United States Patent Application Publication US 2005/0255487 A1 - sequence listing, part 39

SEQ ID NO: 1063739 - RNA, 19 nt, Homo sapiens
  misc_RNA (1)...(19): siRNA sense strand
cuucaucaguucauugaga

SEQ ID NO: 1063740 - RNA, 19 nt, Homo sapiens
  misc_RNA (1)...(19): siRNA sense strand
gcaaaucaugucuccuuca

SEQ ID NO: 1063741 - RNA, 19 nt, Homo sapiens
  misc_RNA (1)...(19): siRNA sense strand
caucaguucauugagaaua

SEQ ID NO: 1063742 - RNA, 19 nt, Homo sapiens
  misc_RNA (1)...(19): siRNA sense strand
cagugacgcggaguuauua

SEQ ID NO: 1063743 - RNA, 19 nt, Homo sapiens
  misc_RNA (1)...(19): siRNA sense strand
ucagugacgcggaguuauu

SEQ ID NO: 1063744 - RNA, 19 nt, Homo sapiens
  misc_RNA (1)...(19): siRNA sense strand
agagagagagauuggauug

SEQ ID NO: 1063745 - RNA, 19 nt, Homo sapiens
  misc_RNA (1)...(19): siRNA sense strand
caacgugggugggaagacu

SEQ ID NO: 1063746 - RNA, 19 nt, Homo sapiens
  misc_RNA (1)...(19): siRNA sense strand
gaugggcucuggcauucag

SEQ ID NO: 1063747 - RNA, 19 nt, Homo sapiens
  misc_RNA (1)...(19): siRNA sense strand
ucaccagccgggagacaua

SEQ ID NO: 1063748 - RNA, 19 nt, Homo sapiens
  misc_RNA (1)...(19): siRNA sense strand
gagcccugcugguguacga

SEQ ID NO: 1063749 - RNA, 19 nt, Homo sapiens
  misc_RNA (1)...(19): siRNA sense strand
cuggagcccugcuggugua

SEQ ID NO: 1063750 - RNA, 19 nt, Homo sapiens
  misc_RNA (1)...(19): siRNA sense strand
gaacuggcaaaucaugucu

SEQ ID NO: 1063751 - RNA, 19 nt, Homo sapiens
  misc_RNA (1)...(19): siRNA sense strand
ugggaagacugugaagcua

SEQ ID NO: 1063752 - RNA, 19 nt, Homo sapiens
  misc_RNA (1)...(19): siRNA sense strand
ggacuccaaccacacaauc

SEQ ID NO: 1063753 - RNA, 19 nt, Homo sapiens
  misc_RNA (1)...(19): siRNA sense strand
ccaggagaaugagcugaug

SEQ ID NO: 1063754 - RNA, 19 nt, Homo sapiens
  misc_RNA (1)...(19): siRNA sense strand
caugucuccuucaucaguu

SEQ ID NO: 1063755 - RNA, 19 nt, Homo sapiens
  misc_RNA (1)...(19): siRNA sense strand
cacaaucggcguggaguuu

SEQ ID NO: 1063756 - RNA, 19 nt, Homo sapiens
  misc_RNA (1)...(19): siRNA sense strand
ggaacuggcaaaucauguc

SEQ ID NO: 1063757 - RNA, 19 nt, Homo sapiens
  misc_RNA (1)...(19): siRNA sense strand
gcuuugcccaggagaauga

SEQ ID NO: 1063758 - RNA, 19 nt, Homo sapiens
  misc_RNA (1)...(19): siRNA sense strand
uggcaaaucaugucuccuu

SEQ ID NO: 1063759 - RNA, 19 nt, Homo sapiens
  misc_RNA (1)...(19): siRNA sense strand
agacuuccucuucaaauuc

SEQ ID NO: 1063760 - RNA, 19 nt, Homo sapiens
  misc_RNA (1)...(19): siRNA sense strand
gauugacucaggcgagcua

SEQ ID NO: 1063761 - RNA, 19 nt, Homo sapiens
  misc_RNA (1)...(19): siRNA sense strand
ggagaaugagcugauguuc

SEQ ID NO: 1063762 - RNA, 19 nt, Homo sapiens
  misc_RNA (1)...(19): siRNA sense strand
ugugaugguuagagagaga

SEQ ID NO: 1063763 - RNA, 19 nt, Homo sapiens
  misc_RNA (1)...(19): siRNA sense strand
aggaugggcucuggcauuc

SEQ ID NO: 1063764 - RNA, 19 nt, Homo sapiens
  misc_RNA (1)...(19): siRNA sense strand
gaucccggguggucaacgu

SEQ ID NO: 1063765 - RNA, 19 nt, Homo sapiens
  misc_RNA (1)...(19): siRNA sense strand
ucaaacaggacuccaacca

SEQ ID NO: 1063766 - RNA, 19 nt, Homo sapiens
  misc_RNA (1)...(19): siRNA sense strand
cauccucuguggcaacaag

SEQ ID NO: 1063767 - RNA, 19 nt, Homo sapiens
  misc_RNA (1)...(19): siRNA sense strand
gagcgguuucggucaguga

SEQ ID NO: 1063768 - RNA, 19 nt, Homo sapiens
  misc_RNA (1)...(19): siRNA sense strand
cuguggguaucccugauuu

SEQ ID NO: 1063769 - RNA, 19 nt, Homo sapiens
  misc_RNA (1)...(19): siRNA sense strand
gauuggcagugcaggaacu

SEQ ID NO: 1063770 - RNA, 19 nt, Homo sapiens
  misc_RNA (1)...(19): siRNA sense strand
cgcacuauccucaacaaga

SEQ ID NO: 1063771 - RNA, 19 nt, Homo sapiens
  misc_RNA (1)...(19): siRNA sense strand
ucagacuuccucuucaaau

SEQ ID NO: 1063772 - RNA, 19 nt, Homo sapiens
  misc_RNA (1)...(19): siRNA sense strand
uucaucaguucauugagaa

SEQ ID NO: 1063773 - RNA, 19 nt, Homo sapiens
  misc_RNA (1)...(19): siRNA sense strand
caaucggcguggaguuugg

SEQ ID NO: 1063774 - RNA, 19 nt, Homo sapiens
  misc_RNA (1)...(19): siRNA sense strand
ugaaagggaugcuugagua

SEQ ID NO: 1063775 - RNA, 19 nt, Homo sapiens
  misc_RNA (1)...(19): siRNA sense strand
gaaggaaauucaacuacug

SEQ ID NO: 1063776 - RNA, 19 nt, Homo sapiens
  misc_RNA (1)...(19): siRNA sense strand
gaagaaggaaauucaacua

SEQ ID NO: 1063777 - RNA, 19 nt, Homo sapiens
  misc_RNA (1)...(19): siRNA sense strand
gagaagcguuucccagugu

SEQ ID NO: 1063778 - RNA, 19 nt, Homo sapiens
  misc_RNA (1)...(19): siRNA sense strand
gggacaacaucuacaaguu

SEQ ID NO: 1063779 - RNA, 19 nt, Homo sapiens
  misc_RNA (1)...(19): siRNA sense strand
ucaagauccucaagaagaa

SEQ ID NO: 1063780 - RNA, 19 nt, Homo sapiens
  misc_RNA (1)...(19): siRNA sense strand
aagaagaaguugcgaagga

SEQ ID NO: 1063781 - RNA, 19 nt, Homo sapiens
  misc_RNA (1)...(19): siRNA sense strand
guacuucugucagcugauu

SEQ ID NO: 1063782 - RNA, 19 nt, Homo sapiens
  misc_RNA (1)...(19): siRNA sense strand
gucaagauccucaagaaga

SEQ ID NO: 1063783 - RNA, 19 nt, Homo sapiens
  misc_RNA (1)...(19): siRNA sense strand
aaauguauauggugaugga

SEQ ID NO: 1063784 - RNA, 19 nt, Homo sapiens
  misc_RNA (1)...(19): siRNA sense strand
uguauauggugauggagua

SEQ ID NO: 1063785 - RNA, 19 nt, Homo sapiens
  misc_RNA (1)...(19): siRNA sense strand
gaaacauccuccggcugaa

SEQ ID NO: 1063786 - RNA, 19 nt, Homo sapiens
  misc_RNA (1)...(19): siRNA sense strand
ccaccgaggucaucuacca

SEQ ID NO: 1063787 - RNA, 19 nt, Homo sapiens
  misc_RNA (1)...(19): siRNA sense strand
caucuacacucaggacuuc

SEQ ID NO: 1063788 - RNA, 19 nt, Homo sapiens
  misc_RNA (1)...(19): siRNA sense strand
caacgaagagaagcagaaa

SEQ ID NO: 1063789 - RNA, 19 nt, Homo sapiens
  misc_RNA (1)...(19): siRNA sense strand
ugacuguggugccguacuu

SEQ ID NO: 1063790 - RNA, 19 nt, Homo sapiens
  misc_RNA (1)...(19): siRNA sense strand
gaaaauguauauggugaug

SEQ ID NO: 1063791 - RNA, 19 nt, Homo sapiens
  misc_RNA (1)...(19): siRNA sense strand
ccaacggccuggacaccuu

SEQ ID NO: 1063792 - RNA, 19 nt, Homo sapiens
  misc_RNA (1)...(19): siRNA sense strand
ggaggccagucacaaugga

SEQ ID NO: 1063793 - RNA, 19 nt, Homo sapiens
  misc_RNA (1)...(19): siRNA sense strand
gcaggagggccgucaagau

SEQ ID NO: 1063794 - RNA, 19 nt, Homo sapiens
  misc_RNA (1)...(19): siRNA sense strand
gaagagaagcagaaaaugu

SEQ ID NO: 1063795 - RNA, 19 nt, Homo sapiens
  misc_RNA (1)...(19): siRNA sense strand
ccaaggccguguguaugaa

SEQ ID NO: 1063796 - RNA, 19 nt, Homo sapiens
  misc_RNA (1)...(19): siRNA sense strand
ucucugaccugcugaaagg

SEQ ID NO: 1063797 - RNA, 19 nt, Homo sapiens
  misc_RNA (1)...(19): siRNA sense strand
ggccuggaguaccugcaua

SEQ ID NO: 1063798 - RNA, 19 nt, Homo sapiens
  misc_RNA (1)...(19): siRNA sense strand
gaggaggccagucacaaug

SEQ ID NO: 1063799 - RNA, 19 nt, Homo sapiens
  misc_RNA (1)...(19): siRNA sense strand
gaagaggaggccagucaca

SEQ ID NO: 1063800 - RNA, 19 nt, Homo sapiens
  misc_RNA (1)...(19): siRNA sense strand
cagaagaggaggccaguca

SEQ ID NO: 1063801 - RNA, 19 nt, Homo sapiens
  misc_RNA (1)...(19): siRNA sense strand
ccgucaagauccucaagaa

SEQ ID NO: 1063802 - RNA, 19 nt, Homo sapiens
  misc_RNA (1)...(19): siRNA sense strand
gcugguggauguguuauac

SEQ ID NO: 1063803 - RNA, 19 nt, Homo sapiens
  misc_RNA (1)...(19): siRNA sense strand
agaaggaaauucaacuacu

SEQ ID NO: 1063804 - RNA, 19 nt, Homo sapiens
  misc_RNA (1)...(19): siRNA sense strand
ccaagcucaucggcaagua

SEQ ID NO: 1063805 - RNA, 19 nt, Homo sapiens
  misc_RNA (1)...(19): siRNA sense strand
gaaagggaugcuugaguac

SEQ ID NO: 1063806 - RNA, 19 nt, Homo sapiens
  misc_RNA (1)...(19): siRNA sense strand
agaagaaguugcgaaggau

SEQ ID NO: 1063807 - RNA, 19 nt, Homo sapiens
  misc_RNA (1)...(19): siRNA sense strand
ccagcugguggauguguua

SEQ ID NO: 1063808 - RNA, 19 nt, Homo sapiens
  misc_RNA (1)...(19): siRNA sense strand
caggagggccgucaagauc

SEQ ID NO: 1063809 - RNA, 19 nt, Homo sapiens
  misc_RNA (1)...(19): siRNA sense strand
caacgugaagaaggaaauu

SEQ ID NO: 1063810 - RNA, 19 nt, Homo sapiens
  misc_RNA (1)...(19): siRNA sense strand
ugguggauguguuauacaa

SEQ ID NO: 1063811 - RNA, 19 nt, Homo sapiens
  misc_RNA (1)...(19): siRNA sense strand
gauggaguacugcgugugu

SEQ ID NO: 1063812 - RNA, 19 nt, Homo sapiens
  misc_RNA (1)...(19): siRNA sense strand
cccaaggccguguguauga

SEQ ID NO: 1063813 - RNA, 19 nt, Homo sapiens
  misc_RNA (1)...(19): siRNA sense strand
gcuucaagguggacaucug

SEQ ID NO: 1063814 - RNA, 19 nt, Homo sapiens
  misc_RNA (1)...(19): siRNA sense strand
gcucuuacggcaaggugaa

SEQ ID NO: 1063815 - RNA, 19 nt, Homo sapiens
  misc_RNA (1)...(19): siRNA sense strand
aagggaugcuugaguacga

SEQ ID NO: 1063816 - RNA, 19 nt, Homo sapiens
  misc_RNA (1)...(19): siRNA sense strand
gggaggccaacgugaagaa

SEQ ID NO: 1063817 - RNA, 19 nt, Homo sapiens
  misc_RNA (1)...(19): siRNA sense strand
aagagaagcagaaaaugua

SEQ ID NO: 1063818 - RNA, 19 nt, Homo sapiens
  misc_RNA (1)...(19): siRNA sense strand
aggccaacgugaagaagga

SEQ ID NO: 1063819 - RNA, 19 nt, Homo sapiens
  misc_RNA (1)...(19): siRNA sense strand
cagcugagcaccaaaucca

SEQ ID NO: 1063820 - RNA, 19 nt, Homo sapiens
  misc_RNA (1)...(19): siRNA sense strand
gcgcagcugagcaccaaau

SEQ ID NO: 1063821 - RNA, 19 nt, Homo sapiens
  misc_RNA (1)...(19): siRNA sense strand
cugcauagccagggcauug

SEQ ID NO: 1063822 - RNA, 19 nt, Homo sapiens
  misc_RNA (1)...(19): siRNA sense strand
ggauguguuauacaacgaa

SEQ ID NO: 1063823 - RNA, 19 nt, Homo sapiens
  misc_RNA (1)...(19): siRNA sense strand
aaggaaauucaacuacuga

SEQ ID NO: 1063824 - RNA, 19 nt, Homo sapiens
  misc_RNA (1)...(19): siRNA sense strand
ugauugacggccuggagua

SEQ ID NO: 1063825 - RNA, 19 nt, Homo sapiens
  misc_RNA (1)...(19): siRNA sense strand
gcauagccagggcauugug

SEQ ID NO: 1063826 - RNA, 19 nt, Homo sapiens
  misc_RNA (1)...(19): siRNA sense strand
ggagggccgucaagauccu

SEQ ID NO: 1063827 - RNA, 19 nt, Homo sapiens
  misc_RNA (1)...(19): siRNA sense strand
gagaagcagaaaauguaua

SEQ ID NO: 1063828 - RNA, 19 nt, Homo sapiens
  misc_RNA (1)...(19): siRNA sense strand
gaauagaaaugccgacuuu

SEQ ID NO: 1063829 - RNA, 19 nt, Homo sapiens
  misc_RNA (1)...(19): siRNA sense strand
gaagauacacccucuguua

SEQ ID NO: 1063830 - RNA, 19 nt, Homo sapiens
  misc_RNA (1)...(19): siRNA sense strand
uggaagagcuugauaaaug

SEQ ID NO: 1063831 - RNA, 19 nt, Homo sapiens
  misc_RNA (1)...(19): siRNA sense strand
gagaaggaaucaaaucaca

SEQ ID NO: 1063832 - RNA, 19 nt, Homo sapiens
  misc_RNA (1)...(19): siRNA sense strand
gcagugaccaucaaagaaa

SEQ ID NO: 1063833 - RNA, 19 nt, Homo sapiens
  misc_RNA (1)...(19): siRNA sense strand
gaaauggaagagcuugaua

SEQ ID NO: 1063834 - RNA, 19 nt, Homo sapiens
  misc_RNA (1)...(19): siRNA sense strand
gaccaucaaagaaacauua

SEQ ID NO: 1063835 - RNA, 19 nt, Homo sapiens
  misc_RNA (1)...(19): siRNA sense strand
cauaugaacugggaaguga

SEQ ID NO: 1063836 - RNA, 19 nt, Homo sapiens
  misc_RNA (1)...(19): siRNA sense strand
ggaagagcuugauaaaugg

SEQ ID NO: 1063837 - RNA, 19 nt, Homo sapiens
  misc_RNA (1)...(19): siRNA sense strand
gaaagaccaaauaaaguga

SEQ ID NO: 1063838 - RNA, 19 nt, Homo sapiens
  misc_RNA (1)...(19): siRNA sense strand
caacuuugcuccggaugaa

SEQ ID NO: 1063839 - RNA, 19 nt, Homo sapiens
  misc_RNA (1)...(19): siRNA sense strand
gaagagaaggaaucaaauc

SEQ ID NO: 1063840 - RNA, 19 nt, Homo sapiens
  misc_RNA (1)...(19): siRNA sense strand
gaaucugaaagaccaaaua

SEQ ID NO: 1063841 - RNA, 19 nt, Homo sapiens
  misc_RNA (1)...(19): siRNA sense strand
ugaacagcaugaauagaaa

SEQ ID NO: 1063842 - RNA, 19 nt, Homo sapiens
  misc_RNA (1)...(19): siRNA sense strand
auacaacuguggaaucuga

SEQ ID NO: 1063843 - RNA, 19 nt, Homo sapiens
  misc_RNA (1)...(19): siRNA sense strand
gaaaugccgacuuugaaug

SEQ ID NO: 1063844 - RNA, 19 nt, Homo sapiens
  misc_RNA (1)...(19): siRNA sense strand
ucagagugcuuuacagaca

SEQ ID NO: 1063845 - RNA, 19 nt, Homo sapiens
  misc_RNA (1)...(19): siRNA sense strand
ugaaagaccaaauaaagug

SEQ ID NO: 1063846 - RNA, 19 nt, Homo sapiens
  misc_RNA (1)...(19): siRNA sense strand
caacccaagugacagugaa

SEQ ID NO: 1063847 - RNA, 19 nt, Homo sapiens
  misc_RNA (1)...(19): siRNA sense strand
uggaugaacagcaugaaua

SEQ ID NO: 1063848 - RNA, 19 nt, Homo sapiens
  misc_RNA (1)...(19): siRNA sense strand
gaaggaagagaaggaauca

SEQ ID NO: 1063849 - RNA, 19 nt, Homo sapiens
  misc_RNA (1)...(19): siRNA sense strand
gaacagcaugaauagaaau

SEQ ID NO: 1063850 - RNA, 19 nt, Homo sapiens
  misc_RNA (1)...(19): siRNA sense strand
caagugacagugaauccua

SEQ ID NO: 1063851 - RNA, 19 nt, Homo sapiens
  misc_RNA (1)...(19): siRNA sense strand
ggaagagaaggaaucaaau

SEQ ID NO: 1063852 - RNA, 19 nt, Homo sapiens
  misc_RNA (1)...(19): siRNA sense strand
gacuuugaauguuuaccua

SEQ ID NO: 1063853 - RNA, 19 nt, Homo sapiens
  misc_RNA (1)...(19): siRNA sense strand
gauacacccucuguuaugg

SEQ ID NO: 1063854 - RNA, 19 nt, Homo sapiens
  misc_RNA (1)...(19): siRNA sense strand
gaccaaauaaagugacuau

SEQ ID NO: 1063855 - RNA, 19 nt, Homo sapiens
  misc_RNA (1)...(19): siRNA sense strand
gaaggaaucaaaucacaac

SEQ ID NO: 1063856 - RNA, 19 nt, Homo sapiens
  misc_RNA (1)...(19): siRNA sense strand
ugguauuccuugcaacaua

SEQ ID NO: 1063857 - RNA, 19 nt, Homo sapiens
  misc_RNA (1)...(19): siRNA sense strand
ggaugaacagcaugaauag

SEQ ID NO: 1063858 - RNA, 19 nt, Homo sapiens
  misc_RNA (1)...(19): siRNA sense strand
uagaaaugccgacuuugaa

SEQ ID NO: 1063859 - RNA, 19 nt, Homo sapiens
  misc_RNA (1)...(19): siRNA sense strand
uuagaaaacucaggagaua

SEQ ID NO: 1063860 - RNA, 19 nt, Homo sapiens
  misc_RNA (1)...(19): siRNA sense strand
auaaauggaugaacagcau

SEQ ID NO: 1063861 - RNA, 19 nt, Homo sapiens
  misc_RNA (1)...(19): siRNA sense strand
agagugcuuuacagacaua

SEQ ID NO: 1063862 - RNA, 19 nt, Homo sapiens
  misc_RNA (1)...(19): siRNA sense strand
ccucuguuauggaaauuga

SEQ ID NO: 1063863 - RNA, 19 nt, Homo sapiens
  misc_RNA (1)...(19): siRNA sense strand
aaauggaagagcuugauaa

SEQ ID NO: 1063864 - RNA, 19 nt, Homo sapiens
  misc_RNA (1)...(19): siRNA sense strand
gagauacaacuguggaauc

SEQ ID NO: 1063865 - RNA, 19 nt, Homo sapiens
  misc_RNA (1)...(19): siRNA sense strand
cuugauaaauggaugaaca

SEQ ID NO: 1063866 - RNA, 19 nt, Homo sapiens
  misc_RNA (1)...(19): siRNA sense strand
gaucucagagugcuuuaca

SEQ ID NO: 1063867 - RNA, 19 nt, Homo sapiens
  misc_RNA (1)...(19): siRNA sense strand
aggaagagaaggaaucaaa

SEQ ID NO: 1063868 - RNA, 19 nt, Homo sapiens
  misc_RNA (1)...(19): siRNA sense strand
gaauguuuaccuaccuuga

SEQ ID NO: 1063869 - RNA, 19 nt, Homo sapiens
  misc_RNA (1)...(19): siRNA sense strand
auagaaaugccgacuuuga

SEQ ID NO: 1063870 - RNA, 19 nt, Homo sapiens
  misc_RNA (1)...(19): siRNA sense strand
ucugaaagaccaaauaaag

SEQ ID NO: 1063871 - RNA, 19 nt, Homo sapiens
  misc_RNA (1)...(19): siRNA sense strand
ggaagauacacccucuguu

SEQ ID NO: 1063872 - RNA, 19 nt, Homo sapiens
  misc_RNA (1)...(19): siRNA sense strand
ugccgacuuugaauguuua

SEQ ID NO: 1063873 - RNA, 19 nt, Homo sapiens
  misc_RNA (1)...(19): siRNA sense strand
uuauugguccucuuacuuu

SEQ ID NO: 1063874 - RNA, 19 nt, Homo sapiens
  misc_RNA (1)...(19): siRNA sense strand
gugcuuuacagacauauga

SEQ ID NO: 1063875 - RNA, 19 nt, Homo sapiens
  misc_RNA (1)...(19): siRNA sense strand
ucaaaucacaacccaagug

SEQ ID NO: 1063876 - RNA, 19 nt, Homo sapiens
  misc_RNA (1)...(19): siRNA sense strand
gaagagcuugauaaaugga

SEQ ID NO: 1063877 - RNA, 19 nt, Homo sapiens
  misc_RNA (1)...(19): siRNA sense strand
guuagaguuuauacugaug

SEQ ID NO: 1063878 - RNA, 19 nt, Homo sapiens
  misc_RNA (1)...(19): siRNA sense strand
aauggaagagcuugauaaa

SEQ ID NO: 1063879 - RNA, 19 nt, Homo sapiens
  misc_RNA (1)...(19): siRNA sense strand
ggagauacaacuguggaau

SEQ ID NO: 1063880 - RNA, 19 nt, Homo sapiens
  misc_RNA (1)...(19): siRNA sense strand
uaaauucuaccaacuuugc

SEQ ID NO: 1063881 - RNA, 19 nt, Homo sapiens
  misc_RNA (1)...(19): siRNA sense strand
augaacagcaugaauagaa

SEQ ID NO: 1063882 - RNA, 19 nt, Homo sapiens
  misc_RNA (1)...(19): siRNA sense strand
aagugacagugaauccuaa

SEQ ID NO: 1063883 - RNA, 19 nt, Homo sapiens
  misc_RNA (1)...(19): siRNA sense strand
aaacgugaaagucccuauu

SEQ ID NO: 1063884 - RNA, 19 nt, Homo sapiens
  misc_RNA (1)...(19): siRNA sense strand
aagagaaggaaucaaauca

SEQ ID NO: 1063885 - RNA, 19 nt, Homo sapiens
  misc_RNA (1)...(19): siRNA sense strand
gagcuugauaaauggauga

SEQ ID NO: 1063886 - RNA, 19 nt, Homo sapiens
  misc_RNA (1)...(19): siRNA sense strand
aagauacacccucuguuau

SEQ ID NO: 1063887 - RNA, 19 nt, Homo sapiens
  misc_RNA (1)...(19): siRNA sense strand
ugaaggaagagaaggaauc

SEQ ID NO: 1063888 - RNA, 19 nt, Homo sapiens
  misc_RNA (1)...(19): siRNA sense strand
agaaaugccgacuuugaau

SEQ ID NO: 1063889 - RNA, 19 nt, Homo sapiens
  misc_RNA (1)...(19): siRNA sense strand
agauacacccucuguuaug

SEQ ID NO: 1063890 - RNA, 19 nt, Homo sapiens
  misc_RNA (1)...(19): siRNA sense strand
ucucagagugcuuuacaga

SEQ ID NO: 1063891 - RNA, 19 nt, Homo sapiens
  misc_RNA (1)...(19): siRNA sense strand
uaugaacugggaagugaaa

SEQ ID NO: 1063892 - RNA, 19 nt, Homo sapiens
  misc_RNA (1)...(19): siRNA sense strand
cacccucuguuauggaaau

SEQ ID NO: 1063893 - RNA, 19 nt, Homo sapiens
  misc_RNA (1)...(19): siRNA sense strand
gaagugaaaacgugaaagu

SEQ ID NO: 1063894 - RNA, 19 nt, Homo sapiens
  misc_RNA (1)...(19): siRNA sense strand
uacacccucuguuauggaa

SEQ ID NO: 1063895 - RNA, 19 nt, Homo sapiens
  misc_RNA (1)...(19): siRNA sense strand
augccgacuuugaauguuu

SEQ ID NO: 1063896 - RNA, 19 nt, Homo sapiens
  misc_RNA (1)...(19): siRNA sense strand
gaugaacagcaugaauaga

SEQ ID NO: 1063897 - RNA, 19 nt, Homo sapiens
  misc_RNA (1)...(19): siRNA sense strand
cagagugcuuuacagacau

SEQ ID NO: 1063898 - RNA, 19 nt, Homo sapiens
  misc_RNA (1)...(19): siRNA sense strand
aacgugaaagucccuauuu

SEQ ID NO: 1063899 - RNA, 19 nt, Homo sapiens
  misc_RNA (1)...(19): siRNA sense strand
ggaaucugaaagaccaaau

SEQ ID NO: 1063900 - RNA, 19 nt, Homo sapiens
  misc_RNA (1)...(19): siRNA sense strand
aaaugccgacuuugaaugu

SEQ ID NO: 1063901 - RNA, 19 nt, Homo sapiens
  misc_RNA (1)...(19): siRNA sense strand
cugaaagaccaaauaaagu

SEQ ID NO: 1063902 - RNA, 19 nt, Homo sapiens
  misc_RNA (1)...(19): siRNA sense strand
gacuauuccaagcacauuu

SEQ ID NO: 1063903 - RNA, 19 nt, Homo sapiens
  misc_RNA (1)...(19): siRNA sense strand
gauuuuauugguccucuua

SEQ ID NO: 1063904 - RNA, 19 nt, Homo sapiens
  misc_RNA (1)...(19): siRNA sense strand
ugaauagaaaugccgacuu

SEQ ID NO: 1063905 - RNA, 19 nt, Homo sapiens
  misc_RNA (1)...(19): siRNA sense strand
cugcagugaccaucaaaga

SEQ ID NO: 1063906 - RNA, 19 nt, Homo sapiens
  misc_RNA (1)...(19): siRNA sense strand
ggaaauugaaauggaagag

SEQ ID NO: 1063907 - RNA, 19 nt, Homo sapiens
  misc_RNA (1)...(19): siRNA sense strand
ccaacuuugcuccggauga

SEQ ID NO: 1063908 - RNA, 19 nt, Homo sapiens
  misc_RNA (1)...(19): siRNA sense strand
acaaugcgcugcugaguaa

SEQ ID NO: 1063909 - RNA, 19 nt, Homo sapiens
  misc_RNA (1)...(19): siRNA sense strand
gagacuggauucagaacua

SEQ ID NO: 1063910 - RNA, 19 nt, Homo sapiens
  misc_RNA (1)...(19): siRNA sense strand
gaaauuacacaaacccauu

SEQ ID NO: 1063911 - RNA, 19 nt, Homo sapiens
  misc_RNA (1)...(19): siRNA sense strand
ugauaugucuccucauuug

SEQ ID NO: 1063912 - RNA, 19 nt, Homo sapiens
  misc_RNA (1)...(19): siRNA sense strand
gcaaggagacaccauugaa

SEQ ID NO: 1063913 - RNA, 19 nt, Homo sapiens
  misc_RNA (1)...(19): siRNA sense strand
gauaucacccagaguauug

SEQ ID NO: 1063914 - RNA, 19 nt, Homo sapiens
  misc_RNA (1)...(19): siRNA sense strand
caggugugcuuuguucuua

SEQ ID NO: 1063915 - RNA, 19 nt, Homo sapiens
  misc_RNA (1)...(19): siRNA sense strand
ccugauaugucuccucauu

SEQ ID NO: 1063916 - RNA, 19 nt, Homo sapiens
  misc_RNA (1)...(19): siRNA sense strand
gaggacaagugcccaggaa

SEQ ID NO: 1063917 - RNA, 19 nt, Homo sapiens
  misc_RNA (1)...(19): siRNA sense strand
ccacaccacucauuacaag

SEQ ID NO: 1063918 - RNA, 19 nt, Homo sapiens
  misc_RNA (1)...(19): siRNA sense strand
guucuuauccuaauccaaa

SEQ ID NO: 1063919 - RNA, 19 nt, Homo sapiens
  misc_RNA (1)...(19): siRNA sense strand
caacaaggcaucucaagag

SEQ ID NO: 1063920 - RNA, 19 nt, Homo sapiens
  misc_RNA (1)...(19): siRNA sense strand
ggacaagugcccaggaaau

SEQ ID NO: 1063921 - RNA, 19 nt, Homo sapiens
  misc_RNA (1)...(19): siRNA sense strand
acucaucuguucccugaua

SEQ ID NO: 1063922 - RNA, 19 nt, Homo sapiens
  misc_RNA (1)...(19): siRNA sense strand
aaaccgaggcuauaacuug

SEQ ID NO: 1063923 - RNA, 19 nt, Homo sapiens
  misc_RNA (1)...(19): siRNA sense strand
uaaaccagagccugauaua

SEQ ID NO: 1063924 - RNA, 19 nt, Homo sapiens
  misc_RNA (1)...(19): siRNA sense strand
uagugaaucuucugugguu

SEQ ID NO: 1063925 - RNA, 19 nt, Homo sapiens
  misc_RNA (1)...(19): siRNA sense strand
aaucuucugugguuuauuc

SEQ ID NO: 1063926 - RNA, 19 nt, Homo sapiens
  misc_RNA (1)...(19): siRNA sense strand
acaaacccauugaaaguuc

SEQ ID NO: 1063927 - RNA, 19 nt, Homo sapiens
  misc_RNA (1)...(19): siRNA sense strand
aaggagacaccauugaaua

SEQ ID NO: 1063928 - RNA, 19 nt, Homo sapiens
  misc_RNA (1)...(19): siRNA sense strand
gacaagugcccaggaaauu

SEQ ID NO: 1063929 - RNA, 19 nt, Homo sapiens
  misc_RNA (1)...(19): siRNA sense strand
gauuguaucuugaccucau

SEQ ID NO: 1063930 - RNA, 19 nt, Homo sapiens
  misc_RNA (1)...(19): siRNA sense strand
gugaaucuucugugguuua

SEQ ID NO: 1063931 - RNA, 19 nt, Homo sapiens
  misc_RNA (1)...(19): siRNA sense strand
gcacuggaacucaucuguu

SEQ ID NO: 1063932 - RNA, 19 nt, Homo sapiens
  misc_RNA (1)...(19): siRNA sense strand
acacaaacccauugaaagu

SEQ ID NO: 1063933 - RNA, 19 nt, Homo sapiens
  misc_RNA (1)...(19): siRNA sense strand
acaagugcccaggaaauua

SEQ ID NO: 1063934 - RNA, 19 nt, Homo sapiens
  misc_RNA (1)...(19): siRNA sense strand
cacagugcuucuccucaua

SEQ ID NO: 1063935 - RNA, 19 nt, Homo sapiens
  misc_RNA (1)...(19): siRNA sense strand
auuacaagcucacuuuaga

SEQ ID NO: 1063936 - RNA, 19 nt, Homo sapiens
  misc_RNA (1)...(19): siRNA sense strand
ccucagaccugggcuguca

SEQ ID NO: 1063937 - RNA, 19 nt, Homo sapiens
  misc_RNA (1)...(19): siRNA sense strand
uuacacaaacccauugaaa

SEQ ID NO: 1063938 - RNA, 19 nt, Homo sapiens
  misc_RNA (1)...(19): siRNA sense strand
guuuauucaucucguguuu

SEQ ID NO: 1063939 - RNA, 19 nt, Homo sapiens
  misc_RNA (1)...(19): siRNA sense strand
ucagaaaccgaggcuauaa

SEQ ID NO: 1063940 - RNA, 19 nt, Homo sapiens
  misc_RNA (1)...(19): siRNA sense strand
cuacagucaucauagugaa

SEQ ID NO: 1063941 - RNA, 19 nt, Homo sapiens
  misc_RNA (1)...(19): siRNA sense strand
gccacagguuccuuggaua

SEQ ID NO: 1063942 - RNA, 19 nt, Homo sapiens
  misc_RNA (1)...(19): siRNA sense strand
gcuaaaccagagccugaua

SEQ ID NO: 1063943 - RNA, 19 nt, Homo sapiens
  misc_RNA (1)...(19): siRNA sense strand
ggauaucacccagaguauu

SEQ ID NO: 1063944 - RNA, 19 nt, Homo sapiens
  misc_RNA (1)...(19): siRNA sense strand
caucucguguuuguuguuu

SEQ ID NO: 1063945 - RNA, 19 nt, Homo sapiens
  misc_RNA (1)...(19): siRNA sense strand
gugcuuuguucuuauccua

SEQ ID NO: 1063946 - RNA, 19 nt, Homo sapiens
  misc_RNA (1)...(19): siRNA sense strand
ccacagguuccuuggauau

SEQ ID NO: 1063947 - RNA, 19 nt, Homo sapiens
  misc_RNA (1)...(19): siRNA sense strand
uauaauccuugggaaaguu

SEQ ID NO: 1063948 - RNA, 19 nt, Homo sapiens
  misc_RNA (1)...(19): siRNA sense strand
gaaaguucagacgguuaua

SEQ ID NO: 1063949 - RNA, 19 nt, Homo sapiens
  misc_RNA (1)...(19): siRNA sense strand
caaggagacaccauugaau

SEQ ID NO: 1063950 - RNA, 19 nt, Homo sapiens
  misc_RNA (1)...(19): siRNA sense strand
gagacuugcguugaugaua

SEQ ID NO: 1063951 - RNA, 19 nt, Homo sapiens
  misc_RNA (1)...(19): siRNA sense strand
aaccgaggcuauaacuuga

SEQ ID NO: 1063952 - RNA, 19 nt, Homo sapiens
  misc_RNA (1)...(19): siRNA sense strand
uuauucaucucguguuugu

SEQ ID NO: 1063953 - RNA, 19 nt, Homo sapiens
  misc_RNA (1)...(19): siRNA sense strand
ggauucagaacuauuucaa

SEQ ID NO: 1063954 - RNA, 19 nt, Homo sapiens
  misc_RNA (1)...(19): siRNA sense strand
cugauauacuugaagaaga

SEQ ID NO: 1063955 - RNA, 19 nt, Homo sapiens
  misc_RNA (1)...(19): siRNA sense strand
agacuugcguugaugauac

SEQ ID NO: 1063956 - RNA, 19 nt, Homo sapiens
  misc_RNA (1)...(19): siRNA sense strand
aaugcuacauccaguauca

SEQ ID NO: 1063957 - RNA, 19 nt, Homo sapiens
  misc_RNA (1)...(19): siRNA sense strand
ggaaaguuauuuuguggau

SEQ ID NO: 1063958 - RNA, 19 nt, Homo sapiens
  misc_RNA (1)...(19): siRNA sense strand
ugaaucuucugugguuuau

SEQ ID NO: 1063959 - RNA, 19 nt, Homo sapiens
  misc_RNA (1)...(19): siRNA sense strand
acacagugcuucuccucau

SEQ ID NO: 1063960 - RNA, 19 nt, Homo sapiens
  misc_RNA (1)...(19): siRNA sense strand
gaaaccgaggcuauaacuu

SEQ ID NO: 1063961 - RNA, 19 nt, Homo sapiens
  misc_RNA (1)...(19): siRNA sense strand
gaggcuauaacuugaucua

SEQ ID NO: 1063962 - RNA, 19 nt, Homo sapiens
  misc_RNA (1)...(19): siRNA sense strand
gcccaggaaauuacacaaa

SEQ ID NO: 1063963 - RNA, 19 nt, Homo sapiens
  misc_RNA (1)...(19): siRNA sense strand
cacaaugcgcugcugagua

SEQ ID NO: 1063964 - RNA, 19 nt, Homo sapiens
  misc_RNA (1)...(19): siRNA sense strand
ucaacaaggcaucucaaga

SEQ ID NO: 1063965 - RNA, 19 nt, Homo sapiens
  misc_RNA (1)...(19): siRNA sense strand
gcuuuguucuuauccuaau

SEQ ID NO: 1063966 - RNA, 19 nt, Homo sapiens
  misc_RNA (1)...(19): siRNA sense strand
gaucaacaaggcaucucaa

SEQ ID NO: 1063967 - RNA, 19 nt, Homo sapiens
  misc_RNA (1)...(19): siRNA sense strand
aaucagaaaccgaggcuau

SEQ ID NO: 1063968 - RNA, 19 nt, Homo sapiens
  misc_RNA (1)...(19): siRNA sense strand
gauucuccauuuacuccuu

SEQ ID NO: 1063969 - RNA, 19 nt, Homo sapiens
  misc_RNA (1)...(19): siRNA sense strand
gguuauaauccuugggaaa

SEQ ID NO: 1063970 - RNA, 19 nt, Homo sapiens
  misc_RNA (1)...(19): siRNA sense strand
ggugugcuuuguucuuauc

SEQ ID NO: 1063971 - RNA, 19 nt, Homo sapiens
  misc_RNA (1)...(19): siRNA sense strand
gugcuucuccucauacugu

SEQ ID NO: 1063972 - RNA, 19 nt, Homo sapiens
  misc_RNA (1)...(19): siRNA sense strand
aaaguucagacgguuauaa

SEQ ID NO: 1063973 - RNA, 19 nt, Homo sapiens
  misc_RNA (1)...(19): siRNA sense strand
ucauuacaagcucacuuua

SEQ ID NO: 1063974 - RNA, 19 nt, Homo sapiens
  misc_RNA (1)...(19): siRNA sense strand
ugaaugcuacauccaguau

SEQ ID NO: 1063975 - RNA, 19 nt, Homo sapiens
  misc_RNA (1)...(19): siRNA sense strand
agacuggauucagaacuau

SEQ ID NO: 1063976 - RNA, 19 nt, Homo sapiens
  misc_RNA (1)...(19): siRNA sense strand
caagugcccaggaaauuac

SEQ ID NO: 1063977 - RNA, 19 nt, Homo sapiens
  misc_RNA (1)...(19): siRNA sense strand
gagacaccauugaauaccu

SEQ ID NO: 1063978 - RNA, 19 nt, Homo sapiens
  misc_RNA (1)...(19): siRNA sense strand
ccuagaagaaauuguugaa

SEQ ID NO: 1063979 - RNA, 19 nt, Homo sapiens
  misc_RNA (1)...(19): siRNA sense strand
accagagccugauauacuu

SEQ ID NO: 1063980 - RNA, 19 nt, Homo sapiens
  misc_RNA (1)...(19): siRNA sense strand
acagguuccuuggauauca

SEQ ID NO: 1063981 - RNA, 19 nt, Homo sapiens
  misc_RNA (1)...(19): siRNA sense strand
ucagacgguuauaauccuu

SEQ ID NO: 1063982 - RNA, 19 nt, Homo sapiens
  misc_RNA (1)...(19): siRNA sense strand
uuggauaucacccagagua

SEQ ID NO: 1063983 - RNA, 19 nt, Homo sapiens
  misc_RNA (1)...(19): siRNA sense strand
aaagcaaggagacaccauu

SEQ ID NO: 1063984 - RNA, 19 nt, Homo sapiens
  misc_RNA (1)...(19): siRNA sense strand
gacuugcguugaugauaca

SEQ ID NO: 1063985 - RNA, 19 nt, Homo sapiens
  misc_RNA (1)...(19): siRNA sense strand
guuauaauccuugggaaag

SEQ ID NO: 1063986 - RNA, 19 nt, Homo sapiens
  misc_RNA (1)...(19): siRNA sense strand
ucucccacaccacucauua

SEQ ID NO: 1063987 - RNA, 19 nt, Homo sapiens
  misc_RNA (1)...(19): siRNA sense strand
gagccuggcagauuguauc

SEQ ID NO: 1063988 - RNA, 19 nt, Homo sapiens
  misc_RNA (1)...(19): siRNA sense strand
uuuaacaggugugcuuugu

SEQ ID NO: 1063989 - RNA, 19 nt, Homo sapiens
  misc_RNA (1)...(19): siRNA sense strand
ucacccagaguauugaaga

SEQ ID NO: 1063990 - RNA, 19 nt, Homo sapiens
  misc_RNA (1)...(19): siRNA sense strand
aaccagagccugauauacu

SEQ ID NO: 1063991 - RNA, 19 nt, Homo sapiens
  misc_RNA (1)...(19): siRNA sense strand
ucuguucccugauaugucu

SEQ ID NO: 1063992 - RNA, 19 nt, Homo sapiens
  misc_RNA (1)...(19): siRNA sense strand
acaguccucuggcaacaca

SEQ ID NO: 1063993 - RNA, 19 nt, Homo sapiens
  misc_RNA (1)...(19): siRNA sense strand
cacaaacccauugaaaguu

SEQ ID NO: 1063994 - RNA, 19 nt, Homo sapiens
  misc_RNA (1)...(19): siRNA sense strand
ucucguguuuguuguuuua

SEQ ID NO: 1063995 - RNA, 19 nt, Homo sapiens
  misc_RNA (1)...(19): siRNA sense strand
cccaggaaauuacacaaac

SEQ ID NO: 1063996 - RNA, 19 nt, Homo sapiens
  misc_RNA (1)...(19): siRNA sense strand
cuucugugguuuauucauc

SEQ ID NO: 1063997 - RNA, 19 nt, Homo sapiens
  misc_RNA (1)...(19): siRNA sense strand
aaauuacacaaacccauug

SEQ ID NO: 1063998 - RNA, 19 nt, Homo sapiens
  misc_RNA (1)...(19): siRNA sense strand
aagccuagaagaaauuguu

SEQ ID NO: 1063999 - RNA, 19 nt, Homo sapiens
  misc_RNA (1)...(19): siRNA sense strand
agccugauauacuugaaga

SEQ ID NO: 1064000 - RNA, 19 nt, Homo sapiens
  misc_RNA (1)...(19): siRNA sense strand
ccuacagucaucauaguga

SEQ ID NO: 1064001 - RNA, 19 nt, Homo sapiens
  misc_RNA (1)...(19): siRNA sense strand
ccgaggcuauaacuugauc

SEQ ID NO: 1064002 - RNA, 19 nt, Homo sapiens
  misc_RNA (1)...(19): siRNA sense strand
gauuguuggcucucacuuc

SEQ ID NO: 1064003 - RNA, 19 nt, Homo sapiens
  misc_RNA (1)...(19): siRNA sense strand
gcugaguaagcgauuguug

SEQ ID NO: 1064004 - RNA, 19 nt, Homo sapiens
  misc_RNA (1)...(19): siRNA sense strand
cuaaaccagagccugauau

SEQ ID NO: 1064005 - RNA, 19 nt, Homo sapiens
  misc_RNA (1)...(19): siRNA sense strand
aagcaaggagacaccauug

SEQ ID NO: 1064006 - RNA, 19 nt, Homo sapiens
  misc_RNA (1)...(19): siRNA sense strand
uaccugaagcgacacaaug

SEQ ID NO: 1064007 - RNA, 19 nt, Homo sapiens
  misc_RNA (1)...(19): siRNA sense strand
caacaucgcuaagcaauau

SEQ ID NO: 1064008 - RNA, 19 nt, Homo sapiens
  misc_RNA (1)...(19): siRNA sense strand
gcauuacgcucuauuuaug

SEQ ID NO: 1064009 - RNA, 19 nt, Homo sapiens
  misc_RNA (1)...(19): siRNA sense strand
ggaauuaaguccaguuucu

SEQ ID NO: 1064010 - RNA, 19 nt, Homo sapiens
  misc_RNA (1)...(19): siRNA sense strand
gaacuggguugauguugug

SEQ ID NO: 1064011 - RNA, 19 nt, Homo sapiens
  misc_RNA (1)...(19): siRNA sense strand
ucccaaagccuucuuaaua

SEQ ID NO: 1064012 - RNA, 19 nt, Homo sapiens
  misc_RNA (1)...(19): siRNA sense strand
gcuaugaccuauacauugu

SEQ ID NO: 1064013 - RNA, 19 nt, Homo sapiens
  misc_RNA (1)...(19): siRNA sense strand
gaaccgcuaugaccuauac

SEQ ID NO: 1064014 - RNA, 19 nt, Homo sapiens
  misc_RNA (1)...(19): siRNA sense strand
ccaaagccuucuuaauaga

SEQ ID NO: 1064015 - RNA, 19 nt, Homo sapiens
  misc_RNA (1)...(19): siRNA sense strand
ggaacuggguugauguugu

SEQ ID NO: 1064016 - RNA, 19 nt, Homo sapiens
  misc_RNA (1)...(19): siRNA sense strand
caaaacagaucacaaagga

SEQ ID NO: 1064017 - RNA, 19 nt, Homo sapiens
  misc_RNA (1)...(19): siRNA sense strand
gcucuaaggaugaugagua

SEQ ID NO: 1064018 - RNA, 19 nt, Homo sapiens
  misc_RNA (1)...(19): siRNA sense strand
gauggaacuagaagcauua

SEQ ID NO: 1064019 - RNA, 19 nt, Homo sapiens
  misc_RNA (1)...(19): siRNA sense strand
gcuaagcaauaucaucuca

SEQ ID NO: 1064020 - RNA, 19 nt, Homo sapiens
  misc_RNA (1)...(19): siRNA sense strand
gaagcauuacgcucuauuu

SEQ ID NO: 1064021 - RNA, 19 nt, Homo sapiens
  misc_RNA (1)...(19): siRNA sense strand
uaacaacaccauaucauca

SEQ ID NO: 1064022 - RNA, 19 nt, Homo sapiens
  misc_RNA (1)...(19): siRNA sense strand
gaauaugccaaagacaaua

SEQ ID NO: 1064023 - RNA, 19 nt, Homo sapiens
  misc_RNA (1)...(19): siRNA sense strand
cccaaagccuucuuaauag

SEQ ID NO: 1064024 - RNA, 19 nt, Homo sapiens
  misc_RNA (1)...(19): siRNA sense strand
gaaucacaaucccaucaau

SEQ ID NO: 1064025 - RNA, 19 nt, Homo sapiens
  misc_RNA (1)...(19): siRNA sense strand
gcaacaucgcuaagcaaua

SEQ ID NO: 1064026 - RNA, 19 nt, Homo sapiens
  misc_RNA (1)...(19): siRNA sense strand
caauauaggauaggugaaa

SEQ ID NO: 1064027 - RNA, 19 nt, Homo sapiens
  misc_RNA (1)...(19): siRNA sense strand
gcaguagaagcuaaucuug

SEQ ID NO: 1064028 - RNA, 19 nt, Homo sapiens
  misc_RNA (1)...(19): siRNA sense strand
guaaagcagaguauauuag

SEQ ID NO: 1064029 - RNA, 19 nt, Homo sapiens
  misc_RNA (1)...(19): siRNA sense strand
aagcauuacgcucuauuua

SEQ ID NO: 1064030 - RNA, 19 nt, Homo sapiens
  misc_RNA (1)...(19): siRNA sense strand
aguagaagcuaaucuugga

SEQ ID NO: 1064031 - RNA, 19 nt, Homo sapiens
  misc_RNA (1)...(19): siRNA sense strand
caccauaucaucagcugua

SEQ ID NO: 1064032 - RNA, 19 nt, Homo sapiens
  misc_RNA (1)...(19): siRNA sense strand
ggagauggaacuagaagca

SEQ ID NO: 1064033 - RNA, 19 nt, Homo sapiens
  misc_RNA (1)...(19): siRNA sense strand
gagaaucacaaucccauca

SEQ ID NO: 1064034 - RNA, 19 nt, Homo sapiens
  misc_RNA (1)...(19): siRNA sense strand
agauggaacuagaagcauu

SEQ ID NO: 1064035 - RNA, 19 nt, Homo sapiens
  misc_RNA (1)...(19): siRNA sense strand
caauugaaacuccuaauac

SEQ ID NO: 1064036 - RNA, 19 nt, Homo sapiens
  misc_RNA (1)...(19): siRNA sense strand
auaaagagcaguucaugga

SEQ ID NO: 1064037 - RNA, 19 nt, Homo sapiens
  misc_RNA (1)...(19): siRNA sense strand
gcuguaaagcagaguauau

SEQ ID NO: 1064038 - RNA, 19 nt, Homo sapiens
  misc_RNA (1)...(19): siRNA sense strand
ugugaagcauuuaagcaaa

SEQ ID NO: 1064039 - RNA, 19 nt, Homo sapiens
  misc_RNA (1)...(19): siRNA sense strand
caagcuacaggaagcagua

SEQ ID NO: 1064040 - RNA, 19 nt, Homo sapiens
  misc_RNA (1)...(19): siRNA sense strand
gaauuaaguccaguuucuu

SEQ ID NO: 1064041 - RNA, 19 nt, Homo sapiens
  misc_RNA (1)...(19): siRNA sense strand
caauaaagagcaguucaug

SEQ ID NO: 1064042 - RNA, 19 nt, Homo sapiens
  misc_RNA (1)...(19): siRNA sense strand
aagagcaguucauggagaa

SEQ ID NO: 1064043 - RNA, 19 nt, Homo sapiens
  misc_RNA (1)...(19): siRNA sense strand
gauguugugaagcauuuaa

SEQ ID NO: 1064044 - RNA, 19 nt, Homo sapiens
  misc_RNA (1)...(19): siRNA sense strand
ggguugauguugugaagca

SEQ ID NO: 1064045 - RNA, 19 nt, Homo sapiens
  misc_RNA (1)...(19): siRNA sense strand
ugaccuauacauuguuuga

SEQ ID NO: 1064046 - RNA, 19 nt, Homo sapiens
  misc_RNA (1)...(19): siRNA sense strand
ggaagcaguagaagcuaau

SEQ ID NO: 1064047 - RNA, 19 nt, Homo sapiens
  misc_RNA (1)...(19): siRNA sense strand
gaucccaaagccuucuuaa

SEQ ID NO: 1064048 - RNA, 19 nt, Homo sapiens
  misc_RNA (1)...(19): siRNA sense strand
aaacuggcucuaaggauga

SEQ ID NO: 1064049 - RNA, 19 nt, Homo sapiens
  misc_RNA (1)...(19): siRNA sense strand
caacgaggaccaggagaug

SEQ ID NO: 1064050 - RNA, 19 nt, Homo sapiens
  misc_RNA (1)...(19): siRNA sense strand
aggaagcaguagaagcuaa

SEQ ID NO: 1064051 - RNA, 19 nt, Homo sapiens
  misc_RNA (1)...(19): siRNA sense strand
ugaauaugccaaagacaau

SEQ ID NO: 1064052 - RNA, 19 nt, Homo sapiens
  misc_RNA (1)...(19): siRNA sense strand
caaaagcccagaagcguaa

SEQ ID NO: 1064053 - RNA, 19 nt, Homo sapiens
  misc_RNA (1)...(19): siRNA sense strand
aaagccuucuuaauagaga

SEQ ID NO: 1064054 - RNA, 19 nt, Homo sapiens
  misc_RNA (1)...(19): siRNA sense strand
ugaaaauggugaucccaaa

SEQ ID NO: 1064055 - RNA, 19 nt, Homo sapiens
  misc_RNA (1)...(19): siRNA sense strand
gaucacaaaggagaacuuc

SEQ ID NO: 1064056 - RNA, 19 nt, Homo sapiens
  misc_RNA (1)...(19): siRNA sense strand
cauaucaucagcuguaaag

SEQ ID NO: 1064057 - RNA, 19 nt, Homo sapiens
  misc_RNA (1)...(19): siRNA sense strand
gacaauaaagagcaguuca

SEQ ID NO: 1064058 - RNA, 19 nt, Homo sapiens
  misc_RNA (1)...(19): siRNA sense strand
uugauguugugaagcauuu

SEQ ID NO: 1064059 - RNA, 19 nt, Homo sapiens
  misc_RNA (1)...(19): siRNA sense strand
agacaaaacagaucacaaa

SEQ ID NO: 1064060 - RNA, 19 nt, Homo sapiens
  misc_RNA (1)...(19): siRNA sense strand
accaggagauggaacuaga

SEQ ID NO: 1064061 - RNA, 19 nt, Homo sapiens
  misc_RNA (1)...(19): siRNA sense strand
agcguaagcuggcagacaa

SEQ ID NO: 1064062 - RNA, 19 nt, Homo sapiens
  misc_RNA (1)...(19): siRNA sense strand
aaucacaaucccaucaauu

SEQ ID NO: 1064063 - RNA, 19 nt, Homo sapiens
  misc_RNA (1)...(19): siRNA sense strand
gugaagcauuuaagcaaaa

SEQ ID NO: 1064064 - RNA, 19 nt, Homo sapiens
  misc_RNA (1)...(19): siRNA sense strand
uaucaucagcuguaaagca

SEQ ID NO: 1064065 - RNA, 19 nt, Homo sapiens
  misc_RNA (1)...(19): siRNA sense strand
ggcuggaacuggguugaug

SEQ ID NO: 1064066 - RNA, 19 nt, Homo sapiens
  misc_RNA (1)...(19): siRNA sense strand
ggaccaggagauggaacua

SEQ ID NO: 1064067 - RNA, 19 nt, Homo sapiens
  misc_RNA (1)...(19): siRNA sense strand
agaaacauauccccaaaca

SEQ ID NO: 1064068 - RNA, 19 nt, Homo sapiens
  misc_RNA (1)...(19): siRNA sense strand
ccgcuaugaccuauacauu

SEQ ID NO: 1064069 - RNA, 19 nt, Homo sapiens
  misc_RNA (1)...(19): siRNA sense strand
uaaagcagaguauauuagc

SEQ ID NO: 1064070 - RNA, 19 nt, Homo sapiens
  misc_RNA (1)...(19): siRNA sense strand
guucauggagaaucacaau

SEQ ID NO: 1064071 - RNA, 19 nt, Homo sapiens
  misc_RNA (1)...(19): siRNA sense strand
ggaaccgcuaugaccuaua

SEQ ID NO: 1064072 - RNA, 19 nt, Homo sapiens
  misc_RNA (1)...(19): siRNA sense strand
gcaaaacuggcucuaagga

SEQ ID NO: 1064073 - RNA, 19 nt, Homo sapiens
  misc_RNA (1)...(19): siRNA sense strand
uggaaccgcuaugaccuau

SEQ ID NO: 1064074 - RNA, 19 nt, Homo sapiens
  misc_RNA (1)...(19): siRNA sense strand
uugaauaugccaaagacaa

SEQ ID NO: 1064075 - RNA, 19 nt, Homo sapiens
  misc_RNA (1)...(19): siRNA sense strand
caaagccuucuuaauagag

SEQ ID NO: 1064076 - RNA, 19 nt, Homo sapiens
  misc_RNA (1)...(19): siRNA sense strand
uuaacaacaccauaucauc

SEQ ID NO: 1064077 - RNA, 19 nt, Homo sapiens
  misc_RNA (1)...(19): siRNA sense strand
ccaacgaggaccaggagau

SEQ ID NO: 1064078 - RNA, 19 nt, Homo sapiens
  misc_RNA (1)...(19): siRNA sense strand
cauuacgcucuauuuauga

SEQ ID NO: 1064079 - RNA, 19 nt, Homo sapiens
  misc_RNA (1)...(19): siRNA sense strand
ucccaucaauuccgcaaca

SEQ ID NO: 1064080 - RNA, 19 nt, Homo sapiens
  misc_RNA (1)...(19): siRNA sense strand
acagaaacauauccccaaa

SEQ ID NO: 1064081 - RNA, 19 nt, Homo sapiens
  misc_RNA (1)...(19): siRNA sense strand
cgcuaugaccuauacauug

SEQ ID NO: 1064082 - RNA, 19 nt, Homo sapiens
  misc_RNA (1)...(19): siRNA sense strand
guagaagcuaaucuuggaa

SEQ ID NO: 1064083 - RNA, 19 nt, Homo sapiens
  misc_RNA (1)...(19): siRNA sense strand
guaaagcacuucaagaguu

SEQ ID NO: 1064084 - RNA, 19 nt, Homo sapiens
  misc_RNA (1)...(19): siRNA sense strand
gaacgagcaucucauuaug

SEQ ID NO: 1064085 - RNA, 19 nt, Homo sapiens
  misc_RNA (1)...(19): siRNA sense strand
uaaagcacuucaagaguua

SEQ ID NO: 1064086 - RNA, 19 nt, Homo sapiens
  misc_RNA (1)...(19): siRNA sense strand
gauguggcauuuaaagaua

SEQ ID NO: 1064087 - RNA, 19 nt, Homo sapiens
  misc_RNA (1)...(19): siRNA sense strand
gaagagcccauaagaguaa

SEQ ID NO: 1064088 - RNA, 19 nt, Homo sapiens
  misc_RNA (1)...(19): siRNA sense strand
ugaaguaugucuccuguuu

SEQ ID NO: 1064089 - RNA, 19 nt, Homo sapiens
  misc_RNA (1)...(19): siRNA sense strand
uaaagaagacguucaugua

SEQ ID NO: 1064090 - RNA, 19 nt, Homo sapiens
  misc_RNA (1)...(19): siRNA sense strand
gaggaaagcuggacaucga

SEQ ID NO: 1064091 - RNA, 19 nt, Homo sapiens
  misc_RNA (1)...(19): siRNA sense strand
ugaaauuccugaugaacua

SEQ ID NO: 1064092 - RNA, 19 nt, Homo sapiens
  misc_RNA (1)...(19): siRNA sense strand
gacaaccuaugcugaauuu

SEQ ID NO: 1064093 - RNA, 19 nt, Homo sapiens
  misc_RNA (1)...(19): siRNA sense strand
ggagauggacaacguauuu

SEQ ID NO: 1064094 - RNA, 19 nt, Homo sapiens
  misc_RNA (1)...(19): siRNA sense strand
gaaacuaggagcaaugaaa

SEQ ID NO: 1064095 - RNA, 19 nt, Homo sapiens
  misc_RNA (1)...(19): siRNA sense strand
ggacaucgaauucaaagaa

SEQ ID NO: 1064096 - RNA, 19 nt, Homo sapiens
  misc_RNA (1)...(19): siRNA sense strand
agaagacguucauguauuu

SEQ ID NO: 1064097 - RNA, 19 nt, Homo sapiens
  misc_RNA (1)...(19): siRNA sense strand
cagaagaauuacugguuua

SEQ ID NO: 1064098 - RNA, 19 nt, Homo sapiens
  misc_RNA (1)...(19): siRNA sense strand
gaagaacgagcaucucauu

SEQ ID NO: 1064099 - RNA, 19 nt, Homo sapiens
  misc_RNA (1)...(19): siRNA sense strand
caacguauuuaccuuguga

SEQ ID NO: 1064100 - RNA, 19 nt, Homo sapiens
  misc_RNA (1)...(19): siRNA sense strand
uacugaagaugcugaauua

SEQ ID NO: 1064101 - RNA, 19 nt, Homo sapiens
  misc_RNA (1)...(19): siRNA sense strand
gcaaagcaguccugaccuu

SEQ ID NO: 1064102 - RNA, 19 nt, Homo sapiens
  misc_RNA (1)...(19): siRNA sense strand
gaagaagaguuuacaacag

SEQ ID NO: 1064103 - RNA, 19 nt, Homo sapiens
  misc_RNA (1)...(19): siRNA sense strand
gaacagucuucucaguuau

SEQ ID NO: 1064104 - RNA, 19 nt, Homo sapiens
  misc_RNA (1)...(19): siRNA sense strand
cccauuaccugcugaagua

SEQ ID NO: 1064105 - RNA, 19 nt, Homo sapiens
  misc_RNA (1)...(19): siRNA sense strand
ucagauacuuuacgaauuc

SEQ ID NO: 1064106 - RNA, 19 nt, Homo sapiens
  misc_RNA (1)...(19): siRNA sense strand
gcccauaagaguaauaaua

SEQ ID NO: 1064107 - RNA, 19 nt, Homo sapiens
  misc_RNA (1)...(19): siRNA sense strand
ggaagagcccauaagagua

SEQ ID NO: 1064108 - RNA, 19 nt, Homo sapiens
  misc_RNA (1)...(19): siRNA sense strand
caaagaggaagaagaguuu

SEQ ID NO: 1064109 - RNA, 19 nt, Homo sapiens
  misc_RNA (1)...(19): siRNA sense strand
aaauaucgguggugugaaa

SEQ ID NO: 1064110 - RNA, 19 nt, Homo sapiens
  misc_RNA (1)...(19): siRNA sense strand
gaugauagcgcuccagaga

SEQ ID NO: 1064111 - RNA, 19 nt, Homo sapiens
  misc_RNA (1)...(19): siRNA sense strand
gaagcaaauugaagaacga

SEQ ID NO: 1064112 - RNA, 19 nt, Homo sapiens
  misc_RNA (1)...(19): siRNA sense strand
gacaacaggccauggauuu

SEQ ID NO: 1064113 - RNA, 19 nt, Homo sapiens
  misc_RNA (1)...(19): siRNA sense strand
cagccggcauuuaauauuu

SEQ ID NO: 1064114 - RNA, 19 nt, Homo sapiens
  misc_RNA (1)...(19): siRNA sense strand
aagaagaguuuacaacaga

SEQ ID NO: 1064115 - RNA, 19 nt, Homo sapiens
  misc_RNA (1)...(19): siRNA sense strand
ggaagaagaguuuacaaca

SEQ ID NO: 1064116 - RNA, 19 nt, Homo sapiens
  misc_RNA (1)...(19): siRNA sense strand
uaucggcacuucaguagaa

SEQ ID NO: 1064117 - RNA, 19 nt, Homo sapiens
  misc_RNA (1)...(19): siRNA sense strand
ggaugaaauuccugaugaa

SEQ ID NO: 1064118 - RNA, 19 nt, Homo sapiens
  misc_RNA (1)...(19): siRNA sense strand
aagaagacguucauguauu

SEQ ID NO: 1064119 - RNA, 19 nt, Homo sapiens
  misc_RNA (1)...(19): siRNA sense strand
guaaauaucggugguguga

SEQ ID NO: 1064120 - RNA, 19 nt, Homo sapiens
  misc_RNA (1)...(19): siRNA sense strand
caagaguuauacgguguua

SEQ ID NO: 1064121 - RNA, 19 nt, Homo sapiens
  misc_RNA (1)...(19): siRNA sense strand
acacugcuaugaaguuauu

SEQ ID NO: 1064122 - RNA, 19 nt, Homo sapiens
  misc_RNA (1)...(19): siRNA sense strand
aaugucagguucucagaua

SEQ ID NO: 1064123 - RNA, 19 nt, Homo sapiens
  misc_RNA (1)...(19): siRNA sense strand
gacaucgaauucaaagaaa

SEQ ID NO: 1064124 - RNA, 19 nt, Homo sapiens
  misc_RNA (1)...(19): siRNA sense strand
ggaaaccguuguccucagu

SEQ ID NO: 1064125 - RNA, 19 nt, Homo sapiens
  misc_RNA (1)...(19): siRNA sense strand
cuucaaaucugacuguuuc

SEQ ID NO: 1064126 - RNA, 19 nt, Homo sapiens
  misc_RNA (1)...(19): siRNA sense strand
uggaugaaauuccugauga

SEQ ID NO: 1064127 - RNA, 19 nt, Homo sapiens
  misc_RNA (1)...(19): siRNA sense strand
caacagaugaagcagauga

SEQ ID NO: 1064128 - RNA, 19 nt, Homo sapiens
  misc_RNA (1)...(19): siRNA sense strand
guaaagaagacguucaugu

SEQ ID NO: 1064129 - RNA, 19 nt, Homo sapiens
  misc_RNA (1)...(19): siRNA sense strand
guaugucuccuguuucuuu

SEQ ID NO: 1064130 - RNA, 19 nt, Homo sapiens
  misc_RNA (1)...(19): siRNA sense strand
uuacacugcuaugaaguua

SEQ ID NO: 1064131 - RNA, 19 nt, Homo sapiens
  misc_RNA (1)...(19): siRNA sense strand
gagacuauuucaucgacaa

SEQ ID NO: 1064132 - RNA, 19 nt, Homo sapiens
  misc_RNA (1)...(19): siRNA sense strand
guagaucucggaguuuaua

SEQ ID NO: 1064133 - RNA, 19 nt, Homo sapiens
  misc_RNA (1)...(19): siRNA sense strand
gaccuuucauuucuaguug

SEQ ID NO: 1064134 - RNA, 19 nt, Homo sapiens
  misc_RNA (1)...(19): siRNA sense strand
caaaguaggagauggacaa

SEQ ID NO: 1064135 - RNA, 19 nt, Homo sapiens
  misc_RNA (1)...(19): siRNA sense strand
gucaugacccuguauguaa

SEQ ID NO: 1064136 - RNA, 19 nt, Homo sapiens
  misc_RNA (1)...(19): siRNA sense strand
uccaugauguggcauuuaa

SEQ ID NO: 1064137 - RNA, 19 nt, Homo sapiens
  misc_RNA (1)...(19): siRNA sense strand
guuaaaagcuguaaagaag

SEQ ID NO: 1064138 - RNA, 19 nt, Homo sapiens
  misc_RNA (1)...(19): siRNA sense strand
cauaaaccaucaccuagca

SEQ ID NO: 1064139 - RNA, 19 nt, Homo sapiens
  misc_RNA (1)...(19): siRNA sense strand
gagauggacaacguauuua

SEQ ID NO: 1064140 - RNA, 19 nt, Homo sapiens
  misc_RNA (1)...(19): siRNA sense strand
ugauagcgcuccagagaca

SEQ ID NO: 1064141 - RNA, 19 nt, Homo sapiens
  misc_RNA (1)...(19): siRNA sense strand
ucaugacccuguauguaaa

SEQ ID NO: 1064142 - RNA, 19 nt, Homo sapiens
  misc_RNA (1)...(19): siRNA sense strand
ucucggaguuuauacaaga

SEQ ID NO: 1064143 - RNA, 19 nt, Homo sapiens
  misc_RNA (1)...(19): siRNA sense strand
agaagcaccugcaagacaa

SEQ ID NO: 1064144 - RNA, 19 nt, Homo sapiens
  misc_RNA (1)...(19): siRNA sense strand
aaagaagacguucauguau

SEQ ID NO: 1064145 - RNA, 19 nt, Homo sapiens
  misc_RNA (1)...(19): siRNA sense strand
acagugaaguggaugaaau

SEQ ID NO: 1064146 - RNA, 19 nt, Homo sapiens
  misc_RNA (1)...(19): siRNA sense strand
gcacuucaguagaaaccau

SEQ ID NO: 1064147 - RNA, 19 nt, Homo sapiens
  misc_RNA (1)...(19): siRNA sense strand
gaaagcuggacaucgaauu

SEQ ID NO: 1064148 - RNA, 19 nt, Homo sapiens
  misc_RNA (1)...(19): siRNA sense strand
agaauaacaugggagagaa

SEQ ID NO: 1064149 - RNA, 19 nt, Homo sapiens
  misc_RNA (1)...(19): siRNA sense strand
gaugcugucugggauaaug

SEQ ID NO: 1064150 - RNA, 19 nt, Homo sapiens
  misc_RNA (1)...(19): siRNA sense strand
gauucugguugaucugaaa

SEQ ID NO: 1064151 - RNA, 19 nt, Homo sapiens
  misc_RNA (1)...(19): siRNA sense strand
gaugguugcauuacucauu

SEQ ID NO: 1064152 - RNA, 19 nt, Homo sapiens
  misc_RNA (1)...(19): siRNA sense strand
uuuagaagcuacugaagau

SEQ ID NO: 1064153 - RNA, 19 nt, Homo sapiens
  misc_RNA (1)...(19): siRNA sense strand
gaagaaccacccuccaucu

SEQ ID NO: 1064154 - RNA, 19 nt, Homo sapiens
  misc_RNA (1)...(19): siRNA sense strand
uacgaauucuuacauguga

SEQ ID NO: 1064155 - RNA, 19 nt, Homo sapiens
  misc_RNA (1)...(19): siRNA sense strand
gcagugaagaugaugauag

SEQ ID NO: 1064156 - RNA, 19 nt, Homo sapiens
  misc_RNA (1)...(19): siRNA sense strand
uauuucagcuccaugaugu

SEQ ID NO: 1064157 - RNA, 19 nt, Homo sapiens
  misc_RNA (1)...(19): siRNA sense strand
ugaagaugcugaauuagcu

SEQ ID NO: 1064158 - RNA, 19 nt, Homo sapiens
  misc_RNA (1)...(19): siRNA sense strand
ccucauaaaccaucaccua

SEQ ID NO: 1064159 - RNA, 19 nt, Homo sapiens
  misc_RNA (1)...(19): siRNA sense strand
ucaaagaggaagaagaguu

SEQ ID NO: 1064160 - RNA, 19 nt, Homo sapiens
  misc_RNA (1)...(19): siRNA sense strand
cagguucucagauacuuua

SEQ ID NO: 1064161 - RNA, 19 nt, Homo sapiens
  misc_RNA (1)...(19): siRNA sense strand
aaagaugguugcauuacuc

SEQ ID NO: 1064162 - RNA, 19 nt, Homo sapiens
  misc_RNA (1)...(19): siRNA sense strand
ccagaauccucauaaacca

SEQ ID NO: 1064163 - RNA, 19 nt, Homo sapiens
  misc_RNA (1)...(19): siRNA sense strand
gcaaugaaacccagaaucc

SEQ ID NO: 1064164 - RNA, 19 nt, Homo sapiens
  misc_RNA (1)...(19): siRNA sense strand
guccugaccuuucauuucu

SEQ ID NO: 1064165 - RNA, 19 nt, Homo sapiens
  misc_RNA (1)...(19): siRNA sense strand
agaacgagcaucucauuau

SEQ ID NO: 1064166 - RNA, 19 nt, Homo sapiens
  misc_RNA (1)...(19): siRNA sense strand
uugcucagcugaagauguu

SEQ ID NO: 1064167 - RNA, 19 nt, Homo sapiens
  misc_RNA (1)...(19): siRNA sense strand
gaaauuccugaugaacuaa

SEQ ID NO: 1064168 - RNA, 19 nt, Homo sapiens
  misc_RNA (1)...(19): siRNA sense strand
aaacccagaauccucauaa

SEQ ID NO: 1064169 - RNA, 19 nt, Homo sapiens
  misc_RNA (1)...(19): siRNA sense strand
uacaacagaugaagcagau

SEQ ID NO: 1064170 - RNA, 19 nt, Homo sapiens
  misc_RNA (1)...(19): siRNA sense strand
gaagaauuacugguuuaug

SEQ ID NO: 1064171 - RNA, 19 nt, Homo sapiens
  misc_RNA (1)...(19): siRNA sense strand
gugaauaaagauggcauua

SEQ ID NO: 1064172 - RNA, 19 nt, Homo sapiens
  misc_RNA (1)...(19): siRNA sense strand
ucauguauuugcuuuggaa

SEQ ID NO: 1064173 - RNA, 19 nt, Homo sapiens
  misc_RNA (1)...(19): siRNA sense strand
agauguuucugacgaauau

SEQ ID NO: 1064174 - RNA, 19 nt, Homo sapiens
  misc_RNA (1)...(19): siRNA sense strand
guucucagauacuuuacga

SEQ ID NO: 1064175 - RNA, 19 nt, Homo sapiens
  misc_RNA (1)...(19): siRNA sense strand
gaaacccagaauccucaua

SEQ ID NO: 1064176 - RNA, 19 nt, Homo sapiens
  misc_RNA (1)...(19): siRNA sense strand
guuauacgguguuaauugc

SEQ ID NO: 1064177 - RNA, 19 nt, Homo sapiens
  misc_RNA (1)...(19): siRNA sense strand
uggaagagcccauaagagu

SEQ ID NO: 1064178 - RNA, 19 nt, Homo sapiens
  misc_RNA (1)...(19): siRNA sense strand
gaauucggcguuggaacua

SEQ ID NO: 1064179 - RNA, 19 nt, Homo sapiens
  misc_RNA (1)...(19): siRNA sense strand
uuguagaucucggaguuua

SEQ ID NO: 1064180 - RNA, 19 nt, Homo sapiens
  misc_RNA (1)...(19): siRNA sense strand
ggaauucggcguuggaacu

SEQ ID NO: 1064181 - RNA, 19 nt, Homo sapiens
  misc_RNA (1)...(19): siRNA sense strand
acagucuucucaguuauaa

SEQ ID NO: 1064182 - RNA, 19 nt, Homo sapiens
  misc_RNA (1)...(19): siRNA sense strand
cuacugaagaugcugaauu

SEQ ID NO: 1064183 - RNA, 19 nt, Homo sapiens
  misc_RNA (1)...(19): siRNA sense strand
caucucuucugcauauuua

SEQ ID NO: 1064184 - RNA, 19 nt, Homo sapiens
  misc_RNA (1)...(19): siRNA sense strand
ggacagugguaccucgauu

SEQ ID NO: 1064185 - RNA, 19 nt, Homo sapiens
  misc_RNA (1)...(19): siRNA sense strand
uauuuaugcuugccuguua

SEQ ID NO: 1064186 - RNA, 19 nt, Homo sapiens
  misc_RNA (1)...(19): siRNA sense strand
ggccaccacuguguccuua

SEQ ID NO: 1064187 - RNA, 19 nt, Homo sapiens
  misc_RNA (1)...(19): siRNA sense strand
ggacucagcugugcuuuug

SEQ ID NO: 1064188 - RNA, 19 nt, Homo sapiens
  misc_RNA (1)...(19): siRNA sense strand
uacauucccuggccucuga

SEQ ID NO: 1064189 - RNA, 19 nt, Homo sapiens
  misc_RNA (1)...(19): siRNA sense strand
guccuuacuuugucgcuuu

SEQ ID NO: 1064190 - RNA, 19 nt, Homo sapiens
  misc_RNA (1)...(19): siRNA sense strand
uuccaucucuucugcauau

SEQ ID NO: 1064191 - RNA, 19 nt, Homo sapiens
  misc_RNA (1)...(19): siRNA sense strand
gacagugguaccucgauuu

SEQ ID NO: 1064192 - RNA, 19 nt, Homo sapiens
  misc_RNA (1)...(19): siRNA sense strand
gaguguccuuuggcaguuu

SEQ ID NO: 1064193 - RNA, 19 nt, Homo sapiens
  misc_RNA (1)...(19): siRNA sense strand
ggcaguuuccaaagcauuu

SEQ ID NO: 1064194 - RNA, 19 nt, Homo sapiens
  misc_RNA (1)...(19): siRNA sense strand
augcuugccuguuacauuc

SEQ ID NO: 1064195 - RNA, 19 nt, Homo sapiens
  misc_RNA (1)...(19): siRNA sense strand
ggacuuuccacacugucuu

SEQ ID NO: 1064196 - RNA, 19 nt, Homo sapiens
  misc_RNA (1)...(19): siRNA sense strand
ugaguguccuuuggcaguu

SEQ ID NO: 1064197 - RNA, 19 nt, Homo sapiens
  misc_RNA (1)...(19): siRNA sense strand
ccaucucuucugcauauuu

SEQ ID NO: 1064198 - RNA, 19 nt, Homo sapiens
  misc_RNA (1)...(19): siRNA sense strand
ccacuguguccuuacuuug

SEQ ID NO: 1064199 - RNA, 19 nt, Homo sapiens
  misc_RNA (1)...(19): siRNA sense strand
ccaccacuguguccuuacu

SEQ ID NO: 1064200 - RNA, 19 nt, Homo sapiens
  misc_RNA (1)...(19): siRNA sense strand
uaugcuugccuguuacauu

SEQ ID NO: 1064201 - RNA, 19 nt, Homo sapiens
  misc_RNA (1)...(19): siRNA sense strand
ggacugggguuaggagaca

SEQ ID NO: 1064202 - RNA, 19 nt, Homo sapiens
  misc_RNA (1)...(19): siRNA sense strand
accacuguguccuuacuuu

SEQ ID NO: 1064203 - RNA, 19 nt, Homo sapiens
  misc_RNA (1)...(19): siRNA sense strand
gacuuuccacacugucuuu

SEQ ID NO: 1064204 - RNA, 19 nt, Homo sapiens
  misc_RNA (1)...(19): siRNA sense strand
ccacagagccuaaguuuga

SEQ ID NO: 1064205 - RNA, 19 nt, Homo sapiens
  misc_RNA (1)...(19): siRNA sense strand
ugaaauacauuccuaucug

SEQ ID NO: 1064206 - RNA, 19 nt, Homo sapiens
  misc_RNA (1)...(19): siRNA sense strand
ggcucacgcugcccaauua

SEQ ID NO: 1064207 - RNA, 19 nt, Homo sapiens
  misc_RNA (1)...(19): siRNA sense strand
agaggagcguggucugaua

SEQ ID NO: 1064208 - RNA, 19 nt, Homo sapiens
  misc_RNA (1)...(19): siRNA sense strand
gagccuaaguuugacaugu

SEQ ID NO: 1064209 - RNA, 19 nt, Homo sapiens
  misc_RNA (1)...(19): siRNA sense strand
ccagaagacacuccagaaa

SEQ ID NO: 1064210 - RNA, 19 nt, Homo sapiens
  misc_RNA (1)...(19): siRNA sense strand
gugccuugcuuucauacuu

SEQ ID NO: 1064211 - RNA, 19 nt, Homo sapiens
  misc_RNA (1)...(19): siRNA sense strand
uguccaaccugcaauuugu

SEQ ID NO: 1064212 - RNA, 19 nt, Homo sapiens
  misc_RNA (1)...(19): siRNA sense strand
caauacaggcauucuugaa

SEQ ID NO: 1064213 - RNA, 19 nt, Homo sapiens
  misc_RNA (1)...(19): siRNA sense strand
gagcuacgauuuccccauu

SEQ ID NO: 1064214 - RNA, 19 nt, Homo sapiens
  misc_RNA (1)...(19): siRNA sense strand
auacaggcauucuugaagu

SEQ ID NO: 1064215 - RNA, 19 nt, Homo sapiens
  misc_RNA (1)...(19): siRNA sense strand
gaagacacuccagaaaaua

SEQ ID NO: 1064216 - RNA, 19 nt, Homo sapiens
  misc_RNA (1)...(19): siRNA sense strand
gggcucaugccaacaguga

SEQ ID NO: 1064217 - RNA, 19 nt, Homo sapiens
  misc_RNA (1)...(19): siRNA sense strand
gcucaucggcaccaucuuc

SEQ ID NO: 1064218 - RNA, 19 nt, Homo sapiens
  misc_RNA (1)...(19): siRNA sense strand
cgggugccuugcuuucaua

SEQ ID NO: 1064219 - RNA, 19 nt, Homo sapiens
  misc_RNA (1)...(19): siRNA sense strand
gccuaaguuugacauguug

SEQ ID NO: 1064220 - RNA, 19 nt, Homo sapiens
  misc_RNA (1)...(19): siRNA sense strand
caaaagaucagauugcaau

SEQ ID NO: 1064221 - RNA, 19 nt, Homo sapiens
  misc_RNA (1)...(19): siRNA sense strand
caaaggauuuucuucaagu

SEQ ID NO: 1064222 - RNA, 19 nt, Homo sapiens
  misc_RNA (1)...(19): siRNA sense strand
gcgggugccuugcuuucau

SEQ ID NO: 1064223 - RNA, 19 nt, Homo sapiens
  misc_RNA (1)...(19): siRNA sense strand
agaagacacuccagaaaau

SEQ ID NO: 1064224 - RNA, 19 nt, Homo sapiens
  misc_RNA (1)...(19): siRNA sense strand
agauugcaauuccagaaga

SEQ ID NO: 1064225 - RNA, 19 nt, Homo sapiens
  misc_RNA (1)...(19): siRNA sense strand
uaucugcccagucuucaaa

SEQ ID NO: 1064226 - RNA, 19 nt, Homo sapiens
  misc_RNA (1)...(19): siRNA sense strand
agccuaaguuugacauguu

SEQ ID NO: 1064227 - RNA, 19 nt, Homo sapiens
  misc_RNA (1)...(19): siRNA sense strand
gcccagucuucaaaggauu

SEQ ID NO: 1064228 - RNA, 19 nt, Homo sapiens
  misc_RNA (1)...(19): siRNA sense strand
uuugacauguuguacaaga

SEQ ID NO: 1064229 - RNA, 19 nt, Homo sapiens
  misc_RNA (1)...(19): siRNA sense strand
uuucauacuugacaacaca

SEQ ID NO: 1064230 - RNA, 19 nt, Homo sapiens
  misc_RNA (1)...(19): siRNA sense strand
gagcguggucugauacagu

SEQ ID NO: 1064231 - RNA, 19 nt, Homo sapiens
  misc_RNA (1)...(19): siRNA sense strand
cuuccagccucaagagcua

SEQ ID NO: 1064232 - RNA, 19 nt, Homo sapiens
  misc_RNA (1)...(19): siRNA sense strand
ggcauguucugcacucucu

SEQ ID NO: 1064233 - RNA, 19 nt, Homo sapiens
  misc_RNA (1)...(19): siRNA sense strand
cgccaucaauacaggcauu

SEQ ID NO: 1064234 - RNA, 19 nt, Homo sapiens
  misc_RNA (1)...(19): siRNA sense strand
aguuugacauguuguacaa

SEQ ID NO: 1064235 - RNA, 19 nt, Homo sapiens
  misc_RNA (1)...(19): siRNA sense strand
ucagauugcaauuccagaa

SEQ ID NO: 1064236 - RNA, 19 nt, Homo sapiens
  misc_RNA (1)...(19): siRNA sense strand
ccucaagagcuacgauuuc

SEQ ID NO: 1064237 - RNA, 19 nt, Homo sapiens
  misc_RNA (1)...(19): siRNA sense strand
cauguucugcacucucuuu

SEQ ID NO: 1064238 - RNA, 19 nt, Homo sapiens
  misc_RNA (1)...(19): siRNA sense strand
cagaagacacuccagaaaa

SEQ ID NO: 1064239 - RNA, 19 nt, Homo sapiens
  misc_RNA (1)...(19): siRNA sense strand
ggucugauacaguggaaag

SEQ ID NO: 1064240 - RNA, 19 nt, Homo sapiens
  misc_RNA (1)...(19): siRNA sense strand
aaagaucagauugcaauuc

SEQ ID NO: 1064241 - RNA, 19 nt, Homo sapiens
  misc_RNA (1)...(19): siRNA sense strand
cuaaguuugacauguugua

SEQ ID NO: 1064242 - RNA, 19 nt, Homo sapiens
  misc_RNA (1)...(19): siRNA sense strand
ugcaauuuguggacaugaa

SEQ ID NO: 1064243 - RNA, 19 nt, Homo sapiens
  misc_RNA (1)...(19): siRNA sense strand
gcucaugccaacagugaca

SEQ ID NO: 1064244 - RNA, 19 nt, Homo sapiens
  misc_RNA (1)...(19): siRNA sense strand
gcugaccacggagauguuu

SEQ ID NO: 1064245 - RNA, 19 nt, Homo sapiens
  misc_RNA (1)...(19): siRNA sense strand
uacaggcauucuugaagug

SEQ ID NO: 1064246 - RNA, 19 nt, Homo sapiens
  misc_RNA (1)...(19): siRNA sense strand
caucaauacaggcauucuu

SEQ ID NO: 1064247 - RNA, 19 nt, Homo sapiens
  misc_RNA (1)...(19): siRNA sense strand
ugccuugcuuucauacuug

SEQ ID NO: 1064248 - RNA, 19 nt, Homo sapiens
  misc_RNA (1)...(19): siRNA sense strand
gaaaauacagaaacugcau

SEQ ID NO: 1064249 - RNA, 19 nt, Homo sapiens
  misc_RNA (1)...(19): siRNA sense strand
aagaucagauugcaauucc

SEQ ID NO: 1064250 - RNA, 19 nt, Homo sapiens
  misc_RNA (1)...(19): siRNA sense strand
gcuguccaaccugcaauuu

SEQ ID NO: 1064251 - RNA, 19 nt, Homo sapiens
  misc_RNA (1)...(19): siRNA sense strand
aacccuggcgccaucaaua

SEQ ID NO: 1064252 - RNA, 19 nt, Homo sapiens
  misc_RNA (1)...(19): siRNA sense strand
gauugcaauuccagaagac

SEQ ID NO: 1064253 - RNA, 19 nt, Homo sapiens
  misc_RNA (1)...(19): siRNA sense strand
ugacauguuguacaagauc

SEQ ID NO: 1064254 - RNA, 19 nt, Homo sapiens
  misc_RNA (1)...(19): siRNA sense strand
gccucaagagcuacgauuu

SEQ ID NO: 1064255 - RNA, 19 nt, Homo sapiens
  misc_RNA (1)...(19): siRNA sense strand
gccuugcuuucauacuuga

SEQ ID NO: 1064256 - RNA, 19 nt, Homo sapiens
  misc_RNA (1)...(19): siRNA sense strand
ccacagagccuaaguuuga

SEQ ID NO: 1064257 - RNA, 19 nt, Homo sapiens
  misc_RNA (1)...(19): siRNA sense strand
ugaaauacauuccuaucug

SEQ ID NO: 1064258 - RNA, 19 nt, Homo sapiens
  misc_RNA (1)...(19): siRNA sense strand
ggcucacgcugcccaauua

SEQ ID NO: 1064259 - RNA, 19 nt, Homo sapiens
  misc_RNA (1)...(19): siRNA sense strand
agaggagcguggucugaua

SEQ ID NO: 1064260 - RNA, 19 nt, Homo sapiens
  misc_RNA (1)...(19): siRNA sense strand
gagccuaaguuugacaugu

SEQ ID NO: 1064261 - RNA, 19 nt, Homo sapiens
  misc_RNA (1)...(19): siRNA sense strand
ccagaagacacuccagaaa

SEQ ID NO: 1064262 - RNA, 19 nt, Homo sapiens
  misc_RNA (1)...(19): siRNA sense strand
gugccuugcuuucauacuu

SEQ ID NO: 1064263 - RNA, 19 nt, Homo sapiens
  misc_RNA (1)...(19): siRNA sense strand
uguccaaccugcaauuugu

SEQ ID NO: 1064264 - RNA, 19 nt, Homo sapiens
  misc_RNA (1)...(19): siRNA sense strand
caauacaggcauucuugaa

SEQ ID NO: 1064265 - RNA, 19 nt, Homo sapiens
  misc_RNA (1)...(19): siRNA sense strand
gagcuacgauuuccccauu

SEQ ID NO: 1064266 - RNA, 19 nt, Homo sapiens
  misc_RNA (1)...(19): siRNA sense strand
auacaggcauucuugaagu

SEQ ID NO: 1064267 - RNA, 19 nt, Homo sapiens
  misc_RNA (1)...(19): siRNA sense strand
gaagacacuccagaaaaua

SEQ ID NO: 1064268 - RNA, 19 nt, Homo sapiens
  misc_RNA (1)...(19): siRNA sense strand
gggcucaugccaacaguga

SEQ ID NO: 1064269 - RNA, 19 nt, Homo sapiens
  misc_RNA (1)...(19): siRNA sense strand
gcucaucggcaccaucuuc

SEQ ID NO: 1064270 - RNA, 19 nt, Homo sapiens
  misc_RNA (1)...(19): siRNA sense strand
cgggugccuugcuuucaua

SEQ ID NO: 1064271 - RNA, 19 nt, Homo sapiens
  misc_RNA (1)...(19): siRNA sense strand
gccuaaguuugacauguug

SEQ ID NO: 1064272 - RNA, 19 nt, Homo sapiens
  misc_RNA (1)...(19): siRNA sense strand
caaaagaucagauugcaau

SEQ ID NO: 1064273 - RNA, 19 nt, Homo sapiens
  misc_RNA (1)...(19): siRNA sense strand
caaaggauuuucuucaagu

SEQ ID NO: 1064274 - RNA, 19 nt, Homo sapiens
  misc_RNA (1)...(19): siRNA sense strand
gcgggugccuugcuuucau

SEQ ID NO: 1064275 - RNA, 19 nt, Homo sapiens
  misc_RNA (1)...(19): siRNA sense strand
agaagacacuccagaaaau

SEQ ID NO: 1064276 - RNA, 19 nt, Homo sapiens
  misc_RNA (1)...(19): siRNA sense strand
agauugcaauuccagaaga

SEQ ID NO: 1064277 - RNA, 19 nt, Homo sapiens
  misc_RNA (1)...(19): siRNA sense strand
uaucugcccagucuucaaa

SEQ ID NO: 1064278 - RNA, 19 nt, Homo sapiens
  misc_RNA (1)...(19): siRNA sense strand
agccuaaguuugacauguu

SEQ ID NO: 1064279 - RNA, 19 nt, Homo sapiens
  misc_RNA (1)...(19): siRNA sense strand
gcccagucuucaaaggauu

SEQ ID NO: 1064280 - RNA, 19 nt, Homo sapiens
  misc_RNA (1)...(19): siRNA sense strand
uuugacauguuguacaaga

SEQ ID NO: 1064281 - RNA, 19 nt, Homo sapiens
  misc_RNA (1)...(19): siRNA sense strand
uuucauacuugacaacaca

SEQ ID NO: 1064282 - RNA, 19 nt, Homo sapiens
  misc_RNA (1)...(19): siRNA sense strand
gagcguggucugauacagu

SEQ ID NO: 1064283 - RNA, 19 nt, Homo sapiens
  misc_RNA (1)...(19): siRNA sense strand
cuuccagccucaagagcua

SEQ ID NO: 1064284 - RNA, 19 nt, Homo sapiens
  misc_RNA (1)...(19): siRNA sense strand
ggcauguucugcacucucu

SEQ ID NO: 1064285 - RNA, 19 nt, Homo sapiens
  misc_RNA (1)...(19): siRNA sense strand
cgccaucaauacaggcauu

SEQ ID NO: 1064286 - RNA, 19 nt, Homo sapiens
  misc_RNA (1)...(19): siRNA sense strand
aguuugacauguuguacaa

SEQ ID NO: 1064287 - RNA, 19 nt, Homo sapiens
  misc_RNA (1)...(19): siRNA sense strand
ucagauugcaauuccagaa

SEQ ID NO: 1064288 - RNA, 19 nt, Homo sapiens
  misc_RNA (1)...(19): siRNA sense strand
ccucaagagcuacgauuuc

SEQ ID NO: 1064289 - RNA, 19 nt, Homo sapiens
  misc_RNA (1)...(19): siRNA sense strand
cauguucugcacucucuuu

SEQ ID NO: 1064290 - RNA, 19 nt, Homo sapiens
  misc_RNA (1)...(19): siRNA sense strand
cagaagacacuccagaaaa

SEQ ID NO: 1064291 - RNA, 19 nt, Homo sapiens
  misc_RNA (1)...(19): siRNA sense strand
ggucugauacaguggaaag

SEQ ID NO: 1064292 - RNA, 19 nt, Homo sapiens
  misc_RNA (1)...(19): siRNA sense strand
aaagaucagauugcaauuc

SEQ ID NO: 1064293 - RNA, 19 nt, Homo sapiens
  misc_RNA (1)...(19): siRNA sense strand
cuaaguuugacauguugua

SEQ ID NO: 1064294 - RNA, 19 nt, Homo sapiens
  misc_RNA (1)...(19): siRNA sense strand
ugcaauuuguggacaugaa

SEQ ID NO: 1064295 - RNA, 19 nt, Homo sapiens
  misc_RNA (1)...(19): siRNA sense strand
gcucaugccaacagugaca

SEQ ID NO: 1064296 - RNA, 19 nt, Homo sapiens
  misc_RNA (1)...(19): siRNA sense strand
gcugaccacggagauguuu

SEQ ID NO: 1064297 - RNA, 19 nt, Homo sapiens
  misc_RNA (1)...(19): siRNA sense strand
uacaggcauucuugaagug

SEQ ID NO: 1064298 - RNA, 19 nt, Homo sapiens
  misc_RNA (1)...(19): siRNA sense strand
caucaauacaggcauucuu

SEQ ID NO: 1064299 - RNA, 19 nt, Homo sapiens
  misc_RNA (1)...(19): siRNA sense strand
ugccuugcuuucauacuug

SEQ ID NO: 1064300 - RNA, 19 nt, Homo sapiens
  misc_RNA (1)...(19): siRNA sense strand
gaaaauacagaaacugcau

SEQ ID NO: 1064301 - RNA, 19 nt, Homo sapiens
  misc_RNA (1)...(19): siRNA sense strand
aagaucagauugcaauucc

SEQ ID NO: 1064302 - RNA, 19 nt, Homo sapiens
  misc_RNA (1)...(19): siRNA sense strand
gcuguccaaccugcaauuu

SEQ ID NO: 1064303 - RNA, 19 nt, Homo sapiens
  misc_RNA (1)...(19): siRNA sense strand
aacccuggcgccaucaaua

SEQ ID NO: 1064304 - RNA, 19 nt, Homo sapiens
  misc_RNA (1)...(19): siRNA sense strand
gauugcaauuccagaagac

SEQ ID NO: 1064305 - RNA, 19 nt, Homo sapiens
  misc_RNA (1)...(19): siRNA sense strand
ugacauguuguacaagauc

SEQ ID NO: 1064306 - RNA, 19 nt, Homo sapiens
  misc_RNA (1)...(19): siRNA sense strand
gccucaagagcuacgauuu

SEQ ID NO: 1064307 - RNA, 19 nt, Homo sapiens
  misc_RNA (1)...(19): siRNA sense strand
gccuugcuuucauacuuga

SEQ ID NO: 1064308 - RNA, 19 nt, Homo sapiens
  misc_RNA (1)...(19): siRNA sense strand
ggaaagaaaugacuuaauc

SEQ ID NO: 1064309 - RNA, 19 nt, Homo sapiens
  misc_RNA (1)...(19): siRNA sense strand
gaaagcagaugauagagaa

SEQ ID NO: 1064310 - RNA, 19 nt, Homo sapiens
  misc_RNA (1)...(19): siRNA sense strand
gaacgucccuuguaauaau

SEQ ID NO: 1064311 - RNA, 19 nt, Homo sapiens
  misc_RNA (1)...(19): siRNA sense strand
caagaugagccacuaauua

SEQ ID NO: 1064312 - RNA, 19 nt, Homo sapiens
  misc_RNA (1)...(19): siRNA sense strand
gaacagcaaccaacugaaa

SEQ ID NO: 1064313 - RNA, 19 nt, Homo sapiens
  misc_RNA (1)...(19): siRNA sense strand
gagaacgucccuuguaaua

SEQ ID NO: 1064314 - RNA, 19 nt, Homo sapiens
  misc_RNA (1)...(19): siRNA sense strand
gauggaaacuucucuguca

SEQ ID NO: 1064315 - RNA, 19 nt, Homo sapiens
  misc_RNA (1)...(19): siRNA sense strand
ggacugcaaucauuccaaa

SEQ ID NO: 1064316 - RNA, 19 nt, Homo sapiens
  misc_RNA (1)...(19): siRNA sense strand
ugacagaccuaaaucaaau

SEQ ID NO: 1064317 - RNA, 19 nt, Homo sapiens
  misc_RNA (1)...(19): siRNA sense strand
gaaucaaccuggaccuuau

SEQ ID NO: 1064318 - RNA, 19 nt, Homo sapiens
  misc_RNA (1)...(19): siRNA sense strand
acauuuagcucuccaacua

SEQ ID NO: 1064319 - RNA, 19 nt, Homo sapiens
  misc_RNA (1)...(19): siRNA sense strand
cuacaagauuucagcaaua

SEQ ID NO: 1064320 - RNA, 19 nt, Homo sapiens
  misc_RNA (1)...(19): siRNA sense strand
gauggaaucuuggacauug

SEQ ID NO: 1064321 - RNA, 19 nt, Homo sapiens
  misc_RNA (1)...(19): siRNA sense strand
ggaaacuucucugucagua

SEQ ID NO: 1064322 - RNA, 19 nt, Homo sapiens
  misc_RNA (1)...(19): siRNA sense strand
ugacuguccucguaagaua

SEQ ID NO: 1064323 - RNA, 19 nt, Homo sapiens
  misc_RNA (1)...(19): siRNA sense strand
gcauugaccacuacaagua

SEQ ID NO: 1064324 - RNA, 19 nt, Homo sapiens
  misc_RNA (1)...(19): siRNA sense strand
gaaaugacuuaaucgucuu

SEQ ID NO: 1064325 - RNA, 19 nt, Homo sapiens
  misc_RNA (1)...(19): siRNA sense strand
ucuaaugacuguccucgua

SEQ ID NO: 1064326 - RNA, 19 nt, Homo sapiens
  misc_RNA (1)...(19): siRNA sense strand
ggauuucaauggugaucua

SEQ ID NO: 1064327 - RNA, 19 nt, Homo sapiens
  misc_RNA (1)...(19): siRNA sense strand
aaagaaagcagaugauaga

SEQ ID NO: 1064328 - RNA, 19 nt, Homo sapiens
  misc_RNA (1)...(19): siRNA sense strand
gcaguggguuccaguccua

SEQ ID NO: 1064329 - RNA, 19 nt, Homo sapiens
  misc_RNA (1)...(19): siRNA sense strand
cagccaauccgcacauuua

SEQ ID NO: 1064330 - RNA, 19 nt, Homo sapiens
  misc_RNA (1)...(19): siRNA sense strand
gcaaauggguaucugaaaa

SEQ ID NO: 1064331 - RNA, 19 nt, Homo sapiens
  misc_RNA (1)...(19): siRNA sense strand
gcaaccaacugaaauacca

SEQ ID NO: 1064332 - RNA, 19 nt, Homo sapiens
  misc_RNA (1)...(19): siRNA sense strand
acacauggaucauuuacug

SEQ ID NO: 1064333 - RNA, 19 nt, Homo sapiens
  misc_RNA (1)...(19): siRNA sense strand
acaagaagcccaccgguuu

SEQ ID NO: 1064334 - RNA, 19 nt, Homo sapiens
  misc_RNA (1)...(19): siRNA sense strand
gaagaggcgcgucgaaugu

SEQ ID NO: 1064335 - RNA, 19 nt, Homo sapiens
  misc_RNA (1)...(19): siRNA sense strand
gggacaaaaucaaacauua

SEQ ID NO: 1064336 - RNA, 19 nt, Homo sapiens
  misc_RNA (1)...(19): siRNA sense strand
aaacaagaguggacugcaa

SEQ ID NO: 1064337 - RNA, 19 nt, Homo sapiens
  misc_RNA (1)...(19): siRNA sense strand
cauacaacgugcuugguuu

SEQ ID NO: 1064338 - RNA, 19 nt, Homo sapiens
  misc_RNA (1)...(19): siRNA sense strand
ucaaauggauguccuucug

SEQ ID NO: 1064339 - RNA, 19 nt, Homo sapiens
  misc_RNA (1)...(19): siRNA sense strand
agaguggacugcaaucauu

SEQ ID NO: 1064340 - RNA, 19 nt, Homo sapiens
  misc_RNA (1)...(19): siRNA sense strand
gcagaugcuuauuuuguua

SEQ ID NO: 1064341 - RNA, 19 nt, Homo sapiens
  misc_RNA (1)...(19): siRNA sense strand
uggagaacgucccuuguaa

SEQ ID NO: 1064342 - RNA, 19 nt, Homo sapiens
  misc_RNA (1)...(19): siRNA sense strand
ccaccuucuuugacauuua

SEQ ID NO: 1064343 - RNA, 19 nt, Homo sapiens
  misc_RNA (1)...(19): siRNA sense strand
cuaaagaacacaucuggaa

SEQ ID NO: 1064344 - RNA, 19 nt, Homo sapiens
  misc_RNA (1)...(19): siRNA sense strand
caaccuggaccuuauauca

SEQ ID NO: 1064345 - RNA, 19 nt, Homo sapiens
  misc_RNA (1)...(19): siRNA sense strand
gaaaagaaagcagaugaua

SEQ ID NO: 1064346 - RNA, 19 nt, Homo sapiens
  misc_RNA (1)...(19): siRNA sense strand
uuauugaucugacugaaga

SEQ ID NO: 1064347 - RNA, 19 nt, Homo sapiens
  misc_RNA (1)...(19): siRNA sense strand
aaauuuggauggaaacuuc

SEQ ID NO: 1064348 - RNA, 19 nt, Homo sapiens
  misc_RNA (1)...(19): siRNA sense strand
auuaggagcuguuaucuuc

SEQ ID NO: 1064349 - RNA, 19 nt, Homo sapiens
  misc_RNA (1)...(19): siRNA sense strand
uaagauaacacccuuugga

SEQ ID NO: 1064350 - RNA, 19 nt, Homo sapiens
  misc_RNA (1)...(19): siRNA sense strand
ugauggagauggacacaug

SEQ ID NO: 1064351 - RNA, 19 nt, Homo sapiens
  misc_RNA (1)...(19): siRNA sense strand
acuaguaccuuccaguuug

SEQ ID NO: 1064352 - RNA, 19 nt, Homo sapiens
  misc_RNA (1)...(19): siRNA sense strand
gccaggcugugaagauaaa

SEQ ID NO: 1064353 - RNA, 19 nt, Homo sapiens
  misc_RNA (1)...(19): siRNA sense strand
gauggugguuggacaguca

SEQ ID NO: 1064354 - RNA, 19 nt, Homo sapiens
  misc_RNA (1)...(19): siRNA sense strand
ggugaucuaauuccugaua

SEQ ID NO: 1064355 - RNA, 19 nt, Homo sapiens
  misc_RNA (1)...(19): siRNA sense strand
ugaaucaaccuggaccuua

SEQ ID NO: 1064356 - RNA, 19 nt, Homo sapiens
  misc_RNA (1)...(19): siRNA sense strand
gacauuguagugcuaagua

SEQ ID NO: 1064357 - RNA, 19 nt, Homo sapiens
  misc_RNA (1)...(19): siRNA sense strand
uuagugagaucugggauga

SEQ ID NO: 1064358 - RNA, 19 nt, Homo sapiens
  misc_RNA (1)...(19): siRNA sense strand
gaagcccaccgguuucauu

SEQ ID NO: 1064359 - RNA, 19 nt, Homo sapiens
  misc_RNA (1)...(19): siRNA sense strand
gcucuggucauacuaaaga

SEQ ID NO: 1064360 - RNA, 19 nt, Homo sapiens
  misc_RNA (1)...(19): siRNA sense strand
aagaugagccacuaauuau

SEQ ID NO: 1064361 - RNA, 19 nt, Homo sapiens
  misc_RNA (1)...(19): siRNA sense strand
caacgugcuugguuuaggu

SEQ ID NO: 1064362 - RNA, 19 nt, Homo sapiens
  misc_RNA (1)...(19): siRNA sense strand
gcgggaaagaaaugacuua

SEQ ID NO: 1064363 - RNA, 19 nt, Homo sapiens
  misc_RNA (1)...(19): siRNA sense strand
caacugaaauaccaauucc

SEQ ID NO: 1064364 - RNA, 19 nt, Homo sapiens
  misc_RNA (1)...(19): siRNA sense strand
ggauuaugauggagauucu

SEQ ID NO: 1064365 - RNA, 19 nt, Homo sapiens
  misc_RNA (1)...(19): siRNA sense strand
ccuacaagauuucagcaau

SEQ ID NO: 1064366 - RNA, 19 nt, Homo sapiens
  misc_RNA (1)...(19): siRNA sense strand
gagauggacacauggauca

SEQ ID NO: 1064367 - RNA, 19 nt, Homo sapiens
  misc_RNA (1)...(19): siRNA sense strand
cacagugcauugauaacaa

SEQ ID NO: 1064368 - RNA, 19 nt, Homo sapiens
  misc_RNA (1)...(19): siRNA sense strand
cacaaugucccucgaaguu

SEQ ID NO: 1064369 - RNA, 19 nt, Homo sapiens
  misc_RNA (1)...(19): siRNA sense strand
cgucgaauguuuaaagucu

SEQ ID NO: 1064370 - RNA, 19 nt, Homo sapiens
  misc_RNA (1)...(19): siRNA sense strand
aaacuucucugucaguacu

SEQ ID NO: 1064371 - RNA, 19 nt, Homo sapiens
  misc_RNA (1)...(19): siRNA sense strand
uaucauggcauccagcauu

SEQ ID NO: 1064372 - RNA, 19 nt, Homo sapiens
  misc_RNA (1)...(19): siRNA sense strand
gaugagccacuaauuaugg

SEQ ID NO: 1064373 - RNA, 19 nt, Homo sapiens
  misc_RNA (1)...(19): siRNA sense strand
ucucaugcauuuauugauc

SEQ ID NO: 1064374 - RNA, 19 nt, Homo sapiens
  misc_RNA (1)...(19): siRNA sense strand
ucucaucggugucuguguu

SEQ ID NO: 1064375 - RNA, 19 nt, Homo sapiens
  misc_RNA (1)...(19): siRNA sense strand
guaauaaugcaagcuguga

SEQ ID NO: 1064376 - RNA, 19 nt, Homo sapiens
  misc_RNA (1)...(19): siRNA sense strand
ggagaacgucccuuguaau

SEQ ID NO: 1064377 - RNA, 19 nt, Homo sapiens
  misc_RNA (1)...(19): siRNA sense strand
caauaggacuuuucaagau

SEQ ID NO: 1064378 - RNA, 19 nt, Homo sapiens
  misc_RNA (1)...(19): siRNA sense strand
gaaagaaaugacuuaaucg

SEQ ID NO: 1064379 - RNA, 19 nt, Homo sapiens
  misc_RNA (1)...(19): siRNA sense strand
gugcauugauaacaagugu

SEQ ID NO: 1064380 - RNA, 19 nt, Homo sapiens
  misc_RNA (1)...(19): siRNA sense strand
cauccagcauugaccacua

SEQ ID NO: 1064381 - RNA, 19 nt, Homo sapiens
  misc_RNA (1)...(19): siRNA sense strand
caaauggauguccuucuga

SEQ ID NO: 1064382 - RNA, 19 nt, Homo sapiens
  misc_RNA (1)...(19): siRNA sense strand
gugccaaacuguaucuuac

SEQ ID NO: 1064383 - RNA, 19 nt, Homo sapiens
  misc_RNA (1)...(19): siRNA sense strand
gcugacagaccuaaaucaa

SEQ ID NO: 1064384 - RNA, 19 nt, Homo sapiens
  misc_RNA (1)...(19): siRNA sense strand
gucagcauuugcagacuuu

SEQ ID NO: 1064385 - RNA, 19 nt, Homo sapiens
  misc_RNA (1)...(19): siRNA sense strand
gggaaaauuuggauggaaa

SEQ ID NO: 1064386 - RNA, 19 nt, Homo sapiens
  misc_RNA (1)...(19): siRNA sense strand
ugaauuaggagcuguuauc

SEQ ID NO: 1064387 - RNA, 19 nt, Homo sapiens
  misc_RNA (1)...(19): siRNA sense strand
aauuaaggaugccaugguu

SEQ ID NO: 1064388 - RNA, 19 nt, Homo sapiens
  misc_RNA (1)...(19): siRNA sense strand
ggagcugacagaccuaaau

SEQ ID NO: 1064389 - RNA, 19 nt, Homo sapiens
  misc_RNA (1)...(19): siRNA sense strand
gaggcgcgucgaauguuua

SEQ ID NO: 1064390 - RNA, 19 nt, Homo sapiens
  misc_RNA (1)...(19): siRNA sense strand
ugucaguacuauauuggaa

SEQ ID NO: 1064391 - RNA, 19 nt, Homo sapiens
  misc_RNA (1)...(19): siRNA sense strand
cuaguaccuuccaguuuga

SEQ ID NO: 1064392 - RNA, 19 nt, Homo sapiens
  misc_RNA (1)...(19): siRNA sense strand
gcauugauaacaaguguag

SEQ ID NO: 1064393 - RNA, 19 nt, Homo sapiens
  misc_RNA (1)...(19): siRNA sense strand
gaaugcacccuauuuuaaa

SEQ ID NO: 1064394 - RNA, 19 nt, Homo sapiens
  misc_RNA (1)...(19): siRNA sense strand
ucugacauaucuucccaaa

SEQ ID NO: 1064395 - RNA, 19 nt, Homo sapiens
  misc_RNA (1)...(19): siRNA sense strand
ucaagaugagccacuaauu

SEQ ID NO: 1064396 - RNA, 19 nt, Homo sapiens
  misc_RNA (1)...(19): siRNA sense strand
gggaaagaaaugacuuaau

SEQ ID NO: 1064397 - RNA, 19 nt, Homo sapiens
  misc_RNA (1)...(19): siRNA sense strand
acagcaaccaacugaaaua

SEQ ID NO: 1064398 - RNA, 19 nt, Homo sapiens
  misc_RNA (1)...(19): siRNA sense strand
cugccaggcugugaagaua

SEQ ID NO: 1064399 - RNA, 19 nt, Homo sapiens
  misc_RNA (1)...(19): siRNA sense strand
agacuuugauggagaugga

SEQ ID NO: 1064400 - RNA, 19 nt, Homo sapiens
  misc_RNA (1)...(19): siRNA sense strand
ccacuaguaccuuccaguu

SEQ ID NO: 1064401 - RNA, 19 nt, Homo sapiens
  misc_RNA (1)...(19): siRNA sense strand
ugaagaggcgcgucgaaug

SEQ ID NO: 1064402 - RNA, 19 nt, Homo sapiens
  misc_RNA (1)...(19): siRNA sense strand
auacaacgugcuugguuua

SEQ ID NO: 1064403 - RNA, 19 nt, Homo sapiens
  misc_RNA (1)...(19): siRNA sense strand
acauuguagugcuaaguaa

SEQ ID NO: 1064404 - RNA, 19 nt, Homo sapiens
  misc_RNA (1)...(19): siRNA sense strand
agaggcgcgucgaauguuu

SEQ ID NO: 1064405 - RNA, 19 nt, Homo sapiens
  misc_RNA (1)...(19): siRNA sense strand
cugcaaucauuccaaauuc

SEQ ID NO: 1064406 - RNA, 19 nt, Homo sapiens
  misc_RNA (1)...(19): siRNA sense strand
ggacacauggaucauuuac

SEQ ID NO: 1064407 - RNA, 19 nt, Homo sapiens
  misc_RNA (1)...(19): siRNA sense strand
ucaagaaucacagugcauu

SEQ ID NO: 1064408 - RNA, 19 nt, Homo sapiens
  misc_RNA (1)...(19): siRNA sense strand
gccagaagcucauggagaa

SEQ ID NO: 1064409 - RNA, 19 nt, Homo sapiens
  misc_RNA (1)...(19): siRNA sense strand
acacggagauuacaucgaa

SEQ ID NO: 1064410 - RNA, 19 nt, Homo sapiens
  misc_RNA (1)...(19): siRNA sense strand
acacgucagucaccuauaa

SEQ ID NO: 1064411 - RNA, 19 nt, Homo sapiens
  misc_RNA (1)...(19): siRNA sense strand
ccaauuggcucagaagguu

SEQ ID NO: 1064412 - RNA, 19 nt, Homo sapiens
  misc_RNA (1)...(19): siRNA sense strand
aaacaugaaugacaacauc

SEQ ID NO: 1064413 - RNA, 19 nt, Homo sapiens
  misc_RNA (1)...(19): siRNA sense strand
ccaaggacuucgucaucua

SEQ ID NO: 1064414 - RNA, 19 nt, Homo sapiens
  misc_RNA (1)...(19): siRNA sense strand
gagagcagccucaccagaa

SEQ ID NO: 1064415 - RNA, 19 nt, Homo sapiens
  misc_RNA (1)...(19): siRNA sense strand
gugaagaucucaagcaacu

SEQ ID NO: 1064416 - RNA, 19 nt, Homo sapiens
  misc_RNA (1)...(19): siRNA sense strand
cugcagagcuugagguugu

SEQ ID NO: 1064417 - RNA, 19 nt, Homo sapiens
  misc_RNA (1)...(19): siRNA sense strand
cccagcagguucuguuuaa

SEQ ID NO: 1064418 - RNA, 19 nt, Homo sapiens
  misc_RNA (1)...(19): siRNA sense strand
gcaagcugcugugccagaa

SEQ ID NO: 1064419 - RNA, 19 nt, Homo sapiens
  misc_RNA (1)...(19): siRNA sense strand
gggccagcauugacuuuga

SEQ ID NO: 1064420 - RNA, 19 nt, Homo sapiens
  misc_RNA (1)...(19): siRNA sense strand
gcacacgucagucaccuau

SEQ ID NO: 1064421 - RNA, 19 nt, Homo sapiens
  misc_RNA (1)...(19): siRNA sense strand
uggaagccauguccgauga

SEQ ID NO: 1064422 - RNA, 19 nt, Homo sapiens
  misc_RNA (1)...(19): siRNA sense strand
gaugauacacggagauuac

SEQ ID NO: 1064423 - RNA, 19 nt, Homo sapiens
  misc_RNA (1)...(19): siRNA sense strand
ccucugugcuuucggauuc

SEQ ID NO: 1064424 - RNA, 19 nt, Homo sapiens
  misc_RNA (1)...(19): siRNA sense strand
ggauguguguccugguuca

SEQ ID NO: 1064425 - RNA, 19 nt, Homo sapiens
  misc_RNA (1)...(19): siRNA sense strand
ccaagaccaucucauuguc

SEQ ID NO: 1064426 - RNA, 19 nt, Homo sapiens
  misc_RNA (1)...(19): siRNA sense strand
ucagugcggucaaggugaa

SEQ ID NO: 1064427 - RNA, 19 nt, Homo sapiens
  misc_RNA (1)...(19): siRNA sense strand
ccaggugaccauccaauug

SEQ ID NO: 1064428 - RNA, 19 nt, Homo sapiens
  misc_RNA (1)...(19): siRNA sense strand
gagaaggugcgacaucaca

SEQ ID NO: 1064429 - RNA, 19 nt, Homo sapiens
  misc_RNA (1)...(19): siRNA sense strand
gcaauugcugggccuuuga

SEQ ID NO: 1064430 - RNA, 19 nt, Homo sapiens
  misc_RNA (1)...(19): siRNA sense strand
ggcaauugcugggccuuug

SEQ ID NO: 1064431 - RNA, 19 nt, Homo sapiens
  misc_RNA (1)...(19): siRNA sense strand
gcccagcagguucuguuua

SEQ ID NO: 1064432 - RNA, 19 nt, Homo sapiens
  misc_RNA (1)...(19): siRNA sense strand
caggaugacagcauaaaug

SEQ ID NO: 1064433 - RNA, 19 nt, Homo sapiens
  misc_RNA (1)...(19): siRNA sense strand
gcaggaugacagcauaaau

SEQ ID NO: 1064434 - RNA, 19 nt, Homo sapiens
  misc_RNA (1)...(19): siRNA sense strand
ucuauucacuuaccaucga

SEQ ID NO: 1064435 - RNA, 19 nt, Homo sapiens
  misc_RNA (1)...(19): siRNA sense strand
gaagaugauacacggagau

SEQ ID NO: 1064436 - RNA, 19 nt, Homo sapiens
  misc_RNA (1)...(19): siRNA sense strand
uguccugguucaccuguuu

SEQ ID NO: 1064437 - RNA, 19 nt, Homo sapiens
  misc_RNA (1)...(19): siRNA sense strand
caaggacuucgucaucuau

SEQ ID NO: 1064438 - RNA, 19 nt, Homo sapiens
  misc_RNA (1)...(19): siRNA sense strand
caacgugacaccuggcaau

SEQ ID NO: 1064439 - RNA, 19 nt, Homo sapiens
  misc_RNA (1)...(19): siRNA sense strand
aaaauggcccagaaaauaa

SEQ ID NO: 1064440 - RNA, 19 nt, Homo sapiens
  misc_RNA (1)...(19): siRNA sense strand
gcuuucggauucuggaugu

SEQ ID NO: 1064441 - RNA, 19 nt, Homo sapiens
  misc_RNA (1)...(19): siRNA sense strand
gaaggugcgacaucacagu

SEQ ID NO: 1064442 - RNA, 19 nt, Homo sapiens
  misc_RNA (1)...(19): siRNA sense strand
cagaaaacaucauccagau

SEQ ID NO: 1064443 - RNA, 19 nt, Homo sapiens
  misc_RNA (1)...(19): siRNA sense strand
ugggauguguguccugguu

SEQ ID NO: 1064444 - RNA, 19 nt, Homo sapiens
  misc_RNA (1)...(19): siRNA sense strand
caagaccaucucauuguca

SEQ ID NO: 1064445 - RNA, 19 nt, Homo sapiens
  misc_RNA (1)...(19): siRNA sense strand
ucaccuauaaccaugagaa

SEQ ID NO: 1064446 - RNA, 19 nt, Homo sapiens
  misc_RNA (1)...(19): siRNA sense strand
gauacacggagauuacauc

SEQ ID NO: 1064447 - RNA, 19 nt, Homo sapiens
  misc_RNA (1)...(19): siRNA sense strand
cuggcaggaugacagcaua

SEQ ID NO: 1064448 - RNA, 19 nt, Homo sapiens
  misc_RNA (1)...(19): siRNA sense strand
cgugacaccuggcaauugc

SEQ ID NO: 1064449 - RNA, 19 nt, Homo sapiens
  misc_RNA (1)...(19): siRNA sense strand
aggagaaggugcgacauca

SEQ ID NO: 1064450 - RNA, 19 nt, Homo sapiens
  misc_RNA (1)...(19): siRNA sense strand
cccaagaccaucucauugu

SEQ ID NO: 1064451 - RNA, 19 nt, Homo sapiens
  misc_RNA (1)...(19): siRNA sense strand
ggaacccaggcuucacuug

SEQ ID NO: 1064452 - RNA, 19 nt, Homo sapiens
  misc_RNA (1)...(19): siRNA sense strand
cagaagcucauggagaaga

SEQ ID NO: 1064453 - RNA, 19 nt, Homo sapiens
  misc_RNA (1)...(19): siRNA sense strand
gccaggugaccauccaauu

SEQ ID NO: 1064454 - RNA, 19 nt, Homo sapiens
  misc_RNA (1)...(19): siRNA sense strand
gauucuggauguuuucuau

SEQ ID NO: 1064455 - RNA, 19 nt, Homo sapiens
  misc_RNA (1)...(19): siRNA sense strand
gcgcccuacucgaagaugu

SEQ ID NO: 1064456 - RNA, 19 nt, Homo sapiens
  misc_RNA (1)...(19): siRNA sense strand
aggugaagaucucaagcaa

SEQ ID NO: 1064457 - RNA, 19 nt, Homo sapiens
  misc_RNA (1)...(19): siRNA sense strand
ggccagcauugacuuugag

SEQ ID NO: 1064458 - RNA, 19 nt, Homo sapiens
  misc_RNA (1)...(19): siRNA sense strand
caaacaugaaugacaacau

SEQ ID NO: 1064459 - RNA, 19 nt, Homo sapiens
  misc_RNA (1)...(19): siRNA sense strand
aauuggcucagaagguuua

SEQ ID NO: 1064460 - RNA, 19 nt, Homo sapiens
  misc_RNA (1)...(19): siRNA sense strand
ccauccaauuggcucagaa

SEQ ID NO: 1064461 - RNA, 19 nt, Homo sapiens
  misc_RNA (1)...(19): siRNA sense strand
ggacagaagugcccuagaa

SEQ ID NO: 1064462 - RNA, 19 nt, Homo sapiens
  misc_RNA (1)...(19): siRNA sense strand
gaucauaucucugcaguga

SEQ ID NO: 1064463 - RNA, 19 nt, Homo sapiens
  misc_RNA (1)...(19): siRNA sense strand
cgaagacgcugaagaagaa

SEQ ID NO: 1064464 - RNA, 19 nt, Homo sapiens
  misc_RNA (1)...(19): siRNA sense strand
gauggaaacuucuauggaa

SEQ ID NO: 1064465 - RNA, 19 nt, Homo sapiens
  misc_RNA (1)...(19): siRNA sense strand
ugaagacuguuccaaguua

SEQ ID NO: 1064466 - RNA, 19 nt, Homo sapiens
  misc_RNA (1)...(19): siRNA sense strand
gaagauaaaccaccaaaca

SEQ ID NO: 1064467 - RNA, 19 nt, Homo sapiens
  misc_RNA (1)...(19): siRNA sense strand
gaaauggccuacacugaca

SEQ ID NO: 1064468 - RNA, 19 nt, Homo sapiens
  misc_RNA (1)...(19): siRNA sense strand
ggaaauaaaguucuucuuc

SEQ ID NO: 1064469 - RNA, 19 nt, Homo sapiens
  misc_RNA (1)...(19): siRNA sense strand
gaaaagaugucuccacuuc

SEQ ID NO: 1064470 - RNA, 19 nt, Homo sapiens
  misc_RNA (1)...(19): siRNA sense strand
caggcaaagucauuaauaa

SEQ ID NO: 1064471 - RNA, 19 nt, Homo sapiens
  misc_RNA (1)...(19): siRNA sense strand
ggauagcucucuuccugaa

SEQ ID NO: 1064472 - RNA, 19 nt, Homo sapiens
  misc_RNA (1)...(19): siRNA sense strand
ggaagaagaugaggacaag

SEQ ID NO: 1064473 - RNA, 19 nt, Homo sapiens
  misc_RNA (1)...(19): siRNA sense strand
gaugaagacuguuccaagu

SEQ ID NO: 1064474 - RNA, 19 nt, Homo sapiens
  misc_RNA (1)...(19): siRNA sense strand
ggagagacuugcaugaauc

SEQ ID NO: 1064475 - RNA, 19 nt, Homo sapiens
  misc_RNA (1)...(19): siRNA sense strand
ccauggacuuuagaaauua

SEQ ID NO: 1064476 - RNA, 19 nt, Homo sapiens
  misc_RNA (1)...(19): siRNA sense strand
gugacuaucccuuugauua

SEQ ID NO: 1064477 - RNA, 19 nt, Homo sapiens
  misc_RNA (1)...(19): siRNA sense strand
ccagauguuucaauuggua

SEQ ID NO: 1064478 - RNA, 19 nt, Homo sapiens
  misc_RNA (1)...(19): siRNA sense strand
uaccaggaguggauuauaa

SEQ ID NO: 1064479 - RNA, 19 nt, Homo sapiens
  misc_RNA (1)...(19): siRNA sense strand
gaccugaccagucuauaua

SEQ ID NO: 1064480 - RNA, 19 nt, Homo sapiens
  misc_RNA (1)...(19): siRNA sense strand
gaaagugggacauaugaug

SEQ ID NO: 1064481 - RNA, 19 nt, Homo sapiens
  misc_RNA (1)...(19): siRNA sense strand
acacagggaugaucuacuu

SEQ ID NO: 1064482 - RNA, 19 nt, Homo sapiens
  misc_RNA (1)...(19): siRNA sense strand
ccgcgcagcugaugaacua

SEQ ID NO: 1064483 - RNA, 19 nt, Homo sapiens
  misc_RNA (1)...(19): siRNA sense strand
agagauccaucccagcuua

SEQ ID NO: 1064484 - RNA, 19 nt, Homo sapiens
  misc_RNA (1)...(19): siRNA sense strand
ccugaaaucuaagacuuua

SEQ ID NO: 1064485 - RNA, 19 nt, Homo sapiens
  misc_RNA (1)...(19): siRNA sense strand
auaaagauuugcggcauua

SEQ ID NO: 1064486 - RNA, 19 nt, Homo sapiens
  misc_RNA (1)...(19): siRNA sense strand
gggagagacuugcaugaau

SEQ ID NO: 1064487 - RNA, 19 nt, Homo sapiens
  misc_RNA (1)...(19): siRNA sense strand
uuaccuaagucuucaguuu

SEQ ID NO: 1064488 - RNA, 19 nt, Homo sapiens
  misc_RNA (1)...(19): siRNA sense strand
ggucauugcugaagaagag

SEQ ID NO: 1064489 - RNA, 19 nt, Homo sapiens
  misc_RNA (1)...(19): siRNA sense strand
gaaaccaggcaaagucauu

SEQ ID NO: 1064490 - RNA, 19 nt, Homo sapiens
  misc_RNA (1)...(19): siRNA sense strand
ggaaaucacacaaacaagu

SEQ ID NO: 1064491 - RNA, 19 nt, Homo sapiens
  misc_RNA (1)...(19): siRNA sense strand
agauagaccugaugaguuc

SEQ ID NO: 1064492 - RNA, 19 nt, Homo sapiens
  misc_RNA (1)...(19): siRNA sense strand
gaaacccgagcaacauuaa

SEQ ID NO: 1064493 - RNA, 19 nt, Homo sapiens
  misc_RNA (1)...(19): siRNA sense strand
gaauuuaacacaucuccaa

SEQ ID NO: 1064494 - RNA, 19 nt, Homo sapiens
  misc_RNA (1)...(19): siRNA sense strand
gaugcagaaucucaaagaa

SEQ ID NO: 1064495 - RNA, 19 nt, Homo sapiens
  misc_RNA (1)...(19): siRNA sense strand
gagauagaccugaugaguu

SEQ ID NO: 1064496 - RNA, 19 nt, Homo sapiens
  misc_RNA (1)...(19): siRNA sense strand
caaguccucuuugauaaug

SEQ ID NO: 1064497 - RNA, 19 nt, Homo sapiens
  misc_RNA (1)...(19): siRNA sense strand
acacaaggaaucacacaua

SEQ ID NO: 1064498 - RNA, 19 nt, Homo sapiens
  misc_RNA (1)...(19): siRNA sense strand
gcugauguaccauugcuua

SEQ ID NO: 1064499 - RNA, 19 nt, Homo sapiens
  misc_RNA (1)...(19): siRNA sense strand
gacauaugauggaaacuuc

SEQ ID NO: 1064500 - RNA, 19 nt, Homo sapiens
  misc_RNA (1)...(19): siRNA sense strand
ccuagaaggugaaauugga

SEQ ID NO: 1064501 - RNA, 19 nt, Homo sapiens
  misc_RNA (1)...(19): siRNA sense strand
caccaaacaccaaagauuu

SEQ ID NO: 1064502 - RNA, 19 nt, Homo sapiens
  misc_RNA (1)...(19): siRNA sense strand
guuauccacuuccugauga

SEQ ID NO: 1064503 - RNA, 19 nt, Homo sapiens
  misc_RNA (1)...(19): siRNA sense strand
caaguuacaaccaaacaaa

SEQ ID NO: 1064504 - RNA, 19 nt, Homo sapiens
  misc_RNA (1)...(19): siRNA sense strand
uccauggacuuuagaaauu

SEQ ID NO: 1064505 - RNA, 19 nt, Homo sapiens
  misc_RNA (1)...(19): siRNA sense strand
gcaguaauuucaguuguag

SEQ ID NO: 1064506 - RNA, 19 nt, Homo sapiens
  misc_RNA (1)...(19): siRNA sense strand
gauguaccauugcuuaucu

SEQ ID NO: 1064507 - RNA, 19 nt, Homo sapiens
  misc_RNA (1)...(19): siRNA sense strand
cuaaagcaguuuccaguag

SEQ ID NO: 1064508 - RNA, 19 nt, Homo sapiens
  misc_RNA (1)...(19): siRNA sense strand
gaaauugggucuucaaaac

SEQ ID NO: 1064509 - RNA, 19 nt, Homo sapiens
  misc_RNA (1)...(19): siRNA sense strand
ggacauaugauggaaacuu

SEQ ID NO: 1064510 - RNA, 19 nt, Homo sapiens
  misc_RNA (1)...(19): siRNA sense strand
ucauaucucugcagugaau

SEQ ID NO: 1064511 - RNA, 19 nt, Homo sapiens
  misc_RNA (1)...(19): siRNA sense strand
gggagcagcugagaaagau

SEQ ID NO: 1064512 - RNA, 19 nt, Homo sapiens
  misc_RNA (1)...(19): siRNA sense strand
ggaccugaccagucuauau

SEQ ID NO: 1064513 - RNA, 19 nt, Homo sapiens
  misc_RNA (1)...(19): siRNA sense strand
gaugaguuccuacaaguga

SEQ ID NO: 1064514 - RNA, 19 nt, Homo sapiens
  misc_RNA (1)...(19): siRNA sense strand
ucagcaagauggaaagaau

SEQ ID NO: 1064515 - RNA, 19 nt, Homo sapiens
  misc_RNA (1)...(19): siRNA sense strand
ggaguggauuauaauuuca

SEQ ID NO: 1064516 - RNA, 19 nt, Homo sapiens
  misc_RNA (1)...(19): siRNA sense strand
gauagucaguggugucaag

SEQ ID NO: 1064517 - RNA, 19 nt, Homo sapiens
  misc_RNA (1)...(19): siRNA sense strand
ugacuaucccuuugauuaa

SEQ ID NO: 1064518 - RNA, 19 nt, Homo sapiens
  misc_RNA (1)...(19): siRNA sense strand
agacaucaauggcaacugu

SEQ ID NO: 1064519 - RNA, 19 nt, Homo sapiens
  misc_RNA (1)...(19): siRNA sense strand
gugcagaauuuaacacauc

SEQ ID NO: 1064520 - RNA, 19 nt, Homo sapiens
  misc_RNA (1)...(19): siRNA sense strand
ccaggcaaagucauuaaua

SEQ ID NO: 1064521 - RNA, 19 nt, Homo sapiens
  misc_RNA (1)...(19): siRNA sense strand
ccugaccagucuauauaua

SEQ ID NO: 1064522 - RNA, 19 nt, Homo sapiens
  misc_RNA (1)...(19): siRNA sense strand
uccaguaggugcugaugua

SEQ ID NO: 1064523 - RNA, 19 nt, Homo sapiens
  misc_RNA (1)...(19): siRNA sense strand
gcacaaugggauuugguuu

SEQ ID NO: 1064524 - RNA, 19 nt, Homo sapiens
  misc_RNA (1)...(19): siRNA sense strand
aaagauggcagaauucaug

SEQ ID NO: 1064525 - RNA, 19 nt, Homo sapiens
  misc_RNA (1)...(19): siRNA sense strand
uaacggucauugcugaaga

SEQ ID NO: 1064526 - RNA, 19 nt, Homo sapiens
  misc_RNA (1)...(19): siRNA sense strand
gaaaucacacaaacaaguc

SEQ ID NO: 1064527 - RNA, 19 nt, Homo sapiens
  misc_RNA (1)...(19): siRNA sense strand
ggccauaaaugagccuauu

SEQ ID NO: 1064528 - RNA, 19 nt, Homo sapiens
  misc_RNA (1)...(19): siRNA sense strand
gaaguuuggaggccauaaa

SEQ ID NO: 1064529 - RNA, 19 nt, Homo sapiens
  misc_RNA (1)...(19): siRNA sense strand
ggacagaaggugaaaauga

SEQ ID NO: 1064530 - RNA, 19 nt, Homo sapiens
  misc_RNA (1)...(19): siRNA sense strand
gcuaaagcaguuuccagua

SEQ ID NO: 1064531 - RNA, 19 nt, Homo sapiens
  misc_RNA (1)...(19): siRNA sense strand
ccaccaaacaccaaagauu

SEQ ID NO: 1064532 - RNA, 19 nt, Homo sapiens
  misc_RNA (1)...(19): siRNA sense strand
guuagaaagugggacauau

SEQ ID NO: 1064533 - RNA, 19 nt, Homo sapiens
  misc_RNA (1)...(19): siRNA sense strand
gcccuaugauguugucuug

SEQ ID NO: 1064534 - RNA, 19 nt, Homo sapiens
  misc_RNA (1)...(19): siRNA sense strand
ugauggaauuccuguuaaa

SEQ ID NO: 1064535 - RNA, 19 nt, Homo sapiens
  misc_RNA (1)...(19): siRNA sense strand
ggagauagaccugaugagu

SEQ ID NO: 1064536 - RNA, 19 nt, Homo sapiens
  misc_RNA (1)...(19): siRNA sense strand
ccucuuugauaaugaguuu

SEQ ID NO: 1064537 - RNA, 19 nt, Homo sapiens
  misc_RNA (1)...(19): siRNA sense strand
ugaagacugugaagaugga

SEQ ID NO: 1064538 - RNA, 19 nt, Homo sapiens
  misc_RNA (1)...(19): siRNA sense strand
ugaaacccgagcaacauua

SEQ ID NO: 1064539 - RNA, 19 nt, Homo sapiens
  misc_RNA (1)...(19): siRNA sense strand
gaaaguuggagaucauauc

SEQ ID NO: 1064540 - RNA, 19 nt, Homo sapiens
  misc_RNA (1)...(19): siRNA sense strand
ucucaggccuucauuucaa

SEQ ID NO: 1064541 - RNA, 19 nt, Homo sapiens
  misc_RNA (1)...(19): siRNA sense strand
cagcaagugaucagagaua

SEQ ID NO: 1064542 - RNA, 19 nt, Homo sapiens
  misc_RNA (1)...(19): siRNA sense strand
gcaagugagcagagaguau

SEQ ID NO: 1064543 - RNA, 19 nt, Homo sapiens
  misc_RNA (1)...(19): siRNA sense strand
cgcaguaauuucaguugua

SEQ ID NO: 1064544 - RNA, 19 nt, Homo sapiens
  misc_RNA (1)...(19): siRNA sense strand
uaaagggaaaucacacaaa

SEQ ID NO: 1064545 - RNA, 19 nt, Homo sapiens
  misc_RNA (1)...(19): siRNA sense strand
gggaaauggccuacacuga

SEQ ID NO: 1064546 - RNA, 19 nt, Homo sapiens
  misc_RNA (1)...(19): siRNA sense strand
gaaccuacacaaggaauca

SEQ ID NO: 1064547 - RNA, 19 nt, Homo sapiens
  misc_RNA (1)...(19): siRNA sense strand
gauggcagaauucauguug

SEQ ID NO: 1064548 - RNA, 19 nt, Homo sapiens
  misc_RNA (1)...(19): siRNA sense strand
caggaguggauuauaauuu

SEQ ID NO: 1064549 - RNA, 19 nt, Homo sapiens
  misc_RNA (1)...(19): siRNA sense strand
gcagucggcacaaucagaa

SEQ ID NO: 1064550 - RNA, 19 nt, Homo sapiens
  misc_RNA (1)...(19): siRNA sense strand
ggguuuggguuugcaauug

SEQ ID NO: 1064551 - RNA, 19 nt, Homo sapiens
  misc_RNA (1)...(19): siRNA sense strand
guccagauguuucaauugg

SEQ ID NO: 1064552 - RNA, 19 nt, Homo sapiens
  misc_RNA (1)...(19): siRNA sense strand
guuaggacagguugaaauu

SEQ ID NO: 1064553 - RNA, 19 nt, Homo sapiens
  misc_RNA (1)...(19): siRNA sense strand
gaagacuguuccaaguuac

SEQ ID NO: 1064554 - RNA, 19 nt, Homo sapiens
  misc_RNA (1)...(19): siRNA sense strand
cagcagaacccagcccuuu

SEQ ID NO: 1064555 - RNA, 19 nt, Homo sapiens
  misc_RNA (1)...(19): siRNA sense strand
agagaggcauucugaguca

SEQ ID NO: 1064556 - RNA, 19 nt, Homo sapiens
  misc_RNA (1)...(19): siRNA sense strand
aaagggaaaucacacaaac

SEQ ID NO: 1064557 - RNA, 19 nt, Homo sapiens
  misc_RNA (1)...(19): siRNA sense strand
aggaguggauuauaauuuc

SEQ ID NO: 1064558 - RNA, 19 nt, Homo sapiens
  misc_RNA (1)...(19): siRNA sense strand
aaacaaauagcuccaugga

SEQ ID NO: 1064559 - RNA, 19 nt, Homo sapiens
  misc_RNA (1)...(19): siRNA sense strand
uaccugaaaucuaagacuu

SEQ ID NO: 1064560 - RNA, 19 nt, Homo sapiens
  misc_RNA (1)...(19): siRNA sense strand
aauaaagauuugcggcauu

SEQ ID NO: 1064561 - RNA, 19 nt, Homo sapiens
  misc_RNA (1)...(19): siRNA sense strand
ggacagaagugcccuagaa

SEQ ID NO: 1064562 - RNA, 19 nt, Homo sapiens
  misc_RNA (1)...(19): siRNA sense strand
gaucauaucucugcaguga

SEQ ID NO: 1064563 - RNA, 19 nt, Homo sapiens
  misc_RNA (1)...(19): siRNA sense strand
cgaagacgcugaagaagaa

SEQ ID NO: 1064564 - RNA, 19 nt, Homo sapiens
  misc_RNA (1)...(19): siRNA sense strand
gauggaaacuucuauggaa

SEQ ID NO: 1064565 - RNA, 19 nt, Homo sapiens
  misc_RNA (1)...(19): siRNA sense strand
ugaagacuguuccaaguua

SEQ ID NO: 1064566 - RNA, 19 nt, Homo sapiens
  misc_RNA (1)...(19): siRNA sense strand
gaagauaaaccaccaaaca

SEQ ID NO: 1064567 - RNA, 19 nt, Homo sapiens
  misc_RNA (1)...(19): siRNA sense strand
gaaauggccuacacugaca

SEQ ID NO: 1064568 - RNA, 19 nt, Homo sapiens
  misc_RNA (1)...(19): siRNA sense strand
ggaaauaaaguucuucuuc

SEQ ID NO: 1064569 - RNA, 19 nt, Homo sapiens
  misc_RNA (1)...(19): siRNA sense strand
gaaaagaugucuccacuuc

SEQ ID NO: 1064570 - RNA, 19 nt, Homo sapiens
  misc_RNA (1)...(19): siRNA sense strand
caggcaaagucauuaauaa

SEQ ID NO: 1064571 - RNA, 19 nt, Homo sapiens
  misc_RNA (1)...(19): siRNA sense strand
ggauagcucucuuccugaa

SEQ ID NO: 1064572 - RNA, 19 nt, Homo sapiens
  misc_RNA (1)...(19): siRNA sense strand
ggaagaagaugaggacaag

SEQ ID NO: 1064573 - RNA, 19 nt, Homo sapiens
  misc_RNA (1)...(19): siRNA sense strand
gaugaagacuguuccaagu

SEQ ID NO: 1064574 - RNA, 19 nt, Homo sapiens
  misc_RNA (1)...(19): siRNA sense strand
ggagagacuugcaugaauc

SEQ ID NO: 1064575 - RNA, 19 nt, Homo sapiens
  misc_RNA (1)...(19): siRNA sense strand
ccauggacuuuagaaauua

SEQ ID NO: 1064576 - RNA, 19 nt, Homo sapiens
  misc_RNA (1)...(19): siRNA sense strand
gugacuaucccuuugauua

SEQ ID NO: 1064577 - RNA, 19 nt, Homo sapiens
  misc_RNA (1)...(19): siRNA sense strand
ccagauguuucaauuggua

SEQ ID NO: 1064578 - RNA, 19 nt, Homo sapiens
  misc_RNA (1)...(19): siRNA sense strand
uaccaggaguggauuauaa

SEQ ID NO: 1064579 - RNA, 19 nt, Homo sapiens
  misc_RNA (1)...(19): siRNA sense strand
gaccugaccagucuauaua

SEQ ID NO: 1064580 - RNA, 19 nt, Homo sapiens
  misc_RNA (1)...(19): siRNA sense strand
gaaagugggacauaugaug

SEQ ID NO: 1064581 - RNA, 19 nt, Homo sapiens
  misc_RNA (1)...(19): siRNA sense strand
acacagggaugaucuacuu

SEQ ID NO: 1064582 - RNA, 19 nt, Homo sapiens
  misc_RNA (1)...(19): siRNA sense strand
ccgcgcagcugaugaacua

SEQ ID NO: 1064583 - RNA, 19 nt, Homo sapiens
  misc_RNA (1)...(19): siRNA sense strand
agagauccaucccagcuua

SEQ ID NO: 1064584 - RNA, 19 nt, Homo sapiens
  misc_RNA (1)...(19): siRNA sense strand
ccugaaaucuaagacuuua

SEQ ID NO: 1064585 - RNA, 19 nt, Homo sapiens
  misc_RNA (1)...(19): siRNA sense strand
auaaagauuugcggcauua

SEQ ID NO: 1064586 - RNA, 19 nt, Homo sapiens
  misc_RNA (1)...(19): siRNA sense strand
gggagagacuugcaugaau

SEQ ID NO: 1064587 - RNA, 19 nt, Homo sapiens
  misc_RNA (1)...(19): siRNA sense strand
uuaccuaagucuucaguuu

SEQ ID NO: 1064588 - RNA, 19 nt, Homo sapiens
  misc_RNA (1)...(19): siRNA sense strand
ggucauugcugaagaagag

SEQ ID NO: 1064589 - RNA, 19 nt, Homo sapiens
  misc_RNA (1)...(19): siRNA sense strand
gaaaccaggcaaagucauu

SEQ ID NO: 1064590 - RNA, 19 nt, Homo sapiens
  misc_RNA (1)...(19): siRNA sense strand
ggaaaucacacaaacaagu

SEQ ID NO: 1064591 - RNA, 19 nt, Homo sapiens
  misc_RNA (1)...(19): siRNA sense strand
agauagaccugaugaguuc

SEQ ID NO: 1064592 - RNA, 19 nt, Homo sapiens
  misc_RNA (1)...(19): siRNA sense strand
gaaacccgagcaacauuaa

SEQ ID NO: 1064593 - RNA, 19 nt, Homo sapiens
  misc_RNA (1)...(19): siRNA sense strand
gaauuuaacacaucuccaa

SEQ ID NO: 1064594 - RNA, 19 nt, Homo sapiens
  misc_RNA (1)...(19): siRNA sense strand
gaugcagaaucucaaagaa

SEQ ID NO: 1064595 - RNA, 19 nt, Homo sapiens
  misc_RNA (1)...(19): siRNA sense strand
gagauagaccugaugaguu

SEQ ID NO: 1064596 - RNA, 19 nt, Homo sapiens
  misc_RNA (1)...(19): siRNA sense strand
caaguccucuuugauaaug

SEQ ID NO: 1064597 - RNA, 19 nt, Homo sapiens
  misc_RNA (1)...(19): siRNA sense strand
acacaaggaaucacacaua

SEQ ID NO: 1064598 - RNA, 19 nt, Homo sapiens
  misc_RNA (1)...(19): siRNA sense strand
gcugauguaccauugcuua

SEQ ID NO: 1064599 - RNA, 19 nt, Homo sapiens
  misc_RNA (1)...(19): siRNA sense strand
gacauaugauggaaacuuc

SEQ ID NO: 1064600 - RNA, 19 nt, Homo sapiens
  misc_RNA (1)...(19): siRNA sense strand
ccuagaaggugaaauugga

SEQ ID NO: 1064601 - RNA, 19 nt, Homo sapiens
  misc_RNA (1)...(19): siRNA sense strand
caccaaacaccaaagauuu

SEQ ID NO: 1064602 - RNA, 19 nt, Homo sapiens
  misc_RNA (1)...(19): siRNA sense strand
guuauccacuuccugauga

SEQ ID NO: 1064603 - RNA, 19 nt, Homo sapiens
  misc_RNA (1)...(19): siRNA sense strand
caaguuacaaccaaacaaa

SEQ ID NO: 1064604 - RNA, 19 nt, Homo sapiens
  misc_RNA (1)...(19): siRNA sense strand
uccauggacuuuagaaauu

SEQ ID NO: 1064605 - RNA, 19 nt, Homo sapiens
  misc_RNA (1)...(19): siRNA sense strand
gcaguaauuucaguuguag

SEQ ID NO: 1064606 - RNA, 19 nt, Homo sapiens
  misc_RNA (1)...(19): siRNA sense strand
gauguaccauugcuuaucu

SEQ ID NO: 1064607 - RNA, 19 nt, Homo sapiens
  misc_RNA (1)...(19): siRNA sense strand
cuaaagcaguuuccaguag

SEQ ID NO: 1064608 - RNA, 19 nt, Homo sapiens
  misc_RNA (1)...(19): siRNA sense strand
gaaauugggucuucaaaac

SEQ ID NO: 1064609 - RNA, 19 nt, Homo sapiens
  misc_RNA (1)...(19): siRNA sense strand
ggacauaugauggaaacuu

SEQ ID NO: 1064610 - RNA, 19 nt, Homo sapiens
  misc_RNA (1)...(19): siRNA sense strand
ucauaucucugcagugaau

SEQ ID NO: 1064611 - RNA, 19 nt, Homo sapiens
  misc_RNA (1)...(19): siRNA sense strand
gggagcagcugagaaagau

SEQ ID NO: 1064612 - RNA, 19 nt, Homo sapiens
  misc_RNA (1)...(19): siRNA sense strand
ggaccugaccagucuauau

SEQ ID NO: 1064613 - RNA, 19 nt, Homo sapiens
  misc_RNA (1)...(19): siRNA sense strand
gaugaguuccuacaaguga

SEQ ID NO: 1064614 - RNA, 19 nt, Homo sapiens
  misc_RNA (1)...(19): siRNA sense strand
ucagcaagauggaaagaau

SEQ ID NO: 1064615 - RNA, 19 nt, Homo sapiens
  misc_RNA (1)...(19): siRNA sense strand
ggaguggauuauaauuuca

SEQ ID NO: 1064616 - RNA, 19 nt, Homo sapiens
  misc_RNA (1)...(19): siRNA sense strand
gauagucaguggugucaag

SEQ ID NO: 1064617 - RNA, 19 nt, Homo sapiens
  misc_RNA (1)...(19): siRNA sense strand
ugacuaucccuuugauuaa

SEQ ID NO: 1064618 - RNA, 19 nt, Homo sapiens
  misc_RNA (1)...(19): siRNA sense strand
agacaucaauggcaacugu

SEQ ID NO: 1064619 - RNA, 19 nt, Homo sapiens
  misc_RNA (1)...(19): siRNA sense strand
gugcagaauuuaacacauc

SEQ ID NO: 1064620 - RNA, 19 nt, Homo sapiens
  misc_RNA (1)...(19): siRNA sense strand
ccaggcaaagucauuaaua

SEQ ID NO: 1064621 - RNA, 19 nt, Homo sapiens
  misc_RNA (1)...(19): siRNA sense strand
ccugaccagucuauauaua

SEQ ID NO: 1064622 - RNA, 19 nt, Homo sapiens
  misc_RNA (1)...(19): siRNA sense strand
uccaguaggugcugaugua

SEQ ID NO: 1064623 - RNA, 19 nt, Homo sapiens
  misc_RNA (1)...(19): siRNA sense strand
gcacaaugggauuugguuu

SEQ ID NO: 1064624 - RNA, 19 nt, Homo sapiens
  misc_RNA (1)...(19): siRNA sense strand
aaagauggcagaauucaug

SEQ ID NO: 1064625 - RNA, 19 nt, Homo sapiens
  misc_RNA (1)...(19): siRNA sense strand
uaacggucauugcugaaga

SEQ ID NO: 1064626 - RNA, 19 nt, Homo sapiens
  misc_RNA (1)...(19): siRNA sense strand
gaaaucacacaaacaaguc

SEQ ID NO: 1064627 - RNA, 19 nt, Homo sapiens
  misc_RNA (1)...(19): siRNA sense strand
ggccauaaaugagccuauu

SEQ ID NO: 1064628 - RNA, 19 nt, Homo sapiens
  misc_RNA (1)...(19): siRNA sense strand
gaaguuuggaggccauaaa

SEQ ID NO: 1064629 - RNA, 19 nt, Homo sapiens
  misc_RNA (1)...(19): siRNA sense strand
ggacagaaggugaaaauga

SEQ ID NO: 1064630 - RNA, 19 nt, Homo sapiens
  misc_RNA (1)...(19): siRNA sense strand
gcuaaagcaguuuccagua

SEQ ID NO: 1064631 - RNA, 19 nt, Homo sapiens
  misc_RNA (1)...(19): siRNA sense strand
ccaccaaacaccaaagauu

SEQ ID NO: 1064632 - RNA, 19 nt, Homo sapiens
  misc_RNA (1)...(19): siRNA sense strand
guuagaaagugggacauau

SEQ ID NO: 1064633 - RNA, 19 nt, Homo sapiens
  misc_RNA (1)...(19): siRNA sense strand
gcccuaugauguugucuug

SEQ ID NO: 1064634 - RNA, 19 nt, Homo sapiens
  misc_RNA (1)...(19): siRNA sense strand
ugauggaauuccuguuaaa

SEQ ID NO: 1064635 - RNA, 19 nt, Homo sapiens
  misc_RNA (1)...(19): siRNA sense strand
ggagauagaccugaugagu

SEQ ID NO: 1064636 - RNA, 19 nt, Homo sapiens
  misc_RNA (1)...(19): siRNA sense strand
ccucuuugauaaugaguuu

SEQ ID NO: 1064637 - RNA, 19 nt, Homo sapiens
  misc_RNA (1)...(19): siRNA sense strand
ugaagacugugaagaugga

SEQ ID NO: 1064638 - RNA, 19 nt, Homo sapiens
  misc_RNA (1)...(19): siRNA sense strand
ugaaacccgagcaacauua

SEQ ID NO: 1064639 - RNA, 19 nt, Homo sapiens
  misc_RNA (1)...(19): siRNA sense strand
gaaaguuggagaucauauc

SEQ ID NO: 1064640 - RNA, 19 nt, Homo sapiens
  misc_RNA (1)...(19): siRNA sense strand
ucucaggccuucauuucaa

SEQ ID NO: 1064641 - RNA, 19 nt, Homo sapiens
  misc_RNA (1)...(19): siRNA sense strand
cagcaagugaucagagaua

SEQ ID NO: 1064642 - RNA, 19 nt, Homo sapiens
  misc_RNA (1)...(19): siRNA sense strand
gcaagugagcagagaguau

SEQ ID NO: 1064643 - RNA, 19 nt, Homo sapiens
  misc_RNA (1)...(19): siRNA sense strand
cgcaguaauuucaguugua

SEQ ID NO: 1064644 - RNA, 19 nt, Homo sapiens
  misc_RNA (1)...(19): siRNA sense strand
uaaagggaaaucacacaaa

SEQ ID NO: 1064645 - RNA, 19 nt, Homo sapiens
  misc_RNA (1)...(19): siRNA sense strand
gggaaauggccuacacuga

SEQ ID NO: 1064646 - RNA, 19 nt, Homo sapiens
  misc_RNA (1)...(19): siRNA sense strand
gaaccuacacaaggaauca

SEQ ID NO: 1064647 - RNA, 19 nt, Homo sapiens
  misc_RNA (1)...(19): siRNA sense strand
gauggcagaauucauguug

SEQ ID NO: 1064648 - RNA, 19 nt, Homo sapiens
  misc_RNA (1)...(19): siRNA sense strand
caggaguggauuauaauuu

SEQ ID NO: 1064649 - RNA, 19 nt, Homo sapiens
  misc_RNA (1)...(19): siRNA sense strand
gcagucggcacaaucagaa

SEQ ID NO: 1064650 - RNA, 19 nt, Homo sapiens
  misc_RNA (1)...(19): siRNA sense strand
ggguuuggguuugcaauug

SEQ ID NO: 1064651 - RNA, 19 nt, Homo sapiens
  misc_RNA (1)...(19): siRNA sense strand
guccagauguuucaauugg

SEQ ID NO: 1064652 - RNA, 19 nt, Homo sapiens
  misc_RNA (1)...(19): siRNA sense strand
guuaggacagguugaaauu

SEQ ID NO: 1064653 - RNA, 19 nt, Homo sapiens
  misc_RNA (1)...(19): siRNA sense strand
gaagacuguuccaaguuac

SEQ ID NO: 1064654 - RNA, 19 nt, Homo sapiens
  misc_RNA (1)...(19): siRNA sense strand
cagcagaacccagcccuuu

SEQ ID NO: 1064655 - RNA, 19 nt, Homo sapiens
  misc_RNA (1)...(19): siRNA sense strand
agagaggcauucugaguca

SEQ ID NO: 1064656 - RNA, 19 nt, Homo sapiens
  misc_RNA (1)...(19): siRNA sense strand
aaagggaaaucacacaaac

SEQ ID NO: 1064657 - RNA, 19 nt, Homo sapiens
  misc_RNA (1)...(19): siRNA sense strand
aggaguggauuauaauuuc

SEQ ID NO: 1064658 - RNA, 19 nt, Homo sapiens
  misc_RNA (1)...(19): siRNA sense strand
aaacaaauagcuccaugga

SEQ ID NO: 1064659 - RNA, 19 nt, Homo sapiens
  misc_RNA (1)...(19): siRNA sense strand
uaccugaaaucuaagacuu

SEQ ID NO: 1064660 - RNA, 19 nt, Homo sapiens
  misc_RNA (1)...(19): siRNA sense strand
aauaaagauuugcggcauu

SEQ ID NO: 1064661 - RNA, 19 nt, Homo sapiens
  misc_RNA (1)...(19): siRNA sense strand
gcucgcgucacuucuaaug

SEQ ID NO: 1064662 - RNA, 19 nt, Homo sapiens
  misc_RNA (1)...(19): siRNA sense strand
gauucaggcucgcgucacu

SEQ ID NO: 1064663 - RNA, 19 nt, Homo sapiens
  misc_RNA (1)...(19): siRNA sense strand
aggcucgcgucacuucuaa

SEQ ID NO: 1064664 - RNA, 19 nt, Homo sapiens
  misc_RNA (1)...(19): siRNA sense strand
cggaggagcucaagaaguu

SEQ ID NO: 1064665 - RNA, 19 nt, Homo sapiens
  misc_RNA (1)...(19): siRNA sense strand
cucaagaaguucaagauga

SEQ ID NO: 1064666 - RNA, 19 nt, Homo sapiens
  misc_RNA (1)...(19): siRNA sense strand
gcucaagaaguucaagaug

SEQ ID NO: 1064667 - RNA, 19 nt, Homo sapiens
  misc_RNA (1)...(19): siRNA sense strand
gcgaggccauccugaaggu

SEQ ID NO: 1064668 - RNA, 19 nt, Homo sapiens
  misc_RNA (1)...(19): siRNA sense strand
gcgcucgggcagcuagaua

SEQ ID NO: 1064669 - RNA, 19 nt, Homo sapiens
  misc_RNA (1)...(19): siRNA sense strand
caccggaggagcucaagaa

SEQ ID NO: 1064670 - RNA, 19 nt, Homo sapiens
  misc_RNA (1)...(19): siRNA sense strand
acaagcuggucgccuccua

SEQ ID NO: 1064671 - RNA, 19 nt, Homo sapiens
  misc_RNA (1)...(19): siRNA sense strand
gagcucaagaaguucaaga

SEQ ID NO: 1064672 - RNA, 19 nt, Homo sapiens
  misc_RNA (1)...(19): siRNA sense strand
gcuggucgccuccuacuac

SEQ ID NO: 1064673 - RNA, 19 nt, Homo sapiens
  misc_RNA (1)...(19): siRNA sense strand
gaggagcucaagaaguuca

SEQ ID NO: 1064674 - RNA, 19 nt, Homo sapiens
  misc_RNA (1)...(19): siRNA sense strand
ucguggaccucaccgacaa

SEQ ID NO: 1064675 - RNA, 19 nt, Homo sapiens
  misc_RNA (1)...(19): siRNA sense strand
uccugaaggugcuggagaa

SEQ ID NO: 1064676 - RNA, 19 nt, Homo sapiens
  misc_RNA (1)...(19): siRNA sense strand
ccaauuccauuuccaagau

SEQ ID NO: 1064677 - RNA, 19 nt, Homo sapiens
  misc_RNA (1)...(19): siRNA sense strand
ggcaguggcuguugguuuc

SEQ ID NO: 1064678 - RNA, 19 nt, Homo sapiens
  misc_RNA (1)...(19): siRNA sense strand
ugacagcgaugaauuagcu

SEQ ID NO: 1064679 - RNA, 19 nt, Homo sapiens
  misc_RNA (1)...(19): siRNA sense strand
uccaagauuuccaugguuu

SEQ ID NO: 1064680 - RNA, 19 nt, Homo sapiens
  misc_RNA (1)...(19): siRNA sense strand
cagugacagcgaugaauua

SEQ ID NO: 1064681 - RNA, 19 nt, Homo sapiens
  misc_RNA (1)...(19): siRNA sense strand
caauuccauuuccaagauu

SEQ ID NO: 1064682 - RNA, 19 nt, Homo sapiens
  misc_RNA (1)...(19): siRNA sense strand
uguguucccuuacccauau

SEQ ID NO: 1064683 - RNA, 19 nt, Homo sapiens
  misc_RNA (1)...(19): siRNA sense strand
ccaagauuuccaugguuua

SEQ ID NO: 1064684 - RNA, 19 nt, Homo sapiens
  misc_RNA (1)...(19): siRNA sense strand
aaaguucuccuccugauca

SEQ ID NO: 1064685 - RNA, 19 nt, Homo sapiens
  misc_RNA (1)...(19): siRNA sense strand
ucagugacagcgaugaauu

SEQ ID NO: 1064686 - RNA, 19 nt, Homo sapiens
  misc_RNA (1)...(19): siRNA sense strand
gaaaguucuccuccugauc

SEQ ID NO: 1064687 - RNA, 19 nt, Homo sapiens
  misc_RNA (1)...(19): siRNA sense strand
gcuguugguuucccagucu

SEQ ID NO: 1064688 - RNA, 19 nt, Homo sapiens
  misc_RNA (1)...(19): siRNA sense strand
agacguaauuuuccuauuc

SEQ ID NO: 1064689 - RNA, 19 nt, Homo sapiens
  misc_RNA (1)...(19): siRNA sense strand
ccugaucacagccaucuug

SEQ ID NO: 1064690 - RNA, 19 nt, Homo sapiens
  misc_RNA (1)...(19): siRNA sense strand
ccaccaauuccauuuccaa

SEQ ID NO: 1064691 - RNA, 19 nt, Homo sapiens
  misc_RNA (1)...(19): siRNA sense strand
caagaccaggaacgagaaa

SEQ ID NO: 1064692 - RNA, 19 nt, Homo sapiens
  misc_RNA (1)...(19): siRNA sense strand
uuuccaugguuuagacgua

SEQ ID NO: 1064693 - RNA, 19 nt, Homo sapiens
  misc_RNA (1)...(19): siRNA sense strand
ucaagaccaggaacgagaa

SEQ ID NO: 1064694 - RNA, 19 nt, Homo sapiens
  misc_RNA (1)...(19): siRNA sense strand
caagauuuccaugguuuag

SEQ ID NO: 1064695 - RNA, 19 nt, Homo sapiens
  misc_RNA (1)...(19): siRNA sense strand
uggcaguggcuguugguuu

SEQ ID NO: 1064696 - RNA, 19 nt, Homo sapiens
  misc_RNA (1)...(19): siRNA sense strand
gaauuagcuucaggguuuu

SEQ ID NO: 1064697 - RNA, 19 nt, Homo sapiens
  misc_RNA (1)...(19): siRNA sense strand
ccacuuccaccaauuccau

SEQ ID NO: 1064698 - RNA, 19 nt, Homo sapiens
  misc_RNA (1)...(19): siRNA sense strand
acaaggagcugaaggaaga

SEQ ID NO: 1064699 - RNA, 19 nt, Homo sapiens
  misc_RNA (1)...(19): siRNA sense strand
ggaagaggccuccagguaa

SEQ ID NO: 1064700 - RNA, 19 nt, Homo sapiens
  misc_RNA (1)...(19): siRNA sense strand
gaauaagucguccuacaaa

SEQ ID NO: 1064701 - RNA, 19 nt, Homo sapiens
  misc_RNA (1)...(19): siRNA sense strand
ugaaacaccuagcagagaa

SEQ ID NO: 1064702 - RNA, 19 nt, Homo sapiens
  misc_RNA (1)...(19): siRNA sense strand
ucaucgagcugaacaaaug

SEQ ID NO: 1064703 - RNA, 19 nt, Homo sapiens
  misc_RNA (1)...(19): siRNA sense strand
aagcggagcuccugaaaca

SEQ ID NO: 1064704 - RNA, 19 nt, Homo sapiens
  misc_RNA (1)...(19): siRNA sense strand
gaagagauccagaagaaac

SEQ ID NO: 1064705 - RNA, 19 nt, Homo sapiens
  misc_RNA (1)...(19): siRNA sense strand
gacccuugcugccuacaaa

SEQ ID NO: 1064706 - RNA, 19 nt, Homo sapiens
  misc_RNA (1)...(19): siRNA sense strand
aacaacaacuucaucaaga

SEQ ID NO: 1064707 - RNA, 19 nt, Homo sapiens
  misc_RNA (1)...(19): siRNA sense strand
gaaacgggaacaugagaga

SEQ ID NO: 1064708 - RNA, 19 nt, Homo sapiens
  misc_RNA (1)...(19): siRNA sense strand
acaaagagaagaugaagga

SEQ ID NO: 1064709 - RNA, 19 nt, Homo sapiens
  misc_RNA (1)...(19): siRNA sense strand
gaugaaagccagcggaaag

SEQ ID NO: 1064710 - RNA, 19 nt, Homo sapiens
  misc_RNA (1)...(19): siRNA sense strand
uaagucguccuacaaauau

SEQ ID NO: 1064711 - RNA, 19 nt, Homo sapiens
  misc_RNA (1)...(19): siRNA sense strand
cagagaaacgggaacauga

SEQ ID NO: 1064712 - RNA, 19 nt, Homo sapiens
  misc_RNA (1)...(19): siRNA sense strand
uggaacggcugcaagagaa

SEQ ID NO: 1064713 - RNA, 19 nt, Homo sapiens
  misc_RNA (1)...(19): siRNA sense strand
ugaauaagucguccuacaa

SEQ ID NO: 1064714 - RNA, 19 nt, Homo sapiens
  misc_RNA (1)...(19): siRNA sense strand
auaagucguccuacaaaua

SEQ ID NO: 1064715 - RNA, 19 nt, Homo sapiens
  misc_RNA (1)...(19): siRNA sense strand
gcagagaaacgggaacaug

SEQ ID NO: 1064716 - RNA, 19 nt, Homo sapiens
  misc_RNA (1)...(19): siRNA sense strand
ggaagcggagcuccugaaa

SEQ ID NO: 1064717 - RNA, 19 nt, Homo sapiens
  misc_RNA (1)...(19): siRNA sense strand
gaaacaccuagcagagaaa

SEQ ID NO: 1064718 - RNA, 19 nt, Homo sapiens
  misc_RNA (1)...(19): siRNA sense strand
agagagaggugauccaaaa

SEQ ID NO: 1064719 - RNA, 19 nt, Homo sapiens
  misc_RNA (1)...(19): siRNA sense strand
gagaaacgggaacaugaga

SEQ ID NO: 1064720 - RNA, 19 nt, Homo sapiens
  misc_RNA (1)...(19): siRNA sense strand
gaaagccagcggaaagaca

SEQ ID NO: 1064721 - RNA, 19 nt, Homo sapiens
  misc_RNA (1)...(19): siRNA sense strand
acaacaacuucaucaagau

SEQ ID NO: 1064722 - RNA, 19 nt, Homo sapiens
  misc_RNA (1)...(19): siRNA sense strand
aaacaacaacuucaucaag

SEQ ID NO: 1064723 - RNA, 19 nt, Homo sapiens
  misc_RNA (1)...(19): siRNA sense strand
ggaagagauccagaagaaa

SEQ ID NO: 1064724 - RNA, 19 nt, Homo sapiens
  misc_RNA (1)...(19): siRNA sense strand
gaagccacccuccuuugau

SEQ ID NO: 1064725 - RNA, 19 nt, Homo sapiens
  misc_RNA (1)...(19): siRNA sense strand
gaaaacaacaacuucauca

SEQ ID NO: 1064726 - RNA, 19 nt, Homo sapiens
  misc_RNA (1)...(19): siRNA sense strand
aggaagaggccuccaggua

SEQ ID NO: 1064727 - RNA, 19 nt, Homo sapiens
  misc_RNA (1)...(19): siRNA sense strand
gaagucaucgagcugaaca

SEQ ID NO: 1064728 - RNA, 19 nt, Homo sapiens
  misc_RNA (1)...(19): siRNA sense strand
gggccaauccuuugaaguc

SEQ ID NO: 1064729 - RNA, 19 nt, Homo sapiens
  misc_RNA (1)...(19): siRNA sense strand
gagagagaggugauccaaa

SEQ ID NO: 1064730 - RNA, 19 nt, Homo sapiens
  misc_RNA (1)...(19): siRNA sense strand
ugaagccacccuccuuuga

SEQ ID NO: 1064731 - RNA, 19 nt, Homo sapiens
  misc_RNA (1)...(19): siRNA sense strand
ggccaauccuuugaaguca

SEQ ID NO: 1064732 - RNA, 19 nt, Homo sapiens
  misc_RNA (1)...(19): siRNA sense strand
cugaauuggugcgucauuu

SEQ ID NO: 1064733 - RNA, 19 nt, Homo sapiens
  misc_RNA (1)...(19): siRNA sense strand
aaaaggccauugaggaaaa

SEQ ID NO: 1064734 - RNA, 19 nt, Homo sapiens
  misc_RNA (1)...(19): siRNA sense strand
aauaagucguccuacaaau

SEQ ID NO: 1064735 - RNA, 19 nt, Homo sapiens
  misc_RNA (1)...(19): siRNA sense strand
cagacacgguggaccugaa

SEQ ID NO: 1064736 - RNA, 19 nt, Homo sapiens
  misc_RNA (1)...(19): siRNA sense strand
cugaauaagucguccuaca

SEQ ID NO: 1064737 - RNA, 19 nt, Homo sapiens
  misc_RNA (1)...(19): siRNA sense strand
ccaauccuuugaagucauc

SEQ ID NO: 1064738 - RNA, 19 nt, Homo sapiens
  misc_RNA (1)...(19): siRNA sense strand
gcgaaggaaguaccaggaa

SEQ ID NO: 1064739 - RNA, 19 nt, Homo sapiens
  misc_RNA (1)...(19): siRNA sense strand
aagccacccuccuuugaug

SEQ ID NO: 1064740 - RNA, 19 nt, Homo sapiens
  misc_RNA (1)...(19): siRNA sense strand
aaacaaggagcugaaggaa

SEQ ID NO: 1064741 - RNA, 19 nt, Homo sapiens
  misc_RNA (1)...(19): siRNA sense strand
gugcgucauuuccgacaug

SEQ ID NO: 1064742 - RNA, 19 nt, Homo sapiens
  misc_RNA (1)...(19): siRNA sense strand
ggagacaguguaggaggaa

SEQ ID NO: 1064743 - RNA, 19 nt, Homo sapiens
  misc_RNA (1)...(19): siRNA sense strand
gcgagacccaucccuggaa

SEQ ID NO: 1064744 - RNA, 19 nt, Homo sapiens
  misc_RNA (1)...(19): siRNA sense strand
ggaugaaagccagcggaaa

SEQ ID NO: 1064745 - RNA, 19 nt, Homo sapiens
  misc_RNA (1)...(19): siRNA sense strand
gcaccucgggccaauccuu

SEQ ID NO: 1064746 - RNA, 19 nt, Homo sapiens
  misc_RNA (1)...(19): siRNA sense strand
gauccagaagaaacuagaa

SEQ ID NO: 1064747 - RNA, 19 nt, Homo sapiens
  misc_RNA (1)...(19): siRNA sense strand
ccuuugaagucauccugaa

SEQ ID NO: 1064748 - RNA, 19 nt, Homo sapiens
  misc_RNA (1)...(19): siRNA sense strand
ccaaaaggccauugaggaa

SEQ ID NO: 1064749 - RNA, 19 nt, Homo sapiens
  misc_RNA (1)...(19): siRNA sense strand
agugcugacuggagagaaa

SEQ ID NO: 1064750 - RNA, 19 nt, Homo sapiens
  misc_RNA (1)...(19): siRNA sense strand
ugacuggagagaaagaaga

SEQ ID NO: 1064751 - RNA, 19 nt, Homo sapiens
  misc_RNA (1)...(19): siRNA sense strand
ugaauuggugcgucauuuc

SEQ ID NO: 1064752 - RNA, 19 nt, Homo sapiens
  misc_RNA (1)...(19): siRNA sense strand
guaggaggaaggaugaaag

SEQ ID NO: 1064753 - RNA, 19 nt, Homo sapiens
  misc_RNA (1)...(19): siRNA sense strand
acacgguggaccugaauug

SEQ ID NO: 1064754 - RNA, 19 nt, Homo sapiens
  misc_RNA (1)...(19): siRNA sense strand
ccugaagccacccuccuuu

SEQ ID NO: 1064755 - RNA, 19 nt, Homo sapiens
  misc_RNA (1)...(19): siRNA sense strand
uggaagucaucgagcugaa

SEQ ID NO: 1064756 - RNA, 19 nt, Homo sapiens
  misc_RNA (1)...(19): siRNA sense strand
ugagagagaggugauccaa

SEQ ID NO: 1064757 - RNA, 19 nt, Homo sapiens
  misc_RNA (1)...(19): siRNA sense strand
acccaucccuggaagagau

SEQ ID NO: 1064758 - RNA, 19 nt, Homo sapiens
  misc_RNA (1)...(19): siRNA sense strand
gccaauccuuugaagucau

SEQ ID NO: 1064759 - RNA, 19 nt, Homo sapiens
  misc_RNA (1)...(19): siRNA sense strand
cugaggagcgaaggaagua

SEQ ID NO: 1064760 - RNA, 19 nt, Homo sapiens
  misc_RNA (1)...(19): siRNA sense strand
ggucccagcugaaagauga

SEQ ID NO: 1064761 - RNA, 19 nt, Homo sapiens
  misc_RNA (1)...(19): siRNA sense strand
gcugaaagaugaggacuug

SEQ ID NO: 1064762 - RNA, 19 nt, Homo sapiens
  misc_RNA (1)...(19): siRNA sense strand
gcaagcaaccuuccaaguc

SEQ ID NO: 1064763 - RNA, 19 nt, Homo sapiens
  misc_RNA (1)...(19): siRNA sense strand
ccacaggaaugccacaaca

SEQ ID NO: 1064764 - RNA, 19 nt, Homo sapiens
  misc_RNA (1)...(19): siRNA sense strand
cacaacagcccgcagcaua

SEQ ID NO: 1064765 - RNA, 19 nt, Homo sapiens
  misc_RNA (1)...(19): siRNA sense strand
gugaucgccuccauuguga

SEQ ID NO: 1064766 - RNA, 19 nt, Homo sapiens
  misc_RNA (1)...(19): siRNA sense strand
ucaagugcgugaagaagag

SEQ ID NO: 1064767 - RNA, 19 nt, Homo sapiens
  misc_RNA (1)...(19): siRNA sense strand
ccucaagcacuucaacaaa

SEQ ID NO: 1064768 - RNA, 19 nt, Homo sapiens
  misc_RNA (1)...(19): siRNA sense strand
ugaaagaugaggacuugga

SEQ ID NO: 1064769 - RNA, 19 nt, Homo sapiens
  misc_RNA (1)...(19): siRNA sense strand
caacagcccgcagcauaug

SEQ ID NO: 1064770 - RNA, 19 nt, Homo sapiens
  misc_RNA (1)...(19): siRNA sense strand
ccgcauaccuuggccucaa

SEQ ID NO: 1064771 - RNA, 19 nt, Homo sapiens
  misc_RNA (1)...(19): siRNA sense strand
ccaaguccuucguggcaau

SEQ ID NO: 1064772 - RNA, 19 nt, Homo sapiens
  misc_RNA (1)...(19): siRNA sense strand
cacgagaccuuuggcuuca

SEQ ID NO: 1064773 - RNA, 19 nt, Homo sapiens
  misc_RNA (1)...(19): siRNA sense strand
gccaucauccugcucaugu

SEQ ID NO: 1064774 - RNA, 19 nt, Homo sapiens
  misc_RNA (1)...(19): siRNA sense strand
gccgugaucgccuccauug

SEQ ID NO: 1064775 - RNA, 19 nt, Homo sapiens
  misc_RNA (1)...(19): siRNA sense strand
cgugaucgccuccauugug

SEQ ID NO: 1064776 - RNA, 19 nt, Homo sapiens
  misc_RNA (1)...(19): siRNA sense strand
agacggugcaggccgcaua

SEQ ID NO: 1064777 - RNA, 19 nt, Homo sapiens
  misc_RNA (1)...(19): siRNA sense strand
acaacagcccgcagcauau

SEQ ID NO: 1064778 - RNA, 19 nt, Homo sapiens
  misc_RNA (1)...(19): siRNA sense strand
cgagaccuuuggcuucaag

SEQ ID NO: 1064779 - RNA, 19 nt, Homo sapiens
  misc_RNA (1)...(19): siRNA sense strand
ccugcugccuccucaagug

SEQ ID NO: 1064780 - RNA, 19 nt, Homo sapiens
  misc_RNA (1)...(19): siRNA sense strand
cucaagcacuucaacaaac

SEQ ID NO: 1064781 - RNA, 19 nt, Homo sapiens
  misc_RNA (1)...(19): siRNA sense strand
gcuucaagguggccgugau

SEQ ID NO: 1064782 - RNA, 19 nt, Homo sapiens
  misc_RNA (1)...(19): siRNA sense strand
ugugagcugugccaucauc

SEQ ID NO: 1064783 - RNA, 19 nt, Homo sapiens
  misc_RNA (1)...(19): siRNA sense strand
auugugagcugugccauca

SEQ ID NO: 1064784 - RNA, 19 nt, Homo sapiens
  misc_RNA (1)...(19): siRNA sense strand
ggugcaggccgcauaccuu

SEQ ID NO: 1064785 - RNA, 19 nt, Homo sapiens
  misc_RNA (1)...(19): siRNA sense strand
gcagaaggguucacuguug

SEQ ID NO: 1064786 - RNA, 19 nt, Homo sapiens
  misc_RNA (1)...(19): siRNA sense strand
gagcggugaugaucuguga

SEQ ID NO: 1064787 - RNA, 19 nt, Homo sapiens
  misc_RNA (1)...(19): siRNA sense strand
cgugaaggcucuagguauu

SEQ ID NO: 1064788 - RNA, 19 nt, Homo sapiens
  misc_RNA (1)...(19): siRNA sense strand
caacaugccaggcgccuuu

SEQ ID NO: 1064789 - RNA, 19 nt, Homo sapiens
  misc_RNA (1)...(19): siRNA sense strand
cagaaggguucacuguuga

SEQ ID NO: 1064790 - RNA, 19 nt, Homo sapiens
  misc_RNA (1)...(19): siRNA sense strand
gaaugugguuugcgagaag

SEQ ID NO: 1064791 - RNA, 19 nt, Homo sapiens
  misc_RNA (1)...(19): siRNA sense strand
ccacucacccggcagauau

SEQ ID NO: 1064792 - RNA, 19 nt, Homo sapiens
  misc_RNA (1)...(19): siRNA sense strand
gaaccugugugaggcacuu

SEQ ID NO: 1064793 - RNA, 19 nt, Homo sapiens
  misc_RNA (1)...(19): siRNA sense strand
ugaagggcauggucuacau

SEQ ID NO: 1064794 - RNA, 19 nt, Homo sapiens
  misc_RNA (1)...(19): siRNA sense strand
gggcagaaggguucacugu

SEQ ID NO: 1064795 - RNA, 19 nt, Homo sapiens
  misc_RNA (1)...(19): siRNA sense strand
gcgaugacuucuguuucuu

SEQ ID NO: 1064796 - RNA, 19 nt, Homo sapiens
  misc_RNA (1)...(19): siRNA sense strand
gccaggaguggacguguuu

SEQ ID NO: 1064797 - RNA, 19 nt, Homo sapiens
  misc_RNA (1)...(19): siRNA sense strand
cacuagcgaugacuucugu

SEQ ID NO: 1064798 - RNA, 19 nt, Homo sapiens
  misc_RNA (1)...(19): siRNA sense strand
ccaaccagaaccuguguga

SEQ ID NO: 1064799 - RNA, 19 nt, Homo sapiens
  misc_RNA (1)...(19): siRNA sense strand
gcugauuucggaacacuau

SEQ ID NO: 1064800 - RNA, 19 nt, Homo sapiens
  misc_RNA (1)...(19): siRNA sense strand
agaaugugguuugcgagaa

SEQ ID NO: 1064801 - RNA, 19 nt, Homo sapiens
  misc_RNA (1)...(19): siRNA sense strand
gcgagaaggcagcaacauc

SEQ ID NO: 1064802 - RNA, 19 nt, Homo sapiens
  misc_RNA (1)...(19): siRNA sense strand
aggaugggcuguacaugca

SEQ ID NO: 1064803 - RNA, 19 nt, Homo sapiens
  misc_RNA (1)...(19): siRNA sense strand
ugaaggcucuagguauugg

SEQ ID NO: 1064804 - RNA, 19 nt, Homo sapiens
  misc_RNA (1)...(19): siRNA sense strand
agacauucgugaggcagaa

SEQ ID NO: 1064805 - RNA, 19 nt, Homo sapiens
  misc_RNA (1)...(19): siRNA sense strand
gcgcaugaaacagcugauu

SEQ ID NO: 1064806 - RNA, 19 nt, Homo sapiens
  misc_RNA (1)...(19): siRNA sense strand
ggcagaaggguucacuguu

SEQ ID NO: 1064807 - RNA, 19 nt, Homo sapiens
  misc_RNA (1)...(19): siRNA sense strand
gacacucaacuucaacaug

SEQ ID NO: 1064808 - RNA, 19 nt, Homo sapiens
  misc_RNA (1)...(19): siRNA sense strand
cuagcgaugacuucuguuu

SEQ ID NO: 1064809 - RNA, 19 nt, Homo sapiens
  misc_RNA (1)...(19): siRNA sense strand
cgcaugaaacagcugauuu

SEQ ID NO: 1064810 - RNA, 19 nt, Homo sapiens
  misc_RNA (1)...(19): siRNA sense strand
gcggugaugaucugugaug

SEQ ID NO: 1064811 - RNA, 19 nt, Homo sapiens
  misc_RNA (1)...(19): siRNA sense strand
gcuauggcuggaucuguga

SEQ ID NO: 1064812 - RNA, 19 nt, Homo sapiens
  misc_RNA (1)...(19): siRNA sense strand
gugcacgggcugcucaaga

SEQ ID NO: 1064813 - RNA, 19 nt, Homo sapiens
  misc_RNA (1)...(19): siRNA sense strand
gugaaggcucuagguauug

SEQ ID NO: 1064814 - RNA, 19 nt, Homo sapiens
  misc_RNA (1)...(19): siRNA sense strand
caggcgccuuugugcauga

SEQ ID NO: 1064815 - RNA, 19 nt, Homo sapiens
  misc_RNA (1)...(19): siRNA sense strand
ugggagcggugaugaucug

SEQ ID NO: 1064816 - RNA, 19 nt, Homo sapiens
  misc_RNA (1)...(19): siRNA sense strand
gagaagcuguugauaguau

SEQ ID NO: 1064817 - RNA, 19 nt, Homo sapiens
  misc_RNA (1)...(19): siRNA sense strand
cgaaucaacuccaguguga

SEQ ID NO: 1064818 - RNA, 19 nt, Homo sapiens
  misc_RNA (1)...(19): siRNA sense strand
ugaaucagaucaucaagga

SEQ ID NO: 1064819 - RNA, 19 nt, Homo sapiens
  misc_RNA (1)...(19): siRNA sense strand
uaacgggagugacaacaug

SEQ ID NO: 1064820 - RNA, 19 nt, Homo sapiens
  misc_RNA (1)...(19): siRNA sense strand
gaagaaaauugcagaaaag

SEQ ID NO: 1064821 - RNA, 19 nt, Homo sapiens
  misc_RNA (1)...(19): siRNA sense strand
gccaacgucuuccgaauca

SEQ ID NO: 1064822 - RNA, 19 nt, Homo sapiens
  misc_RNA (1)...(19): siRNA sense strand
gaucaagugcugcuuccua

SEQ ID NO: 1064823 - RNA, 19 nt, Homo sapiens
  misc_RNA (1)...(19): siRNA sense strand
gcuauggaguggugcagaa

SEQ ID NO: 1064824 - RNA, 19 nt, Homo sapiens
  misc_RNA (1)...(19): siRNA sense strand
gcaaggagaagcuguugau

SEQ ID NO: 1064825 - RNA, 19 nt, Homo sapiens
  misc_RNA (1)...(19): siRNA sense strand
cagaugccauucagugcua

SEQ ID NO: 1064826 - RNA, 19 nt, Homo sapiens
  misc_RNA (1)...(19): siRNA sense strand
gcagauggagagcaacuug

SEQ ID NO: 1064827 - RNA, 19 nt, Homo sapiens
  misc_RNA (1)...(19): siRNA sense strand
aggagaagcuguugauagu

SEQ ID NO: 1064828 - RNA, 19 nt, Homo sapiens
  misc_RNA (1)...(19): siRNA sense strand
ugaaugcgcugggcuacug

SEQ ID NO: 1064829 - RNA, 19 nt, Homo sapiens
  misc_RNA (1)...(19): siRNA sense strand
caagugcugcuuccuauca

SEQ ID NO: 1064830 - RNA, 19 nt, Homo sapiens
  misc_RNA (1)...(19): siRNA sense strand
uugccgagcuggcugauga

SEQ ID NO: 1064831 - RNA, 19 nt, Homo sapiens
  misc_RNA (1)...(19): siRNA sense strand
gcggagccuucaguccuua

SEQ ID NO: 1064832 - RNA, 19 nt, Homo sapiens
  misc_RNA (1)...(19): siRNA sense strand
ggagaagcuguugauagua

SEQ ID NO: 1064833 - RNA, 19 nt, Homo sapiens
  misc_RNA (1)...(19): siRNA sense strand
gauguuggaccgaguaugg

SEQ ID NO: 1064834 - RNA, 19 nt, Homo sapiens
  misc_RNA (1)...(19): siRNA sense strand
ccuaucagcuggagucacu

SEQ ID NO: 1064835 - RNA, 19 nt, Homo sapiens
  misc_RNA (1)...(19): siRNA sense strand
gcucucagaugccauucag

SEQ ID NO: 1064836 - RNA, 19 nt, Homo sapiens
  misc_RNA (1)...(19): siRNA sense strand
caaggagaagcuguugaua

SEQ ID NO: 1064837 - RNA, 19 nt, Homo sapiens
  misc_RNA (1)...(19): siRNA sense strand
cgagcuggcugaugaugag

SEQ ID NO: 1064838 - RNA, 19 nt, Homo sapiens
  misc_RNA (1)...(19): siRNA sense strand
gaagcuguugauaguauug

SEQ ID NO: 1064839 - RNA, 19 nt, Homo sapiens
  misc_RNA (1)...(19): siRNA sense strand
gcacaaguggcgggaccua

SEQ ID NO: 1064840 - RNA, 19 nt, Homo sapiens
  misc_RNA (1)...(19): siRNA sense strand
ucacugcccugcuugucau

SEQ ID NO: 1064841 - RNA, 19 nt, Homo sapiens
  misc_RNA (1)...(19): siRNA sense strand
gaugaugagaaggucuuua

SEQ ID NO: 1064842 - RNA, 19 nt, Homo sapiens
  misc_RNA (1)...(19): siRNA sense strand
ccgaggugcugguguccaa

SEQ ID NO: 1064843 - RNA, 19 nt, Homo sapiens
  misc_RNA (1)...(19): siRNA sense strand
gagcaaggagaagcuguug

SEQ ID NO: 1064844 - RNA, 19 nt, Homo sapiens
  misc_RNA (1)...(19): siRNA sense strand
gagaccaacaagaccauug

SEQ ID NO: 1064845 - RNA, 19 nt, Homo sapiens
  misc_RNA (1)...(19): siRNA sense strand
ggcaccaacuccagagaca

SEQ ID NO: 1064846 - RNA, 19 nt, Homo sapiens
  misc_RNA (1)...(19): siRNA sense strand
ucccggacaucacugaaga

SEQ ID NO: 1064847 - RNA, 19 nt, Homo sapiens
  misc_RNA (1)...(19): siRNA sense strand
uggagucacugcccugcuu

SEQ ID NO: 1064848 - RNA, 19 nt, Homo sapiens
  misc_RNA (1)...(19): siRNA sense strand
agaagcuguugauaguauu

SEQ ID NO: 1064849 - RNA, 19 nt, Homo sapiens
  misc_RNA (1)...(19): siRNA sense strand
gaugucggccaacgucuuc

SEQ ID NO: 1064850 - RNA, 19 nt, Homo sapiens
  misc_RNA (1)...(19): siRNA sense strand
gaugagaaggucuuuaacg

SEQ ID NO: 1064851 - RNA, 19 nt, Homo sapiens
  misc_RNA (1)...(19): siRNA sense strand
gcacagcaggagaccaaca

SEQ ID NO: 1064852 - RNA, 19 nt, Homo sapiens
  misc_RNA (1)...(19): siRNA sense strand
augaugagaaggucuuuaa

SEQ ID NO: 1064853 - RNA, 19 nt, Homo sapiens
  misc_RNA (1)...(19): siRNA sense strand
caacuccagagacacaaga

SEQ ID NO: 1064854 - RNA, 19 nt, Homo sapiens
  misc_RNA (1)...(19): siRNA sense strand
caacuugcuggaugugaau

SEQ ID NO: 1064855 - RNA, 19 nt, Homo sapiens
  misc_RNA (1)...(19): siRNA sense strand
ccaccucuguccgaaagug

SEQ ID NO: 1064856 - RNA, 19 nt, Homo sapiens
  misc_RNA (1)...(19): siRNA sense strand
ggugucagagcaaggagaa

SEQ ID NO: 1064857 - RNA, 19 nt, Homo sapiens
  misc_RNA (1)...(19): siRNA sense strand
cagcaggagaccaacaaga

SEQ ID NO: 1064858 - RNA, 19 nt, Homo sapiens
  misc_RNA (1)...(19): siRNA sense strand
aaggagaagcuguugauag

SEQ ID NO: 1064859 - RNA, 19 nt, Homo sapiens
  misc_RNA (1)...(19): siRNA sense strand
cggcacagcaggagaccaa

SEQ ID NO: 1064860 - RNA, 19 nt, Homo sapiens
  misc_RNA (1)...(19): siRNA sense strand
agaagaggaagcccaacuu

SEQ ID NO: 1064861 - RNA, 19 nt, Homo sapiens
  misc_RNA (1)...(19): siRNA sense strand
ccucaucacccaccauugg

SEQ ID NO: 1064862 - RNA, 19 nt, Homo sapiens
  misc_RNA (1)...(19): siRNA sense strand
ccagcuccgugaagcagau

SEQ ID NO: 1064863 - RNA, 19 nt, Homo sapiens
  misc_RNA (1)...(19): siRNA sense strand
cggccaacgucuuccgaau

SEQ ID NO: 1064864 - RNA, 19 nt, Homo sapiens
  misc_RNA (1)...(19): siRNA sense strand
cuagauguuggaccgagua

SEQ ID NO: 1064865 - RNA, 19 nt, Homo sapiens
  misc_RNA (1)...(19): siRNA sense strand
aucaagugcugcuuccuau

SEQ ID NO: 1064866 - RNA, 19 nt, Homo sapiens
  misc_RNA (1)...(19): siRNA sense strand
gagcaggugguggccaaga

SEQ ID NO: 1064867 - RNA, 19 nt, Homo sapiens
  misc_RNA (1)...(19): siRNA sense strand
guauugaagccagccuuga

SEQ ID NO: 1064868 - RNA, 19 nt, Homo sapiens
  misc_RNA (1)...(19): siRNA sense strand
gcaauggcagccugacuuu

SEQ ID NO: 1064869 - RNA, 19 nt, Homo sapiens
  misc_RNA (1)...(19): siRNA sense strand
caaccacccuugccacuac

SEQ ID NO: 1064870 - RNA, 19 nt, Homo sapiens
  misc_RNA (1)...(19): siRNA sense strand
ccacuacuccuggugcuua

SEQ ID NO: 1064871 - RNA, 19 nt, Homo sapiens
  misc_RNA (1)...(19): siRNA sense strand
guucaacucugagcuguuc

SEQ ID NO: 1064872 - RNA, 19 nt, Homo sapiens
  misc_RNA (1)...(19): siRNA sense strand
ugucaaaacuacugcaaua

SEQ ID NO: 1064873 - RNA, 19 nt, Homo sapiens
  misc_RNA (1)...(19): siRNA sense strand
caaaacuacugcaauaugu

SEQ ID NO: 1064874 - RNA, 19 nt, Homo sapiens
  misc_RNA (1)...(19): siRNA sense strand
ggacaccaggguacacaug

SEQ ID NO: 1064875 - RNA, 19 nt, Homo sapiens
  misc_RNA (1)...(19): siRNA sense strand
ccacugcggacccaugcua

SEQ ID NO: 1064876 - RNA, 19 nt, Homo sapiens
  misc_RNA (1)...(19): siRNA sense strand
gacccuagccagccuaucu

SEQ ID NO: 1064877 - RNA, 19 nt, Homo sapiens
  misc_RNA (1)...(19): siRNA sense strand
acaugagccuucggaggua

SEQ ID NO: 1064878 - RNA, 19 nt, Homo sapiens
  misc_RNA (1)...(19): siRNA sense strand
gacaccaggguacacauga

SEQ ID NO: 1064879 - RNA, 19 nt, Homo sapiens
  misc_RNA (1)...(19): siRNA sense strand
gcugccgguucaacucuga

SEQ ID NO: 1064880 - RNA, 19 nt, Homo sapiens
  misc_RNA (1)...(19): siRNA sense strand
ucugucagcuugcgcuucu

SEQ ID NO: 1064881 - RNA, 19 nt, Homo sapiens
  misc_RNA (1)...(19): siRNA sense strand
caccuuggcgccagggaaa

SEQ ID NO: 1064882 - RNA, 19 nt, Homo sapiens
  misc_RNA (1)...(19): siRNA sense strand
guaacucucugaaagauga

SEQ ID NO: 1064883 - RNA, 19 nt, Homo sapiens
  misc_RNA (1)...(19): siRNA sense strand
gaaccaaacgcagcacuua

SEQ ID NO: 1064884 - RNA, 19 nt, Homo sapiens
  misc_RNA (1)...(19): siRNA sense strand
caaaucaacuggaccuugu

SEQ ID NO: 1064885 - RNA, 19 nt, Homo sapiens
  misc_RNA (1)...(19): siRNA sense strand
gaucaaggaauucaagaaa

SEQ ID NO: 1064886 - RNA, 19 nt, Homo sapiens
  misc_RNA (1)...(19): siRNA sense strand
cgaaugugaucaaggaauu

SEQ ID NO: 1064887 - RNA, 19 nt, Homo sapiens
  misc_RNA (1)...(19): siRNA sense strand
gggcgaaugugaucaagga

SEQ ID NO: 1064888 - RNA, 19 nt, Homo sapiens
  misc_RNA (1)...(19): siRNA sense strand
gaagagguguuggacuguu

SEQ ID NO: 1064889 - RNA, 19 nt, Homo sapiens
  misc_RNA (1)...(19): siRNA sense strand
ggaaaguggagacaaauca

SEQ ID NO: 1064890 - RNA, 19 nt, Homo sapiens
  misc_RNA (1)...(19): siRNA sense strand
ucaaggaauucaagaaagu

SEQ ID NO: 1064891 - RNA, 19 nt, Homo sapiens
  misc_RNA (1)...(19): siRNA sense strand
aaacuuugccgcuugcuaa

SEQ ID NO: 1064892 - RNA, 19 nt, Homo sapiens
  misc_RNA (1)...(19): siRNA sense strand
gaaaguggagacaaaucaa

SEQ ID NO: 1064893 - RNA, 19 nt, Homo sapiens
  misc_RNA (1)...(19): siRNA sense strand
ggucucggcuuguacauac

SEQ ID NO: 1064894 - RNA, 19 nt, Homo sapiens
  misc_RNA (1)...(19): siRNA sense strand
gcaaauacccgaggaacca

SEQ ID NO: 1064895 - RNA, 19 nt, Homo sapiens
  misc_RNA (1)...(19): siRNA sense strand
guguuggacuguuuacauu

SEQ ID NO: 1064896 - RNA, 19 nt, Homo sapiens
  misc_RNA (1)...(19): siRNA sense strand
ggguaacucucugaaagau

SEQ ID NO: 1064897 - RNA, 19 nt, Homo sapiens
  misc_RNA (1)...(19): siRNA sense strand
aagagguguuggacuguuu

SEQ ID NO: 1064898 - RNA, 19 nt, Homo sapiens
  misc_RNA (1)...(19): siRNA sense strand
gcacuuaauggguaacucu

SEQ ID NO: 1064899 - RNA, 19 nt, Homo sapiens
  misc_RNA (1)...(19): siRNA sense strand
ccaaacgcagcacuuaaug

SEQ ID NO: 1064900 - RNA, 19 nt, Homo sapiens
  misc_RNA (1)...(19): siRNA sense strand
ccagauggacagcaaauac

SEQ ID NO: 1064901 - RNA, 19 nt, Homo sapiens
  misc_RNA (1)...(19): siRNA sense strand
uggcguccuuugucaagaa

SEQ ID NO: 1064902 - RNA, 19 nt, Homo sapiens
  misc_RNA (1)...(19): siRNA sense strand
ucccaaguguauccacaaa

SEQ ID NO: 1064903 - RNA, 19 nt, Homo sapiens
  misc_RNA (1)...(19): siRNA sense strand
caaggaauucaagaaaguu

SEQ ID NO: 1064904 - RNA, 19 nt, Homo sapiens
  misc_RNA (1)...(19): siRNA sense strand
gcuguugggcauccucauu

SEQ ID NO: 1064905 - RNA, 19 nt, Homo sapiens
  misc_RNA (1)...(19): siRNA sense strand
gguguuggacuguuuacau

SEQ ID NO: 1064906 - RNA, 19 nt, Homo sapiens
  misc_RNA (1)...(19): siRNA sense strand
gaacguguuuguggggaaa

SEQ ID NO: 1064907 - RNA, 19 nt, Homo sapiens
  misc_RNA (1)...(19): siRNA sense strand
uuacauugccagaggauca

SEQ ID NO: 1064908 - RNA, 19 nt, Homo sapiens
  misc_RNA (1)...(19): siRNA sense strand
gcgaaugugaucaaggaau

SEQ ID NO: 1064909 - RNA, 19 nt, Homo sapiens
  misc_RNA (1)...(19): siRNA sense strand
cagaggaucacucccaagu

SEQ ID NO: 1064910 - RNA, 19 nt, Homo sapiens
  misc_RNA (1)...(19): siRNA sense strand
acuacgcgcugaacguguu

SEQ ID NO: 1064911 - RNA, 19 nt, Homo sapiens
  misc_RNA (1)...(19): siRNA sense strand
cgaggaaccaggcgcuguu

SEQ ID NO: 1064912 - RNA, 19 nt, Homo sapiens
  misc_RNA (1)...(19): siRNA sense strand
gggaaaguggagacaaauc

SEQ ID NO: 1064913 - RNA, 19 nt, Homo sapiens
  misc_RNA (1)...(19): siRNA sense strand
aaccaaacgcagcacuuaa

SEQ ID NO: 1064914 - RNA, 19 nt, Homo sapiens
  misc_RNA (1)...(19): siRNA sense strand
caaacgcagcacuuaaugg

SEQ ID NO: 1064915 - RNA, 19 nt, Homo sapiens
  misc_RNA (1)...(19): siRNA sense strand
auggguaacucucugaaag

SEQ ID NO: 1064916 - RNA, 19 nt, Homo sapiens
  misc_RNA (1)...(19): siRNA sense strand
guuggacuguuuacauugc

SEQ ID NO: 1064917 - RNA, 19 nt, Homo sapiens
  misc_RNA (1)...(19): siRNA sense strand
agaugagccucugcuggaa

SEQ ID NO: 1064918 - RNA, 19 nt, Homo sapiens
  misc_RNA (1)...(19): siRNA sense strand
ggacgcagcuaggcaguga

SEQ ID NO: 1064919 - RNA, 19 nt, Homo sapiens
  misc_RNA (1)...(19): siRNA sense strand
gcagaucaacgguggauuu

SEQ ID NO: 1064920 - RNA, 19 nt, Homo sapiens
  misc_RNA (1)...(19): siRNA sense strand
gaucaacgguggauuuggu

SEQ ID NO: 1064921 - RNA, 19 nt, Homo sapiens
  misc_RNA (1)...(19): siRNA sense strand
caucuuggcucccggauuc

SEQ ID NO: 1064922 - RNA, 19 nt, Homo sapiens
  misc_RNA (1)...(19): siRNA sense strand
ggagguuuaucacaagguu

SEQ ID NO: 1064923 - RNA, 19 nt, Homo sapiens
  misc_RNA (1)...(19): siRNA sense strand
caccggagguuuaucacaa

SEQ ID NO: 1064924 - RNA, 19 nt, Homo sapiens
  misc_RNA (1)...(19): siRNA sense strand
gagcggagccaccuucauc

SEQ ID NO: 1064925 - RNA, 19 nt, Homo sapiens
  misc_RNA (1)...(19): siRNA sense strand
ucaacgccaugcugccuuu

SEQ ID NO: 1064926 - RNA, 19 nt, Homo sapiens
  misc_RNA (1)...(19): siRNA sense strand
caagguuguuccucagauc

SEQ ID NO: 1064927 - RNA, 19 nt, Homo sapiens
  misc_RNA (1)...(19): siRNA sense strand
ucagaucccugugaagagu

SEQ ID NO: 1064928 - RNA, 19 nt, Homo sapiens
  misc_RNA (1)...(19): siRNA sense strand
ccucagaucccugugaaga

SEQ ID NO: 1064929 - RNA, 19 nt, Homo sapiens
  misc_RNA (1)...(19): siRNA sense strand
uggauuugguguugacuuc

SEQ ID NO: 1064930 - RNA, 19 nt, Homo sapiens
  misc_RNA (1)...(19): siRNA sense strand
ggccguagccacgaaguga

SEQ ID NO: 1064931 - RNA, 19 nt, Homo sapiens
  misc_RNA (1)...(19): siRNA sense strand
caacgguggauuugguguu

SEQ ID NO: 1064932 - RNA, 19 nt, Homo sapiens
  misc_RNA (1)...(19): siRNA sense strand
gauuugguguugacuucuc

SEQ ID NO: 1064933 - RNA, 19 nt, Homo sapiens
  misc_RNA (1)...(19): siRNA sense strand
ucaucgacgugcagaucaa

SEQ ID NO: 1064934 - RNA, 19 nt, Homo sapiens
  misc_RNA (1)...(19): siRNA sense strand
cuucaucacccaccucuuc

SEQ ID NO: 1064935 - RNA, 19 nt, Homo sapiens
  misc_RNA (1)...(19): siRNA sense strand
gauccugcgcggagggaaa

SEQ ID NO: 1064936 - RNA, 19 nt, Homo sapiens
  misc_RNA (1)...(19): siRNA sense strand
caucuuggacccagagaag

SEQ ID NO: 1064937 - RNA, 19 nt, Homo sapiens
  misc_RNA (1)...(19): siRNA sense strand
cagaucaacgguggauuug

SEQ ID NO: 1064938 - RNA, 19 nt, Homo sapiens
  misc_RNA (1)...(19): siRNA sense strand
aggacuugcuggccaccua

SEQ ID NO: 1064939 - RNA, 19 nt, Homo sapiens
  misc_RNA (1)...(19): siRNA sense strand
gaaaguagcugcacaugaa

SEQ ID NO: 1064940 - RNA, 19 nt, Homo sapiens
  misc_RNA (1)...(19): siRNA sense strand
cgacaaagaugacuuagua

SEQ ID NO: 1064941 - RNA, 19 nt, Homo sapiens
  misc_RNA (1)...(19): siRNA sense strand
cgacaucacuuaauggaua

SEQ ID NO: 1064942 - RNA, 19 nt, Homo sapiens
  misc_RNA (1)...(19): siRNA sense strand
caagugggaugucuccuua

SEQ ID NO: 1064943 - RNA, 19 nt, Homo sapiens
  misc_RNA (1)...(19): siRNA sense strand
gaggaagaaucugauaaua

SEQ ID NO: 1064944 - RNA, 19 nt, Homo sapiens
  misc_RNA (1)...(19): siRNA sense strand
gaagaauccuccaguuuua

SEQ ID NO: 1064945 - RNA, 19 nt, Homo sapiens
  misc_RNA (1)...(19): siRNA sense strand
gaacucacacuccaguaua

SEQ ID NO: 1064946 - RNA, 19 nt, Homo sapiens
  misc_RNA (1)...(19): siRNA sense strand
ccagaacucucagaacuaa

SEQ ID NO: 1064947 - RNA, 19 nt, Homo sapiens
  misc_RNA (1)...(19): siRNA sense strand
ucacagauaugaaugaaca

SEQ ID NO: 1064948 - RNA, 19 nt, Homo sapiens
  misc_RNA (1)...(19): siRNA sense strand
gaguaucacuucuuuaucu

SEQ ID NO: 1064949 - RNA, 19 nt, Homo sapiens
  misc_RNA (1)...(19): siRNA sense strand
cacaguggaugcuucaaua

SEQ ID NO: 1064950 - RNA, 19 nt, Homo sapiens
  misc_RNA (1)...(19): siRNA sense strand
caacagcauuuccuuaucu

SEQ ID NO: 1064951 - RNA, 19 nt, Homo sapiens
  misc_RNA (1)...(19): siRNA sense strand
gaagcaaacaggaguauca

SEQ ID NO: 1064952 - RNA, 19 nt, Homo sapiens
  misc_RNA (1)...(19): siRNA sense strand
gcacucagaucuuggaaaa

SEQ ID NO: 1064953 - RNA, 19 nt, Homo sapiens
  misc_RNA (1)...(19): siRNA sense strand
gagaacaauuugccacugu

SEQ ID NO: 1064954 - RNA, 19 nt, Homo sapiens
  misc_RNA (1)...(19): siRNA sense strand
gguacaagaugccagaugu

SEQ ID NO: 1064955 - RNA, 19 nt, Homo sapiens
  misc_RNA (1)...(19): siRNA sense strand
gaacuuagugagagcugua

SEQ ID NO: 1064956 - RNA, 19 nt, Homo sapiens
  misc_RNA (1)...(19): siRNA sense strand
ugucacaacucacagauau

SEQ ID NO: 1064957 - RNA, 19 nt, Homo sapiens
  misc_RNA (1)...(19): siRNA sense strand
ggaaagauggaaauagaug

SEQ ID NO: 1064958 - RNA, 19 nt, Homo sapiens
  misc_RNA (1)...(19): siRNA sense strand
gcaaacaggaguaucacuu

SEQ ID NO: 1064959 - RNA, 19 nt, Homo sapiens
  misc_RNA (1)...(19): siRNA sense strand
gacaucacuuaauggauaa

SEQ ID NO: 1064960 - RNA, 19 nt, Homo sapiens
  misc_RNA (1)...(19): siRNA sense strand
gaaagauggaaauagauga

SEQ ID NO: 1064961 - RNA, 19 nt, Homo sapiens
  misc_RNA (1)...(19): siRNA sense strand
uauguuaccucuccauuag

SEQ ID NO: 1064962 - RNA, 19 nt, Homo sapiens
  misc_RNA (1)...(19): siRNA sense strand
acaggaguaucacuucuuu

SEQ ID NO: 1064963 - RNA, 19 nt, Homo sapiens
  misc_RNA (1)...(19): siRNA sense strand
cagcauuuccuuaucuaua

SEQ ID NO: 1064964 - RNA, 19 nt, Homo sapiens
  misc_RNA (1)...(19): siRNA sense strand
gcaaugcacagccaauuuc

SEQ ID NO: 1064965 - RNA, 19 nt, Homo sapiens
  misc_RNA (1)...(19): siRNA sense strand
ugaacaagaggagguauua

SEQ ID NO: 1064966 - RNA, 19 nt, Homo sapiens
  misc_RNA (1)...(19): siRNA sense strand
ggauaaacaaggaguguau

SEQ ID NO: 1064967 - RNA, 19 nt, Homo sapiens
  misc_RNA (1)...(19): siRNA sense strand
gaagagccaaggaagagaa

SEQ ID NO: 1064968 - RNA, 19 nt, Homo sapiens
  misc_RNA (1)...(19): siRNA sense strand
agaugucccugaugcauuu

SEQ ID NO: 1064969 - RNA, 19 nt, Homo sapiens
  misc_RNA (1)...(19): siRNA sense strand
ggaagaauccuccaguuuu

SEQ ID NO: 1064970 - RNA, 19 nt, Homo sapiens
  misc_RNA (1)...(19): siRNA sense strand
guauguuaccucuccauua

SEQ ID NO: 1064971 - RNA, 19 nt, Homo sapiens
  misc_RNA (1)...(19): siRNA sense strand
gcaaaggcagcaugaacuu

SEQ ID NO: 1064972 - RNA, 19 nt, Homo sapiens
  misc_RNA (1)...(19): siRNA sense strand
ccaauuucaugcuccacua

SEQ ID NO: 1064973 - RNA, 19 nt, Homo sapiens
  misc_RNA (1)...(19): siRNA sense strand
cucaguagcuucauggaaa

SEQ ID NO: 1064974 - RNA, 19 nt, Homo sapiens
  misc_RNA (1)...(19): siRNA sense strand
acaugaagcugaggaagaa

SEQ ID NO: 1064975 - RNA, 19 nt, Homo sapiens
  misc_RNA (1)...(19): siRNA sense strand
acaaugcacucagaucuug

SEQ ID NO: 1064976 - RNA, 19 nt, Homo sapiens
  misc_RNA (1)...(19): siRNA sense strand
acagaaagauguggaauac

SEQ ID NO: 1064977 - RNA, 19 nt, Homo sapiens
  misc_RNA (1)...(19): siRNA sense strand
agggaaagauggaaauaga

SEQ ID NO: 1064978 - RNA, 19 nt, Homo sapiens
  misc_RNA (1)...(19): siRNA sense strand
agaaagauguggaauacag

SEQ ID NO: 1064979 - RNA, 19 nt, Homo sapiens
  misc_RNA (1)...(19): siRNA sense strand
ccaauacgacaucacuuaa

SEQ ID NO: 1064980 - RNA, 19 nt, Homo sapiens
  misc_RNA (1)...(19): siRNA sense strand
agugagagcuguagugcaa

SEQ ID NO: 1064981 - RNA, 19 nt, Homo sapiens
  misc_RNA (1)...(19): siRNA sense strand
ugaauuacuuacacagaug

SEQ ID NO: 1064982 - RNA, 19 nt, Homo sapiens
  misc_RNA (1)...(19): siRNA sense strand
aauacgacaucacuuaaug

SEQ ID NO: 1064983 - RNA, 19 nt, Homo sapiens
  misc_RNA (1)...(19): siRNA sense strand
ggagggaaagauggaaaua

SEQ ID NO: 1064984 - RNA, 19 nt, Homo sapiens
  misc_RNA (1)...(19): siRNA sense strand
caaaggcagcaugaacuua

SEQ ID NO: 1064985 - RNA, 19 nt, Homo sapiens
  misc_RNA (1)...(19): siRNA sense strand
gguauuacuagaacaguuu

SEQ ID NO: 1064986 - RNA, 19 nt, Homo sapiens
  misc_RNA (1)...(19): siRNA sense strand
gaaagauguggaauacaga

SEQ ID NO: 1064987 - RNA, 19 nt, Homo sapiens
  misc_RNA (1)...(19): siRNA sense strand
cugauaauauugcagaaga

SEQ ID NO: 1064988 - RNA, 19 nt, Homo sapiens
  misc_RNA (1)...(19): siRNA sense strand
caggcaagauugaaaguag

SEQ ID NO: 1064989 - RNA, 19 nt, Homo sapiens
  misc_RNA (1)...(19): siRNA sense strand
gaggagguauuacuagaac

SEQ ID NO: 1064990 - RNA, 19 nt, Homo sapiens
  misc_RNA (1)...(19): siRNA sense strand
ggaacucacacuccaguau

SEQ ID NO: 1064991 - RNA, 19 nt, Homo sapiens
  misc_RNA (1)...(19): siRNA sense strand
ucacaacucacagauauga

SEQ ID NO: 1064992 - RNA, 19 nt, Homo sapiens
  misc_RNA (1)...(19): siRNA sense strand
uguuaccucuccauuagua

SEQ ID NO: 1064993 - RNA, 19 nt, Homo sapiens
  misc_RNA (1)...(19): siRNA sense strand
agauugccauucaccauaa

SEQ ID NO: 1064994 - RNA, 19 nt, Homo sapiens
  misc_RNA (1)...(19): siRNA sense strand
cuuaauggauaaacaagga

SEQ ID NO: 1064995 - RNA, 19 nt, Homo sapiens
  misc_RNA (1)...(19): siRNA sense strand
agaacaauuugccacugua

SEQ ID NO: 1064996 - RNA, 19 nt, Homo sapiens
  misc_RNA (1)...(19): siRNA sense strand
uugaggaacuagcaagaaa

SEQ ID NO: 1064997 - RNA, 19 nt, Homo sapiens
  misc_RNA (1)...(19): siRNA sense strand
ugacuuugccucaacuaaa

SEQ ID NO: 1064998 - RNA, 19 nt, Homo sapiens
  misc_RNA (1)...(19): siRNA sense strand
cagauugccauucaccaua

SEQ ID NO: 1064999 - RNA, 19 nt, Homo sapiens
  misc_RNA (1)...(19): siRNA sense strand
gaaugaacaagaggaggua

SEQ ID NO: 1065000 - RNA, 19 nt, Homo sapiens
  misc_RNA (1)...(19): siRNA sense strand
caaccugacaauuaacauu

SEQ ID NO: 1065001 - RNA, 19 nt, Homo sapiens
  misc_RNA (1)...(19): siRNA sense strand
guagaagagccaaggaaga

SEQ ID NO: 1065002 - RNA, 19 nt, Homo sapiens
  misc_RNA (1)...(19): siRNA sense strand
aagaggagguauuacuaga

SEQ ID NO: 1065003 - RNA, 19 nt, Homo sapiens
  misc_RNA (1)...(19): siRNA sense strand
gccugccgcuccuucauuu

SEQ ID NO: 1065004 - RNA, 19 nt, Homo sapiens
  misc_RNA (1)...(19): siRNA sense strand
uagccgaaauacagaaaga

SEQ ID NO: 1065005 - RNA, 19 nt, Homo sapiens
  misc_RNA (1)...(19): siRNA sense strand
acaagaggagguauuacua

SEQ ID NO: 1065006 - RNA, 19 nt, Homo sapiens
  misc_RNA (1)...(19): siRNA sense strand
gaauuacuuacacagauga

SEQ ID NO: 1065007 - RNA, 19 nt, Homo sapiens
  misc_RNA (1)...(19): siRNA sense strand
caagaagcaaacaggagua

SEQ ID NO: 1065008 - RNA, 19 nt, Homo sapiens
  misc_RNA (1)...(19): siRNA sense strand
caaacaggaguaucacuuc

SEQ ID NO: 1065009 - RNA, 19 nt, Homo sapiens
  misc_RNA (1)...(19): siRNA sense strand
gaacaauuugccacuguag

SEQ ID NO: 1065010 - RNA, 19 nt, Homo sapiens
  misc_RNA (1)...(19): siRNA sense strand
cagcaugaacuuagugaga

SEQ ID NO: 1065011 - RNA, 19 nt, Homo sapiens
  misc_RNA (1)...(19): siRNA sense strand
caguguuuauccaccaaua

SEQ ID NO: 1065012 - RNA, 19 nt, Homo sapiens
  misc_RNA (1)...(19): siRNA sense strand
ucaacagcauuuccuuauc

SEQ ID NO: 1065013 - RNA, 19 nt, Homo sapiens
  misc_RNA (1)...(19): siRNA sense strand
ugaaaguagcugcacauga

SEQ ID NO: 1065014 - RNA, 19 nt, Homo sapiens
  misc_RNA (1)...(19): siRNA sense strand
caagaggagguauuacuag

SEQ ID NO: 1065015 - RNA, 19 nt, Homo sapiens
  misc_RNA (1)...(19): siRNA sense strand
aaccagugaucaguguuua

SEQ ID NO: 1065016 - RNA, 19 nt, Homo sapiens
  misc_RNA (1)...(19): siRNA sense strand
uacagaaagauguggaaua

SEQ ID NO: 1065017 - RNA, 19 nt, Homo sapiens
  misc_RNA (1)...(19): siRNA sense strand
cgaaauacagaaagaugug

SEQ ID NO: 1065018 - RNA, 19 nt, Homo sapiens
  misc_RNA (1)...(19): siRNA sense strand
ugaggaagaaucugauaau

SEQ ID NO: 1065019 - RNA, 19 nt, Homo sapiens
  misc_RNA (1)...(19): siRNA sense strand
gcugaggaagaaucugaua

SEQ ID NO: 1065020 - RNA, 19 nt, Homo sapiens
  misc_RNA (1)...(19): siRNA sense strand
gauugccauucaccauaaa

SEQ ID NO: 1065021 - RNA, 19 nt, Homo sapiens
  misc_RNA (1)...(19): siRNA sense strand
gacaaagaugacuuaguaa

SEQ ID NO: 1065022 - RNA, 19 nt, Homo sapiens
  misc_RNA (1)...(19): siRNA sense strand
cauaaacaaccugacaauu

SEQ ID NO: 1065023 - RNA, 19 nt, Homo sapiens
  misc_RNA (1)...(19): siRNA sense strand
aaucugccauuacccauuc

SEQ ID NO: 1065024 - RNA, 19 nt, Homo sapiens
  misc_RNA (1)...(19): siRNA sense strand
ccuuucaaaucugccauua

SEQ ID NO: 1065025 - RNA, 19 nt, Homo sapiens
  misc_RNA (1)...(19): siRNA sense strand
aaacaggaguaucacuucu

SEQ ID NO: 1065026 - RNA, 19 nt, Homo sapiens
  misc_RNA (1)...(19): siRNA sense strand
accaauacgacaucacuua

SEQ ID NO: 1065027 - RNA, 19 nt, Homo sapiens
  misc_RNA (1)...(19): siRNA sense strand
acaauuugccacuguagaa

SEQ ID NO: 1065028 - RNA, 19 nt, Homo sapiens
  misc_RNA (1)...(19): siRNA sense strand
gcauuuccuuaucuauaca

SEQ ID NO: 1065029 - RNA, 19 nt, Homo sapiens
  misc_RNA (1)...(19): siRNA sense strand
uuccauuucuuccuccaua

SEQ ID NO: 1065030 - RNA, 19 nt, Homo sapiens
  misc_RNA (1)...(19): siRNA sense strand
ugacacuguuucuucuuca

SEQ ID NO: 1065031 - RNA, 19 nt, Homo sapiens
  misc_RNA (1)...(19): siRNA sense strand
gacuuugccucaacuaaaa

SEQ ID NO: 1065032 - RNA, 19 nt, Homo sapiens
  misc_RNA (1)...(19): siRNA sense strand
gaacaguuucugacuuugc

SEQ ID NO: 1065033 - RNA, 19 nt, Homo sapiens
  misc_RNA (1)...(19): siRNA sense strand
caacucacagauaugaaug

SEQ ID NO: 1065034 - RNA, 19 nt, Homo sapiens
  misc_RNA (1)...(19): siRNA sense strand
gaugccagaugucccugau

SEQ ID NO: 1065035 - RNA, 19 nt, Homo sapiens
  misc_RNA (1)...(19): siRNA sense strand
agauaugaaugaacaagag

SEQ ID NO: 1065036 - RNA, 19 nt, Homo sapiens
  misc_RNA (1)...(19): siRNA sense strand
gacacuguuucuucuucaa

SEQ ID NO: 1065037 - RNA, 19 nt, Homo sapiens
  misc_RNA (1)...(19): siRNA sense strand
caauacgacaucacuuaau

SEQ ID NO: 1065038 - RNA, 19 nt, Homo sapiens
  misc_RNA (1)...(19): siRNA sense strand
uaccgacaaagaugacuua

SEQ ID NO: 1065039 - RNA, 19 nt, Homo sapiens
  misc_RNA (1)...(19): siRNA sense strand
ggguauggcugcaagacua

SEQ ID NO: 1065040 - RNA, 19 nt, Homo sapiens
  misc_RNA (1)...(19): siRNA sense strand
ggacgagccuuuagagacu

SEQ ID NO: 1065041 - RNA, 19 nt, Homo sapiens
  misc_RNA (1)...(19): siRNA sense strand
agacaaagaguuagagaaa

SEQ ID NO: 1065042 - RNA, 19 nt, Homo sapiens
  misc_RNA (1)...(19): siRNA sense strand
gaaagacaggaacaaacua

SEQ ID NO: 1065043 - RNA, 19 nt, Homo sapiens
  misc_RNA (1)...(19): siRNA sense strand
ggaaaaggccgaggaguua

SEQ ID NO: 1065044 - RNA, 19 nt, Homo sapiens
  misc_RNA (1)...(19): siRNA sense strand
ccaccaagcgggaguauga

SEQ ID NO: 1065045 - RNA, 19 nt, Homo sapiens
  misc_RNA (1)...(19): siRNA sense strand
gcagccagacaaagaguua

SEQ ID NO: 1065046 - RNA, 19 nt, Homo sapiens
  misc_RNA (1)...(19): siRNA sense strand
ggaguuagcagccagacaa

SEQ ID NO: 1065047 - RNA, 19 nt, Homo sapiens
  misc_RNA (1)...(19): siRNA sense strand
gaacaaacuaagaggaugu

SEQ ID NO: 1065048 - RNA, 19 nt, Homo sapiens
  misc_RNA (1)...(19): siRNA sense strand
gaggagaggcggagggaaa

SEQ ID NO: 1065049 - RNA, 19 nt, Homo sapiens
  misc_RNA (1)...(19): siRNA sense strand
ggaaagacaggaacaaacu

SEQ ID NO: 1065050 - RNA, 19 nt, Homo sapiens
  misc_RNA (1)...(19): siRNA sense strand
gcagagagagccaagaagu

SEQ ID NO: 1065051 - RNA, 19 nt, Homo sapiens
  misc_RNA (1)...(19): siRNA sense strand
gagaggaacgggaggcauu

SEQ ID NO: 1065052 - RNA, 19 nt, Homo sapiens
  misc_RNA (1)...(19): siRNA sense strand
gaggaaagacaggaacaaa

SEQ ID NO: 1065053 - RNA, 19 nt, Homo sapiens
  misc_RNA (1)...(19): siRNA sense strand
gagacaagggcaagaguug

SEQ ID NO: 1065054 - RNA, 19 nt, Homo sapiens
  misc_RNA (1)...(19): siRNA sense strand
gcgggagcgugaagaaaga

SEQ ID NO: 1065055 - RNA, 19 nt, Homo sapiens
  misc_RNA (1)...(19): siRNA sense strand
gacagcggcuacaggaaga

SEQ ID NO: 1065056 - RNA, 19 nt, Homo sapiens
  misc_RNA (1)...(19): siRNA sense strand
aaagacaggaacaaacuaa

SEQ ID NO: 1065057 - RNA, 19 nt, Homo sapiens
  misc_RNA (1)...(19): siRNA sense strand
cagagagagccaagaagua

SEQ ID NO: 1065058 - RNA, 19 nt, Homo sapiens
  misc_RNA (1)...(19): siRNA sense strand
aaacuaagaggauguugga

SEQ ID NO: 1065059 - RNA, 19 nt, Homo sapiens
  misc_RNA (1)...(19): siRNA sense strand
aaggagggaugcaaagaga

SEQ ID NO: 1065060 - RNA, 19 nt, Homo sapiens
  misc_RNA (1)...(19): siRNA sense strand
ggagacaagggcaagaguu

SEQ ID NO: 1065061 - RNA, 19 nt, Homo sapiens
  misc_RNA (1)...(19): siRNA sense strand
guuagcagccagacaaaga

SEQ ID NO: 1065062 - RNA, 19 nt, Homo sapiens
  misc_RNA (1)...(19): siRNA sense strand
gaaaccaggacuagaaacu

SEQ ID NO: 1065063 - RNA, 19 nt, Homo sapiens
  misc_RNA (1)...(19): siRNA sense strand
ccagaugggaccucacuga

SEQ ID NO: 1065064 - RNA, 19 nt, Homo sapiens
  misc_RNA (1)...(19): siRNA sense strand
ggaacgggaggcauuggaa

SEQ ID NO: 1065065 - RNA, 19 nt, Homo sapiens
  misc_RNA (1)...(19): siRNA sense strand
agagagagccaagaaguau

SEQ ID NO: 1065066 - RNA, 19 nt, Homo sapiens
  misc_RNA (1)...(19): siRNA sense strand
gagaaggcaaacccgcuuu

SEQ ID NO: 1065067 - RNA, 19 nt, Homo sapiens
  misc_RNA (1)...(19): siRNA sense strand
agacaggaacaaacuaaga

SEQ ID NO: 1065068 - RNA, 19 nt, Homo sapiens
  misc_RNA (1)...(19): siRNA sense strand
gcagcgggagcgugaagaa

SEQ ID NO: 1065069 - RNA, 19 nt, Homo sapiens
  misc_RNA (1)...(19): siRNA sense strand
uagaaaccaggacuagaaa

SEQ ID NO: 1065070 - RNA, 19 nt, Homo sapiens
  misc_RNA (1)...(19): siRNA sense strand
ggaaaaggagggaugcaaa

SEQ ID NO: 1065071 - RNA, 19 nt, Homo sapiens
  misc_RNA (1)...(19): siRNA sense strand
gacaaagaguuagagaaaa

SEQ ID NO: 1065072 - RNA, 19 nt, Homo sapiens
  misc_RNA (1)...(19): siRNA sense strand
ggagggaugcaaagagaag

SEQ ID NO: 1065073 - RNA, 19 nt, Homo sapiens
  misc_RNA (1)...(19): siRNA sense strand
aagcagagagagccaagaa

SEQ ID NO: 1065074 - RNA, 19 nt, Homo sapiens
  misc_RNA (1)...(19): siRNA sense strand
cgauguggacgagccuuua

SEQ ID NO: 1065075 - RNA, 19 nt, Homo sapiens
  misc_RNA (1)...(19): siRNA sense strand
ccagacgggccuucucaga

SEQ ID NO: 1065076 - RNA, 19 nt, Homo sapiens
  misc_RNA (1)...(19): siRNA sense strand
gacaggaacaaacuaagag

SEQ ID NO: 1065077 - RNA, 19 nt, Homo sapiens
  misc_RNA (1)...(19): siRNA sense strand
gagagagccaagaaguaug

SEQ ID NO: 1065078 - RNA, 19 nt, Homo sapiens
  misc_RNA (1)...(19): siRNA sense strand
acaaagaguuagagaaaag

SEQ ID NO: 1065079 - RNA, 19 nt, Homo sapiens
  misc_RNA (1)...(19): siRNA sense strand
gggaaaaggccgaggaguu

SEQ ID NO: 1065080 - RNA, 19 nt, Homo sapiens
  misc_RNA (1)...(19): siRNA sense strand
cagacaaagaguuagagaa

SEQ ID NO: 1065081 - RNA, 19 nt, Homo sapiens
  misc_RNA (1)...(19): siRNA sense strand
gcuacaggaagaugagaug

SEQ ID NO: 1065082 - RNA, 19 nt, Homo sapiens
  misc_RNA (1)...(19): siRNA sense strand
ugaagaggaaagacaggaa

SEQ ID NO: 1065083 - RNA, 19 nt, Homo sapiens
  misc_RNA (1)...(19): siRNA sense strand
gaguuagcagccagacaaa

SEQ ID NO: 1065084 - RNA, 19 nt, Homo sapiens
  misc_RNA (1)...(19): siRNA sense strand
gagggacaaagcagagaga

SEQ ID NO: 1065085 - RNA, 19 nt, Homo sapiens
  misc_RNA (1)...(19): siRNA sense strand
gaucgagagggacaaagca

SEQ ID NO: 1065086 - RNA, 19 nt, Homo sapiens
  misc_RNA (1)...(19): siRNA sense strand
ccagacaaagaguuagaga

SEQ ID NO: 1065087 - RNA, 19 nt, Homo sapiens
  misc_RNA (1)...(19): siRNA sense strand
agacuagaaaccaggacua

SEQ ID NO: 1065088 - RNA, 19 nt, Homo sapiens
  misc_RNA (1)...(19): siRNA sense strand
gauguggacgagccuuuag

SEQ ID NO: 1065089 - RNA, 19 nt, Homo sapiens
  misc_RNA (1)...(19): siRNA sense strand
gaaaaggagggaugcaaag

SEQ ID NO: 1065090 - RNA, 19 nt, Homo sapiens
  misc_RNA (1)...(19): siRNA sense strand
ggaauaaaguucaacauca

SEQ ID NO: 1065091 - RNA, 19 nt, Homo sapiens
  misc_RNA (1)...(19): siRNA sense strand
gcacaacaccguccacuau

SEQ ID NO: 1065092 - RNA, 19 nt, Homo sapiens
  misc_RNA (1)...(19): siRNA sense strand
gagggucacucgggacuua

SEQ ID NO: 1065093 - RNA, 19 nt, Homo sapiens
  misc_RNA (1)...(19): siRNA sense strand
ggaggacgaugccaacuuc

SEQ ID NO: 1065094 - RNA, 19 nt, Homo sapiens
  misc_RNA (1)...(19): siRNA sense strand
cuacauggauuaccugaug

SEQ ID NO: 1065095 - RNA, 19 nt, Homo sapiens
  misc_RNA (1)...(19): siRNA sense strand
gaauaaaguucaacaucag

SEQ ID NO: 1065096 - RNA, 19 nt, Homo sapiens
  misc_RNA (1)...(19): siRNA sense strand
gcaccuacgacuucuacua

SEQ ID NO: 1065097 - RNA, 19 nt, Homo sapiens
  misc_RNA (1)...(19): siRNA sense strand
uggauuaccugauguucaa

SEQ ID NO: 1065098 - RNA, 19 nt, Homo sapiens
  misc_RNA (1)...(19): siRNA sense strand
ggacgaugccaacuucuuc

SEQ ID NO: 1065099 - RNA, 19 nt, Homo sapiens
  misc_RNA (1)...(19): siRNA sense strand
uaccugauguucaacuauu

SEQ ID NO: 1065100 - RNA, 19 nt, Homo sapiens
  misc_RNA (1)...(19): siRNA sense strand
ggaagcgggugcucauggu

SEQ ID NO: 1065101 - RNA, 19 nt, Homo sapiens
  misc_RNA (1)...(19): siRNA sense strand
gaggaucgcccaccaguac

SEQ ID NO: 1065102 - RNA, 19 nt, Homo sapiens
  misc_RNA (1)...(19): siRNA sense strand
ccacgugucccguaucuuc

SEQ ID NO: 1065103 - RNA, 19 nt, Homo sapiens
  misc_RNA (1)...(19): siRNA sense strand
gcaggugccaggaauaaag

SEQ ID NO: 1065104 - RNA, 19 nt, Homo sapiens
  misc_RNA (1)...(19): siRNA sense strand
cagcaggugccaggaauaa

SEQ ID NO: 1065105 - RNA, 19 nt, Homo sapiens
  misc_RNA (1)...(19): siRNA sense strand
gccgucugcucaucaagaa

SEQ ID NO: 1065106 - RNA, 19 nt, Homo sapiens
  misc_RNA (1)...(19): siRNA sense strand
ucaagcgccuggacaccuu

SEQ ID NO: 1065107 - RNA, 19 nt, Homo sapiens
  misc_RNA (1)...(19): siRNA sense strand
gcagcgcaccuacgacuuc

SEQ ID NO: 1065108 - RNA, 19 nt, Homo sapiens
  misc_RNA (1)...(19): siRNA sense strand
ccugcgaccuggaacaaug

SEQ ID NO: 1065109 - RNA, 19 nt, Homo sapiens
  misc_RNA (1)...(19): siRNA sense strand
ccaggauggugacuugaag

SEQ ID NO: 1065110 - RNA, 19 nt, Homo sapiens
  misc_RNA (1)...(19): siRNA sense strand
cgacuucuacuacauggau

SEQ ID NO: 1065111 - RNA, 19 nt, Homo sapiens
  misc_RNA (1)...(19): siRNA sense strand
caacuauuccaagcccuuu

SEQ ID NO: 1065112 - RNA, 19 nt, Homo sapiens
  misc_RNA (1)...(19): siRNA sense strand
gcaggccuccuccucuuca

SEQ ID NO: 1065113 - RNA, 19 nt, Homo sapiens
  misc_RNA (1)...(19): siRNA sense strand
acaacaccguccacuaugg

SEQ ID NO: 1065114 - RNA, 19 nt, Homo sapiens
  misc_RNA (1)...(19): siRNA sense strand
ucucuuccauccugcuguu

SEQ ID NO: 1065115 - RNA, 19 nt, Homo sapiens
  misc_RNA (1)...(19): siRNA sense strand
aaaggcagcgcaccuacga

SEQ ID NO: 1065116 - RNA, 19 nt, Homo sapiens
  misc_RNA (1)...(19): siRNA sense strand
cugcaggccuccuccucuu

SEQ ID NO: 1065117 - RNA, 19 nt, Homo sapiens
  misc_RNA (1)...(19): siRNA sense strand
gcaccuacaccaagaugcu

SEQ ID NO: 1065118 - RNA, 19 nt, Homo sapiens
  misc_RNA (1)...(19): siRNA sense strand
ccagcaggugccaggaaua

SEQ ID NO: 1065119 - RNA, 19 nt, Homo sapiens
  misc_RNA (1)...(19): siRNA sense strand
ccaagcccuuugcagaucu

SEQ ID NO: 1065120 - RNA, 19 nt, Homo sapiens
  misc_RNA (1)...(19): siRNA sense strand
cggcuggccugcauguucu

SEQ ID NO: 1065121 - RNA, 19 nt, Homo sapiens
  misc_RNA (1)...(19): siRNA sense strand
ccuacgacuucuacuacau

SEQ ID NO: 1065122 - RNA, 19 nt, Homo sapiens
  misc_RNA (1)...(19): siRNA sense strand
cuacgacuucuacuacaug

SEQ ID NO: 1065123 - RNA, 19 nt, Homo sapiens
  misc_RNA (1)...(19): siRNA sense strand
gaaugacugugaugaagaa

SEQ ID NO: 1065124 - RNA, 19 nt, Homo sapiens
  misc_RNA (1)...(19): siRNA sense strand
gaugaagaauuccaguauu

SEQ ID NO: 1065125 - RNA, 19 nt, Homo sapiens
  misc_RNA (1)...(19): siRNA sense strand
caguggagcucuuguuuga

SEQ ID NO: 1065126 - RNA, 19 nt, Homo sapiens
  misc_RNA (1)...(19): siRNA sense strand
gacggucucugccaguaua

SEQ ID NO: 1065127 - RNA, 19 nt, Homo sapiens
  misc_RNA (1)...(19): siRNA sense strand
gcaugcaggugucauuaug

SEQ ID NO: 1065128 - RNA, 19 nt, Homo sapiens
  misc_RNA (1)...(19): siRNA sense strand
ugacugugaugaagaauuc

SEQ ID NO: 1065129 - RNA, 19 nt, Homo sapiens
  misc_RNA (1)...(19): siRNA sense strand
gacaaaguguugcaaccaa

SEQ ID NO: 1065130 - RNA, 19 nt, Homo sapiens
  misc_RNA (1)...(19): siRNA sense strand
gcaagaaugacugugauga

SEQ ID NO: 1065131 - RNA, 19 nt, Homo sapiens
  misc_RNA (1)...(19): siRNA sense strand
uaaaugcagugacggaucu

SEQ ID NO: 1065132 - RNA, 19 nt, Homo sapiens
  misc_RNA (1)...(19): siRNA sense strand
aaacaacaguggagcucuu

SEQ ID NO: 1065133 - RNA, 19 nt, Homo sapiens
  misc_RNA (1)...(19): siRNA sense strand
caagaaugacugugaugaa

SEQ ID NO: 1065134 - RNA, 19 nt, Homo sapiens
  misc_RNA (1)...(19): siRNA sense strand
augaagaauuccaguauug

SEQ ID NO: 1065135 - RNA, 19 nt, Homo sapiens
  misc_RNA (1)...(19): siRNA sense strand
guggagcucuuguuugaca

SEQ ID NO: 1065136 - RNA, 19 nt, Homo sapiens
  misc_RNA (1)...(19): siRNA sense strand
cuaagccuuucccacguua

SEQ ID NO: 1065137 - RNA, 19 nt, Homo sapiens
  misc_RNA (1)...(19): siRNA sense strand
cacgacaggugcuaugaga

SEQ ID NO: 1065138 - RNA, 19 nt, Homo sapiens
  misc_RNA (1)...(19): siRNA sense strand
ggacuaacucagcauguuc

SEQ ID NO: 1065139 - RNA, 19 nt, Homo sapiens
  misc_RNA (1)...(19): siRNA sense strand
cugccgagauguacagaaa

SEQ ID NO: 1065140 - RNA, 19 nt, Homo sapiens
  misc_RNA (1)...(19): siRNA sense strand
gcucuuguuugacaguguu

SEQ ID NO: 1065141 - RNA, 19 nt, Homo sapiens
  misc_RNA (1)...(19): siRNA sense strand
ugacggaucuaagccuuuc

SEQ ID NO: 1065142 - RNA, 19 nt, Homo sapiens
  misc_RNA (1)...(19): siRNA sense strand
gagccacccugaagaccau

SEQ ID NO: 1065143 - RNA, 19 nt, Homo sapiens
  misc_RNA (1)...(19): siRNA sense strand
uucauaagauagacacgua

SEQ ID NO: 1065144 - RNA, 19 nt, Homo sapiens
  misc_RNA (1)...(19): siRNA sense strand
aaagcaagaaugacuguga

SEQ ID NO: 1065145 - RNA, 19 nt, Homo sapiens
  misc_RNA (1)...(19): siRNA sense strand
ucaggcaugugaaacaaca

SEQ ID NO: 1065146 - RNA, 19 nt, Homo sapiens
  misc_RNA (1)...(19): siRNA sense strand
caacacgacaggugcuaug

SEQ ID NO: 1065147 - RNA, 19 nt, Homo sapiens
  misc_RNA (1)...(19): siRNA sense strand
aguauugccucuccaagau

SEQ ID NO: 1065148 - RNA, 19 nt, Homo sapiens
  misc_RNA (1)...(19): siRNA sense strand
aagaaugacugugaugaag

SEQ ID NO: 1065149 - RNA, 19 nt, Homo sapiens
  misc_RNA (1)...(19): siRNA sense strand
ugaugaagaauuccaguau

SEQ ID NO: 1065150 - RNA, 19 nt, Homo sapiens
  misc_RNA (1)...(19): siRNA sense strand
gugaugaagaauuccagua

SEQ ID NO: 1065151 - RNA, 19 nt, Homo sapiens
  misc_RNA (1)...(19): siRNA sense strand
ucuaagccuuucccacguu

SEQ ID NO: 1065152 - RNA, 19 nt, Homo sapiens
  misc_RNA (1)...(19): siRNA sense strand
aagcaagaaugacugugau

SEQ ID NO: 1065153 - RNA, 19 nt, Homo sapiens
  misc_RNA (1)...(19): siRNA sense strand
uguuugguguucaucuuaa

SEQ ID NO: 1065154 - RNA, 19 nt, Homo sapiens
  misc_RNA (1)...(19): siRNA sense strand
ucccuucccugacaaagug

SEQ ID NO: 1065155 - RNA, 19 nt, Homo sapiens
  misc_RNA (1)...(19): siRNA sense strand
ggacggucucugccaguau

SEQ ID NO: 1065156 - RNA, 19 nt, Homo sapiens
  misc_RNA (1)...(19): siRNA sense strand
gauagacacguaccugaac

SEQ ID NO: 1065157 - RNA, 19 nt, Homo sapiens
  misc_RNA (1)...(19): siRNA sense strand
ggucucugccaguauaaau

SEQ ID NO: 1065158 - RNA, 19 nt, Homo sapiens
  misc_RNA (1)...(19): siRNA sense strand
ggagagccacccugaagac

SEQ ID NO: 1065159 - RNA, 19 nt, Homo sapiens
  misc_RNA (1)...(19): siRNA sense strand
ccgcaugcaggugucauua

SEQ ID NO: 1065160 - RNA, 19 nt, Homo sapiens
  misc_RNA (1)...(19): siRNA sense strand
caguauugccucuccaaga

SEQ ID NO: 1065161 - RNA, 19 nt, Homo sapiens
  misc_RNA (1)...(19): siRNA sense strand
uaugagaccuguggcaaaa

SEQ ID NO: 1065162 - RNA, 19 nt, Homo sapiens
  misc_RNA (1)...(19): siRNA sense strand
gguaucccuucccugacaa

SEQ ID NO: 1065163 - RNA, 19 nt, Homo sapiens
  misc_RNA (1)...(19): siRNA sense strand
agaaugacugugaugaaga

SEQ ID NO: 1065164 - RNA, 19 nt, Homo sapiens
  misc_RNA (1)...(19): siRNA sense strand
aggacuaacucagcauguu

SEQ ID NO: 1065165 - RNA, 19 nt, Homo sapiens
  misc_RNA (1)...(19): siRNA sense strand
ccucauggccgcuguuguc

SEQ ID NO: 1065166 - RNA, 19 nt, Homo sapiens
  misc_RNA (1)...(19): siRNA sense strand
guucaucuuaacauuggua

SEQ ID NO: 1065167 - RNA, 19 nt, Homo sapiens
  misc_RNA (1)...(19): siRNA sense strand
guuugacaguguuauacau

SEQ ID NO: 1065168 - RNA, 19 nt, Homo sapiens
  misc_RNA (1)...(19): siRNA sense strand
ugguaucccuucccugaca

SEQ ID NO: 1065169 - RNA, 19 nt, Homo sapiens
  misc_RNA (1)...(19): siRNA sense strand
agauagacacguaccugaa

SEQ ID NO: 1065170 - RNA, 19 nt, Homo sapiens
  misc_RNA (1)...(19): siRNA sense strand
cagaaaacacuaggacuaa

SEQ ID NO: 1065171 - RNA, 19 nt, Homo sapiens
  misc_RNA (1)...(19): siRNA sense strand
cuaugagaccuguggcaaa

SEQ ID NO: 1065172 - RNA, 19 nt, Homo sapiens
  misc_RNA (1)...(19): siRNA sense strand
gcaaugaaguacaugaaua

SEQ ID NO: 1065173 - RNA, 19 nt, Homo sapiens
  misc_RNA (1)...(19): siRNA sense strand
gcaaugaagugagaaaugu

SEQ ID NO: 1065174 - RNA, 19 nt, Homo sapiens
  misc_RNA (1)...(19): siRNA sense strand
ccaagaagauguacgcaau

SEQ ID NO: 1065175 - RNA, 19 nt, Homo sapiens
  misc_RNA (1)...(19): siRNA sense strand
ugagaaaugucuucaagga

SEQ ID NO: 1065176 - RNA, 19 nt, Homo sapiens
  misc_RNA (1)...(19): siRNA sense strand
gagcacccuuuccugguua

SEQ ID NO: 1065177 - RNA, 19 nt, Homo sapiens
  misc_RNA (1)...(19): siRNA sense strand
uaugaagccugacaauauu

SEQ ID NO: 1065178 - RNA, 19 nt, Homo sapiens
  misc_RNA (1)...(19): siRNA sense strand
gaagaaugauaccaagaag

SEQ ID NO: 1065179 - RNA, 19 nt, Homo sapiens
  misc_RNA (1)...(19): siRNA sense strand
gaacguccacuucaaggaa

SEQ ID NO: 1065180 - RNA, 19 nt, Homo sapiens
  misc_RNA (1)...(19): siRNA sense strand
gauaugaagccugacaaua

SEQ ID NO: 1065181 - RNA, 19 nt, Homo sapiens
  misc_RNA (1)...(19): siRNA sense strand
gggaaggucugcauuguac

SEQ ID NO: 1065182 - RNA, 19 nt, Homo sapiens
  misc_RNA (1)...(19): siRNA sense strand
ggagcacccuuuccugguu

SEQ ID NO: 1065183 - RNA, 19 nt, Homo sapiens
  misc_RNA (1)...(19): siRNA sense strand
caacagaacguccacuuca

SEQ ID NO: 1065184 - RNA, 19 nt, Homo sapiens
  misc_RNA (1)...(19): siRNA sense strand
guuaucaccugcaacagaa

SEQ ID NO: 1065185 - RNA, 19 nt, Homo sapiens
  misc_RNA (1)...(19): siRNA sense strand
ucaaggaacuccagaucau

SEQ ID NO: 1065186 - RNA, 19 nt, Homo sapiens
  misc_RNA (1)...(19): siRNA sense strand
gguauuccuuccaagauga

SEQ ID NO: 1065187 - RNA, 19 nt, Homo sapiens
  misc_RNA (1)...(19): siRNA sense strand
gaagauguacgcaaugaag

SEQ ID NO: 1065188 - RNA, 19 nt, Homo sapiens
  misc_RNA (1)...(19): siRNA sense strand
gagccaacacuucaagaaa

SEQ ID NO: 1065189 - RNA, 19 nt, Homo sapiens
  misc_RNA (1)...(19): siRNA sense strand
ggagcgcaaugaagugaga

SEQ ID NO: 1065190 - RNA, 19 nt, Homo sapiens
  misc_RNA (1)...(19): siRNA sense strand
guggagaccugcguuauca

SEQ ID NO: 1065191 - RNA, 19 nt, Homo sapiens
  misc_RNA (1)...(19): siRNA sense strand
caacuuugaccacuuugaa

SEQ ID NO: 1065192 - RNA, 19 nt, Homo sapiens
  misc_RNA (1)...(19): siRNA sense strand
aagaagauguacgcaauga

SEQ ID NO: 1065193 - RNA, 19 nt, Homo sapiens
  misc_RNA (1)...(19): siRNA sense strand
gcagaaccagcgcaucauu

SEQ ID NO: 1065194 - RNA, 19 nt, Homo sapiens
  misc_RNA (1)...(19): siRNA sense strand
gagaaaugucuucaaggaa

SEQ ID NO: 1065195 - RNA, 19 nt, Homo sapiens
  misc_RNA (1)...(19): siRNA sense strand
gaaaugucuucaaggaacu

SEQ ID NO: 1065196 - RNA, 19 nt, Homo sapiens
  misc_RNA (1)...(19): siRNA sense strand
ggagccaacacuucaagaa

SEQ ID NO: 1065197 - RNA, 19 nt, Homo sapiens
  misc_RNA (1)...(19): siRNA sense strand
ccaccaguguuugaugaaa

SEQ ID NO: 1065198 - RNA, 19 nt, Homo sapiens
  misc_RNA (1)...(19): siRNA sense strand
auaccuggcucuccuacaa

SEQ ID NO: 1065199 - RNA, 19 nt, Homo sapiens
  misc_RNA (1)...(19): siRNA sense strand
agaagaaugauaccaagaa

SEQ ID NO: 1065200 - RNA, 19 nt, Homo sapiens
  misc_RNA (1)...(19): siRNA sense strand
agaaugauaccaagaagau

SEQ ID NO: 1065201 - RNA, 19 nt, Homo sapiens
  misc_RNA (1)...(19): siRNA sense strand
gcaacagaacguccacuuc

SEQ ID NO: 1065202 - RNA, 19 nt, Homo sapiens
  misc_RNA (1)...(19): siRNA sense strand
acccuuuccugguuaauuu

SEQ ID NO: 1065203 - RNA, 19 nt, Homo sapiens
  misc_RNA (1)...(19): siRNA sense strand
uuacuugacgaacaugaua

SEQ ID NO: 1065204 - RNA, 19 nt, Homo sapiens
  misc_RNA (1)...(19): siRNA sense strand
ggauaugaagccugacaau

SEQ ID NO: 1065205 - RNA, 19 nt, Homo sapiens
  misc_RNA (1)...(19): siRNA sense strand
aaccaccaguguuugauga

SEQ ID NO: 1065206 - RNA, 19 nt, Homo sapiens
  misc_RNA (1)...(19): siRNA sense strand
caagaagauguacgcaaug

SEQ ID NO: 1065207 - RNA, 19 nt, Homo sapiens
  misc_RNA (1)...(19): siRNA sense strand
agugagaaaugucuucaag

SEQ ID NO: 1065208 - RNA, 19 nt, Homo sapiens
  misc_RNA (1)...(19): siRNA sense strand
caaggaagaaacagugaag

SEQ ID NO: 1065209 - RNA, 19 nt, Homo sapiens
  misc_RNA (1)...(19): siRNA sense strand
agauguacgcaaugaagua

SEQ ID NO: 1065210 - RNA, 19 nt, Homo sapiens
  misc_RNA (1)...(19): siRNA sense strand
ggucauggcccuggacuac

SEQ ID NO: 1065211 - RNA, 19 nt, Homo sapiens
  misc_RNA (1)...(19): siRNA sense strand
aacagaacguccacuucaa

SEQ ID NO: 1065212 - RNA, 19 nt, Homo sapiens
  misc_RNA (1)...(19): siRNA sense strand
cugguuaauuugugguauu

SEQ ID NO: 1065213 - RNA, 19 nt, Homo sapiens
  misc_RNA (1)...(19): siRNA sense strand
ccaagaugaggaagacaug

SEQ ID NO: 1065214 - RNA, 19 nt, Homo sapiens
  misc_RNA (1)...(19): siRNA sense strand
gaaggucugcauuguacag

SEQ ID NO: 1065215 - RNA, 19 nt, Homo sapiens
  misc_RNA (1)...(19): siRNA sense strand
cagaagaaugauaccaaga

SEQ ID NO: 1065216 - RNA, 19 nt, Homo sapiens
  misc_RNA (1)...(19): siRNA sense strand
caaggaacuccagaucaug

SEQ ID NO: 1065217 - RNA, 19 nt, Homo sapiens
  misc_RNA (1)...(19): siRNA sense strand
agaaccagcgcaucauuca

SEQ ID NO: 1065218 - RNA, 19 nt, Homo sapiens
  misc_RNA (1)...(19): siRNA sense strand
uggacuaccugcagaacca

SEQ ID NO: 1065219 - RNA, 19 nt, Homo sapiens
  misc_RNA (1)...(19): siRNA sense strand
uacagaagaaugauaccaa

SEQ ID NO: 1065220 - RNA, 19 nt, Homo sapiens
  misc_RNA (1)...(19): siRNA sense strand
gguggagaccugcguuauc

SEQ ID NO: 1065221 - RNA, 19 nt, Homo sapiens
  misc_RNA (1)...(19): siRNA sense strand
ugguauuccuuccaagaug

SEQ ID NO: 1065222 - RNA, 19 nt, Homo sapiens
  misc_RNA (1)...(19): siRNA sense strand
gaaugauaccaagaagaug

SEQ ID NO: 1065223 - RNA, 19 nt, Homo sapiens
  misc_RNA (1)...(19): siRNA sense strand
aaugauaccaagaagaugu

SEQ ID NO: 1065224 - RNA, 19 nt, Homo sapiens
  misc_RNA (1)...(19): siRNA sense strand
ugggaaggucugcauugua

SEQ ID NO: 1065225 - RNA, 19 nt, Homo sapiens
  misc_RNA (1)...(19): siRNA sense strand
cagaaccagcgcaucauuc

SEQ ID NO: 1065226 - RNA, 19 nt, Homo sapiens
  misc_RNA (1)...(19): siRNA sense strand
caagaaaaccaccaguguu

SEQ ID NO: 1065227 - RNA, 19 nt, Homo sapiens
  misc_RNA (1)...(19): siRNA sense strand
gcguggagcgcaaugaagu

SEQ ID NO: 1065228 - RNA, 19 nt, Homo sapiens
  misc_RNA (1)...(19): siRNA sense strand
cguuaucaccugcaacaga

SEQ ID NO: 1065229 - RNA, 19 nt, Homo sapiens
  misc_RNA (1)...(19): siRNA sense strand
gaagccugacaauauuuua

SEQ ID NO: 1065230 - RNA, 19 nt, Homo sapiens
  misc_RNA (1)...(19): siRNA sense strand
ucaaggaagaaacagugaa

SEQ ID NO: 1065231 - RNA, 19 nt, Homo sapiens
  misc_RNA (1)...(19): siRNA sense strand
cugcagaaccagcgcauca

SEQ ID NO: 1065232 - RNA, 19 nt, Homo sapiens
  misc_RNA (1)...(19): siRNA sense strand
gaaaggagcagauauuaau

SEQ ID NO: 1065233 - RNA, 19 nt, Homo sapiens
  misc_RNA (1)...(19): siRNA sense strand
ugaaauugcuucugucaaa

SEQ ID NO: 1065234 - RNA, 19 nt, Homo sapiens
  misc_RNA (1)...(19): siRNA sense strand
ggaaaccucuucauuaugc

SEQ ID NO: 1065235 - RNA, 19 nt, Homo sapiens
  misc_RNA (1)...(19): siRNA sense strand
aaggaaaccucuucauuau

SEQ ID NO: 1065236 - RNA, 19 nt, Homo sapiens
  misc_RNA (1)...(19): siRNA sense strand
gauauuaaugcuccagaua

SEQ ID NO: 1065237 - RNA, 19 nt, Homo sapiens
  misc_RNA (1)...(19): siRNA sense strand
ggucauguuuccuguguga

SEQ ID NO: 1065238 - RNA, 19 nt, Homo sapiens
  misc_RNA (1)...(19): siRNA sense strand
uggaugaggugaaagacua

SEQ ID NO: 1065239 - RNA, 19 nt, Homo sapiens
  misc_RNA (1)...(19): siRNA sense strand
gcugaaaggagcagauauu

SEQ ID NO: 1065240 - RNA, 19 nt, Homo sapiens
  misc_RNA (1)...(19): siRNA sense strand
gaaauugcuucugucaaag

SEQ ID NO: 1065241 - RNA, 19 nt, Homo sapiens
  misc_RNA (1)...(19): siRNA sense strand
ugaaaggagcagauauuaa

SEQ ID NO: 1065242 - RNA, 19 nt, Homo sapiens
  misc_RNA (1)...(19): siRNA sense strand
ggacugaccgccuuugaag

SEQ ID NO: 1065243 - RNA, 19 nt, Homo sapiens
  misc_RNA (1)...(19): siRNA sense strand
acuagaagguggaaggaaa

SEQ ID NO: 1065244 - RNA, 19 nt, Homo sapiens
  misc_RNA (1)...(19): siRNA sense strand
ugucaaagggugcugauaa

SEQ ID NO: 1065245 - RNA, 19 nt, Homo sapiens
  misc_RNA (1)...(19): siRNA sense strand
agacuuggaugaggugaaa

SEQ ID NO: 1065246 - RNA, 19 nt, Homo sapiens
  misc_RNA (1)...(19): siRNA sense strand
caaagcucuucuccaguga

SEQ ID NO: 1065247 - RNA, 19 nt, Homo sapiens
  misc_RNA (1)...(19): siRNA sense strand
ugacaaccaggcaaucaaa

SEQ ID NO: 1065248 - RNA, 19 nt, Homo sapiens
  misc_RNA (1)...(19): siRNA sense strand
cugaaaggagcagauauua

SEQ ID NO: 1065249 - RNA, 19 nt, Homo sapiens
  misc_RNA (1)...(19): siRNA sense strand
gucaaagggugcugauaag

SEQ ID NO: 1065250 - RNA, 19 nt, Homo sapiens
  misc_RNA (1)...(19): siRNA sense strand
ugugugaaauugcuucugu

SEQ ID NO: 1065251 - RNA, 19 nt, Homo sapiens
  misc_RNA (1)...(19): siRNA sense strand
uggaauuucugcugcugaa

SEQ ID NO: 1065252 - RNA, 19 nt, Homo sapiens
  misc_RNA (1)...(19): siRNA sense strand
aaagggugcugauaagacu

SEQ ID NO: 1065253 - RNA, 19 nt, Homo sapiens
  misc_RNA (1)...(19): siRNA sense strand
caucauauuacuccucuuc

SEQ ID NO: 1065254 - RNA, 19 nt, Homo sapiens
  misc_RNA (1)...(19): siRNA sense strand
cauauuacuccucuucugu

SEQ ID NO: 1065255 - RNA, 19 nt, Homo sapiens
  misc_RNA (1)...(19): siRNA sense strand
caagggagaagaugucaac

SEQ ID NO: 1065256 - RNA, 19 nt, Homo sapiens
  misc_RNA (1)...(19): siRNA sense strand
ucauauuacuccucuucug

SEQ ID NO: 1065257 - RNA, 19 nt, Homo sapiens
  misc_RNA (1)...(19): siRNA sense strand
gauugugggcagcuugaaa

SEQ ID NO: 1065258 - RNA, 19 nt, Homo sapiens
  misc_RNA (1)...(19): siRNA sense strand
gaaaccucuucauuaugca

SEQ ID NO: 1065259 - RNA, 19 nt, Homo sapiens
  misc_RNA (1)...(19): siRNA sense strand
caaagggugcugauaagac

SEQ ID NO: 1065260 - RNA, 19 nt, Homo sapiens
  misc_RNA (1)...(19): siRNA sense strand
uuaaugcuccagauaaaca

SEQ ID NO: 1065261 - RNA, 19 nt, Homo sapiens
  misc_RNA (1)...(19): siRNA sense strand
ucaaagggugcugauaaga

SEQ ID NO: 1065262 - RNA, 19 nt, Homo sapiens
  misc_RNA (1)...(19): siRNA sense strand
ccacugacaaccaggcaau

SEQ ID NO: 1065263 - RNA, 19 nt, Homo sapiens
  misc_RNA (1)...(19): siRNA sense strand
gcgacaaggaguucaugug

SEQ ID NO: 1065264 - RNA, 19 nt, Homo sapiens
  misc_RNA (1)...(19): siRNA sense strand
caaccggacacuagaaggu

SEQ ID NO: 1065265 - RNA, 19 nt, Homo sapiens
  misc_RNA (1)...(19): siRNA sense strand
ggaugaggugaaagacuau

SEQ ID NO: 1065266 - RNA, 19 nt, Homo sapiens
  misc_RNA (1)...(19): siRNA sense strand
ugugaaaggcccagaugga

SEQ ID NO: 1065267 - RNA, 19 nt, Homo sapiens
  misc_RNA (1)...(19): siRNA sense strand
aaaggagcagauauuaaug

SEQ ID NO: 1065268 - RNA, 19 nt, Homo sapiens
  misc_RNA (1)...(19): siRNA sense strand
gugcugauaagacugugaa

SEQ ID NO: 1065269 - RNA, 19 nt, Homo sapiens
  misc_RNA (1)...(19): siRNA sense strand
agauauuaaugcuccagau

SEQ ID NO: 1065270 - RNA, 19 nt, Homo sapiens
  misc_RNA (1)...(19): siRNA sense strand
cugauaagacugugaaagg

SEQ ID NO: 1065271 - RNA, 19 nt, Homo sapiens
  misc_RNA (1)...(19): siRNA sense strand
ucuucugucugcugucuau

SEQ ID NO: 1065272 - RNA, 19 nt, Homo sapiens
  misc_RNA (1)...(19): siRNA sense strand
aaacggagacuuggaugag

SEQ ID NO: 1065273 - RNA, 19 nt, Homo sapiens
  misc_RNA (1)...(19): siRNA sense strand
ccaagugccucaagcauua

SEQ ID NO: 1065274 - RNA, 19 nt, Homo sapiens
  misc_RNA (1)...(19): siRNA sense strand
caacaaggaugaugaggaa

SEQ ID NO: 1065275 - RNA, 19 nt, Homo sapiens
  misc_RNA (1)...(19): siRNA sense strand
gagcaaggaugugaugauu

SEQ ID NO: 1065276 - RNA, 19 nt, Homo sapiens
  misc_RNA (1)...(19): siRNA sense strand
gcaaggaugugaugauuuu

SEQ ID NO: 1065277 - RNA, 19 nt, Homo sapiens
  misc_RNA (1)...(19): siRNA sense strand
gccaggagcuguucucugu

SEQ ID NO: 1065278 - RNA, 19 nt, Homo sapiens
  misc_RNA (1)...(19): siRNA sense strand
gaacuuccgcuuccuguca

SEQ ID NO: 1065279 - RNA, 19 nt, Homo sapiens
  misc_RNA (1)...(19): siRNA sense strand
gcaaggagaacccugacaa

SEQ ID NO: 1065280 - RNA, 19 nt, Homo sapiens
  misc_RNA (1)...(19): siRNA sense strand
ggaacugauugccaacuuc

SEQ ID NO: 1065281 - RNA, 19 nt, Homo sapiens
  misc_RNA (1)...(19): siRNA sense strand
ucaccggcgucuacuugua

SEQ ID NO: 1065282 - RNA, 19 nt, Homo sapiens
  misc_RNA (1)...(19): siRNA sense strand
ggugcucgcugccaacaau

SEQ ID NO: 1065283 - RNA, 19 nt, Homo sapiens
  misc_RNA (1)...(19): siRNA sense strand
gcuuaugucugugcucuca

SEQ ID NO: 1065284 - RNA, 19 nt, Homo sapiens
  misc_RNA (1)...(19): siRNA sense strand
caagagcaaggaugugaug

SEQ ID NO: 1065285 - RNA, 19 nt, Homo sapiens
  misc_RNA (1)...(19): siRNA sense strand
ccaaugaggaccagcuguu

SEQ ID NO: 1065286 - RNA, 19 nt, Homo sapiens
  misc_RNA (1)...(19): siRNA sense strand
cuggugcucuucaucauug

SEQ ID NO: 1065287 - RNA, 19 nt, Homo sapiens
  misc_RNA (1)...(19): siRNA sense strand
gccgcaggcucagguauga

SEQ ID NO: 1065288 - RNA, 19 nt, Homo sapiens
  misc_RNA (1)...(19): siRNA sense strand
caucaccggcgucuacuug

SEQ ID NO: 1065289 - RNA, 19 nt, Homo sapiens
  misc_RNA (1)...(19): siRNA sense strand
ccugucaccuggucuguca

SEQ ID NO: 1065290 - RNA, 19 nt, Homo sapiens
  misc_RNA (1)...(19): siRNA sense strand
gaugaugaggaacugauug

SEQ ID NO: 1065291 - RNA, 19 nt, Homo sapiens
  misc_RNA (1)...(19): siRNA sense strand
ucaacaaccacaccuggaa

SEQ ID NO: 1065292 - RNA, 19 nt, Homo sapiens
  misc_RNA (1)...(19): siRNA sense strand
cauuacugcucaccacuca

SEQ ID NO: 1065293 - RNA, 19 nt, Homo sapiens
  misc_RNA (1)...(19): siRNA sense strand
guaugagucccagcucuuu

SEQ ID NO: 1065294 - RNA, 19 nt, Homo sapiens
  misc_RNA (1)...(19): siRNA sense strand
caaggaugaugaggaacug

SEQ ID NO: 1065295 - RNA, 19 nt, Homo sapiens
  misc_RNA (1)...(19): siRNA sense strand
ggaugaugaggaacugauu

SEQ ID NO: 1065296 - RNA, 19 nt, Homo sapiens
  misc_RNA (1)...(19): siRNA sense strand
uggugaggcuuaugucugu

SEQ ID NO: 1065297 - RNA, 19 nt, Homo sapiens
  misc_RNA (1)...(19): siRNA sense strand
gcaucauccucaacaacca

SEQ ID NO: 1065298 - RNA, 19 nt, Homo sapiens
  misc_RNA (1)...(19): siRNA sense strand
gguaugagucccagcucuu

SEQ ID NO: 1065299 - RNA, 19 nt, Homo sapiens
  misc_RNA (1)...(19): siRNA sense strand
ccaccuuccuccuucuaag

SEQ ID NO: 1065300 - RNA, 19 nt, Homo sapiens
  misc_RNA (1)...(19): siRNA sense strand
cuucaucauuggcaucauc

SEQ ID NO: 1065301 - RNA, 19 nt, Homo sapiens
  misc_RNA (1)...(19): siRNA sense strand
aggaacugauugccaacuu

SEQ ID NO: 1065302 - RNA, 19 nt, Homo sapiens
  misc_RNA (1)...(19): siRNA sense strand
ucauuggcaucauccucaa

SEQ ID NO: 1065303 - RNA, 19 nt, Homo sapiens
  misc_RNA (1)...(19): siRNA sense strand
gaccaagugccucaagcau

SEQ ID NO: 1065304 - RNA, 19 nt, Homo sapiens
  misc_RNA (1)...(19): siRNA sense strand
gaagcaagaucaaagauga

SEQ ID NO: 1065305 - RNA, 19 nt, Homo sapiens
  misc_RNA (1)...(19): siRNA sense strand
gaaauggaaucacugguaa

SEQ ID NO: 1065306 - RNA, 19 nt, Homo sapiens
  misc_RNA (1)...(19): siRNA sense strand
gaaaggaacagcugcuaua

SEQ ID NO: 1065307 - RNA, 19 nt, Homo sapiens
  misc_RNA (1)...(19): siRNA sense strand
gaacaacuuuccaauuuag

SEQ ID NO: 1065308 - RNA, 19 nt, Homo sapiens
  misc_RNA (1)...(19): siRNA sense strand
caauauacaugccaucauu

SEQ ID NO: 1065309 - RNA, 19 nt, Homo sapiens
  misc_RNA (1)...(19): siRNA sense strand
ggaaauccuuugagaacaa

SEQ ID NO: 1065310 - RNA, 19 nt, Homo sapiens
  misc_RNA (1)...(19): siRNA sense strand
caacuuugauuccugauga

SEQ ID NO: 1065311 - RNA, 19 nt, Homo sapiens
  misc_RNA (1)...(19): siRNA sense strand
ucaaaucucuuggaaacua

SEQ ID NO: 1065312 - RNA, 19 nt, Homo sapiens
  misc_RNA (1)...(19): siRNA sense strand
uaucguaucuucacacuug

SEQ ID NO: 1065313 - RNA, 19 nt, Homo sapiens
  misc_RNA (1)...(19): siRNA sense strand
gaacagcugcuauacuuga

SEQ ID NO: 1065314 - RNA, 19 nt, Homo sapiens
  misc_RNA (1)...(19): siRNA sense strand
ugaauuggcuggcauggaa

SEQ ID NO: 1065315 - RNA, 19 nt, Homo sapiens
  misc_RNA (1)...(19): siRNA sense strand
caccagagcucgguaauug

SEQ ID NO: 1065316 - RNA, 19 nt, Homo sapiens
  misc_RNA (1)...(19): siRNA sense strand
gcauuuggauuguaauuca

SEQ ID NO: 1065317 - RNA, 19 nt, Homo sapiens
  misc_RNA (1)...(19): siRNA sense strand
gagaccgaauuccuacuua

SEQ ID NO: 1065318 - RNA, 19 nt, Homo sapiens
  misc_RNA (1)...(19): siRNA sense strand
gacucaaucuuucuaguaa

SEQ ID NO: 1065319 - RNA, 19 nt, Homo sapiens
  misc_RNA (1)...(19): siRNA sense strand
gagaacaauucgaagagaa

SEQ ID NO: 1065320 - RNA, 19 nt, Homo sapiens
  misc_RNA (1)...(19): siRNA sense strand
gagaauaaauguggauauc

SEQ ID NO: 1065321 - RNA, 19 nt, Homo sapiens
  misc_RNA (1)...(19): siRNA sense strand
gaccuaagcaacaaugaua

SEQ ID NO: 1065322 - RNA, 19 nt, Homo sapiens
  misc_RNA (1)...(19): siRNA sense strand
gcacugacuguucuugaua

SEQ ID NO: 1065323 - RNA, 19 nt, Homo sapiens
  misc_RNA (1)...(19): siRNA sense strand
gagcagccauauuaaugaa

SEQ ID NO: 1065324 - RNA, 19 nt, Homo sapiens
  misc_RNA (1)...(19): siRNA sense strand
gaacugaaggaaaugguuu

SEQ ID NO: 1065325 - RNA, 19 nt, Homo sapiens
  misc_RNA (1)...(19): siRNA sense strand
ugaauuaaccugcauauca

SEQ ID NO: 1065326 - RNA, 19 nt, Homo sapiens
  misc_RNA (1)...(19): siRNA sense strand
gaauuaaccugcauaucag

SEQ ID NO: 1065327 - RNA, 19 nt, Homo sapiens
  misc_RNA (1)...(19): siRNA sense strand
gaaguucuauaucguaucu

SEQ ID NO: 1065328 - RNA, 19 nt, Homo sapiens
  misc_RNA (1)...(19): siRNA sense strand
ugaggaagcuaaucagaau

SEQ ID NO: 1065329 - RNA, 19 nt, Homo sapiens
  misc_RNA (1)...(19): siRNA sense strand
ugaagcauuuggauuguaa

SEQ ID NO: 1065330 - RNA, 19 nt, Homo sapiens
  misc_RNA (1)...(19): siRNA sense strand
gaaacuauaccuccugaau

SEQ ID NO: 1065331 - RNA, 19 nt, Homo sapiens
  misc_RNA (1)...(19): siRNA sense strand
cagaacaucuuaaacaucu

SEQ ID NO: 1065332 - RNA, 19 nt, Homo sapiens
  misc_RNA (1)...(19): siRNA sense strand
guagaaaccucagugaagu

SEQ ID NO: 1065333 - RNA, 19 nt, Homo sapiens
  misc_RNA (1)...(19): siRNA sense strand
uaugugugcuucagaaauu

SEQ ID NO: 1065334 - RNA, 19 nt, Homo sapiens
  misc_RNA (1)...(19): siRNA sense strand
guaagaaucaacuauguga

SEQ ID NO: 1065335 - RNA, 19 nt, Homo sapiens
  misc_RNA (1)...(19): siRNA sense strand
gaggaagagcggccaguua

SEQ ID NO: 1065336 - RNA, 19 nt, Homo sapiens
  misc_RNA (1)...(19): siRNA sense strand
acaaucaucuuacaacugu

SEQ ID NO: 1065337 - RNA, 19 nt, Homo sapiens
  misc_RNA (1)...(19): siRNA sense strand
gccuguaucuccagcauaa

SEQ ID NO: 1065338 - RNA, 19 nt, Homo sapiens
  misc_RNA (1)...(19): siRNA sense strand
cagcugcuauacuugaaua

SEQ ID NO: 1065339 - RNA, 19 nt, Homo sapiens
  misc_RNA (1)...(19): siRNA sense strand
gauaaacaagcaacuuuga

SEQ ID NO: 1065340 - RNA, 19 nt, Homo sapiens
  misc_RNA (1)...(19): siRNA sense strand
ggugggagcagacagauuu

SEQ ID NO: 1065341 - RNA, 19 nt, Homo sapiens
  misc_RNA (1)...(19): siRNA sense strand
gaacaucuuaaacaucuga

SEQ ID NO: 1065342 - RNA, 19 nt, Homo sapiens
  misc_RNA (1)...(19): siRNA sense strand
cacaagaaguccuaaaaua

SEQ ID NO: 1065343 - RNA, 19 nt, Homo sapiens
  misc_RNA (1)...(19): siRNA sense strand
gaagcuaaucagaaucuuu

SEQ ID NO: 1065344 - RNA, 19 nt, Homo sapiens
  misc_RNA (1)...(19): siRNA sense strand
aggaacagcugcuauacuu

SEQ ID NO: 1065345 - RNA, 19 nt, Homo sapiens
  misc_RNA (1)...(19): siRNA sense strand
gcaacaucgucacuucuau

SEQ ID NO: 1065346 - RNA, 19 nt, Homo sapiens
  misc_RNA (1)...(19): siRNA sense strand
ccaagugaauccagaguca

SEQ ID NO: 1065347 - RNA, 19 nt, Homo sapiens
  misc_RNA (1)...(19): siRNA sense strand
gaacacaagaaguccuaaa

SEQ ID NO: 1065348 - RNA, 19 nt, Homo sapiens
  misc_RNA (1)...(19): siRNA sense strand
cuacuacgguccuuggaaa

SEQ ID NO: 1065349 - RNA, 19 nt, Homo sapiens
  misc_RNA (1)...(19): siRNA sense strand
aauacucccugaagaaauu

SEQ ID NO: 1065350 - RNA, 19 nt, Homo sapiens
  misc_RNA (1)...(19): siRNA sense strand
acaauaaacuucagucacu

SEQ ID NO: 1065351 - RNA, 19 nt, Homo sapiens
  misc_RNA (1)...(19): siRNA sense strand
aacuauaccuccugaauug

SEQ ID NO: 1065352 - RNA, 19 nt, Homo sapiens
  misc_RNA (1)...(19): siRNA sense strand
uuaguagucuucccuauuc

SEQ ID NO: 1065353 - RNA, 19 nt, Homo sapiens
  misc_RNA (1)...(19): siRNA sense strand
gaaaauacucccugaagaa

SEQ ID NO: 1065354 - RNA, 19 nt, Homo sapiens
  misc_RNA (1)...(19): siRNA sense strand
gaugauggaccuagccaaa

SEQ ID NO: 1065355 - RNA, 19 nt, Homo sapiens
  misc_RNA (1)...(19): siRNA sense strand
gaguuugccagcagaaaua

SEQ ID NO: 1065356 - RNA, 19 nt, Homo sapiens
  misc_RNA (1)...(19): siRNA sense strand
cgacucaaucuuucuagua

SEQ ID NO: 1065357 - RNA, 19 nt, Homo sapiens
  misc_RNA (1)...(19): siRNA sense strand
cagaagaaauggaaucacu

SEQ ID NO: 1065358 - RNA, 19 nt, Homo sapiens
  misc_RNA (1)...(19): siRNA sense strand
gaaauccuuugagaacaau

SEQ ID NO: 1065359 - RNA, 19 nt, Homo sapiens
  misc_RNA (1)...(19): siRNA sense strand
gaauuuccuucuuguaguc

SEQ ID NO: 1065360 - RNA, 19 nt, Homo sapiens
  misc_RNA (1)...(19): siRNA sense strand
ggaggaauaaauuacguuu

SEQ ID NO: 1065361 - RNA, 19 nt, Homo sapiens
  misc_RNA (1)...(19): siRNA sense strand
uaagagagcuagaaaaucu

SEQ ID NO: 1065362 - RNA, 19 nt, Homo sapiens
  misc_RNA (1)...(19): siRNA sense strand
cauggaaucacuagaauug

SEQ ID NO: 1065363 - RNA, 19 nt, Homo sapiens
  misc_RNA (1)...(19): siRNA sense strand
cuuaaugucagccauaaua

SEQ ID NO: 1065364 - RNA, 19 nt, Homo sapiens
  misc_RNA (1)...(19): siRNA sense strand
gcuagaaaaucuucagaaa

SEQ ID NO: 1065365 - RNA, 19 nt, Homo sapiens
  misc_RNA (1)...(19): siRNA sense strand
gcagccauauuaaugaaag

SEQ ID NO: 1065366 - RNA, 19 nt, Homo sapiens
  misc_RNA (1)...(19): siRNA sense strand
cgguaauuguguaaacuua

SEQ ID NO: 1065367 - RNA, 19 nt, Homo sapiens
  misc_RNA (1)...(19): siRNA sense strand
aaugaccucuuacaaauuc

SEQ ID NO: 1065368 - RNA, 19 nt, Homo sapiens
  misc_RNA (1)...(19): siRNA sense strand
agaaauggaaucacuggua

SEQ ID NO: 1065369 - RNA, 19 nt, Homo sapiens
  misc_RNA (1)...(19): siRNA sense strand
ggaccuagccaaagugagu

SEQ ID NO: 1065370 - RNA, 19 nt, Homo sapiens
  misc_RNA (1)...(19): siRNA sense strand
uaaaggaacacaagaaguc

SEQ ID NO: 1065371 - RNA, 19 nt, Homo sapiens
  misc_RNA (1)...(19): siRNA sense strand
gcaacaaugauauuaguag

SEQ ID NO: 1065372 - RNA, 19 nt, Homo sapiens
  misc_RNA (1)...(19): siRNA sense strand
ugaaaagguugaagcauuu

SEQ ID NO: 1065373 - RNA, 19 nt, Homo sapiens
  misc_RNA (1)...(19): siRNA sense strand
ugacuguucuugauauaca

SEQ ID NO: 1065374 - RNA, 19 nt, Homo sapiens
  misc_RNA (1)...(19): siRNA sense strand
caguaagaaucaacuaugu

SEQ ID NO: 1065375 - RNA, 19 nt, Homo sapiens
  misc_RNA (1)...(19): siRNA sense strand
caacaucgucacuucuauu

SEQ ID NO: 1065376 - RNA, 19 nt, Homo sapiens
  misc_RNA (1)...(19): siRNA sense strand
ggcagaacaucuuaaacau

SEQ ID NO: 1065377 - RNA, 19 nt, Homo sapiens
  misc_RNA (1)...(19): siRNA sense strand
gcuauaagagagcuagaaa

SEQ ID NO: 1065378 - RNA, 19 nt, Homo sapiens
  misc_RNA (1)...(19): siRNA sense strand
gguugaagcauuuggauug

SEQ ID NO: 1065379 - RNA, 19 nt, Homo sapiens
  misc_RNA (1)...(19): siRNA sense strand
agaccgaauuccuacuuaa

SEQ ID NO: 1065380 - RNA, 19 nt, Homo sapiens
  misc_RNA (1)...(19): siRNA sense strand
ggaagagcggccaguuaaa

SEQ ID NO: 1065381 - RNA, 19 nt, Homo sapiens
  misc_RNA (1)...(19): siRNA sense strand
gugauaaacaagcaacuuu

SEQ ID NO: 1065382 - RNA, 19 nt, Homo sapiens
  misc_RNA (1)...(19): siRNA sense strand
aaacuauaccuccugaauu

SEQ ID NO: 1065383 - RNA, 19 nt, Homo sapiens
  misc_RNA (1)...(19): siRNA sense strand
aaagcaacaucgucacuuc

SEQ ID NO: 1065384 - RNA, 19 nt, Homo sapiens
  misc_RNA (1)...(19): siRNA sense strand
ugagguguuugaugcagua

SEQ ID NO: 1065385 - RNA, 19 nt, Homo sapiens
  misc_RNA (1)...(19): siRNA sense strand
ggaauugcacguaggugaa

SEQ ID NO: 1065386 - RNA, 19 nt, Homo sapiens
  misc_RNA (1)...(19): siRNA sense strand
aaacuuaaugucagccaua

SEQ ID NO: 1065387 - RNA, 19 nt, Homo sapiens
  misc_RNA (1)...(19): siRNA sense strand
ucuccgcgcugguuucaaa

SEQ ID NO: 1065388 - RNA, 19 nt, Homo sapiens
  misc_RNA (1)...(19): siRNA sense strand
aaugcuaccugaaguucua

SEQ ID NO: 1065389 - RNA, 19 nt, Homo sapiens
  misc_RNA (1)...(19): siRNA sense strand
caucgucacuucuauuaac

SEQ ID NO: 1065390 - RNA, 19 nt, Homo sapiens
  misc_RNA (1)...(19): siRNA sense strand
gguagaaaccucagugaag

SEQ ID NO: 1065391 - RNA, 19 nt, Homo sapiens
  misc_RNA (1)...(19): siRNA sense strand
aaagugagucugcuacuga

SEQ ID NO: 1065392 - RNA, 19 nt, Homo sapiens
  misc_RNA (1)...(19): siRNA sense strand
caaaucucuuggaaacuau

SEQ ID NO: 1065393 - RNA, 19 nt, Homo sapiens
  misc_RNA (1)...(19): siRNA sense strand
uacaugccaucauuacauu

SEQ ID NO: 1065394 - RNA, 19 nt, Homo sapiens
  misc_RNA (1)...(19): siRNA sense strand
ugguagaacugaaggaaau

SEQ ID NO: 1065395 - RNA, 19 nt, Homo sapiens
  misc_RNA (1)...(19): siRNA sense strand
caauaaacuucagucacuu

SEQ ID NO: 1065396 - RNA, 19 nt, Homo sapiens
  misc_RNA (1)...(19): siRNA sense strand
caaagugagucugcuacug

SEQ ID NO: 1065397 - RNA, 19 nt, Homo sapiens
  misc_RNA (1)...(19): siRNA sense strand
ggagaauaaauguggauau

SEQ ID NO: 1065398 - RNA, 19 nt, Homo sapiens
  misc_RNA (1)...(19): siRNA sense strand
ggcauggaaucacuagaau

SEQ ID NO: 1065399 - RNA, 19 nt, Homo sapiens
  misc_RNA (1)...(19): siRNA sense strand
ugagaacaauucgaagaga

SEQ ID NO: 1065400 - RNA, 19 nt, Homo sapiens
  misc_RNA (1)...(19): siRNA sense strand
uggaaaggcuugaccuaag

SEQ ID NO: 1065401 - RNA, 19 nt, Homo sapiens
  misc_RNA (1)...(19): siRNA sense strand
gugcuagaccugagggaua

SEQ ID NO: 1065402 - RNA, 19 nt, Homo sapiens
  misc_RNA (1)...(19): siRNA sense strand
gcagaacaucuuaaacauc

SEQ ID NO: 1065403 - RNA, 19 nt, Homo sapiens
  misc_RNA (1)...(19): siRNA sense strand
gaagagcggccaguuaaac

SEQ ID NO: 1065404 - RNA, 19 nt, Homo sapiens
  misc_RNA (1)...(19): siRNA sense strand
gaaagccacuguucgguua

SEQ ID NO: 1065405 - RNA, 19 nt, Homo sapiens
  misc_RNA (1)...(19): siRNA sense strand
guggauaucugucuaagua

SEQ ID NO: 1065406 - RNA, 19 nt, Homo sapiens
  misc_RNA (1)...(19): siRNA sense strand
gagcaauucuucaccaaau

SEQ ID NO: 1065407 - RNA, 19 nt, Homo sapiens
  misc_RNA (1)...(19): siRNA sense strand
gauucugucugaacucuuu

SEQ ID NO: 1065408 - RNA, 19 nt, Homo sapiens
  misc_RNA (1)...(19): siRNA sense strand
gcuaugagcuaagggagaa

SEQ ID NO: 1065409 - RNA, 19 nt, Homo sapiens
  misc_RNA (1)...(19): siRNA sense strand
gaacuacuaccaugaaucu

SEQ ID NO: 1065410 - RNA, 19 nt, Homo sapiens
  misc_RNA (1)...(19): siRNA sense strand
gcucucauaucauuccauu

SEQ ID NO: 1065411 - RNA, 19 nt, Homo sapiens
  misc_RNA (1)...(19): siRNA sense strand
ucaccaaauuuguagauga

SEQ ID NO: 1065412 - RNA, 19 nt, Homo sapiens
  misc_RNA (1)...(19): siRNA sense strand
ggaagauucugucugaacu

SEQ ID NO: 1065413 - RNA, 19 nt, Homo sapiens
  misc_RNA (1)...(19): siRNA sense strand
uguggaagauucugucuga

SEQ ID NO: 1065414 - RNA, 19 nt, Homo sapiens
  misc_RNA (1)...(19): siRNA sense strand
gagcuaagggagaacauug

SEQ ID NO: 1065415 - RNA, 19 nt, Homo sapiens
  misc_RNA (1)...(19): siRNA sense strand
ggauaucugucuaaguaag

SEQ ID NO: 1065416 - RNA, 19 nt, Homo sapiens
  misc_RNA (1)...(19): siRNA sense strand
uaaguaaggauuccauaug

SEQ ID NO: 1065417 - RNA, 19 nt, Homo sapiens
  misc_RNA (1)...(19): siRNA sense strand
caaggaacuacuaccauga

SEQ ID NO: 1065418 - RNA, 19 nt, Homo sapiens
  misc_RNA (1)...(19): siRNA sense strand
acacuguggucuuaguaga

SEQ ID NO: 1065419 - RNA, 19 nt, Homo sapiens
  misc_RNA (1)...(19): siRNA sense strand
acuguggucuuaguagaua

SEQ ID NO: 1065420 - RNA, 19 nt, Homo sapiens
  misc_RNA (1)...(19): siRNA sense strand
aaguaaggauuccauaugg

SEQ ID NO: 1065421 - RNA, 19 nt, Homo sapiens
  misc_RNA (1)...(19): siRNA sense strand
caccaaauuuguagaugag

SEQ ID NO: 1065422 - RNA, 19 nt, Homo sapiens
  misc_RNA (1)...(19): siRNA sense strand
gggacccgcuaugagcuaa

SEQ ID NO: 1065423 - RNA, 19 nt, Homo sapiens
  misc_RNA (1)...(19): siRNA sense strand
cuaaguaaggauuccauau

SEQ ID NO: 1065424 - RNA, 19 nt, Homo sapiens
  misc_RNA (1)...(19): siRNA sense strand
ggaacuacuaccaugaauc

SEQ ID NO: 1065425 - RNA, 19 nt, Homo sapiens
  misc_RNA (1)...(19): siRNA sense strand
ccacuguucgguuaaagga

SEQ ID NO: 1065426 - RNA, 19 nt, Homo sapiens
  misc_RNA (1)...(19): siRNA sense strand
gcucaucuccacccugaag

SEQ ID NO: 1065427 - RNA, 19 nt, Homo sapiens
  misc_RNA (1)...(19): siRNA sense strand
gaacucuuucauucaagga

SEQ ID NO: 1065428 - RNA, 19 nt, Homo sapiens
  misc_RNA (1)...(19): siRNA sense strand
ucuccacccugaaggacaa

SEQ ID NO: 1065429 - RNA, 19 nt, Homo sapiens
  misc_RNA (1)...(19): siRNA sense strand
ucauaucauuccauuccau

SEQ ID NO: 1065430 - RNA, 19 nt, Homo sapiens
  misc_RNA (1)...(19): siRNA sense strand
ucuaaguaaggauuccaua

SEQ ID NO: 1065431 - RNA, 19 nt, Homo sapiens
  misc_RNA (1)...(19): siRNA sense strand
aaggaacuacuaccaugaa

SEQ ID NO: 1065432 - RNA, 19 nt, Homo sapiens
  misc_RNA (1)...(19): siRNA sense strand
gaagauucugucugaacuc

SEQ ID NO: 1065433 - RNA, 19 nt, Homo sapiens
  misc_RNA (1)...(19): siRNA sense strand
ugagcaauucuucaccaaa

SEQ ID NO: 1065434 - RNA, 19 nt, Homo sapiens
  misc_RNA (1)...(19): siRNA sense strand
gacaagaaguuaucauuga

SEQ ID NO: 1065435 - RNA, 19 nt, Homo sapiens
  misc_RNA (1)...(19): siRNA sense strand
guaauacgaggaaauagua

SEQ ID NO: 1065436 - RNA, 19 nt, Homo sapiens
  misc_RNA (1)...(19): siRNA sense strand
ggaaauaguaucaucaugu

SEQ ID NO: 1065437 - RNA, 19 nt, Homo sapiens
  misc_RNA (1)...(19): siRNA sense strand
ggacaagaaguuaucauug

SEQ ID NO: 1065438 - RNA, 19 nt, Homo sapiens
  misc_RNA (1)...(19): siRNA sense strand
caacagaacaauauuggaa

SEQ ID NO: 1065439 - RNA, 19 nt, Homo sapiens
  misc_RNA (1)...(19): siRNA sense strand
gcagacauguccaaggaau

SEQ ID NO: 1065440 - RNA, 19 nt, Homo sapiens
  misc_RNA (1)...(19): siRNA sense strand
ggacaacagaacaauauug

SEQ ID NO: 1065441 - RNA, 19 nt, Homo sapiens
  misc_RNA (1)...(19): siRNA sense strand
gauuugaucccuuuaugaa

SEQ ID NO: 1065442 - RNA, 19 nt, Homo sapiens
  misc_RNA (1)...(19): siRNA sense strand
uuaugaaccuugugauaga

SEQ ID NO: 1065443 - RNA, 19 nt, Homo sapiens
  misc_RNA (1)...(19): siRNA sense strand
uggcagacauguccaagga

SEQ ID NO: 1065444 - RNA, 19 nt, Homo sapiens
  misc_RNA (1)...(19): siRNA sense strand
acagaacaauauuggaaug

SEQ ID NO: 1065445 - RNA, 19 nt, Homo sapiens
  misc_RNA (1)...(19): siRNA sense strand
guggacaacagaacaauau

SEQ ID NO: 1065446 - RNA, 19 nt, Homo sapiens
  misc_RNA (1)...(19): siRNA sense strand
gugguaauacgaggaaaua

SEQ ID NO: 1065447 - RNA, 19 nt, Homo sapiens
  misc_RNA (1)...(19): siRNA sense strand
gguaauacgaggaaauagu

SEQ ID NO: 1065448 - RNA, 19 nt, Homo sapiens
  misc_RNA (1)...(19): siRNA sense strand
gacaacagaacaauauugg

SEQ ID NO: 1065449 - RNA, 19 nt, Homo sapiens
  misc_RNA (1)...(19): siRNA sense strand
gauggcgacuaguggacaa

SEQ ID NO: 1065450 - RNA, 19 nt, Homo sapiens
  misc_RNA (1)...(19): siRNA sense strand
gaggaaauaguaucaucau

SEQ ID NO: 1065451 - RNA, 19 nt, Homo sapiens
  misc_RNA (1)...(19): siRNA sense strand
agacauguccaaggaauau

SEQ ID NO: 1065452 - RNA, 19 nt, Homo sapiens
  misc_RNA (1)...(19): siRNA sense strand
guguggagauggcgacuag

SEQ ID NO: 1065453 - RNA, 19 nt, Homo sapiens
  misc_RNA (1)...(19): siRNA sense strand
cauguuagaagccuuggaa

SEQ ID NO: 1065454 - RNA, 19 nt, Homo sapiens
  misc_RNA (1)...(19): siRNA sense strand
guuagaagccuuggaacga

SEQ ID NO: 1065455 - RNA, 19 nt, Homo sapiens
  misc_RNA (1)...(19): siRNA sense strand
ugaaccuugugauagauga

SEQ ID NO: 1065456 - RNA, 19 nt, Homo sapiens
  misc_RNA (1)...(19): siRNA sense strand
uggacaagaaguuaucauu

SEQ ID NO: 1065457 - RNA, 19 nt, Homo sapiens
  misc_RNA (1)...(19): siRNA sense strand
gaaccuugugauagaugaa

SEQ ID NO: 1065458 - RNA, 19 nt, Homo sapiens
  misc_RNA (1)...(19): siRNA sense strand
cgaggaaauaguaucauca

SEQ ID NO: 1065459 - RNA, 19 nt, Homo sapiens
  misc_RNA (1)...(19): siRNA sense strand
cagacauguccaaggaaua

SEQ ID NO: 1065460 - RNA, 19 nt, Homo sapiens
  misc_RNA (1)...(19): siRNA sense strand
cuuuaugaaccuugugaua

SEQ ID NO: 1065461 - RNA, 19 nt, Homo sapiens
  misc_RNA (1)...(19): siRNA sense strand
acgaggaaauaguaucauc

SEQ ID NO: 1065462 - RNA, 19 nt, Homo sapiens
  misc_RNA (1)...(19): siRNA sense strand
gcgacuaguggacaacaga

SEQ ID NO: 1065463 - RNA, 19 nt, Homo sapiens
  misc_RNA (1)...(19): siRNA sense strand
agaugaauguguggagaug

SEQ ID NO: 1065464 - RNA, 19 nt, Homo sapiens
  misc_RNA (1)...(19): siRNA sense strand
uuaaaugguggcagacaug

SEQ ID NO: 1065465 - RNA, 19 nt, Homo sapiens
  misc_RNA (1)...(19): siRNA sense strand
uaugaaccuugugauagau

SEQ ID NO: 1065466 - RNA, 19 nt, Homo sapiens
  misc_RNA (1)...(19): siRNA sense strand
agaacaauauuggaauggu

SEQ ID NO: 1065467 - RNA, 19 nt, Homo sapiens
  misc_RNA (1)...(19): siRNA sense strand
cgacuaguggacaacagaa

SEQ ID NO: 1065468 - RNA, 19 nt, Homo sapiens
  misc_RNA (1)...(19): siRNA sense strand
aggaaauaguaucaucaug

SEQ ID NO: 1065469 - RNA, 19 nt, Homo sapiens
  misc_RNA (1)...(19): siRNA sense strand
gcaauacugucacuauaaa

SEQ ID NO: 1065470 - RNA, 19 nt, Homo sapiens
  misc_RNA (1)...(19): siRNA sense strand
guaaagaaaugccucgaaa

SEQ ID NO: 1065471 - RNA, 19 nt, Homo sapiens
  misc_RNA (1)...(19): siRNA sense strand
ggaagaagaaccaguuaua

SEQ ID NO: 1065472 - RNA, 19 nt, Homo sapiens
  misc_RNA (1)...(19): siRNA sense strand
ccaauccgaucucuucuua

SEQ ID NO: 1065473 - RNA, 19 nt, Homo sapiens
  misc_RNA (1)...(19): siRNA sense strand
caaggcaccucgucaguaa

SEQ ID NO: 1065474 - RNA, 19 nt, Homo sapiens
  misc_RNA (1)...(19): siRNA sense strand
gaagaagaaccaguuauaa

SEQ ID NO: 1065475 - RNA, 19 nt, Homo sapiens
  misc_RNA (1)...(19): siRNA sense strand
gauauggugucuccuggua

SEQ ID NO: 1065476 - RNA, 19 nt, Homo sapiens
  misc_RNA (1)...(19): siRNA sense strand
ugaagcagaucaacaaaug

SEQ ID NO: 1065477 - RNA, 19 nt, Homo sapiens
  misc_RNA (1)...(19): siRNA sense strand
gauauaauccuccaacuuc

SEQ ID NO: 1065478 - RNA, 19 nt, Homo sapiens
  misc_RNA (1)...(19): siRNA sense strand
gcaaacauguaucaaugga

SEQ ID NO: 1065479 - RNA, 19 nt, Homo sapiens
  misc_RNA (1)...(19): siRNA sense strand
uaacugcagugaagucuga

SEQ ID NO: 1065480 - RNA, 19 nt, Homo sapiens
  misc_RNA (1)...(19): siRNA sense strand
acaaaggaauuucucauug

SEQ ID NO: 1065481 - RNA, 19 nt, Homo sapiens
  misc_RNA (1)...(19): siRNA sense strand
gcucagaccauuuaugaaa

SEQ ID NO: 1065482 - RNA, 19 nt, Homo sapiens
  misc_RNA (1)...(19): siRNA sense strand
gaaggaagaagaaccaguu

SEQ ID NO: 1065483 - RNA, 19 nt, Homo sapiens
  misc_RNA (1)...(19): siRNA sense strand
guucagaccucuuccuguu

SEQ ID NO: 1065484 - RNA, 19 nt, Homo sapiens
  misc_RNA (1)...(19): siRNA sense strand
aaacugcucugaacuaaag

SEQ ID NO: 1065485 - RNA, 19 nt, Homo sapiens
  misc_RNA (1)...(19): siRNA sense strand
gcugugcacuugauuauag

SEQ ID NO: 1065486 - RNA, 19 nt, Homo sapiens
  misc_RNA (1)...(19): siRNA sense strand
ggugaaaccucugauuguu

SEQ ID NO: 1065487 - RNA, 19 nt, Homo sapiens
  misc_RNA (1)...(19): siRNA sense strand
ggauaaaucuuccucuacu

SEQ ID NO: 1065488 - RNA, 19 nt, Homo sapiens
  misc_RNA (1)...(19): siRNA sense strand
uacgagaucugaugaguga

SEQ ID NO: 1065489 - RNA, 19 nt, Homo sapiens
  misc_RNA (1)...(19): siRNA sense strand
acuaggcguugacaaauua

SEQ ID NO: 1065490 - RNA, 19 nt, Homo sapiens
  misc_RNA (1)...(19): siRNA sense strand
gaacagucccucccacuuc

SEQ ID NO: 1065491 - RNA, 19 nt, Homo sapiens
  misc_RNA (1)...(19): siRNA sense strand
ggcaugagaaaccaaauua

SEQ ID NO: 1065492 - RNA, 19 nt, Homo sapiens
  misc_RNA (1)...(19): siRNA sense strand
gcaagacgagucacagaaa

SEQ ID NO: 1065493 - RNA, 19 nt, Homo sapiens
  misc_RNA (1)...(19): siRNA sense strand
ugacaggugugcccacuga

SEQ ID NO: 1065494 - RNA, 19 nt, Homo sapiens
  misc_RNA (1)...(19): siRNA sense strand
ccacaggagugcugcuuga

SEQ ID NO: 1065495 - RNA, 19 nt, Homo sapiens
  misc_RNA (1)...(19): siRNA sense strand
ugaaggaggucucucuugu

SEQ ID NO: 1065496 - RNA, 19 nt, Homo sapiens
  misc_RNA (1)...(19): siRNA sense strand
ucucuugucuggcaucuuu

SEQ ID NO: 1065497 - RNA, 19 nt, Homo sapiens
  misc_RNA (1)...(19): siRNA sense strand
gaauauugcugaugaaccu

SEQ ID NO: 1065498 - RNA, 19 nt, Homo sapiens
  misc_RNA (1)...(19): siRNA sense strand
ucaagaggcuuuccuaucg

SEQ ID NO: 1065499 - RNA, 19 nt, Homo sapiens
  misc_RNA (1)...(19): siRNA sense strand
ugaaagaaggucuaaggua

SEQ ID NO: 1065500 - RNA, 19 nt, Homo sapiens
  misc_RNA (1)...(19): siRNA sense strand
uaugaagccuggagccuuu

SEQ ID NO: 1065501 - RNA, 19 nt, Homo sapiens
  misc_RNA (1)...(19): siRNA sense strand
gaagucugauucugaugga

SEQ ID NO: 1065502 - RNA, 19 nt, Homo sapiens
  misc_RNA (1)...(19): siRNA sense strand
gcauucacuaguacaauua

SEQ ID NO: 1065503 - RNA, 19 nt, Homo sapiens
  misc_RNA (1)...(19): siRNA sense strand
uggcaaacauguaucaaug

SEQ ID NO: 1065504 - RNA, 19 nt, Homo sapiens
  misc_RNA (1)...(19): siRNA sense strand
ucagaauaaucuuggauga

SEQ ID NO: 1065505 - RNA, 19 nt, Homo sapiens
  misc_RNA (1)...(19): siRNA sense strand
gcucugaacuaaagcucaa

SEQ ID NO: 1065506 - RNA, 19 nt, Homo sapiens
  misc_RNA (1)...(19): siRNA sense strand
caaaggaauuucucauugc

SEQ ID NO: 1065507 - RNA, 19 nt, Homo sapiens
  misc_RNA (1)...(19): siRNA sense strand
uaacaaggcagauaugaag

SEQ ID NO: 1065508 - RNA, 19 nt, Homo sapiens
  misc_RNA (1)...(19): siRNA sense strand
caagacgagucacagaaau

SEQ ID NO: 1065509 - RNA, 19 nt, Homo sapiens
  misc_RNA (1)...(19): siRNA sense strand
gccaaggccuacaguguug

SEQ ID NO: 1065510 - RNA, 19 nt, Homo sapiens
  misc_RNA (1)...(19): siRNA sense strand
uuaaacugcucugaacuaa

SEQ ID NO: 1065511 - RNA, 19 nt, Homo sapiens
  misc_RNA (1)...(19): siRNA sense strand
caaaacagccuucccaaaa

SEQ ID NO: 1065512 - RNA, 19 nt, Homo sapiens
  misc_RNA (1)...(19): siRNA sense strand
gagccacucuccagcauag

SEQ ID NO: 1065513 - RNA, 19 nt, Homo sapiens
  misc_RNA (1)...(19): siRNA sense strand
cuauaaaucugaguagaga

SEQ ID NO: 1065514 - RNA, 19 nt, Homo sapiens
  misc_RNA (1)...(19): siRNA sense strand
ccacagaagcaacgucaaa

SEQ ID NO: 1065515 - RNA, 19 nt, Homo sapiens
  misc_RNA (1)...(19): siRNA sense strand
gaguagagauuauguucgu

SEQ ID NO: 1065516 - RNA, 19 nt, Homo sapiens
  misc_RNA (1)...(19): siRNA sense strand
ccagcgauguuguccauau

SEQ ID NO: 1065517 - RNA, 19 nt, Homo sapiens
  misc_RNA (1)...(19): siRNA sense strand
ggccuacaguguugugaaa

SEQ ID NO: 1065518 - RNA, 19 nt, Homo sapiens
  misc_RNA (1)...(19): siRNA sense strand
agaauaaucuuggaugaag

SEQ ID NO: 1065519 - RNA, 19 nt, Homo sapiens
  misc_RNA (1)...(19): siRNA sense strand
acacggcucagaccauuua

SEQ ID NO: 1065520 - RNA, 19 nt, Homo sapiens
  misc_RNA (1)...(19): siRNA sense strand
ucaaaugacuccagaucca

SEQ ID NO: 1065521 - RNA, 19 nt, Homo sapiens
  misc_RNA (1)...(19): siRNA sense strand
ggagcugugcacuugauua

SEQ ID NO: 1065522 - RNA, 19 nt, Homo sapiens
  misc_RNA (1)...(19): siRNA sense strand
ugaccaggaugcuuuguuc

SEQ ID NO: 1065523 - RNA, 19 nt, Homo sapiens
  misc_RNA (1)...(19): siRNA sense strand
aaucagaguccaauacaaa

SEQ ID NO: 1065524 - RNA, 19 nt, Homo sapiens
  misc_RNA (1)...(19): siRNA sense strand
caugguugaugaugcaauu

SEQ ID NO: 1065525 - RNA, 19 nt, Homo sapiens
  misc_RNA (1)...(19): siRNA sense strand
guuaaacugcucugaacua

SEQ ID NO: 1065526 - RNA, 19 nt, Homo sapiens
  misc_RNA (1)...(19): siRNA sense strand
ggagccaaaucugguuauu

SEQ ID NO: 1065527 - RNA, 19 nt, Homo sapiens
  misc_RNA (1)...(19): siRNA sense strand
guauugcaguaaagaaaug

SEQ ID NO: 1065528 - RNA, 19 nt, Homo sapiens
  misc_RNA (1)...(19): siRNA sense strand
gagcugugcacuugauuau

SEQ ID NO: 1065529 - RNA, 19 nt, Homo sapiens
  misc_RNA (1)...(19): siRNA sense strand
gauaaaucagaguccaaua

SEQ ID NO: 1065530 - RNA, 19 nt, Homo sapiens
  misc_RNA (1)...(19): siRNA sense strand
agagacugcuuaugauaug

SEQ ID NO: 1065531 - RNA, 19 nt, Homo sapiens
  misc_RNA (1)...(19): siRNA sense strand
gcaacaucacaaaugaaua

SEQ ID NO: 1065532 - RNA, 19 nt, Homo sapiens
  misc_RNA (1)...(19): siRNA sense strand
gagauuauguucgugugau

SEQ ID NO: 1065533 - RNA, 19 nt, Homo sapiens
  misc_RNA (1)...(19): siRNA sense strand
aaccauaacugcagugaag

SEQ ID NO: 1065534 - RNA, 19 nt, Homo sapiens
  misc_RNA (1)...(19): siRNA sense strand
uuaauggcauggaagagaa

SEQ ID NO: 1065535 - RNA, 19 nt, Homo sapiens
  misc_RNA (1)...(19): siRNA sense strand
ugacgagagugggaaugua

SEQ ID NO: 1065536 - RNA, 19 nt, Homo sapiens
  misc_RNA (1)...(19): siRNA sense strand
gaacgugcucagacucuug

SEQ ID NO: 1065537 - RNA, 19 nt, Homo sapiens
  misc_RNA (1)...(19): siRNA sense strand
gcagugaagucugauucug

SEQ ID NO: 1065538 - RNA, 19 nt, Homo sapiens
  misc_RNA (1)...(19): siRNA sense strand
aaagcucacuccaacaugu

SEQ ID NO: 1065539 - RNA, 19 nt, Homo sapiens
  misc_RNA (1)...(19): siRNA sense strand
agacacggcucagaccauu

SEQ ID NO: 1065540 - RNA, 19 nt, Homo sapiens
  misc_RNA (1)...(19): siRNA sense strand
gaugucaccugcaguuugc

SEQ ID NO: 1065541 - RNA, 19 nt, Homo sapiens
  misc_RNA (1)...(19): siRNA sense strand
ucagaccucuuccuguuuc

SEQ ID NO: 1065542 - RNA, 19 nt, Homo sapiens
  misc_RNA (1)...(19): siRNA sense strand
ugaaagagggaaucacaga

SEQ ID NO: 1065543 - RNA, 19 nt, Homo sapiens
  misc_RNA (1)...(19): siRNA sense strand
caaacagaaugguucaaac

SEQ ID NO: 1065544 - RNA, 19 nt, Homo sapiens
  misc_RNA (1)...(19): siRNA sense strand
cuaucgacaugguuuacua

SEQ ID NO: 1065545 - RNA, 19 nt, Homo sapiens
  misc_RNA (1)...(19): siRNA sense strand
cggcagguguucauuguuc

SEQ ID NO: 1065546 - RNA, 19 nt, Homo sapiens
  misc_RNA (1)...(19): siRNA sense strand
ucagucugcccguuaauaa

SEQ ID NO: 1065547 - RNA, 19 nt, Homo sapiens
  misc_RNA (1)...(19): siRNA sense strand
gcaggagaaggaagaagaa

SEQ ID NO: 1065548 - RNA, 19 nt, Homo sapiens
  misc_RNA (1)...(19): siRNA sense strand
ccacugagaaugaugacuu

SEQ ID NO: 1065549 - RNA, 19 nt, Homo sapiens
  misc_RNA (1)...(19): siRNA sense strand
ccaacuucauuuacaacuu

SEQ ID NO: 1065550 - RNA, 19 nt, Homo sapiens
  misc_RNA (1)...(19): siRNA sense strand
cggcucagaccauuuauga

SEQ ID NO: 1065551 - RNA, 19 nt, Homo sapiens
  misc_RNA (1)...(19): siRNA sense strand
caagaggcuuuccuaucga

SEQ ID NO: 1065552 - RNA, 19 nt, Homo sapiens
  misc_RNA (1)...(19): siRNA sense strand
ugauuggucuggcucaguu

SEQ ID NO: 1065553 - RNA, 19 nt, Homo sapiens
  misc_RNA (1)...(19): siRNA sense strand
ccaggaugcuuuguucuuc

SEQ ID NO: 1065554 - RNA, 19 nt, Homo sapiens
  misc_RNA (1)...(19): siRNA sense strand
acauggacguaauacagua

SEQ ID NO: 1065555 - RNA, 19 nt, Homo sapiens
  misc_RNA (1)...(19): siRNA sense strand
gaugaugcaauugugauaa

SEQ ID NO: 1065556 - RNA, 19 nt, Homo sapiens
  misc_RNA (1)...(19): siRNA sense strand
gauguuguccauaucagaa

SEQ ID NO: 1065557 - RNA, 19 nt, Homo sapiens
  misc_RNA (1)...(19): siRNA sense strand
caaaugcaauacugucacu

SEQ ID NO: 1065558 - RNA, 19 nt, Homo sapiens
  misc_RNA (1)...(19): siRNA sense strand
gaacucacaaacagaaugg

SEQ ID NO: 1065559 - RNA, 19 nt, Homo sapiens
  misc_RNA (1)...(19): siRNA sense strand
caugcaaaccugauuguga

SEQ ID NO: 1065560 - RNA, 19 nt, Homo sapiens
  misc_RNA (1)...(19): siRNA sense strand
gaaaaggaaggaaccauga

SEQ ID NO: 1065561 - RNA, 19 nt, Homo sapiens
  misc_RNA (1)...(19): siRNA sense strand
gcaauugugauaagagaca

SEQ ID NO: 1065562 - RNA, 19 nt, Homo sapiens
  misc_RNA (1)...(19): siRNA sense strand
gauaaaucuuccucuacuc

SEQ ID NO: 1065563 - RNA, 19 nt, Homo sapiens
  misc_RNA (1)...(19): siRNA sense strand
ucuugaauauugcugauga

SEQ ID NO: 1065564 - RNA, 19 nt, Homo sapiens
  misc_RNA (1)...(19): siRNA sense strand
ggaacagucccucccacuu

SEQ ID NO: 1065565 - RNA, 19 nt, Homo sapiens
  misc_RNA (1)...(19): siRNA sense strand
augcaauacugucacuaua

SEQ ID NO: 1065566 - RNA, 19 nt, Homo sapiens
  misc_RNA (1)...(19): siRNA sense strand
ggaccuaugcauucacuag

SEQ ID NO: 1065567 - RNA, 19 nt, Homo sapiens
  misc_RNA (1)...(19): siRNA sense strand
ggccagauguccggcaaga

SEQ ID NO: 1065568 - RNA, 19 nt, Homo sapiens
  misc_RNA (1)...(19): siRNA sense strand
agcgauggcugcucuagaa

SEQ ID NO: 1065569 - RNA, 19 nt, Homo sapiens
  misc_RNA (1)...(19): siRNA sense strand
caacaugugucaagccaau

SEQ ID NO: 1065570 - RNA, 19 nt, Homo sapiens
  misc_RNA (1)...(19): siRNA sense strand
ggaagacauugaccacaga

SEQ ID NO: 1065571 - RNA, 19 nt, Homo sapiens
  misc_RNA (1)...(19): siRNA sense strand
caaauagccucgcccaucu

SEQ ID NO: 1065572 - RNA, 19 nt, Homo sapiens
  misc_RNA (1)...(19): siRNA sense strand
ggacauggaggaacggaaa

SEQ ID NO: 1065573 - RNA, 19 nt, Homo sapiens
  misc_RNA (1)...(19): siRNA sense strand
ggaaucauccuugcugaaa

SEQ ID NO: 1065574 - RNA, 19 nt, Homo sapiens
  misc_RNA (1)...(19): siRNA sense strand
uugaagagcuggugaagga

SEQ ID NO: 1065575 - RNA, 19 nt, Homo sapiens
  misc_RNA (1)...(19): siRNA sense strand
gcugaaaucucccagaaac

SEQ ID NO: 1065576 - RNA, 19 nt, Homo sapiens
  misc_RNA (1)...(19): siRNA sense strand
ggagaaggagaaacaaaga

SEQ ID NO: 1065577 - RNA, 19 nt, Homo sapiens
  misc_RNA (1)...(19): siRNA sense strand
gaacuuaggaagggucuug

SEQ ID NO: 1065578 - RNA, 19 nt, Homo sapiens
  misc_RNA (1)...(19): siRNA sense strand
gaagagcuggugaaggaaa

SEQ ID NO: 1065579 - RNA, 19 nt, Homo sapiens
  misc_RNA (1)...(19): siRNA sense strand
gaaucauccuugcugaaau

SEQ ID NO: 1065580 - RNA, 19 nt, Homo sapiens
  misc_RNA (1)...(19): siRNA sense strand
ucagagugaugaugaagga

SEQ ID NO: 1065581 - RNA, 19 nt, Homo sapiens
  misc_RNA (1)...(19): siRNA sense strand
gagaaacaaagacuccaaa

SEQ ID NO: 1065582 - RNA, 19 nt, Homo sapiens
  misc_RNA (1)...(19): siRNA sense strand
ccagggauuuggagaagga

SEQ ID NO: 1065583 - RNA, 19 nt, Homo sapiens
  misc_RNA (1)...(19): siRNA sense strand
ggagugaggaacuuaggaa

SEQ ID NO: 1065584 - RNA, 19 nt, Homo sapiens
  misc_RNA (1)...(19): siRNA sense strand
agucuuaccuuccaagcaa

SEQ ID NO: 1065585 - RNA, 19 nt, Homo sapiens
  misc_RNA (1)...(19): siRNA sense strand
gaaacuccgggaaauggaa

SEQ ID NO: 1065586 - RNA, 19 nt, Homo sapiens
  misc_RNA (1)...(19): siRNA sense strand
gagcuagaccgauuugaag

SEQ ID NO: 1065587 - RNA, 19 nt, Homo sapiens
  misc_RNA (1)...(19): siRNA sense strand
gaugaugaaggaauccaaa

SEQ ID NO: 1065588 - RNA, 19 nt, Homo sapiens
  misc_RNA (1)...(19): siRNA sense strand
aauccaaacugacgaacau

SEQ ID NO: 1065589 - RNA, 19 nt, Homo sapiens
  misc_RNA (1)...(19): siRNA sense strand
cagaaggagugaggaacuu

SEQ ID NO: 1065590 - RNA, 19 nt, Homo sapiens
  misc_RNA (1)...(19): siRNA sense strand
ggcaaacaguaccgaggaa

SEQ ID NO: 1065591 - RNA, 19 nt, Homo sapiens
  misc_RNA (1)...(19): siRNA sense strand
ggaaauccaggagaggaaa

SEQ ID NO: 1065592 - RNA, 19 nt, Homo sapiens
  misc_RNA (1)...(19): siRNA sense strand
gaugaaggaauccaaacug

SEQ ID NO: 1065593 - RNA, 19 nt, Homo sapiens
  misc_RNA (1)...(19): siRNA sense strand
aaucauccuugcugaaauc

SEQ ID NO: 1065594 - RNA, 19 nt, Homo sapiens
  misc_RNA (1)...(19): siRNA sense strand
gaagacauugaccacagaa

SEQ ID NO: 1065595 - RNA, 19 nt, Homo sapiens
  misc_RNA (1)...(19): siRNA sense strand
gagugaugaugaaggaauc

SEQ ID NO: 1065596 - RNA, 19 nt, Homo sapiens
  misc_RNA (1)...(19): siRNA sense strand
augaaggaauccaaacuga

SEQ ID NO: 1065597 - RNA, 19 nt, Homo sapiens
  misc_RNA (1)...(19): siRNA sense strand
cagagagucuuaccuucca

SEQ ID NO: 1065598 - RNA, 19 nt, Homo sapiens
  misc_RNA (1)...(19): siRNA sense strand
ccacagaaggagugaggaa

SEQ ID NO: 1065599 - RNA, 19 nt, Homo sapiens
  misc_RNA (1)...(19): siRNA sense strand
agaagcagauggagguagu

SEQ ID NO: 1065600 - RNA, 19 nt, Homo sapiens
  misc_RNA (1)...(19): siRNA sense strand
ugagcuagaccgauuugaa

SEQ ID NO: 1065601 - RNA, 19 nt, Homo sapiens
  misc_RNA (1)...(19): siRNA sense strand
gacauugaccacagaagga

SEQ ID NO: 1065602 - RNA, 19 nt, Homo sapiens
  misc_RNA (1)...(19): siRNA sense strand
uugcugaaaucucccagaa

SEQ ID NO: 1065603 - RNA, 19 nt, Homo sapiens
  misc_RNA (1)...(19): siRNA sense strand
ccugcgagcuguucagagu

SEQ ID NO: 1065604 - RNA, 19 nt, Homo sapiens
  misc_RNA (1)...(19): siRNA sense strand
ggagguagugaccaaagga

SEQ ID NO: 1065605 - RNA, 19 nt, Homo sapiens
  misc_RNA (1)...(19): siRNA sense strand
aaacaguaccgaggaauca

SEQ ID NO: 1065606 - RNA, 19 nt, Homo sapiens
  misc_RNA (1)...(19): siRNA sense strand
gaaggagugaggaacuuag

SEQ ID NO: 1065607 - RNA, 19 nt, Homo sapiens
  misc_RNA (1)...(19): siRNA sense strand
caacauccagccagagagu

SEQ ID NO: 1065608 - RNA, 19 nt, Homo sapiens
  misc_RNA (1)...(19): siRNA sense strand
ccaagaccaucacuuacac

SEQ ID NO: 1065609 - RNA, 19 nt, Homo sapiens
  misc_RNA (1)...(19): siRNA sense strand
gaaacaaagacuccaaaau

SEQ ID NO: 1065610 - RNA, 19 nt, Homo sapiens
  misc_RNA (1)...(19): siRNA sense strand
agaaggagugaggaacuua

SEQ ID NO: 1065611 - RNA, 19 nt, Homo sapiens
  misc_RNA (1)...(19): siRNA sense strand
agauggagguagugaccaa

SEQ ID NO: 1065612 - RNA, 19 nt, Homo sapiens
  misc_RNA (1)...(19): siRNA sense strand
cccagaaacuccgggaaau

SEQ ID NO: 1065613 - RNA, 19 nt, Homo sapiens
  misc_RNA (1)...(19): siRNA sense strand
caaacaguaccgaggaauc

SEQ ID NO: 1065614 - RNA, 19 nt, Homo sapiens
  misc_RNA (1)...(19): siRNA sense strand
gcaaacaguaccgaggaau

SEQ ID NO: 1065615 - RNA, 19 nt, Homo sapiens
  misc_RNA (1)...(19): siRNA sense strand
gaauccaaacugacgaaca

SEQ ID NO: 1065616 - RNA, 19 nt, Homo sapiens
  misc_RNA (1)...(19): siRNA sense strand
ccagaaacuccgggaaaug

SEQ ID NO: 1065617 - RNA, 19 nt, Homo sapiens
  misc_RNA (1)...(19): siRNA sense strand
caccagggauuuggagaag

SEQ ID NO: 1065618 - RNA, 19 nt, Homo sapiens
  misc_RNA (1)...(19): siRNA sense strand
gagcuguucagagugauga

SEQ ID NO: 1065619 - RNA, 19 nt, Homo sapiens
  misc_RNA (1)...(19): siRNA sense strand
cagaaacuccgggaaaugg

SEQ ID NO: 1065620 - RNA, 19 nt, Homo sapiens
  misc_RNA (1)...(19): siRNA sense strand
aagaauuccuggcugacau

SEQ ID NO: 1065621 - RNA, 19 nt, Homo sapiens
  misc_RNA (1)...(19): siRNA sense strand
ugcgagcuguucagaguga

SEQ ID NO: 1065622 - RNA, 19 nt, Homo sapiens
  misc_RNA (1)...(19): siRNA sense strand
gagguagugaccaaaggaa

SEQ ID NO: 1065623 - RNA, 19 nt, Homo sapiens
  misc_RNA (1)...(19): siRNA sense strand
ccaccagggauuuggagaa

SEQ ID NO: 1065624 - RNA, 19 nt, Homo sapiens
  misc_RNA (1)...(19): siRNA sense strand
gccccaagaccaucacuua

SEQ ID NO: 1065625 - RNA, 19 nt, Homo sapiens
  misc_RNA (1)...(19): siRNA sense strand
ugaaaucucccagaaacuc

SEQ ID NO: 1065626 - RNA, 19 nt, Homo sapiens
  misc_RNA (1)...(19): siRNA sense strand
ccucaagccaccagggauu

SEQ ID NO: 1065627 - RNA, 19 nt, Homo sapiens
  misc_RNA (1)...(19): siRNA sense strand
gggauuuggagaaggagaa

SEQ ID NO: 1065628 - RNA, 19 nt, Homo sapiens
  misc_RNA (1)...(19): siRNA sense strand
gauuugaagagcuggugaa

SEQ ID NO: 1065629 - RNA, 19 nt, Homo sapiens
  misc_RNA (1)...(19): siRNA sense strand
uccaggagaggaaagaauu

SEQ ID NO: 1065630 - RNA, 19 nt, Homo sapiens
  misc_RNA (1)...(19): siRNA sense strand
gaaauccaggagaggaaag

SEQ ID NO: 1065631 - RNA, 19 nt, Homo sapiens
  misc_RNA (1)...(19): siRNA sense strand
ggauuuggagaaggagaaa

SEQ ID NO: 1065632 - RNA, 19 nt, Homo sapiens
  misc_RNA (1)...(19): siRNA sense strand
ugggacagggcaaacagua

SEQ ID NO: 1065633 - RNA, 19 nt, Homo sapiens
  misc_RNA (1)...(19): siRNA sense strand
cccaagaccaucacuuaca

SEQ ID NO: 1065634 - RNA, 19 nt, Homo sapiens
  misc_RNA (1)...(19): siRNA sense strand
gaaaggagguggcugauag

SEQ ID NO: 1065635 - RNA, 19 nt, Homo sapiens
  misc_RNA (1)...(19): siRNA sense strand
acagugaaaucaagaacua

SEQ ID NO: 1065636 - RNA, 19 nt, Homo sapiens
  misc_RNA (1)...(19): siRNA sense strand
gauagaugguacagugaaa

SEQ ID NO: 1065637 - RNA, 19 nt, Homo sapiens
  misc_RNA (1)...(19): siRNA sense strand
ggaagaacaccaagaagau

SEQ ID NO: 1065638 - RNA, 19 nt, Homo sapiens
  misc_RNA (1)...(19): siRNA sense strand
caagucagcuuccaaacag

SEQ ID NO: 1065639 - RNA, 19 nt, Homo sapiens
  misc_RNA (1)...(19): siRNA sense strand
ggaaaggagguggcugaua

SEQ ID NO: 1065640 - RNA, 19 nt, Homo sapiens
  misc_RNA (1)...(19): siRNA sense strand
ggaaggcguccgcaaguga

SEQ ID NO: 1065641 - RNA, 19 nt, Homo sapiens
  misc_RNA (1)...(19): siRNA sense strand
gcaagucagcuuccaaaca

SEQ ID NO: 1065642 - RNA, 19 nt, Homo sapiens
  misc_RNA (1)...(19): siRNA sense strand
gaagaacaccaagaagaug

SEQ ID NO: 1065643 - RNA, 19 nt, Homo sapiens
  misc_RNA (1)...(19): siRNA sense strand
ccgggaggcucaacaguau

SEQ ID NO: 1065644 - RNA, 19 nt, Homo sapiens
  misc_RNA (1)...(19): siRNA sense strand
ccacugaagcucugcaaga

SEQ ID NO: 1065645 - RNA, 19 nt, Homo sapiens
  misc_RNA (1)...(19): siRNA sense strand
ugaaggcccacaaugagua

SEQ ID NO: 1065646 - RNA, 19 nt, Homo sapiens
  misc_RNA (1)...(19): siRNA sense strand
gcaugggcauccuaugauc

SEQ ID NO: 1065647 - RNA, 19 nt, Homo sapiens
  misc_RNA (1)...(19): siRNA sense strand
gggcaagucagcuuccaaa

SEQ ID NO: 1065648 - RNA, 19 nt, Homo sapiens
  misc_RNA (1)...(19): siRNA sense strand
cacugaagcucugcaagaa

SEQ ID NO: 1065649 - RNA, 19 nt, Homo sapiens
  misc_RNA (1)...(19): siRNA sense strand
caaugagggcuucuucgaa

SEQ ID NO: 1065650 - RNA, 19 nt, Homo sapiens
  misc_RNA (1)...(19): siRNA sense strand
uggaagaacaccaagaaga

SEQ ID NO: 1065651 - RNA, 19 nt, Homo sapiens
  misc_RNA (1)...(19): siRNA sense strand
ccuaugaucagacaggaaa

SEQ ID NO: 1065652 - RNA, 19 nt, Homo sapiens
  misc_RNA (1)...(19): siRNA sense strand
uauggaagaacaccaagaa

SEQ ID NO: 1065653 - RNA, 19 nt, Homo sapiens
  misc_RNA (1)...(19): siRNA sense strand
acacuucacggccauggua

SEQ ID NO: 1065654 - RNA, 19 nt, Homo sapiens
  misc_RNA (1)...(19): siRNA sense strand
gaugguacagugaaaucaa

SEQ ID NO: 1065655 - RNA, 19 nt, Homo sapiens
  misc_RNA (1)...(19): siRNA sense strand
ccuuugugguggccagaua

SEQ ID NO: 1065656 - RNA, 19 nt, Homo sapiens
  misc_RNA (1)...(19): siRNA sense strand
gggaggcucaacaguauuc

SEQ ID NO: 1065657 - RNA, 19 nt, Homo sapiens
  misc_RNA (1)...(19): siRNA sense strand
ugacggguccuccuuugug

SEQ ID NO: 1065658 - RNA, 19 nt, Homo sapiens
  misc_RNA (1)...(19): siRNA sense strand
ucaaugagggcuucuucga

SEQ ID NO: 1065659 - RNA, 19 nt, Homo sapiens
  misc_RNA (1)...(19): siRNA sense strand
caagugacggguccuccuu

SEQ ID NO: 1065660 - RNA, 19 nt, Homo sapiens
  misc_RNA (1)...(19): siRNA sense strand
ggcauccuaugaucagaca

SEQ ID NO: 1065661 - RNA, 19 nt, Homo sapiens
  misc_RNA (1)...(19): siRNA sense strand
cggggaauguugucaauga

SEQ ID NO: 1065662 - RNA, 19 nt, Homo sapiens
  misc_RNA (1)...(19): siRNA sense strand
uugcaugggcauccuauga

SEQ ID NO: 1065663 - RNA, 19 nt, Homo sapiens
  misc_RNA (1)...(19): siRNA sense strand
ugauagaugguacagugaa

SEQ ID NO: 1065664 - RNA, 19 nt, Homo sapiens
  misc_RNA (1)...(19): siRNA sense strand
ggaaggagcuggagcagaa

SEQ ID NO: 1065665 - RNA, 19 nt, Homo sapiens
  misc_RNA (1)...(19): siRNA sense strand
cagaagauccuccuugaua

SEQ ID NO: 1065666 - RNA, 19 nt, Homo sapiens
  misc_RNA (1)...(19): siRNA sense strand
gaaacuggcuggcguacug

SEQ ID NO: 1065667 - RNA, 19 nt, Homo sapiens
  misc_RNA (1)...(19): siRNA sense strand
gcugacgucuuguuauguu

SEQ ID NO: 1065668 - RNA, 19 nt, Homo sapiens
  misc_RNA (1)...(19): siRNA sense strand
ggagauggcauacacaauc

SEQ ID NO: 1065669 - RNA, 19 nt, Homo sapiens
  misc_RNA (1)...(19): siRNA sense strand
ccagcaggaugcccacuuu

SEQ ID NO: 1065670 - RNA, 19 nt, Homo sapiens
  misc_RNA (1)...(19): siRNA sense strand
ggcaacaucuaccagaaga

SEQ ID NO: 1065671 - RNA, 19 nt, Homo sapiens
  misc_RNA (1)...(19): siRNA sense strand
gcagucagaaggcaaagaa

SEQ ID NO: 1065672 - RNA, 19 nt, Homo sapiens
  misc_RNA (1)...(19): siRNA sense strand
gacaagagcagccuucgau

SEQ ID NO: 1065673 - RNA, 19 nt, Homo sapiens
  misc_RNA (1)...(19): siRNA sense strand
aacagaagauccuccuuga

SEQ ID NO: 1065674 - RNA, 19 nt, Homo sapiens
  misc_RNA (1)...(19): siRNA sense strand
cagguggucuucucugaug

SEQ ID NO: 1065675 - RNA, 19 nt, Homo sapiens
  misc_RNA (1)...(19): siRNA sense strand
gaagauccuccuugauaca

SEQ ID NO: 1065676 - RNA, 19 nt, Homo sapiens
  misc_RNA (1)...(19): siRNA sense strand
cucagaagaucaucgugua

SEQ ID NO: 1065677 - RNA, 19 nt, Homo sapiens
  misc_RNA (1)...(19): siRNA sense strand
gcaaagaacagaagauccu

SEQ ID NO: 1065678 - RNA, 19 nt, Homo sapiens
  misc_RNA (1)...(19): siRNA sense strand
ggacagcugcguggugcua

SEQ ID NO: 1065679 - RNA, 19 nt, Homo sapiens
  misc_RNA (1)...(19): siRNA sense strand
gaucaucguguaccucuca

SEQ ID NO: 1065680 - RNA, 19 nt, Homo sapiens
  misc_RNA (1)...(19): siRNA sense strand
caagagcagccuucgauca

SEQ ID NO: 1065681 - RNA, 19 nt, Homo sapiens
  misc_RNA (1)...(19): siRNA sense strand
ugauacagccugcaagaug

SEQ ID NO: 1065682 - RNA, 19 nt, Homo sapiens
  misc_RNA (1)...(19): siRNA sense strand
ucuggccgcuguacaacua

SEQ ID NO: 1065683 - RNA, 19 nt, Homo sapiens
  misc_RNA (1)...(19): siRNA sense strand
acacggugcuguccaugga

SEQ ID NO: 1065684 - RNA, 19 nt, Homo sapiens
  misc_RNA (1)...(19): siRNA sense strand
ggaagccuggucugcagua

SEQ ID NO: 1065685 - RNA, 19 nt, Homo sapiens
  misc_RNA (1)...(19): siRNA sense strand
gaaggcaaagaacagaaga

SEQ ID NO: 1065686 - RNA, 19 nt, Homo sapiens
  misc_RNA (1)...(19): siRNA sense strand
cacagguggucuucucuga

SEQ ID NO: 1065687 - RNA, 19 nt, Homo sapiens
  misc_RNA (1)...(19): siRNA sense strand
gggagccuguccucaccua

SEQ ID NO: 1065688 - RNA, 19 nt, Homo sapiens
  misc_RNA (1)...(19): siRNA sense strand
ggaccauccugugugugaa

SEQ ID NO: 1065689 - RNA, 19 nt, Homo sapiens
  misc_RNA (1)...(19): siRNA sense strand
uggccuugcugcccacuaa

SEQ ID NO: 1065690 - RNA, 19 nt, Homo sapiens
  misc_RNA (1)...(19): siRNA sense strand
cugcugacgucuuguuaug

SEQ ID NO: 1065691 - RNA, 19 nt, Homo sapiens
  misc_RNA (1)...(19): siRNA sense strand
agaagauccuccuugauac

SEQ ID NO: 1065692 - RNA, 19 nt, Homo sapiens
  misc_RNA (1)...(19): siRNA sense strand
agccaggacuugaagcaaa

SEQ ID NO: 1065693 - RNA, 19 nt, Homo sapiens
  misc_RNA (1)...(19): siRNA sense strand
gggacauucugcagaucaa

SEQ ID NO: 1065694 - RNA, 19 nt, Homo sapiens
  misc_RNA (1)...(19): siRNA sense strand
uggacgagcugcagaaggu

SEQ ID NO: 1065695 - RNA, 19 nt, Homo sapiens
  misc_RNA (1)...(19): siRNA sense strand
cgacugaacagccguaagg

SEQ ID NO: 1065696 - RNA, 19 nt, Homo sapiens
  misc_RNA (1)...(19): siRNA sense strand
gcccuucuccugccuguug

SEQ ID NO: 1065697 - RNA, 19 nt, Homo sapiens
  misc_RNA (1)...(19): siRNA sense strand
ucagcuaccuccuccacau

SEQ ID NO: 1065698 - RNA, 19 nt, Homo sapiens
  misc_RNA (1)...(19): siRNA sense strand
ccacaccuuugaccuguac

SEQ ID NO: 1065699 - RNA, 19 nt, Homo sapiens
  misc_RNA (1)...(19): siRNA sense strand
ggacaagagcagccuucga

SEQ ID NO: 1065700 - RNA, 19 nt, Homo sapiens
  misc_RNA (1)...(19): siRNA sense strand
gccaggacuugaagcaaag

SEQ ID NO: 1065701 - RNA, 19 nt, Homo sapiens
  misc_RNA (1)...(19): siRNA sense strand
gaccauccugugugugaaa

SEQ ID NO: 1065702 - RNA, 19 nt, Homo sapiens
  misc_RNA (1)...(19): siRNA sense strand
ggucuucucucagcugcau

SEQ ID NO: 1065703 - RNA, 19 nt, Homo sapiens
  misc_RNA (1)...(19): siRNA sense strand
ccuguugggugacaucauc

SEQ ID NO: 1065704 - RNA, 19 nt, Homo sapiens
  misc_RNA (1)...(19): siRNA sense strand
ccggcaacaucuaccagaa

SEQ ID NO: 1065705 - RNA, 19 nt, Homo sapiens
  misc_RNA (1)...(19): siRNA sense strand
acaccacacucauggacau

SEQ ID NO: 1065706 - RNA, 19 nt, Homo sapiens
  misc_RNA (1)...(19): siRNA sense strand
gaagcccacccaucacuac

SEQ ID NO: 1065707 - RNA, 19 nt, Homo sapiens
  misc_RNA (1)...(19): siRNA sense strand
gcugaacccugggcuuguc

SEQ ID NO: 1065708 - RNA, 19 nt, Homo sapiens
  misc_RNA (1)...(19): siRNA sense strand
ugcaugagcuucggcaaca

SEQ ID NO: 1065709 - RNA, 19 nt, Homo sapiens
  misc_RNA (1)...(19): siRNA sense strand
ugacagcagccaggacuug

SEQ ID NO: 1065710 - RNA, 19 nt, Homo sapiens
  misc_RNA (1)...(19): siRNA sense strand
gcccacccaucacuacaag

SEQ ID NO: 1065711 - RNA, 19 nt, Homo sapiens
  misc_RNA (1)...(19): siRNA sense strand
ugagacagaggacuuccaa

SEQ ID NO: 1065712 - RNA, 19 nt, Homo sapiens
  misc_RNA (1)...(19): siRNA sense strand
caccguguccaacaagauu

SEQ ID NO: 1065713 - RNA, 19 nt, Homo sapiens
  misc_RNA (1)...(19): siRNA sense strand
gacagcagccaggacuuga

SEQ ID NO: 1065714 - RNA, 19 nt, Homo sapiens
  misc_RNA (1)...(19): siRNA sense strand
gcaccguguccaacaagau

SEQ ID NO: 1065715 - RNA, 19 nt, Homo sapiens
  misc_RNA (1)...(19): siRNA sense strand
accaguaccugcccuacau

SEQ ID NO: 1065716 - RNA, 19 nt, Homo sapiens
  misc_RNA (1)...(19): siRNA sense strand
ggaaaaucauccccaacca

SEQ ID NO: 1065717 - RNA, 19 nt, Homo sapiens
  misc_RNA (1)...(19): siRNA sense strand
caaucuacgugcccuucuc

SEQ ID NO: 1065718 - RNA, 19 nt, Homo sapiens
  misc_RNA (1)...(19): siRNA sense strand
cggaccauccuguguguga

SEQ ID NO: 1065719 - RNA, 19 nt, Homo sapiens
  misc_RNA (1)...(19): siRNA sense strand
ucagaaggcaaagaacaga

SEQ ID NO: 1065720 - RNA, 19 nt, Homo sapiens
  misc_RNA (1)...(19): siRNA sense strand
ggaugcccacuuucacuuc

SEQ ID NO: 1065721 - RNA, 19 nt, Homo sapiens
  misc_RNA (1)...(19): siRNA sense strand
gacaucauccggaaaauca

SEQ ID NO: 1065722 - RNA, 19 nt, Homo sapiens
  misc_RNA (1)...(19): siRNA sense strand
gcagccaggacuugaagca

SEQ ID NO: 1065723 - RNA, 19 nt, Homo sapiens
  misc_RNA (1)...(19): siRNA sense strand
cagaaggcaaagaacagaa

SEQ ID NO: 1065724 - RNA, 19 nt, Homo sapiens
  misc_RNA (1)...(19): siRNA sense strand
gcagauagaugaaagagaa

SEQ ID NO: 1065725 - RNA, 19 nt, Homo sapiens
  misc_RNA (1)...(19): siRNA sense strand
gaaagaagauuccauuagu

SEQ ID NO: 1065726 - RNA, 19 nt, Homo sapiens
  misc_RNA (1)...(19): siRNA sense strand
gaacagagcagacaaaucu

SEQ ID NO: 1065727 - RNA, 19 nt, Homo sapiens
  misc_RNA (1)...(19): siRNA sense strand
cagaaacucuauccaagua

SEQ ID NO: 1065728 - RNA, 19 nt, Homo sapiens
  misc_RNA (1)...(19): siRNA sense strand
gcaccgaggucccgacaaa

SEQ ID NO: 1065729 - RNA, 19 nt, Homo sapiens
  misc_RNA (1)...(19): siRNA sense strand
gaaauuggacugaauaaag

SEQ ID NO: 1065730 - RNA, 19 nt, Homo sapiens
  misc_RNA (1)...(19): siRNA sense strand
gaaagaaggacaaggaguu

SEQ ID NO: 1065731 - RNA, 19 nt, Homo sapiens
  misc_RNA (1)...(19): siRNA sense strand
gaugacuacuugccugaua

SEQ ID NO: 1065732 - RNA, 19 nt, Homo sapiens
  misc_RNA (1)...(19): siRNA sense strand
ggaaggaucugagggugaa

SEQ ID NO: 1065733 - RNA, 19 nt, Homo sapiens
  misc_RNA (1)...(19): siRNA sense strand
ggaagagcaugcaccagaa

SEQ ID NO: 1065734 - RNA, 19 nt, Homo sapiens
  misc_RNA (1)...(19): siRNA sense strand
aagaagaucuggucagcua

SEQ ID NO: 1065735 - RNA, 19 nt, Homo sapiens
  misc_RNA (1)...(19): siRNA sense strand
ugagagagcuggcgaucuu

SEQ ID NO: 1065736 - RNA, 19 nt, Homo sapiens
  misc_RNA (1)...(19): siRNA sense strand
gaaacucuauccaaguaug

SEQ ID NO: 1065737 - RNA, 19 nt, Homo sapiens
  misc_RNA (1)...(19): siRNA sense strand
ggagaaauuggacugaaua

SEQ ID NO: 1065738 - RNA, 19 nt, Homo sapiens
  misc_RNA (1)...(19): siRNA sense strand
gaacuucgggagaacauuu

SEQ ID NO: 1065739 - RNA, 19 nt, Homo sapiens
  misc_RNA (1)...(19): siRNA sense strand
cugacaagcuucuauguaa

SEQ ID NO: 1065740 - RNA, 19 nt, Homo sapiens
  misc_RNA (1)...(19): siRNA sense strand
gauagcaccuaaagcgauu

SEQ ID NO: 1065741 - RNA, 19 nt, Homo sapiens
  misc_RNA (1)...(19): siRNA sense strand
gcacugcucuuggaacaug

SEQ ID NO: 1065742 - RNA, 19 nt, Homo sapiens
  misc_RNA (1)...(19): siRNA sense strand
gagccacccuccuugauga

SEQ ID NO: 1065743 - RNA, 19 nt, Homo sapiens
  misc_RNA (1)...(19): siRNA sense strand
gaaacagggucagaaagau

SEQ ID NO: 1065744 - RNA, 19 nt, Homo sapiens
  misc_RNA (1)...(19): siRNA sense strand
gagugaagcgugacaagua

SEQ ID NO: 1065745 - RNA, 19 nt, Homo sapiens
  misc_RNA (1)...(19): siRNA sense strand
agacaaaucuguucuuggu

SEQ ID NO: 1065746 - RNA, 19 nt, Homo sapiens
  misc_RNA (1)...(19): siRNA sense strand
ccagaaagaaucagagaaa

SEQ ID NO: 1065747 - RNA, 19 nt, Homo sapiens
  misc_RNA (1)...(19): siRNA sense strand
guacucagucuucaacuuu

SEQ ID NO: 1065748 - RNA, 19 nt, Homo sapiens
  misc_RNA (1)...(19): siRNA sense strand
gauaagcagucggcuguga

SEQ ID NO: 1065749 - RNA, 19 nt, Homo sapiens
  misc_RNA (1)...(19): siRNA sense strand
cuacuucaguguuagaauu

SEQ ID NO: 1065750 - RNA, 19 nt, Homo sapiens
  misc_RNA (1)...(19): siRNA sense strand
ugaagaugaugacuacuug

SEQ ID NO: 1065751 - RNA, 19 nt, Homo sapiens
  misc_RNA (1)...(19): siRNA sense strand
ggaggaggaugacucagau

SEQ ID NO: 1065752 - RNA, 19 nt, Homo sapiens
  misc_RNA (1)...(19): siRNA sense strand
ggacagcacccaggcagua

SEQ ID NO: 1065753 - RNA, 19 nt, Homo sapiens
  misc_RNA (1)...(19): siRNA sense strand
caaaucagaccgucaacaa

SEQ ID NO: 1065754 - RNA, 19 nt, Homo sapiens
  misc_RNA (1)...(19): siRNA sense strand
gaaagaccuucgguacguu

SEQ ID NO: 1065755 - RNA, 19 nt, Homo sapiens
  misc_RNA (1)...(19): siRNA sense strand
gaacaaagacaagcacaag

SEQ ID NO: 1065756 - RNA, 19 nt, Homo sapiens
  misc_RNA (1)...(19): siRNA sense strand
ggauaccucuaaacacgaa

SEQ ID NO: 1065757 - RNA, 19 nt, Homo sapiens
  misc_RNA (1)...(19): siRNA sense strand
ggaguugguccucgaguaa

SEQ ID NO: 1065758 - RNA, 19 nt, Homo sapiens
  misc_RNA (1)...(19): siRNA sense strand
gagagaaucaaagaaauga

SEQ ID NO: 1065759 - RNA, 19 nt, Homo sapiens
  misc_RNA (1)...(19): siRNA sense strand
gcagucggcugugaagaug

SEQ ID NO: 1065760 - RNA, 19 nt, Homo sapiens
  misc_RNA (1)...(19): siRNA sense strand
gaaggugaaagaccaaaga

SEQ ID NO: 1065761 - RNA, 19 nt, Homo sapiens
  misc_RNA (1)...(19): siRNA sense strand
gcgauacgacgaguucuua

SEQ ID NO: 1065762 - RNA, 19 nt, Homo sapiens
  misc_RNA (1)...(19): siRNA sense strand
cuacuugccugauaaugug

SEQ ID NO: 1065763 - RNA, 19 nt, Homo sapiens
  misc_RNA (1)...(19): siRNA sense strand
ccacagaaacucuauccaa

SEQ ID NO: 1065764 - RNA, 19 nt, Homo sapiens
  misc_RNA (1)...(19): siRNA sense strand
agaggaagaugaugauauc

SEQ ID NO: 1065765 - RNA, 19 nt, Homo sapiens
  misc_RNA (1)...(19): siRNA sense strand
aaaggaagguauaaacgau

SEQ ID NO: 1065766 - RNA, 19 nt, Homo sapiens
  misc_RNA (1)...(19): siRNA sense strand
aaagaagauuccauuagug

SEQ ID NO: 1065767 - RNA, 19 nt, Homo sapiens
  misc_RNA (1)...(19): siRNA sense strand
ggacagugacagcgaagaa

SEQ ID NO: 1065768 - RNA, 19 nt, Homo sapiens
  misc_RNA (1)...(19): siRNA sense strand
ccagaugggauaccucuaa

SEQ ID NO: 1065769 - RNA, 19 nt, Homo sapiens
  misc_RNA (1)...(19): siRNA sense strand
ugaagucccucgagaccaa

SEQ ID NO: 1065770 - RNA, 19 nt, Homo sapiens
  misc_RNA (1)...(19): siRNA sense strand
gaagaggaagaugaugaua

SEQ ID NO: 1065771 - RNA, 19 nt, Homo sapiens
  misc_RNA (1)...(19): siRNA sense strand
gauuucacaccuaaagaua

SEQ ID NO: 1065772 - RNA, 19 nt, Homo sapiens
  misc_RNA (1)...(19): siRNA sense strand
caaacgggcugaguugcuu

SEQ ID NO: 1065773 - RNA, 19 nt, Homo sapiens
  misc_RNA (1)...(19): siRNA sense strand
cuccagagcugccaagaga

SEQ ID NO: 1065774 - RNA, 19 nt, Homo sapiens
  misc_RNA (1)...(19): siRNA sense strand
gagaaauuggacugaauaa

SEQ ID NO: 1065775 - RNA, 19 nt, Homo sapiens
  misc_RNA (1)...(19): siRNA sense strand
uaaugucccugacccuuau

SEQ ID NO: 1065776 - RNA, 19 nt, Homo sapiens
  misc_RNA (1)...(19): siRNA sense strand
guacgcaucuucccauucg

SEQ ID NO: 1065777 - RNA, 19 nt, Homo sapiens
  misc_RNA (1)...(19): siRNA sense strand
ugaaacagggucagaaaga

SEQ ID NO: 1065778 - RNA, 19 nt, Homo sapiens
  misc_RNA (1)...(19): siRNA sense strand
acaaagagagaaucaaaga

SEQ ID NO: 1065779 - RNA, 19 nt, Homo sapiens
  misc_RNA (1)...(19): siRNA sense strand
agacaaagagagaaucaaa

SEQ ID NO: 1065780 - RNA, 19 nt, Homo sapiens
  misc_RNA (1)...(19): siRNA sense strand
ggagagacgccuauucaag

SEQ ID NO: 1065781 - RNA, 19 nt, Homo sapiens
  misc_RNA (1)...(19): siRNA sense strand
ucaauacuguuggcucaaa

SEQ ID NO: 1065782 - RNA, 19 nt, Homo sapiens
  misc_RNA (1)...(19): siRNA sense strand
cagaugggauaccucuaaa

SEQ ID NO: 1065783 - RNA, 19 nt, Homo sapiens
  misc_RNA (1)...(19): siRNA sense strand
aaagacagaauacgagaaa

SEQ ID NO: 1065784 - RNA, 19 nt, Homo sapiens
  misc_RNA (1)...(19): siRNA sense strand
gaaagaaucagagaaagac

SEQ ID NO: 1065785 - RNA, 19 nt, Homo sapiens
  misc_RNA (1)...(19): siRNA sense strand
ugacucagaucagguugaa

SEQ ID NO: 1065786 - RNA, 19 nt, Homo sapiens
  misc_RNA (1)...(19): siRNA sense strand
cuucaagccuuucgccaaa

SEQ ID NO: 1065787 - RNA, 19 nt, Homo sapiens
  misc_RNA (1)...(19): siRNA sense strand
ccaacugaaugccuccaaa

SEQ ID NO: 1065788 - RNA, 19 nt, Homo sapiens
  misc_RNA (1)...(19): siRNA sense strand
ugauaucuaugccacagaa

SEQ ID NO: 1065789 - RNA, 19 nt, Homo sapiens
  misc_RNA (1)...(19): siRNA sense strand
acucaagcaucaagugaaa

SEQ ID NO: 1065790 - RNA, 19 nt, Homo sapiens
  misc_RNA (1)...(19): siRNA sense strand
ccagcaacuucaagccuuu

SEQ ID NO: 1065791 - RNA, 19 nt, Homo sapiens
  misc_RNA (1)...(19): siRNA sense strand
aaaugaagcaggcaacuga

SEQ ID NO: 1065792 - RNA, 19 nt, Homo sapiens
  misc_RNA (1)...(19): siRNA sense strand
guaugacacuguucugaag

SEQ ID NO: 1065793 - RNA, 19 nt, Homo sapiens
  misc_RNA (1)...(19): siRNA sense strand
gaagaucuggucagcuaug

SEQ ID NO: 1065794 - RNA, 19 nt, Homo sapiens
  misc_RNA (1)...(19): siRNA sense strand
gaugggauaccucuaaaca

SEQ ID NO: 1065795 - RNA, 19 nt, Homo sapiens
  misc_RNA (1)...(19): siRNA sense strand
gcccaccacucaagcauca

SEQ ID NO: 1065796 - RNA, 19 nt, Homo sapiens
  misc_RNA (1)...(19): siRNA sense strand
gggcacugcucuuggaaca

SEQ ID NO: 1065797 - RNA, 19 nt, Homo sapiens
  misc_RNA (1)...(19): siRNA sense strand
gggugaagaugaugacuac

SEQ ID NO: 1065798 - RNA, 19 nt, Homo sapiens
  misc_RNA (1)...(19): siRNA sense strand
ugagcaaggugacagugaa

SEQ ID NO: 1065799 - RNA, 19 nt, Homo sapiens
  misc_RNA (1)...(19): siRNA sense strand
gacaagcuucuauguaaga

SEQ ID NO: 1065800 - RNA, 19 nt, Homo sapiens
  misc_RNA (1)...(19): siRNA sense strand
ggaagaggaagaugaugau

SEQ ID NO: 1065801 - RNA, 19 nt, Homo sapiens
  misc_RNA (1)...(19): siRNA sense strand
ggaucagacugucagagau

SEQ ID NO: 1065802 - RNA, 19 nt, Homo sapiens
  misc_RNA (1)...(19): siRNA sense strand
gcaccuaaagcgauuguca

SEQ ID NO: 1065803 - RNA, 19 nt, Homo sapiens
  misc_RNA (1)...(19): siRNA sense strand
gagcacaggcggaagaaag

SEQ ID NO: 1065804 - RNA, 19 nt, Homo sapiens
  misc_RNA (1)...(19): siRNA sense strand
gcacaaggccaagaaagag

SEQ ID NO: 1065805 - RNA, 19 nt, Homo sapiens
  misc_RNA (1)...(19): siRNA sense strand
gaucagacugucagagaug

SEQ ID NO: 1065806 - RNA, 19 nt, Homo sapiens
  misc_RNA (1)...(19): siRNA sense strand
aaauuggacugaauaaagg

SEQ ID NO: 1065807 - RNA, 19 nt, Homo sapiens
  misc_RNA (1)...(19): siRNA sense strand
gcuggagccucuggaagaa

SEQ ID NO: 1065808 - RNA, 19 nt, Homo sapiens
  misc_RNA (1)...(19): siRNA sense strand
caaagagagaaucaaagaa

SEQ ID NO: 1065809 - RNA, 19 nt, Homo sapiens
  misc_RNA (1)...(19): siRNA sense strand
aaucuauggcugugcauua

SEQ ID NO: 1065810 - RNA, 19 nt, Homo sapiens
  misc_RNA (1)...(19): siRNA sense strand
aguaguagcuccgagaguu

SEQ ID NO: 1065811 - RNA, 19 nt, Homo sapiens
  misc_RNA (1)...(19): siRNA sense strand
gaaagaccaaagaaaccaa

SEQ ID NO: 1065812 - RNA, 19 nt, Homo sapiens
  misc_RNA (1)...(19): siRNA sense strand
gagcaugcaccagaauuau

SEQ ID NO: 1065813 - RNA, 19 nt, Homo sapiens
  misc_RNA (1)...(19): siRNA sense strand
ugacaaguacucagucuuc

SEQ ID NO: 1065814 - RNA, 19 nt, Homo sapiens
  misc_RNA (1)...(19): siRNA sense strand
gcugggcacugcucuugga

SEQ ID NO: 1065815 - RNA, 19 nt, Homo sapiens
  misc_RNA (1)...(19): siRNA sense strand
agaaagaccuucgguacgu

SEQ ID NO: 1065816 - RNA, 19 nt, Homo sapiens
  misc_RNA (1)...(19): siRNA sense strand
gaauuucaggccaggcuuu

SEQ ID NO: 1065817 - RNA, 19 nt, Homo sapiens
  misc_RNA (1)...(19): siRNA sense strand
guucuuaguacacaugaaa

SEQ ID NO: 1065818 - RNA, 19 nt, Homo sapiens
  misc_RNA (1)...(19): siRNA sense strand
gcugaaaagucuuccacua

SEQ ID NO: 1065819 - RNA, 19 nt, Homo sapiens
  misc_RNA (1)...(19): siRNA sense strand
uuccaaagcucccaagaca

SEQ ID NO: 1065820 - RNA, 19 nt, Homo sapiens
  misc_RNA (1)...(19): siRNA sense strand
gaauuauccgcaaaucaga

SEQ ID NO: 1065821 - RNA, 19 nt, Homo sapiens
  misc_RNA (1)...(19): siRNA sense strand
aaacaaagaggaagagcau

SEQ ID NO: 1065822 - RNA, 19 nt, Homo sapiens
  misc_RNA (1)...(19): siRNA sense strand
aagaagauuccauuaguga

SEQ ID NO: 1065823 - RNA, 19 nt, Homo sapiens
  misc_RNA (1)...(19): siRNA sense strand
gcuggauacuucaauacug

SEQ ID NO: 1065824 - RNA, 19 nt, Homo sapiens
  misc_RNA (1)...(19): siRNA sense strand
gcccaucccuuccuuauuc

SEQ ID NO: 1065825 - RNA, 19 nt, Homo sapiens
  misc_RNA (1)...(19): siRNA sense strand
gaaggccacugcugucuca

SEQ ID NO: 1065826 - RNA, 19 nt, Homo sapiens
  misc_RNA (1)...(19): siRNA sense strand
gaaaggccacgaauacaga

SEQ ID NO: 1065827 - RNA, 19 nt, Homo sapiens
  misc_RNA (1)...(19): siRNA sense strand
gccaagcgccuaacuuuau

SEQ ID NO: 1065828 - RNA, 19 nt, Homo sapiens
  misc_RNA (1)...(19): siRNA sense strand
gcauucagccucagcaguu

SEQ ID NO: 1065829 - RNA, 19 nt, Homo sapiens
  misc_RNA (1)...(19): siRNA sense strand
caacaugggccaccuccuu

SEQ ID NO: 1065830 - RNA, 19 nt, Homo sapiens
  misc_RNA (1)...(19): siRNA sense strand
ggccaagcgccuaacuuua

SEQ ID NO: 1065831 - RNA, 19 nt, Homo sapiens
  misc_RNA (1)...(19): siRNA sense strand
ccaagcgccuaacuuuaug

SEQ ID NO: 1065832 - RNA, 19 nt, Homo sapiens
  misc_RNA (1)...(19): siRNA sense strand
ggaaaggccacgaauacag

SEQ ID NO: 1065833 - RNA, 19 nt, Homo sapiens
  misc_RNA (1)...(19): siRNA sense strand
ccaccaagauucacaaacc

SEQ ID NO: 1065834 - RNA, 19 nt, Homo sapiens
  misc_RNA (1)...(19): siRNA sense strand
gaauacagaaaccagacuu

SEQ ID NO: 1065835 - RNA, 19 nt, Homo sapiens
  misc_RNA (1)...(19): siRNA sense strand
ggacagagcaagccccauu

SEQ ID NO: 1065836 - RNA, 19 nt, Homo sapiens
  misc_RNA (1)...(19): siRNA sense strand
gcagaccccuucgcgauuu

SEQ ID NO: 1065837 - RNA, 19 nt, Homo sapiens
  misc_RNA (1)...(19): siRNA sense strand
ccaagauucacaaaccaaa

SEQ ID NO: 1065838 - RNA, 19 nt, Homo sapiens
  misc_RNA (1)...(19): siRNA sense strand
gcaaggaccggagcaagag

SEQ ID NO: 1065839 - RNA, 19 nt, Homo sapiens
  misc_RNA (1)...(19): siRNA sense strand
cauccuagucaguuugaaa

SEQ ID NO: 1065840 - RNA, 19 nt, Homo sapiens
  misc_RNA (1)...(19): siRNA sense strand
aacaugggccaccuccuua

SEQ ID NO: 1065841 - RNA, 19 nt, Homo sapiens
  misc_RNA (1)...(19): siRNA sense strand
gcccucaucccaaccaguu

SEQ ID NO: 1065842 - RNA, 19 nt, Homo sapiens
  misc_RNA (1)...(19): siRNA sense strand
ggaguggcaccaucccaau

SEQ ID NO: 1065843 - RNA, 19 nt, Homo sapiens
  misc_RNA (1)...(19): siRNA sense strand
gaguggcaccaucccaauu

SEQ ID NO: 1065844 - RNA, 19 nt, Homo sapiens
  misc_RNA (1)...(19): siRNA sense strand
guggcaccaucccaauuug

SEQ ID NO: 1065845 - RNA, 19 nt, Homo sapiens
  misc_RNA (1)...(19): siRNA sense strand
gaccggagcaagagcaaag

SEQ ID NO: 1065846 - RNA, 19 nt, Homo sapiens
  misc_RNA (1)...(19): siRNA sense strand
gggaaaggccacgaauaca

SEQ ID NO: 1065847 - RNA, 19 nt, Homo sapiens
  misc_RNA (1)...(19): siRNA sense strand
ggcaccaucccaauuugaa

SEQ ID NO: 1065848 - RNA, 19 nt, Homo sapiens
  misc_RNA (1)...(19): siRNA sense strand
gggcccaucccuuccuuau

SEQ ID NO: 1065849 - RNA, 19 nt, Homo sapiens
  misc_RNA (1)...(19): siRNA sense strand
caccaagauucacaaacca

SEQ ID NO: 1065850 - RNA, 19 nt, Homo sapiens
  misc_RNA (1)...(19): siRNA sense strand
gcaccaucccaauuugaag

SEQ ID NO: 1065851 - RNA, 19 nt, Homo sapiens
  misc_RNA (1)...(19): siRNA sense strand
ccauucaccaccaagauuc

SEQ ID NO: 1065852 - RNA, 19 nt, Homo sapiens
  misc_RNA (1)...(19): siRNA sense strand
ccaguucggaggccagaga

SEQ ID NO: 1065853 - RNA, 19 nt, Homo sapiens
  misc_RNA (1)...(19): siRNA sense strand
caccaucccaauuugaaga

SEQ ID NO: 1065854 - RNA, 19 nt, Homo sapiens
  misc_RNA (1)...(19): siRNA sense strand
gagaaggccacugcugucu

SEQ ID NO: 1065855 - RNA, 19 nt, Homo sapiens
  misc_RNA (1)...(19): siRNA sense strand
cgcaaggaccggagcaaga

SEQ ID NO: 1065856 - RNA, 19 nt, Homo sapiens
  misc_RNA (1)...(19): siRNA sense strand
ugaaggauauggaguaaua

SEQ ID NO: 1065857 - RNA, 19 nt, Homo sapiens
  misc_RNA (1)...(19): siRNA sense strand
agagagaacuguuguaauu

SEQ ID NO: 1065858 - RNA, 19 nt, Homo sapiens
  misc_RNA (1)...(19): siRNA sense strand
gcacacagauaccguuuau

SEQ ID NO: 1065859 - RNA, 19 nt, Homo sapiens
  misc_RNA (1)...(19): siRNA sense strand
acacagauaccguuuauua

SEQ ID NO: 1065860 - RNA, 19 nt, Homo sapiens
  misc_RNA (1)...(19): siRNA sense strand
gaagcgacgugauuucuau

SEQ ID NO: 1065861 - RNA, 19 nt, Homo sapiens
  misc_RNA (1)...(19): siRNA sense strand
gcagggagguccagaugaa

SEQ ID NO: 1065862 - RNA, 19 nt, Homo sapiens
  misc_RNA (1)...(19): siRNA sense strand
ggauaaacauggcacaaau

SEQ ID NO: 1065863 - RNA, 19 nt, Homo sapiens
  misc_RNA (1)...(19): siRNA sense strand
ggaaaaggauuguaauuug

SEQ ID NO: 1065864 - RNA, 19 nt, Homo sapiens
  misc_RNA (1)...(19): siRNA sense strand
gaagauacacguacaguca

SEQ ID NO: 1065865 - RNA, 19 nt, Homo sapiens
  misc_RNA (1)...(19): siRNA sense strand
gcaauuguauaucagagaa

SEQ ID NO: 1065866 - RNA, 19 nt, Homo sapiens
  misc_RNA (1)...(19): siRNA sense strand
ugaagaacaugcaaucuau

SEQ ID NO: 1065867 - RNA, 19 nt, Homo sapiens
  misc_RNA (1)...(19): siRNA sense strand
gagagaucaucacgaagua

SEQ ID NO: 1065868 - RNA, 19 nt, Homo sapiens
  misc_RNA (1)...(19): siRNA sense strand
gagaauggaugagagagaa

SEQ ID NO: 1065869 - RNA, 19 nt, Homo sapiens
  misc_RNA (1)...(19): siRNA sense strand
gcagugggcuagaagacuu

SEQ ID NO: 1065870 - RNA, 19 nt, Homo sapiens
  misc_RNA (1)...(19): siRNA sense strand
cuaccgcacugaaagauuu

SEQ ID NO: 1065871 - RNA, 19 nt, Homo sapiens
  misc_RNA (1)...(19): siRNA sense strand
uaggagagaucaucacgaa

SEQ ID NO: 1065872 - RNA, 19 nt, Homo sapiens
  misc_RNA (1)...(19): siRNA sense strand
uccuugagcucuuuaauuu

SEQ ID NO: 1065873 - RNA, 19 nt, Homo sapiens
  misc_RNA (1)...(19): siRNA sense strand
ggacaguggcacacagaua

SEQ ID NO: 1065874 - RNA, 19 nt, Homo sapiens
  misc_RNA (1)...(19): siRNA sense strand
ggacaguuaagacacauaa

SEQ ID NO: 1065875 - RNA, 19 nt, Homo sapiens
  misc_RNA (1)...(19): siRNA sense strand
caaagaagcgacgugauuu

SEQ ID NO: 1065876 - RNA, 19 nt, Homo sapiens
  misc_RNA (1)...(19): siRNA sense strand
uaacuaccgggaagauuua

SEQ ID NO: 1065877 - RNA, 19 nt, Homo sapiens
  misc_RNA (1)...(19): siRNA sense strand
guacuaaaucccaaugaaa

SEQ ID NO: 1065878 - RNA, 19 nt, Homo sapiens
  misc_RNA (1)...(19): siRNA sense strand
gaagagcuuuccgucuauu

SEQ ID NO: 1065879 - RNA, 19 nt, Homo sapiens
  misc_RNA (1)...(19): siRNA sense strand
gggaagauuuacacagaug

SEQ ID NO: 1065880 - RNA, 19 nt, Homo sapiens
  misc_RNA (1)...(19): siRNA sense strand
gcugaaggauauggaguaa

SEQ ID NO: 1065881 - RNA, 19 nt, Homo sapiens
  misc_RNA (1)...(19): siRNA sense strand
ggagagaucaucacgaagu

SEQ ID NO: 1065882 - RNA, 19 nt, Homo sapiens
  misc_RNA (1)...(19): siRNA sense strand
ucacgaaguauguauauga

SEQ ID NO: 1065883 - RNA, 19 nt, Homo sapiens
  misc_RNA (1)...(19): siRNA sense strand
uaggauagauuuggaugaa

SEQ ID NO: 1065884 - RNA, 19 nt, Homo sapiens
  misc_RNA (1)...(19): siRNA sense strand
ggaaggauuugaauaugcu

SEQ ID NO: 1065885 - RNA, 19 nt, Homo sapiens
  misc_RNA (1)...(19): siRNA sense strand
uauaugagcuccuggaaaa

SEQ ID NO: 1065886 - RNA, 19 nt, Homo sapiens
  misc_RNA (1)...(19): siRNA sense strand
acaaagaagcgacgugauu

SEQ ID NO: 1065887 - RNA, 19 nt, Homo sapiens
  misc_RNA (1)...(19): siRNA sense strand
cgacgugauuucuaugaga

SEQ ID NO: 1065888 - RNA, 19 nt, Homo sapiens
  misc_RNA (1)...(19): siRNA sense strand
ccgggaagauuuacacaga

SEQ ID NO: 1065889 - RNA, 19 nt, Homo sapiens
  misc_RNA (1)...(19): siRNA sense strand
ucacagcuauggaggacuu

SEQ ID NO: 1065890 - RNA, 19 nt, Homo sapiens
  misc_RNA (1)...(19): siRNA sense strand
gaaaaugguucuccugaag

SEQ ID NO: 1065891 - RNA, 19 nt, Homo sapiens
  misc_RNA (1)...(19): siRNA sense strand
ggauagauuuggaugaacu

SEQ ID NO: 1065892 - RNA, 19 nt, Homo sapiens
  misc_RNA (1)...(19): siRNA sense strand
gguaacugcuguggcauug

SEQ ID NO: 1065893 - RNA, 19 nt, Homo sapiens
  misc_RNA (1)...(19): siRNA sense strand
agauuuggaugaacuaaug

SEQ ID NO: 1065894 - RNA, 19 nt, Homo sapiens
  misc_RNA (1)...(19): siRNA sense strand
gaugaaccgccucuugauu

SEQ ID NO: 1065895 - RNA, 19 nt, Homo sapiens
  misc_RNA (1)...(19): siRNA sense strand
uguuugggaucauuucaua

SEQ ID NO: 1065896 - RNA, 19 nt, Homo sapiens
  misc_RNA (1)...(19): siRNA sense strand
uaaaagagcuguggcugaa

SEQ ID NO: 1065897 - RNA, 19 nt, Homo sapiens
  misc_RNA (1)...(19): siRNA sense strand
gcagggcagugggcuagaa

SEQ ID NO: 1065898 - RNA, 19 nt, Homo sapiens
  misc_RNA (1)...(19): siRNA sense strand
gagcuguggcugaaggaua

SEQ ID NO: 1065899 - RNA, 19 nt, Homo sapiens
  misc_RNA (1)...(19): siRNA sense strand
agagugaaccaaagaguuu

SEQ ID NO: 1065900 - RNA, 19 nt, Homo sapiens
  misc_RNA (1)...(19): siRNA sense strand
ugagagagaacuguuguaa

SEQ ID NO: 1065901 - RNA, 19 nt, Homo sapiens
  misc_RNA (1)...(19): siRNA sense strand
gaucaucacgaaguaugua

SEQ ID NO: 1065902 - RNA, 19 nt, Homo sapiens
  misc_RNA (1)...(19): siRNA sense strand
gagagugaaccaaagaguu

SEQ ID NO: 1065903 - RNA, 19 nt, Homo sapiens
  misc_RNA (1)...(19): siRNA sense strand
gagugaggaugcuuugaca

SEQ ID NO: 1065904 - RNA, 19 nt, Homo sapiens
  misc_RNA (1)...(19): siRNA sense strand
ugacaaauccacagaaacu

SEQ ID NO: 1065905 - RNA, 19 nt, Homo sapiens
  misc_RNA (1)...(19): siRNA sense strand
gaagaacaugcaaucuaug

SEQ ID NO: 1065906 - RNA, 19 nt, Homo sapiens
  misc_RNA (1)...(19): siRNA sense strand
uuaacuaccgggaagauuu

SEQ ID NO: 1065907 - RNA, 19 nt, Homo sapiens
  misc_RNA (1)...(19): siRNA sense strand
gagaucaucacgaaguaug

SEQ ID NO: 1065908 - RNA, 19 nt, Homo sapiens
  misc_RNA (1)...(19): siRNA sense strand
gagagaacuguuguaauug

SEQ ID NO: 1065909 - RNA, 19 nt, Homo sapiens
  misc_RNA (1)...(19): siRNA sense strand
ucaacgagaagccgaugua

SEQ ID NO: 1065910 - RNA, 19 nt, Homo sapiens
  misc_RNA (1)...(19): siRNA sense strand
ggcuagaagacuuauuaua

SEQ ID NO: 1065911 - RNA, 19 nt, Homo sapiens
  misc_RNA (1)...(19): siRNA sense strand
ugggcuagaagacuuauua

SEQ ID NO: 1065912 - RNA, 19 nt, Homo sapiens
  misc_RNA (1)...(19): siRNA sense strand
gauggaaccagaaaagaua

SEQ ID NO: 1065913 - RNA, 19 nt, Homo sapiens
  misc_RNA (1)...(19): siRNA sense strand
agagaacuguuguaauugg

SEQ ID NO: 1065914 - RNA, 19 nt, Homo sapiens
  misc_RNA (1)...(19): siRNA sense strand
ucuaugagaaguaucguaa

SEQ ID NO: 1065915 - RNA, 19 nt, Homo sapiens
  misc_RNA (1)...(19): siRNA sense strand
ggauauggaguaauaguac

SEQ ID NO: 1065916 - RNA, 19 nt, Homo sapiens
  misc_RNA (1)...(19): siRNA sense strand
gaagauuuacacagaugga

SEQ ID NO: 1065917 - RNA, 19 nt, Homo sapiens
  misc_RNA (1)...(19): siRNA sense strand
cacagauaccguuuauuaa

SEQ ID NO: 1065918 - RNA, 19 nt, Homo sapiens
  misc_RNA (1)...(19): siRNA sense strand
cugauacccuggaaggauu

SEQ ID NO: 1065919 - RNA, 19 nt, Homo sapiens
  misc_RNA (1)...(19): siRNA sense strand
gauaaacauggcacaaauc

SEQ ID NO: 1065920 - RNA, 19 nt, Homo sapiens
  misc_RNA (1)...(19): siRNA sense strand
cugaagaacaugcaaucua

SEQ ID NO: 1065921 - RNA, 19 nt, Homo sapiens
  misc_RNA (1)...(19): siRNA sense strand
gagagagaacuguuguaau

SEQ ID NO: 1065922 - RNA, 19 nt, Homo sapiens
  misc_RNA (1)...(19): siRNA sense strand
caacgagaagccgauguaa

SEQ ID NO: 1065923 - RNA, 19 nt, Homo sapiens
  misc_RNA (1)...(19): siRNA sense strand
caaucuauguuugggauca

SEQ ID NO: 1065924 - RNA, 19 nt, Homo sapiens
  misc_RNA (1)...(19): siRNA sense strand
acaaauccacagaaacuga

SEQ ID NO: 1065925 - RNA, 19 nt, Homo sapiens
  misc_RNA (1)...(19): siRNA sense strand
gaugagagagaacuguugu

SEQ ID NO: 1065926 - RNA, 19 nt, Homo sapiens
  misc_RNA (1)...(19): siRNA sense strand
ccuggaaggauuugaauau

SEQ ID NO: 1065927 - RNA, 19 nt, Homo sapiens
  misc_RNA (1)...(19): siRNA sense strand
caucacgaaguauguauau

SEQ ID NO: 1065928 - RNA, 19 nt, Homo sapiens
  misc_RNA (1)...(19): siRNA sense strand
gcaucaagaagcuggcaaa

SEQ ID NO: 1065929 - RNA, 19 nt, Homo sapiens
  misc_RNA (1)...(19): siRNA sense strand
guauaugagcuccuggaaa

SEQ ID NO: 1065930 - RNA, 19 nt, Homo sapiens
  misc_RNA (1)...(19): siRNA sense strand
acacagauggaaccagaaa

SEQ ID NO: 1065931 - RNA, 19 nt, Homo sapiens
  misc_RNA (1)...(19): siRNA sense strand
aguacuaaaucccaaugaa

SEQ ID NO: 1065932 - RNA, 19 nt, Homo sapiens
  misc_RNA (1)...(19): siRNA sense strand
aaaugaagaucuggacagu

SEQ ID NO: 1065933 - RNA, 19 nt, Homo sapiens
  misc_RNA (1)...(19): siRNA sense strand
gaaaagauacgaggcucua

SEQ ID NO: 1065934 - RNA, 19 nt, Homo sapiens
  misc_RNA (1)...(19): siRNA sense strand
uaacugcuguggcauugac

SEQ ID NO: 1065935 - RNA, 19 nt, Homo sapiens
  misc_RNA (1)...(19): siRNA sense strand
gauagauuuggaugaacua

SEQ ID NO: 1065936 - RNA, 19 nt, Homo sapiens
  misc_RNA (1)...(19): siRNA sense strand
ggaugagagagaacuguug

SEQ ID NO: 1065937 - RNA, 19 nt, Homo sapiens
  misc_RNA (1)...(19): siRNA sense strand
aaagacuaccgcacugaaa

SEQ ID NO: 1065938 - RNA, 19 nt, Homo sapiens
  misc_RNA (1)...(19): siRNA sense strand
caccgaccgucacgagcua

SEQ ID NO: 1065939 - RNA, 19 nt, Homo sapiens
  misc_RNA (1)...(19): siRNA sense strand
gacaguggcacacagauac

SEQ ID NO: 1065940 - RNA, 19 nt, Homo sapiens
  misc_RNA (1)...(19): siRNA sense strand
ucaagaagcuggcaaaacg

SEQ ID NO: 1065941 - RNA, 19 nt, Homo sapiens
  misc_RNA (1)...(19): siRNA sense strand
cgcacugaaagauuuauua

SEQ ID NO: 1065942 - RNA, 19 nt, Homo sapiens
  misc_RNA (1)...(19): siRNA sense strand
augaaccgccucuugauuu

SEQ ID NO: 1065943 - RNA, 19 nt, Homo sapiens
  misc_RNA (1)...(19): siRNA sense strand
caauguguggcaucaagaa

SEQ ID NO: 1065944 - RNA, 19 nt, Homo sapiens
  misc_RNA (1)...(19): siRNA sense strand
uuucguugcucacagcuau

SEQ ID NO: 1065945 - RNA, 19 nt, Homo sapiens
  misc_RNA (1)...(19): siRNA sense strand
cagcagggagguccagaug

SEQ ID NO: 1065946 - RNA, 19 nt, Homo sapiens
  misc_RNA (1)...(19): siRNA sense strand
caagcacgaagagcuguaa

SEQ ID NO: 1065947 - RNA, 19 nt, Homo sapiens
  misc_RNA (1)...(19): siRNA sense strand
gaugcaauuguauaucaga

SEQ ID NO: 1065948 - RNA, 19 nt, Homo sapiens
  misc_RNA (1)...(19): siRNA sense strand
ggcugaaggauauggagua

SEQ ID NO: 1065949 - RNA, 19 nt, Homo sapiens
  misc_RNA (1)...(19): siRNA sense strand
cuggaaggauuugaauaug

SEQ ID NO: 1065950 - RNA, 19 nt, Homo sapiens
  misc_RNA (1)...(19): siRNA sense strand
caaauccacagaaacugau

SEQ ID NO: 1065951 - RNA, 19 nt, Homo sapiens
  misc_RNA (1)...(19): siRNA sense strand
cgagaauggaugagagaga

SEQ ID NO: 1065952 - RNA, 19 nt, Homo sapiens
  misc_RNA (1)...(19): siRNA sense strand
ucagaugaaccagcagaaa

SEQ ID NO: 1065953 - RNA, 19 nt, Homo sapiens
  misc_RNA (1)...(19): siRNA sense strand
uggaaggauuugaauaugc

SEQ ID NO: 1065954 - RNA, 19 nt, Homo sapiens
  misc_RNA (1)...(19): siRNA sense strand
aaagaagcgacgugauuuc

SEQ ID NO: 1065955 - RNA, 19 nt, Homo sapiens
  misc_RNA (1)...(19): siRNA sense strand
uaaugaaaagggacaguua

SEQ ID NO: 1065956 - RNA, 19 nt, Homo sapiens
  misc_RNA (1)...(19): siRNA sense strand
gcacuucaaggaugacaag

SEQ ID NO: 1065957 - RNA, 19 nt, Homo sapiens
  misc_RNA (1)...(19): siRNA sense strand
ugacaagaccaaagaagca

SEQ ID NO: 1065958 - RNA, 19 nt, Homo sapiens
  misc_RNA (1)...(19): siRNA sense strand
gcaccugcacuucaaggau

SEQ ID NO: 1065959 - RNA, 19 nt, Homo sapiens
  misc_RNA (1)...(19): siRNA sense strand
ucaaggaugacaagaccaa

SEQ ID NO: 1065960 - RNA, 19 nt, Homo sapiens
  misc_RNA (1)...(19): siRNA sense strand
ggaugacaagaccaaagaa

SEQ ID NO: 1065961 - RNA, 19 nt, Homo sapiens
  misc_RNA (1)...(19): siRNA sense strand
gaugacaagaccaaagaag

SEQ ID NO: 1065962 - RNA, 19 nt, Homo sapiens
  misc_RNA (1)...(19): siRNA sense strand
uggaccagcuggagaaggu

SEQ ID NO: 1065963 - RNA, 19 nt, Homo sapiens
  misc_RNA (1)...(19): siRNA sense strand
gcacaaaccugcucucuca

SEQ ID NO: 1065964 - RNA, 19 nt, Homo sapiens
  misc_RNA (1)...(19): siRNA sense strand
caauggugguggcaucuuu

SEQ ID NO: 1065965 - RNA, 19 nt, Homo sapiens
  misc_RNA (1)...(19): siRNA sense strand
cagcacgagucucuggaaa

SEQ ID NO: 1065966 - RNA, 19 nt, Homo sapiens
  misc_RNA (1)...(19): siRNA sense strand
gcucuccucugcucaaguc

SEQ ID NO: 1065967 - RNA, 19 nt, Homo sapiens
  misc_RNA (1)...(19): siRNA sense strand
guccacagccucaugauuc

SEQ ID NO: 1065968 - RNA, 19 nt, Homo sapiens
  misc_RNA (1)...(19): siRNA sense strand
ccagagaguggccaagaga

SEQ ID NO: 1065969 - RNA, 19 nt, Homo sapiens
  misc_RNA (1)...(19): siRNA sense strand
ucaggaagcagccuuagca

SEQ ID NO: 1065970 - RNA, 19 nt, Homo sapiens
  misc_RNA (1)...(19): siRNA sense strand
gcagagcagggagcacaaa

SEQ ID NO: 1065971 - RNA, 19 nt, Homo sapiens
  misc_RNA (1)...(19): siRNA sense strand
gcagcacgagucucuggaa

SEQ ID NO: 1065972 - RNA, 19 nt, Homo sapiens
  misc_RNA (1)...(19): siRNA sense strand
gguccacagccucaugauu

SEQ ID NO: 1065973 - RNA, 19 nt, Homo sapiens
  misc_RNA (1)...(19): siRNA sense strand
ggccucuccucccucacua

SEQ ID NO: 1065974 - RNA, 19 nt, Homo sapiens
  misc_RNA (1)...(19): siRNA sense strand
gaagggcuggccagagagu

SEQ ID NO: 1065975 - RNA, 19 nt, Homo sapiens
  misc_RNA (1)...(19): siRNA sense strand
ggaguugaggacccuggaa

SEQ ID NO: 1065976 - RNA, 19 nt, Homo sapiens
  misc_RNA (1)...(19): siRNA sense strand
gcaggggucuuccucuaag

SEQ ID NO: 1065977 - RNA, 19 nt, Homo sapiens
  misc_RNA (1)...(19): siRNA sense strand
ccccagcccucuccuguuu

SEQ ID NO: 1065978 - RNA, 19 nt, Homo sapiens
  misc_RNA (1)...(19): siRNA sense strand
gggaagaccuuuaggguua

SEQ ID NO: 1065979 - RNA, 19 nt, Homo sapiens
  misc_RNA (1)...(19): siRNA sense strand
gaagaaagauaccaugaau

SEQ ID NO: 1065980 - RNA, 19 nt, Homo sapiens
  misc_RNA (1)...(19): siRNA sense strand
ggaaagacauuuggaacua

SEQ ID NO: 1065981 - RNA, 19 nt, Homo sapiens
  misc_RNA (1)...(19): siRNA sense strand
ggaaaggccuucauucaga

SEQ ID NO: 1065982 - RNA, 19 nt, Homo sapiens
  misc_RNA (1)...(19): siRNA sense strand
ggacaaacccuaugaaugu

SEQ ID NO: 1065983 - RNA, 19 nt, Homo sapiens
  misc_RNA (1)...(19): siRNA sense strand
gguaaagccuucagucaaa

SEQ ID NO: 1065984 - RNA, 19 nt, Homo sapiens
  misc_RNA (1)...(19): siRNA sense strand
ggccagaacucagagauua

SEQ ID NO: 1065985 - RNA, 19 nt, Homo sapiens
  misc_RNA (1)...(19): siRNA sense strand
gaaagacauuuggaacuaa

SEQ ID NO: 1065986 - RNA, 19 nt, Homo sapiens
  misc_RNA (1)...(19): siRNA sense strand
ggagagagacccuauaaau

SEQ ID NO: 1065987 - RNA, 19 nt, Homo sapiens
  misc_RNA (1)...(19): siRNA sense strand
agagaaaccuuaugaaugu

SEQ ID NO: 1065988 - RNA, 19 nt, Homo sapiens
  misc_RNA (1)...(19): siRNA sense strand
gcaagaaccuuuugggaua

SEQ ID NO: 1065989 - RNA, 19 nt, Homo sapiens
  misc_RNA (1)...(19): siRNA sense strand
aagcauagcucaggccuua

SEQ ID NO: 1065990 - RNA, 19 nt, Homo sapiens
  misc_RNA (1)...(19): siRNA sense strand
ggcaaagccuucaagcaua

SEQ ID NO: 1065991 - RNA, 19 nt, Homo sapiens
  misc_RNA (1)...(19): siRNA sense strand
ccacaugggucauuauuag

SEQ ID NO: 1065992 - RNA, 19 nt, Homo sapiens
  misc_RNA (1)...(19): siRNA sense strand
gaaacccuaugaaugcuuu

SEQ ID NO: 1065993 - RNA, 19 nt, Homo sapiens
  misc_RNA (1)...(19): siRNA sense strand
ggagagagacuuuccauca

SEQ ID NO: 1065994 - RNA, 19 nt, Homo sapiens
  misc_RNA (1)...(19): siRNA sense strand
gagaagcccuauguaugua

SEQ ID NO: 1065995 - RNA, 19 nt, Homo sapiens
  misc_RNA (1)...(19): siRNA sense strand
gagagaaaccuuaugaaug

SEQ ID NO: 1065996 - RNA, 19 nt, Homo sapiens
  misc_RNA (1)...(19): siRNA sense strand
agaaagaccgggagaauaa

SEQ ID NO: 1065997 - RNA, 19 nt, Homo sapiens
  misc_RNA (1)...(19): siRNA sense strand
uaaagaauguggaaagaca

SEQ ID NO: 1065998 - RNA, 19 nt, Homo sapiens
  misc_RNA (1)...(19): siRNA sense strand
aaucagaacucacaucuca

SEQ ID NO: 1065999 - RNA, 19 nt, Homo sapiens
  misc_RNA (1)...(19): siRNA sense strand
caacuuaucauacaucaga

SEQ ID NO: 1066000 - RNA, 19 nt, Homo sapiens
  misc_RNA (1)...(19): siRNA sense strand
gcaaagccuucaagcauag

SEQ ID NO: 1066001 - RNA, 19 nt, Homo sapiens
  misc_RNA (1)...(19): siRNA sense strand
uuaccaaggucaugaguuu

SEQ ID NO: 1066002 - RNA, 19 nt, Homo sapiens
  misc_RNA (1)...(19): siRNA sense strand
gagagaaacccuaugaaug

SEQ ID NO: 1066003 - RNA, 19 nt, Homo sapiens
  misc_RNA (1)...(19): siRNA sense strand
gagaaagaccgggagaaua

SEQ ID NO: 1066004 - RNA, 19 nt, Homo sapiens
  misc_RNA (1)...(19): siRNA sense strand
ggagagaaaccuuaugaau

SEQ ID NO: 1066005 - RNA, 19 nt, Homo sapiens
  misc_RNA (1)...(19): siRNA sense strand
gcucaggccuuauuagaca

SEQ ID NO: 1066006 - RNA, 19 nt, Homo sapiens
  misc_RNA (1)...(19): siRNA sense strand
gagaaaccauaugaaugua

SEQ ID NO: 1066007 - RNA, 19 nt, Homo sapiens
  misc_RNA (1)...(19): siRNA sense strand
ggagagaaaccauaugaau

SEQ ID NO: 1066008 - RNA, 19 nt, Homo sapiens
  misc_RNA (1)...(19): siRNA sense strand
gcccaaaucugguuacaca

SEQ ID NO: 1066009 - RNA, 19 nt, Homo sapiens
  misc_RNA (1)...(19): siRNA sense strand
gagagagacccuauaaaug

SEQ ID NO: 1066010 - RNA, 19 nt, Homo sapiens
  misc_RNA (1)...(19): siRNA sense strand
gacaaacccuaugaaugua

SEQ ID NO: 1066011 - RNA, 19 nt, Homo sapiens
  misc_RNA (1)...(19): siRNA sense strand
ccucauacauguaaagaau

SEQ ID NO: 1066012 - RNA, 19 nt, Homo sapiens
  misc_RNA (1)...(19): siRNA sense strand
ggagagaaacccuaugaau

SEQ ID NO: 1066013 - RNA, 19 nt, Homo sapiens
  misc_RNA (1)...(19): siRNA sense strand
gagcuuauccggcaucaga

SEQ ID NO: 1066014 - RNA, 19 nt, Homo sapiens
  misc_RNA (1)...(19): siRNA sense strand
aaccauaucuguguaauga

SEQ ID NO: 1066015 - RNA, 19 nt, Homo sapiens
  misc_RNA (1)...(19): siRNA sense strand
gagaauucaugcuggagaa

SEQ ID NO: 1066016 - RNA, 19 nt, Homo sapiens
  misc_RNA (1)...(19): siRNA sense strand
gaacucagagauuauuaga

SEQ ID NO: 1066017 - RNA, 19 nt, Homo sapiens
  misc_RNA (1)...(19): siRNA sense strand
gagagaaaccauaugaaug

SEQ ID NO: 1066018 - RNA, 19 nt, Homo sapiens
  misc_RNA (1)...(19): siRNA sense strand
gagagacccuauaaaugug

SEQ ID NO: 1066019 - RNA, 19 nt, Homo sapiens
  misc_RNA (1)...(19): siRNA sense strand
aggcggaccucucaccuua

SEQ ID NO: 1066020 - RNA, 19 nt, Homo sapiens
  misc_RNA (1)...(19): siRNA sense strand
caaaucugguuacacauca

SEQ ID NO: 1066021 - RNA, 19 nt, Homo sapiens
  misc_RNA (1)...(19): siRNA sense strand
gcggaccucucaccuuauu

SEQ ID NO: 1066022 - RNA, 19 nt, Homo sapiens
  misc_RNA (1)...(19): siRNA sense strand
auucagaguucacaccuua

SEQ ID NO: 1066023 - RNA, 19 nt, Homo sapiens
  misc_RNA (1)...(19): siRNA sense strand
gagaaaccuuaugaaugua

SEQ ID NO: 1066024 - RNA, 19 nt, Homo sapiens
  misc_RNA (1)...(19): siRNA sense strand
gaauguagcgagugugaga

SEQ ID NO: 1066025 - RNA, 19 nt, Homo sapiens
  misc_RNA (1)...(19): siRNA sense strand
caggguugaugaucuuuaa

SEQ ID NO: 1066026 - RNA, 19 nt, Homo sapiens
  misc_RNA (1)...(19): siRNA sense strand
agagagacccuauaaaugu

SEQ ID NO: 1066027 - RNA, 19 nt, Homo sapiens
  misc_RNA (1)...(19): siRNA sense strand
ucacaucucauccagcaua

SEQ ID NO: 1066028 - RNA, 19 nt, Homo sapiens
  misc_RNA (1)...(19): siRNA sense strand
ggaguuagugcauuugcua

SEQ ID NO: 1066029 - RNA, 19 nt, Homo sapiens
  misc_RNA (1)...(19): siRNA sense strand
acucagagauuauuagaca

SEQ ID NO: 1066030 - RNA, 19 nt, Homo sapiens
  misc_RNA (1)...(19): siRNA sense strand
gagaaaagccucauacaug

SEQ ID NO: 1066031 - RNA, 19 nt, Homo sapiens
  misc_RNA (1)...(19): siRNA sense strand
gaaugugggaagaccuuua

SEQ ID NO: 1066032 - RNA, 19 nt, Homo sapiens
  misc_RNA (1)...(19): siRNA sense strand
ggagagaagccuuaugagu

SEQ ID NO: 1066033 - RNA, 19 nt, Homo sapiens
  misc_RNA (1)...(19): siRNA sense strand
agagggaguuagugcauuu

SEQ ID NO: 1066034 - RNA, 19 nt, Homo sapiens
  misc_RNA (1)...(19): siRNA sense strand
ccauaucuguguaaugaau

SEQ ID NO: 1066035 - RNA, 19 nt, Homo sapiens
  misc_RNA (1)...(19): siRNA sense strand
cagcaucagagaauucaua

SEQ ID NO: 1066036 - RNA, 19 nt, Homo sapiens
  misc_RNA (1)...(19): siRNA sense strand
gaacuucuuagacaugaga

SEQ ID NO: 1066037 - RNA, 19 nt, Homo sapiens
  misc_RNA (1)...(19): siRNA sense strand
gcauagcucaggccuuauu

SEQ ID NO: 1066038 - RNA, 19 nt, Homo sapiens
  misc_RNA (1)...(19): siRNA sense strand
cgacggcaccugagaauuc

SEQ ID NO: 1066039 - RNA, 19 nt, Homo sapiens
  misc_RNA (1)...(19): siRNA sense strand
aggguuaguucacagcuua

SEQ ID NO: 1066040 - RNA, 19 nt, Homo sapiens
  misc_RNA (1)...(19): siRNA sense strand
agagaaaccauaugaaugu

SEQ ID NO: 1066041 - RNA, 19 nt, Homo sapiens
  misc_RNA (1)...(19): siRNA sense strand
gagagagacuuuccaucag

SEQ ID NO: 1066042 - RNA, 19 nt, Homo sapiens
  misc_RNA (1)...(19): siRNA sense strand
caucauagaauucauacug

SEQ ID NO: 1066043 - RNA, 19 nt, Homo sapiens
  misc_RNA (1)...(19): siRNA sense strand
ugagaagcccuauguaugu

SEQ ID NO: 1066044 - RNA, 19 nt, Homo sapiens
  misc_RNA (1)...(19): siRNA sense strand
ggugagaagcccuauguau

SEQ ID NO: 1066045 - RNA, 19 nt, Homo sapiens
  misc_RNA (1)...(19): siRNA sense strand
aaagauaccaugaaugcaa

SEQ ID NO: 1066046 - RNA, 19 nt, Homo sapiens
  misc_RNA (1)...(19): siRNA sense strand
gggagaauaaugagaguga

SEQ ID NO: 1066047 - RNA, 19 nt, Homo sapiens
  misc_RNA (1)...(19): siRNA sense strand
aagaaugucagaagacuuu

SEQ ID NO: 1066048 - RNA, 19 nt, Homo sapiens
  misc_RNA (1)...(19): siRNA sense strand
uaagaaaucacccucaagu

SEQ ID NO: 1066049 - RNA, 19 nt, Homo sapiens
  misc_RNA (1)...(19): siRNA sense strand
gugagaagcccuauguaug

SEQ ID NO: 1066050 - RNA, 19 nt, Homo sapiens
  misc_RNA (1)...(19): siRNA sense strand
aaauucagcccuuauucua

SEQ ID NO: 1066051 - RNA, 19 nt, Homo sapiens
  misc_RNA (1)...(19): siRNA sense strand
gaaaauucauacuggagaa

SEQ ID NO: 1066052 - RNA, 19 nt, Homo sapiens
  misc_RNA (1)...(19): siRNA sense strand
cgagagaguccauggaaga

SEQ ID NO: 1066053 - RNA, 19 nt, Homo sapiens
  misc_RNA (1)...(19): siRNA sense strand
gggacaaacccuaugaaug

SEQ ID NO: 1066054 - RNA, 19 nt, Homo sapiens
  misc_RNA (1)...(19): siRNA sense strand
gaauguaaagaauguggaa

SEQ ID NO: 1066055 - RNA, 19 nt, Homo sapiens
  misc_RNA (1)...(19): siRNA sense strand
caucagagaauucauacug

SEQ ID NO: 1066056 - RNA, 19 nt, Homo sapiens
  misc_RNA (1)...(19): siRNA sense strand
ggccaaaacuuccuagaga

SEQ ID NO: 1066057 - RNA, 19 nt, Homo sapiens
  misc_RNA (1)...(19): siRNA sense strand
gagaguucauaguggagaa

SEQ ID NO: 1066058 - RNA, 19 nt, Homo sapiens
  misc_RNA (1)...(19): siRNA sense strand
caaacccuaugaauguaau

SEQ ID NO: 1066059 - RNA, 19 nt, Homo sapiens
  misc_RNA (1)...(19): siRNA sense strand
caugggucauuauuagaaa

SEQ ID NO: 1066060 - RNA, 19 nt, Homo sapiens
  misc_RNA (1)...(19): siRNA sense strand
ggauaauucugagcugcuu

SEQ ID NO: 1066061 - RNA, 19 nt, Homo sapiens
  misc_RNA (1)...(19): siRNA sense strand
ugaagaaucugagccacau

SEQ ID NO: 1066062 - RNA, 19 nt, Homo sapiens
  misc_RNA (1)...(19): siRNA sense strand
uguaaagaauguggaaaga

SEQ ID NO: 1066063 - RNA, 19 nt, Homo sapiens
  misc_RNA (1)...(19): siRNA sense strand
ugagccacaugggucauua

SEQ ID NO: 1066064 - RNA, 19 nt, Homo sapiens
  misc_RNA (1)...(19): siRNA sense strand
guggaaaggccuucauuca

SEQ ID NO: 1066065 - RNA, 19 nt, Homo sapiens
  misc_RNA (1)...(19): siRNA sense strand
gagaauaaugagagugaga

SEQ ID NO: 1066066 - RNA, 19 nt, Homo sapiens
  misc_RNA (1)...(19): siRNA sense strand
ggaccucucaccuuauugu

SEQ ID NO: 1066067 - RNA, 19 nt, Homo sapiens
  misc_RNA (1)...(19): siRNA sense strand
ugaagaaagauaccaugaa

SEQ ID NO: 1066068 - RNA, 19 nt, Homo sapiens
  misc_RNA (1)...(19): siRNA sense strand
ggaagaccuuuaggguuag

SEQ ID NO: 1066069 - RNA, 19 nt, Homo sapiens
  misc_RNA (1)...(19): siRNA sense strand
gcauucccaacuuaucaua

SEQ ID NO: 1066070 - RNA, 19 nt, Homo sapiens
  misc_RNA (1)...(19): siRNA sense strand
agccagcauucccaacuua

SEQ ID NO: 1066071 - RNA, 19 nt, Homo sapiens
  misc_RNA (1)...(19): siRNA sense strand
uguaaugagugugcaagaa

SEQ ID NO: 1066072 - RNA, 19 nt, Homo sapiens
  misc_RNA (1)...(19): siRNA sense strand
agagaaacccuaugaaugc

SEQ ID NO: 1066073 - RNA, 19 nt, Homo sapiens
  misc_RNA (1)...(19): siRNA sense strand
cggcaucagagaauucaua

SEQ ID NO: 1066074 - RNA, 19 nt, Homo sapiens
  misc_RNA (1)...(19): siRNA sense strand
agaaagauaccaugaaugc

SEQ ID NO: 1066075 - RNA, 19 nt, Homo sapiens
  misc_RNA (1)...(19): siRNA sense strand
gauacaacagagggaguua

SEQ ID NO: 1066076 - RNA, 19 nt, Homo sapiens
  misc_RNA (1)...(19): siRNA sense strand
gaagcccuauguauguaag

SEQ ID NO: 1066077 - RNA, 19 nt, Homo sapiens
  misc_RNA (1)...(19): siRNA sense strand
ccaagaaugucagaagacu

SEQ ID NO: 1066078 - RNA, 19 nt, Homo sapiens
  misc_RNA (1)...(19): siRNA sense strand
gaccaggacuuuauuagau

SEQ ID NO: 1066079 - RNA, 19 nt, Homo sapiens
  misc_RNA (1)...(19): siRNA sense strand
gaagaucaaaggaacacua

SEQ ID NO: 1066080 - RNA, 19 nt, Homo sapiens
  misc_RNA (1)...(19): siRNA sense strand
uguaugacccugugaauuu

SEQ ID NO: 1066081 - RNA, 19 nt, Homo sapiens
  misc_RNA (1)...(19): siRNA sense strand
ggacuuuauuagaugauga

SEQ ID NO: 1066082 - RNA, 19 nt, Homo sapiens
  misc_RNA (1)...(19): siRNA sense strand
ggacagaaauccccagguu

SEQ ID NO: 1066083 - RNA, 19 nt, Homo sapiens
  misc_RNA (1)...(19): siRNA sense strand
gaacgacagucugagauac

SEQ ID NO: 1066084 - RNA, 19 nt, Homo sapiens
  misc_RNA (1)...(19): siRNA sense strand
cuccauaucugaaacuaaa

SEQ ID NO: 1066085 - RNA, 19 nt, Homo sapiens
  misc_RNA (1)...(19): siRNA sense strand
gggagccucugaagaaugu

SEQ ID NO: 1066086 - RNA, 19 nt, Homo sapiens
  misc_RNA (1)...(19): siRNA sense strand
gaugagaacgacagucuga

SEQ ID NO: 1066087 - RNA, 19 nt, Homo sapiens
  misc_RNA (1)...(19): siRNA sense strand
ggugagaaaguauaagaaa

SEQ ID NO: 1066088 - RNA, 19 nt, Homo sapiens
  misc_RNA (1)...(19): siRNA sense strand
gaccaaagacagaggagaa

SEQ ID NO: 1066089 - RNA, 19 nt, Homo sapiens
  misc_RNA (1)...(19): siRNA sense strand
gcugguguauggacuguau

SEQ ID NO: 1066090 - RNA, 19 nt, Homo sapiens
  misc_RNA (1)...(19): siRNA sense strand
guaugacccugugaauuug

SEQ ID NO: 1066091 - RNA, 19 nt, Homo sapiens
  misc_RNA (1)...(19): siRNA sense strand
gacaaggugagaaaguaua

SEQ ID NO: 1066092 - RNA, 19 nt, Homo sapiens
  misc_RNA (1)...(19): siRNA sense strand
gagauucccuccugaucca

SEQ ID NO: 1066093 - RNA, 19 nt, Homo sapiens
  misc_RNA (1)...(19): siRNA sense strand
ucaagccuguucuccauau

SEQ ID NO: 1066094 - RNA, 19 nt, Homo sapiens
  misc_RNA (1)...(19): siRNA sense strand
ucauagauaucgcccuuca

SEQ ID NO: 1066095 - RNA, 19 nt, Homo sapiens
  misc_RNA (1)...(19): siRNA sense strand
gagauacucggccuuuguu

SEQ ID NO: 1066096 - RNA, 19 nt, Homo sapiens
  misc_RNA (1)...(19): siRNA sense strand
ccaggacuuuauuagauga

SEQ ID NO: 1066097 - RNA, 19 nt, Homo sapiens
  misc_RNA (1)...(19): siRNA sense strand
ugggaaccauggccuauga

SEQ ID NO: 1066098 - RNA, 19 nt, Homo sapiens
  misc_RNA (1)...(19): siRNA sense strand
cugacaaggugagaaagua

SEQ ID NO: 1066099 - RNA, 19 nt, Homo sapiens
  misc_RNA (1)...(19): siRNA sense strand
gaaacuaaaggaggaauac

SEQ ID NO: 1066100 - RNA, 19 nt, Homo sapiens
  misc_RNA (1)...(19): siRNA sense strand
gugaagaagaucaaaggaa

SEQ ID NO: 1066101 - RNA, 19 nt, Homo sapiens
  misc_RNA (1)...(19): siRNA sense strand
gaagaagaucaaaggaaca

SEQ ID NO: 1066102 - RNA, 19 nt, Homo sapiens
  misc_RNA (1)...(19): siRNA sense strand
ucagaccaggacuuuauua

SEQ ID NO: 1066103 - RNA, 19 nt, Homo sapiens
  misc_RNA (1)...(19): siRNA sense strand
guucuucuacgcaaauaaa

SEQ ID NO: 1066104 - RNA, 19 nt, Homo sapiens
  misc_RNA (1)...(19): siRNA sense strand
gguuccuucuucauagaua

SEQ ID NO: 1066105 - RNA, 19 nt, Homo sapiens
  misc_RNA (1)...(19): siRNA sense strand
cagagauccugcaguucuu

SEQ ID NO: 1066106 - RNA, 19 nt, Homo sapiens
  misc_RNA (1)...(19): siRNA sense strand
ccacuaucauccagagauc

SEQ ID NO: 1066107 - RNA, 19 nt, Homo sapiens
  misc_RNA (1)...(19): siRNA sense strand
cagcugagccacuaucauc

SEQ ID NO: 1066108 - RNA, 19 nt, Homo sapiens
  misc_RNA (1)...(19): siRNA sense strand
aaaggaacacuaagcucua

SEQ ID NO: 1066109 - RNA, 19 nt, Homo sapiens
  misc_RNA (1)...(19): siRNA sense strand
uaaaggaggaauacagcuu

SEQ ID NO: 1066110 - RNA, 19 nt, Homo sapiens
  misc_RNA (1)...(19): siRNA sense strand
agaacgacagucugagaua

SEQ ID NO: 1066111 - RNA, 19 nt, Homo sapiens
  misc_RNA (1)...(19): siRNA sense strand
ccagagauccugcaguucu

SEQ ID NO: 1066112 - RNA, 19 nt, Homo sapiens
  misc_RNA (1)...(19): siRNA sense strand
gaucaaaggaacacuaagc

SEQ ID NO: 1066113 - RNA, 19 nt, Homo sapiens
  misc_RNA (1)...(19): siRNA sense strand
cagaaaaggacaucaauga

SEQ ID NO: 1066114 - RNA, 19 nt, Homo sapiens
  misc_RNA (1)...(19): siRNA sense strand
gcaguucuucuacgcaaau

SEQ ID NO: 1066115 - RNA, 19 nt, Homo sapiens
  misc_RNA (1)...(19): siRNA sense strand
cuucagaccaggacuuuau

SEQ ID NO: 1066116 - RNA, 19 nt, Homo sapiens
  misc_RNA (1)...(19): siRNA sense strand
ugaaacuaaaggaggaaua

SEQ ID NO: 1066117 - RNA, 19 nt, Homo sapiens
  misc_RNA (1)...(19): siRNA sense strand
acaaggugagaaaguauaa

SEQ ID NO: 1066118 - RNA, 19 nt, Homo sapiens
  misc_RNA (1)...(19): siRNA sense strand
gaaacugagguuccagaag

SEQ ID NO: 1066119 - RNA, 19 nt, Homo sapiens
  misc_RNA (1)...(19): siRNA sense strand
gagaacgacagucugagau

SEQ ID NO: 1066120 - RNA, 19 nt, Homo sapiens
  misc_RNA (1)...(19): siRNA sense strand
gcgggagccucugaagaau

SEQ ID NO: 1066121 - RNA, 19 nt, Homo sapiens
  misc_RNA (1)...(19): siRNA sense strand
guuaagcagacacgagauu

SEQ ID NO: 1066122 - RNA, 19 nt, Homo sapiens
  misc_RNA (1)...(19): siRNA sense strand
auccagagauccugcaguu

SEQ ID NO: 1066123 - RNA, 19 nt, Homo sapiens
  misc_RNA (1)...(19): siRNA sense strand
auagauaucgcccuucaga

SEQ ID NO: 1066124 - RNA, 19 nt, Homo sapiens
  misc_RNA (1)...(19): siRNA sense strand
ugagaacgacagucugaga

SEQ ID NO: 1066125 - RNA, 19 nt, Homo sapiens
  misc_RNA (1)...(19): siRNA sense strand
ugacaaggugagaaaguau

SEQ ID NO: 1066126 - RNA, 19 nt, Homo sapiens
  misc_RNA (1)...(19): siRNA sense strand
aagaucaaaggaacacuaa

SEQ ID NO: 1066127 - RNA, 19 nt, Homo sapiens
  misc_RNA (1)...(19): siRNA sense strand
agaccaggacuuuauuaga

SEQ ID NO: 1066128 - RNA, 19 nt, Homo sapiens
  misc_RNA (1)...(19): siRNA sense strand
gguuuggguuccuucuuca

SEQ ID NO: 1066129 - RNA, 19 nt, Homo sapiens
  misc_RNA (1)...(19): siRNA sense strand
gagugaagaagaucaaagg

SEQ ID NO: 1066130 - RNA, 19 nt, Homo sapiens
  misc_RNA (1)...(19): siRNA sense strand
ugagauacucggccuuugu

SEQ ID NO: 1066131 - RNA, 19 nt, Homo sapiens
  misc_RNA (1)...(19): siRNA sense strand
uuucaagccuguucuccau

SEQ ID NO: 1066132 - RNA, 19 nt, Homo sapiens
  misc_RNA (1)...(19): siRNA sense strand
aauacagcuuccagaguga

SEQ ID NO: 1066133 - RNA, 19 nt, Homo sapiens
  misc_RNA (1)...(19): siRNA sense strand
gaagcgggagccucugaag

SEQ ID NO: 1066134 - RNA, 19 nt, Homo sapiens
  misc_RNA (1)...(19): siRNA sense strand
guuccuucuucauagauau

SEQ ID NO: 1066135 - RNA, 19 nt, Homo sapiens
  misc_RNA (1)...(19): siRNA sense strand
aaggugagaaaguauaaga

SEQ ID NO: 1066136 - RNA, 19 nt, Homo sapiens
  misc_RNA (1)...(19): siRNA sense strand
caguucuucuacgcaaaua

SEQ ID NO: 1066137 - RNA, 19 nt, Homo sapiens
  misc_RNA (1)...(19): siRNA sense strand
ugagaaacuugggaaccau

SEQ ID NO: 1066138 - RNA, 19 nt, Homo sapiens
  misc_RNA (1)...(19): siRNA sense strand
accaggacuuuauuagaug

SEQ ID NO: 1066139 - RNA, 19 nt, Homo sapiens
  misc_RNA (1)...(19): siRNA sense strand
ggaaccauggccuaugaag

SEQ ID NO: 1066140 - RNA, 19 nt, Homo sapiens
  misc_RNA (1)...(19): siRNA sense strand
ccagagugaagaagaucaa

SEQ ID NO: 1066141 - RNA, 19 nt, Homo sapiens
  misc_RNA (1)...(19): siRNA sense strand
gauacucggccuuuguuuu

SEQ ID NO: 1066142 - RNA, 19 nt, Homo sapiens
  misc_RNA (1)...(19): siRNA sense strand
cgucacauggcaaugagaa

SEQ ID NO: 1066143 - RNA, 19 nt, Homo sapiens
  misc_RNA (1)...(19): siRNA sense strand
gauaggaacucuuuauugu

SEQ ID NO: 1066144 - RNA, 19 nt, Homo sapiens
  misc_RNA (1)...(19): siRNA sense strand
gaaauacauuccuguguug

SEQ ID NO: 1066145 - RNA, 19 nt, Homo sapiens
  misc_RNA (1)...(19): siRNA sense strand
gaagaaagaaugcauguug

SEQ ID NO: 1066146 - RNA, 19 nt, Homo sapiens
  misc_RNA (1)...(19): siRNA sense strand
gaaaagaucuuccgcaaau

SEQ ID NO: 1066147 - RNA, 19 nt, Homo sapiens
  misc_RNA (1)...(19): siRNA sense strand
gcauaucgcugagauuauu

SEQ ID NO: 1066148 - RNA, 19 nt, Homo sapiens
  misc_RNA (1)...(19): siRNA sense strand
ucaagaauguguccaguuu

SEQ ID NO: 1066149 - RNA, 19 nt, Homo sapiens
  misc_RNA (1)...(19): siRNA sense strand
gaaugucagugcuauugua

SEQ ID NO: 1066150 - RNA, 19 nt, Homo sapiens
  misc_RNA (1)...(19): siRNA sense strand
caacagagaugaugaagcu

SEQ ID NO: 1066151 - RNA, 19 nt, Homo sapiens
  misc_RNA (1)...(19): siRNA sense strand
gagauuauaggauggaaua

SEQ ID NO: 1066152 - RNA, 19 nt, Homo sapiens
  misc_RNA (1)...(19): siRNA sense strand
gcaaaucuguggaauucug

SEQ ID NO: 1066153 - RNA, 19 nt, Homo sapiens
  misc_RNA (1)...(19): siRNA sense strand
gaauguggcucauguucug

SEQ ID NO: 1066154 - RNA, 19 nt, Homo sapiens
  misc_RNA (1)...(19): siRNA sense strand
agaaauacauuccuguguu

SEQ ID NO: 1066155 - RNA, 19 nt, Homo sapiens
  misc_RNA (1)...(19): siRNA sense strand
caaagaagccauugguuuc

SEQ ID NO: 1066156 - RNA, 19 nt, Homo sapiens
  misc_RNA (1)...(19): siRNA sense strand
ccagacagcuccugaagag

SEQ ID NO: 1066157 - RNA, 19 nt, Homo sapiens
  misc_RNA (1)...(19): siRNA sense strand
ccagacaauugaaagcuuu

SEQ ID NO: 1066158 - RNA, 19 nt, Homo sapiens
  misc_RNA (1)...(19): siRNA sense strand
ccgcaaaucuguggaauuc

SEQ ID NO: 1066159 - RNA, 19 nt, Homo sapiens
  misc_RNA (1)...(19): siRNA sense strand
uaccaucucugcauuguga

SEQ ID NO: 1066160 - RNA, 19 nt, Homo sapiens
  misc_RNA (1)...(19): siRNA sense strand
gaaaacaugucaaaacaca

SEQ ID NO: 1066161 - RNA, 19 nt, Homo sapiens
  misc_RNA (1)...(19): siRNA sense strand
uagaugcccugaucacuug

SEQ ID NO: 1066162 - RNA, 19 nt, Homo sapiens
  misc_RNA (1)...(19): siRNA sense strand
agaauacagucacagauga

SEQ ID NO: 1066163 - RNA, 19 nt, Homo sapiens
  misc_RNA (1)...(19): siRNA sense strand
gaaugcauguugggaagaa

SEQ ID NO: 1066164 - RNA, 19 nt, Homo sapiens
  misc_RNA (1)...(19): siRNA sense strand
cagaggaguugaugaggaa

SEQ ID NO: 1066165 - RNA, 19 nt, Homo sapiens
  misc_RNA (1)...(19): siRNA sense strand
ggaagaauacagucacaga

SEQ ID NO: 1066166 - RNA, 19 nt, Homo sapiens
  misc_RNA (1)...(19): siRNA sense strand
gcacaaccaggcacuaaug

SEQ ID NO: 1066167 - RNA, 19 nt, Homo sapiens
  misc_RNA (1)...(19): siRNA sense strand
acaaagaagccauugguuu

SEQ ID NO: 1066168 - RNA, 19 nt, Homo sapiens
  misc_RNA (1)...(19): siRNA sense strand
gcaaguacaggaagcaaga

SEQ ID NO: 1066169 - RNA, 19 nt, Homo sapiens
  misc_RNA (1)...(19): siRNA sense strand
caaccuggcuuuggccuau

SEQ ID NO: 1066170 - RNA, 19 nt, Homo sapiens
  misc_RNA (1)...(19): siRNA sense strand
augaaaccauggagaaaua

SEQ ID NO: 1066171 - RNA, 19 nt, Homo sapiens
  misc_RNA (1)...(19): siRNA sense strand
gaaugaauaugaugaaacc

SEQ ID NO: 1066172 - RNA, 19 nt, Homo sapiens
  misc_RNA (1)...(19): siRNA sense strand
gcagauguccuggcagaaa

SEQ ID NO: 1066173 - RNA, 19 nt, Homo sapiens
  misc_RNA (1)...(19): siRNA sense strand
aagcauaucgcugagauua

SEQ ID NO: 1066174 - RNA, 19 nt, Homo sapiens
  misc_RNA (1)...(19): siRNA sense strand
ugacaguguuauucaagaa

SEQ ID NO: 1066175 - RNA, 19 nt, Homo sapiens
  misc_RNA (1)...(19): siRNA sense strand
cuaucucuaugacuucuua

SEQ ID NO: 1066176 - RNA, 19 nt, Homo sapiens
  misc_RNA (1)...(19): siRNA sense strand
caugauguguggaaguuga

SEQ ID NO: 1066177 - RNA, 19 nt, Homo sapiens
  misc_RNA (1)...(19): siRNA sense strand
gaagcugcaugcuccaagu

SEQ ID NO: 1066178 - RNA, 19 nt, Homo sapiens
  misc_RNA (1)...(19): siRNA sense strand
aaaaggcagugaaugaaua

SEQ ID NO: 1066179 - RNA, 19 nt, Homo sapiens
  misc_RNA (1)...(19): siRNA sense strand
gucaagaagcauuaugaua

SEQ ID NO: 1066180 - RNA, 19 nt, Homo sapiens
  misc_RNA (1)...(19): siRNA sense strand
ggaauucuguaacgaccau

SEQ ID NO: 1066181 - RNA, 19 nt, Homo sapiens
  misc_RNA (1)...(19): siRNA sense strand
uagaauaccaacugagaaa

SEQ ID NO: 1066182 - RNA, 19 nt, Homo sapiens
  misc_RNA (1)...(19): siRNA sense strand
gaagaauacagucacagau

SEQ ID NO: 1066183 - RNA, 19 nt, Homo sapiens
  misc_RNA (1)...(19): siRNA sense strand
uuaggacacugugaacuuu

SEQ ID NO: 1066184 - RNA, 19 nt, Homo sapiens
  misc_RNA (1)...(19): siRNA sense strand
uuugguauuucucgaguua

SEQ ID NO: 1066185 - RNA, 19 nt, Homo sapiens
  misc_RNA (1)...(19): siRNA sense strand
caaauacaaagaagccauu

SEQ ID NO: 1066186 - RNA, 19 nt, Homo sapiens
  misc_RNA (1)...(19): siRNA sense strand
gccauagaauaccaacuga

SEQ ID NO: 1066187 - RNA, 19 nt, Homo sapiens
  misc_RNA (1)...(19): siRNA sense strand
gaaaguggaggcgacaaug

SEQ ID NO: 1066188 - RNA, 19 nt, Homo sapiens
  misc_RNA (1)...(19): siRNA sense strand
ugaagaagcagaggaguug

SEQ ID NO: 1066189 - RNA, 19 nt, Homo sapiens
  misc_RNA (1)...(19): siRNA sense strand
gcaagacacaacagagaug

SEQ ID NO: 1066190 - RNA, 19 nt, Homo sapiens
  misc_RNA (1)...(19): siRNA sense strand
ggaagcaagacacaacaga

SEQ ID NO: 1066191 - RNA, 19 nt, Homo sapiens
  misc_RNA (1)...(19): siRNA sense strand
cauagaauaccaacugaga

SEQ ID NO: 1066192 - RNA, 19 nt, Homo sapiens
  misc_RNA (1)...(19): siRNA sense strand
cacccuaucucuaugacuu

SEQ ID NO: 1066193 - RNA, 19 nt, Homo sapiens
  misc_RNA (1)...(19): siRNA sense strand
gcaagcugccaucaaguau

SEQ ID NO: 1066194 - RNA, 19 nt, Homo sapiens
  misc_RNA (1)...(19): siRNA sense strand
gagaaauacauuccugugu

SEQ ID NO: 1066195 - RNA, 19 nt, Homo sapiens
  misc_RNA (1)...(19): siRNA sense strand
ugaagcauaucgcugagau

SEQ ID NO: 1066196 - RNA, 19 nt, Homo sapiens
  misc_RNA (1)...(19): siRNA sense strand
gaugaguccagacaauuga

SEQ ID NO: 1066197 - RNA, 19 nt, Homo sapiens
  misc_RNA (1)...(19): siRNA sense strand
acagaugaguccagacaau

SEQ ID NO: 1066198 - RNA, 19 nt, Homo sapiens
  misc_RNA (1)...(19): siRNA sense strand
ugauaggaacucuuuauug

SEQ ID NO: 1066199 - RNA, 19 nt, Homo sapiens
  misc_RNA (1)...(19): siRNA sense strand
ggugauaggaacucuuuau

SEQ ID NO: 1066200 - RNA, 19 nt, Homo sapiens
  misc_RNA (1)...(19): siRNA sense strand
gaugaaaccauggagaaau

SEQ ID NO: 1066201 - RNA, 19 nt, Homo sapiens
  misc_RNA (1)...(19): siRNA sense strand
uuaaggcagccauagaaua

SEQ ID NO: 1066202 - RNA, 19 nt, Homo sapiens
  misc_RNA (1)...(19): siRNA sense strand
caagcugccaucaaguaua

SEQ ID NO: 1066203 - RNA, 19 nt, Homo sapiens
  misc_RNA (1)...(19): siRNA sense strand
ccucacacccuaucucuau

SEQ ID NO: 1066204 - RNA, 19 nt, Homo sapiens
  misc_RNA (1)...(19): siRNA sense strand
gaugcuuccuguccuuguu

SEQ ID NO: 1066205 - RNA, 19 nt, Homo sapiens
  misc_RNA (1)...(19): siRNA sense strand
uaugauaacauccugaaug

SEQ ID NO: 1066206 - RNA, 19 nt, Homo sapiens
  misc_RNA (1)...(19): siRNA sense strand
gcagcucucuuaugaugac

SEQ ID NO: 1066207 - RNA, 19 nt, Homo sapiens
  misc_RNA (1)...(19): siRNA sense strand
cauaccugcuguuauugaa

SEQ ID NO: 1066208 - RNA, 19 nt, Homo sapiens
  misc_RNA (1)...(19): siRNA sense strand
cauugugaauuuggugaua

SEQ ID NO: 1066209 - RNA, 19 nt, Homo sapiens
  misc_RNA (1)...(19): siRNA sense strand
uaaggcagccauagaauac

SEQ ID NO: 1066210 - RNA, 19 nt, Homo sapiens
  misc_RNA (1)...(19): siRNA sense strand
acaaggagggacaguauga

SEQ ID NO: 1066211 - RNA, 19 nt, Homo sapiens
  misc_RNA (1)...(19): siRNA sense strand
ucaaaagcuuggagccuua

SEQ ID NO: 1066212 - RNA, 19 nt, Homo sapiens
  misc_RNA (1)...(19): siRNA sense strand
aagcugccaucaaguauag

SEQ ID NO: 1066213 - RNA, 19 nt, Homo sapiens
  misc_RNA (1)...(19): siRNA sense strand
cuucuuagaugcccugauc

SEQ ID NO: 1066214 - RNA, 19 nt, Homo sapiens
  misc_RNA (1)...(19): siRNA sense strand
gagaaacuaugagguagcu

SEQ ID NO: 1066215 - RNA, 19 nt, Homo sapiens
  misc_RNA (1)...(19): siRNA sense strand
aauaccaacugagaaacua

SEQ ID NO: 1066216 - RNA, 19 nt, Homo sapiens
  misc_RNA (1)...(19): siRNA sense strand
cuacaaggagggacaguau

SEQ ID NO: 1066217 - RNA, 19 nt, Homo sapiens
  misc_RNA (1)...(19): siRNA sense strand
aaagaugcuuccuguccuu

SEQ ID NO: 1066218 - RNA, 19 nt, Homo sapiens
  misc_RNA (1)...(19): siRNA sense strand
uaugaugacccaaauagga

SEQ ID NO: 1066219 - RNA, 19 nt, Homo sapiens
  misc_RNA (1)...(19): siRNA sense strand
ggcagugaaugaauaugau

SEQ ID NO: 1066220 - RNA, 19 nt, Homo sapiens
  misc_RNA (1)...(19): siRNA sense strand
ccugaucacuugccagaca

SEQ ID NO: 1066221 - RNA, 19 nt, Homo sapiens
  misc_RNA (1)...(19): siRNA sense strand
ugaggaagauugaaaagga

SEQ ID NO: 1066222 - RNA, 19 nt, Homo sapiens
  misc_RNA (1)...(19): siRNA sense strand
gugauaggaacucuuuauu

SEQ ID NO: 1066223 - RNA, 19 nt, Homo sapiens
  misc_RNA (1)...(19): siRNA sense strand
agccugaccuuuccuacaa

SEQ ID NO: 1066224 - RNA, 19 nt, Homo sapiens
  misc_RNA (1)...(19): siRNA sense strand
ccauagucaagaagcauua

SEQ ID NO: 1066225 - RNA, 19 nt, Homo sapiens
  misc_RNA (1)...(19): siRNA sense strand
gaaguugaauguggcucau

SEQ ID NO: 1066226 - RNA, 19 nt, Homo sapiens
  misc_RNA (1)...(19): siRNA sense strand
gagacucaccaagcaagua

SEQ ID NO: 1066227 - RNA, 19 nt, Homo sapiens
  misc_RNA (1)...(19): siRNA sense strand
aagaaacccucaccgacau

SEQ ID NO: 1066228 - RNA, 19 nt, Homo sapiens
  misc_RNA (1)...(19): siRNA sense strand
gaacuuuauggcacaaaca

SEQ ID NO: 1066229 - RNA, 19 nt, Homo sapiens
  misc_RNA (1)...(19): siRNA sense strand
gaguugaugaggaagauug

SEQ ID NO: 1066230 - RNA, 19 nt, Homo sapiens
  misc_RNA (1)...(19): siRNA sense strand
uaaucucuguguuuccuau

SEQ ID NO: 1066231 - RNA, 19 nt, Homo sapiens
  misc_RNA (1)...(19): siRNA sense strand
gaagaguuggacccuguga

SEQ ID NO: 1066232 - RNA, 19 nt, Homo sapiens
  misc_RNA (1)...(19): siRNA sense strand
gagcagcuucggagacuca

SEQ ID NO: 1066233 - RNA, 19 nt, Homo sapiens
  misc_RNA (1)...(19): siRNA sense strand
uggcuaaucucuguguuuc

SEQ ID NO: 1066234 - RNA, 19 nt, Homo sapiens
  misc_RNA (1)...(19): siRNA sense strand
ccugcaagcugccaucaag

SEQ ID NO: 1066235 - RNA, 19 nt, Homo sapiens
  misc_RNA (1)...(19): siRNA sense strand
gaauaccaacugagaaacu

SEQ ID NO: 1066236 - RNA, 19 nt, Homo sapiens
  misc_RNA (1)...(19): siRNA sense strand
ucaugacaguguuauucaa

SEQ ID NO: 1066237 - RNA, 19 nt, Homo sapiens
  misc_RNA (1)...(19): siRNA sense strand
ucucuguguuuccuauauu

SEQ ID NO: 1066238 - RNA, 19 nt, Homo sapiens
  misc_RNA (1)...(19): siRNA sense strand
gcagugaaugaauaugaug

SEQ ID NO: 1066239 - RNA, 19 nt, Homo sapiens
  misc_RNA (1)...(19): siRNA sense strand
caagacacaacagagauga

SEQ ID NO: 1066240 - RNA, 19 nt, Homo sapiens
  misc_RNA (1)...(19): siRNA sense strand
guacaggaagcaagacaca

SEQ ID NO: 1066241 - RNA, 19 nt, Homo sapiens
  misc_RNA (1)...(19): siRNA sense strand
acugagaaacuaugaggua

SEQ ID NO: 1066242 - RNA, 19 nt, Homo sapiens
  misc_RNA (1)...(19): siRNA sense strand
cagaugaguccagacaauu

SEQ ID NO: 1066243 - RNA, 19 nt, Homo sapiens
  misc_RNA (1)...(19): siRNA sense strand
ggaaggagagguuugauua

SEQ ID NO: 1066244 - RNA, 19 nt, Homo sapiens
  misc_RNA (1)...(19): siRNA sense strand
ggaccaaguuccauuuaag

SEQ ID NO: 1066245 - RNA, 19 nt, Homo sapiens
  misc_RNA (1)...(19): siRNA sense strand
agggugagcuccacaagua

SEQ ID NO: 1066246 - RNA, 19 nt, Homo sapiens
  misc_RNA (1)...(19): siRNA sense strand
gggaccaaguuccauuuaa

SEQ ID NO: 1066247 - RNA, 19 nt, Homo sapiens
  misc_RNA (1)...(19): siRNA sense strand
gggcaccguuugauaagaa

SEQ ID NO: 1066248 - RNA, 19 nt, Homo sapiens
  misc_RNA (1)...(19): siRNA sense strand
guaccucaguggcaucauu

SEQ ID NO: 1066249 - RNA, 19 nt, Homo sapiens
  misc_RNA (1)...(19): siRNA sense strand
ucgaaagccuaucagcaua

SEQ ID NO: 1066250 - RNA, 19 nt, Homo sapiens
  misc_RNA (1)...(19): siRNA sense strand
gaaggagagguuugauuau

SEQ ID NO: 1066251 - RNA, 19 nt, Homo sapiens
  misc_RNA (1)...(19): siRNA sense strand
ggcauucgcuucaucaucu

SEQ ID NO: 1066252 - RNA, 19 nt, Homo sapiens
  misc_RNA (1)...(19): siRNA sense strand
ucuacaacauccacaguuu

SEQ ID NO: 1066253 - RNA, 19 nt, Homo sapiens
  misc_RNA (1)...(19): siRNA sense strand
ugacauuucugcuguaugc

SEQ ID NO: 1066254 - RNA, 19 nt, Homo sapiens
  misc_RNA (1)...(19): siRNA sense strand
ugacgugggcggaaucuuu

SEQ ID NO: 1066255 - RNA, 19 nt, Homo sapiens
  misc_RNA (1)...(19): siRNA sense strand
gcugggcaccguuugauaa

SEQ ID NO: 1066256 - RNA, 19 nt, Homo sapiens
  misc_RNA (1)...(19): siRNA sense strand
cagcuauacuuuccucuuc

SEQ ID NO: 1066257 - RNA, 19 nt, Homo sapiens
  misc_RNA (1)...(19): siRNA sense strand
gaaaauuccaggcgugaua

SEQ ID NO: 1066258 - RNA, 19 nt, Homo sapiens
  misc_RNA (1)...(19): siRNA sense strand
gcuacuggguguccacaug

SEQ ID NO: 1066259 - RNA, 19 nt, Homo sapiens
  misc_RNA (1)...(19): siRNA sense strand
gauugagacuccagaagca

SEQ ID NO: 1066260 - RNA, 19 nt, Homo sapiens
  misc_RNA (1)...(19): siRNA sense strand
gauucuacgugguaacuca

SEQ ID NO: 1066261 - RNA, 19 nt, Homo sapiens
  misc_RNA (1)...(19): siRNA sense strand
gcagaugccugugccuuac

SEQ ID NO: 1066262 - RNA, 19 nt, Homo sapiens
  misc_RNA (1)...(19): siRNA sense strand
gauagugugcuuucucuuc

SEQ ID NO: 1066263 - RNA, 19 nt, Homo sapiens
  misc_RNA (1)...(19): siRNA sense strand
aaggagagguuugauuaug

SEQ ID NO: 1066264 - RNA, 19 nt, Homo sapiens
  misc_RNA (1)...(19): siRNA sense strand
ugagaaugguacaaacaga

SEQ ID NO: 1066265 - RNA, 19 nt, Homo sapiens
  misc_RNA (1)...(19): siRNA sense strand
gcuaugagaaugguacaaa

SEQ ID NO: 1066266 - RNA, 19 nt, Homo sapiens
  misc_RNA (1)...(19): siRNA sense strand
gggauagugugcuuucucu

SEQ ID NO: 1066267 - RNA, 19 nt, Homo sapiens
  misc_RNA (1)...(19): siRNA sense strand
gccugccgauuagguauua

SEQ ID NO: 1066268 - RNA, 19 nt, Homo sapiens
  misc_RNA (1)...(19): siRNA sense strand
cgaaccaggucgucauucu

SEQ ID NO: 1066269 - RNA, 19 nt, Homo sapiens
  misc_RNA (1)...(19): siRNA sense strand
gagaaugguacaaacagau

SEQ ID NO: 1066270 - RNA, 19 nt, Homo sapiens
  misc_RNA (1)...(19): siRNA sense strand
uggcaggugugaucucaga

SEQ ID NO: 1066271 - RNA, 19 nt, Homo sapiens
  misc_RNA (1)...(19): siRNA sense strand
cacaaguacugcacugcuu

SEQ ID NO: 1066272 - RNA, 19 nt, Homo sapiens
  misc_RNA (1)...(19): siRNA sense strand
gaaugguacaaacagauug

SEQ ID NO: 1066273 - RNA, 19 nt, Homo sapiens
  misc_RNA (1)...(19): siRNA sense strand
gauagaguucucacugugu

SEQ ID NO: 1066274 - RNA, 19 nt, Homo sapiens
  misc_RNA (1)...(19): siRNA sense strand
gcuauacuuuccucuucug

SEQ ID NO: 1066275 - RNA, 19 nt, Homo sapiens
  misc_RNA (1)...(19): siRNA sense strand
uaggguauuucuacaacau

SEQ ID NO: 1066276 - RNA, 19 nt, Homo sapiens
  misc_RNA (1)...(19): siRNA sense strand
gacgugggcggaaucuuug

SEQ ID NO: 1066277 - RNA, 19 nt, Homo sapiens
  misc_RNA (1)...(19): siRNA sense strand
aaaggaaggagagguuuga

SEQ ID NO: 1066278 - RNA, 19 nt, Homo sapiens
  misc_RNA (1)...(19): siRNA sense strand
ggaaaaggaaggagagguu

SEQ ID NO: 1066279 - RNA, 19 nt, Homo sapiens
  misc_RNA (1)...(19): siRNA sense strand
caacugguuuggaaaagga

SEQ ID NO: 1066280 - RNA, 19 nt, Homo sapiens
  misc_RNA (1)...(19): siRNA sense strand
agaaugguacaaacagauu

SEQ ID NO: 1066281 - RNA, 19 nt, Homo sapiens
  misc_RNA (1)...(19): siRNA sense strand
ucaaaaggcuaugagaaug

SEQ ID NO: 1066282 - RNA, 19 nt, Homo sapiens
  misc_RNA (1)...(19): siRNA sense strand
guacaaacagauugagacu

SEQ ID NO: 1066283 - RNA, 19 nt, Homo sapiens
  misc_RNA (1)...(19): siRNA sense strand
ugacgggacgggcucugua

SEQ ID NO: 1066284 - RNA, 19 nt, Homo sapiens
  misc_RNA (1)...(19): siRNA sense strand
cgugguaacucaggucauc

SEQ ID NO: 1066285 - RNA, 19 nt, Homo sapiens
  misc_RNA (1)...(19): siRNA sense strand
ccagcucccugacaaugag

SEQ ID NO: 1066286 - RNA, 19 nt, Homo sapiens
  misc_RNA (1)...(19): siRNA sense strand
cgaauguggaucaccuuga

SEQ ID NO: 1066287 - RNA, 19 nt, Homo sapiens
  misc_RNA (1)...(19): siRNA sense strand
gaaccaggucgucauucuc

SEQ ID NO: 1066288 - RNA, 19 nt, Homo sapiens
  misc_RNA (1)...(19): siRNA sense strand
gaaaaggaaggagagguuu

SEQ ID NO: 1066289 - RNA, 19 nt, Homo sapiens
  misc_RNA (1)...(19): siRNA sense strand
aggagagguuugauuaugg

SEQ ID NO: 1066290 - RNA, 19 nt, Homo sapiens
  misc_RNA (1)...(19): siRNA sense strand
ugcagaugccugugccuua

SEQ ID NO: 1066291 - RNA, 19 nt, Homo sapiens
  misc_RNA (1)...(19): siRNA sense strand
ugcuuucucuuccucauug

SEQ ID NO: 1066292 - RNA, 19 nt, Homo sapiens
  misc_RNA (1)...(19): siRNA sense strand
gaccaaguuccauuuaagg

SEQ ID NO: 1066293 - RNA, 19 nt, Homo sapiens
  misc_RNA (1)...(19): siRNA sense strand
cccaccagcucccugacaa

SEQ ID NO: 1066294 - RNA, 19 nt, Homo sapiens
  misc_RNA (1)...(19): siRNA sense strand
acaggggccuugaaaauuc

SEQ ID NO: 1066295 - RNA, 19 nt, Homo sapiens
  misc_RNA (1)...(19): siRNA sense strand
cguuugauaagaacaacua

SEQ ID NO: 1066296 - RNA, 19 nt, Homo sapiens
  misc_RNA (1)...(19): siRNA sense strand
ucauugaacauccgaacga

SEQ ID NO: 1066297 - RNA, 19 nt, Homo sapiens
  misc_RNA (1)...(19): siRNA sense strand
cuacaacauccacaguuuc

SEQ ID NO: 1066298 - RNA, 19 nt, Homo sapiens
  misc_RNA (1)...(19): siRNA sense strand
gcuuaggguauuucuacaa

SEQ ID NO: 1066299 - RNA, 19 nt, Homo sapiens
  misc_RNA (1)...(19): siRNA sense strand
cggcuuaggguauuucuac

SEQ ID NO: 1066300 - RNA, 19 nt, Homo sapiens
  misc_RNA (1)...(19): siRNA sense strand
uacaucuucuccaccauca

SEQ ID NO: 1066301 - RNA, 19 nt, Homo sapiens
  misc_RNA (1)...(19): siRNA sense strand
uaugagaaugguacaaaca

SEQ ID NO: 1066302 - RNA, 19 nt, Homo sapiens
  misc_RNA (1)...(19): siRNA sense strand
ggagaaaggcggauuggua

SEQ ID NO: 1066303 - RNA, 19 nt, Homo sapiens
  misc_RNA (1)...(19): siRNA sense strand
gaacaugucgccugaugaa

SEQ ID NO: 1066304 - RNA, 19 nt, Homo sapiens
  misc_RNA (1)...(19): siRNA sense strand
gaauggauaugaacuacau

SEQ ID NO: 1066305 - RNA, 19 nt, Homo sapiens
  misc_RNA (1)...(19): siRNA sense strand
ucaaaucacuugcaagaca

SEQ ID NO: 1066306 - RNA, 19 nt, Homo sapiens
  misc_RNA (1)...(19): siRNA sense strand
ugaagaugguuaugaagaa

SEQ ID NO: 1066307 - RNA, 19 nt, Homo sapiens
  misc_RNA (1)...(19): siRNA sense strand
gacaagauccagaagcuuu

SEQ ID NO: 1066308 - RNA, 19 nt, Homo sapiens
  misc_RNA (1)...(19): siRNA sense strand
gaagaaggccaagcaguga

SEQ ID NO: 1066309 - RNA, 19 nt, Homo sapiens
  misc_RNA (1)...(19): siRNA sense strand
gagaaaggcggauugguau

SEQ ID NO: 1066310 - RNA, 19 nt, Homo sapiens
  misc_RNA (1)...(19): siRNA sense strand
ugucgucucucgcaguuua

SEQ ID NO: 1066311 - RNA, 19 nt, Homo sapiens
  misc_RNA (1)...(19): siRNA sense strand
ugaugaagaugguuaugaa

SEQ ID NO: 1066312 - RNA, 19 nt, Homo sapiens
  misc_RNA (1)...(19): siRNA sense strand
gaagaugacgauucagaga

SEQ ID NO: 1066313 - RNA, 19 nt, Homo sapiens
  misc_RNA (1)...(19): siRNA sense strand
gcugaugacccaaaggaua

SEQ ID NO: 1066314 - RNA, 19 nt, Homo sapiens
  misc_RNA (1)...(19): siRNA sense strand
gaacuacauuauccaaagg

SEQ ID NO: 1066315 - RNA, 19 nt, Homo sapiens
  misc_RNA (1)...(19): siRNA sense strand
caaaucacuugcaagacaa

SEQ ID NO: 1066316 - RNA, 19 nt, Homo sapiens
  misc_RNA (1)...(19): siRNA sense strand
acgagaagcugauccaguu

SEQ ID NO: 1066317 - RNA, 19 nt, Homo sapiens
  misc_RNA (1)...(19): siRNA sense strand
ccaaaggaagaaagaauuu

SEQ ID NO: 1066318 - RNA, 19 nt, Homo sapiens
  misc_RNA (1)...(19): siRNA sense strand
gaagaugguuaugaagaag

SEQ ID NO: 1066319 - RNA, 19 nt, Homo sapiens
  misc_RNA (1)...(19): siRNA sense strand
gaagaagaugagaacagua

SEQ ID NO: 1066320 - RNA, 19 nt, Homo sapiens
  misc_RNA (1)...(19): siRNA sense strand
guucaaaucacuugcaaga

SEQ ID NO: 1066321 - RNA, 19 nt, Homo sapiens
  misc_RNA (1)...(19): siRNA sense strand
guagacagucggaagauga

SEQ ID NO: 1066322 - RNA, 19 nt, Homo sapiens
  misc_RNA (1)...(19): siRNA sense strand
uaaaggagggaauggauau

SEQ ID NO: 1066323 - RNA, 19 nt, Homo sapiens
  misc_RNA (1)...(19): siRNA sense strand
ugaacuacauuauccaaag

SEQ ID NO: 1066324 - RNA, 19 nt, Homo sapiens
  misc_RNA (1)...(19): siRNA sense strand
gaugagaacaguagacagu

SEQ ID NO: 1066325 - RNA, 19 nt, Homo sapiens
  misc_RNA (1)...(19): siRNA sense strand
agaaagagcaagugggauu

SEQ ID NO: 1066326 - RNA, 19 nt, Homo sapiens
  misc_RNA (1)...(19): siRNA sense strand
gcaagugggauucggcuau

SEQ ID NO: 1066327 - RNA, 19 nt, Homo sapiens
  misc_RNA (1)...(19): siRNA sense strand
agaagaagaugagaacagu

SEQ ID NO: 1066328 - RNA, 19 nt, Homo sapiens
  misc_RNA (1)...(19): siRNA sense strand
ccaacuacccaaaggauau

SEQ ID NO: 1066329 - RNA, 19 nt, Homo sapiens
  misc_RNA (1)...(19): siRNA sense strand
gauaaaggagggaauggau

SEQ ID NO: 1066330 - RNA, 19 nt, Homo sapiens
  misc_RNA (1)...(19): siRNA sense strand
ccagaagcuuuaugaacga

SEQ ID NO: 1066331 - RNA, 19 nt, Homo sapiens
  misc_RNA (1)...(19): siRNA sense strand
gauaauacagaagcagaaa

SEQ ID NO: 1066332 - RNA, 19 nt, Homo sapiens
  misc_RNA (1)...(19): siRNA sense strand
cccaaaggauaauacagaa

SEQ ID NO: 1066333 - RNA, 19 nt, Homo sapiens
  misc_RNA (1)...(19): siRNA sense strand
gucggaagaugacgauuca

SEQ ID NO: 1066334 - RNA, 19 nt, Homo sapiens
  misc_RNA (1)...(19): siRNA sense strand
gagauggacaaauuggaaa

SEQ ID NO: 1066335 - RNA, 19 nt, Homo sapiens
  misc_RNA (1)...(19): siRNA sense strand
cggaacaugucgccugaug

SEQ ID NO: 1066336 - RNA, 19 nt, Homo sapiens
  misc_RNA (1)...(19): siRNA sense strand
gaaaggcggauugguaucu

SEQ ID NO: 1066337 - RNA, 19 nt, Homo sapiens
  misc_RNA (1)...(19): siRNA sense strand
ggauaauacagaagcagaa

SEQ ID NO: 1066338 - RNA, 19 nt, Homo sapiens
  misc_RNA (1)...(19): siRNA sense strand
gcugugggcaccauuguga

SEQ ID NO: 1066339 - RNA, 19 nt, Homo sapiens
  misc_RNA (1)...(19): siRNA sense strand
cagaugcucagaagagaaa

SEQ ID NO: 1066340 - RNA, 19 nt, Homo sapiens
  misc_RNA (1)...(19): siRNA sense strand
gggaauggauaugaacuac

SEQ ID NO: 1066341 - RNA, 19 nt, Homo sapiens
  misc_RNA (1)...(19): siRNA sense strand
caugucgccugaugaaauc

SEQ ID NO: 1066342 - RNA, 19 nt, Homo sapiens
  misc_RNA (1)...(19): siRNA sense strand
ccuggcagauguucaaauc

SEQ ID NO: 1066343 - RNA, 19 nt, Homo sapiens
  misc_RNA (1)...(19): siRNA sense strand
acaagauccagaagcuuua

SEQ ID NO: 1066344 - RNA, 19 nt, Homo sapiens
  misc_RNA (1)...(19): siRNA sense strand
gaaagagcaagugggauuc

SEQ ID NO: 1066345 - RNA, 19 nt, Homo sapiens
  misc_RNA (1)...(19): siRNA sense strand
cugaugacccaaaggauaa

SEQ ID NO: 1066346 - RNA, 19 nt, Homo sapiens
  misc_RNA (1)...(19): siRNA sense strand
ugagauggacaaauuggaa

SEQ ID NO: 1066347 - RNA, 19 nt, Homo sapiens
  misc_RNA (1)...(19): siRNA sense strand
gaagaagaagaagaugaga

SEQ ID NO: 1066348 - RNA, 19 nt, Homo sapiens
  misc_RNA (1)...(19): siRNA sense strand
gaaagauaaaggagggaau

SEQ ID NO: 1066349 - RNA, 19 nt, Homo sapiens
  misc_RNA (1)...(19): siRNA sense strand
ggaacaugucgccugauga

SEQ ID NO: 1066350 - RNA, 19 nt, Homo sapiens
  misc_RNA (1)...(19): siRNA sense strand
ggaacucguggccuccuuu

SEQ ID NO: 1066351 - RNA, 19 nt, Homo sapiens
  misc_RNA (1)...(19): siRNA sense strand
gcagaugcucagaagagaa

SEQ ID NO: 1066352 - RNA, 19 nt, Homo sapiens
  misc_RNA (1)...(19): siRNA sense strand
caagugggauucggcuauc

SEQ ID NO: 1066353 - RNA, 19 nt, Homo sapiens
  misc_RNA (1)...(19): siRNA sense strand
gcagauguucaaaucacuu

SEQ ID NO: 1066354 - RNA, 19 nt, Homo sapiens
  misc_RNA (1)...(19): siRNA sense strand
gcaccaacuacccaaagga

SEQ ID NO: 1066355 - RNA, 19 nt, Homo sapiens
  misc_RNA (1)...(19): siRNA sense strand
uacauuauccaaaggaaga

SEQ ID NO: 1066356 - RNA, 19 nt, Homo sapiens
  misc_RNA (1)...(19): siRNA sense strand
caagaccaccgucaucucu

SEQ ID NO: 1066357 - RNA, 19 nt, Homo sapiens
  misc_RNA (1)...(19): siRNA sense strand
gauccagaagcuuuaugaa

SEQ ID NO: 1066358 - RNA, 19 nt, Homo sapiens
  misc_RNA (1)...(19): siRNA sense strand
gugaugaagaugguuauga

SEQ ID NO: 1066359 - RNA, 19 nt, Homo sapiens
  misc_RNA (1)...(19): siRNA sense strand
auugguaucugaugccuau

SEQ ID NO: 1066360 - RNA, 19 nt, Homo sapiens
  misc_RNA (1)...(19): siRNA sense strand
cuccuacuaugaggcauua

SEQ ID NO: 1066361 - RNA, 19 nt, Homo sapiens
  misc_RNA (1)...(19): siRNA sense strand
auaaaggagggaauggaua

SEQ ID NO: 1066362 - RNA, 19 nt, Homo sapiens
  misc_RNA (1)...(19): siRNA sense strand
ugaagaagaagaagaugag

SEQ ID NO: 1066363 - RNA, 19 nt, Homo sapiens
  misc_RNA (1)...(19): siRNA sense strand
agaugguuaugaagaagaa

SEQ ID NO: 1066364 - RNA, 19 nt, Homo sapiens
  misc_RNA (1)...(19): siRNA sense strand
cggaagaugacgauucaga

SEQ ID NO: 1066365 - RNA, 19 nt, Homo sapiens
  misc_RNA (1)...(19): siRNA sense strand
gaugacccaaaggauaaua

SEQ ID NO: 1066366 - RNA, 19 nt, Homo sapiens
  misc_RNA (1)...(19): siRNA sense strand
cagaagagaaagagcaagu

SEQ ID NO: 1066367 - RNA, 19 nt, Homo sapiens
  misc_RNA (1)...(19): siRNA sense strand
aggagggaauggauaugaa

SEQ ID NO: 1066368 - RNA, 19 nt, Homo sapiens
  misc_RNA (1)...(19): siRNA sense strand
cagaagcuuuaugaacgaa

SEQ ID NO: 1066369 - RNA, 19 nt, Homo sapiens
  misc_RNA (1)...(19): siRNA sense strand
gaagaugagaacaguagac

SEQ ID NO: 1066370 - RNA, 19 nt, Homo sapiens
  misc_RNA (1)...(19): siRNA sense strand
gcaguuuacgcggaagauu

SEQ ID NO: 1066371 - RNA, 19 nt, Homo sapiens
  misc_RNA (1)...(19): siRNA sense strand
cuacccaaaggauauguuu

SEQ ID NO: 1066372 - RNA, 19 nt, Homo sapiens
  misc_RNA (1)...(19): siRNA sense strand
aagaagaugagaacaguag

SEQ ID NO: 1066373 - RNA, 19 nt, Homo sapiens
  misc_RNA (1)...(19): siRNA sense strand
gaagaagaagaugagaaca

SEQ ID NO: 1066374 - RNA, 19 nt, Homo sapiens
  misc_RNA (1)...(19): siRNA sense strand
aaagauaaaggagggaaug

SEQ ID NO: 1066375 - RNA, 19 nt, Homo sapiens
  misc_RNA (1)...(19): siRNA sense strand
aagacaagauccagaagcu

SEQ ID NO: 1066376 - RNA, 19 nt, Homo sapiens
  misc_RNA (1)...(19): siRNA sense strand
acaugucgccugaugaaau

SEQ ID NO: 1066377 - RNA, 19 nt, Homo sapiens
  misc_RNA (1)...(19): siRNA sense strand
caacuacccaaaggauaug

SEQ ID NO: 1066378 - RNA, 19 nt, Homo sapiens
  misc_RNA (1)...(19): siRNA sense strand
uccaaaggaagaaagaauu

SEQ ID NO: 1066379 - RNA, 19 nt, Homo sapiens
  misc_RNA (1)...(19): siRNA sense strand
ggaauggauaugaacuaca

SEQ ID NO: 1066380 - RNA, 19 nt, Homo sapiens
  misc_RNA (1)...(19): siRNA sense strand
guuaugaagaagaagaaga

SEQ ID NO: 1066381 - RNA, 19 nt, Homo sapiens
  misc_RNA (1)...(19): siRNA sense strand
gaauuucggaacccuagca

SEQ ID NO: 1066382 - RNA, 19 nt, Homo sapiens
  misc_RNA (1)...(19): siRNA sense strand
gcaagacaagauccagaag

SEQ ID NO: 1066383 - RNA, 19 nt, Homo sapiens
  misc_RNA (1)...(19): siRNA sense strand
aagaagaagaagaugagaa

SEQ ID NO: 1066384 - RNA, 19 nt, Homo sapiens
  misc_RNA (1)...(19): siRNA sense strand
agaagaagaagaugagaac

SEQ ID NO: 1066385 - RNA, 19 nt, Homo sapiens
  misc_RNA (1)...(19): siRNA sense strand
gauccaguucugugccauu

SEQ ID NO: 1066386 - RNA, 19 nt, Homo sapiens
  misc_RNA (1)...(19): siRNA sense strand
aaaggauaauacagaagca

SEQ ID NO: 1066387 - RNA, 19 nt, Homo sapiens
  misc_RNA (1)...(19): siRNA sense strand
acccaaaggauaauacaga

SEQ ID NO: 1066388 - RNA, 19 nt, Homo sapiens
  misc_RNA (1)...(19): siRNA sense strand
gaugaagaugguuaugaag

SEQ ID NO: 1066389 - RNA, 19 nt, Homo sapiens
  misc_RNA (1)...(19): siRNA sense strand
ccaguucugugccauugac

SEQ ID NO: 1066390 - RNA, 19 nt, Homo sapiens
  misc_RNA (1)...(19): siRNA sense strand
caagauccagaagcuuuau

SEQ ID NO: 1066391 - RNA, 19 nt, Homo sapiens
  misc_RNA (1)...(19): siRNA sense strand
uggcagauguucaaaucac

SEQ ID NO: 1066392 - RNA, 19 nt, Homo sapiens
  misc_RNA (1)...(19): siRNA sense strand
ucugucgucucucgcaguu

SEQ ID NO: 1066393 - RNA, 19 nt, Homo sapiens
  misc_RNA (1)...(19): siRNA sense strand
cagauguucaaaucacuug

SEQ ID NO: 1066394 - RNA, 19 nt, Homo sapiens
  misc_RNA (1)...(19): siRNA sense strand
ugggcaccauugugaagaa

SEQ ID NO: 1066395 - RNA, 19 nt, Homo sapiens
  misc_RNA (1)...(19): siRNA sense strand
ggagggaauggauaugaac

SEQ ID NO: 1066396 - RNA, 19 nt, Homo sapiens
  misc_RNA (1)...(19): siRNA sense strand
gaaacaacaucuggaaaua

SEQ ID NO: 1066397 - RNA, 19 nt, Homo sapiens
  misc_RNA (1)...(19): siRNA sense strand
ccagaaagguugcaagaaa

SEQ ID NO: 1066398 - RNA, 19 nt, Homo sapiens
  misc_RNA (1)...(19): siRNA sense strand
gaagugaaaugccgcugua

SEQ ID NO: 1066399 - RNA, 19 nt, Homo sapiens
  misc_RNA (1)...(19): siRNA sense strand
gagaaagcgugccaaauga

SEQ ID NO: 1066400 - RNA, 19 nt, Homo sapiens
  misc_RNA (1)...(19): siRNA sense strand
ggaugcuucuucugaauua

SEQ ID NO: 1066401 - RNA, 19 nt, Homo sapiens
  misc_RNA (1)...(19): siRNA sense strand
gcucaucauuuauggaaua

SEQ ID NO: 1066402 - RNA, 19 nt, Homo sapiens
  misc_RNA (1)...(19): siRNA sense strand
gauccaagauucaccuaaa

SEQ ID NO: 1066403 - RNA, 19 nt, Homo sapiens
  misc_RNA (1)...(19): siRNA sense strand
ggagaauguucccacuaua

SEQ ID NO: 1066404 - RNA, 19 nt, Homo sapiens
  misc_RNA (1)...(19): siRNA sense strand
gaagagcuauagugaagug

SEQ ID NO: 1066405 - RNA, 19 nt, Homo sapiens
  misc_RNA (1)...(19): siRNA sense strand
cauuauggaucacaagaua

SEQ ID NO: 1066406 - RNA, 19 nt, Homo sapiens
  misc_RNA (1)...(19): siRNA sense strand
ggacucaacuggugcaucu

SEQ ID NO: 1066407 - RNA, 19 nt, Homo sapiens
  misc_RNA (1)...(19): siRNA sense strand
ccaaaucgaugaccgacaa

SEQ ID NO: 1066408 - RNA, 19 nt, Homo sapiens
  misc_RNA (1)...(19): siRNA sense strand
gaguguagcucaaggaauc

SEQ ID NO: 1066409 - RNA, 19 nt, Homo sapiens
  misc_RNA (1)...(19): siRNA sense strand
uaucauaggcucucacuuu

SEQ ID NO: 1066410 - RNA, 19 nt, Homo sapiens
  misc_RNA (1)...(19): siRNA sense strand
uaaggaagcuguggccaaa

SEQ ID NO: 1066411 - RNA, 19 nt, Homo sapiens
  misc_RNA (1)...(19): siRNA sense strand
gaucauugcugucacuaca

SEQ ID NO: 1066412 - RNA, 19 nt, Homo sapiens
  misc_RNA (1)...(19): siRNA sense strand
caucaaaggcccaaguuaa

SEQ ID NO: 1066413 - RNA, 19 nt, Homo sapiens
  misc_RNA (1)...(19): siRNA sense strand
gaaaucaucagaaacaaca

SEQ ID NO: 1066414 - RNA, 19 nt, Homo sapiens
  misc_RNA (1)...(19): siRNA sense strand
gagagaagcccacuugcaa

SEQ ID NO: 1066415 - RNA, 19 nt, Homo sapiens
  misc_RNA (1)...(19): siRNA sense strand
ccugaggccuguuggcuua

SEQ ID NO: 1066416 - RNA, 19 nt, Homo sapiens
  misc_RNA (1)...(19): siRNA sense strand
uggaauagccacucucaua

SEQ ID NO: 1066417 - RNA, 19 nt, Homo sapiens
  misc_RNA (1)...(19): siRNA sense strand
gaacaauaccacagaagau

SEQ ID NO: 1066418 - RNA, 19 nt, Homo sapiens
  misc_RNA (1)...(19): siRNA sense strand
gccaaugugugguuuauca

SEQ ID NO: 1066419 - RNA, 19 nt, Homo sapiens
  misc_RNA (1)...(19): siRNA sense strand
ccuaaaagcuggagauaaa

SEQ ID NO: 1066420 - RNA, 19 nt, Homo sapiens
  misc_RNA (1)...(19): siRNA sense strand
uggcuuaacugggacaaua

SEQ ID NO: 1066421 - RNA, 19 nt, Homo sapiens
  misc_RNA (1)...(19): siRNA sense strand
ccaguguggugaugucuuu

SEQ ID NO: 1066422 - RNA, 19 nt, Homo sapiens
  misc_RNA (1)...(19): siRNA sense strand
ugagaaagcgugccaaaug

SEQ ID NO: 1066423 - RNA, 19 nt, Homo sapiens
  misc_RNA (1)...(19): siRNA sense strand
gaccuuguauuucuucuuc

SEQ ID NO: 1066424 - RNA, 19 nt, Homo sapiens
  misc_RNA (1)...(19): siRNA sense strand
uaaauggucuggugcuauc

SEQ ID NO: 1066425 - RNA, 19 nt, Homo sapiens
  misc_RNA (1)...(19): siRNA sense strand
caacuccacauccacaaua

SEQ ID NO: 1066426 - RNA, 19 nt, Homo sapiens
  misc_RNA (1)...(19): siRNA sense strand
cagaaagguugcaagaaau

SEQ ID NO: 1066427 - RNA, 19 nt, Homo sapiens
  misc_RNA (1)...(19): siRNA sense strand
ggcucucacuuuaacauua

SEQ ID NO: 1066428 - RNA, 19 nt, Homo sapiens
  misc_RNA (1)...(19): siRNA sense strand
caggauguggucauaauua

SEQ ID NO: 1066429 - RNA, 19 nt, Homo sapiens
  misc_RNA (1)...(19): siRNA sense strand
uaacaaaccaggcuacauc

SEQ ID NO: 1066430 - RNA, 19 nt, Homo sapiens
  misc_RNA (1)...(19): siRNA sense strand
uaauguuacucgagagaaa

SEQ ID NO: 1066431 - RNA, 19 nt, Homo sapiens
  misc_RNA (1)...(19): siRNA sense strand
ugacggagauaucauacau

SEQ ID NO: 1066432 - RNA, 19 nt, Homo sapiens
  misc_RNA (1)...(19): siRNA sense strand
uaaugaaucgucaaggaua

SEQ ID NO: 1066433 - RNA, 19 nt, Homo sapiens
  misc_RNA (1)...(19): siRNA sense strand
gaauagccacucucauaga

SEQ ID NO: 1066434 - RNA, 19 nt, Homo sapiens
  misc_RNA (1)...(19): siRNA sense strand
gaugaagucccgaaugaug

SEQ ID NO: 1066435 - RNA, 19 nt, Homo sapiens
  misc_RNA (1)...(19): siRNA sense strand
caagauaagagaugcuuug

SEQ ID NO: 1066436 - RNA, 19 nt, Homo sapiens
  misc_RNA (1)...(19): siRNA sense strand
cacuauagauccaagauuc

SEQ ID NO: 1066437 - RNA, 19 nt, Homo sapiens
  misc_RNA (1)...(19): siRNA sense strand
ggaauagccacucucauag

SEQ ID NO: 1066438 - RNA, 19 nt, Homo sapiens
  misc_RNA (1)...(19): siRNA sense strand
cgacacagcagccauuuca

SEQ ID NO: 1066439 - RNA, 19 nt, Homo sapiens
  misc_RNA (1)...(19): siRNA sense strand
gagagaaaaugaagagcua

SEQ ID NO: 1066440 - RNA, 19 nt, Homo sapiens
  misc_RNA (1)...(19): siRNA sense strand
ggugaaaucaucagaaaca

SEQ ID NO: 1066441 - RNA, 19 nt, Homo sapiens
  misc_RNA (1)...(19): siRNA sense strand
ucaaugcuuuccaggguuu

SEQ ID NO: 1066442 - RNA, 19 nt, Homo sapiens
  misc_RNA (1)...(19): siRNA sense strand
cgacaaaguucuggacuac

SEQ ID NO: 1066443 - RNA, 19 nt, Homo sapiens
  misc_RNA (1)...(19): siRNA sense strand
gaaaugccgcuguaacuac

SEQ ID NO: 1066444 - RNA, 19 nt, Homo sapiens
  misc_RNA (1)...(19): siRNA sense strand
gaaagcgugccaaaugaug

SEQ ID NO: 1066445 - RNA, 19 nt, Homo sapiens
  misc_RNA (1)...(19): siRNA sense strand
gcucaaggaauccguaaga

SEQ ID NO: 1066446 - RNA, 19 nt, Homo sapiens
  misc_RNA (1)...(19): siRNA sense strand
ggaaggauccaagagaaau

SEQ ID NO: 1066447 - RNA, 19 nt, Homo sapiens
  misc_RNA (1)...(19): siRNA sense strand
caaccaauggaucuaaauu

SEQ ID NO: 1066448 - RNA, 19 nt, Homo sapiens
  misc_RNA (1)...(19): siRNA sense strand
ggacugaccugggguuuug

SEQ ID NO: 1066449 - RNA, 19 nt, Homo sapiens
  misc_RNA (1)...(19): siRNA sense strand
gguaaauggucuggugcua

SEQ ID NO: 1066450 - RNA, 19 nt, Homo sapiens
  misc_RNA (1)...(19): siRNA sense strand
gagaauguucccacuauag

SEQ ID NO: 1066451 - RNA, 19 nt, Homo sapiens
  misc_RNA (1)...(19): siRNA sense strand
ucacuaggcccaaccaaug

SEQ ID NO: 1066452 - RNA, 19 nt, Homo sapiens
  misc_RNA (1)...(19): siRNA sense strand
gaucacaagauaagagaug

SEQ ID NO: 1066453 - RNA, 19 nt, Homo sapiens
  misc_RNA (1)...(19): siRNA sense strand
aauagccacucucauagaa

SEQ ID NO: 1066454 - RNA, 19 nt, Homo sapiens
  misc_RNA (1)...(19): siRNA sense strand
gaccugggguuuuggaaua

SEQ ID NO: 1066455 - RNA, 19 nt, Homo sapiens
  misc_RNA (1)...(19): siRNA sense strand
agagaaaggcuacaugaga

SEQ ID NO: 1066456 - RNA, 19 nt, Homo sapiens
  misc_RNA (1)...(19): siRNA sense strand
ccagagaaaggcuacauga

SEQ ID NO: 1066457 - RNA, 19 nt, Homo sapiens
  misc_RNA (1)...(19): siRNA sense strand
aucauaggcucucacuuua

SEQ ID NO: 1066458 - RNA, 19 nt, Homo sapiens
  misc_RNA (1)...(19): siRNA sense strand
cauaauaccucagagaaaa

SEQ ID NO: 1066459 - RNA, 19 nt, Homo sapiens
  misc_RNA (1)...(19): siRNA sense strand
cagcagccauuucaaacug

SEQ ID NO: 1066460 - RNA, 19 nt, Homo sapiens
  misc_RNA (1)...(19): siRNA sense strand
aaaaucagcugaaacaugu

SEQ ID NO: 1066461 - RNA, 19 nt, Homo sapiens
  misc_RNA (1)...(19): siRNA sense strand
uaaggacuuucauggagaa

SEQ ID NO: 1066462 - RNA, 19 nt, Homo sapiens
  misc_RNA (1)...(19): siRNA sense strand
gaacugccccuuugauuau

SEQ ID NO: 1066463 - RNA, 19 nt, Homo sapiens
  misc_RNA (1)...(19): siRNA sense strand
gcccaggacuacaacaugu

SEQ ID NO: 1066464 - RNA, 19 nt, Homo sapiens
  misc_RNA (1)...(19): siRNA sense strand
gcagucagugaauuuguuu

SEQ ID NO: 1066465 - RNA, 19 nt, Homo sapiens
  misc_RNA (1)...(19): siRNA sense strand
agagaugcuuugaggauga

SEQ ID NO: 1066466 - RNA, 19 nt, Homo sapiens
  misc_RNA (1)...(19): siRNA sense strand
ucacagagccagagaaagg

SEQ ID NO: 1066467 - RNA, 19 nt, Homo sapiens
  misc_RNA (1)...(19): siRNA sense strand
caaugugugguuuaucaua

SEQ ID NO: 1066468 - RNA, 19 nt, Homo sapiens
  misc_RNA (1)...(19): siRNA sense strand
acaaaguucuggacuacau

SEQ ID NO: 1066469 - RNA, 19 nt, Homo sapiens
  misc_RNA (1)...(19): siRNA sense strand
gaugagaaagcgugccaaa

SEQ ID NO: 1066470 - RNA, 19 nt, Homo sapiens
  misc_RNA (1)...(19): siRNA sense strand
gcauagcuuucccaaccuu

SEQ ID NO: 1066471 - RNA, 19 nt, Homo sapiens
  misc_RNA (1)...(19): siRNA sense strand
uaacugggacaauaccaaa

SEQ ID NO: 1066472 - RNA, 19 nt, Homo sapiens
  misc_RNA (1)...(19): siRNA sense strand
aaugaaucgucaaggauaa

SEQ ID NO: 1066473 - RNA, 19 nt, Homo sapiens
  misc_RNA (1)...(19): siRNA sense strand
uaagagaugcuuugaggau

SEQ ID NO: 1066474 - RNA, 19 nt, Homo sapiens
  misc_RNA (1)...(19): siRNA sense strand
cagagaccauugagagugu

SEQ ID NO: 1066475 - RNA, 19 nt, Homo sapiens
  misc_RNA (1)...(19): siRNA sense strand
ggaugaggaugucuucacu

SEQ ID NO: 1066476 - RNA, 19 nt, Homo sapiens
  misc_RNA (1)...(19): siRNA sense strand
gcucagcgucucaauccua

SEQ ID NO: 1066477 - RNA, 19 nt, Homo sapiens
  misc_RNA (1)...(19): siRNA sense strand
caugaacaauaccacagaa

SEQ ID NO: 1066478 - RNA, 19 nt, Homo sapiens
  misc_RNA (1)...(19): siRNA sense strand
gaaacauguacaagccuuu

SEQ ID NO: 1066479 - RNA, 19 nt, Homo sapiens
  misc_RNA (1)...(19): siRNA sense strand
cauaggcucucacuuuaac

SEQ ID NO: 1066480 - RNA, 19 nt, Homo sapiens
  misc_RNA (1)...(19): siRNA sense strand
ccgacaaaguucuggacua

SEQ ID NO: 1066481 - RNA, 19 nt, Homo sapiens
  misc_RNA (1)...(19): siRNA sense strand
ccagacaacuccacaucca

SEQ ID NO: 1066482 - RNA, 19 nt, Homo sapiens
  misc_RNA (1)...(19): siRNA sense strand
acacagcagccauuucaaa

SEQ ID NO: 1066483 - RNA, 19 nt, Homo sapiens
  misc_RNA (1)...(19): siRNA sense strand
aaaugaagagcuauaguga

SEQ ID NO: 1066484 - RNA, 19 nt, Homo sapiens
  misc_RNA (1)...(19): siRNA sense strand
caaggaauccguaagaacu

SEQ ID NO: 1066485 - RNA, 19 nt, Homo sapiens
  misc_RNA (1)...(19): siRNA sense strand
aggagaauguucccacuau

SEQ ID NO: 1066486 - RNA, 19 nt, Homo sapiens
  misc_RNA (1)...(19): siRNA sense strand
augaugaagucccgaauga

SEQ ID NO: 1066487 - RNA, 19 nt, Homo sapiens
  misc_RNA (1)...(19): siRNA sense strand
gcauugcucaucauuuaug

SEQ ID NO: 1066488 - RNA, 19 nt, Homo sapiens
  misc_RNA (1)...(19): siRNA sense strand
guucuuugccugaucauug

SEQ ID NO: 1066489 - RNA, 19 nt, Homo sapiens
  misc_RNA (1)...(19): siRNA sense strand
uaucaggaacgaagugaaa

SEQ ID NO: 1066490 - RNA, 19 nt, Homo sapiens
  misc_RNA (1)...(19): siRNA sense strand
caaaaggguuucacaucaa

SEQ ID NO: 1066491 - RNA, 19 nt, Homo sapiens
  misc_RNA (1)...(19): siRNA sense strand
gggcuuucauucccaacaa

SEQ ID NO: 1066492 - RNA, 19 nt, Homo sapiens
  misc_RNA (1)...(19): siRNA sense strand
gaaggauccaagagaaaug

SEQ ID NO: 1066493 - RNA, 19 nt, Homo sapiens
  misc_RNA (1)...(19): siRNA sense strand
caaaggcccaaguuaacaa

SEQ ID NO: 1066494 - RNA, 19 nt, Homo sapiens
  misc_RNA (1)...(19): siRNA sense strand
caucugggcuuuuaccaaa

SEQ ID NO: 1066495 - RNA, 19 nt, Homo sapiens
  misc_RNA (1)...(19): siRNA sense strand
ugaaaugccgcuguaacua

SEQ ID NO: 1066496 - RNA, 19 nt, Homo sapiens
  misc_RNA (1)...(19): siRNA sense strand
agacagagaucaccuauuu

SEQ ID NO: 1066497 - RNA, 19 nt, Homo sapiens
  misc_RNA (1)...(19): siRNA sense strand
gcaaauuguuuaccucuuu

SEQ ID NO: 1066498 - RNA, 19 nt, Homo sapiens
  misc_RNA (1)...(19): siRNA sense strand
ucagaugucuucauucaua

SEQ ID NO: 1066499 - RNA, 19 nt, Homo sapiens
  misc_RNA (1)...(19): siRNA sense strand
caacauaucaacagcaaua

SEQ ID NO: 1066500 - RNA, 19 nt, Homo sapiens
  misc_RNA (1)...(19): siRNA sense strand
aggcaaagaugcagaguua

SEQ ID NO: 1066501 - RNA, 19 nt, Homo sapiens
  misc_RNA (1)...(19): siRNA sense strand
gcagaugugugguucauug

SEQ ID NO: 1066502 - RNA, 19 nt, Homo sapiens
  misc_RNA (1)...(19): siRNA sense strand
gaagugagagccauuguga

SEQ ID NO: 1066503 - RNA, 19 nt, Homo sapiens
  misc_RNA (1)...(19): siRNA sense strand
cauaucagaugucuucauu

SEQ ID NO: 1066504 - RNA, 19 nt, Homo sapiens
  misc_RNA (1)...(19): siRNA sense strand
acagauauguugcuacaaa

SEQ ID NO: 1066505 - RNA, 19 nt, Homo sapiens
  misc_RNA (1)...(19): siRNA sense strand
gaacaucgccauccucaca

SEQ ID NO: 1066506 - RNA, 19 nt, Homo sapiens
  misc_RNA (1)...(19): siRNA sense strand
gaucugucuuguguaauua

SEQ ID NO: 1066507 - RNA, 19 nt, Homo sapiens
  misc_RNA (1)...(19): siRNA sense strand
gagaauucaugaagauguu

SEQ ID NO: 1066508 - RNA, 19 nt, Homo sapiens
  misc_RNA (1)...(19): siRNA sense strand
uaucagaugucuucauuca

SEQ ID NO: 1066509 - RNA, 19 nt, Homo sapiens
  misc_RNA (1)...(19): siRNA sense strand
cgccaugugugcauuguua

SEQ ID NO: 1066510 - RNA, 19 nt, Homo sapiens
  misc_RNA (1)...(19): siRNA sense strand
uaacuugacucucauccau

SEQ ID NO: 1066511 - RNA, 19 nt, Homo sapiens
  misc_RNA (1)...(19): siRNA sense strand
gacagaaacagcagcuaua

SEQ ID NO: 1066512 - RNA, 19 nt, Homo sapiens
  misc_RNA (1)...(19): siRNA sense strand
caaaagacauggcacaaga

SEQ ID NO: 1066513 - RNA, 19 nt, Homo sapiens
  misc_RNA (1)...(19): siRNA sense strand
gcuauauccugcuacauuc

SEQ ID NO: 1066514 - RNA, 19 nt, Homo sapiens
  misc_RNA (1)...(19): siRNA sense strand
ugagagaauucaugaagau

SEQ ID NO: 1066515 - RNA, 19 nt, Homo sapiens
  misc_RNA (1)...(19): siRNA sense strand
gcaaagaugcagaguuaca

SEQ ID NO: 1066516 - RNA, 19 nt, Homo sapiens
  misc_RNA (1)...(19): siRNA sense strand
ggccugggcauuucuauuu

SEQ ID NO: 1066517 - RNA, 19 nt, Homo sapiens
  misc_RNA (1)...(19): siRNA sense strand
gugcagcucuuacacaaca

SEQ ID NO: 1066518 - RNA, 19 nt, Homo sapiens
  misc_RNA (1)...(19): siRNA sense strand
ucaugaagauguucuguag

SEQ ID NO: 1066519 - RNA, 19 nt, Homo sapiens
  misc_RNA (1)...(19): siRNA sense strand
ucccuggccuuccacauua

SEQ ID NO: 1066520 - RNA, 19 nt, Homo sapiens
  misc_RNA (1)...(19): siRNA sense strand
caagcuguuugcaaaugua

SEQ ID NO: 1066521 - RNA, 19 nt, Homo sapiens
  misc_RNA (1)...(19): siRNA sense strand
gcauugcauuuccaacuau

SEQ ID NO: 1066522 - RNA, 19 nt, Homo sapiens
  misc_RNA (1)...(19): siRNA sense strand
gagcccagccugugauuug

SEQ ID NO: 1066523 - RNA, 19 nt, Homo sapiens
  misc_RNA (1)...(19): siRNA sense strand
gcucaaugcauuccaggua

SEQ ID NO: 1066524 - RNA, 19 nt, Homo sapiens
  misc_RNA (1)...(19): siRNA sense strand
ccaaggaacuuaaaagaau

SEQ ID NO: 1066525 - RNA, 19 nt, Homo sapiens
  misc_RNA (1)...(19): siRNA sense strand
caccauagccaaccacauu

SEQ ID NO: 1066526 - RNA, 19 nt, Homo sapiens
  misc_RNA (1)...(19): siRNA sense strand
ucccaucucuuucuucuug

SEQ ID NO: 1066527 - RNA, 19 nt, Homo sapiens
  misc_RNA (1)...(19): siRNA sense strand
ucagcagucucccuggaua

SEQ ID NO: 1066528 - RNA, 19 nt, Homo sapiens
  misc_RNA (1)...(19): siRNA sense strand
ugaggaggauucacguuug

SEQ ID NO: 1066529 - RNA, 19 nt, Homo sapiens
  misc_RNA (1)...(19): siRNA sense strand
uggaugggcugcaagcaaa

SEQ ID NO: 1066530 - RNA, 19 nt, Homo sapiens
  misc_RNA (1)...(19): siRNA sense strand
gugagagaauucaugaaga

SEQ ID NO: 1066531 - RNA, 19 nt, Homo sapiens
  misc_RNA (1)...(19): siRNA sense strand
ucagucaacuccuuugcaa

SEQ ID NO: 1066532 - RNA, 19 nt, Homo sapiens
  misc_RNA (1)...(19): siRNA sense strand
caggaaacauugccguaau

SEQ ID NO: 1066533 - RNA, 19 nt, Homo sapiens
  misc_RNA (1)...(19): siRNA sense strand
ggacugaccuggggauuug

SEQ ID NO: 1066534 - RNA, 19 nt, Homo sapiens
  misc_RNA (1)...(19): siRNA sense strand
ugagagccauugugagaau

SEQ ID NO: 1066535 - RNA, 19 nt, Homo sapiens
  misc_RNA (1)...(19): siRNA sense strand
uaacauugcagccacuuug

SEQ ID NO: 1066536 - RNA, 19 nt, Homo sapiens
  misc_RNA (1)...(19): siRNA sense strand
guuuaccucuuucucaauu

SEQ ID NO: 1066537 - RNA, 19 nt, Homo sapiens
  misc_RNA (1)...(19): siRNA sense strand
gagugagucccaucucuuu

SEQ ID NO: 1066538 - RNA, 19 nt, Homo sapiens
  misc_RNA (1)...(19): siRNA sense strand
ggucaucagcauugcauuu

SEQ ID NO: 1066539 - RNA, 19 nt, Homo sapiens
  misc_RNA (1)...(19): siRNA sense strand
uuaaugcccucaacaucuu

SEQ ID NO: 1066540 - RNA, 19 nt, Homo sapiens
  misc_RNA (1)...(19): siRNA sense strand
caaauuguuuaccucuuuc

SEQ ID NO: 1066541 - RNA, 19 nt, Homo sapiens
  misc_RNA (1)...(19): siRNA sense strand
aaacauugccguaauugug

SEQ ID NO: 1066542 - RNA, 19 nt, Homo sapiens
  misc_RNA (1)...(19): siRNA sense strand
agaucugucuuguguaauu

SEQ ID NO: 1066543 - RNA, 19 nt, Homo sapiens
  misc_RNA (1)...(19): siRNA sense strand
gaauuaaugauaccagcaa

SEQ ID NO: 1066544 - RNA, 19 nt, Homo sapiens
  misc_RNA (1)...(19): siRNA sense strand
uaguaaaccugaucacagu

SEQ ID NO: 1066545 - RNA, 19 nt, Homo sapiens
  misc_RNA (1)...(19): siRNA sense strand
gcaaauguaggccaagcaa

SEQ ID NO: 1066546 - RNA, 19 nt, Homo sapiens
  misc_RNA (1)...(19): siRNA sense strand
ggaaacauugccguaauug

SEQ ID NO: 1066547 - RNA, 19 nt, Homo sapiens
  misc_RNA (1)...(19): siRNA sense strand
gcaagaacaucgccauccu

SEQ ID NO: 1066548 - RNA, 19 nt, Homo sapiens
  misc_RNA (1)...(19): siRNA sense strand
caacuggacuuucauuccu

SEQ ID NO: 1066549 - RNA, 19 nt, Homo sapiens
  misc_RNA (1)...(19): siRNA sense strand
gcucuuacacaacauauca

SEQ ID NO: 1066550 - RNA, 19 nt, Homo sapiens
  misc_RNA (1)...(19): siRNA sense strand
cacaacauaucaacagcaa

SEQ ID NO: 1066551 - RNA, 19 nt, Homo sapiens
  misc_RNA (1)...(19): siRNA sense strand
gaggauggauggguucagu

SEQ ID NO: 1066552 - RNA, 19 nt, Homo sapiens
  misc_RNA (1)...(19): siRNA sense strand
cauuguggcuuccuuucuu

SEQ ID NO: 1066553 - RNA, 19 nt, Homo sapiens
  misc_RNA (1)...(19): siRNA sense strand
caaagacagagaucaccua

SEQ ID NO: 1066554 - RNA, 19 nt, Homo sapiens
  misc_RNA (1)...(19): siRNA sense strand
uuagagagucugauucuga

SEQ ID NO: 1066555 - RNA, 19 nt, Homo sapiens
  misc_RNA (1)...(19): siRNA sense strand
gaucagcagagaugaacuu

SEQ ID NO: 1066556 - RNA, 19 nt, Homo sapiens
  misc_RNA (1)...(19): siRNA sense strand
caacaucuuugaggaggau

SEQ ID NO: 1066557 - RNA, 19 nt, Homo sapiens
  misc_RNA (1)...(19): siRNA sense strand
aaagugagagaauucauga

SEQ ID NO: 1066558 - RNA, 19 nt, Homo sapiens
  misc_RNA (1)...(19): siRNA sense strand
caaagugagagaauucaug

SEQ ID NO: 1066559 - RNA, 19 nt, Homo sapiens
  misc_RNA (1)...(19): siRNA sense strand
gacagagaucaccuauuua

SEQ ID NO: 1066560 - RNA, 19 nt, Homo sapiens
  misc_RNA (1)...(19): siRNA sense strand
gauucugacuuacaucaca

SEQ ID NO: 1066561 - RNA, 19 nt, Homo sapiens
  misc_RNA (1)...(19): siRNA sense strand
gcaaaagcaucuccaacug

SEQ ID NO: 1066562 - RNA, 19 nt, Homo sapiens
  misc_RNA (1)...(19): siRNA sense strand
aggaaacauugccguaauu

SEQ ID NO: 1066563 - RNA, 19 nt, Homo sapiens
  misc_RNA (1)...(19): siRNA sense strand
gcagaguuacagcaccaua

SEQ ID NO: 1066564 - RNA, 19 nt, Homo sapiens
  misc_RNA (1)...(19): siRNA sense strand
gaaacauugccguaauugu

SEQ ID NO: 1066565 - RNA, 19 nt, Homo sapiens
  misc_RNA (1)...(19): siRNA sense strand
ggauggauggguucaguug

SEQ ID NO: 1066566 - RNA, 19 nt, Homo sapiens
  misc_RNA (1)...(19): siRNA sense strand
caucuuagagagucugauu

SEQ ID NO: 1066567 - RNA, 19 nt, Homo sapiens
  misc_RNA (1)...(19): siRNA sense strand
ccacauucuuaacagcaaa

SEQ ID NO: 1066568 - RNA, 19 nt, Homo sapiens
  misc_RNA (1)...(19): siRNA sense strand
gaggaggauucacguuugg

SEQ ID NO: 1066569 - RNA, 19 nt, Homo sapiens
  misc_RNA (1)...(19): siRNA sense strand
ugacagaaacagcagcuau

SEQ ID NO: 1066570 - RNA, 19 nt, Homo sapiens
  misc_RNA (1)...(19): siRNA sense strand
uuaaugauaccagcaauga

SEQ ID NO: 1066571 - RNA, 19 nt, Homo sapiens
  misc_RNA (1)...(19): siRNA sense strand
uguaugcgauggugucugu

SEQ ID NO: 1066572 - RNA, 19 nt, Homo sapiens
  misc_RNA (1)...(19): siRNA sense strand
gagaucugcuggcucaacu

SEQ ID NO: 1066573 - RNA, 19 nt, Homo sapiens
  misc_RNA (1)...(19): siRNA sense strand
caacugccauccccuaaug

SEQ ID NO: 1066574 - RNA, 19 nt, Homo sapiens
  misc_RNA (1)...(19): siRNA sense strand
gccauuugaagacaauaua

SEQ ID NO: 1066575 - RNA, 19 nt, Homo sapiens
  misc_RNA (1)...(19): siRNA sense strand
acagacuacucccagugua

SEQ ID NO: 1066576 - RNA, 19 nt, Homo sapiens
  misc_RNA (1)...(19): siRNA sense strand
cucaaugcauuccagguaa

SEQ ID NO: 1066577 - RNA, 19 nt, Homo sapiens
  misc_RNA (1)...(19): siRNA sense strand
ccaagcaaauuguuuaccu

SEQ ID NO: 1066578 - RNA, 19 nt, Homo sapiens
  misc_RNA (1)...(19): siRNA sense strand
gaggagaggaggacacagu

SEQ ID NO: 1066579 - RNA, 19 nt, Homo sapiens
  misc_RNA (1)...(19): siRNA sense strand
gcagcucuuacacaacaua

SEQ ID NO: 1066580 - RNA, 19 nt, Homo sapiens
  misc_RNA (1)...(19): siRNA sense strand
ccaggaaacauugccguaa

SEQ ID NO: 1066581 - RNA, 19 nt, Homo sapiens
  misc_RNA (1)...(19): siRNA sense strand
uauccucuauggaaucaug

SEQ ID NO: 1066582 - RNA, 19 nt, Homo sapiens
  misc_RNA (1)...(19): siRNA sense strand
aaauguaggccaagcaaau

SEQ ID NO: 1066583 - RNA, 19 nt, Homo sapiens
  misc_RNA (1)...(19): siRNA sense strand
ugcaagaaggcuauucaua

SEQ ID NO: 1066584 - RNA, 19 nt, Homo sapiens
  misc_RNA (1)...(19): siRNA sense strand
uagccaaccacauucuuaa

SEQ ID NO: 1066585 - RNA, 19 nt, Homo sapiens
  misc_RNA (1)...(19): siRNA sense strand
ggaggauucacguuugguu

SEQ ID NO: 1066586 - RNA, 19 nt, Homo sapiens
  misc_RNA (1)...(19): siRNA sense strand
ggccauugcugccaucacu

SEQ ID NO: 1066587 - RNA, 19 nt, Homo sapiens
  misc_RNA (1)...(19): siRNA sense strand
gcaauauggacagguguug

SEQ ID NO: 1066588 - RNA, 19 nt, Homo sapiens
  misc_RNA (1)...(19): siRNA sense strand
ggaagugagagccauugug

SEQ ID NO: 1066589 - RNA, 19 nt, Homo sapiens
  misc_RNA (1)...(19): siRNA sense strand
uggcucaacugggacauga

SEQ ID NO: 1066590 - RNA, 19 nt, Homo sapiens
  misc_RNA (1)...(19): siRNA sense strand
uggcaaaggcuaucuacga

SEQ ID NO: 1066591 - RNA, 19 nt, Homo sapiens
  misc_RNA (1)...(19): siRNA sense strand
ggagccaagugacaaagac

SEQ ID NO: 1066592 - RNA, 19 nt, Homo sapiens
  misc_RNA (1)...(19): siRNA sense strand
gaugucuucauucauacua

SEQ ID NO: 1066593 - RNA, 19 nt, Homo sapiens
  misc_RNA (1)...(19): siRNA sense strand
ccugguggcaucucuguuu

SEQ ID NO: 1066594 - RNA, 19 nt, Homo sapiens
  misc_RNA (1)...(19): siRNA sense strand
gugcaaagugagagaauuc

SEQ ID NO: 1066595 - RNA, 19 nt, Homo sapiens
  misc_RNA (1)...(19): siRNA sense strand
guaaaccugaucacaguca

SEQ ID NO: 1066596 - RNA, 19 nt, Homo sapiens
  misc_RNA (1)...(19): siRNA sense strand
gaugauggcuguuggauuu

SEQ ID NO: 1066597 - RNA, 19 nt, Homo sapiens
  misc_RNA (1)...(19): siRNA sense strand
gaacaagaauuucaguaug

SEQ ID NO: 1066598 - RNA, 19 nt, Homo sapiens
  misc_RNA (1)...(19): siRNA sense strand
gcaaaccacuccuggcuuu

SEQ ID NO: 1066599 - RNA, 19 nt, Homo sapiens
  misc_RNA (1)...(19): siRNA sense strand
gguuacagcuaucagauua

SEQ ID NO: 1066600 - RNA, 19 nt, Homo sapiens
  misc_RNA (1)...(19): siRNA sense strand
caaaggccauuaugcauuu

SEQ ID NO: 1066601 - RNA, 19 nt, Homo sapiens
  misc_RNA (1)...(19): siRNA sense strand
gaaugaaacucaagacauc

SEQ ID NO: 1066602 - RNA, 19 nt, Homo sapiens
  misc_RNA (1)...(19): siRNA sense strand
gaaauucauugacuggaaa

SEQ ID NO: 1066603 - RNA, 19 nt, Homo sapiens
  misc_RNA (1)...(19): siRNA sense strand
gcugaugucugguuuauug

SEQ ID NO: 1066604 - RNA, 19 nt, Homo sapiens
  misc_RNA (1)...(19): siRNA sense strand
ggacauaucaauacaaaga

SEQ ID NO: 1066605 - RNA, 19 nt, Homo sapiens
  misc_RNA (1)...(19): siRNA sense strand
caucagaggccguguguua

SEQ ID NO: 1066606 - RNA, 19 nt, Homo sapiens
  misc_RNA (1)...(19): siRNA sense strand
aaagauguguguuggcuua

SEQ ID NO: 1066607 - RNA, 19 nt, Homo sapiens
  misc_RNA (1)...(19): siRNA sense strand
ggaaauucauugacuggaa

SEQ ID NO: 1066608 - RNA, 19 nt, Homo sapiens
  misc_RNA (1)...(19): siRNA sense strand
gaucaucgaggcuuuguuu

SEQ ID NO: 1066609 - RNA, 19 nt, Homo sapiens
  misc_RNA (1)...(19): siRNA sense strand
cgacagcucuuccucugaa

SEQ ID NO: 1066610 - RNA, 19 nt, Homo sapiens
  misc_RNA (1)...(19): siRNA sense strand
caaguugucugccuuaagu

SEQ ID NO: 1066611 - RNA, 19 nt, Homo sapiens
  misc_RNA (1)...(19): siRNA sense strand
ggaagagccuccucauucu

SEQ ID NO: 1066612 - RNA, 19 nt, Homo sapiens
  misc_RNA (1)...(19): siRNA sense strand
gggaagagccuccucauuc

SEQ ID NO: 1066613 - RNA, 19 nt, Homo sapiens
  misc_RNA (1)...(19): siRNA sense strand
uugaagaacugaacaagaa

SEQ ID NO: 1066614 - RNA, 19 nt, Homo sapiens
  misc_RNA (1)...(19): siRNA sense strand
guccaaggaugaugaauau

SEQ ID NO: 1066615 - RNA, 19 nt, Homo sapiens
  misc_RNA (1)...(19): siRNA sense strand
gcaaaacucaucagauuua

SEQ ID NO: 1066616 - RNA, 19 nt, Homo sapiens
  misc_RNA (1)...(19): siRNA sense strand
caguauagcugacaauauc

SEQ ID NO: 1066617 - RNA, 19 nt, Homo sapiens
  misc_RNA (1)...(19): siRNA sense strand
gaacaaaagccaacucaaa

SEQ ID NO: 1066618 - RNA, 19 nt, Homo sapiens
  misc_RNA (1)...(19): siRNA sense strand
gaaaugcucaggucaaugg

SEQ ID NO: 1066619 - RNA, 19 nt, Homo sapiens
  misc_RNA (1)...(19): siRNA sense strand
ccugugauauccacgguua

SEQ ID NO: 1066620 - RNA, 19 nt, Homo sapiens
  misc_RNA (1)...(19): siRNA sense strand
gaagaacugaacaagaauu

SEQ ID NO: 1066621 - RNA, 19 nt, Homo sapiens
  misc_RNA (1)...(19): siRNA sense strand
gaaucuggcuuggcauguu

SEQ ID NO: 1066622 - RNA, 19 nt, Homo sapiens
  misc_RNA (1)...(19): siRNA sense strand
uaaaauggaucaccuaugu

SEQ ID NO: 1066623 - RNA, 19 nt, Homo sapiens
  misc_RNA (1)...(19): siRNA sense strand
ccauauugaugucaccuuu

SEQ ID NO: 1066624 - RNA, 19 nt, Homo sapiens
  misc_RNA (1)...(19): siRNA sense strand
ccagagaucccuuccagaa

SEQ ID NO: 1066625 - RNA, 19 nt, Homo sapiens
  misc_RNA (1)...(19): siRNA sense strand
gguccaaggaugaugaaua

SEQ ID NO: 1066626 - RNA, 19 nt, Homo sapiens
  misc_RNA (1)...(19): siRNA sense strand
gaaagggauuccagugaac

SEQ ID NO: 1066627 - RNA, 19 nt, Homo sapiens
  misc_RNA (1)...(19): siRNA sense strand
gaugucugguuuauuguug

SEQ ID NO: 1066628 - RNA, 19 nt, Homo sapiens
  misc_RNA (1)...(19): siRNA sense strand
uggcuuaacugguccaaug

SEQ ID NO: 1066629 - RNA, 19 nt, Homo sapiens
  misc_RNA (1)...(19): siRNA sense strand
ucacaagcuguuuccauua

SEQ ID NO: 1066630 - RNA, 19 nt, Homo sapiens
  misc_RNA (1)...(19): siRNA sense strand
aaucuggcuuggcauguua

SEQ ID NO: 1066631 - RNA, 19 nt, Homo sapiens
  misc_RNA (1)...(19): siRNA sense strand
caaaagggguuacagcuau

SEQ ID NO: 1066632 - RNA, 19 nt, Homo sapiens
  misc_RNA (1)...(19): siRNA sense strand
caagcuguuuccauuagaa

SEQ ID NO: 1066633 - RNA, 19 nt, Homo sapiens
  misc_RNA (1)...(19): siRNA sense strand
aaacaaaggccauuaugca

SEQ ID NO: 1066634 - RNA, 19 nt, Homo sapiens
  misc_RNA (1)...(19): siRNA sense strand
ugggugcccucucauuaua

SEQ ID NO: 1066635 - RNA, 19 nt, Homo sapiens
  misc_RNA (1)...(19): siRNA sense strand
uaagacagcccuucacaag

SEQ ID NO: 1066636 - RNA, 19 nt, Homo sapiens
  misc_RNA (1)...(19): siRNA sense strand
gcugccaccuagugaauga

SEQ ID NO: 1066637 - RNA, 19 nt, Homo sapiens
  misc_RNA (1)...(19): siRNA sense strand
aagcaaaacucaucagauu

SEQ ID NO: 1066638 - RNA, 19 nt, Homo sapiens
  misc_RNA (1)...(19): siRNA sense strand
ucacauggcccagcauuug

SEQ ID NO: 1066639 - RNA, 19 nt, Homo sapiens
  misc_RNA (1)...(19): siRNA sense strand
ggacuggguaucuccauug

SEQ ID NO: 1066640 - RNA, 19 nt, Homo sapiens
  misc_RNA (1)...(19): siRNA sense strand
gacaauauccuuaauucag

SEQ ID NO: 1066641 - RNA, 19 nt, Homo sapiens
  misc_RNA (1)...(19): siRNA sense strand
cagaaacuauuaucagcau

SEQ ID NO: 1066642 - RNA, 19 nt, Homo sapiens
  misc_RNA (1)...(19): siRNA sense strand
uaaaauguguccccaaaau

SEQ ID NO: 1066643 - RNA, 19 nt, Homo sapiens
  misc_RNA (1)...(19): siRNA sense strand
gguuaugggugcccucuca

SEQ ID NO: 1066644 - RNA, 19 nt, Homo sapiens
  misc_RNA (1)...(19): siRNA sense strand
cagaggccguguguuaauu

SEQ ID NO: 1066645 - RNA, 19 nt, Homo sapiens
  misc_RNA (1)...(19): siRNA sense strand
uaugggugcccucucauua

SEQ ID NO: 1066646 - RNA, 19 nt, Homo sapiens
  misc_RNA (1)...(19): siRNA sense strand
guacucacuugaccuccuu

SEQ ID NO: 1066647 - RNA, 19 nt, Homo sapiens
  misc_RNA (1)...(19): siRNA sense strand
gaaaagcccaguguaauga

SEQ ID NO: 1066648 - RNA, 19 nt, Homo sapiens
  misc_RNA (1)...(19): siRNA sense strand
ucaaugcauuccagggauu

SEQ ID NO: 1066649 - RNA, 19 nt, Homo sapiens
  misc_RNA (1)...(19): siRNA sense strand
ggaacauucuacccguuuc

SEQ ID NO: 1066650 - RNA, 19 nt, Homo sapiens
  misc_RNA (1)...(19): siRNA sense strand
cacaagcuguuuccauuag

SEQ ID NO: 1066651 - RNA, 19 nt, Homo sapiens
  misc_RNA (1)...(19): siRNA sense strand
aaacaucacagccaagugu

SEQ ID NO: 1066652 - RNA, 19 nt, Homo sapiens
  misc_RNA (1)...(19): siRNA sense strand
ucucacacacgucguauuu

SEQ ID NO: 1066653 - RNA, 19 nt, Homo sapiens
  misc_RNA (1)...(19): siRNA sense strand
cugacaauauccuuaauuc

SEQ ID NO: 1066654 - RNA, 19 nt, Homo sapiens
  misc_RNA (1)...(19): siRNA sense strand
ccaaggaugaugaauauac

SEQ ID NO: 1066655 - RNA, 19 nt, Homo sapiens
  misc_RNA (1)...(19): siRNA sense strand
acaaaggccauuaugcauu

SEQ ID NO: 1066656 - RNA, 19 nt, Homo sapiens
  misc_RNA (1)...(19): siRNA sense strand
agacagcccuucacaagcu

SEQ ID NO: 1066657 - RNA, 19 nt, Homo sapiens
  misc_RNA (1)...(19): siRNA sense strand
caucguugcuggguaugaa

SEQ ID NO: 1066658 - RNA, 19 nt, Homo sapiens
  misc_RNA (1)...(19): siRNA sense strand
gauugcugaugucugguuu

SEQ ID NO: 1066659 - RNA, 19 nt, Homo sapiens
  misc_RNA (1)...(19): siRNA sense strand
ucacacacgucguauuugc

SEQ ID NO: 1066660 - RNA, 19 nt, Homo sapiens
  misc_RNA (1)...(19): siRNA sense strand
cauuggaagucucauuuua

SEQ ID NO: 1066661 - RNA, 19 nt, Homo sapiens
  misc_RNA (1)...(19): siRNA sense strand
gggaacauucuacccguuu

SEQ ID NO: 1066662 - RNA, 19 nt, Homo sapiens
  misc_RNA (1)...(19): siRNA sense strand
ugucagccauugaacaugu

SEQ ID NO: 1066663 - RNA, 19 nt, Homo sapiens
  misc_RNA (1)...(19): siRNA sense strand
gggacuggguaucuccauu

SEQ ID NO: 1066664 - RNA, 19 nt, Homo sapiens
  misc_RNA (1)...(19): siRNA sense strand
gugccaauguacucacuug

SEQ ID NO: 1066665 - RNA, 19 nt, Homo sapiens
  misc_RNA (1)...(19): siRNA sense strand
ggaaacaucacagccaagu

SEQ ID NO: 1066666 - RNA, 19 nt, Homo sapiens
  misc_RNA (1)...(19): siRNA sense strand
ugacaaggccaccaucauc

SEQ ID NO: 1066667 - RNA, 19 nt, Homo sapiens
  misc_RNA (1)...(19): siRNA sense strand
aaaggaaagauguguguug

SEQ ID NO: 1066668 - RNA, 19 nt, Homo sapiens
  misc_RNA (1)...(19): siRNA sense strand
ugaccuccuucuccauauu

SEQ ID NO: 1066669 - RNA, 19 nt, Homo sapiens
  misc_RNA (1)...(19): siRNA sense strand
cagcucuuccucugaauuu

SEQ ID NO: 1066670 - RNA, 19 nt, Homo sapiens
  misc_RNA (1)...(19): siRNA sense strand
gguguccaauucaacaaug

SEQ ID NO: 1066671 - RNA, 19 nt, Homo sapiens
  misc_RNA (1)...(19): siRNA sense strand
ugagcaauauuucaucucu

SEQ ID NO: 1066672 - RNA, 19 nt, Homo sapiens
  misc_RNA (1)...(19): siRNA sense strand
uagcugacaauauccuuaa

SEQ ID NO: 1066673 - RNA, 19 nt, Homo sapiens
  misc_RNA (1)...(19): siRNA sense strand
guauuugcauggugaacau

SEQ ID NO: 1066674 - RNA, 19 nt, Homo sapiens
  misc_RNA (1)...(19): siRNA sense strand
agagaucccuuccagaaac

SEQ ID NO: 1066675 - RNA, 19 nt, Homo sapiens
  misc_RNA (1)...(19): siRNA sense strand
ggaaaagcccaguguaaug

SEQ ID NO: 1066676 - RNA, 19 nt, Homo sapiens
  misc_RNA (1)...(19): siRNA sense strand
gcugacaauauccuuaauu

SEQ ID NO: 1066677 - RNA, 19 nt, Homo sapiens
  misc_RNA (1)...(19): siRNA sense strand
ucaauggaccugugauauc

SEQ ID NO: 1066678 - RNA, 19 nt, Homo sapiens
  misc_RNA (1)...(19): siRNA sense strand
uucacaagcuguuuccauu

SEQ ID NO: 1066679 - RNA, 19 nt, Homo sapiens
  misc_RNA (1)...(19): siRNA sense strand
ucagucauuugcaguggaa

SEQ ID NO: 1066680 - RNA, 19 nt, Homo sapiens
  misc_RNA (1)...(19): siRNA sense strand
uuuccaagauagagucaaa

SEQ ID NO: 1066681 - RNA, 19 nt, Homo sapiens
  misc_RNA (1)...(19): siRNA sense strand
gcugcuaguucucacaaag

SEQ ID NO: 1066682 - RNA, 19 nt, Homo sapiens
  misc_RNA (1)...(19): siRNA sense strand
cuaccucucuuuguucuuc

SEQ ID NO: 1066683 - RNA, 19 nt, Homo sapiens
  misc_RNA (1)...(19): siRNA sense strand
gcuaucagauuaaaaugug

SEQ ID NO: 1066684 - RNA, 19 nt, Homo sapiens
  misc_RNA (1)...(19): siRNA sense strand
gaagagccuccucauucug

SEQ ID NO: 1066685 - RNA, 19 nt, Homo sapiens
  misc_RNA (1)...(19): siRNA sense strand
caaccuagcaauaccuaca

SEQ ID NO: 1066686 - RNA, 19 nt, Homo sapiens
  misc_RNA (1)...(19): siRNA sense strand
gauauccacgguuauucaa

SEQ ID NO: 1066687 - RNA, 19 nt, Homo sapiens
  misc_RNA (1)...(19): siRNA sense strand
caauggaccugugauaucc

SEQ ID NO: 1066688 - RNA, 19 nt, Homo sapiens
  misc_RNA (1)...(19): siRNA sense strand
caauauuucaucucuguca

SEQ ID NO: 1066689 - RNA, 19 nt, Homo sapiens
  misc_RNA (1)...(19): siRNA sense strand
gcuaagacagcccuucaca

SEQ ID NO: 1066690 - RNA, 19 nt, Homo sapiens
  misc_RNA (1)...(19): siRNA sense strand
cauuauaucugucauuacc

SEQ ID NO: 1066691 - RNA, 19 nt, Homo sapiens
  misc_RNA (1)...(19): siRNA sense strand
cagagaucccuuccagaaa

SEQ ID NO: 1066692 - RNA, 19 nt, Homo sapiens
  misc_RNA (1)...(19): siRNA sense strand
uggaaaugcucaggucaau

SEQ ID NO: 1066693 - RNA, 19 nt, Homo sapiens
  misc_RNA (1)...(19): siRNA sense strand
acaguaagcugcgacaacu

SEQ ID NO: 1066694 - RNA, 19 nt, Homo sapiens
  misc_RNA (1)...(19): siRNA sense strand
uugaacauguugccgagaa

SEQ ID NO: 1066695 - RNA, 19 nt, Homo sapiens
  misc_RNA (1)...(19): siRNA sense strand
ugaaugaaacucaagacau

SEQ ID NO: 1066696 - RNA, 19 nt, Homo sapiens
  misc_RNA (1)...(19): siRNA sense strand
cuaccaacauuaaguauga

SEQ ID NO: 1066697 - RNA, 19 nt, Homo sapiens
  misc_RNA (1)...(19): siRNA sense strand
gccaucagauugucacaga

SEQ ID NO: 1066698 - RNA, 19 nt, Homo sapiens
  misc_RNA (1)...(19): siRNA sense strand
gcacugcucuccuguuccu

SEQ ID NO: 1066699 - RNA, 19 nt, Homo sapiens
  misc_RNA (1)...(19): siRNA sense strand
gugcacugcucuccuguuc

SEQ ID NO: 1066700 - RNA, 19 nt, Homo sapiens
  misc_RNA (1)...(19): siRNA sense strand
guagcuugcuccugguaug

SEQ ID NO: 1066701 - RNA, 19 nt, Homo sapiens
  misc_RNA (1)...(19): siRNA sense strand
agccauggguggaggcaua

SEQ ID NO: 1066702 - RNA, 19 nt, Homo sapiens
  misc_RNA (1)...(19): siRNA sense strand
gagacgacaaagugaagaa

SEQ ID NO: 1066703 - RNA, 19 nt, Homo sapiens
  misc_RNA (1)...(19): siRNA sense strand
uuugaucccuaccaacauu

SEQ ID NO: 1066704 - RNA, 19 nt, Homo sapiens
  misc_RNA (1)...(19): siRNA sense strand
gugaagaaggcccguauag

SEQ ID NO: 1066705 - RNA, 19 nt, Homo sapiens
  misc_RNA (1)...(19): siRNA sense strand
gguauggccaucagauugu

SEQ ID NO: 1066706 - RNA, 19 nt, Homo sapiens
  misc_RNA (1)...(19): siRNA sense strand
ccaauucgggccugcaguu

SEQ ID NO: 1066707 - RNA, 19 nt, Homo sapiens
  misc_RNA (1)...(19): siRNA sense strand
gcccugccaucuuuauugg

SEQ ID NO: 1066708 - RNA, 19 nt, Homo sapiens
  misc_RNA (1)...(19): siRNA sense strand
ucagauugucacagacuuu

SEQ ID NO: 1066709 - RNA, 19 nt, Homo sapiens
  misc_RNA (1)...(19): siRNA sense strand
ggcccugccaucuuuauug

SEQ ID NO: 1066710 - RNA, 19 nt, Homo sapiens
  misc_RNA (1)...(19): siRNA sense strand
gggcuuccuggccauguuu

SEQ ID NO: 1066711 - RNA, 19 nt, Homo sapiens
  misc_RNA (1)...(19): siRNA sense strand
augaugagcugcaaaaugu

SEQ ID NO: 1066712 - RNA, 19 nt, Homo sapiens
  misc_RNA (1)...(19): siRNA sense strand
gaugaugagcugcaaaaug

SEQ ID NO: 1066713 - RNA, 19 nt, Homo sapiens
  misc_RNA (1)...(19): siRNA sense strand
ggagacgacaaagugaaga

SEQ ID NO: 1066714 - RNA, 19 nt, Homo sapiens
  misc_RNA (1)...(19): siRNA sense strand
ccacgaugggcaugaagug

SEQ ID NO: 1066715 - RNA, 19 nt, Homo sapiens
  misc_RNA (1)...(19): siRNA sense strand
gggagacgacaaagugaag

SEQ ID NO: 1066716 - RNA, 19 nt, Homo sapiens
  misc_RNA (1)...(19): siRNA sense strand
gaaaguguucuuccaagua

SEQ ID NO: 1066717 - RNA, 19 nt, Homo sapiens
  misc_RNA (1)...(19): siRNA sense strand
ggaacgagcccaaguacaa

SEQ ID NO: 1066718 - RNA, 19 nt, Homo sapiens
  misc_RNA (1)...(19): siRNA sense strand
gcacgucuuuccagaauuc

SEQ ID NO: 1066719 - RNA, 19 nt, Homo sapiens
  misc_RNA (1)...(19): siRNA sense strand
ugaauuccaucaagaagaa

SEQ ID NO: 1066720 - RNA, 19 nt, Homo sapiens
  misc_RNA (1)...(19): siRNA sense strand
agagagcgaugccauguuu

SEQ ID NO: 1066721 - RNA, 19 nt, Homo sapiens
  misc_RNA (1)...(19): siRNA sense strand
gauauucuguggaaagugu

SEQ ID NO: 1066722 - RNA, 19 nt, Homo sapiens
  misc_RNA (1)...(19): siRNA sense strand
gaagagacaaguggaggua

SEQ ID NO: 1066723 - RNA, 19 nt, Homo sapiens
  misc_RNA (1)...(19): siRNA sense strand
ugaaggaccugcugaagag

SEQ ID NO: 1066724 - RNA, 19 nt, Homo sapiens
  misc_RNA (1)...(19): siRNA sense strand
gggcacgucuuuccagaau

SEQ ID NO: 1066725 - RNA, 19 nt, Homo sapiens
  misc_RNA (1)...(19): siRNA sense strand
guaaacguccguaacaaga

SEQ ID NO: 1066726 - RNA, 19 nt, Homo sapiens
  misc_RNA (1)...(19): siRNA sense strand
agaagaaagucaacgacaa

SEQ ID NO: 1066727 - RNA, 19 nt, Homo sapiens
  misc_RNA (1)...(19): siRNA sense strand
gagauaaugcggcagaaga

SEQ ID NO: 1066728 - RNA, 19 nt, Homo sapiens
  misc_RNA (1)...(19): siRNA sense strand
ggucauggaaucuguggua

SEQ ID NO: 1066729 - RNA, 19 nt, Homo sapiens
  misc_RNA (1)...(19): siRNA sense strand
gaagaaagucaacgacaag

SEQ ID NO: 1066730 - RNA, 19 nt, Homo sapiens
  misc_RNA (1)...(19): siRNA sense strand
uggaaucugugguaaagaa

SEQ ID NO: 1066731 - RNA, 19 nt, Homo sapiens
  misc_RNA (1)...(19): siRNA sense strand
gcugugaauuccaucaaga

SEQ ID NO: 1066732 - RNA, 19 nt, Homo sapiens
  misc_RNA (1)...(19): siRNA sense strand
caaaauaugcugugaauuc

SEQ ID NO: 1066733 - RNA, 19 nt, Homo sapiens
  misc_RNA (1)...(19): siRNA sense strand
gagccacaguuccacaaug

SEQ ID NO: 1066734 - RNA, 19 nt, Homo sapiens
  misc_RNA (1)...(19): siRNA sense strand
gaaagucaacgacaagaac

SEQ ID NO: 1066735 - RNA, 19 nt, Homo sapiens
  misc_RNA (1)...(19): siRNA sense strand
cuaccagccuuacaacaug

SEQ ID NO: 1066736 - RNA, 19 nt, Homo sapiens
  misc_RNA (1)...(19): siRNA sense strand
ugaaccgcaugaagaguaa

SEQ ID NO: 1066737 - RNA, 19 nt, Homo sapiens
  misc_RNA (1)...(19): siRNA sense strand
agacagaaguccacguaca

SEQ ID NO: 1066738 - RNA, 19 nt, Homo sapiens
  misc_RNA (1)...(19): siRNA sense strand
guaacaagauccuguaccu

SEQ ID NO: 1066739 - RNA, 19 nt, Homo sapiens
  misc_RNA (1)...(19): siRNA sense strand
agagacaaguggagguaaa

SEQ ID NO: 1066740 - RNA, 19 nt, Homo sapiens
  misc_RNA (1)...(19): siRNA sense strand
gagguaaacguccguaaca

SEQ ID NO: 1066741 - RNA, 19 nt, Homo sapiens
  misc_RNA (1)...(19): siRNA sense strand
gacagacucucagcccauu

SEQ ID NO: 1066742 - RNA, 19 nt, Homo sapiens
  misc_RNA (1)...(19): siRNA sense strand
cauggaaucugugguaaag

SEQ ID NO: 1066743 - RNA, 19 nt, Homo sapiens
  misc_RNA (1)...(19): siRNA sense strand
cauguuugcugccgagaga

SEQ ID NO: 1066744 - RNA, 19 nt, Homo sapiens
  misc_RNA (1)...(19): siRNA sense strand
ccagccagcuccuguugga

SEQ ID NO: 1066745 - RNA, 19 nt, Homo sapiens
  misc_RNA (1)...(19): siRNA sense strand
gcucauuucauucgacuga

SEQ ID NO: 1066746 - RNA, 19 nt, Homo sapiens
  misc_RNA (1)...(19): siRNA sense strand
gugaaccgcaugaagagua

SEQ ID NO: 1066747 - RNA, 19 nt, Homo sapiens
  misc_RNA (1)...(19): siRNA sense strand
ccagcagccuguacucuuc

SEQ ID NO: 1066748 - RNA, 19 nt, Homo sapiens
  misc_RNA (1)...(19): siRNA sense strand
acgagcagcugaacaggaa

SEQ ID NO: 1066749 - RNA, 19 nt, Homo sapiens
  misc_RNA (1)...(19): siRNA sense strand
caggacaccuaccagauca

SEQ ID NO: 1066750 - RNA, 19 nt, Homo sapiens
  misc_RNA (1)...(19): siRNA sense strand
aaagaacuguggccagaca

SEQ ID NO: 1066751 - RNA, 19 nt, Homo sapiens
  misc_RNA (1)...(19): siRNA sense strand
ggaacuacugggagaagaa

SEQ ID NO: 1066752 - RNA, 19 nt, Homo sapiens
  misc_RNA (1)...(19): siRNA sense strand
ggcagaagaagcaggagua

SEQ ID NO: 1066753 - RNA, 19 nt, Homo sapiens
  misc_RNA (1)...(19): siRNA sense strand
ugagacagaaguccacgua

SEQ ID NO: 1066754 - RNA, 19 nt, Homo sapiens
  misc_RNA (1)...(19): siRNA sense strand
aggcccagcucauuucauu

SEQ ID NO: 1066755 - RNA, 19 nt, Homo sapiens
  misc_RNA (1)...(19): siRNA sense strand
gcgaagagcaccgggagaa

SEQ ID NO: 1066756 - RNA, 19 nt, Homo sapiens
  misc_RNA (1)...(19): siRNA sense strand
ccaacaagcagaccaugga

SEQ ID NO: 1066757 - RNA, 19 nt, Homo sapiens
  misc_RNA (1)...(19): siRNA sense strand
gaagcagacgguccagaug

SEQ ID NO: 1066758 - RNA, 19 nt, Homo sapiens
  misc_RNA (1)...(19): siRNA sense strand
aaaguguucuuccaaguac

SEQ ID NO: 1066759 - RNA, 19 nt, Homo sapiens
  misc_RNA (1)...(19): siRNA sense strand
ccacagcgggcuaccagaa

SEQ ID NO: 1066760 - RNA, 19 nt, Homo sapiens
  misc_RNA (1)...(19): siRNA sense strand
gagcgcaggcuguacuaug

SEQ ID NO: 1066761 - RNA, 19 nt, Homo sapiens
  misc_RNA (1)...(19): siRNA sense strand
aaacguccguaacaagauc

SEQ ID NO: 1066762 - RNA, 19 nt, Homo sapiens
  misc_RNA (1)...(19): siRNA sense strand
ggacacacaagcaaaauau

SEQ ID NO: 1066763 - RNA, 19 nt, Homo sapiens
  misc_RNA (1)...(19): siRNA sense strand
gaacgagcccaaguacaag

SEQ ID NO: 1066764 - RNA, 19 nt, Homo sapiens
  misc_RNA (1)...(19): siRNA sense strand
augaugagguggccaacaa

SEQ ID NO: 1066765 - RNA, 19 nt, Homo sapiens
  misc_RNA (1)...(19): siRNA sense strand
gcuaccagccuuacaacau

SEQ ID NO: 1066766 - RNA, 19 nt, Homo sapiens
  misc_RNA (1)...(19): siRNA sense strand
gccgcagcaucaccaauga

SEQ ID NO: 1066767 - RNA, 19 nt, Homo sapiens
  misc_RNA (1)...(19): siRNA sense strand
ggacaccuaccagaucaug

SEQ ID NO: 1066768 - RNA, 19 nt, Homo sapiens
  misc_RNA (1)...(19): siRNA sense strand
gguaaacguccguaacaag

SEQ ID NO: 1066769 - RNA, 19 nt, Homo sapiens
  misc_RNA (1)...(19): siRNA sense strand
aggacaagcuggcacagau

SEQ ID NO: 1066770 - RNA, 19 nt, Homo sapiens
  misc_RNA (1)...(19): siRNA sense strand
gaaggaggugcgcgugugu

SEQ ID NO: 1066771 - RNA, 19 nt, Homo sapiens
  misc_RNA (1)...(19): siRNA sense strand
gguggacgcugaggaaugc

SEQ ID NO: 1066772 - RNA, 19 nt, Homo sapiens
  misc_RNA (1)...(19): siRNA sense strand
ggccagacaguucaugaug

SEQ ID NO: 1066773 - RNA, 19 nt, Homo sapiens
  misc_RNA (1)...(19): siRNA sense strand
gcaugaagaguaaccacau

SEQ ID NO: 1066774 - RNA, 19 nt, Homo sapiens
  misc_RNA (1)...(19): siRNA sense strand
aaggagaggcugagacaga

SEQ ID NO: 1066775 - RNA, 19 nt, Homo sapiens
  misc_RNA (1)...(19): siRNA sense strand
gaccagccagcuccuguug

SEQ ID NO: 1066776 - RNA, 19 nt, Homo sapiens
  misc_RNA (1)...(19): siRNA sense strand
cagcgaggcccagcucauu

SEQ ID NO: 1066777 - RNA, 19 nt, Homo sapiens
  misc_RNA (1)...(19): siRNA sense strand
ggagaaggagcggcagaug

SEQ ID NO: 1066778 - RNA, 19 nt, Homo sapiens
  misc_RNA (1)...(19): siRNA sense strand
ugagugcccugcgcgaaga

SEQ ID NO: 1066779 - RNA, 19 nt, Homo sapiens
  misc_RNA (1)...(19): siRNA sense strand
ggacaagcuggcacagauc

SEQ ID NO: 1066780 - RNA, 19 nt, Homo sapiens
  misc_RNA (1)...(19): siRNA sense strand
ucaagaagaaagucaacga

SEQ ID NO: 1066781 - RNA, 19 nt, Homo sapiens
  misc_RNA (1)...(19): siRNA sense strand
gucauggaaucugugguaa

SEQ ID NO: 1066782 - RNA, 19 nt, Homo sapiens
  misc_RNA (1)...(19): siRNA sense strand
ggugagugccuacauguac

SEQ ID NO: 1066783 - RNA, 19 nt, Homo sapiens
  misc_RNA (1)...(19): siRNA sense strand
ggagagccacgagcaguuc

SEQ ID NO: 1066784 - RNA, 19 nt, Homo sapiens
  misc_RNA (1)...(19): siRNA sense strand
aggagaggcugagacagaa

SEQ ID NO: 1066785 - RNA, 19 nt, Homo sapiens
  misc_RNA (1)...(19): siRNA sense strand
acaccuaccagaucaugaa

SEQ ID NO: 1066786 - RNA, 19 nt, Homo sapiens
  misc_RNA (1)...(19): siRNA sense strand
acaagauccuguaccugau

SEQ ID NO: 1066787 - RNA, 19 nt, Homo sapiens
  misc_RNA (1)...(19): siRNA sense strand
gugaauuccaucaagaaga

SEQ ID NO: 1066788 - RNA, 19 nt, Homo sapiens
  misc_RNA (1)...(19): siRNA sense strand
agcgcaggcuguacuauga

SEQ ID NO: 1066789 - RNA, 19 nt, Homo sapiens
  misc_RNA (1)...(19): siRNA sense strand
gaacuacugggagaagaag

SEQ ID NO: 1066790 - RNA, 19 nt, Homo sapiens
  misc_RNA (1)...(19): siRNA sense strand
agucagaggcggaggagaa

SEQ ID NO: 1066791 - RNA, 19 nt, Homo sapiens
  misc_RNA (1)...(19): siRNA sense strand
ggagguaaacguccguaac

SEQ ID NO: 1066792 - RNA, 19 nt, Homo sapiens
  misc_RNA (1)...(19): siRNA sense strand
cuuacaacaugcagaaucu

SEQ ID NO: 1066793 - RNA, 19 nt, Homo sapiens
  misc_RNA (1)...(19): siRNA sense strand
acccacacgucgccuugua

SEQ ID NO: 1066794 - RNA, 19 nt, Homo sapiens
  misc_RNA (1)...(19): siRNA sense strand
aaagagagcgaugccaugu

SEQ ID NO: 1066795 - RNA, 19 nt, Homo sapiens
  misc_RNA (1)...(19): siRNA sense strand
ccuaccagaucaugaaggu

SEQ ID NO: 1066796 - RNA, 19 nt, Homo sapiens
  misc_RNA (1)...(19): siRNA sense strand
ccaggacaccuaccagauc

SEQ ID NO: 1066797 - RNA, 19 nt, Homo sapiens
  misc_RNA (1)...(19): siRNA sense strand
ggccgcagcaucaccaaug

SEQ ID NO: 1066798 - RNA, 19 nt, Homo sapiens
  misc_RNA (1)...(19): siRNA sense strand
gcgaggcccagcucauuuc

SEQ ID NO: 1066799 - RNA, 19 nt, Homo sapiens
  misc_RNA (1)...(19): siRNA sense strand
cugaaggaccugcugaaga

SEQ ID NO: 1066800 - RNA, 19 nt, Homo sapiens
  misc_RNA (1)...(19): siRNA sense strand
gagcucgcacgguaucuca

SEQ ID NO: 1066801 - RNA, 19 nt, Homo sapiens
  misc_RNA (1)...(19): siRNA sense strand
ccacacgucgccuuguaug

SEQ ID NO: 1066802 - RNA, 19 nt, Homo sapiens
  misc_RNA (1)...(19): siRNA sense strand
gggcgugugggcagauauu

SEQ ID NO: 1066803 - RNA, 19 nt, Homo sapiens
  misc_RNA (1)...(19): siRNA sense strand
aauaugcugugaauuccau

SEQ ID NO: 1066804 - RNA, 19 nt, Homo sapiens
  misc_RNA (1)...(19): siRNA sense strand
agaaagucaacgacaagaa

SEQ ID NO: 1066805 - RNA, 19 nt, Homo sapiens
  misc_RNA (1)...(19): siRNA sense strand
agaggcagcuggccaucca

SEQ ID NO: 1066806 - RNA, 19 nt, Homo sapiens
  misc_RNA (1)...(19): siRNA sense strand
agauaaugcggcagaagaa

SEQ ID NO: 1066807 - RNA, 19 nt, Homo sapiens
  misc_RNA (1)...(19): siRNA sense strand
gccagcagccuguacucuu

SEQ ID NO: 1066808 - RNA, 19 nt, Homo sapiens
  misc_RNA (1)...(19): siRNA sense strand
agaaggagaggcugagaca

SEQ ID NO: 1066809 - RNA, 19 nt, Homo sapiens
  misc_RNA (1)...(19): siRNA sense strand
ggagaaggagaggcugaga

SEQ ID NO: 1066810 - RNA, 19 nt, Homo sapiens
  misc_RNA (1)...(19): siRNA sense strand
ccauggaggagcugaagga

SEQ ID NO: 1066811 - RNA, 19 nt, Homo sapiens
  misc_RNA (1)...(19): siRNA sense strand
acaggaaagcggagggaaa

SEQ ID NO: 1066812 - RNA, 19 nt, Homo sapiens
  misc_RNA (1)...(19): siRNA sense strand
gccacgagcaguuccugaa

SEQ ID NO: 1066813 - RNA, 19 nt, Homo sapiens
  misc_RNA (1)...(19): siRNA sense strand
cgucuuuccagaauucaaa

SEQ ID NO: 1066814 - RNA, 19 nt, Homo sapiens
  misc_RNA (1)...(19): siRNA sense strand
gcuacgagcagcugaacag

SEQ ID NO: 1066815 - RNA, 19 nt, Homo sapiens
  misc_RNA (1)...(19): siRNA sense strand
uaaacguccguaacaagau

SEQ ID NO: 1066816 - RNA, 19 nt, Homo sapiens
  misc_RNA (1)...(19): siRNA sense strand
gaaggucguuuguuucaga

SEQ ID NO: 1066817 - RNA, 19 nt, Homo sapiens
  misc_RNA (1)...(19): siRNA sense strand
gcauugcccuuaccauuau

SEQ ID NO: 1066818 - RNA, 19 nt, Homo sapiens
  misc_RNA (1)...(19): siRNA sense strand
ggaguuauacuguuuguga

SEQ ID NO: 1066819 - RNA, 19 nt, Homo sapiens
  misc_RNA (1)...(19): siRNA sense strand
caaauggaguuauacuguu

SEQ ID NO: 1066820 - RNA, 19 nt, Homo sapiens
  misc_RNA (1)...(19): siRNA sense strand
gggcauuucuauuagguuu

SEQ ID NO: 1066821 - RNA, 19 nt, Homo sapiens
  misc_RNA (1)...(19): siRNA sense strand
uaagaggaguauugaaugu

SEQ ID NO: 1066822 - RNA, 19 nt, Homo sapiens
  misc_RNA (1)...(19): siRNA sense strand
ggauguuacuggcugguuu

SEQ ID NO: 1066823 - RNA, 19 nt, Homo sapiens
  misc_RNA (1)...(19): siRNA sense strand
agaggaguauugaauguaa

SEQ ID NO: 1066824 - RNA, 19 nt, Homo sapiens
  misc_RNA (1)...(19): siRNA sense strand
gcccuuaccauuauucuaa

SEQ ID NO: 1066825 - RNA, 19 nt, Homo sapiens
  misc_RNA (1)...(19): siRNA sense strand
cuaauaauacugcacauga

SEQ ID NO: 1066826 - RNA, 19 nt, Homo sapiens
  misc_RNA (1)...(19): siRNA sense strand
uaacacauggucuucaauu

SEQ ID NO: 1066827 - RNA, 19 nt, Homo sapiens
  misc_RNA (1)...(19): siRNA sense strand
ccacaggcuuugaggcauu

SEQ ID NO: 1066828 - RNA, 19 nt, Homo sapiens
  misc_RNA (1)...(19): siRNA sense strand
aauaagagcugggcuugga

SEQ ID NO: 1066829 - RNA, 19 nt, Homo sapiens
  misc_RNA (1)...(19): siRNA sense strand
ggucguuuguuucagauug

SEQ ID NO: 1066830 - RNA, 19 nt, Homo sapiens
  misc_RNA (1)...(19): siRNA sense strand
gaugaaaacuuccaaacau

SEQ ID NO: 1066831 - RNA, 19 nt, Homo sapiens
  misc_RNA (1)...(19): siRNA sense strand
cacauggucuucaauuuua

SEQ ID NO: 1066832 - RNA, 19 nt, Homo sapiens
  misc_RNA (1)...(19): siRNA sense strand
auacauuucuuguccucua

SEQ ID NO: 1066833 - RNA, 19 nt, Homo sapiens
  misc_RNA (1)...(19): siRNA sense strand
uuugugauaugguguauga

SEQ ID NO: 1066834 - RNA, 19 nt, Homo sapiens
  misc_RNA (1)...(19): siRNA sense strand
gcauuucuauuagguuugu

SEQ ID NO: 1066835 - RNA, 19 nt, Homo sapiens
  misc_RNA (1)...(19): siRNA sense strand
gaaauaaaaccacagacaa

SEQ ID NO: 1066836 - RNA, 19 nt, Homo sapiens
  misc_RNA (1)...(19): siRNA sense strand
ccuaacacauggucuucaa

SEQ ID NO: 1066837 - RNA, 19 nt, Homo sapiens
  misc_RNA (1)...(19): siRNA sense strand
ucuauuagguuuguucuag

SEQ ID NO: 1066838 - RNA, 19 nt, Homo sapiens
  misc_RNA (1)...(19): siRNA sense strand
gaaauuucccuggcaaugg

SEQ ID NO: 1066839 - RNA, 19 nt, Homo sapiens
  misc_RNA (1)...(19): siRNA sense strand
ccacuuccaccucuucuug

SEQ ID NO: 1066840 - RNA, 19 nt, Homo sapiens
  misc_RNA (1)...(19): siRNA sense strand
gcuguagguccaugccuua

SEQ ID NO: 1066841 - RNA, 19 nt, Homo sapiens
  misc_RNA (1)...(19): siRNA sense strand
acaaauggaguuauacugu

SEQ ID NO: 1066842 - RNA, 19 nt, Homo sapiens
  misc_RNA (1)...(19): siRNA sense strand
ggagacauacauuucuugu

SEQ ID NO: 1066843 - RNA, 19 nt, Homo sapiens
  misc_RNA (1)...(19): siRNA sense strand
aacacauggucuucaauuu

SEQ ID NO: 1066844 - RNA, 19 nt, Homo sapiens
  misc_RNA (1)...(19): siRNA sense strand
gaggaguauugaauguaau

SEQ ID NO: 1066845 - RNA, 19 nt, Homo sapiens
  misc_RNA (1)...(19): siRNA sense strand
gaacauuuggaggaugaaa

SEQ ID NO: 1066846 - RNA, 19 nt, Homo sapiens
  misc_RNA (1)...(19): siRNA sense strand
auuugaaggucguuuguuu

SEQ ID NO: 1066847 - RNA, 19 nt, Homo sapiens
  misc_RNA (1)...(19): siRNA sense strand
ucuaagaggaguauugaau

SEQ ID NO: 1066848 - RNA, 19 nt, Homo sapiens
  misc_RNA (1)...(19): siRNA sense strand
gcacaugaagaaacuaaaa

SEQ ID NO: 1066849 - RNA, 19 nt, Homo sapiens
  misc_RNA (1)...(19): siRNA sense strand
agcauugcccuuaccauua

SEQ ID NO: 1066850 - RNA, 19 nt, Homo sapiens
  misc_RNA (1)...(19): siRNA sense strand
ucucccugguggaaauuua

SEQ ID NO: 1066851 - RNA, 19 nt, Homo sapiens
  misc_RNA (1)...(19): siRNA sense strand
gaagcucucccugguggaa

SEQ ID NO: 1066852 - RNA, 19 nt, Homo sapiens
  misc_RNA (1)...(19): siRNA sense strand
gaguuauacuguuugugau

SEQ ID NO: 1066853 - RNA, 19 nt, Homo sapiens
  misc_RNA (1)...(19): siRNA sense strand
aaggagacauacauuucuu

SEQ ID NO: 1066854 - RNA, 19 nt, Homo sapiens
  misc_RNA (1)...(19): siRNA sense strand
cuaaaacugucuuaucaga

SEQ ID NO: 1066855 - RNA, 19 nt, Homo sapiens
  misc_RNA (1)...(19): siRNA sense strand
aagcauugcccuuaccauu

SEQ ID NO: 1066856 - RNA, 19 nt, Homo sapiens
  misc_RNA (1)...(19): siRNA sense strand
uaauacugcacaugaagaa

SEQ ID NO: 1066857 - RNA, 19 nt, Homo sapiens
  misc_RNA (1)...(19): siRNA sense strand
cuaagaggaguauugaaug

SEQ ID NO: 1066858 - RNA, 19 nt, Homo sapiens
  misc_RNA (1)...(19): siRNA sense strand
gaagaaauaaaaccacaga

SEQ ID NO: 1066859 - RNA, 19 nt, Homo sapiens
  misc_RNA (1)...(19): siRNA sense strand
uacauuucuuguccucuaa

SEQ ID NO: 1066860 - RNA, 19 nt, Homo sapiens
  misc_RNA (1)...(19): siRNA sense strand
ccucagagucucauugauc

SEQ ID NO: 1066861 - RNA, 19 nt, Homo sapiens
  misc_RNA (1)...(19): siRNA sense strand
gaaaacuuccaaacaucua

SEQ ID NO: 1066862 - RNA, 19 nt, Homo sapiens
  misc_RNA (1)...(19): siRNA sense strand
caacucauuagaauaccuu

SEQ ID NO: 1066863 - RNA, 19 nt, Homo sapiens
  misc_RNA (1)...(19): siRNA sense strand
augaacauuuggaggauga

SEQ ID NO: 1066864 - RNA, 19 nt, Homo sapiens
  misc_RNA (1)...(19): siRNA sense strand
agagucucauugauccuaa

SEQ ID NO: 1066865 - RNA, 19 nt, Homo sapiens
  misc_RNA (1)...(19): siRNA sense strand
cacaggcuuugaggcauuu

SEQ ID NO: 1066866 - RNA, 19 nt, Homo sapiens
  misc_RNA (1)...(19): siRNA sense strand
ugaaauuucccuggcaaug

SEQ ID NO: 1066867 - RNA, 19 nt, Homo sapiens
  misc_RNA (1)...(19): siRNA sense strand
gcauuugaaggucguuugu

SEQ ID NO: 1066868 - RNA, 19 nt, Homo sapiens
  misc_RNA (1)...(19): siRNA sense strand
ggucaaucuuaggcucuga

SEQ ID NO: 1066869 - RNA, 19 nt, Homo sapiens
  misc_RNA (1)...(19): siRNA sense strand
acacauggucuucaauuuu

SEQ ID NO: 1066870 - RNA, 19 nt, Homo sapiens
  misc_RNA (1)...(19): siRNA sense strand
aaaggagacauacauuucu

SEQ ID NO: 1066871 - RNA, 19 nt, Homo sapiens
  misc_RNA (1)...(19): siRNA sense strand
cagagucucauugauccua

SEQ ID NO: 1066872 - RNA, 19 nt, Homo sapiens
  misc_RNA (1)...(19): siRNA sense strand
aagaggaguauugaaugua

SEQ ID NO: 1066873 - RNA, 19 nt, Homo sapiens
  misc_RNA (1)...(19): siRNA sense strand
uuccaaacaucuacaacuc

SEQ ID NO: 1066874 - RNA, 19 nt, Homo sapiens
  misc_RNA (1)...(19): siRNA sense strand
gcaaagcucugcaggaaua

SEQ ID NO: 1066875 - RNA, 19 nt, Homo sapiens
  misc_RNA (1)...(19): siRNA sense strand
gcaauaaacccaaguacaa

SEQ ID NO: 1066876 - RNA, 19 nt, Homo sapiens
  misc_RNA (1)...(19): siRNA sense strand
gcgaucagcucaacuguca

SEQ ID NO: 1066877 - RNA, 19 nt, Homo sapiens
  misc_RNA (1)...(19): siRNA sense strand
gauucaagccaguuacuua

SEQ ID NO: 1066878 - RNA, 19 nt, Homo sapiens
  misc_RNA (1)...(19): siRNA sense strand
gagccaagccuucagcauu

SEQ ID NO: 1066879 - RNA, 19 nt, Homo sapiens
  misc_RNA (1)...(19): siRNA sense strand
ccacagggcugcaguacag

SEQ ID NO: 1066880 - RNA, 19 nt, Homo sapiens
  misc_RNA (1)...(19): siRNA sense strand
aaacugccaucauuacaug

SEQ ID NO: 1066881 - RNA, 19 nt, Homo sapiens
  misc_RNA (1)...(19): siRNA sense strand
gcagaaccacagacuauga

SEQ ID NO: 1066882 - RNA, 19 nt, Homo sapiens
  misc_RNA (1)...(19): siRNA sense strand
ggaagucuaugucuaagcu

SEQ ID NO: 1066883 - RNA, 19 nt, Homo sapiens
  misc_RNA (1)...(19): siRNA sense strand
gcucagcaguuacuugauc

SEQ ID NO: 1066884 - RNA, 19 nt, Homo sapiens
  misc_RNA (1)...(19): siRNA sense strand
gaagaucugaagagaagaa

SEQ ID NO: 1066885 - RNA, 19 nt, Homo sapiens
  misc_RNA (1)...(19): siRNA sense strand
ggauuggcauucugacguu

SEQ ID NO: 1066886 - RNA, 19 nt, Homo sapiens
  misc_RNA (1)...(19): siRNA sense strand
uggaagaucugaagagaag

SEQ ID NO: 1066887 - RNA, 19 nt, Homo sapiens
  misc_RNA (1)...(19): siRNA sense strand
ucaagccaguuacuuaaug

SEQ ID NO: 1066888 - RNA, 19 nt, Homo sapiens
  misc_RNA (1)...(19): siRNA sense strand
ugagaggaacgauuuguaa

SEQ ID NO: 1066889 - RNA, 19 nt, Homo sapiens
  misc_RNA (1)...(19): siRNA sense strand
cgagugcugugguggauug

SEQ ID NO: 1066890 - RNA, 19 nt, Homo sapiens
  misc_RNA (1)...(19): siRNA sense strand
ggacucuucucccaaguac

SEQ ID NO: 1066891 - RNA, 19 nt, Homo sapiens
  misc_RNA (1)...(19): siRNA sense strand
gaagcagaaccacagacua

SEQ ID NO: 1066892 - RNA, 19 nt, Homo sapiens
  misc_RNA (1)...(19): siRNA sense strand
cagcuuccaugacaagguu

SEQ ID NO: 1066893 - RNA, 19 nt, Homo sapiens
  misc_RNA (1)...(19): siRNA sense strand
ugucauauguacuguguca

SEQ ID NO: 1066894 - RNA, 19 nt, Homo sapiens
  misc_RNA (1)...(19): siRNA sense strand
uuagaaaacugccaucauu

SEQ ID NO: 1066895 - RNA, 19 nt, Homo sapiens
  misc_RNA (1)...(19): siRNA sense strand
gcuacaagcgugugggaaa

SEQ ID NO: 1066896 - RNA, 19 nt, Homo sapiens
  misc_RNA (1)...(19): siRNA sense strand
gaccaugucucugcaggau

SEQ ID NO: 1066897 - RNA, 19 nt, Homo sapiens
  misc_RNA (1)...(19): siRNA sense strand
gaucugaagagaagaaucu

SEQ ID NO: 1066898 - RNA, 19 nt, Homo sapiens
  misc_RNA (1)...(19): siRNA sense strand
acacaaggguauuucucaa

SEQ ID NO: 1066899 - RNA, 19 nt, Homo sapiens
  misc_RNA (1)...(19): siRNA sense strand
ccaugucucugcaggaugu

SEQ ID NO: 1066900 - RNA, 19 nt, Homo sapiens
  misc_RNA (1)...(19): siRNA sense strand
ccgcggaagucuaugucua

SEQ ID NO: 1066901 - RNA, 19 nt, Homo sapiens
  misc_RNA (1)...(19): siRNA sense strand
ccauuaucauugucuuuga

SEQ ID NO: 1066902 - RNA, 19 nt, Homo sapiens
  misc_RNA (1)...(19): siRNA sense strand
gaagcggaauucagcaaaa

SEQ ID NO: 1066903 - RNA, 19 nt, Homo sapiens
  misc_RNA (1)...(19): siRNA sense strand
aagcagaaccacagacuau

SEQ ID NO: 1066904 - RNA, 19 nt, Homo sapiens
  misc_RNA (1)...(19): siRNA sense strand
gcuguugcauugggaaaga

SEQ ID NO: 1066905 - RNA, 19 nt, Homo sapiens
  misc_RNA (1)...(19): siRNA sense strand
acucauagguccgaagaug

SEQ ID NO: 1066906 - RNA, 19 nt, Homo sapiens
  misc_RNA (1)...(19): siRNA sense strand
caacuuggaagaucugaag

SEQ ID NO: 1066907 - RNA, 19 nt, Homo sapiens
  misc_RNA (1)...(19): siRNA sense strand
agccaagccuucagcauug

SEQ ID NO: 1066908 - RNA, 19 nt, Homo sapiens
  misc_RNA (1)...(19): siRNA sense strand
guugucauauguacugugu

SEQ ID NO: 1066909 - RNA, 19 nt, Homo sapiens
  misc_RNA (1)...(19): siRNA sense strand
gaaccacagacuaugacuu

SEQ ID NO: 1066910 - RNA, 19 nt, Homo sapiens
  misc_RNA (1)...(19): siRNA sense strand
acagugguuuccauuauca

SEQ ID NO: 1066911 - RNA, 19 nt, Homo sapiens
  misc_RNA (1)...(19): siRNA sense strand
ugucagccaucaugugugu

SEQ ID NO: 1066912 - RNA, 19 nt, Homo sapiens
  misc_RNA (1)...(19): siRNA sense strand
caagcugccagauacguuu

SEQ ID NO: 1066913 - RNA, 19 nt, Homo sapiens
  misc_RNA (1)...(19): siRNA sense strand
caagccaguuacuuaaugg

SEQ ID NO: 1066914 - RNA, 19 nt, Homo sapiens
  misc_RNA (1)...(19): siRNA sense strand
cgacaggacaguuguaaac

SEQ ID NO: 1066915 - RNA, 19 nt, Homo sapiens
  misc_RNA (1)...(19): siRNA sense strand
ccaccuggauagucaugau

SEQ ID NO: 1066916 - RNA, 19 nt, Homo sapiens
  misc_RNA (1)...(19): siRNA sense strand
gcucugcugcucacuauag

SEQ ID NO: 1066917 - RNA, 19 nt, Homo sapiens
  misc_RNA (1)...(19): siRNA sense strand
gcucuugugcuguugcauu

SEQ ID NO: 1066918 - RNA, 19 nt, Homo sapiens
  misc_RNA (1)...(19): siRNA sense strand
ccuggcaguugucauaugu

SEQ ID NO: 1066919 - RNA, 19 nt, Homo sapiens
  misc_RNA (1)...(19): siRNA sense strand
aaaccagaaucaagcucuu

SEQ ID NO: 1066920 - RNA, 19 nt, Homo sapiens
  misc_RNA (1)...(19): siRNA sense strand
guggucaguuggaucauca

SEQ ID NO: 1066921 - RNA, 19 nt, Homo sapiens
  misc_RNA (1)...(19): siRNA sense strand
gcagaagcagaaccacaga

SEQ ID NO: 1066922 - RNA, 19 nt, Homo sapiens
  misc_RNA (1)...(19): siRNA sense strand
gaggaaaccccaacaacuu

SEQ ID NO: 1066923 - RNA, 19 nt, Homo sapiens
  misc_RNA (1)...(19): siRNA sense strand
cacagugguuuccauuauc

SEQ ID NO: 1066924 - RNA, 19 nt, Homo sapiens
  misc_RNA (1)...(19): siRNA sense strand
gcacacaaggguauuucuc

SEQ ID NO: 1066925 - RNA, 19 nt, Homo sapiens
  misc_RNA (1)...(19): siRNA sense strand
caggaaagagucuguugug

SEQ ID NO: 1066926 - RNA, 19 nt, Homo sapiens
  misc_RNA (1)...(19): siRNA sense strand
aaccacagacuaugacuug

SEQ ID NO: 1066927 - RNA, 19 nt, Homo sapiens
  misc_RNA (1)...(19): siRNA sense strand
caucauuacaugcaguuug

SEQ ID NO: 1066928 - RNA, 19 nt, Homo sapiens
  misc_RNA (1)...(19): siRNA sense strand
caucagcaacaggacaaua

SEQ ID NO: 1066929 - RNA, 19 nt, Homo sapiens
  misc_RNA (1)...(19): siRNA sense strand
ucuccuggcaguugucaua

SEQ ID NO: 1066930 - RNA, 19 nt, Homo sapiens
  misc_RNA (1)...(19): siRNA sense strand
agaucuugcugcacgguuu

SEQ ID NO: 1066931 - RNA, 19 nt, Homo sapiens
  misc_RNA (1)...(19): siRNA sense strand
ggaccgcggaagucuaugu

SEQ ID NO: 1066932 - RNA, 19 nt, Homo sapiens
  misc_RNA (1)...(19): siRNA sense strand
gaugcucaccgaccacaug

SEQ ID NO: 1066933 - RNA, 19 nt, Homo sapiens
  misc_RNA (1)...(19): siRNA sense strand
auucugacguuguaucuca

SEQ ID NO: 1066934 - RNA, 19 nt, Homo sapiens
  misc_RNA (1)...(19): siRNA sense strand
cugcaggaauauucucaga

SEQ ID NO: 1066935 - RNA, 19 nt, Homo sapiens
  misc_RNA (1)...(19): siRNA sense strand
cuuggaagaucugaagaga

SEQ ID NO: 1066936 - RNA, 19 nt, Homo sapiens
  misc_RNA (1)...(19): siRNA sense strand
cgaagcggaauucagcaaa

SEQ ID NO: 1066937 - RNA, 19 nt, Homo sapiens
  misc_RNA (1)...(19): siRNA sense strand
caauaaacccaaguacaag

SEQ ID NO: 1066938 - RNA, 19 nt, Homo sapiens
  misc_RNA (1)...(19): siRNA sense strand
cagcaugagaggaacgauu

SEQ ID NO: 1066939 - RNA, 19 nt, Homo sapiens
  misc_RNA (1)...(19): siRNA sense strand
ggucacacgaagcggaauu

SEQ ID NO: 1066940 - RNA, 19 nt, Homo sapiens
  misc_RNA (1)...(19): siRNA sense strand
gcaguacagggacuucauc

SEQ ID NO: 1066941 - RNA, 19 nt, Homo sapiens
  misc_RNA (1)...(19): siRNA sense strand
ggaagcugaucuggaugca

SEQ ID NO: 1066942 - RNA, 19 nt, Homo sapiens
  misc_RNA (1)...(19): siRNA sense strand
cggcagagcuuuucucaac

SEQ ID NO: 1066943 - RNA, 19 nt, Homo sapiens
  misc_RNA (1)...(19): siRNA sense strand
cgcggaagucuaugucuaa

SEQ ID NO: 1066944 - RNA, 19 nt, Homo sapiens
  misc_RNA (1)...(19): siRNA sense strand
cugcucugcugcucacuau

SEQ ID NO: 1066945 - RNA, 19 nt, Homo sapiens
  misc_RNA (1)...(19): siRNA sense strand
aaacccaaguacaagaucu

SEQ ID NO: 1066946 - RNA, 19 nt, Homo sapiens
  misc_RNA (1)...(19): siRNA sense strand
cagcaacaggacaauauca

SEQ ID NO: 1066947 - RNA, 19 nt, Homo sapiens
  misc_RNA (1)...(19): siRNA sense strand
gagaggaacgauuuguaac

SEQ ID NO: 1066948 - RNA, 19 nt, Homo sapiens
  misc_RNA (1)...(19): siRNA sense strand
aauaaacccaaguacaaga

SEQ ID NO: 1066949 - RNA, 19 nt, Homo sapiens
  misc_RNA (1)...(19): siRNA sense strand
uagaaaacugccaucauua

SEQ ID NO: 1066950 - RNA, 19 nt, Homo sapiens
  misc_RNA (1)...(19): siRNA sense strand
gguggcagaugguguucag

SEQ ID NO: 1066951 - RNA, 19 nt, Homo sapiens
  misc_RNA (1)...(19): siRNA sense strand
agcaugagaggaacgauuu

SEQ ID NO: 1066952 - RNA, 19 nt, Homo sapiens
  misc_RNA (1)...(19): siRNA sense strand
gaucagcucaacugucacu

SEQ ID NO: 1066953 - RNA, 19 nt, Homo sapiens
  misc_RNA (1)...(19): siRNA sense strand
gaggcgaucagcucaacug

SEQ ID NO: 1066954 - RNA, 19 nt, Homo sapiens
  misc_RNA (1)...(19): siRNA sense strand
gaaaacugccaucauuaca

SEQ ID NO: 1066955 - RNA, 19 nt, Homo sapiens
  misc_RNA (1)...(19): siRNA sense strand
gcgacaggacaguuguaaa

SEQ ID NO: 1066956 - RNA, 19 nt, Homo sapiens
  misc_RNA (1)...(19): siRNA sense strand
gcggaagucuaugucuaag

SEQ ID NO: 1066957 - RNA, 19 nt, Homo sapiens
  misc_RNA (1)...(19): siRNA sense strand
ucaugauucaagccaguua

SEQ ID NO: 1066958 - RNA, 19 nt, Homo sapiens
  misc_RNA (1)...(19): siRNA sense strand
gaucuugcugcacgguuug

SEQ ID NO: 1066959 - RNA, 19 nt, Homo sapiens
  misc_RNA (1)...(19): siRNA sense strand
gcaugagaggaacgauuug

SEQ ID NO: 1066960 - RNA, 19 nt, Homo sapiens
  misc_RNA (1)...(19): siRNA sense strand
ggcucuggaucacaggaaa

SEQ ID NO: 1066961 - RNA, 19 nt, Homo sapiens
  misc_RNA (1)...(19): siRNA sense strand
auucaagccaguuacuuaa

SEQ ID NO: 1066962 - RNA, 19 nt, Homo sapiens
  misc_RNA (1)...(19): siRNA sense strand
gaauucagcaaaauacuca

SEQ ID NO: 1066963 - RNA, 19 nt, Homo sapiens
  misc_RNA (1)...(19): siRNA sense strand
uuucucaagcugccagaua

SEQ ID NO: 1066964 - RNA, 19 nt, Homo sapiens
  misc_RNA (1)...(19): siRNA sense strand
cccucuacaucuacagaaa

SEQ ID NO: 1066965 - RNA, 19 nt, Homo sapiens
  misc_RNA (1)...(19): siRNA sense strand
uggcaguugucauauguac

SEQ ID NO: 1066966 - RNA, 19 nt, Homo sapiens
  misc_RNA (1)...(19): siRNA sense strand
cacacaaggguauuucuca

SEQ ID NO: 1066967 - RNA, 19 nt, Homo sapiens
  misc_RNA (1)...(19): siRNA sense strand
ccacagacuaugacuuggu

SEQ ID NO: 1066968 - RNA, 19 nt, Homo sapiens
  misc_RNA (1)...(19): siRNA sense strand
ggaagaagcuaucaccuua

SEQ ID NO: 1066969 - RNA, 19 nt, Homo sapiens
  misc_RNA (1)...(19): siRNA sense strand
gaacagcucucaaguugua

SEQ ID NO: 1066970 - RNA, 19 nt, Homo sapiens
  misc_RNA (1)...(19): siRNA sense strand
gaacuuagccaccaucuuu

SEQ ID NO: 1066971 - RNA, 19 nt, Homo sapiens
  misc_RNA (1)...(19): siRNA sense strand
gaacauggguggcauccaa

SEQ ID NO: 1066972 - RNA, 19 nt, Homo sapiens
  misc_RNA (1)...(19): siRNA sense strand
gcaaagauguacuaucaga

SEQ ID NO: 1066973 - RNA, 19 nt, Homo sapiens
  misc_RNA (1)...(19): siRNA sense strand
gaagaggcuuugcagauuu

SEQ ID NO: 1066974 - RNA, 19 nt, Homo sapiens
  misc_RNA (1)...(19): siRNA sense strand
acacaaagcugagauauug

SEQ ID NO: 1066975 - RNA, 19 nt, Homo sapiens
  misc_RNA (1)...(19): siRNA sense strand
caaauuggaucgccuagaa

SEQ ID NO: 1066976 - RNA, 19 nt, Homo sapiens
  misc_RNA (1)...(19): siRNA sense strand
cagaacagcucucaaguug

SEQ ID NO: 1066977 - RNA, 19 nt, Homo sapiens
  misc_RNA (1)...(19): siRNA sense strand
gaagaaauauaccaaacug

SEQ ID NO: 1066978 - RNA, 19 nt, Homo sapiens
  misc_RNA (1)...(19): siRNA sense strand
caaauaugguccagaguuu

SEQ ID NO: 1066979 - RNA, 19 nt, Homo sapiens
  misc_RNA (1)...(19): siRNA sense strand
gcacaggccuggaugaaca

SEQ ID NO: 1066980 - RNA, 19 nt, Homo sapiens
  misc_RNA (1)...(19): siRNA sense strand
gaaacagaaugaaauuugg

SEQ ID NO: 1066981 - RNA, 19 nt, Homo sapiens
  misc_RNA (1)...(19): siRNA sense strand
cgaagaggcuuugcagauu

SEQ ID NO: 1066982 - RNA, 19 nt, Homo sapiens
  misc_RNA (1)...(19): siRNA sense strand
gaagcuaucaccuuacuga

SEQ ID NO: 1066983 - RNA, 19 nt, Homo sapiens
  misc_RNA (1)...(19): siRNA sense strand
ccaggaagcugcagcacuu

SEQ ID NO: 1066984 - RNA, 19 nt, Homo sapiens
  misc_RNA (1)...(19): siRNA sense strand
aggcaaagauguacuauca

SEQ ID NO: 1066985 - RNA, 19 nt, Homo sapiens
  misc_RNA (1)...(19): siRNA sense strand
ugaaggauuccaucaaaua

SEQ ID NO: 1066986 - RNA, 19 nt, Homo sapiens
  misc_RNA (1)...(19): siRNA sense strand
ggagagaguccuuuacaug

SEQ ID NO: 1066987 - RNA, 19 nt, Homo sapiens
  misc_RNA (1)...(19): siRNA sense strand
cagcaggccaucaaacuua

SEQ ID NO: 1066988 - RNA, 19 nt, Homo sapiens
  misc_RNA (1)...(19): siRNA sense strand
aaauuuggcugucaagaga

SEQ ID NO: 1066989 - RNA, 19 nt, Homo sapiens
  misc_RNA (1)...(19): siRNA sense strand
aaaagaagcugaaaagaug

SEQ ID NO: 1066990 - RNA, 19 nt, Homo sapiens
  misc_RNA (1)...(19): siRNA sense strand
gaaggauuccaucaaauau

SEQ ID NO: 1066991 - RNA, 19 nt, Homo sapiens
  misc_RNA (1)...(19): siRNA sense strand
gcaagagcuuauuaugaga

SEQ ID NO: 1066992 - RNA, 19 nt, Homo sapiens
  misc_RNA (1)...(19): siRNA sense strand
gcugagauauugucaccuu

SEQ ID NO: 1066993 - RNA, 19 nt, Homo sapiens
  misc_RNA (1)...(19): siRNA sense strand
gaaauauaccaaacuggaa

SEQ ID NO: 1066994 - RNA, 19 nt, Homo sapiens
  misc_RNA (1)...(19): siRNA sense strand
cuacaacuaugccaauuuc

SEQ ID NO: 1066995 - RNA, 19 nt, Homo sapiens
  misc_RNA (1)...(19): siRNA sense strand
gaaggaaaaucuugccaaa

SEQ ID NO: 1066996 - RNA, 19 nt, Homo sapiens
  misc_RNA (1)...(19): siRNA sense strand
gcucagauuuacacaacaa

SEQ ID NO: 1066997 - RNA, 19 nt, Homo sapiens
  misc_RNA (1)...(19): siRNA sense strand
gaagcgaucuaccacuaca

SEQ ID NO: 1066998 - RNA, 19 nt, Homo sapiens
  misc_RNA (1)...(19): siRNA sense strand
gcaaacugcugaaggaaaa

SEQ ID NO: 1066999 - RNA, 19 nt, Homo sapiens
  misc_RNA (1)...(19): siRNA sense strand
ugaaugcuaucgccucuug

SEQ ID NO: 1067000 - RNA, 19 nt, Homo sapiens
  misc_RNA (1)...(19): siRNA sense strand
gagaaaaggaucaaacaua

SEQ ID NO: 1067001 - RNA, 19 nt, Homo sapiens
  misc_RNA (1)...(19): siRNA sense strand
cagcagaggcaaagaugua

SEQ ID NO: 1067002 - RNA, 19 nt, Homo sapiens
  misc_RNA (1)...(19): siRNA sense strand
gaaugaaauuuggcuguca

SEQ ID NO: 1067003 - RNA, 19 nt, Homo sapiens
  misc_RNA (1)...(19): siRNA sense strand
aagaggcuuugcagauuua

SEQ ID NO: 1067004 - RNA, 19 nt, Homo sapiens
  misc_RNA (1)...(19): siRNA sense strand
cagcauaaccgggcucuuu

SEQ ID NO: 1067005 - RNA, 19 nt, Homo sapiens
  misc_RNA (1)...(19): siRNA sense strand
agaugcauauucaagcuua

SEQ ID NO: 1067006 - RNA, 19 nt, Homo sapiens
  misc_RNA (1)...(19): siRNA sense strand
ccagacagcucagauuuac

SEQ ID NO: 1067007 - RNA, 19 nt, Homo sapiens
  misc_RNA (1)...(19): siRNA sense strand
gaaauuuggcugucaagag

SEQ ID NO: 1067008 - RNA, 19 nt, Homo sapiens
  misc_RNA (1)...(19): siRNA sense strand
ccggaugccuugaaugcua

SEQ ID NO: 1067009 - RNA, 19 nt, Homo sapiens
  misc_RNA (1)...(19): siRNA sense strand
gcacuucagccuucucaga

SEQ ID NO: 1067010 - RNA, 19 nt, Homo sapiens
  misc_RNA (1)...(19): siRNA sense strand
ucaagagagucccuauuca

SEQ ID NO: 1067011 - RNA, 19 nt, Homo sapiens
  misc_RNA (1)...(19): siRNA sense strand
auaccaaacuggaauaaag

SEQ ID NO: 1067012 - RNA, 19 nt, Homo sapiens
  misc_RNA (1)...(19): siRNA sense strand
ugcaagagcuuauuaugag

SEQ ID NO: 1067013 - RNA, 19 nt, Homo sapiens
  misc_RNA (1)...(19): siRNA sense strand
aaagaugaccaaucacauu

SEQ ID NO: 1067014 - RNA, 19 nt, Homo sapiens
  misc_RNA (1)...(19): siRNA sense strand
caagugcgcucaacaaccu

SEQ ID NO: 1067015 - RNA, 19 nt, Homo sapiens
  misc_RNA (1)...(19): siRNA sense strand
ggaaaaucuugccaaauug

SEQ ID NO: 1067016 - RNA, 19 nt, Homo sapiens
  misc_RNA (1)...(19): siRNA sense strand
uuacaacacuggccgauac

SEQ ID NO: 1067017 - RNA, 19 nt, Homo sapiens
  misc_RNA (1)...(19): siRNA sense strand
acugaaggauuccaucaaa

SEQ ID NO: 1067018 - RNA, 19 nt, Homo sapiens
  misc_RNA (1)...(19): siRNA sense strand
uuaagagacuggagcacaa

SEQ ID NO: 1067019 - RNA, 19 nt, Homo sapiens
  misc_RNA (1)...(19): siRNA sense strand
gcaacuaaacccagaccaa

SEQ ID NO: 1067020 - RNA, 19 nt, Homo sapiens
  misc_RNA (1)...(19): siRNA sense strand
ucaaauaugguccagaguu

SEQ ID NO: 1067021 - RNA, 19 nt, Homo sapiens
  misc_RNA (1)...(19): siRNA sense strand
aggaagcgaucuaccacua

SEQ ID NO: 1067022 - RNA, 19 nt, Homo sapiens
  misc_RNA (1)...(19): siRNA sense strand
ggaacaaggaagcgaucua

SEQ ID NO: 1067023 - RNA, 19 nt, Homo sapiens
  misc_RNA (1)...(19): siRNA sense strand
aggaaaaucuugccaaauu

SEQ ID NO: 1067024 - RNA, 19 nt, Homo sapiens
  misc_RNA (1)...(19): siRNA sense strand
acaaggcucuccagcugaa

SEQ ID NO: 1067025 - RNA, 19 nt, Homo sapiens
  misc_RNA (1)...(19): siRNA sense strand
aaaaggcaguggcccauua

SEQ ID NO: 1067026 - RNA, 19 nt, Homo sapiens
  misc_RNA (1)...(19): siRNA sense strand
caggagcgguuuaaagaag

SEQ ID NO: 1067027 - RNA, 19 nt, Homo sapiens
  misc_RNA (1)...(19): siRNA sense strand
gcagaugcauauucaagcu

SEQ ID NO: 1067028 - RNA, 19 nt, Homo sapiens
  misc_RNA (1)...(19): siRNA sense strand
gaacaaggaagcgaucuac

SEQ ID NO: 1067029 - RNA, 19 nt, Homo sapiens
  misc_RNA (1)...(19): siRNA sense strand
gcacacaaagcugagauau

SEQ ID NO: 1067030 - RNA, 19 nt, Homo sapiens
  misc_RNA (1)...(19): siRNA sense strand
gcucugcacuuggcugaau

SEQ ID NO: 1067031 - RNA, 19 nt, Homo sapiens
  misc_RNA (1)...(19): siRNA sense strand
gagaccggaugccuugaau

SEQ ID NO: 1067032 - RNA, 19 nt, Homo sapiens
  misc_RNA (1)...(19): siRNA sense strand
aaacuggaauaaagaacug

SEQ ID NO: 1067033 - RNA, 19 nt, Homo sapiens
  misc_RNA (1)...(19): siRNA sense strand
gcaggagcgguuuaaagaa

SEQ ID NO: 1067034 - RNA, 19 nt, Homo sapiens
  misc_RNA (1)...(19): siRNA sense strand
gagcaggagcgguuuaaag

SEQ ID NO: 1067035 - RNA, 19 nt, Homo sapiens
  misc_RNA (1)...(19): siRNA sense strand
gagauauugucaccuuugg

SEQ ID NO: 1067036 - RNA, 19 nt, Homo sapiens
  misc_RNA (1)...(19): siRNA sense strand
cagcucagauuuacacaac

SEQ ID NO: 1067037 - RNA, 19 nt, Homo sapiens
  misc_RNA (1)...(19): siRNA sense strand
ccaagguucacuacaacua

SEQ ID NO: 1067038 - RNA, 19 nt, Homo sapiens
  misc_RNA (1)...(19): siRNA sense strand
gaacuugggaagacucuac

SEQ ID NO: 1067039 - RNA, 19 nt, Homo sapiens
  misc_RNA (1)...(19): siRNA sense strand
guuuaaagaagcugaagaa

SEQ ID NO: 1067040 - RNA, 19 nt, Homo sapiens
  misc_RNA (1)...(19): siRNA sense strand
gucaagagagucccuauuc

SEQ ID NO: 1067041 - RNA, 19 nt, Homo sapiens
  misc_RNA (1)...(19): siRNA sense strand
caaaagaagcugaaaagau

SEQ ID NO: 1067042 - RNA, 19 nt, Homo sapiens
  misc_RNA (1)...(19): siRNA sense strand
caacacuggccgauacgaa

SEQ ID NO: 1067043 - RNA, 19 nt, Homo sapiens
  misc_RNA (1)...(19): siRNA sense strand
cuuaguugauacuggcuua

SEQ ID NO: 1067044 - RNA, 19 nt, Homo sapiens
  misc_RNA (1)...(19): siRNA sense strand
gcaguauuccucugguaga

SEQ ID NO: 1067045 - RNA, 19 nt, Homo sapiens
  misc_RNA (1)...(19): siRNA sense strand
gaaaagaugaccaaucaca

SEQ ID NO: 1067046 - RNA, 19 nt, Homo sapiens
  misc_RNA (1)...(19): siRNA sense strand
gaucuaccacuacagaaca

SEQ ID NO: 1067047 - RNA, 19 nt, Homo sapiens
  misc_RNA (1)...(19): siRNA sense strand
cuacagaacagcucucaag

SEQ ID NO: 1067048 - RNA, 19 nt, Homo sapiens
  misc_RNA (1)...(19): siRNA sense strand
agaaaaggaucaaacauag

SEQ ID NO: 1067049 - RNA, 19 nt, Homo sapiens
  misc_RNA (1)...(19): siRNA sense strand
cugcaagagcuuauuauga

SEQ ID NO: 1067050 - RNA, 19 nt, Homo sapiens
  misc_RNA (1)...(19): siRNA sense strand
ugucagccaucuauagcaa

SEQ ID NO: 1067051 - RNA, 19 nt, Homo sapiens
  misc_RNA (1)...(19): siRNA sense strand
ggagaccggaugccuugaa

SEQ ID NO: 1067052 - RNA, 19 nt, Homo sapiens
  misc_RNA (1)...(19): siRNA sense strand
cagauuuacacaacaacua

SEQ ID NO: 1067053 - RNA, 19 nt, Homo sapiens
  misc_RNA (1)...(19): siRNA sense strand
guccagacagcucagauuu

SEQ ID NO: 1067054 - RNA, 19 nt, Homo sapiens
  misc_RNA (1)...(19): siRNA sense strand
uaaccgggcucuuuucaau

SEQ ID NO: 1067055 - RNA, 19 nt, Homo sapiens
  misc_RNA (1)...(19): siRNA sense strand
gcugaagaaauauaccaaa

SEQ ID NO: 1067056 - RNA, 19 nt, Homo sapiens
  misc_RNA (1)...(19): siRNA sense strand
uuacaagaaguucgagaaa

SEQ ID NO: 1067057 - RNA, 19 nt, Homo sapiens
  misc_RNA (1)...(19): siRNA sense strand
cugaaaagaugaccaauca

SEQ ID NO: 1067058 - RNA, 19 nt, Homo sapiens
  misc_RNA (1)...(19): siRNA sense strand
ccacuguguugcugcuguu

SEQ ID NO: 1067059 - RNA, 19 nt, Homo sapiens
  misc_RNA (1)...(19): siRNA sense strand
aaaggaaaccaauuaagag

SEQ ID NO: 1067060 - RNA, 19 nt, Homo sapiens
  misc_RNA (1)...(19): siRNA sense strand
cacaaaaggaaaccaauua

SEQ ID NO: 1067061 - RNA, 19 nt, Homo sapiens
  misc_RNA (1)...(19): siRNA sense strand
caacuaugggguuuucuua

SEQ ID NO: 1067062 - RNA, 19 nt, Homo sapiens
  misc_RNA (1)...(19): siRNA sense strand
gcucaacaaccuuggaaca

SEQ ID NO: 1067063 - RNA, 19 nt, Homo sapiens
  misc_RNA (1)...(19): siRNA sense strand
caagguucacuacaacuau

SEQ ID NO: 1067064 - RNA, 19 nt, Homo sapiens
  misc_RNA (1)...(19): siRNA sense strand
gcggagagaguccuuuaca

SEQ ID NO: 1067065 - RNA, 19 nt, Homo sapiens
  misc_RNA (1)...(19): siRNA sense strand
uccaacacaucaagggaaa

SEQ ID NO: 1067066 - RNA, 19 nt, Homo sapiens
  misc_RNA (1)...(19): siRNA sense strand
cggcaguauuccucuggua

SEQ ID NO: 1067067 - RNA, 19 nt, Homo sapiens
  misc_RNA (1)...(19): siRNA sense strand
acagaacagcucucaaguu

SEQ ID NO: 1067068 - RNA, 19 nt, Homo sapiens
  misc_RNA (1)...(19): siRNA sense strand
ggaagaagcuaucaccuua

SEQ ID NO: 1067069 - RNA, 19 nt, Homo sapiens
  misc_RNA (1)...(19): siRNA sense strand
gaacagcucucaaguugua

SEQ ID NO: 1067070 - RNA, 19 nt, Homo sapiens
  misc_RNA (1)...(19): siRNA sense strand
gaacuuagccaccaucuuu

SEQ ID NO: 1067071 - RNA, 19 nt, Homo sapiens
  misc_RNA (1)...(19): siRNA sense strand
gaacauggguggcauccaa

SEQ ID NO: 1067072 - RNA, 19 nt, Homo sapiens
  misc_RNA (1)...(19): siRNA sense strand
gcaaagauguacuaucaga

SEQ ID NO: 1067073 - RNA, 19 nt, Homo sapiens
  misc_RNA (1)...(19): siRNA sense strand
gaagaggcuuugcagauuu

SEQ ID NO: 1067074 - RNA, 19 nt, Homo sapiens
  misc_RNA (1)...(19): siRNA sense strand
acacaaagcugagauauug

SEQ ID NO: 1067075 - RNA, 19 nt, Homo sapiens
  misc_RNA (1)...(19): siRNA sense strand
caaauuggaucgccuagaa

SEQ ID NO: 1067076 - RNA, 19 nt, Homo sapiens
  misc_RNA (1)...(19): siRNA sense strand
cagaacagcucucaaguug

SEQ ID NO: 1067077 - RNA, 19 nt, Homo sapiens
  misc_RNA (1)...(19): siRNA sense strand
gaagaaauauaccaaacug

SEQ ID NO: 1067078 - RNA, 19 nt, Homo sapiens
  misc_RNA (1)...(19): siRNA sense strand
caaauaugguccagaguuu

SEQ ID NO: 1067079 - RNA, 19 nt, Homo sapiens
  misc_RNA (1)...(19): siRNA sense strand
gcacaggccuggaugaaca

SEQ ID NO: 1067080 - RNA, 19 nt, Homo sapiens
  misc_RNA (1)...(19): siRNA sense strand
gaaacagaaugaaauuugg

SEQ ID NO: 1067081 - RNA, 19 nt, Homo sapiens
  misc_RNA (1)...(19): siRNA sense strand
cgaagaggcuuugcagauu

SEQ ID NO: 1067082 - RNA, 19 nt, Homo sapiens
  misc_RNA (1)...(19): siRNA sense strand
gaagcuaucaccuuacuga

SEQ ID NO: 1067083 - RNA, 19 nt, Homo sapiens
  misc_RNA (1)...(19): siRNA sense strand
ccaggaagcugcagcacuu

SEQ ID NO: 1067084 - RNA, 19 nt, Homo sapiens
  misc_RNA (1)...(19): siRNA sense strand
aggcaaagauguacuauca

SEQ ID NO: 1067085 - RNA, 19 nt, Homo sapiens
  misc_RNA (1)...(19): siRNA sense strand
ugaaggauuccaucaaaua

SEQ ID NO: 1067086 - RNA, 19 nt, Homo sapiens
  misc_RNA (1)...(19): siRNA sense strand
ggagagaguccuuuacaug

SEQ ID NO: 1067087 - RNA, 19 nt, Homo sapiens
  misc_RNA (1)...(19): siRNA sense strand
cagcaggccaucaaacuua

SEQ ID NO: 1067088 - RNA, 19 nt, Homo sapiens
  misc_RNA (1)...(19): siRNA sense strand
aaauuuggcugucaagaga

SEQ ID NO: 1067089 - RNA, 19 nt, Homo sapiens
  misc_RNA (1)...(19): siRNA sense strand
aaaagaagcugaaaagaug

SEQ ID NO: 1067090 - RNA, 19 nt, Homo sapiens
  misc_RNA (1)...(19): siRNA sense strand
gaaggauuccaucaaauau

SEQ ID NO: 1067091 - RNA, 19 nt, Homo sapiens
  misc_RNA (1)...(19): siRNA sense strand
gcaagagcuuauuaugaga

SEQ ID NO: 1067092 - RNA, 19 nt, Homo sapiens
  misc_RNA (1)...(19): siRNA sense strand
gcugagauauugucaccuu

SEQ ID NO: 1067093 - RNA, 19 nt, Homo sapiens
  misc_RNA (1)...(19): siRNA sense strand
gaaauauaccaaacuggaa

SEQ ID NO: 1067094 - RNA, 19 nt, Homo sapiens
  misc_RNA (1)...(19): siRNA sense strand
cuacaacuaugccaauuuc

SEQ ID NO: 1067095 - RNA, 19 nt, Homo sapiens
  misc_RNA (1)...(19): siRNA sense strand
gaaggaaaaucuugccaaa

SEQ ID NO: 1067096 - RNA, 19 nt, Homo sapiens
  misc_RNA (1)...(19): siRNA sense strand
gcucagauuuacacaacaa

SEQ ID NO: 1067097 - RNA, 19 nt, Homo sapiens
  misc_RNA (1)...(19): siRNA sense strand
gaagcgaucuaccacuaca

SEQ ID NO: 1067098 - RNA, 19 nt, Homo sapiens
  misc_RNA (1)...(19): siRNA sense strand
gcaaacugcugaaggaaaa

SEQ ID NO: 1067099 - RNA, 19 nt, Homo sapiens
  misc_RNA (1)...(19): siRNA sense strand
ugaaugcuaucgccucuug

SEQ ID NO: 1067100 - RNA, 19 nt, Homo sapiens
  misc_RNA (1)...(19): siRNA sense strand
gagaaaaggaucaaacaua

SEQ ID NO: 1067101 - RNA, 19 nt, Homo sapiens
  misc_RNA (1)...(19): siRNA sense strand
cagcagaggcaaagaugua

SEQ ID NO: 1067102 - RNA, 19 nt, Homo sapiens
  misc_RNA (1)...(19): siRNA sense strand
gaaugaaauuuggcuguca

SEQ ID NO: 1067103 - RNA, 19 nt, Homo sapiens
  misc_RNA (1)...(19): siRNA sense strand
aagaggcuuugcagauuua

SEQ ID NO: 1067104 - RNA, 19 nt, Homo sapiens
  misc_RNA (1)...(19): siRNA sense strand
cagcauaaccgggcucuuu

SEQ ID NO: 1067105 - RNA, 19 nt, Homo sapiens
  misc_RNA (1)...(19): siRNA sense strand
agaugcauauucaagcuua

SEQ ID NO: 1067106 - RNA, 19 nt, Homo sapiens
  misc_RNA (1)...(19): siRNA sense strand
ccagacagcucagauuuac

SEQ ID NO: 1067107 - RNA, 19 nt, Homo sapiens
  misc_RNA (1)...(19): siRNA sense strand
gaaauuuggcugucaagag

SEQ ID NO: 1067108 - RNA, 19 nt, Homo sapiens
  misc_RNA (1)...(19): siRNA sense strand
ccggaugccuugaaugcua

SEQ ID NO: 1067109 - RNA, 19 nt, Homo sapiens
  misc_RNA (1)...(19): siRNA sense strand
gcacuucagccuucucaga

SEQ ID NO: 1067110 - RNA, 19 nt, Homo sapiens
  misc_RNA (1)...(19): siRNA sense strand
ucaagagagucccuauuca

SEQ ID NO: 1067111 - RNA, 19 nt, Homo sapiens
  misc_RNA (1)...(19): siRNA sense strand
auaccaaacuggaauaaag

SEQ ID NO: 1067112 - RNA, 19 nt, Homo sapiens
  misc_RNA (1)...(19): siRNA sense strand
ugcaagagcuuauuaugag

SEQ ID NO: 1067113 - RNA, 19 nt, Homo sapiens
  misc_RNA (1)...(19): siRNA sense strand
aaagaugaccaaucacauu

SEQ ID NO: 1067114 - RNA, 19 nt, Homo sapiens
  misc_RNA (1)...(19): siRNA sense strand
caagugcgcucaacaaccu

SEQ ID NO: 1067115 - RNA, 19 nt, Homo sapiens
  misc_RNA (1)...(19): siRNA sense strand
ggaaaaucuugccaaauug

SEQ ID NO: 1067116 - RNA, 19 nt, Homo sapiens
  misc_RNA (1)...(19): siRNA sense strand
uuacaacacuggccgauac

SEQ ID NO: 1067117 - RNA, 19 nt, Homo sapiens
  misc_RNA (1)...(19): siRNA sense strand
acugaaggauuccaucaaa

SEQ ID NO: 1067118 - RNA, 19 nt, Homo sapiens
  misc_RNA (1)...(19): siRNA sense strand
uuaagagacuggagcacaa

SEQ ID NO: 1067119 - RNA, 19 nt, Homo sapiens
  misc_RNA (1)...(19): siRNA sense strand
gcaacuaaacccagaccaa

SEQ ID NO: 1067120 - RNA, 19 nt, Homo sapiens
  misc_RNA (1)...(19): siRNA sense strand
ucaaauaugguccagaguu

SEQ ID NO: 1067121 - RNA, 19 nt, Homo sapiens
  misc_RNA (1)...(19): siRNA sense strand
aggaagcgaucuaccacua

SEQ ID NO: 1067122 - RNA, 19 nt, Homo sapiens
  misc_RNA (1)...(19): siRNA sense strand
ggaacaaggaagcgaucua

SEQ ID NO: 1067123 - RNA, 19 nt, Homo sapiens
  misc_RNA (1)...(19): siRNA sense strand
aggaaaaucuugccaaauu

SEQ ID NO: 1067124 - RNA, 19 nt, Homo sapiens
  misc_RNA (1)...(19): siRNA sense strand
acaaggcucuccagcugaa

SEQ ID NO: 1067125 - RNA, 19 nt, Homo sapiens
  misc_RNA (1)...(19): siRNA sense strand
aaaaggcaguggcccauua

SEQ ID NO: 1067126 - RNA, 19 nt, Homo sapiens
  misc_RNA (1)...(19): siRNA sense strand
caggagcgguuuaaagaag

SEQ ID NO: 1067127 - RNA, 19 nt, Homo sapiens
  misc_RNA (1)...(19): siRNA sense strand
gcagaugcauauucaagcu

SEQ ID NO: 1067128 - RNA, 19 nt, Homo sapiens
  misc_RNA (1)...(19): siRNA sense strand
gaacaaggaagcgaucuac

SEQ ID NO: 1067129 - RNA, 19 nt, Homo sapiens
  misc_RNA (1)...(19): siRNA sense strand
gcacacaaagcugagauau

SEQ ID NO: 1067130 - RNA, 19 nt, Homo sapiens
  misc_RNA (1)...(19): siRNA sense strand
gcucugcacuuggcugaau

SEQ ID NO: 1067131 - RNA, 19 nt, Homo sapiens
  misc_RNA (1)...(19): siRNA sense strand
gagaccggaugccuugaau

SEQ ID NO: 1067132 - RNA, 19 nt, Homo sapiens
  misc_RNA (1)...(19): siRNA sense strand
aaacuggaauaaagaacug

SEQ ID NO: 1067133 - RNA, 19 nt, Homo sapiens
  misc_RNA (1)...(19): siRNA sense strand
gcaggagcgguuuaaagaa

SEQ ID NO: 1067134 - RNA, 19 nt, Homo sapiens
  misc_RNA (1)...(19): siRNA sense strand
gagcaggagcgguuuaaag

SEQ ID NO: 1067135 - RNA, 19 nt, Homo sapiens
  misc_RNA (1)...(19): siRNA sense strand
gagauauugucaccuuugg

SEQ ID NO: 1067136 - RNA, 19 nt, Homo sapiens
  misc_RNA (1)...(19): siRNA sense strand
cagcucagauuuacacaac

SEQ ID NO: 1067137 - RNA, 19 nt, Homo sapiens
  misc_RNA (1)...(19): siRNA sense strand
ccaagguucacuacaacua

SEQ ID NO: 1067138 - RNA, 19 nt, Homo sapiens
  misc_RNA (1)...(19): siRNA sense strand
gaacuugggaagacucuac

SEQ ID NO: 1067139 - RNA, 19 nt, Homo sapiens
  misc_RNA (1)...(19): siRNA sense strand
guuuaaagaagcugaagaa

SEQ ID NO: 1067140 - RNA, 19 nt, Homo sapiens
  misc_RNA (1)...(19): siRNA sense strand
gucaagagagucccuauuc

SEQ ID NO: 1067141 - RNA, 19 nt, Homo sapiens
  misc_RNA (1)...(19): siRNA sense strand
caaaagaagcugaaaagau

SEQ ID NO: 1067142 - RNA, 19 nt, Homo sapiens
  misc_RNA (1)...(19): siRNA sense strand
caacacuggccgauacgaa

SEQ ID NO: 1067143 - RNA, 19 nt, Homo sapiens
  misc_RNA (1)...(19): siRNA sense strand
cuuaguugauacuggcuua

SEQ ID NO: 1067144 - RNA, 19 nt, Homo sapiens
  misc_RNA (1)...(19): siRNA sense strand
gcaguauuccucugguaga

SEQ ID NO: 1067145 - RNA, 19 nt, Homo sapiens
  misc_RNA (1)...(19): siRNA sense strand
gaaaagaugaccaaucaca

SEQ ID NO: 1067146 - RNA, 19 nt, Homo sapiens
  misc_RNA (1)...(19): siRNA sense strand
gaucuaccacuacagaaca

SEQ ID NO: 1067147 - RNA, 19 nt, Homo sapiens
  misc_RNA (1)...(19): siRNA sense strand
cuacagaacagcucucaag

SEQ ID NO: 1067148 - RNA, 19 nt, Homo sapiens
  misc_RNA (1)...(19): siRNA sense strand
agaaaaggaucaaacauag

SEQ ID NO: 1067149 - RNA, 19 nt, Homo sapiens
  misc_RNA (1)...(19): siRNA sense strand
cugcaagagcuuauuauga

SEQ ID NO: 1067150 - RNA, 19 nt, Homo sapiens
  misc_RNA (1)...(19): siRNA sense strand
ugucagccaucuauagcaa

SEQ ID NO: 1067151 - RNA, 19 nt, Homo sapiens
  misc_RNA (1)...(19): siRNA sense strand
ggagaccggaugccuugaa

SEQ ID NO: 1067152 - RNA, 19 nt, Homo sapiens
  misc_RNA (1)...(19): siRNA sense strand
cagauuuacacaacaacua

SEQ ID NO: 1067153 - RNA, 19 nt, Homo sapiens
  misc_RNA (1)...(19): siRNA sense strand
guccagacagcucagauuu

SEQ ID NO: 1067154 - RNA, 19 nt, Homo sapiens
  misc_RNA (1)...(19): siRNA sense strand
uaaccgggcucuuuucaau

SEQ ID NO: 1067155 - RNA, 19 nt, Homo sapiens
  misc_RNA (1)...(19): siRNA sense strand
gcugaagaaauauaccaaa

SEQ ID NO: 1067156 - RNA, 19 nt, Homo sapiens
  misc_RNA (1)...(19): siRNA sense strand
uuacaagaaguucgagaaa

SEQ ID NO: 1067157 - RNA, 19 nt, Homo sapiens
  misc_RNA (1)...(19): siRNA sense strand
cugaaaagaugaccaauca

SEQ ID NO: 1067158 - RNA, 19 nt, Homo sapiens
  misc_RNA (1)...(19): siRNA sense strand
ccacuguguugcugcuguu

SEQ ID NO: 1067159 - RNA, 19 nt, Homo sapiens
  misc_RNA (1)...(19): siRNA sense strand
aaaggaaaccaauuaagag

SEQ ID NO: 1067160 - RNA, 19 nt, Homo sapiens
  misc_RNA (1)...(19): siRNA sense strand
cacaaaaggaaaccaauua

SEQ ID NO: 1067161 - RNA, 19 nt, Homo sapiens
  misc_RNA (1)...(19): siRNA sense strand
caacuaugggguuuucuua

SEQ ID NO: 1067162 - RNA, 19 nt, Homo sapiens
  misc_RNA (1)...(19): siRNA sense strand
gcucaacaaccuuggaaca

SEQ ID NO: 1067163 - RNA, 19 nt, Homo sapiens
  misc_RNA (1)...(19): siRNA sense strand
caagguucacuacaacuau

SEQ ID NO: 1067164 - RNA, 19 nt, Homo sapiens
  misc_RNA (1)...(19): siRNA sense strand
gcggagagaguccuuuaca

SEQ ID NO: 1067165 - RNA, 19 nt, Homo sapiens
  misc_RNA (1)...(19): siRNA sense strand
uccaacacaucaagggaaa

SEQ ID NO: 1067166 - RNA, 19 nt, Homo sapiens
  misc_RNA (1)...(19): siRNA sense strand
cggcaguauuccucuggua

SEQ ID NO: 1067167 - RNA, 19 nt, Homo sapiens
  misc_RNA (1)...(19): siRNA sense strand
acagaacagcucucaaguu

SEQ ID NO: 1067168 - RNA, 19 nt, Homo sapiens
  misc_RNA (1)...(19): siRNA sense strand
gaagauugccuacugaaua

SEQ ID NO: 1067169 - RNA, 19 nt, Homo sapiens
  misc_RNA (1)...(19): siRNA sense strand
gaaagucguucaucauuug

SEQ ID NO: 1067170 - RNA, 19 nt, Homo sapiens
  misc_RNA (1)...(19): siRNA sense strand
gaacaucgacggagacauu

SEQ ID NO: 1067171 - RNA, 19 nt, Homo sapiens
  misc_RNA (1)...(19): siRNA sense strand
cgacugaacuggacacugu

SEQ ID NO: 1067172 - RNA, 19 nt, Homo sapiens
  misc_RNA (1)...(19): siRNA sense strand
ggaaacaucugcauaucag

SEQ ID NO: 1067173 - RNA, 19 nt, Homo sapiens
  misc_RNA (1)...(19): siRNA sense strand
caaccaagacauuagauuu

SEQ ID NO: 1067174 - RNA, 19 nt, Homo sapiens
  misc_RNA (1)...(19): siRNA sense strand
aagauugccuacugaauaa

SEQ ID NO: 1067175 - RNA, 19 nt, Homo sapiens
  misc_RNA (1)...(19): siRNA sense strand
ugaggaaacugcacaagug

SEQ ID NO: 1067176 - RNA, 19 nt, Homo sapiens
  misc_RNA (1)...(19): siRNA sense strand
agaaagucguucaucauuu

SEQ ID NO: 1067177 - RNA, 19 nt, Homo sapiens
  misc_RNA (1)...(19): siRNA sense strand
uggaacagcuggaugaaga

SEQ ID NO: 1067178 - RNA, 19 nt, Homo sapiens
  misc_RNA (1)...(19): siRNA sense strand
ugaauaagguggacuugag

SEQ ID NO: 1067179 - RNA, 19 nt, Homo sapiens
  misc_RNA (1)...(19): siRNA sense strand
ucaagucguuuggguuuaa

SEQ ID NO: 1067180 - RNA, 19 nt, Homo sapiens
  misc_RNA (1)...(19): siRNA sense strand
cgagaaauauccccacuuu

SEQ ID NO: 1067181 - RNA, 19 nt, Homo sapiens
  misc_RNA (1)...(19): siRNA sense strand
cagaaagucguucaucauu

SEQ ID NO: 1067182 - RNA, 19 nt, Homo sapiens
  misc_RNA (1)...(19): siRNA sense strand
ccagggaacaggccgguua

SEQ ID NO: 1067183 - RNA, 19 nt, Homo sapiens
  misc_RNA (1)...(19): siRNA sense strand
guggaacaguuuaugaaga

SEQ ID NO: 1067184 - RNA, 19 nt, Homo sapiens
  misc_RNA (1)...(19): siRNA sense strand
caucaagucguuuggguuu

SEQ ID NO: 1067185 - RNA, 19 nt, Homo sapiens
  misc_RNA (1)...(19): siRNA sense strand
gcagaaagucguucaucau

SEQ ID NO: 1067186 - RNA, 19 nt, Homo sapiens
  misc_RNA (1)...(19): siRNA sense strand
ccacaaacaucagcaacca

SEQ ID NO: 1067187 - RNA, 19 nt, Homo sapiens
  misc_RNA (1)...(19): siRNA sense strand
agaaauauccccacuuuaa

SEQ ID NO: 1067188 - RNA, 19 nt, Homo sapiens
  misc_RNA (1)...(19): siRNA sense strand
ccaagguccuccuaguguu

SEQ ID NO: 1067189 - RNA, 19 nt, Homo sapiens
  misc_RNA (1)...(19): siRNA sense strand
gagcagcacuggcgguacu

SEQ ID NO: 1067190 - RNA, 19 nt, Homo sapiens
  misc_RNA (1)...(19): siRNA sense strand
gauuucaagcugugccuua

SEQ ID NO: 1067191 - RNA, 19 nt, Homo sapiens
  misc_RNA (1)...(19): siRNA sense strand
gcaaccaagacauuagauu

SEQ ID NO: 1067192 - RNA, 19 nt, Homo sapiens
  misc_RNA (1)...(19): siRNA sense strand
caucagcaaccaagacauu

SEQ ID NO: 1067193 - RNA, 19 nt, Homo sapiens
  misc_RNA (1)...(19): siRNA sense strand
gaacagcaaccucuuucag

SEQ ID NO: 1067194 - RNA, 19 nt, Homo sapiens
  misc_RNA (1)...(19): siRNA sense strand
gaaauauccccacuuuaaa

SEQ ID NO: 1067195 - RNA, 19 nt, Homo sapiens
  misc_RNA (1)...(19): siRNA sense strand
uggaggaggugcagaaagu

SEQ ID NO: 1067196 - RNA, 19 nt, Homo sapiens
  misc_RNA (1)...(19): siRNA sense strand
uuagaagauugccuacuga

SEQ ID NO: 1067197 - RNA, 19 nt, Homo sapiens
  misc_RNA (1)...(19): siRNA sense strand
cuuagaagauugccuacug

SEQ ID NO: 1067198 - RNA, 19 nt, Homo sapiens
  misc_RNA (1)...(19): siRNA sense strand
guucaucauuugaccacaa

SEQ ID NO: 1067199 - RNA, 19 nt, Homo sapiens
  misc_RNA (1)...(19): siRNA sense strand
gagguggaacaguuuauga

SEQ ID NO: 1067200 - RNA, 19 nt, Homo sapiens
  misc_RNA (1)...(19): siRNA sense strand
gugggagacuuagaagauu

SEQ ID NO: 1067201 - RNA, 19 nt, Homo sapiens
  misc_RNA (1)...(19): siRNA sense strand
ggucuucagcaaagcauuu

SEQ ID NO: 1067202 - RNA, 19 nt, Homo sapiens
  misc_RNA (1)...(19): siRNA sense strand
ccaagacauuagauuucaa

SEQ ID NO: 1067203 - RNA, 19 nt, Homo sapiens
  misc_RNA (1)...(19): siRNA sense strand
ggcuggagguggaacaguu

SEQ ID NO: 1067204 - RNA, 19 nt, Homo sapiens
  misc_RNA (1)...(19): siRNA sense strand
uggcaggucuucagcaaag

SEQ ID NO: 1067205 - RNA, 19 nt, Homo sapiens
  misc_RNA (1)...(19): siRNA sense strand
gcaguggcaugagacagau

SEQ ID NO: 1067206 - RNA, 19 nt, Homo sapiens
  misc_RNA (1)...(19): siRNA sense strand
gagccagcacuuccugaaa

SEQ ID NO: 1067207 - RNA, 19 nt, Homo sapiens
  misc_RNA (1)...(19): siRNA sense strand
gggaacaggccgguuauca

SEQ ID NO: 1067208 - RNA, 19 nt, Homo sapiens
  misc_RNA (1)...(19): siRNA sense strand
gaacagcuggaugaagaug

SEQ ID NO: 1067209 - RNA, 19 nt, Homo sapiens
  misc_RNA (1)...(19): siRNA sense strand
uagaaccugucaccucuca

SEQ ID NO: 1067210 - RNA, 19 nt, Homo sapiens
  misc_RNA (1)...(19): siRNA sense strand
ccucgucacagucccaaua

SEQ ID NO: 1067211 - RNA, 19 nt, Homo sapiens
  misc_RNA (1)...(19): siRNA sense strand
uggaacaguuuaugaagag

SEQ ID NO: 1067212 - RNA, 19 nt, Homo sapiens
  misc_RNA (1)...(19): siRNA sense strand
ucugacacguacaaugaaa

SEQ ID NO: 1067213 - RNA, 19 nt, Homo sapiens
  misc_RNA (1)...(19): siRNA sense strand
gccaagguccuccuagugu

SEQ ID NO: 1067214 - RNA, 19 nt, Homo sapiens
  misc_RNA (1)...(19): siRNA sense strand
acucugacacguacaauga

SEQ ID NO: 1067215 - RNA, 19 nt, Homo sapiens
  misc_RNA (1)...(19): siRNA sense strand
guggaaacaucugcauauc

SEQ ID NO: 1067216 - RNA, 19 nt, Homo sapiens
  misc_RNA (1)...(19): siRNA sense strand
ugcagaaagucguucauca

SEQ ID NO: 1067217 - RNA, 19 nt, Homo sapiens
  misc_RNA (1)...(19): siRNA sense strand
ugggagacuuagaagauug

SEQ ID NO: 1067218 - RNA, 19 nt, Homo sapiens
  misc_RNA (1)...(19): siRNA sense strand
guuggccuguucaaauuau

SEQ ID NO: 1067219 - RNA, 19 nt, Homo sapiens
  misc_RNA (1)...(19): siRNA sense strand
uggagugcaucaagucguu

SEQ ID NO: 1067220 - RNA, 19 nt, Homo sapiens
  misc_RNA (1)...(19): siRNA sense strand
ggaacagcaaccucuuuca

SEQ ID NO: 1067221 - RNA, 19 nt, Homo sapiens
  misc_RNA (1)...(19): siRNA sense strand
gcacuuccugaaacacuau

SEQ ID NO: 1067222 - RNA, 19 nt, Homo sapiens
  misc_RNA (1)...(19): siRNA sense strand
uuguuggccuguucaaauu

SEQ ID NO: 1067223 - RNA, 19 nt, Homo sapiens
  misc_RNA (1)...(19): siRNA sense strand
aagcugugccuuacucuga

SEQ ID NO: 1067224 - RNA, 19 nt, Homo sapiens
  misc_RNA (1)...(19): siRNA sense strand
gagaguggagugcaucaag

SEQ ID NO: 1067225 - RNA, 19 nt, Homo sapiens
  misc_RNA (1)...(19): siRNA sense strand
ggcaguggcaugagacaga

SEQ ID NO: 1067226 - RNA, 19 nt, Homo sapiens
  misc_RNA (1)...(19): siRNA sense strand
gcacuggcgguacuacaca

SEQ ID NO: 1067227 - RNA, 19 nt, Homo sapiens
  misc_RNA (1)...(19): siRNA sense strand
cagcaaccaagacauuaga

SEQ ID NO: 1067228 - RNA, 19 nt, Homo sapiens
  misc_RNA (1)...(19): siRNA sense strand
gccagcacuuccugaaaca

SEQ ID NO: 1067229 - RNA, 19 nt, Homo sapiens
  misc_RNA (1)...(19): siRNA sense strand
ggagguggaacaguuuaug

SEQ ID NO: 1067230 - RNA, 19 nt, Homo sapiens
  misc_RNA (1)...(19): siRNA sense strand
gcuggagguggaacaguuu

SEQ ID NO: 1067231 - RNA, 19 nt, Homo sapiens
  misc_RNA (1)...(19): siRNA sense strand
gguggaaaaugcaguuaga

SEQ ID NO: 1067232 - RNA, 19 nt, Homo sapiens
  misc_RNA (1)...(19): siRNA sense strand
ggcaugagacagaugugaa

SEQ ID NO: 1067233 - RNA, 19 nt, Homo sapiens
  misc_RNA (1)...(19): siRNA sense strand
caagacauuagauuucaag

SEQ ID NO: 1067234 - RNA, 19 nt, Homo sapiens
  misc_RNA (1)...(19): siRNA sense strand
accaagacauuagauuuca

SEQ ID NO: 1067235 - RNA, 19 nt, Homo sapiens
  misc_RNA (1)...(19): siRNA sense strand
caagguccuccuaguguuc

SEQ ID NO: 1067236 - RNA, 19 nt, Homo sapiens
  misc_RNA (1)...(19): siRNA sense strand
ggaacaggccgguuaucac

SEQ ID NO: 1067237 - RNA, 19 nt, Homo sapiens
  misc_RNA (1)...(19): siRNA sense strand
cguuuggguuuaacuuguu

SEQ ID NO: 1067238 - RNA, 19 nt, Homo sapiens
  misc_RNA (1)...(19): siRNA sense strand
agaguggagugcaucaagu

SEQ ID NO: 1067239 - RNA, 19 nt, Homo sapiens
  misc_RNA (1)...(19): siRNA sense strand
uguggaaacaucugcauau

SEQ ID NO: 1067240 - RNA, 19 nt, Homo sapiens
  misc_RNA (1)...(19): siRNA sense strand
ggguugcuguggaaacauc

SEQ ID NO: 1067241 - RNA, 19 nt, Homo sapiens
  misc_RNA (1)...(19): siRNA sense strand
aaggucagccugcuaggaa

SEQ ID NO: 1067242 - RNA, 19 nt, Homo sapiens
  misc_RNA (1)...(19): siRNA sense strand
ucugcagacugugcucuuu

SEQ ID NO: 1067243 - RNA, 19 nt, Homo sapiens
  misc_RNA (1)...(19): siRNA sense strand
cccaaaagcuggccaccuu

SEQ ID NO: 1067244 - RNA, 19 nt, Homo sapiens
  misc_RNA (1)...(19): siRNA sense strand
gugaggaaacugcacaagu

SEQ ID NO: 1067245 - RNA, 19 nt, Homo sapiens
  misc_RNA (1)...(19): siRNA sense strand
ggaggugcagaaagucguu

SEQ ID NO: 1067246 - RNA, 19 nt, Homo sapiens
  misc_RNA (1)...(19): siRNA sense strand
ugugggagacuuagaagau

SEQ ID NO: 1067247 - RNA, 19 nt, Homo sapiens
  misc_RNA (1)...(19): siRNA sense strand
gagaaauauccccacuuua

SEQ ID NO: 1067248 - RNA, 19 nt, Homo sapiens
  misc_RNA (1)...(19): siRNA sense strand
uggaaacaucugcauauca

SEQ ID NO: 1067249 - RNA, 19 nt, Homo sapiens
  misc_RNA (1)...(19): siRNA sense strand
aaccaagacauuagauuuc

SEQ ID NO: 1067250 - RNA, 19 nt, Homo sapiens
  misc_RNA (1)...(19): siRNA sense strand
gguggaacaguuuaugaag

SEQ ID NO: 1067251 - RNA, 19 nt, Homo sapiens
  misc_RNA (1)...(19): siRNA sense strand
ucaugaggcaccugaagga

SEQ ID NO: 1067252 - RNA, 19 nt, Homo sapiens
  misc_RNA (1)...(19): siRNA sense strand
ggaacagcuggaugaagau

SEQ ID NO: 1067253 - RNA, 19 nt, Homo sapiens
  misc_RNA (1)...(19): siRNA sense strand
uugaggcgccagcagauuu

SEQ ID NO: 1067254 - RNA, 19 nt, Homo sapiens
  misc_RNA (1)...(19): siRNA sense strand
uagaagauugccuacugaa

SEQ ID NO: 1067255 - RNA, 19 nt, Homo sapiens
  misc_RNA (1)...(19): siRNA sense strand
gagagaguggagugcauca

SEQ ID NO: 1067256 - RNA, 19 nt, Homo sapiens
  misc_RNA (1)...(19): siRNA sense strand
cccaccaucugcagacugu

SEQ ID NO: 1067257 - RNA, 19 nt, Homo sapiens
  misc_RNA (1)...(19): siRNA sense strand
ggaaauggcucaugccuuu

SEQ ID NO: 1067258 - RNA, 19 nt, Homo sapiens
  misc_RNA (1)...(19): siRNA sense strand
gagcagaugaucaggaaau

SEQ ID NO: 1067259 - RNA, 19 nt, Homo sapiens
  misc_RNA (1)...(19): siRNA sense strand
gaaauggcucaugccuuua

SEQ ID NO: 1067260 - RNA, 19 nt, Homo sapiens
  misc_RNA (1)...(19): siRNA sense strand
gcaugaaagugccgcucuu

SEQ ID NO: 1067261 - RNA, 19 nt, Homo sapiens
  misc_RNA (1)...(19): siRNA sense strand
ggagcagccuggagcagau

SEQ ID NO: 1067262 - RNA, 19 nt, Homo sapiens
  misc_RNA (1)...(19): siRNA sense strand
uggagcagaugaucaggaa

SEQ ID NO: 1067263 - RNA, 19 nt, Homo sapiens
  misc_RNA (1)...(19): siRNA sense strand
gaucaggaaauggcucaug

SEQ ID NO: 1067264 - RNA, 19 nt, Homo sapiens
  misc_RNA (1)...(19): siRNA sense strand
gugccgcucuuccgcuuuc

SEQ ID NO: 1067265 - RNA, 19 nt, Homo sapiens
  misc_RNA (1)...(19): siRNA sense strand
ggagccacuucaggcaaga

SEQ ID NO: 1067266 - RNA, 19 nt, Homo sapiens
  misc_RNA (1)...(19): siRNA sense strand
gaaggaagaucuggagcua

SEQ ID NO: 1067267 - RNA, 19 nt, Homo sapiens
  misc_RNA (1)...(19): siRNA sense strand
gaagaucuggagcuaauaa

SEQ ID NO: 1067268 - RNA, 19 nt, Homo sapiens
  misc_RNA (1)...(19): siRNA sense strand
ugacugagauggagauauc

SEQ ID NO: 1067269 - RNA, 19 nt, Homo sapiens
  misc_RNA (1)...(19): siRNA sense strand
agaaggagauccagaguuc

SEQ ID NO: 1067270 - RNA, 19 nt, Homo sapiens
  misc_RNA (1)...(19): siRNA sense strand
gaucuggagcuaauaauga

SEQ ID NO: 1067271 - RNA, 19 nt, Homo sapiens
  misc_RNA (1)...(19): siRNA sense strand
gagcuaauaaugacugaga

SEQ ID NO: 1067272 - RNA, 19 nt, Homo sapiens
  misc_RNA (1)...(19): siRNA sense strand
gagaagccacggaaacaug

SEQ ID NO: 1067273 - RNA, 19 nt, Homo sapiens
  misc_RNA (1)...(19): siRNA sense strand
gaaggucccgggagcagaa

SEQ ID NO: 1067274 - RNA, 19 nt, Homo sapiens
  misc_RNA (1)...(19): siRNA sense strand
aggaagaucuggagcuaau

SEQ ID NO: 1067275 - RNA, 19 nt, Homo sapiens
  misc_RNA (1)...(19): siRNA sense strand
agaaagaacuggcaaaagu

SEQ ID NO: 1067276 - RNA, 19 nt, Homo sapiens
  misc_RNA (1)...(19): siRNA sense strand
gagaaggagauccagaguu

SEQ ID NO: 1067277 - RNA, 19 nt, Homo sapiens
  misc_RNA (1)...(19): siRNA sense strand
ggccaugucugugauugga

SEQ ID NO: 1067278 - RNA, 19 nt, Homo sapiens
  misc_RNA (1)...(19): siRNA sense strand
acacaugggcaacguggua

SEQ ID NO: 1067279 - RNA, 19 nt, Homo sapiens
  misc_RNA (1)...(19): siRNA sense strand
gcaaaagucacuaucaaga

SEQ ID NO: 1067280 - RNA, 19 nt, Homo sapiens
  misc_RNA (1)...(19): siRNA sense strand
ggaagaucuggagcuaaua

SEQ ID NO: 1067281 - RNA, 19 nt, Homo sapiens
  misc_RNA (1)...(19): siRNA sense strand
gcuaauaaugacugagaug

SEQ ID NO: 1067282 - RNA, 19 nt, Homo sapiens
  misc_RNA (1)...(19): siRNA sense strand
ggagaaggagauccagagu

SEQ ID NO: 1067283 - RNA, 19 nt, Homo sapiens
  misc_RNA (1)...(19): siRNA sense strand
aacaggagcgggagaaaga

SEQ ID NO: 1067284 - RNA, 19 nt, Homo sapiens
  misc_RNA (1)...(19): siRNA sense strand
ggagaaagaacuggcaaaa

SEQ ID NO: 1067285 - RNA, 19 nt, Homo sapiens
  misc_RNA (1)...(19): siRNA sense strand
uaauaaugacugagaugga

SEQ ID NO: 1067286 - RNA, 19 nt, Homo sapiens
  misc_RNA (1)...(19): siRNA sense strand
caaaagucacuaucaagaa

SEQ ID NO: 1067287 - RNA, 19 nt, Homo sapiens
  misc_RNA (1)...(19): siRNA sense strand
ggagaagccacggaaacau

SEQ ID NO: 1067288 - RNA, 19 nt, Homo sapiens
  misc_RNA (1)...(19): siRNA sense strand
gggagaaagaacuggcaaa

SEQ ID NO: 1067289 - RNA, 19 nt, Homo sapiens
  misc_RNA (1)...(19): siRNA sense strand
caaacaggagcgggagaaa

SEQ ID NO: 1067290 - RNA, 19 nt, Homo sapiens
  misc_RNA (1)...(19): siRNA sense strand
ccaaacaggagcgggagaa

SEQ ID NO: 1067291 - RNA, 19 nt, Homo sapiens
  misc_RNA (1)...(19): siRNA sense strand
gcggcguggugaaauagau

SEQ ID NO: 1067292 - RNA, 19 nt, Homo sapiens
  misc_RNA (1)...(19): siRNA sense strand
uggagcgggucaccgacua

SEQ ID NO: 1067293 - RNA, 19 nt, Homo sapiens
  misc_RNA (1)...(19): siRNA sense strand
agaagccacggaaacauga

SEQ ID NO: 1067294 - RNA, 19 nt, Homo sapiens
  misc_RNA (1)...(19): siRNA sense strand
ggagauccagaguuccaau

SEQ ID NO: 1067295 - RNA, 19 nt, Homo sapiens
  misc_RNA (1)...(19): siRNA sense strand
gggaacacaugggcaacgu

SEQ ID NO: 1067296 - RNA, 19 nt, Homo sapiens
  misc_RNA (1)...(19): siRNA sense strand
gcaguuugcgggaacacau

SEQ ID NO: 1067297 - RNA, 19 nt, Homo sapiens
  misc_RNA (1)...(19): siRNA sense strand
ggauguggagcuggaguug

SEQ ID NO: 1067298 - RNA, 19 nt, Homo sapiens
  misc_RNA (1)...(19): siRNA sense strand
aaaagucacuaucaagaag

SEQ ID NO: 1067299 - RNA, 19 nt, Homo sapiens
  misc_RNA (1)...(19): siRNA sense strand
gaagcuaaauccaaagaaa

SEQ ID NO: 1067300 - RNA, 19 nt, Homo sapiens
  misc_RNA (1)...(19): siRNA sense strand
gccaugaacuuucugauuu

SEQ ID NO: 1067301 - RNA, 19 nt, Homo sapiens
  misc_RNA (1)...(19): siRNA sense strand
ggacaagacuguggcauau

SEQ ID NO: 1067302 - RNA, 19 nt, Homo sapiens
  misc_RNA (1)...(19): siRNA sense strand
ggcaaggacuuacuuauug

SEQ ID NO: 1067303 - RNA, 19 nt, Homo sapiens
  misc_RNA (1)...(19): siRNA sense strand
ugauaaagaugccucuaua

SEQ ID NO: 1067304 - RNA, 19 nt, Homo sapiens
  misc_RNA (1)...(19): siRNA sense strand
uaucagaacugcuaaagga

SEQ ID NO: 1067305 - RNA, 19 nt, Homo sapiens
  misc_RNA (1)...(19): siRNA sense strand
agagauaccugaagucuga

SEQ ID NO: 1067306 - RNA, 19 nt, Homo sapiens
  misc_RNA (1)...(19): siRNA sense strand
gcgagaagcucagcaaaga

SEQ ID NO: 1067307 - RNA, 19 nt, Homo sapiens
  misc_RNA (1)...(19): siRNA sense strand
acaagaagcuaaauccaaa

SEQ ID NO: 1067308 - RNA, 19 nt, Homo sapiens
  misc_RNA (1)...(19): siRNA sense strand
uaaagaugccucuauagua

SEQ ID NO: 1067309 - RNA, 19 nt, Homo sapiens
  misc_RNA (1)...(19): siRNA sense strand
ggacugaggaagaauuuaa

SEQ ID NO: 1067310 - RNA, 19 nt, Homo sapiens
  misc_RNA (1)...(19): siRNA sense strand
auaaagaugugcugauuga

SEQ ID NO: 1067311 - RNA, 19 nt, Homo sapiens
  misc_RNA (1)...(19): siRNA sense strand
aaagaugccucuauaguag

SEQ ID NO: 1067312 - RNA, 19 nt, Homo sapiens
  misc_RNA (1)...(19): siRNA sense strand
gaagauauuuagagauggu

SEQ ID NO: 1067313 - RNA, 19 nt, Homo sapiens
  misc_RNA (1)...(19): siRNA sense strand
gccagcaacuugagggaua

SEQ ID NO: 1067314 - RNA, 19 nt, Homo sapiens
  misc_RNA (1)...(19): siRNA sense strand
ggaauagucccauuagcaa

SEQ ID NO: 1067315 - RNA, 19 nt, Homo sapiens
  misc_RNA (1)...(19): siRNA sense strand
gggcaaggacuuacuuauu

SEQ ID NO: 1067316 - RNA, 19 nt, Homo sapiens
  misc_RNA (1)...(19): siRNA sense strand
gagagaaguuugucaugca

SEQ ID NO: 1067317 - RNA, 19 nt, Homo sapiens
  misc_RNA (1)...(19): siRNA sense strand
gaaaagaacgcuaaagguu

SEQ ID NO: 1067318 - RNA, 19 nt, Homo sapiens
  misc_RNA (1)...(19): siRNA sense strand
aagaugugcugauugaauu

SEQ ID NO: 1067319 - RNA, 19 nt, Homo sapiens
  misc_RNA (1)...(19): siRNA sense strand
ggaauugucagccacuuga

SEQ ID NO: 1067320 - RNA, 19 nt, Homo sapiens
  misc_RNA (1)...(19): siRNA sense strand
acuaugauguggacuauga

SEQ ID NO: 1067321 - RNA, 19 nt, Homo sapiens
  misc_RNA (1)...(19): siRNA sense strand
ugacagaagacaauaaaga

SEQ ID NO: 1067322 - RNA, 19 nt, Homo sapiens
  misc_RNA (1)...(19): siRNA sense strand
cugaagauauuuagagaug

SEQ ID NO: 1067323 - RNA, 19 nt, Homo sapiens
  misc_RNA (1)...(19): siRNA sense strand
auaaagaacuuggcgagaa

SEQ ID NO: 1067324 - RNA, 19 nt, Homo sapiens
  misc_RNA (1)...(19): siRNA sense strand
gaaacaggguaaugauggu

SEQ ID NO: 1067325 - RNA, 19 nt, Homo sapiens
  misc_RNA (1)...(19): siRNA sense strand
cuucacaucucacuaacaa

SEQ ID NO: 1067326 - RNA, 19 nt, Homo sapiens
  misc_RNA (1)...(19): siRNA sense strand
ggacuuacuuauugcuuac

SEQ ID NO: 1067327 - RNA, 19 nt, Homo sapiens
  misc_RNA (1)...(19): siRNA sense strand
uaaagaacuuggcgagaag

SEQ ID NO: 1067328 - RNA, 19 nt, Homo sapiens
  misc_RNA (1)...(19): siRNA sense strand
gaaccuggagcccaaguau

SEQ ID NO: 1067329 - RNA, 19 nt, Homo sapiens
  misc_RNA (1)...(19): siRNA sense strand
aaacucaacuuugcuguag

SEQ ID NO: 1067330 - RNA, 19 nt, Homo sapiens
  misc_RNA (1)...(19): siRNA sense strand
acacuaacaccuguaauaa

SEQ ID NO: 1067331 - RNA, 19 nt, Homo sapiens
  misc_RNA (1)...(19): siRNA sense strand
uaaugaugguggcaaagaa

SEQ ID NO: 1067332 - RNA, 19 nt, Homo sapiens
  misc_RNA (1)...(19): siRNA sense strand
ugaugugccuucuccauau

SEQ ID NO: 1067333 - RNA, 19 nt, Homo sapiens
  misc_RNA (1)...(19): siRNA sense strand
gaagagauaccugaagucu

SEQ ID NO: 1067334 - RNA, 19 nt, Homo sapiens
  misc_RNA (1)...(19): siRNA sense strand
gaauagucccauuagcaaa

SEQ ID NO: 1067335 - RNA, 19 nt, Homo sapiens
  misc_RNA (1)...(19): siRNA sense strand
ggagagauuccuguuguug

SEQ ID NO: 1067336 - RNA, 19 nt, Homo sapiens
  misc_RNA (1)...(19): siRNA sense strand
ggagaaacaggguaaugau

SEQ ID NO: 1067337 - RNA, 19 nt, Homo sapiens
  misc_RNA (1)...(19): siRNA sense strand
gacagaagacaauaaagau

SEQ ID NO: 1067338 - RNA, 19 nt, Homo sapiens
  misc_RNA (1)...(19): siRNA sense strand
agggauaacuaccgauuug

SEQ ID NO: 1067339 - RNA, 19 nt, Homo sapiens
  misc_RNA (1)...(19): siRNA sense strand
gcaaugaugggccugugaa

SEQ ID NO: 1067340 - RNA, 19 nt, Homo sapiens
  misc_RNA (1)...(19): siRNA sense strand
gagaaacaggguaaugaug

SEQ ID NO: 1067341 - RNA, 19 nt, Homo sapiens
  misc_RNA (1)...(19): siRNA sense strand
caucuuauuucguccuuca

SEQ ID NO: 1067342 - RNA, 19 nt, Homo sapiens
  misc_RNA (1)...(19): siRNA sense strand
gcaacuugagggauaacua

SEQ ID NO: 1067343 - RNA, 19 nt, Homo sapiens
  misc_RNA (1)...(19): siRNA sense strand
gaagaaggcacaggaggau

SEQ ID NO: 1067344 - RNA, 19 nt, Homo sapiens
  misc_RNA (1)...(19): siRNA sense strand
gcagagaauuuugaugaaa

SEQ ID NO: 1067345 - RNA, 19 nt, Homo sapiens
  misc_RNA (1)...(19): siRNA sense strand
ugaacgaguaugaugauaa

SEQ ID NO: 1067346 - RNA, 19 nt, Homo sapiens
  misc_RNA (1)...(19): siRNA sense strand
gaugugccuucuccauaug

SEQ ID NO: 1067347 - RNA, 19 nt, Homo sapiens
  misc_RNA (1)...(19): siRNA sense strand
gauaaagaugccucuauag

SEQ ID NO: 1067348 - RNA, 19 nt, Homo sapiens
  misc_RNA (1)...(19): siRNA sense strand
caugacagaagacaauaaa

SEQ ID NO: 1067349 - RNA, 19 nt, Homo sapiens
  misc_RNA (1)...(19): siRNA sense strand
ucacaugacagaagacaau

SEQ ID NO: 1067350 - RNA, 19 nt, Homo sapiens
  misc_RNA (1)...(19): siRNA sense strand
uaucugcccucacaugaca

SEQ ID NO: 1067351 - RNA, 19 nt, Homo sapiens
  misc_RNA (1)...(19): siRNA sense strand
acaagacuguggcauauac

SEQ ID NO: 1067352 - RNA, 19 nt, Homo sapiens
  misc_RNA (1)...(19): siRNA sense strand
gcccucacaugacagaaga

SEQ ID NO: 1067353 - RNA, 19 nt, Homo sapiens
  misc_RNA (1)...(19): siRNA sense strand
ggguaaugaugguggcaaa

SEQ ID NO: 1067354 - RNA, 19 nt, Homo sapiens
  misc_RNA (1)...(19): siRNA sense strand
aggacuuacuuauugcuua

SEQ ID NO: 1067355 - RNA, 19 nt, Homo sapiens
  misc_RNA (1)...(19): siRNA sense strand
gauacagggcaaggacuua

SEQ ID NO: 1067356 - RNA, 19 nt, Homo sapiens
  misc_RNA (1)...(19): siRNA sense strand
ggauuacuuugauggcaau

SEQ ID NO: 1067357 - RNA, 19 nt, Homo sapiens
  misc_RNA (1)...(19): siRNA sense strand
ggacgacaacuucgagagu

SEQ ID NO: 1067358 - RNA, 19 nt, Homo sapiens
  misc_RNA (1)...(19): siRNA sense strand
guaaugaugguggcaaaga

SEQ ID NO: 1067359 - RNA, 19 nt, Homo sapiens
  misc_RNA (1)...(19): siRNA sense strand
gugaacgaguaugaugaua

SEQ ID NO: 1067360 - RNA, 19 nt, Homo sapiens
  misc_RNA (1)...(19): siRNA sense strand
ccagcaacuugagggauaa

SEQ ID NO: 1067361 - RNA, 19 nt, Homo sapiens
  misc_RNA (1)...(19): siRNA sense strand
gacuugcaccugaguauga

SEQ ID NO: 1067362 - RNA, 19 nt, Homo sapiens
  misc_RNA (1)...(19): siRNA sense strand
auuuagagauggugaagaa

SEQ ID NO: 1067363 - RNA, 19 nt, Homo sapiens
  misc_RNA (1)...(19): siRNA sense strand
aacacuaacaccuguaaua

SEQ ID NO: 1067364 - RNA, 19 nt, Homo sapiens
  misc_RNA (1)...(19): siRNA sense strand
gcuaaagguuccaacuacu

SEQ ID NO: 1067365 - RNA, 19 nt, Homo sapiens
  misc_RNA (1)...(19): siRNA sense strand
gacaagacuguggcauaua

SEQ ID NO: 1067366 - RNA, 19 nt, Homo sapiens
  misc_RNA (1)...(19): siRNA sense strand
gagggauaacuaccgauuu

SEQ ID NO: 1067367 - RNA, 19 nt, Homo sapiens
  misc_RNA (1)...(19): siRNA sense strand
gguaucugcccucacauga

SEQ ID NO: 1067368 - RNA, 19 nt, Homo sapiens
  misc_RNA (1)...(19): siRNA sense strand
aaagaugugcugauugaau

SEQ ID NO: 1067369 - RNA, 19 nt, Homo sapiens
  misc_RNA (1)...(19): siRNA sense strand
cugaagagauaccugaagu

SEQ ID NO: 1067370 - RNA, 19 nt, Homo sapiens
  misc_RNA (1)...(19): siRNA sense strand
gcaaaaccuuuagccauga

SEQ ID NO: 1067371 - RNA, 19 nt, Homo sapiens
  misc_RNA (1)...(19): siRNA sense strand
auacgaauguugagucucu

SEQ ID NO: 1067372 - RNA, 19 nt, Homo sapiens
  misc_RNA (1)...(19): siRNA sense strand
aauauggagucaguggaua

SEQ ID NO: 1067373 - RNA, 19 nt, Homo sapiens
  misc_RNA (1)...(19): siRNA sense strand
ugaugggccugugaaggua

SEQ ID NO: 1067374 - RNA, 19 nt, Homo sapiens
  misc_RNA (1)...(19): siRNA sense strand
gcuaaaggagagaaguuug

SEQ ID NO: 1067375 - RNA, 19 nt, Homo sapiens
  misc_RNA (1)...(19): siRNA sense strand
cuggagagauuccuguugu

SEQ ID NO: 1067376 - RNA, 19 nt, Homo sapiens
  misc_RNA (1)...(19): siRNA sense strand
ucacaucucacuaacaagu

SEQ ID NO: 1067377 - RNA, 19 nt, Homo sapiens
  misc_RNA (1)...(19): siRNA sense strand
ccaacacuaacaccuguaa

SEQ ID NO: 1067378 - RNA, 19 nt, Homo sapiens
  misc_RNA (1)...(19): siRNA sense strand
ccugaagucugaaccuauc

SEQ ID NO: 1067379 - RNA, 19 nt, Homo sapiens
  misc_RNA (1)...(19): siRNA sense strand
ggauauccaacccugaaga

SEQ ID NO: 1067380 - RNA, 19 nt, Homo sapiens
  misc_RNA (1)...(19): siRNA sense strand
auccaacccugaagauauu

SEQ ID NO: 1067381 - RNA, 19 nt, Homo sapiens
  misc_RNA (1)...(19): siRNA sense strand
gagacuugcaccugaguau

SEQ ID NO: 1067382 - RNA, 19 nt, Homo sapiens
  misc_RNA (1)...(19): siRNA sense strand
uaaaaggaauagucccauu

SEQ ID NO: 1067383 - RNA, 19 nt, Homo sapiens
  misc_RNA (1)...(19): siRNA sense strand
gugauaaagaugccucuau

SEQ ID NO: 1067384 - RNA, 19 nt, Homo sapiens
  misc_RNA (1)...(19): siRNA sense strand
cacuaacaccuguaauaaa

SEQ ID NO: 1067385 - RNA, 19 nt, Homo sapiens
  misc_RNA (1)...(19): siRNA sense strand
uuacuaugauguggacuau

SEQ ID NO: 1067386 - RNA, 19 nt, Homo sapiens
  misc_RNA (1)...(19): siRNA sense strand
guccuucacaucucacuaa

SEQ ID NO: 1067387 - RNA, 19 nt, Homo sapiens
  misc_RNA (1)...(19): siRNA sense strand
uaccugaagucugaaccua

SEQ ID NO: 1067388 - RNA, 19 nt, Homo sapiens
  misc_RNA (1)...(19): siRNA sense strand
uagagauggugaagaagca

SEQ ID NO: 1067389 - RNA, 19 nt, Homo sapiens
  misc_RNA (1)...(19): siRNA sense strand
gauauccaacccugaagau

SEQ ID NO: 1067390 - RNA, 19 nt, Homo sapiens
  misc_RNA (1)...(19): siRNA sense strand
gaacugcuaaaggagagaa

SEQ ID NO: 1067391 - RNA, 19 nt, Homo sapiens
  misc_RNA (1)...(19): siRNA sense strand
caacuugagggauaacuac

SEQ ID NO: 1067392 - RNA, 19 nt, Homo sapiens
  misc_RNA (1)...(19): siRNA sense strand
ccaugaacuuucugauuuu

SEQ ID NO: 1067393 - RNA, 19 nt, Homo sapiens
  misc_RNA (1)...(19): siRNA sense strand
gaugguggcaaagaaauuc

SEQ ID NO: 1067394 - RNA, 19 nt, Homo sapiens
  misc_RNA (1)...(19): siRNA sense strand
ggauaacuaccgauuugca

SEQ ID NO: 1067395 - RNA, 19 nt, Homo sapiens
  misc_RNA (1)...(19): siRNA sense strand
auaaagaugccucuauagu

SEQ ID NO: 1067396 - RNA, 19 nt, Homo sapiens
  misc_RNA (1)...(19): siRNA sense strand
caacaagaagcuaaaucca

SEQ ID NO: 1067397 - RNA, 19 nt, Homo sapiens
  misc_RNA (1)...(19): siRNA sense strand
gcuaccagauuaaaaggaa

SEQ ID NO: 1067398 - RNA, 19 nt, Homo sapiens
  misc_RNA (1)...(19): siRNA sense strand
accuggagcccaaguauaa

SEQ ID NO: 1067399 - RNA, 19 nt, Homo sapiens
  misc_RNA (1)...(19): siRNA sense strand
ggagaucccuuacacauuu

SEQ ID NO: 1067400 - RNA, 19 nt, Homo sapiens
  misc_RNA (1)...(19): siRNA sense strand
gagcagaggugguggauga

SEQ ID NO: 1067401 - RNA, 19 nt, Homo sapiens
  misc_RNA (1)...(19): siRNA sense strand
ggucagggcucaucuucua

SEQ ID NO: 1067402 - RNA, 19 nt, Homo sapiens
  misc_RNA (1)...(19): siRNA sense strand
ggacagugauccugagaug

SEQ ID NO: 1067403 - RNA, 19 nt, Homo sapiens
  misc_RNA (1)...(19): siRNA sense strand
aaacuggccucauugacua

SEQ ID NO: 1067404 - RNA, 19 nt, Homo sapiens
  misc_RNA (1)...(19): siRNA sense strand
ggagaguuguggacuuuau

SEQ ID NO: 1067405 - RNA, 19 nt, Homo sapiens
  misc_RNA (1)...(19): siRNA sense strand
ugagagaggugugugauga

SEQ ID NO: 1067406 - RNA, 19 nt, Homo sapiens
  misc_RNA (1)...(19): siRNA sense strand
ucaaauccuuccugcuuaa

SEQ ID NO: 1067407 - RNA, 19 nt, Homo sapiens
  misc_RNA (1)...(19): siRNA sense strand
cugccaagcuccaggauuu

SEQ ID NO: 1067408 - RNA, 19 nt, Homo sapiens
  misc_RNA (1)...(19): siRNA sense strand
gcuuagaggugaagagcaa

SEQ ID NO: 1067409 - RNA, 19 nt, Homo sapiens
  misc_RNA (1)...(19): siRNA sense strand
gcacugacugcucgacuuu

SEQ ID NO: 1067410 - RNA, 19 nt, Homo sapiens
  misc_RNA (1)...(19): siRNA sense strand
gguccugucugaacaacaa

SEQ ID NO: 1067411 - RNA, 19 nt, Homo sapiens
  misc_RNA (1)...(19): siRNA sense strand
ucgagucuaugcccuauaa

SEQ ID NO: 1067412 - RNA, 19 nt, Homo sapiens
  misc_RNA (1)...(19): siRNA sense strand
cuacaugucugacgucaag

SEQ ID NO: 1067413 - RNA, 19 nt, Homo sapiens
  misc_RNA (1)...(19): siRNA sense strand
ggugugugaugaagucaaa

SEQ ID NO: 1067414 - RNA, 19 nt, Homo sapiens
  misc_RNA (1)...(19): siRNA sense strand
guuguggacuuuauagaug

SEQ ID NO: 1067415 - RNA, 19 nt, Homo sapiens
  misc_RNA (1)...(19): siRNA sense strand
gaaucaacuuugccguguu

SEQ ID NO: 1067416 - RNA, 19 nt, Homo sapiens
  misc_RNA (1)...(19): siRNA sense strand
ucacugguaucagguggua

SEQ ID NO: 1067417 - RNA, 19 nt, Homo sapiens
  misc_RNA (1)...(19): siRNA sense strand
cuacacagcccuucugcaa

SEQ ID NO: 1067418 - RNA, 19 nt, Homo sapiens
  misc_RNA (1)...(19): siRNA sense strand
ccggagaguuguggacuuu

SEQ ID NO: 1067419 - RNA, 19 nt, Homo sapiens
  misc_RNA (1)...(19): siRNA sense strand
gagaguuguggacuuuaua

SEQ ID NO: 1067420 - RNA, 19 nt, Homo sapiens
  misc_RNA (1)...(19): siRNA sense strand
acaaguacucggaggguua

SEQ ID NO: 1067421 - RNA, 19 nt, Homo sapiens
  misc_RNA (1)...(19): siRNA sense strand
caaccuggccgucuacaca

SEQ ID NO: 1067422 - RNA, 19 nt, Homo sapiens
  misc_RNA (1)...(19): siRNA sense strand
uucaaauccuuccugcuua

SEQ ID NO: 1067423 - RNA, 19 nt, Homo sapiens
  misc_RNA (1)...(19): siRNA sense strand
gagaucccuuacacauuug

SEQ ID NO: 1067424 - RNA, 19 nt, Homo sapiens
  misc_RNA (1)...(19): siRNA sense strand
ccacguccaucuucuucga

SEQ ID NO: 1067425 - RNA, 19 nt, Homo sapiens
  misc_RNA (1)...(19): siRNA sense strand
cagaggugguggaugaaau

SEQ ID NO: 1067426 - RNA, 19 nt, Homo sapiens
  misc_RNA (1)...(19): siRNA sense strand
gcgaggcuacucacuggua

SEQ ID NO: 1067427 - RNA, 19 nt, Homo sapiens
  misc_RNA (1)...(19): siRNA sense strand
agacauggcccacaucagu

SEQ ID NO: 1067428 - RNA, 19 nt, Homo sapiens
  misc_RNA (1)...(19): siRNA sense strand
ggaagccuuugaccuggau

SEQ ID NO: 1067429 - RNA, 19 nt, Homo sapiens
  misc_RNA (1)...(19): siRNA sense strand
cuuaaggacucagaaacaa

SEQ ID NO: 1067430 - RNA, 19 nt, Homo sapiens
  misc_RNA (1)...(19): siRNA sense strand
ggugguggaugaaauugag

SEQ ID NO: 1067431 - RNA, 19 nt, Homo sapiens
  misc_RNA (1)...(19): siRNA sense strand
gcagacauggcccacauca

SEQ ID NO: 1067432 - RNA, 19 nt, Homo sapiens
  misc_RNA (1)...(19): siRNA sense strand
cgccuaugcucgccucauu

SEQ ID NO: 1067433 - RNA, 19 nt, Homo sapiens
  misc_RNA (1)...(19): siRNA sense strand
gcuguacuucucuuuguuu

SEQ ID NO: 1067434 - RNA, 19 nt, Homo sapiens
  misc_RNA (1)...(19): siRNA sense strand
gugggcagcuggucaggau

SEQ ID NO: 1067435 - RNA, 19 nt, Homo sapiens
  misc_RNA (1)...(19): siRNA sense strand
gaugacuuccggagaguug

SEQ ID NO: 1067436 - RNA, 19 nt, Homo sapiens
  misc_RNA (1)...(19): siRNA sense strand
aaucaacuuugccguguuc

SEQ ID NO: 1067437 - RNA, 19 nt, Homo sapiens
  misc_RNA (1)...(19): siRNA sense strand
gcagaggugguggaugaaa

SEQ ID NO: 1067438 - RNA, 19 nt, Homo sapiens
  misc_RNA (1)...(19): siRNA sense strand
gcuuaaggacucagaaaca

SEQ ID NO: 1067439 - RNA, 19 nt, Homo sapiens
  misc_RNA (1)...(19): siRNA sense strand
gcucaucuucuaccggaaa

SEQ ID NO: 1067440 - RNA, 19 nt, Homo sapiens
  misc_RNA (1)...(19): siRNA sense strand
gagagaggugugugaugaa

SEQ ID NO: 1067441 - RNA, 19 nt, Homo sapiens
  misc_RNA (1)...(19): siRNA sense strand
caguagcuguggcccuaaa

SEQ ID NO: 1067442 - RNA, 19 nt, Homo sapiens
  misc_RNA (1)...(19): siRNA sense strand
ggguuauccuggcaagaga

SEQ ID NO: 1067443 - RNA, 19 nt, Homo sapiens
  misc_RNA (1)...(19): siRNA sense strand
agaccgaagugccaucaca

SEQ ID NO: 1067444 - RNA, 19 nt, Homo sapiens
  misc_RNA (1)...(19): siRNA sense strand
gaggaccgaaucaacuuug

SEQ ID NO: 1067445 - RNA, 19 nt, Homo sapiens
  misc_RNA (1)...(19): siRNA sense strand
gcaacgcagcccagacuca

SEQ ID NO: 1067446 - RNA, 19 nt, Homo sapiens
  misc_RNA (1)...(19): siRNA sense strand
ggcacugacugcucgacuu

SEQ ID NO: 1067447 - RNA, 19 nt, Homo sapiens
  misc_RNA (1)...(19): siRNA sense strand
cgaggcuacucacugguau

SEQ ID NO: 1067448 - RNA, 19 nt, Homo sapiens
  misc_RNA (1)...(19): siRNA sense strand
ccccaaaacuggccucauu

SEQ ID NO: 1067449 - RNA, 19 nt, Homo sapiens
  misc_RNA (1)...(19): siRNA sense strand
gcucauugccucagagaac

SEQ ID NO: 1067450 - RNA, 19 nt, Homo sapiens
  misc_RNA (1)...(19): siRNA sense strand
acagugauccugagaugug

SEQ ID NO: 1067451 - RNA, 19 nt, Homo sapiens
  misc_RNA (1)...(19): siRNA sense strand
gcaugagagagguguguga

SEQ ID NO: 1067452 - RNA, 19 nt, Homo sapiens
  misc_RNA (1)...(19): siRNA sense strand
caagcuccaggauuucaaa

SEQ ID NO: 1067453 - RNA, 19 nt, Homo sapiens
  misc_RNA (1)...(19): siRNA sense strand
uuucaaauccuuccugcuu

SEQ ID NO: 1067454 - RNA, 19 nt, Homo sapiens
  misc_RNA (1)...(19): siRNA sense strand
ggccacggcucaucauagc

SEQ ID NO: 1067455 - RNA, 19 nt, Homo sapiens
  misc_RNA (1)...(19): siRNA sense strand
uaaggacucagaaacaagu

SEQ ID NO: 1067456 - RNA, 19 nt, Homo sapiens
  misc_RNA (1)...(19): siRNA sense strand
ggagaaggacaggcagugu

SEQ ID NO: 1067457 - RNA, 19 nt, Homo sapiens
  misc_RNA (1)...(19): siRNA sense strand
gacaguuccgugaggauga

SEQ ID NO: 1067458 - RNA, 19 nt, Homo sapiens
  misc_RNA (1)...(19): siRNA sense strand
agaggugugugaugaaguc

SEQ ID NO: 1067459 - RNA, 19 nt, Homo sapiens
  misc_RNA (1)...(19): siRNA sense strand
ccacuacucacaagacucu

SEQ ID NO: 1067460 - RNA, 19 nt, Homo sapiens
  misc_RNA (1)...(19): siRNA sense strand
ugcuagagcuuguauccau

SEQ ID NO: 1067461 - RNA, 19 nt, Homo sapiens
  misc_RNA (1)...(19): siRNA sense strand
ccuaugcucgccucauuga

SEQ ID NO: 1067462 - RNA, 19 nt, Homo sapiens
  misc_RNA (1)...(19): siRNA sense strand
uggcagacauggcccacau

SEQ ID NO: 1067463 - RNA, 19 nt, Homo sapiens
  misc_RNA (1)...(19): siRNA sense strand
gacaucgucaccaccacua

SEQ ID NO: 1067464 - RNA, 19 nt, Homo sapiens
  misc_RNA (1)...(19): siRNA sense strand
agaggugguggaugaaauu

SEQ ID NO: 1067465 - RNA, 19 nt, Homo sapiens
  misc_RNA (1)...(19): siRNA sense strand
guacuucucuuuguuuugg

SEQ ID NO: 1067466 - RNA, 19 nt, Homo sapiens
  misc_RNA (1)...(19): siRNA sense strand
ucaugccauugcugcagua

SEQ ID NO: 1067467 - RNA, 19 nt, Homo sapiens
  misc_RNA (1)...(19): siRNA sense strand
gagcucauugccucagaga

SEQ ID NO: 1067468 - RNA, 19 nt, Homo sapiens
  misc_RNA (1)...(19): siRNA sense strand
ggauaucagccacguccau

SEQ ID NO: 1067469 - RNA, 19 nt, Homo sapiens
  misc_RNA (1)...(19): siRNA sense strand
caaguacucggaggguuau

SEQ ID NO: 1067470 - RNA, 19 nt, Homo sapiens
  misc_RNA (1)...(19): siRNA sense strand
caccaccacuacucacaag

SEQ ID NO: 1067471 - RNA, 19 nt, Homo sapiens
  misc_RNA (1)...(19): siRNA sense strand
caaccucacgaccggauca

SEQ ID NO: 1067472 - RNA, 19 nt, Homo sapiens
  misc_RNA (1)...(19): siRNA sense strand
ggagaccgaagugccauca

SEQ ID NO: 1067473 - RNA, 19 nt, Homo sapiens
  misc_RNA (1)...(19): siRNA sense strand
uaucagccacguccaucuu

SEQ ID NO: 1067474 - RNA, 19 nt, Homo sapiens
  misc_RNA (1)...(19): siRNA sense strand
uuguggacuuuauagauga

SEQ ID NO: 1067475 - RNA, 19 nt, Homo sapiens
  misc_RNA (1)...(19): siRNA sense strand
gggaauagcugaguuugug

SEQ ID NO: 1067476 - RNA, 19 nt, Homo sapiens
  misc_RNA (1)...(19): siRNA sense strand
uauggaaacucaucugauu

SEQ ID NO: 1067477 - RNA, 19 nt, Homo sapiens
  misc_RNA (1)...(19): siRNA sense strand
gaagagggccaccaggaaa

SEQ ID NO: 1067478 - RNA, 19 nt, Homo sapiens
  misc_RNA (1)...(19): siRNA sense strand
ggaagagggccaccaggaa

SEQ ID NO: 1067479 - RNA, 19 nt, Homo sapiens
  misc_RNA (1)...(19): siRNA sense strand
cagauaugaugauggaaga

SEQ ID NO: 1067480 - RNA, 19 nt, Homo sapiens
  misc_RNA (1)...(19): siRNA sense strand
cgaagaauggguagaauca

SEQ ID NO: 1067481 - RNA, 19 nt, Homo sapiens
  misc_RNA (1)...(19): siRNA sense strand
aagaagcuauggaaacuca

SEQ ID NO: 1067482 - RNA, 19 nt, Homo sapiens
  misc_RNA (1)...(19): siRNA sense strand
aagaauggguagaaucaau

SEQ ID NO: 1067483 - RNA, 19 nt, Homo sapiens
  misc_RNA (1)...(19): siRNA sense strand
agaagaagcuauggaaacu

SEQ ID NO: 1067484 - RNA, 19 nt, Homo sapiens
  misc_RNA (1)...(19): siRNA sense strand
gcuauggaaacucaucuga

SEQ ID NO: 1067485 - RNA, 19 nt, Homo sapiens
  misc_RNA (1)...(19): siRNA sense strand
gaauggguagaaucaauca

SEQ ID NO: 1067486 - RNA, 19 nt, Homo sapiens
  misc_RNA (1)...(19): siRNA sense strand
aaagaagaagcuauggaaa

SEQ ID NO: 1067487 - RNA, 19 nt, Homo sapiens
  misc_RNA (1)...(19): siRNA sense strand
gaagaauggguagaaucaa

SEQ ID NO: 1067488 - RNA, 19 nt, Homo sapiens
  misc_RNA (1)...(19): siRNA sense strand
uagcugaguuugugguuuu

SEQ ID NO: 1067489 - RNA, 19 nt, Homo sapiens
  misc_RNA (1)...(19): siRNA sense strand
gaagcuauggaaacucauc

SEQ ID NO: 1067490 - RNA, 19 nt, Homo sapiens
  misc_RNA (1)...(19): siRNA sense strand
gauuccagauaugaugaug

SEQ ID NO: 1067491 - RNA, 19 nt, Homo sapiens
  misc_RNA (1)...(19): siRNA sense strand
gcugguggaugaggaaggu

SEQ ID NO: 1067492 - RNA, 19 nt, Homo sapiens
  misc_RNA (1)...(19): siRNA sense strand
aaaagaagaagcuauggaa

SEQ ID NO: 1067493 - RNA, 19 nt, Homo sapiens
  misc_RNA (1)...(19): siRNA sense strand
aagaagaagcuauggaaac

SEQ ID NO: 1067494 - RNA, 19 nt, Homo sapiens
  misc_RNA (1)...(19): siRNA sense strand
ggacagccggagucagucu

SEQ ID NO: 1067495 - RNA, 19 nt, Homo sapiens
  misc_RNA (1)...(19): siRNA sense strand
uaacucagaucucaguaua

SEQ ID NO: 1067496 - RNA, 19 nt, Homo sapiens
  misc_RNA (1)...(19): siRNA sense strand
ggucaaaucucauuacaca

SEQ ID NO: 1067497 - RNA, 19 nt, Homo sapiens
  misc_RNA (1)...(19): siRNA sense strand
gggaagaccuuucgacaga

SEQ ID NO: 1067498 - RNA, 19 nt, Homo sapiens
  misc_RNA (1)...(19): siRNA sense strand
gagagaaaccuuauaaaug

SEQ ID NO: 1067499 - RNA, 19 nt, Homo sapiens
  misc_RNA (1)...(19): siRNA sense strand
agagaaaucuuccauaugu

SEQ ID NO: 1067500 - RNA, 19 nt, Homo sapiens
  misc_RNA (1)...(19): siRNA sense strand
acucagaagucaaaucuua

SEQ ID NO: 1067501 - RNA, 19 nt, Homo sapiens
  misc_RNA (1)...(19): siRNA sense strand
ggucagaguugauuauuca

SEQ ID NO: 1067502 - RNA, 19 nt, Homo sapiens
  misc_RNA (1)...(19): siRNA sense strand
gagagaagccuuaugaaug

SEQ ID NO: 1067503 - RNA, 19 nt, Homo sapiens
  misc_RNA (1)...(19): siRNA sense strand
ggagagaaaccuuauaaau

SEQ ID NO: 1067504 - RNA, 19 nt, Homo sapiens
  misc_RNA (1)...(19): siRNA sense strand
ggagaagccuuaugaaugc

SEQ ID NO: 1067505 - RNA, 19 nt, Homo sapiens
  misc_RNA (1)...(19): siRNA sense strand
gaaagagcuucaccuggaa

SEQ ID NO: 1067506 - RNA, 19 nt, Homo sapiens
  misc_RNA (1)...(19): siRNA sense strand
ggaaaggcuucguucagaa

SEQ ID NO: 1067507 - RNA, 19 nt, Homo sapiens
  misc_RNA (1)...(19): siRNA sense strand
ggaaagccuucaaccagaa

SEQ ID NO: 1067508 - RNA, 19 nt, Homo sapiens
  misc_RNA (1)...(19): siRNA sense strand
gcacaccgaagaauucaua

SEQ ID NO: 1067509 - RNA, 19 nt, Homo sapiens
  misc_RNA (1)...(19): siRNA sense strand
gagagaaaccuuaugaaug

SEQ ID NO: 1067510 - RNA, 19 nt, Homo sapiens
  misc_RNA (1)...(19): siRNA sense strand
ggagagaaacccuauguau

SEQ ID NO: 1067511 - RNA, 19 nt, Homo sapiens
  misc_RNA (1)...(19): siRNA sense strand
gugaagcccuauauaugua

SEQ ID NO: 1067512 - RNA, 19 nt, Homo sapiens
  misc_RNA (1)...(19): siRNA sense strand
gagaaaucuuccauaugua

SEQ ID NO: 1067513 - RNA, 19 nt, Homo sapiens
  misc_RNA (1)...(19): siRNA sense strand
gauuacacaucacagaauu

SEQ ID NO: 1067514 - RNA, 19 nt, Homo sapiens
  misc_RNA (1)...(19): siRNA sense strand
gaauaaacaucagacaaca

SEQ ID NO: 1067515 - RNA, 19 nt, Homo sapiens
  misc_RNA (1)...(19): siRNA sense strand
agagagaaaucuuccauau

SEQ ID NO: 1067516 - RNA, 19 nt, Homo sapiens
  misc_RNA (1)...(19): siRNA sense strand
gggaaaggcuucguucaga

SEQ ID NO: 1067517 - RNA, 19 nt, Homo sapiens
  misc_RNA (1)...(19): siRNA sense strand
caagguacaucugaaaguu

SEQ ID NO: 1067518 - RNA, 19 nt, Homo sapiens
  misc_RNA (1)...(19): siRNA sense strand
gggagaagccuuaugaaug

SEQ ID NO: 1067519 - RNA, 19 nt, Homo sapiens
  misc_RNA (1)...(19): siRNA sense strand
ggagagaaaccuuaugaau

SEQ ID NO: 1067520 - RNA, 19 nt, Homo sapiens
  misc_RNA (1)...(19): siRNA sense strand
ggucaaaucucaguaagca

SEQ ID NO: 1067521 - RNA, 19 nt, Homo sapiens
  misc_RNA (1)...(19): siRNA sense strand
gaaaagcccuacauuuguu

SEQ ID NO: 1067522 - RNA, 19 nt, Homo sapiens
  misc_RNA (1)...(19): siRNA sense strand
ggauguggcuaucgauuuc

SEQ ID NO: 1067523 - RNA, 19 nt, Homo sapiens
  misc_RNA (1)...(19): siRNA sense strand
ggagagaagccuuaugaau

SEQ ID NO: 1067524 - RNA, 19 nt, Homo sapiens
  misc_RNA (1)...(19): siRNA sense strand
gaaaggcuucguucagaaa

SEQ ID NO: 1067525 - RNA, 19 nt, Homo sapiens
  misc_RNA (1)...(19): siRNA sense strand
gggaaggccuuuagcaaca

SEQ ID NO: 1067526 - RNA, 19 nt, Homo sapiens
  misc_RNA (1)...(19): siRNA sense strand
cgacagaagucagaguuga

SEQ ID NO: 1067527 - RNA, 19 nt, Homo sapiens
  misc_RNA (1)...(19): siRNA sense strand
agagaaaccuuaugaaugc

SEQ ID NO: 1067528 - RNA, 19 nt, Homo sapiens
  misc_RNA (1)...(19): siRNA sense strand
acacaucacagaauucaua

SEQ ID NO: 1067529 - RNA, 19 nt, Homo sapiens
  misc_RNA (1)...(19): siRNA sense strand
ggagagagacaguaugaau

SEQ ID NO: 1067530 - RNA, 19 nt, Homo sapiens
  misc_RNA (1)...(19): siRNA sense strand
ggagagccuucacucagaa

SEQ ID NO: 1067531 - RNA, 19 nt, Homo sapiens
  misc_RNA (1)...(19): siRNA sense strand
gcaaagcguucacacaaaa

SEQ ID NO: 1067532 - RNA, 19 nt, Homo sapiens
  misc_RNA (1)...(19): siRNA sense strand
gagaaaagcccuacauuug

SEQ ID NO: 1067533 - RNA, 19 nt, Homo sapiens
  misc_RNA (1)...(19): siRNA sense strand
ggagagaaacccuaugugu

SEQ ID NO: 1067534 - RNA, 19 nt, Homo sapiens
  misc_RNA (1)...(19): siRNA sense strand
gagagaaacccuauguaug

SEQ ID NO: 1067535 - RNA, 19 nt, Homo sapiens
  misc_RNA (1)...(19): siRNA sense strand
gggagagccuucacucaga

SEQ ID NO: 1067536 - RNA, 19 nt, Homo sapiens
  misc_RNA (1)...(19): siRNA sense strand
gaagucacaguucaaggua

SEQ ID NO: 1067537 - RNA, 19 nt, Homo sapiens
  misc_RNA (1)...(19): siRNA sense strand
ggcaaagcguucacacaaa

SEQ ID NO: 1067538 - RNA, 19 nt, Homo sapiens
  misc_RNA (1)...(19): siRNA sense strand
uaaaccagcuuccucucaa

SEQ ID NO: 1067539 - RNA, 19 nt, Homo sapiens
  misc_RNA (1)...(19): siRNA sense strand
ggucagacuugauuacaca

SEQ ID NO: 1067540 - RNA, 19 nt, Homo sapiens
  misc_RNA (1)...(19): siRNA sense strand
ggagagagacaccaugaau

SEQ ID NO: 1067541 - RNA, 19 nt, Homo sapiens
  misc_RNA (1)...(19): siRNA sense strand
gagugaagcccuauauaug

SEQ ID NO: 1067542 - RNA, 19 nt, Homo sapiens
  misc_RNA (1)...(19): siRNA sense strand
caacagguccaauuugaau

SEQ ID NO: 1067543 - RNA, 19 nt, Homo sapiens
  misc_RNA (1)...(19): siRNA sense strand
ggaaguccuuuaccuccaa

SEQ ID NO: 1067544 - RNA, 19 nt, Homo sapiens
  misc_RNA (1)...(19): siRNA sense strand
ggaccauaaucaacauaga

SEQ ID NO: 1067545 - RNA, 19 nt, Homo sapiens
  misc_RNA (1)...(19): siRNA sense strand
ggagagaaaccuuaugagu

SEQ ID NO: 1067546 - RNA, 19 nt, Homo sapiens
  misc_RNA (1)...(19): siRNA sense strand
caugagaagauucaaagua

SEQ ID NO: 1067547 - RNA, 19 nt, Homo sapiens
  misc_RNA (1)...(19): siRNA sense strand
agaaaucaguguucagugu

SEQ ID NO: 1067548 - RNA, 19 nt, Homo sapiens
  misc_RNA (1)...(19): siRNA sense strand
ccagaaaucaauacucauu

SEQ ID NO: 1067549 - RNA, 19 nt, Homo sapiens
  misc_RNA (1)...(19): siRNA sense strand
gagaauucauacaggagaa

SEQ ID NO: 1067550 - RNA, 19 nt, Homo sapiens
  misc_RNA (1)...(19): siRNA sense strand
gggaaggccuuuaccuaca

SEQ ID NO: 1067551 - RNA, 19 nt, Homo sapiens
  misc_RNA (1)...(19): siRNA sense strand
gagacaaacccuacaagug

SEQ ID NO: 1067552 - RNA, 19 nt, Homo sapiens
  misc_RNA (1)...(19): siRNA sense strand
agacaaacccuacaagugu

SEQ ID NO: 1067553 - RNA, 19 nt, Homo sapiens
  misc_RNA (1)...(19): siRNA sense strand
cuaugagugugcugaauuu

SEQ ID NO: 1067554 - RNA, 19 nt, Homo sapiens
  misc_RNA (1)...(19): siRNA sense strand
gcaggucaaaucucaguaa

SEQ ID NO: 1067555 - RNA, 19 nt, Homo sapiens
  misc_RNA (1)...(19): siRNA sense strand
gagaaaccuuauaaaugug

SEQ ID NO: 1067556 - RNA, 19 nt, Homo sapiens
  misc_RNA (1)...(19): siRNA sense strand
gaauucaucacacaucaga

SEQ ID NO: 1067557 - RNA, 19 nt, Homo sapiens
  misc_RNA (1)...(19): siRNA sense strand
gaaaucaguguucaguguu

SEQ ID NO: 1067558 - RNA, 19 nt, Homo sapiens
  misc_RNA (1)...(19): siRNA sense strand
gguccaauuugaauaaaca

SEQ ID NO: 1067559 - RNA, 19 nt, Homo sapiens
  misc_RNA (1)...(19): siRNA sense strand
agagaagccuuacgugugu

SEQ ID NO: 1067560 - RNA, 19 nt, Homo sapiens
  misc_RNA (1)...(19): siRNA sense strand
gaucauggcagcuccuaug

SEQ ID NO: 1067561 - RNA, 19 nt, Homo sapiens
  misc_RNA (1)...(19): siRNA sense strand
uuucaaguaucgucucuuu

SEQ ID NO: 1067562 - RNA, 19 nt, Homo sapiens
  misc_RNA (1)...(19): siRNA sense strand
cuacaaguguggcaucugu

SEQ ID NO: 1067563 - RNA, 19 nt, Homo sapiens
  misc_RNA (1)...(19): siRNA sense strand
gaagaccuuucgacagaag

SEQ ID NO: 1067564 - RNA, 19 nt, Homo sapiens
  misc_RNA (1)...(19): siRNA sense strand
caaaucucauuacacauca

SEQ ID NO: 1067565 - RNA, 19 nt, Homo sapiens
  misc_RNA (1)...(19): siRNA sense strand
gauucaaaguagagagaaa

SEQ ID NO: 1067566 - RNA, 19 nt, Homo sapiens
  misc_RNA (1)...(19): siRNA sense strand
ggaagaccuuucgacagaa

SEQ ID NO: 1067567 - RNA, 19 nt, Homo sapiens
  misc_RNA (1)...(19): siRNA sense strand
aaccagaaaucaauacuca

SEQ ID NO: 1067568 - RNA, 19 nt, Homo sapiens
  misc_RNA (1)...(19): siRNA sense strand
gagagaaaucuuccauaug

SEQ ID NO: 1067569 - RNA, 19 nt, Homo sapiens
  misc_RNA (1)...(19): siRNA sense strand
ccaagugcaucagcgaauu

SEQ ID NO: 1067570 - RNA, 19 nt, Homo sapiens
  misc_RNA (1)...(19): siRNA sense strand
ugggaagucuuucacuaaa

SEQ ID NO: 1067571 - RNA, 19 nt, Homo sapiens
  misc_RNA (1)...(19): siRNA sense strand
ggagaaaagcccuacauuu

SEQ ID NO: 1067572 - RNA, 19 nt, Homo sapiens
  misc_RNA (1)...(19): siRNA sense strand
acaacuccauguucauaaa

SEQ ID NO: 1067573 - RNA, 19 nt, Homo sapiens
  misc_RNA (1)...(19): siRNA sense strand
ucacaacuccauguucaua

SEQ ID NO: 1067574 - RNA, 19 nt, Homo sapiens
  misc_RNA (1)...(19): siRNA sense strand
gaccauaaucaacauagaa

SEQ ID NO: 1067575 - RNA, 19 nt, Homo sapiens
  misc_RNA (1)...(19): siRNA sense strand
agagaagccuuaugaaugc

SEQ ID NO: 1067576 - RNA, 19 nt, Homo sapiens
  misc_RNA (1)...(19): siRNA sense strand
caucaaagaauucauacug

SEQ ID NO: 1067577 - RNA, 19 nt, Homo sapiens
  misc_RNA (1)...(19): siRNA sense strand
gagagagacaguaugaaug

SEQ ID NO: 1067578 - RNA, 19 nt, Homo sapiens
  misc_RNA (1)...(19): siRNA sense strand
caaaguagagagaaaucuu

SEQ ID NO: 1067579 - RNA, 19 nt, Homo sapiens
  misc_RNA (1)...(19): siRNA sense strand
ucagguacaucaacguguu

SEQ ID NO: 1067580 - RNA, 19 nt, Homo sapiens
  misc_RNA (1)...(19): siRNA sense strand
cagaauucaucacacauca

SEQ ID NO: 1067581 - RNA, 19 nt, Homo sapiens
  misc_RNA (1)...(19): siRNA sense strand
ugagugugcugaauuugga

SEQ ID NO: 1067582 - RNA, 19 nt, Homo sapiens
  misc_RNA (1)...(19): siRNA sense strand
gagaaaagcccuauguaug

SEQ ID NO: 1067583 - RNA, 19 nt, Homo sapiens
  misc_RNA (1)...(19): siRNA sense strand
guacagaagccagaauuca

SEQ ID NO: 1067584 - RNA, 19 nt, Homo sapiens
  misc_RNA (1)...(19): siRNA sense strand
caagagugaagcccuauau

SEQ ID NO: 1067585 - RNA, 19 nt, Homo sapiens
  misc_RNA (1)...(19): siRNA sense strand
gcaacagguccaauuugaa

SEQ ID NO: 1067586 - RNA, 19 nt, Homo sapiens
  misc_RNA (1)...(19): siRNA sense strand
agagaaacccuaugugugu

SEQ ID NO: 1067587 - RNA, 19 nt, Homo sapiens
  misc_RNA (1)...(19): siRNA sense strand
ccagaggucagacuugauu

SEQ ID NO: 1067588 - RNA, 19 nt, Homo sapiens
  misc_RNA (1)...(19): siRNA sense strand
caggagagaaaucuuauau

SEQ ID NO: 1067589 - RNA, 19 nt, Homo sapiens
  misc_RNA (1)...(19): siRNA sense strand
auacaggagagaaaucuua

SEQ ID NO: 1067590 - RNA, 19 nt, Homo sapiens
  misc_RNA (1)...(19): siRNA sense strand
gugcaucagagaauucaua

SEQ ID NO: 1067591 - RNA, 19 nt, Homo sapiens
  misc_RNA (1)...(19): siRNA sense strand
gggauguggcuaucgauuu

SEQ ID NO: 1067592 - RNA, 19 nt, Homo sapiens
  misc_RNA (1)...(19): siRNA sense strand
guucagaaaucaguguuca

SEQ ID NO: 1067593 - RNA, 19 nt, Homo sapiens
  misc_RNA (1)...(19): siRNA sense strand
gagaaacccuauguaugca

SEQ ID NO: 1067594 - RNA, 19 nt, Homo sapiens
  misc_RNA (1)...(19): siRNA sense strand
uuauaaauguggucacugu

SEQ ID NO: 1067595 - RNA, 19 nt, Homo sapiens
  misc_RNA (1)...(19): siRNA sense strand
ggacuuggaucugagcuaa

SEQ ID NO: 1067596 - RNA, 19 nt, Homo sapiens
  misc_RNA (1)...(19): siRNA sense strand
ugaugagacuauuggauuu

SEQ ID NO: 1067597 - RNA, 19 nt, Homo sapiens
  misc_RNA (1)...(19): siRNA sense strand
cuuucaagcucaaaucuuu

SEQ ID NO: 1067598 - RNA, 19 nt, Homo sapiens
  misc_RNA (1)...(19): siRNA sense strand
ggauuugaggauauucuua

SEQ ID NO: 1067599 - RNA, 19 nt, Homo sapiens
  misc_RNA (1)...(19): siRNA sense strand
aaacauucagggucuauuu

SEQ ID NO: 1067600 - RNA, 19 nt, Homo sapiens
  misc_RNA (1)...(19): siRNA sense strand
ugaaagucaugaucuucuu

SEQ ID NO: 1067601 - RNA, 19 nt, Homo sapiens
  misc_RNA (1)...(19): siRNA sense strand
gagaaacauucagggucua

SEQ ID NO: 1067602 - RNA, 19 nt, Homo sapiens
  misc_RNA (1)...(19): siRNA sense strand
gaggauauucuuaaugauc

SEQ ID NO: 1067603 - RNA, 19 nt, Homo sapiens
  misc_RNA (1)...(19): siRNA sense strand
gagcuaaaggacaguauuc

SEQ ID NO: 1067604 - RNA, 19 nt, Homo sapiens
  misc_RNA (1)...(19): siRNA sense strand
cacacuugaugguggaaua

SEQ ID NO: 1067605 - RNA, 19 nt, Homo sapiens
  misc_RNA (1)...(19): siRNA sense strand
gaugguggaauauaaacuu

SEQ ID NO: 1067606 - RNA, 19 nt, Homo sapiens
  misc_RNA (1)...(19): siRNA sense strand
gcaaguggaccuuuugaaa

SEQ ID NO: 1067607 - RNA, 19 nt, Homo sapiens
  misc_RNA (1)...(19): siRNA sense strand
acuauuggauuugaggaua

SEQ ID NO: 1067608 - RNA, 19 nt, Homo sapiens
  misc_RNA (1)...(19): siRNA sense strand
aaaggacaguauuccaguu

SEQ ID NO: 1067609 - RNA, 19 nt, Homo sapiens
  misc_RNA (1)...(19): siRNA sense strand
gaaagucaugaucuucuuc

SEQ ID NO: 1067610 - RNA, 19 nt, Homo sapiens
  misc_RNA (1)...(19): siRNA sense strand
gguucagcgucuuccauuu

SEQ ID NO: 1067611 - RNA, 19 nt, Homo sapiens
  misc_RNA (1)...(19): siRNA sense strand
guaaugaugagacuauugg

SEQ ID NO: 1067612 - RNA, 19 nt, Homo sapiens
  misc_RNA (1)...(19): siRNA sense strand
cgucuuccauuucuuucaa

SEQ ID NO: 1067613 - RNA, 19 nt, Homo sapiens
  misc_RNA (1)...(19): siRNA sense strand
gaucuucuucggaaagguu

SEQ ID NO: 1067614 - RNA, 19 nt, Homo sapiens
  misc_RNA (1)...(19): siRNA sense strand
aaggacaguauuccaguua

SEQ ID NO: 1067615 - RNA, 19 nt, Homo sapiens
  misc_RNA (1)...(19): siRNA sense strand
cagcgucuuccauuucuuu

SEQ ID NO: 1067616 - RNA, 19 nt, Homo sapiens
  misc_RNA (1)...(19): siRNA sense strand
gguggaauauaaacuuggu

SEQ ID NO: 1067617 - RNA, 19 nt, Homo sapiens
  misc_RNA (1)...(19): siRNA sense strand
gguaaugaugagacuauug

SEQ ID NO: 1067618 - RNA, 19 nt, Homo sapiens
  misc_RNA (1)...(19): siRNA sense strand
acuugaugguggaauauaa

SEQ ID NO: 1067619 - RNA, 19 nt, Homo sapiens
  misc_RNA (1)...(19): siRNA sense strand
gaugagacuauuggauuug

SEQ ID NO: 1067620 - RNA, 19 nt, Homo sapiens
  misc_RNA (1)...(19): siRNA sense strand
gaaacauucagggucuauu

SEQ ID NO: 1067621 - RNA, 19 nt, Homo sapiens
  misc_RNA (1)...(19): siRNA sense strand
caugggagagccacacuug

SEQ ID NO: 1067622 - RNA, 19 nt, Homo sapiens
  misc_RNA (1)...(19): siRNA sense strand
ggguaaugaugagacuauu

SEQ ID NO: 1067623 - RNA, 19 nt, Homo sapiens
  misc_RNA (1)...(19): siRNA sense strand
guucagcgucuuccauuuc

SEQ ID NO: 1067624 - RNA, 19 nt, Homo sapiens
  misc_RNA (1)...(19): siRNA sense strand
gggagagccacacuugaug

SEQ ID NO: 1067625 - RNA, 19 nt, Homo sapiens
  misc_RNA (1)...(19): siRNA sense strand
cuauuggauuugaggauau

SEQ ID NO: 1067626 - RNA, 19 nt, Homo sapiens
  misc_RNA (1)...(19): siRNA sense strand
ccagcucaaccaagauaaa

SEQ ID NO: 1067627 - RNA, 19 nt, Homo sapiens
  misc_RNA (1)...(19): siRNA sense strand
augaugagacuauuggauu

SEQ ID NO: 1067628 - RNA, 19 nt, Homo sapiens
  misc_RNA (1)...(19): siRNA sense strand
ccauuucuuucaagcucaa

SEQ ID NO: 1067629 - RNA, 19 nt, Homo sapiens
  misc_RNA (1)...(19): siRNA sense strand
gcuaaaggacaguauucca

SEQ ID NO: 1067630 - RNA, 19 nt, Homo sapiens
  misc_RNA (1)...(19): siRNA sense strand
gcaagucgaugucguaaua

SEQ ID NO: 1067631 - RNA, 19 nt, Homo sapiens
  misc_RNA (1)...(19): siRNA sense strand
gcacuuggaucgcaugaaa

SEQ ID NO: 1067632 - RNA, 19 nt, Homo sapiens
  misc_RNA (1)...(19): siRNA sense strand
uuacagagcugacagauga

SEQ ID NO: 1067633 - RNA, 19 nt, Homo sapiens
  misc_RNA (1)...(19): siRNA sense strand
gaacgucaaugauucuguu

SEQ ID NO: 1067634 - RNA, 19 nt, Homo sapiens
  misc_RNA (1)...(19): siRNA sense strand
gaaaauggaugaauacguu

SEQ ID NO: 1067635 - RNA, 19 nt, Homo sapiens
  misc_RNA (1)...(19): siRNA sense strand
guaauaacuugcacaggaa

SEQ ID NO: 1067636 - RNA, 19 nt, Homo sapiens
  misc_RNA (1)...(19): siRNA sense strand
agacagcgguguugauuga

SEQ ID NO: 1067637 - RNA, 19 nt, Homo sapiens
  misc_RNA (1)...(19): siRNA sense strand
guacuugcuuccuaagaaa

SEQ ID NO: 1067638 - RNA, 19 nt, Homo sapiens
  misc_RNA (1)...(19): siRNA sense strand
gcacaggaaauaagaaugu

SEQ ID NO: 1067639 - RNA, 19 nt, Homo sapiens
  misc_RNA (1)...(19): siRNA sense strand
gauguguacuugcuuccua

SEQ ID NO: 1067640 - RNA, 19 nt, Homo sapiens
  misc_RNA (1)...(19): siRNA sense strand
gagagaagcagcaaaccaa

SEQ ID NO: 1067641 - RNA, 19 nt, Homo sapiens
  misc_RNA (1)...(19): siRNA sense strand
ggagcaauugucuacauua

SEQ ID NO: 1067642 - RNA, 19 nt, Homo sapiens
  misc_RNA (1)...(19): siRNA sense strand
gcccuuggcuggugcuaaa

SEQ ID NO: 1067643 - RNA, 19 nt, Homo sapiens
  misc_RNA (1)...(19): siRNA sense strand
ccaguuugcugaugacaug

SEQ ID NO: 1067644 - RNA, 19 nt, Homo sapiens
  misc_RNA (1)...(19): siRNA sense strand
caaugauucuguuaccaaa

SEQ ID NO: 1067645 - RNA, 19 nt, Homo sapiens
  misc_RNA (1)...(19): siRNA sense strand
gaugacuucugguggugua

SEQ ID NO: 1067646 - RNA, 19 nt, Homo sapiens
  misc_RNA (1)...(19): siRNA sense strand
ggaaauaagaauguaguga

SEQ ID NO: 1067647 - RNA, 19 nt, Homo sapiens
  misc_RNA (1)...(19): siRNA sense strand
gagcaauugucuacauuac

SEQ ID NO: 1067648 - RNA, 19 nt, Homo sapiens
  misc_RNA (1)...(19): siRNA sense strand
gcuugcaucugccaucauu

SEQ ID NO: 1067649 - RNA, 19 nt, Homo sapiens
  misc_RNA (1)...(19): siRNA sense strand
ccaagaagcaaauccaguu

SEQ ID NO: 1067650 - RNA, 19 nt, Homo sapiens
  misc_RNA (1)...(19): siRNA sense strand
gcugacagaugaccaagca

SEQ ID NO: 1067651 - RNA, 19 nt, Homo sapiens
  misc_RNA (1)...(19): siRNA sense strand
ccaugaacgucaaugauuc

SEQ ID NO: 1067652 - RNA, 19 nt, Homo sapiens
  misc_RNA (1)...(19): siRNA sense strand
caucaagcaggcagaauuu

SEQ ID NO: 1067653 - RNA, 19 nt, Homo sapiens
  misc_RNA (1)...(19): siRNA sense strand
ccacuggguuuauaagaag

SEQ ID NO: 1067654 - RNA, 19 nt, Homo sapiens
  misc_RNA (1)...(19): siRNA sense strand
cuacucaacucagaaugaa

SEQ ID NO: 1067655 - RNA, 19 nt, Homo sapiens
  misc_RNA (1)...(19): siRNA sense strand
gaacaucaagcaggcagaa

SEQ ID NO: 1067656 - RNA, 19 nt, Homo sapiens
  misc_RNA (1)...(19): siRNA sense strand
ugcaggaguucaccaaauu

SEQ ID NO: 1067657 - RNA, 19 nt, Homo sapiens
  misc_RNA (1)...(19): siRNA sense strand
gccaugaacgucaaugauu

SEQ ID NO: 1067658 - RNA, 19 nt, Homo sapiens
  misc_RNA (1)...(19): siRNA sense strand
gaagggcgagucagaagau

SEQ ID NO: 1067659 - RNA, 19 nt, Homo sapiens
  misc_RNA (1)...(19): siRNA sense strand
guucucagguggaccaugu

SEQ ID NO: 1067660 - RNA, 19 nt, Homo sapiens
  misc_RNA (1)...(19): siRNA sense strand
caagaagcaaauccaguuu

SEQ ID NO: 1067661 - RNA, 19 nt, Homo sapiens
  misc_RNA (1)...(19): siRNA sense strand
gcagagggucgucuacuca

SEQ ID NO: 1067662 - RNA, 19 nt, Homo sapiens
  misc_RNA (1)...(19): siRNA sense strand
uaacuugcacaggaaauaa

SEQ ID NO: 1067663 - RNA, 19 nt, Homo sapiens
  misc_RNA (1)...(19): siRNA sense strand
ugacagaugaccaagcaaa

SEQ ID NO: 1067664 - RNA, 19 nt, Homo sapiens
  misc_RNA (1)...(19): siRNA sense strand
ccagauggcaaacgaguug

SEQ ID NO: 1067665 - RNA, 19 nt, Homo sapiens
  misc_RNA (1)...(19): siRNA sense strand
caaaauaucugggacucaa

SEQ ID NO: 1067666 - RNA, 19 nt, Homo sapiens
  misc_RNA (1)...(19): siRNA sense strand
uguacuugcuuccuaagaa

SEQ ID NO: 1067667 - RNA, 19 nt, Homo sapiens
  misc_RNA (1)...(19): siRNA sense strand
gcugcauccuacacagaua

SEQ ID NO: 1067668 - RNA, 19 nt, Homo sapiens
  misc_RNA (1)...(19): siRNA sense strand
cacaggaaauaagaaugua

SEQ ID NO: 1067669 - RNA, 19 nt, Homo sapiens
  misc_RNA (1)...(19): siRNA sense strand
gaagauccgaggcauugug

SEQ ID NO: 1067670 - RNA, 19 nt, Homo sapiens
  misc_RNA (1)...(19): siRNA sense strand
ugguaaagcuaaaugaagu

SEQ ID NO: 1067671 - RNA, 19 nt, Homo sapiens
  misc_RNA (1)...(19): siRNA sense strand
gagggucgucuacucaauu

SEQ ID NO: 1067672 - RNA, 19 nt, Homo sapiens
  misc_RNA (1)...(19): siRNA sense strand
gauccgaggcauuguggaa

SEQ ID NO: 1067673 - RNA, 19 nt, Homo sapiens
  misc_RNA (1)...(19): siRNA sense strand
cugcugugcugcucucaaa

SEQ ID NO: 1067674 - RNA, 19 nt, Homo sapiens
  misc_RNA (1)...(19): siRNA sense strand
ccagacagcgguguugauu

SEQ ID NO: 1067675 - RNA, 19 nt, Homo sapiens
  misc_RNA (1)...(19): siRNA sense strand
ggaagggcgagucagaaga

SEQ ID NO: 1067676 - RNA, 19 nt, Homo sapiens
  misc_RNA (1)...(19): siRNA sense strand
gcagcaauuucugugugaa

SEQ ID NO: 1067677 - RNA, 19 nt, Homo sapiens
  misc_RNA (1)...(19): siRNA sense strand
ggccauucaaaccuaauua

SEQ ID NO: 1067678 - RNA, 19 nt, Homo sapiens
  misc_RNA (1)...(19): siRNA sense strand
ccacaguucccaccuuugu

SEQ ID NO: 1067679 - RNA, 19 nt, Homo sapiens
  misc_RNA (1)...(19): siRNA sense strand
aaauccaguuugcugauga

SEQ ID NO: 1067680 - RNA, 19 nt, Homo sapiens
  misc_RNA (1)...(19): siRNA sense strand
uauaagaaguauccaaacg

SEQ ID NO: 1067681 - RNA, 19 nt, Homo sapiens
  misc_RNA (1)...(19): siRNA sense strand
cugaugacaugcaggaguu

SEQ ID NO: 1067682 - RNA, 19 nt, Homo sapiens
  misc_RNA (1)...(19): siRNA sense strand
auagugggcuguacacaca

SEQ ID NO: 1067683 - RNA, 19 nt, Homo sapiens
  misc_RNA (1)...(19): siRNA sense strand
ugaagaggaccacagaugu

SEQ ID NO: 1067684 - RNA, 19 nt, Homo sapiens
  misc_RNA (1)...(19): siRNA sense strand
aagaagauccgaggcauug

SEQ ID NO: 1067685 - RNA, 19 nt, Homo sapiens
  misc_RNA (1)...(19): siRNA sense strand
gaaacaagugguggugugu

SEQ ID NO: 1067686 - RNA, 19 nt, Homo sapiens
  misc_RNA (1)...(19): siRNA sense strand
acaguuguaucguaugcaa

SEQ ID NO: 1067687 - RNA, 19 nt, Homo sapiens
  misc_RNA (1)...(19): siRNA sense strand
agaaguauccaaacguguu

SEQ ID NO: 1067688 - RNA, 19 nt, Homo sapiens
  misc_RNA (1)...(19): siRNA sense strand
ggugguaaagcuaaaugaa

SEQ ID NO: 1067689 - RNA, 19 nt, Homo sapiens
  misc_RNA (1)...(19): siRNA sense strand
uggagcaauugucuacauu

SEQ ID NO: 1067690 - RNA, 19 nt, Homo sapiens
  misc_RNA (1)...(19): siRNA sense strand
ucaaugauucuguuaccaa

SEQ ID NO: 1067691 - RNA, 19 nt, Homo sapiens
  misc_RNA (1)...(19): siRNA sense strand
uguaucagcucuccaaagc

SEQ ID NO: 1067692 - RNA, 19 nt, Homo sapiens
  misc_RNA (1)...(19): siRNA sense strand
gacuucuggugguguauug

SEQ ID NO: 1067693 - RNA, 19 nt, Homo sapiens
  misc_RNA (1)...(19): siRNA sense strand
acacaggcuuuggcacuga

SEQ ID NO: 1067694 - RNA, 19 nt, Homo sapiens
  misc_RNA (1)...(19): siRNA sense strand
caccaaaacuggccgaaga

SEQ ID NO: 1067695 - RNA, 19 nt, Homo sapiens
  misc_RNA (1)...(19): siRNA sense strand
aaacaguuguaucguaugc

SEQ ID NO: 1067696 - RNA, 19 nt, Homo sapiens
  misc_RNA (1)...(19): siRNA sense strand
ucgaggacgccgagaagua

SEQ ID NO: 1067697 - RNA, 19 nt, Homo sapiens
  misc_RNA (1)...(19): siRNA sense strand
caagcaggcagaauuugga

SEQ ID NO: 1067698 - RNA, 19 nt, Homo sapiens
  misc_RNA (1)...(19): siRNA sense strand
gcaauaugggccacuccaa

SEQ ID NO: 1067699 - RNA, 19 nt, Homo sapiens
  misc_RNA (1)...(19): siRNA sense strand
guguggcuauggugaggua

SEQ ID NO: 1067700 - RNA, 19 nt, Homo sapiens
  misc_RNA (1)...(19): siRNA sense strand
uaagaagauccgaggcauu

SEQ ID NO: 1067701 - RNA, 19 nt, Homo sapiens
  misc_RNA (1)...(19): siRNA sense strand
uguaacaucuacucaacuc

SEQ ID NO: 1067702 - RNA, 19 nt, Homo sapiens
  misc_RNA (1)...(19): siRNA sense strand
gaucgaggacgccgagaag

SEQ ID NO: 1067703 - RNA, 19 nt, Homo sapiens
  misc_RNA (1)...(19): siRNA sense strand
ccaagggcagcagcaauuu

SEQ ID NO: 1067704 - RNA, 19 nt, Homo sapiens
  misc_RNA (1)...(19): siRNA sense strand
gcaggaguucaccaaauuc

SEQ ID NO: 1067705 - RNA, 19 nt, Homo sapiens
  misc_RNA (1)...(19): siRNA sense strand
ucagggugguaaagcuaaa

SEQ ID NO: 1067706 - RNA, 19 nt, Homo sapiens
  misc_RNA (1)...(19): siRNA sense strand
uguauugaccgcuguguga

SEQ ID NO: 1067707 - RNA, 19 nt, Homo sapiens
  misc_RNA (1)...(19): siRNA sense strand
gccgggagauugagauugc

SEQ ID NO: 1067708 - RNA, 19 nt, Homo sapiens
  misc_RNA (1)...(19): siRNA sense strand
agauagcucugaugaugag

SEQ ID NO: 1067709 - RNA, 19 nt, Homo sapiens
  misc_RNA (1)...(19): siRNA sense strand
gcuccacaguucccaccuu

SEQ ID NO: 1067710 - RNA, 19 nt, Homo sapiens
  misc_RNA (1)...(19): siRNA sense strand
agggucgucuacucaauuu

SEQ ID NO: 1067711 - RNA, 19 nt, Homo sapiens
  misc_RNA (1)...(19): siRNA sense strand
gcugggaagcucuguguuc

SEQ ID NO: 1067712 - RNA, 19 nt, Homo sapiens
  misc_RNA (1)...(19): siRNA sense strand
uagcucugaugaugagguu

SEQ ID NO: 1067713 - RNA, 19 nt, Homo sapiens
  misc_RNA (1)...(19): siRNA sense strand
cuccacaguucccaccuuu

SEQ ID NO: 1067714 - RNA, 19 nt, Homo sapiens
  misc_RNA (1)...(19): siRNA sense strand
ggcagagggucgucuacuc

SEQ ID NO: 1067715 - RNA, 19 nt, Homo sapiens
  misc_RNA (1)...(19): siRNA sense strand
ggcuggaguugcaguguuc

SEQ ID NO: 1067716 - RNA, 19 nt, Homo sapiens
  misc_RNA (1)...(19): siRNA sense strand
augaauacguugccagcuu

SEQ ID NO: 1067717 - RNA, 19 nt, Homo sapiens
  misc_RNA (1)...(19): siRNA sense strand
cagaugaccaagcaaaaua

SEQ ID NO: 1067718 - RNA, 19 nt, Homo sapiens
  misc_RNA (1)...(19): siRNA sense strand
gcucugaugaugagguuuc

SEQ ID NO: 1067719 - RNA, 19 nt, Homo sapiens
  misc_RNA (1)...(19): siRNA sense strand
cagcuugcaucugccauca

SEQ ID NO: 1067720 - RNA, 19 nt, Homo sapiens
  misc_RNA (1)...(19): siRNA sense strand
aaacuggccgaagaucuuu

SEQ ID NO: 1067721 - RNA, 19 nt, Homo sapiens
  misc_RNA (1)...(19): siRNA sense strand
aguuguaucguaugcaaua

SEQ ID NO: 1067722 - RNA, 19 nt, Homo sapiens
  misc_RNA (1)...(19): siRNA sense strand
guucagggugguaaagcua

SEQ ID NO: 1067723 - RNA, 19 nt, Homo sapiens
  misc_RNA (1)...(19): siRNA sense strand
gggcagcagcaauuucugu

SEQ ID NO: 1067724 - RNA, 19 nt, Homo sapiens
  misc_RNA (1)...(19): siRNA sense strand
gccauucaaaccuaauuau

SEQ ID NO: 1067725 - RNA, 19 nt, Homo sapiens
  misc_RNA (1)...(19): siRNA sense strand
acaagcaggauguguacuu

SEQ ID NO: 1067726 - RNA, 19 nt, Homo sapiens
  misc_RNA (1)...(19): siRNA sense strand
guucccaccuuuguucugu

SEQ ID NO: 1067727 - RNA, 19 nt, Homo sapiens
  misc_RNA (1)...(19): siRNA sense strand
ugaagcaggccaaggagau

SEQ ID NO: 1067728 - RNA, 19 nt, Homo sapiens
  misc_RNA (1)...(19): siRNA sense strand
ugugauguuuggugggaaa

SEQ ID NO: 1067729 - RNA, 19 nt, Homo sapiens
  misc_RNA (1)...(19): siRNA sense strand
acagcgguguugauugaga

SEQ ID NO: 1067730 - RNA, 19 nt, Homo sapiens
  misc_RNA (1)...(19): siRNA sense strand
gaagaaaucucucuguuaa

SEQ ID NO: 1067731 - RNA, 19 nt, Homo sapiens
  misc_RNA (1)...(19): siRNA sense strand
gcaaagaugugaagaauug

SEQ ID NO: 1067732 - RNA, 19 nt, Homo sapiens
  misc_RNA (1)...(19): siRNA sense strand
gaagaaagaugaagauaug

SEQ ID NO: 1067733 - RNA, 19 nt, Homo sapiens
  misc_RNA (1)...(19): siRNA sense strand
gcaaagagcguauuagaga

SEQ ID NO: 1067734 - RNA, 19 nt, Homo sapiens
  misc_RNA (1)...(19): siRNA sense strand
ggagaaagccagaaaugua

SEQ ID NO: 1067735 - RNA, 19 nt, Homo sapiens
  misc_RNA (1)...(19): siRNA sense strand
ugaaugaacuggaaacuga

SEQ ID NO: 1067736 - RNA, 19 nt, Homo sapiens
  misc_RNA (1)...(19): siRNA sense strand
ccagaaaucuuuacaggaa

SEQ ID NO: 1067737 - RNA, 19 nt, Homo sapiens
  misc_RNA (1)...(19): siRNA sense strand
caagagcccugaaagauga

SEQ ID NO: 1067738 - RNA, 19 nt, Homo sapiens
  misc_RNA (1)...(19): siRNA sense strand
gcauaggaaugaugaauug

SEQ ID NO: 1067739 - RNA, 19 nt, Homo sapiens
  misc_RNA (1)...(19): siRNA sense strand
gaaagcaguuggcagagaa

SEQ ID NO: 1067740 - RNA, 19 nt, Homo sapiens
  misc_RNA (1)...(19): siRNA sense strand
gcacuuaucccugauuuaa

SEQ ID NO: 1067741 - RNA, 19 nt, Homo sapiens
  misc_RNA (1)...(19): siRNA sense strand
ucacagagguccaugaaga

SEQ ID NO: 1067742 - RNA, 19 nt, Homo sapiens
  misc_RNA (1)...(19): siRNA sense strand
cagcuuagaagaagaauua

SEQ ID NO: 1067743 - RNA, 19 nt, Homo sapiens
  misc_RNA (1)...(19): siRNA sense strand
gaagaaacaagaacucauu

SEQ ID NO: 1067744 - RNA, 19 nt, Homo sapiens
  misc_RNA (1)...(19): siRNA sense strand
ugacuacacuucaagauga

SEQ ID NO: 1067745 - RNA, 19 nt, Homo sapiens
  misc_RNA (1)...(19): siRNA sense strand
caaauaaacuggagucaac

SEQ ID NO: 1067746 - RNA, 19 nt, Homo sapiens
  misc_RNA (1)...(19): siRNA sense strand
gaaaagaauucacugguuu

SEQ ID NO: 1067747 - RNA, 19 nt, Homo sapiens
  misc_RNA (1)...(19): siRNA sense strand
gaaaguuccagcaaauuaa

SEQ ID NO: 1067748 - RNA, 19 nt, Homo sapiens
  misc_RNA (1)...(19): siRNA sense strand
gagaaagccagaaauguaa

SEQ ID NO: 1067749 - RNA, 19 nt, Homo sapiens
  misc_RNA (1)...(19): siRNA sense strand
agagguccaugaagaauua

SEQ ID NO: 1067750 - RNA, 19 nt, Homo sapiens
  misc_RNA (1)...(19): siRNA sense strand
caaguuaaauccagcauca

SEQ ID NO: 1067751 - RNA, 19 nt, Homo sapiens
  misc_RNA (1)...(19): siRNA sense strand
caagaaggcucugagaaug

SEQ ID NO: 1067752 - RNA, 19 nt, Homo sapiens
  misc_RNA (1)...(19): siRNA sense strand
cgaaaguuccagcaaauua

SEQ ID NO: 1067753 - RNA, 19 nt, Homo sapiens
  misc_RNA (1)...(19): siRNA sense strand
gaaacaagaacucauugaa

SEQ ID NO: 1067754 - RNA, 19 nt, Homo sapiens
  misc_RNA (1)...(19): siRNA sense strand
ggucaugacugcuauucaa

SEQ ID NO: 1067755 - RNA, 19 nt, Homo sapiens
  misc_RNA (1)...(19): siRNA sense strand
guuggaagcucauauggaa

SEQ ID NO: 1067756 - RNA, 19 nt, Homo sapiens
  misc_RNA (1)...(19): siRNA sense strand
gaaugaacguauugaggaa

SEQ ID NO: 1067757 - RNA, 19 nt, Homo sapiens
  misc_RNA (1)...(19): siRNA sense strand
ugaaauagauguucuuagg

SEQ ID NO: 1067758 - RNA, 19 nt, Homo sapiens
  misc_RNA (1)...(19): siRNA sense strand
gcaagaaggcucugagaau

SEQ ID NO: 1067759 - RNA, 19 nt, Homo sapiens
  misc_RNA (1)...(19): siRNA sense strand
gcaagcaggugaaaacuuu

SEQ ID NO: 1067760 - RNA, 19 nt, Homo sapiens
  misc_RNA (1)...(19): siRNA sense strand
gcacguacacaauuagaaa

SEQ ID NO: 1067761 - RNA, 19 nt, Homo sapiens
  misc_RNA (1)...(19): siRNA sense strand
gaauaaaggccaguaaugu

SEQ ID NO: 1067762 - RNA, 19 nt, Homo sapiens
  misc_RNA (1)...(19): siRNA sense strand
gcacaaguucuucaucaaa

SEQ ID NO: 1067763 - RNA, 19 nt, Homo sapiens
  misc_RNA (1)...(19): siRNA sense strand
gagcaaagagcguauuaga

SEQ ID NO: 1067764 - RNA, 19 nt, Homo sapiens
  misc_RNA (1)...(19): siRNA sense strand
ccaaauaaccgaauguuca

SEQ ID NO: 1067765 - RNA, 19 nt, Homo sapiens
  misc_RNA (1)...(19): siRNA sense strand
gaaagccagaaauguaaua

SEQ ID NO: 1067766 - RNA, 19 nt, Homo sapiens
  misc_RNA (1)...(19): siRNA sense strand
uaaagucccugcuacaaca

SEQ ID NO: 1067767 - RNA, 19 nt, Homo sapiens
  misc_RNA (1)...(19): siRNA sense strand
ccugaaagaugaaauagau

SEQ ID NO: 1067768 - RNA, 19 nt, Homo sapiens
  misc_RNA (1)...(19): siRNA sense strand
aacaagaacucauugaaga

SEQ ID NO: 1067769 - RNA, 19 nt, Homo sapiens
  misc_RNA (1)...(19): siRNA sense strand
gaaagaaacaaaugaagag

SEQ ID NO: 1067770 - RNA, 19 nt, Homo sapiens
  misc_RNA (1)...(19): siRNA sense strand
gagagugaaugcaaaguag

SEQ ID NO: 1067771 - RNA, 19 nt, Homo sapiens
  misc_RNA (1)...(19): siRNA sense strand
caaagagcguauuagagaa

SEQ ID NO: 1067772 - RNA, 19 nt, Homo sapiens
  misc_RNA (1)...(19): siRNA sense strand
gagcuucgauguucacaag

SEQ ID NO: 1067773 - RNA, 19 nt, Homo sapiens
  misc_RNA (1)...(19): siRNA sense strand
gauggaaucuagacuugug

SEQ ID NO: 1067774 - RNA, 19 nt, Homo sapiens
  misc_RNA (1)...(19): siRNA sense strand
gggauggaaucuagacuug

SEQ ID NO: 1067775 - RNA, 19 nt, Homo sapiens
  misc_RNA (1)...(19): siRNA sense strand
ggagagugaaugcaaagua

SEQ ID NO: 1067776 - RNA, 19 nt, Homo sapiens
  misc_RNA (1)...(19): siRNA sense strand
gagaaagagagaagaauug

SEQ ID NO: 1067777 - RNA, 19 nt, Homo sapiens
  misc_RNA (1)...(19): siRNA sense strand
gaauauagggagguguuua

SEQ ID NO: 1067778 - RNA, 19 nt, Homo sapiens
  misc_RNA (1)...(19): siRNA sense strand
caaacacagugguugcaaa

SEQ ID NO: 1067779 - RNA, 19 nt, Homo sapiens
  misc_RNA (1)...(19): siRNA sense strand
agaagaaaucucucuguua

SEQ ID NO: 1067780 - RNA, 19 nt, Homo sapiens
  misc_RNA (1)...(19): siRNA sense strand
gcugaaauaaugcuacuaa

SEQ ID NO: 1067781 - RNA, 19 nt, Homo sapiens
  misc_RNA (1)...(19): siRNA sense strand
gcaggugacuacacuucaa

SEQ ID NO: 1067782 - RNA, 19 nt, Homo sapiens
  misc_RNA (1)...(19): siRNA sense strand
gaacagaaacaccguaaaa

SEQ ID NO: 1067783 - RNA, 19 nt, Homo sapiens
  misc_RNA (1)...(19): siRNA sense strand
caagagggcagacacacua

SEQ ID NO: 1067784 - RNA, 19 nt, Homo sapiens
  misc_RNA (1)...(19): siRNA sense strand
gcauaauacagucagcuua

SEQ ID NO: 1067785 - RNA, 19 nt, Homo sapiens
  misc_RNA (1)...(19): siRNA sense strand
uaauaagagucuagcauuc

SEQ ID NO: 1067786 - RNA, 19 nt, Homo sapiens
  misc_RNA (1)...(19): siRNA sense strand
gcaauggaggaaagauaua

SEQ ID NO: 1067787 - RNA, 19 nt, Homo sapiens
  misc_RNA (1)...(19): siRNA sense strand
caugaagaauuacagaaga

SEQ ID NO: 1067788 - RNA, 19 nt, Homo sapiens
  misc_RNA (1)...(19): siRNA sense strand
ugacugcuauucaagaguu

SEQ ID NO: 1067789 - RNA, 19 nt, Homo sapiens
  misc_RNA (1)...(19): siRNA sense strand
gcuucgauguucacaagua

SEQ ID NO: 1067790 - RNA, 19 nt, Homo sapiens
  misc_RNA (1)...(19): siRNA sense strand
guucaagaucuucauguua

SEQ ID NO: 1067791 - RNA, 19 nt, Homo sapiens
  misc_RNA (1)...(19): siRNA sense strand
ugagauauaucgucagaag

SEQ ID NO: 1067792 - RNA, 19 nt, Homo sapiens
  misc_RNA (1)...(19): siRNA sense strand
gaagcaagaacauauucaa

SEQ ID NO: 1067793 - RNA, 19 nt, Homo sapiens
  misc_RNA (1)...(19): siRNA sense strand
gcagagaaagagagaagaa

SEQ ID NO: 1067794 - RNA, 19 nt, Homo sapiens
  misc_RNA (1)...(19): siRNA sense strand
gaaguuggaagcucauaug

SEQ ID NO: 1067795 - RNA, 19 nt, Homo sapiens
  misc_RNA (1)...(19): siRNA sense strand
gcaaauuaaagcagaaguu

SEQ ID NO: 1067796 - RNA, 19 nt, Homo sapiens
  misc_RNA (1)...(19): siRNA sense strand
ggggacaacuggagaauaa

SEQ ID NO: 1067797 - RNA, 19 nt, Homo sapiens
  misc_RNA (1)...(19): siRNA sense strand
gaauuggagcaacagcuua

SEQ ID NO: 1067798 - RNA, 19 nt, Homo sapiens
  misc_RNA (1)...(19): siRNA sense strand
agaaaucucucuguuaaag

SEQ ID NO: 1067799 - RNA, 19 nt, Homo sapiens
  misc_RNA (1)...(19): siRNA sense strand
gagcagaggcugagcaaag

SEQ ID NO: 1067800 - RNA, 19 nt, Homo sapiens
  misc_RNA (1)...(19): siRNA sense strand
agaaacaaaugaagagcuu

SEQ ID NO: 1067801 - RNA, 19 nt, Homo sapiens
  misc_RNA (1)...(19): siRNA sense strand
acaugaagcuuuacuuaag

SEQ ID NO: 1067802 - RNA, 19 nt, Homo sapiens
  misc_RNA (1)...(19): siRNA sense strand
cuaaucgaauuccagcaua

SEQ ID NO: 1067803 - RNA, 19 nt, Homo sapiens
  misc_RNA (1)...(19): siRNA sense strand
aaagagagaagaauugaga

SEQ ID NO: 1067804 - RNA, 19 nt, Homo sapiens
  misc_RNA (1)...(19): siRNA sense strand
aauaaaggccaguaaugua

SEQ ID NO: 1067805 - RNA, 19 nt, Homo sapiens
  misc_RNA (1)...(19): siRNA sense strand
ggugaaaacuuuacaggaa

SEQ ID NO: 1067806 - RNA, 19 nt, Homo sapiens
  misc_RNA (1)...(19): siRNA sense strand
gaaacaagagcccugaaag

SEQ ID NO: 1067807 - RNA, 19 nt, Homo sapiens
  misc_RNA (1)...(19): siRNA sense strand
gaaaagaagcaagaacaua

SEQ ID NO: 1067808 - RNA, 19 nt, Homo sapiens
  misc_RNA (1)...(19): siRNA sense strand
ugaaagcaauggaggaaag

SEQ ID NO: 1067809 - RNA, 19 nt, Homo sapiens
  misc_RNA (1)...(19): siRNA sense strand
gcagcgugauacuuugaaa

SEQ ID NO: 1067810 - RNA, 19 nt, Homo sapiens
  misc_RNA (1)...(19): siRNA sense strand
aaacaagagcccugaaaga

SEQ ID NO: 1067811 - RNA, 19 nt, Homo sapiens
  misc_RNA (1)...(19): siRNA sense strand
gcaaauaaacuggagucaa

SEQ ID NO: 1067812 - RNA, 19 nt, Homo sapiens
  misc_RNA (1)...(19): siRNA sense strand
caaauuaaagcagaaguug

SEQ ID NO: 1067813 - RNA, 19 nt, Homo sapiens
  misc_RNA (1)...(19): siRNA sense strand
ggcgaaaguuccagcaaau

SEQ ID NO: 1067814 - RNA, 19 nt, Homo sapiens
  misc_RNA (1)...(19): siRNA sense strand
acacuagcguuugaaauga

SEQ ID NO: 1067815 - RNA, 19 nt, Homo sapiens
  misc_RNA (1)...(19): siRNA sense strand
gguucaagaucuucauguu

SEQ ID NO: 1067816 - RNA, 19 nt, Homo sapiens
  misc_RNA (1)...(19): siRNA sense strand
guugagauauaucgucaga

SEQ ID NO: 1067817 - RNA, 19 nt, Homo sapiens
  misc_RNA (1)...(19): siRNA sense strand
aaaugaugcuguuggagaa

SEQ ID NO: 1067818 - RNA, 19 nt, Homo sapiens
  misc_RNA (1)...(19): siRNA sense strand
cacaaguucuucaucaaau

SEQ ID NO: 1067819 - RNA, 19 nt, Homo sapiens
  misc_RNA (1)...(19): siRNA sense strand
ggagaauaaaggccaguaa

SEQ ID NO: 1067820 - RNA, 19 nt, Homo sapiens
  misc_RNA (1)...(19): siRNA sense strand
ugaaugaccuucgcaagca

SEQ ID NO: 1067821 - RNA, 19 nt, Homo sapiens
  misc_RNA (1)...(19): siRNA sense strand
gaacaauuacaggaagaaa

SEQ ID NO: 1067822 - RNA, 19 nt, Homo sapiens
  misc_RNA (1)...(19): siRNA sense strand
aagaagagcugaggcaaag

SEQ ID NO: 1067823 - RNA, 19 nt, Homo sapiens
  misc_RNA (1)...(19): siRNA sense strand
agcaucagcugaaauaaug

SEQ ID NO: 1067824 - RNA, 19 nt, Homo sapiens
  misc_RNA (1)...(19): siRNA sense strand
gagaauaaaggccaguaau

SEQ ID NO: 1067825 - RNA, 19 nt, Homo sapiens
  misc_RNA (1)...(19): siRNA sense strand
gaagagcugaggcaaagau

SEQ ID NO: 1067826 - RNA, 19 nt, Homo sapiens
  misc_RNA (1)...(19): siRNA sense strand
aaaagcagcuaaucgaauu

SEQ ID NO: 1067827 - RNA, 19 nt, Homo sapiens
  misc_RNA (1)...(19): siRNA sense strand
auaaaggccaguaauguaa

SEQ ID NO: 1067828 - RNA, 19 nt, Homo sapiens
  misc_RNA (1)...(19): siRNA sense strand
uaaaccaaauaaccgaaug

SEQ ID NO: 1067829 - RNA, 19 nt, Homo sapiens
  misc_RNA (1)...(19): siRNA sense strand
ggaaugaugaauugacuag

SEQ ID NO: 1067830 - RNA, 19 nt, Homo sapiens
  misc_RNA (1)...(19): siRNA sense strand
ggaaaucacugucucagaa

SEQ ID NO: 1067831 - RNA, 19 nt, Homo sapiens
  misc_RNA (1)...(19): siRNA sense strand
gaaauuaacuucacauugc

SEQ ID NO: 1067832 - RNA, 19 nt, Homo sapiens
  misc_RNA (1)...(19): siRNA sense strand
guacagaucuggauggauu

SEQ ID NO: 1067833 - RNA, 19 nt, Homo sapiens
  misc_RNA (1)...(19): siRNA sense strand
gcaaugagagagagaauua

SEQ ID NO: 1067834 - RNA, 19 nt, Homo sapiens
  misc_RNA (1)...(19): siRNA sense strand
gaacaugccagacacauuu

SEQ ID NO: 1067835 - RNA, 19 nt, Homo sapiens
  misc_RNA (1)...(19): siRNA sense strand
uaaauggccuuccaauaaa

SEQ ID NO: 1067836 - RNA, 19 nt, Homo sapiens
  misc_RNA (1)...(19): siRNA sense strand
gaaauauccuccagucaga

SEQ ID NO: 1067837 - RNA, 19 nt, Homo sapiens
  misc_RNA (1)...(19): siRNA sense strand
ggaagaaugugcugaaaca

SEQ ID NO: 1067838 - RNA, 19 nt, Homo sapiens
  misc_RNA (1)...(19): siRNA sense strand
gaaaacagaugcuccaaaa

SEQ ID NO: 1067839 - RNA, 19 nt, Homo sapiens
  misc_RNA (1)...(19): siRNA sense strand
aaacaagacuccuuaugaa

SEQ ID NO: 1067840 - RNA, 19 nt, Homo sapiens
  misc_RNA (1)...(19): siRNA sense strand
gaaauagacacuuugguuu

SEQ ID NO: 1067841 - RNA, 19 nt, Homo sapiens
  misc_RNA (1)...(19): siRNA sense strand
gaccugauaugccuuguuu

SEQ ID NO: 1067842 - RNA, 19 nt, Homo sapiens
  misc_RNA (1)...(19): siRNA sense strand
caaacuacaucaccagaaa

SEQ ID NO: 1067843 - RNA, 19 nt, Homo sapiens
  misc_RNA (1)...(19): siRNA sense strand
cacaagagcugcuaaugaa

SEQ ID NO: 1067844 - RNA, 19 nt, Homo sapiens
  misc_RNA (1)...(19): siRNA sense strand
ggauauaaguacugaaaug

SEQ ID NO: 1067845 - RNA, 19 nt, Homo sapiens
  misc_RNA (1)...(19): siRNA sense strand
ggucuaaacugcaguaauc

SEQ ID NO: 1067846 - RNA, 19 nt, Homo sapiens
  misc_RNA (1)...(19): siRNA sense strand
uuaaauggccuuccaauaa

SEQ ID NO: 1067847 - RNA, 19 nt, Homo sapiens
  misc_RNA (1)...(19): siRNA sense strand
gaagguagaauucuuguug

SEQ ID NO: 1067848 - RNA, 19 nt, Homo sapiens
  misc_RNA (1)...(19): siRNA sense strand
caaacaagacuccuuauga

SEQ ID NO: 1067849 - RNA, 19 nt, Homo sapiens
  misc_RNA (1)...(19): siRNA sense strand
gaagaccuaucaaguaaca

SEQ ID NO: 1067850 - RNA, 19 nt, Homo sapiens
  misc_RNA (1)...(19): siRNA sense strand
uaaagugggucguuauaga

SEQ ID NO: 1067851 - RNA, 19 nt, Homo sapiens
  misc_RNA (1)...(19): siRNA sense strand
uaaagucgauagugaagaa

SEQ ID NO: 1067852 - RNA, 19 nt, Homo sapiens
  misc_RNA (1)...(19): siRNA sense strand
gaaggaaaggugccaagua

SEQ ID NO: 1067853 - RNA, 19 nt, Homo sapiens
  misc_RNA (1)...(19): siRNA sense strand
ggaaggauauaaguacuga

SEQ ID NO: 1067854 - RNA, 19 nt, Homo sapiens
  misc_RNA (1)...(19): siRNA sense strand
gaaggaauuucagauguug

SEQ ID NO: 1067855 - RNA, 19 nt, Homo sapiens
  misc_RNA (1)...(19): siRNA sense strand
gguggcaagucaauaauaa

SEQ ID NO: 1067856 - RNA, 19 nt, Homo sapiens
  misc_RNA (1)...(19): siRNA sense strand
ggaugaugcuggaagaauu

SEQ ID NO: 1067857 - RNA, 19 nt, Homo sapiens
  misc_RNA (1)...(19): siRNA sense strand
aaggaaaggugccaaguaa

SEQ ID NO: 1067858 - RNA, 19 nt, Homo sapiens
  misc_RNA (1)...(19): siRNA sense strand
ggacaggaaacuugaauug

SEQ ID NO: 1067859 - RNA, 19 nt, Homo sapiens
  misc_RNA (1)...(19): siRNA sense strand
cugaagaccuaucaaguaa

SEQ ID NO: 1067860 - RNA, 19 nt, Homo sapiens
  misc_RNA (1)...(19): siRNA sense strand
cgaacgaaauagacacuuu

SEQ ID NO: 1067861 - RNA, 19 nt, Homo sapiens
  misc_RNA (1)...(19): siRNA sense strand
cauagaagaugcucagugu

SEQ ID NO: 1067862 - RNA, 19 nt, Homo sapiens
  misc_RNA (1)...(19): siRNA sense strand
gagacuaccuguacagauc

SEQ ID NO: 1067863 - RNA, 19 nt, Homo sapiens
  misc_RNA (1)...(19): siRNA sense strand
gaacuaaaauugcucauag

SEQ ID NO: 1067864 - RNA, 19 nt, Homo sapiens
  misc_RNA (1)...(19): siRNA sense strand
agacuaagauugauaacga

SEQ ID NO: 1067865 - RNA, 19 nt, Homo sapiens
  misc_RNA (1)...(19): siRNA sense strand
ggucaaacaagacuccuua

SEQ ID NO: 1067866 - RNA, 19 nt, Homo sapiens
  misc_RNA (1)...(19): siRNA sense strand
aaacugcaguaauccauuu

SEQ ID NO: 1067867 - RNA, 19 nt, Homo sapiens
  misc_RNA (1)...(19): siRNA sense strand
gaggagacaucaagaacau

SEQ ID NO: 1067868 - RNA, 19 nt, Homo sapiens
  misc_RNA (1)...(19): siRNA sense strand
guacugaaaugauuagaac

SEQ ID NO: 1067869 - RNA, 19 nt, Homo sapiens
  misc_RNA (1)...(19): siRNA sense strand
ucaaauaaauugccauguc

SEQ ID NO: 1067870 - RNA, 19 nt, Homo sapiens
  misc_RNA (1)...(19): siRNA sense strand
cgaaauagacacuuugguu

SEQ ID NO: 1067871 - RNA, 19 nt, Homo sapiens
  misc_RNA (1)...(19): siRNA sense strand
cagauggagucuuaucaaa

SEQ ID NO: 1067872 - RNA, 19 nt, Homo sapiens
  misc_RNA (1)...(19): siRNA sense strand
ggaauacgaacgaaauaga

SEQ ID NO: 1067873 - RNA, 19 nt, Homo sapiens
  misc_RNA (1)...(19): siRNA sense strand
gaacgaaauagacacuuug

SEQ ID NO: 1067874 - RNA, 19 nt, Homo sapiens
  misc_RNA (1)...(19): siRNA sense strand
gcagagagagaaagcuaaa

SEQ ID NO: 1067875 - RNA, 19 nt, Homo sapiens
  misc_RNA (1)...(19): siRNA sense strand
gaaggaauggaacugaauu

SEQ ID NO: 1067876 - RNA, 19 nt, Homo sapiens
  misc_RNA (1)...(19): siRNA sense strand
agaaugaguuugccucuuc

SEQ ID NO: 1067877 - RNA, 19 nt, Homo sapiens
  misc_RNA (1)...(19): siRNA sense strand
gaauuaggcaggaagaaug

SEQ ID NO: 1067878 - RNA, 19 nt, Homo sapiens
  misc_RNA (1)...(19): siRNA sense strand
gaaucuggguggcaaguca

SEQ ID NO: 1067879 - RNA, 19 nt, Homo sapiens
  misc_RNA (1)...(19): siRNA sense strand
ucaacaaucugaucaaacu

SEQ ID NO: 1067880 - RNA, 19 nt, Homo sapiens
  misc_RNA (1)...(19): siRNA sense strand
gaagauguaauccacaaau

SEQ ID NO: 1067881 - RNA, 19 nt, Homo sapiens
  misc_RNA (1)...(19): siRNA sense strand
gaaaucacugucucagaaa

SEQ ID NO: 1067882 - RNA, 19 nt, Homo sapiens
  misc_RNA (1)...(19): siRNA sense strand
acaggaaacuugaauugga

SEQ ID NO: 1067883 - RNA, 19 nt, Homo sapiens
  misc_RNA (1)...(19): siRNA sense strand
ggaaaggugccaaguaaag

SEQ ID NO: 1067884 - RNA, 19 nt, Homo sapiens
  misc_RNA (1)...(19): siRNA sense strand
gagcagagagagaaagcua

SEQ ID NO: 1067885 - RNA, 19 nt, Homo sapiens
  misc_RNA (1)...(19): siRNA sense strand
ucacaagagcugcuaauga

SEQ ID NO: 1067886 - RNA, 19 nt, Homo sapiens
  misc_RNA (1)...(19): siRNA sense strand
caagaaagccagucacaag

SEQ ID NO: 1067887 - RNA, 19 nt, Homo sapiens
  misc_RNA (1)...(19): siRNA sense strand
gagcagacuaagauugaua

SEQ ID NO: 1067888 - RNA, 19 nt, Homo sapiens
  misc_RNA (1)...(19): siRNA sense strand
aaaccagaaugcugugaaa

SEQ ID NO: 1067889 - RNA, 19 nt, Homo sapiens
  misc_RNA (1)...(19): siRNA sense strand
gaaagcaggagcagcauag

SEQ ID NO: 1067890 - RNA, 19 nt, Homo sapiens
  misc_RNA (1)...(19): siRNA sense strand
ucccaucacuugaaagaaa

SEQ ID NO: 1067891 - RNA, 19 nt, Homo sapiens
  misc_RNA (1)...(19): siRNA sense strand
gaaagagcagagagagaaa

SEQ ID NO: 1067892 - RNA, 19 nt, Homo sapiens
  misc_RNA (1)...(19): siRNA sense strand
gaaugccaccuucuugauu

SEQ ID NO: 1067893 - RNA, 19 nt, Homo sapiens
  misc_RNA (1)...(19): siRNA sense strand
agaaggaauuucagauguu

SEQ ID NO: 1067894 - RNA, 19 nt, Homo sapiens
  misc_RNA (1)...(19): siRNA sense strand
aaagugaacaugugaagaa

SEQ ID NO: 1067895 - RNA, 19 nt, Homo sapiens
  misc_RNA (1)...(19): siRNA sense strand
gauguaauccacaaauuca

SEQ ID NO: 1067896 - RNA, 19 nt, Homo sapiens
  misc_RNA (1)...(19): siRNA sense strand
caauacagcaagauucaaa

SEQ ID NO: 1067897 - RNA, 19 nt, Homo sapiens
  misc_RNA (1)...(19): siRNA sense strand
gaaagcuaaacgaggaaua

SEQ ID NO: 1067898 - RNA, 19 nt, Homo sapiens
  misc_RNA (1)...(19): siRNA sense strand
aaggaaagguuuaaacagu

SEQ ID NO: 1067899 - RNA, 19 nt, Homo sapiens
  misc_RNA (1)...(19): siRNA sense strand
gcaaagcagguucccagaa

SEQ ID NO: 1067900 - RNA, 19 nt, Homo sapiens
  misc_RNA (1)...(19): siRNA sense strand
ggagaggagacaucaagaa

SEQ ID NO: 1067901 - RNA, 19 nt, Homo sapiens
  misc_RNA (1)...(19): siRNA sense strand
aaagcuguaucucagagua

SEQ ID NO: 1067902 - RNA, 19 nt, Homo sapiens
  misc_RNA (1)...(19): siRNA sense strand
uagaagauguaauccacaa

SEQ ID NO: 1067903 - RNA, 19 nt, Homo sapiens
  misc_RNA (1)...(19): siRNA sense strand
uaaaggagacuaccuguac

SEQ ID NO: 1067904 - RNA, 19 nt, Homo sapiens
  misc_RNA (1)...(19): siRNA sense strand
gguugaugauugugaauau

SEQ ID NO: 1067905 - RNA, 19 nt, Homo sapiens
  misc_RNA (1)...(19): siRNA sense strand
uugaaggacugguugauga

SEQ ID NO: 1067906 - RNA, 19 nt, Homo sapiens
  misc_RNA (1)...(19): siRNA sense strand
ccaagacaauacagcaaga

SEQ ID NO: 1067907 - RNA, 19 nt, Homo sapiens
  misc_RNA (1)...(19): siRNA sense strand
ugaaagagcagagagagaa

SEQ ID NO: 1067908 - RNA, 19 nt, Homo sapiens
  misc_RNA (1)...(19): siRNA sense strand
ucucagguauagcaaguaa

SEQ ID NO: 1067909 - RNA, 19 nt, Homo sapiens
  misc_RNA (1)...(19): siRNA sense strand
aaaguugucucagguauag

SEQ ID NO: 1067910 - RNA, 19 nt, Homo sapiens
  misc_RNA (1)...(19): siRNA sense strand
ucagauagaagauguaauc

SEQ ID NO: 1067911 - RNA, 19 nt, Homo sapiens
  misc_RNA (1)...(19): siRNA sense strand
ggaguagcagaugauauua

SEQ ID NO: 1067912 - RNA, 19 nt, Homo sapiens
  misc_RNA (1)...(19): siRNA sense strand
gaacaugugaagaagacuu

SEQ ID NO: 1067913 - RNA, 19 nt, Homo sapiens
  misc_RNA (1)...(19): siRNA sense strand
gcaggaagaaugugcugaa

SEQ ID NO: 1067914 - RNA, 19 nt, Homo sapiens
  misc_RNA (1)...(19): siRNA sense strand
gaagaauugcagcgagaaa

SEQ ID NO: 1067915 - RNA, 19 nt, Homo sapiens
  misc_RNA (1)...(19): siRNA sense strand
uaacgagagugauguucga

SEQ ID NO: 1067916 - RNA, 19 nt, Homo sapiens
  misc_RNA (1)...(19): siRNA sense strand
aagaaggaauuucagaugu

SEQ ID NO: 1067917 - RNA, 19 nt, Homo sapiens
  misc_RNA (1)...(19): siRNA sense strand
gcuauuccaucuucuguac

SEQ ID NO: 1067918 - RNA, 19 nt, Homo sapiens
  misc_RNA (1)...(19): siRNA sense strand
ccagugagagaaugaguuu

SEQ ID NO: 1067919 - RNA, 19 nt, Homo sapiens
  misc_RNA (1)...(19): siRNA sense strand
guaaauaagacagacuuga

SEQ ID NO: 1067920 - RNA, 19 nt, Homo sapiens
  misc_RNA (1)...(19): siRNA sense strand
aauagacacuuugguuuga

SEQ ID NO: 1067921 - RNA, 19 nt, Homo sapiens
  misc_RNA (1)...(19): siRNA sense strand
uaaauugccauguccuuug

SEQ ID NO: 1067922 - RNA, 19 nt, Homo sapiens
  misc_RNA (1)...(19): siRNA sense strand
gacaauacagcaagauuca

SEQ ID NO: 1067923 - RNA, 19 nt, Homo sapiens
  misc_RNA (1)...(19): siRNA sense strand
ucugaagaccuaucaagua

SEQ ID NO: 1067924 - RNA, 19 nt, Homo sapiens
  misc_RNA (1)...(19): siRNA sense strand
ccagaacagucucaucuac

SEQ ID NO: 1067925 - RNA, 19 nt, Homo sapiens
  misc_RNA (1)...(19): siRNA sense strand
agaauuccuucgcaccuaa

SEQ ID NO: 1067926 - RNA, 19 nt, Homo sapiens
  misc_RNA (1)...(19): siRNA sense strand
gaguagcagaugauauuaa

SEQ ID NO: 1067927 - RNA, 19 nt, Homo sapiens
  misc_RNA (1)...(19): siRNA sense strand
acuugaagguggauuguuu

SEQ ID NO: 1067928 - RNA, 19 nt, Homo sapiens
  misc_RNA (1)...(19): siRNA sense strand
uaaggaauacgaacgaaau

SEQ ID NO: 1067929 - RNA, 19 nt, Homo sapiens
  misc_RNA (1)...(19): siRNA sense strand
gcacagcaguuggucaaac

SEQ ID NO: 1067930 - RNA, 19 nt, Homo sapiens
  misc_RNA (1)...(19): siRNA sense strand
gaagaucgcugaggaagaa

SEQ ID NO: 1067931 - RNA, 19 nt, Homo sapiens
  misc_RNA (1)...(19): siRNA sense strand
ggaggcauaugaccagaag

SEQ ID NO: 1067932 - RNA, 19 nt, Homo sapiens
  misc_RNA (1)...(19): siRNA sense strand
ggacugaggcagccagcuu

SEQ ID NO: 1067933 - RNA, 19 nt, Homo sapiens
  misc_RNA (1)...(19): siRNA sense strand
caaauuccgacccuacuga

SEQ ID NO: 1067934 - RNA, 19 nt, Homo sapiens
  misc_RNA (1)...(19): siRNA sense strand
gcaaauuccgacccuacug

SEQ ID NO: 1067935 - RNA, 19 nt, Homo sapiens
  misc_RNA (1)...(19): siRNA sense strand
agacggaagcgcagccaaa

SEQ ID NO: 1067936 - RNA, 19 nt, Homo sapiens
  misc_RNA (1)...(19): siRNA sense strand
caacuacgccuggcagcau

SEQ ID NO: 1067937 - RNA, 19 nt, Homo sapiens
  misc_RNA (1)...(19): siRNA sense strand
ccagaagaucgcugaggaa

SEQ ID NO: 1067938 - RNA, 19 nt, Homo sapiens
  misc_RNA (1)...(19): siRNA sense strand
cagcugcgcaagaaguuug

SEQ ID NO: 1067939 - RNA, 19 nt, Homo sapiens
  misc_RNA (1)...(19): siRNA sense strand
cagcaucgagagagcaaga

SEQ ID NO: 1067940 - RNA, 19 nt, Homo sapiens
  misc_RNA (1)...(19): siRNA sense strand
ucgcugaggaagaagcuaa

SEQ ID NO: 1067941 - RNA, 19 nt, Homo sapiens
  misc_RNA (1)...(19): siRNA sense strand
gcagcugcgcaagaaguuu

SEQ ID NO: 1067942 - RNA, 19 nt, Homo sapiens
  misc_RNA (1)...(19): siRNA sense strand
ucucaguccuggccuauga

SEQ ID NO: 1067943 - RNA, 19 nt, Homo sapiens
  misc_RNA (1)...(19): siRNA sense strand
gcucacgggucuggcauug

SEQ ID NO: 1067944 - RNA, 19 nt, Homo sapiens
  misc_RNA (1)...(19): siRNA sense strand
gguccugccuccucgucua

SEQ ID NO: 1067945 - RNA, 19 nt, Homo sapiens
  misc_RNA (1)...(19): siRNA sense strand
cgaccuggacuugaacuaa

SEQ ID NO: 1067946 - RNA, 19 nt, Homo sapiens
  misc_RNA (1)...(19): siRNA sense strand
gugucgaccuggacuugaa

SEQ ID NO: 1067947 - RNA, 19 nt, Homo sapiens
  misc_RNA (1)...(19): siRNA sense strand
gcagcucccaggcuaucuu

SEQ ID NO: 1067948 - RNA, 19 nt, Homo sapiens
  misc_RNA (1)...(19): siRNA sense strand
ggacccaucugcuugguuu

SEQ ID NO: 1067949 - RNA, 19 nt, Homo sapiens
  misc_RNA (1)...(19): siRNA sense strand
ggauugcucuucuaauuau

SEQ ID NO: 1067950 - RNA, 19 nt, Homo sapiens
  misc_RNA (1)...(19): siRNA sense strand
gaaggcggcuguacugaug

SEQ ID NO: 1067951 - RNA, 19 nt, Homo sapiens
  misc_RNA (1)...(19): siRNA sense strand
ggacaacgacuaucugcua

SEQ ID NO: 1067952 - RNA, 19 nt, Homo sapiens
  misc_RNA (1)...(19): siRNA sense strand
gggauugcucuucuaauua

SEQ ID NO: 1067953 - RNA, 19 nt, Homo sapiens
  misc_RNA (1)...(19): siRNA sense strand
gaccaaauauguacuucau

SEQ ID NO: 1067954 - RNA, 19 nt, Homo sapiens
  misc_RNA (1)...(19): siRNA sense strand
gagaagggcaaacggguaa

SEQ ID NO: 1067955 - RNA, 19 nt, Homo sapiens
  misc_RNA (1)...(19): siRNA sense strand
gacaagagcaggcguguuc

SEQ ID NO: 1067956 - RNA, 19 nt, Homo sapiens
  misc_RNA (1)...(19): siRNA sense strand
uggagaagauggaagaguu

SEQ ID NO: 1067957 - RNA, 19 nt, Homo sapiens
  misc_RNA (1)...(19): siRNA sense strand
guuccagucucaucagauu

SEQ ID NO: 1067958 - RNA, 19 nt, Homo sapiens
  misc_RNA (1)...(19): siRNA sense strand
ggagaagauggaagaguuu

SEQ ID NO: 1067959 - RNA, 19 nt, Homo sapiens
  misc_RNA (1)...(19): siRNA sense strand
ucuccaaccuucaggaauu

SEQ ID NO: 1067960 - RNA, 19 nt, Homo sapiens
  misc_RNA (1)...(19): siRNA sense strand
agggauugcucuucuaauu

SEQ ID NO: 1067961 - RNA, 19 nt, Homo sapiens
  misc_RNA (1)...(19): siRNA sense strand
guuggagggucaucccaua

SEQ ID NO: 1067962 - RNA, 19 nt, Homo sapiens
  misc_RNA (1)...(19): siRNA sense strand
gcuaaaggacaacgacuau

SEQ ID NO: 1067963 - RNA, 19 nt, Homo sapiens
  misc_RNA (1)...(19): siRNA sense strand
cacuggagcuggccuuuau

SEQ ID NO: 1067964 - RNA, 19 nt, Homo sapiens
  misc_RNA (1)...(19): siRNA sense strand
uacagaaacuggcaacauc

SEQ ID NO: 1067965 - RNA, 19 nt, Homo sapiens
  misc_RNA (1)...(19): siRNA sense strand
acccaaagcugaagaagag

SEQ ID NO: 1067966 - RNA, 19 nt, Homo sapiens
  misc_RNA (1)...(19): siRNA sense strand
gaagauggaagaguuugug

SEQ ID NO: 1067967 - RNA, 19 nt, Homo sapiens
  misc_RNA (1)...(19): siRNA sense strand
caacgacuaucugcuacau

SEQ ID NO: 1067968 - RNA, 19 nt, Homo sapiens
  misc_RNA (1)...(19): siRNA sense strand
uaaaggacaacgacuaucu

SEQ ID NO: 1067969 - RNA, 19 nt, Homo sapiens
  misc_RNA (1)...(19): siRNA sense strand
ccucauggcugugauguac

SEQ ID NO: 1067970 - RNA, 19 nt, Homo sapiens
  misc_RNA (1)...(19): siRNA sense strand
gauggaagaguuuguguac

SEQ ID NO: 1067971 - RNA, 19 nt, Homo sapiens
  misc_RNA (1)...(19): siRNA sense strand
gcucagaccaaauauguac

SEQ ID NO: 1067972 - RNA, 19 nt, Homo sapiens
  misc_RNA (1)...(19): siRNA sense strand
ccuuuaugcugcucgaauu

SEQ ID NO: 1067973 - RNA, 19 nt, Homo sapiens
  misc_RNA (1)...(19): siRNA sense strand
gcucuauuauuccuucuac

SEQ ID NO: 1067974 - RNA, 19 nt, Homo sapiens
  misc_RNA (1)...(19): siRNA sense strand
caccgucuauugucauuca

SEQ ID NO: 1067975 - RNA, 19 nt, Homo sapiens
  misc_RNA (1)...(19): siRNA sense strand
acauaugguuccagucuca

SEQ ID NO: 1067976 - RNA, 19 nt, Homo sapiens
  misc_RNA (1)...(19): siRNA sense strand
cagcagccuuuguccacuu

SEQ ID NO: 1067977 - RNA, 19 nt, Homo sapiens
  misc_RNA (1)...(19): siRNA sense strand
ggugguggcagcagccuuu

SEQ ID NO: 1067978 - RNA, 19 nt, Homo sapiens
  misc_RNA (1)...(19): siRNA sense strand
ugaccaugcucagaccaaa

SEQ ID NO: 1067979 - RNA, 19 nt, Homo sapiens
  misc_RNA (1)...(19): siRNA sense strand
cagcuucuccuggcucuuu

SEQ ID NO: 1067980 - RNA, 19 nt, Homo sapiens
  misc_RNA (1)...(19): siRNA sense strand
gcauuucugccaucauugu

SEQ ID NO: 1067981 - RNA, 19 nt, Homo sapiens
  misc_RNA (1)...(19): siRNA sense strand
ucagggauugcucuucuaa

SEQ ID NO: 1067982 - RNA, 19 nt, Homo sapiens
  misc_RNA (1)...(19): siRNA sense strand
uacuaucgcugagggcuuu

SEQ ID NO: 1067983 - RNA, 19 nt, Homo sapiens
  misc_RNA (1)...(19): siRNA sense strand
ccaccaugcacuuuacuau

SEQ ID NO: 1067984 - RNA, 19 nt, Homo sapiens
  misc_RNA (1)...(19): siRNA sense strand
gagaagauggaagaguuug

SEQ ID NO: 1067985 - RNA, 19 nt, Homo sapiens
  misc_RNA (1)...(19): siRNA sense strand
ugaugacacccuucucuga

SEQ ID NO: 1067986 - RNA, 19 nt, Homo sapiens
  misc_RNA (1)...(19): siRNA sense strand
ugacauaugguuccagucu

SEQ ID NO: 1067987 - RNA, 19 nt, Homo sapiens
  misc_RNA (1)...(19): siRNA sense strand
cuauugucauucagagaaa

SEQ ID NO: 1067988 - RNA, 19 nt, Homo sapiens
  misc_RNA (1)...(19): siRNA sense strand
ucacuggagcuggccuuua

SEQ ID NO: 1067989 - RNA, 19 nt, Homo sapiens
  misc_RNA (1)...(19): siRNA sense strand
ggcuaaaggacaacgacua

SEQ ID NO: 1067990 - RNA, 19 nt, Homo sapiens
  misc_RNA (1)...(19): siRNA sense strand
caucuggacccaucugcuu

SEQ ID NO: 1067991 - RNA, 19 nt, Homo sapiens
  misc_RNA (1)...(19): siRNA sense strand
gaggaggugcggguacuga

SEQ ID NO: 1067992 - RNA, 19 nt, Homo sapiens
  misc_RNA (1)...(19): siRNA sense strand
cagccuuuguccacuucua

SEQ ID NO: 1067993 - RNA, 19 nt, Homo sapiens
  misc_RNA (1)...(19): siRNA sense strand
caacccacccaaagcugaa

SEQ ID NO: 1067994 - RNA, 19 nt, Homo sapiens
  misc_RNA (1)...(19): siRNA sense strand
ucugcuacauggucauaga

SEQ ID NO: 1067995 - RNA, 19 nt, Homo sapiens
  misc_RNA (1)...(19): siRNA sense strand
ccuaagcaccggcagacaa

SEQ ID NO: 1067996 - RNA, 19 nt, Homo sapiens
  misc_RNA (1)...(19): siRNA sense strand
cacaccgucuauugucauu

SEQ ID NO: 1067997 - RNA, 19 nt, Homo sapiens
  misc_RNA (1)...(19): siRNA sense strand
gaccucccaugcccuccuu

SEQ ID NO: 1067998 - RNA, 19 nt, Homo sapiens
  misc_RNA (1)...(19): siRNA sense strand
cuagaaggcggcuguacug

SEQ ID NO: 1067999 - RNA, 19 nt, Homo sapiens
  misc_RNA (1)...(19): siRNA sense strand
gaagggcaaacggguaauc

SEQ ID NO: 1068000 - RNA, 19 nt, Homo sapiens
  misc_RNA (1)...(19): siRNA sense strand
accaugcucagaccaaaua

SEQ ID NO: 1068001 - RNA, 19 nt, Homo sapiens
  misc_RNA (1)...(19): siRNA sense strand
ucuauugucauucagagaa

SEQ ID NO: 1068002 - RNA, 19 nt, Homo sapiens
  misc_RNA (1)...(19): siRNA sense strand
ucauggcugugauguacau

SEQ ID NO: 1068003 - RNA, 19 nt, Homo sapiens
  misc_RNA (1)...(19): siRNA sense strand
guacugaugacacccuucu

SEQ ID NO: 1068004 - RNA, 19 nt, Homo sapiens
  misc_RNA (1)...(19): siRNA sense strand
gcuagaagagaagggcaaa

SEQ ID NO: 1068005 - RNA, 19 nt, Homo sapiens
  misc_RNA (1)...(19): siRNA sense strand
cugacuggcuaaaggacaa

SEQ ID NO: 1068006 - RNA, 19 nt, Homo sapiens
  misc_RNA (1)...(19): siRNA sense strand
cugaagaagagcaaacaug

SEQ ID NO: 1068007 - RNA, 19 nt, Homo sapiens
  misc_RNA (1)...(19): siRNA sense strand
caaagcugaagaagagcaa

SEQ ID NO: 1068008 - RNA, 19 nt, Homo sapiens
  misc_RNA (1)...(19): siRNA sense strand
gauugcucuucuaauuaug

SEQ ID NO: 1068009 - RNA, 19 nt, Homo sapiens
  misc_RNA (1)...(19): siRNA sense strand
acuggacuauucagggauu

SEQ ID NO: 1068010 - RNA, 19 nt, Homo sapiens
  misc_RNA (1)...(19): siRNA sense strand
gaagauggauacauugaua

SEQ ID NO: 1068011 - RNA, 19 nt, Homo sapiens
  misc_RNA (1)...(19): siRNA sense strand
gaaaugagcuucugcuugu

SEQ ID NO: 1068012 - RNA, 19 nt, Homo sapiens
  misc_RNA (1)...(19): siRNA sense strand
ggaaauaccucgcagaaga

SEQ ID NO: 1068013 - RNA, 19 nt, Homo sapiens
  misc_RNA (1)...(19): siRNA sense strand
caacagagcugcaguaucu

SEQ ID NO: 1068014 - RNA, 19 nt, Homo sapiens
  misc_RNA (1)...(19): siRNA sense strand
gaacaaccuuauaagcuua

SEQ ID NO: 1068015 - RNA, 19 nt, Homo sapiens
  misc_RNA (1)...(19): siRNA sense strand
gaaauuccuuggacauuaa

SEQ ID NO: 1068016 - RNA, 19 nt, Homo sapiens
  misc_RNA (1)...(19): siRNA sense strand
ggaauaugcugucaacuug

SEQ ID NO: 1068017 - RNA, 19 nt, Homo sapiens
  misc_RNA (1)...(19): siRNA sense strand
gaagugauauacacagauu

SEQ ID NO: 1068018 - RNA, 19 nt, Homo sapiens
  misc_RNA (1)...(19): siRNA sense strand
gagcuucucugauccuaua

SEQ ID NO: 1068019 - RNA, 19 nt, Homo sapiens
  misc_RNA (1)...(19): siRNA sense strand
gaaagaagguguuaugacu

SEQ ID NO: 1068020 - RNA, 19 nt, Homo sapiens
  misc_RNA (1)...(19): siRNA sense strand
ggaggaaaguauugaaauu

SEQ ID NO: 1068021 - RNA, 19 nt, Homo sapiens
  misc_RNA (1)...(19): siRNA sense strand
cuacaaagcagauuacaua

SEQ ID NO: 1068022 - RNA, 19 nt, Homo sapiens
  misc_RNA (1)...(19): siRNA sense strand
gagcaugggucauccagaa

SEQ ID NO: 1068023 - RNA, 19 nt, Homo sapiens
  misc_RNA (1)...(19): siRNA sense strand
gaaacuggccgacuuaugu

SEQ ID NO: 1068024 - RNA, 19 nt, Homo sapiens
  misc_RNA (1)...(19): siRNA sense strand
gaaauagcccugcagcaaa

SEQ ID NO: 1068025 - RNA, 19 nt, Homo sapiens
  misc_RNA (1)...(19): siRNA sense strand
ccaaugagauggcaagugu

SEQ ID NO: 1068026 - RNA, 19 nt, Homo sapiens
  misc_RNA (1)...(19): siRNA sense strand
ggaaugggcuccgucuuug

SEQ ID NO: 1068027 - RNA, 19 nt, Homo sapiens
  misc_RNA (1)...(19): siRNA sense strand
gaacguggccauauggaaa

SEQ ID NO: 1068028 - RNA, 19 nt, Homo sapiens
  misc_RNA (1)...(19): siRNA sense strand
gcaauauuauccaagagaa

SEQ ID NO: 1068029 - RNA, 19 nt, Homo sapiens
  misc_RNA (1)...(19): siRNA sense strand
gaaagaaauggaacuagaa

SEQ ID NO: 1068030 - RNA, 19 nt, Homo sapiens
  misc_RNA (1)...(19): siRNA sense strand
agaaauuccuuggacauua

SEQ ID NO: 1068031 - RNA, 19 nt, Homo sapiens
  misc_RNA (1)...(19): siRNA sense strand
ccagaaugcuuccagugua

SEQ ID NO: 1068032 - RNA, 19 nt, Homo sapiens
  misc_RNA (1)...(19): siRNA sense strand
gagcugcaguaucugauuu

SEQ ID NO: 1068033 - RNA, 19 nt, Homo sapiens
  misc_RNA (1)...(19): siRNA sense strand
ccgagaagauggauacauu

SEQ ID NO: 1068034 - RNA, 19 nt, Homo sapiens
  misc_RNA (1)...(19): siRNA sense strand
gaacacugcauauauuaga

SEQ ID NO: 1068035 - RNA, 19 nt, Homo sapiens
  misc_RNA (1)...(19): siRNA sense strand
uaaaccaccugucucuaaa

SEQ ID NO: 1068036 - RNA, 19 nt, Homo sapiens
  misc_RNA (1)...(19): siRNA sense strand
agaaagaaauggaacuaga

SEQ ID NO: 1068037 - RNA, 19 nt, Homo sapiens
  misc_RNA (1)...(19): siRNA sense strand
cagaagaacaagaagaaua

SEQ ID NO: 1068038 - RNA, 19 nt, Homo sapiens
  misc_RNA (1)...(19): siRNA sense strand
caccaagacccaagaaaua

SEQ ID NO: 1068039 - RNA, 19 nt, Homo sapiens
  misc_RNA (1)...(19): siRNA sense strand
gcuggaggcuguaucaaug

SEQ ID NO: 1068040 - RNA, 19 nt, Homo sapiens
  misc_RNA (1)...(19): siRNA sense strand
gauguuggcaugcaaguaa

SEQ ID NO: 1068041 - RNA, 19 nt, Homo sapiens
  misc_RNA (1)...(19): siRNA sense strand
cagaaugcuuccaguguaa

SEQ ID NO: 1068042 - RNA, 19 nt, Homo sapiens
  misc_RNA (1)...(19): siRNA sense strand
ugaacaaccuuauaagcuu

SEQ ID NO: 1068043 - RNA, 19 nt, Homo sapiens
  misc_RNA (1)...(19): siRNA sense strand
gaacauauuccugaagaug

SEQ ID NO: 1068044 - RNA, 19 nt, Homo sapiens
  misc_RNA (1)...(19): siRNA sense strand
gaaauaccucgcagaagaa

SEQ ID NO: 1068045 - RNA, 19 nt, Homo sapiens
  misc_RNA (1)...(19): siRNA sense strand
acaaaugcaggcugaauua

SEQ ID NO: 1068046 - RNA, 19 nt, Homo sapiens
  misc_RNA (1)...(19): siRNA sense strand
gaagacauggaaccaguaa

SEQ ID NO: 1068047 - RNA, 19 nt, Homo sapiens
  misc_RNA (1)...(19): siRNA sense strand
cagaugaacaaccuuauaa

SEQ ID NO: 1068048 - RNA, 19 nt, Homo sapiens
  misc_RNA (1)...(19): siRNA sense strand
caucaaacccuggaucuuu

SEQ ID NO: 1068049 - RNA, 19 nt, Homo sapiens
  misc_RNA (1)...(19): siRNA sense strand
gagaucaccuuucuacaac

SEQ ID NO: 1068050 - RNA, 19 nt, Homo sapiens
  misc_RNA (1)...(19): siRNA sense strand
ggaauauccuggaaaugag

SEQ ID NO: 1068051 - RNA, 19 nt, Homo sapiens
  misc_RNA (1)...(19): siRNA sense strand
gcugucaacuugucacaug

SEQ ID NO: 1068052 - RNA, 19 nt, Homo sapiens
  misc_RNA (1)...(19): siRNA sense strand
gagccacacugaagccuau

SEQ ID NO: 1068053 - RNA, 19 nt, Homo sapiens
  misc_RNA (1)...(19): siRNA sense strand
uaaggcaggugauaguaga

SEQ ID NO: 1068054 - RNA, 19 nt, Homo sapiens
  misc_RNA (1)...(19): siRNA sense strand
aaagagaagucaagcaucu

SEQ ID NO: 1068055 - RNA, 19 nt, Homo sapiens
  misc_RNA (1)...(19): siRNA sense strand
gaaccagcccagucucaaa

SEQ ID NO: 1068056 - RNA, 19 nt, Homo sapiens
  misc_RNA (1)...(19): siRNA sense strand
gagaagauggauacauuga

SEQ ID NO: 1068057 - RNA, 19 nt, Homo sapiens
  misc_RNA (1)...(19): siRNA sense strand
uuacagauauacacugguu

SEQ ID NO: 1068058 - RNA, 19 nt, Homo sapiens
  misc_RNA (1)...(19): siRNA sense strand
ccgaauagaugaagauguc

SEQ ID NO: 1068059 - RNA, 19 nt, Homo sapiens
  misc_RNA (1)...(19): siRNA sense strand
ggucauacauggaggugau

SEQ ID NO: 1068060 - RNA, 19 nt, Homo sapiens
  misc_RNA (1)...(19): siRNA sense strand
caagacccaagaaauauuu

SEQ ID NO: 1068061 - RNA, 19 nt, Homo sapiens
  misc_RNA (1)...(19): siRNA sense strand
gauauacacagauuggaaa

SEQ ID NO: 1068062 - RNA, 19 nt, Homo sapiens
  misc_RNA (1)...(19): siRNA sense strand
aaacagagaaggcagaaga

SEQ ID NO: 1068063 - RNA, 19 nt, Homo sapiens
  misc_RNA (1)...(19): siRNA sense strand
gaaucgaaguggaauaugc

SEQ ID NO: 1068064 - RNA, 19 nt, Homo sapiens
  misc_RNA (1)...(19): siRNA sense strand
ccaacuaucuaugggcuaa

SEQ ID NO: 1068065 - RNA, 19 nt, Homo sapiens
  misc_RNA (1)...(19): siRNA sense strand
ucacagaugaacaaccuua

SEQ ID NO: 1068066 - RNA, 19 nt, Homo sapiens
  misc_RNA (1)...(19): siRNA sense strand
gaacaaaugcaggcugaau

SEQ ID NO: 1068067 - RNA, 19 nt, Homo sapiens
  misc_RNA (1)...(19): siRNA sense strand
gaacacauuuauugaugac

SEQ ID NO: 1068068 - RNA, 19 nt, Homo sapiens
  misc_RNA (1)...(19): siRNA sense strand
ggacauaagcacucagaca

SEQ ID NO: 1068069 - RNA, 19 nt, Homo sapiens
  misc_RNA (1)...(19): siRNA sense strand
uaacuaugaucaccuacau

SEQ ID NO: 1068070 - RNA, 19 nt, Homo sapiens
  misc_RNA (1)...(19): siRNA sense strand
cgacggaacuguccacacu

SEQ ID NO: 1068071 - RNA, 19 nt, Homo sapiens
  misc_RNA (1)...(19): siRNA sense strand
gcgaagugauauacacaga

SEQ ID NO: 1068072 - RNA, 19 nt, Homo sapiens
  misc_RNA (1)...(19): siRNA sense strand
agaggaaggcgaagugaua

SEQ ID NO: 1068073 - RNA, 19 nt, Homo sapiens
  misc_RNA (1)...(19): siRNA sense strand
ccagaaauuuauccuuuag

SEQ ID NO: 1068074 - RNA, 19 nt, Homo sapiens
  misc_RNA (1)...(19): siRNA sense strand
aagaacauauuccugaaga

SEQ ID NO: 1068075 - RNA, 19 nt, Homo sapiens
  misc_RNA (1)...(19): siRNA sense strand
agccacagcugauuauuau

SEQ ID NO: 1068076 - RNA, 19 nt, Homo sapiens
  misc_RNA (1)...(19): siRNA sense strand
gaacuguccacacuauuca

SEQ ID NO: 1068077 - RNA, 19 nt, Homo sapiens
  misc_RNA (1)...(19): siRNA sense strand
agauaagccugaaugaaga

SEQ ID NO: 1068078 - RNA, 19 nt, Homo sapiens
  misc_RNA (1)...(19): siRNA sense strand
gagaaucgaaguggaauau

SEQ ID NO: 1068079 - RNA, 19 nt, Homo sapiens
  misc_RNA (1)...(19): siRNA sense strand
uccuauacauccucaguua

SEQ ID NO: 1068080 - RNA, 19 nt, Homo sapiens
  misc_RNA (1)...(19): siRNA sense strand
gacauaagcacucagacaa

SEQ ID NO: 1068081 - RNA, 19 nt, Homo sapiens
  misc_RNA (1)...(19): siRNA sense strand
gaacuagaaauggcaaaga

SEQ ID NO: 1068082 - RNA, 19 nt, Homo sapiens
  misc_RNA (1)...(19): siRNA sense strand
gauauuagaccacagaaac

SEQ ID NO: 1068083 - RNA, 19 nt, Homo sapiens
  misc_RNA (1)...(19): siRNA sense strand
ucugacacauuugagauua

SEQ ID NO: 1068084 - RNA, 19 nt, Homo sapiens
  misc_RNA (1)...(19): siRNA sense strand
uaacaaugcauccauaagu

SEQ ID NO: 1068085 - RNA, 19 nt, Homo sapiens
  misc_RNA (1)...(19): siRNA sense strand
gaaguggaauaugcuguca

SEQ ID NO: 1068086 - RNA, 19 nt, Homo sapiens
  misc_RNA (1)...(19): siRNA sense strand
uaaucaaagucacagagaa

SEQ ID NO: 1068087 - RNA, 19 nt, Homo sapiens
  misc_RNA (1)...(19): siRNA sense strand
gaaauggaacuagaaaugg

SEQ ID NO: 1068088 - RNA, 19 nt, Homo sapiens
  misc_RNA (1)...(19): siRNA sense strand
ggaacuguccacacuauuc

SEQ ID NO: 1068089 - RNA, 19 nt, Homo sapiens
  misc_RNA (1)...(19): siRNA sense strand
uaaaggacauaagcacuca

SEQ ID NO: 1068090 - RNA, 19 nt, Homo sapiens
  misc_RNA (1)...(19): siRNA sense strand
gaacccguaucauaaucug

SEQ ID NO: 1068091 - RNA, 19 nt, Homo sapiens
  misc_RNA (1)...(19): siRNA sense strand
gaaggaggaaaguauugaa

SEQ ID NO: 1068092 - RNA, 19 nt, Homo sapiens
  misc_RNA (1)...(19): siRNA sense strand
ugaaauagcccugcagcaa

SEQ ID NO: 1068093 - RNA, 19 nt, Homo sapiens
  misc_RNA (1)...(19): siRNA sense strand
gacauggaaccaguaaaua

SEQ ID NO: 1068094 - RNA, 19 nt, Homo sapiens
  misc_RNA (1)...(19): siRNA sense strand
agaaauggaacuagaaaug

SEQ ID NO: 1068095 - RNA, 19 nt, Homo sapiens
  misc_RNA (1)...(19): siRNA sense strand
gaucaccuuucuacaacga

SEQ ID NO: 1068096 - RNA, 19 nt, Homo sapiens
  misc_RNA (1)...(19): siRNA sense strand
caagauaagccugaaugaa

SEQ ID NO: 1068097 - RNA, 19 nt, Homo sapiens
  misc_RNA (1)...(19): siRNA sense strand
ggagaguaauaaagaagca

SEQ ID NO: 1068098 - RNA, 19 nt, Homo sapiens
  misc_RNA (1)...(19): siRNA sense strand
auacccaccugaaagagua

SEQ ID NO: 1068099 - RNA, 19 nt, Homo sapiens
  misc_RNA (1)...(19): siRNA sense strand
aaagagacacucaaacaau

SEQ ID NO: 1068100 - RNA, 19 nt, Homo sapiens
  misc_RNA (1)...(19): siRNA sense strand
gcaggugauaguagaagua

SEQ ID NO: 1068101 - RNA, 19 nt, Homo sapiens
  misc_RNA (1)...(19): siRNA sense strand
ucaagcaucuggaauacgu

SEQ ID NO: 1068102 - RNA, 19 nt, Homo sapiens
  misc_RNA (1)...(19): siRNA sense strand
uagccacagcugauuauua

SEQ ID NO: 1068103 - RNA, 19 nt, Homo sapiens
  misc_RNA (1)...(19): siRNA sense strand
augaagaugucacagauga

SEQ ID NO: 1068104 - RNA, 19 nt, Homo sapiens
  misc_RNA (1)...(19): siRNA sense strand
aaagugggauggccaaucu

SEQ ID NO: 1068105 - RNA, 19 nt, Homo sapiens
  misc_RNA (1)...(19): siRNA sense strand
caaccaagauaagccugaa

SEQ ID NO: 1068106 - RNA, 19 nt, Homo sapiens
  misc_RNA (1)...(19): siRNA sense strand
ccuggaaaccucucacuaa

SEQ ID NO: 1068107 - RNA, 19 nt, Homo sapiens
  misc_RNA (1)...(19): siRNA sense strand
cauuugagauuaacggaau

SEQ ID NO: 1068108 - RNA, 19 nt, Homo sapiens
  misc_RNA (1)...(19): siRNA sense strand
ugcagucucuucaauagaa

SEQ ID NO: 1068109 - RNA, 19 nt, Homo sapiens
  misc_RNA (1)...(19): siRNA sense strand
gcagucucuucaauagaaa

SEQ ID NO: 1068110 - RNA, 19 nt, Homo sapiens
  misc_RNA (1)...(19): siRNA sense strand
gaaaacagcucgaaugaug

SEQ ID NO: 1068111 - RNA, 19 nt, Homo sapiens
  misc_RNA (1)...(19): siRNA sense strand
cagcuaagacucaauguua

SEQ ID NO: 1068112 - RNA, 19 nt, Homo sapiens
  misc_RNA (1)...(19): siRNA sense strand
gcaauaugcuaucucauuc

SEQ ID NO: 1068113 - RNA, 19 nt, Homo sapiens
  misc_RNA (1)...(19): siRNA sense strand
ccagacaccuuaaagcaaa

SEQ ID NO: 1068114 - RNA, 19 nt, Homo sapiens
  misc_RNA (1)...(19): siRNA sense strand
caagaggaaucagaacuuu

SEQ ID NO: 1068115 - RNA, 19 nt, Homo sapiens
  misc_RNA (1)...(19): siRNA sense strand
gcaaggcacuuuguucuuc

SEQ ID NO: 1068116 - RNA, 19 nt, Homo sapiens
  misc_RNA (1)...(19): siRNA sense strand
guagcaacauucagucaaa

SEQ ID NO: 1068117 - RNA, 19 nt, Homo sapiens
  misc_RNA (1)...(19): siRNA sense strand
ugaaagauguaucccaaga

SEQ ID NO: 1068118 - RNA, 19 nt, Homo sapiens
  misc_RNA (1)...(19): siRNA sense strand
gauaaucagucaguaguca

SEQ ID NO: 1068119 - RNA, 19 nt, Homo sapiens
  misc_RNA (1)...(19): siRNA sense strand
uuacugaacagcucaauaa

SEQ ID NO: 1068120 - RNA, 19 nt, Homo sapiens
  misc_RNA (1)...(19): siRNA sense strand
gcuagucgcugcaauaugc

SEQ ID NO: 1068121 - RNA, 19 nt, Homo sapiens
  misc_RNA (1)...(19): siRNA sense strand
caaacaaagaucacaauga

SEQ ID NO: 1068122 - RNA, 19 nt, Homo sapiens
  misc_RNA (1)...(19): siRNA sense strand
gcuaagacucaauguuaua

SEQ ID NO: 1068123 - RNA, 19 nt, Homo sapiens
  misc_RNA (1)...(19): siRNA sense strand
caagcaagauuagugaaga

SEQ ID NO: 1068124 - RNA, 19 nt, Homo sapiens
  misc_RNA (1)...(19): siRNA sense strand
ggagcuagucgcugcaaua

SEQ ID NO: 1068125 - RNA, 19 nt, Homo sapiens
  misc_RNA (1)...(19): siRNA sense strand
caagagacaugcacugaac

SEQ ID NO: 1068126 - RNA, 19 nt, Homo sapiens
  misc_RNA (1)...(19): siRNA sense strand
gaugaugaacuucuuaaug

SEQ ID NO: 1068127 - RNA, 19 nt, Homo sapiens
  misc_RNA (1)...(19): siRNA sense strand
acacucagaugaugaacuu

SEQ ID NO: 1068128 - RNA, 19 nt, Homo sapiens
  misc_RNA (1)...(19): siRNA sense strand
caaauaggcgguuuucuua

SEQ ID NO: 1068129 - RNA, 19 nt, Homo sapiens
  misc_RNA (1)...(19): siRNA sense strand
caagauuagugaagacaau

SEQ ID NO: 1068130 - RNA, 19 nt, Homo sapiens
  misc_RNA (1)...(19): siRNA sense strand
gaacacugcuuggauucug

SEQ ID NO: 1068131 - RNA, 19 nt, Homo sapiens
  misc_RNA (1)...(19): siRNA sense strand
agagaacacugcuuggauu

SEQ ID NO: 1068132 - RNA, 19 nt, Homo sapiens
  misc_RNA (1)...(19): siRNA sense strand
gcaagaaguagcaacauuc

SEQ ID NO: 1068133 - RNA, 19 nt, Homo sapiens
  misc_RNA (1)...(19): siRNA sense strand
gauggauguuugucagaaa

SEQ ID NO: 1068134 - RNA, 19 nt, Homo sapiens
  misc_RNA (1)...(19): siRNA sense strand
gaaucagaacuuugucuuu

SEQ ID NO: 1068135 - RNA, 19 nt, Homo sapiens
  misc_RNA (1)...(19): siRNA sense strand
gaagauaaucagucaguag

SEQ ID NO: 1068136 - RNA, 19 nt, Homo sapiens
  misc_RNA (1)...(19): siRNA sense strand
ugaacuggaugcuaaacuu

SEQ ID NO: 1068137 - RNA, 19 nt, Homo sapiens
  misc_RNA (1)...(19): siRNA sense strand
agacuuggauccacuuuca

SEQ ID NO: 1068138 - RNA, 19 nt, Homo sapiens
  misc_RNA (1)...(19): siRNA sense strand
gaacuggaugcuaaacuug

SEQ ID NO: 1068139 - RNA, 19 nt, Homo sapiens
  misc_RNA (1)...(19): siRNA sense strand
gaagauaaucgagaaauac

SEQ ID NO: 1068140 - RNA, 19 nt, Homo sapiens
  misc_RNA (1)...(19): siRNA sense strand
ucugauaccuugaugacaa

SEQ ID NO: 1068141 - RNA, 19 nt, Homo sapiens
  misc_RNA (1)...(19): siRNA sense strand
aaucagaacuuugucuuuc

SEQ ID NO: 1068142 - RNA, 19 nt, Homo sapiens
  misc_RNA (1)...(19): siRNA sense strand
ucacagaguccaaagaaau

SEQ ID NO: 1068143 - RNA, 19 nt, Homo sapiens
  misc_RNA (1)...(19): siRNA sense strand
gaggagcucuacuguggau

SEQ ID NO: 1068144 - RNA, 19 nt, Homo sapiens
  misc_RNA (1)...(19): siRNA sense strand
aaggaauucucauuucuga

SEQ ID NO: 1068145 - RNA, 19 nt, Homo sapiens
  misc_RNA (1)...(19): siRNA sense strand
gugaagacaauaaagauga

SEQ ID NO: 1068146 - RNA, 19 nt, Homo sapiens
  misc_RNA (1)...(19): siRNA sense strand
gacaugcacugaacuucug

SEQ ID NO: 1068147 - RNA, 19 nt, Homo sapiens
  misc_RNA (1)...(19): siRNA sense strand
gcaaacaaagaucacaaug

SEQ ID NO: 1068148 - RNA, 19 nt, Homo sapiens
  misc_RNA (1)...(19): siRNA sense strand
gaacaagcaaacaaagauc

SEQ ID NO: 1068149 - RNA, 19 nt, Homo sapiens
  misc_RNA (1)...(19): siRNA sense strand
cagaugcaagugagaaaua

SEQ ID NO: 1068150 - RNA, 19 nt, Homo sapiens
  misc_RNA (1)...(19): siRNA sense strand
gcaaagauuggcccugugu

SEQ ID NO: 1068151 - RNA, 19 nt, Homo sapiens
  misc_RNA (1)...(19): siRNA sense strand
aaacccagaugcuauugga

SEQ ID NO: 1068152 - RNA, 19 nt, Homo sapiens
  misc_RNA (1)...(19): siRNA sense strand
gagaagauuuugagaagga

SEQ ID NO: 1068153 - RNA, 19 nt, Homo sapiens
  misc_RNA (1)...(19): siRNA sense strand
gcugcaauaugcuaucuca

SEQ ID NO: 1068154 - RNA, 19 nt, Homo sapiens
  misc_RNA (1)...(19): siRNA sense strand
caacccagaccagaagaua

SEQ ID NO: 1068155 - RNA, 19 nt, Homo sapiens
  misc_RNA (1)...(19): siRNA sense strand
gaagcaagaaguagcaaca

SEQ ID NO: 1068156 - RNA, 19 nt, Homo sapiens
  misc_RNA (1)...(19): siRNA sense strand
augcugaacuggaugcuaa

SEQ ID NO: 1068157 - RNA, 19 nt, Homo sapiens
  misc_RNA (1)...(19): siRNA sense strand
gaacuuugucuuucacaca

SEQ ID NO: 1068158 - RNA, 19 nt, Homo sapiens
  misc_RNA (1)...(19): siRNA sense strand
gaagaaaacagcucgaaug

SEQ ID NO: 1068159 - RNA, 19 nt, Homo sapiens
  misc_RNA (1)...(19): siRNA sense strand
cuagugaauuuacccaaga

SEQ ID NO: 1068160 - RNA, 19 nt, Homo sapiens
  misc_RNA (1)...(19): siRNA sense strand
gaaggaauucucauuucug

SEQ ID NO: 1068161 - RNA, 19 nt, Homo sapiens
  misc_RNA (1)...(19): siRNA sense strand
ggaaucagaacuuugucuu

SEQ ID NO: 1068162 - RNA, 19 nt, Homo sapiens
  misc_RNA (1)...(19): siRNA sense strand
cgagaaauaccagcuaaga

SEQ ID NO: 1068163 - RNA, 19 nt, Homo sapiens
  misc_RNA (1)...(19): siRNA sense strand
ggaauucucauuucugaac

SEQ ID NO: 1068164 - RNA, 19 nt, Homo sapiens
  misc_RNA (1)...(19): siRNA sense strand
caagacacgccaagcaaga

SEQ ID NO: 1068165 - RNA, 19 nt, Homo sapiens
  misc_RNA (1)...(19): siRNA sense strand
aguuaaagauggauguuug

SEQ ID NO: 1068166 - RNA, 19 nt, Homo sapiens
  misc_RNA (1)...(19): siRNA sense strand
gcucuacuguggaugaaag

SEQ ID NO: 1068167 - RNA, 19 nt, Homo sapiens
  misc_RNA (1)...(19): siRNA sense strand
gacucaauguuauaucaga

SEQ ID NO: 1068168 - RNA, 19 nt, Homo sapiens
  misc_RNA (1)...(19): siRNA sense strand
caaggcacuuuguucuuca

SEQ ID NO: 1068169 - RNA, 19 nt, Homo sapiens
  misc_RNA (1)...(19): siRNA sense strand
caagaaguagcaacauuca

SEQ ID NO: 1068170 - RNA, 19 nt, Homo sapiens
  misc_RNA (1)...(19): siRNA sense strand
cucauucgcucacuaccua

SEQ ID NO: 1068171 - RNA, 19 nt, Homo sapiens
  misc_RNA (1)...(19): siRNA sense strand
guagucagaagaaugcaaa

SEQ ID NO: 1068172 - RNA, 19 nt, Homo sapiens
  misc_RNA (1)...(19): siRNA sense strand
ccuaaguucugguucuuca

SEQ ID NO: 1068173 - RNA, 19 nt, Homo sapiens
  misc_RNA (1)...(19): siRNA sense strand
gaauucucauuucugaaca

SEQ ID NO: 1068174 - RNA, 19 nt, Homo sapiens
  misc_RNA (1)...(19): siRNA sense strand
gagcuagucgcugcaauau

SEQ ID NO: 1068175 - RNA, 19 nt, Homo sapiens
  misc_RNA (1)...(19): siRNA sense strand
ggauuuacuuggagcuagu

SEQ ID NO: 1068176 - RNA, 19 nt, Homo sapiens
  misc_RNA (1)...(19): siRNA sense strand
gcaagugagaaauagcaaa

SEQ ID NO: 1068177 - RNA, 19 nt, Homo sapiens
  misc_RNA (1)...(19): siRNA sense strand
gagcaggcacgcacagaau

SEQ ID NO: 1068178 - RNA, 19 nt, Homo sapiens
  misc_RNA (1)...(19): siRNA sense strand
gauaccuugaugacaauua

SEQ ID NO: 1068179 - RNA, 19 nt, Homo sapiens
  misc_RNA (1)...(19): siRNA sense strand
ggagcucuacuguggauga

SEQ ID NO: 1068180 - RNA, 19 nt, Homo sapiens
  misc_RNA (1)...(19): siRNA sense strand
ccaagaggaaucagaacuu

SEQ ID NO: 1068181 - RNA, 19 nt, Homo sapiens
  misc_RNA (1)...(19): siRNA sense strand
guacagaugcaagugagaa

SEQ ID NO: 1068182 - RNA, 19 nt, Homo sapiens
  misc_RNA (1)...(19): siRNA sense strand
gagugaacaagcaaacaaa

SEQ ID NO: 1068183 - RNA, 19 nt, Homo sapiens
  misc_RNA (1)...(19): siRNA sense strand
gccagugccuucacagagu

SEQ ID NO: 1068184 - RNA, 19 nt, Homo sapiens
  misc_RNA (1)...(19): siRNA sense strand
ggagcaggcacgcacagaa

SEQ ID NO: 1068185 - RNA, 19 nt, Homo sapiens
  misc_RNA (1)...(19): siRNA sense strand
agaagauaaucagucagua

SEQ ID NO: 1068186 - RNA, 19 nt, Homo sapiens
  misc_RNA (1)...(19): siRNA sense strand
gacacgccaagcaagauua

SEQ ID NO: 1068187 - RNA, 19 nt, Homo sapiens
  misc_RNA (1)...(19): siRNA sense strand
cugcuuggauucuggaaga

SEQ ID NO: 1068188 - RNA, 19 nt, Homo sapiens
  misc_RNA (1)...(19): siRNA sense strand
gagcucuacuguggaugaa

SEQ ID NO: 1068189 - RNA, 19 nt, Homo sapiens
  misc_RNA (1)...(19): siRNA sense strand
ucagaugaugaacuucuua

SEQ ID NO: 1068190 - RNA, 19 nt, Homo sapiens
  misc_RNA (1)...(19): siRNA sense strand
cacagaguccaaagaaauu

SEQ ID NO: 1068191 - RNA, 19 nt, Homo sapiens
  misc_RNA (1)...(19): siRNA sense strand
cugaacaaccuccuaaguu

SEQ ID NO: 1068192 - RNA, 19 nt, Homo sapiens
  misc_RNA (1)...(19): siRNA sense strand
ugaacaagcaaacaaagau

SEQ ID NO: 1068193 - RNA, 19 nt, Homo sapiens
  misc_RNA (1)...(19): siRNA sense strand
gcucgaaugaugucccaaa

SEQ ID NO: 1068194 - RNA, 19 nt, Homo sapiens
  misc_RNA (1)...(19): siRNA sense strand
agcaagaaguagcaacauu

SEQ ID NO: 1068195 - RNA, 19 nt, Homo sapiens
  misc_RNA (1)...(19): siRNA sense strand
gaugaacuucuuaaugcuu

SEQ ID NO: 1068196 - RNA, 19 nt, Homo sapiens
  misc_RNA (1)...(19): siRNA sense strand
ucagaagaaugcaaaagaa

SEQ ID NO: 1068197 - RNA, 19 nt, Homo sapiens
  misc_RNA (1)...(19): siRNA sense strand
ugcaauaugcuaucucauu

SEQ ID NO: 1068198 - RNA, 19 nt, Homo sapiens
  misc_RNA (1)...(19): siRNA sense strand
ucaaagggcaguaucugau

SEQ ID NO: 1068199 - RNA, 19 nt, Homo sapiens
  misc_RNA (1)...(19): siRNA sense strand
ggacccagacaccuuaaag

SEQ ID NO: 1068200 - RNA, 19 nt, Homo sapiens
  misc_RNA (1)...(19): siRNA sense strand
augaugaacuucuuaaugc

SEQ ID NO: 1068201 - RNA, 19 nt, Homo sapiens
  misc_RNA (1)...(19): siRNA sense strand
cagaugaugaacuucuuaa

SEQ ID NO: 1068202 - RNA, 19 nt, Homo sapiens
  misc_RNA (1)...(19): siRNA sense strand
gguggcgucugaugcugaa

SEQ ID NO: 1068203 - RNA, 19 nt, Homo sapiens
  misc_RNA (1)...(19): siRNA sense strand
gugaacaagcaaacaaaga

SEQ ID NO: 1068204 - RNA, 19 nt, Homo sapiens
  misc_RNA (1)...(19): siRNA sense strand
ucaauaagcuaguuuuguc

SEQ ID NO: 1068205 - RNA, 19 nt, Homo sapiens
  misc_RNA (1)...(19): siRNA sense strand
uaaagauggauguuuguca

SEQ ID NO: 1068206 - RNA, 19 nt, Homo sapiens
  misc_RNA (1)...(19): siRNA sense strand
caagugagaaauagcaaag

SEQ ID NO: 1068207 - RNA, 19 nt, Homo sapiens
  misc_RNA (1)...(19): siRNA sense strand
gcuauuggacacucagaug

SEQ ID NO: 1068208 - RNA, 19 nt, Homo sapiens
  misc_RNA (1)...(19): siRNA sense strand
gaauuuggagcaccucagu

SEQ ID NO: 1068209 - RNA, 19 nt, Homo sapiens
  misc_RNA (1)...(19): siRNA sense strand
gagaacacugcuuggauuc

SEQ ID NO: 1068210 - RNA, 19 nt, Homo sapiens
  misc_RNA (1)...(19): siRNA sense strand
gaaaagagauaccuacgua

SEQ ID NO: 1068211 - RNA, 19 nt, Homo sapiens
  misc_RNA (1)...(19): siRNA sense strand
gaacagcacuacugagauc

SEQ ID NO: 1068212 - RNA, 19 nt, Homo sapiens
  misc_RNA (1)...(19): siRNA sense strand
acacaaggcuucuaaggaa

SEQ ID NO: 1068213 - RNA, 19 nt, Homo sapiens
  misc_RNA (1)...(19): siRNA sense strand
gaaaguggaacaaacaaug

SEQ ID NO: 1068214 - RNA, 19 nt, Homo sapiens
  misc_RNA (1)...(19): siRNA sense strand
cuaugaaacuccacuacua

SEQ ID NO: 1068215 - RNA, 19 nt, Homo sapiens
  misc_RNA (1)...(19): siRNA sense strand
gaaagaaggagccacuaug

SEQ ID NO: 1068216 - RNA, 19 nt, Homo sapiens
  misc_RNA (1)...(19): siRNA sense strand
gagaacagcacuacugaga

SEQ ID NO: 1068217 - RNA, 19 nt, Homo sapiens
  misc_RNA (1)...(19): siRNA sense strand
gaucugagaaggugacuga

SEQ ID NO: 1068218 - RNA, 19 nt, Homo sapiens
  misc_RNA (1)...(19): siRNA sense strand
gcaaugaccauauucaaag

SEQ ID NO: 1068219 - RNA, 19 nt, Homo sapiens
  misc_RNA (1)...(19): siRNA sense strand
cuacugagaucgcccauca

SEQ ID NO: 1068220 - RNA, 19 nt, Homo sapiens
  misc_RNA (1)...(19): siRNA sense strand
uggcaguacugacacuuua

SEQ ID NO: 1068221 - RNA, 19 nt, Homo sapiens
  misc_RNA (1)...(19): siRNA sense strand
gaaggugacugagauguac

SEQ ID NO: 1068222 - RNA, 19 nt, Homo sapiens
  misc_RNA (1)...(19): siRNA sense strand
aaacuccacuacuauaaug

SEQ ID NO: 1068223 - RNA, 19 nt, Homo sapiens
  misc_RNA (1)...(19): siRNA sense strand
agaaugcaaugaccauauu

SEQ ID NO: 1068224 - RNA, 19 nt, Homo sapiens
  misc_RNA (1)...(19): siRNA sense strand
caucccaaaucacuaauga

SEQ ID NO: 1068225 - RNA, 19 nt, Homo sapiens
  misc_RNA (1)...(19): siRNA sense strand
ggaacaaacaaugaagaua

SEQ ID NO: 1068226 - RNA, 19 nt, Homo sapiens
  misc_RNA (1)...(19): siRNA sense strand
ccaaaucacuaaugagcau

SEQ ID NO: 1068227 - RNA, 19 nt, Homo sapiens
  misc_RNA (1)...(19): siRNA sense strand
gaaacuccacuacuauaau

SEQ ID NO: 1068228 - RNA, 19 nt, Homo sapiens
  misc_RNA (1)...(19): siRNA sense strand
gaaggagccacuauggauu

SEQ ID NO: 1068229 - RNA, 19 nt, Homo sapiens
  misc_RNA (1)...(19): siRNA sense strand
cuacuuccaucucauguau

SEQ ID NO: 1068230 - RNA, 19 nt, Homo sapiens
  misc_RNA (1)...(19): siRNA sense strand
gaagaaugcaaugaccaua

SEQ ID NO: 1068231 - RNA, 19 nt, Homo sapiens
  misc_RNA (1)...(19): siRNA sense strand
caaugaccauauucaaaga

SEQ ID NO: 1068232 - RNA, 19 nt, Homo sapiens
  misc_RNA (1)...(19): siRNA sense strand
gagaacgccauuuggauga

SEQ ID NO: 1068233 - RNA, 19 nt, Homo sapiens
  misc_RNA (1)...(19): siRNA sense strand
uggaugaccucaguuuaaa

SEQ ID NO: 1068234 - RNA, 19 nt, Homo sapiens
  misc_RNA (1)...(19): siRNA sense strand
cuacugauccguaaauugu

SEQ ID NO: 1068235 - RNA, 19 nt, Homo sapiens
  misc_RNA (1)...(19): siRNA sense strand
cauauuaucagauggauuc

SEQ ID NO: 1068236 - RNA, 19 nt, Homo sapiens
  misc_RNA (1)...(19): siRNA sense strand
uagcagcaguacaagcuuu

SEQ ID NO: 1068237 - RNA, 19 nt, Homo sapiens
  misc_RNA (1)...(19): siRNA sense strand
ugaaacuccacuacuauaa

SEQ ID NO: 1068238 - RNA, 19 nt, Homo sapiens
  misc_RNA (1)...(19): siRNA sense strand
uugagccacuuccuaauaa

SEQ ID NO: 1068239 - RNA, 19 nt, Homo sapiens
  misc_RNA (1)...(19): siRNA sense strand
caauacacaaggcuucuaa

SEQ ID NO: 1068240 - RNA, 19 nt, Homo sapiens
  misc_RNA (1)...(19): siRNA sense strand
gaagaggaaggucagugaa

SEQ ID NO: 1068241 - RNA, 19 nt, Homo sapiens
  misc_RNA (1)...(19): siRNA sense strand
caaauacacgaaagaagga

SEQ ID NO: 1068242 - RNA, 19 nt, Homo sapiens
  misc_RNA (1)...(19): siRNA sense strand
ccgggucacugcauauuau

SEQ ID NO: 1068243 - RNA, 19 nt, Homo sapiens
  misc_RNA (1)...(19): siRNA sense strand
ugauugauuuggagaacaa

SEQ ID NO: 1068244 - RNA, 19 nt, Homo sapiens
  misc_RNA (1)...(19): siRNA sense strand
ggaagaagaaugcaaugac

SEQ ID NO: 1068245 - RNA, 19 nt, Homo sapiens
  misc_RNA (1)...(19): siRNA sense strand
gggagaacagcacuacuga

SEQ ID NO: 1068246 - RNA, 19 nt, Homo sapiens
  misc_RNA (1)...(19): siRNA sense strand
cgaaagaaggagccacuau

SEQ ID NO: 1068247 - RNA, 19 nt, Homo sapiens
  misc_RNA (1)...(19): siRNA sense strand
agauguaccaguucaaauu

SEQ ID NO: 1068248 - RNA, 19 nt, Homo sapiens
  misc_RNA (1)...(19): siRNA sense strand
cacaaggcuucuaaggaaa

SEQ ID NO: 1068249 - RNA, 19 nt, Homo sapiens
  misc_RNA (1)...(19): siRNA sense strand
gauguaccaguucaaauuc

SEQ ID NO: 1068250 - RNA, 19 nt, Homo sapiens
  misc_RNA (1)...(19): siRNA sense strand
gcagugaccccacaugauu

SEQ ID NO: 1068251 - RNA, 19 nt, Homo sapiens
  misc_RNA (1)...(19): siRNA sense strand
agucauagcagcaguacaa

SEQ ID NO: 1068252 - RNA, 19 nt, Homo sapiens
  misc_RNA (1)...(19): siRNA sense strand
acuuccaucucauguauaa

SEQ ID NO: 1068253 - RNA, 19 nt, Homo sapiens
  misc_RNA (1)...(19): siRNA sense strand
ucugagugcuccaggaaga

SEQ ID NO: 1068254 - RNA, 19 nt, Homo sapiens
  misc_RNA (1)...(19): siRNA sense strand
acaaggagccuaucaacgu

SEQ ID NO: 1068255 - RNA, 19 nt, Homo sapiens
  misc_RNA (1)...(19): siRNA sense strand
aaaguggaacaaacaauga

SEQ ID NO: 1068256 - RNA, 19 nt, Homo sapiens
  misc_RNA (1)...(19): siRNA sense strand
ccauuuggaugaccucagu

SEQ ID NO: 1068257 - RNA, 19 nt, Homo sapiens
  misc_RNA (1)...(19): siRNA sense strand
cugagaaggugacugagau

SEQ ID NO: 1068258 - RNA, 19 nt, Homo sapiens
  misc_RNA (1)...(19): siRNA sense strand
agacugugaugaggaagaa

SEQ ID NO: 1068259 - RNA, 19 nt, Homo sapiens
  misc_RNA (1)...(19): siRNA sense strand
ccacugcucagcuuucuca

SEQ ID NO: 1068260 - RNA, 19 nt, Homo sapiens
  misc_RNA (1)...(19): siRNA sense strand
ucuagacugugaugaggaa

SEQ ID NO: 1068261 - RNA, 19 nt, Homo sapiens
  misc_RNA (1)...(19): siRNA sense strand
caacgugcaagugggauuu

SEQ ID NO: 1068262 - RNA, 19 nt, Homo sapiens
  misc_RNA (1)...(19): siRNA sense strand
agaaggugacugagaugua

SEQ ID NO: 1068263 - RNA, 19 nt, Homo sapiens
  misc_RNA (1)...(19): siRNA sense strand
cuugagccacuuccuaaua

SEQ ID NO: 1068264 - RNA, 19 nt, Homo sapiens
  misc_RNA (1)...(19): siRNA sense strand
agaaggagccacuauggau

SEQ ID NO: 1068265 - RNA, 19 nt, Homo sapiens
  misc_RNA (1)...(19): siRNA sense strand
gagauguaccaguucaaau

SEQ ID NO: 1068266 - RNA, 19 nt, Homo sapiens
  misc_RNA (1)...(19): siRNA sense strand
uaugaaacuccacuacuau

SEQ ID NO: 1068267 - RNA, 19 nt, Homo sapiens
  misc_RNA (1)...(19): siRNA sense strand
gaccuugagccacuuccua

SEQ ID NO: 1068268 - RNA, 19 nt, Homo sapiens
  misc_RNA (1)...(19): siRNA sense strand
gagccacuuccuaauaaug

SEQ ID NO: 1068269 - RNA, 19 nt, Homo sapiens
  misc_RNA (1)...(19): siRNA sense strand
agaagaggaaggucaguga

SEQ ID NO: 1068270 - RNA, 19 nt, Homo sapiens
  misc_RNA (1)...(19): siRNA sense strand
gaaaguaaaagucaugaca

SEQ ID NO: 1068271 - RNA, 19 nt, Homo sapiens
  misc_RNA (1)...(19): siRNA sense strand
cacacuuccugcuguuuga

SEQ ID NO: 1068272 - RNA, 19 nt, Homo sapiens
  misc_RNA (1)...(19): siRNA sense strand
uuggaugaccucaguuuaa

SEQ ID NO: 1068273 - RNA, 19 nt, Homo sapiens
  misc_RNA (1)...(19): siRNA sense strand
ccaucagggucuagacugu

SEQ ID NO: 1068274 - RNA, 19 nt, Homo sapiens
  misc_RNA (1)...(19): siRNA sense strand
gacagaggcuacaaaagug

SEQ ID NO: 1068275 - RNA, 19 nt, Homo sapiens
  misc_RNA (1)...(19): siRNA sense strand
gagccacuauggauuuuga

SEQ ID NO: 1068276 - RNA, 19 nt, Homo sapiens
  misc_RNA (1)...(19): siRNA sense strand
cagauggauucaagguugu

SEQ ID NO: 1068277 - RNA, 19 nt, Homo sapiens
  misc_RNA (1)...(19): siRNA sense strand
ccacuggcuuucauagcau

SEQ ID NO: 1068278 - RNA, 19 nt, Homo sapiens
  misc_RNA (1)...(19): siRNA sense strand
aaggagccacuauggauuu

SEQ ID NO: 1068279 - RNA, 19 nt, Homo sapiens
  misc_RNA (1)...(19): siRNA sense strand
aaagaaggagccacuaugg

SEQ ID NO: 1068280 - RNA, 19 nt, Homo sapiens
  misc_RNA (1)...(19): siRNA sense strand
gcaguacugacacuuuaca

SEQ ID NO: 1068281 - RNA, 19 nt, Homo sapiens
  misc_RNA (1)...(19): siRNA sense strand
ugagauguaccaguucaaa

SEQ ID NO: 1068282 - RNA, 19 nt, Homo sapiens
  misc_RNA (1)...(19): siRNA sense strand
uacugacacuuuacacaga

SEQ ID NO: 1068283 - RNA, 19 nt, Homo sapiens
  misc_RNA (1)...(19): siRNA sense strand
guaccaguucaaauucaaa

SEQ ID NO: 1068284 - RNA, 19 nt, Homo sapiens
  misc_RNA (1)...(19): siRNA sense strand
ugaggaagaagaaugcaau

SEQ ID NO: 1068285 - RNA, 19 nt, Homo sapiens
  misc_RNA (1)...(19): siRNA sense strand
gaucgcccaucagggucua

SEQ ID NO: 1068286 - RNA, 19 nt, Homo sapiens
  misc_RNA (1)...(19): siRNA sense strand
gcuacuuccaucucaugua

SEQ ID NO: 1068287 - RNA, 19 nt, Homo sapiens
  misc_RNA (1)...(19): siRNA sense strand
ugcaaugaccauauucaaa

SEQ ID NO: 1068288 - RNA, 19 nt, Homo sapiens
  misc_RNA (1)...(19): siRNA sense strand
gaggaagaagaaugcaaug

SEQ ID NO: 1068289 - RNA, 19 nt, Homo sapiens
  misc_RNA (1)...(19): siRNA sense strand
ucacacuuccugcuguuug

SEQ ID NO: 1068290 - RNA, 19 nt, Homo sapiens
  misc_RNA (1)...(19): siRNA sense strand
gccacuuccuaauaauguu

SEQ ID NO: 1068291 - RNA, 19 nt, Homo sapiens
  misc_RNA (1)...(19): siRNA sense strand
gcaggaccuugagccacuu

SEQ ID NO: 1068292 - RNA, 19 nt, Homo sapiens
  misc_RNA (1)...(19): siRNA sense strand
acugauccguaaauuguau

SEQ ID NO: 1068293 - RNA, 19 nt, Homo sapiens
  misc_RNA (1)...(19): siRNA sense strand
uaaagaagggguaaauuca

SEQ ID NO: 1068294 - RNA, 19 nt, Homo sapiens
  misc_RNA (1)...(19): siRNA sense strand
ggucuucaucccuaacaga

SEQ ID NO: 1068295 - RNA, 19 nt, Homo sapiens
  misc_RNA (1)...(19): siRNA sense strand
gugaaccagugaaggucuu

SEQ ID NO: 1068296 - RNA, 19 nt, Homo sapiens
  misc_RNA (1)...(19): siRNA sense strand
gugaugaggaagaagaaug

SEQ ID NO: 1068297 - RNA, 19 nt, Homo sapiens
  misc_RNA (1)...(19): siRNA sense strand
ugacagaggcuacaaaagu

SEQ ID NO: 1068298 - RNA, 19 nt, Homo sapiens
  misc_RNA (1)...(19): siRNA sense strand
ugucccgggucacugcaua

SEQ ID NO: 1068299 - RNA, 19 nt, Homo sapiens
  misc_RNA (1)...(19): siRNA sense strand
aagaaugcaaugaccauau

SEQ ID NO: 1068300 - RNA, 19 nt, Homo sapiens
  misc_RNA (1)...(19): siRNA sense strand
gacagucauagcagcagua

SEQ ID NO: 1068301 - RNA, 19 nt, Homo sapiens
  misc_RNA (1)...(19): siRNA sense strand
ccaguucaaauucaaauac

SEQ ID NO: 1068302 - RNA, 19 nt, Homo sapiens
  misc_RNA (1)...(19): siRNA sense strand
gagaaggugacugagaugu

SEQ ID NO: 1068303 - RNA, 19 nt, Homo sapiens
  misc_RNA (1)...(19): siRNA sense strand
guguucuacugauccguaa

SEQ ID NO: 1068304 - RNA, 19 nt, Homo sapiens
  misc_RNA (1)...(19): siRNA sense strand
cacugcauauuaucagaug

SEQ ID NO: 1068305 - RNA, 19 nt, Homo sapiens
  misc_RNA (1)...(19): siRNA sense strand
ugagccacuuccuaauaau

SEQ ID NO: 1068306 - RNA, 19 nt, Homo sapiens
  misc_RNA (1)...(19): siRNA sense strand
ucagugaaccagugaaggu

SEQ ID NO: 1068307 - RNA, 19 nt, Homo sapiens
  misc_RNA (1)...(19): siRNA sense strand
guucugagugcuccaggaa

SEQ ID NO: 1068308 - RNA, 19 nt, Homo sapiens
  misc_RNA (1)...(19): siRNA sense strand
uccacuggcuuucauagca

SEQ ID NO: 1068309 - RNA, 19 nt, Homo sapiens
  misc_RNA (1)...(19): siRNA sense strand
augaaacuccacuacuaua

SEQ ID NO: 1068310 - RNA, 19 nt, Homo sapiens
  misc_RNA (1)...(19): siRNA sense strand
ugaagaagcugagugauuu

SEQ ID NO: 1068311 - RNA, 19 nt, Homo sapiens
  misc_RNA (1)...(19): siRNA sense strand
gccaugcccuggaggaaua

SEQ ID NO: 1068312 - RNA, 19 nt, Homo sapiens
  misc_RNA (1)...(19): siRNA sense strand
agccagagcucccgacuaa

SEQ ID NO: 1068313 - RNA, 19 nt, Homo sapiens
  misc_RNA (1)...(19): siRNA sense strand
caccacagcuggccacaau

SEQ ID NO: 1068314 - RNA, 19 nt, Homo sapiens
  misc_RNA (1)...(19): siRNA sense strand
gcucauggcaggaagcauu

SEQ ID NO: 1068315 - RNA, 19 nt, Homo sapiens
  misc_RNA (1)...(19): siRNA sense strand
gugaagaagcugagugauu

SEQ ID NO: 1068316 - RNA, 19 nt, Homo sapiens
  misc_RNA (1)...(19): siRNA sense strand
ccucagaauuccuggagaa

SEQ ID NO: 1068317 - RNA, 19 nt, Homo sapiens
  misc_RNA (1)...(19): siRNA sense strand
ugggagaguuggugaagaa

SEQ ID NO: 1068318 - RNA, 19 nt, Homo sapiens
  misc_RNA (1)...(19): siRNA sense strand
ccaagaagcagcaugagau

SEQ ID NO: 1068319 - RNA, 19 nt, Homo sapiens
  misc_RNA (1)...(19): siRNA sense strand
ccugaacucucucccagaa

SEQ ID NO: 1068320 - RNA, 19 nt, Homo sapiens
  misc_RNA (1)...(19): siRNA sense strand
agaaagaggagaagaggaa

SEQ ID NO: 1068321 - RNA, 19 nt, Homo sapiens
  misc_RNA (1)...(19): siRNA sense strand
ggccaucucucccgcuuca

SEQ ID NO: 1068322 - RNA, 19 nt, Homo sapiens
  misc_RNA (1)...(19): siRNA sense strand
aaacaugucaggcccaaga

SEQ ID NO: 1068323 - RNA, 19 nt, Homo sapiens
  misc_RNA (1)...(19): siRNA sense strand
gcaggaagcauuggaugga

SEQ ID NO: 1068324 - RNA, 19 nt, Homo sapiens
  misc_RNA (1)...(19): siRNA sense strand
gaaucuggcugcccuucag

SEQ ID NO: 1068325 - RNA, 19 nt, Homo sapiens
  misc_RNA (1)...(19): siRNA sense strand
ccagagcucccgacuaaca

SEQ ID NO: 1068326 - RNA, 19 nt, Homo sapiens
  misc_RNA (1)...(19): siRNA sense strand
ucagugggcugcugcuaca

SEQ ID NO: 1068327 - RNA, 19 nt, Homo sapiens
  misc_RNA (1)...(19): siRNA sense strand
gagaguuggugaagaagcu

SEQ ID NO: 1068328 - RNA, 19 nt, Homo sapiens
  misc_RNA (1)...(19): siRNA sense strand
cccgaggccucucucauga

SEQ ID NO: 1068329 - RNA, 19 nt, Homo sapiens
  misc_RNA (1)...(19): siRNA sense strand
ugcaggcucuggagaaaga

SEQ ID NO: 1068330 - RNA, 19 nt, Homo sapiens
  misc_RNA (1)...(19): siRNA sense strand
gaagaagcugagugauuuc

SEQ ID NO: 1068331 - RNA, 19 nt, Homo sapiens
  misc_RNA (1)...(19): siRNA sense strand
gggucaggcucuuucuguu

SEQ ID NO: 1068332 - RNA, 19 nt, Homo sapiens
  misc_RNA (1)...(19): siRNA sense strand
ggagacgcuuauucuacug

SEQ ID NO: 1068333 - RNA, 19 nt, Homo sapiens
  misc_RNA (1)...(19): siRNA sense strand
caagauugaagaauaugug

SEQ ID NO: 1068334 - RNA, 19 nt, Homo sapiens
  misc_RNA (1)...(19): siRNA sense strand
agcauuggauggacugaaa

SEQ ID NO: 1068335 - RNA, 19 nt, Homo sapiens
  misc_RNA (1)...(19): siRNA sense strand
gugggcugcugcuacauga

SEQ ID NO: 1068336 - RNA, 19 nt, Homo sapiens
  misc_RNA (1)...(19): siRNA sense strand
ugaacucucucccagaaac

SEQ ID NO: 1068337 - RNA, 19 nt, Homo sapiens
  misc_RNA (1)...(19): siRNA sense strand
acucuaccguuccaucuug

SEQ ID NO: 1068338 - RNA, 19 nt, Homo sapiens
  misc_RNA (1)...(19): siRNA sense strand
gguggagacgcuuauucua

SEQ ID NO: 1068339 - RNA, 19 nt, Homo sapiens
  misc_RNA (1)...(19): siRNA sense strand
caagaagcagcaugagauc

SEQ ID NO: 1068340 - RNA, 19 nt, Homo sapiens
  misc_RNA (1)...(19): siRNA sense strand
uuucuguucuggagacuga

SEQ ID NO: 1068341 - RNA, 19 nt, Homo sapiens
  misc_RNA (1)...(19): siRNA sense strand
ggucaggcucuuucuguuc

SEQ ID NO: 1068342 - RNA, 19 nt, Homo sapiens
  misc_RNA (1)...(19): siRNA sense strand
gcccuggccuucgaacuca

SEQ ID NO: 1068343 - RNA, 19 nt, Homo sapiens
  misc_RNA (1)...(19): siRNA sense strand
caaaccagcccucgucacu

SEQ ID NO: 1068344 - RNA, 19 nt, Homo sapiens
  misc_RNA (1)...(19): siRNA sense strand
gguccacgagcucaagauu

SEQ ID NO: 1068345 - RNA, 19 nt, Homo sapiens
  misc_RNA (1)...(19): siRNA sense strand
uggagacgcuuauucuacu

SEQ ID NO: 1068346 - RNA, 19 nt, Homo sapiens
  misc_RNA (1)...(19): siRNA sense strand
gcugagcggcuacagaaag

SEQ ID NO: 1068347 - RNA, 19 nt, Homo sapiens
  misc_RNA (1)...(19): siRNA sense strand
ggcccaagaagcagcauga

SEQ ID NO: 1068348 - RNA, 19 nt, Homo sapiens
  misc_RNA (1)...(19): siRNA sense strand
augccuacaucaucgaauu

SEQ ID NO: 1068349 - RNA, 19 nt, Homo sapiens
  misc_RNA (1)...(19): siRNA sense strand
gcacucuaccguuccaucu

SEQ ID NO: 1068350 - RNA, 19 nt, Homo sapiens
  misc_RNA (1)...(19): siRNA sense strand
gcugagcuccugcccaucu

SEQ ID NO: 1068351 - RNA, 19 nt, Homo sapiens
  misc_RNA (1)...(19): siRNA sense strand
gucaggcucuuucuguucu

SEQ ID NO: 1068352 - RNA, 19 nt, Homo sapiens
  misc_RNA (1)...(19): siRNA sense strand
ucugcaggcucuggagaaa

SEQ ID NO: 1068353 - RNA, 19 nt, Homo sapiens
  misc_RNA (1)...(19): siRNA sense strand
guggagacgcuuauucuac

SEQ ID NO: 1068354 - RNA, 19 nt, Homo sapiens
  misc_RNA (1)...(19): siRNA sense strand
ucacccugcuggcccugaa

SEQ ID NO: 1068355 - RNA, 19 nt, Homo sapiens
  misc_RNA (1)...(19): siRNA sense strand
gcgugugcccuggccuuua

SEQ ID NO: 1068356 - RNA, 19 nt, Homo sapiens
  misc_RNA (1)...(19): siRNA sense strand
cgugugcccuggccuuuac

SEQ ID NO: 1068357 - RNA, 19 nt, Homo sapiens
  misc_RNA (1)...(19): siRNA sense strand
gcuccauuccggaaacaug

SEQ ID NO: 1068358 - RNA, 19 nt, Homo sapiens
  misc_RNA (1)...(19): siRNA sense strand
gcuacaugaagcugaguga

SEQ ID NO: 1068359 - RNA, 19 nt, Homo sapiens
  misc_RNA (1)...(19): siRNA sense strand
ggagaaaguucaccagaga

SEQ ID NO: 1068360 - RNA, 19 nt, Homo sapiens
  misc_RNA (1)...(19): siRNA sense strand
gcagagcacuuauacuuca

SEQ ID NO: 1068361 - RNA, 19 nt, Homo sapiens
  misc_RNA (1)...(19): siRNA sense strand
gcacuuauacuucauccua

SEQ ID NO: 1068362 - RNA, 19 nt, Homo sapiens
  misc_RNA (1)...(19): siRNA sense strand
ccacaucgcuaccugauca

SEQ ID NO: 1068363 - RNA, 19 nt, Homo sapiens
  misc_RNA (1)...(19): siRNA sense strand
gcaccuaugacgaccauua

SEQ ID NO: 1068364 - RNA, 19 nt, Homo sapiens
  misc_RNA (1)...(19): siRNA sense strand
gaccaaguauucaacgaaa

SEQ ID NO: 1068365 - RNA, 19 nt, Homo sapiens
  misc_RNA (1)...(19): siRNA sense strand
gaagagaggagaaaguuca

SEQ ID NO: 1068366 - RNA, 19 nt, Homo sapiens
  misc_RNA (1)...(19): siRNA sense strand
cagagacacugacaagaca

SEQ ID NO: 1068367 - RNA, 19 nt, Homo sapiens
  misc_RNA (1)...(19): siRNA sense strand
uacaaacuauggacucuau

SEQ ID NO: 1068368 - RNA, 19 nt, Homo sapiens
  misc_RNA (1)...(19): siRNA sense strand
cccaauccauuuacagaaa

SEQ ID NO: 1068369 - RNA, 19 nt, Homo sapiens
  misc_RNA (1)...(19): siRNA sense strand
aagcagagcacuuauacuu

SEQ ID NO: 1068370 - RNA, 19 nt, Homo sapiens
  misc_RNA (1)...(19): siRNA sense strand
caaacuauggacucuauga

SEQ ID NO: 1068371 - RNA, 19 nt, Homo sapiens
  misc_RNA (1)...(19): siRNA sense strand
gcuggcagauugagaccaa

SEQ ID NO: 1068372 - RNA, 19 nt, Homo sapiens
  misc_RNA (1)...(19): siRNA sense strand
ccacagaccagaccagauc

SEQ ID NO: 1068373 - RNA, 19 nt, Homo sapiens
  misc_RNA (1)...(19): siRNA sense strand
gcacuuggaauggacagaa

SEQ ID NO: 1068374 - RNA, 19 nt, Homo sapiens
  misc_RNA (1)...(19): siRNA sense strand
gagaccaaguauucaacga

SEQ ID NO: 1068375 - RNA, 19 nt, Homo sapiens
  misc_RNA (1)...(19): siRNA sense strand
ggaaauuggauggaagaga

SEQ ID NO: 1068376 - RNA, 19 nt, Homo sapiens
  misc_RNA (1)...(19): siRNA sense strand
agauugagaccaaguauuc

SEQ ID NO: 1068377 - RNA, 19 nt, Homo sapiens
  misc_RNA (1)...(19): siRNA sense strand
gcagauugagaccaaguau

SEQ ID NO: 1068378 - RNA, 19 nt, Homo sapiens
  misc_RNA (1)...(19): siRNA sense strand
ggaagagaggagaaaguuc

SEQ ID NO: 1068379 - RNA, 19 nt, Homo sapiens
  misc_RNA (1)...(19): siRNA sense strand
gccugaagcagagcacuua

SEQ ID NO: 1068380 - RNA, 19 nt, Homo sapiens
  misc_RNA (1)...(19): siRNA sense strand
ccacuccgcacuuggaaug

SEQ ID NO: 1068381 - RNA, 19 nt, Homo sapiens
  misc_RNA (1)...(19): siRNA sense strand
ccaaguauucaacgaaagu

SEQ ID NO: 1068382 - RNA, 19 nt, Homo sapiens
  misc_RNA (1)...(19): siRNA sense strand
ugaagcagagcacuuauac

SEQ ID NO: 1068383 - RNA, 19 nt, Homo sapiens
  misc_RNA (1)...(19): siRNA sense strand
ggauggaagagaggagaaa

SEQ ID NO: 1068384 - RNA, 19 nt, Homo sapiens
  misc_RNA (1)...(19): siRNA sense strand
ggaauggacagaaguugcu

SEQ ID NO: 1068385 - RNA, 19 nt, Homo sapiens
  misc_RNA (1)...(19): siRNA sense strand
ccagagacacugacaagac

SEQ ID NO: 1068386 - RNA, 19 nt, Homo sapiens
  misc_RNA (1)...(19): siRNA sense strand
guaaauccacagccacucu

SEQ ID NO: 1068387 - RNA, 19 nt, Homo sapiens
  misc_RNA (1)...(19): siRNA sense strand
uggaagagaggagaaaguu

SEQ ID NO: 1068388 - RNA, 19 nt, Homo sapiens
  misc_RNA (1)...(19): siRNA sense strand
gaccaccguugugcgcuau

SEQ ID NO: 1068389 - RNA, 19 nt, Homo sapiens
  misc_RNA (1)...(19): siRNA sense strand
cugaagcagagcacuuaua

SEQ ID NO: 1068390 - RNA, 19 nt, Homo sapiens
  misc_RNA (1)...(19): siRNA sense strand
ggugguaugggaagaggaa

SEQ ID NO: 1068391 - RNA, 19 nt, Homo sapiens
  misc_RNA (1)...(19): siRNA sense strand
caagacaccccaauccauu

SEQ ID NO: 1068392 - RNA, 19 nt, Homo sapiens
  misc_RNA (1)...(19): siRNA sense strand
ccacagccacucucuacuc

SEQ ID NO: 1068393 - RNA, 19 nt, Homo sapiens
  misc_RNA (1)...(19): siRNA sense strand
cagcaccuaugacgaccau

SEQ ID NO: 1068394 - RNA, 19 nt, Homo sapiens
  misc_RNA (1)...(19): siRNA sense strand
cagauugagaccaaguauu

SEQ ID NO: 1068395 - RNA, 19 nt, Homo sapiens
  misc_RNA (1)...(19): siRNA sense strand
ccuaugacgaccauuacaa

SEQ ID NO: 1068396 - RNA, 19 nt, Homo sapiens
  misc_RNA (1)...(19): siRNA sense strand
uaugggaagaggaaaguug

SEQ ID NO: 1068397 - RNA, 19 nt, Homo sapiens
  misc_RNA (1)...(19): siRNA sense strand
ccaauccauuuacagaaaa

SEQ ID NO: 1068398 - RNA, 19 nt, Homo sapiens
  misc_RNA (1)...(19): siRNA sense strand
agaccaaguauucaacgaa

SEQ ID NO: 1068399 - RNA, 19 nt, Homo sapiens
  misc_RNA (1)...(19): siRNA sense strand
caccagagacacugacaag

SEQ ID NO: 1068400 - RNA, 19 nt, Homo sapiens
  misc_RNA (1)...(19): siRNA sense strand
ggcagauugagaccaagua

SEQ ID NO: 1068401 - RNA, 19 nt, Homo sapiens
  misc_RNA (1)...(19): siRNA sense strand
gagaagguguccaagauca

SEQ ID NO: 1068402 - RNA, 19 nt, Homo sapiens
  misc_RNA (1)...(19): siRNA sense strand
gaaccucuaugccgacauc

SEQ ID NO: 1068403 - RNA, 19 nt, Homo sapiens
  misc_RNA (1)...(19): siRNA sense strand
gaugagcagcuucuacauu

SEQ ID NO: 1068404 - RNA, 19 nt, Homo sapiens
  misc_RNA (1)...(19): siRNA sense strand
ccaagaagaccuacugcuu

SEQ ID NO: 1068405 - RNA, 19 nt, Homo sapiens
  misc_RNA (1)...(19): siRNA sense strand
ucgagaagguguccaagau

SEQ ID NO: 1068406 - RNA, 19 nt, Homo sapiens
  misc_RNA (1)...(19): siRNA sense strand
augagcagcuucuacauug

SEQ ID NO: 1068407 - RNA, 19 nt, Homo sapiens
  misc_RNA (1)...(19): siRNA sense strand
acaacgacaucgagcucua

SEQ ID NO: 1068408 - RNA, 19 nt, Homo sapiens
  misc_RNA (1)...(19): siRNA sense strand
ugacggagcgugccgacuu

SEQ ID NO: 1068409 - RNA, 19 nt, Homo sapiens
  misc_RNA (1)...(19): siRNA sense strand
gcacggaggacgaggugau

SEQ ID NO: 1068410 - RNA, 19 nt, Homo sapiens
  misc_RNA (1)...(19): siRNA sense strand
gcaacaucuucuccuacga

SEQ ID NO: 1068411 - RNA, 19 nt, Homo sapiens
  misc_RNA (1)...(19): siRNA sense strand
gagcucugcugccucuucu

SEQ ID NO: 1068412 - RNA, 19 nt, Homo sapiens
  misc_RNA (1)...(19): siRNA sense strand
cagaugagcagcuucuaca

SEQ ID NO: 1068413 - RNA, 19 nt, Homo sapiens
  misc_RNA (1)...(19): siRNA sense strand
gcggguacauccaccuucu

SEQ ID NO: 1068414 - RNA, 19 nt, Homo sapiens
  misc_RNA (1)...(19): siRNA sense strand
caucuucuccuacgacuac

SEQ ID NO: 1068415 - RNA, 19 nt, Homo sapiens
  misc_RNA (1)...(19): siRNA sense strand
ggacgaggugaucgacuuc

SEQ ID NO: 1068416 - RNA, 19 nt, Homo sapiens
  misc_RNA (1)...(19): siRNA sense strand
ccgcgucuccugcauguau

SEQ ID NO: 1068417 - RNA, 19 nt, Homo sapiens
  misc_RNA (1)...(19): siRNA sense strand
gcaaccgcgucuccugcau

SEQ ID NO: 1068418 - RNA, 19 nt, Homo sapiens
  misc_RNA (1)...(19): siRNA sense strand
gguacacgguccucuucuc

SEQ ID NO: 1068419 - RNA, 19 nt, Homo sapiens
  misc_RNA (1)...(19): siRNA sense strand
acugcaacaucuucuccua

SEQ ID NO: 1068420 - RNA, 19 nt, Homo sapiens
  misc_RNA (1)...(19): siRNA sense strand
aggacgaggugaucgacuu

SEQ ID NO: 1068421 - RNA, 19 nt, Homo sapiens
  misc_RNA (1)...(19): siRNA sense strand
ggacaccaucgaggucuuc

SEQ ID NO: 1068422 - RNA, 19 nt, Homo sapiens
  misc_RNA (1)...(19): siRNA sense strand
ucccuaacaucgagaaggu

SEQ ID NO: 1068423 - RNA, 19 nt, Homo sapiens
  misc_RNA (1)...(19): siRNA sense strand
gaaaugauguggauaagag

SEQ ID NO: 1068424 - RNA, 19 nt, Homo sapiens
  misc_RNA (1)...(19): siRNA sense strand
ugaaugagcugaugauugu

SEQ ID NO: 1068425 - RNA, 19 nt, Homo sapiens
  misc_RNA (1)...(19): siRNA sense strand
gaucaaauccucccugaaa

SEQ ID NO: 1068426 - RNA, 19 nt, Homo sapiens
  misc_RNA (1)...(19): siRNA sense strand
gaagucaguuggauuucaa

SEQ ID NO: 1068427 - RNA, 19 nt, Homo sapiens
  misc_RNA (1)...(19): siRNA sense strand
caacaacaauacucucaga

SEQ ID NO: 1068428 - RNA, 19 nt, Homo sapiens
  misc_RNA (1)...(19): siRNA sense strand
gacuguaacugaucuuauu

SEQ ID NO: 1068429 - RNA, 19 nt, Homo sapiens
  misc_RNA (1)...(19): siRNA sense strand
ggaaaccugucaaccaaca

SEQ ID NO: 1068430 - RNA, 19 nt, Homo sapiens
  misc_RNA (1)...(19): siRNA sense strand
ggaugagucugugauuuau

SEQ ID NO: 1068431 - RNA, 19 nt, Homo sapiens
  misc_RNA (1)...(19): siRNA sense strand
gauuaagccacacugaaua

SEQ ID NO: 1068432 - RNA, 19 nt, Homo sapiens
  misc_RNA (1)...(19): siRNA sense strand
uuagccagcuugcuuguuu

SEQ ID NO: 1068433 - RNA, 19 nt, Homo sapiens
  misc_RNA (1)...(19): siRNA sense strand
ugggugugcuuuauauaua

SEQ ID NO: 1068434 - RNA, 19 nt, Homo sapiens
  misc_RNA (1)...(19): siRNA sense strand
guacauguuuggucuugug

SEQ ID NO: 1068435 - RNA, 19 nt, Homo sapiens
  misc_RNA (1)...(19): siRNA sense strand
gcuaaaugcuggauuaagc

SEQ ID NO: 1068436 - RNA, 19 nt, Homo sapiens
  misc_RNA (1)...(19): siRNA sense strand
caucguaaaucucaacauc

SEQ ID NO: 1068437 - RNA, 19 nt, Homo sapiens
  misc_RNA (1)...(19): siRNA sense strand
ugagaaaugauguggauaa

SEQ ID NO: 1068438 - RNA, 19 nt, Homo sapiens
  misc_RNA (1)...(19): siRNA sense strand
ggaagaaggacagcaauca

SEQ ID NO: 1068439 - RNA, 19 nt, Homo sapiens
  misc_RNA (1)...(19): siRNA sense strand
ugaaauggcuguccuuagc

SEQ ID NO: 1068440 - RNA, 19 nt, Homo sapiens
  misc_RNA (1)...(19): siRNA sense strand
ggauuaagccacacugaau

SEQ ID NO: 1068441 - RNA, 19 nt, Homo sapiens
  misc_RNA (1)...(19): siRNA sense strand
gcaaucaucuugucauccu

SEQ ID NO: 1068442 - RNA, 19 nt, Homo sapiens
  misc_RNA (1)...(19): siRNA sense strand
ccagcuugcuuguuuaugu

SEQ ID NO: 1068443 - RNA, 19 nt, Homo sapiens
  misc_RNA (1)...(19): siRNA sense strand
uggaugagucugugauuua

SEQ ID NO: 1068444 - RNA, 19 nt, Homo sapiens
  misc_RNA (1)...(19): siRNA sense strand
gggcaucaaucuccucauc

SEQ ID NO: 1068445 - RNA, 19 nt, Homo sapiens
  misc_RNA (1)...(19): siRNA sense strand
gcuuuaacuucuagcauga

SEQ ID NO: 1068446 - RNA, 19 nt, Homo sapiens
  misc_RNA (1)...(19): siRNA sense strand
gggaugcucuuuggaacaa

SEQ ID NO: 1068447 - RNA, 19 nt, Homo sapiens
  misc_RNA (1)...(19): siRNA sense strand
ccaugggugugcuuuauau

SEQ ID NO: 1068448 - RNA, 19 nt, Homo sapiens
  misc_RNA (1)...(19): siRNA sense strand
gagaggcugcggcauguuu

SEQ ID NO: 1068449 - RNA, 19 nt, Homo sapiens
  misc_RNA (1)...(19): siRNA sense strand
cuugcuaaaugcuggauua

SEQ ID NO: 1068450 - RNA, 19 nt, Homo sapiens
  misc_RNA (1)...(19): siRNA sense strand
caacaugcggacccgaaua

SEQ ID NO: 1068451 - RNA, 19 nt, Homo sapiens
  misc_RNA (1)...(19): siRNA sense strand
ucaguuggauuucaaagca

SEQ ID NO: 1068452 - RNA, 19 nt, Homo sapiens
  misc_RNA (1)...(19): siRNA sense strand
cauguuuggucuugugauu

SEQ ID NO: 1068453 - RNA, 19 nt, Homo sapiens
  misc_RNA (1)...(19): siRNA sense strand
gagaaaugauguggauaag

SEQ ID NO: 1068454 - RNA, 19 nt, Homo sapiens
  misc_RNA (1)...(19): siRNA sense strand
acaaaucacuggccaacca

SEQ ID NO: 1068455 - RNA, 19 nt, Homo sapiens
  misc_RNA (1)...(19): siRNA sense strand
cgaauaaugauaggacuaa

SEQ ID NO: 1068456 - RNA, 19 nt, Homo sapiens
  misc_RNA (1)...(19): siRNA sense strand
gaaagaugaauaucaguac

SEQ ID NO: 1068457 - RNA, 19 nt, Homo sapiens
  misc_RNA (1)...(19): siRNA sense strand
cuacacgguucuuauagug

SEQ ID NO: 1068458 - RNA, 19 nt, Homo sapiens
  misc_RNA (1)...(19): siRNA sense strand
ugcauuggcuccucuguga

SEQ ID NO: 1068459 - RNA, 19 nt, Homo sapiens
  misc_RNA (1)...(19): siRNA sense strand
aauccucccugaaagauga

SEQ ID NO: 1068460 - RNA, 19 nt, Homo sapiens
  misc_RNA (1)...(19): siRNA sense strand
gaagaaggacagcaaucau

SEQ ID NO: 1068461 - RNA, 19 nt, Homo sapiens
  misc_RNA (1)...(19): siRNA sense strand
ccacacugaauaccagaua

SEQ ID NO: 1068462 - RNA, 19 nt, Homo sapiens
  misc_RNA (1)...(19): siRNA sense strand
gcaucaaucuccucaucuc

SEQ ID NO: 1068463 - RNA, 19 nt, Homo sapiens
  misc_RNA (1)...(19): siRNA sense strand
cagcuugcuuguuuauguu

SEQ ID NO: 1068464 - RNA, 19 nt, Homo sapiens
  misc_RNA (1)...(19): siRNA sense strand
aagaagaauuagugccaaa

SEQ ID NO: 1068465 - RNA, 19 nt, Homo sapiens
  misc_RNA (1)...(19): siRNA sense strand
gaccaugggcaucguaaau

SEQ ID NO: 1068466 - RNA, 19 nt, Homo sapiens
  misc_RNA (1)...(19): siRNA sense strand
ccugagaaaugauguggau

SEQ ID NO: 1068467 - RNA, 19 nt, Homo sapiens
  misc_RNA (1)...(19): siRNA sense strand
gauagacagauauggaaga

SEQ ID NO: 1068468 - RNA, 19 nt, Homo sapiens
  misc_RNA (1)...(19): siRNA sense strand
gccauggcuuuaacuucua

SEQ ID NO: 1068469 - RNA, 19 nt, Homo sapiens
  misc_RNA (1)...(19): siRNA sense strand
uagccagcuugcuuguuua

SEQ ID NO: 1068470 - RNA, 19 nt, Homo sapiens
  misc_RNA (1)...(19): siRNA sense strand
gcaccauccugccacucuu

SEQ ID NO: 1068471 - RNA, 19 nt, Homo sapiens
  misc_RNA (1)...(19): siRNA sense strand
ucaaauccucccugaaaga

SEQ ID NO: 1068472 - RNA, 19 nt, Homo sapiens
  misc_RNA (1)...(19): siRNA sense strand
uagcaaaagugaacuaugu

SEQ ID NO: 1068473 - RNA, 19 nt, Homo sapiens
  misc_RNA (1)...(19): siRNA sense strand
cagcaaucaucuugucauc

SEQ ID NO: 1068474 - RNA, 19 nt, Homo sapiens
  misc_RNA (1)...(19): siRNA sense strand
ccugguggguuaugaacuu

SEQ ID NO: 1068475 - RNA, 19 nt, Homo sapiens
  misc_RNA (1)...(19): siRNA sense strand
uagcagaagcucacucaug

SEQ ID NO: 1068476 - RNA, 19 nt, Homo sapiens
  misc_RNA (1)...(19): siRNA sense strand
ucucuuccauugccacuug

SEQ ID NO: 1068477 - RNA, 19 nt, Homo sapiens
  misc_RNA (1)...(19): siRNA sense strand
gaaggacagcaaucaucuu

SEQ ID NO: 1068478 - RNA, 19 nt, Homo sapiens
  misc_RNA (1)...(19): siRNA sense strand
aaacauuccucugcauugg

SEQ ID NO: 1068479 - RNA, 19 nt, Homo sapiens
  misc_RNA (1)...(19): siRNA sense strand
aaugauaggacuaacacua

SEQ ID NO: 1068480 - RNA, 19 nt, Homo sapiens
  misc_RNA (1)...(19): siRNA sense strand
ggacaagagggagcugcua

SEQ ID NO: 1068481 - RNA, 19 nt, Homo sapiens
  misc_RNA (1)...(19): siRNA sense strand
ucaccaagaagaauuagug

SEQ ID NO: 1068482 - RNA, 19 nt, Homo sapiens
  misc_RNA (1)...(19): siRNA sense strand
ggagucgucaaggucauua

SEQ ID NO: 1068483 - RNA, 19 nt, Homo sapiens
  misc_RNA (1)...(19): siRNA sense strand
gggagcugcuagcaagguu

SEQ ID NO: 1068484 - RNA, 19 nt, Homo sapiens
  misc_RNA (1)...(19): siRNA sense strand
caauggagcuagcaaaagu

SEQ ID NO: 1068485 - RNA, 19 nt, Homo sapiens
  misc_RNA (1)...(19): siRNA sense strand
guuuauaccugagacaaag

SEQ ID NO: 1068486 - RNA, 19 nt, Homo sapiens
  misc_RNA (1)...(19): siRNA sense strand
gggcucuucuucagaucaa

SEQ ID NO: 1068487 - RNA, 19 nt, Homo sapiens
  misc_RNA (1)...(19): siRNA sense strand
gagcaggaaaugguuguga

SEQ ID NO: 1068488 - RNA, 19 nt, Homo sapiens
  misc_RNA (1)...(19): siRNA sense strand
uguaacaagcuguguggua

SEQ ID NO: 1068489 - RNA, 19 nt, Homo sapiens
  misc_RNA (1)...(19): siRNA sense strand
auagacagauauggaagaa

SEQ ID NO: 1068490 - RNA, 19 nt, Homo sapiens
  misc_RNA (1)...(19): siRNA sense strand
acaaauaucaauggagcua

SEQ ID NO: 1068491 - RNA, 19 nt, Homo sapiens
  misc_RNA (1)...(19): siRNA sense strand
gauugcuccucaacacaga

SEQ ID NO: 1068492 - RNA, 19 nt, Homo sapiens
  misc_RNA (1)...(19): siRNA sense strand
ccaugggcaucguaaaucu

SEQ ID NO: 1068493 - RNA, 19 nt, Homo sapiens
  misc_RNA (1)...(19): siRNA sense strand
ucaucaccaagaagaauua

SEQ ID NO: 1068494 - RNA, 19 nt, Homo sapiens
  misc_RNA (1)...(19): siRNA sense strand
uggaacaaauaucaaugga

SEQ ID NO: 1068495 - RNA, 19 nt, Homo sapiens
  misc_RNA (1)...(19): siRNA sense strand
gccaugggugugcuuuaua

SEQ ID NO: 1068496 - RNA, 19 nt, Homo sapiens
  misc_RNA (1)...(19): siRNA sense strand
ucagagaccacuucaaagg

SEQ ID NO: 1068497 - RNA, 19 nt, Homo sapiens
  misc_RNA (1)...(19): siRNA sense strand
gaagccacaauucuaucaa

SEQ ID NO: 1068498 - RNA, 19 nt, Homo sapiens
  misc_RNA (1)...(19): siRNA sense strand
caacauccacaugaacuuc

SEQ ID NO: 1068499 - RNA, 19 nt, Homo sapiens
  misc_RNA (1)...(19): siRNA sense strand
cauucuuucugccuauauu

SEQ ID NO: 1068500 - RNA, 19 nt, Homo sapiens
  misc_RNA (1)...(19): siRNA sense strand
caaauccucccugaaagau

SEQ ID NO: 1068501 - RNA, 19 nt, Homo sapiens
  misc_RNA (1)...(19): siRNA sense strand
cuucuugugucacugaaug

SEQ ID NO: 1068502 - RNA, 19 nt, Homo sapiens
  misc_RNA (1)...(19): siRNA sense strand
caaccaacaacaauacucu

SEQ ID NO: 1068503 - RNA, 19 nt, Homo sapiens
  misc_RNA (1)...(19): siRNA sense strand
aaucucaacauccacauga

SEQ ID NO: 1068504 - RNA, 19 nt, Homo sapiens
  misc_RNA (1)...(19): siRNA sense strand
augcggacccgaauaauga

SEQ ID NO: 1068505 - RNA, 19 nt, Homo sapiens
  misc_RNA (1)...(19): siRNA sense strand
ccuacacgguucuuauagu

SEQ ID NO: 1068506 - RNA, 19 nt, Homo sapiens
  misc_RNA (1)...(19): siRNA sense strand
ccucaucucgcugacauuu

SEQ ID NO: 1068507 - RNA, 19 nt, Homo sapiens
  misc_RNA (1)...(19): siRNA sense strand
uaacuucuagcaugaacug

SEQ ID NO: 1068508 - RNA, 19 nt, Homo sapiens
  misc_RNA (1)...(19): siRNA sense strand
aauaccagauagucacaga

SEQ ID NO: 1068509 - RNA, 19 nt, Homo sapiens
  misc_RNA (1)...(19): siRNA sense strand
caagcaauugcaauguauu

SEQ ID NO: 1068510 - RNA, 19 nt, Homo sapiens
  misc_RNA (1)...(19): siRNA sense strand
ugagucaucaccaagaaga

SEQ ID NO: 1068511 - RNA, 19 nt, Homo sapiens
  misc_RNA (1)...(19): siRNA sense strand
uauacaaucaugagucuag

SEQ ID NO: 1068512 - RNA, 19 nt, Homo sapiens
  misc_RNA (1)...(19): siRNA sense strand
gggugugcuuuauauauac

SEQ ID NO: 1068513 - RNA, 19 nt, Homo sapiens
  misc_RNA (1)...(19): siRNA sense strand
uuguuuauguugcugcuuu

SEQ ID NO: 1068514 - RNA, 19 nt, Homo sapiens
  misc_RNA (1)...(19): siRNA sense strand
ucaaccaguccuuggauga

SEQ ID NO: 1068515 - RNA, 19 nt, Homo sapiens
  misc_RNA (1)...(19): siRNA sense strand
uagucuugauccucaguuu

SEQ ID NO: 1068516 - RNA, 19 nt, Homo sapiens
  misc_RNA (1)...(19): siRNA sense strand
uuaccuuccugucaucugu

SEQ ID NO: 1068517 - RNA, 19 nt, Homo sapiens
  misc_RNA (1)...(19): siRNA sense strand
gaauaaugauaggacuaac

SEQ ID NO: 1068518 - RNA, 19 nt, Homo sapiens
  misc_RNA (1)...(19): siRNA sense strand
gggaucuguuucguucaaa

SEQ ID NO: 1068519 - RNA, 19 nt, Homo sapiens
  misc_RNA (1)...(19): siRNA sense strand
ugggaucuguuucguucaa

SEQ ID NO: 1068520 - RNA, 19 nt, Homo sapiens
  misc_RNA (1)...(19): siRNA sense strand
gaaguacauguuuggucuu

SEQ ID NO: 1068521 - RNA, 19 nt, Homo sapiens
  misc_RNA (1)...(19): siRNA sense strand
agagauugcuccucaacac

SEQ ID NO: 1068522 - RNA, 19 nt, Homo sapiens
  misc_RNA (1)...(19): siRNA sense strand
guguuuacaucgcagagau

SEQ ID NO: 1068523 - RNA, 19 nt, Homo sapiens
  misc_RNA (1)...(19): siRNA sense strand
gauagaaguuugucaggua

SEQ ID NO: 1068524 - RNA, 19 nt, Homo sapiens
  misc_RNA (1)...(19): siRNA sense strand
gaagaggcauugcucaaga

SEQ ID NO: 1068525 - RNA, 19 nt, Homo sapiens
  misc_RNA (1)...(19): siRNA sense strand
gaagaauucucaucauagu

SEQ ID NO: 1068526 - RNA, 19 nt, Homo sapiens
  misc_RNA (1)...(19): siRNA sense strand
gagaagcugucccaaguga

SEQ ID NO: 1068527 - RNA, 19 nt, Homo sapiens
  misc_RNA (1)...(19): siRNA sense strand
gaauuuacgucgcaucuca

SEQ ID NO: 1068528 - RNA, 19 nt, Homo sapiens
  misc_RNA (1)...(19): siRNA sense strand
gaugaugacuggaggcaaa

SEQ ID NO: 1068529 - RNA, 19 nt, Homo sapiens
  misc_RNA (1)...(19): siRNA sense strand
gcaggagaccucagaauug

SEQ ID NO: 1068530 - RNA, 19 nt, Homo sapiens
  misc_RNA (1)...(19): siRNA sense strand
guacagugcagagaauuua

SEQ ID NO: 1068531 - RNA, 19 nt, Homo sapiens
  misc_RNA (1)...(19): siRNA sense strand
ccaugacccuucuguguuu

SEQ ID NO: 1068532 - RNA, 19 nt, Homo sapiens
  misc_RNA (1)...(19): siRNA sense strand
caagcucccuccacaagaa

SEQ ID NO: 1068533 - RNA, 19 nt, Homo sapiens
  misc_RNA (1)...(19): siRNA sense strand
gcagcacagucaaugguaa

SEQ ID NO: 1068534 - RNA, 19 nt, Homo sapiens
  misc_RNA (1)...(19): siRNA sense strand
guacagguuucaaggauag

SEQ ID NO: 1068535 - RNA, 19 nt, Homo sapiens
  misc_RNA (1)...(19): siRNA sense strand
gcaguacagugcagagaau

SEQ ID NO: 1068536 - RNA, 19 nt, Homo sapiens
  misc_RNA (1)...(19): siRNA sense strand
caaacaggcucugcagaug

SEQ ID NO: 1068537 - RNA, 19 nt, Homo sapiens
  misc_RNA (1)...(19): siRNA sense strand
gaggucagcuuggaauuca

SEQ ID NO: 1068538 - RNA, 19 nt, Homo sapiens
  misc_RNA (1)...(19): siRNA sense strand
ggagugaucuuuuccauuc

SEQ ID NO: 1068539 - RNA, 19 nt, Homo sapiens
  misc_RNA (1)...(19): siRNA sense strand
gcaccuaggccaggaauga

SEQ ID NO: 1068540 - RNA, 19 nt, Homo sapiens
  misc_RNA (1)...(19): siRNA sense strand
gcagugaggagaccuauag

SEQ ID NO: 1068541 - RNA, 19 nt, Homo sapiens
  misc_RNA (1)...(19): siRNA sense strand
aagagaagcugucccaagu

SEQ ID NO: 1068542 - RNA, 19 nt, Homo sapiens
  misc_RNA (1)...(19): siRNA sense strand
gggaccagauuccugacua

SEQ ID NO: 1068543 - RNA, 19 nt, Homo sapiens
  misc_RNA (1)...(19): siRNA sense strand
caaggaguguccagcaguu

SEQ ID NO: 1068544 - RNA, 19 nt, Homo sapiens
  misc_RNA (1)...(19): siRNA sense strand
caagcuggcuguucuggau

SEQ ID NO: 1068545 - RNA, 19 nt, Homo sapiens
  misc_RNA (1)...(19): siRNA sense strand
ggacuuccuugccuuugga

SEQ ID NO: 1068546 - RNA, 19 nt, Homo sapiens
  misc_RNA (1)...(19): siRNA sense strand
ggaauagccaccucugaga

SEQ ID NO: 1068547 - RNA, 19 nt, Homo sapiens
  misc_RNA (1)...(19): siRNA sense strand
agagagaaaucacauccuu

SEQ ID NO: 1068548 - RNA, 19 nt, Homo sapiens
  misc_RNA (1)...(19): siRNA sense strand
uaaccuauccagagagaaa

SEQ ID NO: 1068549 - RNA, 19 nt, Homo sapiens
  misc_RNA (1)...(19): siRNA sense strand
gggcagcaguacugacuug

SEQ ID NO: 1068550 - RNA, 19 nt, Homo sapiens
  misc_RNA (1)...(19): siRNA sense strand
gaagcugucccaagugaga

SEQ ID NO: 1068551 - RNA, 19 nt, Homo sapiens
  misc_RNA (1)...(19): siRNA sense strand
gaauucagauccuguucca

SEQ ID NO: 1068552 - RNA, 19 nt, Homo sapiens
  misc_RNA (1)...(19): siRNA sense strand
ccagacauauaccaagaga

SEQ ID NO: 1068553 - RNA, 19 nt, Homo sapiens
  misc_RNA (1)...(19): siRNA sense strand
gaaggacuuugaacuacca

SEQ ID NO: 1068554 - RNA, 19 nt, Homo sapiens
  misc_RNA (1)...(19): siRNA sense strand
gaauuggagucucuguauc

SEQ ID NO: 1068555 - RNA, 19 nt, Homo sapiens
  misc_RNA (1)...(19): siRNA sense strand
cauaaugccuguugcuucu

SEQ ID NO: 1068556 - RNA, 19 nt, Homo sapiens
  misc_RNA (1)...(19): siRNA sense strand
caggaaggacuuugaacua

SEQ ID NO: 1068557 - RNA, 19 nt, Homo sapiens
  misc_RNA (1)...(19): siRNA sense strand
gccuguugcuucuucauuu

SEQ ID NO: 1068558 - RNA, 19 nt, Homo sapiens
  misc_RNA (1)...(19): siRNA sense strand
ugaaguagacaacauugaa

SEQ ID NO: 1068559 - RNA, 19 nt, Homo sapiens
  misc_RNA (1)...(19): siRNA sense strand
caguagaucugccuugaag

SEQ ID NO: 1068560 - RNA, 19 nt, Homo sapiens
  misc_RNA (1)...(19): siRNA sense strand
ggagagggguuucuguuug

SEQ ID NO: 1068561 - RNA, 19 nt, Homo sapiens
  misc_RNA (1)...(19): siRNA sense strand
gcuguaguccuucaaauuc

SEQ ID NO: 1068562 - RNA, 19 nt, Homo sapiens
  misc_RNA (1)...(19): siRNA sense strand
gagaccaaccagcauauug

SEQ ID NO: 1068563 - RNA, 19 nt, Homo sapiens
  misc_RNA (1)...(19): siRNA sense strand
gagagaaaucacauccuuu

SEQ ID NO: 1068564 - RNA, 19 nt, Homo sapiens
  misc_RNA (1)...(19): siRNA sense strand
gcagaaaacuaaccaaugc

SEQ ID NO: 1068565 - RNA, 19 nt, Homo sapiens
  misc_RNA (1)...(19): siRNA sense strand
gaagaguccacugaacauu

SEQ ID NO: 1068566 - RNA, 19 nt, Homo sapiens
  misc_RNA (1)...(19): siRNA sense strand
gugcuucacuguccugauc

SEQ ID NO: 1068567 - RNA, 19 nt, Homo sapiens
  misc_RNA (1)...(19): siRNA sense strand
ucagagaccaaccagcaua

SEQ ID NO: 1068568 - RNA, 19 nt, Homo sapiens
  misc_RNA (1)...(19): siRNA sense strand
agaauucucaucauaguug

SEQ ID NO: 1068569 - RNA, 19 nt, Homo sapiens
  misc_RNA (1)...(19): siRNA sense strand
ggaagaguccacugaacau

SEQ ID NO: 1068570 - RNA, 19 nt, Homo sapiens
  misc_RNA (1)...(19): siRNA sense strand
ccaguucuuucuuccauuc

SEQ ID NO: 1068571 - RNA, 19 nt, Homo sapiens
  misc_RNA (1)...(19): siRNA sense strand
gggaagaguccacugaaca

SEQ ID NO: 1068572 - RNA, 19 nt, Homo sapiens
  misc_RNA (1)...(19): siRNA sense strand
gcaauccucaacuaaccua

SEQ ID NO: 1068573 - RNA, 19 nt, Homo sapiens
  misc_RNA (1)...(19): siRNA sense strand
ccaaacaggcucugcagau

SEQ ID NO: 1068574 - RNA, 19 nt, Homo sapiens
  misc_RNA (1)...(19): siRNA sense strand
ccacugaacauucuucucu

SEQ ID NO: 1068575 - RNA, 19 nt, Homo sapiens
  misc_RNA (1)...(19): siRNA sense strand
caggagaccucagaauugg

SEQ ID NO: 1068576 - RNA, 19 nt, Homo sapiens
  misc_RNA (1)...(19): siRNA sense strand
gaaaucacauccuuuugca

SEQ ID NO: 1068577 - RNA, 19 nt, Homo sapiens
  misc_RNA (1)...(19): siRNA sense strand
gaucugggcagcaguacug

SEQ ID NO: 1068578 - RNA, 19 nt, Homo sapiens
  misc_RNA (1)...(19): siRNA sense strand
auucuucucuugccuuaaa

SEQ ID NO: 1068579 - RNA, 19 nt, Homo sapiens
  misc_RNA (1)...(19): siRNA sense strand
aaagaaggauccugcuaac

SEQ ID NO: 1068580 - RNA, 19 nt, Homo sapiens
  misc_RNA (1)...(19): siRNA sense strand
ggaccagauuccugacuac

SEQ ID NO: 1068581 - RNA, 19 nt, Homo sapiens
  misc_RNA (1)...(19): siRNA sense strand
gauccuggucucucaaaga

SEQ ID NO: 1068582 - RNA, 19 nt, Homo sapiens
  misc_RNA (1)...(19): siRNA sense strand
caagaaggaagaggcauug

SEQ ID NO: 1068583 - RNA, 19 nt, Homo sapiens
  misc_RNA (1)...(19): siRNA sense strand
aaccuacacugccacacua

SEQ ID NO: 1068584 - RNA, 19 nt, Homo sapiens
  misc_RNA (1)...(19): siRNA sense strand
uguguaaccuauccagaga

SEQ ID NO: 1068585 - RNA, 19 nt, Homo sapiens
  misc_RNA (1)...(19): siRNA sense strand
agacauauaccaagagaag

SEQ ID NO: 1068586 - RNA, 19 nt, Homo sapiens
  misc_RNA (1)...(19): siRNA sense strand
acauucuucucuugccuua

SEQ ID NO: 1068587 - RNA, 19 nt, Homo sapiens
  misc_RNA (1)...(19): siRNA sense strand
gaaaagaaggauccugcua

SEQ ID NO: 1068588 - RNA, 19 nt, Homo sapiens
  misc_RNA (1)...(19): siRNA sense strand
gcacccacuuagccaaaca

SEQ ID NO: 1068589 - RNA, 19 nt, Homo sapiens
  misc_RNA (1)...(19): siRNA sense strand
gcaagcucccuccacaaga

SEQ ID NO: 1068590 - RNA, 19 nt, Homo sapiens
  misc_RNA (1)...(19): siRNA sense strand
ccauacguguguaaccuau

SEQ ID NO: 1068591 - RNA, 19 nt, Homo sapiens
  misc_RNA (1)...(19): siRNA sense strand
acucugggcugccuaaugg

SEQ ID NO: 1068592 - RNA, 19 nt, Homo sapiens
  misc_RNA (1)...(19): siRNA sense strand
ucagguagucuaaggaaga

SEQ ID NO: 1068593 - RNA, 19 nt, Homo sapiens
  misc_RNA (1)...(19): siRNA sense strand
uuucaaggauagaaguuug

SEQ ID NO: 1068594 - RNA, 19 nt, Homo sapiens
  misc_RNA (1)...(19): siRNA sense strand
ggaagaggcauugcucaag

SEQ ID NO: 1068595 - RNA, 19 nt, Homo sapiens
  misc_RNA (1)...(19): siRNA sense strand
cagguagucuaaggaagaa

SEQ ID NO: 1068596 - RNA, 19 nt, Homo sapiens
  misc_RNA (1)...(19): siRNA sense strand
ugaggaagccuuuggaaac

SEQ ID NO: 1068597 - RNA, 19 nt, Homo sapiens
  misc_RNA (1)...(19): siRNA sense strand
ccucagaauuggagucucu

SEQ ID NO: 1068598 - RNA, 19 nt, Homo sapiens
  misc_RNA (1)...(19): siRNA sense strand
guucugugauucucagcuu

SEQ ID NO: 1068599 - RNA, 19 nt, Homo sapiens
  misc_RNA (1)...(19): siRNA sense strand
aagaggcauugcucaagaa

SEQ ID NO: 1068600 - RNA, 19 nt, Homo sapiens
  misc_RNA (1)...(19): siRNA sense strand
cccaauagacucccaggaa

SEQ ID NO: 1068601 - RNA, 19 nt, Homo sapiens
  misc_RNA (1)...(19): siRNA sense strand
gugaggaagccuuuggaaa

SEQ ID NO: 1068602 - RNA, 19 nt, Homo sapiens
  misc_RNA (1)...(19): siRNA sense strand
agaauuggagucucuguau

SEQ ID NO: 1068603 - RNA, 19 nt, Homo sapiens
  misc_RNA (1)...(19): siRNA sense strand
gagcaggagaccucagaau

SEQ ID NO: 1068604 - RNA, 19 nt, Homo sapiens
  misc_RNA (1)...(19): siRNA sense strand
uaguacagguuucaaggau

SEQ ID NO: 1068605 - RNA, 19 nt, Homo sapiens
  misc_RNA (1)...(19): siRNA sense strand
ugagggauaguacagguuu

SEQ ID NO: 1068606 - RNA, 19 nt, Homo sapiens
  misc_RNA (1)...(19): siRNA sense strand
ggccaguucuuucuuccau

SEQ ID NO: 1068607 - RNA, 19 nt, Homo sapiens
  misc_RNA (1)...(19): siRNA sense strand
gaucugccuugaagcuucu

SEQ ID NO: 1068608 - RNA, 19 nt, Homo sapiens
  misc_RNA (1)...(19): siRNA sense strand
caugaagccagaacagcua

SEQ ID NO: 1068609 - RNA, 19 nt, Homo sapiens
  misc_RNA (1)...(19): siRNA sense strand
ccaugauccuggucucuca

SEQ ID NO: 1068610 - RNA, 19 nt, Homo sapiens
  misc_RNA (1)...(19): siRNA sense strand
gcacucagcccaugauccu

SEQ ID NO: 1068611 - RNA, 19 nt, Homo sapiens
  misc_RNA (1)...(19): siRNA sense strand
uguaaccuauccagagaga

SEQ ID NO: 1068612 - RNA, 19 nt, Homo sapiens
  misc_RNA (1)...(19): siRNA sense strand
gaaguagacaacauugaac

SEQ ID NO: 1068613 - RNA, 19 nt, Homo sapiens
  misc_RNA (1)...(19): siRNA sense strand
uaaugccuguugcuucuuc

SEQ ID NO: 1068614 - RNA, 19 nt, Homo sapiens
  misc_RNA (1)...(19): siRNA sense strand
gagcagaucagggcuagag

SEQ ID NO: 1068615 - RNA, 19 nt, Homo sapiens
  misc_RNA (1)...(19): siRNA sense strand
caggguggacugagaagaa

SEQ ID NO: 1068616 - RNA, 19 nt, Homo sapiens
  misc_RNA (1)...(19): siRNA sense strand
gaaaccgggcaccguuguu

SEQ ID NO: 1068617 - RNA, 19 nt, Homo sapiens
  misc_RNA (1)...(19): siRNA sense strand
ggaaaccgggcaccguugu

SEQ ID NO: 1068618 - RNA, 19 nt, Homo sapiens
  misc_RNA (1)...(19): siRNA sense strand
aguacagguuucaaggaua

SEQ ID NO: 1068619 - RNA, 19 nt, Homo sapiens
  misc_RNA (1)...(19): siRNA sense strand
gccaaagccucaaaacuuc

SEQ ID NO: 1068620 - RNA, 19 nt, Homo sapiens
  misc_RNA (1)...(19): siRNA sense strand
guccugauccugugcagaa

SEQ ID NO: 1068621 - RNA, 19 nt, Homo sapiens
  misc_RNA (1)...(19): siRNA sense strand
gaauaucacaagguucugu

SEQ ID NO: 1068622 - RNA, 19 nt, Homo sapiens
  misc_RNA (1)...(19): siRNA sense strand
caaacgugaggaagccuuu

SEQ ID NO: 1068623 - RNA, 19 nt, Homo sapiens
  misc_RNA (1)...(19): siRNA sense strand
gugcugaacuggacaaaua

SEQ ID NO: 1068624 - RNA, 19 nt, Homo sapiens
  misc_RNA (1)...(19): siRNA sense strand
gaaagaggaaucagaauuu

SEQ ID NO: 1068625 - RNA, 19 nt, Homo sapiens
  misc_RNA (1)...(19): siRNA sense strand
caaauacacugaaccuuga

SEQ ID NO: 1068626 - RNA, 19 nt, Homo sapiens
  misc_RNA (1)...(19): siRNA sense strand
cagauuagguggaguuaaa

SEQ ID NO: 1068627 - RNA, 19 nt, Homo sapiens
  misc_RNA (1)...(19): siRNA sense strand
uaacagcccuagaaauuau

SEQ ID NO: 1068628 - RNA, 19 nt, Homo sapiens
  misc_RNA (1)...(19): siRNA sense strand
gcuaacagcccuagaaauu

SEQ ID NO: 1068629 - RNA, 19 nt, Homo sapiens
  misc_RNA (1)...(19): siRNA sense strand
gaagaucucugugcuaaca

SEQ ID NO: 1068630 - RNA, 19 nt, Homo sapiens
  misc_RNA (1)...(19): siRNA sense strand
ggaaggaaauugcuacaag

SEQ ID NO: 1068631 - RNA, 19 nt, Homo sapiens
  misc_RNA (1)...(19): siRNA sense strand
ggaaagaggaaucagaauu

SEQ ID NO: 1068632 - RNA, 19 nt, Homo sapiens
  misc_RNA (1)...(19): siRNA sense strand
gaagagaaggcaagauuug

SEQ ID NO: 1068633 - RNA, 19 nt, Homo sapiens
  misc_RNA (1)...(19): siRNA sense strand
ucacagaccuauugaagau

SEQ ID NO: 1068634 - RNA, 19 nt, Homo sapiens
  misc_RNA (1)...(19): siRNA sense strand
gcaaagcauacaucucaua

SEQ ID NO: 1068635 - RNA, 19 nt, Homo sapiens
  misc_RNA (1)...(19): siRNA sense strand
gaaccuugaugaguacauu

SEQ ID NO: 1068636 - RNA, 19 nt, Homo sapiens
  misc_RNA (1)...(19): siRNA sense strand
gaauaccagaugauacuua

SEQ ID NO: 1068637 - RNA, 19 nt, Homo sapiens
  misc_RNA (1)...(19): siRNA sense strand
gaggagacauaucaaagau

SEQ ID NO: 1068638 - RNA, 19 nt, Homo sapiens
  misc_RNA (1)...(19): siRNA sense strand
caggaagucuggaggcuaa

SEQ ID NO: 1068639 - RNA, 19 nt, Homo sapiens
  misc_RNA (1)...(19): siRNA sense strand
ucaugaaacucuaggacua

SEQ ID NO: 1068640 - RNA, 19 nt, Homo sapiens
  misc_RNA (1)...(19): siRNA sense strand
gccaguuucugauacauuu

SEQ ID NO: 1068641 - RNA, 19 nt, Homo sapiens
  misc_RNA (1)...(19): siRNA sense strand
caaauguacuacucaggaa

SEQ ID NO: 1068642 - RNA, 19 nt, Homo sapiens
  misc_RNA (1)...(19): siRNA sense strand
cagaugauacuuacuauga

SEQ ID NO: 1068643 - RNA, 19 nt, Homo sapiens
  misc_RNA (1)...(19): siRNA sense strand
cauaguggcugguaucauc

SEQ ID NO: 1068644 - RNA, 19 nt, Homo sapiens
  misc_RNA (1)...(19): siRNA sense strand
cagcaaagcauacaucuca

SEQ ID NO: 1068645 - RNA, 19 nt, Homo sapiens
  misc_RNA (1)...(19): siRNA sense strand
caaagcauacaucucauaa

SEQ ID NO: 1068646 - RNA, 19 nt, Homo sapiens
  misc_RNA (1)...(19): siRNA sense strand
cacgucagauagugaaaua

SEQ ID NO: 1068647 - RNA, 19 nt, Homo sapiens
  misc_RNA (1)...(19): siRNA sense strand
ggaggagacauaucaaaga

SEQ ID NO: 1068648 - RNA, 19 nt, Homo sapiens
  misc_RNA (1)...(19): siRNA sense strand
ucaaaggauucagguuuaa

SEQ ID NO: 1068649 - RNA, 19 nt, Homo sapiens
  misc_RNA (1)...(19): siRNA sense strand
gauuagagcuuuugaagau

SEQ ID NO: 1068650 - RNA, 19 nt, Homo sapiens
  misc_RNA (1)...(19): siRNA sense strand
cgucagauagugaaauaua

SEQ ID NO: 1068651 - RNA, 19 nt, Homo sapiens
  misc_RNA (1)...(19): siRNA sense strand
gaaacucuaggacuaauuc

SEQ ID NO: 1068652 - RNA, 19 nt, Homo sapiens
  misc_RNA (1)...(19): siRNA sense strand
gauagauucugugauggaa

SEQ ID NO: 1068653 - RNA, 19 nt, Homo sapiens
  misc_RNA (1)...(19): siRNA sense strand
uucaaaggauucagguuua

SEQ ID NO: 1068654 - RNA, 19 nt, Homo sapiens
  misc_RNA (1)...(19): siRNA sense strand
gaauuuacaaagcaggaua

SEQ ID NO: 1068655 - RNA, 19 nt, Homo sapiens
  misc_RNA (1)...(19): siRNA sense strand
cacugaaccuugaugagua

SEQ ID NO: 1068656 - RNA, 19 nt, Homo sapiens
  misc_RNA (1)...(19): siRNA sense strand
uaaugucgcuauauuccaa

SEQ ID NO: 1068657 - RNA, 19 nt, Homo sapiens
  misc_RNA (1)...(19): siRNA sense strand
ggaaucagaauuuacaaag

SEQ ID NO: 1068658 - RNA, 19 nt, Homo sapiens
  misc_RNA (1)...(19): siRNA sense strand
gcuauauuccaacacuuua

SEQ ID NO: 1068659 - RNA, 19 nt, Homo sapiens
  misc_RNA (1)...(19): siRNA sense strand
uaacgccugauucuacuua

SEQ ID NO: 1068660 - RNA, 19 nt, Homo sapiens
  misc_RNA (1)...(19): siRNA sense strand
caacacaucaugaaacucu

SEQ ID NO: 1068661 - RNA, 19 nt, Homo sapiens
  misc_RNA (1)...(19): siRNA sense strand
cuaacagcccuagaaauua

SEQ ID NO: 1068662 - RNA, 19 nt, Homo sapiens
  misc_RNA (1)...(19): siRNA sense strand
uugaagaucucugugcuaa

SEQ ID NO: 1068663 - RNA, 19 nt, Homo sapiens
  misc_RNA (1)...(19): siRNA sense strand
gaaccacgucagauaguga

SEQ ID NO: 1068664 - RNA, 19 nt, Homo sapiens
  misc_RNA (1)...(19): siRNA sense strand
gaaccaaauguaacuagau

SEQ ID NO: 1068665 - RNA, 19 nt, Homo sapiens
  misc_RNA (1)...(19): siRNA sense strand
caaaugggaauaccagaug

SEQ ID NO: 1068666 - RNA, 19 nt, Homo sapiens
  misc_RNA (1)...(19): siRNA sense strand
ggagaaccacgucagauag

SEQ ID NO: 1068667 - RNA, 19 nt, Homo sapiens
  misc_RNA (1)...(19): siRNA sense strand
gaggcuaagucaacacauc

SEQ ID NO: 1068668 - RNA, 19 nt, Homo sapiens
  misc_RNA (1)...(19): siRNA sense strand
caugugcgauucagauuag

SEQ ID NO: 1068669 - RNA, 19 nt, Homo sapiens
  misc_RNA (1)...(19): siRNA sense strand
caaagaggcagagcuucua

SEQ ID NO: 1068670 - RNA, 19 nt, Homo sapiens
  misc_RNA (1)...(19): siRNA sense strand
gauuaacgccugauucuac

SEQ ID NO: 1068671 - RNA, 19 nt, Homo sapiens
  misc_RNA (1)...(19): siRNA sense strand
gagaaggcaagauuuggaa

SEQ ID NO: 1068672 - RNA, 19 nt, Homo sapiens
  misc_RNA (1)...(19): siRNA sense strand
uggcugguaucaucguaua

SEQ ID NO: 1068673 - RNA, 19 nt, Homo sapiens
  misc_RNA (1)...(19): siRNA sense strand
gugaauuccauuucucuaa

SEQ ID NO: 1068674 - RNA, 19 nt, Homo sapiens
  misc_RNA (1)...(19): siRNA sense strand
gaaucagaauuuacaaagc

SEQ ID NO: 1068675 - RNA, 19 nt, Homo sapiens
  misc_RNA (1)...(19): siRNA sense strand
gcaaaugggaauaccagau

SEQ ID NO: 1068676 - RNA, 19 nt, Homo sapiens
  misc_RNA (1)...(19): siRNA sense strand
ggggauagauucugugaug

SEQ ID NO: 1068677 - RNA, 19 nt, Homo sapiens
  misc_RNA (1)...(19): siRNA sense strand
cggcuaacuucaaaggauu

SEQ ID NO: 1068678 - RNA, 19 nt, Homo sapiens
  misc_RNA (1)...(19): siRNA sense strand
aaacuuccagcaaagcaua

SEQ ID NO: 1068679 - RNA, 19 nt, Homo sapiens
  misc_RNA (1)...(19): siRNA sense strand
uaagucaacacaucaugaa

SEQ ID NO: 1068680 - RNA, 19 nt, Homo sapiens
  misc_RNA (1)...(19): siRNA sense strand
ugaagagaaggcaagauuu

SEQ ID NO: 1068681 - RNA, 19 nt, Homo sapiens
  misc_RNA (1)...(19): siRNA sense strand
ggaggccaguuucugauac

SEQ ID NO: 1068682 - RNA, 19 nt, Homo sapiens
  misc_RNA (1)...(19): siRNA sense strand
ggauagauucugugaugga

SEQ ID NO: 1068683 - RNA, 19 nt, Homo sapiens
  misc_RNA (1)...(19): siRNA sense strand
ggacuaauucacacugcaa

SEQ ID NO: 1068684 - RNA, 19 nt, Homo sapiens
  misc_RNA (1)...(19): siRNA sense strand
gaauuccauuucucuaaac

SEQ ID NO: 1068685 - RNA, 19 nt, Homo sapiens
  misc_RNA (1)...(19): siRNA sense strand
cuucaaaggauucagguuu

SEQ ID NO: 1068686 - RNA, 19 nt, Homo sapiens
  misc_RNA (1)...(19): siRNA sense strand
gaucauaguggcugguauc

SEQ ID NO: 1068687 - RNA, 19 nt, Homo sapiens
  misc_RNA (1)...(19): siRNA sense strand
uaccagaugauacuuacua

SEQ ID NO: 1068688 - RNA, 19 nt, Homo sapiens
  misc_RNA (1)...(19): siRNA sense strand
cagcaggccuggaaaaguu

SEQ ID NO: 1068689 - RNA, 19 nt, Homo sapiens
  misc_RNA (1)...(19): siRNA sense strand
ggaaugggaaguggaugaa

SEQ ID NO: 1068690 - RNA, 19 nt, Homo sapiens
  misc_RNA (1)...(19): siRNA sense strand
gcaacaaaggggcugauua

SEQ ID NO: 1068691 - RNA, 19 nt, Homo sapiens
  misc_RNA (1)...(19): siRNA sense strand
gcuaucuacugaugguaug

SEQ ID NO: 1068692 - RNA, 19 nt, Homo sapiens
  misc_RNA (1)...(19): siRNA sense strand
ggacaaauacacugaaccu

SEQ ID NO: 1068693 - RNA, 19 nt, Homo sapiens
  misc_RNA (1)...(19): siRNA sense strand
gggaauaccagaugauacu

SEQ ID NO: 1068694 - RNA, 19 nt, Homo sapiens
  misc_RNA (1)...(19): siRNA sense strand
aaaugggaauaccagauga

SEQ ID NO: 1068695 - RNA, 19 nt, Homo sapiens
  misc_RNA (1)...(19): siRNA sense strand
guuaaauuuccaccugaua

SEQ ID NO: 1068696 - RNA, 19 nt, Homo sapiens
  misc_RNA (1)...(19): siRNA sense strand
agaaccaaauguaacuaga

SEQ ID NO: 1068697 - RNA, 19 nt, Homo sapiens
  misc_RNA (1)...(19): siRNA sense strand
caagcaacucuucggcuaa

SEQ ID NO: 1068698 - RNA, 19 nt, Homo sapiens
  misc_RNA (1)...(19): siRNA sense strand
uaauucacacugcaacaaa

SEQ ID NO: 1068699 - RNA, 19 nt, Homo sapiens
  misc_RNA (1)...(19): siRNA sense strand
gauuagguggaguuaaauu

SEQ ID NO: 1068700 - RNA, 19 nt, Homo sapiens
  misc_RNA (1)...(19): siRNA sense strand
ggcaagauuuggaaaagaa

SEQ ID NO: 1068701 - RNA, 19 nt, Homo sapiens
  misc_RNA (1)...(19): siRNA sense strand
cugaagagaaggcaagauu

SEQ ID NO: 1068702 - RNA, 19 nt, Homo sapiens
  misc_RNA (1)...(19): siRNA sense strand
ccauuucucuaaacugaag

SEQ ID NO: 1068703 - RNA, 19 nt, Homo sapiens
  misc_RNA (1)...(19): siRNA sense strand
caaggagaaccacgucaga

SEQ ID NO: 1068704 - RNA, 19 nt, Homo sapiens
  misc_RNA (1)...(19): siRNA sense strand
aggagaaccacgucagaua

SEQ ID NO: 1068705 - RNA, 19 nt, Homo sapiens
  misc_RNA (1)...(19): siRNA sense strand
gaggccaguuucugauaca

SEQ ID NO: 1068706 - RNA, 19 nt, Homo sapiens
  misc_RNA (1)...(19): siRNA sense strand
uggaugaagugcugaacug

SEQ ID NO: 1068707 - RNA, 19 nt, Homo sapiens
  misc_RNA (1)...(19): siRNA sense strand
caugaaacucuaggacuaa

SEQ ID NO: 1068708 - RNA, 19 nt, Homo sapiens
  misc_RNA (1)...(19): siRNA sense strand
uuccauuucucuaaacuga

SEQ ID NO: 1068709 - RNA, 19 nt, Homo sapiens
  misc_RNA (1)...(19): siRNA sense strand
guauggugguggaagacaa

SEQ ID NO: 1068710 - RNA, 19 nt, Homo sapiens
  misc_RNA (1)...(19): siRNA sense strand
ugauucuacuuauggacua

SEQ ID NO: 1068711 - RNA, 19 nt, Homo sapiens
  misc_RNA (1)...(19): siRNA sense strand
ucaugugcgauucagauua

SEQ ID NO: 1068712 - RNA, 19 nt, Homo sapiens
  misc_RNA (1)...(19): siRNA sense strand
gucaacacaucaugaaacu

SEQ ID NO: 1068713 - RNA, 19 nt, Homo sapiens
  misc_RNA (1)...(19): siRNA sense strand
gugcuaacagcccuagaaa

SEQ ID NO: 1068714 - RNA, 19 nt, Homo sapiens
  misc_RNA (1)...(19): siRNA sense strand
ccaaagaggcagagcuucu

SEQ ID NO: 1068715 - RNA, 19 nt, Homo sapiens
  misc_RNA (1)...(19): siRNA sense strand
gcaacucuucggcuaacuu

SEQ ID NO: 1068716 - RNA, 19 nt, Homo sapiens
  misc_RNA (1)...(19): siRNA sense strand
gagaaccacgucagauagu

SEQ ID NO: 1068717 - RNA, 19 nt, Homo sapiens
  misc_RNA (1)...(19): siRNA sense strand
aaagugaauuccauuucuc

SEQ ID NO: 1068718 - RNA, 19 nt, Homo sapiens
  misc_RNA (1)...(19): siRNA sense strand
aaaugaucaucuucaggaa

SEQ ID NO: 1068719 - RNA, 19 nt, Homo sapiens
  misc_RNA (1)...(19): siRNA sense strand
caagaaccaaauguaacua

SEQ ID NO: 1068720 - RNA, 19 nt, Homo sapiens
  misc_RNA (1)...(19): siRNA sense strand
gaguugaugaggcaaaugu

SEQ ID NO: 1068721 - RNA, 19 nt, Homo sapiens
  misc_RNA (1)...(19): siRNA sense strand
caacaaaggggcugauuag

SEQ ID NO: 1068722 - RNA, 19 nt, Homo sapiens
  misc_RNA (1)...(19): siRNA sense strand
caaagaugcaaaugggaau

SEQ ID NO: 1068723 - RNA, 19 nt, Homo sapiens
  misc_RNA (1)...(19): siRNA sense strand
ggaagaagcucgucucaua

SEQ ID NO: 1068724 - RNA, 19 nt, Homo sapiens
  misc_RNA (1)...(19): siRNA sense strand
cagaagcacuacauuauua

SEQ ID NO: 1068725 - RNA, 19 nt, Homo sapiens
  misc_RNA (1)...(19): siRNA sense strand
ccacagagcuuguacaaca

SEQ ID NO: 1068726 - RNA, 19 nt, Homo sapiens
  misc_RNA (1)...(19): siRNA sense strand
gaaauguucugaagaguca

SEQ ID NO: 1068727 - RNA, 19 nt, Homo sapiens
  misc_RNA (1)...(19): siRNA sense strand
uaggaaagcuguaucauga

SEQ ID NO: 1068728 - RNA, 19 nt, Homo sapiens
  misc_RNA (1)...(19): siRNA sense strand
ggacauagcugccuuucag

SEQ ID NO: 1068729 - RNA, 19 nt, Homo sapiens
  misc_RNA (1)...(19): siRNA sense strand
gcacagaguuugauguugu

SEQ ID NO: 1068730 - RNA, 19 nt, Homo sapiens
  misc_RNA (1)...(19): siRNA sense strand
aaacaaggcuuaaagacuu

SEQ ID NO: 1068731 - RNA, 19 nt, Homo sapiens
  misc_RNA (1)...(19): siRNA sense strand
ggagaaaccuacacacugu

SEQ ID NO: 1068732 - RNA, 19 nt, Homo sapiens
  misc_RNA (1)...(19): siRNA sense strand
gaaagcgccuauagaaaug

SEQ ID NO: 1068733 - RNA, 19 nt, Homo sapiens
  misc_RNA (1)...(19): siRNA sense strand
ggaaaugcuuuauagauca

SEQ ID NO: 1068734 - RNA, 19 nt, Homo sapiens
  misc_RNA (1)...(19): siRNA sense strand
gaacccagcuuccuucuac

SEQ ID NO: 1068735 - RNA, 19 nt, Homo sapiens
  misc_RNA (1)...(19): siRNA sense strand
gagcgaguauuauauauuc

SEQ ID NO: 1068736 - RNA, 19 nt, Homo sapiens
  misc_RNA (1)...(19): siRNA sense strand
gcagagcgaguauuauaua

SEQ ID NO: 1068737 - RNA, 19 nt, Homo sapiens
  misc_RNA (1)...(19): siRNA sense strand
gcacacaagagcucuguua

SEQ ID NO: 1068738 - RNA, 19 nt, Homo sapiens
  misc_RNA (1)...(19): siRNA sense strand
gauauuaccuaccauuuac

SEQ ID NO: 1068739 - RNA, 19 nt, Homo sapiens
  misc_RNA (1)...(19): siRNA sense strand
uggcugacaugcuuuauaa

SEQ ID NO: 1068740 - RNA, 19 nt, Homo sapiens
  misc_RNA (1)...(19): siRNA sense strand
guucggagaucccagauga

SEQ ID NO: 1068741 - RNA, 19 nt, Homo sapiens
  misc_RNA (1)...(19): siRNA sense strand
aaacaaaccaccaagcuuu

SEQ ID NO: 1068742 - RNA, 19 nt, Homo sapiens
  misc_RNA (1)...(19): siRNA sense strand
gaaacuguuacaugcauua

SEQ ID NO: 1068743 - RNA, 19 nt, Homo sapiens
  misc_RNA (1)...(19): siRNA sense strand
cgacggacauucuuaaagu

SEQ ID NO: 1068744 - RNA, 19 nt, Homo sapiens
  misc_RNA (1)...(19): siRNA sense strand
aggaagaacuugucgcuuu

SEQ ID NO: 1068745 - RNA, 19 nt, Homo sapiens
  misc_RNA (1)...(19): siRNA sense strand
aaacagauauuaccuacca

SEQ ID NO: 1068746 - RNA, 19 nt, Homo sapiens
  misc_RNA (1)...(19): siRNA sense strand
gcagaagcacuacauuauu

SEQ ID NO: 1068747 - RNA, 19 nt, Homo sapiens
  misc_RNA (1)...(19): siRNA sense strand
gcugaaagcgccuauagaa

SEQ ID NO: 1068748 - RNA, 19 nt, Homo sapiens
  misc_RNA (1)...(19): siRNA sense strand
gaacagcagguuugcagaa

SEQ ID NO: 1068749 - RNA, 19 nt, Homo sapiens
  misc_RNA (1)...(19): siRNA sense strand
ugaagcagcugagaaguau

SEQ ID NO: 1068750 - RNA, 19 nt, Homo sapiens
  misc_RNA (1)...(19): siRNA sense strand
caaaggaaacuguuacaug

SEQ ID NO: 1068751 - RNA, 19 nt, Homo sapiens
  misc_RNA (1)...(19): siRNA sense strand
caugaugggugaagcauau

SEQ ID NO: 1068752 - RNA, 19 nt, Homo sapiens
  misc_RNA (1)...(19): siRNA sense strand
caaggaagcaauucagaaa

SEQ ID NO: 1068753 - RNA, 19 nt, Homo sapiens
  misc_RNA (1)...(19): siRNA sense strand
gagcuaccaucuugucaau

SEQ ID NO: 1068754 - RNA, 19 nt, Homo sapiens
  misc_RNA (1)...(19): siRNA sense strand
uaacaggucguaagaguga

SEQ ID NO: 1068755 - RNA, 19 nt, Homo sapiens
  misc_RNA (1)...(19): siRNA sense strand
ugaaagcgccuauagaaau

SEQ ID NO: 1068756 - RNA, 19 nt, Homo sapiens
  misc_RNA (1)...(19): siRNA sense strand
gcuaccaucuugucaaugu

SEQ ID NO: 1068757 - RNA, 19 nt, Homo sapiens
  misc_RNA (1)...(19): siRNA sense strand
gcagagcauugguauaugg

SEQ ID NO: 1068758 - RNA, 19 nt, Homo sapiens
  misc_RNA (1)...(19): siRNA sense strand
gaaacaaaccaccaagcuu

SEQ ID NO: 1068759 - RNA, 19 nt, Homo sapiens
  misc_RNA (1)...(19): siRNA sense strand
cuaauuauccggcugcuuu

SEQ ID NO: 1068760 - RNA, 19 nt, Homo sapiens
  misc_RNA (1)...(19): siRNA sense strand
cagcugagaaguauuauga

SEQ ID NO: 1068761 - RNA, 19 nt, Homo sapiens
  misc_RNA (1)...(19): siRNA sense strand
gaggaaaugcuuuauagau

SEQ ID NO: 1068762 - RNA, 19 nt, Homo sapiens
  misc_RNA (1)...(19): siRNA sense strand
ugaggaagcccuuagugua

SEQ ID NO: 1068763 - RNA, 19 nt, Homo sapiens
  misc_RNA (1)...(19): siRNA sense strand
gaggaagcccuuaguguau

SEQ ID NO: 1068764 - RNA, 19 nt, Homo sapiens
  misc_RNA (1)...(19): siRNA sense strand
uaacaaauggcaagcagaa

SEQ ID NO: 1068765 - RNA, 19 nt, Homo sapiens
  misc_RNA (1)...(19): siRNA sense strand
gcugacaugcuuuauaauu

SEQ ID NO: 1068766 - RNA, 19 nt, Homo sapiens
  misc_RNA (1)...(19): siRNA sense strand
ggacauucuuaaaguguuc

SEQ ID NO: 1068767 - RNA, 19 nt, Homo sapiens
  misc_RNA (1)...(19): siRNA sense strand
gauggauacuggacauuca

SEQ ID NO: 1068768 - RNA, 19 nt, Homo sapiens
  misc_RNA (1)...(19): siRNA sense strand
ggaaacuguuacaugcauu

SEQ ID NO: 1068769 - RNA, 19 nt, Homo sapiens
  misc_RNA (1)...(19): siRNA sense strand
ccaagaaccucuggcuguu

SEQ ID NO: 1068770 - RNA, 19 nt, Homo sapiens
  misc_RNA (1)...(19): siRNA sense strand
gcggauuucugcuaugaug

SEQ ID NO: 1068771 - RNA, 19 nt, Homo sapiens
  misc_RNA (1)...(19): siRNA sense strand
gcugagaaguauuaugauc

SEQ ID NO: 1068772 - RNA, 19 nt, Homo sapiens
  misc_RNA (1)...(19): siRNA sense strand
gagcauugguauauggaau

SEQ ID NO: 1068773 - RNA, 19 nt, Homo sapiens
  misc_RNA (1)...(19): siRNA sense strand
gcagggacacuaugaggaa

SEQ ID NO: 1068774 - RNA, 19 nt, Homo sapiens
  misc_RNA (1)...(19): siRNA sense strand
caaaagcgguuccucaaga

SEQ ID NO: 1068775 - RNA, 19 nt, Homo sapiens
  misc_RNA (1)...(19): siRNA sense strand
ggaagaacuugucgcuuuu

SEQ ID NO: 1068776 - RNA, 19 nt, Homo sapiens
  misc_RNA (1)...(19): siRNA sense strand
uaccagaacucagagacua

SEQ ID NO: 1068777 - RNA, 19 nt, Homo sapiens
  misc_RNA (1)...(19): siRNA sense strand
ucacuggucucuucacaag

SEQ ID NO: 1068778 - RNA, 19 nt, Homo sapiens
  misc_RNA (1)...(19): siRNA sense strand
gaugacagccgugcuauca

SEQ ID NO: 1068779 - RNA, 19 nt, Homo sapiens
  misc_RNA (1)...(19): siRNA sense strand
agaaugaggaaaugcuuua

SEQ ID NO: 1068780 - RNA, 19 nt, Homo sapiens
  misc_RNA (1)...(19): siRNA sense strand
gcaagcagaaugcaaaugg

SEQ ID NO: 1068781 - RNA, 19 nt, Homo sapiens
  misc_RNA (1)...(19): siRNA sense strand
aagcagcugagaaguauua

SEQ ID NO: 1068782 - RNA, 19 nt, Homo sapiens
  misc_RNA (1)...(19): siRNA sense strand
gccgugcuaucaagacuaa

SEQ ID NO: 1068783 - RNA, 19 nt, Homo sapiens
  misc_RNA (1)...(19): siRNA sense strand
gaagaagcccgacggacau

SEQ ID NO: 1068784 - RNA, 19 nt, Homo sapiens
  misc_RNA (1)...(19): siRNA sense strand
ccacaucccugcucaucuc

SEQ ID NO: 1068785 - RNA, 19 nt, Homo sapiens
  misc_RNA (1)...(19): siRNA sense strand
ucacaagcuucuccaagau

SEQ ID NO: 1068786 - RNA, 19 nt, Homo sapiens
  misc_RNA (1)...(19): siRNA sense strand
gggcucgccuuguaucuca

SEQ ID NO: 1068787 - RNA, 19 nt, Homo sapiens
  misc_RNA (1)...(19): siRNA sense strand
gaucagggauaaaaguaaa

SEQ ID NO: 1068788 - RNA, 19 nt, Homo sapiens
  misc_RNA (1)...(19): siRNA sense strand
uaugucggcuuuguaauug

SEQ ID NO: 1068789 - RNA, 19 nt, Homo sapiens
  misc_RNA (1)...(19): siRNA sense strand
ccaccaaaggaaacuguua

SEQ ID NO: 1068790 - RNA, 19 nt, Homo sapiens
  misc_RNA (1)...(19): siRNA sense strand
cggccacucugcacucuuu

SEQ ID NO: 1068791 - RNA, 19 nt, Homo sapiens
  misc_RNA (1)...(19): siRNA sense strand
cuagagcccuuuaugucaa

SEQ ID NO: 1068792 - RNA, 19 nt, Homo sapiens
  misc_RNA (1)...(19): siRNA sense strand
gaaaugcuuuauagaucag

SEQ ID NO: 1068793 - RNA, 19 nt, Homo sapiens
  misc_RNA (1)...(19): siRNA sense strand
gaagcagagcauugguaua

SEQ ID NO: 1068794 - RNA, 19 nt, Homo sapiens
  misc_RNA (1)...(19): siRNA sense strand
cacaagagcucuguuacca

SEQ ID NO: 1068795 - RNA, 19 nt, Homo sapiens
  misc_RNA (1)...(19): siRNA sense strand
ccuggcuucugcauauuua

SEQ ID NO: 1068796 - RNA, 19 nt, Homo sapiens
  misc_RNA (1)...(19): siRNA sense strand
guccagauacccucaguuu

SEQ ID NO: 1068797 - RNA, 19 nt, Homo sapiens
  misc_RNA (1)...(19): siRNA sense strand
ugagaaguauuaugaucug

SEQ ID NO: 1068798 - RNA, 19 nt, Homo sapiens
  misc_RNA (1)...(19): siRNA sense strand
aagcagagcauugguauau

SEQ ID NO: 1068799 - RNA, 19 nt, Homo sapiens
  misc_RNA (1)...(19): siRNA sense strand
ugacagccgugcuaucaag

SEQ ID NO: 1068800 - RNA, 19 nt, Homo sapiens
  misc_RNA (1)...(19): siRNA sense strand
cuauagaaaugcuuuguac

SEQ ID NO: 1068801 - RNA, 19 nt, Homo sapiens
  misc_RNA (1)...(19): siRNA sense strand
caaaauuucugaagcugaa

SEQ ID NO: 1068802 - RNA, 19 nt, Homo sapiens
  misc_RNA (1)...(19): siRNA sense strand
gcuagagcccuuuauguca

SEQ ID NO: 1068803 - RNA, 19 nt, Homo sapiens
  misc_RNA (1)...(19): siRNA sense strand
cagagcgaguauuauauau

SEQ ID NO: 1068804 - RNA, 19 nt, Homo sapiens
  misc_RNA (1)...(19): siRNA sense strand
ggacgcacauuuucuacaa

SEQ ID NO: 1068805 - RNA, 19 nt, Homo sapiens
  misc_RNA (1)...(19): siRNA sense strand
caagcagaaugcaaaugga

SEQ ID NO: 1068806 - RNA, 19 nt, Homo sapiens
  misc_RNA (1)...(19): siRNA sense strand
gugcggauuucugcuauga

SEQ ID NO: 1068807 - RNA, 19 nt, Homo sapiens
  misc_RNA (1)...(19): siRNA sense strand
gcucuaacaggucguaaga

SEQ ID NO: 1068808 - RNA, 19 nt, Homo sapiens
  misc_RNA (1)...(19): siRNA sense strand
aggaagcccuuaguguaua

SEQ ID NO: 1068809 - RNA, 19 nt, Homo sapiens
  misc_RNA (1)...(19): siRNA sense strand
aggaaaugcuuuauagauc

SEQ ID NO: 1068810 - RNA, 19 nt, Homo sapiens
  misc_RNA (1)...(19): siRNA sense strand
gaauggagacuggcagaau

SEQ ID NO: 1068811 - RNA, 19 nt, Homo sapiens
  misc_RNA (1)...(19): siRNA sense strand
uugcagagcgaguauuaua

SEQ ID NO: 1068812 - RNA, 19 nt, Homo sapiens
  misc_RNA (1)...(19): siRNA sense strand
auucauggcuggcuugaug

SEQ ID NO: 1068813 - RNA, 19 nt, Homo sapiens
  misc_RNA (1)...(19): siRNA sense strand
uacccuggcuucugcauau

SEQ ID NO: 1068814 - RNA, 19 nt, Homo sapiens
  misc_RNA (1)...(19): siRNA sense strand
ggaaaacuguaacaaaugg

SEQ ID NO: 1068815 - RNA, 19 nt, Homo sapiens
  misc_RNA (1)...(19): siRNA sense strand
uccuugcucugcuacauua

SEQ ID NO: 1068816 - RNA, 19 nt, Homo sapiens
  misc_RNA (1)...(19): siRNA sense strand
cugaaaagcucuucuugaa

SEQ ID NO: 1068817 - RNA, 19 nt, Homo sapiens
  misc_RNA (1)...(19): siRNA sense strand
ucuaacaggucguaagagu

SEQ ID NO: 1068818 - RNA, 19 nt, Homo sapiens
  misc_RNA (1)...(19): siRNA sense strand
ggaaacaaaccaccaagcu

SEQ ID NO: 1068819 - RNA, 19 nt, Homo sapiens
  misc_RNA (1)...(19): siRNA sense strand
gaaugcaaauggacauagc

SEQ ID NO: 1068820 - RNA, 19 nt, Homo sapiens
  misc_RNA (1)...(19): siRNA sense strand
cuucaaugcugcccacaug

SEQ ID NO: 1068821 - RNA, 19 nt, Homo sapiens
  misc_RNA (1)...(19): siRNA sense strand
gcauugguauauggaauca

SEQ ID NO: 1068822 - RNA, 19 nt, Homo sapiens
  misc_RNA (1)...(19): siRNA sense strand
uagaaaugcuuuguacuac

SEQ ID NO: 1068823 - RNA, 19 nt, Homo sapiens
  misc_RNA (1)...(19): siRNA sense strand
caauaaaggagauguguua

SEQ ID NO: 1068824 - RNA, 19 nt, Homo sapiens
  misc_RNA (1)...(19): siRNA sense strand
gaagaagccucauuuuaaa

SEQ ID NO: 1068825 - RNA, 19 nt, Homo sapiens
  misc_RNA (1)...(19): siRNA sense strand
ccacagaacuuuccuaacu

SEQ ID NO: 1068826 - RNA, 19 nt, Homo sapiens
  misc_RNA (1)...(19): siRNA sense strand
ggaggugacuguuauguuc

SEQ ID NO: 1068827 - RNA, 19 nt, Homo sapiens
  misc_RNA (1)...(19): siRNA sense strand
gaaagaaauucaggaagga

SEQ ID NO: 1068828 - RNA, 19 nt, Homo sapiens
  misc_RNA (1)...(19): siRNA sense strand
ggaaguagaugaacaaaau

SEQ ID NO: 1068829 - RNA, 19 nt, Homo sapiens
  misc_RNA (1)...(19): siRNA sense strand
cagcaaaccucgaaauauc

SEQ ID NO: 1068830 - RNA, 19 nt, Homo sapiens
  misc_RNA (1)...(19): siRNA sense strand
acaauaaaguccaugcuaa

SEQ ID NO: 1068831 - RNA, 19 nt, Homo sapiens
  misc_RNA (1)...(19): siRNA sense strand
ccaaagcauucccuaacua

SEQ ID NO: 1068832 - RNA, 19 nt, Homo sapiens
  misc_RNA (1)...(19): siRNA sense strand
gaagaaaugggagcaagua

SEQ ID NO: 1068833 - RNA, 19 nt, Homo sapiens
  misc_RNA (1)...(19): siRNA sense strand
ggagauagucuuacaguuc

SEQ ID NO: 1068834 - RNA, 19 nt, Homo sapiens
  misc_RNA (1)...(19): siRNA sense strand
gaaagaaaucaccauauca

SEQ ID NO: 1068835 - RNA, 19 nt, Homo sapiens
  misc_RNA (1)...(19): siRNA sense strand
cgacaaaacuuagccaaua

SEQ ID NO: 1068836 - RNA, 19 nt, Homo sapiens
  misc_RNA (1)...(19): siRNA sense strand
gaaaggcaaggugaaauaa

SEQ ID NO: 1068837 - RNA, 19 nt, Homo sapiens
  misc_RNA (1)...(19): siRNA sense strand
agacugacauugcugcuuu

SEQ ID NO: 1068838 - RNA, 19 nt, Homo sapiens
  misc_RNA (1)...(19): siRNA sense strand
ggaagaagaggaaguagau

SEQ ID NO: 1068839 - RNA, 19 nt, Homo sapiens
  misc_RNA (1)...(19): siRNA sense strand
agaaagaaaucaccauauc

SEQ ID NO: 1068840 - RNA, 19 nt, Homo sapiens
  misc_RNA (1)...(19): siRNA sense strand
cagcaaaacugcagcauuu

SEQ ID NO: 1068841 - RNA, 19 nt, Homo sapiens
  misc_RNA (1)...(19): siRNA sense strand
caaccucaguccagacaaa

SEQ ID NO: 1068842 - RNA, 19 nt, Homo sapiens
  misc_RNA (1)...(19): siRNA sense strand
gagaauaucaguaugaagu

SEQ ID NO: 1068843 - RNA, 19 nt, Homo sapiens
  misc_RNA (1)...(19): siRNA sense strand
acgcauggguccuacaaua

SEQ ID NO: 1068844 - RNA, 19 nt, Homo sapiens
  misc_RNA (1)...(19): siRNA sense strand
ugaaaggcaaggugaaaua

SEQ ID NO: 1068845 - RNA, 19 nt, Homo sapiens
  misc_RNA (1)...(19): siRNA sense strand
ccacagagggucauauuuc

SEQ ID NO: 1068846 - RNA, 19 nt, Homo sapiens
  misc_RNA (1)...(19): siRNA sense strand
gcauggguccuacaauaaa

SEQ ID NO: 1068847 - RNA, 19 nt, Homo sapiens
  misc_RNA (1)...(19): siRNA sense strand
caauaucacacuacagaaa

SEQ ID NO: 1068848 - RNA, 19 nt, Homo sapiens
  misc_RNA (1)...(19): siRNA sense strand
gagaaugcauccuauaucc

SEQ ID NO: 1068849 - RNA, 19 nt, Homo sapiens
  misc_RNA (1)...(19): siRNA sense strand
gagaaagaaaucaccauau

SEQ ID NO: 1068850 - RNA, 19 nt, Homo sapiens
  misc_RNA (1)...(19): siRNA sense strand
ugaagaagccucauuuuaa

SEQ ID NO: 1068851 - RNA, 19 nt, Homo sapiens
  misc_RNA (1)...(19): siRNA sense strand
gaaacucagccucuugguu

SEQ ID NO: 1068852 - RNA, 19 nt, Homo sapiens
  misc_RNA (1)...(19): siRNA sense strand
agaaggagauagucuuaca

SEQ ID NO: 1068853 - RNA, 19 nt, Homo sapiens
  misc_RNA (1)...(19): siRNA sense strand
caugacaccuacagcagaa

SEQ ID NO: 1068854 - RNA, 19 nt, Homo sapiens
  misc_RNA (1)...(19): siRNA sense strand
aagugaagcuuuaacugaa

SEQ ID NO: 1068855 - RNA, 19 nt, Homo sapiens
  misc_RNA (1)...(19): siRNA sense strand
ggacaaagaccccugaaga

SEQ ID NO: 1068856 - RNA, 19 nt, Homo sapiens
  misc_RNA (1)...(19): siRNA sense strand
uggaggaggugacuguuau

SEQ ID NO: 1068857 - RNA, 19 nt, Homo sapiens
  misc_RNA (1)...(19): siRNA sense strand
ggagaaugcauccuauauc

SEQ ID NO: 1068858 - RNA, 19 nt, Homo sapiens
  misc_RNA (1)...(19): siRNA sense strand
cauccaccauccuuuaguu

SEQ ID NO: 1068859 - RNA, 19 nt, Homo sapiens
  misc_RNA (1)...(19): siRNA sense strand
ccaccauccuuuaguuuua

SEQ ID NO: 1068860 - RNA, 19 nt, Homo sapiens
  misc_RNA (1)...(19): siRNA sense strand
caaauauacgucaacauca

SEQ ID NO: 1068861 - RNA, 19 nt, Homo sapiens
  misc_RNA (1)...(19): siRNA sense strand
acaaauauacgucaacauc

SEQ ID NO: 1068862 - RNA, 19 nt, Homo sapiens
  misc_RNA (1)...(19): siRNA sense strand
agagaaagaaaucaccaua

SEQ ID NO: 1068863 - RNA, 19 nt, Homo sapiens
  misc_RNA (1)...(19): siRNA sense strand
gaaaccaaagacugacauu

SEQ ID NO: 1068864 - RNA, 19 nt, Homo sapiens
  misc_RNA (1)...(19): siRNA sense strand
cacagcaaaccucgaaaua

SEQ ID NO: 1068865 - RNA, 19 nt, Homo sapiens
  misc_RNA (1)...(19): siRNA sense strand
gcaauaaaggagauguguu

SEQ ID NO: 1068866 - RNA, 19 nt, Homo sapiens
  misc_RNA (1)...(19): siRNA sense strand
gcaaaccucgaaauaucaa

SEQ ID NO: 1068867 - RNA, 19 nt, Homo sapiens
  misc_RNA (1)...(19): siRNA sense strand
ugacauugcugcuuuugaa

SEQ ID NO: 1068868 - RNA, 19 nt, Homo sapiens
  misc_RNA (1)...(19): siRNA sense strand
gagaugcugucaggacugu

SEQ ID NO: 1068869 - RNA, 19 nt, Homo sapiens
  misc_RNA (1)...(19): siRNA sense strand
cauccuauauccacguuca

SEQ ID NO: 1068870 - RNA, 19 nt, Homo sapiens
  misc_RNA (1)...(19): siRNA sense strand
aaagaccccugaagaaauu

SEQ ID NO: 1068871 - RNA, 19 nt, Homo sapiens
  misc_RNA (1)...(19): siRNA sense strand
gaucagcuguaucuuuuau

SEQ ID NO: 1068872 - RNA, 19 nt, Homo sapiens
  misc_RNA (1)...(19): siRNA sense strand
gugaagaagccucauuuua

SEQ ID NO: 1068873 - RNA, 19 nt, Homo sapiens
  misc_RNA (1)...(19): siRNA sense strand
aaagagcaauaaaggagau

SEQ ID NO: 1068874 - RNA, 19 nt, Homo sapiens
  misc_RNA (1)...(19): siRNA sense strand
ucauacuccuccagauauu

SEQ ID NO: 1068875 - RNA, 19 nt, Homo sapiens
  misc_RNA (1)...(19): siRNA sense strand
ccagacaaauauacgucaa

SEQ ID NO: 1068876 - RNA, 19 nt, Homo sapiens
  misc_RNA (1)...(19): siRNA sense strand
cagagggucauauuucuug

SEQ ID NO: 1068877 - RNA, 19 nt, Homo sapiens
  misc_RNA (1)...(19): siRNA sense strand
ugaggaagaagaggaagua

SEQ ID NO: 1068878 - RNA, 19 nt, Homo sapiens
  misc_RNA (1)...(19): siRNA sense strand
agacaaauauacgucaaca

SEQ ID NO: 1068879 - RNA, 19 nt, Homo sapiens
  misc_RNA (1)...(19): siRNA sense strand
ucaggacugucgcguugaa

SEQ ID NO: 1068880 - RNA, 19 nt, Homo sapiens
  misc_RNA (1)...(19): siRNA sense strand
gaaccacagaacuuuccua

SEQ ID NO: 1068881 - RNA, 19 nt, Homo sapiens
  misc_RNA (1)...(19): siRNA sense strand
gugaagcuuuaacugaaga

SEQ ID NO: 1068882 - RNA, 19 nt, Homo sapiens
  misc_RNA (1)...(19): siRNA sense strand
gacaaaacuuagccaauau

SEQ ID NO: 1068883 - RNA, 19 nt, Homo sapiens
  misc_RNA (1)...(19): siRNA sense strand
uggagucgaugaaagugaa

SEQ ID NO: 1068884 - RNA, 19 nt, Homo sapiens
  misc_RNA (1)...(19): siRNA sense strand
gcaauaucacacuacagaa

SEQ ID NO: 1068885 - RNA, 19 nt, Homo sapiens
  misc_RNA (1)...(19): siRNA sense strand
gcggagaaugcauccuaua

SEQ ID NO: 1068886 - RNA, 19 nt, Homo sapiens
  misc_RNA (1)...(19): siRNA sense strand
aagaagaggaaguagauga

SEQ ID NO: 1068887 - RNA, 19 nt, Homo sapiens
  misc_RNA (1)...(19): siRNA sense strand
cucgaaauaucaauggauu

SEQ ID NO: 1068888 - RNA, 19 nt, Homo sapiens
  misc_RNA (1)...(19): siRNA sense strand
ccaccaaguagcaauauca

SEQ ID NO: 1068889 - RNA, 19 nt, Homo sapiens
  misc_RNA (1)...(19): siRNA sense strand
gcuucuaguuuauggacaa

SEQ ID NO: 1068890 - RNA, 19 nt, Homo sapiens
  misc_RNA (1)...(19): siRNA sense strand
cagugaagaagccucauuu

SEQ ID NO: 1068891 - RNA, 19 nt, Homo sapiens
  misc_RNA (1)...(19): siRNA sense strand
cacagagggucauauuucu

SEQ ID NO: 1068892 - RNA, 19 nt, Homo sapiens
  misc_RNA (1)...(19): siRNA sense strand
gugugaagaucagcuguau

SEQ ID NO: 1068893 - RNA, 19 nt, Homo sapiens
  misc_RNA (1)...(19): siRNA sense strand
ucuaguuuauggacaaaga

SEQ ID NO: 1068894 - RNA, 19 nt, Homo sapiens
  misc_RNA (1)...(19): siRNA sense strand
gagucaagaaccucugaaa

SEQ ID NO: 1068895 - RNA, 19 nt, Homo sapiens
  misc_RNA (1)...(19): siRNA sense strand
ccagagccaagaagaaaug

SEQ ID NO: 1068896 - RNA, 19 nt, Homo sapiens
  misc_RNA (1)...(19): siRNA sense strand
acagaaagaaauucaggaa

SEQ ID NO: 1068897 - RNA, 19 nt, Homo sapiens
  misc_RNA (1)...(19): siRNA sense strand
agcuuuaacugaagagaaa

SEQ ID NO: 1068898 - RNA, 19 nt, Homo sapiens
  misc_RNA (1)...(19): siRNA sense strand
uaucacagcaaaccucgaa

SEQ ID NO: 1068899 - RNA, 19 nt, Homo sapiens
  misc_RNA (1)...(19): siRNA sense strand
uacaauaaaguccaugcua

SEQ ID NO: 1068900 - RNA, 19 nt, Homo sapiens
  misc_RNA (1)...(19): siRNA sense strand
gaauugcaagaaggagaua

SEQ ID NO: 1068901 - RNA, 19 nt, Homo sapiens
  misc_RNA (1)...(19): siRNA sense strand
ggcagugaauugcaagaag

SEQ ID NO: 1068902 - RNA, 19 nt, Homo sapiens
  misc_RNA (1)...(19): siRNA sense strand
ucaagaaccucugaaaccu

SEQ ID NO: 1068903 - RNA, 19 nt, Homo sapiens
  misc_RNA (1)...(19): siRNA sense strand
aaauggcagugaauugcaa

SEQ ID NO: 1068904 - RNA, 19 nt, Homo sapiens
  misc_RNA (1)...(19): siRNA sense strand
ggaaaauggcagugaauug

SEQ ID NO: 1068905 - RNA, 19 nt, Homo sapiens
  misc_RNA (1)...(19): siRNA sense strand
uuucauacuccuccagaua

SEQ ID NO: 1068906 - RNA, 19 nt, Homo sapiens
  misc_RNA (1)...(19): siRNA sense strand
ggaauacuacagauuucau

SEQ ID NO: 1068907 - RNA, 19 nt, Homo sapiens
  misc_RNA (1)...(19): siRNA sense strand
gaagaagaggaaguagaug

SEQ ID NO: 1068908 - RNA, 19 nt, Homo sapiens
  misc_RNA (1)...(19): siRNA sense strand
cggagaaugcauccuauau

SEQ ID NO: 1068909 - RNA, 19 nt, Homo sapiens
  misc_RNA (1)...(19): siRNA sense strand
aaaggcaaggugaaauaaa

SEQ ID NO: 1068910 - RNA, 19 nt, Homo sapiens
  misc_RNA (1)...(19): siRNA sense strand
aagaggaaguagaugaaca

SEQ ID NO: 1068911 - RNA, 19 nt, Homo sapiens
  misc_RNA (1)...(19): siRNA sense strand
agaagaggaaguagaugaa

SEQ ID NO: 1068912 - RNA, 19 nt, Homo sapiens
  misc_RNA (1)...(19): siRNA sense strand
ccagauauuuugucaucaa

SEQ ID NO: 1068913 - RNA, 19 nt, Homo sapiens
  misc_RNA (1)...(19): siRNA sense strand
ccucaguccagacaaauau

SEQ ID NO: 1068914 - RNA, 19 nt, Homo sapiens
  misc_RNA (1)...(19): siRNA sense strand
cgcauggguccuacaauaa

SEQ ID NO: 1068915 - RNA, 19 nt, Homo sapiens
  misc_RNA (1)...(19): siRNA sense strand
cuauauccacguucaaaga

SEQ ID NO: 1068916 - RNA, 19 nt, Homo sapiens
  misc_RNA (1)...(19): siRNA sense strand
ugaugaaccacagaacuuu

SEQ ID NO: 1068917 - RNA, 19 nt, Homo sapiens
  misc_RNA (1)...(19): siRNA sense strand
caaagcauucccuaacuac

SEQ ID NO: 1068918 - RNA, 19 nt, Homo sapiens
  misc_RNA (1)...(19): siRNA sense strand
ucacagcaaaccucgaaau

SEQ ID NO: 1068919 - RNA, 19 nt, Homo sapiens
  misc_RNA (1)...(19): siRNA sense strand
acagcaaaccucgaaauau

SEQ ID NO: 1068920 - RNA, 19 nt, Homo sapiens
  misc_RNA (1)...(19): siRNA sense strand
acagaacuuuccuaacucu

SEQ ID NO: 1068921 - RNA, 19 nt, Homo sapiens
  misc_RNA (1)...(19): siRNA sense strand
gaugaaccacagaacuuuc

SEQ ID NO: 1068922 - RNA, 19 nt, Homo sapiens
  misc_RNA (1)...(19): siRNA sense strand
cauccaaagcauucccuaa

SEQ ID NO: 1068923 - RNA, 19 nt, Homo sapiens
  misc_RNA (1)...(19): siRNA sense strand
ugaaauagcugaagugaau

SEQ ID NO: 1068924 - RNA, 19 nt, Homo sapiens
  misc_RNA (1)...(19): siRNA sense strand
gaagguaguuggauuaaca

SEQ ID NO: 1068925 - RNA, 19 nt, Homo sapiens
  misc_RNA (1)...(19): siRNA sense strand
ugaagaaguuggccaauuu

SEQ ID NO: 1068926 - RNA, 19 nt, Homo sapiens
  misc_RNA (1)...(19): siRNA sense strand
guaguuggauuaacagaaa

SEQ ID NO: 1068927 - RNA, 19 nt, Homo sapiens
  misc_RNA (1)...(19): siRNA sense strand
gcaggcaaauuccacagua

SEQ ID NO: 1068928 - RNA, 19 nt, Homo sapiens
  misc_RNA (1)...(19): siRNA sense strand
gaagaaacaggaugaauca

SEQ ID NO: 1068929 - RNA, 19 nt, Homo sapiens
  misc_RNA (1)...(19): siRNA sense strand
gaagacaucugagucacaa

SEQ ID NO: 1068930 - RNA, 19 nt, Homo sapiens
  misc_RNA (1)...(19): siRNA sense strand
gaagaaguuggccaauuua

SEQ ID NO: 1068931 - RNA, 19 nt, Homo sapiens
  misc_RNA (1)...(19): siRNA sense strand
gaaggaacaagacaaguuu

SEQ ID NO: 1068932 - RNA, 19 nt, Homo sapiens
  misc_RNA (1)...(19): siRNA sense strand
agacaaacuuggaguauau

SEQ ID NO: 1068933 - RNA, 19 nt, Homo sapiens
  misc_RNA (1)...(19): siRNA sense strand
ggagaagauuauuuccuuu

SEQ ID NO: 1068934 - RNA, 19 nt, Homo sapiens
  misc_RNA (1)...(19): siRNA sense strand
gagcaaguccugauuguau

SEQ ID NO: 1068935 - RNA, 19 nt, Homo sapiens
  misc_RNA (1)...(19): siRNA sense strand
ucuuggagauguugaaaua

SEQ ID NO: 1068936 - RNA, 19 nt, Homo sapiens
  misc_RNA (1)...(19): siRNA sense strand
caagacaaguuuagagcaa

SEQ ID NO: 1068937 - RNA, 19 nt, Homo sapiens
  misc_RNA (1)...(19): siRNA sense strand
ggaaggaacaagacaaguu

SEQ ID NO: 1068938 - RNA, 19 nt, Homo sapiens
  misc_RNA (1)...(19): siRNA sense strand
guaacuauaucaacaacug

SEQ ID NO: 1068939 - RNA, 19 nt, Homo sapiens
  misc_RNA (1)...(19): siRNA sense strand
gaaugccucuugguuacua

SEQ ID NO: 1068940 - RNA, 19 nt, Homo sapiens
  misc_RNA (1)...(19): siRNA sense strand
caauugacuucuaaagcua

SEQ ID NO: 1068941 - RNA, 19 nt, Homo sapiens
  misc_RNA (1)...(19): siRNA sense strand
gaucauauucuccagcaaa

SEQ ID NO: 1068942 - RNA, 19 nt, Homo sapiens
  misc_RNA (1)...(19): siRNA sense strand
acaaagaaauggcaauugg

SEQ ID NO: 1068943 - RNA, 19 nt, Homo sapiens
  misc_RNA (1)...(19): siRNA sense strand
gaaaucccaccaaccguuu

SEQ ID NO: 1068944 - RNA, 19 nt, Homo sapiens
  misc_RNA (1)...(19): siRNA sense strand
gaacaagacaaguuuagag

SEQ ID NO: 1068945 - RNA, 19 nt, Homo sapiens
  misc_RNA (1)...(19): siRNA sense strand
gaagacaaacuuggaguau

SEQ ID NO: 1068946 - RNA, 19 nt, Homo sapiens
  misc_RNA (1)...(19): siRNA sense strand
caaauuaucagguggaaca

SEQ ID NO: 1068947 - RNA, 19 nt, Homo sapiens
  misc_RNA (1)...(19): siRNA sense strand
gcaauuggagaucauauuc

SEQ ID NO: 1068948 - RNA, 19 nt, Homo sapiens
  misc_RNA (1)...(19): siRNA sense strand
caggaugaaucacccauga

SEQ ID NO: 1068949 - RNA, 19 nt, Homo sapiens
  misc_RNA (1)...(19): siRNA sense strand
gcaucaaccuccaucagau

SEQ ID NO: 1068950 - RNA, 19 nt, Homo sapiens
  misc_RNA (1)...(19): siRNA sense strand
uggagaagauuauuuccuu

SEQ ID NO: 1068951 - RNA, 19 nt, Homo sapiens
  misc_RNA (1)...(19): siRNA sense strand
cagcuacaauaacuaaaga

SEQ ID NO: 1068952 - RNA, 19 nt, Homo sapiens
  misc_RNA (1)...(19): siRNA sense strand
gcaucuacagcuacaauaa

SEQ ID NO: 1068953 - RNA, 19 nt, Homo sapiens
  misc_RNA (1)...(19): siRNA sense strand
aguaguaucuccaacauuc

SEQ ID NO: 1068954 - RNA, 19 nt, Homo sapiens
  misc_RNA (1)...(19): siRNA sense strand
gcaaguccugauuguauaa

SEQ ID NO: 1068955 - RNA, 19 nt, Homo sapiens
  misc_RNA (1)...(19): siRNA sense strand
guauaacaauccugugcaa

SEQ ID NO: 1068956 - RNA, 19 nt, Homo sapiens
  misc_RNA (1)...(19): siRNA sense strand
guggaaugccucuugguua

SEQ ID NO: 1068957 - RNA, 19 nt, Homo sapiens
  misc_RNA (1)...(19): siRNA sense strand
aagcucaaguucuucuuaa

SEQ ID NO: 1068958 - RNA, 19 nt, Homo sapiens
  misc_RNA (1)...(19): siRNA sense strand
caagcucaaguucuucuua

SEQ ID NO: 1068959 - RNA, 19 nt, Homo sapiens
  misc_RNA (1)...(19): siRNA sense strand
aaaauuagaugcugacguu

SEQ ID NO: 1068960 - RNA, 19 nt, Homo sapiens
  misc_RNA (1)...(19): siRNA sense strand
aagacaaacuuggaguaua

SEQ ID NO: 1068961 - RNA, 19 nt, Homo sapiens
  misc_RNA (1)...(19): siRNA sense strand
caauuuaccuccaguucuc

SEQ ID NO: 1068962 - RNA, 19 nt, Homo sapiens
  misc_RNA (1)...(19): siRNA sense strand
ggauggagaagauuauuuc

SEQ ID NO: 1068963 - RNA, 19 nt, Homo sapiens
  misc_RNA (1)...(19): siRNA sense strand
gucaagccauugcguggua

SEQ ID NO: 1068964 - RNA, 19 nt, Homo sapiens
  misc_RNA (1)...(19): siRNA sense strand
gaucaaccuaagaaagaua

SEQ ID NO: 1068965 - RNA, 19 nt, Homo sapiens
  misc_RNA (1)...(19): siRNA sense strand
gcuugaagguaguuggauu

SEQ ID NO: 1068966 - RNA, 19 nt, Homo sapiens
  misc_RNA (1)...(19): siRNA sense strand
cuacagcuacaauaacuaa

SEQ ID NO: 1068967 - RNA, 19 nt, Homo sapiens
  misc_RNA (1)...(19): siRNA sense strand
ccauugucaucuucaaauu

SEQ ID NO: 1068968 - RNA, 19 nt, Homo sapiens
  misc_RNA (1)...(19): siRNA sense strand
caggcaaauuccacaguaa

SEQ ID NO: 1068969 - RNA, 19 nt, Homo sapiens
  misc_RNA (1)...(19): siRNA sense strand
augcugacguugaauuuaa

SEQ ID NO: 1068970 - RNA, 19 nt, Homo sapiens
  misc_RNA (1)...(19): siRNA sense strand
cgaagaaacaggaugaauc

SEQ ID NO: 1068971 - RNA, 19 nt, Homo sapiens
  misc_RNA (1)...(19): siRNA sense strand
gcuggaggcagauuggaua

SEQ ID NO: 1068972 - RNA, 19 nt, Homo sapiens
  misc_RNA (1)...(19): siRNA sense strand
uuacagcacacucaaacua

SEQ ID NO: 1068973 - RNA, 19 nt, Homo sapiens
  misc_RNA (1)...(19): siRNA sense strand
acaauugacuucuaaagcu

SEQ ID NO: 1068974 - RNA, 19 nt, Homo sapiens
  misc_RNA (1)...(19): siRNA sense strand
gagaagauuauuuccuuuc

SEQ ID NO: 1068975 - RNA, 19 nt, Homo sapiens
  misc_RNA (1)...(19): siRNA sense strand
ggaacaagacaaguuuaga

SEQ ID NO: 1068976 - RNA, 19 nt, Homo sapiens
  misc_RNA (1)...(19): siRNA sense strand
cauccuuacuguccucuga

SEQ ID NO: 1068977 - RNA, 19 nt, Homo sapiens
  misc_RNA (1)...(19): siRNA sense strand
aucaacaacuggacaauug

SEQ ID NO: 1068978 - RNA, 19 nt, Homo sapiens
  misc_RNA (1)...(19): siRNA sense strand
gacguugaauuuaacagau

SEQ ID NO: 1068979 - RNA, 19 nt, Homo sapiens
  misc_RNA (1)...(19): siRNA sense strand
gaugcugacguugaauuua

SEQ ID NO: 1068980 - RNA, 19 nt, Homo sapiens
  misc_RNA (1)...(19): siRNA sense strand
uagcugaagugaaugucaa

SEQ ID NO: 1068981 - RNA, 19 nt, Homo sapiens
  misc_RNA (1)...(19): siRNA sense strand
gaaacuuacagcacacuca

SEQ ID NO: 1068982 - RNA, 19 nt, Homo sapiens
  misc_RNA (1)...(19): siRNA sense strand
ggacaauugacuucuaaag

SEQ ID NO: 1068983 - RNA, 19 nt, Homo sapiens
  misc_RNA (1)...(19): siRNA sense strand
aagaucaaccuaagaaaga

SEQ ID NO: 1068984 - RNA, 19 nt, Homo sapiens
  misc_RNA (1)...(19): siRNA sense strand
caagaucaaccuaagaaag

SEQ ID NO: 1068985 - RNA, 19 nt, Homo sapiens
  misc_RNA (1)...(19): siRNA sense strand
ggaguauauucuuuaguac

SEQ ID NO: 1068986 - RNA, 19 nt, Homo sapiens
  misc_RNA (1)...(19): siRNA sense strand
caacuggacaauugacuuc

SEQ ID NO: 1068987 - RNA, 19 nt, Homo sapiens
  misc_RNA (1)...(19): siRNA sense strand
uaacucuucccuugacaaa

SEQ ID NO: 1068988 - RNA, 19 nt, Homo sapiens
  misc_RNA (1)...(19): siRNA sense strand
gggauggagaagauuauuu

SEQ ID NO: 1068989 - RNA, 19 nt, Homo sapiens
  misc_RNA (1)...(19): siRNA sense strand
ccucagauuaguagaguaa

SEQ ID NO: 1068990 - RNA, 19 nt, Homo sapiens
  misc_RNA (1)...(19): siRNA sense strand
aaagaagacaucugaguca

SEQ ID NO: 1068991 - RNA, 19 nt, Homo sapiens
  misc_RNA (1)...(19): siRNA sense strand
ugacaaagaaauggcaauu

SEQ ID NO: 1068992 - RNA, 19 nt, Homo sapiens
  misc_RNA (1)...(19): siRNA sense strand
gaaguuggccaauuuaccu

SEQ ID NO: 1068993 - RNA, 19 nt, Homo sapiens
  misc_RNA (1)...(19): siRNA sense strand
cuggacaauugacuucuaa

SEQ ID NO: 1068994 - RNA, 19 nt, Homo sapiens
  misc_RNA (1)...(19): siRNA sense strand
ggaggcagauuggauagac

SEQ ID NO: 1068995 - RNA, 19 nt, Homo sapiens
  misc_RNA (1)...(19): siRNA sense strand
agcaaguccugauuguaua

SEQ ID NO: 1068996 - RNA, 19 nt, Homo sapiens
  misc_RNA (1)...(19): siRNA sense strand
uagagcaaguccugauugu

SEQ ID NO: 1068997 - RNA, 19 nt, Homo sapiens
  misc_RNA (1)...(19): siRNA sense strand
acacugccauugucaucuu

SEQ ID NO: 1068998 - RNA, 19 nt, Homo sapiens
  misc_RNA (1)...(19): siRNA sense strand
caaagaaauggcaauugga

SEQ ID NO: 1068999 - RNA, 19 nt, Homo sapiens
  misc_RNA (1)...(19): siRNA sense strand
aagugaaugucaaggguuu

SEQ ID NO: 1069000 - RNA, 19 nt, Homo sapiens
  misc_RNA (1)...(19): siRNA sense strand
gaaugucaaggguuuguuc

SEQ ID NO: 1069001 - RNA, 19 nt, Homo sapiens
  misc_RNA (1)...(19): siRNA sense strand
aaacaagaucaaccuaaga

SEQ ID NO: 1069002 - RNA, 19 nt, Homo sapiens
  misc_RNA (1)...(19): siRNA sense strand
gacagcaucuacagcuaca

SEQ ID NO: 1069003 - RNA, 19 nt, Homo sapiens
  misc_RNA (1)...(19): siRNA sense strand
ucaaggguuuguucgugaa

SEQ ID NO: 1069004 - RNA, 19 nt, Homo sapiens
  misc_RNA (1)...(19): siRNA sense strand
ggugauucaaagaaacuua

SEQ ID NO: 1069005 - RNA, 19 nt, Homo sapiens
  misc_RNA (1)...(19): siRNA sense strand
ucaguaguaucuccaacau

SEQ ID NO: 1069006 - RNA, 19 nt, Homo sapiens
  misc_RNA (1)...(19): siRNA sense strand
gacaaagaaauggcaauug

SEQ ID NO: 1069007 - RNA, 19 nt, Homo sapiens
  misc_RNA (1)...(19): siRNA sense strand
uugaagaaguuggccaauu

SEQ ID NO: 1069008 - RNA, 19 nt, Homo sapiens
  misc_RNA (1)...(19): siRNA sense strand
ccauuucuuuguaccgauu

SEQ ID NO: 1069009 - RNA, 19 nt, Homo sapiens
  misc_RNA (1)...(19): siRNA sense strand
gagaaggaaaucccaccaa

SEQ ID NO: 1069010 - RNA, 19 nt, Homo sapiens
  misc_RNA (1)...(19): siRNA sense strand
caucagauuuucuuuggaa

SEQ ID NO: 1069011 - RNA, 19 nt, Homo sapiens
  misc_RNA (1)...(19): siRNA sense strand
caucaaccuccaucagauu

SEQ ID NO: 1069012 - RNA, 19 nt, Homo sapiens
  misc_RNA (1)...(19): siRNA sense strand
caacacugccauugucauc

SEQ ID NO: 1069013 - RNA, 19 nt, Homo sapiens
  misc_RNA (1)...(19): siRNA sense strand
uggaaugccucuugguuac

SEQ ID NO: 1069014 - RNA, 19 nt, Homo sapiens
  misc_RNA (1)...(19): siRNA sense strand
gguggaacaagcucaaguu

SEQ ID NO: 1069015 - RNA, 19 nt, Homo sapiens
  misc_RNA (1)...(19): siRNA sense strand
gaguaacuauaucaacaac

SEQ ID NO: 1069016 - RNA, 19 nt, Homo sapiens
  misc_RNA (1)...(19): siRNA sense strand
gaaauggcaauuggagauc

SEQ ID NO: 1069017 - RNA, 19 nt, Homo sapiens
  misc_RNA (1)...(19): siRNA sense strand
ucgugaagcucauuaacuc

SEQ ID NO: 1069018 - RNA, 19 nt, Homo sapiens
  misc_RNA (1)...(19): siRNA sense strand
agaagacaaacuuggagua

SEQ ID NO: 1069019 - RNA, 19 nt, Homo sapiens
  misc_RNA (1)...(19): siRNA sense strand
ggcaauuggagaucauauu

SEQ ID NO: 1069020 - RNA, 19 nt, Homo sapiens
  misc_RNA (1)...(19): siRNA sense strand
caaagauguuggguucagu

SEQ ID NO: 1069021 - RNA, 19 nt, Homo sapiens
  misc_RNA (1)...(19): siRNA sense strand
caaauuccacaguaacagu

SEQ ID NO: 1069022 - RNA, 19 nt, Homo sapiens
  misc_RNA (1)...(19): siRNA sense strand
uaagagagagaaggaaauc

SEQ ID NO: 1069023 - RNA, 19 nt, Homo sapiens
  misc_RNA (1)...(19): siRNA sense strand
ugagacagcuggaggauaa

SEQ ID NO: 1069024 - RNA, 19 nt, Homo sapiens
  misc_RNA (1)...(19): siRNA sense strand
caaagaagcaugucaagaa

SEQ ID NO: 1069025 - RNA, 19 nt, Homo sapiens
  misc_RNA (1)...(19): siRNA sense strand
gagaaacuguucaagaaga

SEQ ID NO: 1069026 - RNA, 19 nt, Homo sapiens
  misc_RNA (1)...(19): siRNA sense strand
ucaagaagauaaacuguga

SEQ ID NO: 1069027 - RNA, 19 nt, Homo sapiens
  misc_RNA (1)...(19): siRNA sense strand
uaaaccagcucauugaaga

SEQ ID NO: 1069028 - RNA, 19 nt, Homo sapiens
  misc_RNA (1)...(19): siRNA sense strand
ucacggagcucaacaacga

SEQ ID NO: 1069029 - RNA, 19 nt, Homo sapiens
  misc_RNA (1)...(19): siRNA sense strand
gaaggagauugaagaccua

SEQ ID NO: 1069030 - RNA, 19 nt, Homo sapiens
  misc_RNA (1)...(19): siRNA sense strand
ccaaggaggagaagaauuu

SEQ ID NO: 1069031 - RNA, 19 nt, Homo sapiens
  misc_RNA (1)...(19): siRNA sense strand
acaagaugcugaccacuaa

SEQ ID NO: 1069032 - RNA, 19 nt, Homo sapiens
  misc_RNA (1)...(19): siRNA sense strand
gaaggcugcuuaugacaau

SEQ ID NO: 1069033 - RNA, 19 nt, Homo sapiens
  misc_RNA (1)...(19): siRNA sense strand
ggaagaaaguaaccaugug

SEQ ID NO: 1069034 - RNA, 19 nt, Homo sapiens
  misc_RNA (1)...(19): siRNA sense strand
uggagaaacuguucaagaa

SEQ ID NO: 1069035 - RNA, 19 nt, Homo sapiens
  misc_RNA (1)...(19): siRNA sense strand
gaagaaaguaaccauguga

SEQ ID NO: 1069036 - RNA, 19 nt, Homo sapiens
  misc_RNA (1)...(19): siRNA sense strand
gaacuuggccauugagcaa

SEQ ID NO: 1069037 - RNA, 19 nt, Homo sapiens
  misc_RNA (1)...(19): siRNA sense strand
ggagacagccugccugaga

SEQ ID NO: 1069038 - RNA, 19 nt, Homo sapiens
  misc_RNA (1)...(19): siRNA sense strand
caaccacucuguccugaga

SEQ ID NO: 1069039 - RNA, 19 nt, Homo sapiens
  misc_RNA (1)...(19): siRNA sense strand
aaacuaaggaggacuauga

SEQ ID NO: 1069040 - RNA, 19 nt, Homo sapiens
  misc_RNA (1)...(19): siRNA sense strand
gauugaagaccuacgauuu

SEQ ID NO: 1069041 - RNA, 19 nt, Homo sapiens
  misc_RNA (1)...(19): siRNA sense strand
ucaagacccugaagacaga

SEQ ID NO: 1069042 - RNA, 19 nt, Homo sapiens
  misc_RNA (1)...(19): siRNA sense strand
ucucgucacuguucacuuu

SEQ ID NO: 1069043 - RNA, 19 nt, Homo sapiens
  misc_RNA (1)...(19): siRNA sense strand
gaagaacucaguggagaaa

SEQ ID NO: 1069044 - RNA, 19 nt, Homo sapiens
  misc_RNA (1)...(19): siRNA sense strand
ggaggaggcagauauguau

SEQ ID NO: 1069045 - RNA, 19 nt, Homo sapiens
  misc_RNA (1)...(19): siRNA sense strand
ugaaugaucgcaaugaauu

SEQ ID NO: 1069046 - RNA, 19 nt, Homo sapiens
  misc_RNA (1)...(19): siRNA sense strand
ugaaagaccgccagaagaa

SEQ ID NO: 1069047 - RNA, 19 nt, Homo sapiens
  misc_RNA (1)...(19): siRNA sense strand
gagacagccugccugagaa

SEQ ID NO: 1069048 - RNA, 19 nt, Homo sapiens
  misc_RNA (1)...(19): siRNA sense strand
gcagaaacagauucacauu

SEQ ID NO: 1069049 - RNA, 19 nt, Homo sapiens
  misc_RNA (1)...(19): siRNA sense strand
gaggauaaacugaggaaga

SEQ ID NO: 1069050 - RNA, 19 nt, Homo sapiens
  misc_RNA (1)...(19): siRNA sense strand
agaagcaugucaagaagaa

SEQ ID NO: 1069051 - RNA, 19 nt, Homo sapiens
  misc_RNA (1)...(19): siRNA sense strand
gauuugagaaggcugcuua

SEQ ID NO: 1069052 - RNA, 19 nt, Homo sapiens
  misc_RNA (1)...(19): siRNA sense strand
gaaccuaaaccagcucauu

SEQ ID NO: 1069053 - RNA, 19 nt, Homo sapiens
  misc_RNA (1)...(19): siRNA sense strand
gagaucacccuacuguuga

SEQ ID NO: 1069054 - RNA, 19 nt, Homo sapiens
  misc_RNA (1)...(19): siRNA sense strand
ccaacgaccugcugcuguu

SEQ ID NO: 1069055 - RNA, 19 nt, Homo sapiens
  misc_RNA (1)...(19): siRNA sense strand
gaagaccuacgauuugaga

SEQ ID NO: 1069056 - RNA, 19 nt, Homo sapiens
  misc_RNA (1)...(19): siRNA sense strand
gacaagaugcugaccacua

SEQ ID NO: 1069057 - RNA, 19 nt, Homo sapiens
  misc_RNA (1)...(19): siRNA sense strand
ggaggacuaugaggcauug

SEQ ID NO: 1069058 - RNA, 19 nt, Homo sapiens
  misc_RNA (1)...(19): siRNA sense strand
gaccuuggaucuauugaag

SEQ ID NO: 1069059 - RNA, 19 nt, Homo sapiens
  misc_RNA (1)...(19): siRNA sense strand
gcugaaugaucgcaaugaa

SEQ ID NO: 1069060 - RNA, 19 nt, Homo sapiens
  misc_RNA (1)...(19): siRNA sense strand
uggcugaacuggaugagaa

SEQ ID NO: 1069061 - RNA, 19 nt, Homo sapiens
  misc_RNA (1)...(19): siRNA sense strand
gcuguuggcugaacuggau

SEQ ID NO: 1069062 - RNA, 19 nt, Homo sapiens
  misc_RNA (1)...(19): siRNA sense strand
ccaagauccuggugcaguu

SEQ ID NO: 1069063 - RNA, 19 nt, Homo sapiens
  misc_RNA (1)...(19): siRNA sense strand
gaugagaucacccuacugu

SEQ ID NO: 1069064 - RNA, 19 nt, Homo sapiens
  misc_RNA (1)...(19): siRNA sense strand
ggacuaugaggcauugauu

SEQ ID NO: 1069065 - RNA, 19 nt, Homo sapiens
  misc_RNA (1)...(19): siRNA sense strand
ucaggaagaugguggaaag

SEQ ID NO: 1069066 - RNA, 19 nt, Homo sapiens
  misc_RNA (1)...(19): siRNA sense strand
gcaaagaagcaugucaaga

SEQ ID NO: 1069067 - RNA, 19 nt, Homo sapiens
  misc_RNA (1)...(19): siRNA sense strand
gaaggacaccucucaguac

SEQ ID NO: 1069068 - RNA, 19 nt, Homo sapiens
  misc_RNA (1)...(19): siRNA sense strand
ugagaucacccuacuguug

SEQ ID NO: 1069069 - RNA, 19 nt, Homo sapiens
  misc_RNA (1)...(19): siRNA sense strand
cagguuggaugauguggaa

SEQ ID NO: 1069070 - RNA, 19 nt, Homo sapiens
  misc_RNA (1)...(19): siRNA sense strand
cagaaacagauucacauuu

SEQ ID NO: 1069071 - RNA, 19 nt, Homo sapiens
  misc_RNA (1)...(19): siRNA sense strand
aaagaagcaugucaagaag

SEQ ID NO: 1069072 - RNA, 19 nt, Homo sapiens
  misc_RNA (1)...(19): siRNA sense strand
acaucaaccuuccgcagua

SEQ ID NO: 1069073 - RNA, 19 nt, Homo sapiens
  misc_RNA (1)...(19): siRNA sense strand
gaaauugucccacgaugac

SEQ ID NO: 1069074 - RNA, 19 nt, Homo sapiens
  misc_RNA (1)...(19): siRNA sense strand
ggagugagaagaacuacau

SEQ ID NO: 1069075 - RNA, 19 nt, Homo sapiens
  misc_RNA (1)...(19): siRNA sense strand
gcagcugguucucgacaau

SEQ ID NO: 1069076 - RNA, 19 nt, Homo sapiens
  misc_RNA (1)...(19): siRNA sense strand
caagaggacccaacgaauc

SEQ ID NO: 1069077 - RNA, 19 nt, Homo sapiens
  misc_RNA (1)...(19): siRNA sense strand
ggacaccucucaguacaac

SEQ ID NO: 1069078 - RNA, 19 nt, Homo sapiens
  misc_RNA (1)...(19): siRNA sense strand
ccaugaacuuggccauuga

SEQ ID NO: 1069079 - RNA, 19 nt, Homo sapiens
  misc_RNA (1)...(19): siRNA sense strand
ugaacuggaugagaagauu

SEQ ID NO: 1069080 - RNA, 19 nt, Homo sapiens
  misc_RNA (1)...(19): siRNA sense strand
gaaacagauucacauuuug

SEQ ID NO: 1069081 - RNA, 19 nt, Homo sapiens
  misc_RNA (1)...(19): siRNA sense strand
aggaagcucucaaggcaaa

SEQ ID NO: 1069082 - RNA, 19 nt, Homo sapiens
  misc_RNA (1)...(19): siRNA sense strand
agaaggacaccucucagua

SEQ ID NO: 1069083 - RNA, 19 nt, Homo sapiens
  misc_RNA (1)...(19): siRNA sense strand
ugagaaggcugcuuaugac

SEQ ID NO: 1069084 - RNA, 19 nt, Homo sapiens
  misc_RNA (1)...(19): siRNA sense strand
guuugaaucucgucacugu

SEQ ID NO: 1069085 - RNA, 19 nt, Homo sapiens
  misc_RNA (1)...(19): siRNA sense strand
gacuaugaggcauugauua

SEQ ID NO: 1069086 - RNA, 19 nt, Homo sapiens
  misc_RNA (1)...(19): siRNA sense strand
gaaaccagcagaagauugc

SEQ ID NO: 1069087 - RNA, 19 nt, Homo sapiens
  misc_RNA (1)...(19): siRNA sense strand
ccuuggaucuauugaagaa

SEQ ID NO: 1069088 - RNA, 19 nt, Homo sapiens
  misc_RNA (1)...(19): siRNA sense strand
ccacggaggaggcagauau

SEQ ID NO: 1069089 - RNA, 19 nt, Homo sapiens
  misc_RNA (1)...(19): siRNA sense strand
gaaacugcagaaacagauu

SEQ ID NO: 1069090 - RNA, 19 nt, Homo sapiens
  misc_RNA (1)...(19): siRNA sense strand
agacagagcaggaugagau

SEQ ID NO: 1069091 - RNA, 19 nt, Homo sapiens
  misc_RNA (1)...(19): siRNA sense strand
ugaaggagaaucggaguaa

SEQ ID NO: 1069092 - RNA, 19 nt, Homo sapiens
  misc_RNA (1)...(19): siRNA sense strand
gaaacuguucaagaagaua

SEQ ID NO: 1069093 - RNA, 19 nt, Homo sapiens
  misc_RNA (1)...(19): siRNA sense strand
gcaaucuucucaggccuau

SEQ ID NO: 1069094 - RNA, 19 nt, Homo sapiens
  misc_RNA (1)...(19): siRNA sense strand
uaaggcagcaguucaggaa

SEQ ID NO: 1069095 - RNA, 19 nt, Homo sapiens
  misc_RNA (1)...(19): siRNA sense strand
ggaaacugcagaaacagau

SEQ ID NO: 1069096 - RNA, 19 nt, Homo sapiens
  misc_RNA (1)...(19): siRNA sense strand
gcugagagugggaaccuaa

SEQ ID NO: 1069097 - RNA, 19 nt, Homo sapiens
  misc_RNA (1)...(19): siRNA sense strand
acauggagaugaugcacaa

SEQ ID NO: 1069098 - RNA, 19 nt, Homo sapiens
  misc_RNA (1)...(19): siRNA sense strand
gaagaaaaccaugaacuug

SEQ ID NO: 1069099 - RNA, 19 nt, Homo sapiens
  misc_RNA (1)...(19): siRNA sense strand
gaaggagaaucggaguaag

SEQ ID NO: 1069100 - RNA, 19 nt, Homo sapiens
  misc_RNA (1)...(19): siRNA sense strand
gaagauugcgagucaguac

SEQ ID NO: 1069101 - RNA, 19 nt, Homo sapiens
  misc_RNA (1)...(19): siRNA sense strand
gaucaagacccugaagaca

SEQ ID NO: 1069102 - RNA, 19 nt, Homo sapiens
  misc_RNA (1)...(19): siRNA sense strand
cugagaagguggaugacuu

SEQ ID NO: 1069103 - RNA, 19 nt, Homo sapiens
  misc_RNA (1)...(19): siRNA sense strand
ugaagaagaacaggagaaa

SEQ ID NO: 1069104 - RNA, 19 nt, Homo sapiens
  misc_RNA (1)...(19): siRNA sense strand
caagcugaaugaucgcaau

SEQ ID NO: 1069105 - RNA, 19 nt, Homo sapiens
  misc_RNA (1)...(19): siRNA sense strand
uugaagaccuacgauuuga

SEQ ID NO: 1069106 - RNA, 19 nt, Homo sapiens
  misc_RNA (1)...(19): siRNA sense strand
cgacaauuauauccugaag

SEQ ID NO: 1069107 - RNA, 19 nt, Homo sapiens
  misc_RNA (1)...(19): siRNA sense strand
ccagaacccaucaaaguca

SEQ ID NO: 1069108 - RNA, 19 nt, Homo sapiens
  misc_RNA (1)...(19): siRNA sense strand
caagauccuggugcaguua

SEQ ID NO: 1069109 - RNA, 19 nt, Homo sapiens
  misc_RNA (1)...(19): siRNA sense strand
ggagaaacuguucaagaag

SEQ ID NO: 1069110 - RNA, 19 nt, Homo sapiens
  misc_RNA (1)...(19): siRNA sense strand
caacaacgacauggagaug

SEQ ID NO: 1069111 - RNA, 19 nt, Homo sapiens
  misc_RNA (1)...(19): siRNA sense strand
acuaugaggcauugauuaa

SEQ ID NO: 1069112 - RNA, 19 nt, Homo sapiens
  misc_RNA (1)...(19): siRNA sense strand
gcgacagguuggaugaugu

SEQ ID NO: 1069113 - RNA, 19 nt, Homo sapiens
  misc_RNA (1)...(19): siRNA sense strand
guggagaaacuguucaaga

SEQ ID NO: 1069114 - RNA, 19 nt, Homo sapiens
  misc_RNA (1)...(19): siRNA sense strand
ggacgagaucauccucuug

SEQ ID NO: 1069115 - RNA, 19 nt, Homo sapiens
  misc_RNA (1)...(19): siRNA sense strand
uugagaaggcugcuuauga

SEQ ID NO: 1069116 - RNA, 19 nt, Homo sapiens
  misc_RNA (1)...(19): siRNA sense strand
aaaugcaggaggccaauaa

SEQ ID NO: 1069117 - RNA, 19 nt, Homo sapiens
  misc_RNA (1)...(19): siRNA sense strand
gaacuggaugagaagauuc

SEQ ID NO: 1069118 - RNA, 19 nt, Homo sapiens
  misc_RNA (1)...(19): siRNA sense strand
guggaaagccggaagucuu

SEQ ID NO: 1069119 - RNA, 19 nt, Homo sapiens
  misc_RNA (1)...(19): siRNA sense strand
cccggaaacugcagaaaca

SEQ ID NO: 1069120 - RNA, 19 nt, Homo sapiens
  misc_RNA (1)...(19): siRNA sense strand
acaacgacauggagaugau

SEQ ID NO: 1069121 - RNA, 19 nt, Homo sapiens
  misc_RNA (1)...(19): siRNA sense strand
cggaggaggcagauaugua

SEQ ID NO: 1069122 - RNA, 19 nt, Homo sapiens
  misc_RNA (1)...(19): siRNA sense strand
gcagaaauugucccacgau

SEQ ID NO: 1069123 - RNA, 19 nt, Homo sapiens
  misc_RNA (1)...(19): siRNA sense strand
cagauaaacuccauaccua

SEQ ID NO: 1069124 - RNA, 19 nt, Homo sapiens
  misc_RNA (1)...(19): siRNA sense strand
aaugcaagcuccagaaaua

SEQ ID NO: 1069125 - RNA, 19 nt, Homo sapiens
  misc_RNA (1)...(19): siRNA sense strand
aagcaaggcugacugauga

SEQ ID NO: 1069126 - RNA, 19 nt, Homo sapiens
  misc_RNA (1)...(19): siRNA sense strand
gaauugggcugcuaacaac

SEQ ID NO: 1069127 - RNA, 19 nt, Homo sapiens
  misc_RNA (1)...(19): siRNA sense strand
ggaauugggcugcuaacaa

SEQ ID NO: 1069128 - RNA, 19 nt, Homo sapiens
  misc_RNA (1)...(19): siRNA sense strand
gauaaacuccauaccuaaa

SEQ ID NO: 1069129 - RNA, 19 nt, Homo sapiens
  misc_RNA (1)...(19): siRNA sense strand
gcaagcuccagaaauauaa

SEQ ID NO: 1069130 - RNA, 19 nt, Homo sapiens
  misc_RNA (1)...(19): siRNA sense strand
gaagcaaggcugacugaug

SEQ ID NO: 1069131 - RNA, 19 nt, Homo sapiens
  misc_RNA (1)...(19): siRNA sense strand
gaauuccgcuaucucuuca

SEQ ID NO: 1069132 - RNA, 19 nt, Homo sapiens
  misc_RNA (1)...(19): siRNA sense strand
uaaacuccauaccuaaaga

SEQ ID NO: 1069133 - RNA, 19 nt, Homo sapiens
  misc_RNA (1)...(19): siRNA sense strand
cagcauauaacaggaauuu

SEQ ID NO: 1069134 - RNA, 19 nt, Homo sapiens
  misc_RNA (1)...(19): siRNA sense strand
gcauauaacaggaauuucu

SEQ ID NO: 1069135 - RNA, 19 nt, Homo sapiens
  misc_RNA (1)...(19): siRNA sense strand
gcaaggcugacugaugaua

SEQ ID NO: 1069136 - RNA, 19 nt, Homo sapiens
  misc_RNA (1)...(19): siRNA sense strand
cuccauaccuaaagaaugu

SEQ ID NO: 1069137 - RNA, 19 nt, Homo sapiens
  misc_RNA (1)...(19): siRNA sense strand
ccuaaagaaugugcagaaa

SEQ ID NO: 1069138 - RNA, 19 nt, Homo sapiens
  misc_RNA (1)...(19): siRNA sense strand
acaggaauuucucuuggaa

SEQ ID NO: 1069139 - RNA, 19 nt, Homo sapiens
  misc_RNA (1)...(19): siRNA sense strand
ggaaguauuuuggauuguu

SEQ ID NO: 1069140 - RNA, 19 nt, Homo sapiens
  misc_RNA (1)...(19): siRNA sense strand
gaaguauuuuggauuguug

SEQ ID NO: 1069141 - RNA, 19 nt, Homo sapiens
  misc_RNA (1)...(19): siRNA sense strand
gagcgucaaacuuguuaug

SEQ ID NO: 1069142 - RNA, 19 nt, Homo sapiens
  misc_RNA (1)...(19): siRNA sense strand
gcgucaaacuuguuaugca

SEQ ID NO: 1069143 - RNA, 19 nt, Homo sapiens
  misc_RNA (1)...(19): siRNA sense strand
gaaaaugcaagcuccagaa

SEQ ID NO: 1069144 - RNA, 19 nt, Homo sapiens
  misc_RNA (1)...(19): siRNA sense strand
ugcaagcuccagaaauaua

SEQ ID NO: 1069145 - RNA, 19 nt, Homo sapiens
  misc_RNA (1)...(19): siRNA sense strand
agauaaacuccauaccuaa

SEQ ID NO: 1069146 - RNA, 19 nt, Homo sapiens
  misc_RNA (1)...(19): siRNA sense strand
gagauguucauauccagau

SEQ ID NO: 1069147 - RNA, 19 nt, Homo sapiens
  misc_RNA (1)...(19): siRNA sense strand
cuucuuucaucaugccuuu

SEQ ID NO: 1069148 - RNA, 19 nt, Homo sapiens
  misc_RNA (1)...(19): siRNA sense strand
gugaagcaaggcugacuga

SEQ ID NO: 1069149 - RNA, 19 nt, Homo sapiens
  misc_RNA (1)...(19): siRNA sense strand
agaauuccgcuaucucuuc

SEQ ID NO: 1069150 - RNA, 19 nt, Homo sapiens
  misc_RNA (1)...(19): siRNA sense strand
auucugagcgucaaacuug

SEQ ID NO: 1069151 - RNA, 19 nt, Homo sapiens
  misc_RNA (1)...(19): siRNA sense strand
guaguagcuccuucucaga

SEQ ID NO: 1069152 - RNA, 19 nt, Homo sapiens
  misc_RNA (1)...(19): siRNA sense strand
uggaauuacagacuucauu

SEQ ID NO: 1069153 - RNA, 19 nt, Homo sapiens
  misc_RNA (1)...(19): siRNA sense strand
ccagauaaacuccauaccu

SEQ ID NO: 1069154 - RNA, 19 nt, Homo sapiens
  misc_RNA (1)...(19): siRNA sense strand
ggugccuucuuucaucaug

SEQ ID NO: 1069155 - RNA, 19 nt, Homo sapiens
  misc_RNA (1)...(19): siRNA sense strand
aacaggaauuucucuugga

SEQ ID NO: 1069156 - RNA, 19 nt, Homo sapiens
  misc_RNA (1)...(19): siRNA sense strand
uccgcuaucucuucaagug

SEQ ID NO: 1069157 - RNA, 19 nt, Homo sapiens
  misc_RNA (1)...(19): siRNA sense strand
ucucagaauuccgcuaucu

SEQ ID NO: 1069158 - RNA, 19 nt, Homo sapiens
  misc_RNA (1)...(19): siRNA sense strand
uagcugugcccauggaugu

SEQ ID NO: 1069159 - RNA, 19 nt, Homo sapiens
  misc_RNA (1)...(19): siRNA sense strand
gggcugcuaacaacuuuua

SEQ ID NO: 1069160 - RNA, 19 nt, Homo sapiens
  misc_RNA (1)...(19): siRNA sense strand
ucagaauuccgcuaucucu

SEQ ID NO: 1069161 - RNA, 19 nt, Homo sapiens
  misc_RNA (1)...(19): siRNA sense strand
aaacuccauaccuaaagaa

SEQ ID NO: 1069162 - RNA, 19 nt, Homo sapiens
  misc_RNA (1)...(19): siRNA sense strand
gggagaagcugacguuguu

SEQ ID NO: 1069163 - RNA, 19 nt, Homo sapiens
  misc_RNA (1)...(19): siRNA sense strand
ggacuacccugcacugcuu

SEQ ID NO: 1069164 - RNA, 19 nt, Homo sapiens
  misc_RNA (1)...(19): siRNA sense strand
gaagagcaguuugugaaag

SEQ ID NO: 1069165 - RNA, 19 nt, Homo sapiens
  misc_RNA (1)...(19): siRNA sense strand
ggaugagaaugaacucgaa

SEQ ID NO: 1069166 - RNA, 19 nt, Homo sapiens
  misc_RNA (1)...(19): siRNA sense strand
gaacugugggagucaagua

SEQ ID NO: 1069167 - RNA, 19 nt, Homo sapiens
  misc_RNA (1)...(19): siRNA sense strand
caagagaaaguagauguuu

SEQ ID NO: 1069168 - RNA, 19 nt, Homo sapiens
  misc_RNA (1)...(19): siRNA sense strand
gcaaaggaaacccuggaaa

SEQ ID NO: 1069169 - RNA, 19 nt, Homo sapiens
  misc_RNA (1)...(19): siRNA sense strand
gagcaccguggguuuauuu

SEQ ID NO: 1069170 - RNA, 19 nt, Homo sapiens
  misc_RNA (1)...(19): siRNA sense strand
gaagcuacuuaaagaacug

SEQ ID NO: 1069171 - RNA, 19 nt, Homo sapiens
  misc_RNA (1)...(19): siRNA sense strand
gcaacugcguggugcugaa

SEQ ID NO: 1069172 - RNA, 19 nt, Homo sapiens
  misc_RNA (1)...(19): siRNA sense strand
guuguaaagugccaucaga

SEQ ID NO: 1069173 - RNA, 19 nt, Homo sapiens
  misc_RNA (1)...(19): siRNA sense strand
ccucaggcaucguuguaaa

SEQ ID NO: 1069174 - RNA, 19 nt, Homo sapiens
  misc_RNA (1)...(19): siRNA sense strand
caucagacaagaucaguug

SEQ ID NO: 1069175 - RNA, 19 nt, Homo sapiens
  misc_RNA (1)...(19): siRNA sense strand
ggaaaauccuacaagagaa

SEQ ID NO: 1069176 - RNA, 19 nt, Homo sapiens
  misc_RNA (1)...(19): siRNA sense strand
guaaagugccaucagacaa

SEQ ID NO: 1069177 - RNA, 19 nt, Homo sapiens
  misc_RNA (1)...(19): siRNA sense strand
cuacaccacugacccgaau

SEQ ID NO: 1069178 - RNA, 19 nt, Homo sapiens
  misc_RNA (1)...(19): siRNA sense strand
gagaagcugacguuguuau

SEQ ID NO: 1069179 - RNA, 19 nt, Homo sapiens
  misc_RNA (1)...(19): siRNA sense strand
cgaagagcaguuugugaaa

SEQ ID NO: 1069180 - RNA, 19 nt, Homo sapiens
  misc_RNA (1)...(19): siRNA sense strand
ucgaagagcaguuugugaa

SEQ ID NO: 1069181 - RNA, 19 nt, Homo sapiens
  misc_RNA (1)...(19): siRNA sense strand
gaaaauccuacaagagaaa

SEQ ID NO: 1069182 - RNA, 19 nt, Homo sapiens
  misc_RNA (1)...(19): siRNA sense strand
ggagaagcugacguuguua

SEQ ID NO: 1069183 - RNA, 19 nt, Homo sapiens
  misc_RNA (1)...(19): siRNA sense strand
caaaggaaacccuggaaaa

SEQ ID NO: 1069184 - RNA, 19 nt, Homo sapiens
  misc_RNA (1)...(19): siRNA sense strand
caguugaucagaacagaaa

SEQ ID NO: 1069185 - RNA, 19 nt, Homo sapiens
  misc_RNA (1)...(19): siRNA sense strand
uaaagugccaucagacaag

SEQ ID NO: 1069186 - RNA, 19 nt, Homo sapiens
  misc_RNA (1)...(19): siRNA sense strand
aaagugccaucagacaaga

SEQ ID NO: 1069187 - RNA, 19 nt, Homo sapiens
  misc_RNA (1)...(19): siRNA sense strand
ccagauggcaggcaagaag

SEQ ID NO: 1069188 - RNA, 19 nt, Homo sapiens
  misc_RNA (1)...(19): siRNA sense strand
caccguggguuuauuucau

SEQ ID NO: 1069189 - RNA, 19 nt, Homo sapiens
  misc_RNA (1)...(19): siRNA sense strand
gcaccguggguuuauuuca

SEQ ID NO: 1069190 - RNA, 19 nt, Homo sapiens
  misc_RNA (1)...(19): siRNA sense strand
aaagaacugugggagucaa

SEQ ID NO: 1069191 - RNA, 19 nt, Homo sapiens
  misc_RNA (1)...(19): siRNA sense strand
aagagcaguuugugaaagg

SEQ ID NO: 1069192 - RNA, 19 nt, Homo sapiens
  misc_RNA (1)...(19): siRNA sense strand
guuguuauccccaggaaua

SEQ ID NO: 1069193 - RNA, 19 nt, Homo sapiens
  misc_RNA (1)...(19): siRNA sense strand
gggccaggcaaccaacaaa

SEQ ID NO: 1069194 - RNA, 19 nt, Homo sapiens
  misc_RNA (1)...(19): siRNA sense strand
cugcacugcuuuccuugga

SEQ ID NO: 1069195 - RNA, 19 nt, Homo sapiens
  misc_RNA (1)...(19): siRNA sense strand
uacaagagaaaguagaugu

SEQ ID NO: 1069196 - RNA, 19 nt, Homo sapiens
  misc_RNA (1)...(19): siRNA sense strand
acaagagaaaguagauguu

SEQ ID NO: 1069197 - RNA, 19 nt, Homo sapiens
  misc_RNA (1)...(19): siRNA sense strand
cggaaaauccuacaagaga

SEQ ID NO: 1069198 - RNA, 19 nt, Homo sapiens
  misc_RNA (1)...(19): siRNA sense strand
agaagcuacuuaaagaacu

SEQ ID NO: 1069199 - RNA, 19 nt, Homo sapiens
  misc_RNA (1)...(19): siRNA sense strand
aaagcuagcucggaaaauc

SEQ ID NO: 1069200 - RNA, 19 nt, Homo sapiens
  misc_RNA (1)...(19): siRNA sense strand
ccguggguuuauuucauuu

SEQ ID NO: 1069201 - RNA, 19 nt, Homo sapiens
  misc_RNA (1)...(19): siRNA sense strand
gagaagaccuagaauuuaa

SEQ ID NO: 1069202 - RNA, 19 nt, Homo sapiens
  misc_RNA (1)...(19): siRNA sense strand
gaagaaagcaugaacauug

SEQ ID NO: 1069203 - RNA, 19 nt, Homo sapiens
  misc_RNA (1)...(19): siRNA sense strand
gaaacugacuaaagcuaua

SEQ ID NO: 1069204 - RNA, 19 nt, Homo sapiens
  misc_RNA (1)...(19): siRNA sense strand
caugaucucucuagaaauu

SEQ ID NO: 1069205 - RNA, 19 nt, Homo sapiens
  misc_RNA (1)...(19): siRNA sense strand
ggagaagaccuagaauuua

SEQ ID NO: 1069206 - RNA, 19 nt, Homo sapiens
  misc_RNA (1)...(19): siRNA sense strand
gccaugaucucucuagaaa

SEQ ID NO: 1069207 - RNA, 19 nt, Homo sapiens
  misc_RNA (1)...(19): siRNA sense strand
aaauggaucugcugaguaa

SEQ ID NO: 1069208 - RNA, 19 nt, Homo sapiens
  misc_RNA (1)...(19): siRNA sense strand
caaaggaacgugaagauga

SEQ ID NO: 1069209 - RNA, 19 nt, Homo sapiens
  misc_RNA (1)...(19): siRNA sense strand
caaccggucuguccaaguu

SEQ ID NO: 1069210 - RNA, 19 nt, Homo sapiens
  misc_RNA (1)...(19): siRNA sense strand
gaacugucuuggccaugua

SEQ ID NO: 1069211 - RNA, 19 nt, Homo sapiens
  misc_RNA (1)...(19): siRNA sense strand
cgagguggaugauguaaug

SEQ ID NO: 1069212 - RNA, 19 nt, Homo sapiens
  misc_RNA (1)...(19): siRNA sense strand
caacggaggauugguauuu

SEQ ID NO: 1069213 - RNA, 19 nt, Homo sapiens
  misc_RNA (1)...(19): siRNA sense strand
cagcagaacacuucaacua

SEQ ID NO: 1069214 - RNA, 19 nt, Homo sapiens
  misc_RNA (1)...(19): siRNA sense strand
caggucagauugaguugua

SEQ ID NO: 1069215 - RNA, 19 nt, Homo sapiens
  misc_RNA (1)...(19): siRNA sense strand
gcagaacacuucaacuacu

SEQ ID NO: 1069216 - RNA, 19 nt, Homo sapiens
  misc_RNA (1)...(19): siRNA sense strand
ucaagaaacugacuaaagc

SEQ ID NO: 1069217 - RNA, 19 nt, Homo sapiens
  misc_RNA (1)...(19): siRNA sense strand
uggaguacuuugccaauaa

SEQ ID NO: 1069218 - RNA, 19 nt, Homo sapiens
  misc_RNA (1)...(19): siRNA sense strand
ccagacauguauucuuuau

SEQ ID NO: 1069219 - RNA, 19 nt, Homo sapiens
  misc_RNA (1)...(19): siRNA sense strand
uauguggacugauugauga

SEQ ID NO: 1069220 - RNA, 19 nt, Homo sapiens
  misc_RNA (1)...(19): siRNA sense strand
uggagaagaccuagaauuu

SEQ ID NO: 1069221 - RNA, 19 nt, Homo sapiens
  misc_RNA (1)...(19): siRNA sense strand
ggaguacuuugccaauaau

SEQ ID NO: 1069222 - RNA, 19 nt, Homo sapiens
  misc_RNA (1)...(19): siRNA sense strand
guggagucauucaaguuua

SEQ ID NO: 1069223 - RNA, 19 nt, Homo sapiens
  misc_RNA (1)...(19): siRNA sense strand
ccucuauguuugacgaaua

SEQ ID NO: 1069224 - RNA, 19 nt, Homo sapiens
  misc_RNA (1)...(19): siRNA sense strand
gaugagucuuccucuaugu

SEQ ID NO: 1069225 - RNA, 19 nt, Homo sapiens
  misc_RNA (1)...(19): siRNA sense strand
gaucgagguggaugaugua

SEQ ID NO: 1069226 - RNA, 19 nt, Homo sapiens
  misc_RNA (1)...(19): siRNA sense strand
auccagacauguauucuuu

SEQ ID NO: 1069227 - RNA, 19 nt, Homo sapiens
  misc_RNA (1)...(19): siRNA sense strand
guuuauuucuggcaucuug

SEQ ID NO: 1069228 - RNA, 19 nt, Homo sapiens
  misc_RNA (1)...(19): siRNA sense strand
gguggagucauucaaguuu

SEQ ID NO: 1069229 - RNA, 19 nt, Homo sapiens
  misc_RNA (1)...(19): siRNA sense strand
aaagcuauauguggacuga

SEQ ID NO: 1069230 - RNA, 19 nt, Homo sapiens
  misc_RNA (1)...(19): siRNA sense strand
gaccuagaauuuaaagaac

SEQ ID NO: 1069231 - RNA, 19 nt, Homo sapiens
  misc_RNA (1)...(19): siRNA sense strand
cauugcagcauauugauuu

SEQ ID NO: 1069232 - RNA, 19 nt, Homo sapiens
  misc_RNA (1)...(19): siRNA sense strand
aaaggaacgugaagaugag

SEQ ID NO: 1069233 - RNA, 19 nt, Homo sapiens
  misc_RNA (1)...(19): siRNA sense strand
ggaugauucucugcgauuc

SEQ ID NO: 1069234 - RNA, 19 nt, Homo sapiens
  misc_RNA (1)...(19): siRNA sense strand
ugaucgagguggaugaugu

SEQ ID NO: 1069235 - RNA, 19 nt, Homo sapiens
  misc_RNA (1)...(19): siRNA sense strand
gaagaccuagaauuuaaag

SEQ ID NO: 1069236 - RNA, 19 nt, Homo sapiens
  misc_RNA (1)...(19): siRNA sense strand
gcauauugauuuugccauu

SEQ ID NO: 1069237 - RNA, 19 nt, Homo sapiens
  misc_RNA (1)...(19): siRNA sense strand
guggacugauugaugacua

SEQ ID NO: 1069238 - RNA, 19 nt, Homo sapiens
  misc_RNA (1)...(19): siRNA sense strand
gcauugcagcauauugauu

SEQ ID NO: 1069239 - RNA, 19 nt, Homo sapiens
  misc_RNA (1)...(19): siRNA sense strand
ucagucagaugaagaaagc

SEQ ID NO: 1069240 - RNA, 19 nt, Homo sapiens
  misc_RNA (1)...(19): siRNA sense strand
gagucuuccucuauguuug

SEQ ID NO: 1069241 - RNA, 19 nt, Homo sapiens
  misc_RNA (1)...(19): siRNA sense strand
cagaacacuucaacuacuc

SEQ ID NO: 1069242 - RNA, 19 nt, Homo sapiens
  misc_RNA (1)...(19): siRNA sense strand
gcugacauccgggaacuga

SEQ ID NO: 1069243 - RNA, 19 nt, Homo sapiens
  misc_RNA (1)...(19): siRNA sense strand
agaaugccaggaugaauga

SEQ ID NO: 1069244 - RNA, 19 nt, Homo sapiens
  misc_RNA (1)...(19): siRNA sense strand
gaauuuaaagaaccaaagg

SEQ ID NO: 1069245 - RNA, 19 nt, Homo sapiens
  misc_RNA (1)...(19): siRNA sense strand
cuacagcaugguucgauuu

SEQ ID NO: 1069246 - RNA, 19 nt, Homo sapiens
  misc_RNA (1)...(19): siRNA sense strand
uggagucauucaaguuuau

SEQ ID NO: 1069247 - RNA, 19 nt, Homo sapiens
  misc_RNA (1)...(19): siRNA sense strand
ccauguagaggacgacuau

SEQ ID NO: 1069248 - RNA, 19 nt, Homo sapiens
  misc_RNA (1)...(19): siRNA sense strand
gauccagacauguauucuu

SEQ ID NO: 1069249 - RNA, 19 nt, Homo sapiens
  misc_RNA (1)...(19): siRNA sense strand
agaugagucuuccucuaug

SEQ ID NO: 1069250 - RNA, 19 nt, Homo sapiens
  misc_RNA (1)...(19): siRNA sense strand
gaaccaaaggaacgugaag

SEQ ID NO: 1069251 - RNA, 19 nt, Homo sapiens
  misc_RNA (1)...(19): siRNA sense strand
gaaauuccgcaagucaaca

SEQ ID NO: 1069252 - RNA, 19 nt, Homo sapiens
  misc_RNA (1)...(19): siRNA sense strand
ccaaaggaacgugaagaug

SEQ ID NO: 1069253 - RNA, 19 nt, Homo sapiens
  misc_RNA (1)...(19): siRNA sense strand
ugaagaaagcaugaacauu

SEQ ID NO: 1069254 - RNA, 19 nt, Homo sapiens
  misc_RNA (1)...(19): siRNA sense strand
gaugaagaaagcaugaaca

SEQ ID NO: 1069255 - RNA, 19 nt, Homo sapiens
  misc_RNA (1)...(19): siRNA sense strand
aagaaagcaugaacauugc

SEQ ID NO: 1069256 - RNA, 19 nt, Homo sapiens
  misc_RNA (1)...(19): siRNA sense strand
ugagucuuccucuauguuu

SEQ ID NO: 1069257 - RNA, 19 nt, Homo sapiens
  misc_RNA (1)...(19): siRNA sense strand
gaaagcaugaacauugcau

SEQ ID NO: 1069258 - RNA, 19 nt, Homo sapiens
  misc_RNA (1)...(19): siRNA sense strand
ugagugccaugaucucucu

SEQ ID NO: 1069259 - RNA, 19 nt, Homo sapiens
  misc_RNA (1)...(19): siRNA sense strand
ucaagaaugccaggaugaa

SEQ ID NO: 1069260 - RNA, 19 nt, Homo sapiens
  misc_RNA (1)...(19): siRNA sense strand
cuagaaauuccgcaaguca

SEQ ID NO: 1069261 - RNA, 19 nt, Homo sapiens
  misc_RNA (1)...(19): siRNA sense strand
ucaauauggagaagaccua

SEQ ID NO: 1069262 - RNA, 19 nt, Homo sapiens
  misc_RNA (1)...(19): siRNA sense strand
caagaaugccaggaugaau

SEQ ID NO: 1069263 - RNA, 19 nt, Homo sapiens
  misc_RNA (1)...(19): siRNA sense strand
agaacugucuuggccaugu

SEQ ID NO: 1069264 - RNA, 19 nt, Homo sapiens
  misc_RNA (1)...(19): siRNA sense strand
aagaaugccaggaugaaug

SEQ ID NO: 1069265 - RNA, 19 nt, Homo sapiens
  misc_RNA (1)...(19): siRNA sense strand
agcuauauguggacugauu

SEQ ID NO: 1069266 - RNA, 19 nt, Homo sapiens
  misc_RNA (1)...(19): siRNA sense strand
ccgcaagucaacaucauga

SEQ ID NO: 1069267 - RNA, 19 nt, Homo sapiens
  misc_RNA (1)...(19): siRNA sense strand
aagaaacugacuaaagcua

SEQ ID NO: 1069268 - RNA, 19 nt, Homo sapiens
  misc_RNA (1)...(19): siRNA sense strand
ucagaugaagaaagcauga

SEQ ID NO: 1069269 - RNA, 19 nt, Homo sapiens
  misc_RNA (1)...(19): siRNA sense strand
ggagucauucaaguuuauu

SEQ ID NO: 1069270 - RNA, 19 nt, Homo sapiens
  misc_RNA (1)...(19): siRNA sense strand
aagcaugaacauugcauug

SEQ ID NO: 1069271 - RNA, 19 nt, Homo sapiens
  misc_RNA (1)...(19): siRNA sense strand
agaaacugacuaaagcuau

SEQ ID NO: 1069272 - RNA, 19 nt, Homo sapiens
  misc_RNA (1)...(19): siRNA sense strand
gauguaauggaggaugauu

SEQ ID NO: 1069273 - RNA, 19 nt, Homo sapiens
  misc_RNA (1)...(19): siRNA sense strand
uaauggaggaugauucucu

SEQ ID NO: 1069274 - RNA, 19 nt, Homo sapiens
  misc_RNA (1)...(19): siRNA sense strand
gcuauauguggacugauug

SEQ ID NO: 1069275 - RNA, 19 nt, Homo sapiens
  misc_RNA (1)...(19): siRNA sense strand
gauuguccaggucagauug

SEQ ID NO: 1069276 - RNA, 19 nt, Homo sapiens
  misc_RNA (1)...(19): siRNA sense strand
ccuagaauuuaaagaacca

SEQ ID NO: 1069277 - RNA, 19 nt, Homo sapiens
  misc_RNA (1)...(19): siRNA sense strand
gugccaugaucucucuaga

SEQ ID NO: 1069278 - RNA, 19 nt, Homo sapiens
  misc_RNA (1)...(19): siRNA sense strand
guccaggucagauugaguu

SEQ ID NO: 1069279 - RNA, 19 nt, Homo sapiens
  misc_RNA (1)...(19): siRNA sense strand
auggaguacuuugccaaua

SEQ ID NO: 1069280 - RNA, 19 nt, Homo sapiens
  misc_RNA (1)...(19): siRNA sense strand
caucuuggcagcccugagu

SEQ ID NO: 1069281 - RNA, 19 nt, Homo sapiens
  misc_RNA (1)...(19): siRNA sense strand
gcgggaagagcaccuacug

SEQ ID NO: 1069282 - RNA, 19 nt, Homo sapiens
  misc_RNA (1)...(19): siRNA sense strand
cgaucagucagaugaagaa

SEQ ID NO: 1069283 - RNA, 19 nt, Homo sapiens
  misc_RNA (1)...(19): siRNA sense strand
cuuacgaucagucagauga

SEQ ID NO: 1069284 - RNA, 19 nt, Homo sapiens
  misc_RNA (1)...(19): siRNA sense strand
uugacuggcuggagaacug

SEQ ID NO: 1069285 - RNA, 19 nt, Homo sapiens
  misc_RNA (1)...(19): siRNA sense strand
ugacauccgggaacugauc

SEQ ID NO: 1069286 - RNA, 19 nt, Homo sapiens
  misc_RNA (1)...(19): siRNA sense strand
uagaaauuccgcaagucaa

SEQ ID NO: 1069287 - RNA, 19 nt, Homo sapiens
  misc_RNA (1)...(19): siRNA sense strand
uuccgagucuguggaguuu

SEQ ID NO: 1069288 - RNA, 19 nt, Homo sapiens
  misc_RNA (1)...(19): siRNA sense strand
guuccgagucuguggaguu

SEQ ID NO: 1069289 - RNA, 19 nt, Homo sapiens
  misc_RNA (1)...(19): siRNA sense strand
gcaagauccuggccaauuu

SEQ ID NO: 1069290 - RNA, 19 nt, Homo sapiens
  misc_RNA (1)...(19): siRNA sense strand
caacaacgcugccgugugu

SEQ ID NO: 1069291 - RNA, 19 nt, Homo sapiens
  misc_RNA (1)...(19): siRNA sense strand
ccagggagaugcaguuaaa

SEQ ID NO: 1069292 - RNA, 19 nt, Homo sapiens
  misc_RNA (1)...(19): siRNA sense strand
ucacagagaucuuaaggau

SEQ ID NO: 1069293 - RNA, 19 nt, Homo sapiens
  misc_RNA (1)...(19): siRNA sense strand
ccacaggagucgcuggaua

SEQ ID NO: 1069294 - RNA, 19 nt, Homo sapiens
  misc_RNA (1)...(19): siRNA sense strand
gcaaagagacaaguccuaa

SEQ ID NO: 1069295 - RNA, 19 nt, Homo sapiens
  misc_RNA (1)...(19): siRNA sense strand
gaaacgcaguggccaacaa

SEQ ID NO: 1069296 - RNA, 19 nt, Homo sapiens
  misc_RNA (1)...(19): siRNA sense strand
gaaauuagacggacuacag

SEQ ID NO: 1069297 - RNA, 19 nt, Homo sapiens
  misc_RNA (1)...(19): siRNA sense strand
gcacauccaggcaguguuu

SEQ ID NO: 1069298 - RNA, 19 nt, Homo sapiens
  misc_RNA (1)...(19): siRNA sense strand
gagcaaggcuuagcagaag

SEQ ID NO: 1069299 - RNA, 19 nt, Homo sapiens
  misc_RNA (1)...(19): siRNA sense strand
gagaugcaguuaaagacuu

SEQ ID NO: 1069300 - RNA, 19 nt, Homo sapiens
  misc_RNA (1)...(19): siRNA sense strand
acgcggagcuucagcagua

SEQ ID NO: 1069301 - RNA, 19 nt, Homo sapiens
  misc_RNA (1)...(19): siRNA sense strand
cagaauaacuuugcagaag

SEQ ID NO: 1069302 - RNA, 19 nt, Homo sapiens
  misc_RNA (1)...(19): siRNA sense strand
cuaaucagcugcagaaacu

SEQ ID NO: 1069303 - RNA, 19 nt, Homo sapiens
  misc_RNA (1)...(19): siRNA sense strand
ccagaaugcugagauggaa

SEQ ID NO: 1069304 - RNA, 19 nt, Homo sapiens
  misc_RNA (1)...(19): siRNA sense strand
ggauuucccuccagauugg

SEQ ID NO: 1069305 - RNA, 19 nt, Homo sapiens
  misc_RNA (1)...(19): siRNA sense strand
ggagcaaggcuuagcagaa

SEQ ID NO: 1069306 - RNA, 19 nt, Homo sapiens
  misc_RNA (1)...(19): siRNA sense strand
ggacuucuucgacuccuuu

SEQ ID NO: 1069307 - RNA, 19 nt, Homo sapiens
  misc_RNA (1)...(19): siRNA sense strand
caauuuggagcaaggcuua

SEQ ID NO: 1069308 - RNA, 19 nt, Homo sapiens
  misc_RNA (1)...(19): siRNA sense strand
ucacggagcaugcagaaga

SEQ ID NO: 1069309 - RNA, 19 nt, Homo sapiens
  misc_RNA (1)...(19): siRNA sense strand
caaacugucugcuccugau

SEQ ID NO: 1069310 - RNA, 19 nt, Homo sapiens
  misc_RNA (1)...(19): siRNA sense strand
gaggaaaccaucgaucuug

SEQ ID NO: 1069311 - RNA, 19 nt, Homo sapiens
  misc_RNA (1)...(19): siRNA sense strand
ggaggaaaccaucgaucuu

SEQ ID NO: 1069312 - RNA, 19 nt, Homo sapiens
  misc_RNA (1)...(19): siRNA sense strand
gcagaauaacuuugcagaa

SEQ ID NO: 1069313 - RNA, 19 nt, Homo sapiens
  misc_RNA (1)...(19): siRNA sense strand
cggacaagcugaacgaaca

SEQ ID NO: 1069314 - RNA, 19 nt, Homo sapiens
  misc_RNA (1)...(19): siRNA sense strand
augcugagauggaauuuga

SEQ ID NO: 1069315 - RNA, 19 nt, Homo sapiens
  misc_RNA (1)...(19): siRNA sense strand
gagaaaguaacacagaaau

SEQ ID NO: 1069316 - RNA, 19 nt, Homo sapiens
  misc_RNA (1)...(19): siRNA sense strand
aaagagacaaguccuaaau

SEQ ID NO: 1069317 - RNA, 19 nt, Homo sapiens
  misc_RNA (1)...(19): siRNA sense strand
agccagaucuuuauuacga

SEQ ID NO: 1069318 - RNA, 19 nt, Homo sapiens
  misc_RNA (1)...(19): siRNA sense strand
caaagagacaaguccuaaa

SEQ ID NO: 1069319 - RNA, 19 nt, Homo sapiens
  misc_RNA (1)...(19): siRNA sense strand
cugcagcucugguuuguca

SEQ ID NO: 1069320 - RNA, 19 nt, Homo sapiens
  misc_RNA (1)...(19): siRNA sense strand
guucuucacagagaucuua

SEQ ID NO: 1069321 - RNA, 19 nt, Homo sapiens
  misc_RNA (1)...(19): siRNA sense strand
cuagugaaguugggccuuu

SEQ ID NO: 1069322 - RNA, 19 nt, Homo sapiens
  misc_RNA (1)...(19): siRNA sense strand
aucauucgguuaucaagua

SEQ ID NO: 1069323 - RNA, 19 nt, Homo sapiens
  misc_RNA (1)...(19): siRNA sense strand
gaguuuggauccgaagaga

SEQ ID NO: 1069324 - RNA, 19 nt, Homo sapiens
  misc_RNA (1)...(19): siRNA sense strand
gaacccuucggaaaucuug

SEQ ID NO: 1069325 - RNA, 19 nt, Homo sapiens
  misc_RNA (1)...(19): siRNA sense strand
uagacggacuacaggguaa

SEQ ID NO: 1069326 - RNA, 19 nt, Homo sapiens
  misc_RNA (1)...(19): siRNA sense strand
ugagaaaguaacacagaaa

SEQ ID NO: 1069327 - RNA, 19 nt, Homo sapiens
  misc_RNA (1)...(19): siRNA sense strand
agagacaaguccuaaaugc

SEQ ID NO: 1069328 - RNA, 19 nt, Homo sapiens
  misc_RNA (1)...(19): siRNA sense strand
cacagguucuucacagaga

SEQ ID NO: 1069329 - RNA, 19 nt, Homo sapiens
  misc_RNA (1)...(19): siRNA sense strand
gugcggacgucuccucaca

SEQ ID NO: 1069330 - RNA, 19 nt, Homo sapiens
  misc_RNA (1)...(19): siRNA sense strand
ucagccagaucuuuauuac

SEQ ID NO: 1069331 - RNA, 19 nt, Homo sapiens
  misc_RNA (1)...(19): siRNA sense strand
gcugaacgaacacaugaug

SEQ ID NO: 1069332 - RNA, 19 nt, Homo sapiens
  misc_RNA (1)...(19): siRNA sense strand
caagauccuggccaauuug

SEQ ID NO: 1069333 - RNA, 19 nt, Homo sapiens
  misc_RNA (1)...(19): siRNA sense strand
uggauagacugcacaaggu

SEQ ID NO: 1069334 - RNA, 19 nt, Homo sapiens
  misc_RNA (1)...(19): siRNA sense strand
caacacacagugccucaag

SEQ ID NO: 1069335 - RNA, 19 nt, Homo sapiens
  misc_RNA (1)...(19): siRNA sense strand
cacggagcaugcagaagaa

SEQ ID NO: 1069336 - RNA, 19 nt, Homo sapiens
  misc_RNA (1)...(19): siRNA sense strand
guugagaaaguaacacaga

SEQ ID NO: 1069337 - RNA, 19 nt, Homo sapiens
  misc_RNA (1)...(19): siRNA sense strand
ggagcaugcagaagaaaca

SEQ ID NO: 1069338 - RNA, 19 nt, Homo sapiens
  misc_RNA (1)...(19): siRNA sense strand
uugagaaaguaacacagaa

SEQ ID NO: 1069339 - RNA, 19 nt, Homo sapiens
  misc_RNA (1)...(19): siRNA sense strand
ugaacgaacacaugaugga

SEQ ID NO: 1069340 - RNA, 19 nt, Homo sapiens
  misc_RNA (1)...(19): siRNA sense strand
ggagaugcaguuaaagacu

SEQ ID NO: 1069341 - RNA, 19 nt, Homo sapiens
  misc_RNA (1)...(19): siRNA sense strand
aagcugaacgaacacauga

SEQ ID NO: 1069342 - RNA, 19 nt, Homo sapiens
  misc_RNA (1)...(19): siRNA sense strand
caagacguugagaaaguaa

SEQ ID NO: 1069343 - RNA, 19 nt, Homo sapiens
  misc_RNA (1)...(19): siRNA sense strand
gcguaucauucgguuauca

SEQ ID NO: 1069344 - RNA, 19 nt, Homo sapiens
  misc_RNA (1)...(19): siRNA sense strand
agaugcaguuaaagacuug

SEQ ID NO: 1069345 - RNA, 19 nt, Homo sapiens
  misc_RNA (1)...(19): siRNA sense strand
ucacugcagcucugguuug

SEQ ID NO: 1069346 - RNA, 19 nt, Homo sapiens
  misc_RNA (1)...(19): siRNA sense strand
uggcggagaugaguuugga

SEQ ID NO: 1069347 - RNA, 19 nt, Homo sapiens
  misc_RNA (1)...(19): siRNA sense strand
ugcacaaggugaagacugu

SEQ ID NO: 1069348 - RNA, 19 nt, Homo sapiens
  misc_RNA (1)...(19): siRNA sense strand
caagcugaacgaacacaug

SEQ ID NO: 1069349 - RNA, 19 nt, Homo sapiens
  misc_RNA (1)...(19): siRNA sense strand
agaaugcugagauggaauu

SEQ ID NO: 1069350 - RNA, 19 nt, Homo sapiens
  misc_RNA (1)...(19): siRNA sense strand
acagaaauuagacggacua

SEQ ID NO: 1069351 - RNA, 19 nt, Homo sapiens
  misc_RNA (1)...(19): siRNA sense strand
gcuaaucagcugcagaaac

SEQ ID NO: 1069352 - RNA, 19 nt, Homo sapiens
  misc_RNA (1)...(19): siRNA sense strand
ggccucagguucgacaaca

SEQ ID NO: 1069353 - RNA, 19 nt, Homo sapiens
  misc_RNA (1)...(19): siRNA sense strand
aauuugaacccuucggaaa

SEQ ID NO: 1069354 - RNA, 19 nt, Homo sapiens
  misc_RNA (1)...(19): siRNA sense strand
cgacucaguggaacaaucu

SEQ ID NO: 1069355 - RNA, 19 nt, Homo sapiens
  misc_RNA (1)...(19): siRNA sense strand
gggacagcuucaacacaca

SEQ ID NO: 1069356 - RNA, 19 nt, Homo sapiens
  misc_RNA (1)...(19): siRNA sense strand
caaccugaccaccauguac

SEQ ID NO: 1069357 - RNA, 19 nt, Homo sapiens
  misc_RNA (1)...(19): siRNA sense strand
cuucaccucgggcagaaua

SEQ ID NO: 1069358 - RNA, 19 nt, Homo sapiens
  misc_RNA (1)...(19): siRNA sense strand
ucauucgguuaucaaguau

SEQ ID NO: 1069359 - RNA, 19 nt, Homo sapiens
  misc_RNA (1)...(19): siRNA sense strand
gggcagacaagccucuauc

SEQ ID NO: 1069360 - RNA, 19 nt, Homo sapiens
  misc_RNA (1)...(19): siRNA sense strand
gaaugcugagauggaauuu

SEQ ID NO: 1069361 - RNA, 19 nt, Homo sapiens
  misc_RNA (1)...(19): siRNA sense strand
ggacuacaggguaaaauca

SEQ ID NO: 1069362 - RNA, 19 nt, Homo sapiens
  misc_RNA (1)...(19): siRNA sense strand
cggauuucccuccagauug

SEQ ID NO: 1069363 - RNA, 19 nt, Homo sapiens
  misc_RNA (1)...(19): siRNA sense strand
caaguauuacccagagcaa

SEQ ID NO: 1069364 - RNA, 19 nt, Homo sapiens
  misc_RNA (1)...(19): siRNA sense strand
aguauuacccagagcaaga

SEQ ID NO: 1069365 - RNA, 19 nt, Homo sapiens
  misc_RNA (1)...(19): siRNA sense strand
ccggauuucccuccagauu

SEQ ID NO: 1069366 - RNA, 19 nt, Homo sapiens
  misc_RNA (1)...(19): siRNA sense strand
gaagaaacccaauaccaaa

SEQ ID NO: 1069367 - RNA, 19 nt, Homo sapiens
  misc_RNA (1)...(19): siRNA sense strand
ccaaacugcuguugaagaa

SEQ ID NO: 1069368 - RNA, 19 nt, Homo sapiens
  misc_RNA (1)...(19): siRNA sense strand
gaaacauccacaucugaua

SEQ ID NO: 1069369 - RNA, 19 nt, Homo sapiens
  misc_RNA (1)...(19): siRNA sense strand
ccugugacauguccuauuu

SEQ ID NO: 1069370 - RNA, 19 nt, Homo sapiens
  misc_RNA (1)...(19): siRNA sense strand
ccagaaauuucguuaguca

SEQ ID NO: 1069371 - RNA, 19 nt, Homo sapiens
  misc_RNA (1)...(19): siRNA sense strand
guaaucaccuauuucagau

SEQ ID NO: 1069372 - RNA, 19 nt, Homo sapiens
  misc_RNA (1)...(19): siRNA sense strand
ggagauccuagccagauua

SEQ ID NO: 1069373 - RNA, 19 nt, Homo sapiens
  misc_RNA (1)...(19): siRNA sense strand
ucagauaguuccugugaca

SEQ ID NO: 1069374 - RNA, 19 nt, Homo sapiens
  misc_RNA (1)...(19): siRNA sense strand
aaacauccacaucugauaa

SEQ ID NO: 1069375 - RNA, 19 nt, Homo sapiens
  misc_RNA (1)...(19): siRNA sense strand
ugacauguccuauuugugu

SEQ ID NO: 1069376 - RNA, 19 nt, Homo sapiens
  misc_RNA (1)...(19): siRNA sense strand
gaaacuuaccaagagaaua

SEQ ID NO: 1069377 - RNA, 19 nt, Homo sapiens
  misc_RNA (1)...(19): siRNA sense strand
ugaagaaacccaauaccaa

SEQ ID NO: 1069378 - RNA, 19 nt, Homo sapiens
  misc_RNA (1)...(19): siRNA sense strand
cacagaaacuuaccaagag

SEQ ID NO: 1069379 - RNA, 19 nt, Homo sapiens
  misc_RNA (1)...(19): siRNA sense strand
aaacugcuguugaagaauc

SEQ ID NO: 1069380 - RNA, 19 nt, Homo sapiens
  misc_RNA (1)...(19): siRNA sense strand
gaaauuucguuagucaucu

SEQ ID NO: 1069381 - RNA, 19 nt, Homo sapiens
  misc_RNA (1)...(19): siRNA sense strand
acacagaaacuuaccaaga

SEQ ID NO: 1069382 - RNA, 19 nt, Homo sapiens
  misc_RNA (1)...(19): siRNA sense strand
auaccaaacugcuguugaa

SEQ ID NO: 1069383 - RNA, 19 nt, Homo sapiens
  misc_RNA (1)...(19): siRNA sense strand
caccgaagaugauuucuac

SEQ ID NO: 1069384 - RNA, 19 nt, Homo sapiens
  misc_RNA (1)...(19): siRNA sense strand
gauaguuccugugacaugu

SEQ ID NO: 1069385 - RNA, 19 nt, Homo sapiens
  misc_RNA (1)...(19): siRNA sense strand
aaucagagacaucaauuug

SEQ ID NO: 1069386 - RNA, 19 nt, Homo sapiens
  misc_RNA (1)...(19): siRNA sense strand
cuagccagauuaccagaaa

SEQ ID NO: 1069387 - RNA, 19 nt, Homo sapiens
  misc_RNA (1)...(19): siRNA sense strand
gggagauccuagccagauu

SEQ ID NO: 1069388 - RNA, 19 nt, Homo sapiens
  misc_RNA (1)...(19): siRNA sense strand
gaaacccaauaccaaacug

SEQ ID NO: 1069389 - RNA, 19 nt, Homo sapiens
  misc_RNA (1)...(19): siRNA sense strand
uaccagaaauuucguuagu

SEQ ID NO: 1069390 - RNA, 19 nt, Homo sapiens
  misc_RNA (1)...(19): siRNA sense strand
cugauaacacagaaacuua

SEQ ID NO: 1069391 - RNA, 19 nt, Homo sapiens
  misc_RNA (1)...(19): siRNA sense strand
acagaaacuuaccaagaga

SEQ ID NO: 1069392 - RNA, 19 nt, Homo sapiens
  misc_RNA (1)...(19): siRNA sense strand
gauuauggagaauuuguga

SEQ ID NO: 1069393 - RNA, 19 nt, Homo sapiens
  misc_RNA (1)...(19): siRNA sense strand
uaacacagaaacuuaccaa

SEQ ID NO: 1069394 - RNA, 19 nt, Homo sapiens
  misc_RNA (1)...(19): siRNA sense strand
aaacuuaccaagagaauac

SEQ ID NO: 1069395 - RNA, 19 nt, Homo sapiens
  misc_RNA (1)...(19): siRNA sense strand
ggagugaaacauccacauc

SEQ ID NO: 1069396 - RNA, 19 nt, Homo sapiens
  misc_RNA (1)...(19): siRNA sense strand
uagaugaagaaacccaaua

SEQ ID NO: 1069397 - RNA, 19 nt, Homo sapiens
  misc_RNA (1)...(19): siRNA sense strand
gauccuagccagauuacca

SEQ ID NO: 1069398 - RNA, 19 nt, Homo sapiens
  misc_RNA (1)...(19): siRNA sense strand
acaguaaucaccuauuuca

SEQ ID NO: 1069399 - RNA, 19 nt, Homo sapiens
  misc_RNA (1)...(19): siRNA sense strand
aguaaucaccuauuucaga

SEQ ID NO: 1069400 - RNA, 19 nt, Homo sapiens
  misc_RNA (1)...(19): siRNA sense strand
gugaaacauccacaucuga

SEQ ID NO: 1069401 - RNA, 19 nt, Homo sapiens
  misc_RNA (1)...(19): siRNA sense strand
ugugacauguccuauuugu

SEQ ID NO: 1069402 - RNA, 19 nt, Homo sapiens
  misc_RNA (1)...(19): siRNA sense strand
ccagauuaccagaaauuuc

SEQ ID NO: 1069403 - RNA, 19 nt, Homo sapiens
  misc_RNA (1)...(19): siRNA sense strand
guaacaguaaucaccuauu

SEQ ID NO: 1069404 - RNA, 19 nt, Homo sapiens
  misc_RNA (1)...(19): siRNA sense strand
cuaaaucagagacaucaau

SEQ ID NO: 1069405 - RNA, 19 nt, Homo sapiens
  misc_RNA (1)...(19): siRNA sense strand
ggagaauuugugaaucuuc

SEQ ID NO: 1069406 - RNA, 19 nt, Homo sapiens
  misc_RNA (1)...(19): siRNA sense strand
ugaaacauccacaucugau

SEQ ID NO: 1069407 - RNA, 19 nt, Homo sapiens
  misc_RNA (1)...(19): siRNA sense strand
gagugaaacauccacaucu

SEQ ID NO: 1069408 - RNA, 19 nt, Homo sapiens
  misc_RNA (1)...(19): siRNA sense strand
ucagcuagaugaagaaacc

SEQ ID NO: 1069409 - RNA, 19 nt, Homo sapiens
  misc_RNA (1)...(19): siRNA sense strand
cuucuggucauccuacuuu

SEQ ID NO: 1069410 - RNA, 19 nt, Homo sapiens
  misc_RNA (1)...(19): siRNA sense strand
cagauuaccagaaauuucg

SEQ ID NO: 1069411 - RNA, 19 nt, Homo sapiens
  misc_RNA (1)...(19): siRNA sense strand
cuacaccgaagaugauuuc

SEQ ID NO: 1069412 - RNA, 19 nt, Homo sapiens
  misc_RNA (1)...(19): siRNA sense strand
cagacagcguuuacuggau

SEQ ID NO: 1069413 - RNA, 19 nt, Homo sapiens
  misc_RNA (1)...(19): siRNA sense strand
uuucagauaguuccuguga

SEQ ID NO: 1069414 - RNA, 19 nt, Homo sapiens
  misc_RNA (1)...(19): siRNA sense strand
agaaauuucguuagucauc

SEQ ID NO: 1069415 - RNA, 19 nt, Homo sapiens
  misc_RNA (1)...(19): siRNA sense strand
acaccgaagaugauuucua

SEQ ID NO: 1069416 - RNA, 19 nt, Homo sapiens
  misc_RNA (1)...(19): siRNA sense strand
ccgaagaugauuucuacug

SEQ ID NO: 1069417 - RNA, 19 nt, Homo sapiens
  misc_RNA (1)...(19): siRNA sense strand
agugaaacauccacaucug

SEQ ID NO: 1069418 - RNA, 19 nt, Homo sapiens
  misc_RNA (1)...(19): siRNA sense strand
cagaaacuuaccaagagaa

SEQ ID NO: 1069419 - RNA, 19 nt, Homo sapiens
  misc_RNA (1)...(19): siRNA sense strand
cguccuacaccgaagauga

SEQ ID NO: 1069420 - RNA, 19 nt, Homo sapiens
  misc_RNA (1)...(19): siRNA sense strand
gccagauuaccagaaauuu

SEQ ID NO: 1069421 - RNA, 19 nt, Homo sapiens
  misc_RNA (1)...(19): siRNA sense strand
gacagcguuuacuggauca

SEQ ID NO: 1069422 - RNA, 19 nt, Homo sapiens
  misc_RNA (1)...(19): siRNA sense strand
auccacaucugauaacaca

SEQ ID NO: 1069423 - RNA, 19 nt, Homo sapiens
  misc_RNA (1)...(19): siRNA sense strand
accaagagaauacaaguuc

SEQ ID NO: 1069424 - RNA, 19 nt, Homo sapiens
  misc_RNA (1)...(19): siRNA sense strand
gaagaaacccaauaccaaa

SEQ ID NO: 1069425 - RNA, 19 nt, Homo sapiens
  misc_RNA (1)...(19): siRNA sense strand
ccaaacugcuguugaagaa

SEQ ID NO: 1069426 - RNA, 19 nt, Homo sapiens
  misc_RNA (1)...(19): siRNA sense strand
gaaacauccacaucugaua

SEQ ID NO: 1069427 - RNA, 19 nt, Homo sapiens
  misc_RNA (1)...(19): siRNA sense strand
ccugugacauguccuauuu

SEQ ID NO: 1069428 - RNA, 19 nt, Homo sapiens
  misc_RNA (1)...(19): siRNA sense strand
ccagaaauuucguuaguca

SEQ ID NO: 1069429 - RNA, 19 nt, Homo sapiens
  misc_RNA (1)...(19): siRNA sense strand
guaaucaccuauuucagau

SEQ ID NO: 1069430 - RNA, 19 nt, Homo sapiens
  misc_RNA (1)...(19): siRNA sense strand
ggagauccuagccagauua

SEQ ID NO: 1069431 - RNA, 19 nt, Homo sapiens
  misc_RNA (1)...(19): siRNA sense strand
ucagauaguuccugugaca

SEQ ID NO: 1069432 - RNA, 19 nt, Homo sapiens
  misc_RNA (1)...(19): siRNA sense strand
aaacauccacaucugauaa

SEQ ID NO: 1069433 - RNA, 19 nt, Homo sapiens
  misc_RNA (1)...(19): siRNA sense strand
ugacauguccuauuugugu

SEQ ID NO: 1069434 - RNA, 19 nt, Homo sapiens
  misc_RNA (1)...(19): siRNA sense strand
gaaacuuaccaagagaaua

SEQ ID NO: 1069435 - RNA, 19 nt, Homo sapiens
  misc_RNA (1)...(19): siRNA sense strand
ugaagaaacccaauaccaa

SEQ ID NO: 1069436 - RNA, 19 nt, Homo sapiens
  misc_RNA (1)...(19): siRNA sense strand
cacagaaacuuaccaagag

SEQ ID NO: 1069437 - RNA, 19 nt, Homo sapiens
  misc_RNA (1)...(19): siRNA sense strand
aaacugcuguugaagaauc

SEQ ID NO: 1069438 - RNA, 19 nt, Homo sapiens
  misc_RNA (1)...(19): siRNA sense strand
gaaauuucguuagucaucu

SEQ ID NO: 1069439 - RNA, 19 nt, Homo sapiens
  misc_RNA (1)...(19): siRNA sense strand
acacagaaacuuaccaaga

SEQ ID NO: 1069440 - RNA, 19 nt, Homo sapiens
  misc_RNA (1)...(19): siRNA sense strand
auaccaaacugcuguugaa

SEQ ID NO: 1069441 - RNA, 19 nt, Homo sapiens
  misc_RNA (1)...(19): siRNA sense strand
caccgaagaugauuucuac

SEQ ID NO: 1069442 - RNA, 19 nt, Homo sapiens
  misc_RNA (1)...(19): siRNA sense strand
gauaguuccugugacaugu

SEQ ID NO: 1069443 - RNA, 19 nt, Homo sapiens
  misc_RNA (1)...(19): siRNA sense strand
aaucagagacaucaauuug

SEQ ID NO: 1069444 - RNA, 19 nt, Homo sapiens
  misc_RNA (1)...(19): siRNA sense strand
cuagccagauuaccagaaa

SEQ ID NO: 1069445 - RNA, 19 nt, Homo sapiens
  misc_RNA (1)...(19): siRNA sense strand
gggagauccuagccagauu

SEQ ID NO: 1069446 - RNA, 19 nt, Homo sapiens
  misc_RNA (1)...(19): siRNA sense strand
gaaacccaauaccaaacug

SEQ ID NO: 1069447 - RNA, 19 nt, Homo sapiens
  misc_RNA (1)...(19): siRNA sense strand
uaccagaaauuucguuagu

SEQ ID NO: 1069448 - RNA, 19 nt, Homo sapiens
  misc_RNA (1)...(19): siRNA sense strand
cugauaacacagaaacuua

SEQ ID NO: 1069449 - RNA, 19 nt, Homo sapiens
  misc_RNA (1)...(19): siRNA sense strand
acagaaacuuaccaagaga

SEQ ID NO: 1069450 - RNA, 19 nt, Homo sapiens
  misc_RNA (1)...(19): siRNA sense strand
gauuauggagaauuuguga

SEQ ID NO: 1069451 - RNA, 19 nt, Homo sapiens
  misc_RNA (1)...(19): siRNA sense strand
uaacacagaaacuuaccaa

SEQ ID NO: 1069452 - RNA, 19 nt, Homo sapiens
  misc_RNA (1)...(19): siRNA sense strand
aaacuuaccaagagaauac

SEQ ID NO: 1069453 - RNA, 19 nt, Homo sapiens
  misc_RNA (1)...(19): siRNA sense strand
ggagugaaacauccacauc

SEQ ID NO: 1069454 - RNA, 19 nt, Homo sapiens
  misc_RNA (1)...(19): siRNA sense strand
uagaugaagaaacccaaua

SEQ ID NO: 1069455 - RNA, 19 nt, Homo sapiens
  misc_RNA (1)...(19): siRNA sense strand
gauccuagccagauuacca

SEQ ID NO: 1069456 - RNA, 19 nt, Homo sapiens
  misc_RNA (1)...(19): siRNA sense strand
acaguaaucaccuauuuca

SEQ ID NO: 1069457 - RNA, 19 nt, Homo sapiens
  misc_RNA (1)...(19): siRNA sense strand
aguaaucaccuauuucaga

SEQ ID NO: 1069458 - RNA, 19 nt, Homo sapiens
  misc_RNA (1)...(19): siRNA sense strand
gugaaacauccacaucuga

SEQ ID NO: 1069459 - RNA, 19 nt, Homo sapiens
  misc_RNA (1)...(19): siRNA sense strand
ugugacauguccuauuugu

SEQ ID NO: 1069460 - RNA, 19 nt, Homo sapiens
  misc_RNA (1)...(19): siRNA sense strand
ccagauuaccagaaauuuc

SEQ ID NO: 1069461 - RNA, 19 nt, Homo sapiens
  misc_RNA (1)...(19): siRNA sense strand
guaacaguaaucaccuauu

SEQ ID NO: 1069462 - RNA, 19 nt, Homo sapiens
  misc_RNA (1)...(19): siRNA sense strand
cuaaaucagagacaucaau

SEQ ID NO: 1069463 - RNA, 19 nt, Homo sapiens
  misc_RNA (1)...(19): siRNA sense strand
ggagaauuugugaaucuuc

SEQ ID NO: 1069464 - RNA, 19 nt, Homo sapiens
  misc_RNA (1)...(19): siRNA sense strand
ugaaacauccacaucugau

SEQ ID NO: 1069465 - RNA, 19 nt, Homo sapiens
  misc_RNA (1)...(19): siRNA sense strand
gagugaaacauccacaucu

SEQ ID NO: 1069466 - RNA, 19 nt, Homo sapiens
  misc_RNA (1)...(19): siRNA sense strand
ucagcuagaugaagaaacc

SEQ ID NO: 1069467 - RNA, 19 nt, Homo sapiens
  misc_RNA (1)...(19): siRNA sense strand
cuucuggucauccuacuuu

SEQ ID NO: 1069468 - RNA, 19 nt, Homo sapiens
  misc_RNA (1)...(19): siRNA sense strand
cagauuaccagaaauuucg

SEQ ID NO: 1069469 - RNA, 19 nt, Homo sapiens
  misc_RNA (1)...(19): siRNA sense strand
cuacaccgaagaugauuuc

SEQ ID NO: 1069470 - RNA, 19 nt, Homo sapiens
  misc_RNA (1)...(19): siRNA sense strand
cagacagcguuuacuggau

SEQ ID NO: 1069471 - RNA, 19 nt, Homo sapiens
  misc_RNA (1)...(19): siRNA sense strand
uuucagauaguuccuguga

SEQ ID NO: 1069472 - RNA, 19 nt, Homo sapiens
  misc_RNA (1)...(19): siRNA sense strand
agaaauuucguuagucauc

SEQ ID NO: 1069473 - RNA, 19 nt, Homo sapiens
  misc_RNA (1)...(19): siRNA sense strand
acaccgaagaugauuucua

SEQ ID NO: 1069474 - RNA, 19 nt, Homo sapiens
  misc_RNA (1)...(19): siRNA sense strand
ccgaagaugauuucuacug

SEQ ID NO: 1069475 - RNA, 19 nt, Homo sapiens
  misc_RNA (1)...(19): siRNA sense strand
agugaaacauccacaucug

SEQ ID NO: 1069476 - RNA, 19 nt, Homo sapiens
  misc_RNA (1)...(19): siRNA sense strand
cagaaacuuaccaagagaa

SEQ ID NO: 1069477 - RNA, 19 nt, Homo sapiens
  misc_RNA (1)...(19): siRNA sense strand
cguccuacaccgaagauga

SEQ ID NO: 1069478 - RNA, 19 nt, Homo sapiens
  misc_RNA (1)...(19): siRNA sense strand
gccagauuaccagaaauuu

SEQ ID NO: 1069479 - RNA, 19 nt, Homo sapiens
  misc_RNA (1)...(19): siRNA sense strand
gacagcguuuacuggauca

SEQ ID NO: 1069480 - RNA, 19 nt, Homo sapiens
  misc_RNA (1)...(19): siRNA sense strand
auccacaucugauaacaca

SEQ ID NO: 1069481 - RNA, 19 nt, Homo sapiens
  misc_RNA (1)...(19): siRNA sense strand
accaagagaauacaaguuc

SEQ ID NO: 1069482 - RNA, 19 nt, Homo sapiens
  misc_RNA (1)...(19): siRNA sense strand
gggaggaucugucuacuuu

SEQ ID NO: 1069483 - RNA, 19 nt, Homo sapiens
  misc_RNA (1)...(19): siRNA sense strand
ugacuuaccugauuaugaa

SEQ ID NO: 1069484 - RNA, 19 nt, Homo sapiens
  misc_RNA (1)...(19): siRNA sense strand
caaaugugguucugaaaug

SEQ ID NO: 1069485 - RNA, 19 nt, Homo sapiens
  misc_RNA (1)...(19): siRNA sense strand
guucugaaaugguaugaaa

SEQ ID NO: 1069486 - RNA, 19 nt, Homo sapiens
  misc_RNA (1)...(19): siRNA sense strand
caaauggaaugccaguaug

SEQ ID NO: 1069487 - RNA, 19 nt, Homo sapiens
  misc_RNA (1)...(19): siRNA sense strand
gcacagaacccucucuuuu

SEQ ID NO: 1069488 - RNA, 19 nt, Homo sapiens
  misc_RNA (1)...(19): siRNA sense strand
gcaaguggcagaggauaaa

SEQ ID NO: 1069489 - RNA, 19 nt, Homo sapiens
  misc_RNA (1)...(19): siRNA sense strand
gcaaaugugguucugaaau

SEQ ID NO: 1069490 - RNA, 19 nt, Homo sapiens
  misc_RNA (1)...(19): siRNA sense strand
caaaagauguuggacaauu

SEQ ID NO: 1069491 - RNA, 19 nt, Homo sapiens
  misc_RNA (1)...(19): siRNA sense strand
gauuggaauuucaguggaa

SEQ ID NO: 1069492 - RNA, 19 nt, Homo sapiens
  misc_RNA (1)...(19): siRNA sense strand
acaccaagcccaucugaaa

SEQ ID NO: 1069493 - RNA, 19 nt, Homo sapiens
  misc_RNA (1)...(19): siRNA sense strand
cggcaaaugugguucugaa

SEQ ID NO: 1069494 - RNA, 19 nt, Homo sapiens
  misc_RNA (1)...(19): siRNA sense strand
ucuuaaaucuggagaagga

SEQ ID NO: 1069495 - RNA, 19 nt, Homo sapiens
  misc_RNA (1)...(19): siRNA sense strand
gcagacuccuguagguaau

SEQ ID NO: 1069496 - RNA, 19 nt, Homo sapiens
  misc_RNA (1)...(19): siRNA sense strand
ucaaauggaaugccaguau

SEQ ID NO: 1069497 - RNA, 19 nt, Homo sapiens
  misc_RNA (1)...(19): siRNA sense strand
ggcagaggauaaauuuguu

SEQ ID NO: 1069498 - RNA, 19 nt, Homo sapiens
  misc_RNA (1)...(19): siRNA sense strand
ggaauuauuagacaguaug

SEQ ID NO: 1069499 - RNA, 19 nt, Homo sapiens
  misc_RNA (1)...(19): siRNA sense strand
aaagacgacuagcacagaa

SEQ ID NO: 1069500 - RNA, 19 nt, Homo sapiens
  misc_RNA (1)...(19): siRNA sense strand
gcagaggauaaauuuguuu

SEQ ID NO: 1069501 - RNA, 19 nt, Homo sapiens
  misc_RNA (1)...(19): siRNA sense strand
uauggcaacuccuaggauu

SEQ ID NO: 1069502 - RNA, 19 nt, Homo sapiens
  misc_RNA (1)...(19): siRNA sense strand
ggucuuaaaucuggagaag

SEQ ID NO: 1069503 - RNA, 19 nt, Homo sapiens
  misc_RNA (1)...(19): siRNA sense strand
ucaguggaauuauuagaca

SEQ ID NO: 1069504 - RNA, 19 nt, Homo sapiens
  misc_RNA (1)...(19): siRNA sense strand
ggagaaggaagccaacauc

SEQ ID NO: 1069505 - RNA, 19 nt, Homo sapiens
  misc_RNA (1)...(19): siRNA sense strand
uauccucaguugacucauu

SEQ ID NO: 1069506 - RNA, 19 nt, Homo sapiens
  misc_RNA (1)...(19): siRNA sense strand
caaagacgacuagcacaga

SEQ ID NO: 1069507 - RNA, 19 nt, Homo sapiens
  misc_RNA (1)...(19): siRNA sense strand
gcugcuguauccucaguug

SEQ ID NO: 1069508 - RNA, 19 nt, Homo sapiens
  misc_RNA (1)...(19): siRNA sense strand
guuggacaauuucuacaau

SEQ ID NO: 1069509 - RNA, 19 nt, Homo sapiens
  misc_RNA (1)...(19): siRNA sense strand
ggaaugggaggaucugucu

SEQ ID NO: 1069510 - RNA, 19 nt, Homo sapiens
  misc_RNA (1)...(19): siRNA sense strand
gccaagugccaucuucaaa

SEQ ID NO: 1069511 - RNA, 19 nt, Homo sapiens
  misc_RNA (1)...(19): siRNA sense strand
aagcccaucugaaauguuc

SEQ ID NO: 1069512 - RNA, 19 nt, Homo sapiens
  misc_RNA (1)...(19): siRNA sense strand
guggaauuauuagacagua

SEQ ID NO: 1069513 - RNA, 19 nt, Homo sapiens
  misc_RNA (1)...(19): siRNA sense strand
uguccgaacuccaucuguu

SEQ ID NO: 1069514 - RNA, 19 nt, Homo sapiens
  misc_RNA (1)...(19): siRNA sense strand
ccaagcccaucugaaaugu

SEQ ID NO: 1069515 - RNA, 19 nt, Homo sapiens
  misc_RNA (1)...(19): siRNA sense strand
caagugccaucuucaaaau

SEQ ID NO: 1069516 - RNA, 19 nt, Homo sapiens
  misc_RNA (1)...(19): siRNA sense strand
gaggaucugucuacuuuuc

SEQ ID NO: 1069517 - RNA, 19 nt, Homo sapiens
  misc_RNA (1)...(19): siRNA sense strand
cacaaaagauguuggacaa

SEQ ID NO: 1069518 - RNA, 19 nt, Homo sapiens
  misc_RNA (1)...(19): siRNA sense strand
ccuaggauuugucacgaau

SEQ ID NO: 1069519 - RNA, 19 nt, Homo sapiens
  misc_RNA (1)...(19): siRNA sense strand
ucacucaguucacacaaaa

SEQ ID NO: 1069520 - RNA, 19 nt, Homo sapiens
  misc_RNA (1)...(19): siRNA sense strand
uggcagaggauaaauuugu

SEQ ID NO: 1069521 - RNA, 19 nt, Homo sapiens
  misc_RNA (1)...(19): siRNA sense strand
uauccugauucaaauggaa

SEQ ID NO: 1069522 - RNA, 19 nt, Homo sapiens
  misc_RNA (1)...(19): siRNA sense strand
cagcagacuccuguaggua

SEQ ID NO: 1069523 - RNA, 19 nt, Homo sapiens
  misc_RNA (1)...(19): siRNA sense strand
caacuccuaggauuuguca

SEQ ID NO: 1069524 - RNA, 19 nt, Homo sapiens
  misc_RNA (1)...(19): siRNA sense strand
gauguuggacaauuucuac

SEQ ID NO: 1069525 - RNA, 19 nt, Homo sapiens
  misc_RNA (1)...(19): siRNA sense strand
ucagcagacuccuguaggu

SEQ ID NO: 1069526 - RNA, 19 nt, Homo sapiens
  misc_RNA (1)...(19): siRNA sense strand
augaaaguaucaaccaugu

SEQ ID NO: 1069527 - RNA, 19 nt, Homo sapiens
  misc_RNA (1)...(19): siRNA sense strand
uaggauuugucacgaaugg

SEQ ID NO: 1069528 - RNA, 19 nt, Homo sapiens
  misc_RNA (1)...(19): siRNA sense strand
uguagguaaugcugcugua

SEQ ID NO: 1069529 - RNA, 19 nt, Homo sapiens
  misc_RNA (1)...(19): siRNA sense strand
caucauuugcugucucuca

SEQ ID NO: 1069530 - RNA, 19 nt, Homo sapiens
  misc_RNA (1)...(19): siRNA sense strand
ugacaccaagcccaucuga

SEQ ID NO: 1069531 - RNA, 19 nt, Homo sapiens
  misc_RNA (1)...(19): siRNA sense strand
gcucagcagacuccuguag

SEQ ID NO: 1069532 - RNA, 19 nt, Homo sapiens
  misc_RNA (1)...(19): siRNA sense strand
aguggcagaggauaaauuu

SEQ ID NO: 1069533 - RNA, 19 nt, Homo sapiens
  misc_RNA (1)...(19): siRNA sense strand
uggcaacuccuaggauuug

SEQ ID NO: 1069534 - RNA, 19 nt, Homo sapiens
  misc_RNA (1)...(19): siRNA sense strand
aaagauguuggacaauuuc

SEQ ID NO: 1069535 - RNA, 19 nt, Homo sapiens
  misc_RNA (1)...(19): siRNA sense strand
ggaagccaagugccaucuu

SEQ ID NO: 1069536 - RNA, 19 nt, Homo sapiens
  misc_RNA (1)...(19): siRNA sense strand
uuggagccaugaauauugu

SEQ ID NO: 1069537 - RNA, 19 nt, Homo sapiens
  misc_RNA (1)...(19): siRNA sense strand
aaaugugguucugaaaugg

SEQ ID NO: 1069538 - RNA, 19 nt, Homo sapiens
  misc_RNA (1)...(19): siRNA sense strand
ggcaaaugugguucugaaa

SEQ ID NO: 1069539 - RNA, 19 nt, Homo sapiens
  misc_RNA (1)...(19): siRNA sense strand
caccaagcccaucugaaau

SEQ ID NO: 1069540 - RNA, 19 nt, Homo sapiens
  misc_RNA (1)...(19): siRNA sense strand
gaaugggaggaucugucua

SEQ ID NO: 1069541 - RNA, 19 nt, Homo sapiens
  misc_RNA (1)...(19): siRNA sense strand
cagcaaguggcagaggaua

SEQ ID NO: 1069542 - RNA, 19 nt, Homo sapiens
  misc_RNA (1)...(19): siRNA sense strand
uugcucagauuggaauuuc

SEQ ID NO: 1069543 - RNA, 19 nt, Homo sapiens
  misc_RNA (1)...(19): siRNA sense strand
caguauggcucagcagacu

SEQ ID NO: 1069544 - RNA, 19 nt, Homo sapiens
  misc_RNA (1)...(19): siRNA sense strand
caagaugacuccaaugaua

SEQ ID NO: 1069545 - RNA, 19 nt, Homo sapiens
  misc_RNA (1)...(19): siRNA sense strand
gaugauacauucuccuaua

SEQ ID NO: 1069546 - RNA, 19 nt, Homo sapiens
  misc_RNA (1)...(19): siRNA sense strand
guaaauaugaggaggauua

SEQ ID NO: 1069547 - RNA, 19 nt, Homo sapiens
  misc_RNA (1)...(19): siRNA sense strand
ccacagauuuccagaauga

SEQ ID NO: 1069548 - RNA, 19 nt, Homo sapiens
  misc_RNA (1)...(19): siRNA sense strand
ggaauuugguguucacuug

SEQ ID NO: 1069549 - RNA, 19 nt, Homo sapiens
  misc_RNA (1)...(19): siRNA sense strand
caaaagcacuguuaagaaa

SEQ ID NO: 1069550 - RNA, 19 nt, Homo sapiens
  misc_RNA (1)...(19): siRNA sense strand
ucaaggagcugucccagau

SEQ ID NO: 1069551 - RNA, 19 nt, Homo sapiens
  misc_RNA (1)...(19): siRNA sense strand
gugcaucguuuguacagua

SEQ ID NO: 1069552 - RNA, 19 nt, Homo sapiens
  misc_RNA (1)...(19): siRNA sense strand
gagaggagaucuacagcau

SEQ ID NO: 1069553 - RNA, 19 nt, Homo sapiens
  misc_RNA (1)...(19): siRNA sense strand
gauccucucuaucagauug

SEQ ID NO: 1069554 - RNA, 19 nt, Homo sapiens
  misc_RNA (1)...(19): siRNA sense strand
gacaaacggcuacaggaua

SEQ ID NO: 1069555 - RNA, 19 nt, Homo sapiens
  misc_RNA (1)...(19): siRNA sense strand
ggaggaggaggaugguuua

SEQ ID NO: 1069556 - RNA, 19 nt, Homo sapiens
  misc_RNA (1)...(19): siRNA sense strand
ugaaggauccucucuauca

SEQ ID NO: 1069557 - RNA, 19 nt, Homo sapiens
  misc_RNA (1)...(19): siRNA sense strand
ucagucaucuugaaacaau

SEQ ID NO: 1069558 - RNA, 19 nt, Homo sapiens
  misc_RNA (1)...(19): siRNA sense strand
acaaacggcuacaggauau

SEQ ID NO: 1069559 - RNA, 19 nt, Homo sapiens
  misc_RNA (1)...(19): siRNA sense strand
ugaaggccaucaucacuga

SEQ ID NO: 1069560 - RNA, 19 nt, Homo sapiens
  misc_RNA (1)...(19): siRNA sense strand
gagaaucgauaagcaaagu

SEQ ID NO: 1069561 - RNA, 19 nt, Homo sapiens
  misc_RNA (1)...(19): siRNA sense strand
ggccacagauuuccagaau

SEQ ID NO: 1069562 - RNA, 19 nt, Homo sapiens
  misc_RNA (1)...(19): siRNA sense strand
ucacugaggagcagauuaa

SEQ ID NO: 1069563 - RNA, 19 nt, Homo sapiens
  misc_RNA (1)...(19): siRNA sense strand
aaucucgucuuuagcauuu

SEQ ID NO: 1069564 - RNA, 19 nt, Homo sapiens
  misc_RNA (1)...(19): siRNA sense strand
ggaaaagggugcagccaaa

SEQ ID NO: 1069565 - RNA, 19 nt, Homo sapiens
  misc_RNA (1)...(19): siRNA sense strand
ugaagaugaugauacauuc

SEQ ID NO: 1069566 - RNA, 19 nt, Homo sapiens
  misc_RNA (1)...(19): siRNA sense strand
cuacgaggaugaugaggaa

SEQ ID NO: 1069567 - RNA, 19 nt, Homo sapiens
  misc_RNA (1)...(19): siRNA sense strand
gcagagacgcucaguguca

SEQ ID NO: 1069568 - RNA, 19 nt, Homo sapiens
  misc_RNA (1)...(19): siRNA sense strand
uggcagaacugacuguaga

SEQ ID NO: 1069569 - RNA, 19 nt, Homo sapiens
  misc_RNA (1)...(19): siRNA sense strand
ugacaacaguaguacgaaa

SEQ ID NO: 1069570 - RNA, 19 nt, Homo sapiens
  misc_RNA (1)...(19): siRNA sense strand
gcacugagcacugguggaa

SEQ ID NO: 1069571 - RNA, 19 nt, Homo sapiens
  misc_RNA (1)...(19): siRNA sense strand
gaagaugaagaugaugaua

SEQ ID NO: 1069572 - RNA, 19 nt, Homo sapiens
  misc_RNA (1)...(19): siRNA sense strand
ccuaauggguugagagaau

SEQ ID NO: 1069573 - RNA, 19 nt, Homo sapiens
  misc_RNA (1)...(19): siRNA sense strand
gaaacaauauguggagacu

SEQ ID NO: 1069574 - RNA, 19 nt, Homo sapiens
  misc_RNA (1)...(19): siRNA sense strand
gagagaaucgauaagcaaa

SEQ ID NO: 1069575 - RNA, 19 nt, Homo sapiens
  misc_RNA (1)...(19): siRNA sense strand
ucacuggugugcccaauca

SEQ ID NO: 1069576 - RNA, 19 nt, Homo sapiens
  misc_RNA (1)...(19): siRNA sense strand
uagaaccucucuuggaguu

SEQ ID NO: 1069577 - RNA, 19 nt, Homo sapiens
  misc_RNA (1)...(19): siRNA sense strand
agaaagccuugccugaauu

SEQ ID NO: 1069578 - RNA, 19 nt, Homo sapiens
  misc_RNA (1)...(19): siRNA sense strand
aagaaagccuugccugaau

SEQ ID NO: 1069579 - RNA, 19 nt, Homo sapiens
  misc_RNA (1)...(19): siRNA sense strand
uaagaaagccuugccugaa

SEQ ID NO: 1069580 - RNA, 19 nt, Homo sapiens
  misc_RNA (1)...(19): siRNA sense strand
gcaaagugcgcuccagugu

SEQ ID NO: 1069581 - RNA, 19 nt, Homo sapiens
  misc_RNA (1)...(19): siRNA sense strand
acacacagaugccacuugu

SEQ ID NO: 1069582 - RNA, 19 nt, Homo sapiens
  misc_RNA (1)...(19): siRNA sense strand
ccugaaggauccucucuau

SEQ ID NO: 1069583 - RNA, 19 nt, Homo sapiens
  misc_RNA (1)...(19): siRNA sense strand
ggaggaggaugguuuagcu

SEQ ID NO: 1069584 - RNA, 19 nt, Homo sapiens
  misc_RNA (1)...(19): siRNA sense strand
gcaaaccugcucuagaguu

SEQ ID NO: 1069585 - RNA, 19 nt, Homo sapiens
  misc_RNA (1)...(19): siRNA sense strand
ucccagagauguauaagau

SEQ ID NO: 1069586 - RNA, 19 nt, Homo sapiens
  misc_RNA (1)...(19): siRNA sense strand
ggaggugacggaggaauuu

SEQ ID NO: 1069587 - RNA, 19 nt, Homo sapiens
  misc_RNA (1)...(19): siRNA sense strand
ucaacgagcucuccaacgu

SEQ ID NO: 1069588 - RNA, 19 nt, Homo sapiens
  misc_RNA (1)...(19): siRNA sense strand
gauacauucuccuauacug

SEQ ID NO: 1069589 - RNA, 19 nt, Homo sapiens
  misc_RNA (1)...(19): siRNA sense strand
ucacagaggccuuuguuca

SEQ ID NO: 1069590 - RNA, 19 nt, Homo sapiens
  misc_RNA (1)...(19): siRNA sense strand
gugcccauaugaucuguaa

SEQ ID NO: 1069591 - RNA, 19 nt, Homo sapiens
  misc_RNA (1)...(19): siRNA sense strand
acacagaugccacuuguug

SEQ ID NO: 1069592 - RNA, 19 nt, Homo sapiens
  misc_RNA (1)...(19): siRNA sense strand
gaaguuacagacacacaga

SEQ ID NO: 1069593 - RNA, 19 nt, Homo sapiens
  misc_RNA (1)...(19): siRNA sense strand
cagcaagcauggaaagcaa

SEQ ID NO: 1069594 - RNA, 19 nt, Homo sapiens
  misc_RNA (1)...(19): siRNA sense strand
uguagaagaugaagaugau

SEQ ID NO: 1069595 - RNA, 19 nt, Homo sapiens
  misc_RNA (1)...(19): siRNA sense strand
gcagugacagcccuaguga

SEQ ID NO: 1069596 - RNA, 19 nt, Homo sapiens
  misc_RNA (1)...(19): siRNA sense strand
uggcugagguguaugguau

SEQ ID NO: 1069597 - RNA, 19 nt, Homo sapiens
  misc_RNA (1)...(19): siRNA sense strand
uggcaaaccugcucuagag

SEQ ID NO: 1069598 - RNA, 19 nt, Homo sapiens
  misc_RNA (1)...(19): siRNA sense strand
caucagucaucuugaaaca

SEQ ID NO: 1069599 - RNA, 19 nt, Homo sapiens
  misc_RNA (1)...(19): siRNA sense strand
gaaggauccucucuaucag

SEQ ID NO: 1069600 - RNA, 19 nt, Homo sapiens
  misc_RNA (1)...(19): siRNA sense strand
acaauggacugugguaugu

SEQ ID NO: 1069601 - RNA, 19 nt, Homo sapiens
  misc_RNA (1)...(19): siRNA sense strand
gaauagcagcucaagacuu

SEQ ID NO: 1069602 - RNA, 19 nt, Homo sapiens
  misc_RNA (1)...(19): siRNA sense strand
gaaagccuugccugaauug

SEQ ID NO: 1069603 - RNA, 19 nt, Homo sapiens
  misc_RNA (1)...(19): siRNA sense strand
uaaccgagagugcagcuuu

SEQ ID NO: 1069604 - RNA, 19 nt, Homo sapiens
  misc_RNA (1)...(19): siRNA sense strand
aaauuuaggccuccugaaa

SEQ ID NO: 1069605 - RNA, 19 nt, Homo sapiens
  misc_RNA (1)...(19): siRNA sense strand
aacaauauguggagacuca

SEQ ID NO: 1069606 - RNA, 19 nt, Homo sapiens
  misc_RNA (1)...(19): siRNA sense strand
ugcagccacucgacauuua

SEQ ID NO: 1069607 - RNA, 19 nt, Homo sapiens
  misc_RNA (1)...(19): siRNA sense strand
gagacccugugcaucguuu

SEQ ID NO: 1069608 - RNA, 19 nt, Homo sapiens
  misc_RNA (1)...(19): siRNA sense strand
agaugaagaugaugauaca

SEQ ID NO: 1069609 - RNA, 19 nt, Homo sapiens
  misc_RNA (1)...(19): siRNA sense strand
gauuuccucugccaguuug

SEQ ID NO: 1069610 - RNA, 19 nt, Homo sapiens
  misc_RNA (1)...(19): siRNA sense strand
uuacacagaagaaguagaa

SEQ ID NO: 1069611 - RNA, 19 nt, Homo sapiens
  misc_RNA (1)...(19): siRNA sense strand
ugaggaagaugacccugau

SEQ ID NO: 1069612 - RNA, 19 nt, Homo sapiens
  misc_RNA (1)...(19): siRNA sense strand
aauaugaggaggauuacua

SEQ ID NO: 1069613 - RNA, 19 nt, Homo sapiens
  misc_RNA (1)...(19): siRNA sense strand
uguauaagaucuucaccau

SEQ ID NO: 1069614 - RNA, 19 nt, Homo sapiens
  misc_RNA (1)...(19): siRNA sense strand
uggcaucagucaucuugaa

SEQ ID NO: 1069615 - RNA, 19 nt, Homo sapiens
  misc_RNA (1)...(19): siRNA sense strand
ugguuuagcuggccaacuu

SEQ ID NO: 1069616 - RNA, 19 nt, Homo sapiens
  misc_RNA (1)...(19): siRNA sense strand
ucgaauuucugcagugaga

SEQ ID NO: 1069617 - RNA, 19 nt, Homo sapiens
  misc_RNA (1)...(19): siRNA sense strand
cuccuauacuguuagaaua

SEQ ID NO: 1069618 - RNA, 19 nt, Homo sapiens
  misc_RNA (1)...(19): siRNA sense strand
gaggagcagauuaaaguau

SEQ ID NO: 1069619 - RNA, 19 nt, Homo sapiens
  misc_RNA (1)...(19): siRNA sense strand
ugaggacagaaguaaauua

SEQ ID NO: 1069620 - RNA, 19 nt, Homo sapiens
  misc_RNA (1)...(19): siRNA sense strand
cgggagcuauugccuaaug

SEQ ID NO: 1069621 - RNA, 19 nt, Homo sapiens
  misc_RNA (1)...(19): siRNA sense strand
gagaggcgaguucuacaga

SEQ ID NO: 1069622 - RNA, 19 nt, Homo sapiens
  misc_RNA (1)...(19): siRNA sense strand
gaaguccugggcuuugaaa

SEQ ID NO: 1069623 - RNA, 19 nt, Homo sapiens
  misc_RNA (1)...(19): siRNA sense strand
guucgaauuucugcaguga

SEQ ID NO: 1069624 - RNA, 19 nt, Homo sapiens
  misc_RNA (1)...(19): siRNA sense strand
agacuuaaaugccguccau

SEQ ID NO: 1069625 - RNA, 19 nt, Homo sapiens
  misc_RNA (1)...(19): siRNA sense strand
ccaacgucauggaggcuaa

SEQ ID NO: 1069626 - RNA, 19 nt, Homo sapiens
  misc_RNA (1)...(19): siRNA sense strand
aaaggaagcguuaguggau

SEQ ID NO: 1069627 - RNA, 19 nt, Homo sapiens
  misc_RNA (1)...(19): siRNA sense strand
gaaaaucucgucuuuagca

SEQ ID NO: 1069628 - RNA, 19 nt, Homo sapiens
  misc_RNA (1)...(19): siRNA sense strand
gugaaguccugggcuuuga

SEQ ID NO: 1069629 - RNA, 19 nt, Homo sapiens
  misc_RNA (1)...(19): siRNA sense strand
uccgggagcuauugccuaa

SEQ ID NO: 1069630 - RNA, 19 nt, Homo sapiens
  misc_RNA (1)...(19): siRNA sense strand
gaacgcuggacaaacauuc

SEQ ID NO: 1069631 - RNA, 19 nt, Homo sapiens
  misc_RNA (1)...(19): siRNA sense strand
caacaguaguacgaaauac

SEQ ID NO: 1069632 - RNA, 19 nt, Homo sapiens
  misc_RNA (1)...(19): siRNA sense strand
acaacaguaguacgaaaua

SEQ ID NO: 1069633 - RNA, 19 nt, Homo sapiens
  misc_RNA (1)...(19): siRNA sense strand
ugucagggcccaaugcaaa

SEQ ID NO: 1069634 - RNA, 19 nt, Homo sapiens
  misc_RNA (1)...(19): siRNA sense strand
uaagauggagguccuaaag

SEQ ID NO: 1069635 - RNA, 19 nt, Homo sapiens
  misc_RNA (1)...(19): siRNA sense strand
cagccaaaguccugaucuu

SEQ ID NO: 1069636 - RNA, 19 nt, Homo sapiens
  misc_RNA (1)...(19): siRNA sense strand
gaaauuuaggccuccugaa

SEQ ID NO: 1069637 - RNA, 19 nt, Homo sapiens
  misc_RNA (1)...(19): siRNA sense strand
gcagaguggagucaagaug

SEQ ID NO: 1069638 - RNA, 19 nt, Homo sapiens
  misc_RNA (1)...(19): siRNA sense strand
aaggagcugucccagauug

SEQ ID NO: 1069639 - RNA, 19 nt, Homo sapiens
  misc_RNA (1)...(19): siRNA sense strand
gaccucaaccucucagugu

SEQ ID NO: 1069640 - RNA, 19 nt, Homo sapiens
  misc_RNA (1)...(19): siRNA sense strand
uccaguggcacaaggauua

SEQ ID NO: 1069641 - RNA, 19 nt, Homo sapiens
  misc_RNA (1)...(19): siRNA sense strand
acauucuccuauacuguua

SEQ ID NO: 1069642 - RNA, 19 nt, Homo sapiens
  misc_RNA (1)...(19): siRNA sense strand
ccugaucuuucccguggua

SEQ ID NO: 1069643 - RNA, 19 nt, Homo sapiens
  misc_RNA (1)...(19): siRNA sense strand
cagaguggagucaagauga

SEQ ID NO: 1069644 - RNA, 19 nt, Homo sapiens
  misc_RNA (1)...(19): siRNA sense strand
ggaagaagcacaucuauau

SEQ ID NO: 1069645 - RNA, 19 nt, Homo sapiens
  misc_RNA (1)...(19): siRNA sense strand
gacaugggcuuuacaguuu

SEQ ID NO: 1069646 - RNA, 19 nt, Homo sapiens
  misc_RNA (1)...(19): siRNA sense strand
gagggcagcuuguuaaaga

SEQ ID NO: 1069647 - RNA, 19 nt, Homo sapiens
  misc_RNA (1)...(19): siRNA sense strand
ggaagaagauacuagaauc

SEQ ID NO: 1069648 - RNA, 19 nt, Homo sapiens
  misc_RNA (1)...(19): siRNA sense strand
cagauuaacuucagcugua

SEQ ID NO: 1069649 - RNA, 19 nt, Homo sapiens
  misc_RNA (1)...(19): siRNA sense strand
gauauucccugucaagguu

SEQ ID NO: 1069650 - RNA, 19 nt, Homo sapiens
  misc_RNA (1)...(19): siRNA sense strand
gcaagcagauauucccauu

SEQ ID NO: 1069651 - RNA, 19 nt, Homo sapiens
  misc_RNA (1)...(19): siRNA sense strand
uaaggaugcucguauaguu

SEQ ID NO: 1069652 - RNA, 19 nt, Homo sapiens
  misc_RNA (1)...(19): siRNA sense strand
ggacaugggcuuuacaguu

SEQ ID NO: 1069653 - RNA, 19 nt, Homo sapiens
  misc_RNA (1)...(19): siRNA sense strand
guagagaacaucaugcuaa

SEQ ID NO: 1069654 - RNA, 19 nt, Homo sapiens
  misc_RNA (1)...(19): siRNA sense strand
gcagaagacucgacuacag

SEQ ID NO: 1069655 - RNA, 19 nt, Homo sapiens
  misc_RNA (1)...(19): siRNA sense strand
gaauggaagcagagucuaa

SEQ ID NO: 1069656 - RNA, 19 nt, Homo sapiens
  misc_RNA (1)...(19): siRNA sense strand
gccagucucuguccaagaa

SEQ ID NO: 1069657 - RNA, 19 nt, Homo sapiens
  misc_RNA (1)...(19): siRNA sense strand
uuaaagaccuacaaacaag

SEQ ID NO: 1069658 - RNA, 19 nt, Homo sapiens
  misc_RNA (1)...(19): siRNA sense strand
ucagagaugugucuuccaa

SEQ ID NO: 1069659 - RNA, 19 nt, Homo sapiens
  misc_RNA (1)...(19): siRNA sense strand
acagagagcucagagaugu

SEQ ID NO: 1069660 - RNA, 19 nt, Homo sapiens
  misc_RNA (1)...(19): siRNA sense strand
caaaguugauguccaugau

SEQ ID NO: 1069661 - RNA, 19 nt, Homo sapiens
  misc_RNA (1)...(19): siRNA sense strand
ccaagaagcuaugcaugga

SEQ ID NO: 1069662 - RNA, 19 nt, Homo sapiens
  misc_RNA (1)...(19): siRNA sense strand
uacaucaucucuucucaaa

SEQ ID NO: 1069663 - RNA, 19 nt, Homo sapiens
  misc_RNA (1)...(19): siRNA sense strand
ccaugggccugaaaucauu

SEQ ID NO: 1069664 - RNA, 19 nt, Homo sapiens
  misc_RNA (1)...(19): siRNA sense strand
ucacugagggcaucaauga

SEQ ID NO: 1069665 - RNA, 19 nt, Homo sapiens
  misc_RNA (1)...(19): siRNA sense strand
ccaagaacggucagauuaa

SEQ ID NO: 1069666 - RNA, 19 nt, Homo sapiens
  misc_RNA (1)...(19): siRNA sense strand
gcuagagggcagcuuguua

SEQ ID NO: 1069667 - RNA, 19 nt, Homo sapiens
  misc_RNA (1)...(19): siRNA sense strand
cccaagaacggucagauua

SEQ ID NO: 1069668 - RNA, 19 nt, Homo sapiens
  misc_RNA (1)...(19): siRNA sense strand
gggcaaaguugauguccau

SEQ ID NO: 1069669 - RNA, 19 nt, Homo sapiens
  misc_RNA (1)...(19): siRNA sense strand
uaucaaugccaacaacaua

SEQ ID NO: 1069670 - RNA, 19 nt, Homo sapiens
  misc_RNA (1)...(19): siRNA sense strand
guuaaagaccuacaaacaa

SEQ ID NO: 1069671 - RNA, 19 nt, Homo sapiens
  misc_RNA (1)...(19): siRNA sense strand
uauagagucugcaugacaa

SEQ ID NO: 1069672 - RNA, 19 nt, Homo sapiens
  misc_RNA (1)...(19): siRNA sense strand
gcaaaguugauguccauga

SEQ ID NO: 1069673 - RNA, 19 nt, Homo sapiens
  misc_RNA (1)...(19): siRNA sense strand
gagucugcaugacaaauga

SEQ ID NO: 1069674 - RNA, 19 nt, Homo sapiens
  misc_RNA (1)...(19): siRNA sense strand
gccaagccauuguggagaa

SEQ ID NO: 1069675 - RNA, 19 nt, Homo sapiens
  misc_RNA (1)...(19): siRNA sense strand
gauaaagagcaagcagaua

SEQ ID NO: 1069676 - RNA, 19 nt, Homo sapiens
  misc_RNA (1)...(19): siRNA sense strand
aaguugauguccaugauaa

SEQ ID NO: 1069677 - RNA, 19 nt, Homo sapiens
  misc_RNA (1)...(19): siRNA sense strand
gaagaagcacaucuauauc

SEQ ID NO: 1069678 - RNA, 19 nt, Homo sapiens
  misc_RNA (1)...(19): siRNA sense strand
gaugauuacccgaacaaga

SEQ ID NO: 1069679 - RNA, 19 nt, Homo sapiens
  misc_RNA (1)...(19): siRNA sense strand
ucucagagcuuggcauaag

SEQ ID NO: 1069680 - RNA, 19 nt, Homo sapiens
  misc_RNA (1)...(19): siRNA sense strand
ccuacaaacaagaugauua

SEQ ID NO: 1069681 - RNA, 19 nt, Homo sapiens
  misc_RNA (1)...(19): siRNA sense strand
caagaacggucagauuaac

SEQ ID NO: 1069682 - RNA, 19 nt, Homo sapiens
  misc_RNA (1)...(19): siRNA sense strand
gaagcagagucuaaaagaa

SEQ ID NO: 1069683 - RNA, 19 nt, Homo sapiens
  misc_RNA (1)...(19): siRNA sense strand
cuagagggcagcuuguuaa

SEQ ID NO: 1069684 - RNA, 19 nt, Homo sapiens
  misc_RNA (1)...(19): siRNA sense strand
auaaagagcaagcagauau

SEQ ID NO: 1069685 - RNA, 19 nt, Homo sapiens
  misc_RNA (1)...(19): siRNA sense strand
uaaagagcaagcagauauu

SEQ ID NO: 1069686 - RNA, 19 nt, Homo sapiens
  misc_RNA (1)...(19): siRNA sense strand
uaacuucagcuguaucaau

SEQ ID NO: 1069687 - RNA, 19 nt, Homo sapiens
  misc_RNA (1)...(19): siRNA sense strand
aagcagauauucccauuuu

SEQ ID NO: 1069688 - RNA, 19 nt, Homo sapiens
  misc_RNA (1)...(19): siRNA sense strand
gcucguauaguuuacauca

SEQ ID NO: 1069689 - RNA, 19 nt, Homo sapiens
  misc_RNA (1)...(19): siRNA sense strand
ccaagugggugggcaaagu

SEQ ID NO: 1069690 - RNA, 19 nt, Homo sapiens
  misc_RNA (1)...(19): siRNA sense strand
uagcacuccucuuuggaaa

SEQ ID NO: 1069691 - RNA, 19 nt, Homo sapiens
  misc_RNA (1)...(19): siRNA sense strand
agaugugucuuccaaagga

SEQ ID NO: 1069692 - RNA, 19 nt, Homo sapiens
  misc_RNA (1)...(19): siRNA sense strand
gagaacaucaugcuaacca

SEQ ID NO: 1069693 - RNA, 19 nt, Homo sapiens
  misc_RNA (1)...(19): siRNA sense strand
uaguuuacaucaucucuuc

SEQ ID NO: 1069694 - RNA, 19 nt, Homo sapiens
  misc_RNA (1)...(19): siRNA sense strand
caagaugauuacccgaaca

SEQ ID NO: 1069695 - RNA, 19 nt, Homo sapiens
  misc_RNA (1)...(19): siRNA sense strand
acaugggcuuuacaguuua

SEQ ID NO: 1069696 - RNA, 19 nt, Homo sapiens
  misc_RNA (1)...(19): siRNA sense strand
ucacagagagcucagagau

SEQ ID NO: 1069697 - RNA, 19 nt, Homo sapiens
  misc_RNA (1)...(19): siRNA sense strand
gaaguuguagagaacauca

SEQ ID NO: 1069698 - RNA, 19 nt, Homo sapiens
  misc_RNA (1)...(19): siRNA sense strand
gaagacucgacuacagauu

SEQ ID NO: 1069699 - RNA, 19 nt, Homo sapiens
  misc_RNA (1)...(19): siRNA sense strand
ucaggaagaagcacaucua

SEQ ID NO: 1069700 - RNA, 19 nt, Homo sapiens
  misc_RNA (1)...(19): siRNA sense strand
gagaauggaagcagagucu

SEQ ID NO: 1069701 - RNA, 19 nt, Homo sapiens
  misc_RNA (1)...(19): siRNA sense strand
ucucccagcuggaaggauu

SEQ ID NO: 1069702 - RNA, 19 nt, Homo sapiens
  misc_RNA (1)...(19): siRNA sense strand
gcagcuuguuaaagaccua

SEQ ID NO: 1069703 - RNA, 19 nt, Homo sapiens
  misc_RNA (1)...(19): siRNA sense strand
cagaagacucgacuacaga

SEQ ID NO: 1069704 - RNA, 19 nt, Homo sapiens
  misc_RNA (1)...(19): siRNA sense strand
ccaguggcuuggaagaaga

SEQ ID NO: 1069705 - RNA, 19 nt, Homo sapiens
  misc_RNA (1)...(19): siRNA sense strand
agacucgacuacagauuuc

SEQ ID NO: 1069706 - RNA, 19 nt, Homo sapiens
  misc_RNA (1)...(19): siRNA sense strand
agagaugugucuuccaaag

SEQ ID NO: 1069707 - RNA, 19 nt, Homo sapiens
  misc_RNA (1)...(19): siRNA sense strand
ucaaugccaacaacauaaa

SEQ ID NO: 1069708 - RNA, 19 nt, Homo sapiens
  misc_RNA (1)...(19): siRNA sense strand
ucaaugugguggagcagau

SEQ ID NO: 1069709 - RNA, 19 nt, Homo sapiens
  misc_RNA (1)...(19): siRNA sense strand
uggcauuuaugaugaagga

SEQ ID NO: 1069710 - RNA, 19 nt, Homo sapiens
  misc_RNA (1)...(19): siRNA sense strand
gccaacaacauaaauuaca

SEQ ID NO: 1069711 - RNA, 19 nt, Homo sapiens
  misc_RNA (1)...(19): siRNA sense strand
gaaggccaucccuggguuu

SEQ ID NO: 1069712 - RNA, 19 nt, Homo sapiens
  misc_RNA (1)...(19): siRNA sense strand
gauauucuuagccuauaga

SEQ ID NO: 1069713 - RNA, 19 nt, Homo sapiens
  misc_RNA (1)...(19): siRNA sense strand
gaacggucagauuaacuuc

SEQ ID NO: 1069714 - RNA, 19 nt, Homo sapiens
  misc_RNA (1)...(19): siRNA sense strand
ggaagcagagucuaaaaga

SEQ ID NO: 1069715 - RNA, 19 nt, Homo sapiens
  misc_RNA (1)...(19): siRNA sense strand
aaaguugauguccaugaua

SEQ ID NO: 1069716 - RNA, 19 nt, Homo sapiens
  misc_RNA (1)...(19): siRNA sense strand
cuacaaacaagaugauuac

SEQ ID NO: 1069717 - RNA, 19 nt, Homo sapiens
  misc_RNA (1)...(19): siRNA sense strand
ucguauaguuuacaucauc

SEQ ID NO: 1069718 - RNA, 19 nt, Homo sapiens
  misc_RNA (1)...(19): siRNA sense strand
gccuauagagucugcauga

SEQ ID NO: 1069719 - RNA, 19 nt, Homo sapiens
  misc_RNA (1)...(19): siRNA sense strand
aggaugcucguauaguuua

SEQ ID NO: 1069720 - RNA, 19 nt, Homo sapiens
  misc_RNA (1)...(19): siRNA sense strand
aagacucgacuacagauuu

SEQ ID NO: 1069721 - RNA, 19 nt, Homo sapiens
  misc_RNA (1)...(19): siRNA sense strand
caagugggugggcaaaguu

SEQ ID NO: 1069722 - RNA, 19 nt, Homo sapiens
  misc_RNA (1)...(19): siRNA sense strand
auacaccaguggcuuggaa

SEQ ID NO: 1069723 - RNA, 19 nt, Homo sapiens
  misc_RNA (1)...(19): siRNA sense strand
aacuucagcuguaucaaug

SEQ ID NO: 1069724 - RNA, 19 nt, Homo sapiens
  misc_RNA (1)...(19): siRNA sense strand
uagagaacaucaugcuaac

SEQ ID NO: 1069725 - RNA, 19 nt, Homo sapiens
  misc_RNA (1)...(19): siRNA sense strand
gggcuuuacaguuuaugaa

SEQ ID NO: 1069726 - RNA, 19 nt, Homo sapiens
  misc_RNA (1)...(19): siRNA sense strand
uaaagaccuacaaacaaga

SEQ ID NO: 1069727 - RNA, 19 nt, Homo sapiens
  misc_RNA (1)...(19): siRNA sense strand
aggaagaagcacaucuaua

SEQ ID NO: 1069728 - RNA, 19 nt, Homo sapiens
  misc_RNA (1)...(19): siRNA sense strand
ucaccuccauccucugcaa

SEQ ID NO: 1069729 - RNA, 19 nt, Homo sapiens
  misc_RNA (1)...(19): siRNA sense strand
cuuugugucucaaggcuuu

SEQ ID NO: 1069730 - RNA, 19 nt, Homo sapiens
  misc_RNA (1)...(19): siRNA sense strand
caagcagauauucccauuu

SEQ ID NO: 1069731 - RNA, 19 nt, Homo sapiens
  misc_RNA (1)...(19): siRNA sense strand
ugauuacccgaacaagaua

SEQ ID NO: 1069732 - RNA, 19 nt, Homo sapiens
  misc_RNA (1)...(19): siRNA sense strand
caugggcuuuacaguuuau

SEQ ID NO: 1069733 - RNA, 19 nt, Homo sapiens
  misc_RNA (1)...(19): siRNA sense strand
cagucucuguccaagaauu

SEQ ID NO: 1069734 - RNA, 19 nt, Homo sapiens
  misc_RNA (1)...(19): siRNA sense strand
ugauaaagagcaagcagau

SEQ ID NO: 1069735 - RNA, 19 nt, Homo sapiens
  misc_RNA (1)...(19): siRNA sense strand
ugauguccaugauaaagag

SEQ ID NO: 1069736 - RNA, 19 nt, Homo sapiens
  misc_RNA (1)...(19): siRNA sense strand
cagcuuggcguccaguuuc

SEQ ID NO: 1069737 - RNA, 19 nt, Homo sapiens
  misc_RNA (1)...(19): siRNA sense strand
gcccacccuuucaguguuc

SEQ ID NO: 1069738 - RNA, 19 nt, Homo sapiens
  misc_RNA (1)...(19): siRNA sense strand
uggaagaagauacuagaau

SEQ ID NO: 1069739 - RNA, 19 nt, Homo sapiens
  misc_RNA (1)...(19): siRNA sense strand
caggaagaagcacaucuau

SEQ ID NO: 1069740 - RNA, 19 nt, Homo sapiens
  misc_RNA (1)...(19): siRNA sense strand
ccugaauuaugaguacuug

SEQ ID NO: 1069741 - RNA, 19 nt, Homo sapiens
  misc_RNA (1)...(19): siRNA sense strand
aaggaugcucguauaguuu

SEQ ID NO: 1069742 - RNA, 19 nt, Homo sapiens
  misc_RNA (1)...(19): siRNA sense strand
agauuaacuucagcuguau

SEQ ID NO: 1069743 - RNA, 19 nt, Homo sapiens
  misc_RNA (1)...(19): siRNA sense strand
uauucccugucaagguuua

SEQ ID NO: 1069744 - RNA, 19 nt, Homo sapiens
  misc_RNA (1)...(19): siRNA sense strand
gaacaguacuucacuuaaa

SEQ ID NO: 1069745 - RNA, 19 nt, Homo sapiens
  misc_RNA (1)...(19): siRNA sense strand
gaaauuaggagaacgguuu

SEQ ID NO: 1069746 - RNA, 19 nt, Homo sapiens
  misc_RNA (1)...(19): siRNA sense strand
guacuucacuuaaagagaa

SEQ ID NO: 1069747 - RNA, 19 nt, Homo sapiens
  misc_RNA (1)...(19): siRNA sense strand
gcaaagaaguagaugacaa

SEQ ID NO: 1069748 - RNA, 19 nt, Homo sapiens
  misc_RNA (1)...(19): siRNA sense strand
gaacaccacccaggaguua

SEQ ID NO: 1069749 - RNA, 19 nt, Homo sapiens
  misc_RNA (1)...(19): siRNA sense strand
gcagaaauaagaaggauaa

SEQ ID NO: 1069750 - RNA, 19 nt, Homo sapiens
  misc_RNA (1)...(19): siRNA sense strand
cauaauagaucacguucaa

SEQ ID NO: 1069751 - RNA, 19 nt, Homo sapiens
  misc_RNA (1)...(19): siRNA sense strand
gagaaaagaucaaggaaaa

SEQ ID NO: 1069752 - RNA, 19 nt, Homo sapiens
  misc_RNA (1)...(19): siRNA sense strand
aggaguagaucccauaaua

SEQ ID NO: 1069753 - RNA, 19 nt, Homo sapiens
  misc_RNA (1)...(19): siRNA sense strand
gaaccagauucaaguguga

SEQ ID NO: 1069754 - RNA, 19 nt, Homo sapiens
  misc_RNA (1)...(19): siRNA sense strand
gaaaaccucucuaccaaaa

SEQ ID NO: 1069755 - RNA, 19 nt, Homo sapiens
  misc_RNA (1)...(19): siRNA sense strand
ggaauugucagcugaauga

SEQ ID NO: 1069756 - RNA, 19 nt, Homo sapiens
  misc_RNA (1)...(19): siRNA sense strand
ggaaagagcaaugaaagaa

SEQ ID NO: 1069757 - RNA, 19 nt, Homo sapiens
  misc_RNA (1)...(19): siRNA sense strand
gaucuaagagcccacauaa

SEQ ID NO: 1069758 - RNA, 19 nt, Homo sapiens
  misc_RNA (1)...(19): siRNA sense strand
agaaagagcacaauaaaga

SEQ ID NO: 1069759 - RNA, 19 nt, Homo sapiens
  misc_RNA (1)...(19): siRNA sense strand
ugagaaggaucgagacaaa

SEQ ID NO: 1069760 - RNA, 19 nt, Homo sapiens
  misc_RNA (1)...(19): siRNA sense strand
ccacaucagugaaagaaga

SEQ ID NO: 1069761 - RNA, 19 nt, Homo sapiens
  misc_RNA (1)...(19): siRNA sense strand
gaaagagcaaugaaagaaa

SEQ ID NO: 1069762 - RNA, 19 nt, Homo sapiens
  misc_RNA (1)...(19): siRNA sense strand
aaagacagauccaaagaga

SEQ ID NO: 1069763 - RNA, 19 nt, Homo sapiens
  misc_RNA (1)...(19): siRNA sense strand
ggaguuagaagaaguaaug

SEQ ID NO: 1069764 - RNA, 19 nt, Homo sapiens
  misc_RNA (1)...(19): siRNA sense strand
gaaagagcacaauaaagaa

SEQ ID NO: 1069765 - RNA, 19 nt, Homo sapiens
  misc_RNA (1)...(19): siRNA sense strand
agacagauccaaagagaua

SEQ ID NO: 1069766 - RNA, 19 nt, Homo sapiens
  misc_RNA (1)...(19): siRNA sense strand
ggaaagagugaaagagaaa

SEQ ID NO: 1069767 - RNA, 19 nt, Homo sapiens
  misc_RNA (1)...(19): siRNA sense strand
uaaacaaguuggagaagug

SEQ ID NO: 1069768 - RNA, 19 nt, Homo sapiens
  misc_RNA (1)...(19): siRNA sense strand
ggaaggagaaguuggagaa

SEQ ID NO: 1069769 - RNA, 19 nt, Homo sapiens
  misc_RNA (1)...(19): siRNA sense strand
gaagcucagucauuuaucu

SEQ ID NO: 1069770 - RNA, 19 nt, Homo sapiens
  misc_RNA (1)...(19): siRNA sense strand
auaaaucacuccaacaaug

SEQ ID NO: 1069771 - RNA, 19 nt, Homo sapiens
  misc_RNA (1)...(19): siRNA sense strand
gagaagcucagucauuuau

SEQ ID NO: 1069772 - RNA, 19 nt, Homo sapiens
  misc_RNA (1)...(19): siRNA sense strand
gaguagaucccauaauaga

SEQ ID NO: 1069773 - RNA, 19 nt, Homo sapiens
  misc_RNA (1)...(19): siRNA sense strand
ccaaagagauagaugaaaa

SEQ ID NO: 1069774 - RNA, 19 nt, Homo sapiens
  misc_RNA (1)...(19): siRNA sense strand
agaaguagaugacaaggau

SEQ ID NO: 1069775 - RNA, 19 nt, Homo sapiens
  misc_RNA (1)...(19): siRNA sense strand
acgagaagcucagucauuu

SEQ ID NO: 1069776 - RNA, 19 nt, Homo sapiens
  misc_RNA (1)...(19): siRNA sense strand
gaaagaguucuaaugauag

SEQ ID NO: 1069777 - RNA, 19 nt, Homo sapiens
  misc_RNA (1)...(19): siRNA sense strand
gagaacgguuuauguugga

SEQ ID NO: 1069778 - RNA, 19 nt, Homo sapiens
  misc_RNA (1)...(19): siRNA sense strand
ucgcgaagaucucguaguu

SEQ ID NO: 1069779 - RNA, 19 nt, Homo sapiens
  misc_RNA (1)...(19): siRNA sense strand
aacgacagcugaucaacua

SEQ ID NO: 1069780 - RNA, 19 nt, Homo sapiens
  misc_RNA (1)...(19): siRNA sense strand
ggaguuauguuuggagaca

SEQ ID NO: 1069781 - RNA, 19 nt, Homo sapiens
  misc_RNA (1)...(19): siRNA sense strand
caauaaagaaccagauuca

SEQ ID NO: 1069782 - RNA, 19 nt, Homo sapiens
  misc_RNA (1)...(19): siRNA sense strand
gagcagaaauaagaaggau

SEQ ID NO: 1069783 - RNA, 19 nt, Homo sapiens
  misc_RNA (1)...(19): siRNA sense strand
uaauagaucacguucaaga

SEQ ID NO: 1069784 - RNA, 19 nt, Homo sapiens
  misc_RNA (1)...(19): siRNA sense strand
agagaaagagcacaauaaa

SEQ ID NO: 1069785 - RNA, 19 nt, Homo sapiens
  misc_RNA (1)...(19): siRNA sense strand
aaagagaaagagcacaaua

SEQ ID NO: 1069786 - RNA, 19 nt, Homo sapiens
  misc_RNA (1)...(19): siRNA sense strand
aaagacagacguagaucua

SEQ ID NO: 1069787 - RNA, 19 nt, Homo sapiens
  misc_RNA (1)...(19): siRNA sense strand
uaaagaaccagauucaagu

SEQ ID NO: 1069788 - RNA, 19 nt, Homo sapiens
  misc_RNA (1)...(19): siRNA sense strand
cuccaacaaugcaauagua

SEQ ID NO: 1069789 - RNA, 19 nt, Homo sapiens
  misc_RNA (1)...(19): siRNA sense strand
gagaugggaaggagaaguu

SEQ ID NO: 1069790 - RNA, 19 nt, Homo sapiens
  misc_RNA (1)...(19): siRNA sense strand
ucauuuaucucagcagcua

SEQ ID NO: 1069791 - RNA, 19 nt, Homo sapiens
  misc_RNA (1)...(19): siRNA sense strand
gaaaagacacucgagaaaa

SEQ ID NO: 1069792 - RNA, 19 nt, Homo sapiens
  misc_RNA (1)...(19): siRNA sense strand
gaaagaagagagagagaac

SEQ ID NO: 1069793 - RNA, 19 nt, Homo sapiens
  misc_RNA (1)...(19): siRNA sense strand
gauccaaagagauagauga

SEQ ID NO: 1069794 - RNA, 19 nt, Homo sapiens
  misc_RNA (1)...(19): siRNA sense strand
aagaacaguacuucacuua

SEQ ID NO: 1069795 - RNA, 19 nt, Homo sapiens
  misc_RNA (1)...(19): siRNA sense strand
aggagaaguuggagaagaa

SEQ ID NO: 1069796 - RNA, 19 nt, Homo sapiens
  misc_RNA (1)...(19): siRNA sense strand
cgagaagcucagucauuua

SEQ ID NO: 1069797 - RNA, 19 nt, Homo sapiens
  misc_RNA (1)...(19): siRNA sense strand
aagagaaagagcacaauaa

SEQ ID NO: 1069798 - RNA, 19 nt, Homo sapiens
  misc_RNA (1)...(19): siRNA sense strand
guucaacgucuaugagaaa

SEQ ID NO: 1069799 - RNA, 19 nt, Homo sapiens
  misc_RNA (1)...(19): siRNA sense strand
aaagggaccacaucaguga

SEQ ID NO: 1069800 - RNA, 19 nt, Homo sapiens
  misc_RNA (1)...(19): siRNA sense strand
acaaagaccgggacaagga

SEQ ID NO: 1069801 - RNA, 19 nt, Homo sapiens
  misc_RNA (1)...(19): siRNA sense strand
caacgucuaugagaaagag

SEQ ID NO: 1069802 - RNA, 19 nt, Homo sapiens
  misc_RNA (1)...(19): siRNA sense strand
ggcugcagcuaaggaguua

SEQ ID NO: 1069803 - RNA, 19 nt, Homo sapiens
  misc_RNA (1)...(19): siRNA sense strand
caaagaaguagaugacaag

SEQ ID NO: 1069804 - RNA, 19 nt, Homo sapiens
  misc_RNA (1)...(19): siRNA sense strand
ugacuacucuugguguuuc

SEQ ID NO: 1069805 - RNA, 19 nt, Homo sapiens
  misc_RNA (1)...(19): siRNA sense strand
gagaaagagcacaauaaag

SEQ ID NO: 1069806 - RNA, 19 nt, Homo sapiens
  misc_RNA (1)...(19): siRNA sense strand
gaaagacagacguagaucu

SEQ ID NO: 1069807 - RNA, 19 nt, Homo sapiens
  misc_RNA (1)...(19): siRNA sense strand
ggaguagaucccauaauag

SEQ ID NO: 1069808 - RNA, 19 nt, Homo sapiens
  misc_RNA (1)...(19): siRNA sense strand
gacagcugaucaacuacuu

SEQ ID NO: 1069809 - RNA, 19 nt, Homo sapiens
  misc_RNA (1)...(19): siRNA sense strand
gaaaaggaacgggguaaaa

SEQ ID NO: 1069810 - RNA, 19 nt, Homo sapiens
  misc_RNA (1)...(19): siRNA sense strand
aggaaagagugaaagagaa

SEQ ID NO: 1069811 - RNA, 19 nt, Homo sapiens
  misc_RNA (1)...(19): siRNA sense strand
ugcaacacuuggagagaua

SEQ ID NO: 1069812 - RNA, 19 nt, Homo sapiens
  misc_RNA (1)...(19): siRNA sense strand
ucaaggagucguucgcauu

SEQ ID NO: 1069813 - RNA, 19 nt, Homo sapiens
  misc_RNA (1)...(19): siRNA sense strand
gauggcaggugaugagacu

SEQ ID NO: 1069814 - RNA, 19 nt, Homo sapiens
  misc_RNA (1)...(19): siRNA sense strand
guguuucacuuagcaguuu

SEQ ID NO: 1069815 - RNA, 19 nt, Homo sapiens
  misc_RNA (1)...(19): siRNA sense strand
caacauugcaacacuugga

SEQ ID NO: 1069816 - RNA, 19 nt, Homo sapiens
  misc_RNA (1)...(19): siRNA sense strand
gaagaaaaccucucuacca

SEQ ID NO: 1069817 - RNA, 19 nt, Homo sapiens
  misc_RNA (1)...(19): siRNA sense strand
gagcaaagaaguagaugac

SEQ ID NO: 1069818 - RNA, 19 nt, Homo sapiens
  misc_RNA (1)...(19): siRNA sense strand
aaaggaacaggacaaagaa

SEQ ID NO: 1069819 - RNA, 19 nt, Homo sapiens
  misc_RNA (1)...(19): siRNA sense strand
ucuaagagcccacauaaaa

SEQ ID NO: 1069820 - RNA, 19 nt, Homo sapiens
  misc_RNA (1)...(19): siRNA sense strand
uaaggaguuagaagaagua

SEQ ID NO: 1069821 - RNA, 19 nt, Homo sapiens
  misc_RNA (1)...(19): siRNA sense strand
gaccacaucagugaaagaa

SEQ ID NO: 1069822 - RNA, 19 nt, Homo sapiens
  misc_RNA (1)...(19): siRNA sense strand
uaggagaacgguuuauguu

SEQ ID NO: 1069823 - RNA, 19 nt, Homo sapiens
  misc_RNA (1)...(19): siRNA sense strand
agacagaaagacagacgua

SEQ ID NO: 1069824 - RNA, 19 nt, Homo sapiens
  misc_RNA (1)...(19): siRNA sense strand
uuaauggaguuauguuugg

SEQ ID NO: 1069825 - RNA, 19 nt, Homo sapiens
  misc_RNA (1)...(19): siRNA sense strand
gcacuagaccccaacauug

SEQ ID NO: 1069826 - RNA, 19 nt, Homo sapiens
  misc_RNA (1)...(19): siRNA sense strand
gaacgguuuauguuggaaa

SEQ ID NO: 1069827 - RNA, 19 nt, Homo sapiens
  misc_RNA (1)...(19): siRNA sense strand
cccaggagcagaaauaaga

SEQ ID NO: 1069828 - RNA, 19 nt, Homo sapiens
  misc_RNA (1)...(19): siRNA sense strand
agaaggaucgagacaaaga

SEQ ID NO: 1069829 - RNA, 19 nt, Homo sapiens
  misc_RNA (1)...(19): siRNA sense strand
caaggagucguucgcauuc

SEQ ID NO: 1069830 - RNA, 19 nt, Homo sapiens
  misc_RNA (1)...(19): siRNA sense strand
agacagacguagaucuaag

SEQ ID NO: 1069831 - RNA, 19 nt, Homo sapiens
  misc_RNA (1)...(19): siRNA sense strand
uaucucagcagcuauugaa

SEQ ID NO: 1069832 - RNA, 19 nt, Homo sapiens
  misc_RNA (1)...(19): siRNA sense strand
ccaacaaugcaauaguaaa

SEQ ID NO: 1069833 - RNA, 19 nt, Homo sapiens
  misc_RNA (1)...(19): siRNA sense strand
gcaccaaggacugaggaaa

SEQ ID NO: 1069834 - RNA, 19 nt, Homo sapiens
  misc_RNA (1)...(19): siRNA sense strand
uacaaugcaucgcgaagau

SEQ ID NO: 1069835 - RNA, 19 nt, Homo sapiens
  misc_RNA (1)...(19): siRNA sense strand
ccacagccaccacuuaugg

SEQ ID NO: 1069836 - RNA, 19 nt, Homo sapiens
  misc_RNA (1)...(19): siRNA sense strand
cagaaagacagacguagau

SEQ ID NO: 1069837 - RNA, 19 nt, Homo sapiens
  misc_RNA (1)...(19): siRNA sense strand
gaaguaaugaagcgaguac

SEQ ID NO: 1069838 - RNA, 19 nt, Homo sapiens
  misc_RNA (1)...(19): siRNA sense strand
ggagacaggccacugaaaa

SEQ ID NO: 1069839 - RNA, 19 nt, Homo sapiens
  misc_RNA (1)...(19): siRNA sense strand
ggugcaggauugcuuccaa

SEQ ID NO: 1069840 - RNA, 19 nt, Homo sapiens
  misc_RNA (1)...(19): siRNA sense strand
gcacaauaaagaaccagau

SEQ ID NO: 1069841 - RNA, 19 nt, Homo sapiens
  misc_RNA (1)...(19): siRNA sense strand
aaagaaagggaccacauca

SEQ ID NO: 1069842 - RNA, 19 nt, Homo sapiens
  misc_RNA (1)...(19): siRNA sense strand
caaagaccgggacaaggaa

SEQ ID NO: 1069843 - RNA, 19 nt, Homo sapiens
  misc_RNA (1)...(19): siRNA sense strand
aaacaaagaccgggacaag

SEQ ID NO: 1069844 - RNA, 19 nt, Homo sapiens
  misc_RNA (1)...(19): siRNA sense strand
gcgaggaagaggaggauua

SEQ ID NO: 1069845 - RNA, 19 nt, Homo sapiens
  misc_RNA (1)...(19): siRNA sense strand
gagcugugagggugacaua

SEQ ID NO: 1069846 - RNA, 19 nt, Homo sapiens
  misc_RNA (1)...(19): siRNA sense strand
ggagacagagggcgaggaa

SEQ ID NO: 1069847 - RNA, 19 nt, Homo sapiens
  misc_RNA (1)...(19): siRNA sense strand
ggaggagggugaggagaca

SEQ ID NO: 1069848 - RNA, 19 nt, Homo sapiens
  misc_RNA (1)...(19): siRNA sense strand
gccgggacgugcugcauau

SEQ ID NO: 1069849 - RNA, 19 nt, Homo sapiens
  misc_RNA (1)...(19): siRNA sense strand
agacagagggcgaggaaga

SEQ ID NO: 1069850 - RNA, 19 nt, Homo sapiens
  misc_RNA (1)...(19): siRNA sense strand
ccaaagaguccagggaugu

SEQ ID NO: 1069851 - RNA, 19 nt, Homo sapiens
  misc_RNA (1)...(19): siRNA sense strand
gcugugagggugacauaug

SEQ ID NO: 1069852 - RNA, 19 nt, Homo sapiens
  misc_RNA (1)...(19): siRNA sense strand
cgugugacauguccaaguc

SEQ ID NO: 1069853 - RNA, 19 nt, Homo sapiens
  misc_RNA (1)...(19): siRNA sense strand
cagucgcccuguccaaaga

SEQ ID NO: 1069854 - RNA, 19 nt, Homo sapiens
  misc_RNA (1)...(19): siRNA sense strand
cuccugagcugcagcaucu

SEQ ID NO: 1069855 - RNA, 19 nt, Homo sapiens
  misc_RNA (1)...(19): siRNA sense strand
ggauucuucuacccaugga

SEQ ID NO: 1069856 - RNA, 19 nt, Homo sapiens
  misc_RNA (1)...(19): siRNA sense strand
gcaccgagggaccaagaag

SEQ ID NO: 1069857 - RNA, 19 nt, Homo sapiens
  misc_RNA (1)...(19): siRNA sense strand
gccagucgcccuguccaaa

SEQ ID NO: 1069858 - RNA, 19 nt, Homo sapiens
  misc_RNA (1)...(19): siRNA sense strand
gggcucggcagacggaaau

SEQ ID NO: 1069859 - RNA, 19 nt, Homo sapiens
  misc_RNA (1)...(19): siRNA sense strand
caaagaguccagggaugug

SEQ ID NO: 1069860 - RNA, 19 nt, Homo sapiens
  misc_RNA (1)...(19): siRNA sense strand
ggaccagucugaagauaag

SEQ ID NO: 1069861 - RNA, 19 nt, Homo sapiens
  misc_RNA (1)...(19): siRNA sense strand
gaggaccagucugaagaua

SEQ ID NO: 1069862 - RNA, 19 nt, Homo sapiens
  misc_RNA (1)...(19): siRNA sense strand
ggacaaggaccaccuguac

SEQ ID NO: 1069863 - RNA, 19 nt, Homo sapiens
  misc_RNA (1)...(19): siRNA sense strand
ggagcuggauagacugaug

SEQ ID NO: 1069864 - RNA, 19 nt, Homo sapiens
  misc_RNA (1)...(19): siRNA sense strand
gaacuuaaugccacucagu

SEQ ID NO: 1069865 - RNA, 19 nt, Homo sapiens
  misc_RNA (1)...(19): siRNA sense strand
gagcgcuucucgccaagau

SEQ ID NO: 1069866 - RNA, 19 nt, Homo sapiens
  misc_RNA (1)...(19): siRNA sense strand
agaaggaggaccagucuga

SEQ ID NO: 1069867 - RNA, 19 nt, Homo sapiens
  misc_RNA (1)...(19): siRNA sense strand
gaaggaggaccagucugaa

SEQ ID NO: 1069868 - RNA, 19 nt, Homo sapiens
  misc_RNA (1)...(19): siRNA sense strand
gcagaaggaggaccagucu

SEQ ID NO: 1069869 - RNA, 19 nt, Homo sapiens
  misc_RNA (1)...(19): siRNA sense strand
cucuguggcuccugcaaua

SEQ ID NO: 1069870 - RNA, 19 nt, Homo sapiens
  misc_RNA (1)...(19): siRNA sense strand
gccacucaguucaacauca

SEQ ID NO: 1069871 - RNA, 19 nt, Homo sapiens
  misc_RNA (1)...(19): siRNA sense strand
gggacaaggaccaccugua

SEQ ID NO: 1069872 - RNA, 19 nt, Homo sapiens
  misc_RNA (1)...(19): siRNA sense strand
caagauguggcuucugcaa

SEQ ID NO: 1069873 - RNA, 19 nt, Homo sapiens
  misc_RNA (1)...(19): siRNA sense strand
ugagcuagaucgguugcuu

SEQ ID NO: 1069874 - RNA, 19 nt, Homo sapiens
  misc_RNA (1)...(19): siRNA sense strand
gggacuuccugcagcuguu

SEQ ID NO: 1069875 - RNA, 19 nt, Homo sapiens
  misc_RNA (1)...(19): siRNA sense strand
ggaggaccagucugaagau

SEQ ID NO: 1069876 - RNA, 19 nt, Homo sapiens
  misc_RNA (1)...(19): siRNA sense strand
ugucucaguucccaucuag

SEQ ID NO: 1069877 - RNA, 19 nt, Homo sapiens
  misc_RNA (1)...(19): siRNA sense strand
gcgcuucucgccaagaugu

SEQ ID NO: 1069878 - RNA, 19 nt, Homo sapiens
  misc_RNA (1)...(19): siRNA sense strand
ugaaaucaugucucaguuc

SEQ ID NO: 1069879 - RNA, 19 nt, Homo sapiens
  misc_RNA (1)...(19): siRNA sense strand
ggcaagggcagccuagaca

SEQ ID NO: 1069880 - RNA, 19 nt, Homo sapiens
  misc_RNA (1)...(19): siRNA sense strand
ccacucaguucaacaucac

SEQ ID NO: 1069881 - RNA, 19 nt, Homo sapiens
  misc_RNA (1)...(19): siRNA sense strand
gacaaggaccaccuguaca

SEQ ID NO: 1069882 - RNA, 19 nt, Homo sapiens
  misc_RNA (1)...(19): siRNA sense strand
cagcccauccgacacaaga

SEQ ID NO: 1069883 - RNA, 19 nt, Homo sapiens
  misc_RNA (1)...(19): siRNA sense strand
uggccucacucucugacuu

SEQ ID NO: 1069884 - RNA, 19 nt, Homo sapiens
  misc_RNA (1)...(19): siRNA sense strand
ucuggcacccggacuguuu

SEQ ID NO: 1069885 - RNA, 19 nt, Homo sapiens
  misc_RNA (1)...(19): siRNA sense strand
cuucggagaugaggguuuc

SEQ ID NO: 1069886 - RNA, 19 nt, Homo sapiens
  misc_RNA (1)...(19): siRNA sense strand
gcauuucugcugcgucagu

SEQ ID NO: 1069887 - RNA, 19 nt, Homo sapiens
  misc_RNA (1)...(19): siRNA sense strand
ccagucugaagauaagaaa

SEQ ID NO: 1069888 - RNA, 19 nt, Homo sapiens
  misc_RNA (1)...(19): siRNA sense strand
acacagagaucuccuuuga

SEQ ID NO: 1069889 - RNA, 19 nt, Homo sapiens
  misc_RNA (1)...(19): siRNA sense strand
gcacauugaccaccacauu

SEQ ID NO: 1069890 - RNA, 19 nt, Homo sapiens
  misc_RNA (1)...(19): siRNA sense strand
ccaaauuuguccucaucaa

SEQ ID NO: 1069891 - RNA, 19 nt, Homo sapiens
  misc_RNA (1)...(19): siRNA sense strand
gcccagcacuccuccaugu

SEQ ID NO: 1069892 - RNA, 19 nt, Homo sapiens
  misc_RNA (1)...(19): siRNA sense strand
acucuggacugcccaaauu

SEQ ID NO: 1069893 - RNA, 19 nt, Homo sapiens
  misc_RNA (1)...(19): siRNA sense strand
aagaggaggcuguguauga

SEQ ID NO: 1069894 - RNA, 19 nt, Homo sapiens
  misc_RNA (1)...(19): siRNA sense strand
gaaggcaacagcaaugaca

SEQ ID NO: 1069895 - RNA, 19 nt, Homo sapiens
  misc_RNA (1)...(19): siRNA sense strand
cagaagaggaggcugugua

SEQ ID NO: 1069896 - RNA, 19 nt, Homo sapiens
  misc_RNA (1)...(19): siRNA sense strand
gcccaaauuuguccucauc

SEQ ID NO: 1069897 - RNA, 19 nt, Homo sapiens
  misc_RNA (1)...(19): siRNA sense strand
aagaagugguuucaaggaa

SEQ ID NO: 1069898 - RNA, 19 nt, Homo sapiens
  misc_RNA (1)...(19): siRNA sense strand
ccaaugccgugucugagau

SEQ ID NO: 1069899 - RNA, 19 nt, Homo sapiens
  misc_RNA (1)...(19): siRNA sense strand
cgacacagagaucuccuuu

SEQ ID NO: 1069900 - RNA, 19 nt, Homo sapiens
  misc_RNA (1)...(19): siRNA sense strand
gcgagggcgugaacgaugu

SEQ ID NO: 1069901 - RNA, 19 nt, Homo sapiens
  misc_RNA (1)...(19): siRNA sense strand
caagaagugguuucaagga

SEQ ID NO: 1069902 - RNA, 19 nt, Homo sapiens
  misc_RNA (1)...(19): siRNA sense strand
gcauguucccugccaacua

SEQ ID NO: 1069903 - RNA, 19 nt, Homo sapiens
  misc_RNA (1)...(19): siRNA sense strand
caacuacagcuuucacaag

SEQ ID NO: 1069904 - RNA, 19 nt, Homo sapiens
  misc_RNA (1)...(19): siRNA sense strand
cgacugggcucucuuuacc

SEQ ID NO: 1069905 - RNA, 19 nt, Homo sapiens
  misc_RNA (1)...(19): siRNA sense strand
gggcucucuuuaccuauga

SEQ ID NO: 1069906 - RNA, 19 nt, Homo sapiens
  misc_RNA (1)...(19): siRNA sense strand
cauguucccugccaacuac

SEQ ID NO: 1069907 - RNA, 19 nt, Homo sapiens
  misc_RNA (1)...(19): siRNA sense strand
cagagaaggaggaggagaa

SEQ ID NO: 1069908 - RNA, 19 nt, Homo sapiens
  misc_RNA (1)...(19): siRNA sense strand
acugggcucucuuuaccua

SEQ ID NO: 1069909 - RNA, 19 nt, Homo sapiens
  misc_RNA (1)...(19): siRNA sense strand
gaccgacugggcucucuuu

SEQ ID NO: 1069910 - RNA, 19 nt, Homo sapiens
  misc_RNA (1)...(19): siRNA sense strand
gggcccaugugaccaucaa

SEQ ID NO: 1069911 - RNA, 19 nt, Homo sapiens
  misc_RNA (1)...(19): siRNA sense strand
gggagcagcagcaagaagu

SEQ ID NO: 1069912 - RNA, 19 nt, Homo sapiens
  misc_RNA (1)...(19): siRNA sense strand
caacuacguggagcucauu

SEQ ID NO: 1069913 - RNA, 19 nt, Homo sapiens
  misc_RNA (1)...(19): siRNA sense strand
ccaacuacguggagcucau

SEQ ID NO: 1069914 - RNA, 19 nt, Homo sapiens
  misc_RNA (1)...(19): siRNA sense strand
cgagggagauuuucaagca

SEQ ID NO: 1069915 - RNA, 19 nt, Homo sapiens
  misc_RNA (1)...(19): siRNA sense strand
cugagugcaucauggagaa

SEQ ID NO: 1069916 - RNA, 19 nt, Homo sapiens
  misc_RNA (1)...(19): siRNA sense strand
gaagaggaggcuguguaug

SEQ ID NO: 1069917 - RNA, 19 nt, Homo sapiens
  misc_RNA (1)...(19): siRNA sense strand
agaagaggaggcuguguau

SEQ ID NO: 1069918 - RNA, 19 nt, Homo sapiens
  misc_RNA (1)...(19): siRNA sense strand
ccaaccagagacccacuuu

SEQ ID NO: 1069919 - RNA, 19 nt, Homo sapiens
  misc_RNA (1)...(19): siRNA sense strand
gcagcaagaagugguuuca

SEQ ID NO: 1069920 - RNA, 19 nt, Homo sapiens
  misc_RNA (1)...(19): siRNA sense strand
ugccgugucugagauuaaa

SEQ ID NO: 1069921 - RNA, 19 nt, Homo sapiens
  misc_RNA (1)...(19): siRNA sense strand
cagagcaggagaccuucua

SEQ ID NO: 1069922 - RNA, 19 nt, Homo sapiens
  misc_RNA (1)...(19): siRNA sense strand
uuaaaaggguugguaaaga

SEQ ID NO: 1069923 - RNA, 19 nt, Homo sapiens
  misc_RNA (1)...(19): siRNA sense strand
ggugccaacuacagcuuuc

SEQ ID NO: 1069924 - RNA, 19 nt, Homo sapiens
  misc_RNA (1)...(19): siRNA sense strand
cccgugcccuguacgacua

SEQ ID NO: 1069925 - RNA, 19 nt, Homo sapiens
  misc_RNA (1)...(19): siRNA sense strand
agcaagaagugguuucaag

SEQ ID NO: 1069926 - RNA, 19 nt, Homo sapiens
  misc_RNA (1)...(19): siRNA sense strand
ccaacuacagcuuucacaa

SEQ ID NO: 1069927 - RNA, 19 nt, Homo sapiens
  misc_RNA (1)...(19): siRNA sense strand
caacagcgggaaggugaug

SEQ ID NO: 1069928 - RNA, 19 nt, Homo sapiens
  misc_RNA (1)...(19): siRNA sense strand
uaugaaggcaacagcaaug

SEQ ID NO: 1069929 - RNA, 19 nt, Homo sapiens
  misc_RNA (1)...(19): siRNA sense strand
cgugggagcagcagcaaga

SEQ ID NO: 1069930 - RNA, 19 nt, Homo sapiens
  misc_RNA (1)...(19): siRNA sense strand
uaaaaggguugguaaagac

SEQ ID NO: 1069931 - RNA, 19 nt, Homo sapiens
  misc_RNA (1)...(19): siRNA sense strand
cagcucacccaaccagaga

SEQ ID NO: 1069932 - RNA, 19 nt, Homo sapiens
  misc_RNA (1)...(19): siRNA sense strand
caaccagagacccacuuug

SEQ ID NO: 1069933 - RNA, 19 nt, Homo sapiens
  misc_RNA (1)...(19): siRNA sense strand
caaauuuguccucaucaac

SEQ ID NO: 1069934 - RNA, 19 nt, Homo sapiens
  misc_RNA (1)...(19): siRNA sense strand
gcagcagcaagaagugguu

SEQ ID NO: 1069935 - RNA, 19 nt, Homo sapiens
  misc_RNA (1)...(19): siRNA sense strand
agaggaggcuguguaugag

SEQ ID NO: 1069936 - RNA, 19 nt, Homo sapiens
  misc_RNA (1)...(19): siRNA sense strand
ggagcagcagcaagaagug

SEQ ID NO: 1069937 - RNA, 19 nt, Homo sapiens
  misc_RNA (1)...(19): siRNA sense strand
ggaacugcaucucuucuua

SEQ ID NO: 1069938 - RNA, 19 nt, Homo sapiens
  misc_RNA (1)...(19): siRNA sense strand
ucaaggaggugaugucaga

SEQ ID NO: 1069939 - RNA, 19 nt, Homo sapiens
  misc_RNA (1)...(19): siRNA sense strand
guacuuugcucacaucauc

SEQ ID NO: 1069940 - RNA, 19 nt, Homo sapiens
  misc_RNA (1)...(19): siRNA sense strand
caagcaagauuuccugaag

SEQ ID NO: 1069941 - RNA, 19 nt, Homo sapiens
  misc_RNA (1)...(19): siRNA sense strand
gaaguacuuugcucacauc

SEQ ID NO: 1069942 - RNA, 19 nt, Homo sapiens
  misc_RNA (1)...(19): siRNA sense strand
ggaaguacuuugcucacau

SEQ ID NO: 1069943 - RNA, 19 nt, Homo sapiens
  misc_RNA (1)...(19): siRNA sense strand
gagagcaaauaccagaaug

SEQ ID NO: 1069944 - RNA, 19 nt, Homo sapiens
  misc_RNA (1)...(19): siRNA sense strand
ccaaggagccgcugaugga

SEQ ID NO: 1069945 - RNA, 19 nt, Homo sapiens
  misc_RNA (1)...(19): siRNA sense strand
gaaagugccacaccgagau

SEQ ID NO: 1069946 - RNA, 19 nt, Homo sapiens
  misc_RNA (1)...(19): siRNA sense strand
caaguuuaaugccaaauac

SEQ ID NO: 1069947 - RNA, 19 nt, Homo sapiens
  misc_RNA (1)...(19): siRNA sense strand
gagcagggccgugaacaga

SEQ ID NO: 1069948 - RNA, 19 nt, Homo sapiens
  misc_RNA (1)...(19): siRNA sense strand
ugacaaguuuaaugccaaa

SEQ ID NO: 1069949 - RNA, 19 nt, Homo sapiens
  misc_RNA (1)...(19): siRNA sense strand
gaacacuuuccaucgcuuu

SEQ ID NO: 1069950 - RNA, 19 nt, Homo sapiens
  misc_RNA (1)...(19): siRNA sense strand
gugcugauggcccugauua

SEQ ID NO: 1069951 - RNA, 19 nt, Homo sapiens
  misc_RNA (1)...(19): siRNA sense strand
gcucagcuccugcgauaug

SEQ ID NO: 1069952 - RNA, 19 nt, Homo sapiens
  misc_RNA (1)...(19): siRNA sense strand
uagagcacguggaugguuu

SEQ ID NO: 1069953 - RNA, 19 nt, Homo sapiens
  misc_RNA (1)...(19): siRNA sense strand
gaacugcaucucuucuuag

SEQ ID NO: 1069954 - RNA, 19 nt, Homo sapiens
  misc_RNA (1)...(19): siRNA sense strand
ggagagcaaauaccagaau

SEQ ID NO: 1069955 - RNA, 19 nt, Homo sapiens
  misc_RNA (1)...(19): siRNA sense strand
ggacagugacucggaccua

SEQ ID NO: 1069956 - RNA, 19 nt, Homo sapiens
  misc_RNA (1)...(19): siRNA sense strand
gaggacaacccacccuaug

SEQ ID NO: 1069957 - RNA, 19 nt, Homo sapiens
  misc_RNA (1)...(19): siRNA sense strand
caugcuggcugagaacauu

SEQ ID NO: 1069958 - RNA, 19 nt, Homo sapiens
  misc_RNA (1)...(19): siRNA sense strand
aagcaagauuuccugaaga

SEQ ID NO: 1069959 - RNA, 19 nt, Homo sapiens
  misc_RNA (1)...(19): siRNA sense strand
acaccgagauuucuacaac

SEQ ID NO: 1069960 - RNA, 19 nt, Homo sapiens
  misc_RNA (1)...(19): siRNA sense strand
gcaacagcgugcucaugag

SEQ ID NO: 1069961 - RNA, 19 nt, Homo sapiens
  misc_RNA (1)...(19): siRNA sense strand
gggaaguacuuugcucaca

SEQ ID NO: 1069962 - RNA, 19 nt, Homo sapiens
  misc_RNA (1)...(19): siRNA sense strand
ccauaaagucauucugcua

SEQ ID NO: 1069963 - RNA, 19 nt, Homo sapiens
  misc_RNA (1)...(19): siRNA sense strand
ugcaugugcuacucaauga

SEQ ID NO: 1069964 - RNA, 19 nt, Homo sapiens
  misc_RNA (1)...(19): siRNA sense strand
uccgagagaucuucaucaa

SEQ ID NO: 1069965 - RNA, 19 nt, Homo sapiens
  misc_RNA (1)...(19): siRNA sense strand
ugacgucaaugugcugaug

SEQ ID NO: 1069966 - RNA, 19 nt, Homo sapiens
  misc_RNA (1)...(19): siRNA sense strand
ggaggacaacccacccuau

SEQ ID NO: 1069967 - RNA, 19 nt, Homo sapiens
  misc_RNA (1)...(19): siRNA sense strand
ccaucgcuuugacaaguuu

SEQ ID NO: 1069968 - RNA, 19 nt, Homo sapiens
  misc_RNA (1)...(19): siRNA sense strand
gcuccaaguuccagaugca

SEQ ID NO: 1069969 - RNA, 19 nt, Homo sapiens
  misc_RNA (1)...(19): siRNA sense strand
gcaugaaccagaagcaucu

SEQ ID NO: 1069970 - RNA, 19 nt, Homo sapiens
  misc_RNA (1)...(19): siRNA sense strand
cuacaccuuugccaacaug

SEQ ID NO: 1069971 - RNA, 19 nt, Homo sapiens
  misc_RNA (1)...(19): siRNA sense strand
gagcaaauaccagaaugca

SEQ ID NO: 1069972 - RNA, 19 nt, Homo sapiens
  misc_RNA (1)...(19): siRNA sense strand
ccucagcuaucaccggaau

SEQ ID NO: 1069973 - RNA, 19 nt, Homo sapiens
  misc_RNA (1)...(19): siRNA sense strand
caggguaucugggaaguac

SEQ ID NO: 1069974 - RNA, 19 nt, Homo sapiens
  misc_RNA (1)...(19): siRNA sense strand
ggaccuacagcucuacaag

SEQ ID NO: 1069975 - RNA, 19 nt, Homo sapiens
  misc_RNA (1)...(19): siRNA sense strand
cgcaacagcgugcucauga

SEQ ID NO: 1069976 - RNA, 19 nt, Homo sapiens
  misc_RNA (1)...(19): siRNA sense strand
gaccugcgcacgucuaugg

SEQ ID NO: 1069977 - RNA, 19 nt, Homo sapiens
  misc_RNA (1)...(19): siRNA sense strand
uggagcagcacccguauga

SEQ ID NO: 1069978 - RNA, 19 nt, Homo sapiens
  misc_RNA (1)...(19): siRNA sense strand
ggagcgugaugugcuggaa

SEQ ID NO: 1069979 - RNA, 19 nt, Homo sapiens
  misc_RNA (1)...(19): siRNA sense strand
acucggaccuacagcucua

SEQ ID NO: 1069980 - RNA, 19 nt, Homo sapiens
  misc_RNA (1)...(19): siRNA sense strand
gugagaugcuggagaccau

SEQ ID NO: 1069981 - RNA, 19 nt, Homo sapiens
  misc_RNA (1)...(19): siRNA sense strand
gcugauggcccugauuauc

SEQ ID NO: 1069982 - RNA, 19 nt, Homo sapiens
  misc_RNA (1)...(19): siRNA sense strand
cugaugaucccuugcaguu

SEQ ID NO: 1069983 - RNA, 19 nt, Homo sapiens
  misc_RNA (1)...(19): siRNA sense strand
gaugaguccaagccugaaa

SEQ ID NO: 1069984 - RNA, 19 nt, Homo sapiens
  misc_RNA (1)...(19): siRNA sense strand
gaucagccaggaugucaag

SEQ ID NO: 1069985 - RNA, 19 nt, Homo sapiens
  misc_RNA (1)...(19): siRNA sense strand
gcacccguaugagcacugu

SEQ ID NO: 1069986 - RNA, 19 nt, Homo sapiens
  misc_RNA (1)...(19): siRNA sense strand
guaccugagcuccaaguuc

SEQ ID NO: 1069987 - RNA, 19 nt, Homo sapiens
  misc_RNA (1)...(19): siRNA sense strand
agcugcggcucuccauuua

SEQ ID NO: 1069988 - RNA, 19 nt, Homo sapiens
  misc_RNA (1)...(19): siRNA sense strand
cgcaggcaguccagaguga

SEQ ID NO: 1069989 - RNA, 19 nt, Homo sapiens
  misc_RNA (1)...(19): siRNA sense strand
cggcuucucgcacaaggua

SEQ ID NO: 1069990 - RNA, 19 nt, Homo sapiens
  misc_RNA (1)...(19): siRNA sense strand
accuacagcucuacaagga

SEQ ID NO: 1069991 - RNA, 19 nt, Homo sapiens
  misc_RNA (1)...(19): siRNA sense strand
cguccugcaugaaccagaa

SEQ ID NO: 1069992 - RNA, 19 nt, Homo sapiens
  misc_RNA (1)...(19): siRNA sense strand
ccagaugcaugugcuacuc

SEQ ID NO: 1069993 - RNA, 19 nt, Homo sapiens
  misc_RNA (1)...(19): siRNA sense strand
ccaagcaagauuuccugaa

SEQ ID NO: 1069994 - RNA, 19 nt, Homo sapiens
  misc_RNA (1)...(19): siRNA sense strand
ccaaguuccagaugcaugu

SEQ ID NO: 1069995 - RNA, 19 nt, Homo sapiens
  misc_RNA (1)...(19): siRNA sense strand
ugucuccgcucagcaacaa

SEQ ID NO: 1069996 - RNA, 19 nt, Homo sapiens
  misc_RNA (1)...(19): siRNA sense strand
uugcucacaucaucaagga

SEQ ID NO: 1069997 - RNA, 19 nt, Homo sapiens
  misc_RNA (1)...(19): siRNA sense strand
uggagacccggaccuauga

SEQ ID NO: 1069998 - RNA, 19 nt, Homo sapiens
  misc_RNA (1)...(19): siRNA sense strand
gcacguggaugguuuugac

SEQ ID NO: 1069999 - RNA, 19 nt, Homo sapiens
  misc_RNA (1)...(19): siRNA sense strand
caucugcugcgcuucauca

SEQ ID NO: 1070000 - RNA, 19 nt, Homo sapiens
  misc_RNA (1)...(19): siRNA sense strand
caccgagauuucuacaaca

SEQ ID NO: 1070001 - RNA, 19 nt, Homo sapiens
  misc_RNA (1)...(19): siRNA sense strand
cagcaacaacagccucuuc

SEQ ID NO: 1070002 - RNA, 19 nt, Homo sapiens
  misc_RNA (1)...(19): siRNA sense strand
aacugcaucucuucuuaga

SEQ ID NO: 1070003 - RNA, 19 nt, Homo sapiens
  misc_RNA (1)...(19): siRNA sense strand
aggagaugcuggagaacau

SEQ ID NO: 1070004 - RNA, 19 nt, Homo sapiens
  misc_RNA (1)...(19): siRNA sense strand
gggaacccgacgagcauug

SEQ ID NO: 1070005 - RNA, 19 nt, Homo sapiens
  misc_RNA (1)...(19): siRNA sense strand
gagaugcuggagaccauuc

SEQ ID NO: 1070006 - RNA, 19 nt, Homo sapiens
  misc_RNA (1)...(19): siRNA sense strand
gucuauggauggcaaaugc

SEQ ID NO: 1070007 - RNA, 19 nt, Homo sapiens
  misc_RNA (1)...(19): siRNA sense strand
gagcuccaaguuccagaug

SEQ ID NO: 1070008 - RNA, 19 nt, Homo sapiens
  misc_RNA (1)...(19): siRNA sense strand
cagagguggagcugccaua

SEQ ID NO: 1070009 - RNA, 19 nt, Homo sapiens
  misc_RNA (1)...(19): siRNA sense strand
gcuccugcgauauguguga

SEQ ID NO: 1070010 - RNA, 19 nt, Homo sapiens
  misc_RNA (1)...(19): siRNA sense strand
ccacugaugaucccuugca

SEQ ID NO: 1070011 - RNA, 19 nt, Homo sapiens
  misc_RNA (1)...(19): siRNA sense strand
ggagccagacauccugcuu

SEQ ID NO: 1070012 - RNA, 19 nt, Homo sapiens
  misc_RNA (1)...(19): siRNA sense strand
aaagugccacaccgagauu

SEQ ID NO: 1070013 - RNA, 19 nt, Homo sapiens
  misc_RNA (1)...(19): siRNA sense strand
ggaacugcaucucuucuua

SEQ ID NO: 1070014 - RNA, 19 nt, Homo sapiens
  misc_RNA (1)...(19): siRNA sense strand
ucaaggaggugaugucaga

SEQ ID NO: 1070015 - RNA, 19 nt, Homo sapiens
  misc_RNA (1)...(19): siRNA sense strand
guacuuugcucacaucauc

SEQ ID NO: 1070016 - RNA, 19 nt, Homo sapiens
  misc_RNA (1)...(19): siRNA sense strand
caagcaagauuuccugaag

SEQ ID NO: 1070017 - RNA, 19 nt, Homo sapiens
  misc_RNA (1)...(19): siRNA sense strand
gaaguacuuugcucacauc

SEQ ID NO: 1070018 - RNA, 19 nt, Homo sapiens
  misc_RNA (1)...(19): siRNA sense strand
ggaaguacuuugcucacau

SEQ ID NO: 1070019 - RNA, 19 nt, Homo sapiens
  misc_RNA (1)...(19): siRNA sense strand
gagagcaaauaccagaaug

SEQ ID NO: 1070020 - RNA, 19 nt, Homo sapiens
  misc_RNA (1)...(19): siRNA sense strand
ccaaggagccgcugaugga

SEQ ID NO: 1070021 - RNA, 19 nt, Homo sapiens
  misc_RNA (1)...(19): siRNA sense strand
gaaagugccacaccgagau

SEQ ID NO: 1070022 - RNA, 19 nt, Homo sapiens
  misc_RNA (1)...(19): siRNA sense strand
caaguuuaaugccaaauac

SEQ ID NO: 1070023 - RNA, 19 nt, Homo sapiens
  misc_RNA (1)...(19): siRNA sense strand
gagcagggccgugaacaga

SEQ ID NO: 1070024 - RNA, 19 nt, Homo sapiens
  misc_RNA (1)...(19): siRNA sense strand
ugacaaguuuaaugccaaa

SEQ ID NO: 1070025 - RNA, 19 nt, Homo sapiens
  misc_RNA (1)...(19): siRNA sense strand
gaacacuuuccaucgcuuu

SEQ ID NO: 1070026 - RNA, 19 nt, Homo sapiens
  misc_RNA (1)...(19): siRNA sense strand
gugcugauggcccugauua

SEQ ID NO: 1070027 - RNA, 19 nt, Homo sapiens
  misc_RNA (1)...(19): siRNA sense strand
gcucagcuccugcgauaug

SEQ ID NO: 1070028 - RNA, 19 nt, Homo sapiens
  misc_RNA (1)...(19): siRNA sense strand
uagagcacguggaugguuu

SEQ ID NO: 1070029 - RNA, 19 nt, Homo sapiens
  misc_RNA (1)...(19): siRNA sense strand
gaacugcaucucuucuuag

SEQ ID NO: 1070030 - RNA, 19 nt, Homo sapiens
  misc_RNA (1)...(19): siRNA sense strand
ggagagcaaauaccagaau

SEQ ID NO: 1070031 - RNA, 19 nt, Homo sapiens
  misc_RNA (1)...(19): siRNA sense strand
ggacagugacucggaccua

SEQ ID NO: 1070032 - RNA, 19 nt, Homo sapiens
  misc_RNA (1)...(19): siRNA sense strand
gaggacaacccacccuaug

SEQ ID NO: 1070033 - RNA, 19 nt, Homo sapiens
  misc_RNA (1)...(19): siRNA sense strand
caugcuggcugagaacauu

SEQ ID NO: 1070034 - RNA, 19 nt, Homo sapiens
  misc_RNA (1)...(19): siRNA sense strand
aagcaagauuuccugaaga

SEQ ID NO: 1070035 - RNA, 19 nt, Homo sapiens
  misc_RNA (1)...(19): siRNA sense strand
acaccgagauuucuacaac

SEQ ID NO: 1070036 - RNA, 19 nt, Homo sapiens
  misc_RNA (1)...(19): siRNA sense strand
gcaacagcgugcucaugag

SEQ ID NO: 1070037 - RNA, 19 nt, Homo sapiens
  misc_RNA (1)...(19): siRNA sense strand
gggaaguacuuugcucaca

SEQ ID NO: 1070038 - RNA, 19 nt, Homo sapiens
  misc_RNA (1)...(19): siRNA sense strand
ccauaaagucauucugcua

SEQ ID NO: 1070039 - RNA, 19 nt, Homo sapiens
  misc_RNA (1)...(19): siRNA sense strand
ugcaugugcuacucaauga

SEQ ID NO: 1070040 - RNA, 19 nt, Homo sapiens
  misc_RNA (1)...(19): siRNA sense strand
uccgagagaucuucaucaa

SEQ ID NO: 1070041 - RNA, 19 nt, Homo sapiens
  misc_RNA (1)...(19): siRNA sense strand
ugacgucaaugugcugaug

SEQ ID NO: 1070042 - RNA, 19 nt, Homo sapiens
  misc_RNA (1)...(19): siRNA sense strand
ggaggacaacccacccuau

SEQ ID NO: 1070043 - RNA, 19 nt, Homo sapiens
  misc_RNA (1)...(19): siRNA sense strand
ccaucgcuuugacaaguuu

SEQ ID NO: 1070044 - RNA, 19 nt, Homo sapiens
  misc_RNA (1)...(19): siRNA sense strand
gcuccaaguuccagaugca

SEQ ID NO: 1070045 - RNA, 19 nt, Homo sapiens
  misc_RNA (1)...(19): siRNA sense strand
gcaugaaccagaagcaucu

SEQ ID NO: 1070046 - RNA, 19 nt, Homo sapiens
  misc_RNA (1)...(19): siRNA sense strand
cuacaccuuugccaacaug

SEQ ID NO: 1070047 - RNA, 19 nt, Homo sapiens
  misc_RNA (1)...(19): siRNA sense strand
gagcaaauaccagaaugca

SEQ ID NO: 1070048 - RNA, 19 nt, Homo sapiens
  misc_RNA (1)...(19): siRNA sense strand
ccucagcuaucaccggaau

SEQ ID NO: 1070049 - RNA, 19 nt, Homo sapiens
  misc_RNA (1)...(19): siRNA sense strand
caggguaucugggaaguac

SEQ ID NO: 1070050 - RNA, 19 nt, Homo sapiens
  misc_RNA (1)...(19): siRNA sense strand
ggaccuacagcucuacaag

SEQ ID NO: 1070051 - RNA, 19 nt, Homo sapiens
  misc_RNA (1)...(19): siRNA sense strand
cgcaacagcgugcucauga

SEQ ID NO: 1070052 - RNA, 19 nt, Homo sapiens
  misc_RNA (1)...(19): siRNA sense strand
gaccugcgcacgucuaugg

SEQ ID NO: 1070053 - RNA, 19 nt, Homo sapiens
  misc_RNA (1)...(19): siRNA sense strand
uggagcagcacccguauga

SEQ ID NO: 1070054 - RNA, 19 nt, Homo sapiens
  misc_RNA (1)...(19): siRNA sense strand
ggagcgugaugugcuggaa

SEQ ID NO: 1070055 - RNA, 19 nt, Homo sapiens
  misc_RNA (1)...(19): siRNA sense strand
acucggaccuacagcucua

SEQ ID NO: 1070056 - RNA, 19 nt, Homo sapiens
  misc_RNA (1)...(19): siRNA sense strand
gugagaugcuggagaccau

SEQ ID NO: 1070057 - RNA, 19 nt, Homo sapiens
  misc_RNA (1)...(19): siRNA sense strand
gcugauggcccugauuauc

SEQ ID NO: 1070058 - RNA, 19 nt, Homo sapiens
  misc_RNA (1)...(19): siRNA sense strand
cugaugaucccuugcaguu

SEQ ID NO: 1070059 - RNA, 19 nt, Homo sapiens
  misc_RNA (1)...(19): siRNA sense strand
gaugaguccaagccugaaa

SEQ ID NO: 1070060 - RNA, 19 nt, Homo sapiens
  misc_RNA (1)...(19): siRNA sense strand
gaucagccaggaugucaag

SEQ ID NO: 1070061 - RNA, 19 nt, Homo sapiens
  misc_RNA (1)...(19): siRNA sense strand
gcacccguaugagcacugu

SEQ ID NO: 1070062 - RNA, 19 nt, Homo sapiens
  misc_RNA (1)...(19): siRNA sense strand
guaccugagcuccaaguuc

SEQ ID NO: 1070063 - RNA, 19 nt, Homo sapiens
  misc_RNA (1)...(19): siRNA sense strand
agcugcggcucuccauuua

SEQ ID NO: 1070064 - RNA, 19 nt, Homo sapiens
  misc_RNA (1)...(19): siRNA sense strand
cgcaggcaguccagaguga

SEQ ID NO: 1070065 - RNA, 19 nt, Homo sapiens
  misc_RNA (1)...(19): siRNA sense strand
cggcuucucgcacaaggua

SEQ ID NO: 1070066 - RNA, 19 nt, Homo sapiens
  misc_RNA (1)...(19): siRNA sense strand
accuacagcucuacaagga

SEQ ID NO: 1070067 - RNA, 19 nt, Homo sapiens
  misc_RNA (1)...(19): siRNA sense strand
cguccugcaugaaccagaa

SEQ ID NO: 1070068 - RNA, 19 nt, Homo sapiens
  misc_RNA (1)...(19): siRNA sense strand
ccagaugcaugugcuacuc

SEQ ID NO: 1070069 - RNA, 19 nt, Homo sapiens
  misc_RNA (1)...(19): siRNA sense strand
ccaagcaagauuuccugaa

SEQ ID NO: 1070070 - RNA, 19 nt, Homo sapiens
  misc_RNA (1)...(19): siRNA sense strand
ccaaguuccagaugcaugu

SEQ ID NO: 1070071 - RNA, 19 nt, Homo sapiens
  misc_RNA (1)...(19): siRNA sense strand
ugucuccgcucagcaacaa

SEQ ID NO: 1070072 - RNA, 19 nt, Homo sapiens
  misc_RNA (1)...(19): siRNA sense strand
uugcucacaucaucaagga

SEQ ID NO: 1070073 - RNA, 19 nt, Homo sapiens
  misc_RNA (1)...(19): siRNA sense strand
uggagacccggaccuauga

SEQ ID NO: 1070074 - RNA, 19 nt, Homo sapiens
  misc_RNA (1)...(19): siRNA sense strand
gcacguggaugguuuugac

SEQ ID NO: 1070075 - RNA, 19 nt, Homo sapiens
  misc_RNA (1)...(19): siRNA sense strand
caucugcugcgcuucauca

SEQ ID NO: 1070076 - RNA, 19 nt, Homo sapiens
  misc_RNA (1)...(19): siRNA sense strand
caccgagauuucuacaaca

SEQ ID NO: 1070077 - RNA, 19 nt, Homo sapiens
  misc_RNA (1)...(19): siRNA sense strand
cagcaacaacagccucuuc

SEQ ID NO: 1070078 - RNA, 19 nt, Homo sapiens
  misc_RNA (1)...(19): siRNA sense strand
aacugcaucucuucuuaga

SEQ ID NO: 1070079 - RNA, 19 nt, Homo sapiens
  misc_RNA (1)...(19): siRNA sense strand
aggagaugcuggagaacau

SEQ ID NO: 1070080 - RNA, 19 nt, Homo sapiens
  misc_RNA (1)...(19): siRNA sense strand
gggaacccgacgagcauug

SEQ ID NO: 1070081 - RNA, 19 nt, Homo sapiens
  misc_RNA (1)...(19): siRNA sense strand
gagaugcuggagaccauuc

SEQ ID NO: 1070082 - RNA, 19 nt, Homo sapiens
  misc_RNA (1)...(19): siRNA sense strand
gucuauggauggcaaaugc

SEQ ID NO: 1070083 - RNA, 19 nt, Homo sapiens
  misc_RNA (1)...(19): siRNA sense strand
gagcuccaaguuccagaug

SEQ ID NO: 1070084 - RNA, 19 nt, Homo sapiens
  misc_RNA (1)...(19): siRNA sense strand
cagagguggagcugccaua

SEQ ID NO: 1070085 - RNA, 19 nt, Homo sapiens
  misc_RNA (1)...(19): siRNA sense strand
gcuccugcgauauguguga

SEQ ID NO: 1070086 - RNA, 19 nt, Homo sapiens
  misc_RNA (1)...(19): siRNA sense strand
ccacugaugaucccuugca

SEQ ID NO: 1070087 - RNA, 19 nt, Homo sapiens
  misc_RNA (1)...(19): siRNA sense strand
ggagccagacauccugcuu

SEQ ID NO: 1070088 - RNA, 19 nt, Homo sapiens
  misc_RNA (1)...(19): siRNA sense strand
aaagugccacaccgagauu

SEQ ID NO: 1070089 - RNA, 19 nt, Homo sapiens
  misc_RNA (1)...(19): siRNA sense strand
gaagagaacauucaucuga

SEQ ID NO: 1070090 - RNA, 19 nt, Homo sapiens
  misc_RNA (1)...(19): siRNA sense strand
gaaaggacaagaaucauaa

SEQ ID NO: 1070091 - RNA, 19 nt, Homo sapiens
  misc_RNA (1)...(19): siRNA sense strand
ggaccaacaucauuucuga

SEQ ID NO: 1070092 - RNA, 19 nt, Homo sapiens
  misc_RNA (1)...(19): siRNA sense strand
gagaagagaccaaauaaau

SEQ ID NO: 1070093 - RNA, 19 nt, Homo sapiens
  misc_RNA (1)...(19): siRNA sense strand
gaagaaggaugagaaguuc

SEQ ID NO: 1070094 - RNA, 19 nt, Homo sapiens
  misc_RNA (1)...(19): siRNA sense strand
gaacacaaaccucuacuau

SEQ ID NO: 1070095 - RNA, 19 nt, Homo sapiens
  misc_RNA (1)...(19): siRNA sense strand
gaagagaccaaauaaauag

SEQ ID NO: 1070096 - RNA, 19 nt, Homo sapiens
  misc_RNA (1)...(19): siRNA sense strand
acacaaaccucuacuauac

SEQ ID NO: 1070097 - RNA, 19 nt, Homo sapiens
  misc_RNA (1)...(19): siRNA sense strand
caagcuaacuccucuucua

SEQ ID NO: 1070098 - RNA, 19 nt, Homo sapiens
  misc_RNA (1)...(19): siRNA sense strand
caacaucauuucugaccua

SEQ ID NO: 1070099 - RNA, 19 nt, Homo sapiens
  misc_RNA (1)...(19): siRNA sense strand
ggaagaaggaugagaaguu

SEQ ID NO: 1070100 - RNA, 19 nt, Homo sapiens
  misc_RNA (1)...(19): siRNA sense strand
agaaauugcucuccaguga

SEQ ID NO: 1070101 - RNA, 19 nt, Homo sapiens
  misc_RNA (1)...(19): siRNA sense strand
gcaagaagagacuaauaaa

SEQ ID NO: 1070102 - RNA, 19 nt, Homo sapiens
  misc_RNA (1)...(19): siRNA sense strand
gcaagaugguagcaagaaa

SEQ ID NO: 1070103 - RNA, 19 nt, Homo sapiens
  misc_RNA (1)...(19): siRNA sense strand
ggacaguauuuaugaugaa

SEQ ID NO: 1070104 - RNA, 19 nt, Homo sapiens
  misc_RNA (1)...(19): siRNA sense strand
gaauauguuucguacguau

SEQ ID NO: 1070105 - RNA, 19 nt, Homo sapiens
  misc_RNA (1)...(19): siRNA sense strand
caagaaaggacaagaauca

SEQ ID NO: 1070106 - RNA, 19 nt, Homo sapiens
  misc_RNA (1)...(19): siRNA sense strand
gugcugagaugaaacagaa

SEQ ID NO: 1070107 - RNA, 19 nt, Homo sapiens
  misc_RNA (1)...(19): siRNA sense strand
gaagaaauuugugaaggau

SEQ ID NO: 1070108 - RNA, 19 nt, Homo sapiens
  misc_RNA (1)...(19): siRNA sense strand
gcagugcugucuuugagaa

SEQ ID NO: 1070109 - RNA, 19 nt, Homo sapiens
  misc_RNA (1)...(19): siRNA sense strand
uagagucacugaacacaaa

SEQ ID NO: 1070110 - RNA, 19 nt, Homo sapiens
  misc_RNA (1)...(19): siRNA sense strand
gaaggaggagcucuugaaa

SEQ ID NO: 1070111 - RNA, 19 nt, Homo sapiens
  misc_RNA (1)...(19): siRNA sense strand
ugaagaaauuugugaagga

SEQ ID NO: 1070112 - RNA, 19 nt, Homo sapiens
  misc_RNA (1)...(19): siRNA sense strand
ggcaagaagagacuaauaa

SEQ ID NO: 1070113 - RNA, 19 nt, Homo sapiens
  misc_RNA (1)...(19): siRNA sense strand
guacguaucaggacaguau

SEQ ID NO: 1070114 - RNA, 19 nt, Homo sapiens
  misc_RNA (1)...(19): siRNA sense strand
aaauugcucuccagugaaa

SEQ ID NO: 1070115 - RNA, 19 nt, Homo sapiens
  misc_RNA (1)...(19): siRNA sense strand
gaaagagaaagcuauagug

SEQ ID NO: 1070116 - RNA, 19 nt, Homo sapiens
  misc_RNA (1)...(19): siRNA sense strand
ugaaacaacaucaaaguga

SEQ ID NO: 1070117 - RNA, 19 nt, Homo sapiens
  misc_RNA (1)...(19): siRNA sense strand
ucaccuggcuaucaacuug

SEQ ID NO: 1070118 - RNA, 19 nt, Homo sapiens
  misc_RNA (1)...(19): siRNA sense strand
cgaaauggaagaaggauga

SEQ ID NO: 1070119 - RNA, 19 nt, Homo sapiens
  misc_RNA (1)...(19): siRNA sense strand
gaacagggagcucaaagag

SEQ ID NO: 1070120 - RNA, 19 nt, Homo sapiens
  misc_RNA (1)...(19): siRNA sense strand
gaaauggagucaggagaag

SEQ ID NO: 1070121 - RNA, 19 nt, Homo sapiens
  misc_RNA (1)...(19): siRNA sense strand
ggagaagagaccaaauaaa

SEQ ID NO: 1070122 - RNA, 19 nt, Homo sapiens
  misc_RNA (1)...(19): siRNA sense strand
gaggagcucuugaaacaac

SEQ ID NO: 1070123 - RNA, 19 nt, Homo sapiens
  misc_RNA (1)...(19): siRNA sense strand
caaagaggcccaugaagca

SEQ ID NO: 1070124 - RNA, 19 nt, Homo sapiens
  misc_RNA (1)...(19): siRNA sense strand
ccagaaagagaaagcuaua

SEQ ID NO: 1070125 - RNA, 19 nt, Homo sapiens
  misc_RNA (1)...(19): siRNA sense strand
gcaacagcuucuucuuaug

SEQ ID NO: 1070126 - RNA, 19 nt, Homo sapiens
  misc_RNA (1)...(19): siRNA sense strand
ucagugaguuggagaacaa

SEQ ID NO: 1070127 - RNA, 19 nt, Homo sapiens
  misc_RNA (1)...(19): siRNA sense strand
aggaggagcucuugaaaca

SEQ ID NO: 1070128 - RNA, 19 nt, Homo sapiens
  misc_RNA (1)...(19): siRNA sense strand
acagggaguuccaagcuaa

SEQ ID NO: 1070129 - RNA, 19 nt, Homo sapiens
  misc_RNA (1)...(19): siRNA sense strand
gcaauuagaagagcugaga

SEQ ID NO: 1070130 - RNA, 19 nt, Homo sapiens
  misc_RNA (1)...(19): siRNA sense strand
gaagagaaguggucaaaac

SEQ ID NO: 1070131 - RNA, 19 nt, Homo sapiens
  misc_RNA (1)...(19): siRNA sense strand
ugcaacagcuucuucuuau

SEQ ID NO: 1070132 - RNA, 19 nt, Homo sapiens
  misc_RNA (1)...(19): siRNA sense strand
gcucaaagaggcccaugaa

SEQ ID NO: 1070133 - RNA, 19 nt, Homo sapiens
  misc_RNA (1)...(19): siRNA sense strand
agaaaggacaagaaucaua

SEQ ID NO: 1070134 - RNA, 19 nt, Homo sapiens
  misc_RNA (1)...(19): siRNA sense strand
cacaagcccuuauccuaga

SEQ ID NO: 1070135 - RNA, 19 nt, Homo sapiens
  misc_RNA (1)...(19): siRNA sense strand
gaaauugcucuccagugaa

SEQ ID NO: 1070136 - RNA, 19 nt, Homo sapiens
  misc_RNA (1)...(19): siRNA sense strand
ccacggaagcuaaucaaga

SEQ ID NO: 1070137 - RNA, 19 nt, Homo sapiens
  misc_RNA (1)...(19): siRNA sense strand
agaaagcuauagugggaaa

SEQ ID NO: 1070138 - RNA, 19 nt, Homo sapiens
  misc_RNA (1)...(19): siRNA sense strand
gagaugaaacagaacuuug

SEQ ID NO: 1070139 - RNA, 19 nt, Homo sapiens
  misc_RNA (1)...(19): siRNA sense strand
ggagaacaacuacaaagca

SEQ ID NO: 1070140 - RNA, 19 nt, Homo sapiens
  misc_RNA (1)...(19): siRNA sense strand
ggucaugcaggaagaauug

SEQ ID NO: 1070141 - RNA, 19 nt, Homo sapiens
  misc_RNA (1)...(19): siRNA sense strand
cgaaauggagucaggagaa

SEQ ID NO: 1070142 - RNA, 19 nt, Homo sapiens
  misc_RNA (1)...(19): siRNA sense strand
uagaagagcaaaucucaga

SEQ ID NO: 1070143 - RNA, 19 nt, Homo sapiens
  misc_RNA (1)...(19): siRNA sense strand
aaagugacaccuugcaauu

SEQ ID NO: 1070144 - RNA, 19 nt, Homo sapiens
  misc_RNA (1)...(19): siRNA sense strand
aagagaagcuagaggagau

SEQ ID NO: 1070145 - RNA, 19 nt, Homo sapiens
  misc_RNA (1)...(19): siRNA sense strand
cuacaaagcagccuugaag

SEQ ID NO: 1070146 - RNA, 19 nt, Homo sapiens
  misc_RNA (1)...(19): siRNA sense strand
gagauuggccucuauuacu

SEQ ID NO: 1070147 - RNA, 19 nt, Homo sapiens
  misc_RNA (1)...(19): siRNA sense strand
agaaauuugugaaggaugu

SEQ ID NO: 1070148 - RNA, 19 nt, Homo sapiens
  misc_RNA (1)...(19): siRNA sense strand
gaggugcccuggagaagag

SEQ ID NO: 1070149 - RNA, 19 nt, Homo sapiens
  misc_RNA (1)...(19): siRNA sense strand
gggagauuggccucuauua

SEQ ID NO: 1070150 - RNA, 19 nt, Homo sapiens
  misc_RNA (1)...(19): siRNA sense strand
aaucggagaucccggacaa

SEQ ID NO: 1070151 - RNA, 19 nt, Homo sapiens
  misc_RNA (1)...(19): siRNA sense strand
cugcaacagcuucuucuua

SEQ ID NO: 1070152 - RNA, 19 nt, Homo sapiens
  misc_RNA (1)...(19): siRNA sense strand
uaaauagacauuggcauga

SEQ ID NO: 1070153 - RNA, 19 nt, Homo sapiens
  misc_RNA (1)...(19): siRNA sense strand
aagaauauguuucguacgu

SEQ ID NO: 1070154 - RNA, 19 nt, Homo sapiens
  misc_RNA (1)...(19): siRNA sense strand
gaugaaacagaacuuugaa

SEQ ID NO: 1070155 - RNA, 19 nt, Homo sapiens
  misc_RNA (1)...(19): siRNA sense strand
gagaccaaauaaauagaca

SEQ ID NO: 1070156 - RNA, 19 nt, Homo sapiens
  misc_RNA (1)...(19): siRNA sense strand
ggaagaauugcaugcacaa

SEQ ID NO: 1070157 - RNA, 19 nt, Homo sapiens
  misc_RNA (1)...(19): siRNA sense strand
ggcaugauguccugcaaca

SEQ ID NO: 1070158 - RNA, 19 nt, Homo sapiens
  misc_RNA (1)...(19): siRNA sense strand
caacgugucaccuggcuau

SEQ ID NO: 1070159 - RNA, 19 nt, Homo sapiens
  misc_RNA (1)...(19): siRNA sense strand
gagaaguggucaaaacaga

SEQ ID NO: 1070160 - RNA, 19 nt, Homo sapiens
  misc_RNA (1)...(19): siRNA sense strand
gcaagaaaggacaagaauc

SEQ ID NO: 1070161 - RNA, 19 nt, Homo sapiens
  misc_RNA (1)...(19): siRNA sense strand
caaagugacaccuugcaau

SEQ ID NO: 1070162 - RNA, 19 nt, Homo sapiens
  misc_RNA (1)...(19): siRNA sense strand
ggagucaggagaagaagau

SEQ ID NO: 1070163 - RNA, 19 nt, Homo sapiens
  misc_RNA (1)...(19): siRNA sense strand
gagaaaauauccugcuaca

SEQ ID NO: 1070164 - RNA, 19 nt, Homo sapiens
  misc_RNA (1)...(19): siRNA sense strand
aaacagaaggcgaaaugga

SEQ ID NO: 1070165 - RNA, 19 nt, Homo sapiens
  misc_RNA (1)...(19): siRNA sense strand
uggagaagagaccaaauaa

SEQ ID NO: 1070166 - RNA, 19 nt, Homo sapiens
  misc_RNA (1)...(19): siRNA sense strand
uugaacaaaugaacagaga

SEQ ID NO: 1070167 - RNA, 19 nt, Homo sapiens
  misc_RNA (1)...(19): siRNA sense strand
ggagauuggccucuauuac

SEQ ID NO: 1070168 - RNA, 19 nt, Homo sapiens
  misc_RNA (1)...(19): siRNA sense strand
gagaaguucgagcgagaaa

SEQ ID NO: 1070169 - RNA, 19 nt, Homo sapiens
  misc_RNA (1)...(19): siRNA sense strand
uaucaggacaguauuuaug

SEQ ID NO: 1070170 - RNA, 19 nt, Homo sapiens
  misc_RNA (1)...(19): siRNA sense strand
agaauauguuucguacgua

SEQ ID NO: 1070171 - RNA, 19 nt, Homo sapiens
  misc_RNA (1)...(19): siRNA sense strand
cuauuacuguuucuaagga

SEQ ID NO: 1070172 - RNA, 19 nt, Homo sapiens
  misc_RNA (1)...(19): siRNA sense strand
uauaagcacaccauacaga

SEQ ID NO: 1070173 - RNA, 19 nt, Homo sapiens
  misc_RNA (1)...(19): siRNA sense strand
caacagcuucuucuuaugc

SEQ ID NO: 1070174 - RNA, 19 nt, Homo sapiens
  misc_RNA (1)...(19): siRNA sense strand
cacagggaguuccaagcua

SEQ ID NO: 1070175 - RNA, 19 nt, Homo sapiens
  misc_RNA (1)...(19): siRNA sense strand
gagaacuucauucaagaga

SEQ ID NO: 1070176 - RNA, 19 nt, Homo sapiens
  misc_RNA (1)...(19): siRNA sense strand
ccaacccucucaucuacug

SEQ ID NO: 1070177 - RNA, 19 nt, Homo sapiens
  misc_RNA (1)...(19): siRNA sense strand
ccgcugugcugagaugaaa

SEQ ID NO: 1070178 - RNA, 19 nt, Homo sapiens
  misc_RNA (1)...(19): siRNA sense strand
caaggcaagaagagacuaa

SEQ ID NO: 1070179 - RNA, 19 nt, Homo sapiens
  misc_RNA (1)...(19): siRNA sense strand
gaaggauguucugggagau

SEQ ID NO: 1070180 - RNA, 19 nt, Homo sapiens
  misc_RNA (1)...(19): siRNA sense strand
ccucuacuauacccaguug

SEQ ID NO: 1070181 - RNA, 19 nt, Homo sapiens
  misc_RNA (1)...(19): siRNA sense strand
aaauagacauuggcaugau

SEQ ID NO: 1070182 - RNA, 19 nt, Homo sapiens
  misc_RNA (1)...(19): siRNA sense strand
cuggagaagagaccaaaua

SEQ ID NO: 1070183 - RNA, 19 nt, Homo sapiens
  misc_RNA (1)...(19): siRNA sense strand
agugacaccuugcaauuag

SEQ ID NO: 1070184 - RNA, 19 nt, Homo sapiens
  misc_RNA (1)...(19): siRNA sense strand
gcuaacuccucuucuacca

SEQ ID NO: 1070185 - RNA, 19 nt, Homo sapiens
  misc_RNA (1)...(19): siRNA sense strand
augaugaaauggaagagaa

SEQ ID NO: 1070186 - RNA, 19 nt, Homo sapiens
  misc_RNA (1)...(19): siRNA sense strand
ggaacuccagaaagagaaa

SEQ ID NO: 1070187 - RNA, 19 nt, Homo sapiens
  misc_RNA (1)...(19): siRNA sense strand
aacacaaaccucuacuaua

SEQ ID NO: 1070188 - RNA, 19 nt, Homo sapiens
  misc_RNA (1)...(19): siRNA sense strand
agaaggaggagcucuugaa

SEQ ID NO: 1070189 - RNA, 19 nt, Homo sapiens
  misc_RNA (1)...(19): siRNA sense strand
gaaagaaggagaagaagaa

SEQ ID NO: 1070190 - RNA, 19 nt, Homo sapiens
  misc_RNA (1)...(19): siRNA sense strand
gauaguagauguuggagau

SEQ ID NO: 1070191 - RNA, 19 nt, Homo sapiens
  misc_RNA (1)...(19): siRNA sense strand
ggauaagcccucugagaua

SEQ ID NO: 1070192 - RNA, 19 nt, Homo sapiens
  misc_RNA (1)...(19): siRNA sense strand
caagaaguguggcuguaaa

SEQ ID NO: 1070193 - RNA, 19 nt, Homo sapiens
  misc_RNA (1)...(19): siRNA sense strand
ccaugaagguugucaauca

SEQ ID NO: 1070194 - RNA, 19 nt, Homo sapiens
  misc_RNA (1)...(19): siRNA sense strand
gauaagcccucugagauag

SEQ ID NO: 1070195 - RNA, 19 nt, Homo sapiens
  misc_RNA (1)...(19): siRNA sense strand
ggcagaagaucacccuuga

SEQ ID NO: 1070196 - RNA, 19 nt, Homo sapiens
  misc_RNA (1)...(19): siRNA sense strand
gaggcugucuugaacacua

SEQ ID NO: 1070197 - RNA, 19 nt, Homo sapiens
  misc_RNA (1)...(19): siRNA sense strand
agaagaagcacaagaagaa

SEQ ID NO: 1070198 - RNA, 19 nt, Homo sapiens
  misc_RNA (1)...(19): siRNA sense strand
aaagaaagaaggagaagaa

SEQ ID NO: 1070199 - RNA, 19 nt, Homo sapiens
  misc_RNA (1)...(19): siRNA sense strand
gacuaaauacucucugaua

SEQ ID NO: 1070200 - RNA, 19 nt, Homo sapiens
  misc_RNA (1)...(19): siRNA sense strand
gggcaaggcacacaucaaa

SEQ ID NO: 1070201 - RNA, 19 nt, Homo sapiens
  misc_RNA (1)...(19): siRNA sense strand
ucugauaccugaugaggaa

SEQ ID NO: 1070202 - RNA, 19 nt, Homo sapiens
  misc_RNA (1)...(19): siRNA sense strand
gagauaaagugugggugaa

SEQ ID NO: 1070203 - RNA, 19 nt, Homo sapiens
  misc_RNA (1)...(19): siRNA sense strand
gggacuaaauacucucuga

SEQ ID NO: 1070204 - RNA, 19 nt, Homo sapiens
  misc_RNA (1)...(19): siRNA sense strand
gcaagaaguguggcuguaa

SEQ ID NO: 1070205 - RNA, 19 nt, Homo sapiens
  misc_RNA (1)...(19): siRNA sense strand
gcaaccaggugggacuaaa

SEQ ID NO: 1070206 - RNA, 19 nt, Homo sapiens
  misc_RNA (1)...(19): siRNA sense strand
aaacuugccugcucucuac

SEQ ID NO: 1070207 - RNA, 19 nt, Homo sapiens
  misc_RNA (1)...(19): siRNA sense strand
ccaucgaacucauauguca

SEQ ID NO: 1070208 - RNA, 19 nt, Homo sapiens
  misc_RNA (1)...(19): siRNA sense strand
gcaaggcagcaaagaagaa

SEQ ID NO: 1070209 - RNA, 19 nt, Homo sapiens
  misc_RNA (1)...(19): siRNA sense strand
uaguagauguuggagauaa

SEQ ID NO: 1070210 - RNA, 19 nt, Homo sapiens
  misc_RNA (1)...(19): siRNA sense strand
ccucugagauaguagaugu

SEQ ID NO: 1070211 - RNA, 19 nt, Homo sapiens
  misc_RNA (1)...(19): siRNA sense strand
agaagaagaagcacaagaa

SEQ ID NO: 1070212 - RNA, 19 nt, Homo sapiens
  misc_RNA (1)...(19): siRNA sense strand
ggcaaagucagcagaguuu

SEQ ID NO: 1070213 - RNA, 19 nt, Homo sapiens
  misc_RNA (1)...(19): siRNA sense strand
gaacacuaccugcaagaag

SEQ ID NO: 1070214 - RNA, 19 nt, Homo sapiens
  misc_RNA (1)...(19): siRNA sense strand
gaagcaaggucugguccau

SEQ ID NO: 1070215 - RNA, 19 nt, Homo sapiens
  misc_RNA (1)...(19): siRNA sense strand
uaagcccucugagauagua

SEQ ID NO: 1070216 - RNA, 19 nt, Homo sapiens
  misc_RNA (1)...(19): siRNA sense strand
caugaagguugucaaucaa

SEQ ID NO: 1070217 - RNA, 19 nt, Homo sapiens
  misc_RNA (1)...(19): siRNA sense strand
gaagaagaagcacaagaag

SEQ ID NO: 1070218 - RNA, 19 nt, Homo sapiens
  misc_RNA (1)...(19): siRNA sense strand
gaagaagcacaaggaguga

SEQ ID NO: 1070219 - RNA, 19 nt, Homo sapiens
  misc_RNA (1)...(19): siRNA sense strand
ccugcucucuacacuauuu

SEQ ID NO: 1070220 - RNA, 19 nt, Homo sapiens
  misc_RNA (1)...(19): siRNA sense strand
aaagaaacauagagauagg

SEQ ID NO: 1070221 - RNA, 19 nt, Homo sapiens
  misc_RNA (1)...(19): siRNA sense strand
ugagaagccugacccuaca

SEQ ID NO: 1070222 - RNA, 19 nt, Homo sapiens
  misc_RNA (1)...(19): siRNA sense strand
ggacugggaaagaccuuga

SEQ ID NO: 1070223 - RNA, 19 nt, Homo sapiens
  misc_RNA (1)...(19): siRNA sense strand
aaacauagagauaggaagu

SEQ ID NO: 1070224 - RNA, 19 nt, Homo sapiens
  misc_RNA (1)...(19): siRNA sense strand
ccaaggagagguugcuaug

SEQ ID NO: 1070225 - RNA, 19 nt, Homo sapiens
  misc_RNA (1)...(19): siRNA sense strand
acaagaagaagcacaagga

SEQ ID NO: 1070226 - RNA, 19 nt, Homo sapiens
  misc_RNA (1)...(19): siRNA sense strand
aaguaucccucuccaugaa

SEQ ID NO: 1070227 - RNA, 19 nt, Homo sapiens
  misc_RNA (1)...(19): siRNA sense strand
aaaggaagaggcaaaguca

SEQ ID NO: 1070228 - RNA, 19 nt, Homo sapiens
  misc_RNA (1)...(19): siRNA sense strand
uaaauacucucugauaccu

SEQ ID NO: 1070229 - RNA, 19 nt, Homo sapiens
  misc_RNA (1)...(19): siRNA sense strand
ggauuacacugggcagaag

SEQ ID NO: 1070230 - RNA, 19 nt, Homo sapiens
  misc_RNA (1)...(19): siRNA sense strand
ugccugcucucuacacuau

SEQ ID NO: 1070231 - RNA, 19 nt, Homo sapiens
  misc_RNA (1)...(19): siRNA sense strand
aaggagagguugcuauggu

SEQ ID NO: 1070232 - RNA, 19 nt, Homo sapiens
  misc_RNA (1)...(19): siRNA sense strand
aaagugugggugaagcuua

SEQ ID NO: 1070233 - RNA, 19 nt, Homo sapiens
  misc_RNA (1)...(19): siRNA sense strand
aaaguaucccucuccauga

SEQ ID NO: 1070234 - RNA, 19 nt, Homo sapiens
  misc_RNA (1)...(19): siRNA sense strand
ggacuaaauacucucugau

SEQ ID NO: 1070235 - RNA, 19 nt, Homo sapiens
  misc_RNA (1)...(19): siRNA sense strand
cagcaaggcagcaaagaag

SEQ ID NO: 1070236 - RNA, 19 nt, Homo sapiens
  misc_RNA (1)...(19): siRNA sense strand
acauagagauaggaaguca

SEQ ID NO: 1070237 - RNA, 19 nt, Homo sapiens
  misc_RNA (1)...(19): siRNA sense strand
uggauaagcccucugagau

SEQ ID NO: 1070238 - RNA, 19 nt, Homo sapiens
  misc_RNA (1)...(19): siRNA sense strand
guggauaagcccucugaga

SEQ ID NO: 1070239 - RNA, 19 nt, Homo sapiens
  misc_RNA (1)...(19): siRNA sense strand
agaaagaaggagaagaaga

SEQ ID NO: 1070240 - RNA, 19 nt, Homo sapiens
  misc_RNA (1)...(19): siRNA sense strand
acuaaauacucucugauac

SEQ ID NO: 1070241 - RNA, 19 nt, Homo sapiens
  misc_RNA (1)...(19): siRNA sense strand
ugagauaguagauguugga

SEQ ID NO: 1070242 - RNA, 19 nt, Homo sapiens
  misc_RNA (1)...(19): siRNA sense strand
aaccaggugggacuaaaua

SEQ ID NO: 1070243 - RNA, 19 nt, Homo sapiens
  misc_RNA (1)...(19): siRNA sense strand
agaccuugaucccaacaau

SEQ ID NO: 1070244 - RNA, 19 nt, Homo sapiens
  misc_RNA (1)...(19): siRNA sense strand
gaagaagcacaagaagaag

SEQ ID NO: 1070245 - RNA, 19 nt, Homo sapiens
  misc_RNA (1)...(19): siRNA sense strand
aagaagaagcacaagaaga

SEQ ID NO: 1070246 - RNA, 19 nt, Homo sapiens
  misc_RNA (1)...(19): siRNA sense strand
caaccaggugggacuaaau

SEQ ID NO: 1070247 - RNA, 19 nt, Homo sapiens
  misc_RNA (1)...(19): siRNA sense strand
ugcaagaaguguggcugua

SEQ ID NO: 1070248 - RNA, 19 nt, Homo sapiens
  misc_RNA (1)...(19): siRNA sense strand
aguagauguuggagauaaa

SEQ ID NO: 1070249 - RNA, 19 nt, Homo sapiens
  misc_RNA (1)...(19): siRNA sense strand
gauguuggagauaaagugu

SEQ ID NO: 1070250 - RNA, 19 nt, Homo sapiens
  misc_RNA (1)...(19): siRNA sense strand
aacacuaccugcaagaagu

SEQ ID NO: 1070251 - RNA, 19 nt, Homo sapiens
  misc_RNA (1)...(19): siRNA sense strand
caaggucugguccaucgaa

SEQ ID NO: 1070252 - RNA, 19 nt, Homo sapiens
  misc_RNA (1)...(19): siRNA sense strand
ugcaaaagauuguuucaug

SEQ ID NO: 1070253 - RNA, 19 nt, Homo sapiens
  misc_RNA (1)...(19): siRNA sense strand
guccaucgaacucauaugu

SEQ ID NO: 1070254 - RNA, 19 nt, Homo sapiens
  misc_RNA (1)...(19): siRNA sense strand
ucaagggacugggaaagac

SEQ ID NO: 1070255 - RNA, 19 nt, Homo sapiens
  misc_RNA (1)...(19): siRNA sense strand
gaggcaaagucagcagagu

SEQ ID NO: 1070256 - RNA, 19 nt, Homo sapiens
  misc_RNA (1)...(19): siRNA sense strand
aaagaaggagaagaagaaa

SEQ ID NO: 1070257 - RNA, 19 nt, Homo sapiens
  misc_RNA (1)...(19): siRNA sense strand
uauggggccuuuaucaaaa

SEQ ID NO: 1070258 - RNA, 19 nt, Homo sapiens
  misc_RNA (1)...(19): siRNA sense strand
uugcuauggugacagacua

SEQ ID NO: 1070259 - RNA, 19 nt, Homo sapiens
  misc_RNA (1)...(19): siRNA sense strand
agaaacauagagauaggaa

SEQ ID NO: 1070260 - RNA, 19 nt, Homo sapiens
  misc_RNA (1)...(19): siRNA sense strand
aagugugggugaagcuuau

SEQ ID NO: 1070261 - RNA, 19 nt, Homo sapiens
  misc_RNA (1)...(19): siRNA sense strand
gaccuugaucccaacaaug

SEQ ID NO: 1070262 - RNA, 19 nt, Homo sapiens
  misc_RNA (1)...(19): siRNA sense strand
cuuauuggccgagagauga

SEQ ID NO: 1070263 - RNA, 19 nt, Homo sapiens
  misc_RNA (1)...(19): siRNA sense strand
acagcaaggcagcaaagaa

SEQ ID NO: 1070264 - RNA, 19 nt, Homo sapiens
  misc_RNA (1)...(19): siRNA sense strand
gaaggccugagaccaugga

SEQ ID NO: 1070265 - RNA, 19 nt, Homo sapiens
  misc_RNA (1)...(19): siRNA sense strand
ccuugaggcugucuugaac

SEQ ID NO: 1070266 - RNA, 19 nt, Homo sapiens
  misc_RNA (1)...(19): siRNA sense strand
aagaagaagaagcacaaga

SEQ ID NO: 1070267 - RNA, 19 nt, Homo sapiens
  misc_RNA (1)...(19): siRNA sense strand
gcaaggcacacaucaaaag

SEQ ID NO: 1070268 - RNA, 19 nt, Homo sapiens
  misc_RNA (1)...(19): siRNA sense strand
gagaagccugacccuacaa

SEQ ID NO: 1070269 - RNA, 19 nt, Homo sapiens
  misc_RNA (1)...(19): siRNA sense strand
caaauguggucucauccuu

SEQ ID NO: 1070270 - RNA, 19 nt, Homo sapiens
  misc_RNA (1)...(19): siRNA sense strand
acagugaggugauucugaa

SEQ ID NO: 1070271 - RNA, 19 nt, Homo sapiens
  misc_RNA (1)...(19): siRNA sense strand
gugaggaucuucgucauca

SEQ ID NO: 1070272 - RNA, 19 nt, Homo sapiens
  misc_RNA (1)...(19): siRNA sense strand
ccagagagggucagaguau

SEQ ID NO: 1070273 - RNA, 19 nt, Homo sapiens
  misc_RNA (1)...(19): siRNA sense strand
aaagauugcagccaaaugu

SEQ ID NO: 1070274 - RNA, 19 nt, Homo sapiens
  misc_RNA (1)...(19): siRNA sense strand
ggaacugcccuccaucauc

SEQ ID NO: 1070275 - RNA, 19 nt, Homo sapiens
  misc_RNA (1)...(19): siRNA sense strand
gcgcccaccuugcuguuca

SEQ ID NO: 1070276 - RNA, 19 nt, Homo sapiens
  misc_RNA (1)...(19): siRNA sense strand
gaucuucgucaucaucuuc

SEQ ID NO: 1070277 - RNA, 19 nt, Homo sapiens
  misc_RNA (1)...(19): siRNA sense strand
ggucauccuguccgucuuu

SEQ ID NO: 1070278 - RNA, 19 nt, Homo sapiens
  misc_RNA (1)...(19): siRNA sense strand
gcagccaaauguggucuca

SEQ ID NO: 1070279 - RNA, 19 nt, Homo sapiens
  misc_RNA (1)...(19): siRNA sense strand
ggucagaguaucccuuucu

SEQ ID NO: 1070280 - RNA, 19 nt, Homo sapiens
  misc_RNA (1)...(19): siRNA sense strand
ccaaaagauugcagccaaa

SEQ ID NO: 1070281 - RNA, 19 nt, Homo sapiens
  misc_RNA (1)...(19): siRNA sense strand
ucuguggccuggcuaagug

SEQ ID NO: 1070282 - RNA, 19 nt, Homo sapiens
  misc_RNA (1)...(19): siRNA sense strand
gaggaucuucgucaucauc

SEQ ID NO: 1070283 - RNA, 19 nt, Homo sapiens
  misc_RNA (1)...(19): siRNA sense strand
agccaaauguggucucauc

SEQ ID NO: 1070284 - RNA, 19 nt, Homo sapiens
  misc_RNA (1)...(19): siRNA sense strand
ggaucuucgucaucaucuu

SEQ ID NO: 1070285 - RNA, 19 nt, Homo sapiens
  misc_RNA (1)...(19): siRNA sense strand
cagagagggucagaguauc

SEQ ID NO: 1070286 - RNA, 19 nt, Homo sapiens
  misc_RNA (1)...(19): siRNA sense strand
cccaaaggauucaaaugcu

SEQ ID NO: 1070287 - RNA, 19 nt, Homo sapiens
  misc_RNA (1)...(19): siRNA sense strand
gaauauaccggggaucaga

SEQ ID NO: 1070288 - RNA, 19 nt, Homo sapiens
  misc_RNA (1)...(19): siRNA sense strand
gaucagaggggcauugaca

SEQ ID NO: 1070289 - RNA, 19 nt, Homo sapiens
  misc_RNA (1)...(19): siRNA sense strand
gagcaaggcugccaaauuc

SEQ ID NO: 1070290 - RNA, 19 nt, Homo sapiens
  misc_RNA (1)...(19): siRNA sense strand
ggaaccagaugauguauuc

SEQ ID NO: 1070291 - RNA, 19 nt, Homo sapiens
  misc_RNA (1)...(19): siRNA sense strand
gcaaacgccuggauuaucu

SEQ ID NO: 1070292 - RNA, 19 nt, Homo sapiens
  misc_RNA (1)...(19): siRNA sense strand
gagcugcaccuccucauua

SEQ ID NO: 1070293 - RNA, 19 nt, Homo sapiens
  misc_RNA (1)...(19): siRNA sense strand
gaaguugagucagcuguuu

SEQ ID NO: 1070294 - RNA, 19 nt, Homo sapiens
  misc_RNA (1)...(19): siRNA sense strand
acagaaagcugaucgaauc

SEQ ID NO: 1070295 - RNA, 19 nt, Homo sapiens
  misc_RNA (1)...(19): siRNA sense strand
gauaugagacgaaugaaga

SEQ ID NO: 1070296 - RNA, 19 nt, Homo sapiens
  misc_RNA (1)...(19): siRNA sense strand
gacccagacuguucaauga

SEQ ID NO: 1070297 - RNA, 19 nt, Homo sapiens
  misc_RNA (1)...(19): siRNA sense strand
guacaugcaucugaaguug

SEQ ID NO: 1070298 - RNA, 19 nt, Homo sapiens
  misc_RNA (1)...(19): siRNA sense strand
cgaagaaagugaacugauc

SEQ ID NO: 1070299 - RNA, 19 nt, Homo sapiens
  misc_RNA (1)...(19): siRNA sense strand
ggagcaaggcugccaaauu

SEQ ID NO: 1070300 - RNA, 19 nt, Homo sapiens
  misc_RNA (1)...(19): siRNA sense strand
ugagucagcuguuugguau

SEQ ID NO: 1070301 - RNA, 19 nt, Homo sapiens
  misc_RNA (1)...(19): siRNA sense strand
uggauuaucucaaccuaaa

SEQ ID NO: 1070302 - RNA, 19 nt, Homo sapiens
  misc_RNA (1)...(19): siRNA sense strand
uuaagaaguuuggucguua

SEQ ID NO: 1070303 - RNA, 19 nt, Homo sapiens
  misc_RNA (1)...(19): siRNA sense strand
gcucuugucugcagaaagu

SEQ ID NO: 1070304 - RNA, 19 nt, Homo sapiens
  misc_RNA (1)...(19): siRNA sense strand
gacaagacccugcaggaaa

SEQ ID NO: 1070305 - RNA, 19 nt, Homo sapiens
  misc_RNA (1)...(19): siRNA sense strand
cugagaagcugcuauuuca

SEQ ID NO: 1070306 - RNA, 19 nt, Homo sapiens
  misc_RNA (1)...(19): siRNA sense strand
gaaguuuggucguuaucug

SEQ ID NO: 1070307 - RNA, 19 nt, Homo sapiens
  misc_RNA (1)...(19): siRNA sense strand
ucaaugagacccacucuga

SEQ ID NO: 1070308 - RNA, 19 nt, Homo sapiens
  misc_RNA (1)...(19): siRNA sense strand
gagcaacaaccgucugaaa

SEQ ID NO: 1070309 - RNA, 19 nt, Homo sapiens
  misc_RNA (1)...(19): siRNA sense strand
ucucagagcucaacaucga

SEQ ID NO: 1070310 - RNA, 19 nt, Homo sapiens
  misc_RNA (1)...(19): siRNA sense strand
ggcacacucugcagaaauu

SEQ ID NO: 1070311 - RNA, 19 nt, Homo sapiens
  misc_RNA (1)...(19): siRNA sense strand
caacaucgaggacuauuuc

SEQ ID NO: 1070312 - RNA, 19 nt, Homo sapiens
  misc_RNA (1)...(19): siRNA sense strand
caacaaccgucugaaaucu

SEQ ID NO: 1070313 - RNA, 19 nt, Homo sapiens
  misc_RNA (1)...(19): siRNA sense strand
caacaacaaccaugaguca

SEQ ID NO: 1070314 - RNA, 19 nt, Homo sapiens
  misc_RNA (1)...(19): siRNA sense strand
gcaacaaccgucugaaauc

SEQ ID NO: 1070315 - RNA, 19 nt, Homo sapiens
  misc_RNA (1)...(19): siRNA sense strand
aaacagauaugagacgaau

SEQ ID NO: 1070316 - RNA, 19 nt, Homo sapiens
  misc_RNA (1)...(19): siRNA sense strand
uaagaaguuuggucguuau

SEQ ID NO: 1070317 - RNA, 19 nt, Homo sapiens
  misc_RNA (1)...(19): siRNA sense strand
ccgacgagcugcuugagaa

SEQ ID NO: 1070318 - RNA, 19 nt, Homo sapiens
  misc_RNA (1)...(19): siRNA sense strand
gaaaguggaaccagaugau

SEQ ID NO: 1070319 - RNA, 19 nt, Homo sapiens
  misc_RNA (1)...(19): siRNA sense strand
ggacaagacccugcaggaa

SEQ ID NO: 1070320 - RNA, 19 nt, Homo sapiens
  misc_RNA (1)...(19): siRNA sense strand
aaggugaacuucuucuuug

SEQ ID NO: 1070321 - RNA, 19 nt, Homo sapiens
  misc_RNA (1)...(19): siRNA sense strand
cuugagaacuugugugaga

SEQ ID NO: 1070322 - RNA, 19 nt, Homo sapiens
  misc_RNA (1)...(19): siRNA sense strand
guuaagaaguuuggucguu

SEQ ID NO: 1070323 - RNA, 19 nt, Homo sapiens
  misc_RNA (1)...(19): siRNA sense strand
ucagcuguuugguauguua

SEQ ID NO: 1070324 - RNA, 19 nt, Homo sapiens
  misc_RNA (1)...(19): siRNA sense strand
ucaaaugccacguucauga

SEQ ID NO: 1070325 - RNA, 19 nt, Homo sapiens
  misc_RNA (1)...(19): siRNA sense strand
gcgagaauuuauacaaaca

SEQ ID NO: 1070326 - RNA, 19 nt, Homo sapiens
  misc_RNA (1)...(19): siRNA sense strand
gaaccucaacuacaacugu

SEQ ID NO: 1070327 - RNA, 19 nt, Homo sapiens
  misc_RNA (1)...(19): siRNA sense strand
acaagacccugcaggaaau

SEQ ID NO: 1070328 - RNA, 19 nt, Homo sapiens
  misc_RNA (1)...(19): siRNA sense strand
uugaacggaucaugaagua

SEQ ID NO: 1070329 - RNA, 19 nt, Homo sapiens
  misc_RNA (1)...(19): siRNA sense strand
gccaucaccuugcugucua

SEQ ID NO: 1070330 - RNA, 19 nt, Homo sapiens
  misc_RNA (1)...(19): siRNA sense strand
caacaucaaaugccacguu

SEQ ID NO: 1070331 - RNA, 19 nt, Homo sapiens
  misc_RNA (1)...(19): siRNA sense strand
uaaagaagaugggcaaacg

SEQ ID NO: 1070332 - RNA, 19 nt, Homo sapiens
  misc_RNA (1)...(19): siRNA sense strand
ggacgaagaaagugaacug

SEQ ID NO: 1070333 - RNA, 19 nt, Homo sapiens
  misc_RNA (1)...(19): siRNA sense strand
acagauaugagacgaauga

SEQ ID NO: 1070334 - RNA, 19 nt, Homo sapiens
  misc_RNA (1)...(19): siRNA sense strand
aaucugggcuuuccuugau

SEQ ID NO: 1070335 - RNA, 19 nt, Homo sapiens
  misc_RNA (1)...(19): siRNA sense strand
aaugagacccacucugaua

SEQ ID NO: 1070336 - RNA, 19 nt, Homo sapiens
  misc_RNA (1)...(19): siRNA sense strand
gcagaaaguggaaccagau

SEQ ID NO: 1070337 - RNA, 19 nt, Homo sapiens
  misc_RNA (1)...(19): siRNA sense strand
gaaauuuacaggaaguaca

SEQ ID NO: 1070338 - RNA, 19 nt, Homo sapiens
  misc_RNA (1)...(19): siRNA sense strand
cugcagaaauuaacuugug

SEQ ID NO: 1070339 - RNA, 19 nt, Homo sapiens
  misc_RNA (1)...(19): siRNA sense strand
ucagcuacaugaggaauga

SEQ ID NO: 1070340 - RNA, 19 nt, Homo sapiens
  misc_RNA (1)...(19): siRNA sense strand
gagaagcugcuauuucagu

SEQ ID NO: 1070341 - RNA, 19 nt, Homo sapiens
  misc_RNA (1)...(19): siRNA sense strand
caggguacaugcaucugaa

SEQ ID NO: 1070342 - RNA, 19 nt, Homo sapiens
  misc_RNA (1)...(19): siRNA sense strand
gggcuuuccuugauguuag

SEQ ID NO: 1070343 - RNA, 19 nt, Homo sapiens
  misc_RNA (1)...(19): siRNA sense strand
gagcuggaccgccugguau

SEQ ID NO: 1070344 - RNA, 19 nt, Homo sapiens
  misc_RNA (1)...(19): siRNA sense strand
guacagaaagcugaucgaa

SEQ ID NO: 1070345 - RNA, 19 nt, Homo sapiens
  misc_RNA (1)...(19): siRNA sense strand
aggcgagaauuuauacaaa

SEQ ID NO: 1070346 - RNA, 19 nt, Homo sapiens
  misc_RNA (1)...(19): siRNA sense strand
acaaugcugucuugaccaa

SEQ ID NO: 1070347 - RNA, 19 nt, Homo sapiens
  misc_RNA (1)...(19): siRNA sense strand
gcugagcucuggcgguaca

SEQ ID NO: 1070348 - RNA, 19 nt, Homo sapiens
  misc_RNA (1)...(19): siRNA sense strand
gcacacucugcagaaauua

SEQ ID NO: 1070349 - RNA, 19 nt, Homo sapiens
  misc_RNA (1)...(19): siRNA sense strand
gacccacucugauagaucu

SEQ ID NO: 1070350 - RNA, 19 nt, Homo sapiens
  misc_RNA (1)...(19): siRNA sense strand
gcuugagcuucuucuuaaa

SEQ ID NO: 1070351 - RNA, 19 nt, Homo sapiens
  misc_RNA (1)...(19): siRNA sense strand
ugcaggaaauuuacaggaa

SEQ ID NO: 1070352 - RNA, 19 nt, Homo sapiens
  misc_RNA (1)...(19): siRNA sense strand
gggcaaacgccuggauuau

SEQ ID NO: 1070353 - RNA, 19 nt, Homo sapiens
  misc_RNA (1)...(19): siRNA sense strand
gcuauuuugucaucguuua

SEQ ID NO: 1070354 - RNA, 19 nt, Homo sapiens
  misc_RNA (1)...(19): siRNA sense strand
guccagggcugcucuuguc

SEQ ID NO: 1070355 - RNA, 19 nt, Homo sapiens
  misc_RNA (1)...(19): siRNA sense strand
gcagaaauuaacuugugaa

SEQ ID NO: 1070356 - RNA, 19 nt, Homo sapiens
  misc_RNA (1)...(19): siRNA sense strand
aucaggagcucauucauca

SEQ ID NO: 1070357 - RNA, 19 nt, Homo sapiens
  misc_RNA (1)...(19): siRNA sense strand
gagaacuugugugagaaug

SEQ ID NO: 1070358 - RNA, 19 nt, Homo sapiens
  misc_RNA (1)...(19): siRNA sense strand
gaucucagagcucaacauc

SEQ ID NO: 1070359 - RNA, 19 nt, Homo sapiens
  misc_RNA (1)...(19): siRNA sense strand
ggccuccugucuugucuga

SEQ ID NO: 1070360 - RNA, 19 nt, Homo sapiens
  misc_RNA (1)...(19): siRNA sense strand
gaagcugcuauuucaguga

SEQ ID NO: 1070361 - RNA, 19 nt, Homo sapiens
  misc_RNA (1)...(19): siRNA sense strand
gagacccacucugauagau

SEQ ID NO: 1070362 - RNA, 19 nt, Homo sapiens
  misc_RNA (1)...(19): siRNA sense strand
ggcgagaauuuauacaaac

SEQ ID NO: 1070363 - RNA, 19 nt, Homo sapiens
  misc_RNA (1)...(19): siRNA sense strand
caggaaauuuacaggaagu

SEQ ID NO: 1070364 - RNA, 19 nt, Homo sapiens
  misc_RNA (1)...(19): siRNA sense strand
gguacaugcaucugaaguu

SEQ ID NO: 1070365 - RNA, 19 nt, Homo sapiens
  misc_RNA (1)...(19): siRNA sense strand
gcuguuugguauguuaaga

SEQ ID NO: 1070366 - RNA, 19 nt, Homo sapiens
  misc_RNA (1)...(19): siRNA sense strand
ggugaacuucuucuuugaa

SEQ ID NO: 1070367 - RNA, 19 nt, Homo sapiens
  misc_RNA (1)...(19): siRNA sense strand
cccugaaccucaacuacaa

SEQ ID NO: 1070368 - RNA, 19 nt, Homo sapiens
  misc_RNA (1)...(19): siRNA sense strand
ucaccuugcugucuacaac

SEQ ID NO: 1070369 - RNA, 19 nt, Homo sapiens
  misc_RNA (1)...(19): siRNA sense strand
ggaaguacagaaagcugau

SEQ ID NO: 1070370 - RNA, 19 nt, Homo sapiens
  misc_RNA (1)...(19): siRNA sense strand
caucaaaugccacguucau

SEQ ID NO: 1070371 - RNA, 19 nt, Homo sapiens
  misc_RNA (1)...(19): siRNA sense strand
ggaccaucaacaucaaaug

SEQ ID NO: 1070372 - RNA, 19 nt, Homo sapiens
  misc_RNA (1)...(19): siRNA sense strand
ucaugaauccuuacaaugc

SEQ ID NO: 1070373 - RNA, 19 nt, Homo sapiens
  misc_RNA (1)...(19): siRNA sense strand
agacccugcaggaaauuua

SEQ ID NO: 1070374 - RNA, 19 nt, Homo sapiens
  misc_RNA (1)...(19): siRNA sense strand
cugcaccuccucauuauau

SEQ ID NO: 1070375 - RNA, 19 nt, Homo sapiens
  misc_RNA (1)...(19): siRNA sense strand
ugcagaaauuaacuuguga

SEQ ID NO: 1070376 - RNA, 19 nt, Homo sapiens
  misc_RNA (1)...(19): siRNA sense strand
cccagacuguucaaugaga

SEQ ID NO: 1070377 - RNA, 19 nt, Homo sapiens
  misc_RNA (1)...(19): siRNA sense strand
ugacccagacuguucaaug

SEQ ID NO: 1070378 - RNA, 19 nt, Homo sapiens
  misc_RNA (1)...(19): siRNA sense strand
caucaggagcucauucauc

SEQ ID NO: 1070379 - RNA, 19 nt, Homo sapiens
  misc_RNA (1)...(19): siRNA sense strand
gugaacuucuucuuugaac

SEQ ID NO: 1070380 - RNA, 19 nt, Homo sapiens
  misc_RNA (1)...(19): siRNA sense strand
caugaggaaugagaaugug

SEQ ID NO: 1070381 - RNA, 19 nt, Homo sapiens
  misc_RNA (1)...(19): siRNA sense strand
gcaaggcugccaaauucuc

SEQ ID NO: 1070382 - RNA, 19 nt, Homo sapiens
  misc_RNA (1)...(19): siRNA sense strand
ugggcaaacgccuggauua

SEQ ID NO: 1070383 - RNA, 19 nt, Homo sapiens
  misc_RNA (1)...(19): siRNA sense strand
gcucauucaucagcagcuu

SEQ ID NO: 1070384 - RNA, 19 nt, Homo sapiens
  misc_RNA (1)...(19): siRNA sense strand
ggcaaacgccuggauuauc

SEQ ID NO: 1070385 - RNA, 19 nt, Homo sapiens
  misc_RNA (1)...(19): siRNA sense strand
ccuccugucuugucugagu

SEQ ID NO: 1070386 - RNA, 19 nt, Homo sapiens
  misc_RNA (1)...(19): siRNA sense strand
acaaccgucugaaaucucu

SEQ ID NO: 1070387 - RNA, 19 nt, Homo sapiens
  misc_RNA (1)...(19): siRNA sense strand
agucagcuguuugguaugu

SEQ ID NO: 1070388 - RNA, 19 nt, Homo sapiens
  misc_RNA (1)...(19): siRNA sense strand
ccuggauuaucucaaccua

SEQ ID NO: 1070389 - RNA, 19 nt, Homo sapiens
  misc_RNA (1)...(19): siRNA sense strand
caauagagcccaccuaauu

SEQ ID NO: 1070390 - RNA, 19 nt, Homo sapiens
  misc_RNA (1)...(19): siRNA sense strand
gagagaagcccuaugauug

SEQ ID NO: 1070391 - RNA, 19 nt, Homo sapiens
  misc_RNA (1)...(19): siRNA sense strand
ccagagagccaaccacuua

SEQ ID NO: 1070392 - RNA, 19 nt, Homo sapiens
  misc_RNA (1)...(19): siRNA sense strand
gcagaaagguaaagugaca

SEQ ID NO: 1070393 - RNA, 19 nt, Homo sapiens
  misc_RNA (1)...(19): siRNA sense strand
cagcagauguucuccauga

SEQ ID NO: 1070394 - RNA, 19 nt, Homo sapiens
  misc_RNA (1)...(19): siRNA sense strand
ggaaaggccuucagaugca

SEQ ID NO: 1070395 - RNA, 19 nt, Homo sapiens
  misc_RNA (1)...(19): siRNA sense strand
agacagaccuccacaagga

SEQ ID NO: 1070396 - RNA, 19 nt, Homo sapiens
  misc_RNA (1)...(19): siRNA sense strand
gaaugaaacccuaugaaug

SEQ ID NO: 1070397 - RNA, 19 nt, Homo sapiens
  misc_RNA (1)...(19): siRNA sense strand
ggaaagacgccuugauuca

SEQ ID NO: 1070398 - RNA, 19 nt, Homo sapiens
  misc_RNA (1)...(19): siRNA sense strand
ggagagaagcccuaugauu

SEQ ID NO: 1070399 - RNA, 19 nt, Homo sapiens
  misc_RNA (1)...(19): siRNA sense strand
ggaaugaaacccuaugaau

SEQ ID NO: 1070400 - RNA, 19 nt, Homo sapiens
  misc_RNA (1)...(19): siRNA sense strand
ggauguggcugugaccuuu

SEQ ID NO: 1070401 - RNA, 19 nt, Homo sapiens
  misc_RNA (1)...(19): siRNA sense strand
gagaaacccuaugagugua

SEQ ID NO: 1070402 - RNA, 19 nt, Homo sapiens
  misc_RNA (1)...(19): siRNA sense strand
gggagaagcccuaugaaug

SEQ ID NO: 1070403 - RNA, 19 nt, Homo sapiens
  misc_RNA (1)...(19): siRNA sense strand
gaagugguaucucguucga

SEQ ID NO: 1070404 - RNA, 19 nt, Homo sapiens
  misc_RNA (1)...(19): siRNA sense strand
ggacaaaccccuacaaaug

SEQ ID NO: 1070405 - RNA, 19 nt, Homo sapiens
  misc_RNA (1)...(19): siRNA sense strand
ggagaugcccuacaagugu

SEQ ID NO: 1070406 - RNA, 19 nt, Homo sapiens
  misc_RNA (1)...(19): siRNA sense strand
aaagacgccuugauucaug

SEQ ID NO: 1070407 - RNA, 19 nt, Homo sapiens
  misc_RNA (1)...(19): siRNA sense strand
gaaacccuaugaaugcaau

SEQ ID NO: 1070408 - RNA, 19 nt, Homo sapiens
  misc_RNA (1)...(19): siRNA sense strand
gugcaaagaaugugagaaa

SEQ ID NO: 1070409 - RNA, 19 nt, Homo sapiens
  misc_RNA (1)...(19): siRNA sense strand
ccaaaggguccauacauga

SEQ ID NO: 1070410 - RNA, 19 nt, Homo sapiens
  misc_RNA (1)...(19): siRNA sense strand
ggagagaaacccuaugagu

SEQ ID NO: 1070411 - RNA, 19 nt, Homo sapiens
  misc_RNA (1)...(19): siRNA sense strand
caggagcuguggauaguga

SEQ ID NO: 1070412 - RNA, 19 nt, Homo sapiens
  misc_RNA (1)...(19): siRNA sense strand
gaaagacgccuugauucau

SEQ ID NO: 1070413 - RNA, 19 nt, Homo sapiens
  misc_RNA (1)...(19): siRNA sense strand
ggagaagcccuaugaaugc

SEQ ID NO: 1070414 - RNA, 19 nt, Homo sapiens
  misc_RNA (1)...(19): siRNA sense strand
ggaaaugcagaaagguaaa

SEQ ID NO: 1070415 - RNA, 19 nt, Homo sapiens
  misc_RNA (1)...(19): siRNA sense strand
cagauguucuccaugaaug

SEQ ID NO: 1070416 - RNA, 19 nt, Homo sapiens
  misc_RNA (1)...(19): siRNA sense strand
ggaaagguuuuaacaggaa

SEQ ID NO: 1070417 - RNA, 19 nt, Homo sapiens
  misc_RNA (1)...(19): siRNA sense strand
gggagaaaccauacaagug

SEQ ID NO: 1070418 - RNA, 19 nt, Homo sapiens
  misc_RNA (1)...(19): siRNA sense strand
agagaaacccuaugagugu

SEQ ID NO: 1070419 - RNA, 19 nt, Homo sapiens
  misc_RNA (1)...(19): siRNA sense strand
ugacagagcacaaguucau

SEQ ID NO: 1070420 - RNA, 19 nt, Homo sapiens
  misc_RNA (1)...(19): siRNA sense strand
gagcccaccuaauucaaca

SEQ ID NO: 1070421 - RNA, 19 nt, Homo sapiens
  misc_RNA (1)...(19): siRNA sense strand
gcagauguucuccaugaau

SEQ ID NO: 1070422 - RNA, 19 nt, Homo sapiens
  misc_RNA (1)...(19): siRNA sense strand
ggcaggagcuguggauagu

SEQ ID NO: 1070423 - RNA, 19 nt, Homo sapiens
  misc_RNA (1)...(19): siRNA sense strand
gggaaagacgccuugauuc

SEQ ID NO: 1070424 - RNA, 19 nt, Homo sapiens
  misc_RNA (1)...(19): siRNA sense strand
gcaauagagcccaccuaau

SEQ ID NO: 1070425 - RNA, 19 nt, Homo sapiens
  misc_RNA (1)...(19): siRNA sense strand
gagaagcccuaugaaugca

SEQ ID NO: 1070426 - RNA, 19 nt, Homo sapiens
  misc_RNA (1)...(19): siRNA sense strand
gagaagcccuaugauugca

SEQ ID NO: 1070427 - RNA, 19 nt, Homo sapiens
  misc_RNA (1)...(19): siRNA sense strand
gcaaagaaugugagaaagc

SEQ ID NO: 1070428 - RNA, 19 nt, Homo sapiens
  misc_RNA (1)...(19): siRNA sense strand
guggaaaggccuucagaug

SEQ ID NO: 1070429 - RNA, 19 nt, Homo sapiens
  misc_RNA (1)...(19): siRNA sense strand
ccacuuacccgccagucuu

SEQ ID NO: 1070430 - RNA, 19 nt, Homo sapiens
  misc_RNA (1)...(19): siRNA sense strand
ccugugggcuucugguuuc

SEQ ID NO: 1070431 - RNA, 19 nt, Homo sapiens
  misc_RNA (1)...(19): siRNA sense strand
ucuucaaccucaagugauu

SEQ ID NO: 1070432 - RNA, 19 nt, Homo sapiens
  misc_RNA (1)...(19): siRNA sense strand
gggagaugcccuacaagug

SEQ ID NO: 1070433 - RNA, 19 nt, Homo sapiens
  misc_RNA (1)...(19): siRNA sense strand
gauguggcugugaccuuua

SEQ ID NO: 1070434 - RNA, 19 nt, Homo sapiens
  misc_RNA (1)...(19): siRNA sense strand
gccugacucuggaaucuuc

SEQ ID NO: 1070435 - RNA, 19 nt, Homo sapiens
  misc_RNA (1)...(19): siRNA sense strand
ucacccaccggucuacuuu

SEQ ID NO: 1070436 - RNA, 19 nt, Homo sapiens
  misc_RNA (1)...(19): siRNA sense strand
uggaaaugcagaaagguaa

SEQ ID NO: 1070437 - RNA, 19 nt, Homo sapiens
  misc_RNA (1)...(19): siRNA sense strand
ggcauuacaagagugguua

SEQ ID NO: 1070438 - RNA, 19 nt, Homo sapiens
  misc_RNA (1)...(19): siRNA sense strand
accaaaggguccauacaug

SEQ ID NO: 1070439 - RNA, 19 nt, Homo sapiens
  misc_RNA (1)...(19): siRNA sense strand
gcaccaaaggguccauaca

SEQ ID NO: 1070440 - RNA, 19 nt, Homo sapiens
  misc_RNA (1)...(19): siRNA sense strand
caacucucauucggcacua

SEQ ID NO: 1070441 - RNA, 19 nt, Homo sapiens
  misc_RNA (1)...(19): siRNA sense strand
ggugacagagcacaaguuc

SEQ ID NO: 1070442 - RNA, 19 nt, Homo sapiens
  misc_RNA (1)...(19): siRNA sense strand
gcacuccagggcauuacaa

SEQ ID NO: 1070443 - RNA, 19 nt, Homo sapiens
  misc_RNA (1)...(19): siRNA sense strand
gaaacccuaugaguguagu

SEQ ID NO: 1070444 - RNA, 19 nt, Homo sapiens
  misc_RNA (1)...(19): siRNA sense strand
aaugaaacccuaugaaugc

SEQ ID NO: 1070445 - RNA, 19 nt, Homo sapiens
  misc_RNA (1)...(19): siRNA sense strand
agggaaagacgccuugauu

SEQ ID NO: 1070446 - RNA, 19 nt, Homo sapiens
  misc_RNA (1)...(19): siRNA sense strand
gggcaggagcuguggauag

SEQ ID NO: 1070447 - RNA, 19 nt, Homo sapiens
  misc_RNA (1)...(19): siRNA sense strand
agaugcagcucagaacuca

SEQ ID NO: 1070448 - RNA, 19 nt, Homo sapiens
  misc_RNA (1)...(19): siRNA sense strand
gaaaugcagaaagguaaag

SEQ ID NO: 1070449 - RNA, 19 nt, Homo sapiens
  misc_RNA (1)...(19): siRNA sense strand
cuggagagaagcccuauga

SEQ ID NO: 1070450 - RNA, 19 nt, Homo sapiens
  misc_RNA (1)...(19): siRNA sense strand
gugguuaucagcagauguu

SEQ ID NO: 1070451 - RNA, 19 nt, Homo sapiens
  misc_RNA (1)...(19): siRNA sense strand
aaucuucaaccucaaguga

SEQ ID NO: 1070452 - RNA, 19 nt, Homo sapiens
  misc_RNA (1)...(19): siRNA sense strand
gaguguagucaaugucgaa

SEQ ID NO: 1070453 - RNA, 19 nt, Homo sapiens
  misc_RNA (1)...(19): siRNA sense strand
uuacaagagugguuaucag

SEQ ID NO: 1070454 - RNA, 19 nt, Homo sapiens
  misc_RNA (1)...(19): siRNA sense strand
gacagagcacaaguucaua

SEQ ID NO: 1070455 - RNA, 19 nt, Homo sapiens
  misc_RNA (1)...(19): siRNA sense strand
cuaugaguguagucaaugu

SEQ ID NO: 1070456 - RNA, 19 nt, Homo sapiens
  misc_RNA (1)...(19): siRNA sense strand
ccacaaggagacccaucuu

SEQ ID NO: 1070457 - RNA, 19 nt, Homo sapiens
  misc_RNA (1)...(19): siRNA sense strand
caccaaaggguccauacau

SEQ ID NO: 1070458 - RNA, 19 nt, Homo sapiens
  misc_RNA (1)...(19): siRNA sense strand
augcagcucagaacucaua

SEQ ID NO: 1070459 - RNA, 19 nt, Homo sapiens
  misc_RNA (1)...(19): siRNA sense strand
ccaccggucuacuuuuauu

SEQ ID NO: 1070460 - RNA, 19 nt, Homo sapiens
  misc_RNA (1)...(19): siRNA sense strand
ggaagggcuuuuggaaaug

SEQ ID NO: 1070461 - RNA, 19 nt, Homo sapiens
  misc_RNA (1)...(19): siRNA sense strand
aauagagcccaccuaauuc

SEQ ID NO: 1070462 - RNA, 19 nt, Homo sapiens
  misc_RNA (1)...(19): siRNA sense strand
uguagucaaugucgaaagg

SEQ ID NO: 1070463 - RNA, 19 nt, Homo sapiens
  misc_RNA (1)...(19): siRNA sense strand
ggagaccugugggcuucug

SEQ ID NO: 1070464 - RNA, 19 nt, Homo sapiens
  misc_RNA (1)...(19): siRNA sense strand
cacuuacccgccagucuua

SEQ ID NO: 1070465 - RNA, 19 nt, Homo sapiens
  misc_RNA (1)...(19): siRNA sense strand
agcaauagagcccaccuaa

SEQ ID NO: 1070466 - RNA, 19 nt, Homo sapiens
  misc_RNA (1)...(19): siRNA sense strand
gaggaagggcuuuuggaaa

SEQ ID NO: 1070467 - RNA, 19 nt, Homo sapiens
  misc_RNA (1)...(19): siRNA sense strand
cggagcacguaccucauuc

SEQ ID NO: 1070468 - RNA, 19 nt, Homo sapiens
  misc_RNA (1)...(19): siRNA sense strand
ccggagcacguaccucauu

SEQ ID NO: 1070469 - RNA, 19 nt, Homo sapiens
  misc_RNA (1)...(19): siRNA sense strand
gcccaccuaauucaacauu

SEQ ID NO: 1070470 - RNA, 19 nt, Homo sapiens
  misc_RNA (1)...(19): siRNA sense strand
cuggagagaaacccuauga

SEQ ID NO: 1070471 - RNA, 19 nt, Homo sapiens
  misc_RNA (1)...(19): siRNA sense strand
gggcauuacaagagugguu

SEQ ID NO: 1070472 - RNA, 19 nt, Homo sapiens
  misc_RNA (1)...(19): siRNA sense strand
aggaagggcuuuuggaaau

SEQ ID NO: 1070473 - RNA, 19 nt, Homo sapiens
  misc_RNA (1)...(19): siRNA sense strand
gggaaagugagccuugaag

SEQ ID NO: 1070474 - RNA, 19 nt, Homo sapiens
  misc_RNA (1)...(19): siRNA sense strand
ggagcacguaccucauuca

SEQ ID NO: 1070475 - RNA, 19 nt, Homo sapiens
  misc_RNA (1)...(19): siRNA sense strand
ggaagccugacucuggaau

SEQ ID NO: 1070476 - RNA, 19 nt, Homo sapiens
  misc_RNA (1)...(19): siRNA sense strand
gggcuucugguuucacuag

SEQ ID NO: 1070477 - RNA, 19 nt, Homo sapiens
  misc_RNA (1)...(19): siRNA sense strand
cuacaaaugcaagcagugu

SEQ ID NO: 1070478 - RNA, 19 nt, Homo sapiens
  misc_RNA (1)...(19): siRNA sense strand
gaaguuaucaacccucuga

SEQ ID NO: 1070479 - RNA, 19 nt, Homo sapiens
  misc_RNA (1)...(19): siRNA sense strand
gccacuaucuggaaaauua

SEQ ID NO: 1070480 - RNA, 19 nt, Homo sapiens
  misc_RNA (1)...(19): siRNA sense strand
gaagaacuugguugcgaua

SEQ ID NO: 1070481 - RNA, 19 nt, Homo sapiens
  misc_RNA (1)...(19): siRNA sense strand
ucaacccucugauagaaga

SEQ ID NO: 1070482 - RNA, 19 nt, Homo sapiens
  misc_RNA (1)...(19): siRNA sense strand
guggaagccugcagagcaa

SEQ ID NO: 1070483 - RNA, 19 nt, Homo sapiens
  misc_RNA (1)...(19): siRNA sense strand
caagggaagcagcguuuga

SEQ ID NO: 1070484 - RNA, 19 nt, Homo sapiens
  misc_RNA (1)...(19): siRNA sense strand
ggguggaccucgauauuuu

SEQ ID NO: 1070485 - RNA, 19 nt, Homo sapiens
  misc_RNA (1)...(19): siRNA sense strand
cugacugccucugaaguua

SEQ ID NO: 1070486 - RNA, 19 nt, Homo sapiens
  misc_RNA (1)...(19): siRNA sense strand
ucaauuaccagcaguuucu

SEQ ID NO: 1070487 - RNA, 19 nt, Homo sapiens
  misc_RNA (1)...(19): siRNA sense strand
gggagccaguggacgaaga

SEQ ID NO: 1070488 - RNA, 19 nt, Homo sapiens
  misc_RNA (1)...(19): siRNA sense strand
cgucuccgccacccacuua

SEQ ID NO: 1070489 - RNA, 19 nt, Homo sapiens
  misc_RNA (1)...(19): siRNA sense strand
caggguggaccucgauauu

SEQ ID NO: 1070490 - RNA, 19 nt, Homo sapiens
  misc_RNA (1)...(19): siRNA sense strand
caucaauuaccagcaguuu

SEQ ID NO: 1070491 - RNA, 19 nt, Homo sapiens
  misc_RNA (1)...(19): siRNA sense strand
gauugcucccggcagaaua

SEQ ID NO: 1070492 - RNA, 19 nt, Homo sapiens
  misc_RNA (1)...(19): siRNA sense strand
gacugccucugaaguuauc

SEQ ID NO: 1070493 - RNA, 19 nt, Homo sapiens
  misc_RNA (1)...(19): siRNA sense strand
gcaagggaagcagcguuug

SEQ ID NO: 1070494 - RNA, 19 nt, Homo sapiens
  misc_RNA (1)...(19): siRNA sense strand
gcaguuucuccgccacuau

SEQ ID NO: 1070495 - RNA, 19 nt, Homo sapiens
  misc_RNA (1)...(19): siRNA sense strand
cagcguuugaugccgaaua

SEQ ID NO: 1070496 - RNA, 19 nt, Homo sapiens
  misc_RNA (1)...(19): siRNA sense strand
agaacuugguugcgauaag

SEQ ID NO: 1070497 - RNA, 19 nt, Homo sapiens
  misc_RNA (1)...(19): siRNA sense strand
ccacccacuuagcguuuua

SEQ ID NO: 1070498 - RNA, 19 nt, Homo sapiens
  misc_RNA (1)...(19): siRNA sense strand
ugacugccucugaaguuau

SEQ ID NO: 1070499 - RNA, 19 nt, Homo sapiens
  misc_RNA (1)...(19): siRNA sense strand
ggacaucucugcgcaccuu

SEQ ID NO: 1070500 - RNA, 19 nt, Homo sapiens
  misc_RNA (1)...(19): siRNA sense strand
caucucaaauucacuccua

SEQ ID NO: 1070501 - RNA, 19 nt, Homo sapiens
  misc_RNA (1)...(19): siRNA sense strand
ggucaacacccucuuccua

SEQ ID NO: 1070502 - RNA, 19 nt, Homo sapiens
  misc_RNA (1)...(19): siRNA sense strand
gcaagauccugcccuucca

SEQ ID NO: 1070503 - RNA, 19 nt, Homo sapiens
  misc_RNA (1)...(19): siRNA sense strand
aaagacagcccggacacua

SEQ ID NO: 1070504 - RNA, 19 nt, Homo sapiens
  misc_RNA (1)...(19): siRNA sense strand
cuagagaggcggacauugu

SEQ ID NO: 1070505 - RNA, 19 nt, Homo sapiens
  misc_RNA (1)...(19): siRNA sense strand
ccucugggcccuagacuug

SEQ ID NO: 1070506 - RNA, 19 nt, Homo sapiens
  misc_RNA (1)...(19): siRNA sense strand
gcuacagccugguguucga

SEQ ID NO: 1070507 - RNA, 19 nt, Homo sapiens
  misc_RNA (1)...(19): siRNA sense strand
gcccuagacuuggcucaga

SEQ ID NO: 1070508 - RNA, 19 nt, Homo sapiens
  misc_RNA (1)...(19): siRNA sense strand
ggugucuccuucuaucuca

SEQ ID NO: 1070509 - RNA, 19 nt, Homo sapiens
  misc_RNA (1)...(19): siRNA sense strand
uagagaggcggacauuguu

SEQ ID NO: 1070510 - RNA, 19 nt, Homo sapiens
  misc_RNA (1)...(19): siRNA sense strand
uuaccgagacuccaucuuc

SEQ ID NO: 1070511 - RNA, 19 nt, Homo sapiens
  misc_RNA (1)...(19): siRNA sense strand
ucucgucugucucugucua

SEQ ID NO: 1070512 - RNA, 19 nt, Homo sapiens
  misc_RNA (1)...(19): siRNA sense strand
caacacccucuuccuacga

SEQ ID NO: 1070513 - RNA, 19 nt, Homo sapiens
  misc_RNA (1)...(19): siRNA sense strand
gagcuuaccgagacuccau

SEQ ID NO: 1070514 - RNA, 19 nt, Homo sapiens
  misc_RNA (1)...(19): siRNA sense strand
gauggucaacacccucuuc

SEQ ID NO: 1070515 - RNA, 19 nt, Homo sapiens
  misc_RNA (1)...(19): siRNA sense strand
uacuagaggcugagcagaa

SEQ ID NO: 1070516 - RNA, 19 nt, Homo sapiens
  misc_RNA (1)...(19): siRNA sense strand
ccaguagccuccccacuuc

SEQ ID NO: 1070517 - RNA, 19 nt, Homo sapiens
  misc_RNA (1)...(19): siRNA sense strand
acaagaacccugacaauaa

SEQ ID NO: 1070518 - RNA, 19 nt, Homo sapiens
  misc_RNA (1)...(19): siRNA sense strand
gacaagaacccugacaaua

SEQ ID NO: 1070519 - RNA, 19 nt, Homo sapiens
  misc_RNA (1)...(19): siRNA sense strand
caagaacccugacaauaag

SEQ ID NO: 1070520 - RNA, 19 nt, Homo sapiens
  misc_RNA (1)...(19): siRNA sense strand
ccuaugagguucugucuga

SEQ ID NO: 1070521 - RNA, 19 nt, Homo sapiens
  misc_RNA (1)...(19): siRNA sense strand
ucaaauggauggacagcaa

SEQ ID NO: 1070522 - RNA, 19 nt, Homo sapiens
  misc_RNA (1)...(19): siRNA sense strand
ccaccgagaugaucaaugg

SEQ ID NO: 1070523 - RNA, 19 nt, Homo sapiens
  misc_RNA (1)...(19): siRNA sense strand
caagaaacgcucccuguau

SEQ ID NO: 1070524 - RNA, 19 nt, Homo sapiens
  misc_RNA (1)...(19): siRNA sense strand
aagaaacgcucccuguaug

SEQ ID NO: 1070525 - RNA, 19 nt, Homo sapiens
  misc_RNA (1)...(19): siRNA sense strand
ggcaggcuuuggagaauuu

SEQ ID NO: 1070526 - RNA, 19 nt, Homo sapiens
  misc_RNA (1)...(19): siRNA sense strand
ccaagaaacgcucccugua

SEQ ID NO: 1070527 - RNA, 19 nt, Homo sapiens
  misc_RNA (1)...(19): siRNA sense strand
gaugaucaauggccacaag

SEQ ID NO: 1070528 - RNA, 19 nt, Homo sapiens
  misc_RNA (1)...(19): siRNA sense strand
ggacagcccauucaauagu

SEQ ID NO: 1070529 - RNA, 19 nt, Homo sapiens
  misc_RNA (1)...(19): siRNA sense strand
ggacaucuuccgggaguuu

SEQ ID NO: 1070530 - RNA, 19 nt, Homo sapiens
  misc_RNA (1)...(19): siRNA sense strand
gcguggagguggaggaaga

SEQ ID NO: 1070531 - RNA, 19 nt, Homo sapiens
  misc_RNA (1)...(19): siRNA sense strand
ccuggacccuuucuccuuu

SEQ ID NO: 1070532 - RNA, 19 nt, Homo sapiens
  misc_RNA (1)...(19): siRNA sense strand
cgacaagaacccugacaau

SEQ ID NO: 1070533 - RNA, 19 nt, Homo sapiens
  misc_RNA (1)...(19): siRNA sense strand
ccaagcgcaucguggagaa

SEQ ID NO: 1070534 - RNA, 19 nt, Homo sapiens
  misc_RNA (1)...(19): siRNA sense strand
gacagcccauucaauagug

SEQ ID NO: 1070535 - RNA, 19 nt, Homo sapiens
  misc_RNA (1)...(19): siRNA sense strand
gccacaaggucaccaccaa

SEQ ID NO: 1070536 - RNA, 19 nt, Homo sapiens
  misc_RNA (1)...(19): siRNA sense strand
aguucaagcuggugucuga

SEQ ID NO: 1070537 - RNA, 19 nt, Homo sapiens
  misc_RNA (1)...(19): siRNA sense strand
gcuggugucugaggccuau

SEQ ID NO: 1070538 - RNA, 19 nt, Homo sapiens
  misc_RNA (1)...(19): siRNA sense strand
gaagacgggcagcucaagu

SEQ ID NO: 1070539 - RNA, 19 nt, Homo sapiens
  misc_RNA (1)...(19): siRNA sense strand
gagaauuuccggccuucau

SEQ ID NO: 1070540 - RNA, 19 nt, Homo sapiens
  misc_RNA (1)...(19): siRNA sense strand
gacccuuucuccuuugagu

SEQ ID NO: 1070541 - RNA, 19 nt, Homo sapiens
  misc_RNA (1)...(19): siRNA sense strand
cggaggacaucaagaaagc

SEQ ID NO: 1070542 - RNA, 19 nt, Homo sapiens
  misc_RNA (1)...(19): siRNA sense strand
agaaacgcucccuguauga

SEQ ID NO: 1070543 - RNA, 19 nt, Homo sapiens
  misc_RNA (1)...(19): siRNA sense strand
aggaggaggcggagaagaa

SEQ ID NO: 1070544 - RNA, 19 nt, Homo sapiens
  misc_RNA (1)...(19): siRNA sense strand
cggcaggcuuuggagaauu

SEQ ID NO: 1070545 - RNA, 19 nt, Homo sapiens
  misc_RNA (1)...(19): siRNA sense strand
gggacagcccauucaauag

SEQ ID NO: 1070546 - RNA, 19 nt, Homo sapiens
  misc_RNA (1)...(19): siRNA sense strand
ggaggaggcggagaagaag

SEQ ID NO: 1070547 - RNA, 19 nt, Homo sapiens
  misc_RNA (1)...(19): siRNA sense strand
cuucucauccuucaacaug

SEQ ID NO: 1070548 - RNA, 19 nt, Homo sapiens
  misc_RNA (1)...(19): siRNA sense strand
auaaggaggaggcggagaa

SEQ ID NO: 1070549 - RNA, 19 nt, Homo sapiens
  misc_RNA (1)...(19): siRNA sense strand
gaggccuucucauccuuca

SEQ ID NO: 1070550 - RNA, 19 nt, Homo sapiens
  misc_RNA (1)...(19): siRNA sense strand
ucauggaggccuucucauc

SEQ ID NO: 1070551 - RNA, 19 nt, Homo sapiens
  misc_RNA (1)...(19): siRNA sense strand
gaaacgcucccuguaugac

SEQ ID NO: 1070552 - RNA, 19 nt, Homo sapiens
  misc_RNA (1)...(19): siRNA sense strand
ggaagacgggcagcucaag

SEQ ID NO: 1070553 - RNA, 19 nt, Homo sapiens
  misc_RNA (1)...(19): siRNA sense strand
gaugaggagucuuuguuua

SEQ ID NO: 1070554 - RNA, 19 nt, Homo sapiens
  misc_RNA (1)...(19): siRNA sense strand
cagaauaaauggacaacua

SEQ ID NO: 1070555 - RNA, 19 nt, Homo sapiens
  misc_RNA (1)...(19): siRNA sense strand
gcccagaaguucaagagua

SEQ ID NO: 1070556 - RNA, 19 nt, Homo sapiens
  misc_RNA (1)...(19): siRNA sense strand
ccucagaacuuacucauca

SEQ ID NO: 1070557 - RNA, 19 nt, Homo sapiens
  misc_RNA (1)...(19): siRNA sense strand
gggauuagcagaauaaaug

SEQ ID NO: 1070558 - RNA, 19 nt, Homo sapiens
  misc_RNA (1)...(19): siRNA sense strand
gaggaaggagucccauuua

SEQ ID NO: 1070559 - RNA, 19 nt, Homo sapiens
  misc_RNA (1)...(19): siRNA sense strand
gcucuuaugcgacaguuua

SEQ ID NO: 1070560 - RNA, 19 nt, Homo sapiens
  misc_RNA (1)...(19): siRNA sense strand
ccucugagcuggacauaug

SEQ ID NO: 1070561 - RNA, 19 nt, Homo sapiens
  misc_RNA (1)...(19): siRNA sense strand
ccaaagagacacugacauu

SEQ ID NO: 1070562 - RNA, 19 nt, Homo sapiens
  misc_RNA (1)...(19): siRNA sense strand
ccagaaaugugugaccuuu

SEQ ID NO: 1070563 - RNA, 19 nt, Homo sapiens
  misc_RNA (1)...(19): siRNA sense strand
uaacuacaauccagaaugg

SEQ ID NO: 1070564 - RNA, 19 nt, Homo sapiens
  misc_RNA (1)...(19): siRNA sense strand
caagcuaccuaacuacaau

SEQ ID NO: 1070565 - RNA, 19 nt, Homo sapiens
  misc_RNA (1)...(19): siRNA sense strand
ggagucccauuuacagcua

SEQ ID NO: 1070566 - RNA, 19 nt, Homo sapiens
  misc_RNA (1)...(19): siRNA sense strand
cccagaaguucaagaguaa

SEQ ID NO: 1070567 - RNA, 19 nt, Homo sapiens
  misc_RNA (1)...(19): siRNA sense strand
aggaagcacuuguucauga

SEQ ID NO: 1070568 - RNA, 19 nt, Homo sapiens
  misc_RNA (1)...(19): siRNA sense strand
ggacaacuaguggcuuuaa

SEQ ID NO: 1070569 - RNA, 19 nt, Homo sapiens
  misc_RNA (1)...(19): siRNA sense strand
ggaagcacuuguucaugau

SEQ ID NO: 1070570 - RNA, 19 nt, Homo sapiens
  misc_RNA (1)...(19): siRNA sense strand
ucuccaagcuaccuaacua

SEQ ID NO: 1070571 - RNA, 19 nt, Homo sapiens
  misc_RNA (1)...(19): siRNA sense strand
ggaaggagucccauuuaca

SEQ ID NO: 1070572 - RNA, 19 nt, Homo sapiens
  misc_RNA (1)...(19): siRNA sense strand
gcugggagccacugaauau

SEQ ID NO: 1070573 - RNA, 19 nt, Homo sapiens
  misc_RNA (1)...(19): siRNA sense strand
aagcacuuguucaugauua

SEQ ID NO: 1070574 - RNA, 19 nt, Homo sapiens
  misc_RNA (1)...(19): siRNA sense strand
gacaacuaguggcuuuaaa

SEQ ID NO: 1070575 - RNA, 19 nt, Homo sapiens
  misc_RNA (1)...(19): siRNA sense strand
uguaccagcuuccugauga

SEQ ID NO: 1070576 - RNA, 19 nt, Homo sapiens
  misc_RNA (1)...(19): siRNA sense strand
ggcugcaucuuuauugaaa

SEQ ID NO: 1070577 - RNA, 19 nt, Homo sapiens
  misc_RNA (1)...(19): siRNA sense strand
caucuuacuugaacuugga

SEQ ID NO: 1070578 - RNA, 19 nt, Homo sapiens
  misc_RNA (1)...(19): siRNA sense strand
gaaacaugccaauauugug

SEQ ID NO: 1070579 - RNA, 19 nt, Homo sapiens
  misc_RNA (1)...(19): siRNA sense strand
gaaggagucccauuuacag

SEQ ID NO: 1070580 - RNA, 19 nt, Homo sapiens
  misc_RNA (1)...(19): siRNA sense strand
ugacauaauccacaccaaa

SEQ ID NO: 1070581 - RNA, 19 nt, Homo sapiens
  misc_RNA (1)...(19): siRNA sense strand
uugaauacaugcacacaga

SEQ ID NO: 1070582 - RNA, 19 nt, Homo sapiens
  misc_RNA (1)...(19): siRNA sense strand
gcuaaagccagaaaugugu

SEQ ID NO: 1070583 - RNA, 19 nt, Homo sapiens
  misc_RNA (1)...(19): siRNA sense strand
ugaaacaugccaauauugu

SEQ ID NO: 1070584 - RNA, 19 nt, Homo sapiens
  misc_RNA (1)...(19): siRNA sense strand
gagucuuuguuuacaguuu

SEQ ID NO: 1070585 - RNA, 19 nt, Homo sapiens
  misc_RNA (1)...(19): siRNA sense strand
gcuccugcaugacauaauc

SEQ ID NO: 1070586 - RNA, 19 nt, Homo sapiens
  misc_RNA (1)...(19): siRNA sense strand
ccagacauacucuucagaa

SEQ ID NO: 1070587 - RNA, 19 nt, Homo sapiens
  misc_RNA (1)...(19): siRNA sense strand
ccacugaauauuccucuga

SEQ ID NO: 1070588 - RNA, 19 nt, Homo sapiens
  misc_RNA (1)...(19): siRNA sense strand
agaggaaggagucccauuu

SEQ ID NO: 1070589 - RNA, 19 nt, Homo sapiens
  misc_RNA (1)...(19): siRNA sense strand
ccucauaaugucagacuuu

SEQ ID NO: 1070590 - RNA, 19 nt, Homo sapiens
  misc_RNA (1)...(19): siRNA sense strand
caggcugcaucuuuauuga

SEQ ID NO: 1070591 - RNA, 19 nt, Homo sapiens
  misc_RNA (1)...(19): siRNA sense strand
guuccagggucaaccuuug

SEQ ID NO: 1070592 - RNA, 19 nt, Homo sapiens
  misc_RNA (1)...(19): siRNA sense strand
agaacuuacucaucaguca

SEQ ID NO: 1070593 - RNA, 19 nt, Homo sapiens
  misc_RNA (1)...(19): siRNA sense strand
gaagcacuuguucaugauu

SEQ ID NO: 1070594 - RNA, 19 nt, Homo sapiens
  misc_RNA (1)...(19): siRNA sense strand
gacauaauccacaccaaag

SEQ ID NO: 1070595 - RNA, 19 nt, Homo sapiens
  misc_RNA (1)...(19): siRNA sense strand
ggaagagccucccuuuugg

SEQ ID NO: 1070596 - RNA, 19 nt, Homo sapiens
  misc_RNA (1)...(19): siRNA sense strand
caaagagacacugacauuc

SEQ ID NO: 1070597 - RNA, 19 nt, Homo sapiens
  misc_RNA (1)...(19): siRNA sense strand
ugaggagucuuuguuuaca

SEQ ID NO: 1070598 - RNA, 19 nt, Homo sapiens
  misc_RNA (1)...(19): siRNA sense strand
gaauaaauggacaacuagu

SEQ ID NO: 1070599 - RNA, 19 nt, Homo sapiens
  misc_RNA (1)...(19): siRNA sense strand
gagcucaaacuggcugauu

SEQ ID NO: 1070600 - RNA, 19 nt, Homo sapiens
  misc_RNA (1)...(19): siRNA sense strand
ccacggaguaacagugauu

SEQ ID NO: 1070601 - RNA, 19 nt, Homo sapiens
  misc_RNA (1)...(19): siRNA sense strand
auauugugcuccugcauga

SEQ ID NO: 1070602 - RNA, 19 nt, Homo sapiens
  misc_RNA (1)...(19): siRNA sense strand
agaaaugugugaccuuuug

SEQ ID NO: 1070603 - RNA, 19 nt, Homo sapiens
  misc_RNA (1)...(19): siRNA sense strand
gcacuuguucaugauuauu

SEQ ID NO: 1070604 - RNA, 19 nt, Homo sapiens
  misc_RNA (1)...(19): siRNA sense strand
gagacacugacauucguuu

SEQ ID NO: 1070605 - RNA, 19 nt, Homo sapiens
  misc_RNA (1)...(19): siRNA sense strand
gcagccucaucuuacuuga

SEQ ID NO: 1070606 - RNA, 19 nt, Homo sapiens
  misc_RNA (1)...(19): siRNA sense strand
ugaugaggagucuuuguuu

SEQ ID NO: 1070607 - RNA, 19 nt, Homo sapiens
  misc_RNA (1)...(19): siRNA sense strand
ucagcgcccugccaucuca

SEQ ID NO: 1070608 - RNA, 19 nt, Homo sapiens
  misc_RNA (1)...(19): siRNA sense strand
ccaggaagcacuuguucau

SEQ ID NO: 1070609 - RNA, 19 nt, Homo sapiens
  misc_RNA (1)...(19): siRNA sense strand
ugucagacuuuucauguuu

SEQ ID NO: 1070610 - RNA, 19 nt, Homo sapiens
  misc_RNA (1)...(19): siRNA sense strand
gggcuucauccucauaaug

SEQ ID NO: 1070611 - RNA, 19 nt, Homo sapiens
  misc_RNA (1)...(19): siRNA sense strand
cugcaucuuuauugaaaug

SEQ ID NO: 1070612 - RNA, 19 nt, Homo sapiens
  misc_RNA (1)...(19): siRNA sense strand
guaaaaggccacggaguaa

SEQ ID NO: 1070613 - RNA, 19 nt, Homo sapiens
  misc_RNA (1)...(19): siRNA sense strand
ucaccacccagcccaguuu

SEQ ID NO: 1070614 - RNA, 19 nt, Homo sapiens
  misc_RNA (1)...(19): siRNA sense strand
ccaagcuaccuaacuacaa

SEQ ID NO: 1070615 - RNA, 19 nt, Homo sapiens
  misc_RNA (1)...(19): siRNA sense strand
guauaugucucagcaucca

SEQ ID NO: 1070616 - RNA, 19 nt, Homo sapiens
  misc_RNA (1)...(19): siRNA sense strand
cagcccaguuuagcaaaug

SEQ ID NO: 1070617 - RNA, 19 nt, Homo sapiens
  misc_RNA (1)...(19): siRNA sense strand
caaggggauuagcagaaua

SEQ ID NO: 1070618 - RNA, 19 nt, Homo sapiens
  misc_RNA (1)...(19): siRNA sense strand
aaagagacacugacauucg

SEQ ID NO: 1070619 - RNA, 19 nt, Homo sapiens
  misc_RNA (1)...(19): siRNA sense strand
gaggagucuuuguuuacag

SEQ ID NO: 1070620 - RNA, 19 nt, Homo sapiens
  misc_RNA (1)...(19): siRNA sense strand
gccuucauguugucuggaa

SEQ ID NO: 1070621 - RNA, 19 nt, Homo sapiens
  misc_RNA (1)...(19): siRNA sense strand
uugaacagcuggagaaaau

SEQ ID NO: 1070622 - RNA, 19 nt, Homo sapiens
  misc_RNA (1)...(19): siRNA sense strand
auggacaacuaguggcuuu

SEQ ID NO: 1070623 - RNA, 19 nt, Homo sapiens
  misc_RNA (1)...(19): siRNA sense strand
ggccacggaguaacaguga

SEQ ID NO: 1070624 - RNA, 19 nt, Homo sapiens
  misc_RNA (1)...(19): siRNA sense strand
gggagccacugaauauucc

SEQ ID NO: 1070625 - RNA, 19 nt, Homo sapiens
  misc_RNA (1)...(19): siRNA sense strand
agcucaaacuggcugauuu

SEQ ID NO: 1070626 - RNA, 19 nt, Homo sapiens
  misc_RNA (1)...(19): siRNA sense strand
ccagcccaguuuagcaaau

SEQ ID NO: 1070627 - RNA, 19 nt, Homo sapiens
  misc_RNA (1)...(19): siRNA sense strand
agaauaaauggacaacuag

SEQ ID NO: 1070628 - RNA, 19 nt, Homo sapiens
  misc_RNA (1)...(19): siRNA sense strand
uaaagccagaaauguguga

SEQ ID NO: 1070629 - RNA, 19 nt, Homo sapiens
  misc_RNA (1)...(19): siRNA sense strand
cuaacuacaauccagaaug

SEQ ID NO: 1070630 - RNA, 19 nt, Homo sapiens
  misc_RNA (1)...(19): siRNA sense strand
ggcuucauccucauaaugu

SEQ ID NO: 1070631 - RNA, 19 nt, Homo sapiens
  misc_RNA (1)...(19): siRNA sense strand
aagagacacugacauucgu

SEQ ID NO: 1070632 - RNA, 19 nt, Homo sapiens
  misc_RNA (1)...(19): siRNA sense strand
aggaaggagucccauuuac

SEQ ID NO: 1070633 - RNA, 19 nt, Homo sapiens
  misc_RNA (1)...(19): siRNA sense strand
guacauccaccaccaacac

SEQ ID NO: 1070634 - RNA, 19 nt, Homo sapiens
  misc_RNA (1)...(19): siRNA sense strand
auuuacagcuauccgagaa

SEQ ID NO: 1070635 - RNA, 19 nt, Homo sapiens
  misc_RNA (1)...(19): siRNA sense strand
guaccagcuuccugaugag

SEQ ID NO: 1070636 - RNA, 19 nt, Homo sapiens
  misc_RNA (1)...(19): siRNA sense strand
ccagggucaaccuuuguuu

SEQ ID NO: 1070637 - RNA, 19 nt, Homo sapiens
  misc_RNA (1)...(19): siRNA sense strand
caccaacacguucuucaca

SEQ ID NO: 1070638 - RNA, 19 nt, Homo sapiens
  misc_RNA (1)...(19): siRNA sense strand
cugaugaggagucuuuguu

SEQ ID NO: 1070639 - RNA, 19 nt, Homo sapiens
  misc_RNA (1)...(19): siRNA sense strand
ggcagccucaucuuacuug

SEQ ID NO: 1070640 - RNA, 19 nt, Homo sapiens
  misc_RNA (1)...(19): siRNA sense strand
gcucaaacuggcugauuuu

SEQ ID NO: 1070641 - RNA, 19 nt, Homo sapiens
  misc_RNA (1)...(19): siRNA sense strand
ggaagacccuauuauuuaa

SEQ ID NO: 1070642 - RNA, 19 nt, Homo sapiens
  misc_RNA (1)...(19): siRNA sense strand
gggaagacccuauuauuua

SEQ ID NO: 1070643 - RNA, 19 nt, Homo sapiens
  misc_RNA (1)...(19): siRNA sense strand
acacaucacugcauuauuu

SEQ ID NO: 1070644 - RNA, 19 nt, Homo sapiens
  misc_RNA (1)...(19): siRNA sense strand
gaacgaaugcacagaaaua

SEQ ID NO: 1070645 - RNA, 19 nt, Homo sapiens
  misc_RNA (1)...(19): siRNA sense strand
gaagauugcauguggguua

SEQ ID NO: 1070646 - RNA, 19 nt, Homo sapiens
  misc_RNA (1)...(19): siRNA sense strand
guacaugucugcuucugaa

SEQ ID NO: 1070647 - RNA, 19 nt, Homo sapiens
  misc_RNA (1)...(19): siRNA sense strand
gagaacgaaugcacagaaa

SEQ ID NO: 1070648 - RNA, 19 nt, Homo sapiens
  misc_RNA (1)...(19): siRNA sense strand
cagaaucuccugaacuuua

SEQ ID NO: 1070649 - RNA, 19 nt, Homo sapiens
  misc_RNA (1)...(19): siRNA sense strand
cagcaugccuuggacuuua

SEQ ID NO: 1070650 - RNA, 19 nt, Homo sapiens
  misc_RNA (1)...(19): siRNA sense strand
gaacugcuaugaucuucug

SEQ ID NO: 1070651 - RNA, 19 nt, Homo sapiens
  misc_RNA (1)...(19): siRNA sense strand
caugucugcuucugaaaua

SEQ ID NO: 1070652 - RNA, 19 nt, Homo sapiens
  misc_RNA (1)...(19): siRNA sense strand
gaguauugaugcuuucuga

SEQ ID NO: 1070653 - RNA, 19 nt, Homo sapiens
  misc_RNA (1)...(19): siRNA sense strand
uggcucaacugaaauauau

SEQ ID NO: 1070654 - RNA, 19 nt, Homo sapiens
  misc_RNA (1)...(19): siRNA sense strand
cacagaaucuccugaacuu

SEQ ID NO: 1070655 - RNA, 19 nt, Homo sapiens
  misc_RNA (1)...(19): siRNA sense strand
guggaggccuuuuauauua

SEQ ID NO: 1070656 - RNA, 19 nt, Homo sapiens
  misc_RNA (1)...(19): siRNA sense strand
guauuuaugcugcacuuua

SEQ ID NO: 1070657 - RNA, 19 nt, Homo sapiens
  misc_RNA (1)...(19): siRNA sense strand
gcuauuaucaccuuacuug

SEQ ID NO: 1070658 - RNA, 19 nt, Homo sapiens
  misc_RNA (1)...(19): siRNA sense strand
uuacauugguucuucauug

SEQ ID NO: 1070659 - RNA, 19 nt, Homo sapiens
  misc_RNA (1)...(19): siRNA sense strand
cgaaugcacagaaauauug

SEQ ID NO: 1070660 - RNA, 19 nt, Homo sapiens
  misc_RNA (1)...(19): siRNA sense strand
gcauucugcuugguauuaa

SEQ ID NO: 1070661 - RNA, 19 nt, Homo sapiens
  misc_RNA (1)...(19): siRNA sense strand
gguacacgaugcuuuacaa

SEQ ID NO: 1070662 - RNA, 19 nt, Homo sapiens
  misc_RNA (1)...(19): siRNA sense strand
gaagccgucuacccacuau

SEQ ID NO: 1070663 - RNA, 19 nt, Homo sapiens
  misc_RNA (1)...(19): siRNA sense strand
cuccugaacuuuaugauug

SEQ ID NO: 1070664 - RNA, 19 nt, Homo sapiens
  misc_RNA (1)...(19): siRNA sense strand
gcaaugcuuccucugguuu

SEQ ID NO: 1070665 - RNA, 19 nt, Homo sapiens
  misc_RNA (1)...(19): siRNA sense strand
caacacaucacugcauuau

SEQ ID NO: 1070666 - RNA, 19 nt, Homo sapiens
  misc_RNA (1)...(19): siRNA sense strand
cagauuacguuaccacagu

SEQ ID NO: 1070667 - RNA, 19 nt, Homo sapiens
  misc_RNA (1)...(19): siRNA sense strand
ugggaagacccuauuauuu

SEQ ID NO: 1070668 - RNA, 19 nt, Homo sapiens
  misc_RNA (1)...(19): siRNA sense strand
cuucaugccuauggaauaa

SEQ ID NO: 1070669 - RNA, 19 nt, Homo sapiens
  misc_RNA (1)...(19): siRNA sense strand
uauauuacgccuucccaua

SEQ ID NO: 1070670 - RNA, 19 nt, Homo sapiens
  misc_RNA (1)...(19): siRNA sense strand
caguugguguucuuuauau

SEQ ID NO: 1070671 - RNA, 19 nt, Homo sapiens
  misc_RNA (1)...(19): siRNA sense strand
gagaacugcuaugaucuuc

SEQ ID NO: 1070672 - RNA, 19 nt, Homo sapiens
  misc_RNA (1)...(19): siRNA sense strand
uacauugguucuucauuga

SEQ ID NO: 1070673 - RNA, 19 nt, Homo sapiens
  misc_RNA (1)...(19): siRNA sense strand
ugucgaguauugaugcuuu

SEQ ID NO: 1070674 - RNA, 19 nt, Homo sapiens
  misc_RNA (1)...(19): siRNA sense strand
gcauguggguuagggaaau

SEQ ID NO: 1070675 - RNA, 19 nt, Homo sapiens
  misc_RNA (1)...(19): siRNA sense strand
agaaucuccugaacuuuau

SEQ ID NO: 1070676 - RNA, 19 nt, Homo sapiens
  misc_RNA (1)...(19): siRNA sense strand
caacccaaguccagauuac

SEQ ID NO: 1070677 - RNA, 19 nt, Homo sapiens
  misc_RNA (1)...(19): siRNA sense strand
ccaguugguguucuuuaua

SEQ ID NO: 1070678 - RNA, 19 nt, Homo sapiens
  misc_RNA (1)...(19): siRNA sense strand
gcacagaaucuccugaacu

SEQ ID NO: 1070679 - RNA, 19 nt, Homo sapiens
  misc_RNA (1)...(19): siRNA sense strand
gugggaagacccuauuauu

SEQ ID NO: 1070680 - RNA, 19 nt, Homo sapiens
  misc_RNA (1)...(19): siRNA sense strand
ggacuuuauugugggaaga

SEQ ID NO: 1070681 - RNA, 19 nt, Homo sapiens
  misc_RNA (1)...(19): siRNA sense strand
ccaaguccagauuacguua

SEQ ID NO: 1070682 - RNA, 19 nt, Homo sapiens
  misc_RNA (1)...(19): siRNA sense strand
ggcaaugcuuccucugguu

SEQ ID NO: 1070683 - RNA, 19 nt, Homo sapiens
  misc_RNA (1)...(19): siRNA sense strand
aaauggcucaacugaaaua

SEQ ID NO: 1070684 - RNA, 19 nt, Homo sapiens
  misc_RNA (1)...(19): siRNA sense strand
cuucaaggauacucucaga

SEQ ID NO: 1070685 - RNA, 19 nt, Homo sapiens
  misc_RNA (1)...(19): siRNA sense strand
cagcauggcagcuauuauc

SEQ ID NO: 1070686 - RNA, 19 nt, Homo sapiens
  misc_RNA (1)...(19): siRNA sense strand
gauuggcucuaucuuggau

SEQ ID NO: 1070687 - RNA, 19 nt, Homo sapiens
  misc_RNA (1)...(19): siRNA sense strand
gcucuaucuuggauuuaug

SEQ ID NO: 1070688 - RNA, 19 nt, Homo sapiens
  misc_RNA (1)...(19): siRNA sense strand
gaaaagacuuauuguucuc

SEQ ID NO: 1070689 - RNA, 19 nt, Homo sapiens
  misc_RNA (1)...(19): siRNA sense strand
ccaacacaucacugcauua

SEQ ID NO: 1070690 - RNA, 19 nt, Homo sapiens
  misc_RNA (1)...(19): siRNA sense strand
gguguucuuuauauucguu

SEQ ID NO: 1070691 - RNA, 19 nt, Homo sapiens
  misc_RNA (1)...(19): siRNA sense strand
uggcagcuauuaucaccuu

SEQ ID NO: 1070692 - RNA, 19 nt, Homo sapiens
  misc_RNA (1)...(19): siRNA sense strand
caagaggacagagaacgaa

SEQ ID NO: 1070693 - RNA, 19 nt, Homo sapiens
  misc_RNA (1)...(19): siRNA sense strand
cuuuacuucuucccaauuu

SEQ ID NO: 1070694 - RNA, 19 nt, Homo sapiens
  misc_RNA (1)...(19): siRNA sense strand
cccacuauauaccauugua

SEQ ID NO: 1070695 - RNA, 19 nt, Homo sapiens
  misc_RNA (1)...(19): siRNA sense strand
caucacugcauuauuugaa

SEQ ID NO: 1070696 - RNA, 19 nt, Homo sapiens
  misc_RNA (1)...(19): siRNA sense strand
ucaaggauacucucagaag

SEQ ID NO: 1070697 - RNA, 19 nt, Homo sapiens
  misc_RNA (1)...(19): siRNA sense strand
uccaacacaucacugcauu

SEQ ID NO: 1070698 - RNA, 19 nt, Homo sapiens
  misc_RNA (1)...(19): siRNA sense strand
agauuacguuaccacagua

SEQ ID NO: 1070699 - RNA, 19 nt, Homo sapiens
  misc_RNA (1)...(19): siRNA sense strand
cagaguggauaaacuugag

SEQ ID NO: 1070700 - RNA, 19 nt, Homo sapiens
  misc_RNA (1)...(19): siRNA sense strand
guaccuacaccagcccuuu

SEQ ID NO: 1070701 - RNA, 19 nt, Homo sapiens
  misc_RNA (1)...(19): siRNA sense strand
uaugauuggcucuaucuug

SEQ ID NO: 1070702 - RNA, 19 nt, Homo sapiens
  misc_RNA (1)...(19): siRNA sense strand
ucucuucagccacugguua

SEQ ID NO: 1070703 - RNA, 19 nt, Homo sapiens
  misc_RNA (1)...(19): siRNA sense strand
cgccuucccauacauuaua

SEQ ID NO: 1070704 - RNA, 19 nt, Homo sapiens
  misc_RNA (1)...(19): siRNA sense strand
ggcucuaucuuggauuuau

SEQ ID NO: 1070705 - RNA, 19 nt, Homo sapiens
  misc_RNA (1)...(19): siRNA sense strand
ucguucaugucgaguauug

SEQ ID NO: 1070706 - RNA, 19 nt, Homo sapiens
  misc_RNA (1)...(19): siRNA sense strand
ccagaguggauaaacuuga

SEQ ID NO: 1070707 - RNA, 19 nt, Homo sapiens
  misc_RNA (1)...(19): siRNA sense strand
gaaugcacagaaauauugu

SEQ ID NO: 1070708 - RNA, 19 nt, Homo sapiens
  misc_RNA (1)...(19): siRNA sense strand
agagaacgaaugcacagaa

SEQ ID NO: 1070709 - RNA, 19 nt, Homo sapiens
  misc_RNA (1)...(19): siRNA sense strand
cuuguucacugcaaaauuu

SEQ ID NO: 1070710 - RNA, 19 nt, Homo sapiens
  misc_RNA (1)...(19): siRNA sense strand
ugguuacucuggcugugua

SEQ ID NO: 1070711 - RNA, 19 nt, Homo sapiens
  misc_RNA (1)...(19): siRNA sense strand
cgcauucugcuugguauua

SEQ ID NO: 1070712 - RNA, 19 nt, Homo sapiens
  misc_RNA (1)...(19): siRNA sense strand
acugguacacgaugcuuua

SEQ ID NO: 1070713 - RNA, 19 nt, Homo sapiens
  misc_RNA (1)...(19): siRNA sense strand
uauuuaugcugcacuuuac

SEQ ID NO: 1070714 - RNA, 19 nt, Homo sapiens
  misc_RNA (1)...(19): siRNA sense strand
ccaagaggacagagaacga

SEQ ID NO: 1070715 - RNA, 19 nt, Homo sapiens
  misc_RNA (1)...(19): siRNA sense strand
uccaguugguguucuuuau

SEQ ID NO: 1070716 - RNA, 19 nt, Homo sapiens
  misc_RNA (1)...(19): siRNA sense strand
ugucagccuugcacagaau

SEQ ID NO: 1070717 - RNA, 19 nt, Homo sapiens
  misc_RNA (1)...(19): siRNA sense strand
ucaugccuauggaauaauc

SEQ ID NO: 1070718 - RNA, 19 nt, Homo sapiens
  misc_RNA (1)...(19): siRNA sense strand
gcucaacugaaauauaugg

SEQ ID NO: 1070719 - RNA, 19 nt, Homo sapiens
  misc_RNA (1)...(19): siRNA sense strand
uaaucuccauuuccagagu

SEQ ID NO: 1070720 - RNA, 19 nt, Homo sapiens
  misc_RNA (1)...(19): siRNA sense strand
uuacgcauucugcuuggua

SEQ ID NO: 1070721 - RNA, 19 nt, Homo sapiens
  misc_RNA (1)...(19): siRNA sense strand
uauuacgccuucccauaca

SEQ ID NO: 1070722 - RNA, 19 nt, Homo sapiens
  misc_RNA (1)...(19): siRNA sense strand
gguggaggccuuuuauauu

SEQ ID NO: 1070723 - RNA, 19 nt, Homo sapiens
  misc_RNA (1)...(19): siRNA sense strand
gaaugguacucggggaaaa

SEQ ID NO: 1070724 - RNA, 19 nt, Homo sapiens
  misc_RNA (1)...(19): siRNA sense strand
gcaguugguggaggccuuu

SEQ ID NO: 1070725 - RNA, 19 nt, Homo sapiens
  misc_RNA (1)...(19): siRNA sense strand
augcugcacuuuacuucuu

SEQ ID NO: 1070726 - RNA, 19 nt, Homo sapiens
  misc_RNA (1)...(19): siRNA sense strand
ccagcaugccuuggacuuu

SEQ ID NO: 1070727 - RNA, 19 nt, Homo sapiens
  misc_RNA (1)...(19): siRNA sense strand
acaacccaaguccagauua

SEQ ID NO: 1070728 - RNA, 19 nt, Homo sapiens
  misc_RNA (1)...(19): siRNA sense strand
uauuaucaccuuacuugug

SEQ ID NO: 1070729 - RNA, 19 nt, Homo sapiens
  misc_RNA (1)...(19): siRNA sense strand
ggcagcuauuaucaccuua

SEQ ID NO: 1070730 - RNA, 19 nt, Homo sapiens
  misc_RNA (1)...(19): siRNA sense strand
gcagcauggcagcuauuau

SEQ ID NO: 1070731 - RNA, 19 nt, Homo sapiens
  misc_RNA (1)...(19): siRNA sense strand
ucaaccagcaugccuugga

SEQ ID NO: 1070732 - RNA, 19 nt, Homo sapiens
  misc_RNA (1)...(19): siRNA sense strand
agagaacugcuaugaucuu

SEQ ID NO: 1070733 - RNA, 19 nt, Homo sapiens
  misc_RNA (1)...(19): siRNA sense strand
uuagggaaaucugaucgau

SEQ ID NO: 1070734 - RNA, 19 nt, Homo sapiens
  misc_RNA (1)...(19): siRNA sense strand
uacccacuauauaccauug

SEQ ID NO: 1070735 - RNA, 19 nt, Homo sapiens
  misc_RNA (1)...(19): siRNA sense strand
guugguguucuuuauauuc

SEQ ID NO: 1070736 - RNA, 19 nt, Homo sapiens
  misc_RNA (1)...(19): siRNA sense strand
uuggcucuaucuuggauuu

SEQ ID NO: 1070737 - RNA, 19 nt, Homo sapiens
  misc_RNA (1)...(19): siRNA sense strand
gccgucuacccacuauaua

SEQ ID NO: 1070738 - RNA, 19 nt, Homo sapiens
  misc_RNA (1)...(19): siRNA sense strand
ugaagccgucuacccacua

SEQ ID NO: 1070739 - RNA, 19 nt, Homo sapiens
  misc_RNA (1)...(19): siRNA sense strand
gaggacagagaacgaaugc

SEQ ID NO: 1070740 - RNA, 19 nt, Homo sapiens
  misc_RNA (1)...(19): siRNA sense strand
aggagccaauggacacuga

SEQ ID NO: 1070741 - RNA, 19 nt, Homo sapiens
  misc_RNA (1)...(19): siRNA sense strand
caaagucccucuauuauua

SEQ ID NO: 1070742 - RNA, 19 nt, Homo sapiens
  misc_RNA (1)...(19): siRNA sense strand
gagcuuaucucuuguacuu

SEQ ID NO: 1070743 - RNA, 19 nt, Homo sapiens
  misc_RNA (1)...(19): siRNA sense strand
gcucaaagucccucuauua

SEQ ID NO: 1070744 - RNA, 19 nt, Homo sapiens
  misc_RNA (1)...(19): siRNA sense strand
uaacgagucuggucaguuu

SEQ ID NO: 1070745 - RNA, 19 nt, Homo sapiens
  misc_RNA (1)...(19): siRNA sense strand
aggaauauguguuggauaa

SEQ ID NO: 1070746 - RNA, 19 nt, Homo sapiens
  misc_RNA (1)...(19): siRNA sense strand
ggaguggaaacuucaaaua

SEQ ID NO: 1070747 - RNA, 19 nt, Homo sapiens
  misc_RNA (1)...(19): siRNA sense strand
cuucaccucuuccacauua

SEQ ID NO: 1070748 - RNA, 19 nt, Homo sapiens
  misc_RNA (1)...(19): siRNA sense strand
guaagaagagcaccaagaa

SEQ ID NO: 1070749 - RNA, 19 nt, Homo sapiens
  misc_RNA (1)...(19): siRNA sense strand
ccacauuacuggagcuuau

SEQ ID NO: 1070750 - RNA, 19 nt, Homo sapiens
  misc_RNA (1)...(19): siRNA sense strand
agacaucccucgucaacuu

SEQ ID NO: 1070751 - RNA, 19 nt, Homo sapiens
  misc_RNA (1)...(19): siRNA sense strand
guaaauguguuggcagcua

SEQ ID NO: 1070752 - RNA, 19 nt, Homo sapiens
  misc_RNA (1)...(19): siRNA sense strand
gcuuaucucuuguacuuga

SEQ ID NO: 1070753 - RNA, 19 nt, Homo sapiens
  misc_RNA (1)...(19): siRNA sense strand
gauccaagccuacguaaca

SEQ ID NO: 1070754 - RNA, 19 nt, Homo sapiens
  misc_RNA (1)...(19): siRNA sense strand
uaaauguguuggcagcuaa

SEQ ID NO: 1070755 - RNA, 19 nt, Homo sapiens
  misc_RNA (1)...(19): siRNA sense strand
ugaauuacuuucccacaug

SEQ ID NO: 1070756 - RNA, 19 nt, Homo sapiens
  misc_RNA (1)...(19): siRNA sense strand
gaauuacuuucccacaugu

SEQ ID NO: 1070757 - RNA, 19 nt, Homo sapiens
  misc_RNA (1)...(19): siRNA sense strand
gaugagaaguaccagaaag

SEQ ID NO: 1070758 - RNA, 19 nt, Homo sapiens
  misc_RNA (1)...(19): siRNA sense strand
cuacguaacauggaacuua

SEQ ID NO: 1070759 - RNA, 19 nt, Homo sapiens
  misc_RNA (1)...(19): siRNA sense strand
ccacaugugcggccuguuu

SEQ ID NO: 1070760 - RNA, 19 nt, Homo sapiens
  misc_RNA (1)...(19): siRNA sense strand
ucaaagucccucuauuauu

SEQ ID NO: 1070761 - RNA, 19 nt, Homo sapiens
  misc_RNA (1)...(19): siRNA sense strand
uacuggagcuuaucucuug

SEQ ID NO: 1070762 - RNA, 19 nt, Homo sapiens
  misc_RNA (1)...(19): siRNA sense strand
gaacucuacuuccagaaaa

SEQ ID NO: 1070763 - RNA, 19 nt, Homo sapiens
  misc_RNA (1)...(19): siRNA sense strand
uggguagacuugugacuuu

SEQ ID NO: 1070764 - RNA, 19 nt, Homo sapiens
  misc_RNA (1)...(19): siRNA sense strand
ggaaacuucaaauagagua

SEQ ID NO: 1070765 - RNA, 19 nt, Homo sapiens
  misc_RNA (1)...(19): siRNA sense strand
ggguagacuugugacuuua

SEQ ID NO: 1070766 - RNA, 19 nt, Homo sapiens
  misc_RNA (1)...(19): siRNA sense strand
gaaguaccagaaaggcaua

SEQ ID NO: 1070767 - RNA, 19 nt, Homo sapiens
  misc_RNA (1)...(19): siRNA sense strand
uacguaacauggaacuuaa

SEQ ID NO: 1070768 - RNA, 19 nt, Homo sapiens
  misc_RNA (1)...(19): siRNA sense strand
aguggaaacuucaaauaga

SEQ ID NO: 1070769 - RNA, 19 nt, Homo sapiens
  misc_RNA (1)...(19): siRNA sense strand
gagaaugcaguucaccaaa

SEQ ID NO: 1070770 - RNA, 19 nt, Homo sapiens
  misc_RNA (1)...(19): siRNA sense strand
cguacucacuguuggguuu

SEQ ID NO: 1070771 - RNA, 19 nt, Homo sapiens
  misc_RNA (1)...(19): siRNA sense strand
gcaguucaccaaagcgaaa

SEQ ID NO: 1070772 - RNA, 19 nt, Homo sapiens
  misc_RNA (1)...(19): siRNA sense strand
gaaugcaguucaccaaagc

SEQ ID NO: 1070773 - RNA, 19 nt, Homo sapiens
  misc_RNA (1)...(19): siRNA sense strand
agacccaacucuuauaugg

SEQ ID NO: 1070774 - RNA, 19 nt, Homo sapiens
  misc_RNA (1)...(19): siRNA sense strand
gaguggaaacuucaaauag

SEQ ID NO: 1070775 - RNA, 19 nt, Homo sapiens
  misc_RNA (1)...(19): siRNA sense strand
guagacuugugacuuuaau

SEQ ID NO: 1070776 - RNA, 19 nt, Homo sapiens
  misc_RNA (1)...(19): siRNA sense strand
gcuguucugucguccaguu

SEQ ID NO: 1070777 - RNA, 19 nt, Homo sapiens
  misc_RNA (1)...(19): siRNA sense strand
acccaacucuuauauggaa

SEQ ID NO: 1070778 - RNA, 19 nt, Homo sapiens
  misc_RNA (1)...(19): siRNA sense strand
acauggaacuuaauuacuc

SEQ ID NO: 1070779 - RNA, 19 nt, Homo sapiens
  misc_RNA (1)...(19): siRNA sense strand
agaagcauccaucguguuu

SEQ ID NO: 1070780 - RNA, 19 nt, Homo sapiens
  misc_RNA (1)...(19): siRNA sense strand
gagugggaguggaaacuuc

SEQ ID NO: 1070781 - RNA, 19 nt, Homo sapiens
  misc_RNA (1)...(19): siRNA sense strand
caaagaggaaagagaaauc

SEQ ID NO: 1070782 - RNA, 19 nt, Homo sapiens
  misc_RNA (1)...(19): siRNA sense strand
cauuauucaugccacaauu

SEQ ID NO: 1070783 - RNA, 19 nt, Homo sapiens
  misc_RNA (1)...(19): siRNA sense strand
guggaaacuucaaauagag

SEQ ID NO: 1070784 - RNA, 19 nt, Homo sapiens
  misc_RNA (1)...(19): siRNA sense strand
cugaugcccuuacuggaaa

SEQ ID NO: 1070785 - RNA, 19 nt, Homo sapiens
  misc_RNA (1)...(19): siRNA sense strand
cccauagcaugaugacauu

SEQ ID NO: 1070786 - RNA, 19 nt, Homo sapiens
  misc_RNA (1)...(19): siRNA sense strand
agacuugugacuuuaauug

SEQ ID NO: 1070787 - RNA, 19 nt, Homo sapiens
  misc_RNA (1)...(19): siRNA sense strand
gugaugagaaguaccagaa

SEQ ID NO: 1070788 - RNA, 19 nt, Homo sapiens
  misc_RNA (1)...(19): siRNA sense strand
cauuugggacuucuucuuu

SEQ ID NO: 1070789 - RNA, 19 nt, Homo sapiens
  misc_RNA (1)...(19): siRNA sense strand
acauaucccaguuggcuua

SEQ ID NO: 1070790 - RNA, 19 nt, Homo sapiens
  misc_RNA (1)...(19): siRNA sense strand
agaaugcaguucaccaaag

SEQ ID NO: 1070791 - RNA, 19 nt, Homo sapiens
  misc_RNA (1)...(19): siRNA sense strand
gguagacuugugacuuuaa

SEQ ID NO: 1070792 - RNA, 19 nt, Homo sapiens
  misc_RNA (1)...(19): siRNA sense strand
caagacaucccucgucaac

SEQ ID NO: 1070793 - RNA, 19 nt, Homo sapiens
  misc_RNA (1)...(19): siRNA sense strand
gcugguggcaaucauuauu

SEQ ID NO: 1070794 - RNA, 19 nt, Homo sapiens
  misc_RNA (1)...(19): siRNA sense strand
gcagaaucaugcggacauc

SEQ ID NO: 1070795 - RNA, 19 nt, Homo sapiens
  misc_RNA (1)...(19): siRNA sense strand
uaucuuggguagacuugug

SEQ ID NO: 1070796 - RNA, 19 nt, Homo sapiens
  misc_RNA (1)...(19): siRNA sense strand
agagguggguagaagauuc

SEQ ID NO: 1070797 - RNA, 19 nt, Homo sapiens
  misc_RNA (1)...(19): siRNA sense strand
uaauuacucucuggcuuca

SEQ ID NO: 1070798 - RNA, 19 nt, Homo sapiens
  misc_RNA (1)...(19): siRNA sense strand
ucaggaauauguguuggau

SEQ ID NO: 1070799 - RNA, 19 nt, Homo sapiens
  misc_RNA (1)...(19): siRNA sense strand
ccaaagaggaaagagaaau

SEQ ID NO: 1070800 - RNA, 19 nt, Homo sapiens
  misc_RNA (1)...(19): siRNA sense strand
ugaacucuacuuccagaaa

SEQ ID NO: 1070801 - RNA, 19 nt, Homo sapiens
  misc_RNA (1)...(19): siRNA sense strand
ggaauauguguuggauaaa

SEQ ID NO: 1070802 - RNA, 19 nt, Homo sapiens
  misc_RNA (1)...(19): siRNA sense strand
gaacagcagaagcauccau

SEQ ID NO: 1070803 - RNA, 19 nt, Homo sapiens
  misc_RNA (1)...(19): siRNA sense strand
aaacggagugggaguggaa

SEQ ID NO: 1070804 - RNA, 19 nt, Homo sapiens
  misc_RNA (1)...(19): siRNA sense strand
aagcauccaucguguuucu

SEQ ID NO: 1070805 - RNA, 19 nt, Homo sapiens
  misc_RNA (1)...(19): siRNA sense strand
ugucagacccaacucuuau

SEQ ID NO: 1070806 - RNA, 19 nt, Homo sapiens
  misc_RNA (1)...(19): siRNA sense strand
cguaacauggaacuuaauu

SEQ ID NO: 1070807 - RNA, 19 nt, Homo sapiens
  misc_RNA (1)...(19): siRNA sense strand
cuuacugguuucaugcuuu

SEQ ID NO: 1070808 - RNA, 19 nt, Homo sapiens
  misc_RNA (1)...(19): siRNA sense strand
cguaagaagagcaccaaga

SEQ ID NO: 1070809 - RNA, 19 nt, Homo sapiens
  misc_RNA (1)...(19): siRNA sense strand
cgccaaagaggaaagagaa

SEQ ID NO: 1070810 - RNA, 19 nt, Homo sapiens
  misc_RNA (1)...(19): siRNA sense strand
cuggaaauguaaauguguu

SEQ ID NO: 1070811 - RNA, 19 nt, Homo sapiens
  misc_RNA (1)...(19): siRNA sense strand
ugugggccauuguguuuau

SEQ ID NO: 1070812 - RNA, 19 nt, Homo sapiens
  misc_RNA (1)...(19): siRNA sense strand
ccugaugcccuuacuggaa

SEQ ID NO: 1070813 - RNA, 19 nt, Homo sapiens
  misc_RNA (1)...(19): siRNA sense strand
cgagggaacagcagaagca

SEQ ID NO: 1070814 - RNA, 19 nt, Homo sapiens
  misc_RNA (1)...(19): siRNA sense strand
ggagugggaguggaaacuu

SEQ ID NO: 1070815 - RNA, 19 nt, Homo sapiens
  misc_RNA (1)...(19): siRNA sense strand
aagccuacguaacauggaa

SEQ ID NO: 1070816 - RNA, 19 nt, Homo sapiens
  misc_RNA (1)...(19): siRNA sense strand
ucugugggccauuguguuu

SEQ ID NO: 1070817 - RNA, 19 nt, Homo sapiens
  misc_RNA (1)...(19): siRNA sense strand
guacugcauuauuuuguug

SEQ ID NO: 1070818 - RNA, 19 nt, Homo sapiens
  misc_RNA (1)...(19): siRNA sense strand
ucagacccaacucuuauau

SEQ ID NO: 1070819 - RNA, 19 nt, Homo sapiens
  misc_RNA (1)...(19): siRNA sense strand
gcauccaucguguuucuca

SEQ ID NO: 1070820 - RNA, 19 nt, Homo sapiens
  misc_RNA (1)...(19): siRNA sense strand
cauggaacuuaauuacucu

SEQ ID NO: 1070821 - RNA, 19 nt, Homo sapiens
  misc_RNA (1)...(19): siRNA sense strand
caucguguuucucacucuu

SEQ ID NO: 1070822 - RNA, 19 nt, Homo sapiens
  misc_RNA (1)...(19): siRNA sense strand
gggcucaaagucccucuau

SEQ ID NO: 1070823 - RNA, 19 nt, Homo sapiens
  misc_RNA (1)...(19): siRNA sense strand
gggccauuguguuuaucuu

SEQ ID NO: 1070824 - RNA, 19 nt, Homo sapiens
  misc_RNA (1)...(19): siRNA sense strand
gcuuacugguuucaugcuu

SEQ ID NO: 1070825 - RNA, 19 nt, Homo sapiens
  misc_RNA (1)...(19): siRNA sense strand
gcacauucauuuuaaucuc

SEQ ID NO: 1070826 - RNA, 19 nt, Homo sapiens
  misc_RNA (1)...(19): siRNA sense strand
gaaacuucaaauagaguag

SEQ ID NO: 1070827 - RNA, 19 nt, Homo sapiens
  misc_RNA (1)...(19): siRNA sense strand
cucaaagucccucuauuau

SEQ ID NO: 1070828 - RNA, 19 nt, Homo sapiens
  misc_RNA (1)...(19): siRNA sense strand
cagaaucggaauccugaug

SEQ ID NO: 1070829 - RNA, 19 nt, Homo sapiens
  misc_RNA (1)...(19): siRNA sense strand
uuacuuuagugaugagaag

SEQ ID NO: 1070830 - RNA, 19 nt, Homo sapiens
  misc_RNA (1)...(19): siRNA sense strand
acauuggucuucaccucuu

SEQ ID NO: 1070831 - RNA, 19 nt, Homo sapiens
  misc_RNA (1)...(19): siRNA sense strand
gucagacccaacucuuaua

SEQ ID NO: 1070832 - RNA, 19 nt, Homo sapiens
  misc_RNA (1)...(19): siRNA sense strand
gccaaagaggaaagagaaa

SEQ ID NO: 1070833 - RNA, 19 nt, Homo sapiens
  misc_RNA (1)...(19): siRNA sense strand
gaaacggucgagaucuucu

SEQ ID NO: 1070834 - RNA, 19 nt, Homo sapiens
  misc_RNA (1)...(19): siRNA sense strand
ggcucaaagucccucuauu

SEQ ID NO: 1070835 - RNA, 19 nt, Homo sapiens
  misc_RNA (1)...(19): siRNA sense strand
uuaauuguuuccguacuca

SEQ ID NO: 1070836 - RNA, 19 nt, Homo sapiens
  misc_RNA (1)...(19): siRNA sense strand
guagacuguccgccaaaga

SEQ ID NO: 1070837 - RNA, 19 nt, Homo sapiens
  misc_RNA (1)...(19): siRNA sense strand
gaguagacuguccgccaaa

SEQ ID NO: 1070838 - RNA, 19 nt, Homo sapiens
  misc_RNA (1)...(19): siRNA sense strand
gggaguggaaacuucaaau

SEQ ID NO: 1070839 - RNA, 19 nt, Homo sapiens
  misc_RNA (1)...(19): siRNA sense strand
uacuggaaauguaaaugug

SEQ ID NO: 1070840 - RNA, 19 nt, Homo sapiens
  misc_RNA (1)...(19): siRNA sense strand
ugcccuuacuggaaaugua

SEQ ID NO: 1070841 - RNA, 19 nt, Homo sapiens
  misc_RNA (1)...(19): siRNA sense strand
uggagaagcugcccaauga

SEQ ID NO: 1070842 - RNA, 19 nt, Homo sapiens
  misc_RNA (1)...(19): siRNA sense strand
gaauuuaagugccccauua

SEQ ID NO: 1070843 - RNA, 19 nt, Homo sapiens
  misc_RNA (1)...(19): siRNA sense strand
ccaagaagguccggaaaga

SEQ ID NO: 1070844 - RNA, 19 nt, Homo sapiens
  misc_RNA (1)...(19): siRNA sense strand
ucccauagcugcuccauga

SEQ ID NO: 1070845 - RNA, 19 nt, Homo sapiens
  misc_RNA (1)...(19): siRNA sense strand
ugaaaccgcuggaaaucaa

SEQ ID NO: 1070846 - RNA, 19 nt, Homo sapiens
  misc_RNA (1)...(19): siRNA sense strand
ucaaaggcaucaaguacuu

SEQ ID NO: 1070847 - RNA, 19 nt, Homo sapiens
  misc_RNA (1)...(19): siRNA sense strand
cuccagagaucuuccauuu

SEQ ID NO: 1070848 - RNA, 19 nt, Homo sapiens
  misc_RNA (1)...(19): siRNA sense strand
ccaccaagguuuauccaau

SEQ ID NO: 1070849 - RNA, 19 nt, Homo sapiens
  misc_RNA (1)...(19): siRNA sense strand
ccaccguccucuuuguaua

SEQ ID NO: 1070850 - RNA, 19 nt, Homo sapiens
  misc_RNA (1)...(19): siRNA sense strand
gagcccaaccgcuugcuua

SEQ ID NO: 1070851 - RNA, 19 nt, Homo sapiens
  misc_RNA (1)...(19): siRNA sense strand
acucugagauucccaagaa

SEQ ID NO: 1070852 - RNA, 19 nt, Homo sapiens
  misc_RNA (1)...(19): siRNA sense strand
gaacaaccagcacggcuau

SEQ ID NO: 1070853 - RNA, 19 nt, Homo sapiens
  misc_RNA (1)...(19): siRNA sense strand
aaaggaagacggacucgua

SEQ ID NO: 1070854 - RNA, 19 nt, Homo sapiens
  misc_RNA (1)...(19): siRNA sense strand
ccagagaucuuccauuucc

SEQ ID NO: 1070855 - RNA, 19 nt, Homo sapiens
  misc_RNA (1)...(19): siRNA sense strand
caaagucaccgccguuuua

SEQ ID NO: 1070856 - RNA, 19 nt, Homo sapiens
  misc_RNA (1)...(19): siRNA sense strand
caccaagguuuauccaaug

SEQ ID NO: 1070857 - RNA, 19 nt, Homo sapiens
  misc_RNA (1)...(19): siRNA sense strand
aggugcagcuggugaauaa

SEQ ID NO: 1070858 - RNA, 19 nt, Homo sapiens
  misc_RNA (1)...(19): siRNA sense strand
uggcugaguuccagacuga

SEQ ID NO: 1070859 - RNA, 19 nt, Homo sapiens
  misc_RNA (1)...(19): siRNA sense strand
ggacgucccugagaacaac

SEQ ID NO: 1070860 - RNA, 19 nt, Homo sapiens
  misc_RNA (1)...(19): siRNA sense strand
ucacguugcugcacuuucu

SEQ ID NO: 1070861 - RNA, 19 nt, Homo sapiens
  misc_RNA (1)...(19): siRNA sense strand
caaguacucgggccucauu

SEQ ID NO: 1070862 - RNA, 19 nt, Homo sapiens
  misc_RNA (1)...(19): siRNA sense strand
gccagaacuucgacauguu

SEQ ID NO: 1070863 - RNA, 19 nt, Homo sapiens
  misc_RNA (1)...(19): siRNA sense strand
ggaauguccagccguaugu

SEQ ID NO: 1070864 - RNA, 19 nt, Homo sapiens
  misc_RNA (1)...(19): siRNA sense strand
gcagcaagaaucccaagau

SEQ ID NO: 1070865 - RNA, 19 nt, Homo sapiens
  misc_RNA (1)...(19): siRNA sense strand
cuuaccagcuccagaucua

SEQ ID NO: 1070866 - RNA, 19 nt, Homo sapiens
  misc_RNA (1)...(19): siRNA sense strand
gacccgggauggcaaauac

SEQ ID NO: 1070867 - RNA, 19 nt, Homo sapiens
  misc_RNA (1)...(19): siRNA sense strand
gggaagaugaauuuaagug

SEQ ID NO: 1070868 - RNA, 19 nt, Homo sapiens
  misc_RNA (1)...(19): siRNA sense strand
gagccgaguugccauccau

SEQ ID NO: 1070869 - RNA, 19 nt, Homo sapiens
  misc_RNA (1)...(19): siRNA sense strand
caacgagagacacaguauu

SEQ ID NO: 1070870 - RNA, 19 nt, Homo sapiens
  misc_RNA (1)...(19): siRNA sense strand
gcucggaugugcggcucua

SEQ ID NO: 1070871 - RNA, 19 nt, Homo sapiens
  misc_RNA (1)...(19): siRNA sense strand
acacugagcgcuacaugga

SEQ ID NO: 1070872 - RNA, 19 nt, Homo sapiens
  misc_RNA (1)...(19): siRNA sense strand
uccaagaucugggucaaug

SEQ ID NO: 1070873 - RNA, 19 nt, Homo sapiens
  misc_RNA (1)...(19): siRNA sense strand
ggacccgggauggcaaaua

SEQ ID NO: 1070874 - RNA, 19 nt, Homo sapiens
  misc_RNA (1)...(19): siRNA sense strand
gcagaugcuggaucauuuc

SEQ ID NO: 1070875 - RNA, 19 nt, Homo sapiens
  misc_RNA (1)...(19): siRNA sense strand
cuucugggcuagcaugaug

SEQ ID NO: 1070876 - RNA, 19 nt, Homo sapiens
  misc_RNA (1)...(19): siRNA sense strand
ggaagacggacucguaucg

SEQ ID NO: 1070877 - RNA, 19 nt, Homo sapiens
  misc_RNA (1)...(19): siRNA sense strand
gcaagaacggcuucauggu

SEQ ID NO: 1070878 - RNA, 19 nt, Homo sapiens
  misc_RNA (1)...(19): siRNA sense strand
caucaccuccuacgacuuc

SEQ ID NO: 1070879 - RNA, 19 nt, Homo sapiens
  misc_RNA (1)...(19): siRNA sense strand
acauggacgucccugagaa

SEQ ID NO: 1070880 - RNA, 19 nt, Homo sapiens
  misc_RNA (1)...(19): siRNA sense strand
ccauauggcagccgagaga

SEQ ID NO: 1070881 - RNA, 19 nt, Homo sapiens
  misc_RNA (1)...(19): siRNA sense strand
gcuccaagaucugggucaa

SEQ ID NO: 1070882 - RNA, 19 nt, Homo sapiens
  misc_RNA (1)...(19): siRNA sense strand
ggacgaaaacgugcacuuu

SEQ ID NO: 1070883 - RNA, 19 nt, Homo sapiens
  misc_RNA (1)...(19): siRNA sense strand
ccaacgagagacacaguau

SEQ ID NO: 1070884 - RNA, 19 nt, Homo sapiens
  misc_RNA (1)...(19): siRNA sense strand
ccuaugaaaccgcuggaaa

SEQ ID NO: 1070885 - RNA, 19 nt, Homo sapiens
  misc_RNA (1)...(19): siRNA sense strand
aagaccggcuucugccauu

SEQ ID NO: 1070886 - RNA, 19 nt, Homo sapiens
  misc_RNA (1)...(19): siRNA sense strand
cgucauacaggaagaguuc

SEQ ID NO: 1070887 - RNA, 19 nt, Homo sapiens
  misc_RNA (1)...(19): siRNA sense strand
guucguggccgagaaguau

SEQ ID NO: 1070888 - RNA, 19 nt, Homo sapiens
  misc_RNA (1)...(19): siRNA sense strand
gagccagaacuucgacaug

SEQ ID NO: 1070889 - RNA, 19 nt, Homo sapiens
  misc_RNA (1)...(19): siRNA sense strand
caacgucuggaucaauguu

SEQ ID NO: 1070890 - RNA, 19 nt, Homo sapiens
  misc_RNA (1)...(19): siRNA sense strand
cuaugaaaccgcuggaaau

SEQ ID NO: 1070891 - RNA, 19 nt, Homo sapiens
  misc_RNA (1)...(19): siRNA sense strand
gugcggcucuacggcauga

SEQ ID NO: 1070892 - RNA, 19 nt, Homo sapiens
  misc_RNA (1)...(19): siRNA sense strand
ucaccaacgucuggaucaa

SEQ ID NO: 1070893 - RNA, 19 nt, Homo sapiens
  misc_RNA (1)...(19): siRNA sense strand
agaacucccuccucuacuc

SEQ ID NO: 1070894 - RNA, 19 nt, Homo sapiens
  misc_RNA (1)...(19): siRNA sense strand
gcugcacuuucuacaggaa

SEQ ID NO: 1070895 - RNA, 19 nt, Homo sapiens
  misc_RNA (1)...(19): siRNA sense strand
guggagaagcugcccaaug

SEQ ID NO: 1070896 - RNA, 19 nt, Homo sapiens
  misc_RNA (1)...(19): siRNA sense strand
gauuauguuccuccagaga

SEQ ID NO: 1070897 - RNA, 19 nt, Homo sapiens
  misc_RNA (1)...(19): siRNA sense strand
agccagaacuucgacaugu

SEQ ID NO: 1070898 - RNA, 19 nt, Homo sapiens
  misc_RNA (1)...(19): siRNA sense strand
ggacaggcagcaagaaucc

SEQ ID NO: 1070899 - RNA, 19 nt, Homo sapiens
  misc_RNA (1)...(19): siRNA sense strand
ucccgaagguggaguacau

SEQ ID NO: 1070900 - RNA, 19 nt, Homo sapiens
  misc_RNA (1)...(19): siRNA sense strand
ggcgagcacuaugaaguca

SEQ ID NO: 1070901 - RNA, 19 nt, Homo sapiens
  misc_RNA (1)...(19): siRNA sense strand
gaacucccuccucuacucu

SEQ ID NO: 1070902 - RNA, 19 nt, Homo sapiens
  misc_RNA (1)...(19): siRNA sense strand
cuucugccaccaagguuua

SEQ ID NO: 1070903 - RNA, 19 nt, Homo sapiens
  misc_RNA (1)...(19): siRNA sense strand
guacacugagcgcuacaug

SEQ ID NO: 1070904 - RNA, 19 nt, Homo sapiens
  misc_RNA (1)...(19): siRNA sense strand
aggcacggcuccaagaucu

SEQ ID NO: 1070905 - RNA, 19 nt, Homo sapiens
  misc_RNA (1)...(19): siRNA sense strand
guucaugacaucuucuauc

SEQ ID NO: 1070906 - RNA, 19 nt, Homo sapiens
  misc_RNA (1)...(19): siRNA sense strand
accaacgucuggaucaaug

SEQ ID NO: 1070907 - RNA, 19 nt, Homo sapiens
  misc_RNA (1)...(19): siRNA sense strand
ucuacggcaugaucuacaa

SEQ ID NO: 1070908 - RNA, 19 nt, Homo sapiens
  misc_RNA (1)...(19): siRNA sense strand
ugccgacccugccuucuuc

SEQ ID NO: 1070909 - RNA, 19 nt, Homo sapiens
  misc_RNA (1)...(19): siRNA sense strand
ugcacuuucuacaggaaua

SEQ ID NO: 1070910 - RNA, 19 nt, Homo sapiens
  misc_RNA (1)...(19): siRNA sense strand
gaccggcuucugccauuug

SEQ ID NO: 1070911 - RNA, 19 nt, Homo sapiens
  misc_RNA (1)...(19): siRNA sense strand
uguaugaggaagucgauga

SEQ ID NO: 1070912 - RNA, 19 nt, Homo sapiens
  misc_RNA (1)...(19): siRNA sense strand
ucuucuccuucaucaauaa

SEQ ID NO: 1070913 - RNA, 19 nt, Homo sapiens
  misc_RNA (1)...(19): siRNA sense strand
aaauacgccugggccaugu

SEQ ID NO: 1070914 - RNA, 19 nt, Homo sapiens
  misc_RNA (1)...(19): siRNA sense strand
aacgagagacacaguauuc

SEQ ID NO: 1070915 - RNA, 19 nt, Homo sapiens
  misc_RNA (1)...(19): siRNA sense strand
gagcagggaaaccuuacca

SEQ ID NO: 1070916 - RNA, 19 nt, Homo sapiens
  misc_RNA (1)...(19): siRNA sense strand
acaaccagcacggcuauga

SEQ ID NO: 1070917 - RNA, 19 nt, Homo sapiens
  misc_RNA (1)...(19): siRNA sense strand
guacuugcggcucaacaca

SEQ ID NO: 1070918 - RNA, 19 nt, Homo sapiens
  misc_RNA (1)...(19): siRNA sense strand
ccaagaucugggucaauga

SEQ ID NO: 1070919 - RNA, 19 nt, Homo sapiens
  misc_RNA (1)...(19): siRNA sense strand
gcucugaccagcggugaau

SEQ ID NO: 1070920 - RNA, 19 nt, Homo sapiens
  misc_RNA (1)...(19): siRNA sense strand
uaugaaaccgcuggaaauc

SEQ ID NO: 1070921 - RNA, 19 nt, Homo sapiens
  misc_RNA (1)...(19): siRNA sense strand
gggcgagcacuaugaaguc

SEQ ID NO: 1070922 - RNA, 19 nt, Homo sapiens
  misc_RNA (1)...(19): siRNA sense strand
cggcaagaacggcuucaug

SEQ ID NO: 1070923 - RNA, 19 nt, Homo sapiens
  misc_RNA (1)...(19): siRNA sense strand
cccaaccgcuugcuuaucc

SEQ ID NO: 1070924 - RNA, 19 nt, Homo sapiens
  misc_RNA (1)...(19): siRNA sense strand
ucaaugaggagaccaagcu

SEQ ID NO: 1070925 - RNA, 19 nt, Homo sapiens
  misc_RNA (1)...(19): siRNA sense strand
acgaggaggucaccaacgu

SEQ ID NO: 1070926 - RNA, 19 nt, Homo sapiens
  misc_RNA (1)...(19): siRNA sense strand
cuucuucuccuucaucaau

SEQ ID NO: 1070927 - RNA, 19 nt, Homo sapiens
  misc_RNA (1)...(19): siRNA sense strand
agaccggcuucugccauuu

SEQ ID NO: 1070928 - RNA, 19 nt, Homo sapiens
  misc_RNA (1)...(19): siRNA sense strand
acucgggccucauugucaa

SEQ ID NO: 1070929 - RNA, 19 nt, Homo sapiens
  misc_RNA (1)...(19): siRNA sense strand
gcuacgccgugguugugau

SEQ ID NO: 1070930 - RNA, 19 nt, Homo sapiens
  misc_RNA (1)...(19): siRNA sense strand
caccguccucuuuguauau

SEQ ID NO: 1070931 - RNA, 19 nt, Homo sapiens
  misc_RNA (1)...(19): siRNA sense strand
guacucgggccucauuguc

SEQ ID NO: 1070932 - RNA, 19 nt, Homo sapiens
  misc_RNA (1)...(19): siRNA sense strand
caagaucugggucaaugag

SEQ ID NO: 1070933 - RNA, 19 nt, Homo sapiens
  misc_RNA (1)...(19): siRNA sense strand
gcaagaggcuguaccuaaa

SEQ ID NO: 1070934 - RNA, 19 nt, Homo sapiens
  misc_RNA (1)...(19): siRNA sense strand
aagaugagcuguugaauuu

SEQ ID NO: 1070935 - RNA, 19 nt, Homo sapiens
  misc_RNA (1)...(19): siRNA sense strand
gaacagacuuagugaaaga

SEQ ID NO: 1070936 - RNA, 19 nt, Homo sapiens
  misc_RNA (1)...(19): siRNA sense strand
gcaaagagaacaaacuaua

SEQ ID NO: 1070937 - RNA, 19 nt, Homo sapiens
  misc_RNA (1)...(19): siRNA sense strand
gcaauugacuguucagaau

SEQ ID NO: 1070938 - RNA, 19 nt, Homo sapiens
  misc_RNA (1)...(19): siRNA sense strand
gauaguaguugcagccuuu

SEQ ID NO: 1070939 - RNA, 19 nt, Homo sapiens
  misc_RNA (1)...(19): siRNA sense strand
gcaaauccuucugaguuua

SEQ ID NO: 1070940 - RNA, 19 nt, Homo sapiens
  misc_RNA (1)...(19): siRNA sense strand
gaagagauccaaauagaga

SEQ ID NO: 1070941 - RNA, 19 nt, Homo sapiens
  misc_RNA (1)...(19): siRNA sense strand
gcagaugcauuauuuaagu

SEQ ID NO: 1070942 - RNA, 19 nt, Homo sapiens
  misc_RNA (1)...(19): siRNA sense strand
cauaaacacucuucaaaca

SEQ ID NO: 1070943 - RNA, 19 nt, Homo sapiens
  misc_RNA (1)...(19): siRNA sense strand
aaauagagaugcaggauau

SEQ ID NO: 1070944 - RNA, 19 nt, Homo sapiens
  misc_RNA (1)...(19): siRNA sense strand
gcagaacucuuagugaaug

SEQ ID NO: 1070945 - RNA, 19 nt, Homo sapiens
  misc_RNA (1)...(19): siRNA sense strand
gagggauucucaaggcuua

SEQ ID NO: 1070946 - RNA, 19 nt, Homo sapiens
  misc_RNA (1)...(19): siRNA sense strand
gggaaccucuguuaaauca

SEQ ID NO: 1070947 - RNA, 19 nt, Homo sapiens
  misc_RNA (1)...(19): siRNA sense strand
cggaagagauccaaauaga

SEQ ID NO: 1070948 - RNA, 19 nt, Homo sapiens
  misc_RNA (1)...(19): siRNA sense strand
gucaagcgcuuauggacua

SEQ ID NO: 1070949 - RNA, 19 nt, Homo sapiens
  misc_RNA (1)...(19): siRNA sense strand
uaucagaucagccaguuua

SEQ ID NO: 1070950 - RNA, 19 nt, Homo sapiens
  misc_RNA (1)...(19): siRNA sense strand
gaagacggaaauagcuuua

SEQ ID NO: 1070951 - RNA, 19 nt, Homo sapiens
  misc_RNA (1)...(19): siRNA sense strand
guagggaaccucuguuaaa

SEQ ID NO: 1070952 - RNA, 19 nt, Homo sapiens
  misc_RNA (1)...(19): siRNA sense strand
gaacggaagagauccaaau

SEQ ID NO: 1070953 - RNA, 19 nt, Homo sapiens
  misc_RNA (1)...(19): siRNA sense strand
caacgugacuauuccaaca

SEQ ID NO: 1070954 - RNA, 19 nt, Homo sapiens
  misc_RNA (1)...(19): siRNA sense strand
uaaacacucuucaaacaca

SEQ ID NO: 1070955 - RNA, 19 nt, Homo sapiens
  misc_RNA (1)...(19): siRNA sense strand
cagcaaauccuucugaguu

SEQ ID NO: 1070956 - RNA, 19 nt, Homo sapiens
  misc_RNA (1)...(19): siRNA sense strand
gaagacuacuguauuucau

SEQ ID NO: 1070957 - RNA, 19 nt, Homo sapiens
  misc_RNA (1)...(19): siRNA sense strand
gauaucagaucagccaguu

SEQ ID NO: 1070958 - RNA, 19 nt, Homo sapiens
  misc_RNA (1)...(19): siRNA sense strand
aaacacaaguggaagugaa

SEQ ID NO: 1070959 - RNA, 19 nt, Homo sapiens
  misc_RNA (1)...(19): siRNA sense strand
ucacuuaucugacguucau

SEQ ID NO: 1070960 - RNA, 19 nt, Homo sapiens
  misc_RNA (1)...(19): siRNA sense strand
gaauuuagaagacuacugu

SEQ ID NO: 1070961 - RNA, 19 nt, Homo sapiens
  misc_RNA (1)...(19): siRNA sense strand
cauaaaagguuucagugua

SEQ ID NO: 1070962 - RNA, 19 nt, Homo sapiens
  misc_RNA (1)...(19): siRNA sense strand
gaugagcuguugaauuuac

SEQ ID NO: 1070963 - RNA, 19 nt, Homo sapiens
  misc_RNA (1)...(19): siRNA sense strand
gagaugcaggauauauuua

SEQ ID NO: 1070964 - RNA, 19 nt, Homo sapiens
  misc_RNA (1)...(19): siRNA sense strand
gaaccucuguuaaaucacu

SEQ ID NO: 1070965 - RNA, 19 nt, Homo sapiens
  misc_RNA (1)...(19): siRNA sense strand
gcuuauggacuacaaagua

SEQ ID NO: 1070966 - RNA, 19 nt, Homo sapiens
  misc_RNA (1)...(19): siRNA sense strand
guaaauaucucugcaaccu

SEQ ID NO: 1070967 - RNA, 19 nt, Homo sapiens
  misc_RNA (1)...(19): siRNA sense strand
cuacccagcuccuucuaaa

SEQ ID NO: 1070968 - RNA, 19 nt, Homo sapiens
  misc_RNA (1)...(19): siRNA sense strand
gagaagacaaccaaagaug

SEQ ID NO: 1070969 - RNA, 19 nt, Homo sapiens
  misc_RNA (1)...(19): siRNA sense strand
gcaggaauuuggcauaaaa

SEQ ID NO: 1070970 - RNA, 19 nt, Homo sapiens
  misc_RNA (1)...(19): siRNA sense strand
caaauagagaugcaggaua

SEQ ID NO: 1070971 - RNA, 19 nt, Homo sapiens
  misc_RNA (1)...(19): siRNA sense strand
gggaaaaucugaguuuaaa

SEQ ID NO: 1070972 - RNA, 19 nt, Homo sapiens
  misc_RNA (1)...(19): siRNA sense strand
ugaagcaguuccaaccaaa

SEQ ID NO: 1070973 - RNA, 19 nt, Homo sapiens
  misc_RNA (1)...(19): siRNA sense strand
uaucugacguucauaaugg

SEQ ID NO: 1070974 - RNA, 19 nt, Homo sapiens
  misc_RNA (1)...(19): siRNA sense strand
ggaagacggaaauagcuuu

SEQ ID NO: 1070975 - RNA, 19 nt, Homo sapiens
  misc_RNA (1)...(19): siRNA sense strand
caacagcaguaacuaucug

SEQ ID NO: 1070976 - RNA, 19 nt, Homo sapiens
  misc_RNA (1)...(19): siRNA sense strand
cuucuugacuccuuacuga

SEQ ID NO: 1070977 - RNA, 19 nt, Homo sapiens
  misc_RNA (1)...(19): siRNA sense strand
ccaaagaugagcuguugaa

SEQ ID NO: 1070978 - RNA, 19 nt, Homo sapiens
  misc_RNA (1)...(19): siRNA sense strand
gaaagugacaaccgaaugg

SEQ ID NO: 1070979 - RNA, 19 nt, Homo sapiens
  misc_RNA (1)...(19): siRNA sense strand
agacggaaauagcuuuaga

SEQ ID NO: 1070980 - RNA, 19 nt, Homo sapiens
  misc_RNA (1)...(19): siRNA sense strand
uugcagaacucuuagugaa

SEQ ID NO: 1070981 - RNA, 19 nt, Homo sapiens
  misc_RNA (1)...(19): siRNA sense strand
uggaauugcagaacucuua

SEQ ID NO: 1070982 - RNA, 19 nt, Homo sapiens
  misc_RNA (1)...(19): siRNA sense strand
caaauggugguggaaauaa

SEQ ID NO: 1070983 - RNA, 19 nt, Homo sapiens
  misc_RNA (1)...(19): siRNA sense strand
ccaaauggugguggaaaua

SEQ ID NO: 1070984 - RNA, 19 nt, Homo sapiens
  misc_RNA (1)...(19): siRNA sense strand
gagccaaaguggugagagu

SEQ ID NO: 1070985 - RNA, 19 nt, Homo sapiens
  misc_RNA (1)...(19): siRNA sense strand
uaauggaucaucagaaaga

SEQ ID NO: 1070986 - RNA, 19 nt, Homo sapiens
  misc_RNA (1)...(19): siRNA sense strand
caaauccuucugaguuuaa

SEQ ID NO: 1070987 - RNA, 19 nt, Homo sapiens
  misc_RNA (1)...(19): siRNA sense strand
cuccacaaguuauuaauga

SEQ ID NO: 1070988 - RNA, 19 nt, Homo sapiens
  misc_RNA (1)...(19): siRNA sense strand
uaagucauccgauaucaga

SEQ ID NO: 1070989 - RNA, 19 nt, Homo sapiens
  misc_RNA (1)...(19): siRNA sense strand
ccacaauaccuaaccaaga

SEQ ID NO: 1070990 - RNA, 19 nt, Homo sapiens
  misc_RNA (1)...(19): siRNA sense strand
guugcagccuuuauagauu

SEQ ID NO: 1070991 - RNA, 19 nt, Homo sapiens
  misc_RNA (1)...(19): siRNA sense strand
aaagaugagcuguugaauu

SEQ ID NO: 1070992 - RNA, 19 nt, Homo sapiens
  misc_RNA (1)...(19): siRNA sense strand
gaagacaaccaaagaugag

SEQ ID NO: 1070993 - RNA, 19 nt, Homo sapiens
  misc_RNA (1)...(19): siRNA sense strand
caauugacuguucagaaua

SEQ ID NO: 1070994 - RNA, 19 nt, Homo sapiens
  misc_RNA (1)...(19): siRNA sense strand
acccagacaucuuuauuga

SEQ ID NO: 1070995 - RNA, 19 nt, Homo sapiens
  misc_RNA (1)...(19): siRNA sense strand
aaccaaagaugagcuguug

SEQ ID NO: 1070996 - RNA, 19 nt, Homo sapiens
  misc_RNA (1)...(19): siRNA sense strand
cagagaagacaaccaaaga

SEQ ID NO: 1070997 - RNA, 19 nt, Homo sapiens
  misc_RNA (1)...(19): siRNA sense strand
gagaagaauuuagaagacu

SEQ ID NO: 1070998 - RNA, 19 nt, Homo sapiens
  misc_RNA (1)...(19): siRNA sense strand
uagggaaccucuguuaaau

SEQ ID NO: 1070999 - RNA, 19 nt, Homo sapiens
  misc_RNA (1)...(19): siRNA sense strand
ccgaacagacuuagugaaa

SEQ ID NO: 1071000 - RNA, 19 nt, Homo sapiens
  misc_RNA (1)...(19): siRNA sense strand
agagaugcaggauauauuu

SEQ ID NO: 1071001 - RNA, 19 nt, Homo sapiens
  misc_RNA (1)...(19): siRNA sense strand
gaugaggauucaaaacuuu

SEQ ID NO: 1071002 - RNA, 19 nt, Homo sapiens
  misc_RNA (1)...(19): siRNA sense strand
cggcagcaauugacuguuc

SEQ ID NO: 1071003 - RNA, 19 nt, Homo sapiens
  misc_RNA (1)...(19): siRNA sense strand
ccagagaauugaucaacgu

SEQ ID NO: 1071004 - RNA, 19 nt, Homo sapiens
  misc_RNA (1)...(19): siRNA sense strand
ugacguucauaauggaauu

SEQ ID NO: 1071005 - RNA, 19 nt, Homo sapiens
  misc_RNA (1)...(19): siRNA sense strand
cuaggucaauucuauaagu

SEQ ID NO: 1071006 - RNA, 19 nt, Homo sapiens
  misc_RNA (1)...(19): siRNA sense strand
uggcaggaauuuggcauaa

SEQ ID NO: 1071007 - RNA, 19 nt, Homo sapiens
  misc_RNA (1)...(19): siRNA sense strand
cacaauaccuaaccaagac

SEQ ID NO: 1071008 - RNA, 19 nt, Homo sapiens
  misc_RNA (1)...(19): siRNA sense strand
agcaaauccuucugaguuu

SEQ ID NO: 1071009 - RNA, 19 nt, Homo sapiens
  misc_RNA (1)...(19): siRNA sense strand
uuaaugaaguguggcaaga

SEQ ID NO: 1071010 - RNA, 19 nt, Homo sapiens
  misc_RNA (1)...(19): siRNA sense strand
cuuauggacuacaaaguau

SEQ ID NO: 1071011 - RNA, 19 nt, Homo sapiens
  misc_RNA (1)...(19): siRNA sense strand
gaauugaucaacgugacua

SEQ ID NO: 1071012 - RNA, 19 nt, Homo sapiens
  misc_RNA (1)...(19): siRNA sense strand
caacuccccucauguaaau

SEQ ID NO: 1071013 - RNA, 19 nt, Homo sapiens
  misc_RNA (1)...(19): siRNA sense strand
cuuuauagauucaccacaa

SEQ ID NO: 1071014 - RNA, 19 nt, Homo sapiens
  misc_RNA (1)...(19): siRNA sense strand
ggcaggaauuuggcauaaa

SEQ ID NO: 1071015 - RNA, 19 nt, Homo sapiens
  misc_RNA (1)...(19): siRNA sense strand
cagaagcuuuccugagcaa

SEQ ID NO: 1071016 - RNA, 19 nt, Homo sapiens
  misc_RNA (1)...(19): siRNA sense strand
guucagaagcuguggaugu

SEQ ID NO: 1071017 - RNA, 19 nt, Homo sapiens
  misc_RNA (1)...(19): siRNA sense strand
gcuccucccuugcccacuu

SEQ ID NO: 1071018 - RNA, 19 nt, Homo sapiens
  misc_RNA (1)...(19): siRNA sense strand
agaagacaaccaaagauga

SEQ ID NO: 1071019 - RNA, 19 nt, Homo sapiens
  misc_RNA (1)...(19): siRNA sense strand
uggcagauauuacaguagu

SEQ ID NO: 1071020 - RNA, 19 nt, Homo sapiens
  misc_RNA (1)...(19): siRNA sense strand
ggucaacagcaguaacuau

SEQ ID NO: 1071021 - RNA, 19 nt, Homo sapiens
  misc_RNA (1)...(19): siRNA sense strand
gggcgucuacuacaacuug

SEQ ID NO: 1071022 - RNA, 19 nt, Homo sapiens
  misc_RNA (1)...(19): siRNA sense strand
gggaugagagguuuaugug

SEQ ID NO: 1071023 - RNA, 19 nt, Homo sapiens
  misc_RNA (1)...(19): siRNA sense strand
ggaugagagguuuauguga

SEQ ID NO: 1071024 - RNA, 19 nt, Homo sapiens
  misc_RNA (1)...(19): siRNA sense strand
caucauaaacacucuucaa

SEQ ID NO: 1071025 - RNA, 19 nt, Homo sapiens
  misc_RNA (1)...(19): siRNA sense strand
uaguagggaaccucuguua

SEQ ID NO: 1071026 - RNA, 19 nt, Homo sapiens
  misc_RNA (1)...(19): siRNA sense strand
agauauuccucgagccaaa

SEQ ID NO: 1071027 - RNA, 19 nt, Homo sapiens
  misc_RNA (1)...(19): siRNA sense strand
ggaagagauccaaauagag

SEQ ID NO: 1071028 - RNA, 19 nt, Homo sapiens
  misc_RNA (1)...(19): siRNA sense strand
uccuggaacucuacauaaa

SEQ ID NO: 1071029 - RNA, 19 nt, Homo sapiens
  misc_RNA (1)...(19): siRNA sense strand
gaaugggaagacggaaaua

SEQ ID NO: 1071030 - RNA, 19 nt, Homo sapiens
  misc_RNA (1)...(19): siRNA sense strand
cgaacagacuuagugaaag

SEQ ID NO: 1071031 - RNA, 19 nt, Homo sapiens
  misc_RNA (1)...(19): siRNA sense strand
ggcagauauuacaguagua

SEQ ID NO: 1071032 - RNA, 19 nt, Homo sapiens
  misc_RNA (1)...(19): siRNA sense strand
agagaagaauuuagaagac

SEQ ID NO: 1071033 - RNA, 19 nt, Homo sapiens
  misc_RNA (1)...(19): siRNA sense strand
ggaacaaccuucauuggaa

SEQ ID NO: 1071034 - RNA, 19 nt, Homo sapiens
  misc_RNA (1)...(19): siRNA sense strand
gaacaaccuucauuggaau

SEQ ID NO: 1071035 - RNA, 19 nt, Homo sapiens
  misc_RNA (1)...(19): siRNA sense strand
gaucccaccucucagcaua

SEQ ID NO: 1071036 - RNA, 19 nt, Homo sapiens
  misc_RNA (1)...(19): siRNA sense strand
ccacgucacugccuguauu

SEQ ID NO: 1071037 - RNA, 19 nt, Homo sapiens
  misc_RNA (1)...(19): siRNA sense strand
ggagaaugguggaacugaa

SEQ ID NO: 1071038 - RNA, 19 nt, Homo sapiens
  misc_RNA (1)...(19): siRNA sense strand
ucaccgaacugaugagaga

SEQ ID NO: 1071039 - RNA, 19 nt, Homo sapiens
  misc_RNA (1)...(19): siRNA sense strand
caaauuaggcucagacauc

SEQ ID NO: 1071040 - RNA, 19 nt, Homo sapiens
  misc_RNA (1)...(19): siRNA sense strand
aaagagcccuggucccauu

SEQ ID NO: 1071041 - RNA, 19 nt, Homo sapiens
  misc_RNA (1)...(19): siRNA sense strand
gaauaucacacuuggcaaa

SEQ ID NO: 1071042 - RNA, 19 nt, Homo sapiens
  misc_RNA (1)...(19): siRNA sense strand
gaaaucaaggaaaguauuc

SEQ ID NO: 1071043 - RNA, 19 nt, Homo sapiens
  misc_RNA (1)...(19): siRNA sense strand
ggaugagccugcuauucuu

SEQ ID NO: 1071044 - RNA, 19 nt, Homo sapiens
  misc_RNA (1)...(19): siRNA sense strand
gcuugaggcucucuaugaa

SEQ ID NO: 1071045 - RNA, 19 nt, Homo sapiens
  misc_RNA (1)...(19): siRNA sense strand
gggaaucucugugcucaug

SEQ ID NO: 1071046 - RNA, 19 nt, Homo sapiens
  misc_RNA (1)...(19): siRNA sense strand
ccacaucccagucaguuaa

SEQ ID NO: 1071047 - RNA, 19 nt, Homo sapiens
  misc_RNA (1)...(19): siRNA sense strand
gaagaaagccuuguguacu

SEQ ID NO: 1071048 - RNA, 19 nt, Homo sapiens
  misc_RNA (1)...(19): siRNA sense strand
gugcugagcugaagaaagc

SEQ ID NO: 1071049 - RNA, 19 nt, Homo sapiens
  misc_RNA (1)...(19): siRNA sense strand
gugaauuccuagaucguuu

SEQ ID NO: 1071050 - RNA, 19 nt, Homo sapiens
  misc_RNA (1)...(19): siRNA sense strand
uaucacacuuggcaaagaa

SEQ ID NO: 1071051 - RNA, 19 nt, Homo sapiens
  misc_RNA (1)...(19): siRNA sense strand
uagcagaguggaaacauuu

SEQ ID NO: 1071052 - RNA, 19 nt, Homo sapiens
  misc_RNA (1)...(19): siRNA sense strand
gcaaagaaagcagggagaa

SEQ ID NO: 1071053 - RNA, 19 nt, Homo sapiens
  misc_RNA (1)...(19): siRNA sense strand
gcuugaagaugaacuugau

SEQ ID NO: 1071054 - RNA, 19 nt, Homo sapiens
  misc_RNA (1)...(19): siRNA sense strand
guacugcccaugagaaguu

SEQ ID NO: 1071055 - RNA, 19 nt, Homo sapiens
  misc_RNA (1)...(19): siRNA sense strand
aagaaagccuuguguacug

SEQ ID NO: 1071056 - RNA, 19 nt, Homo sapiens
  misc_RNA (1)...(19): siRNA sense strand
augcagcucucccugauaa

SEQ ID NO: 1071057 - RNA, 19 nt, Homo sapiens
  misc_RNA (1)...(19): siRNA sense strand
gagccaggaugccacuuuc

SEQ ID NO: 1071058 - RNA, 19 nt, Homo sapiens
  misc_RNA (1)...(19): siRNA sense strand
caagugcucuagcugucaa

SEQ ID NO: 1071059 - RNA, 19 nt, Homo sapiens
  misc_RNA (1)...(19): siRNA sense strand
ugagaaaucaaggaaagua

SEQ ID NO: 1071060 - RNA, 19 nt, Homo sapiens
  misc_RNA (1)...(19): siRNA sense strand
ucccgaagcuucuuugauc

SEQ ID NO: 1071061 - RNA, 19 nt, Homo sapiens
  misc_RNA (1)...(19): siRNA sense strand
ugacagauauaagcaacga

SEQ ID NO: 1071062 - RNA, 19 nt, Homo sapiens
  misc_RNA (1)...(19): siRNA sense strand
acaaccagcuuuugacuuu

SEQ ID NO: 1071063 - RNA, 19 nt, Homo sapiens
  misc_RNA (1)...(19): siRNA sense strand
aaagaaagcagggagaaug

SEQ ID NO: 1071064 - RNA, 19 nt, Homo sapiens
  misc_RNA (1)...(19): siRNA sense strand
aaugugauaugcucaagug

SEQ ID NO: 1071065 - RNA, 19 nt, Homo sapiens
  misc_RNA (1)...(19): siRNA sense strand
gagaaaucaaggaaaguau

SEQ ID NO: 1071066 - RNA, 19 nt, Homo sapiens
  misc_RNA (1)...(19): siRNA sense strand
gcaguucggacacaucuuc

SEQ ID NO: 1071067 - RNA, 19 nt, Homo sapiens
  misc_RNA (1)...(19): siRNA sense strand
ggagccaggaugccacuuu

SEQ ID NO: 1071068 - RNA, 19 nt, Homo sapiens
  misc_RNA (1)...(19): siRNA sense strand
uacacuugcuugaagauga

SEQ ID NO: 1071069 - RNA, 19 nt, Homo sapiens
  misc_RNA (1)...(19): siRNA sense strand
guuagugaauuccuagauc

SEQ ID NO: 1071070 - RNA, 19 nt, Homo sapiens
  misc_RNA (1)...(19): siRNA sense strand
gagccugcuauucuuguua

SEQ ID NO: 1071071 - RNA, 19 nt, Homo sapiens
  misc_RNA (1)...(19): siRNA sense strand
ccagucaguuaauggauca

SEQ ID NO: 1071072 - RNA, 19 nt, Homo sapiens
  misc_RNA (1)...(19): siRNA sense strand
acacuugcuugaagaugaa

SEQ ID NO: 1071073 - RNA, 19 nt, Homo sapiens
  misc_RNA (1)...(19): siRNA sense strand
cugcuauucuuguuaguga

SEQ ID NO: 1071074 - RNA, 19 nt, Homo sapiens
  misc_RNA (1)...(19): siRNA sense strand
caaccuucauuggaaucua

SEQ ID NO: 1071075 - RNA, 19 nt, Homo sapiens
  misc_RNA (1)...(19): siRNA sense strand
ucugagaaaucaaggaaag

SEQ ID NO: 1071076 - RNA, 19 nt, Homo sapiens
  misc_RNA (1)...(19): siRNA sense strand
ggaaugugauaugcucaag

SEQ ID NO: 1071077 - RNA, 19 nt, Homo sapiens
  misc_RNA (1)...(19): siRNA sense strand
gggcguguaguuccucuuu

SEQ ID NO: 1071078 - RNA, 19 nt, Homo sapiens
  misc_RNA (1)...(19): siRNA sense strand
ggaaucuacaagcaaagaa

SEQ ID NO: 1071079 - RNA, 19 nt, Homo sapiens
  misc_RNA (1)...(19): siRNA sense strand
ccaugcagcucucccugau

SEQ ID NO: 1071080 - RNA, 19 nt, Homo sapiens
  misc_RNA (1)...(19): siRNA sense strand
ccagaccgauuugggaugu

SEQ ID NO: 1071081 - RNA, 19 nt, Homo sapiens
  misc_RNA (1)...(19): siRNA sense strand
gauaugcucaagugcucua

SEQ ID NO: 1071082 - RNA, 19 nt, Homo sapiens
  misc_RNA (1)...(19): siRNA sense strand
gaacuugaucaccgaacug

SEQ ID NO: 1071083 - RNA, 19 nt, Homo sapiens
  misc_RNA (1)...(19): siRNA sense strand
ugaagaaagccuuguguac

SEQ ID NO: 1071084 - RNA, 19 nt, Homo sapiens
  misc_RNA (1)...(19): siRNA sense strand
cugauaacauguucgcaau

SEQ ID NO: 1071085 - RNA, 19 nt, Homo sapiens
  misc_RNA (1)...(19): siRNA sense strand
uuagcagaguggaaacauu

SEQ ID NO: 1071086 - RNA, 19 nt, Homo sapiens
  misc_RNA (1)...(19): siRNA sense strand
gcguguaguuccucuuugg

SEQ ID NO: 1071087 - RNA, 19 nt, Homo sapiens
  misc_RNA (1)...(19): siRNA sense strand
gaugagccugcuauucuug

SEQ ID NO: 1071088 - RNA, 19 nt, Homo sapiens
  misc_RNA (1)...(19): siRNA sense strand
gaugugcugagcugaagaa

SEQ ID NO: 1071089 - RNA, 19 nt, Homo sapiens
  misc_RNA (1)...(19): siRNA sense strand
cggaacaaccuucauugga

SEQ ID NO: 1071090 - RNA, 19 nt, Homo sapiens
  misc_RNA (1)...(19): siRNA sense strand
gcugaaacggacuccauga

SEQ ID NO: 1071091 - RNA, 19 nt, Homo sapiens
  misc_RNA (1)...(19): siRNA sense strand
caaagaaagcagggagaau

SEQ ID NO: 1071092 - RNA, 19 nt, Homo sapiens
  misc_RNA (1)...(19): siRNA sense strand
gaaucuacaagcaaagaag

SEQ ID NO: 1071093 - RNA, 19 nt, Homo sapiens
  misc_RNA (1)...(19): siRNA sense strand
ucauuggaaucuacaagca

SEQ ID NO: 1071094 - RNA, 19 nt, Homo sapiens
  misc_RNA (1)...(19): siRNA sense strand
ccggaggacuugaaaacua

SEQ ID NO: 1071095 - RNA, 19 nt, Homo sapiens
  misc_RNA (1)...(19): siRNA sense strand
uggaugagccugcuauucu

SEQ ID NO: 1071096 - RNA, 19 nt, Homo sapiens
  misc_RNA (1)...(19): siRNA sense strand
agaccgauuugggauguug

SEQ ID NO: 1071097 - RNA, 19 nt, Homo sapiens
  misc_RNA (1)...(19): siRNA sense strand
uugaggcucucuaugaauc

SEQ ID NO: 1071098 - RNA, 19 nt, Homo sapiens
  misc_RNA (1)...(19): siRNA sense strand
gggagaaugguggaacuga

SEQ ID NO: 1071099 - RNA, 19 nt, Homo sapiens
  misc_RNA (1)...(19): siRNA sense strand
auuggaaucuacaagcaaa

SEQ ID NO: 1071100 - RNA, 19 nt, Homo sapiens
  misc_RNA (1)...(19): siRNA sense strand
ucagucuucuccuacacuu

SEQ ID NO: 1071101 - RNA, 19 nt, Homo sapiens
  misc_RNA (1)...(19): siRNA sense strand
gcagcucucccugauaaca

SEQ ID NO: 1071102 - RNA, 19 nt, Homo sapiens
  misc_RNA (1)...(19): siRNA sense strand
aagcggaacaaccuucauu

SEQ ID NO: 1071103 - RNA, 19 nt, Homo sapiens
  misc_RNA (1)...(19): siRNA sense strand
gaaucucugugcucaugcu

SEQ ID NO: 1071104 - RNA, 19 nt, Homo sapiens
  misc_RNA (1)...(19): siRNA sense strand
gagaaugguggaacugaac

SEQ ID NO: 1071105 - RNA, 19 nt, Homo sapiens
  misc_RNA (1)...(19): siRNA sense strand
gccuggagguaccaucuag

SEQ ID NO: 1071106 - RNA, 19 nt, Homo sapiens
  misc_RNA (1)...(19): siRNA sense strand
guguguggcugggcgugua

SEQ ID NO: 1071107 - RNA, 19 nt, Homo sapiens
  misc_RNA (1)...(19): siRNA sense strand
cugaagaaagccuugugua

SEQ ID NO: 1071108 - RNA, 19 nt, Homo sapiens
  misc_RNA (1)...(19): siRNA sense strand
ugacagaggacaagaucag

SEQ ID NO: 1071109 - RNA, 19 nt, Homo sapiens
  misc_RNA (1)...(19): siRNA sense strand
gccacaucccagucaguua

SEQ ID NO: 1071110 - RNA, 19 nt, Homo sapiens
  misc_RNA (1)...(19): siRNA sense strand
gaucagucuucuccuacac

SEQ ID NO: 1071111 - RNA, 19 nt, Homo sapiens
  misc_RNA (1)...(19): siRNA sense strand
ucuuugaaaugggcaggua

SEQ ID NO: 1071112 - RNA, 19 nt, Homo sapiens
  misc_RNA (1)...(19): siRNA sense strand
gcugaagaaagccuugugu

SEQ ID NO: 1071113 - RNA, 19 nt, Homo sapiens
  misc_RNA (1)...(19): siRNA sense strand
cccauugucucucgaacuc

SEQ ID NO: 1071114 - RNA, 19 nt, Homo sapiens
  misc_RNA (1)...(19): siRNA sense strand
ugagagucuuagagaagga

SEQ ID NO: 1071115 - RNA, 19 nt, Homo sapiens
  misc_RNA (1)...(19): siRNA sense strand
ugagccugcuauucuuguu

SEQ ID NO: 1071116 - RNA, 19 nt, Homo sapiens
  misc_RNA (1)...(19): siRNA sense strand
acucggagcugggacucuu

SEQ ID NO: 1071117 - RNA, 19 nt, Homo sapiens
  misc_RNA (1)...(19): siRNA sense strand
gucacugccuguauucucu

SEQ ID NO: 1071118 - RNA, 19 nt, Homo sapiens
  misc_RNA (1)...(19): siRNA sense strand
cgcuugaggcucucuauga

SEQ ID NO: 1071119 - RNA, 19 nt, Homo sapiens
  misc_RNA (1)...(19): siRNA sense strand
gcggaacaaccuucauugg

SEQ ID NO: 1071120 - RNA, 19 nt, Homo sapiens
  misc_RNA (1)...(19): siRNA sense strand
gaaugugauaugcucaagu

SEQ ID NO: 1071121 - RNA, 19 nt, Homo sapiens
  misc_RNA (1)...(19): siRNA sense strand
uugaaucguccaugacuga

SEQ ID NO: 1071122 - RNA, 19 nt, Homo sapiens
  misc_RNA (1)...(19): siRNA sense strand
ggcguguaguuccucuuug

SEQ ID NO: 1071123 - RNA, 19 nt, Homo sapiens
  misc_RNA (1)...(19): siRNA sense strand
caaucaaauuaggcucaga

SEQ ID NO: 1071124 - RNA, 19 nt, Homo sapiens
  misc_RNA (1)...(19): siRNA sense strand
ugaacuugaucaccgaacu

SEQ ID NO: 1071125 - RNA, 19 nt, Homo sapiens
  misc_RNA (1)...(19): siRNA sense strand
gaagauaaguggcgaguug

SEQ ID NO: 1071126 - RNA, 19 nt, Homo sapiens
  misc_RNA (1)...(19): siRNA sense strand
caacuucuauggugauuua

SEQ ID NO: 1071127 - RNA, 19 nt, Homo sapiens
  misc_RNA (1)...(19): siRNA sense strand
gaagagaauugcuguguga

SEQ ID NO: 1071128 - RNA, 19 nt, Homo sapiens
  misc_RNA (1)...(19): siRNA sense strand
ggucagcuuuggaauauaa

SEQ ID NO: 1071129 - RNA, 19 nt, Homo sapiens
  misc_RNA (1)...(19): siRNA sense strand
cgaaagauguaacuguuug

SEQ ID NO: 1071130 - RNA, 19 nt, Homo sapiens
  misc_RNA (1)...(19): siRNA sense strand
ggagaacuuugaagagaau

SEQ ID NO: 1071131 - RNA, 19 nt, Homo sapiens
  misc_RNA (1)...(19): siRNA sense strand
caggauauauucagacaga

SEQ ID NO: 1071132 - RNA, 19 nt, Homo sapiens
  misc_RNA (1)...(19): siRNA sense strand
ugucugauguugcuucuuu

SEQ ID NO: 1071133 - RNA, 19 nt, Homo sapiens
  misc_RNA (1)...(19): siRNA sense strand
cuacaaagcccaagguguu

SEQ ID NO: 1071134 - RNA, 19 nt, Homo sapiens
  misc_RNA (1)...(19): siRNA sense strand
ccaagagaauuuguugauu

SEQ ID NO: 1071135 - RNA, 19 nt, Homo sapiens
  misc_RNA (1)...(19): siRNA sense strand
gaaaagagaccagaauuug

SEQ ID NO: 1071136 - RNA, 19 nt, Homo sapiens
  misc_RNA (1)...(19): siRNA sense strand
gcuuuuaucuuguggaaua

SEQ ID NO: 1071137 - RNA, 19 nt, Homo sapiens
  misc_RNA (1)...(19): siRNA sense strand
aaagagaccagaauuuguu

SEQ ID NO: 1071138 - RNA, 19 nt, Homo sapiens
  misc_RNA (1)...(19): siRNA sense strand
gaaggccugucugauguug

SEQ ID NO: 1071139 - RNA, 19 nt, Homo sapiens
  misc_RNA (1)...(19): siRNA sense strand
gagaaaacccucagaagaa

SEQ ID NO: 1071140 - RNA, 19 nt, Homo sapiens
  misc_RNA (1)...(19): siRNA sense strand
gaugacuucuuuggauauu

SEQ ID NO: 1071141 - RNA, 19 nt, Homo sapiens
  misc_RNA (1)...(19): siRNA sense strand
gaauauaauuuccccaaga

SEQ ID NO: 1071142 - RNA, 19 nt, Homo sapiens
  misc_RNA (1)...(19): siRNA sense strand
gacaggauauauucagaca

SEQ ID NO: 1071143 - RNA, 19 nt, Homo sapiens
  misc_RNA (1)...(19): siRNA sense strand
gcacuuuaaccaacuucua

SEQ ID NO: 1071144 - RNA, 19 nt, Homo sapiens
  misc_RNA (1)...(19): siRNA sense strand
cccaagguguuauagauga

SEQ ID NO: 1071145 - RNA, 19 nt, Homo sapiens
  misc_RNA (1)...(19): siRNA sense strand
gcaagcacuuuaaccaacu

SEQ ID NO: 1071146 - RNA, 19 nt, Homo sapiens
  misc_RNA (1)...(19): siRNA sense strand
caaagcccaagguguuaua

SEQ ID NO: 1071147 - RNA, 19 nt, Homo sapiens
  misc_RNA (1)...(19): siRNA sense strand
cagaauuuguucgaggaua

SEQ ID NO: 1071148 - RNA, 19 nt, Homo sapiens
  misc_RNA (1)...(19): siRNA sense strand
aacgaaagauguaacuguu

SEQ ID NO: 1071149 - RNA, 19 nt, Homo sapiens
  misc_RNA (1)...(19): siRNA sense strand
gaauuuguucgaggauaua

SEQ ID NO: 1071150 - RNA, 19 nt, Homo sapiens
  misc_RNA (1)...(19): siRNA sense strand
ugggacagcuugaugacuu

SEQ ID NO: 1071151 - RNA, 19 nt, Homo sapiens
  misc_RNA (1)...(19): siRNA sense strand
ggagaaaacccucagaaga

SEQ ID NO: 1071152 - RNA, 19 nt, Homo sapiens
  misc_RNA (1)...(19): siRNA sense strand
agaauuuguucgaggauau

SEQ ID NO: 1071153 - RNA, 19 nt, Homo sapiens
  misc_RNA (1)...(19): siRNA sense strand
guggcgaguugcuaagaaa

SEQ ID NO: 1071154 - RNA, 19 nt, Homo sapiens
  misc_RNA (1)...(19): siRNA sense strand
uugaugacuucuuuggaua

SEQ ID NO: 1071155 - RNA, 19 nt, Homo sapiens
  misc_RNA (1)...(19): siRNA sense strand
acagcuugaugacuucuuu

SEQ ID NO: 1071156 - RNA, 19 nt, Homo sapiens
  misc_RNA (1)...(19): siRNA sense strand
ccaguaccauagcauugaa

SEQ ID NO: 1071157 - RNA, 19 nt, Homo sapiens
  misc_RNA (1)...(19): siRNA sense strand
guugauuucuccuauacug

SEQ ID NO: 1071158 - RNA, 19 nt, Homo sapiens
  misc_RNA (1)...(19): siRNA sense strand
aaaacacucucauccagua

SEQ ID NO: 1071159 - RNA, 19 nt, Homo sapiens
  misc_RNA (1)...(19): siRNA sense strand
ccauagcauugaagaagau

SEQ ID NO: 1071160 - RNA, 19 nt, Homo sapiens
  misc_RNA (1)...(19): siRNA sense strand
uggagaacuuugaagagaa

SEQ ID NO: 1071161 - RNA, 19 nt, Homo sapiens
  misc_RNA (1)...(19): siRNA sense strand
aaacgaaagauguaacugu

SEQ ID NO: 1071162 - RNA, 19 nt, Homo sapiens
  misc_RNA (1)...(19): siRNA sense strand
gaugaccuugucuauagua

SEQ ID NO: 1071163 - RNA, 19 nt, Homo sapiens
  misc_RNA (1)...(19): siRNA sense strand
cuggagaacuuugaagaga

SEQ ID NO: 1071164 - RNA, 19 nt, Homo sapiens
  misc_RNA (1)...(19): siRNA sense strand
gauaaguggcgaguugcua

SEQ ID NO: 1071165 - RNA, 19 nt, Homo sapiens
  misc_RNA (1)...(19): siRNA sense strand
cuggucagcuuuggaauau

SEQ ID NO: 1071166 - RNA, 19 nt, Homo sapiens
  misc_RNA (1)...(19): siRNA sense strand
ugacuucuuuggauauucu

SEQ ID NO: 1071167 - RNA, 19 nt, Homo sapiens
  misc_RNA (1)...(19): siRNA sense strand
gauguaacuguuuggagaa

SEQ ID NO: 1071168 - RNA, 19 nt, Homo sapiens
  misc_RNA (1)...(19): siRNA sense strand
cuugaugacuucuuuggau

SEQ ID NO: 1071169 - RNA, 19 nt, Homo sapiens
  misc_RNA (1)...(19): siRNA sense strand
gauugggacagcuugauga

SEQ ID NO: 1071170 - RNA, 19 nt, Homo sapiens
  misc_RNA (1)...(19): siRNA sense strand
uacaaagcccaagguguua

SEQ ID NO: 1071171 - RNA, 19 nt, Homo sapiens
  misc_RNA (1)...(19): siRNA sense strand
caagcacuuuaaccaacuu

SEQ ID NO: 1071172 - RNA, 19 nt, Homo sapiens
  misc_RNA (1)...(19): siRNA sense strand
ggauauauucagacagauc

SEQ ID NO: 1071173 - RNA, 19 nt, Homo sapiens
  misc_RNA (1)...(19): siRNA sense strand
ugacugggaugaaaagaga

SEQ ID NO: 1071174 - RNA, 19 nt, Homo sapiens
  misc_RNA (1)...(19): siRNA sense strand
uguuauagaugaccuuguc

SEQ ID NO: 1071175 - RNA, 19 nt, Homo sapiens
  misc_RNA (1)...(19): siRNA sense strand
gcauugaagaagauaagug

SEQ ID NO: 1071176 - RNA, 19 nt, Homo sapiens
  misc_RNA (1)...(19): siRNA sense strand
ggaaggccugucugauguu

SEQ ID NO: 1071177 - RNA, 19 nt, Homo sapiens
  misc_RNA (1)...(19): siRNA sense strand
gaucugcgugggaugauuc

SEQ ID NO: 1071178 - RNA, 19 nt, Homo sapiens
  misc_RNA (1)...(19): siRNA sense strand
gggacagcuugaugacuuc

SEQ ID NO: 1071179 - RNA, 19 nt, Homo sapiens
  misc_RNA (1)...(19): siRNA sense strand
ggccuugucguuuggauug

SEQ ID NO: 1071180 - RNA, 19 nt, Homo sapiens
  misc_RNA (1)...(19): siRNA sense strand
cccagggccuugucguuug

SEQ ID NO: 1071181 - RNA, 19 nt, Homo sapiens
  misc_RNA (1)...(19): siRNA sense strand
ggauugggacagcuugaug

SEQ ID NO: 1071182 - RNA, 19 nt, Homo sapiens
  misc_RNA (1)...(19): siRNA sense strand
gauauauucagacagaucu

SEQ ID NO: 1071183 - RNA, 19 nt, Homo sapiens
  misc_RNA (1)...(19): siRNA sense strand
gaagggcuuuuaucuugug

SEQ ID NO: 1071184 - RNA, 19 nt, Homo sapiens
  misc_RNA (1)...(19): siRNA sense strand
gccauggcaagcacuuuaa

SEQ ID NO: 1071185 - RNA, 19 nt, Homo sapiens
  misc_RNA (1)...(19): siRNA sense strand
ugaaaagagaccagaauuu

SEQ ID NO: 1071186 - RNA, 19 nt, Homo sapiens
  misc_RNA (1)...(19): siRNA sense strand
auaaguggcgaguugcuaa

SEQ ID NO: 1071187 - RNA, 19 nt, Homo sapiens
  misc_RNA (1)...(19): siRNA sense strand
gaaagauguaacuguuugg

SEQ ID NO: 1071188 - RNA, 19 nt, Homo sapiens
  misc_RNA (1)...(19): siRNA sense strand
guguuccacuuaaagacaa

SEQ ID NO: 1071189 - RNA, 19 nt, Homo sapiens
  misc_RNA (1)...(19): siRNA sense strand
gugaugcguuacacuacug

SEQ ID NO: 1071190 - RNA, 19 nt, Homo sapiens
  misc_RNA (1)...(19): siRNA sense strand
auggauaucucuacaaagc

SEQ ID NO: 1071191 - RNA, 19 nt, Homo sapiens
  misc_RNA (1)...(19): siRNA sense strand
cuucuauggugauuuacga

SEQ ID NO: 1071192 - RNA, 19 nt, Homo sapiens
  misc_RNA (1)...(19): siRNA sense strand
gcccaagguguuauagaug

SEQ ID NO: 1071193 - RNA, 19 nt, Homo sapiens
  misc_RNA (1)...(19): siRNA sense strand
agcccaagguguuauagau

SEQ ID NO: 1071194 - RNA, 19 nt, Homo sapiens
  misc_RNA (1)...(19): siRNA sense strand
gaacuuugaagagaauugc

SEQ ID NO: 1071195 - RNA, 19 nt, Homo sapiens
  misc_RNA (1)...(19): siRNA sense strand
guaccauagcauugaagaa

SEQ ID NO: 1071196 - RNA, 19 nt, Homo sapiens
  misc_RNA (1)...(19): siRNA sense strand
cacuuuaaccaacuucuau

SEQ ID NO: 1071197 - RNA, 19 nt, Homo sapiens
  misc_RNA (1)...(19): siRNA sense strand
accauagcauugaagaaga

SEQ ID NO: 1071198 - RNA, 19 nt, Homo sapiens
  misc_RNA (1)...(19): siRNA sense strand
agccauggcaagcacuuua

SEQ ID NO: 1071199 - RNA, 19 nt, Homo sapiens
  misc_RNA (1)...(19): siRNA sense strand
ccaucccugugguugguuu

SEQ ID NO: 1071200 - RNA, 19 nt, Homo sapiens
  misc_RNA (1)...(19): siRNA sense strand
gagaccagaauuuguucga

SEQ ID NO: 1071201 - RNA, 19 nt, Homo sapiens
  misc_RNA (1)...(19): siRNA sense strand
cccaagagaauuuguugau

SEQ ID NO: 1071202 - RNA, 19 nt, Homo sapiens
  misc_RNA (1)...(19): siRNA sense strand
ccucagaagaauuuaaugg

SEQ ID NO: 1071203 - RNA, 19 nt, Homo sapiens
  misc_RNA (1)...(19): siRNA sense strand
acucucauccaguaccaua

SEQ ID NO: 1071204 - RNA, 19 nt, Homo sapiens
  misc_RNA (1)...(19): siRNA sense strand
aacccaaaccagagucuuu

SEQ ID NO: 1071205 - RNA, 19 nt, Homo sapiens
  misc_RNA (1)...(19): siRNA sense strand
gaaaacccucagaagaauu

SEQ ID NO: 1071206 - RNA, 19 nt, Homo sapiens
  misc_RNA (1)...(19): siRNA sense strand
uaccauagcauugaagaag

SEQ ID NO: 1071207 - RNA, 19 nt, Homo sapiens
  misc_RNA (1)...(19): siRNA sense strand
ccagggccuugucguuugg

SEQ ID NO: 1071208 - RNA, 19 nt, Homo sapiens
  misc_RNA (1)...(19): siRNA sense strand
cauccaguaccauagcauu

SEQ ID NO: 1071209 - RNA, 19 nt, Homo sapiens
  misc_RNA (1)...(19): siRNA sense strand
agaaaacccucagaagaau

SEQ ID NO: 1071210 - RNA, 19 nt, Homo sapiens
  misc_RNA (1)...(19): siRNA sense strand
acugugggcuauaaagaag

SEQ ID NO: 1071211 - RNA, 19 nt, Homo sapiens
  misc_RNA (1)...(19): siRNA sense strand
gcgcaggucuucuugaaua

SEQ ID NO: 1071212 - RNA, 19 nt, Homo sapiens
  misc_RNA (1)...(19): siRNA sense strand
ggacaguaauuaaucauga

SEQ ID NO: 1071213 - RNA, 19 nt, Homo sapiens
  misc_RNA (1)...(19): siRNA sense strand
gaauaucccugacuucuag

SEQ ID NO: 1071214 - RNA, 19 nt, Homo sapiens
  misc_RNA (1)...(19): siRNA sense strand
gaacaugaccuggacagua

SEQ ID NO: 1071215 - RNA, 19 nt, Homo sapiens
  misc_RNA (1)...(19): siRNA sense strand
agaaaucccuccucuuuga

SEQ ID NO: 1071216 - RNA, 19 nt, Homo sapiens
  misc_RNA (1)...(19): siRNA sense strand
ggacagcccuggugugaag

SEQ ID NO: 1071217 - RNA, 19 nt, Homo sapiens
  misc_RNA (1)...(19): siRNA sense strand
gcauucauccuguuaguuu

SEQ ID NO: 1071218 - RNA, 19 nt, Homo sapiens
  misc_RNA (1)...(19): siRNA sense strand
gaauuguucucaucugugu

SEQ ID NO: 1071219 - RNA, 19 nt, Homo sapiens
  misc_RNA (1)...(19): siRNA sense strand
cgaagaauaucccugacuu

SEQ ID NO: 1071220 - RNA, 19 nt, Homo sapiens
  misc_RNA (1)...(19): siRNA sense strand
aacaugaccuggacaguaa

SEQ ID NO: 1071221 - RNA, 19 nt, Homo sapiens
  misc_RNA (1)...(19): siRNA sense strand
gauauccacuggucuucuu

SEQ ID NO: 1071222 - RNA, 19 nt, Homo sapiens
  misc_RNA (1)...(19): siRNA sense strand
guacaacagugacaacaac

SEQ ID NO: 1071223 - RNA, 19 nt, Homo sapiens
  misc_RNA (1)...(19): siRNA sense strand
acagagggcuggaaaagua

SEQ ID NO: 1071224 - RNA, 19 nt, Homo sapiens
  misc_RNA (1)...(19): siRNA sense strand
ccacuggucuucuucuagu

SEQ ID NO: 1071225 - RNA, 19 nt, Homo sapiens
  misc_RNA (1)...(19): siRNA sense strand
gagaaaucccuccucuuug

SEQ ID NO: 1071226 - RNA, 19 nt, Homo sapiens
  misc_RNA (1)...(19): siRNA sense strand
gggaauuguucucaucugu

SEQ ID NO: 1071227 - RNA, 19 nt, Homo sapiens
  misc_RNA (1)...(19): siRNA sense strand
gcuggucucuggcccuuga

SEQ ID NO: 1071228 - RNA, 19 nt, Homo sapiens
  misc_RNA (1)...(19): siRNA sense strand
ccaguaaaugcuucagaua

SEQ ID NO: 1071229 - RNA, 19 nt, Homo sapiens
  misc_RNA (1)...(19): siRNA sense strand
cuaauagccuuggagauca

SEQ ID NO: 1071230 - RNA, 19 nt, Homo sapiens
  misc_RNA (1)...(19): siRNA sense strand
ugcuucaacuucacuauaa

SEQ ID NO: 1071231 - RNA, 19 nt, Homo sapiens
  misc_RNA (1)...(19): siRNA sense strand
caacagugacaacaacaug

SEQ ID NO: 1071232 - RNA, 19 nt, Homo sapiens
  misc_RNA (1)...(19): siRNA sense strand
aagcgcaggucuucuugaa

SEQ ID NO: 1071233 - RNA, 19 nt, Homo sapiens
  misc_RNA (1)...(19): siRNA sense strand
aguaaaugcuucagauauc

SEQ ID NO: 1071234 - RNA, 19 nt, Homo sapiens
  misc_RNA (1)...(19): siRNA sense strand
gcaguucgccaccaaugga

SEQ ID NO: 1071235 - RNA, 19 nt, Homo sapiens
  misc_RNA (1)...(19): siRNA sense strand
gcuucaacuucacuauaaa

SEQ ID NO: 1071236 - RNA, 19 nt, Homo sapiens
  misc_RNA (1)...(19): siRNA sense strand
uuucugcuguugcuacuaa

SEQ ID NO: 1071237 - RNA, 19 nt, Homo sapiens
  misc_RNA (1)...(19): siRNA sense strand
caguaaaugcuucagauau

SEQ ID NO: 1071238 - RNA, 19 nt, Homo sapiens
  misc_RNA (1)...(19): siRNA sense strand
ugaccuggacaguaauuaa

SEQ ID NO: 1071239 - RNA, 19 nt, Homo sapiens
  misc_RNA (1)...(19): siRNA sense strand
gggcauucauccuguuagu

SEQ ID NO: 1071240 - RNA, 19 nt, Homo sapiens
  misc_RNA (1)...(19): siRNA sense strand
ucucuuugcuucaacuuca

SEQ ID NO: 1071241 - RNA, 19 nt, Homo sapiens
  misc_RNA (1)...(19): siRNA sense strand
aaggagacauggaagaaag

SEQ ID NO: 1071242 - RNA, 19 nt, Homo sapiens
  misc_RNA (1)...(19): siRNA sense strand
gaccuggacaguaauuaau

SEQ ID NO: 1071243 - RNA, 19 nt, Homo sapiens
  misc_RNA (1)...(19): siRNA sense strand
gaaagacagagggcuggaa

SEQ ID NO: 1071244 - RNA, 19 nt, Homo sapiens
  misc_RNA (1)...(19): siRNA sense strand
caaggagacauggaagaaa

SEQ ID NO: 1071245 - RNA, 19 nt, Homo sapiens
  misc_RNA (1)...(19): siRNA sense strand
ucaaggagacauggaagaa

SEQ ID NO: 1071246 - RNA, 19 nt, Homo sapiens
  misc_RNA (1)...(19): siRNA sense strand
aaagacagagggcuggaaa

SEQ ID NO: 1071247 - RNA, 19 nt, Homo sapiens
  misc_RNA (1)...(19): siRNA sense strand
gcaggucuucuugaauaaa

SEQ ID NO: 1071248 - RNA, 19 nt, Homo sapiens
  misc_RNA (1)...(19): siRNA sense strand
guaaaugcuucagauaucc

SEQ ID NO: 1071249 - RNA, 19 nt, Homo sapiens
  misc_RNA (1)...(19): siRNA sense strand
ccuggacaguaauuaauca

SEQ ID NO: 1071250 - RNA, 19 nt, Homo sapiens
  misc_RNA (1)...(19): siRNA sense strand
caugaagccaguaagauca

SEQ ID NO: 1071251 - RNA, 19 nt, Homo sapiens
  misc_RNA (1)...(19): siRNA sense strand
cgcaggucuucuugaauaa

SEQ ID NO: 1071252 - RNA, 19 nt, Homo sapiens
  misc_RNA (1)...(19): siRNA sense strand
ucagauauccacuggucuu

SEQ ID NO: 1071253 - RNA, 19 nt, Homo sapiens
  misc_RNA (1)...(19): siRNA sense strand
cgccaccaauggagagaaa

SEQ ID NO: 1071254 - RNA, 19 nt, Homo sapiens
  misc_RNA (1)...(19): siRNA sense strand
ucaugaagccaguaagauc

SEQ ID NO: 1071255 - RNA, 19 nt, Homo sapiens
  misc_RNA (1)...(19): siRNA sense strand
cuucuagucuaccagauag

SEQ ID NO: 1071256 - RNA, 19 nt, Homo sapiens
  misc_RNA (1)...(19): siRNA sense strand
gguggucacucucuuugcu

SEQ ID NO: 1071257 - RNA, 19 nt, Homo sapiens
  misc_RNA (1)...(19): siRNA sense strand
aaucaugaagccaguaaga

SEQ ID NO: 1071258 - RNA, 19 nt, Homo sapiens
  misc_RNA (1)...(19): siRNA sense strand
acuaauagccuuggagauc

SEQ ID NO: 1071259 - RNA, 19 nt, Homo sapiens
  misc_RNA (1)...(19): siRNA sense strand
uaauagccuuggagaucau

SEQ ID NO: 1071260 - RNA, 19 nt, Homo sapiens
  misc_RNA (1)...(19): siRNA sense strand
guauaugccaccagcacuu

SEQ ID NO: 1071261 - RNA, 19 nt, Homo sapiens
  misc_RNA (1)...(19): siRNA sense strand
aaugggaauuguucucauc

SEQ ID NO: 1071262 - RNA, 19 nt, Homo sapiens
  misc_RNA (1)...(19): siRNA sense strand
cagauaaagaccagugauc

SEQ ID NO: 1071263 - RNA, 19 nt, Homo sapiens
  misc_RNA (1)...(19): siRNA sense strand
uaaugggaauuguucucau

SEQ ID NO: 1071264 - RNA, 19 nt, Homo sapiens
  misc_RNA (1)...(19): siRNA sense strand
gaucacuggcucagggaau

SEQ ID NO: 1071265 - RNA, 19 nt, Homo sapiens
  misc_RNA (1)...(19): siRNA sense strand
uuaaucaugaagccaguaa

SEQ ID NO: 1071266 - RNA, 19 nt, Homo sapiens
  misc_RNA (1)...(19): siRNA sense strand
guaagaucaaggagacaug

SEQ ID NO: 1071267 - RNA, 19 nt, Homo sapiens
  misc_RNA (1)...(19): siRNA sense strand
gauaaagaccagugauccu

SEQ ID NO: 1071268 - RNA, 19 nt, Homo sapiens
  misc_RNA (1)...(19): siRNA sense strand
ggcccuugaggacgucuua

SEQ ID NO: 1071269 - RNA, 19 nt, Homo sapiens
  misc_RNA (1)...(19): siRNA sense strand
accaguaaaugcuucagau

SEQ ID NO: 1071270 - RNA, 19 nt, Homo sapiens
  misc_RNA (1)...(19): siRNA sense strand
acaacaacauggucaaacc

SEQ ID NO: 1071271 - RNA, 19 nt, Homo sapiens
  misc_RNA (1)...(19): siRNA sense strand
uugcuucaacuucacuaua

SEQ ID NO: 1071272 - RNA, 19 nt, Homo sapiens
  misc_RNA (1)...(19): siRNA sense strand
caugguugguggucacucu

SEQ ID NO: 1071273 - RNA, 19 nt, Homo sapiens
  misc_RNA (1)...(19): siRNA sense strand
ucacagagcuagagucuca

SEQ ID NO: 1071274 - RNA, 19 nt, Homo sapiens
  misc_RNA (1)...(19): siRNA sense strand
cauggccucuuaucaaaua

SEQ ID NO: 1071275 - RNA, 19 nt, Homo sapiens
  misc_RNA (1)...(19): siRNA sense strand
caacaucgaagacaugauu

SEQ ID NO: 1071276 - RNA, 19 nt, Homo sapiens
  misc_RNA (1)...(19): siRNA sense strand
gcacuaggccaguacacua

SEQ ID NO: 1071277 - RNA, 19 nt, Homo sapiens
  misc_RNA (1)...(19): siRNA sense strand
gccauggccucuuaucaaa

SEQ ID NO: 1071278 - RNA, 19 nt, Homo sapiens
  misc_RNA (1)...(19): siRNA sense strand
caacgucuacuacaucauu

SEQ ID NO: 1071279 - RNA, 19 nt, Homo sapiens
  misc_RNA (1)...(19): siRNA sense strand
guacuucacggccacauuu

SEQ ID NO: 1071280 - RNA, 19 nt, Homo sapiens
  misc_RNA (1)...(19): siRNA sense strand
gaacaacaagauggaguuu

SEQ ID NO: 1071281 - RNA, 19 nt, Homo sapiens
  misc_RNA (1)...(19): siRNA sense strand
ugacagcgcugguggacau

SEQ ID NO: 1071282 - RNA, 19 nt, Homo sapiens
  misc_RNA (1)...(19): siRNA sense strand
caacagcggcaccagcuuu

SEQ ID NO: 1071283 - RNA, 19 nt, Homo sapiens
  misc_RNA (1)...(19): siRNA sense strand
caaauacuguuggcucuuc

SEQ ID NO: 1071284 - RNA, 19 nt, Homo sapiens
  misc_RNA (1)...(19): siRNA sense strand
gagaauccgucagcucaug

SEQ ID NO: 1071285 - RNA, 19 nt, Homo sapiens
  misc_RNA (1)...(19): siRNA sense strand
uaccucgucuuccucuuua

SEQ ID NO: 1071286 - RNA, 19 nt, Homo sapiens
  misc_RNA (1)...(19): siRNA sense strand
acacuccgcugaccuacaa

SEQ ID NO: 1071287 - RNA, 19 nt, Homo sapiens
  misc_RNA (1)...(19): siRNA sense strand
ccgcugaccuacaacaaga

SEQ ID NO: 1071288 - RNA, 19 nt, Homo sapiens
  misc_RNA (1)...(19): siRNA sense strand
ggaccucacugcucagacu

SEQ ID NO: 1071289 - RNA, 19 nt, Homo sapiens
  misc_RNA (1)...(19): siRNA sense strand
ggaacaacaagauggaguu

SEQ ID NO: 1071290 - RNA, 19 nt, Homo sapiens
  misc_RNA (1)...(19): siRNA sense strand
cauguacccucacguguuc

SEQ ID NO: 1071291 - RNA, 19 nt, Homo sapiens
  misc_RNA (1)...(19): siRNA sense strand
ggcuaugccucccagauga

SEQ ID NO: 1071292 - RNA, 19 nt, Homo sapiens
  misc_RNA (1)...(19): siRNA sense strand
agacagcacuaggccagua

SEQ ID NO: 1071293 - RNA, 19 nt, Homo sapiens
  misc_RNA (1)...(19): siRNA sense strand
gaauucaguuuuaccugua

SEQ ID NO: 1071294 - RNA, 19 nt, Homo sapiens
  misc_RNA (1)...(19): siRNA sense strand
ugaccuacaacaagaagua

SEQ ID NO: 1071295 - RNA, 19 nt, Homo sapiens
  misc_RNA (1)...(19): siRNA sense strand
gaguaucugucgucuccuu

SEQ ID NO: 1071296 - RNA, 19 nt, Homo sapiens
  misc_RNA (1)...(19): siRNA sense strand
ggaugcaggcacccagaua

SEQ ID NO: 1071297 - RNA, 19 nt, Homo sapiens
  misc_RNA (1)...(19): siRNA sense strand
caggcaaggugguguacuu

SEQ ID NO: 1071298 - RNA, 19 nt, Homo sapiens
  misc_RNA (1)...(19): siRNA sense strand
gcacagccaccuuucucuu

SEQ ID NO: 1071299 - RNA, 19 nt, Homo sapiens
  misc_RNA (1)...(19): siRNA sense strand
gcacuggaacaacaagaug

SEQ ID NO: 1071300 - RNA, 19 nt, Homo sapiens
  misc_RNA (1)...(19): siRNA sense strand
gagccaagcgcuucuacga

SEQ ID NO: 1071301 - RNA, 19 nt, Homo sapiens
  misc_RNA (1)...(19): siRNA sense strand
ucacagagggcggaaugua

SEQ ID NO: 1071302 - RNA, 19 nt, Homo sapiens
  misc_RNA (1)...(19): siRNA sense strand
acaacaagaaguacacgua

SEQ ID NO: 1071303 - RNA, 19 nt, Homo sapiens
  misc_RNA (1)...(19): siRNA sense strand
gaaugguaccucugagaau

SEQ ID NO: 1071304 - RNA, 19 nt, Homo sapiens
  misc_RNA (1)...(19): siRNA sense strand
ggccugcuguuucuucuuc

SEQ ID NO: 1071305 - RNA, 19 nt, Homo sapiens
  misc_RNA (1)...(19): siRNA sense strand
ggcaacgucuggagguuuc

SEQ ID NO: 1071306 - RNA, 19 nt, Homo sapiens
  misc_RNA (1)...(19): siRNA sense strand
caacaaguaccacaacaac

SEQ ID NO: 1071307 - RNA, 19 nt, Homo sapiens
  misc_RNA (1)...(19): siRNA sense strand
gcacccagauauucuucuc

SEQ ID NO: 1071308 - RNA, 19 nt, Homo sapiens
  misc_RNA (1)...(19): siRNA sense strand
gaccaacggcucccugaau

SEQ ID NO: 1071309 - RNA, 19 nt, Homo sapiens
  misc_RNA (1)...(19): siRNA sense strand
ucacggccacauuuccuua

SEQ ID NO: 1071310 - RNA, 19 nt, Homo sapiens
  misc_RNA (1)...(19): siRNA sense strand
cacauuuccuuaccucaug

SEQ ID NO: 1071311 - RNA, 19 nt, Homo sapiens
  misc_RNA (1)...(19): siRNA sense strand
cagcgcugguggacaugua

SEQ ID NO: 1071312 - RNA, 19 nt, Homo sapiens
  misc_RNA (1)...(19): siRNA sense strand
ucuucucccugauaaagua

SEQ ID NO: 1071313 - RNA, 19 nt, Homo sapiens
  misc_RNA (1)...(19): siRNA sense strand
cgacaacaucgaagacaug

SEQ ID NO: 1071314 - RNA, 19 nt, Homo sapiens
  misc_RNA (1)...(19): siRNA sense strand
aaugguaccucugagaaug

SEQ ID NO: 1071315 - RNA, 19 nt, Homo sapiens
  misc_RNA (1)...(19): siRNA sense strand
ccagcucuuugacuacuau

SEQ ID NO: 1071316 - RNA, 19 nt, Homo sapiens
  misc_RNA (1)...(19): siRNA sense strand
gaugcaggcacccagauau

SEQ ID NO: 1071317 - RNA, 19 nt, Homo sapiens
  misc_RNA (1)...(19): siRNA sense strand
cccaaggaauucaguuuua

SEQ ID NO: 1071318 - RNA, 19 nt, Homo sapiens
  misc_RNA (1)...(19): siRNA sense strand
ugaaugguaccucugagaa

SEQ ID NO: 1071319 - RNA, 19 nt, Homo sapiens
  misc_RNA (1)...(19): siRNA sense strand
gcaugugccuccuguucgu

SEQ ID NO: 1071320 - RNA, 19 nt, Homo sapiens
  misc_RNA (1)...(19): siRNA sense strand
gcucacagagggcggaaug

SEQ ID NO: 1071321 - RNA, 19 nt, Homo sapiens
  misc_RNA (1)...(19): siRNA sense strand
gcaaggugguguacuucac

SEQ ID NO: 1071322 - RNA, 19 nt, Homo sapiens
  misc_RNA (1)...(19): siRNA sense strand
ucuacuacaucauuguguu

SEQ ID NO: 1071323 - RNA, 19 nt, Homo sapiens
  misc_RNA (1)...(19): siRNA sense strand
aaaccaguguauccaguca

SEQ ID NO: 1071324 - RNA, 19 nt, Homo sapiens
  misc_RNA (1)...(19): siRNA sense strand
acaaguaccacaacaacug

SEQ ID NO: 1071325 - RNA, 19 nt, Homo sapiens
  misc_RNA (1)...(19): siRNA sense strand
uggcauuccugucuuccuu

SEQ ID NO: 1071326 - RNA, 19 nt, Homo sapiens
  misc_RNA (1)...(19): siRNA sense strand
ccaguaauggagagacaaa

SEQ ID NO: 1071327 - RNA, 19 nt, Homo sapiens
  misc_RNA (1)...(19): siRNA sense strand
guacguguuccagcucuuu

SEQ ID NO: 1071328 - RNA, 19 nt, Homo sapiens
  misc_RNA (1)...(19): siRNA sense strand
ccucauccuuggaguaucu

SEQ ID NO: 1071329 - RNA, 19 nt, Homo sapiens
  misc_RNA (1)...(19): siRNA sense strand
ccucacguguuccgcaaga

SEQ ID NO: 1071330 - RNA, 19 nt, Homo sapiens
  misc_RNA (1)...(19): siRNA sense strand
ggauagccaguuugugugu

SEQ ID NO: 1071331 - RNA, 19 nt, Homo sapiens
  misc_RNA (1)...(19): siRNA sense strand
gccuggcuuucaucgcuua

SEQ ID NO: 1071332 - RNA, 19 nt, Homo sapiens
  misc_RNA (1)...(19): siRNA sense strand
uguuccagcucuuugacua

SEQ ID NO: 1071333 - RNA, 19 nt, Homo sapiens
  misc_RNA (1)...(19): siRNA sense strand
gacaacaucgaagacauga

SEQ ID NO: 1071334 - RNA, 19 nt, Homo sapiens
  misc_RNA (1)...(19): siRNA sense strand
gggaggugccuucuucauc

SEQ ID NO: 1071335 - RNA, 19 nt, Homo sapiens
  misc_RNA (1)...(19): siRNA sense strand
uuucucuucucccugauaa

SEQ ID NO: 1071336 - RNA, 19 nt, Homo sapiens
  misc_RNA (1)...(19): siRNA sense strand
gauggaguuugugcuguca

SEQ ID NO: 1071337 - RNA, 19 nt, Homo sapiens
  misc_RNA (1)...(19): siRNA sense strand
gcaggcacccagauauucu

SEQ ID NO: 1071338 - RNA, 19 nt, Homo sapiens
  misc_RNA (1)...(19): siRNA sense strand
cuaccucgucuuccucuuu

SEQ ID NO: 1071339 - RNA, 19 nt, Homo sapiens
  misc_RNA (1)...(19): siRNA sense strand
gucacagccuggaggaaga

SEQ ID NO: 1071340 - RNA, 19 nt, Homo sapiens
  misc_RNA (1)...(19): siRNA sense strand
ccaagcgcuucuacgacaa

SEQ ID NO: 1071341 - RNA, 19 nt, Homo sapiens
  misc_RNA (1)...(19): siRNA sense strand
ccaaaccucacgcgucugu

SEQ ID NO: 1071342 - RNA, 19 nt, Homo sapiens
  misc_RNA (1)...(19): siRNA sense strand
uggccugggucaucugcua

SEQ ID NO: 1071343 - RNA, 19 nt, Homo sapiens
  misc_RNA (1)...(19): siRNA sense strand
accaacggcucccugaaug

SEQ ID NO: 1071344 - RNA, 19 nt, Homo sapiens
  misc_RNA (1)...(19): siRNA sense strand
caguuuguguguguagaaa

SEQ ID NO: 1071345 - RNA, 19 nt, Homo sapiens
  misc_RNA (1)...(19): siRNA sense strand
gcccuggccuggcuuucau

SEQ ID NO: 1071346 - RNA, 19 nt, Homo sapiens
  misc_RNA (1)...(19): siRNA sense strand
gcccucugcuuccucaaca

SEQ ID NO: 1071347 - RNA, 19 nt, Homo sapiens
  misc_RNA (1)...(19): siRNA sense strand
gcugcuaccaugaguggaa

SEQ ID NO: 1071348 - RNA, 19 nt, Homo sapiens
  misc_RNA (1)...(19): siRNA sense strand
ccucuccugucaucgaguu

SEQ ID NO: 1071349 - RNA, 19 nt, Homo sapiens
  misc_RNA (1)...(19): siRNA sense strand
gaagacaugauuggguaca

SEQ ID NO: 1071350 - RNA, 19 nt, Homo sapiens
  misc_RNA (1)...(19): siRNA sense strand
uacaacaaguaccacaaca

SEQ ID NO: 1071351 - RNA, 19 nt, Homo sapiens
  misc_RNA (1)...(19): siRNA sense strand
gcauuccugucuuccuucu

SEQ ID NO: 1071352 - RNA, 19 nt, Homo sapiens
  misc_RNA (1)...(19): siRNA sense strand
ucucaggcacaaccaguaa

SEQ ID NO: 1071353 - RNA, 19 nt, Homo sapiens
  misc_RNA (1)...(19): siRNA sense strand
gcgcuucuacgacaacauc

SEQ ID NO: 1071354 - RNA, 19 nt, Homo sapiens
  misc_RNA (1)...(19): siRNA sense strand
ggaaguccucauccuugga

SEQ ID NO: 1071355 - RNA, 19 nt, Homo sapiens
  misc_RNA (1)...(19): siRNA sense strand
gcuggugguccuguuaauu

SEQ ID NO: 1071356 - RNA, 19 nt, Homo sapiens
  misc_RNA (1)...(19): siRNA sense strand
ccacauuuccuuaccucau

SEQ ID NO: 1071357 - RNA, 19 nt, Homo sapiens
  misc_RNA (1)...(19): siRNA sense strand
ccucuuaucaaauacuguu

SEQ ID NO: 1071358 - RNA, 19 nt, Homo sapiens
  misc_RNA (1)...(19): siRNA sense strand
aaugccaccucuccuguca

SEQ ID NO: 1071359 - RNA, 19 nt, Homo sapiens
  misc_RNA (1)...(19): siRNA sense strand
caucuucgagucccucugu

SEQ ID NO: 1071360 - RNA, 19 nt, Homo sapiens
  misc_RNA (1)...(19): siRNA sense strand
gcuacaacaaguaccacaa

SEQ ID NO: 1071361 - RNA, 19 nt, Homo sapiens
  misc_RNA (1)...(19): siRNA sense strand
caugcuggugguccuguua

SEQ ID NO: 1071362 - RNA, 19 nt, Homo sapiens
  misc_RNA (1)...(19): siRNA sense strand
gcccuguucuaccucuuca

SEQ ID NO: 1071363 - RNA, 19 nt, Homo sapiens
  misc_RNA (1)...(19): siRNA sense strand
gggcggaauguacguguuc

SEQ ID NO: 1071364 - RNA, 19 nt, Homo sapiens
  misc_RNA (1)...(19): siRNA sense strand
acaacaaguaccacaacaa

SEQ ID NO: 1071365 - RNA, 19 nt, Homo sapiens
  misc_RNA (1)...(19): siRNA sense strand
cagaacacuguauggaguu

SEQ ID NO: 1071366 - RNA, 19 nt, Homo sapiens
  misc_RNA (1)...(19): siRNA sense strand
ccucaacgucuacuacauc

SEQ ID NO: 1071367 - RNA, 19 nt, Homo sapiens
  misc_RNA (1)...(19): siRNA sense strand
acauguacccucacguguu

SEQ ID NO: 1071368 - RNA, 19 nt, Homo sapiens
  misc_RNA (1)...(19): siRNA sense strand
gcagcuacaacaaguacca

SEQ ID NO: 1071369 - RNA, 19 nt, Homo sapiens
  misc_RNA (1)...(19): siRNA sense strand
cuacuacaucauuguguug

SEQ ID NO: 1071370 - RNA, 19 nt, Homo sapiens
  misc_RNA (1)...(19): siRNA sense strand
acaagucccuguaugauga

SEQ ID NO: 1071371 - RNA, 19 nt, Homo sapiens
  misc_RNA (1)...(19): siRNA sense strand
ccaccgugcucuucgagaa

SEQ ID NO: 1071372 - RNA, 19 nt, Homo sapiens
  misc_RNA (1)...(19): siRNA sense strand
ggucaacgguggcucaaac

SEQ ID NO: 1071373 - RNA, 19 nt, Homo sapiens
  misc_RNA (1)...(19): siRNA sense strand
gaacagcucaaggucuuug

SEQ ID NO: 1071374 - RNA, 19 nt, Homo sapiens
  misc_RNA (1)...(19): siRNA sense strand
ucagacaagucccuguaug

SEQ ID NO: 1071375 - RNA, 19 nt, Homo sapiens
  misc_RNA (1)...(19): siRNA sense strand
cagacaagucccuguauga

SEQ ID NO: 1071376 - RNA, 19 nt, Homo sapiens
  misc_RNA (1)...(19): siRNA sense strand
caucagacaagucccugua

SEQ ID NO: 1071377 - RNA, 19 nt, Homo sapiens
  misc_RNA (1)...(19): siRNA sense strand
acgcaagacugagaaagaa

SEQ ID NO: 1071378 - RNA, 19 nt, Homo sapiens
  misc_RNA (1)...(19): siRNA sense strand
gcgaauuccuggaguacgu

SEQ ID NO: 1071379 - RNA, 19 nt, Homo sapiens
  misc_RNA (1)...(19): siRNA sense strand
gacaagucccuguaugaug

SEQ ID NO: 1071380 - RNA, 19 nt, Homo sapiens
  misc_RNA (1)...(19): siRNA sense strand
gcacuggagcugccuuugg

SEQ ID NO: 1071381 - RNA, 19 nt, Homo sapiens
  misc_RNA (1)...(19): siRNA sense strand
augaacagcucaaggucuu

SEQ ID NO: 1071382 - RNA, 19 nt, Homo sapiens
  misc_RNA (1)...(19): siRNA sense strand
ucugcaaccuugaugaaca

SEQ ID NO: 1071383 - RNA, 19 nt, Homo sapiens
  misc_RNA (1)...(19): siRNA sense strand
cgaagacacagagggcuuu

SEQ ID NO: 1071384 - RNA, 19 nt, Homo sapiens
  misc_RNA (1)...(19): siRNA sense strand
acagagagauccgggacau

SEQ ID NO: 1071385 - RNA, 19 nt, Homo sapiens
  misc_RNA (1)...(19): siRNA sense strand
gaggagacgccacccacau

SEQ ID NO: 1071386 - RNA, 19 nt, Homo sapiens
  misc_RNA (1)...(19): siRNA sense strand
gcuccggaaccuucuguug

SEQ ID NO: 1071387 - RNA, 19 nt, Homo sapiens
  misc_RNA (1)...(19): siRNA sense strand
gaagacacagagggcuuug

SEQ ID NO: 1071388 - RNA, 19 nt, Homo sapiens
  misc_RNA (1)...(19): siRNA sense strand
agacucagacgaagacaca

SEQ ID NO: 1071389 - RNA, 19 nt, Homo sapiens
  misc_RNA (1)...(19): siRNA sense strand
cacgcaagacugagaaaga

SEQ ID NO: 1071390 - RNA, 19 nt, Homo sapiens
  misc_RNA (1)...(19): siRNA sense strand
ugugcgaauuccuggagua

SEQ ID NO: 1071391 - RNA, 19 nt, Homo sapiens
  misc_RNA (1)...(19): siRNA sense strand
uccggaaccuucuguugga

SEQ ID NO: 1071392 - RNA, 19 nt, Homo sapiens
  misc_RNA (1)...(19): siRNA sense strand
cugagggccugugcgaauu

SEQ ID NO: 1071393 - RNA, 19 nt, Homo sapiens
  misc_RNA (1)...(19): siRNA sense strand
agacacagagggcuuugga

SEQ ID NO: 1071394 - RNA, 19 nt, Homo sapiens
  misc_RNA (1)...(19): siRNA sense strand
gccaccuucuccagcauug

SEQ ID NO: 1071395 - RNA, 19 nt, Homo sapiens
  misc_RNA (1)...(19): siRNA sense strand
cccggcagcucgaaugaca

SEQ ID NO: 1071396 - RNA, 19 nt, Homo sapiens
  misc_RNA (1)...(19): siRNA sense strand
cuucucgccucaccacuuc

SEQ ID NO: 1071397 - RNA, 19 nt, Homo sapiens
  misc_RNA (1)...(19): siRNA sense strand
gugcccaaccucaagaaga

SEQ ID NO: 1071398 - RNA, 19 nt, Homo sapiens
  misc_RNA (1)...(19): siRNA sense strand
agacaagucccuguaugau

SEQ ID NO: 1071399 - RNA, 19 nt, Homo sapiens
  misc_RNA (1)...(19): siRNA sense strand
cagcacggcaaacggagaa

SEQ ID NO: 1071400 - RNA, 19 nt, Homo sapiens
  misc_RNA (1)...(19): siRNA sense strand
ggacccugccucucacaag

SEQ ID NO: 1071401 - RNA, 19 nt, Homo sapiens
  misc_RNA (1)...(19): siRNA sense strand
cucacaagcuacugguguu

SEQ ID NO: 1071402 - RNA, 19 nt, Homo sapiens
  misc_RNA (1)...(19): siRNA sense strand
cccugucgguguccuuuga

SEQ ID NO: 1071403 - RNA, 19 nt, Homo sapiens
  misc_RNA (1)...(19): siRNA sense strand
ugacagagauugaagaaga

SEQ ID NO: 1071404 - RNA, 19 nt, Homo sapiens
  misc_RNA (1)...(19): siRNA sense strand
ucagacagguugacagaua

SEQ ID NO: 1071405 - RNA, 19 nt, Homo sapiens
  misc_RNA (1)...(19): siRNA sense strand
guacauauguggcuuggau

SEQ ID NO: 1071406 - RNA, 19 nt, Homo sapiens
  misc_RNA (1)...(19): siRNA sense strand
gcaguucacuuugcagaaa

SEQ ID NO: 1071407 - RNA, 19 nt, Homo sapiens
  misc_RNA (1)...(19): siRNA sense strand
gcaaaacgcccagcaauua

SEQ ID NO: 1071408 - RNA, 19 nt, Homo sapiens
  misc_RNA (1)...(19): siRNA sense strand
ggagauauccuuccuugau

SEQ ID NO: 1071409 - RNA, 19 nt, Homo sapiens
  misc_RNA (1)...(19): siRNA sense strand
gaugaaaccagaacucuug

SEQ ID NO: 1071410 - RNA, 19 nt, Homo sapiens
  misc_RNA (1)...(19): siRNA sense strand
aaccagaacucuugaauuc

SEQ ID NO: 1071411 - RNA, 19 nt, Homo sapiens
  misc_RNA (1)...(19): siRNA sense strand
cagcggaucuguucuuuua

SEQ ID NO: 1071412 - RNA, 19 nt, Homo sapiens
  misc_RNA (1)...(19): siRNA sense strand
gagauauccuuccuugaug

SEQ ID NO: 1071413 - RNA, 19 nt, Homo sapiens
  misc_RNA (1)...(19): siRNA sense strand
guagggagacucuuucgua

SEQ ID NO: 1071414 - RNA, 19 nt, Homo sapiens
  misc_RNA (1)...(19): siRNA sense strand
gaaguucuuugaguccuuu

SEQ ID NO: 1071415 - RNA, 19 nt, Homo sapiens
  misc_RNA (1)...(19): siRNA sense strand
cuacuuaucccauuacuug

SEQ ID NO: 1071416 - RNA, 19 nt, Homo sapiens
  misc_RNA (1)...(19): siRNA sense strand
ugaaacaucacccucauuu

SEQ ID NO: 1071417 - RNA, 19 nt, Homo sapiens
  misc_RNA (1)...(19): siRNA sense strand
gaugauaagucagcuaaag

SEQ ID NO: 1071418 - RNA, 19 nt, Homo sapiens
  misc_RNA (1)...(19): siRNA sense strand
gcaggaggcgugaagauga

SEQ ID NO: 1071419 - RNA, 19 nt, Homo sapiens
  misc_RNA (1)...(19): siRNA sense strand
gagccucgaugucuauuca

SEQ ID NO: 1071420 - RNA, 19 nt, Homo sapiens
  misc_RNA (1)...(19): siRNA sense strand
gaaguacuguauccuugug

SEQ ID NO: 1071421 - RNA, 19 nt, Homo sapiens
  misc_RNA (1)...(19): siRNA sense strand
ggucaacagggcaccauua

SEQ ID NO: 1071422 - RNA, 19 nt, Homo sapiens
  misc_RNA (1)...(19): siRNA sense strand
gacagagauugaagaagaa

SEQ ID NO: 1071423 - RNA, 19 nt, Homo sapiens
  misc_RNA (1)...(19): siRNA sense strand
gcuacaagauacugagaug

SEQ ID NO: 1071424 - RNA, 19 nt, Homo sapiens
  misc_RNA (1)...(19): siRNA sense strand
aaacaucacccucauuuua

SEQ ID NO: 1071425 - RNA, 19 nt, Homo sapiens
  misc_RNA (1)...(19): siRNA sense strand
cagacagguugacagauaa

SEQ ID NO: 1071426 - RNA, 19 nt, Homo sapiens
  misc_RNA (1)...(19): siRNA sense strand
gaaaccagaacucuugaau

SEQ ID NO: 1071427 - RNA, 19 nt, Homo sapiens
  misc_RNA (1)...(19): siRNA sense strand
ucaaguagacgucagauuc

SEQ ID NO: 1071428 - RNA, 19 nt, Homo sapiens
  misc_RNA (1)...(19): siRNA sense strand
ucaguugggauuacgauua

SEQ ID NO: 1071429 - RNA, 19 nt, Homo sapiens
  misc_RNA (1)...(19): siRNA sense strand
gguaggccuuguagagaaa

SEQ ID NO: 1071430 - RNA, 19 nt, Homo sapiens
  misc_RNA (1)...(19): siRNA sense strand
ggcauuauuguacuacuua

SEQ ID NO: 1071431 - RNA, 19 nt, Homo sapiens
  misc_RNA (1)...(19): siRNA sense strand
ccauuacacuggaugaugu

SEQ ID NO: 1071432 - RNA, 19 nt, Homo sapiens
  misc_RNA (1)...(19): siRNA sense strand
ggauuacgauuagggaugu

SEQ ID NO: 1071433 - RNA, 19 nt, Homo sapiens
  misc_RNA (1)...(19): siRNA sense strand
acacuggacuuggucauga

SEQ ID NO: 1071434 - RNA, 19 nt, Homo sapiens
  misc_RNA (1)...(19): siRNA sense strand
gcagaaguacuguauccuu

SEQ ID NO: 1071435 - RNA, 19 nt, Homo sapiens
  misc_RNA (1)...(19): siRNA sense strand
aaagaaaggcaaagcaguu

SEQ ID NO: 1071436 - RNA, 19 nt, Homo sapiens
  misc_RNA (1)...(19): siRNA sense strand
gaaaagaaacgcaugacuu

SEQ ID NO: 1071437 - RNA, 19 nt, Homo sapiens
  misc_RNA (1)...(19): siRNA sense strand
ccagaacucuugaauucag

SEQ ID NO: 1071438 - RNA, 19 nt, Homo sapiens
  misc_RNA (1)...(19): siRNA sense strand
acaauaacaugaggauuca

SEQ ID NO: 1071439 - RNA, 19 nt, Homo sapiens
  misc_RNA (1)...(19): siRNA sense strand
gccgguaguuggcaucuug

SEQ ID NO: 1071440 - RNA, 19 nt, Homo sapiens
  misc_RNA (1)...(19): siRNA sense strand
gggagacucuuucguacca

SEQ ID NO: 1071441 - RNA, 19 nt, Homo sapiens
  misc_RNA (1)...(19): siRNA sense strand
ggaaguucuuugaguccuu

SEQ ID NO: 1071442 - RNA, 19 nt, Homo sapiens
  misc_RNA (1)...(19): siRNA sense strand
uguacuacuuaucccauua

SEQ ID NO: 1071443 - RNA, 19 nt, Homo sapiens
  misc_RNA (1)...(19): siRNA sense strand
ucaggagaaugauggcaaa

SEQ ID NO: 1071444 - RNA, 19 nt, Homo sapiens
  misc_RNA (1)...(19): siRNA sense strand
gcgugaagaugaggaauca

SEQ ID NO: 1071445 - RNA, 19 nt, Homo sapiens
  misc_RNA (1)...(19): siRNA sense strand
gaaguagggagacucuuuc

SEQ ID NO: 1071446 - RNA, 19 nt, Homo sapiens
  misc_RNA (1)...(19): siRNA sense strand
cagcagaagucaaggaaaa

SEQ ID NO: 1071447 - RNA, 19 nt, Homo sapiens
  misc_RNA (1)...(19): siRNA sense strand
ggaauugguuuuaagugaa

SEQ ID NO: 1071448 - RNA, 19 nt, Homo sapiens
  misc_RNA (1)...(19): siRNA sense strand
cagaagguuugccgcagaa

SEQ ID NO: 1071449 - RNA, 19 nt, Homo sapiens
  misc_RNA (1)...(19): siRNA sense strand
uacacuggaugauguuaaa

SEQ ID NO: 1071450 - RNA, 19 nt, Homo sapiens
  misc_RNA (1)...(19): siRNA sense strand
agaaguagggagacucuuu

SEQ ID NO: 1071451 - RNA, 19 nt, Homo sapiens
  misc_RNA (1)...(19): siRNA sense strand
auaauuuccucauggcauu

SEQ ID NO: 1071452 - RNA, 19 nt, Homo sapiens
  misc_RNA (1)...(19): siRNA sense strand
ugaaaacacuguccucuca

SEQ ID NO: 1071453 - RNA, 19 nt, Homo sapiens
  misc_RNA (1)...(19): siRNA sense strand
gaagaaguagggagacucu

SEQ ID NO: 1071454 - RNA, 19 nt, Homo sapiens
  misc_RNA (1)...(19): siRNA sense strand
gaaaggagaaaauaucaga

SEQ ID NO: 1071455 - RNA, 19 nt, Homo sapiens
  misc_RNA (1)...(19): siRNA sense strand
gcuuggccgugccggauaa

SEQ ID NO: 1071456 - RNA, 19 nt, Homo sapiens
  misc_RNA (1)...(19): siRNA sense strand
gcagaccccuuacuugaug

SEQ ID NO: 1071457 - RNA, 19 nt, Homo sapiens
  misc_RNA (1)...(19): siRNA sense strand
gauuagggaugugguacug

SEQ ID NO: 1071458 - RNA, 19 nt, Homo sapiens
  misc_RNA (1)...(19): siRNA sense strand
gcgcagaaguacuguaucc

SEQ ID NO: 1071459 - RNA, 19 nt, Homo sapiens
  misc_RNA (1)...(19): siRNA sense strand
gaagguuugccgcagaaga

SEQ ID NO: 1071460 - RNA, 19 nt, Homo sapiens
  misc_RNA (1)...(19): siRNA sense strand
guucaguucaggagaauga

SEQ ID NO: 1071461 - RNA, 19 nt, Homo sapiens
  misc_RNA (1)...(19): siRNA sense strand
agagauugaagaagaagua

SEQ ID NO: 1071462 - RNA, 19 nt, Homo sapiens
  misc_RNA (1)...(19): siRNA sense strand
aaaacucacuggaaaagaa

SEQ ID NO: 1071463 - RNA, 19 nt, Homo sapiens
  misc_RNA (1)...(19): siRNA sense strand
caacagggcaccauuacac

SEQ ID NO: 1071464 - RNA, 19 nt, Homo sapiens
  misc_RNA (1)...(19): siRNA sense strand
ggaaagaugaaaccagaac

SEQ ID NO: 1071465 - RNA, 19 nt, Homo sapiens
  misc_RNA (1)...(19): siRNA sense strand
aaaccagaacucuugaauu

SEQ ID NO: 1071466 - RNA, 19 nt, Homo sapiens
  misc_RNA (1)...(19): siRNA sense strand
uccaguggcuccugaaaca

SEQ ID NO: 1071467 - RNA, 19 nt, Homo sapiens
  misc_RNA (1)...(19): siRNA sense strand
ugggaacucuggacucugu

SEQ ID NO: 1071468 - RNA, 19 nt, Homo sapiens
  misc_RNA (1)...(19): siRNA sense strand
caguugggauuacgauuag

SEQ ID NO: 1071469 - RNA, 19 nt, Homo sapiens
  misc_RNA (1)...(19): siRNA sense strand
gacuggaaguucuuugagu

SEQ ID NO: 1071470 - RNA, 19 nt, Homo sapiens
  misc_RNA (1)...(19): siRNA sense strand
aaaagaaacccaaaagcua

SEQ ID NO: 1071471 - RNA, 19 nt, Homo sapiens
  misc_RNA (1)...(19): siRNA sense strand
gaaaagaaacccaaaagcu

SEQ ID NO: 1071472 - RNA, 19 nt, Homo sapiens
  misc_RNA (1)...(19): siRNA sense strand
gagacucuuucguaccaau

SEQ ID NO: 1071473 - RNA, 19 nt, Homo sapiens
  misc_RNA (1)...(19): siRNA sense strand
agagguacuuggcgcagaa

SEQ ID NO: 1071474 - RNA, 19 nt, Homo sapiens
  misc_RNA (1)...(19): siRNA sense strand
acacuguccucucauacau

SEQ ID NO: 1071475 - RNA, 19 nt, Homo sapiens
  misc_RNA (1)...(19): siRNA sense strand
aaaacacuguccucucaua

SEQ ID NO: 1071476 - RNA, 19 nt, Homo sapiens
  misc_RNA (1)...(19): siRNA sense strand
ugguaggccuuguagagaa

SEQ ID NO: 1071477 - RNA, 19 nt, Homo sapiens
  misc_RNA (1)...(19): siRNA sense strand
aacaauaacaugaggauuc

SEQ ID NO: 1071478 - RNA, 19 nt, Homo sapiens
  misc_RNA (1)...(19): siRNA sense strand
cggauaagcaucacaugug

SEQ ID NO: 1071479 - RNA, 19 nt, Homo sapiens
  misc_RNA (1)...(19): siRNA sense strand
aagaugauaagucagcuaa

SEQ ID NO: 1071480 - RNA, 19 nt, Homo sapiens
  misc_RNA (1)...(19): siRNA sense strand
acagaaagacuggaaguuc

SEQ ID NO: 1071481 - RNA, 19 nt, Homo sapiens
  misc_RNA (1)...(19): siRNA sense strand
ccucauggcauuauuguac

SEQ ID NO: 1071482 - RNA, 19 nt, Homo sapiens
  misc_RNA (1)...(19): siRNA sense strand
aacaugaggauucaggaua

SEQ ID NO: 1071483 - RNA, 19 nt, Homo sapiens
  misc_RNA (1)...(19): siRNA sense strand
cuuccgacgucaacacuug

SEQ ID NO: 1071484 - RNA, 19 nt, Homo sapiens
  misc_RNA (1)...(19): siRNA sense strand
ucauggcauuauuguacua

SEQ ID NO: 1071485 - RNA, 19 nt, Homo sapiens
  misc_RNA (1)...(19): siRNA sense strand
cagaacucuugaauucaga

SEQ ID NO: 1071486 - RNA, 19 nt, Homo sapiens
  misc_RNA (1)...(19): siRNA sense strand
uacaucaugcccuaaguaa

SEQ ID NO: 1071487 - RNA, 19 nt, Homo sapiens
  misc_RNA (1)...(19): siRNA sense strand
caaaacgcccagcaauuaa

SEQ ID NO: 1071488 - RNA, 19 nt, Homo sapiens
  misc_RNA (1)...(19): siRNA sense strand
uagaagcagcacagaggua

SEQ ID NO: 1071489 - RNA, 19 nt, Homo sapiens
  misc_RNA (1)...(19): siRNA sense strand
gcaccauuacacuggauga

SEQ ID NO: 1071490 - RNA, 19 nt, Homo sapiens
  misc_RNA (1)...(19): siRNA sense strand
cuacucugcugccaucucu

SEQ ID NO: 1071491 - RNA, 19 nt, Homo sapiens
  misc_RNA (1)...(19): siRNA sense strand
gggcagaccccuuacuuga

SEQ ID NO: 1071492 - RNA, 19 nt, Homo sapiens
  misc_RNA (1)...(19): siRNA sense strand
cuaaagcuguagagaaacg

SEQ ID NO: 1071493 - RNA, 19 nt, Homo sapiens
  misc_RNA (1)...(19): siRNA sense strand
auacaucaugcccuaagua

SEQ ID NO: 1071494 - RNA, 19 nt, Homo sapiens
  misc_RNA (1)...(19): siRNA sense strand
acaugaggauucaggauac

SEQ ID NO: 1071495 - RNA, 19 nt, Homo sapiens
  misc_RNA (1)...(19): siRNA sense strand
gggaugugguacuggaaag

SEQ ID NO: 1071496 - RNA, 19 nt, Homo sapiens
  misc_RNA (1)...(19): siRNA sense strand
gauggaucaguugggauua

SEQ ID NO: 1071497 - RNA, 19 nt, Homo sapiens
  misc_RNA (1)...(19): siRNA sense strand
gcagcagaagucaaggaaa

SEQ ID NO: 1071498 - RNA, 19 nt, Homo sapiens
  misc_RNA (1)...(19): siRNA sense strand
gaaacugaugguccagcuu

SEQ ID NO: 1071499 - RNA, 19 nt, Homo sapiens
  misc_RNA (1)...(19): siRNA sense strand
uggcauuauuguacuacuu

SEQ ID NO: 1071500 - RNA, 19 nt, Homo sapiens
  misc_RNA (1)...(19): siRNA sense strand
gaaacaucacccucauuuu

SEQ ID NO: 1071501 - RNA, 19 nt, Homo sapiens
  misc_RNA (1)...(19): siRNA sense strand
ugcaaaagaugauaaguca

SEQ ID NO: 1071502 - RNA, 19 nt, Homo sapiens
  misc_RNA (1)...(19): siRNA sense strand
gaaagaugaaaccagaacu

SEQ ID NO: 1071503 - RNA, 19 nt, Homo sapiens
  misc_RNA (1)...(19): siRNA sense strand
ucacaguucagaagaaaua

SEQ ID NO: 1071504 - RNA, 19 nt, Homo sapiens
  misc_RNA (1)...(19): siRNA sense strand
gacaagacccugaaucugu

SEQ ID NO: 1071505 - RNA, 19 nt, Homo sapiens
  misc_RNA (1)...(19): siRNA sense strand
gcauuacccucaucaucau

SEQ ID NO: 1071506 - RNA, 19 nt, Homo sapiens
  misc_RNA (1)...(19): siRNA sense strand
ccucaucauuuccaucaug

SEQ ID NO: 1071507 - RNA, 19 nt, Homo sapiens
  misc_RNA (1)...(19): siRNA sense strand
caucaugggcaucgucauu

SEQ ID NO: 1071508 - RNA, 19 nt, Homo sapiens
  misc_RNA (1)...(19): siRNA sense strand
ucaugggcaucgucauuau

SEQ ID NO: 1071509 - RNA, 19 nt, Homo sapiens
  misc_RNA (1)...(19): siRNA sense strand
aggcagagaacaaggauga

SEQ ID NO: 1071510 - RNA, 19 nt, Homo sapiens
  misc_RNA (1)...(19): siRNA sense strand
gggcaucgucauuaucaug

SEQ ID NO: 1071511 - RNA, 19 nt, Homo sapiens
  misc_RNA (1)...(19): siRNA sense strand
gcucagcauuacccucauc

SEQ ID NO: 1071512 - RNA, 19 nt, Homo sapiens
  misc_RNA (1)...(19): siRNA sense strand
gcagagaacaaggaugaca

SEQ ID NO: 1071513 - RNA, 19 nt, Homo sapiens
  misc_RNA (1)...(19): siRNA sense strand
ucaccaaggcagagaacaa

SEQ ID NO: 1071514 - RNA, 19 nt, Homo sapiens
  misc_RNA (1)...(19): siRNA sense strand
cagcauuacccucaucauc

SEQ ID NO: 1071515 - RNA, 19 nt, Homo sapiens
  misc_RNA (1)...(19): siRNA sense strand
ccaaggcagagaacaagga

SEQ ID NO: 1071516 - RNA, 19 nt, Homo sapiens
  misc_RNA (1)...(19): siRNA sense strand
gaugacaagacccugaauc

SEQ ID NO: 1071517 - RNA, 19 nt, Homo sapiens
  misc_RNA (1)...(19): siRNA sense strand
cagagaacaaggaugacaa

SEQ ID NO: 1071518 - RNA, 19 nt, Homo sapiens
  misc_RNA (1)...(19): siRNA sense strand
gcaguccgaguuuccuuca

SEQ ID NO: 1071519 - RNA, 19 nt, Homo sapiens
  misc_RNA (1)...(19): siRNA sense strand
gagaacaaggaugacaaga

SEQ ID NO: 1071520 - RNA, 19 nt, Homo sapiens
  misc_RNA (1)...(19): siRNA sense strand
ugacaagacccugaaucug

SEQ ID NO: 1071521 - RNA, 19 nt, Homo sapiens
  misc_RNA (1)...(19): siRNA sense strand
gaaccugggugcagacaga

SEQ ID NO: 1071522 - RNA, 19 nt, Homo sapiens
  misc_RNA (1)...(19): siRNA sense strand
ugaaagcucuggugaaguc

SEQ ID NO: 1071523 - RNA, 19 nt, Homo sapiens
  misc_RNA (1)...(19): siRNA sense strand
cggaggagcuggcugaaga

SEQ ID NO: 1071524 - RNA, 19 nt, Homo sapiens
  misc_RNA (1)...(19): siRNA sense strand
ggaggaagcaacacaugaa

SEQ ID NO: 1071525 - RNA, 19 nt, Homo sapiens
  misc_RNA (1)...(19): siRNA sense strand
gaaggugccugccgacacu

SEQ ID NO: 1071526 - RNA, 19 nt, Homo sapiens
  misc_RNA (1)...(19): siRNA sense strand
ggaagccugucuuucaaca

SEQ ID NO: 1071527 - RNA, 19 nt, Homo sapiens
  misc_RNA (1)...(19): siRNA sense strand
aaaccaaaccucccugauu

SEQ ID NO: 1071528 - RNA, 19 nt, Homo sapiens
  misc_RNA (1)...(19): siRNA sense strand
aaccaaaccucccugauuc

SEQ ID NO: 1071529 - RNA, 19 nt, Homo sapiens
  misc_RNA (1)...(19): siRNA sense strand
agacggacauccuccagaa

SEQ ID NO: 1071530 - RNA, 19 nt, Homo sapiens
  misc_RNA (1)...(19): siRNA sense strand
ggagagaaggaagaugaua

SEQ ID NO: 1071531 - RNA, 19 nt, Homo sapiens
  misc_RNA (1)...(19): siRNA sense strand
gaacugggaggaagcaaca

SEQ ID NO: 1071532 - RNA, 19 nt, Homo sapiens
  misc_RNA (1)...(19): siRNA sense strand
gcagaugugccucaaggaa

SEQ ID NO: 1071533 - RNA, 19 nt, Homo sapiens
  misc_RNA (1)...(19): siRNA sense strand
ggaagcagaugugccucaa

SEQ ID NO: 1071534 - RNA, 19 nt, Homo sapiens
  misc_RNA (1)...(19): siRNA sense strand
ggaaaucgugcaccuggaa

SEQ ID NO: 1071535 - RNA, 19 nt, Homo sapiens
  misc_RNA (1)...(19): siRNA sense strand
gaagaggagcuguucaucu

SEQ ID NO: 1071536 - RNA, 19 nt, Homo sapiens
  misc_RNA (1)...(19): siRNA sense strand
ccucaaggcugucaaagac

SEQ ID NO: 1071537 - RNA, 19 nt, Homo sapiens
  misc_RNA (1)...(19): siRNA sense strand
gcucagggccuuucagaag

SEQ ID NO: 1071538 - RNA, 19 nt, Homo sapiens
  misc_RNA (1)...(19): siRNA sense strand
gaagacaaccagggaaauc

SEQ ID NO: 1071539 - RNA, 19 nt, Homo sapiens
  misc_RNA (1)...(19): siRNA sense strand
gaccagcagugacaaaggu

SEQ ID NO: 1071540 - RNA, 19 nt, Homo sapiens
  misc_RNA (1)...(19): siRNA sense strand
ccucagcacugccucacaa

SEQ ID NO: 1071541 - RNA, 19 nt, Homo sapiens
  misc_RNA (1)...(19): siRNA sense strand
acaacaggcucauggaaca

SEQ ID NO: 1071542 - RNA, 19 nt, Homo sapiens
  misc_RNA (1)...(19): siRNA sense strand
caggagagaaggaagauga

SEQ ID NO: 1071543 - RNA, 19 nt, Homo sapiens
  misc_RNA (1)...(19): siRNA sense strand
gaacacaaggacaaaggau

SEQ ID NO: 1071544 - RNA, 19 nt, Homo sapiens
  misc_RNA (1)...(19): siRNA sense strand
gagagaaggaagaugauag

SEQ ID NO: 1071545 - RNA, 19 nt, Homo sapiens
  misc_RNA (1)...(19): siRNA sense strand
agacagaacacaaggacaa

SEQ ID NO: 1071546 - RNA, 19 nt, Homo sapiens
  misc_RNA (1)...(19): siRNA sense strand
ccacagcuccucugacagu

SEQ ID NO: 1071547 - RNA, 19 nt, Homo sapiens
  misc_RNA (1)...(19): siRNA sense strand
ggaggaggaggaagagaug

SEQ ID NO: 1071548 - RNA, 19 nt, Homo sapiens
  misc_RNA (1)...(19): siRNA sense strand
gggaggaagcaacacauga

SEQ ID NO: 1071549 - RNA, 19 nt, Homo sapiens
  misc_RNA (1)...(19): siRNA sense strand
cagcacugccucacaagaa

SEQ ID NO: 1071550 - RNA, 19 nt, Homo sapiens
  misc_RNA (1)...(19): siRNA sense strand
caacuugaagcgugggauu

SEQ ID NO: 1071551 - RNA, 19 nt, Homo sapiens
  misc_RNA (1)...(19): siRNA sense strand
ccacaacaggcucauggaa

SEQ ID NO: 1071552 - RNA, 19 nt, Homo sapiens
  misc_RNA (1)...(19): siRNA sense strand
ggaagcaacacaugaagcu

SEQ ID NO: 1071553 - RNA, 19 nt, Homo sapiens
  misc_RNA (1)...(19): siRNA sense strand
ggagcuggcugaagauccu

SEQ ID NO: 1071554 - RNA, 19 nt, Homo sapiens
  misc_RNA (1)...(19): siRNA sense strand
caccaaagaggcagauuca

SEQ ID NO: 1071555 - RNA, 19 nt, Homo sapiens
  misc_RNA (1)...(19): siRNA sense strand
cgacaggagagaaggaaga

SEQ ID NO: 1071556 - RNA, 19 nt, Homo sapiens
  misc_RNA (1)...(19): siRNA sense strand
cugcagaauuggccacaga

SEQ ID NO: 1071557 - RNA, 19 nt, Homo sapiens
  misc_RNA (1)...(19): siRNA sense strand
gaaaccaaaccucccugau

SEQ ID NO: 1071558 - RNA, 19 nt, Homo sapiens
  misc_RNA (1)...(19): siRNA sense strand
agaaggaagaugauagaga

SEQ ID NO: 1071559 - RNA, 19 nt, Homo sapiens
  misc_RNA (1)...(19): siRNA sense strand
gggaagaggagcuguucau

SEQ ID NO: 1071560 - RNA, 19 nt, Homo sapiens
  misc_RNA (1)...(19): siRNA sense strand
ugaagacacagcuggauca

SEQ ID NO: 1071561 - RNA, 19 nt, Homo sapiens
  misc_RNA (1)...(19): siRNA sense strand
agagaaggaagaugauaga

SEQ ID NO: 1071562 - RNA, 19 nt, Homo sapiens
  misc_RNA (1)...(19): siRNA sense strand
uuugaaagcucuggugaag

SEQ ID NO: 1071563 - RNA, 19 nt, Homo sapiens
  misc_RNA (1)...(19): siRNA sense strand
agccacagcuccucugaca

SEQ ID NO: 1071564 - RNA, 19 nt, Homo sapiens
  misc_RNA (1)...(19): siRNA sense strand
ggaagaggagcuguucauc

SEQ ID NO: 1071565 - RNA, 19 nt, Homo sapiens
  misc_RNA (1)...(19): siRNA sense strand
gacagaacacaaggacaaa

SEQ ID NO: 1071566 - RNA, 19 nt, Homo sapiens
  misc_RNA (1)...(19): siRNA sense strand
cuuggaagccugucuuuca

SEQ ID NO: 1071567 - RNA, 19 nt, Homo sapiens
  misc_RNA (1)...(19): siRNA sense strand
uuggaagccugucuuucaa

SEQ ID NO: 1071568 - RNA, 19 nt, Homo sapiens
  misc_RNA (1)...(19): siRNA sense strand
aagaagacaaccagggaaa

SEQ ID NO: 1071569 - RNA, 19 nt, Homo sapiens
  misc_RNA (1)...(19): siRNA sense strand
gagucuggcgggacaagaa

SEQ ID NO: 1071570 - RNA, 19 nt, Homo sapiens
  misc_RNA (1)...(19): siRNA sense strand
ggacauccuccagaaaguc

SEQ ID NO: 1071571 - RNA, 19 nt, Homo sapiens
  misc_RNA (1)...(19): siRNA sense strand
gcugaccaccgccaaguuc

SEQ ID NO: 1071572 - RNA, 19 nt, Homo sapiens
  misc_RNA (1)...(19): siRNA sense strand
ggacucagacuccccuuug

SEQ ID NO: 1071573 - RNA, 19 nt, Homo sapiens
  misc_RNA (1)...(19): siRNA sense strand
cugggucgcugcagcugaa

SEQ ID NO: 1071574 - RNA, 19 nt, Homo sapiens
  misc_RNA (1)...(19): siRNA sense strand
gaucacgaacugggaggaa

SEQ ID NO: 1071575 - RNA, 19 nt, Homo sapiens
  misc_RNA (1)...(19): siRNA sense strand
acagcuggaucacgaacug

SEQ ID NO: 1071576 - RNA, 19 nt, Homo sapiens
  misc_RNA (1)...(19): siRNA sense strand
gcacugccucacaagaauc

SEQ ID NO: 1071577 - RNA, 19 nt, Homo sapiens
  misc_RNA (1)...(19): siRNA sense strand
gaggaagcaacacaugaag

SEQ ID NO: 1071578 - RNA, 19 nt, Homo sapiens
  misc_RNA (1)...(19): siRNA sense strand
cagcucagggccuuucaga

SEQ ID NO: 1071579 - RNA, 19 nt, Homo sapiens
  misc_RNA (1)...(19): siRNA sense strand
gacauccuccagaaaguca

SEQ ID NO: 1071580 - RNA, 19 nt, Homo sapiens
  misc_RNA (1)...(19): siRNA sense strand
gcagauucaggaagcagau

SEQ ID NO: 1071581 - RNA, 19 nt, Homo sapiens
  misc_RNA (1)...(19): siRNA sense strand
aagcgugggauuuggauga

SEQ ID NO: 1071582 - RNA, 19 nt, Homo sapiens
  misc_RNA (1)...(19): siRNA sense strand
cggacauccuccagaaagu

SEQ ID NO: 1071583 - RNA, 19 nt, Homo sapiens
  misc_RNA (1)...(19): siRNA sense strand
gaccaccuguccccagaaa

SEQ ID NO: 1071584 - RNA, 19 nt, Homo sapiens
  misc_RNA (1)...(19): siRNA sense strand
gcucccgucucuggacuca

SEQ ID NO: 1071585 - RNA, 19 nt, Homo sapiens
  misc_RNA (1)...(19): siRNA sense strand
caaauuauauccgcgguua

SEQ ID NO: 1071586 - RNA, 19 nt, Homo sapiens
  misc_RNA (1)...(19): siRNA sense strand
ggaaaucuauaucguguug

SEQ ID NO: 1071587 - RNA, 19 nt, Homo sapiens
  misc_RNA (1)...(19): siRNA sense strand
gcaaguguauaauauggua

SEQ ID NO: 1071588 - RNA, 19 nt, Homo sapiens
  misc_RNA (1)...(19): siRNA sense strand
cagcuaaacuaucugauuu

SEQ ID NO: 1071589 - RNA, 19 nt, Homo sapiens
  misc_RNA (1)...(19): siRNA sense strand
acacagaacuccaucaaga

SEQ ID NO: 1071590 - RNA, 19 nt, Homo sapiens
  misc_RNA (1)...(19): siRNA sense strand
agacguggauuucaucaua

SEQ ID NO: 1071591 - RNA, 19 nt, Homo sapiens
  misc_RNA (1)...(19): siRNA sense strand
ccaacaaacugcccaagaa

SEQ ID NO: 1071592 - RNA, 19 nt, Homo sapiens
  misc_RNA (1)...(19): siRNA sense strand
aaccaugccuuccaacuua

SEQ ID NO: 1071593 - RNA, 19 nt, Homo sapiens
  misc_RNA (1)...(19): siRNA sense strand
gauaaaucauugcaagugu

SEQ ID NO: 1071594 - RNA, 19 nt, Homo sapiens
  misc_RNA (1)...(19): siRNA sense strand
caaacuggagacagaauua

SEQ ID NO: 1071595 - RNA, 19 nt, Homo sapiens
  misc_RNA (1)...(19): siRNA sense strand
cagaauauccuccaucuuc

SEQ ID NO: 1071596 - RNA, 19 nt, Homo sapiens
  misc_RNA (1)...(19): siRNA sense strand
ccaguaaggcuucuagaaa

SEQ ID NO: 1071597 - RNA, 19 nt, Homo sapiens
  misc_RNA (1)...(19): siRNA sense strand
ggaauaaaggcacacagaa

SEQ ID NO: 1071598 - RNA, 19 nt, Homo sapiens
  misc_RNA (1)...(19): siRNA sense strand
cuaccaaacuggagacaga

SEQ ID NO: 1071599 - RNA, 19 nt, Homo sapiens
  misc_RNA (1)...(19): siRNA sense strand
cgaaggaaauaugaacauu

SEQ ID NO: 1071600 - RNA, 19 nt, Homo sapiens
  misc_RNA (1)...(19): siRNA sense strand
uaaccauccuuguggcuuu

SEQ ID NO: 1071601 - RNA, 19 nt, Homo sapiens
  misc_RNA (1)...(19): siRNA sense strand
agacagaaaugagaggaaa

SEQ ID NO: 1071602 - RNA, 19 nt, Homo sapiens
  misc_RNA (1)...(19): siRNA sense strand
gacguggauuucaucauaa

SEQ ID NO: 1071603 - RNA, 19 nt, Homo sapiens
  misc_RNA (1)...(19): siRNA sense strand
gcacacagaacuccaucaa

SEQ ID NO: 1071604 - RNA, 19 nt, Homo sapiens
  misc_RNA (1)...(19): siRNA sense strand
uauccuccaucuucaaauu

SEQ ID NO: 1071605 - RNA, 19 nt, Homo sapiens
  misc_RNA (1)...(19): siRNA sense strand
ugucauaccauuacacaaa

SEQ ID NO: 1071606 - RNA, 19 nt, Homo sapiens
  misc_RNA (1)...(19): siRNA sense strand
gaagaaaacccagcauauu

SEQ ID NO: 1071607 - RNA, 19 nt, Homo sapiens
  misc_RNA (1)...(19): siRNA sense strand
ggauaaaucauugcaagug

SEQ ID NO: 1071608 - RNA, 19 nt, Homo sapiens
  misc_RNA (1)...(19): siRNA sense strand
gaaaugagaggaaaauugu

SEQ ID NO: 1071609 - RNA, 19 nt, Homo sapiens
  misc_RNA (1)...(19): siRNA sense strand
gcaauugcccaacaaacug

SEQ ID NO: 1071610 - RNA, 19 nt, Homo sapiens
  misc_RNA (1)...(19): siRNA sense strand
gaauaaaggcacacagaac

SEQ ID NO: 1071611 - RNA, 19 nt, Homo sapiens
  misc_RNA (1)...(19): siRNA sense strand
uacaugggauaaaucauug

SEQ ID NO: 1071612 - RNA, 19 nt, Homo sapiens
  misc_RNA (1)...(19): siRNA sense strand
ggauugauucggacacauu

SEQ ID NO: 1071613 - RNA, 19 nt, Homo sapiens
  misc_RNA (1)...(19): siRNA sense strand
agaaucaccagcuaaacua

SEQ ID NO: 1071614 - RNA, 19 nt, Homo sapiens
  misc_RNA (1)...(19): siRNA sense strand
guacaucaagcgcuacgaa

SEQ ID NO: 1071615 - RNA, 19 nt, Homo sapiens
  misc_RNA (1)...(19): siRNA sense strand
ccagcuaaacuaucugauu

SEQ ID NO: 1071616 - RNA, 19 nt, Homo sapiens
  misc_RNA (1)...(19): siRNA sense strand
cccagcauauuccaaacua

SEQ ID NO: 1071617 - RNA, 19 nt, Homo sapiens
  misc_RNA (1)...(19): siRNA sense strand
ccaagaaguuuuagguuau

SEQ ID NO: 1071618 - RNA, 19 nt, Homo sapiens
  misc_RNA (1)...(19): siRNA sense strand
gacagaauuacaugggaua

SEQ ID NO: 1071619 - RNA, 19 nt, Homo sapiens
  misc_RNA (1)...(19): siRNA sense strand
cccaagaaguuuuagguua

SEQ ID NO: 1071620 - RNA, 19 nt, Homo sapiens
  misc_RNA (1)...(19): siRNA sense strand
aaacccagcauauuccaaa

SEQ ID NO: 1071621 - RNA, 19 nt, Homo sapiens
  misc_RNA (1)...(19): siRNA sense strand
gaauauccuccaucuucaa

SEQ ID NO: 1071622 - RNA, 19 nt, Homo sapiens
  misc_RNA (1)...(19): siRNA sense strand
agaauauccuccaucuuca

SEQ ID NO: 1071623 - RNA, 19 nt, Homo sapiens
  misc_RNA (1)...(19): siRNA sense strand
caguaaggcuucuagaaaa

SEQ ID NO: 1071624 - RNA, 19 nt, Homo sapiens
  misc_RNA (1)...(19): siRNA sense strand
ggaagaaaacccagcauau

SEQ ID NO: 1071625 - RNA, 19 nt, Homo sapiens
  misc_RNA (1)...(19): siRNA sense strand
caacuuaguaaacuucauc

SEQ ID NO: 1071626 - RNA, 19 nt, Homo sapiens
  misc_RNA (1)...(19): siRNA sense strand
caacaaacugcccaagaag

SEQ ID NO: 1071627 - RNA, 19 nt, Homo sapiens
  misc_RNA (1)...(19): siRNA sense strand
gcauauuccaaacuaguga

SEQ ID NO: 1071628 - RNA, 19 nt, Homo sapiens
  misc_RNA (1)...(19): siRNA sense strand
guaaacuucauccucaaug

SEQ ID NO: 1071629 - RNA, 19 nt, Homo sapiens
  misc_RNA (1)...(19): siRNA sense strand
gagacuuuaucgacuuagu

SEQ ID NO: 1071630 - RNA, 19 nt, Homo sapiens
  misc_RNA (1)...(19): siRNA sense strand
gaaucaccagcuaaacuau

SEQ ID NO: 1071631 - RNA, 19 nt, Homo sapiens
  misc_RNA (1)...(19): siRNA sense strand
ggaaaauuguccccaucaa

SEQ ID NO: 1071632 - RNA, 19 nt, Homo sapiens
  misc_RNA (1)...(19): siRNA sense strand
gcgcuacgaaggaaauaug

SEQ ID NO: 1071633 - RNA, 19 nt, Homo sapiens
  misc_RNA (1)...(19): siRNA sense strand
caucaagcgcuacgaagga

SEQ ID NO: 1071634 - RNA, 19 nt, Homo sapiens
  misc_RNA (1)...(19): siRNA sense strand
gaauuacaugggauaaauc

SEQ ID NO: 1071635 - RNA, 19 nt, Homo sapiens
  misc_RNA (1)...(19): siRNA sense strand
ccaaacuggagacagaauu

SEQ ID NO: 1071636 - RNA, 19 nt, Homo sapiens
  misc_RNA (1)...(19): siRNA sense strand
aaaccaugccuuccaacuu

SEQ ID NO: 1071637 - RNA, 19 nt, Homo sapiens
  misc_RNA (1)...(19): siRNA sense strand
ccuccaucuucaaauuaua

SEQ ID NO: 1071638 - RNA, 19 nt, Homo sapiens
  misc_RNA (1)...(19): siRNA sense strand
cgacuuaguguacaucaag

SEQ ID NO: 1071639 - RNA, 19 nt, Homo sapiens
  misc_RNA (1)...(19): siRNA sense strand
uaucugauuuccucuacca

SEQ ID NO: 1071640 - RNA, 19 nt, Homo sapiens
  misc_RNA (1)...(19): siRNA sense strand
uaaacuucauccucaaugc

SEQ ID NO: 1071641 - RNA, 19 nt, Homo sapiens
  misc_RNA (1)...(19): siRNA sense strand
gauuuccucuaccaaacug

SEQ ID NO: 1071642 - RNA, 19 nt, Homo sapiens
  misc_RNA (1)...(19): siRNA sense strand
ccauggaaaucuauaucgu

SEQ ID NO: 1071643 - RNA, 19 nt, Homo sapiens
  misc_RNA (1)...(19): siRNA sense strand
guuauaaucgagauacauc

SEQ ID NO: 1071644 - RNA, 19 nt, Homo sapiens
  misc_RNA (1)...(19): siRNA sense strand
ccuuguggcuuuguauguu

SEQ ID NO: 1071645 - RNA, 19 nt, Homo sapiens
  misc_RNA (1)...(19): siRNA sense strand
gucauaccauuacacaaag

SEQ ID NO: 1071646 - RNA, 19 nt, Homo sapiens
  misc_RNA (1)...(19): siRNA sense strand
uaauaugguacacaggauu

SEQ ID NO: 1071647 - RNA, 19 nt, Homo sapiens
  misc_RNA (1)...(19): siRNA sense strand
gcuaaacuaucugauuucc

SEQ ID NO: 1071648 - RNA, 19 nt, Homo sapiens
  misc_RNA (1)...(19): siRNA sense strand
cagaaucaccagcuaaacu

SEQ ID NO: 1071649 - RNA, 19 nt, Homo sapiens
  misc_RNA (1)...(19): siRNA sense strand
uggaauaaaggcacacaga

SEQ ID NO: 1071650 - RNA, 19 nt, Homo sapiens
  misc_RNA (1)...(19): siRNA sense strand
uaguaaacuucauccucaa

SEQ ID NO: 1071651 - RNA, 19 nt, Homo sapiens
  misc_RNA (1)...(19): siRNA sense strand
cagaauuacaugggauaaa

SEQ ID NO: 1071652 - RNA, 19 nt, Homo sapiens
  misc_RNA (1)...(19): siRNA sense strand
gauucggacacauucauau

SEQ ID NO: 1071653 - RNA, 19 nt, Homo sapiens
  misc_RNA (1)...(19): siRNA sense strand
guggauuucaucauaauag

SEQ ID NO: 1071654 - RNA, 19 nt, Homo sapiens
  misc_RNA (1)...(19): siRNA sense strand
caucaagacguggauuuca

SEQ ID NO: 1071655 - RNA, 19 nt, Homo sapiens
  misc_RNA (1)...(19): siRNA sense strand
cagcauauuccaaacuagu

SEQ ID NO: 1071656 - RNA, 19 nt, Homo sapiens
  misc_RNA (1)...(19): siRNA sense strand
cuuuguauguucaccaaug

SEQ ID NO: 1071657 - RNA, 19 nt, Homo sapiens
  misc_RNA (1)...(19): siRNA sense strand
uugcaaguguauaauaugg

SEQ ID NO: 1071658 - RNA, 19 nt, Homo sapiens
  misc_RNA (1)...(19): siRNA sense strand
ugauucggacacauucaua

SEQ ID NO: 1071659 - RNA, 19 nt, Homo sapiens
  misc_RNA (1)...(19): siRNA sense strand
caagcgcuacgaaggaaau

SEQ ID NO: 1071660 - RNA, 19 nt, Homo sapiens
  misc_RNA (1)...(19): siRNA sense strand
ugcaaaagauggaauaaag

SEQ ID NO: 1071661 - RNA, 19 nt, Homo sapiens
  misc_RNA (1)...(19): siRNA sense strand
auuccaaacuagugauguu

SEQ ID NO: 1071662 - RNA, 19 nt, Homo sapiens
  misc_RNA (1)...(19): siRNA sense strand
guucaccaauggaagaaaa

SEQ ID NO: 1071663 - RNA, 19 nt, Homo sapiens
  misc_RNA (1)...(19): siRNA sense strand
gcuacgaaggaaauaugaa

SEQ ID NO: 1071664 - RNA, 19 nt, Homo sapiens
  misc_RNA (1)...(19): siRNA sense strand
ggcuuuguauguucaccaa

SEQ ID NO: 1071665 - RNA, 19 nt, Homo sapiens
  misc_RNA (1)...(19): siRNA sense strand
uccagaauauccuccaucu

SEQ ID NO: 1071666 - RNA, 19 nt, Homo sapiens
  misc_RNA (1)...(19): siRNA sense strand
gggauaaaucauugcaagu

SEQ ID NO: 1071667 - RNA, 19 nt, Homo sapiens
  misc_RNA (1)...(19): siRNA sense strand
aauauccuccaucuucaaa

SEQ ID NO: 1071668 - RNA, 19 nt, Homo sapiens
  misc_RNA (1)...(19): siRNA sense strand
caggauugauucggacaca

SEQ ID NO: 1071669 - RNA, 19 nt, Homo sapiens
  misc_RNA (1)...(19): siRNA sense strand
gacuuuaucgacuuagugu

SEQ ID NO: 1071670 - RNA, 19 nt, Homo sapiens
  misc_RNA (1)...(19): siRNA sense strand
aauaaaggcacacagaacu

SEQ ID NO: 1071671 - RNA, 19 nt, Homo sapiens
  misc_RNA (1)...(19): siRNA sense strand
agauacaucaggcuggaaa

SEQ ID NO: 1071672 - RNA, 19 nt, Homo sapiens
  misc_RNA (1)...(19): siRNA sense strand
uauguucaccaauggaaga

SEQ ID NO: 1071673 - RNA, 19 nt, Homo sapiens
  misc_RNA (1)...(19): siRNA sense strand
aaacacuucucucaacuaa

SEQ ID NO: 1071674 - RNA, 19 nt, Homo sapiens
  misc_RNA (1)...(19): siRNA sense strand
ugacaugucuggcucgaaa

SEQ ID NO: 1071675 - RNA, 19 nt, Homo sapiens
  misc_RNA (1)...(19): siRNA sense strand
gaagcuuugugucaacauu

SEQ ID NO: 1071676 - RNA, 19 nt, Homo sapiens
  misc_RNA (1)...(19): siRNA sense strand
gaaacacuucucucaacua

SEQ ID NO: 1071677 - RNA, 19 nt, Homo sapiens
  misc_RNA (1)...(19): siRNA sense strand
aagguggacuucagaaauu

SEQ ID NO: 1071678 - RNA, 19 nt, Homo sapiens
  misc_RNA (1)...(19): siRNA sense strand
acagaacagugaaacauca

SEQ ID NO: 1071679 - RNA, 19 nt, Homo sapiens
  misc_RNA (1)...(19): siRNA sense strand
ggacugcaaacccaaauca

SEQ ID NO: 1071680 - RNA, 19 nt, Homo sapiens
  misc_RNA (1)...(19): siRNA sense strand
caacagaacagugaaacau

SEQ ID NO: 1071681 - RNA, 19 nt, Homo sapiens
  misc_RNA (1)...(19): siRNA sense strand
acacuucucucaacuaaaa

SEQ ID NO: 1071682 - RNA, 19 nt, Homo sapiens
  misc_RNA (1)...(19): siRNA sense strand
agugaaacaucaugguaaa

SEQ ID NO: 1071683 - RNA, 19 nt, Homo sapiens
  misc_RNA (1)...(19): siRNA sense strand
gaaggacugcaaacccaaa

SEQ ID NO: 1071684 - RNA, 19 nt, Homo sapiens
  misc_RNA (1)...(19): siRNA sense strand
caaagguggacuucagaaa

SEQ ID NO: 1071685 - RNA, 19 nt, Homo sapiens
  misc_RNA (1)...(19): siRNA sense strand
ucuacuugcuccucaaaga

SEQ ID NO: 1071686 - RNA, 19 nt, Homo sapiens
  misc_RNA (1)...(19): siRNA sense strand
ccagagagaaggacugcaa

SEQ ID NO: 1071687 - RNA, 19 nt, Homo sapiens
  misc_RNA (1)...(19): siRNA sense strand
cugcaaacccaaaucauga

SEQ ID NO: 1071688 - RNA, 19 nt, Homo sapiens
  misc_RNA (1)...(19): siRNA sense strand
guagaagcuuugugucaac

SEQ ID NO: 1071689 - RNA, 19 nt, Homo sapiens
  misc_RNA (1)...(19): siRNA sense strand
cagaaugaaucccaaaaga

SEQ ID NO: 1071690 - RNA, 19 nt, Homo sapiens
  misc_RNA (1)...(19): siRNA sense strand
ucugaaggguggacuuuua

SEQ ID NO: 1071691 - RNA, 19 nt, Homo sapiens
  misc_RNA (1)...(19): siRNA sense strand
cagugaaacaucaugguaa

SEQ ID NO: 1071692 - RNA, 19 nt, Homo sapiens
  misc_RNA (1)...(19): siRNA sense strand
ggguggacuuuuaaaauaa

SEQ ID NO: 1071693 - RNA, 19 nt, Homo sapiens
  misc_RNA (1)...(19): siRNA sense strand
aaagguggacuucagaaau

SEQ ID NO: 1071694 - RNA, 19 nt, Homo sapiens
  misc_RNA (1)...(19): siRNA sense strand
aguagaagcuuugugucaa

SEQ ID NO: 1071695 - RNA, 19 nt, Homo sapiens
  misc_RNA (1)...(19): siRNA sense strand
gcaacagaacagugaaaca

SEQ ID NO: 1071696 - RNA, 19 nt, Homo sapiens
  misc_RNA (1)...(19): siRNA sense strand
guguauuguugaucacuug

SEQ ID NO: 1071697 - RNA, 19 nt, Homo sapiens
  misc_RNA (1)...(19): siRNA sense strand
ucaaagaacaccagcaaaa

SEQ ID NO: 1071698 - RNA, 19 nt, Homo sapiens
  misc_RNA (1)...(19): siRNA sense strand
acagugaaacaucauggua

SEQ ID NO: 1071699 - RNA, 19 nt, Homo sapiens
  misc_RNA (1)...(19): siRNA sense strand
gaaacaucaugguaaaagu

SEQ ID NO: 1071700 - RNA, 19 nt, Homo sapiens
  misc_RNA (1)...(19): siRNA sense strand
ccucaaagaacaccagcaa

SEQ ID NO: 1071701 - RNA, 19 nt, Homo sapiens
  misc_RNA (1)...(19): siRNA sense strand
aggguggacuuuuaaaaua

SEQ ID NO: 1071702 - RNA, 19 nt, Homo sapiens
  misc_RNA (1)...(19): siRNA sense strand
guugaucacuuguaaaaca

SEQ ID NO: 1071703 - RNA, 19 nt, Homo sapiens
  misc_RNA (1)...(19): siRNA sense strand
gaaggguggacuuuuaaaa

SEQ ID NO: 1071704 - RNA, 19 nt, Homo sapiens
  misc_RNA (1)...(19): siRNA sense strand
uguaaaacaugcaacagaa

SEQ ID NO: 1071705 - RNA, 19 nt, Homo sapiens
  misc_RNA (1)...(19): siRNA sense strand
ccaaagguggacuucagaa

SEQ ID NO: 1071706 - RNA, 19 nt, Homo sapiens
  misc_RNA (1)...(19): siRNA sense strand
cuacuugcuccucaaagaa

SEQ ID NO: 1071707 - RNA, 19 nt, Homo sapiens
  misc_RNA (1)...(19): siRNA sense strand
gcaaacccaaaucaugaca

SEQ ID NO: 1071708 - RNA, 19 nt, Homo sapiens
  misc_RNA (1)...(19): siRNA sense strand
caaagacuccaaaagugua

SEQ ID NO: 1071709 - RNA, 19 nt, Homo sapiens
  misc_RNA (1)...(19): siRNA sense strand
aaaguucaaagacuccaaa

SEQ ID NO: 1071710 - RNA, 19 nt, Homo sapiens
  misc_RNA (1)...(19): siRNA sense strand
guaucuacuugcuccucaa

SEQ ID NO: 1071711 - RNA, 19 nt, Homo sapiens
  misc_RNA (1)...(19): siRNA sense strand
gcaaaacaaagaaacacuu

SEQ ID NO: 1071712 - RNA, 19 nt, Homo sapiens
  misc_RNA (1)...(19): siRNA sense strand
uagaagcuuugugucaaca

SEQ ID NO: 1071713 - RNA, 19 nt, Homo sapiens
  misc_RNA (1)...(19): siRNA sense strand
guucaaagacuccaaaagu

SEQ ID NO: 1071714 - RNA, 19 nt, Homo sapiens
  misc_RNA (1)...(19): siRNA sense strand
ccaaaaguguauuguugau

SEQ ID NO: 1071715 - RNA, 19 nt, Homo sapiens
  misc_RNA (1)...(19): siRNA sense strand
guauuguugaucacuugua

SEQ ID NO: 1071716 - RNA, 19 nt, Homo sapiens
  misc_RNA (1)...(19): siRNA sense strand
ugaagacaccagagagaag

SEQ ID NO: 1071717 - RNA, 19 nt, Homo sapiens
  misc_RNA (1)...(19): siRNA sense strand
cagagagaaggacugcaaa

SEQ ID NO: 1071718 - RNA, 19 nt, Homo sapiens
  misc_RNA (1)...(19): siRNA sense strand
gagaagagauggccaagag

SEQ ID NO: 1071719 - RNA, 19 nt, Homo sapiens
  misc_RNA (1)...(19): siRNA sense strand
ucaaggagguggagcauau

SEQ ID NO: 1071720 - RNA, 19 nt, Homo sapiens
  misc_RNA (1)...(19): siRNA sense strand
gagaggcacuccaucauca

SEQ ID NO: 1071721 - RNA, 19 nt, Homo sapiens
  misc_RNA (1)...(19): siRNA sense strand
gcacucacguccucagcaa

SEQ ID NO: 1071722 - RNA, 19 nt, Homo sapiens
  misc_RNA (1)...(19): siRNA sense strand
caacagaacaaguccauuc

SEQ ID NO: 1071723 - RNA, 19 nt, Homo sapiens
  misc_RNA (1)...(19): siRNA sense strand
cagaacaaguccauucaga

SEQ ID NO: 1071724 - RNA, 19 nt, Homo sapiens
  misc_RNA (1)...(19): siRNA sense strand
aagagaagaugcagacaga

SEQ ID NO: 1071725 - RNA, 19 nt, Homo sapiens
  misc_RNA (1)...(19): siRNA sense strand
ugauggagacuauugauaa

SEQ ID NO: 1071726 - RNA, 19 nt, Homo sapiens
  misc_RNA (1)...(19): siRNA sense strand
gcaacaaccagaucaguca

SEQ ID NO: 1071727 - RNA, 19 nt, Homo sapiens
  misc_RNA (1)...(19): siRNA sense strand
gaaaacuccuccaacagaa

SEQ ID NO: 1071728 - RNA, 19 nt, Homo sapiens
  misc_RNA (1)...(19): siRNA sense strand
agucuaaacuccucagaga

SEQ ID NO: 1071729 - RNA, 19 nt, Homo sapiens
  misc_RNA (1)...(19): siRNA sense strand
gauggagacuauugauaag

SEQ ID NO: 1071730 - RNA, 19 nt, Homo sapiens
  misc_RNA (1)...(19): siRNA sense strand
gcgcuugccuacagcagaa

SEQ ID NO: 1071731 - RNA, 19 nt, Homo sapiens
  misc_RNA (1)...(19): siRNA sense strand
gaccugcgcuggaauaacg

SEQ ID NO: 1071732 - RNA, 19 nt, Homo sapiens
  misc_RNA (1)...(19): siRNA sense strand
cugcagagcgggagucuaa

SEQ ID NO: 1071733 - RNA, 19 nt, Homo sapiens
  misc_RNA (1)...(19): siRNA sense strand
ccaagcaguuccucgacuu

SEQ ID NO: 1071734 - RNA, 19 nt, Homo sapiens
  misc_RNA (1)...(19): siRNA sense strand
cagcugggccugcaaguug

SEQ ID NO: 1071735 - RNA, 19 nt, Homo sapiens
  misc_RNA (1)...(19): siRNA sense strand
agaacgccguccuggcuua

SEQ ID NO: 1071736 - RNA, 19 nt, Homo sapiens
  misc_RNA (1)...(19): siRNA sense strand
ggaaaacuccuccaacaga

SEQ ID NO: 1071737 - RNA, 19 nt, Homo sapiens
  misc_RNA (1)...(19): siRNA sense strand
gagcugagccgagugaaag

SEQ ID NO: 1071738 - RNA, 19 nt, Homo sapiens
  misc_RNA (1)...(19): siRNA sense strand
ggaccuggcugggaacaac

SEQ ID NO: 1071739 - RNA, 19 nt, Homo sapiens
  misc_RNA (1)...(19): siRNA sense strand
ggcaggagaugaccagcau

SEQ ID NO: 1071740 - RNA, 19 nt, Homo sapiens
  misc_RNA (1)...(19): siRNA sense strand
ggacauggagaagagaaga

SEQ ID NO: 1071741 - RNA, 19 nt, Homo sapiens
  misc_RNA (1)...(19): siRNA sense strand
ggacuuaaagggcaacaac

SEQ ID NO: 1071742 - RNA, 19 nt, Homo sapiens
  misc_RNA (1)...(19): siRNA sense strand
gauaagcagcgagaagaga

SEQ ID NO: 1071743 - RNA, 19 nt, Homo sapiens
  misc_RNA (1)...(19): siRNA sense strand
ggagaaguccaagcaguuc

SEQ ID NO: 1071744 - RNA, 19 nt, Homo sapiens
  misc_RNA (1)...(19): siRNA sense strand
gggcgagcuuccugcagaa

SEQ ID NO: 1071745 - RNA, 19 nt, Homo sapiens
  misc_RNA (1)...(19): siRNA sense strand
ggagcugagccgagugaaa

SEQ ID NO: 1071746 - RNA, 19 nt, Homo sapiens
  misc_RNA (1)...(19): siRNA sense strand
gagcgccagcugaaaguga

SEQ ID NO: 1071747 - RNA, 19 nt, Homo sapiens
  misc_RNA (1)...(19): siRNA sense strand
gcugcgcuuucuggacuua

SEQ ID NO: 1071748 - RNA, 19 nt, Homo sapiens
  misc_RNA (1)...(19): siRNA sense strand
gcaguuccucgacuugaug

SEQ ID NO: 1071749 - RNA, 19 nt, Homo sapiens
  misc_RNA (1)...(19): siRNA sense strand
gaggagcugagccgaguga

SEQ ID NO: 1071750 - RNA, 19 nt, Homo sapiens
  misc_RNA (1)...(19): siRNA sense strand
gggaggagaaguccaagca

SEQ ID NO: 1071751 - RNA, 19 nt, Homo sapiens
  misc_RNA (1)...(19): siRNA sense strand
uggcucaccuggaggacaa

SEQ ID NO: 1071752 - RNA, 19 nt, Homo sapiens
  misc_RNA (1)...(19): siRNA sense strand
ccgaaagccugcgcaucaa

SEQ ID NO: 1071753 - RNA, 19 nt, Homo sapiens
  misc_RNA (1)...(19): siRNA sense strand
uggagacuauugauaagca

SEQ ID NO: 1071754 - RNA, 19 nt, Homo sapiens
  misc_RNA (1)...(19): siRNA sense strand
gagcugguccugagugacu

SEQ ID NO: 1071755 - RNA, 19 nt, Homo sapiens
  misc_RNA (1)...(19): siRNA sense strand
gagcugaucaaggccaaga

SEQ ID NO: 1071756 - RNA, 19 nt, Homo sapiens
  misc_RNA (1)...(19): siRNA sense strand
ucaccaccuuccaggagaa

SEQ ID NO: 1071757 - RNA, 19 nt, Homo sapiens
  misc_RNA (1)...(19): siRNA sense strand
ccucagagccguggagcaa

SEQ ID NO: 1071758 - RNA, 19 nt, Homo sapiens
  misc_RNA (1)...(19): siRNA sense strand
gccucacgcuggaguggaa

SEQ ID NO: 1071759 - RNA, 19 nt, Homo sapiens
  misc_RNA (1)...(19): siRNA sense strand
gcagagcgggagucuaaac

SEQ ID NO: 1071760 - RNA, 19 nt, Homo sapiens
  misc_RNA (1)...(19): siRNA sense strand
acaaccagaucagucacaa

SEQ ID NO: 1071761 - RNA, 19 nt, Homo sapiens
  misc_RNA (1)...(19): siRNA sense strand
ggacagggagagcgagaac

SEQ ID NO: 1071762 - RNA, 19 nt, Homo sapiens
  misc_RNA (1)...(19): siRNA sense strand
uccgaaagccugcgcauca

SEQ ID NO: 1071763 - RNA, 19 nt, Homo sapiens
  misc_RNA (1)...(19): siRNA sense strand
caucaucaacgcucucaag

SEQ ID NO: 1071764 - RNA, 19 nt, Homo sapiens
  misc_RNA (1)...(19): siRNA sense strand
cggagcugguccugaguga

SEQ ID NO: 1071765 - RNA, 19 nt, Homo sapiens
  misc_RNA (1)...(19): siRNA sense strand
cuaaacuccucagagacuu

SEQ ID NO: 1071766 - RNA, 19 nt, Homo sapiens
  misc_RNA (1)...(19): siRNA sense strand
ccaagcugcagaugacaga

SEQ ID NO: 1071767 - RNA, 19 nt, Homo sapiens
  misc_RNA (1)...(19): siRNA sense strand
ugaaugagaggcacuccau

SEQ ID NO: 1071768 - RNA, 19 nt, Homo sapiens
  misc_RNA (1)...(19): siRNA sense strand
ucgacuugauggagacuau

SEQ ID NO: 1071769 - RNA, 19 nt, Homo sapiens
  misc_RNA (1)...(19): siRNA sense strand
ggcuggaccuccgcaacaa

SEQ ID NO: 1071770 - RNA, 19 nt, Homo sapiens
  misc_RNA (1)...(19): siRNA sense strand
aggaggcgcugagggagaa

SEQ ID NO: 1071771 - RNA, 19 nt, Homo sapiens
  misc_RNA (1)...(19): siRNA sense strand
gacuugauggagacuauug

SEQ ID NO: 1071772 - RNA, 19 nt, Homo sapiens
  misc_RNA (1)...(19): siRNA sense strand
caggagaugaccagcaugu

SEQ ID NO: 1071773 - RNA, 19 nt, Homo sapiens
  misc_RNA (1)...(19): siRNA sense strand
caacaccgugcugcgcuuu

SEQ ID NO: 1071774 - RNA, 19 nt, Homo sapiens
  misc_RNA (1)...(19): siRNA sense strand
aaugagaggcacuccauca

SEQ ID NO: 1071775 - RNA, 19 nt, Homo sapiens
  misc_RNA (1)...(19): siRNA sense strand
ugagaggcacuccaucauc

SEQ ID NO: 1071776 - RNA, 19 nt, Homo sapiens
  misc_RNA (1)...(19): siRNA sense strand
aaaccagguagacgaguug

SEQ ID NO: 1071777 - RNA, 19 nt, Homo sapiens
  misc_RNA (1)...(19): siRNA sense strand
cacagaggcaggccaagga

SEQ ID NO: 1071778 - RNA, 19 nt, Homo sapiens
  misc_RNA (1)...(19): siRNA sense strand
gaacuuggaugccagcaaa

SEQ ID NO: 1071779 - RNA, 19 nt, Homo sapiens
  misc_RNA (1)...(19): siRNA sense strand
caagagaggugaagaaagu

SEQ ID NO: 1071780 - RNA, 19 nt, Homo sapiens
  misc_RNA (1)...(19): siRNA sense strand
gaaaguggaugugcagagu

SEQ ID NO: 1071781 - RNA, 19 nt, Homo sapiens
  misc_RNA (1)...(19): siRNA sense strand
caguauggaugaagacuuu

SEQ ID NO: 1071782 - RNA, 19 nt, Homo sapiens
  misc_RNA (1)...(19): siRNA sense strand
gaagaagacagcacugaug

SEQ ID NO: 1071783 - RNA, 19 nt, Homo sapiens
  misc_RNA (1)...(19): siRNA sense strand
cuuaagcgauuucaauuug

SEQ ID NO: 1071784 - RNA, 19 nt, Homo sapiens
  misc_RNA (1)...(19): siRNA sense strand
ggcaauggcuacagcaaug

SEQ ID NO: 1071785 - RNA, 19 nt, Homo sapiens
  misc_RNA (1)...(19): siRNA sense strand
agacagcacugaugaccaa

SEQ ID NO: 1071786 - RNA, 19 nt, Homo sapiens
  misc_RNA (1)...(19): siRNA sense strand
gcaauggucagcuuggaaa

SEQ ID NO: 1071787 - RNA, 19 nt, Homo sapiens
  misc_RNA (1)...(19): siRNA sense strand
caacaaagaagcuggaucu

SEQ ID NO: 1071788 - RNA, 19 nt, Homo sapiens
  misc_RNA (1)...(19): siRNA sense strand
gcacugaugaccaaagaga

SEQ ID NO: 1071789 - RNA, 19 nt, Homo sapiens
  misc_RNA (1)...(19): siRNA sense strand
guaaaugaucaguggauaa

SEQ ID NO: 1071790 - RNA, 19 nt, Homo sapiens
  misc_RNA (1)...(19): siRNA sense strand
cuuccacccuuccugauua

SEQ ID NO: 1071791 - RNA, 19 nt, Homo sapiens
  misc_RNA (1)...(19): siRNA sense strand
uguaagacccacugcuuua

SEQ ID NO: 1071792 - RNA, 19 nt, Homo sapiens
  misc_RNA (1)...(19): siRNA sense strand
caccgacucugccuacauu

SEQ ID NO: 1071793 - RNA, 19 nt, Homo sapiens
  misc_RNA (1)...(19): siRNA sense strand
caagcaguauggaugaaga

SEQ ID NO: 1071794 - RNA, 19 nt, Homo sapiens
  misc_RNA (1)...(19): siRNA sense strand
gcacaauuucugccaaaga

SEQ ID NO: 1071795 - RNA, 19 nt, Homo sapiens
  misc_RNA (1)...(19): siRNA sense strand
gcaugaagcauauggcaau

SEQ ID NO: 1071796 - RNA, 19 nt, Homo sapiens
  misc_RNA (1)...(19): siRNA sense strand
cagcacugaugaccaaaga

SEQ ID NO: 1071797 - RNA, 19 nt, Homo sapiens
  misc_RNA (1)...(19): siRNA sense strand
cuacagcaauggucagcuu

SEQ ID NO: 1071798 - RNA, 19 nt, Homo sapiens
  misc_RNA (1)...(19): siRNA sense strand
gaaaccacagugaagaaga

SEQ ID NO: 1071799 - RNA, 19 nt, Homo sapiens
  misc_RNA (1)...(19): siRNA sense strand
guaguaagaagaacuugga

SEQ ID NO: 1071800 - RNA, 19 nt, Homo sapiens
  misc_RNA (1)...(19): siRNA sense strand
uguaaaugaucaguggaua

SEQ ID NO: 1071801 - RNA, 19 nt, Homo sapiens
  misc_RNA (1)...(19): siRNA sense strand
aaguggaugugcagaguuu

SEQ ID NO: 1071802 - RNA, 19 nt, Homo sapiens
  misc_RNA (1)...(19): siRNA sense strand
ucacucagcgcuaacauca

SEQ ID NO: 1071803 - RNA, 19 nt, Homo sapiens
  misc_RNA (1)...(19): siRNA sense strand
uuauucaccuuaagcgauu

SEQ ID NO: 1071804 - RNA, 19 nt, Homo sapiens
  misc_RNA (1)...(19): siRNA sense strand
gacucugccuacauucuuu

SEQ ID NO: 1071805 - RNA, 19 nt, Homo sapiens
  misc_RNA (1)...(19): siRNA sense strand
cauccucacucagcgcuaa

SEQ ID NO: 1071806 - RNA, 19 nt, Homo sapiens
  misc_RNA (1)...(19): siRNA sense strand
gcagacacaagcaguaugg

SEQ ID NO: 1071807 - RNA, 19 nt, Homo sapiens
  misc_RNA (1)...(19): siRNA sense strand
ggcaagagaggugaagaaa

SEQ ID NO: 1071808 - RNA, 19 nt, Homo sapiens
  misc_RNA (1)...(19): siRNA sense strand
auacuacuguuccaagugu

SEQ ID NO: 1071809 - RNA, 19 nt, Homo sapiens
  misc_RNA (1)...(19): siRNA sense strand
acacaagcaguauggauga

SEQ ID NO: 1071810 - RNA, 19 nt, Homo sapiens
  misc_RNA (1)...(19): siRNA sense strand
aagaagacagcacugauga

SEQ ID NO: 1071811 - RNA, 19 nt, Homo sapiens
  misc_RNA (1)...(19): siRNA sense strand
gcaagagaggugaagaaag

SEQ ID NO: 1071812 - RNA, 19 nt, Homo sapiens
  misc_RNA (1)...(19): siRNA sense strand
gagauauacuacuguucca

SEQ ID NO: 1071813 - RNA, 19 nt, Homo sapiens
  misc_RNA (1)...(19): siRNA sense strand
guguaagacccacugcuuu

SEQ ID NO: 1071814 - RNA, 19 nt, Homo sapiens
  misc_RNA (1)...(19): siRNA sense strand
caccuuaagcgauuucaau

SEQ ID NO: 1071815 - RNA, 19 nt, Homo sapiens
  misc_RNA (1)...(19): siRNA sense strand
ugucaaguaguaagaagaa

SEQ ID NO: 1071816 - RNA, 19 nt, Homo sapiens
  misc_RNA (1)...(19): siRNA sense strand
gcaguauggaugaagacuu

SEQ ID NO: 1071817 - RNA, 19 nt, Homo sapiens
  misc_RNA (1)...(19): siRNA sense strand
ggaaaccacagugaagaag

SEQ ID NO: 1071818 - RNA, 19 nt, Homo sapiens
  misc_RNA (1)...(19): siRNA sense strand
cagcaauggucagcuugga

SEQ ID NO: 1071819 - RNA, 19 nt, Homo sapiens
  misc_RNA (1)...(19): siRNA sense strand
ccuuaagcgauuucaauuu

SEQ ID NO: 1071820 - RNA, 19 nt, Homo sapiens
  misc_RNA (1)...(19): siRNA sense strand
aaacugucaaguaguaaga

SEQ ID NO: 1071821 - RNA, 19 nt, Homo sapiens
  misc_RNA (1)...(19): siRNA sense strand
guauggaugaagacuuuga

SEQ ID NO: 1071822 - RNA, 19 nt, Homo sapiens
  misc_RNA (1)...(19): siRNA sense strand
cgacucugccuacauucuu

SEQ ID NO: 1071823 - RNA, 19 nt, Homo sapiens
  misc_RNA (1)...(19): siRNA sense strand
aaaccacagugaagaagac

SEQ ID NO: 1071824 - RNA, 19 nt, Homo sapiens
  misc_RNA (1)...(19): siRNA sense strand
gugaagaagacagcacuga

SEQ ID NO: 1071825 - RNA, 19 nt, Homo sapiens
  misc_RNA (1)...(19): siRNA sense strand
cacccuuccugauuauuca

SEQ ID NO: 1071826 - RNA, 19 nt, Homo sapiens
  misc_RNA (1)...(19): siRNA sense strand
guaagacccacugcuuuag

SEQ ID NO: 1071827 - RNA, 19 nt, Homo sapiens
  misc_RNA (1)...(19): siRNA sense strand
ugaagaagacagcacugau

SEQ ID NO: 1071828 - RNA, 19 nt, Homo sapiens
  misc_RNA (1)...(19): siRNA sense strand
caugaagcauauggcaaug

SEQ ID NO: 1071829 - RNA, 19 nt, Homo sapiens
  misc_RNA (1)...(19): siRNA sense strand
cacaagcaguauggaugaa

SEQ ID NO: 1071830 - RNA, 19 nt, Homo sapiens
  misc_RNA (1)...(19): siRNA sense strand
ccacccuuccugauuauuc

SEQ ID NO: 1071831 - RNA, 19 nt, Homo sapiens
  misc_RNA (1)...(19): siRNA sense strand
gcuuccacccuuccugauu

SEQ ID NO: 1071832 - RNA, 19 nt, Homo sapiens
  misc_RNA (1)...(19): siRNA sense strand
ccuacauucuuuucuauga

SEQ ID NO: 1071833 - RNA, 19 nt, Homo sapiens
  misc_RNA (1)...(19): siRNA sense strand
uggaaaccacagugaagaa

SEQ ID NO: 1071834 - RNA, 19 nt, Homo sapiens
  misc_RNA (1)...(19): siRNA sense strand
gcuuggaaaccacagugaa

SEQ ID NO: 1071835 - RNA, 19 nt, Homo sapiens
  misc_RNA (1)...(19): siRNA sense strand
gagaaacccuauaaaugua

SEQ ID NO: 1071836 - RNA, 19 nt, Homo sapiens
  misc_RNA (1)...(19): siRNA sense strand
agaaagaccuuaugaaugu

SEQ ID NO: 1071837 - RNA, 19 nt, Homo sapiens
  misc_RNA (1)...(19): siRNA sense strand
ggauggaccuuauaaaugu

SEQ ID NO: 1071838 - RNA, 19 nt, Homo sapiens
  misc_RNA (1)...(19): siRNA sense strand
ggaaagaccagaacauuga

SEQ ID NO: 1071839 - RNA, 19 nt, Homo sapiens
  misc_RNA (1)...(19): siRNA sense strand
ggagaaagacguuauaaau

SEQ ID NO: 1071840 - RNA, 19 nt, Homo sapiens
  misc_RNA (1)...(19): siRNA sense strand
gagagaagcccuauaaaug

SEQ ID NO: 1071841 - RNA, 19 nt, Homo sapiens
  misc_RNA (1)...(19): siRNA sense strand
gaaaccaugugaauguaaa

SEQ ID NO: 1071842 - RNA, 19 nt, Homo sapiens
  misc_RNA (1)...(19): siRNA sense strand
gguaaagccuucccucauu

SEQ ID NO: 1071843 - RNA, 19 nt, Homo sapiens
  misc_RNA (1)...(19): siRNA sense strand
gagaaaagccuuaugaaua

SEQ ID NO: 1071844 - RNA, 19 nt, Homo sapiens
  misc_RNA (1)...(19): siRNA sense strand
gagagaaacccuauaaaug

SEQ ID NO: 1071845 - RNA, 19 nt, Homo sapiens
  misc_RNA (1)...(19): siRNA sense strand
ggagaaagaccuuaugaau

SEQ ID NO: 1071846 - RNA, 19 nt, Homo sapiens
  misc_RNA (1)...(19): siRNA sense strand
gagaaaccaugugaaugua

SEQ ID NO: 1071847 - RNA, 19 nt, Homo sapiens
  misc_RNA (1)...(19): siRNA sense strand
gggaaagccuucagauaug

SEQ ID NO: 1071848 - RNA, 19 nt, Homo sapiens
  misc_RNA (1)...(19): siRNA sense strand
ggagagaaacccuauaaau

SEQ ID NO: 1071849 - RNA, 19 nt, Homo sapiens
  misc_RNA (1)...(19): siRNA sense strand
gaaaggacccacucuagga

SEQ ID NO: 1071850 - RNA, 19 nt, Homo sapiens
  misc_RNA (1)...(19): siRNA sense strand
gagaaagacguuauaaaug

SEQ ID NO: 1071851 - RNA, 19 nt, Homo sapiens
  misc_RNA (1)...(19): siRNA sense strand
caucagaggugacauugga

SEQ ID NO: 1071852 - RNA, 19 nt, Homo sapiens
  misc_RNA (1)...(19): siRNA sense strand
ggagagaagcccuauaaau

SEQ ID NO: 1071853 - RNA, 19 nt, Homo sapiens
  misc_RNA (1)...(19): siRNA sense strand
gagaaagaccuuaugaaug

SEQ ID NO: 1071854 - RNA, 19 nt, Homo sapiens
  misc_RNA (1)...(19): siRNA sense strand
gaagacacaugguaaugca

SEQ ID NO: 1071855 - RNA, 19 nt, Homo sapiens
  misc_RNA (1)...(19): siRNA sense strand
gagagaaaccguaugaaug

SEQ ID NO: 1071856 - RNA, 19 nt, Homo sapiens
  misc_RNA (1)...(19): siRNA sense strand
gaaacccaaugcuuguaaa

SEQ ID NO: 1071857 - RNA, 19 nt, Homo sapiens
  misc_RNA (1)...(19): siRNA sense strand
caagcaacguucaguaguu

SEQ ID NO: 1071858 - RNA, 19 nt, Homo sapiens
  misc_RNA (1)...(19): siRNA sense strand
gaaagaccuuaugaaugua

SEQ ID NO: 1071859 - RNA, 19 nt, Homo sapiens
  misc_RNA (1)...(19): siRNA sense strand
gagaaacccuaugagugua

SEQ ID NO: 1071860 - RNA, 19 nt, Homo sapiens
  misc_RNA (1)...(19): siRNA sense strand
gaagagaaacccuaugagu

SEQ ID NO: 1071861 - RNA, 19 nt, Homo sapiens
  misc_RNA (1)...(19): siRNA sense strand
uauccucucuuacaaguuu

SEQ ID NO: 1071862 - RNA, 19 nt, Homo sapiens
  misc_RNA (1)...(19): siRNA sense strand
ggaaagccuucagauaugu

SEQ ID NO: 1071863 - RNA, 19 nt, Homo sapiens
  misc_RNA (1)...(19): siRNA sense strand
ggaucacacuggagagaaa

SEQ ID NO: 1071864 - RNA, 19 nt, Homo sapiens
  misc_RNA (1)...(19): siRNA sense strand
ggacucacccugaagagaa

SEQ ID NO: 1071865 - RNA, 19 nt, Homo sapiens
  misc_RNA (1)...(19): siRNA sense strand
gagaaaccguaugaaugua

SEQ ID NO: 1071866 - RNA, 19 nt, Homo sapiens
  misc_RNA (1)...(19): siRNA sense strand
ggagagaaaccguaugaau

SEQ ID NO: 1071867 - RNA, 19 nt, Homo sapiens
  misc_RNA (1)...(19): siRNA sense strand
ggagagaaaccaugugaau

SEQ ID NO: 1071868 - RNA, 19 nt, Homo sapiens
  misc_RNA (1)...(19): siRNA sense strand
cuagguaacucaucuuuua

SEQ ID NO: 1071869 - RNA, 19 nt, Homo sapiens
  misc_RNA (1)...(19): siRNA sense strand
gggcuuugcuggauauuuc

SEQ ID NO: 1071870 - RNA, 19 nt, Homo sapiens
  misc_RNA (1)...(19): siRNA sense strand
gaauguaaacaguguggua

SEQ ID NO: 1071871 - RNA, 19 nt, Homo sapiens
  misc_RNA (1)...(19): siRNA sense strand
guaaagccuucccucauuc

SEQ ID NO: 1071872 - RNA, 19 nt, Homo sapiens
  misc_RNA (1)...(19): siRNA sense strand
gcauuauccucucuuacaa

SEQ ID NO: 1071873 - RNA, 19 nt, Homo sapiens
  misc_RNA (1)...(19): siRNA sense strand
gaaaaggcuuaucaaugua

SEQ ID NO: 1071874 - RNA, 19 nt, Homo sapiens
  misc_RNA (1)...(19): siRNA sense strand
agagaaacccuauaaaugu

SEQ ID NO: 1071875 - RNA, 19 nt, Homo sapiens
  misc_RNA (1)...(19): siRNA sense strand
ucaggagucucauagaaga

SEQ ID NO: 1071876 - RNA, 19 nt, Homo sapiens
  misc_RNA (1)...(19): siRNA sense strand
gcccagaaccuucgaauuc

SEQ ID NO: 1071877 - RNA, 19 nt, Homo sapiens
  misc_RNA (1)...(19): siRNA sense strand
ggauguggcugugaacuuc

SEQ ID NO: 1071878 - RNA, 19 nt, Homo sapiens
  misc_RNA (1)...(19): siRNA sense strand
ggagagaaacccaaugcuu

SEQ ID NO: 1071879 - RNA, 19 nt, Homo sapiens
  misc_RNA (1)...(19): siRNA sense strand
gaaaggacacaaacacaca

SEQ ID NO: 1071880 - RNA, 19 nt, Homo sapiens
  misc_RNA (1)...(19): siRNA sense strand
gaaaggacacaaacacaca

SEQ ID NO: 1071881 - RNA, 19 nt, Homo sapiens
  misc_RNA (1)...(19): siRNA sense strand
gggaaagccuucagaucug

SEQ ID NO: 1071882 - RNA, 19 nt, Homo sapiens
  misc_RNA (1)...(19): siRNA sense strand
cauaugaguaucaggaaua

SEQ ID NO: 1071883 - RNA, 19 nt, Homo sapiens
  misc_RNA (1)...(19): siRNA sense strand
aaagcauuauccucucuua

SEQ ID NO: 1071884 - RNA, 19 nt, Homo sapiens
  misc_RNA (1)...(19): siRNA sense strand
gggauggaccuuauaaaug

SEQ ID NO: 1071885 - RNA, 19 nt, Homo sapiens
  misc_RNA (1)...(19): siRNA sense strand
acccaaugcuuguaaagua

SEQ ID NO: 1071886 - RNA, 19 nt, Homo sapiens
  misc_RNA (1)...(19): siRNA sense strand
gauggaccuuauaaaugua

SEQ ID NO: 1071887 - RNA, 19 nt, Homo sapiens
  misc_RNA (1)...(19): siRNA sense strand
ggagugggcuuugcuggau

SEQ ID NO: 1071888 - RNA, 19 nt, Homo sapiens
  misc_RNA (1)...(19): siRNA sense strand
agaauacacucuggagaaa

SEQ ID NO: 1071889 - RNA, 19 nt, Homo sapiens
  misc_RNA (1)...(19): siRNA sense strand
gaauguaagauauguggaa

SEQ ID NO: 1071890 - RNA, 19 nt, Homo sapiens
  misc_RNA (1)...(19): siRNA sense strand
agaaaaggcuuaucaaugu

SEQ ID NO: 1071891 - RNA, 19 nt, Homo sapiens
  misc_RNA (1)...(19): siRNA sense strand
acacaaggcauaugaguau

SEQ ID NO: 1071892 - RNA, 19 nt, Homo sapiens
  misc_RNA (1)...(19): siRNA sense strand
ggagagaaacccuaugagu

SEQ ID NO: 1071893 - RNA, 19 nt, Homo sapiens
  misc_RNA (1)...(19): siRNA sense strand
ggaaagcauuauccucucu

SEQ ID NO: 1071894 - RNA, 19 nt, Homo sapiens
  misc_RNA (1)...(19): siRNA sense strand
ucaaacacacguaagauug

SEQ ID NO: 1071895 - RNA, 19 nt, Homo sapiens
  misc_RNA (1)...(19): siRNA sense strand
ccaguucccuucgauauca

SEQ ID NO: 1071896 - RNA, 19 nt, Homo sapiens
  misc_RNA (1)...(19): siRNA sense strand
ggaccaaagccauguaagu

SEQ ID NO: 1071897 - RNA, 19 nt, Homo sapiens
  misc_RNA (1)...(19): siRNA sense strand
gaaagaccagaacauugaa

SEQ ID NO: 1071898 - RNA, 19 nt, Homo sapiens
  misc_RNA (1)...(19): siRNA sense strand
acacaaacacacauaagaa

SEQ ID NO: 1071899 - RNA, 19 nt, Homo sapiens
  misc_RNA (1)...(19): siRNA sense strand
ugggaaagccuucagauau

SEQ ID NO: 1071900 - RNA, 19 nt, Homo sapiens
  misc_RNA (1)...(19): siRNA sense strand
gaaaccguaugaauguaag

SEQ ID NO: 1071901 - RNA, 19 nt, Homo sapiens
  misc_RNA (1)...(19): siRNA sense strand
accagaacauugaauauga

SEQ ID NO: 1071902 - RNA, 19 nt, Homo sapiens
  misc_RNA (1)...(19): siRNA sense strand
gcauaugaguaucaggaau

SEQ ID NO: 1071903 - RNA, 19 nt, Homo sapiens
  misc_RNA (1)...(19): siRNA sense strand
gagaaacucuaugaaugca

SEQ ID NO: 1071904 - RNA, 19 nt, Homo sapiens
  misc_RNA (1)...(19): siRNA sense strand
aauacacucuggagaaaga

SEQ ID NO: 1071905 - RNA, 19 nt, Homo sapiens
  misc_RNA (1)...(19): siRNA sense strand
gacacaaacacacauaaga

SEQ ID NO: 1071906 - RNA, 19 nt, Homo sapiens
  misc_RNA (1)...(19): siRNA sense strand
gcagugugggaaagcauua

SEQ ID NO: 1071907 - RNA, 19 nt, Homo sapiens
  misc_RNA (1)...(19): siRNA sense strand
guaagugucaacaaccuaa

SEQ ID NO: 1071908 - RNA, 19 nt, Homo sapiens
  misc_RNA (1)...(19): siRNA sense strand
gaccaaagccauguaagug

SEQ ID NO: 1071909 - RNA, 19 nt, Homo sapiens
  misc_RNA (1)...(19): siRNA sense strand
agagaaaccguaugaaugu

SEQ ID NO: 1071910 - RNA, 19 nt, Homo sapiens
  misc_RNA (1)...(19): siRNA sense strand
ggagaaacuucaggagucu

SEQ ID NO: 1071911 - RNA, 19 nt, Homo sapiens
  misc_RNA (1)...(19): siRNA sense strand
guggagagaaacccuauaa

SEQ ID NO: 1071912 - RNA, 19 nt, Homo sapiens
  misc_RNA (1)...(19): siRNA sense strand
gacacaaggcauaugagua

SEQ ID NO: 1071913 - RNA, 19 nt, Homo sapiens
  misc_RNA (1)...(19): siRNA sense strand
agagaaacccuaugagugu

SEQ ID NO: 1071914 - RNA, 19 nt, Homo sapiens
  misc_RNA (1)...(19): siRNA sense strand
gaauaaccuucaaagucau

SEQ ID NO: 1071915 - RNA, 19 nt, Homo sapiens
  misc_RNA (1)...(19): siRNA sense strand
agagaaacccuaugagugu

SEQ ID NO: 1071916 - RNA, 19 nt, Homo sapiens
  misc_RNA (1)...(19): siRNA sense strand
gagaaaaggcuuaucaaug

SEQ ID NO: 1071917 - RNA, 19 nt, Homo sapiens
  misc_RNA (1)...(19): siRNA sense strand
uuaaggauguggcugugaa

SEQ ID NO: 1071918 - RNA, 19 nt, Homo sapiens
  misc_RNA (1)...(19): siRNA sense strand
agagaaaccaugugaaugu

SEQ ID NO: 1071919 - RNA, 19 nt, Homo sapiens
  misc_RNA (1)...(19): siRNA sense strand
cuucaggagucucauagaa

SEQ ID NO: 1071920 - RNA, 19 nt, Homo sapiens
  misc_RNA (1)...(19): siRNA sense strand
ucaggaauauggaccaaag

SEQ ID NO: 1071921 - RNA, 19 nt, Homo sapiens
  misc_RNA (1)...(19): siRNA sense strand
cuucagagcugugucaauc

SEQ ID NO: 1071922 - RNA, 19 nt, Homo sapiens
  misc_RNA (1)...(19): siRNA sense strand
ggagaaguuggccuaggua

SEQ ID NO: 1071923 - RNA, 19 nt, Homo sapiens
  misc_RNA (1)...(19): siRNA sense strand
gaccagaacauugaauaug

SEQ ID NO: 1071924 - RNA, 19 nt, Homo sapiens
  misc_RNA (1)...(19): siRNA sense strand
uccauugucucagauuaua

SEQ ID NO: 1071925 - RNA, 19 nt, Homo sapiens
  misc_RNA (1)...(19): siRNA sense strand
guucgaagacacaugguaa

SEQ ID NO: 1071926 - RNA, 19 nt, Homo sapiens
  misc_RNA (1)...(19): siRNA sense strand
gaggugacauuggacacaa

SEQ ID NO: 1071927 - RNA, 19 nt, Homo sapiens
  misc_RNA (1)...(19): siRNA sense strand
ccauucaaguguucgaaga

SEQ ID NO: 1071928 - RNA, 19 nt, Homo sapiens
  misc_RNA (1)...(19): siRNA sense strand
gagugggcuuugcuggaua

SEQ ID NO: 1071929 - RNA, 19 nt, Homo sapiens
  misc_RNA (1)...(19): siRNA sense strand
caaacacacauaagaauac

SEQ ID NO: 1071930 - RNA, 19 nt, Homo sapiens
  misc_RNA (1)...(19): siRNA sense strand
ggacacaaacacacauaag

SEQ ID NO: 1071931 - RNA, 19 nt, Homo sapiens
  misc_RNA (1)...(19): siRNA sense strand
ucagauaugugaauaaccu

SEQ ID NO: 1071932 - RNA, 19 nt, Homo sapiens
  misc_RNA (1)...(19): siRNA sense strand
gugggaaagccuucagaua

SEQ ID NO: 1071933 - RNA, 19 nt, Homo sapiens
  misc_RNA (1)...(19): siRNA sense strand
gauccuaucguagacauga

SEQ ID NO: 1071934 - RNA, 19 nt, Homo sapiens
  misc_RNA (1)...(19): siRNA sense strand
gagagaaaccaugugaaug

SEQ ID NO: 1071935 - RNA, 19 nt, Homo sapiens
  misc_RNA (1)...(19): siRNA sense strand
gcaagaaacuggcagaaau

SEQ ID NO: 1071936 - RNA, 19 nt, Homo sapiens
  misc_RNA (1)...(19): siRNA sense strand
gaacgaggaugaauuaaag

SEQ ID NO: 1071937 - RNA, 19 nt, Homo sapiens
  misc_RNA (1)...(19): siRNA sense strand
ccagauagcucguggauug

SEQ ID NO: 1071938 - RNA, 19 nt, Homo sapiens
  misc_RNA (1)...(19): siRNA sense strand
gaaauucaauggagaaaca

SEQ ID NO: 1071939 - RNA, 19 nt, Homo sapiens
  misc_RNA (1)...(19): siRNA sense strand
ccaggaagcuaacaccuua

SEQ ID NO: 1071940 - RNA, 19 nt, Homo sapiens
  misc_RNA (1)...(19): siRNA sense strand
gcagugggcugaauucuuc

SEQ ID NO: 1071941 - RNA, 19 nt, Homo sapiens
  misc_RNA (1)...(19): siRNA sense strand
ggaguuugcugaagaggaa

SEQ ID NO: 1071942 - RNA, 19 nt, Homo sapiens
  misc_RNA (1)...(19): siRNA sense strand
gaggaugaauuaaagaguu

SEQ ID NO: 1071943 - RNA, 19 nt, Homo sapiens
  misc_RNA (1)...(19): siRNA sense strand
ggaccuugcugcugucuug

SEQ ID NO: 1071944 - RNA, 19 nt, Homo sapiens
  misc_RNA (1)...(19): siRNA sense strand
gaagagagccaaggaguug

SEQ ID NO: 1071945 - RNA, 19 nt, Homo sapiens
  misc_RNA (1)...(19): siRNA sense strand
ccaaugugcuccuggauga

SEQ ID NO: 1071946 - RNA, 19 nt, Homo sapiens
  misc_RNA (1)...(19): siRNA sense strand
gcugaacgaggaugaauua

SEQ ID NO: 1071947 - RNA, 19 nt, Homo sapiens
  misc_RNA (1)...(19): siRNA sense strand
gcugggagaugcagaagaa

SEQ ID NO: 1071948 - RNA, 19 nt, Homo sapiens
  misc_RNA (1)...(19): siRNA sense strand
gcucagaaaucauaaaugc

SEQ ID NO: 1071949 - RNA, 19 nt, Homo sapiens
  misc_RNA (1)...(19): siRNA sense strand
gaagaccuaugaaacuaau

SEQ ID NO: 1071950 - RNA, 19 nt, Homo sapiens
  misc_RNA (1)...(19): siRNA sense strand
gaacugggcucggcaggau

SEQ ID NO: 1071951 - RNA, 19 nt, Homo sapiens
  misc_RNA (1)...(19): siRNA sense strand
ggguguuccuggagaauua

SEQ ID NO: 1071952 - RNA, 19 nt, Homo sapiens
  misc_RNA (1)...(19): siRNA sense strand
ggacuucugucuugcuuuc

SEQ ID NO: 1071953 - RNA, 19 nt, Homo sapiens
  misc_RNA (1)...(19): siRNA sense strand
gagcugaucuccaaagacu

SEQ ID NO: 1071954 - RNA, 19 nt, Homo sapiens
  misc_RNA (1)...(19): siRNA sense strand
ggaugagggugccauguug

SEQ ID NO: 1071955 - RNA, 19 nt, Homo sapiens
  misc_RNA (1)...(19): siRNA sense strand
ucacaaaccuggacuugag

SEQ ID NO: 1071956 - RNA, 19 nt, Homo sapiens
  misc_RNA (1)...(19): siRNA sense strand
aauccaaacuguaaccuaa

SEQ ID NO: 1071957 - RNA, 19 nt, Homo sapiens
  misc_RNA (1)...(19): siRNA sense strand
aaggaaggauggagaaauu

SEQ ID NO: 1071958 - RNA, 19 nt, Homo sapiens
  misc_RNA (1)...(19): siRNA sense strand
gggcugaauucuucuaugu

SEQ ID NO: 1071959 - RNA, 19 nt, Homo sapiens
  misc_RNA (1)...(19): siRNA sense strand
gaacuggacauugaauuug

SEQ ID NO: 1071960 - RNA, 19 nt, Homo sapiens
  misc_RNA (1)...(19): siRNA sense strand
aagcacaucuucaugcaaa

SEQ ID NO: 1071961 - RNA, 19 nt, Homo sapiens
  misc_RNA (1)...(19): siRNA sense strand
gcucguggauuguggauuc

SEQ ID NO: 1071962 - RNA, 19 nt, Homo sapiens
  misc_RNA (1)...(19): siRNA sense strand
gucaacaccuccucagaaa

SEQ ID NO: 1071963 - RNA, 19 nt, Homo sapiens
  misc_RNA (1)...(19): siRNA sense strand
caagaaacuggcagaaauu

SEQ ID NO: 1071964 - RNA, 19 nt, Homo sapiens
  misc_RNA (1)...(19): siRNA sense strand
gcacuuaccuaaccauucc

SEQ ID NO: 1071965 - RNA, 19 nt, Homo sapiens
  misc_RNA (1)...(19): siRNA sense strand
gcacaucuucaugcaaaua

SEQ ID NO: 1071966 - RNA, 19 nt, Homo sapiens
  misc_RNA (1)...(19): siRNA sense strand
gagaagaaagacucaagaa

SEQ ID NO: 1071967 - RNA, 19 nt, Homo sapiens
  misc_RNA (1)...(19): siRNA sense strand
ggcaaaggcugagaugaug

SEQ ID NO: 1071968 - RNA, 19 nt, Homo sapiens
  misc_RNA (1)...(19): siRNA sense strand
uagagaauccaaacuguaa

SEQ ID NO: 1071969 - RNA, 19 nt, Homo sapiens
  misc_RNA (1)...(19): siRNA sense strand
gauuguggauucucuguca

SEQ ID NO: 1071970 - RNA, 19 nt, Homo sapiens
  misc_RNA (1)...(19): siRNA sense strand
gaccugcucagaaaucaua

SEQ ID NO: 1071971 - RNA, 19 nt, Homo sapiens
  misc_RNA (1)...(19): siRNA sense strand
ggacaucaaacaggaauug

SEQ ID NO: 1071972 - RNA, 19 nt, Homo sapiens
  misc_RNA (1)...(19): siRNA sense strand
gggugaaguuucuguguga

SEQ ID NO: 1071973 - RNA, 19 nt, Homo sapiens
  misc_RNA (1)...(19): siRNA sense strand
gaaacaaagcuuccugagu

SEQ ID NO: 1071974 - RNA, 19 nt, Homo sapiens
  misc_RNA (1)...(19): siRNA sense strand
uugcagagcugaucuccaa

SEQ ID NO: 1071975 - RNA, 19 nt, Homo sapiens
  misc_RNA (1)...(19): siRNA sense strand
gcagaaaguggagauuaaa

SEQ ID NO: 1071976 - RNA, 19 nt, Homo sapiens
  misc_RNA (1)...(19): siRNA sense strand
caaagcacaucuucaugca

SEQ ID NO: 1071977 - RNA, 19 nt, Homo sapiens
  misc_RNA (1)...(19): siRNA sense strand
ggucaacaccuccucagaa

SEQ ID NO: 1071978 - RNA, 19 nt, Homo sapiens
  misc_RNA (1)...(19): siRNA sense strand
ugugugaccugcucagaaa

SEQ ID NO: 1071979 - RNA, 19 nt, Homo sapiens
  misc_RNA (1)...(19): siRNA sense strand
gaagacgugcuacagaaga

SEQ ID NO: 1071980 - RNA, 19 nt, Homo sapiens
  misc_RNA (1)...(19): siRNA sense strand
ggaaugcgacugugaacau

SEQ ID NO: 1071981 - RNA, 19 nt, Homo sapiens
  misc_RNA (1)...(19): siRNA sense strand
ucgaagacgugcuacagaa

SEQ ID NO: 1071982 - RNA, 19 nt, Homo sapiens
  misc_RNA (1)...(19): siRNA sense strand
ugcagaaaguggagauuaa

SEQ ID NO: 1071983 - RNA, 19 nt, Homo sapiens
  misc_RNA (1)...(19): siRNA sense strand
caaagacuggccugaauug

SEQ ID NO: 1071984 - RNA, 19 nt, Homo sapiens
  misc_RNA (1)...(19): siRNA sense strand
ggagaaauucaauggagaa

SEQ ID NO: 1071985 - RNA, 19 nt, Homo sapiens
  misc_RNA (1)...(19): siRNA sense strand
gaaacucucacugcaggua

SEQ ID NO: 1071986 - RNA, 19 nt, Homo sapiens
  misc_RNA (1)...(19): siRNA sense strand
ucaaguuucuggaagugaa

SEQ ID NO: 1071987 - RNA, 19 nt, Homo sapiens
  misc_RNA (1)...(19): siRNA sense strand
aagcuuggcuguagauauc

SEQ ID NO: 1071988 - RNA, 19 nt, Homo sapiens
  misc_RNA (1)...(19): siRNA sense strand
ggagaagaaagacucaaga

SEQ ID NO: 1071989 - RNA, 19 nt, Homo sapiens
  misc_RNA (1)...(19): siRNA sense strand
ugaacuggacauugaauuu

SEQ ID NO: 1071990 - RNA, 19 nt, Homo sapiens
  misc_RNA (1)...(19): siRNA sense strand
guaggacacuucuuauucg

SEQ ID NO: 1071991 - RNA, 19 nt, Homo sapiens
  misc_RNA (1)...(19): siRNA sense strand
caauggagaaacagucuuu

SEQ ID NO: 1071992 - RNA, 19 nt, Homo sapiens
  misc_RNA (1)...(19): siRNA sense strand
gauucucugucaggcauua

SEQ ID NO: 1071993 - RNA, 19 nt, Homo sapiens
  misc_RNA (1)...(19): siRNA sense strand
gggcgcagauguccguguu

SEQ ID NO: 1071994 - RNA, 19 nt, Homo sapiens
  misc_RNA (1)...(19): siRNA sense strand
ggaaggauggagaaauuca

SEQ ID NO: 1071995 - RNA, 19 nt, Homo sapiens
  misc_RNA (1)...(19): siRNA sense strand
ugaacgaggaugaauuaaa

SEQ ID NO: 1071996 - RNA, 19 nt, Homo sapiens
  misc_RNA (1)...(19): siRNA sense strand
ggacaggagggccuauuuc

SEQ ID NO: 1071997 - RNA, 19 nt, Homo sapiens
  misc_RNA (1)...(19): siRNA sense strand
ccaaagacuggccugaauu

SEQ ID NO: 1071998 - RNA, 19 nt, Homo sapiens
  misc_RNA (1)...(19): siRNA sense strand
uugaagaccuaugaaacua

SEQ ID NO: 1071999 - RNA, 19 nt, Homo sapiens
  misc_RNA (1)...(19): siRNA sense strand
uaccgggacuucugucuug

SEQ ID NO: 1072000 - RNA, 19 nt, Homo sapiens
  misc_RNA (1)...(19): siRNA sense strand
ggacauugaauuugaaagg

SEQ ID NO: 1072001 - RNA, 19 nt, Homo sapiens
  misc_RNA (1)...(19): siRNA sense strand
gcggugugcuggauugugu

SEQ ID NO: 1072002 - RNA, 19 nt, Homo sapiens
  misc_RNA (1)...(19): siRNA sense strand
ggaaaacugucgucuuaca

SEQ ID NO: 1072003 - RNA, 19 nt, Homo sapiens
  misc_RNA (1)...(19): siRNA sense strand
gcaccugucaucugcagaa

SEQ ID NO: 1072004 - RNA, 19 nt, Homo sapiens
  misc_RNA (1)...(19): siRNA sense strand
gaauccaaacuguaaccua

SEQ ID NO: 1072005 - RNA, 19 nt, Homo sapiens
  misc_RNA (1)...(19): siRNA sense strand
aaccuggacuugaguauca

SEQ ID NO: 1072006 - RNA, 19 nt, Homo sapiens
  misc_RNA (1)...(19): siRNA sense strand
gaaugcgacugugaacauc

SEQ ID NO: 1072007 - RNA, 19 nt, Homo sapiens
  misc_RNA (1)...(19): siRNA sense strand
uuggaaaacugucgucuua

SEQ ID NO: 1072008 - RNA, 19 nt, Homo sapiens
  misc_RNA (1)...(19): siRNA sense strand
gagggccuauuuccugaga

SEQ ID NO: 1072009 - RNA, 19 nt, Homo sapiens
  misc_RNA (1)...(19): siRNA sense strand
ggacggacaggugcaagaa

SEQ ID NO: 1072010 - RNA, 19 nt, Homo sapiens
  misc_RNA (1)...(19): siRNA sense strand
cagagcugaucuccaaaga

SEQ ID NO: 1072011 - RNA, 19 nt, Homo sapiens
  misc_RNA (1)...(19): siRNA sense strand
ggucuugggcugccuguau

SEQ ID NO: 1072012 - RNA, 19 nt, Homo sapiens
  misc_RNA (1)...(19): siRNA sense strand
ggacaggugcaagaaauag

SEQ ID NO: 1072013 - RNA, 19 nt, Homo sapiens
  misc_RNA (1)...(19): siRNA sense strand
ugugugagggcuugaguua

SEQ ID NO: 1072014 - RNA, 19 nt, Homo sapiens
  misc_RNA (1)...(19): siRNA sense strand
gcacgaugaugcugaugcu

SEQ ID NO: 1072015 - RNA, 19 nt, Homo sapiens
  misc_RNA (1)...(19): siRNA sense strand
ggauaaggaaugcgacugu

SEQ ID NO: 1072016 - RNA, 19 nt, Homo sapiens
  misc_RNA (1)...(19): siRNA sense strand
gaaggauggagaaauucaa

SEQ ID NO: 1072017 - RNA, 19 nt, Homo sapiens
  misc_RNA (1)...(19): siRNA sense strand
ucacggaauuguguaagau

SEQ ID NO: 1072018 - RNA, 19 nt, Homo sapiens
  misc_RNA (1)...(19): siRNA sense strand
ggaaaucaagaagcuguug

SEQ ID NO: 1072019 - RNA, 19 nt, Homo sapiens
  misc_RNA (1)...(19): siRNA sense strand
cagauguugucguuggaaa

SEQ ID NO: 1072020 - RNA, 19 nt, Homo sapiens
  misc_RNA (1)...(19): siRNA sense strand
gcaaugcaaagcacaucuu

SEQ ID NO: 1072021 - RNA, 19 nt, Homo sapiens
  misc_RNA (1)...(19): siRNA sense strand
cgaccugauucaaguagga

SEQ ID NO: 1072022 - RNA, 19 nt, Homo sapiens
  misc_RNA (1)...(19): siRNA sense strand
ccugucaucugcagaaagu

SEQ ID NO: 1072023 - RNA, 19 nt, Homo sapiens
  misc_RNA (1)...(19): siRNA sense strand
uaaggaaugcgacugugaa

SEQ ID NO: 1072024 - RNA, 19 nt, Homo sapiens
  misc_RNA (1)...(19): siRNA sense strand
uccaaagacuggccugaau

SEQ ID NO: 1072025 - RNA, 19 nt, Homo sapiens
  misc_RNA (1)...(19): siRNA sense strand
acagcaaccucaaguuucu

SEQ ID NO: 1072026 - RNA, 19 nt, Homo sapiens
  misc_RNA (1)...(19): siRNA sense strand
gauuucugcucucucuuca

SEQ ID NO: 1072027 - RNA, 19 nt, Homo sapiens
  misc_RNA (1)...(19): siRNA sense strand
gacauugaauuugaaaggu

SEQ ID NO: 1072028 - RNA, 19 nt, Homo sapiens
  misc_RNA (1)...(19): siRNA sense strand
aggaggagcuggcgaaggu

SEQ ID NO: 1072029 - RNA, 19 nt, Homo sapiens
  misc_RNA (1)...(19): siRNA sense strand
cugaagugaugcauuguuc

SEQ ID NO: 1072030 - RNA, 19 nt, Homo sapiens
  misc_RNA (1)...(19): siRNA sense strand
ugaagaccuaugaaacuaa

SEQ ID NO: 1072031 - RNA, 19 nt, Homo sapiens
  misc_RNA (1)...(19): siRNA sense strand
gauucuuugugaccacgua

SEQ ID NO: 1072032 - RNA, 19 nt, Homo sapiens
  misc_RNA (1)...(19): siRNA sense strand
caaacagcaaccucaaguu

SEQ ID NO: 1072033 - RNA, 19 nt, Homo sapiens
  misc_RNA (1)...(19): siRNA sense strand
gaaucucacggaauugugu

SEQ ID NO: 1072034 - RNA, 19 nt, Homo sapiens
  misc_RNA (1)...(19): siRNA sense strand
ggcaagaaacuggcagaaa

SEQ ID NO: 1072035 - RNA, 19 nt, Homo sapiens
  misc_RNA (1)...(19): siRNA sense strand
gaaagaagcugacuggaua

SEQ ID NO: 1072036 - RNA, 19 nt, Homo sapiens
  misc_RNA (1)...(19): siRNA sense strand
gaacagcuuugucaagaug

SEQ ID NO: 1072037 - RNA, 19 nt, Homo sapiens
  misc_RNA (1)...(19): siRNA sense strand
gaacuuccuuacacuuauu

SEQ ID NO: 1072038 - RNA, 19 nt, Homo sapiens
  misc_RNA (1)...(19): siRNA sense strand
ucagagaggauauaacuua

SEQ ID NO: 1072039 - RNA, 19 nt, Homo sapiens
  misc_RNA (1)...(19): siRNA sense strand
gagaacuuccuuacacuua

SEQ ID NO: 1072040 - RNA, 19 nt, Homo sapiens
  misc_RNA (1)...(19): siRNA sense strand
caugggaccuuguuaauca

SEQ ID NO: 1072041 - RNA, 19 nt, Homo sapiens
  misc_RNA (1)...(19): siRNA sense strand
gaagcugacuggauauugg

SEQ ID NO: 1072042 - RNA, 19 nt, Homo sapiens
  misc_RNA (1)...(19): siRNA sense strand
gaacaaagagcaucaucuc

SEQ ID NO: 1072043 - RNA, 19 nt, Homo sapiens
  misc_RNA (1)...(19): siRNA sense strand
gagaggguguguaugaaau

SEQ ID NO: 1072044 - RNA, 19 nt, Homo sapiens
  misc_RNA (1)...(19): siRNA sense strand
gaucaugggaccuuguuaa

SEQ ID NO: 1072045 - RNA, 19 nt, Homo sapiens
  misc_RNA (1)...(19): siRNA sense strand
uaucagcaaccaagacuua

SEQ ID NO: 1072046 - RNA, 19 nt, Homo sapiens
  misc_RNA (1)...(19): siRNA sense strand
gaaucacuauggaaccaaa

SEQ ID NO: 1072047 - RNA, 19 nt, Homo sapiens
  misc_RNA (1)...(19): siRNA sense strand
gaauaccacucuagagaac

SEQ ID NO: 1072048 - RNA, 19 nt, Homo sapiens
  misc_RNA (1)...(19): siRNA sense strand
caaagaauaccacucuaga

SEQ ID NO: 1072049 - RNA, 19 nt, Homo sapiens
  misc_RNA (1)...(19): siRNA sense strand
ugacagagaguuuguguuc

SEQ ID NO: 1072050 - RNA, 19 nt, Homo sapiens
  misc_RNA (1)...(19): siRNA sense strand
gaagauacccuuggaucau

SEQ ID NO: 1072051 - RNA, 19 nt, Homo sapiens
  misc_RNA (1)...(19): siRNA sense strand
gcacauuugagaugagaaa

SEQ ID NO: 1072052 - RNA, 19 nt, Homo sapiens
  misc_RNA (1)...(19): siRNA sense strand
ugacagagaggguguguau

SEQ ID NO: 1072053 - RNA, 19 nt, Homo sapiens
  misc_RNA (1)...(19): siRNA sense strand
acagagaguuuguguucaa

SEQ ID NO: 1072054 - RNA, 19 nt, Homo sapiens
  misc_RNA (1)...(19): siRNA sense strand
ggaacagcuuugucaagau

SEQ ID NO: 1072055 - RNA, 19 nt, Homo sapiens
  misc_RNA (1)...(19): siRNA sense strand
uaucuagggucuguuugua

SEQ ID NO: 1072056 - RNA, 19 nt, Homo sapiens
  misc_RNA (1)...(19): siRNA sense strand
acagagaggguguguauga

SEQ ID NO: 1072057 - RNA, 19 nt, Homo sapiens
  misc_RNA (1)...(19): siRNA sense strand
cauuugagaugagaaagaa

SEQ ID NO: 1072058 - RNA, 19 nt, Homo sapiens
  misc_RNA (1)...(19): siRNA sense strand
cauuauugcuucacuaagu

SEQ ID NO: 1072059 - RNA, 19 nt, Homo sapiens
  misc_RNA (1)...(19): siRNA sense strand
uggaacagcuuugucaaga

SEQ ID NO: 1072060 - RNA, 19 nt, Homo sapiens
  misc_RNA (1)...(19): siRNA sense strand
gagugaagauacccuugga

SEQ ID NO: 1072061 - RNA, 19 nt, Homo sapiens
  misc_RNA (1)...(19): siRNA sense strand
ggaagaacaaagagcauca

SEQ ID NO: 1072062 - RNA, 19 nt, Homo sapiens
  misc_RNA (1)...(19): siRNA sense strand
cuagggaggugccccauua

SEQ ID NO: 1072063 - RNA, 19 nt, Homo sapiens
  misc_RNA (1)...(19): siRNA sense strand
gagugaaccugaccuuucg

SEQ ID NO: 1072064 - RNA, 19 nt, Homo sapiens
  misc_RNA (1)...(19): siRNA sense strand
cagagaggguguguaugaa

SEQ ID NO: 1072065 - RNA, 19 nt, Homo sapiens
  misc_RNA (1)...(19): siRNA sense strand
aagaauaccacucuagaga

SEQ ID NO: 1072066 - RNA, 19 nt, Homo sapiens
  misc_RNA (1)...(19): siRNA sense strand
ugaaagaagcugacuggau

SEQ ID NO: 1072067 - RNA, 19 nt, Homo sapiens
  misc_RNA (1)...(19): siRNA sense strand
caaccaagacuuacagcau

SEQ ID NO: 1072068 - RNA, 19 nt, Homo sapiens
  misc_RNA (1)...(19): siRNA sense strand
acacgcacauuugagauga

SEQ ID NO: 1072069 - RNA, 19 nt, Homo sapiens
  misc_RNA (1)...(19): siRNA sense strand
caucagagaggauauaacu

SEQ ID NO: 1072070 - RNA, 19 nt, Homo sapiens
  misc_RNA (1)...(19): siRNA sense strand
ggaaggagcgacacaagcu

SEQ ID NO: 1072071 - RNA, 19 nt, Homo sapiens
  misc_RNA (1)...(19): siRNA sense strand
gaugaugaacccucacuag

SEQ ID NO: 1072072 - RNA, 19 nt, Homo sapiens
  misc_RNA (1)...(19): siRNA sense strand
ggagaacuuccuuacacuu

SEQ ID NO: 1072073 - RNA, 19 nt, Homo sapiens
  misc_RNA (1)...(19): siRNA sense strand
gaggguguguaugaaauca

SEQ ID NO: 1072074 - RNA, 19 nt, Homo sapiens
  misc_RNA (1)...(19): siRNA sense strand
ccaaagaauaccacucuag

SEQ ID NO: 1072075 - RNA, 19 nt, Homo sapiens
  misc_RNA (1)...(19): siRNA sense strand
agaacuuccuuacacuuau

SEQ ID NO: 1072076 - RNA, 19 nt, Homo sapiens
  misc_RNA (1)...(19): siRNA sense strand
gguauggagaacuuccuua

SEQ ID NO: 1072077 - RNA, 19 nt, Homo sapiens
  misc_RNA (1)...(19): siRNA sense strand
ggaccuuguuaaucaugga

SEQ ID NO: 1072078 - RNA, 19 nt, Homo sapiens
  misc_RNA (1)...(19): siRNA sense strand
aaagaagccaccaccagaa

SEQ ID NO: 1072079 - RNA, 19 nt, Homo sapiens
  misc_RNA (1)...(19): siRNA sense strand
gagagugaaccugaccuuu

SEQ ID NO: 1072080 - RNA, 19 nt, Homo sapiens
  misc_RNA (1)...(19): siRNA sense strand
ccacaccuucaacuccuua

SEQ ID NO: 1072081 - RNA, 19 nt, Homo sapiens
  misc_RNA (1)...(19): siRNA sense strand
cacgagugauugacagaga

SEQ ID NO: 1072082 - RNA, 19 nt, Homo sapiens
  misc_RNA (1)...(19): siRNA sense strand
agagccaucuccaccagaa

SEQ ID NO: 1072083 - RNA, 19 nt, Homo sapiens
  misc_RNA (1)...(19): siRNA sense strand
uccuuacucugcaaucuuu

SEQ ID NO: 1072084 - RNA, 19 nt, Homo sapiens
  misc_RNA (1)...(19): siRNA sense strand
aagauacccuuggaucaug

SEQ ID NO: 1072085 - RNA, 19 nt, Homo sapiens
  misc_RNA (1)...(19): siRNA sense strand
gagcaucaucucucugaca

SEQ ID NO: 1072086 - RNA, 19 nt, Homo sapiens
  misc_RNA (1)...(19): siRNA sense strand
aaacagaggaccggcauca

SEQ ID NO: 1072087 - RNA, 19 nt, Homo sapiens
  misc_RNA (1)...(19): siRNA sense strand
gacagagaguuuguguuca

SEQ ID NO: 1072088 - RNA, 19 nt, Homo sapiens
  misc_RNA (1)...(19): siRNA sense strand
ucuagggucuguuuguauc

SEQ ID NO: 1072089 - RNA, 19 nt, Homo sapiens
  misc_RNA (1)...(19): siRNA sense strand
agaauaccacucuagagaa

SEQ ID NO: 1072090 - RNA, 19 nt, Homo sapiens
  misc_RNA (1)...(19): siRNA sense strand
ugaagauacccuuggauca

SEQ ID NO: 1072091 - RNA, 19 nt, Homo sapiens
  misc_RNA (1)...(19): siRNA sense strand
gauauuggaacagcuuugu

SEQ ID NO: 1072092 - RNA, 19 nt, Homo sapiens
  misc_RNA (1)...(19): siRNA sense strand
agagugaaccugaccuuuc

SEQ ID NO: 1072093 - RNA, 19 nt, Homo sapiens
  misc_RNA (1)...(19): siRNA sense strand
gcccaaagaauaccacucu

SEQ ID NO: 1072094 - RNA, 19 nt, Homo sapiens
  misc_RNA (1)...(19): siRNA sense strand
gcaucgagugcccaaagaa

SEQ ID NO: 1072095 - RNA, 19 nt, Homo sapiens
  misc_RNA (1)...(19): siRNA sense strand
acagaggaccggcaucaga

SEQ ID NO: 1072096 - RNA, 19 nt, Homo sapiens
  misc_RNA (1)...(19): siRNA sense strand
uggcuuuguugacgugaaa

SEQ ID NO: 1072097 - RNA, 19 nt, Homo sapiens
  misc_RNA (1)...(19): siRNA sense strand
gaagccaccaccagaagag

SEQ ID NO: 1072098 - RNA, 19 nt, Homo sapiens
  misc_RNA (1)...(19): siRNA sense strand
caagacuuacagcauggua

SEQ ID NO: 1072099 - RNA, 19 nt, Homo sapiens
  misc_RNA (1)...(19): siRNA sense strand
cuagagaaccgagagugaa

SEQ ID NO: 1072100 - RNA, 19 nt, Homo sapiens
  misc_RNA (1)...(19): siRNA sense strand
ggaucaugggaccuuguua

SEQ ID NO: 1072101 - RNA, 19 nt, Homo sapiens
  misc_RNA (1)...(19): siRNA sense strand
guggaaagagugaagauac

SEQ ID NO: 1072102 - RNA, 19 nt, Homo sapiens
  misc_RNA (1)...(19): siRNA sense strand
agagaggguguguaugaaa

SEQ ID NO: 1072103 - RNA, 19 nt, Homo sapiens
  misc_RNA (1)...(19): siRNA sense strand
cccaaagaauaccacucua

SEQ ID NO: 1072104 - RNA, 19 nt, Homo sapiens
  misc_RNA (1)...(19): siRNA sense strand
ccuuacacuuauucaagaa

SEQ ID NO: 1072105 - RNA, 19 nt, Homo sapiens
  misc_RNA (1)...(19): siRNA sense strand
gaagaacaaagagcaucau

SEQ ID NO: 1072106 - RNA, 19 nt, Homo sapiens
  misc_RNA (1)...(19): siRNA sense strand
ggcaucagagaggauauaa

SEQ ID NO: 1072107 - RNA, 19 nt, Homo sapiens
  misc_RNA (1)...(19): siRNA sense strand
agaccuggaagaacaaaga

SEQ ID NO: 1072108 - RNA, 19 nt, Homo sapiens
  misc_RNA (1)...(19): siRNA sense strand
uccuuacacuuauucaaga

SEQ ID NO: 1072109 - RNA, 19 nt, Homo sapiens
  misc_RNA (1)...(19): siRNA sense strand
ggauauuggaacagcuuug

SEQ ID NO: 1072110 - RNA, 19 nt, Homo sapiens
  misc_RNA (1)...(19): siRNA sense strand
caucgagugcccaaagaau

SEQ ID NO: 1072111 - RNA, 19 nt, Homo sapiens
  misc_RNA (1)...(19): siRNA sense strand
guaucuagggucuguuugu

SEQ ID NO: 1072112 - RNA, 19 nt, Homo sapiens
  misc_RNA (1)...(19): siRNA sense strand
gccacacgcacauuugaga

SEQ ID NO: 1072113 - RNA, 19 nt, Homo sapiens
  misc_RNA (1)...(19): siRNA sense strand
agacuuacagcaugguaug

SEQ ID NO: 1072114 - RNA, 19 nt, Homo sapiens
  misc_RNA (1)...(19): siRNA sense strand
cccauuauugcuucacuaa

SEQ ID NO: 1072115 - RNA, 19 nt, Homo sapiens
  misc_RNA (1)...(19): siRNA sense strand
gagccacgagugauugaca

SEQ ID NO: 1072116 - RNA, 19 nt, Homo sapiens
  misc_RNA (1)...(19): siRNA sense strand
ccagcuaccacugcuaaga

SEQ ID NO: 1072117 - RNA, 19 nt, Homo sapiens
  misc_RNA (1)...(19): siRNA sense strand
guguaucuagggucuguuu

SEQ ID NO: 1072118 - RNA, 19 nt, Homo sapiens
  misc_RNA (1)...(19): siRNA sense strand
cggcaucagagaggauaua

SEQ ID NO: 1072119 - RNA, 19 nt, Homo sapiens
  misc_RNA (1)...(19): siRNA sense strand
ucuagagaaccgagaguga

SEQ ID NO: 1072120 - RNA, 19 nt, Homo sapiens
  misc_RNA (1)...(19): siRNA sense strand
cagcaucgagugcccaaag

SEQ ID NO: 1072121 - RNA, 19 nt, Homo sapiens
  misc_RNA (1)...(19): siRNA sense strand
gagcuaacauccauauuua

SEQ ID NO: 1072122 - RNA, 19 nt, Homo sapiens
  misc_RNA (1)...(19): siRNA sense strand
gcacaacacuccugauauu

SEQ ID NO: 1072123 - RNA, 19 nt, Homo sapiens
  misc_RNA (1)...(19): siRNA sense strand
ggaguuggcuucaaagaaa

SEQ ID NO: 1072124 - RNA, 19 nt, Homo sapiens
  misc_RNA (1)...(19): siRNA sense strand
ggaaacagcuaaucaggaa

SEQ ID NO: 1072125 - RNA, 19 nt, Homo sapiens
  misc_RNA (1)...(19): siRNA sense strand
agaugaagcugaaacauua

SEQ ID NO: 1072126 - RNA, 19 nt, Homo sapiens
  misc_RNA (1)...(19): siRNA sense strand
gaucuaagcuggcaacuag

SEQ ID NO: 1072127 - RNA, 19 nt, Homo sapiens
  misc_RNA (1)...(19): siRNA sense strand
gcaacugucuuuaauauuc

SEQ ID NO: 1072128 - RNA, 19 nt, Homo sapiens
  misc_RNA (1)...(19): siRNA sense strand
gcagggaucuuuacauguu

SEQ ID NO: 1072129 - RNA, 19 nt, Homo sapiens
  misc_RNA (1)...(19): siRNA sense strand
ggaagcagaucucuccaaa

SEQ ID NO: 1072130 - RNA, 19 nt, Homo sapiens
  misc_RNA (1)...(19): siRNA sense strand
gaggaaaccugccauguca

SEQ ID NO: 1072131 - RNA, 19 nt, Homo sapiens
  misc_RNA (1)...(19): siRNA sense strand
ugacaaggcagcuaauuua

SEQ ID NO: 1072132 - RNA, 19 nt, Homo sapiens
  misc_RNA (1)...(19): siRNA sense strand
ggaaagaacugcacaacac

SEQ ID NO: 1072133 - RNA, 19 nt, Homo sapiens
  misc_RNA (1)...(19): siRNA sense strand
aaacuaggauuuccaaaga

SEQ ID NO: 1072134 - RNA, 19 nt, Homo sapiens
  misc_RNA (1)...(19): siRNA sense strand
aagcagaucucuccaaaga

SEQ ID NO: 1072135 - RNA, 19 nt, Homo sapiens
  misc_RNA (1)...(19): siRNA sense strand
ggagcuaacauccauauuu

SEQ ID NO: 1072136 - RNA, 19 nt, Homo sapiens
  misc_RNA (1)...(19): siRNA sense strand
gcaccucgauucauccaaa

SEQ ID NO: 1072137 - RNA, 19 nt, Homo sapiens
  misc_RNA (1)...(19): siRNA sense strand
gaagaaagcaagaauacug

SEQ ID NO: 1072138 - RNA, 19 nt, Homo sapiens
  misc_RNA (1)...(19): siRNA sense strand
gcacaaaggaugcuguuau

SEQ ID NO: 1072139 - RNA, 19 nt, Homo sapiens
  misc_RNA (1)...(19): siRNA sense strand
gagauuugcacccuaguua

SEQ ID NO: 1072140 - RNA, 19 nt, Homo sapiens
  misc_RNA (1)...(19): siRNA sense strand
gcuggaaugucguguauug

SEQ ID NO: 1072141 - RNA, 19 nt, Homo sapiens
  misc_RNA (1)...(19): siRNA sense strand
gugcaacugucuuuaauau

SEQ ID NO: 1072142 - RNA, 19 nt, Homo sapiens
  misc_RNA (1)...(19): siRNA sense strand
ggaguaaauggacugauua

SEQ ID NO: 1072143 - RNA, 19 nt, Homo sapiens
  misc_RNA (1)...(19): siRNA sense strand
ccaagacucuccagauuuc

SEQ ID NO: 1072144 - RNA, 19 nt, Homo sapiens
  misc_RNA (1)...(19): siRNA sense strand
gcaaagcuaacaguaauaa

SEQ ID NO: 1072145 - RNA, 19 nt, Homo sapiens
  misc_RNA (1)...(19): siRNA sense strand
gcagagaaacaaacuaaga

SEQ ID NO: 1072146 - RNA, 19 nt, Homo sapiens
  misc_RNA (1)...(19): siRNA sense strand
ugacagugcucacaagaug

SEQ ID NO: 1072147 - RNA, 19 nt, Homo sapiens
  misc_RNA (1)...(19): siRNA sense strand
ccaguaacuuucacaugua

SEQ ID NO: 1072148 - RNA, 19 nt, Homo sapiens
  misc_RNA (1)...(19): siRNA sense strand
gcaagggagugaaauccaa

SEQ ID NO: 1072149 - RNA, 19 nt, Homo sapiens
  misc_RNA (1)...(19): siRNA sense strand
gaguuuaucuggaguguag

SEQ ID NO: 1072150 - RNA, 19 nt, Homo sapiens
  misc_RNA (1)...(19): siRNA sense strand
gccaguaacuuucacaugu

SEQ ID NO: 1072151 - RNA, 19 nt, Homo sapiens
  misc_RNA (1)...(19): siRNA sense strand
gagaugaagcugaaacauu

SEQ ID NO: 1072152 - RNA, 19 nt, Homo sapiens
  misc_RNA (1)...(19): siRNA sense strand
cacaaaggaugcuguuauu

SEQ ID NO: 1072153 - RNA, 19 nt, Homo sapiens
  misc_RNA (1)...(19): siRNA sense strand
gaucauagcagaggccuuu

SEQ ID NO: 1072154 - RNA, 19 nt, Homo sapiens
  misc_RNA (1)...(19): siRNA sense strand
cuucagaccucacuucuug

SEQ ID NO: 1072155 - RNA, 19 nt, Homo sapiens
  misc_RNA (1)...(19): siRNA sense strand
gcugaaacauuacaagauc

SEQ ID NO: 1072156 - RNA, 19 nt, Homo sapiens
  misc_RNA (1)...(19): siRNA sense strand
gagaaacaaacuaagagua

SEQ ID NO: 1072157 - RNA, 19 nt, Homo sapiens
  misc_RNA (1)...(19): siRNA sense strand
gaaacaaacuaagaguauc

SEQ ID NO: 1072158 - RNA, 19 nt, Homo sapiens
  misc_RNA (1)...(19): siRNA sense strand
guggguaccugucuccuaa

SEQ ID NO: 1072159 - RNA, 19 nt, Homo sapiens
  misc_RNA (1)...(19): siRNA sense strand
caacacuccugauauucaa

SEQ ID NO: 1072160 - RNA, 19 nt, Homo sapiens
  misc_RNA (1)...(19): siRNA sense strand
gugaacauccuucccauaa

SEQ ID NO: 1072161 - RNA, 19 nt, Homo sapiens
  misc_RNA (1)...(19): siRNA sense strand
gagguuaacauacgaagaa

SEQ ID NO: 1072162 - RNA, 19 nt, Homo sapiens
  misc_RNA (1)...(19): siRNA sense strand
caaaggaugcuguuauuca

SEQ ID NO: 1072163 - RNA, 19 nt, Homo sapiens
  misc_RNA (1)...(19): siRNA sense strand
gcagaagggagccgaguuu

SEQ ID NO: 1072164 - RNA, 19 nt, Homo sapiens
  misc_RNA (1)...(19): siRNA sense strand
gaguaucucuucaccuguu

SEQ ID NO: 1072165 - RNA, 19 nt, Homo sapiens
  misc_RNA (1)...(19): siRNA sense strand
gagcaggacagaacucauu

SEQ ID NO: 1072166 - RNA, 19 nt, Homo sapiens
  misc_RNA (1)...(19): siRNA sense strand
cggcaaagcuaacaguaau

SEQ ID NO: 1072167 - RNA, 19 nt, Homo sapiens
  misc_RNA (1)...(19): siRNA sense strand
ggugaacaacccugaguua

SEQ ID NO: 1072168 - RNA, 19 nt, Homo sapiens
  misc_RNA (1)...(19): siRNA sense strand
gaagggagccgaguuuauc

SEQ ID NO: 1072169 - RNA, 19 nt, Homo sapiens
  misc_RNA (1)...(19): siRNA sense strand
ggaaaacucugcagaaugg

SEQ ID NO: 1072170 - RNA, 19 nt, Homo sapiens
  misc_RNA (1)...(19): siRNA sense strand
gcaccauucuuugagauga

SEQ ID NO: 1072171 - RNA, 19 nt, Homo sapiens
  misc_RNA (1)...(19): siRNA sense strand
aaacagcuaaucaggaaua

SEQ ID NO: 1072172 - RNA, 19 nt, Homo sapiens
  misc_RNA (1)...(19): siRNA sense strand
gcaaagccaagaaacagaa

SEQ ID NO: 1072173 - RNA, 19 nt, Homo sapiens
  misc_RNA (1)...(19): siRNA sense strand
ucaaagaaaccaucugaga

SEQ ID NO: 1072174 - RNA, 19 nt, Homo sapiens
  misc_RNA (1)...(19): siRNA sense strand
ccaaagaaggccaguagaa

SEQ ID NO: 1072175 - RNA, 19 nt, Homo sapiens
  misc_RNA (1)...(19): siRNA sense strand
cugcugagguguucauuga

SEQ ID NO: 1072176 - RNA, 19 nt, Homo sapiens
  misc_RNA (1)...(19): siRNA sense strand
gaagaugcugggugguaua

SEQ ID NO: 1072177 - RNA, 19 nt, Homo sapiens
  misc_RNA (1)...(19): siRNA sense strand
aaaggaugcuguuauucaa

SEQ ID NO: 1072178 - RNA, 19 nt, Homo sapiens
  misc_RNA (1)...(19): siRNA sense strand
uggaguaaauggacugauu

SEQ ID NO: 1072179 - RNA, 19 nt, Homo sapiens
  misc_RNA (1)...(19): siRNA sense strand
agaaaggucuccuguggau

SEQ ID NO: 1072180 - RNA, 19 nt, Homo sapiens
  misc_RNA (1)...(19): siRNA sense strand
gacaaggcagcuaauuuaa

SEQ ID NO: 1072181 - RNA, 19 nt, Homo sapiens
  misc_RNA (1)...(19): siRNA sense strand
ggaaauccaaagccaaaga

SEQ ID NO: 1072182 - RNA, 19 nt, Homo sapiens
  misc_RNA (1)...(19): siRNA sense strand
ucucagacaugcaggaaga

SEQ ID NO: 1072183 - RNA, 19 nt, Homo sapiens
  misc_RNA (1)...(19): siRNA sense strand
gaugaugaugggaauuaua

SEQ ID NO: 1072184 - RNA, 19 nt, Homo sapiens
  misc_RNA (1)...(19): siRNA sense strand
gaaguucaguauggagaug

SEQ ID NO: 1072185 - RNA, 19 nt, Homo sapiens
  misc_RNA (1)...(19): siRNA sense strand
gaaccacuacugccuacuu

SEQ ID NO: 1072186 - RNA, 19 nt, Homo sapiens
  misc_RNA (1)...(19): siRNA sense strand
gccaccaccucagauauuu

SEQ ID NO: 1072187 - RNA, 19 nt, Homo sapiens
  misc_RNA (1)...(19): siRNA sense strand
ggugcacucucugaucaua

SEQ ID NO: 1072188 - RNA, 19 nt, Homo sapiens
  misc_RNA (1)...(19): siRNA sense strand
gcaagccucugugaacauc

SEQ ID NO: 1072189 - RNA, 19 nt, Homo sapiens
  misc_RNA (1)...(19): siRNA sense strand
gcugaggagccaagaagua

SEQ ID NO: 1072190 - RNA, 19 nt, Homo sapiens
  misc_RNA (1)...(19): siRNA sense strand
caacaaugaccacuuccaa

SEQ ID NO: 1072191 - RNA, 19 nt, Homo sapiens
  misc_RNA (1)...(19): siRNA sense strand
ggacaaccacggcuacauc

SEQ ID NO: 1072192 - RNA, 19 nt, Homo sapiens
  misc_RNA (1)...(19): siRNA sense strand
gcuggcaacuagauggaaa

SEQ ID NO: 1072193 - RNA, 19 nt, Homo sapiens
  misc_RNA (1)...(19): siRNA sense strand
guuaacauacgaagaaaga

SEQ ID NO: 1072194 - RNA, 19 nt, Homo sapiens
  misc_RNA (1)...(19): siRNA sense strand
guucagcaagaaaugauua

SEQ ID NO: 1072195 - RNA, 19 nt, Homo sapiens
  misc_RNA (1)...(19): siRNA sense strand
uagaugaugaugggaauua

SEQ ID NO: 1072196 - RNA, 19 nt, Homo sapiens
  misc_RNA (1)...(19): siRNA sense strand
cagaagaggaaacagcuaa

SEQ ID NO: 1072197 - RNA, 19 nt, Homo sapiens
  misc_RNA (1)...(19): siRNA sense strand
gaguaaauggacugauuaa

SEQ ID NO: 1072198 - RNA, 19 nt, Homo sapiens
  misc_RNA (1)...(19): siRNA sense strand
guaaauggacugauuaacg

SEQ ID NO: 1072199 - RNA, 19 nt, Homo sapiens
  misc_RNA (1)...(19): siRNA sense strand
caaagccaaagaucuauug

SEQ ID NO: 1072200 - RNA, 19 nt, Homo sapiens
  misc_RNA (1)...(19): siRNA sense strand
ggaaugccaguaacuuuca

SEQ ID NO: 1072201 - RNA, 19 nt, Homo sapiens
  misc_RNA (1)...(19): siRNA sense strand
aacagagacucaucaguga

SEQ ID NO: 1072202 - RNA, 19 nt, Homo sapiens
  misc_RNA (1)...(19): siRNA sense strand
cagcuaaucaggaauacaa

SEQ ID NO: 1072203 - RNA, 19 nt, Homo sapiens
  misc_RNA (1)...(19): siRNA sense strand
gaaauucaaggcacaaagg

SEQ ID NO: 1072204 - RNA, 19 nt, Homo sapiens
  misc_RNA (1)...(19): siRNA sense strand
gugacaaggcagcuaauuu

SEQ ID NO: 1072205 - RNA, 19 nt, Homo sapiens
  misc_RNA (1)...(19): siRNA sense strand
ucacuacaccauucaaaga

SEQ ID NO: 1072206 - RNA, 19 nt, Homo sapiens
  misc_RNA (1)...(19): siRNA sense strand
caagaucuuugagggaaug

SEQ ID NO: 1072207 - RNA, 19 nt, Homo sapiens
  misc_RNA (1)...(19): siRNA sense strand
gacaauaggaucaucaucu

SEQ ID NO: 1072208 - RNA, 19 nt, Homo sapiens
  misc_RNA (1)...(19): siRNA sense strand
gagccaagaaguagcagaa

SEQ ID NO: 1072209 - RNA, 19 nt, Homo sapiens
  misc_RNA (1)...(19): siRNA sense strand
gggauuguguccuguacug

SEQ ID NO: 1072210 - RNA, 19 nt, Homo sapiens
  misc_RNA (1)...(19): siRNA sense strand
gaucacuacaccauucaaa

SEQ ID NO: 1072211 - RNA, 19 nt, Homo sapiens
  misc_RNA (1)...(19): siRNA sense strand
gaaauccaaagccaaagau

SEQ ID NO: 1072212 - RNA, 19 nt, Homo sapiens
  misc_RNA (1)...(19): siRNA sense strand
aaaggucuccuguggauga

SEQ ID NO: 1072213 - RNA, 19 nt, Homo sapiens
  misc_RNA (1)...(19): siRNA sense strand
uucaagaccuggaacgaaa

SEQ ID NO: 1072214 - RNA, 19 nt, Homo sapiens
  misc_RNA (1)...(19): siRNA sense strand
gcaggaagaaagcaagaau

SEQ ID NO: 1072215 - RNA, 19 nt, Homo sapiens
  misc_RNA (1)...(19): siRNA sense strand
caacuucuguuuccuugac

SEQ ID NO: 1072216 - RNA, 19 nt, Homo sapiens
  misc_RNA (1)...(19): siRNA sense strand
gccacaagcucaaaagaaa

SEQ ID NO: 1072217 - RNA, 19 nt, Homo sapiens
  misc_RNA (1)...(19): siRNA sense strand
gagacucaucagugaaaua

SEQ ID NO: 1072218 - RNA, 19 nt, Homo sapiens
  misc_RNA (1)...(19): siRNA sense strand
gaaugaagcagggauugug

SEQ ID NO: 1072219 - RNA, 19 nt, Homo sapiens
  misc_RNA (1)...(19): siRNA sense strand
gaugcugggugguauacug

SEQ ID NO: 1072220 - RNA, 19 nt, Homo sapiens
  misc_RNA (1)...(19): siRNA sense strand
ugugguugcugcuaaagaa

SEQ ID NO: 1072221 - RNA, 19 nt, Homo sapiens
  misc_RNA (1)...(19): siRNA sense strand
gauauuaccuuccaaauga

SEQ ID NO: 1072222 - RNA, 19 nt, Homo sapiens
  misc_RNA (1)...(19): siRNA sense strand
aaagagaacuuaaccauga

SEQ ID NO: 1072223 - RNA, 19 nt, Homo sapiens
  misc_RNA (1)...(19): siRNA sense strand
gagaacaacuugaauguca

SEQ ID NO: 1072224 - RNA, 19 nt, Homo sapiens
  misc_RNA (1)...(19): siRNA sense strand
gaagagaaguugaagaucu

SEQ ID NO: 1072225 - RNA, 19 nt, Homo sapiens
  misc_RNA (1)...(19): siRNA sense strand
caaagaaauugcugacaaa

SEQ ID NO: 1072226 - RNA, 19 nt, Homo sapiens
  misc_RNA (1)...(19): siRNA sense strand
guacugcucgugauuauua

SEQ ID NO: 1072227 - RNA, 19 nt, Homo sapiens
  misc_RNA (1)...(19): siRNA sense strand
gaacaaagaaagcgugauu

SEQ ID NO: 1072228 - RNA, 19 nt, Homo sapiens
  misc_RNA (1)...(19): siRNA sense strand
gaagauauugugucaguaa

SEQ ID NO: 1072229 - RNA, 19 nt, Homo sapiens
  misc_RNA (1)...(19): siRNA sense strand
ccaaagaaauugcugacaa

SEQ ID NO: 1072230 - RNA, 19 nt, Homo sapiens
  misc_RNA (1)...(19): siRNA sense strand
gcaguucccuccugacuau

SEQ ID NO: 1072231 - RNA, 19 nt, Homo sapiens
  misc_RNA (1)...(19): siRNA sense strand
uaucaguucuguuacguua

SEQ ID NO: 1072232 - RNA, 19 nt, Homo sapiens
  misc_RNA (1)...(19): siRNA sense strand
gaucaacagucaauugugu

SEQ ID NO: 1072233 - RNA, 19 nt, Homo sapiens
  misc_RNA (1)...(19): siRNA sense strand
gggcaagucugugaaauga

SEQ ID NO: 1072234 - RNA, 19 nt, Homo sapiens
  misc_RNA (1)...(19): siRNA sense strand
caccuuaacuccauauauu

SEQ ID NO: 1072235 - RNA, 19 nt, Homo sapiens
  misc_RNA (1)...(19): siRNA sense strand
ugucagagguccagacuuu

SEQ ID NO: 1072236 - RNA, 19 nt, Homo sapiens
  misc_RNA (1)...(19): siRNA sense strand
gaaaugaccaaagaaauug

SEQ ID NO: 1072237 - RNA, 19 nt, Homo sapiens
  misc_RNA (1)...(19): siRNA sense strand
gcaaagaagaugagaaugu

SEQ ID NO: 1072238 - RNA, 19 nt, Homo sapiens
  misc_RNA (1)...(19): siRNA sense strand
aaauggagcugaaauggaa

SEQ ID NO: 1072239 - RNA, 19 nt, Homo sapiens
  misc_RNA (1)...(19): siRNA sense strand
ugaaguaacacaaagcuua

SEQ ID NO: 1072240 - RNA, 19 nt, Homo sapiens
  misc_RNA (1)...(19): siRNA sense strand
gaaacuccgucuucagaug

SEQ ID NO: 1072241 - RNA, 19 nt, Homo sapiens
  misc_RNA (1)...(19): siRNA sense strand
uggcagaacuuaaacuaaa

SEQ ID NO: 1072242 - RNA, 19 nt, Homo sapiens
  misc_RNA (1)...(19): siRNA sense strand
gaaguaacacaaagcuuaa

SEQ ID NO: 1072243 - RNA, 19 nt, Homo sapiens
  misc_RNA (1)...(19): siRNA sense strand
gagcaaauuugaagaacau

SEQ ID NO: 1072244 - RNA, 19 nt, Homo sapiens
  misc_RNA (1)...(19): siRNA sense strand
caaagaagaugagaaugug

SEQ ID NO: 1072245 - RNA, 19 nt, Homo sapiens
  misc_RNA (1)...(19): siRNA sense strand
ucagaucaaucagcuaaua

SEQ ID NO: 1072246 - RNA, 19 nt, Homo sapiens
  misc_RNA (1)...(19): siRNA sense strand
ugaaggaaauucugacaug

SEQ ID NO: 1072247 - RNA, 19 nt, Homo sapiens
  misc_RNA (1)...(19): siRNA sense strand
aggaaauucugacauguua

SEQ ID NO: 1072248 - RNA, 19 nt, Homo sapiens
  misc_RNA (1)...(19): siRNA sense strand
gaacuuuccugcuuacaac

SEQ ID NO: 1072249 - RNA, 19 nt, Homo sapiens
  misc_RNA (1)...(19): siRNA sense strand
ugaagaacauguugaaagu

SEQ ID NO: 1072250 - RNA, 19 nt, Homo sapiens
  misc_RNA (1)...(19): siRNA sense strand
gaaugaugcuucaguaaac

SEQ ID NO: 1072251 - RNA, 19 nt, Homo sapiens
  misc_RNA (1)...(19): siRNA sense strand
aagaagagguucagugaug

SEQ ID NO: 1072252 - RNA, 19 nt, Homo sapiens
  misc_RNA (1)...(19): siRNA sense strand
gaguuaauguuuccuccua

SEQ ID NO: 1072253 - RNA, 19 nt, Homo sapiens
  misc_RNA (1)...(19): siRNA sense strand
gcaauaugguaauccuuau

SEQ ID NO: 1072254 - RNA, 19 nt, Homo sapiens
  misc_RNA (1)...(19): siRNA sense strand
uaaaggagcaacuucguaa

SEQ ID NO: 1072255 - RNA, 19 nt, Homo sapiens
  misc_RNA (1)...(19): siRNA sense strand
gaaggaaauucugacaugu

SEQ ID NO: 1072256 - RNA, 19 nt, Homo sapiens
  misc_RNA (1)...(19): siRNA sense strand
gcaauaaauaugcugauga

SEQ ID NO: 1072257 - RNA, 19 nt, Homo sapiens
  misc_RNA (1)...(19): siRNA sense strand
gaaagaaagaugugaccaa

SEQ ID NO: 1072258 - RNA, 19 nt, Homo sapiens
  misc_RNA (1)...(19): siRNA sense strand
ggaaucagcagaaagugaa

SEQ ID NO: 1072259 - RNA, 19 nt, Homo sapiens
  misc_RNA (1)...(19): siRNA sense strand
ggaaagagaacuuaaccau

SEQ ID NO: 1072260 - RNA, 19 nt, Homo sapiens
  misc_RNA (1)...(19): siRNA sense strand
gaaguacaggacaauuaua

SEQ ID NO: 1072261 - RNA, 19 nt, Homo sapiens
  misc_RNA (1)...(19): siRNA sense strand
auaccaagcuuaugucaga

SEQ ID NO: 1072262 - RNA, 19 nt, Homo sapiens
  misc_RNA (1)...(19): siRNA sense strand
caagaaggcacaacaugaa

SEQ ID NO: 1072263 - RNA, 19 nt, Homo sapiens
  misc_RNA (1)...(19): siRNA sense strand
gaaauucguggagcaagua

SEQ ID NO: 1072264 - RNA, 19 nt, Homo sapiens
  misc_RNA (1)...(19): siRNA sense strand
gcuuugauguucacaagaa

SEQ ID NO: 1072265 - RNA, 19 nt, Homo sapiens
  misc_RNA (1)...(19): siRNA sense strand
gcagaccauuauaaagaaa

SEQ ID NO: 1072266 - RNA, 19 nt, Homo sapiens
  misc_RNA (1)...(19): siRNA sense strand
agaaagaugugaccaacug

SEQ ID NO: 1072267 - RNA, 19 nt, Homo sapiens
  misc_RNA (1)...(19): siRNA sense strand
gaucagagcaaauuugaag

SEQ ID NO: 1072268 - RNA, 19 nt, Homo sapiens
  misc_RNA (1)...(19): siRNA sense strand
gaaauggaaagaacaagug

SEQ ID NO: 1072269 - RNA, 19 nt, Homo sapiens
  misc_RNA (1)...(19): siRNA sense strand
gagcugaaauggaaagaac

SEQ ID NO: 1072270 - RNA, 19 nt, Homo sapiens
  misc_RNA (1)...(19): siRNA sense strand
ugaaagagaacaacuugaa

SEQ ID NO: 1072271 - RNA, 19 nt, Homo sapiens
  misc_RNA (1)...(19): siRNA sense strand
gcaguuauguuuggcugaa

SEQ ID NO: 1072272 - RNA, 19 nt, Homo sapiens
  misc_RNA (1)...(19): siRNA sense strand
uauggaagaugaaggaaau

SEQ ID NO: 1072273 - RNA, 19 nt, Homo sapiens
  misc_RNA (1)...(19): siRNA sense strand
gccaagaguuaccuuccua

SEQ ID NO: 1072274 - RNA, 19 nt, Homo sapiens
  misc_RNA (1)...(19): siRNA sense strand
ugaacuagcugaaguacag

SEQ ID NO: 1072275 - RNA, 19 nt, Homo sapiens
  misc_RNA (1)...(19): siRNA sense strand
gaaagagaacaacuugaau

SEQ ID NO: 1072276 - RNA, 19 nt, Homo sapiens
  misc_RNA (1)...(19): siRNA sense strand
ugaggaagauauuguguca

SEQ ID NO: 1072277 - RNA, 19 nt, Homo sapiens
  misc_RNA (1)...(19): siRNA sense strand
ggaguacugcucgugauua

SEQ ID NO: 1072278 - RNA, 19 nt, Homo sapiens
  misc_RNA (1)...(19): siRNA sense strand
cacaaccaguucugcaaua

SEQ ID NO: 1072279 - RNA, 19 nt, Homo sapiens
  misc_RNA (1)...(19): siRNA sense strand
guaaagccaucaccuucug

SEQ ID NO: 1072280 - RNA, 19 nt, Homo sapiens
  misc_RNA (1)...(19): siRNA sense strand
gagaacaaguugggagaau

SEQ ID NO: 1072281 - RNA, 19 nt, Homo sapiens
  misc_RNA (1)...(19): siRNA sense strand
gaguacugcucgugauuau

SEQ ID NO: 1072282 - RNA, 19 nt, Homo sapiens
  misc_RNA (1)...(19): siRNA sense strand
ggaaggaucaacagucaau

SEQ ID NO: 1072283 - RNA, 19 nt, Homo sapiens
  misc_RNA (1)...(19): siRNA sense strand
cgugauuacucauuucaaa

SEQ ID NO: 1072284 - RNA, 19 nt, Homo sapiens
  misc_RNA (1)...(19): siRNA sense strand
gaaagcgugauuacucauu

SEQ ID NO: 1072285 - RNA, 19 nt, Homo sapiens
  misc_RNA (1)...(19): siRNA sense strand
gaaggcacaacaugaaaga

SEQ ID NO: 1072286 - RNA, 19 nt, Homo sapiens
  misc_RNA (1)...(19): siRNA sense strand
ggaagauauugugucagua

SEQ ID NO: 1072287 - RNA, 19 nt, Homo sapiens
  misc_RNA (1)...(19): siRNA sense strand
gaacuuaaccaugagaaag

SEQ ID NO: 1072288 - RNA, 19 nt, Homo sapiens
  misc_RNA (1)...(19): siRNA sense strand
aaguacaccuuuccaguuu

SEQ ID NO: 1072289 - RNA, 19 nt, Homo sapiens
  misc_RNA (1)...(19): siRNA sense strand
ucuguuacguuacccauaa

SEQ ID NO: 1072290 - RNA, 19 nt, Homo sapiens
  misc_RNA (1)...(19): siRNA sense strand
ggauauuaccuuccaaaug

SEQ ID NO: 1072291 - RNA, 19 nt, Homo sapiens
  misc_RNA (1)...(19): siRNA sense strand
guacuagcauuccaaggau

SEQ ID NO: 1072292 - RNA, 19 nt, Homo sapiens
  misc_RNA (1)...(19): siRNA sense strand
aagcaggccuucuugaguu

SEQ ID NO: 1072293 - RNA, 19 nt, Homo sapiens
  misc_RNA (1)...(19): siRNA sense strand
gaucugaaacuccgucuuc

SEQ ID NO: 1072294 - RNA, 19 nt, Homo sapiens
  misc_RNA (1)...(19): siRNA sense strand
aaagcgugauuacucauuu

SEQ ID NO: 1072295 - RNA, 19 nt, Homo sapiens
  misc_RNA (1)...(19): siRNA sense strand
gaaaauaccaagcuuaugu

SEQ ID NO: 1072296 - RNA, 19 nt, Homo sapiens
  misc_RNA (1)...(19): siRNA sense strand
caaguacaccuuuccaguu

SEQ ID NO: 1072297 - RNA, 19 nt, Homo sapiens
  misc_RNA (1)...(19): siRNA sense strand
gaacacgaacuaagaagag

SEQ ID NO: 1072298 - RNA, 19 nt, Homo sapiens
  misc_RNA (1)...(19): siRNA sense strand
cgaauuagacaguuuaaag

SEQ ID NO: 1072299 - RNA, 19 nt, Homo sapiens
  misc_RNA (1)...(19): siRNA sense strand
gaaaccgaauuagacaguu

SEQ ID NO: 1072300 - RNA, 19 nt, Homo sapiens
  misc_RNA (1)...(19): siRNA sense strand
guggaaggaucaacaguca

SEQ ID NO: 1072301 - RNA, 19 nt, Homo sapiens
  misc_RNA (1)...(19): siRNA sense strand
uaacuaugaucagagcaaa

SEQ ID NO: 1072302 - RNA, 19 nt, Homo sapiens
  misc_RNA (1)...(19): siRNA sense strand
ucaagaaggcacaacauga

SEQ ID NO: 1072303 - RNA, 19 nt, Homo sapiens
  misc_RNA (1)...(19): siRNA sense strand
gaauggaaagagaacuuaa

SEQ ID NO: 1072304 - RNA, 19 nt, Homo sapiens
  misc_RNA (1)...(19): siRNA sense strand
gaaauucugacauguuagu

SEQ ID NO: 1072305 - RNA, 19 nt, Homo sapiens
  misc_RNA (1)...(19): siRNA sense strand
aagaacauguugaaaguca

SEQ ID NO: 1072306 - RNA, 19 nt, Homo sapiens
  misc_RNA (1)...(19): siRNA sense strand
agaguuaccuuccuaaugc

SEQ ID NO: 1072307 - RNA, 19 nt, Homo sapiens
  misc_RNA (1)...(19): siRNA sense strand
ucaauuguguacuagcauu

SEQ ID NO: 1072308 - RNA, 19 nt, Homo sapiens
  misc_RNA (1)...(19): siRNA sense strand
ccagaguccucaauguuuc

SEQ ID NO: 1072309 - RNA, 19 nt, Homo sapiens
  misc_RNA (1)...(19): siRNA sense strand
gaacaaguugggagaaugg

SEQ ID NO: 1072310 - RNA, 19 nt, Homo sapiens
  misc_RNA (1)...(19): siRNA sense strand
gagaaaaccaugaaagaaa

SEQ ID NO: 1072311 - RNA, 19 nt, Homo sapiens
  misc_RNA (1)...(19): siRNA sense strand
caaaugaugauggagaauu

SEQ ID NO: 1072312 - RNA, 19 nt, Homo sapiens
  misc_RNA (1)...(19): siRNA sense strand
cagugaugcugucaacgua

SEQ ID NO: 1072313 - RNA, 19 nt, Homo sapiens
  misc_RNA (1)...(19): siRNA sense strand
ucagagguccagacuuuaa

SEQ ID NO: 1072314 - RNA, 19 nt, Homo sapiens
  misc_RNA (1)...(19): siRNA sense strand
ggcacaacaugaaagagaa

SEQ ID NO: 1072315 - RNA, 19 nt, Homo sapiens
  misc_RNA (1)...(19): siRNA sense strand
ggaacacgaacuaagaaga

SEQ ID NO: 1072316 - RNA, 19 nt, Homo sapiens
  misc_RNA (1)...(19): siRNA sense strand
ccagccugcucgaaacuuu

SEQ ID NO: 1072317 - RNA, 19 nt, Homo sapiens
  misc_RNA (1)...(19): siRNA sense strand
uuacccagaugaaauacaa

SEQ ID NO: 1072318 - RNA, 19 nt, Homo sapiens
  misc_RNA (1)...(19): siRNA sense strand
guacaggacaauuauaaag

SEQ ID NO: 1072319 - RNA, 19 nt, Homo sapiens
  misc_RNA (1)...(19): siRNA sense strand
caacuuugcccaugucauc

SEQ ID NO: 1072320 - RNA, 19 nt, Homo sapiens
  misc_RNA (1)...(19): siRNA sense strand
ucugugaaaugaccaaaga

SEQ ID NO: 1072321 - RNA, 19 nt, Homo sapiens
  misc_RNA (1)...(19): siRNA sense strand
gauaggagcucaaggugua

SEQ ID NO: 1072322 - RNA, 19 nt, Homo sapiens
  misc_RNA (1)...(19): siRNA sense strand
agacaucacuccucuaaua

SEQ ID NO: 1072323 - RNA, 19 nt, Homo sapiens
  misc_RNA (1)...(19): siRNA sense strand
gcuagaagauuccaaacua

SEQ ID NO: 1072324 - RNA, 19 nt, Homo sapiens
  misc_RNA (1)...(19): siRNA sense strand
ccuaauaccuugcaaagaa

SEQ ID NO: 1072325 - RNA, 19 nt, Homo sapiens
  misc_RNA (1)...(19): siRNA sense strand
gaagacaucacuccucuaa

SEQ ID NO: 1072326 - RNA, 19 nt, Homo sapiens
  misc_RNA (1)...(19): siRNA sense strand
gaacuacggugccauuuac

SEQ ID NO: 1072327 - RNA, 19 nt, Homo sapiens
  misc_RNA (1)...(19): siRNA sense strand
gagcauacaaccacuauuu

SEQ ID NO: 1072328 - RNA, 19 nt, Homo sapiens
  misc_RNA (1)...(19): siRNA sense strand
gacaauaacuuggaauuag

SEQ ID NO: 1072329 - RNA, 19 nt, Homo sapiens
  misc_RNA (1)...(19): siRNA sense strand
gccaugagguuggaaauaa

SEQ ID NO: 1072330 - RNA, 19 nt, Homo sapiens
  misc_RNA (1)...(19): siRNA sense strand
gauggaagcagauauuaaa

SEQ ID NO: 1072331 - RNA, 19 nt, Homo sapiens
  misc_RNA (1)...(19): siRNA sense strand
ccaaaggaauuacaagaau

SEQ ID NO: 1072332 - RNA, 19 nt, Homo sapiens
  misc_RNA (1)...(19): siRNA sense strand
ggacuugcauucuggaugu

SEQ ID NO: 1072333 - RNA, 19 nt, Homo sapiens
  misc_RNA (1)...(19): siRNA sense strand
gaagagaaaggcauuuguu

SEQ ID NO: 1072334 - RNA, 19 nt, Homo sapiens
  misc_RNA (1)...(19): siRNA sense strand
ggaacuacggugccauuua

SEQ ID NO: 1072335 - RNA, 19 nt, Homo sapiens
  misc_RNA (1)...(19): siRNA sense strand
gucaugaaauccagauaua

SEQ ID NO: 1072336 - RNA, 19 nt, Homo sapiens
  misc_RNA (1)...(19): siRNA sense strand
gagaaaggcauuuguuaga

SEQ ID NO: 1072337 - RNA, 19 nt, Homo sapiens
  misc_RNA (1)...(19): siRNA sense strand
gaaaggcauuuguuagaag

SEQ ID NO: 1072338 - RNA, 19 nt, Homo sapiens
  misc_RNA (1)...(19): siRNA sense strand
ccagauauaugaggaggua

SEQ ID NO: 1072339 - RNA, 19 nt, Homo sapiens
  misc_RNA (1)...(19): siRNA sense strand
ggaugaaagugcacggauu

SEQ ID NO: 1072340 - RNA, 19 nt, Homo sapiens
  misc_RNA (1)...(19): siRNA sense strand
gaaagugcacggauucaga

SEQ ID NO: 1072341 - RNA, 19 nt, Homo sapiens
  misc_RNA (1)...(19): siRNA sense strand
gacaaggucuacuucaugu

SEQ ID NO: 1072342 - RNA, 19 nt, Homo sapiens
  misc_RNA (1)...(19): siRNA sense strand
cacaagcacugaaaguauu

SEQ ID NO: 1072343 - RNA, 19 nt, Homo sapiens
  misc_RNA (1)...(19): siRNA sense strand
gaaggaaaucucuauggaa

SEQ ID NO: 1072344 - RNA, 19 nt, Homo sapiens
  misc_RNA (1)...(19): siRNA sense strand
ggaaauaauccaaaggaau

SEQ ID NO: 1072345 - RNA, 19 nt, Homo sapiens
  misc_RNA (1)...(19): siRNA sense strand
caaagaagcaggauugaag

SEQ ID NO: 1072346 - RNA, 19 nt, Homo sapiens
  misc_RNA (1)...(19): siRNA sense strand
ugaaggaaaucucuaugga

SEQ ID NO: 1072347 - RNA, 19 nt, Homo sapiens
  misc_RNA (1)...(19): siRNA sense strand
gaagagacugggacaauuc

SEQ ID NO: 1072348 - RNA, 19 nt, Homo sapiens
  misc_RNA (1)...(19): siRNA sense strand
gcaaacugccauagagaaa

SEQ ID NO: 1072349 - RNA, 19 nt, Homo sapiens
  misc_RNA (1)...(19): siRNA sense strand
ggaagcagauauuaaagcu

SEQ ID NO: 1072350 - RNA, 19 nt, Homo sapiens
  misc_RNA (1)...(19): siRNA sense strand
gagcugcccucgucuacug

SEQ ID NO: 1072351 - RNA, 19 nt, Homo sapiens
  misc_RNA (1)...(19): siRNA sense strand
ucaagggaauuauggagaa

SEQ ID NO: 1072352 - RNA, 19 nt, Homo sapiens
  misc_RNA (1)...(19): siRNA sense strand
gagauggaagcagauauua

SEQ ID NO: 1072353 - RNA, 19 nt, Homo sapiens
  misc_RNA (1)...(19): siRNA sense strand
aggaagcgcuggucucauu

SEQ ID NO: 1072354 - RNA, 19 nt, Homo sapiens
  misc_RNA (1)...(19): siRNA sense strand
caucacuccucuaauaaau

SEQ ID NO: 1072355 - RNA, 19 nt, Homo sapiens
  misc_RNA (1)...(19): siRNA sense strand
ggaaaucucuauggaacca

SEQ ID NO: 1072356 - RNA, 19 nt, Homo sapiens
  misc_RNA (1)...(19): siRNA sense strand
ggaauuauggagaauccua

SEQ ID NO: 1072357 - RNA, 19 nt, Homo sapiens
  misc_RNA (1)...(19): siRNA sense strand
caacagguauuugugaagu

SEQ ID NO: 1072358 - RNA, 19 nt, Homo sapiens
  misc_RNA (1)...(19): siRNA sense strand
agaaaggcauuuguuagaa

SEQ ID NO: 1072359 - RNA, 19 nt, Homo sapiens
  misc_RNA (1)...(19): siRNA sense strand
ucacuccucuaauaaaugu

SEQ ID NO: 1072360 - RNA, 19 nt, Homo sapiens
  misc_RNA (1)...(19): siRNA sense strand
ggagaauccuauuguaaaa

SEQ ID NO: 1072361 - RNA, 19 nt, Homo sapiens
  misc_RNA (1)...(19): siRNA sense strand
cagaagaaauagaccuaau

SEQ ID NO: 1072362 - RNA, 19 nt, Homo sapiens
  misc_RNA (1)...(19): siRNA sense strand
gaagcaggauugaaguuuu

SEQ ID NO: 1072363 - RNA, 19 nt, Homo sapiens
  misc_RNA (1)...(19): siRNA sense strand
ccacugggugugacauuua

SEQ ID NO: 1072364 - RNA, 19 nt, Homo sapiens
  misc_RNA (1)...(19): siRNA sense strand
guagaugccauucguauuc

SEQ ID NO: 1072365 - RNA, 19 nt, Homo sapiens
  misc_RNA (1)...(19): siRNA sense strand
ccacaagcacugaaaguau

SEQ ID NO: 1072366 - RNA, 19 nt, Homo sapiens
  misc_RNA (1)...(19): siRNA sense strand
ggaaaccaagggaagauga

SEQ ID NO: 1072367 - RNA, 19 nt, Homo sapiens
  misc_RNA (1)...(19): siRNA sense strand
ggaaaguauuuggaacaug

SEQ ID NO: 1072368 - RNA, 19 nt, Homo sapiens
  misc_RNA (1)...(19): siRNA sense strand
uauggagaauccuauugua

SEQ ID NO: 1072369 - RNA, 19 nt, Homo sapiens
  misc_RNA (1)...(19): siRNA sense strand
gacaucacuccucuaauaa

SEQ ID NO: 1072370 - RNA, 19 nt, Homo sapiens
  misc_RNA (1)...(19): siRNA sense strand
gaccgacucugacuugaag

SEQ ID NO: 1072371 - RNA, 19 nt, Homo sapiens
  misc_RNA (1)...(19): siRNA sense strand
gaauuugaucgucaugaaa

SEQ ID NO: 1072372 - RNA, 19 nt, Homo sapiens
  misc_RNA (1)...(19): siRNA sense strand
agaauuugaucgucaugaa

SEQ ID NO: 1072373 - RNA, 19 nt, Homo sapiens
  misc_RNA (1)...(19): siRNA sense strand
agaagagacugggacaauu

SEQ ID NO: 1072374 - RNA, 19 nt, Homo sapiens
  misc_RNA (1)...(19): siRNA sense strand
aagagaaaggcauuuguua

SEQ ID NO: 1072375 - RNA, 19 nt, Homo sapiens
  misc_RNA (1)...(19): siRNA sense strand
gcaaagaagcaggauugaa

SEQ ID NO: 1072376 - RNA, 19 nt, Homo sapiens
  misc_RNA (1)...(19): siRNA sense strand
caugugggagauauaauua

SEQ ID NO: 1072377 - RNA, 19 nt, Homo sapiens
  misc_RNA (1)...(19): siRNA sense strand
aaugauagaucgacaaggu

SEQ ID NO: 1072378 - RNA, 19 nt, Homo sapiens
  misc_RNA (1)...(19): siRNA sense strand
aaagauggccaggcauaua

SEQ ID NO: 1072379 - RNA, 19 nt, Homo sapiens
  misc_RNA (1)...(19): siRNA sense strand
caugaaauccagauauaug

SEQ ID NO: 1072380 - RNA, 19 nt, Homo sapiens
  misc_RNA (1)...(19): siRNA sense strand
uagagaaacugagaaugga

SEQ ID NO: 1072381 - RNA, 19 nt, Homo sapiens
  misc_RNA (1)...(19): siRNA sense strand
gccauuuacuucacggaaa

SEQ ID NO: 1072382 - RNA, 19 nt, Homo sapiens
  misc_RNA (1)...(19): siRNA sense strand
auaaugaucugguaauugc

SEQ ID NO: 1072383 - RNA, 19 nt, Homo sapiens
  misc_RNA (1)...(19): siRNA sense strand
gaaaccaagggaagaugaa

SEQ ID NO: 1072384 - RNA, 19 nt, Homo sapiens
  misc_RNA (1)...(19): siRNA sense strand
gagaagagaaaggcauuug

SEQ ID NO: 1072385 - RNA, 19 nt, Homo sapiens
  misc_RNA (1)...(19): siRNA sense strand
cgacaaggucuacuucaug

SEQ ID NO: 1072386 - RNA, 19 nt, Homo sapiens
  misc_RNA (1)...(19): siRNA sense strand
aaaggcauuuguuagaaga

SEQ ID NO: 1072387 - RNA, 19 nt, Homo sapiens
  misc_RNA (1)...(19): siRNA sense strand
gaugaaagugcacggauuc

SEQ ID NO: 1072388 - RNA, 19 nt, Homo sapiens
  misc_RNA (1)...(19): siRNA sense strand
ggaggcccaugauauugug

SEQ ID NO: 1072389 - RNA, 19 nt, Homo sapiens
  misc_RNA (1)...(19): siRNA sense strand
aaacagguucauaguauug

SEQ ID NO: 1072390 - RNA, 19 nt, Homo sapiens
  misc_RNA (1)...(19): siRNA sense strand
gcagaagaaauagaccuaa

SEQ ID NO: 1072391 - RNA, 19 nt, Homo sapiens
  misc_RNA (1)...(19): siRNA sense strand
uggagaauccuauuguaaa

SEQ ID NO: 1072392 - RNA, 19 nt, Homo sapiens
  misc_RNA (1)...(19): siRNA sense strand
ccaaucagcuggguuuacu

SEQ ID NO: 1072393 - RNA, 19 nt, Homo sapiens
  misc_RNA (1)...(19): siRNA sense strand
uacuggagcagaagaaaua

SEQ ID NO: 1072394 - RNA, 19 nt, Homo sapiens
  misc_RNA (1)...(19): siRNA sense strand
ggaggaagcgcuggucuca

SEQ ID NO: 1072395 - RNA, 19 nt, Homo sapiens
  misc_RNA (1)...(19): siRNA sense strand
guggaagugucacccuaaa

SEQ ID NO: 1072396 - RNA, 19 nt, Homo sapiens
  misc_RNA (1)...(19): siRNA sense strand
caugagaggcuagaagauu

SEQ ID NO: 1072397 - RNA, 19 nt, Homo sapiens
  misc_RNA (1)...(19): siRNA sense strand
ugagauggaagcagauauu

SEQ ID NO: 1072398 - RNA, 19 nt, Homo sapiens
  misc_RNA (1)...(19): siRNA sense strand
ggccaggcauauaaguuug

SEQ ID NO: 1072399 - RNA, 19 nt, Homo sapiens
  misc_RNA (1)...(19): siRNA sense strand
uggcagaauugguugguau

SEQ ID NO: 1072400 - RNA, 19 nt, Homo sapiens
  misc_RNA (1)...(19): siRNA sense strand
cagaguuuaugcccuaugu

SEQ ID NO: 1072401 - RNA, 19 nt, Homo sapiens
  misc_RNA (1)...(19): siRNA sense strand
caaaagagcuggggaacca

SEQ ID NO: 1072402 - RNA, 19 nt, Homo sapiens
  misc_RNA (1)...(19): siRNA sense strand
guuggaggcccaugauauu

SEQ ID NO: 1072403 - RNA, 19 nt, Homo sapiens
  misc_RNA (1)...(19): siRNA sense strand
ucaaagaaccucacuucca

SEQ ID NO: 1072404 - RNA, 19 nt, Homo sapiens
  misc_RNA (1)...(19): siRNA sense strand
ccaucaagcccagaaauga

SEQ ID NO: 1072405 - RNA, 19 nt, Homo sapiens
  misc_RNA (1)...(19): siRNA sense strand
caaccacuauuuugauuug

SEQ ID NO: 1072406 - RNA, 19 nt, Homo sapiens
  misc_RNA (1)...(19): siRNA sense strand
uugaggacaucagaguuua

SEQ ID NO: 1072407 - RNA, 19 nt, Homo sapiens
  misc_RNA (1)...(19): siRNA sense strand
gaauaugaaggaaaucucu

SEQ ID NO: 1072408 - RNA, 19 nt, Homo sapiens
  misc_RNA (1)...(19): siRNA sense strand
aagauggccaggcauauaa

SEQ ID NO: 1072409 - RNA, 19 nt, Homo sapiens
  misc_RNA (1)...(19): siRNA sense strand
guaaauagagaagauccaa

SEQ ID NO: 1072410 - RNA, 19 nt, Homo sapiens
  misc_RNA (1)...(19): siRNA sense strand
cauuacuccucaacaggua

SEQ ID NO: 1072411 - RNA, 19 nt, Homo sapiens
  misc_RNA (1)...(19): siRNA sense strand
ccaugagguuggaaauaau

SEQ ID NO: 1072412 - RNA, 19 nt, Homo sapiens
  misc_RNA (1)...(19): siRNA sense strand
caucaagcccagaaaugaa

SEQ ID NO: 1072413 - RNA, 19 nt, Homo sapiens
  misc_RNA (1)...(19): siRNA sense strand
gaggcuagaagauuccaaa

SEQ ID NO: 1072414 - RNA, 19 nt, Homo sapiens
  misc_RNA (1)...(19): siRNA sense strand
gagagcauacaaccacuau

SEQ ID NO: 1072415 - RNA, 19 nt, Homo sapiens
  misc_RNA (1)...(19): siRNA sense strand
guuuaugcccuauguggua

SEQ ID NO: 1072416 - RNA, 19 nt, Homo sapiens
  misc_RNA (1)...(19): siRNA sense strand
caaacuagaagcugucagu

SEQ ID NO: 1072417 - RNA, 19 nt, Homo sapiens
  misc_RNA (1)...(19): siRNA sense strand
caaccagaaaugcagaauu

SEQ ID NO: 1072418 - RNA, 19 nt, Homo sapiens
  misc_RNA (1)...(19): siRNA sense strand
ggaaugauagaucgacaag

SEQ ID NO: 1072419 - RNA, 19 nt, Homo sapiens
  misc_RNA (1)...(19): siRNA sense strand
gaauuauggagaauccuau

SEQ ID NO: 1072420 - RNA, 19 nt, Homo sapiens
  misc_RNA (1)...(19): siRNA sense strand
gaagauuccaaacuagaag

SEQ ID NO: 1072421 - RNA, 19 nt, Homo sapiens
  misc_RNA (1)...(19): siRNA sense strand
ggacccaccuccuggauua

SEQ ID NO: 1072422 - RNA, 19 nt, Homo sapiens
  misc_RNA (1)...(19): siRNA sense strand
gcaguucccugagcauuga

SEQ ID NO: 1072423 - RNA, 19 nt, Homo sapiens
  misc_RNA (1)...(19): siRNA sense strand
gacagcaacuccaacuuca

SEQ ID NO: 1072424 - RNA, 19 nt, Homo sapiens
  misc_RNA (1)...(19): siRNA sense strand
acaaagagcaggagaagga

SEQ ID NO: 1072425 - RNA, 19 nt, Homo sapiens
  misc_RNA (1)...(19): siRNA sense strand
caaggaugcuaacgagaau

SEQ ID NO: 1072426 - RNA, 19 nt, Homo sapiens
  misc_RNA (1)...(19): siRNA sense strand
ccaaggaugcuaacgagaa

SEQ ID NO: 1072427 - RNA, 19 nt, Homo sapiens
  misc_RNA (1)...(19): siRNA sense strand
gagcuucgacaccauccua

SEQ ID NO: 1072428 - RNA, 19 nt, Homo sapiens
  misc_RNA (1)...(19): siRNA sense strand
cagcaacuccaacuucaug

SEQ ID NO: 1072429 - RNA, 19 nt, Homo sapiens
  misc_RNA (1)...(19): siRNA sense strand
caagugccaaggaugcuaa

SEQ ID NO: 1072430 - RNA, 19 nt, Homo sapiens
  misc_RNA (1)...(19): siRNA sense strand
agacagcaacuccaacuuc

SEQ ID NO: 1072431 - RNA, 19 nt, Homo sapiens
  misc_RNA (1)...(19): siRNA sense strand
gcaagugccaaggaugcua

SEQ ID NO: 1072432 - RNA, 19 nt, Homo sapiens
  misc_RNA (1)...(19): siRNA sense strand
uccaggagcgcuacaaaga

SEQ ID NO: 1072433 - RNA, 19 nt, Homo sapiens
  misc_RNA (1)...(19): siRNA sense strand
gcuacaaagagcaggagaa

SEQ ID NO: 1072434 - RNA, 19 nt, Homo sapiens
  misc_RNA (1)...(19): siRNA sense strand
caaagagcaggagaaggaa

SEQ ID NO: 1072435 - RNA, 19 nt, Homo sapiens
  misc_RNA (1)...(19): siRNA sense strand
caggcagaguggaaccuau

SEQ ID NO: 1072436 - RNA, 19 nt, Homo sapiens
  misc_RNA (1)...(19): siRNA sense strand
ccucugagucacccucuga

SEQ ID NO: 1072437 - RNA, 19 nt, Homo sapiens
  misc_RNA (1)...(19): siRNA sense strand
gacaaccggaaggagcuua

SEQ ID NO: 1072438 - RNA, 19 nt, Homo sapiens
  misc_RNA (1)...(19): siRNA sense strand
cuacaaagagcaggagaag

SEQ ID NO: 1072439 - RNA, 19 nt, Homo sapiens
  misc_RNA (1)...(19): siRNA sense strand
gcagagagaugcagaguuc

SEQ ID NO: 1072440 - RNA, 19 nt, Homo sapiens
  misc_RNA (1)...(19): siRNA sense strand
gaaaauggguugcagaaaa

SEQ ID NO: 1072441 - RNA, 19 nt, Homo sapiens
  misc_RNA (1)...(19): siRNA sense strand
guaaaucccuggucccauu

SEQ ID NO: 1072442 - RNA, 19 nt, Homo sapiens
  misc_RNA (1)...(19): siRNA sense strand
agaggcagcuccuuaauaa

SEQ ID NO: 1072443 - RNA, 19 nt, Homo sapiens
  misc_RNA (1)...(19): siRNA sense strand
gcacaagacuucagaugca

SEQ ID NO: 1072444 - RNA, 19 nt, Homo sapiens
  misc_RNA (1)...(19): siRNA sense strand
gcugaaagccugaauaguu

SEQ ID NO: 1072445 - RNA, 19 nt, Homo sapiens
  misc_RNA (1)...(19): siRNA sense strand
aagagaagcuuaguccuua

SEQ ID NO: 1072446 - RNA, 19 nt, Homo sapiens
  misc_RNA (1)...(19): siRNA sense strand
gaggaugcauucauuguga

SEQ ID NO: 1072447 - RNA, 19 nt, Homo sapiens
  misc_RNA (1)...(19): siRNA sense strand
gaaugaauguggccaagga

SEQ ID NO: 1072448 - RNA, 19 nt, Homo sapiens
  misc_RNA (1)...(19): siRNA sense strand
gaccaaugcuuuccaccua

SEQ ID NO: 1072449 - RNA, 19 nt, Homo sapiens
  misc_RNA (1)...(19): siRNA sense strand
guaccuccaucacuguuua

SEQ ID NO: 1072450 - RNA, 19 nt, Homo sapiens
  misc_RNA (1)...(19): siRNA sense strand
cagaagaaaucacuguuug

SEQ ID NO: 1072451 - RNA, 19 nt, Homo sapiens
  misc_RNA (1)...(19): siRNA sense strand
ggaaagccauugcugaaag

SEQ ID NO: 1072452 - RNA, 19 nt, Homo sapiens
  misc_RNA (1)...(19): siRNA sense strand
caucaagucuucagaaaca

SEQ ID NO: 1072453 - RNA, 19 nt, Homo sapiens
  misc_RNA (1)...(19): siRNA sense strand
caggaaagcucaauuaaaa

SEQ ID NO: 1072454 - RNA, 19 nt, Homo sapiens
  misc_RNA (1)...(19): siRNA sense strand
cagcuaaguuccucugaaa

SEQ ID NO: 1072455 - RNA, 19 nt, Homo sapiens
  misc_RNA (1)...(19): siRNA sense strand
ccaaggagauggaccugaa

SEQ ID NO: 1072456 - RNA, 19 nt, Homo sapiens
  misc_RNA (1)...(19): siRNA sense strand
ggaagaugcugagaaggaa

SEQ ID NO: 1072457 - RNA, 19 nt, Homo sapiens
  misc_RNA (1)...(19): siRNA sense strand
gauggagucagaauaauaa

SEQ ID NO: 1072458 - RNA, 19 nt, Homo sapiens
  misc_RNA (1)...(19): siRNA sense strand
caaggaagaugcugagaag

SEQ ID NO: 1072459 - RNA, 19 nt, Homo sapiens
  misc_RNA (1)...(19): siRNA sense strand
gaagaaggauguggaaacu

SEQ ID NO: 1072460 - RNA, 19 nt, Homo sapiens
  misc_RNA (1)...(19): siRNA sense strand
gacaucaagucuucagaaa

SEQ ID NO: 1072461 - RNA, 19 nt, Homo sapiens
  misc_RNA (1)...(19): siRNA sense strand
ggaagagcauguucaacug

SEQ ID NO: 1072462 - RNA, 19 nt, Homo sapiens
  misc_RNA (1)...(19): siRNA sense strand
gaguagacccuaaccagua

SEQ ID NO: 1072463 - RNA, 19 nt, Homo sapiens
  misc_RNA (1)...(19): siRNA sense strand
aaacgaggcugaggaaaga

SEQ ID NO: 1072464 - RNA, 19 nt, Homo sapiens
  misc_RNA (1)...(19): siRNA sense strand
gcucagaggcagcuccuua

SEQ ID NO: 1072465 - RNA, 19 nt, Homo sapiens
  misc_RNA (1)...(19): siRNA sense strand
ggauggagucagaauaaua

SEQ ID NO: 1072466 - RNA, 19 nt, Homo sapiens
  misc_RNA (1)...(19): siRNA sense strand
uaugggagaugaagacaaa

SEQ ID NO: 1072467 - RNA, 19 nt, Homo sapiens
  misc_RNA (1)...(19): siRNA sense strand
uuuaaaggcucacauauca

SEQ ID NO: 1072468 - RNA, 19 nt, Homo sapiens
  misc_RNA (1)...(19): siRNA sense strand
gcagaagaaaucacuguuu

SEQ ID NO: 1072469 - RNA, 19 nt, Homo sapiens
  misc_RNA (1)...(19): siRNA sense strand
gacagaagaagaacaguuu

SEQ ID NO: 1072470 - RNA, 19 nt, Homo sapiens
  misc_RNA (1)...(19): siRNA sense strand
cagaagauaugggagauga

SEQ ID NO: 1072471 - RNA, 19 nt, Homo sapiens
  misc_RNA (1)...(19): siRNA sense strand
ggacacaucuaggcacugu

SEQ ID NO: 1072472 - RNA, 19 nt, Homo sapiens
  misc_RNA (1)...(19): siRNA sense strand
guacugcaauggucugaug

SEQ ID NO: 1072473 - RNA, 19 nt, Homo sapiens
  misc_RNA (1)...(19): siRNA sense strand
gaggagcucuugaggaaag

SEQ ID NO: 1072474 - RNA, 19 nt, Homo sapiens
  misc_RNA (1)...(19): siRNA sense strand
acaagaaugagaaguguua

SEQ ID NO: 1072475 - RNA, 19 nt, Homo sapiens
  misc_RNA (1)...(19): siRNA sense strand
ccaagggauuguugaagaa

SEQ ID NO: 1072476 - RNA, 19 nt, Homo sapiens
  misc_RNA (1)...(19): siRNA sense strand
agacuucucuagacauuga

SEQ ID NO: 1072477 - RNA, 19 nt, Homo sapiens
  misc_RNA (1)...(19): siRNA sense strand
gaggaaagccauugcugaa

SEQ ID NO: 1072478 - RNA, 19 nt, Homo sapiens
  misc_RNA (1)...(19): siRNA sense strand
gaaacgaggcugaggaaag

SEQ ID NO: 1072479 - RNA, 19 nt, Homo sapiens
  misc_RNA (1)...(19): siRNA sense strand
cugaaagccugaauaguug

SEQ ID NO: 1072480 - RNA, 19 nt, Homo sapiens
  misc_RNA (1)...(19): siRNA sense strand
uuaaagaagucuccgaauc

SEQ ID NO: 1072481 - RNA, 19 nt, Homo sapiens
  misc_RNA (1)...(19): siRNA sense strand
ccagacuucucuagacauu

SEQ ID NO: 1072482 - RNA, 19 nt, Homo sapiens
  misc_RNA (1)...(19): siRNA sense strand
gagaaguguuaccucugua

SEQ ID NO: 1072483 - RNA, 19 nt, Homo sapiens
  misc_RNA (1)...(19): siRNA sense strand
caaaagagccugaaaaugg

SEQ ID NO: 1072484 - RNA, 19 nt, Homo sapiens
  misc_RNA (1)...(19): siRNA sense strand
gagaaggaaguagcuauuu

SEQ ID NO: 1072485 - RNA, 19 nt, Homo sapiens
  misc_RNA (1)...(19): siRNA sense strand
gaaccaguguuaccuagac

SEQ ID NO: 1072486 - RNA, 19 nt, Homo sapiens
  misc_RNA (1)...(19): siRNA sense strand
uaucuuggauggagucaga

SEQ ID NO: 1072487 - RNA, 19 nt, Homo sapiens
  misc_RNA (1)...(19): siRNA sense strand
uagcagagauaucuuggau

SEQ ID NO: 1072488 - RNA, 19 nt, Homo sapiens
  misc_RNA (1)...(19): siRNA sense strand
ccaggaaagcucaauuaaa

SEQ ID NO: 1072489 - RNA, 19 nt, Homo sapiens
  misc_RNA (1)...(19): siRNA sense strand
cgucgugacuuaaaugaau

SEQ ID NO: 1072490 - RNA, 19 nt, Homo sapiens
  misc_RNA (1)...(19): siRNA sense strand
ggacagcugcccagacuuc

SEQ ID NO: 1072491 - RNA, 19 nt, Homo sapiens
  misc_RNA (1)...(19): siRNA sense strand
ggagguugguaacaaggaa

SEQ ID NO: 1072492 - RNA, 19 nt, Homo sapiens
  misc_RNA (1)...(19): siRNA sense strand
gaaccaacaaccagucaug

SEQ ID NO: 1072493 - RNA, 19 nt, Homo sapiens
  misc_RNA (1)...(19): siRNA sense strand
cagaggcagcuccuuaaua

SEQ ID NO: 1072494 - RNA, 19 nt, Homo sapiens
  misc_RNA (1)...(19): siRNA sense strand
gaagaaaucacuguuuguc

SEQ ID NO: 1072495 - RNA, 19 nt, Homo sapiens
  misc_RNA (1)...(19): siRNA sense strand
ucgcacagaugacagaaga

SEQ ID NO: 1072496 - RNA, 19 nt, Homo sapiens
  misc_RNA (1)...(19): siRNA sense strand
ugagaaguguuaccucugu

SEQ ID NO: 1072497 - RNA, 19 nt, Homo sapiens
  misc_RNA (1)...(19): siRNA sense strand
uaaagaagucuccgaaucu

SEQ ID NO: 1072498 - RNA, 19 nt, Homo sapiens
  misc_RNA (1)...(19): siRNA sense strand
ggacuccugucuccagcuu

SEQ ID NO: 1072499 - RNA, 19 nt, Homo sapiens
  misc_RNA (1)...(19): siRNA sense strand
gauggaggaagauacagua

SEQ ID NO: 1072500 - RNA, 19 nt, Homo sapiens
  misc_RNA (1)...(19): siRNA sense strand
agaaggaaguagcuauuuc

SEQ ID NO: 1072501 - RNA, 19 nt, Homo sapiens
  misc_RNA (1)...(19): siRNA sense strand
cagauaaggagguugguaa

SEQ ID NO: 1072502 - RNA, 19 nt, Homo sapiens
  misc_RNA (1)...(19): siRNA sense strand
ggagucagaauaauaaugg

SEQ ID NO: 1072503 - RNA, 19 nt, Homo sapiens
  misc_RNA (1)...(19): siRNA sense strand
aaaugaaucucccgucaag

SEQ ID NO: 1072504 - RNA, 19 nt, Homo sapiens
  misc_RNA (1)...(19): siRNA sense strand
ugcaaaggcugaccaagga

SEQ ID NO: 1072505 - RNA, 19 nt, Homo sapiens
  misc_RNA (1)...(19): siRNA sense strand
cgaauagagcaaaguguuu

SEQ ID NO: 1072506 - RNA, 19 nt, Homo sapiens
  misc_RNA (1)...(19): siRNA sense strand
agaaggauguggaaacuac

SEQ ID NO: 1072507 - RNA, 19 nt, Homo sapiens
  misc_RNA (1)...(19): siRNA sense strand
ugacaagaaugagaagugu

SEQ ID NO: 1072508 - RNA, 19 nt, Homo sapiens
  misc_RNA (1)...(19): siRNA sense strand
gaaggaaguagcuauuucu

SEQ ID NO: 1072509 - RNA, 19 nt, Homo sapiens
  misc_RNA (1)...(19): siRNA sense strand
cccaagggauuguugaaga

SEQ ID NO: 1072510 - RNA, 19 nt, Homo sapiens
  misc_RNA (1)...(19): siRNA sense strand
uugagaaugugaacguuaa

SEQ ID NO: 1072511 - RNA, 19 nt, Homo sapiens
  misc_RNA (1)...(19): siRNA sense strand
ccagucccaucaagagaaa

SEQ ID NO: 1072512 - RNA, 19 nt, Homo sapiens
  misc_RNA (1)...(19): siRNA sense strand
ggaacagucugagcacaag

SEQ ID NO: 1072513 - RNA, 19 nt, Homo sapiens
  misc_RNA (1)...(19): siRNA sense strand
ggagaagaaggauguggaa

SEQ ID NO: 1072514 - RNA, 19 nt, Homo sapiens
  misc_RNA (1)...(19): siRNA sense strand
gaagaggaagcguagacuu

SEQ ID NO: 1072515 - RNA, 19 nt, Homo sapiens
  misc_RNA (1)...(19): siRNA sense strand
gaaugugaacguuaaaucu

SEQ ID NO: 1072516 - RNA, 19 nt, Homo sapiens
  misc_RNA (1)...(19): siRNA sense strand
cgauagugauggagaggaa

SEQ ID NO: 1072517 - RNA, 19 nt, Homo sapiens
  misc_RNA (1)...(19): siRNA sense strand
gaaagccauugcugaaagc

SEQ ID NO: 1072518 - RNA, 19 nt, Homo sapiens
  misc_RNA (1)...(19): siRNA sense strand
gagagaugcagaguucuuu

SEQ ID NO: 1072519 - RNA, 19 nt, Homo sapiens
  misc_RNA (1)...(19): siRNA sense strand
gaagagcauguucaacugu

SEQ ID NO: 1072520 - RNA, 19 nt, Homo sapiens
  misc_RNA (1)...(19): siRNA sense strand
auaaggagguugguaacaa

SEQ ID NO: 1072521 - RNA, 19 nt, Homo sapiens
  misc_RNA (1)...(19): siRNA sense strand
agagcaggcuagugagaaa

SEQ ID NO: 1072522 - RNA, 19 nt, Homo sapiens
  misc_RNA (1)...(19): siRNA sense strand
uaaggagguugguaacaag

SEQ ID NO: 1072523 - RNA, 19 nt, Homo sapiens
  misc_RNA (1)...(19): siRNA sense strand
gaacagccaggaggaggaa

SEQ ID NO: 1072524 - RNA, 19 nt, Homo sapiens
  misc_RNA (1)...(19): siRNA sense strand
gagcacaagacuucagaug

SEQ ID NO: 1072525 - RNA, 19 nt, Homo sapiens
  misc_RNA (1)...(19): siRNA sense strand
cugaagaacccaaaggaaa

SEQ ID NO: 1072526 - RNA, 19 nt, Homo sapiens
  misc_RNA (1)...(19): siRNA sense strand
gcccagacuucucuagaca

SEQ ID NO: 1072527 - RNA, 19 nt, Homo sapiens
  misc_RNA (1)...(19): siRNA sense strand
gcuaugugaccaaugcuuu

SEQ ID NO: 1072528 - RNA, 19 nt, Homo sapiens
  misc_RNA (1)...(19): siRNA sense strand
gcagauaaggagguuggua

SEQ ID NO: 1072529 - RNA, 19 nt, Homo sapiens
  misc_RNA (1)...(19): siRNA sense strand
guaccugcuucacaaagug

SEQ ID NO: 1072530 - RNA, 19 nt, Homo sapiens
  misc_RNA (1)...(19): siRNA sense strand
gaagauaugggagaugaag

SEQ ID NO: 1072531 - RNA, 19 nt, Homo sapiens
  misc_RNA (1)...(19): siRNA sense strand
caagccagccaguguuuga

SEQ ID NO: 1072532 - RNA, 19 nt, Homo sapiens
  misc_RNA (1)...(19): siRNA sense strand
aaggagagcaggcuaguga

SEQ ID NO: 1072533 - RNA, 19 nt, Homo sapiens
  misc_RNA (1)...(19): siRNA sense strand
acagaugacagaagaagaa

SEQ ID NO: 1072534 - RNA, 19 nt, Homo sapiens
  misc_RNA (1)...(19): siRNA sense strand
aaucucccgucaagucuuu

SEQ ID NO: 1072535 - RNA, 19 nt, Homo sapiens
  misc_RNA (1)...(19): siRNA sense strand
ggagagcaggcuagugaga

SEQ ID NO: 1072536 - RNA, 19 nt, Homo sapiens
  misc_RNA (1)...(19): siRNA sense strand
gcaucugacuggcacucaa

SEQ ID NO: 1072537 - RNA, 19 nt, Homo sapiens
  misc_RNA (1)...(19): siRNA sense strand
gaugcagaguucuuucaca

SEQ ID NO: 1072538 - RNA, 19 nt, Homo sapiens
  misc_RNA (1)...(19): siRNA sense strand
ggaugcauucauugugaua

SEQ ID NO: 1072539 - RNA, 19 nt, Homo sapiens
  misc_RNA (1)...(19): siRNA sense strand
ggaaucagcuagagaagua

SEQ ID NO: 1072540 - RNA, 19 nt, Homo sapiens
  misc_RNA (1)...(19): siRNA sense strand
cgaauguucucaccuauua

SEQ ID NO: 1072541 - RNA, 19 nt, Homo sapiens
  misc_RNA (1)...(19): siRNA sense strand
gaagaaaccugucgacaag

SEQ ID NO: 1072542 - RNA, 19 nt, Homo sapiens
  misc_RNA (1)...(19): siRNA sense strand
gaaugugucuucuuuauca

SEQ ID NO: 1072543 - RNA, 19 nt, Homo sapiens
  misc_RNA (1)...(19): siRNA sense strand
ucaaauggcucaaagaaau

SEQ ID NO: 1072544 - RNA, 19 nt, Homo sapiens
  misc_RNA (1)...(19): siRNA sense strand
gcaaugguauggagagauu

SEQ ID NO: 1072545 - RNA, 19 nt, Homo sapiens
  misc_RNA (1)...(19): siRNA sense strand
ggaaguuucucacccauga

SEQ ID NO: 1072546 - RNA, 19 nt, Homo sapiens
  misc_RNA (1)...(19): siRNA sense strand
gaaauggaacuacaagaaa

SEQ ID NO: 1072547 - RNA, 19 nt, Homo sapiens
  misc_RNA (1)...(19): siRNA sense strand
ccgaggagcuggcuaauga

SEQ ID NO: 1072548 - RNA, 19 nt, Homo sapiens
  misc_RNA (1)...(19): siRNA sense strand
gaaagcgacuuggugaauu

SEQ ID NO: 1072549 - RNA, 19 nt, Homo sapiens
  misc_RNA (1)...(19): siRNA sense strand
accaagaacuggaagauua

SEQ ID NO: 1072550 - RNA, 19 nt, Homo sapiens
  misc_RNA (1)...(19): siRNA sense strand
gaagaaagggaaguauaua

SEQ ID NO: 1072551 - RNA, 19 nt, Homo sapiens
  misc_RNA (1)...(19): siRNA sense strand
caagagauccacuguauau

SEQ ID NO: 1072552 - RNA, 19 nt, Homo sapiens
  misc_RNA (1)...(19): siRNA sense strand
ggaagaaagggaaguauau

SEQ ID NO: 1072553 - RNA, 19 nt, Homo sapiens
  misc_RNA (1)...(19): siRNA sense strand
cacaagagauccacuguau

SEQ ID NO: 1072554 - RNA, 19 nt, Homo sapiens
  misc_RNA (1)...(19): siRNA sense strand
ucacugaacucuucuccaa

SEQ ID NO: 1072555 - RNA, 19 nt, Homo sapiens
  misc_RNA (1)...(19): siRNA sense strand
ggaagaaaccugucgacaa

SEQ ID NO: 1072556 - RNA, 19 nt, Homo sapiens
  misc_RNA (1)...(19): siRNA sense strand
cagcagcgaugaagacuug

SEQ ID NO: 1072557 - RNA, 19 nt, Homo sapiens
  misc_RNA (1)...(19): siRNA sense strand
gcuccacucuucuaauaaa

SEQ ID NO: 1072558 - RNA, 19 nt, Homo sapiens
  misc_RNA (1)...(19): siRNA sense strand
gaucaaauggcucaaagaa

SEQ ID NO: 1072559 - RNA, 19 nt, Homo sapiens
  misc_RNA (1)...(19): siRNA sense strand
uuagacaacuggauacaaa

SEQ ID NO: 1072560 - RNA, 19 nt, Homo sapiens
  misc_RNA (1)...(19): siRNA sense strand
ggaaacugguugcgaacuu

SEQ ID NO: 1072561 - RNA, 19 nt, Homo sapiens
  misc_RNA (1)...(19): siRNA sense strand
gccaagaauuccuauaaug

SEQ ID NO: 1072562 - RNA, 19 nt, Homo sapiens
  misc_RNA (1)...(19): siRNA sense strand
gaaacgagaaugugucuuc

SEQ ID NO: 1072563 - RNA, 19 nt, Homo sapiens
  misc_RNA (1)...(19): siRNA sense strand
agaaggaacucuccaaagu

SEQ ID NO: 1072564 - RNA, 19 nt, Homo sapiens
  misc_RNA (1)...(19): siRNA sense strand
gaaacacaccaaggaauuu

SEQ ID NO: 1072565 - RNA, 19 nt, Homo sapiens
  misc_RNA (1)...(19): siRNA sense strand
cggcuccacucuucuaaua

SEQ ID NO: 1072566 - RNA, 19 nt, Homo sapiens
  misc_RNA (1)...(19): siRNA sense strand
aagcaaagcuccggaauca

SEQ ID NO: 1072567 - RNA, 19 nt, Homo sapiens
  misc_RNA (1)...(19): siRNA sense strand
ccaagaauuccuauaauga

SEQ ID NO: 1072568 - RNA, 19 nt, Homo sapiens
  misc_RNA (1)...(19): siRNA sense strand
ggagagauuucccgagaca

SEQ ID NO: 1072569 - RNA, 19 nt, Homo sapiens
  misc_RNA (1)...(19): siRNA sense strand
gggaugaaauugugagcaa

SEQ ID NO: 1072570 - RNA, 19 nt, Homo sapiens
  misc_RNA (1)...(19): siRNA sense strand
ugucuggacuacauuauuu

SEQ ID NO: 1072571 - RNA, 19 nt, Homo sapiens
  misc_RNA (1)...(19): siRNA sense strand
aaagcgacuuggugaauuu

SEQ ID NO: 1072572 - RNA, 19 nt, Homo sapiens
  misc_RNA (1)...(19): siRNA sense strand
gggacgagauggacauaga

SEQ ID NO: 1072573 - RNA, 19 nt, Homo sapiens
  misc_RNA (1)...(19): siRNA sense strand
ucucaagggucuucugaaa

SEQ ID NO: 1072574 - RNA, 19 nt, Homo sapiens
  misc_RNA (1)...(19): siRNA sense strand
gcacccagaucaaccaaag

SEQ ID NO: 1072575 - RNA, 19 nt, Homo sapiens
  misc_RNA (1)...(19): siRNA sense strand
cccaguaccuuauggauga

SEQ ID NO: 1072576 - RNA, 19 nt, Homo sapiens
  misc_RNA (1)...(19): siRNA sense strand
gggaagaaagggaaguaua

SEQ ID NO: 1072577 - RNA, 19 nt, Homo sapiens
  misc_RNA (1)...(19): siRNA sense strand
ugaagacucuggccaaagu

SEQ ID NO: 1072578 - RNA, 19 nt, Homo sapiens
  misc_RNA (1)...(19): siRNA sense strand
ggacuuagccaaugaugag

SEQ ID NO: 1072579 - RNA, 19 nt, Homo sapiens
  misc_RNA (1)...(19): siRNA sense strand
gaaacugguugcgaacuuc

SEQ ID NO: 1072580 - RNA, 19 nt, Homo sapiens
  misc_RNA (1)...(19): siRNA sense strand
caacuaugguggcaagauc

SEQ ID NO: 1072581 - RNA, 19 nt, Homo sapiens
  misc_RNA (1)...(19): siRNA sense strand
aaacuuaggacccaagauu

SEQ ID NO: 1072582 - RNA, 19 nt, Homo sapiens
  misc_RNA (1)...(19): siRNA sense strand
ggaagaagcuggggaugaa

SEQ ID NO: 1072583 - RNA, 19 nt, Homo sapiens
  misc_RNA (1)...(19): siRNA sense strand
uuacggcucucauaaagga

SEQ ID NO: 1072584 - RNA, 19 nt, Homo sapiens
  misc_RNA (1)...(19): siRNA sense strand
cuucauagcaggaauugua

SEQ ID NO: 1072585 - RNA, 19 nt, Homo sapiens
  misc_RNA (1)...(19): siRNA sense strand
caacaaccacacacauuug

SEQ ID NO: 1072586 - RNA, 19 nt, Homo sapiens
  misc_RNA (1)...(19): siRNA sense strand
ggaacucuccaaagucauu

SEQ ID NO: 1072587 - RNA, 19 nt, Homo sapiens
  misc_RNA (1)...(19): siRNA sense strand
ggaaccagcuggacuuagc

SEQ ID NO: 1072588 - RNA, 19 nt, Homo sapiens
  misc_RNA (1)...(19): siRNA sense strand
caacuggauacaaagcuua

SEQ ID NO: 1072589 - RNA, 19 nt, Homo sapiens
  misc_RNA (1)...(19): siRNA sense strand
uuacugaccuguggaaugu

SEQ ID NO: 1072590 - RNA, 19 nt, Homo sapiens
  misc_RNA (1)...(19): siRNA sense strand
ggagucugcugaccuucaa

SEQ ID NO: 1072591 - RNA, 19 nt, Homo sapiens
  misc_RNA (1)...(19): siRNA sense strand
caaccaaagugagaaaugg

SEQ ID NO: 1072592 - RNA, 19 nt, Homo sapiens
  misc_RNA (1)...(19): siRNA sense strand
gugagacagugguacguaa

SEQ ID NO: 1072593 - RNA, 19 nt, Homo sapiens
  misc_RNA (1)...(19): siRNA sense strand
ggaagauuauccugugucu

SEQ ID NO: 1072594 - RNA, 19 nt, Homo sapiens
  misc_RNA (1)...(19): siRNA sense strand
ggagcuggcuaaugaguac

SEQ ID NO: 1072595 - RNA, 19 nt, Homo sapiens
  misc_RNA (1)...(19): siRNA sense strand
gacaacaaccacacacauu

SEQ ID NO: 1072596 - RNA, 19 nt, Homo sapiens
  misc_RNA (1)...(19): siRNA sense strand
caagaaacacaccaaggaa

SEQ ID NO: 1072597 - RNA, 19 nt, Homo sapiens
  misc_RNA (1)...(19): siRNA sense strand
ggugggcuguggcuuugua

SEQ ID NO: 1072598 - RNA, 19 nt, Homo sapiens
  misc_RNA (1)...(19): siRNA sense strand
gggacacccucaucaggaa

SEQ ID NO: 1072599 - RNA, 19 nt, Homo sapiens
  misc_RNA (1)...(19): siRNA sense strand
agaaauggaacuacaagaa

SEQ ID NO: 1072600 - RNA, 19 nt, Homo sapiens
  misc_RNA (1)...(19): siRNA sense strand
gggagggugucaugaagga

SEQ ID NO: 1072601 - RNA, 19 nt, Homo sapiens
  misc_RNA (1)...(19): siRNA sense strand
cgucuucgcuuacuucuac

SEQ ID NO: 1072602 - RNA, 19 nt, Homo sapiens
  misc_RNA (1)...(19): siRNA sense strand
gcugaucgauguguucuuc

SEQ ID NO: 1072603 - RNA, 19 nt, Homo sapiens
  misc_RNA (1)...(19): siRNA sense strand
ucucgaauguucucaccua

SEQ ID NO: 1072604 - RNA, 19 nt, Homo sapiens
  misc_RNA (1)...(19): siRNA sense strand
auuauggccugaugaagua

SEQ ID NO: 1072605 - RNA, 19 nt, Homo sapiens
  misc_RNA (1)...(19): siRNA sense strand
ccaagaacuucgcccugaa

SEQ ID NO: 1072606 - RNA, 19 nt, Homo sapiens
  misc_RNA (1)...(19): siRNA sense strand
gggagguggugagagauaa

SEQ ID NO: 1072607 - RNA, 19 nt, Homo sapiens
  misc_RNA (1)...(19): siRNA sense strand
cuguugagcuguucacuga

SEQ ID NO: 1072608 - RNA, 19 nt, Homo sapiens
  misc_RNA (1)...(19): siRNA sense strand
cgacgugucuccuauuacu

SEQ ID NO: 1072609 - RNA, 19 nt, Homo sapiens
  misc_RNA (1)...(19): siRNA sense strand
cuccuacgcucuauacaaa

SEQ ID NO: 1072610 - RNA, 19 nt, Homo sapiens
  misc_RNA (1)...(19): siRNA sense strand
caaauggcucaaagaaauu

SEQ ID NO: 1072611 - RNA, 19 nt, Homo sapiens
  misc_RNA (1)...(19): siRNA sense strand
caucaauaccuccaucaaa

SEQ ID NO: 1072612 - RNA, 19 nt, Homo sapiens
  misc_RNA (1)...(19): siRNA sense strand
ggaguucagaggagaauau

SEQ ID NO: 1072613 - RNA, 19 nt, Homo sapiens
  misc_RNA (1)...(19): siRNA sense strand
agacaaggauaacuggaau

SEQ ID NO: 1072614 - RNA, 19 nt, Homo sapiens
  misc_RNA (1)...(19): siRNA sense strand
aaggaacucuccaaaguca

SEQ ID NO: 1072615 - RNA, 19 nt, Homo sapiens
  misc_RNA (1)...(19): siRNA sense strand
gaaggaacucuccaaaguc

SEQ ID NO: 1072616 - RNA, 19 nt, Homo sapiens
  misc_RNA (1)...(19): siRNA sense strand
acaacaaccacacacauuu

SEQ ID NO: 1072617 - RNA, 19 nt, Homo sapiens
  misc_RNA (1)...(19): siRNA sense strand
cgauuuagacaacuggaua

SEQ ID NO: 1072618 - RNA, 19 nt, Homo sapiens
  misc_RNA (1)...(19): siRNA sense strand
cauagcaggaauuguauuu

SEQ ID NO: 1072619 - RNA, 19 nt, Homo sapiens
  misc_RNA (1)...(19): siRNA sense strand
gguacuauguggcguucuu

SEQ ID NO: 1072620 - RNA, 19 nt, Homo sapiens
  misc_RNA (1)...(19): siRNA sense strand
gcuguggcuuuguaucauu

SEQ ID NO: 1072621 - RNA, 19 nt, Homo sapiens
  misc_RNA (1)...(19): siRNA sense strand
uaagaaggaacucuccaaa

SEQ ID NO: 1072622 - RNA, 19 nt, Homo sapiens
  misc_RNA (1)...(19): siRNA sense strand
agaaacacaccaaggaauu

SEQ ID NO: 1072623 - RNA, 19 nt, Homo sapiens
  misc_RNA (1)...(19): siRNA sense strand
gauacaaagcuuaaugauc

SEQ ID NO: 1072624 - RNA, 19 nt, Homo sapiens
  misc_RNA (1)...(19): siRNA sense strand
ggugugcaucuacauguua

SEQ ID NO: 1072625 - RNA, 19 nt, Homo sapiens
  misc_RNA (1)...(19): siRNA sense strand
gaacagaaggaaugacacu

SEQ ID NO: 1072626 - RNA, 19 nt, Homo sapiens
  misc_RNA (1)...(19): siRNA sense strand
gaucaaccaaagugagaaa

SEQ ID NO: 1072627 - RNA, 19 nt, Homo sapiens
  misc_RNA (1)...(19): siRNA sense strand
cacccaaccuggucauuuc

SEQ ID NO: 1072628 - RNA, 19 nt, Homo sapiens
  misc_RNA (1)...(19): siRNA sense strand
ccuggaauguggucuucua

SEQ ID NO: 1072629 - RNA, 19 nt, Homo sapiens
  misc_RNA (1)...(19): siRNA sense strand
cccaugauguccucacuga

SEQ ID NO: 1072630 - RNA, 19 nt, Homo sapiens
  misc_RNA (1)...(19): siRNA sense strand
ggacaacaaccacacacau

SEQ ID NO: 1072631 - RNA, 19 nt, Homo sapiens
  misc_RNA (1)...(19): siRNA sense strand
guucagaggagaauauugu

SEQ ID NO: 1072632 - RNA, 19 nt, Homo sapiens
  misc_RNA (1)...(19): siRNA sense strand
gaagcaaagcuccggaauc

SEQ ID NO: 1072633 - RNA, 19 nt, Homo sapiens
  misc_RNA (1)...(19): siRNA sense strand
gaucucaagggucuucuga

SEQ ID NO: 1072634 - RNA, 19 nt, Homo sapiens
  misc_RNA (1)...(19): siRNA sense strand
ggacgagauggacauagaa

SEQ ID NO: 1072635 - RNA, 19 nt, Homo sapiens
  misc_RNA (1)...(19): siRNA sense strand
gaaagggaaguauauacgu

SEQ ID NO: 1072636 - RNA, 19 nt, Homo sapiens
  misc_RNA (1)...(19): siRNA sense strand
gaugaagacuuggcagaac

SEQ ID NO: 1072637 - RNA, 19 nt, Homo sapiens
  misc_RNA (1)...(19): siRNA sense strand
gauauuccguucggucauc

SEQ ID NO: 1072638 - RNA, 19 nt, Homo sapiens
  misc_RNA (1)...(19): siRNA sense strand
acaagaaacacaccaagga

SEQ ID NO: 1072639 - RNA, 19 nt, Homo sapiens
  misc_RNA (1)...(19): siRNA sense strand
gaaagaacauccucagcua

SEQ ID NO: 1072640 - RNA, 19 nt, Homo sapiens
  misc_RNA (1)...(19): siRNA sense strand
gcaaaugucugaccuggaa

SEQ ID NO: 1072641 - RNA, 19 nt, Homo sapiens
  misc_RNA (1)...(19): siRNA sense strand
ggaaggaggugaggaaugg

SEQ ID NO: 1072642 - RNA, 19 nt, Homo sapiens
  misc_RNA (1)...(19): siRNA sense strand
caagggagacuggccauug

SEQ ID NO: 1072643 - RNA, 19 nt, Homo sapiens
  misc_RNA (1)...(19): siRNA sense strand
ucacgugguuccgagauga

SEQ ID NO: 1072644 - RNA, 19 nt, Homo sapiens
  misc_RNA (1)...(19): siRNA sense strand
gggcagcaccgucuauuac

SEQ ID NO: 1072645 - RNA, 19 nt, Homo sapiens
  misc_RNA (1)...(19): siRNA sense strand
gcagcaccgucuauuacca

SEQ ID NO: 1072646 - RNA, 19 nt, Homo sapiens
  misc_RNA (1)...(19): siRNA sense strand
guuccgagaugaggugguu

SEQ ID NO: 1072647 - RNA, 19 nt, Homo sapiens
  misc_RNA (1)...(19): siRNA sense strand
ccuucgggcuggauucuau

SEQ ID NO: 1072648 - RNA, 19 nt, Homo sapiens
  misc_RNA (1)...(19): siRNA sense strand
gggaaggaggugaggaaug

SEQ ID NO: 1072649 - RNA, 19 nt, Homo sapiens
  misc_RNA (1)...(19): siRNA sense strand
ugagauucguacccuggaa

SEQ ID NO: 1072650 - RNA, 19 nt, Homo sapiens
  misc_RNA (1)...(19): siRNA sense strand
uaccagggcaaaugucuga

SEQ ID NO: 1072651 - RNA, 19 nt, Homo sapiens
  misc_RNA (1)...(19): siRNA sense strand
gcaucuacgugugcagagu

SEQ ID NO: 1072652 - RNA, 19 nt, Homo sapiens
  misc_RNA (1)...(19): siRNA sense strand
cagggaaggaggugaggaa

SEQ ID NO: 1072653 - RNA, 19 nt, Homo sapiens
  misc_RNA (1)...(19): siRNA sense strand
ggcuggugguggagaaaga

SEQ ID NO: 1072654 - RNA, 19 nt, Homo sapiens
  misc_RNA (1)...(19): siRNA sense strand
ugggcagcaccgucuauua

SEQ ID NO: 1072655 - RNA, 19 nt, Homo sapiens
  misc_RNA (1)...(19): siRNA sense strand
aagggagacuggccauugg

SEQ ID NO: 1072656 - RNA, 19 nt, Homo sapiens
  misc_RNA (1)...(19): siRNA sense strand
gagccagaccuuauaauua

SEQ ID NO: 1072657 - RNA, 19 nt, Homo sapiens
  misc_RNA (1)...(19): siRNA sense strand
gaagagaaaccucagacua

SEQ ID NO: 1072658 - RNA, 19 nt, Homo sapiens
  misc_RNA (1)...(19): siRNA sense strand
gaugaacgauugaaacaga

SEQ ID NO: 1072659 - RNA, 19 nt, Homo sapiens
  misc_RNA (1)...(19): siRNA sense strand
cagaugacacuuacuauua

SEQ ID NO: 1072660 - RNA, 19 nt, Homo sapiens
  misc_RNA (1)...(19): siRNA sense strand
gagcaauccugauaagaga

SEQ ID NO: 1072661 - RNA, 19 nt, Homo sapiens
  misc_RNA (1)...(19): siRNA sense strand
auacagagaugaacgauug

SEQ ID NO: 1072662 - RNA, 19 nt, Homo sapiens
  misc_RNA (1)...(19): siRNA sense strand
gagaugaacaggugacuuu

SEQ ID NO: 1072663 - RNA, 19 nt, Homo sapiens
  misc_RNA (1)...(19): siRNA sense strand
ggacggaagcuuacauuga

SEQ ID NO: 1072664 - RNA, 19 nt, Homo sapiens
  misc_RNA (1)...(19): siRNA sense strand
cagaagagcuguucaacgu

SEQ ID NO: 1072665 - RNA, 19 nt, Homo sapiens
  misc_RNA (1)...(19): siRNA sense strand
cagagucgcugaaacuuga

SEQ ID NO: 1072666 - RNA, 19 nt, Homo sapiens
  misc_RNA (1)...(19): siRNA sense strand
ggacacagacucagaagga

SEQ ID NO: 1072667 - RNA, 19 nt, Homo sapiens
  misc_RNA (1)...(19): siRNA sense strand
gauaagagacuucgcuaug

SEQ ID NO: 1072668 - RNA, 19 nt, Homo sapiens
  misc_RNA (1)...(19): siRNA sense strand
gagaaggauuacauugauu

SEQ ID NO: 1072669 - RNA, 19 nt, Homo sapiens
  misc_RNA (1)...(19): siRNA sense strand
gagcuucucugcaugacuu

SEQ ID NO: 1072670 - RNA, 19 nt, Homo sapiens
  misc_RNA (1)...(19): siRNA sense strand
guacaaaggaucaagaaau

SEQ ID NO: 1072671 - RNA, 19 nt, Homo sapiens
  misc_RNA (1)...(19): siRNA sense strand
ugacaaauuuggcaggauu

SEQ ID NO: 1072672 - RNA, 19 nt, Homo sapiens
  misc_RNA (1)...(19): siRNA sense strand
gcaggugccuuacuuugug

SEQ ID NO: 1072673 - RNA, 19 nt, Homo sapiens
  misc_RNA (1)...(19): siRNA sense strand
gacuacauauucugcauuu

SEQ ID NO: 1072674 - RNA, 19 nt, Homo sapiens
  misc_RNA (1)...(19): siRNA sense strand
uacaaaggaucaagaaaug

SEQ ID NO: 1072675 - RNA, 19 nt, Homo sapiens
  misc_RNA (1)...(19): siRNA sense strand
gcaguuagaagaaacaaau

SEQ ID NO: 1072676 - RNA, 19 nt, Homo sapiens
  misc_RNA (1)...(19): siRNA sense strand
gaaaagaagucugagaaug

SEQ ID NO: 1072677 - RNA, 19 nt, Homo sapiens
  misc_RNA (1)...(19): siRNA sense strand
gaagacacaccuccugaga

SEQ ID NO: 1072678 - RNA, 19 nt, Homo sapiens
  misc_RNA (1)...(19): siRNA sense strand
gauuauauccagacuaguu

SEQ ID NO: 1072679 - RNA, 19 nt, Homo sapiens
  misc_RNA (1)...(19): siRNA sense strand
ugacaucacuccagaagag

SEQ ID NO: 1072680 - RNA, 19 nt, Homo sapiens
  misc_RNA (1)...(19): siRNA sense strand
agccagaccuuauaauuau

SEQ ID NO: 1072681 - RNA, 19 nt, Homo sapiens
  misc_RNA (1)...(19): siRNA sense strand
ugacagaugacacuuacua

SEQ ID NO: 1072682 - RNA, 19 nt, Homo sapiens
  misc_RNA (1)...(19): siRNA sense strand
uuucaaaugugacagauga

SEQ ID NO: 1072683 - RNA, 19 nt, Homo sapiens
  misc_RNA (1)...(19): siRNA sense strand
ugacgaagagcuuaagaaa

SEQ ID NO: 1072684 - RNA, 19 nt, Homo sapiens
  misc_RNA (1)...(19): siRNA sense strand
gaaagcagagucgcugaaa

SEQ ID NO: 1072685 - RNA, 19 nt, Homo sapiens
  misc_RNA (1)...(19): siRNA sense strand
uaagagacuucgcuaugau

SEQ ID NO: 1072686 - RNA, 19 nt, Homo sapiens
  misc_RNA (1)...(19): siRNA sense strand
ggaggaggaagaagagaaa

SEQ ID NO: 1072687 - RNA, 19 nt, Homo sapiens
  misc_RNA (1)...(19): siRNA sense strand
agagaaggauuacauugau

SEQ ID NO: 1072688 - RNA, 19 nt, Homo sapiens
  misc_RNA (1)...(19): siRNA sense strand
auaagagacuucgcuauga

SEQ ID NO: 1072689 - RNA, 19 nt, Homo sapiens
  misc_RNA (1)...(19): siRNA sense strand
gacggaagcuuacauugac

SEQ ID NO: 1072690 - RNA, 19 nt, Homo sapiens
  misc_RNA (1)...(19): siRNA sense strand
gagaugaacgauugaaaca

SEQ ID NO: 1072691 - RNA, 19 nt, Homo sapiens
  misc_RNA (1)...(19): siRNA sense strand
agacacaccuccugagagu

SEQ ID NO: 1072692 - RNA, 19 nt, Homo sapiens
  misc_RNA (1)...(19): siRNA sense strand
gaaacaaauacccagaaga

SEQ ID NO: 1072693 - RNA, 19 nt, Homo sapiens
  misc_RNA (1)...(19): siRNA sense strand
ggaacuccacguacaguga

SEQ ID NO: 1072694 - RNA, 19 nt, Homo sapiens
  misc_RNA (1)...(19): siRNA sense strand
gcuacaccauuucuagaga

SEQ ID NO: 1072695 - RNA, 19 nt, Homo sapiens
  misc_RNA (1)...(19): siRNA sense strand
agaaaccucagacuacaua

SEQ ID NO: 1072696 - RNA, 19 nt, Homo sapiens
  misc_RNA (1)...(19): siRNA sense strand
gaucaagaaaugcagaaau

SEQ ID NO: 1072697 - RNA, 19 nt, Homo sapiens
  misc_RNA (1)...(19): siRNA sense strand
uagagaaggauuacauuga

SEQ ID NO: 1072698 - RNA, 19 nt, Homo sapiens
  misc_RNA (1)...(19): siRNA sense strand
gaagaagagaaaccucaga

SEQ ID NO: 1072699 - RNA, 19 nt, Homo sapiens
  misc_RNA (1)...(19): siRNA sense strand
gcaggauuauacagagaug

SEQ ID NO: 1072700 - RNA, 19 nt, Homo sapiens
  misc_RNA (1)...(19): siRNA sense strand
gcagagucgcugaaacuug

SEQ ID NO: 1072701 - RNA, 19 nt, Homo sapiens
  misc_RNA (1)...(19): siRNA sense strand
caagaaaugcagaaauuac

SEQ ID NO: 1072702 - RNA, 19 nt, Homo sapiens
  misc_RNA (1)...(19): siRNA sense strand
caaauuuggcaggauuaua

SEQ ID NO: 1072703 - RNA, 19 nt, Homo sapiens
  misc_RNA (1)...(19): siRNA sense strand
caauagagaaggauuacau

SEQ ID NO: 1072704 - RNA, 19 nt, Homo sapiens
  misc_RNA (1)...(19): siRNA sense strand
cgagccagaccuuauaauu

SEQ ID NO: 1072705 - RNA, 19 nt, Homo sapiens
  misc_RNA (1)...(19): siRNA sense strand
caaauacccagaagacaca

SEQ ID NO: 1072706 - RNA, 19 nt, Homo sapiens
  misc_RNA (1)...(19): siRNA sense strand
ugccuuacuuuguggauaa

SEQ ID NO: 1072707 - RNA, 19 nt, Homo sapiens
  misc_RNA (1)...(19): siRNA sense strand
gcuguucaacgucuucuuu

SEQ ID NO: 1072708 - RNA, 19 nt, Homo sapiens
  misc_RNA (1)...(19): siRNA sense strand
gaaauuucacccugacaag

SEQ ID NO: 1072709 - RNA, 19 nt, Homo sapiens
  misc_RNA (1)...(19): siRNA sense strand
gacaaauuuggcaggauua

SEQ ID NO: 1072710 - RNA, 19 nt, Homo sapiens
  misc_RNA (1)...(19): siRNA sense strand
agacuucgcuaugaugaau

SEQ ID NO: 1072711 - RNA, 19 nt, Homo sapiens
  misc_RNA (1)...(19): siRNA sense strand
guccugagcaauccugaua

SEQ ID NO: 1072712 - RNA, 19 nt, Homo sapiens
  misc_RNA (1)...(19): siRNA sense strand
cgacggcaccgacaugaga

SEQ ID NO: 1072713 - RNA, 19 nt, Homo sapiens
  misc_RNA (1)...(19): siRNA sense strand
gaaggaggaggaagaagag

SEQ ID NO: 1072714 - RNA, 19 nt, Homo sapiens
  misc_RNA (1)...(19): siRNA sense strand
gagaggacacagacucaga

SEQ ID NO: 1072715 - RNA, 19 nt, Homo sapiens
  misc_RNA (1)...(19): siRNA sense strand
aaacaaauacccagaagac

SEQ ID NO: 1072716 - RNA, 19 nt, Homo sapiens
  misc_RNA (1)...(19): siRNA sense strand
caaaggaucaagaaaugca

SEQ ID NO: 1072717 - RNA, 19 nt, Homo sapiens
  misc_RNA (1)...(19): siRNA sense strand
gaggagcuucucugcauga

SEQ ID NO: 1072718 - RNA, 19 nt, Homo sapiens
  misc_RNA (1)...(19): siRNA sense strand
gaccuugggcuacaccauu

SEQ ID NO: 1072719 - RNA, 19 nt, Homo sapiens
  misc_RNA (1)...(19): siRNA sense strand
agagaaaccucagacuaca

SEQ ID NO: 1072720 - RNA, 19 nt, Homo sapiens
  misc_RNA (1)...(19): siRNA sense strand
gccagaccuuauaauuauu

SEQ ID NO: 1072721 - RNA, 19 nt, Homo sapiens
  misc_RNA (1)...(19): siRNA sense strand
aaagaagucugagaaugag

SEQ ID NO: 1072722 - RNA, 19 nt, Homo sapiens
  misc_RNA (1)...(19): siRNA sense strand
agaaacaaauacccagaag

SEQ ID NO: 1072723 - RNA, 19 nt, Homo sapiens
  misc_RNA (1)...(19): siRNA sense strand
uugauuauauccagacuag

SEQ ID NO: 1072724 - RNA, 19 nt, Homo sapiens
  misc_RNA (1)...(19): siRNA sense strand
gagaugcuagugacgaaga

SEQ ID NO: 1072725 - RNA, 19 nt, Homo sapiens
  misc_RNA (1)...(19): siRNA sense strand
ggaaggagaaacaacaaaa

SEQ ID NO: 1072726 - RNA, 19 nt, Homo sapiens
  misc_RNA (1)...(19): siRNA sense strand
aaaagaagucugagaauga

SEQ ID NO: 1072727 - RNA, 19 nt, Homo sapiens
  misc_RNA (1)...(19): siRNA sense strand
agaaggaggaggaagaaga

SEQ ID NO: 1072728 - RNA, 19 nt, Homo sapiens
  misc_RNA (1)...(19): siRNA sense strand
aaacucgcccugaaauuuc

SEQ ID NO: 1072729 - RNA, 19 nt, Homo sapiens
  misc_RNA (1)...(19): siRNA sense strand
ccucgagccagaccuuaua

SEQ ID NO: 1072730 - RNA, 19 nt, Homo sapiens
  misc_RNA (1)...(19): siRNA sense strand
cgacaugagaggacacaga

SEQ ID NO: 1072731 - RNA, 19 nt, Homo sapiens
  misc_RNA (1)...(19): siRNA sense strand
agaugacacuuacuauuac

SEQ ID NO: 1072732 - RNA, 19 nt, Homo sapiens
  misc_RNA (1)...(19): siRNA sense strand
acagaugacacuuacuauu

SEQ ID NO: 1072733 - RNA, 19 nt, Homo sapiens
  misc_RNA (1)...(19): siRNA sense strand
guucuugugauugugauua

SEQ ID NO: 1072734 - RNA, 19 nt, Homo sapiens
  misc_RNA (1)...(19): siRNA sense strand
gcuagugacgaagagcuua

SEQ ID NO: 1072735 - RNA, 19 nt, Homo sapiens
  misc_RNA (1)...(19): siRNA sense strand
gugccuuacuuuguggaua

SEQ ID NO: 1072736 - RNA, 19 nt, Homo sapiens
  misc_RNA (1)...(19): siRNA sense strand
gcauuuauucagcuacuuc

SEQ ID NO: 1072737 - RNA, 19 nt, Homo sapiens
  misc_RNA (1)...(19): siRNA sense strand
gaaaacucgcccugaaauu

SEQ ID NO: 1072738 - RNA, 19 nt, Homo sapiens
  misc_RNA (1)...(19): siRNA sense strand
ucgagaugcuagugacgaa

SEQ ID NO: 1072739 - RNA, 19 nt, Homo sapiens
  misc_RNA (1)...(19): siRNA sense strand
aaauuuggcaggauuauac

SEQ ID NO: 1072740 - RNA, 19 nt, Homo sapiens
  misc_RNA (1)...(19): siRNA sense strand
uuacauugacgcaguuaga

SEQ ID NO: 1072741 - RNA, 19 nt, Homo sapiens
  misc_RNA (1)...(19): siRNA sense strand
gguacaaaggaucaagaaa

SEQ ID NO: 1072742 - RNA, 19 nt, Homo sapiens
  misc_RNA (1)...(19): siRNA sense strand
acacaccuccugagaguca

SEQ ID NO: 1072743 - RNA, 19 nt, Homo sapiens
  misc_RNA (1)...(19): siRNA sense strand
gggcuacaccauuucuaga

SEQ ID NO: 1072744 - RNA, 19 nt, Homo sapiens
  misc_RNA (1)...(19): siRNA sense strand
cuacuuccaguucuuguga

SEQ ID NO: 1072745 - RNA, 19 nt, Homo sapiens
  misc_RNA (1)...(19): siRNA sense strand
ucaaagcaauaggaaaugc

SEQ ID NO: 1072746 - RNA, 19 nt, Homo sapiens
  misc_RNA (1)...(19): siRNA sense strand
uaugaaauucugggaguuu

SEQ ID NO: 1072747 - RNA, 19 nt, Homo sapiens
  misc_RNA (1)...(19): siRNA sense strand
acagaaaacucgcccugaa

SEQ ID NO: 1072748 - RNA, 19 nt, Homo sapiens
  misc_RNA (1)...(19): siRNA sense strand
aaacuuuccaaacucauug

SEQ ID NO: 1072749 - RNA, 19 nt, Homo sapiens
  misc_RNA (1)...(19): siRNA sense strand
cagagaugaacgauugaaa

SEQ ID NO: 1072750 - RNA, 19 nt, Homo sapiens
  misc_RNA (1)...(19): siRNA sense strand
ggagaaacaacaaaaguca

SEQ ID NO: 1072751 - RNA, 19 nt, Homo sapiens
  misc_RNA (1)...(19): siRNA sense strand
aagagaaaccucagacuac

SEQ ID NO: 1072752 - RNA, 19 nt, Homo sapiens
  misc_RNA (1)...(19): siRNA sense strand
gacagaugacacuuacuau

SEQ ID NO: 1072753 - RNA, 19 nt, Homo sapiens
  misc_RNA (1)...(19): siRNA sense strand
guucaacgucuucuuugga

SEQ ID NO: 1072754 - RNA, 19 nt, Homo sapiens
  misc_RNA (1)...(19): siRNA sense strand
ccacguacagugaggaaca

SEQ ID NO: 1072755 - RNA, 19 nt, Homo sapiens
  misc_RNA (1)...(19): siRNA sense strand
ugaugaauacggagaugaa

SEQ ID NO: 1072756 - RNA, 19 nt, Homo sapiens
  misc_RNA (1)...(19): siRNA sense strand
gaaaugagacaucuucuga

SEQ ID NO: 1072757 - RNA, 19 nt, Homo sapiens
  misc_RNA (1)...(19): siRNA sense strand
ggaagcagguccucccaaa

SEQ ID NO: 1072758 - RNA, 19 nt, Homo sapiens
  misc_RNA (1)...(19): siRNA sense strand
guaggaauuucgcuucuuu

SEQ ID NO: 1072759 - RNA, 19 nt, Homo sapiens
  misc_RNA (1)...(19): siRNA sense strand
caugaaaucucaguugaaa

SEQ ID NO: 1072760 - RNA, 19 nt, Homo sapiens
  misc_RNA (1)...(19): siRNA sense strand
ugagacaucuucugacuau

SEQ ID NO: 1072761 - RNA, 19 nt, Homo sapiens
  misc_RNA (1)...(19): siRNA sense strand
acacagggcagucuaauuu

SEQ ID NO: 1072762 - RNA, 19 nt, Homo sapiens
  misc_RNA (1)...(19): siRNA sense strand
agacaucuucugacuauua

SEQ ID NO: 1072763 - RNA, 19 nt, Homo sapiens
  misc_RNA (1)...(19): siRNA sense strand
gaaaagcuguggaaauaau

SEQ ID NO: 1072764 - RNA, 19 nt, Homo sapiens
  misc_RNA (1)...(19): siRNA sense strand
gaaauaacacacacgacaa

SEQ ID NO: 1072765 - RNA, 19 nt, Homo sapiens
  misc_RNA (1)...(19): siRNA sense strand
ggccauuucuguaggaauu

SEQ ID NO: 1072766 - RNA, 19 nt, Homo sapiens
  misc_RNA (1)...(19): siRNA sense strand
ggagaaaagucuguacuaa

SEQ ID NO: 1072767 - RNA, 19 nt, Homo sapiens
  misc_RNA (1)...(19): siRNA sense strand
ggcaugaaaucucaguuga

SEQ ID NO: 1072768 - RNA, 19 nt, Homo sapiens
  misc_RNA (1)...(19): siRNA sense strand
uaacacacacgacaacuau

SEQ ID NO: 1072769 - RNA, 19 nt, Homo sapiens
  misc_RNA (1)...(19): siRNA sense strand
ucgaaaagcuguggaaaua

SEQ ID NO: 1072770 - RNA, 19 nt, Homo sapiens
  misc_RNA (1)...(19): siRNA sense strand
ugaaguuccucaagaugaa

SEQ ID NO: 1072771 - RNA, 19 nt, Homo sapiens
  misc_RNA (1)...(19): siRNA sense strand
gacaucuucugacuauuau

SEQ ID NO: 1072772 - RNA, 19 nt, Homo sapiens
  misc_RNA (1)...(19): siRNA sense strand
gaccacaaaucugcuguca

SEQ ID NO: 1072773 - RNA, 19 nt, Homo sapiens
  misc_RNA (1)...(19): siRNA sense strand
aaaccgauaaggaacuaua

SEQ ID NO: 1072774 - RNA, 19 nt, Homo sapiens
  misc_RNA (1)...(19): siRNA sense strand
ggaacuauaugaaaacaca

SEQ ID NO: 1072775 - RNA, 19 nt, Homo sapiens
  misc_RNA (1)...(19): siRNA sense strand
gcaugaaaucucaguugaa

SEQ ID NO: 1072776 - RNA, 19 nt, Homo sapiens
  misc_RNA (1)...(19): siRNA sense strand
gaauuucgcuucuuuuacu

SEQ ID NO: 1072777 - RNA, 19 nt, Homo sapiens
  misc_RNA (1)...(19): siRNA sense strand
ggaaaugagacaucuucug

SEQ ID NO: 1072778 - RNA, 19 nt, Homo sapiens
  misc_RNA (1)...(19): siRNA sense strand
acacacacgacaacuauga

SEQ ID NO: 1072779 - RNA, 19 nt, Homo sapiens
  misc_RNA (1)...(19): siRNA sense strand
cuuaaggcaugaaaucuca

SEQ ID NO: 1072780 - RNA, 19 nt, Homo sapiens
  misc_RNA (1)...(19): siRNA sense strand
cuuagugguuuguggaauu

SEQ ID NO: 1072781 - RNA, 19 nt, Homo sapiens
  misc_RNA (1)...(19): siRNA sense strand
ccgauaaggaacuauauga

SEQ ID NO: 1072782 - RNA, 19 nt, Homo sapiens
  misc_RNA (1)...(19): siRNA sense strand
gagaaaagucuguacuaaa

SEQ ID NO: 1072783 - RNA, 19 nt, Homo sapiens
  misc_RNA (1)...(19): siRNA sense strand
uccucaagaugaagauaua

SEQ ID NO: 1072784 - RNA, 19 nt, Homo sapiens
  misc_RNA (1)...(19): siRNA sense strand
uauacauucuuccagauuc

SEQ ID NO: 1072785 - RNA, 19 nt, Homo sapiens
  misc_RNA (1)...(19): siRNA sense strand
cgauaaggaacuauaugaa

SEQ ID NO: 1072786 - RNA, 19 nt, Homo sapiens
  misc_RNA (1)...(19): siRNA sense strand
uaauuuagcggccauuucu

SEQ ID NO: 1072787 - RNA, 19 nt, Homo sapiens
  misc_RNA (1)...(19): siRNA sense strand
ggagaagcagcaggagaaa

SEQ ID NO: 1072788 - RNA, 19 nt, Homo sapiens
  misc_RNA (1)...(19): siRNA sense strand
cgacaacuaugaaaaugug

SEQ ID NO: 1072789 - RNA, 19 nt, Homo sapiens
  misc_RNA (1)...(19): siRNA sense strand
gcagguccucccaaagcua

SEQ ID NO: 1072790 - RNA, 19 nt, Homo sapiens
  misc_RNA (1)...(19): siRNA sense strand
ucccaaagcuaaaggaaaa

SEQ ID NO: 1072791 - RNA, 19 nt, Homo sapiens
  misc_RNA (1)...(19): siRNA sense strand
aaugagacaucuucugacu

SEQ ID NO: 1072792 - RNA, 19 nt, Homo sapiens
  misc_RNA (1)...(19): siRNA sense strand
ugaaacccaagaccacaaa

SEQ ID NO: 1072793 - RNA, 19 nt, Homo sapiens
  misc_RNA (1)...(19): siRNA sense strand
acacacgacaacuaugaaa

SEQ ID NO: 1072794 - RNA, 19 nt, Homo sapiens
  misc_RNA (1)...(19): siRNA sense strand
gaaaacacagggcagucua

SEQ ID NO: 1072795 - RNA, 19 nt, Homo sapiens
  misc_RNA (1)...(19): siRNA sense strand
gaagcagguccucccaaag

SEQ ID NO: 1072796 - RNA, 19 nt, Homo sapiens
  misc_RNA (1)...(19): siRNA sense strand
auacauucuuccagauuca

SEQ ID NO: 1072797 - RNA, 19 nt, Homo sapiens
  misc_RNA (1)...(19): siRNA sense strand
cugaaguuccucaagauga

SEQ ID NO: 1072798 - RNA, 19 nt, Homo sapiens
  misc_RNA (1)...(19): siRNA sense strand
uuagugguuuguggaauug

SEQ ID NO: 1072799 - RNA, 19 nt, Homo sapiens
  misc_RNA (1)...(19): siRNA sense strand
gccacacgauuuaccuuac

SEQ ID NO: 1072800 - RNA, 19 nt, Homo sapiens
  misc_RNA (1)...(19): siRNA sense strand
cagguccucccaaagcuaa

SEQ ID NO: 1072801 - RNA, 19 nt, Homo sapiens
  misc_RNA (1)...(19): siRNA sense strand
aggagaagcagcaggagaa

SEQ ID NO: 1072802 - RNA, 19 nt, Homo sapiens
  misc_RNA (1)...(19): siRNA sense strand
ccgcaucauuggcuuaagg

SEQ ID NO: 1072803 - RNA, 19 nt, Homo sapiens
  misc_RNA (1)...(19): siRNA sense strand
ugccacacgauuuaccuua

SEQ ID NO: 1072804 - RNA, 19 nt, Homo sapiens
  misc_RNA (1)...(19): siRNA sense strand
gaaacccaagaccacaaau

SEQ ID NO: 1072805 - RNA, 19 nt, Homo sapiens
  misc_RNA (1)...(19): siRNA sense strand
gagacaucuucugacuauu

SEQ ID NO: 1072806 - RNA, 19 nt, Homo sapiens
  misc_RNA (1)...(19): siRNA sense strand
auaacacacacgacaacua

SEQ ID NO: 1072807 - RNA, 19 nt, Homo sapiens
  misc_RNA (1)...(19): siRNA sense strand
ugaaaucucaguugaaacc

SEQ ID NO: 1072808 - RNA, 19 nt, Homo sapiens
  misc_RNA (1)...(19): siRNA sense strand
ccaugaagcuuaugaagaa

SEQ ID NO: 1072809 - RNA, 19 nt, Homo sapiens
  misc_RNA (1)...(19): siRNA sense strand
ggaacaacuacgugaauua

SEQ ID NO: 1072810 - RNA, 19 nt, Homo sapiens
  misc_RNA (1)...(19): siRNA sense strand
ggaagaaacaggugcuaaa

SEQ ID NO: 1072811 - RNA, 19 nt, Homo sapiens
  misc_RNA (1)...(19): siRNA sense strand
gaagaagaacuaaggaaga

SEQ ID NO: 1072812 - RNA, 19 nt, Homo sapiens
  misc_RNA (1)...(19): siRNA sense strand
gaacaacuacgugaauuau

SEQ ID NO: 1072813 - RNA, 19 nt, Homo sapiens
  misc_RNA (1)...(19): siRNA sense strand
ugaagaggcuacaggaaga

SEQ ID NO: 1072814 - RNA, 19 nt, Homo sapiens
  misc_RNA (1)...(19): siRNA sense strand
gaagcuuauucacguauga

SEQ ID NO: 1072815 - RNA, 19 nt, Homo sapiens
  misc_RNA (1)...(19): siRNA sense strand
acauaaagcucucagaaag

SEQ ID NO: 1072816 - RNA, 19 nt, Homo sapiens
  misc_RNA (1)...(19): siRNA sense strand
gagauaaagcuaaggaaga

SEQ ID NO: 1072817 - RNA, 19 nt, Homo sapiens
  misc_RNA (1)...(19): siRNA sense strand
ggucguggcagagguauua

SEQ ID NO: 1072818 - RNA, 19 nt, Homo sapiens
  misc_RNA (1)...(19): siRNA sense strand
uaagugaggaugccuauga

SEQ ID NO: 1072819 - RNA, 19 nt, Homo sapiens
  misc_RNA (1)...(19): siRNA sense strand
agauaaagcuaaggaagaa

SEQ ID NO: 1072820 - RNA, 19 nt, Homo sapiens
  misc_RNA (1)...(19): siRNA sense strand
ggaagaggagaaauauuug

SEQ ID NO: 1072821 - RNA, 19 nt, Homo sapiens
  misc_RNA (1)...(19): siRNA sense strand
gaauaugguuaugaugaug

SEQ ID NO: 1072822 - RNA, 19 nt, Homo sapiens
  misc_RNA (1)...(19): siRNA sense strand
gggcaaaggaucaaugaga

SEQ ID NO: 1072823 - RNA, 19 nt, Homo sapiens
  misc_RNA (1)...(19): siRNA sense strand
aaacauaaagcucucagaa

SEQ ID NO: 1072824 - RNA, 19 nt, Homo sapiens
  misc_RNA (1)...(19): siRNA sense strand
caccaacagugccaggaua

SEQ ID NO: 1072825 - RNA, 19 nt, Homo sapiens
  misc_RNA (1)...(19): siRNA sense strand
agaaguaucuugaugucau

SEQ ID NO: 1072826 - RNA, 19 nt, Homo sapiens
  misc_RNA (1)...(19): siRNA sense strand
gaccagaccuaugagacuu

SEQ ID NO: 1072827 - RNA, 19 nt, Homo sapiens
  misc_RNA (1)...(19): siRNA sense strand
caagcaguauccaaaguuc

SEQ ID NO: 1072828 - RNA, 19 nt, Homo sapiens
  misc_RNA (1)...(19): siRNA sense strand
gugcaugcgucgcgccuuu

SEQ ID NO: 1072829 - RNA, 19 nt, Homo sapiens
  misc_RNA (1)...(19): siRNA sense strand
aaagugugccugaauacua

SEQ ID NO: 1072830 - RNA, 19 nt, Homo sapiens
  misc_RNA (1)...(19): siRNA sense strand
gagcuucauguauuaauug

SEQ ID NO: 1072831 - RNA, 19 nt, Homo sapiens
  misc_RNA (1)...(19): siRNA sense strand
caaauaugcccacuugagu

SEQ ID NO: 1072832 - RNA, 19 nt, Homo sapiens
  misc_RNA (1)...(19): siRNA sense strand
acaacuacgugaauuaucu

SEQ ID NO: 1072833 - RNA, 19 nt, Homo sapiens
  misc_RNA (1)...(19): siRNA sense strand
gcaaaggaucaaugagaga

SEQ ID NO: 1072834 - RNA, 19 nt, Homo sapiens
  misc_RNA (1)...(19): siRNA sense strand
agagaaagauagccuggau

SEQ ID NO: 1072835 - RNA, 19 nt, Homo sapiens
  misc_RNA (1)...(19): siRNA sense strand
ggaagcuuauucacguaug

SEQ ID NO: 1072836 - RNA, 19 nt, Homo sapiens
  misc_RNA (1)...(19): siRNA sense strand
ucaaugagagauaaagcua

SEQ ID NO: 1072837 - RNA, 19 nt, Homo sapiens
  misc_RNA (1)...(19): siRNA sense strand
agaaacaggugcuaaaaug

SEQ ID NO: 1072838 - RNA, 19 nt, Homo sapiens
  misc_RNA (1)...(19): siRNA sense strand
cagcuacgcaccagaagaa

SEQ ID NO: 1072839 - RNA, 19 nt, Homo sapiens
  misc_RNA (1)...(19): siRNA sense strand
aaggaucaaugagagauaa

SEQ ID NO: 1072840 - RNA, 19 nt, Homo sapiens
  misc_RNA (1)...(19): siRNA sense strand
agccaaauaugcccacuug

SEQ ID NO: 1072841 - RNA, 19 nt, Homo sapiens
  misc_RNA (1)...(19): siRNA sense strand
gaagaauaugguuaugaug

SEQ ID NO: 1072842 - RNA, 19 nt, Homo sapiens
  misc_RNA (1)...(19): siRNA sense strand
cauaaagcucucagaaaga

SEQ ID NO: 1072843 - RNA, 19 nt, Homo sapiens
  misc_RNA (1)...(19): siRNA sense strand
gcagagggaucagaauagc

SEQ ID NO: 1072844 - RNA, 19 nt, Homo sapiens
  misc_RNA (1)...(19): siRNA sense strand
ugaugaaauucgucaggaa

SEQ ID NO: 1072845 - RNA, 19 nt, Homo sapiens
  misc_RNA (1)...(19): siRNA sense strand
ccaaauaugcccacuugag

SEQ ID NO: 1072846 - RNA, 19 nt, Homo sapiens
  misc_RNA (1)...(19): siRNA sense strand
gaagaaacaggugcuaaaa

SEQ ID NO: 1072847 - RNA, 19 nt, Homo sapiens
  misc_RNA (1)...(19): siRNA sense strand
ugaaauucgucaggaacaa

SEQ ID NO: 1072848 - RNA, 19 nt, Homo sapiens
  misc_RNA (1)...(19): siRNA sense strand
uaaggaagaagaacuaagg

SEQ ID NO: 1072849 - RNA, 19 nt, Homo sapiens
  misc_RNA (1)...(19): siRNA sense strand
ugacagcuacgcaccagaa

SEQ ID NO: 1072850 - RNA, 19 nt, Homo sapiens
  misc_RNA (1)...(19): siRNA sense strand
guuccugacuacaaugaug

SEQ ID NO: 1072851 - RNA, 19 nt, Homo sapiens
  misc_RNA (1)...(19): siRNA sense strand
ugauuccugucaagcagua

SEQ ID NO: 1072852 - RNA, 19 nt, Homo sapiens
  misc_RNA (1)...(19): siRNA sense strand
aagugugccugaauacuau

SEQ ID NO: 1072853 - RNA, 19 nt, Homo sapiens
  misc_RNA (1)...(19): siRNA sense strand
agaccuaugagacuuauga

SEQ ID NO: 1072854 - RNA, 19 nt, Homo sapiens
  misc_RNA (1)...(19): siRNA sense strand
cuacaaugaugaaauucgu

SEQ ID NO: 1072855 - RNA, 19 nt, Homo sapiens
  misc_RNA (1)...(19): siRNA sense strand
caaugagagauaaagcuaa

SEQ ID NO: 1072856 - RNA, 19 nt, Homo sapiens
  misc_RNA (1)...(19): siRNA sense strand
gaagaggcuacaggaagaa

SEQ ID NO: 1072857 - RNA, 19 nt, Homo sapiens
  misc_RNA (1)...(19): siRNA sense strand
aaugagagauaaagcuaag

SEQ ID NO: 1072858 - RNA, 19 nt, Homo sapiens
  misc_RNA (1)...(19): siRNA sense strand
aaagauagccuggauccau

SEQ ID NO: 1072859 - RNA, 19 nt, Homo sapiens
  misc_RNA (1)...(19): siRNA sense strand
cuacgugaauuaucuuacu

SEQ ID NO: 1072860 - RNA, 19 nt, Homo sapiens
  misc_RNA (1)...(19): siRNA sense strand
aagaagaacuaaggaagag

SEQ ID NO: 1072861 - RNA, 19 nt, Homo sapiens
  misc_RNA (1)...(19): siRNA sense strand
ucaagcaguauccaaaguu

SEQ ID NO: 1072862 - RNA, 19 nt, Homo sapiens
  misc_RNA (1)...(19): siRNA sense strand
ccagaagaaugggccacaa

SEQ ID NO: 1072863 - RNA, 19 nt, Homo sapiens
  misc_RNA (1)...(19): siRNA sense strand
aggaacaacuacgugaauu

SEQ ID NO: 1072864 - RNA, 19 nt, Homo sapiens
  misc_RNA (1)...(19): siRNA sense strand
aggcagagggaucagaaua

SEQ ID NO: 1072865 - RNA, 19 nt, Homo sapiens
  misc_RNA (1)...(19): siRNA sense strand
ucaagguucugauggaaaa

SEQ ID NO: 1072866 - RNA, 19 nt, Homo sapiens
  misc_RNA (1)...(19): siRNA sense strand
gaagaaugggccacaacca

SEQ ID NO: 1072867 - RNA, 19 nt, Homo sapiens
  misc_RNA (1)...(19): siRNA sense strand
ccagaccuaugagacuuau

SEQ ID NO: 1072868 - RNA, 19 nt, Homo sapiens
  misc_RNA (1)...(19): siRNA sense strand
gcuaaggaagaagaacuaa

SEQ ID NO: 1072869 - RNA, 19 nt, Homo sapiens
  misc_RNA (1)...(19): siRNA sense strand
gaacaccccuaugguagau

SEQ ID NO: 1072870 - RNA, 19 nt, Homo sapiens
  misc_RNA (1)...(19): siRNA sense strand
guuucaagguucugaugga

SEQ ID NO: 1072871 - RNA, 19 nt, Homo sapiens
  misc_RNA (1)...(19): siRNA sense strand
aacauaaagcucucagaaa

SEQ ID NO: 1072872 - RNA, 19 nt, Homo sapiens
  misc_RNA (1)...(19): siRNA sense strand
gaagaggagaaauauuugc

SEQ ID NO: 1072873 - RNA, 19 nt, Homo sapiens
  misc_RNA (1)...(19): siRNA sense strand
gucaagcaguauccaaagu

SEQ ID NO: 1072874 - RNA, 19 nt, Homo sapiens
  misc_RNA (1)...(19): siRNA sense strand
cuacggucauggaguaagu

SEQ ID NO: 1072875 - RNA, 19 nt, Homo sapiens
  misc_RNA (1)...(19): siRNA sense strand
aaaggaucaaugagagaua

SEQ ID NO: 1072876 - RNA, 19 nt, Homo sapiens
  misc_RNA (1)...(19): siRNA sense strand
caaaggaucaaugagagau

SEQ ID NO: 1072877 - RNA, 19 nt, Homo sapiens
  misc_RNA (1)...(19): siRNA sense strand
gaguacugauuccugucaa

SEQ ID NO: 1072878 - RNA, 19 nt, Homo sapiens
  misc_RNA (1)...(19): siRNA sense strand
caacuacgugaauuaucuu

SEQ ID NO: 1072879 - RNA, 19 nt, Homo sapiens
  misc_RNA (1)...(19): siRNA sense strand
gagagauaaagcuaaggaa

SEQ ID NO: 1072880 - RNA, 19 nt, Homo sapiens
  misc_RNA (1)...(19): siRNA sense strand
ugagagauaaagcuaagga

SEQ ID NO: 1072881 - RNA, 19 nt, Homo sapiens
  misc_RNA (1)...(19): siRNA sense strand
gcugauggcagagaaagau

SEQ ID NO: 1072882 - RNA, 19 nt, Homo sapiens
  misc_RNA (1)...(19): siRNA sense strand
caggaacaacuacgugaau

SEQ ID NO: 1072883 - RNA, 19 nt, Homo sapiens
  misc_RNA (1)...(19): siRNA sense strand
ccugguuccugacuacaau

SEQ ID NO: 1072884 - RNA, 19 nt, Homo sapiens
  misc_RNA (1)...(19): siRNA sense strand
aauaugaugaccagaccua

SEQ ID NO: 1072885 - RNA, 19 nt, Homo sapiens
  misc_RNA (1)...(19): siRNA sense strand
gaggcuacaggaagaaaca

SEQ ID NO: 1072886 - RNA, 19 nt, Homo sapiens
  misc_RNA (1)...(19): siRNA sense strand
gaugaccagaccuaugaga

SEQ ID NO: 1072887 - RNA, 19 nt, Homo sapiens
  misc_RNA (1)...(19): siRNA sense strand
augaugaccagaccuauga

SEQ ID NO: 1072888 - RNA, 19 nt, Homo sapiens
  misc_RNA (1)...(19): siRNA sense strand
ggcagagggaucagaauag

SEQ ID NO: 1072889 - RNA, 19 nt, Homo sapiens
  misc_RNA (1)...(19): siRNA sense strand
gggaagcuuauucacguau

SEQ ID NO: 1072890 - RNA, 19 nt, Homo sapiens
  misc_RNA (1)...(19): siRNA sense strand
uaaagcuaaggaagaagaa

SEQ ID NO: 1072891 - RNA, 19 nt, Homo sapiens
  misc_RNA (1)...(19): siRNA sense strand
agucaugcauuggaagaga

SEQ ID NO: 1072892 - RNA, 19 nt, Homo sapiens
  misc_RNA (1)...(19): siRNA sense strand
cccaugaagcuuaugaaga

SEQ ID NO: 1072893 - RNA, 19 nt, Homo sapiens
  misc_RNA (1)...(19): siRNA sense strand
cuccagcccaugaagcuua

SEQ ID NO: 1072894 - RNA, 19 nt, Homo sapiens
  misc_RNA (1)...(19): siRNA sense strand
auaaagcuaaggaagaaga

SEQ ID NO: 1072895 - RNA, 19 nt, Homo sapiens
  misc_RNA (1)...(19): siRNA sense strand
cuacgcaccagaagaaugg

SEQ ID NO: 1072896 - RNA, 19 nt, Homo sapiens
  misc_RNA (1)...(19): siRNA sense strand
gcuacgcaccagaagaaug

SEQ ID NO: 1072897 - RNA, 19 nt, Homo sapiens
  misc_RNA (1)...(19): siRNA sense strand
gaaauucgucaggaacaac

SEQ ID NO: 1072898 - RNA, 19 nt, Homo sapiens
  misc_RNA (1)...(19): siRNA sense strand
gaaacaggugcuaaaaugu

SEQ ID NO: 1072899 - RNA, 19 nt, Homo sapiens
  misc_RNA (1)...(19): siRNA sense strand
gaaggcaccaccgcaaagg

SEQ ID NO: 1072900 - RNA, 19 nt, Homo sapiens
  misc_RNA (1)...(19): siRNA sense strand
cagcuacgcgacccaaaca

SEQ ID NO: 1072901 - RNA, 19 nt, Homo sapiens
  misc_RNA (1)...(19): siRNA sense strand
uuucaagguucugauggaa

SEQ ID NO: 1072902 - RNA, 19 nt, Homo sapiens
  misc_RNA (1)...(19): siRNA sense strand
cagaaagaguacugauucc

SEQ ID NO: 1072903 - RNA, 19 nt, Homo sapiens
  misc_RNA (1)...(19): siRNA sense strand
ucaggaacaacuacgugaa

SEQ ID NO: 1072904 - RNA, 19 nt, Homo sapiens
  misc_RNA (1)...(19): siRNA sense strand
gggaaucgcucuuauuuau

SEQ ID NO: 1072905 - RNA, 19 nt, Homo sapiens
  misc_RNA (1)...(19): siRNA sense strand
gaucacagccacugccuuu

SEQ ID NO: 1072906 - RNA, 19 nt, Homo sapiens
  misc_RNA (1)...(19): siRNA sense strand
ggaaucgcucuuauuuaua

SEQ ID NO: 1072907 - RNA, 19 nt, Homo sapiens
  misc_RNA (1)...(19): siRNA sense strand
gcaaguggccucggaaauc

SEQ ID NO: 1072908 - RNA, 19 nt, Homo sapiens
  misc_RNA (1)...(19): siRNA sense strand
gugggaaucgcucuuauuu

SEQ ID NO: 1072909 - RNA, 19 nt, Homo sapiens
  misc_RNA (1)...(19): siRNA sense strand
gagaagggcccacgugucu

SEQ ID NO: 1072910 - RNA, 19 nt, Homo sapiens
  misc_RNA (1)...(19): siRNA sense strand
ggaggcugcugcucagagu

SEQ ID NO: 1072911 - RNA, 19 nt, Homo sapiens
  misc_RNA (1)...(19): siRNA sense strand
ggcagucaguucugugugu

SEQ ID NO: 1072912 - RNA, 19 nt, Homo sapiens
  misc_RNA (1)...(19): siRNA sense strand
caaguggccucggaaaucg

SEQ ID NO: 1072913 - RNA, 19 nt, Homo sapiens
  misc_RNA (1)...(19): siRNA sense strand
gagggcaccugagccaauc

SEQ ID NO: 1072914 - RNA, 19 nt, Homo sapiens
  misc_RNA (1)...(19): siRNA sense strand
gcugugggaaucgcucuua

SEQ ID NO: 1072915 - RNA, 19 nt, Homo sapiens
  misc_RNA (1)...(19): siRNA sense strand
gcagguggcagucaguucu

SEQ ID NO: 1072916 - RNA, 19 nt, Homo sapiens
  misc_RNA (1)...(19): siRNA sense strand
ugggaaucgcucuuauuua

SEQ ID NO: 1072917 - RNA, 19 nt, Homo sapiens
  misc_RNA (1)...(19): siRNA sense strand
ggucagacucccugguuca

SEQ ID NO: 1072918 - RNA, 19 nt, Homo sapiens
  misc_RNA (1)...(19): siRNA sense strand
ucacagccacugccuuucu

SEQ ID NO: 1072919 - RNA, 19 nt, Homo sapiens
  misc_RNA (1)...(19): siRNA sense strand
uggccacggucaccaggaa

SEQ ID NO: 1072920 - RNA, 19 nt, Homo sapiens
  misc_RNA (1)...(19): siRNA sense strand
uuaaacaccuuggauuuuc

SEQ ID NO: 1072921 - RNA, 19 nt, Homo sapiens
  misc_RNA (1)...(19): siRNA sense strand
gagcugcgagugggucaga

SEQ ID NO: 1072922 - RNA, 19 nt, Homo sapiens
  misc_RNA (1)...(19): siRNA sense strand
gagccuccacuuccuccaa

SEQ ID NO: 1072923 - RNA, 19 nt, Homo sapiens
  misc_RNA (1)...(19): siRNA sense strand
gagcugaacugggaugaaa

SEQ ID NO: 1072924 - RNA, 19 nt, Homo sapiens
  misc_RNA (1)...(19): siRNA sense strand
caaccuaucugaucucauc

SEQ ID NO: 1072925 - RNA, 19 nt, Homo sapiens
  misc_RNA (1)...(19): siRNA sense strand
gcaaucaacugcccacaca

SEQ ID NO: 1072926 - RNA, 19 nt, Homo sapiens
  misc_RNA (1)...(19): siRNA sense strand
ggcaauugcuucucaggua

SEQ ID NO: 1072927 - RNA, 19 nt, Homo sapiens
  misc_RNA (1)...(19): siRNA sense strand
ggacuuagcagccuccuau

SEQ ID NO: 1072928 - RNA, 19 nt, Homo sapiens
  misc_RNA (1)...(19): siRNA sense strand
ugguucagcuguauaguua

SEQ ID NO: 1072929 - RNA, 19 nt, Homo sapiens
  misc_RNA (1)...(19): siRNA sense strand
gcacaaaggccgcuuaugc

SEQ ID NO: 1072930 - RNA, 19 nt, Homo sapiens
  misc_RNA (1)...(19): siRNA sense strand
gguuagaggcuacagauuu

SEQ ID NO: 1072931 - RNA, 19 nt, Homo sapiens
  misc_RNA (1)...(19): siRNA sense strand
gaugaacugucucacacaa

SEQ ID NO: 1072932 - RNA, 19 nt, Homo sapiens
  misc_RNA (1)...(19): siRNA sense strand
cccagaagcuuccugaguu

SEQ ID NO: 1072933 - RNA, 19 nt, Homo sapiens
  misc_RNA (1)...(19): siRNA sense strand
guuagaggcuacagauuuc

SEQ ID NO: 1072934 - RNA, 19 nt, Homo sapiens
  misc_RNA (1)...(19): siRNA sense strand
gcaccagaauaccaggaaa

SEQ ID NO: 1072935 - RNA, 19 nt, Homo sapiens
  misc_RNA (1)...(19): siRNA sense strand
gcaucagccuggaagagaa

SEQ ID NO: 1072936 - RNA, 19 nt, Homo sapiens
  misc_RNA (1)...(19): siRNA sense strand
ccaguucuauacaagauga

SEQ ID NO: 1072937 - RNA, 19 nt, Homo sapiens
  misc_RNA (1)...(19): siRNA sense strand
gcaccuguaucccacugaa

SEQ ID NO: 1072938 - RNA, 19 nt, Homo sapiens
  misc_RNA (1)...(19): siRNA sense strand
cccaagagcccaagaauuc

SEQ ID NO: 1072939 - RNA, 19 nt, Homo sapiens
  misc_RNA (1)...(19): siRNA sense strand
ggaaacugcagcacagcua

SEQ ID NO: 1072940 - RNA, 19 nt, Homo sapiens
  misc_RNA (1)...(19): siRNA sense strand
cacccaggaugccacaaua

SEQ ID NO: 1072941 - RNA, 19 nt, Homo sapiens
  misc_RNA (1)...(19): siRNA sense strand
gauccaauuucaagaaggu

SEQ ID NO: 1072942 - RNA, 19 nt, Homo sapiens
  misc_RNA (1)...(19): siRNA sense strand
uuagcagccuccuauauug

SEQ ID NO: 1072943 - RNA, 19 nt, Homo sapiens
  misc_RNA (1)...(19): siRNA sense strand
caauacacuuuaaccuuca

SEQ ID NO: 1072944 - RNA, 19 nt, Homo sapiens
  misc_RNA (1)...(19): siRNA sense strand
ccuggagggucuaauaguu

SEQ ID NO: 1072945 - RNA, 19 nt, Homo sapiens
  misc_RNA (1)...(19): siRNA sense strand
cauccaggccugccaguaa

SEQ ID NO: 1072946 - RNA, 19 nt, Homo sapiens
  misc_RNA (1)...(19): siRNA sense strand
ccaccaaccuaucugaucu

SEQ ID NO: 1072947 - RNA, 19 nt, Homo sapiens
  misc_RNA (1)...(19): siRNA sense strand
uauacaagaugaacugucu

SEQ ID NO: 1072948 - RNA, 19 nt, Homo sapiens
  misc_RNA (1)...(19): siRNA sense strand
ccagaagcuuccugaguuc

SEQ ID NO: 1072949 - RNA, 19 nt, Homo sapiens
  misc_RNA (1)...(19): siRNA sense strand
agagaagccugaucccaau

SEQ ID NO: 1072950 - RNA, 19 nt, Homo sapiens
  misc_RNA (1)...(19): siRNA sense strand
ggagacaucagcagcuuca

SEQ ID NO: 1072951 - RNA, 19 nt, Homo sapiens
  misc_RNA (1)...(19): siRNA sense strand
aucagcagcuucagaguuu

SEQ ID NO: 1072952 - RNA, 19 nt, Homo sapiens
  misc_RNA (1)...(19): siRNA sense strand
caagaugaacugucucaca

SEQ ID NO: 1072953 - RNA, 19 nt, Homo sapiens
  misc_RNA (1)...(19): siRNA sense strand
ugcaguggcugauggaaga

SEQ ID NO: 1072954 - RNA, 19 nt, Homo sapiens
  misc_RNA (1)...(19): siRNA sense strand
gaaggucuugccaguucua

SEQ ID NO: 1072955 - RNA, 19 nt, Homo sapiens
  misc_RNA (1)...(19): siRNA sense strand
gugguuauccuggucauuu

SEQ ID NO: 1072956 - RNA, 19 nt, Homo sapiens
  misc_RNA (1)...(19): siRNA sense strand
ccuccuauauuguucugaa

SEQ ID NO: 1072957 - RNA, 19 nt, Homo sapiens
  misc_RNA (1)...(19): siRNA sense strand
caugagaucccaacagucu

SEQ ID NO: 1072958 - RNA, 19 nt, Homo sapiens
  misc_RNA (1)...(19): siRNA sense strand
gauggugguuccagcucuu

SEQ ID NO: 1072959 - RNA, 19 nt, Homo sapiens
  misc_RNA (1)...(19): siRNA sense strand
cuuagcagccuccuauauu

SEQ ID NO: 1072960 - RNA, 19 nt, Homo sapiens
  misc_RNA (1)...(19): siRNA sense strand
ggaauuccuagaacucuca

SEQ ID NO: 1072961 - RNA, 19 nt, Homo sapiens
  misc_RNA (1)...(19): siRNA sense strand
gcccaagagcccaagaauu

SEQ ID NO: 1072962 - RNA, 19 nt, Homo sapiens
  misc_RNA (1)...(19): siRNA sense strand
caucagcagcuucagaguu

SEQ ID NO: 1072963 - RNA, 19 nt, Homo sapiens
  misc_RNA (1)...(19): siRNA sense strand
cuucaaaugcccaggaauu

SEQ ID NO: 1072964 - RNA, 19 nt, Homo sapiens
  misc_RNA (1)...(19): siRNA sense strand
cccaugagaucccaacagu

SEQ ID NO: 1072965 - RNA, 19 nt, Homo sapiens
  misc_RNA (1)...(19): siRNA sense strand
ggugagcuuuguuggcaau

SEQ ID NO: 1072966 - RNA, 19 nt, Homo sapiens
  misc_RNA (1)...(19): siRNA sense strand
caguggagauucccagaag

SEQ ID NO: 1072967 - RNA, 19 nt, Homo sapiens
  misc_RNA (1)...(19): siRNA sense strand
uaauaguuguggagacauc

SEQ ID NO: 1072968 - RNA, 19 nt, Homo sapiens
  misc_RNA (1)...(19): siRNA sense strand
ccaagcagccaaggaguau

SEQ ID NO: 1072969 - RNA, 19 nt, Homo sapiens
  misc_RNA (1)...(19): siRNA sense strand
ucuaauaguuguggagaca

SEQ ID NO: 1072970 - RNA, 19 nt, Homo sapiens
  misc_RNA (1)...(19): siRNA sense strand
gaaauucggcaggcucaag

SEQ ID NO: 1072971 - RNA, 19 nt, Homo sapiens
  misc_RNA (1)...(19): siRNA sense strand
gagaguccaccagcugaaa

SEQ ID NO: 1072972 - RNA, 19 nt, Homo sapiens
  misc_RNA (1)...(19): siRNA sense strand
ggucuugccaguucuauac

SEQ ID NO: 1072973 - RNA, 19 nt, Homo sapiens
  misc_RNA (1)...(19): siRNA sense strand
gagcuuuguuggcaauugc

SEQ ID NO: 1072974 - RNA, 19 nt, Homo sapiens
  misc_RNA (1)...(19): siRNA sense strand
gcagccuccuauauuguuc

SEQ ID NO: 1072975 - RNA, 19 nt, Homo sapiens
  misc_RNA (1)...(19): siRNA sense strand
ccaggaggcaccagaauac

SEQ ID NO: 1072976 - RNA, 19 nt, Homo sapiens
  misc_RNA (1)...(19): siRNA sense strand
ugagaucccaacagucuug

SEQ ID NO: 1072977 - RNA, 19 nt, Homo sapiens
  misc_RNA (1)...(19): siRNA sense strand
cccaggaggcaccagaaua

SEQ ID NO: 1072978 - RNA, 19 nt, Homo sapiens
  misc_RNA (1)...(19): siRNA sense strand
cagcacagcuagaguuccu

SEQ ID NO: 1072979 - RNA, 19 nt, Homo sapiens
  misc_RNA (1)...(19): siRNA sense strand
guggagacaucagcagcuu

SEQ ID NO: 1072980 - RNA, 19 nt, Homo sapiens
  misc_RNA (1)...(19): siRNA sense strand
caccagagccacaggaucu

SEQ ID NO: 1072981 - RNA, 19 nt, Homo sapiens
  misc_RNA (1)...(19): siRNA sense strand
gccagagauugcccuguca

SEQ ID NO: 1072982 - RNA, 19 nt, Homo sapiens
  misc_RNA (1)...(19): siRNA sense strand
aagcagccaaggaguauga

SEQ ID NO: 1072983 - RNA, 19 nt, Homo sapiens
  misc_RNA (1)...(19): siRNA sense strand
uggagggucuaauaguugu

SEQ ID NO: 1072984 - RNA, 19 nt, Homo sapiens
  misc_RNA (1)...(19): siRNA sense strand
ccagaaaacaugaaagaug

SEQ ID NO: 1072985 - RNA, 19 nt, Homo sapiens
  misc_RNA (1)...(19): siRNA sense strand
agucagagggcaccuguau

SEQ ID NO: 1072986 - RNA, 19 nt, Homo sapiens
  misc_RNA (1)...(19): siRNA sense strand
ccaccucauugcucaagag

SEQ ID NO: 1072987 - RNA, 19 nt, Homo sapiens
  misc_RNA (1)...(19): siRNA sense strand
gccuucaaaugcccaggaa

SEQ ID NO: 1072988 - RNA, 19 nt, Homo sapiens
  misc_RNA (1)...(19): siRNA sense strand
ccgcuuaugccucuacugu

SEQ ID NO: 1072989 - RNA, 19 nt, Homo sapiens
  misc_RNA (1)...(19): siRNA sense strand
gaagccugaucccaaucca

SEQ ID NO: 1072990 - RNA, 19 nt, Homo sapiens
  misc_RNA (1)...(19): siRNA sense strand
ucauguagcaacccacuuc

SEQ ID NO: 1072991 - RNA, 19 nt, Homo sapiens
  misc_RNA (1)...(19): siRNA sense strand
ccaaaagaccccagaguuc

SEQ ID NO: 1072992 - RNA, 19 nt, Homo sapiens
  misc_RNA (1)...(19): siRNA sense strand
agacaucagcagcuucaga

SEQ ID NO: 1072993 - RNA, 19 nt, Homo sapiens
  misc_RNA (1)...(19): siRNA sense strand
ccaagagcccaagaauuca

SEQ ID NO: 1072994 - RNA, 19 nt, Homo sapiens
  misc_RNA (1)...(19): siRNA sense strand
caaaagaccccagaguuca

SEQ ID NO: 1072995 - RNA, 19 nt, Homo sapiens
  misc_RNA (1)...(19): siRNA sense strand
cuggagcaaugugaaaguu

SEQ ID NO: 1072996 - RNA, 19 nt, Homo sapiens
  misc_RNA (1)...(19): siRNA sense strand
uuacuggagcaaugugaaa

SEQ ID NO: 1072997 - RNA, 19 nt, Homo sapiens
  misc_RNA (1)...(19): siRNA sense strand
uaugaucuacuccgaaagu

SEQ ID NO: 1072998 - RNA, 19 nt, Homo sapiens
  misc_RNA (1)...(19): siRNA sense strand
ugcaauacacuuuaaccuu

SEQ ID NO: 1072999 - RNA, 19 nt, Homo sapiens
  misc_RNA (1)...(19): siRNA sense strand
cccaagcagccaaggagua

SEQ ID NO: 1073000 - RNA, 19 nt, Homo sapiens
  misc_RNA (1)...(19): siRNA sense strand
ccucuggagccuucaaaug

SEQ ID NO: 1073001 - RNA, 19 nt, Homo sapiens
  misc_RNA (1)...(19): siRNA sense strand
guuccugguucagcuguau

SEQ ID NO: 1073002 - RNA, 19 nt, Homo sapiens
  misc_RNA (1)...(19): siRNA sense strand
acacaagcccagccaccaa

SEQ ID NO: 1073003 - RNA, 19 nt, Homo sapiens
  misc_RNA (1)...(19): siRNA sense strand
ccaggauacuuuugauaau

SEQ ID NO: 1073004 - RNA, 19 nt, Homo sapiens
  misc_RNA (1)...(19): siRNA sense strand
ugagcuuuguuggcaauug

SEQ ID NO: 1073005 - RNA, 19 nt, Homo sapiens
  misc_RNA (1)...(19): siRNA sense strand
ugccaguucuauacaagau

SEQ ID NO: 1073006 - RNA, 19 nt, Homo sapiens
  misc_RNA (1)...(19): siRNA sense strand
caacagagauccuaauuug

SEQ ID NO: 1073007 - RNA, 19 nt, Homo sapiens
  misc_RNA (1)...(19): siRNA sense strand
ggucuaaugucaucaguua

SEQ ID NO: 1073008 - RNA, 19 nt, Homo sapiens
  misc_RNA (1)...(19): siRNA sense strand
gcacaaccacucaaucuua

SEQ ID NO: 1073009 - RNA, 19 nt, Homo sapiens
  misc_RNA (1)...(19): siRNA sense strand
gcaaucauguuaagucuug

SEQ ID NO: 1073010 - RNA, 19 nt, Homo sapiens
  misc_RNA (1)...(19): siRNA sense strand
gcaaucagcucaauacagu

SEQ ID NO: 1073011 - RNA, 19 nt, Homo sapiens
  misc_RNA (1)...(19): siRNA sense strand
gagaauacauugaucuguu

SEQ ID NO: 1073012 - RNA, 19 nt, Homo sapiens
  misc_RNA (1)...(19): siRNA sense strand
ucagaugucucacuacuaa

SEQ ID NO: 1073013 - RNA, 19 nt, Homo sapiens
  misc_RNA (1)...(19): siRNA sense strand
caacaaagcauucuggauu

SEQ ID NO: 1073014 - RNA, 19 nt, Homo sapiens
  misc_RNA (1)...(19): siRNA sense strand
gcacaaaucuaaccaugag

SEQ ID NO: 1073015 - RNA, 19 nt, Homo sapiens
  misc_RNA (1)...(19): siRNA sense strand
ggauaaugcuguaccgauu

SEQ ID NO: 1073016 - RNA, 19 nt, Homo sapiens
  misc_RNA (1)...(19): siRNA sense strand
gaggauggauaaugcugua

SEQ ID NO: 1073017 - RNA, 19 nt, Homo sapiens
  misc_RNA (1)...(19): siRNA sense strand
gcagucagcuccagucucu

SEQ ID NO: 1073018 - RNA, 19 nt, Homo sapiens
  misc_RNA (1)...(19): siRNA sense strand
uaagacaccugaagaacau

SEQ ID NO: 1073019 - RNA, 19 nt, Homo sapiens
  misc_RNA (1)...(19): siRNA sense strand
uaauucagaugucucacua

SEQ ID NO: 1073020 - RNA, 19 nt, Homo sapiens
  misc_RNA (1)...(19): siRNA sense strand
gaacuggagacuggaauaa

SEQ ID NO: 1073021 - RNA, 19 nt, Homo sapiens
  misc_RNA (1)...(19): siRNA sense strand
gaagaagaauaagcaguca

SEQ ID NO: 1073022 - RNA, 19 nt, Homo sapiens
  misc_RNA (1)...(19): siRNA sense strand
ucaauacagugcacaauca

SEQ ID NO: 1073023 - RNA, 19 nt, Homo sapiens
  misc_RNA (1)...(19): siRNA sense strand
ugacauggcucaggugaau

SEQ ID NO: 1073024 - RNA, 19 nt, Homo sapiens
  misc_RNA (1)...(19): siRNA sense strand
caccacaucuucuuauaau

SEQ ID NO: 1073025 - RNA, 19 nt, Homo sapiens
  misc_RNA (1)...(19): siRNA sense strand
gcaccacaucuucuuauaa

SEQ ID NO: 1073026 - RNA, 19 nt, Homo sapiens
  misc_RNA (1)...(19): siRNA sense strand
ccaagucuauucucugguu

SEQ ID NO: 1073027 - RNA, 19 nt, Homo sapiens
  misc_RNA (1)...(19): siRNA sense strand
caaguccucucuagauguu

SEQ ID NO: 1073028 - RNA, 19 nt, Homo sapiens
  misc_RNA (1)...(19): siRNA sense strand
gaaggcagaccgaagagaa

SEQ ID NO: 1073029 - RNA, 19 nt, Homo sapiens
  misc_RNA (1)...(19): siRNA sense strand
gcggugcccuuuacucuga

SEQ ID NO: 1073030 - RNA, 19 nt, Homo sapiens
  misc_RNA (1)...(19): siRNA sense strand
ggacugaagccaaggucua

SEQ ID NO: 1073031 - RNA, 19 nt, Homo sapiens
  misc_RNA (1)...(19): siRNA sense strand
ucagacagauccauuccaa

SEQ ID NO: 1073032 - RNA, 19 nt, Homo sapiens
  misc_RNA (1)...(19): siRNA sense strand
ccaacagacauuuauagua

SEQ ID NO: 1073033 - RNA, 19 nt, Homo sapiens
  misc_RNA (1)...(19): siRNA sense strand
ccaguucccucccuucgaa

SEQ ID NO: 1073034 - RNA, 19 nt, Homo sapiens
  misc_RNA (1)...(19): siRNA sense strand
gcggaggguucacauguau

SEQ ID NO: 1073035 - RNA, 19 nt, Homo sapiens
  misc_RNA (1)...(19): siRNA sense strand
aggaagaggacaacaaaua

SEQ ID NO: 1073036 - RNA, 19 nt, Homo sapiens
  misc_RNA (1)...(19): siRNA sense strand
uaaacuaccagucagcuuu

SEQ ID NO: 1073037 - RNA, 19 nt, Homo sapiens
  misc_RNA (1)...(19): siRNA sense strand
gggaagcuguacaccacua

SEQ ID NO: 1073038 - RNA, 19 nt, Homo sapiens
  misc_RNA (1)...(19): siRNA sense strand
caaauucuccugccuucaa

SEQ ID NO: 1073039 - RNA, 19 nt, Homo sapiens
  misc_RNA (1)...(19): siRNA sense strand
ccaaauacaagcacaaauc

SEQ ID NO: 1073040 - RNA, 19 nt, Homo sapiens
  misc_RNA (1)...(19): siRNA sense strand
ccacaucuucuuauaauuc

SEQ ID NO: 1073041 - RNA, 19 nt, Homo sapiens
  misc_RNA (1)...(19): siRNA sense strand
gcacucagacagauccauu

SEQ ID NO: 1073042 - RNA, 19 nt, Homo sapiens
  misc_RNA (1)...(19): siRNA sense strand
gaucaagagucccuucacu

SEQ ID NO: 1073043 - RNA, 19 nt, Homo sapiens
  misc_RNA (1)...(19): siRNA sense strand
ggaagaggacaacaaauac

SEQ ID NO: 1073044 - RNA, 19 nt, Homo sapiens
  misc_RNA (1)...(19): siRNA sense strand
gaagagaauacauugaucu

SEQ ID NO: 1073045 - RNA, 19 nt, Homo sapiens
  misc_RNA (1)...(19): siRNA sense strand
gaagaggacaacaaauaca

SEQ ID NO: 1073046 - RNA, 19 nt, Homo sapiens
  misc_RNA (1)...(19): siRNA sense strand
ugacucaccuuuuggauuu

SEQ ID NO: 1073047 - RNA, 19 nt, Homo sapiens
  misc_RNA (1)...(19): siRNA sense strand
gacaaugacucaccuuuug

SEQ ID NO: 1073048 - RNA, 19 nt, Homo sapiens
  misc_RNA (1)...(19): siRNA sense strand
gaagcucggaaguacauuu

SEQ ID NO: 1073049 - RNA, 19 nt, Homo sapiens
  misc_RNA (1)...(19): siRNA sense strand
ggaggguucacauguauga

SEQ ID NO: 1073050 - RNA, 19 nt, Homo sapiens
  misc_RNA (1)...(19): siRNA sense strand
acagauccauuccaacaga

SEQ ID NO: 1073051 - RNA, 19 nt, Homo sapiens
  misc_RNA (1)...(19): siRNA sense strand
gccagucgcuucagugagu

SEQ ID NO: 1073052 - RNA, 19 nt, Homo sapiens
  misc_RNA (1)...(19): siRNA sense strand
ggaggaaugcccacucuca

SEQ ID NO: 1073053 - RNA, 19 nt, Homo sapiens
  misc_RNA (1)...(19): siRNA sense strand
ggacuacaagcaacaacaa

SEQ ID NO: 1073054 - RNA, 19 nt, Homo sapiens
  misc_RNA (1)...(19): siRNA sense strand
cauugugccuccacugaaa

SEQ ID NO: 1073055 - RNA, 19 nt, Homo sapiens
  misc_RNA (1)...(19): siRNA sense strand
cgaagagaauacauugauc

SEQ ID NO: 1073056 - RNA, 19 nt, Homo sapiens
  misc_RNA (1)...(19): siRNA sense strand
gccaaggucuaaugucauc

SEQ ID NO: 1073057 - RNA, 19 nt, Homo sapiens
  misc_RNA (1)...(19): siRNA sense strand
gcucacaauugaugcagau

SEQ ID NO: 1073058 - RNA, 19 nt, Homo sapiens
  misc_RNA (1)...(19): siRNA sense strand
agaaaaugcucacaauuga

SEQ ID NO: 1073059 - RNA, 19 nt, Homo sapiens
  misc_RNA (1)...(19): siRNA sense strand
aagccaaggucuaauguca

SEQ ID NO: 1073060 - RNA, 19 nt, Homo sapiens
  misc_RNA (1)...(19): siRNA sense strand
gacucugacucuucuuuga

SEQ ID NO: 1073061 - RNA, 19 nt, Homo sapiens
  misc_RNA (1)...(19): siRNA sense strand
gaccgaagagaauacauug

SEQ ID NO: 1073062 - RNA, 19 nt, Homo sapiens
  misc_RNA (1)...(19): siRNA sense strand
ugaggaagaggacaacaaa

SEQ ID NO: 1073063 - RNA, 19 nt, Homo sapiens
  misc_RNA (1)...(19): siRNA sense strand
gauaaugcuguaccgauug

SEQ ID NO: 1073064 - RNA, 19 nt, Homo sapiens
  misc_RNA (1)...(19): siRNA sense strand
ucaaguagccaccaucaca

SEQ ID NO: 1073065 - RNA, 19 nt, Homo sapiens
  misc_RNA (1)...(19): siRNA sense strand
caaacuggacuacaagcaa

SEQ ID NO: 1073066 - RNA, 19 nt, Homo sapiens
  misc_RNA (1)...(19): siRNA sense strand
ggcaauaguggauccguuu

SEQ ID NO: 1073067 - RNA, 19 nt, Homo sapiens
  misc_RNA (1)...(19): siRNA sense strand
gcuccagucucuuccaagu

SEQ ID NO: 1073068 - RNA, 19 nt, Homo sapiens
  misc_RNA (1)...(19): siRNA sense strand
ucacaauugaugcagauaa

SEQ ID NO: 1073069 - RNA, 19 nt, Homo sapiens
  misc_RNA (1)...(19): siRNA sense strand
uggagggacucagcaaauu

SEQ ID NO: 1073070 - RNA, 19 nt, Homo sapiens
  misc_RNA (1)...(19): siRNA sense strand
caaauacaagcacaaaucu

SEQ ID NO: 1073071 - RNA, 19 nt, Homo sapiens
  misc_RNA (1)...(19): siRNA sense strand
guucuagcuuccaguucua

SEQ ID NO: 1073072 - RNA, 19 nt, Homo sapiens
  misc_RNA (1)...(19): siRNA sense strand
caaaagaagcucggaagua

SEQ ID NO: 1073073 - RNA, 19 nt, Homo sapiens
  misc_RNA (1)...(19): siRNA sense strand
ucaacagagauccuaauuu

SEQ ID NO: 1073074 - RNA, 19 nt, Homo sapiens
  misc_RNA (1)...(19): siRNA sense strand
gcucagccacuacagauuc

SEQ ID NO: 1073075 - RNA, 19 nt, Homo sapiens
  misc_RNA (1)...(19): siRNA sense strand
gagaauuaccccucuaaaa

SEQ ID NO: 1073076 - RNA, 19 nt, Homo sapiens
  misc_RNA (1)...(19): siRNA sense strand
cacaaccacucaaucuuag

SEQ ID NO: 1073077 - RNA, 19 nt, Homo sapiens
  misc_RNA (1)...(19): siRNA sense strand
ggagggacucagcaaauuc

SEQ ID NO: 1073078 - RNA, 19 nt, Homo sapiens
  misc_RNA (1)...(19): siRNA sense strand
agacagauccauuccaaca

SEQ ID NO: 1073079 - RNA, 19 nt, Homo sapiens
  misc_RNA (1)...(19): siRNA sense strand
accaugagcuucagcaauc

SEQ ID NO: 1073080 - RNA, 19 nt, Homo sapiens
  misc_RNA (1)...(19): siRNA sense strand
ccacccagauuugcacuca

SEQ ID NO: 1073081 - RNA, 19 nt, Homo sapiens
  misc_RNA (1)...(19): siRNA sense strand
caucagcccaucaucauuc

SEQ ID NO: 1073082 - RNA, 19 nt, Homo sapiens
  misc_RNA (1)...(19): siRNA sense strand
cgcaccacaucuucuuaua

SEQ ID NO: 1073083 - RNA, 19 nt, Homo sapiens
  misc_RNA (1)...(19): siRNA sense strand
aacaaagcauucuggauuc

SEQ ID NO: 1073084 - RNA, 19 nt, Homo sapiens
  misc_RNA (1)...(19): siRNA sense strand
cacaauugaugcagauaag

SEQ ID NO: 1073085 - RNA, 19 nt, Homo sapiens
  misc_RNA (1)...(19): siRNA sense strand
caaugauucuccagacucu

SEQ ID NO: 1073086 - RNA, 19 nt, Homo sapiens
  misc_RNA (1)...(19): siRNA sense strand
gcuuaagacaccugaagaa

SEQ ID NO: 1073087 - RNA, 19 nt, Homo sapiens
  misc_RNA (1)...(19): siRNA sense strand
gaugcagauaagagaauua

SEQ ID NO: 1073088 - RNA, 19 nt, Homo sapiens
  misc_RNA (1)...(19): siRNA sense strand
gacaacaacaauccaguuc

SEQ ID NO: 1073089 - RNA, 19 nt, Homo sapiens
  misc_RNA (1)...(19): siRNA sense strand
cuagcugacuggaggaaug

SEQ ID NO: 1073090 - RNA, 19 nt, Homo sapiens
  misc_RNA (1)...(19): siRNA sense strand
ggaagcuguacaccacuaa

SEQ ID NO: 1073091 - RNA, 19 nt, Homo sapiens
  misc_RNA (1)...(19): siRNA sense strand
cauucuggauucccuguga

SEQ ID NO: 1073092 - RNA, 19 nt, Homo sapiens
  misc_RNA (1)...(19): siRNA sense strand
caagcaacaacaaagcauu

SEQ ID NO: 1073093 - RNA, 19 nt, Homo sapiens
  misc_RNA (1)...(19): siRNA sense strand
gacugaagccaaggucuaa

SEQ ID NO: 1073094 - RNA, 19 nt, Homo sapiens
  misc_RNA (1)...(19): siRNA sense strand
gauuugcacucagacagau

SEQ ID NO: 1073095 - RNA, 19 nt, Homo sapiens
  misc_RNA (1)...(19): siRNA sense strand
acaaauacaagcccaguag

SEQ ID NO: 1073096 - RNA, 19 nt, Homo sapiens
  misc_RNA (1)...(19): siRNA sense strand
ugucaucacuauccgaagu

SEQ ID NO: 1073097 - RNA, 19 nt, Homo sapiens
  misc_RNA (1)...(19): siRNA sense strand
agagaaggcagaccgaaga

SEQ ID NO: 1073098 - RNA, 19 nt, Homo sapiens
  misc_RNA (1)...(19): siRNA sense strand
uagcaaucauguuaagucu

SEQ ID NO: 1073099 - RNA, 19 nt, Homo sapiens
  misc_RNA (1)...(19): siRNA sense strand
gcacuggcacccgcacuau

SEQ ID NO: 1073100 - RNA, 19 nt, Homo sapiens
  misc_RNA (1)...(19): siRNA sense strand
ggcaaccaguacagcacua

SEQ ID NO: 1073101 - RNA, 19 nt, Homo sapiens
  misc_RNA (1)...(19): siRNA sense strand
cagauucagucaggaguuc

SEQ ID NO: 1073102 - RNA, 19 nt, Homo sapiens
  misc_RNA (1)...(19): siRNA sense strand
ccgaagagaauacauugau

SEQ ID NO: 1073103 - RNA, 19 nt, Homo sapiens
  misc_RNA (1)...(19): siRNA sense strand
caucaucauuccagauacu

SEQ ID NO: 1073104 - RNA, 19 nt, Homo sapiens
  misc_RNA (1)...(19): siRNA sense strand
guuaugucacugucaauga

SEQ ID NO: 1073105 - RNA, 19 nt, Homo sapiens
  misc_RNA (1)...(19): siRNA sense strand
cuaaugucaucaguuaugu

SEQ ID NO: 1073106 - RNA, 19 nt, Homo sapiens
  misc_RNA (1)...(19): siRNA sense strand
caacagagauccuaauuug

SEQ ID NO: 1073107 - RNA, 19 nt, Homo sapiens
  misc_RNA (1)...(19): siRNA sense strand
ggucuaaugucaucaguua

SEQ ID NO: 1073108 - RNA, 19 nt, Homo sapiens
  misc_RNA (1)...(19): siRNA sense strand
gcacaaccacucaaucuua

SEQ ID NO: 1073109 - RNA, 19 nt, Homo sapiens
  misc_RNA (1)...(19): siRNA sense strand
gcaaucauguuaagucuug

SEQ ID NO: 1073110 - RNA, 19 nt, Homo sapiens
  misc_RNA (1)...(19): siRNA sense strand
gcaaucagcucaauacagu

SEQ ID NO: 1073111 - RNA, 19 nt, Homo sapiens
  misc_RNA (1)...(19): siRNA sense strand
gagaauacauugaucuguu

SEQ ID NO: 1073112 - RNA, 19 nt, Homo sapiens
  misc_RNA (1)...(19): siRNA sense strand
ucagaugucucacuacuaa

SEQ ID NO: 1073113 - RNA, 19 nt, Homo sapiens
  misc_RNA (1)...(19): siRNA sense strand
caacaaagcauucuggauu

SEQ ID NO: 1073114 - RNA, 19 nt, Homo sapiens
  misc_RNA (1)...(19): siRNA sense strand
gcacaaaucuaaccaugag

SEQ ID NO: 1073115 - RNA, 19 nt, Homo sapiens
  misc_RNA (1)...(19): siRNA sense strand
ggauaaugcuguaccgauu

SEQ ID NO: 1073116 - RNA, 19 nt, Homo sapiens
  misc_RNA (1)...(19): siRNA sense strand
gaggauggauaaugcugua

SEQ ID NO: 1073117 - RNA, 19 nt, Homo sapiens
  misc_RNA (1)...(19): siRNA sense strand
gcagucagcuccagucucu

SEQ ID NO: 1073118 - RNA, 19 nt, Homo sapiens
  misc_RNA (1)...(19): siRNA sense strand
uaagacaccugaagaacau

SEQ ID NO: 1073119 - RNA, 19 nt, Homo sapiens
  misc_RNA (1)...(19): siRNA sense strand
uaauucagaugucucacua

SEQ ID NO: 1073120 - RNA, 19 nt, Homo sapiens
  misc_RNA (1)...(19): siRNA sense strand
gaacuggagacuggaauaa

SEQ ID NO: 1073121 - RNA, 19 nt, Homo sapiens
  misc_RNA (1)...(19): siRNA sense strand
gaagaagaauaagcaguca

SEQ ID NO: 1073122 - RNA, 19 nt, Homo sapiens
  misc_RNA (1)...(19): siRNA sense strand
ucaauacagugcacaauca

SEQ ID NO: 1073123 - RNA, 19 nt, Homo sapiens
  misc_RNA (1)...(19): siRNA sense strand
ugacauggcucaggugaau

SEQ ID NO: 1073124 - RNA, 19 nt, Homo sapiens
  misc_RNA (1)...(19): siRNA sense strand
caccacaucuucuuauaau

SEQ ID NO: 1073125 - RNA, 19 nt, Homo sapiens
  misc_RNA (1)...(19): siRNA sense strand
gcaccacaucuucuuauaa

SEQ ID NO: 1073126 - RNA, 19 nt, Homo sapiens
  misc_RNA (1)...(19): siRNA sense strand
ccaagucuauucucugguu

SEQ ID NO: 1073127 - RNA, 19 nt, Homo sapiens
  misc_RNA (1)...(19): siRNA sense strand
caaguccucucuagauguu

SEQ ID NO: 1073128 - RNA, 19 nt, Homo sapiens
  misc_RNA (1)...(19): siRNA sense strand
gaaggcagaccgaagagaa

SEQ ID NO: 1073129 - RNA, 19 nt, Homo sapiens
  misc_RNA (1)...(19): siRNA sense strand
gcggugcccuuuacucuga

SEQ ID NO: 1073130 - RNA, 19 nt, Homo sapiens
  misc_RNA (1)...(19): siRNA sense strand
ggacugaagccaaggucua

SEQ ID NO: 1073131 - RNA, 19 nt, Homo sapiens
  misc_RNA (1)...(19): siRNA sense strand
ucagacagauccauuccaa

SEQ ID NO: 1073132 - RNA, 19 nt, Homo sapiens
  misc_RNA (1)...(19): siRNA sense strand
ccaacagacauuuauagua

SEQ ID NO: 1073133 - RNA, 19 nt, Homo sapiens
  misc_RNA (1)...(19): siRNA sense strand
ccaguucccucccuucgaa

SEQ ID NO: 1073134 - RNA, 19 nt, Homo sapiens
  misc_RNA (1)...(19): siRNA sense strand
gcggaggguucacauguau

SEQ ID NO: 1073135 - RNA, 19 nt, Homo sapiens
  misc_RNA (1)...(19): siRNA sense strand
aggaagaggacaacaaaua

SEQ ID NO: 1073136 - RNA, 19 nt, Homo sapiens
  misc_RNA (1)...(19): siRNA sense strand
uaaacuaccagucagcuuu

SEQ ID NO: 1073137 - RNA, 19 nt, Homo sapiens
  misc_RNA (1)...(19): siRNA sense strand
gggaagcuguacaccacua

SEQ ID NO: 1073138 - RNA, 19 nt, Homo sapiens
  misc_RNA (1)...(19): siRNA sense strand
caaauucuccugccuucaa

SEQ ID NO: 1073139 - RNA, 19 nt, Homo sapiens
  misc_RNA (1)...(19): siRNA sense strand
ccaaauacaagcacaaauc

SEQ ID NO: 1073140 - RNA, 19 nt, Homo sapiens
  misc_RNA (1)...(19): siRNA sense strand
ccacaucuucuuauaauuc

SEQ ID NO: 1073141 - RNA, 19 nt, Homo sapiens
  misc_RNA (1)...(19): siRNA sense strand
gcacucagacagauccauu

SEQ ID NO: 1073142 - RNA, 19 nt, Homo sapiens
  misc_RNA (1)...(19): siRNA sense strand
gaucaagagucccuucacu

SEQ ID NO: 1073143 - RNA, 19 nt, Homo sapiens
  misc_RNA (1)...(19): siRNA sense strand
ggaagaggacaacaaauac

SEQ ID NO: 1073144 - RNA, 19 nt, Homo sapiens
  misc_RNA (1)...(19): siRNA sense strand
gaagagaauacauugaucu

SEQ ID NO: 1073145 - RNA, 19 nt, Homo sapiens
  misc_RNA (1)...(19): siRNA sense strand
gaagaggacaacaaauaca

SEQ ID NO: 1073146 - RNA, 19 nt, Homo sapiens
  misc_RNA (1)...(19): siRNA sense strand
ugacucaccuuuuggauuu

SEQ ID NO: 1073147 - RNA, 19 nt, Homo sapiens
  misc_RNA (1)...(19): siRNA sense strand
gacaaugacucaccuuuug

SEQ ID NO: 1073148 - RNA, 19 nt, Homo sapiens
  misc_RNA (1)...(19): siRNA sense strand
gaagcucggaaguacauuu

SEQ ID NO: 1073149 - RNA, 19 nt, Homo sapiens
  misc_RNA (1)...(19): siRNA sense strand
ggaggguucacauguauga

SEQ ID NO: 1073150 - RNA, 19 nt, Homo sapiens
  misc_RNA (1)...(19): siRNA sense strand
acagauccauuccaacaga

SEQ ID NO: 1073151 - RNA, 19 nt, Homo sapiens
  misc_RNA (1)...(19): siRNA sense strand
gccagucgcuucagugagu

SEQ ID NO: 1073152 - RNA, 19 nt, Homo sapiens
  misc_RNA (1)...(19): siRNA sense strand
ggaggaaugcccacucuca

SEQ ID NO: 1073153 - RNA, 19 nt, Homo sapiens
  misc_RNA (1)...(19): siRNA sense strand
ggacuacaagcaacaacaa

SEQ ID NO: 1073154 - RNA, 19 nt, Homo sapiens
  misc_RNA (1)...(19): siRNA sense strand
cauugugccuccacugaaa

SEQ ID NO: 1073155 - RNA, 19 nt, Homo sapiens
  misc_RNA (1)...(19): siRNA sense strand
cgaagagaauacauugauc

SEQ ID NO: 1073156 - RNA, 19 nt, Homo sapiens
  misc_RNA (1)...(19): siRNA sense strand
gccaaggucuaaugucauc

SEQ ID NO: 1073157 - RNA, 19 nt, Homo sapiens
  misc_RNA (1)...(19): siRNA sense strand
gcucacaauugaugcagau

SEQ ID NO: 1073158 - RNA, 19 nt, Homo sapiens
  misc_RNA (1)...(19): siRNA sense strand
agaaaaugcucacaauuga

SEQ ID NO: 1073159 - RNA, 19 nt, Homo sapiens
  misc_RNA (1)...(19): siRNA sense strand
aagccaaggucuaauguca

SEQ ID NO: 1073160 - RNA, 19 nt, Homo sapiens
  misc_RNA (1)...(19): siRNA sense strand
gacucugacucuucuuuga

SEQ ID NO: 1073161 - RNA, 19 nt, Homo sapiens
  misc_RNA (1)...(19): siRNA sense strand
gaccgaagagaauacauug

SEQ ID NO: 1073162 - RNA, 19 nt, Homo sapiens
  misc_RNA (1)...(19): siRNA sense strand
ugaggaagaggacaacaaa

SEQ ID NO: 1073163 - RNA, 19 nt, Homo sapiens
  misc_RNA (1)...(19): siRNA sense strand
gauaaugcuguaccgauug

SEQ ID NO: 1073164 - RNA, 19 nt, Homo sapiens
  misc_RNA (1)...(19): siRNA sense strand
ucaaguagccaccaucaca

SEQ ID NO: 1073165 - RNA, 19 nt, Homo sapiens
  misc_RNA (1)...(19): siRNA sense strand
caaacuggacuacaagcaa

SEQ ID NO: 1073166 - RNA, 19 nt, Homo sapiens
  misc_RNA (1)...(19): siRNA sense strand
ggcaauaguggauccguuu

SEQ ID NO: 1073167 - RNA, 19 nt, Homo sapiens
  misc_RNA (1)...(19): siRNA sense strand
gcuccagucucuuccaagu

SEQ ID NO: 1073168 - RNA, 19 nt, Homo sapiens
  misc_RNA (1)...(19): siRNA sense strand
ucacaauugaugcagauaa

SEQ ID NO: 1073169 - RNA, 19 nt, Homo sapiens
  misc_RNA (1)...(19): siRNA sense strand
uggagggacucagcaaauu

SEQ ID NO: 1073170 - RNA, 19 nt, Homo sapiens
  misc_RNA (1)...(19): siRNA sense strand
caaauacaagcacaaaucu

SEQ ID NO: 1073171 - RNA, 19 nt, Homo sapiens
  misc_RNA (1)...(19): siRNA sense strand
guucuagcuuccaguucua

SEQ ID NO: 1073172 - RNA, 19 nt, Homo sapiens
  misc_RNA (1)...(19): siRNA sense strand
caaaagaagcucggaagua

SEQ ID NO: 1073173 - RNA, 19 nt, Homo sapiens
  misc_RNA (1)...(19): siRNA sense strand
ucaacagagauccuaauuu

SEQ ID NO: 1073174 - RNA, 19 nt, Homo sapiens
  misc_RNA (1)...(19): siRNA sense strand
gcucagccacuacagauuc

SEQ ID NO: 1073175 - RNA, 19 nt, Homo sapiens
  misc_RNA (1)...(19): siRNA sense strand
gagaauuaccccucuaaaa

SEQ ID NO: 1073176 - RNA, 19 nt, Homo sapiens
  misc_RNA (1)...(19): siRNA sense strand
cacaaccacucaaucuuag

SEQ ID NO: 1073177 - RNA, 19 nt, Homo sapiens
  misc_RNA (1)...(19): siRNA sense strand
ggagggacucagcaaauuc

SEQ ID NO: 1073178 - RNA, 19 nt, Homo sapiens
  misc_RNA (1)...(19): siRNA sense strand
agacagauccauuccaaca

SEQ ID NO: 1073179 - RNA, 19 nt, Homo sapiens
  misc_RNA (1)...(19): siRNA sense strand
accaugagcuucagcaauc

SEQ ID NO: 1073180 - RNA, 19 nt, Homo sapiens
  misc_RNA (1)...(19): siRNA sense strand
ccacccagauuugcacuca

SEQ ID NO: 1073181 - RNA, 19 nt, Homo sapiens
  misc_RNA (1)...(19): siRNA sense strand
caucagcccaucaucauuc

SEQ ID NO: 1073182 - RNA, 19 nt, Homo sapiens
  misc_RNA (1)...(19): siRNA sense strand
cgcaccacaucuucuuaua

SEQ ID NO: 1073183 - RNA, 19 nt, Homo sapiens
  misc_RNA (1)...(19): siRNA sense strand
aacaaagcauucuggauuc

SEQ ID NO: 1073184 - RNA, 19 nt, Homo sapiens
  misc_RNA (1)...(19): siRNA sense strand
cacaauugaugcagauaag

SEQ ID NO: 1073185 - RNA, 19 nt, Homo sapiens
  misc_RNA (1)...(19): siRNA sense strand
caaugauucuccagacucu

SEQ ID NO: 1073186 - RNA, 19 nt, Homo sapiens
  misc_RNA (1)...(19): siRNA sense strand
gcuuaagacaccugaagaa

SEQ ID NO: 1073187 - RNA, 19 nt, Homo sapiens
  misc_RNA (1)...(19): siRNA sense strand
gaugcagauaagagaauua

SEQ ID NO: 1073188 - RNA, 19 nt, Homo sapiens
  misc_RNA (1)...(19): siRNA sense strand
gacaacaacaauccaguuc

SEQ ID NO: 1073189 - RNA, 19 nt, Homo sapiens
  misc_RNA (1)...(19): siRNA sense strand
cuagcugacuggaggaaug

SEQ ID NO: 1073190 - RNA, 19 nt, Homo sapiens
  misc_RNA (1)...(19): siRNA sense strand
ggaagcuguacaccacuaa

SEQ ID NO: 1073191 - RNA, 19 nt, Homo sapiens
  misc_RNA (1)...(19): siRNA sense strand
cauucuggauucccuguga

SEQ ID NO: 1073192 - RNA, 19 nt, Homo sapiens
  misc_RNA (1)...(19): siRNA sense strand
caagcaacaacaaagcauu

SEQ ID NO: 1073193 - RNA, 19 nt, Homo sapiens
  misc_RNA (1)...(19): siRNA sense strand
gacugaagccaaggucuaa

SEQ ID NO: 1073194 - RNA, 19 nt, Homo sapiens
  misc_RNA (1)...(19): siRNA sense strand
gauuugcacucagacagau

SEQ ID NO: 1073195 - RNA, 19 nt, Homo sapiens
  misc_RNA (1)...(19): siRNA sense strand
acaaauacaagcccaguag

SEQ ID NO: 1073196 - RNA, 19 nt, Homo sapiens
  misc_RNA (1)...(19): siRNA sense strand
ugucaucacuauccgaagu

SEQ ID NO: 1073197 - RNA, 19 nt, Homo sapiens
  misc_RNA (1)...(19): siRNA sense strand
agagaaggcagaccgaaga

SEQ ID NO: 1073198 - RNA, 19 nt, Homo sapiens
  misc_RNA (1)...(19): siRNA sense strand
uagcaaucauguuaagucu

SEQ ID NO: 1073199 - RNA, 19 nt, Homo sapiens
  misc_RNA (1)...(19): siRNA sense strand
gcacuggcacccgcacuau

SEQ ID NO: 1073200 - RNA, 19 nt, Homo sapiens
  misc_RNA (1)...(19): siRNA sense strand
ggcaaccaguacagcacua

SEQ ID NO: 1073201 - RNA, 19 nt, Homo sapiens
  misc_RNA (1)...(19): siRNA sense strand
cagauucagucaggaguuc

SEQ ID NO: 1073202 - RNA, 19 nt, Homo sapiens
  misc_RNA (1)...(19): siRNA sense strand
ccgaagagaauacauugau

SEQ ID NO: 1073203 - RNA, 19 nt, Homo sapiens
  misc_RNA (1)...(19): siRNA sense strand
caucaucauuccagauacu

SEQ ID NO: 1073204 - RNA, 19 nt, Homo sapiens
  misc_RNA (1)...(19): siRNA sense strand
guuaugucacugucaauga

SEQ ID NO: 1073205 - RNA, 19 nt, Homo sapiens
  misc_RNA (1)...(19): siRNA sense strand
cuaaugucaucaguuaugu

SEQ ID NO: 1073206 - RNA, 19 nt, Homo sapiens
  misc_RNA (1)...(19): siRNA sense strand
caacagagauccuaauuug

SEQ ID NO: 1073207 - RNA, 19 nt, Homo sapiens
  misc_RNA (1)...(19): siRNA sense strand
ggucuaaugucaucaguua

SEQ ID NO: 1073208 - RNA, 19 nt, Homo sapiens
  misc_RNA (1)...(19): siRNA sense strand
gcacaaccacucaaucuua

SEQ ID NO: 1073209 - RNA, 19 nt, Homo sapiens
  misc_RNA (1)...(19): siRNA sense strand
gcaaucauguuaagucuug

SEQ ID NO: 1073210 - RNA, 19 nt, Homo sapiens
  misc_RNA (1)...(19): siRNA sense strand
gcaaucagcucaauacagu

SEQ ID NO: 1073211 - RNA, 19 nt, Homo sapiens
  misc_RNA (1)...(19): siRNA sense strand
gagaauacauugaucuguu

SEQ ID NO: 1073212 - RNA, 19 nt, Homo sapiens
  misc_RNA (1)...(19): siRNA sense strand
ucagaugucucacuacuaa

SEQ ID NO: 1073213 - RNA, 19 nt, Homo sapiens
  misc_RNA (1)...(19): siRNA sense strand
caacaaagcauucuggauu

SEQ ID NO: 1073214 - RNA, 19 nt, Homo sapiens
  misc_RNA (1)...(19): siRNA sense strand
gcacaaaucuaaccaugag

SEQ ID NO: 1073215 - RNA, 19 nt, Homo sapiens
  misc_RNA (1)...(19): siRNA sense strand
ggauaaugcuguaccgauu

SEQ ID NO: 1073216 - RNA, 19 nt, Homo sapiens
  misc_RNA (1)...(19): siRNA sense strand
gaggauggauaaugcugua

SEQ ID NO: 1073217 - RNA, 19 nt, Homo sapiens
  misc_RNA (1)...(19): siRNA sense strand
gcagucagcuccagucucu

SEQ ID NO: 1073218 - RNA, 19 nt, Homo sapiens
  misc_RNA (1)...(19): siRNA sense strand
uaagacaccugaagaacau

SEQ ID NO: 1073219 - RNA, 19 nt, Homo sapiens
  misc_RNA (1)...(19): siRNA sense strand
uaauucagaugucucacua

SEQ ID NO: 1073220 - RNA, 19 nt, Homo sapiens
  misc_RNA (1)...(19): siRNA sense strand
gaacuggagacuggaauaa

SEQ ID NO: 1073221 - RNA, 19 nt, Homo sapiens
  misc_RNA (1)...(19): siRNA sense strand
gaagaagaauaagcaguca

SEQ ID NO: 1073222 - RNA, 19 nt, Homo sapiens
  misc_RNA (1)...(19): siRNA sense strand
ucaauacagugcacaauca

SEQ ID NO: 1073223 - RNA, 19 nt, Homo sapiens
  misc_RNA (1)...(19): siRNA sense strand
ugacauggcucaggugaau

SEQ ID NO: 1073224 - RNA, 19 nt, Homo sapiens
  misc_RNA (1)...(19): siRNA sense strand
caccacaucuucuuauaau

SEQ ID NO: 1073225 - RNA, 19 nt, Homo sapiens
  misc_RNA (1)...(19): siRNA sense strand
gcaccacaucuucuuauaa

SEQ ID NO: 1073226 - RNA, 19 nt, Homo sapiens
  misc_RNA (1)...(19): siRNA sense strand
ccaagucuauucucugguu

SEQ ID NO: 1073227 - RNA, 19 nt, Homo sapiens
  misc_RNA (1)...(19): siRNA sense strand
caaguccucucuagauguu

SEQ ID NO: 1073228 - RNA, 19 nt, Homo sapiens
  misc_RNA (1)...(19): siRNA sense strand
gaaggcagaccgaagagaa

SEQ ID NO: 1073229 - RNA, 19 nt, Homo sapiens
  misc_RNA (1)...(19): siRNA sense strand
gcggugcccuuuacucuga

SEQ ID NO: 1073230 - RNA, 19 nt, Homo sapiens
  misc_RNA (1)...(19): siRNA sense strand
ggacugaagccaaggucua

SEQ ID NO: 1073231 - RNA, 19 nt, Homo sapiens
  misc_RNA (1)...(19): siRNA sense strand
ucagacagauccauuccaa

SEQ ID NO: 1073232 - RNA, 19 nt, Homo sapiens
  misc_RNA (1)...(19): siRNA sense strand
ccaacagacauuuauagua

SEQ ID NO: 1073233 - RNA, 19 nt, Homo sapiens
  misc_RNA (1)...(19): siRNA sense strand
ccaguucccucccuucgaa

SEQ ID NO: 1073234 - RNA, 19 nt, Homo sapiens
  misc_RNA (1)...(19): siRNA sense strand
gcggaggguucacauguau

SEQ ID NO: 1073235 - RNA, 19 nt, Homo sapiens
  misc_RNA (1)...(19): siRNA sense strand
aggaagaggacaacaaaua

SEQ ID NO: 1073236 - RNA, 19 nt, Homo sapiens
  misc_RNA (1)...(19): siRNA sense strand
uaaacuaccagucagcuuu

SEQ ID NO: 1073237 - RNA, 19 nt, Homo sapiens
  misc_RNA (1)...(19): siRNA sense strand
gggaagcuguacaccacua

SEQ ID NO: 1073238 - RNA, 19 nt, Homo sapiens
  misc_RNA (1)...(19): siRNA sense strand
caaauucuccugccuucaa

SEQ ID NO: 1073239 - RNA, 19 nt, Homo sapiens
  misc_RNA (1)...(19): siRNA sense strand
ccaaauacaagcacaaauc

SEQ ID NO: 1073240 - RNA, 19 nt, Homo sapiens
  misc_RNA (1)...(19): siRNA sense strand
ccacaucuucuuauaauuc

SEQ ID NO: 1073241 - RNA, 19 nt, Homo sapiens
  misc_RNA (1)...(19): siRNA sense strand
gcacucagacagauccauu

SEQ ID NO: 1073242 - RNA, 19 nt, Homo sapiens
  misc_RNA (1)...(19): siRNA sense strand
gaucaagagucccuucacu

SEQ ID NO: 1073243 - RNA, 19 nt, Homo sapiens
  misc_RNA (1)...(19): siRNA sense strand
ggaagaggacaacaaauac

SEQ ID NO: 1073244 - RNA, 19 nt, Homo sapiens
  misc_RNA (1)...(19): siRNA sense strand
gaagagaauacauugaucu

SEQ ID NO: 1073245 - RNA, 19 nt, Homo sapiens
  misc_RNA (1)...(19): siRNA sense strand
gaagaggacaacaaauaca

SEQ ID NO: 1073246 - RNA, 19 nt, Homo sapiens
  misc_RNA (1)...(19): siRNA sense strand
ugacucaccuuuuggauuu

SEQ ID NO: 1073247 - RNA, 19 nt, Homo sapiens
  misc_RNA (1)...(19): siRNA sense strand
gacaaugacucaccuuuug

SEQ ID NO: 1073248 - RNA, 19 nt, Homo sapiens
  misc_RNA (1)...(19): siRNA sense strand
gaagcucggaaguacauuu

SEQ ID NO: 1073249 - RNA, 19 nt, Homo sapiens
  misc_RNA (1)...(19): siRNA sense strand
ggaggguucacauguauga

SEQ ID NO: 1073250 - RNA, 19 nt, Homo sapiens
  misc_RNA (1)...(19): siRNA sense strand
acagauccauuccaacaga

SEQ ID NO: 1073251 - RNA, 19 nt, Homo sapiens
  misc_RNA (1)...(19): siRNA sense strand
gccagucgcuucagugagu

SEQ ID NO: 1073252 - RNA, 19 nt, Homo sapiens
  misc_RNA (1)...(19): siRNA sense strand
ggaggaaugcccacucuca

SEQ ID NO: 1073253 - RNA, 19 nt, Homo sapiens
  misc_RNA (1)...(19): siRNA sense strand
ggacuacaagcaacaacaa

SEQ ID NO: 1073254 - RNA, 19 nt, Homo sapiens
  misc_RNA (1)...(19): siRNA sense strand
cauugugccuccacugaaa

SEQ ID NO: 1073255 - RNA, 19 nt, Homo sapiens
  misc_RNA (1)...(19): siRNA sense strand
cgaagagaauacauugauc

SEQ ID NO: 1073256 - RNA, 19 nt, Homo sapiens
  misc_RNA (1)...(19): siRNA sense strand
gccaaggucuaaugucauc

SEQ ID NO: 1073257 - RNA, 19 nt, Homo sapiens
  misc_RNA (1)...(19): siRNA sense strand
gcucacaauugaugcagau

SEQ ID NO: 1073258 - RNA, 19 nt, Homo sapiens
  misc_RNA (1)...(19): siRNA sense strand
agaaaaugcucacaauuga

SEQ ID NO: 1073259 - RNA, 19 nt, Homo sapiens
  misc_RNA (1)...(19): siRNA sense strand
aagccaaggucuaauguca

SEQ ID NO: 1073260 - RNA, 19 nt, Homo sapiens
  misc_RNA (1)...(19): siRNA sense strand
gacucugacucuucuuuga

SEQ ID NO: 1073261 - RNA, 19 nt, Homo sapiens
  misc_RNA (1)...(19): siRNA sense strand
gaccgaagagaauacauug

SEQ ID NO: 1073262 - RNA, 19 nt, Homo sapiens
  misc_RNA (1)...(19): siRNA sense strand
ugaggaagaggacaacaaa

SEQ ID NO: 1073263 - RNA, 19 nt, Homo sapiens
  misc_RNA (1)...(19): siRNA sense strand
gauaaugcuguaccgauug

SEQ ID NO: 1073264 - RNA, 19 nt, Homo sapiens
  misc_RNA (1)...(19): siRNA sense strand
ucaaguagccaccaucaca

SEQ ID NO: 1073265 - RNA, 19 nt, Homo sapiens
  misc_RNA (1)...(19): siRNA sense strand
caaacuggacuacaagcaa

SEQ ID NO: 1073266 - RNA, 19 nt, Homo sapiens
  misc_RNA (1)...(19): siRNA sense strand
ggcaauaguggauccguuu

SEQ ID NO: 1073267 - RNA, 19 nt, Homo sapiens
  misc_RNA (1)...(19): siRNA sense strand
gcuccagucucuuccaagu

SEQ ID NO: 1073268 - RNA, 19 nt, Homo sapiens
  misc_RNA (1)...(19): siRNA sense strand
ucacaauugaugcagauaa

SEQ ID NO: 1073269 - RNA, 19 nt, Homo sapiens
  misc_RNA (1)...(19): siRNA sense strand
uggagggacucagcaaauu

SEQ ID NO: 1073270 - RNA, 19 nt, Homo sapiens
  misc_RNA (1)...(19): siRNA sense strand
caaauacaagcacaaaucu

SEQ ID NO: 1073271 - RNA, 19 nt, Homo sapiens
  misc_RNA (1)...(19): siRNA sense strand
guucuagcuuccaguucua

SEQ ID NO: 1073272 - RNA, 19 nt, Homo sapiens
  misc_RNA (1)...(19): siRNA sense strand
caaaagaagcucggaagua

SEQ ID NO: 1073273 - RNA, 19 nt, Homo sapiens
  misc_RNA (1)...(19): siRNA sense strand
ucaacagagauccuaauuu

SEQ ID NO: 1073274 - RNA, 19 nt, Homo sapiens
  misc_RNA (1)...(19): siRNA sense strand
gcucagccacuacagauuc

SEQ ID NO: 1073275 - RNA, 19 nt, Homo sapiens
  misc_RNA (1)...(19): siRNA sense strand
gagaauuaccccucuaaaa

SEQ ID NO: 1073276 - RNA, 19 nt, Homo sapiens
  misc_RNA (1)...(19): siRNA sense strand
cacaaccacucaaucuuag

SEQ ID NO: 1073277 - RNA, 19 nt, Homo sapiens
  misc_RNA (1)...(19): siRNA sense strand
ggagggacucagcaaauuc

SEQ ID NO: 1073278 - RNA, 19 nt, Homo sapiens
  misc_RNA (1)...(19): siRNA sense strand
agacagauccauuccaaca

SEQ ID NO: 1073279 - RNA, 19 nt, Homo sapiens
  misc_RNA (1)...(19): siRNA sense strand
accaugagcuucagcaauc

SEQ ID NO: 1073280 - RNA, 19 nt, Homo sapiens
  misc_RNA (1)...(19): siRNA sense strand
ccacccagauuugcacuca

SEQ ID NO: 1073281 - RNA, 19 nt, Homo sapiens
  misc_RNA (1)...(19): siRNA sense strand
caucagcccaucaucauuc

SEQ ID NO: 1073282 - RNA, 19 nt, Homo sapiens
  misc_RNA (1)...(19): siRNA sense strand
cgcaccacaucuucuuaua

SEQ ID NO: 1073283 - RNA, 19 nt, Homo sapiens
  misc_RNA (1)...(19): siRNA sense strand
aacaaagcauucuggauuc

SEQ ID NO: 1073284 - RNA, 19 nt, Homo sapiens
  misc_RNA (1)...(19): siRNA sense strand
cacaauugaugcagauaag

SEQ ID NO: 1073285 - RNA, 19 nt, Homo sapiens
  misc_RNA (1)...(19): siRNA sense strand
caaugauucuccagacucu

SEQ ID NO: 1073286 - RNA, 19 nt, Homo sapiens
  misc_RNA (1)...(19): siRNA sense strand
gcuuaagacaccugaagaa

SEQ ID NO: 1073287 - RNA, 19 nt, Homo sapiens
  misc_RNA (1)...(19): siRNA sense strand
gaugcagauaagagaauua

SEQ ID NO: 1073288 - RNA, 19 nt, Homo sapiens
  misc_RNA (1)...(19): siRNA sense strand
gacaacaacaauccaguuc

SEQ ID NO: 1073289 - RNA, 19 nt, Homo sapiens
  misc_RNA (1)...(19): siRNA sense strand
cuagcugacuggaggaaug

SEQ ID NO: 1073290 - RNA, 19 nt, Homo sapiens
  misc_RNA (1)...(19): siRNA sense strand
ggaagcuguacaccacuaa

SEQ ID NO: 1073291 - RNA, 19 nt, Homo sapiens
  misc_RNA (1)...(19): siRNA sense strand
cauucuggauucccuguga

SEQ ID NO: 1073292 - RNA, 19 nt, Homo sapiens
  misc_RNA (1)...(19): siRNA sense strand
caagcaacaacaaagcauu

SEQ ID NO: 1073293 - RNA, 19 nt, Homo sapiens
  misc_RNA (1)...(19): siRNA sense strand
gacugaagccaaggucuaa

SEQ ID NO: 1073294 - RNA, 19 nt, Homo sapiens
  misc_RNA (1)...(19): siRNA sense strand
gauuugcacucagacagau

SEQ ID NO: 1073295 - RNA, 19 nt, Homo sapiens
  misc_RNA (1)...(19): siRNA sense strand
acaaauacaagcccaguag

SEQ ID NO: 1073296 - RNA, 19 nt, Homo sapiens
  misc_RNA (1)...(19): siRNA sense strand
ugucaucacuauccgaagu

SEQ ID NO: 1073297 - RNA, 19 nt, Homo sapiens
  misc_RNA (1)...(19): siRNA sense strand
agagaaggcagaccgaaga

SEQ ID NO: 1073298 - RNA, 19 nt, Homo sapiens
  misc_RNA (1)...(19): siRNA sense strand
uagcaaucauguuaagucu

SEQ ID NO: 1073299 - RNA, 19 nt, Homo sapiens
  misc_RNA (1)...(19): siRNA sense strand
gcacuggcacccgcacuau

SEQ ID NO: 1073300 - RNA, 19 nt, Homo sapiens
  misc_RNA (1)...(19): siRNA sense strand
ggcaaccaguacagcacua

SEQ ID NO: 1073301 - RNA, 19 nt, Homo sapiens
  misc_RNA (1)...(19): siRNA sense strand
cagauucagucaggaguuc

SEQ ID NO: 1073302 - RNA, 19 nt, Homo sapiens
  misc_RNA (1)...(19): siRNA sense strand
ccgaagagaauacauugau

SEQ ID NO: 1073303 - RNA, 19 nt, Homo sapiens
  misc_RNA (1)...(19): siRNA sense strand
caucaucauuccagauacu

SEQ ID NO: 1073304 - RNA, 19 nt, Homo sapiens
  misc_RNA (1)...(19): siRNA sense strand
guuaugucacugucaauga

SEQ ID NO: 1073305 - RNA, 19 nt, Homo sapiens
  misc_RNA (1)...(19): siRNA sense strand
cuaaugucaucaguuaugu

SEQ ID NO: 1073306 - RNA, 19 nt, Homo sapiens
  misc_RNA (1)...(19): siRNA sense strand
caacagagauccuaauuug

SEQ ID NO: 1073307 - RNA, 19 nt, Homo sapiens
  misc_RNA (1)...(19): siRNA sense strand
ggucuaaugucaucaguua

SEQ ID NO: 1073308 - RNA, 19 nt, Homo sapiens
  misc_RNA (1)...(19): siRNA sense strand
gcacaaccacucaaucuua

SEQ ID NO: 1073309 - RNA, 19 nt, Homo sapiens
  misc_RNA (1)...(19): siRNA sense strand
gcaaucauguuaagucuug

SEQ ID NO: 1073310 - RNA, 19 nt, Homo sapiens
  misc_RNA (1)...(19): siRNA sense strand
gcaaucagcucaauacagu

SEQ ID NO: 1073311 - RNA, 19 nt, Homo sapiens
  misc_RNA (1)...(19): siRNA sense strand
gagaauacauugaucuguu

SEQ ID NO: 1073312 - RNA, 19 nt, Homo sapiens
  misc_RNA (1)...(19): siRNA sense strand
ucagaugucucacuacuaa

SEQ ID NO: 1073313 - RNA, 19 nt, Homo sapiens
  misc_RNA (1)...(19): siRNA sense strand
caacaaagcauucuggauu

SEQ ID NO: 1073314 - RNA, 19 nt, Homo sapiens
  misc_RNA (1)...(19): siRNA sense strand
gcacaaaucuaaccaugag

SEQ ID NO: 1073315 - RNA, 19 nt, Homo sapiens
  misc_RNA (1)...(19): siRNA sense strand
ggauaaugcuguaccgauu

SEQ ID NO: 1073316 - RNA, 19 nt, Homo sapiens
  misc_RNA (1)...(19): siRNA sense strand
gaggauggauaaugcugua

SEQ ID NO: 1073317 - RNA, 19 nt, Homo sapiens
  misc_RNA (1)...(19): siRNA sense strand
gcagucagcuccagucucu

SEQ ID NO: 1073318 - RNA, 19 nt, Homo sapiens
  misc_RNA (1)...(19): siRNA sense strand
uaagacaccugaagaacau

SEQ ID NO: 1073319 - RNA, 19 nt, Homo sapiens
  misc_RNA (1)...(19): siRNA sense strand
uaauucagaugucucacua

SEQ ID NO: 1073320 - RNA, 19 nt, Homo sapiens
  misc_RNA (1)...(19): siRNA sense strand
gaacuggagacuggaauaa

SEQ ID NO: 1073321 - RNA, 19 nt, Homo sapiens
  misc_RNA (1)...(19): siRNA sense strand
gaagaagaauaagcaguca

SEQ ID NO: 1073322 - RNA, 19 nt, Homo sapiens
  misc_RNA (1)...(19): siRNA sense strand
ucaauacagugcacaauca

SEQ ID NO: 1073323 - RNA, 19 nt, Homo sapiens
  misc_RNA (1)...(19): siRNA sense strand
ugacauggcucaggugaau

SEQ ID NO: 1073324 - RNA, 19 nt, Homo sapiens
  misc_RNA (1)...(19): siRNA sense strand
caccacaucuucuuauaau

SEQ ID NO: 1073325 - RNA, 19 nt, Homo sapiens
  misc_RNA (1)...(19): siRNA sense strand
gcaccacaucuucuuauaa

SEQ ID NO: 1073326 - RNA, 19 nt, Homo sapiens
  misc_RNA (1)...(19): siRNA sense strand
ccaagucuauucucugguu

SEQ ID NO: 1073327 - RNA, 19 nt, Homo sapiens
  misc_RNA (1)...(19): siRNA sense strand
caaguccucucuagauguu

SEQ ID NO: 1073328 - RNA, 19 nt, Homo sapiens
  misc_RNA (1)...(19): siRNA sense strand
gaaggcagaccgaagagaa

SEQ ID NO: 1073329 - RNA, 19 nt, Homo sapiens
  misc_RNA (1)...(19): siRNA sense strand
gcggugcccuuuacucuga

SEQ ID NO: 1073330 - RNA, 19 nt, Homo sapiens
  misc_RNA (1)...(19): siRNA sense strand
ggacugaagccaaggucua

SEQ ID NO: 1073331 - RNA, 19 nt, Homo sapiens
  misc_RNA (1)...(19): siRNA sense strand
ucagacagauccauuccaa

SEQ ID NO: 1073332 - RNA, 19 nt, Homo sapiens
  misc_RNA (1)...(19): siRNA sense strand
ccaacagacauuuauagua

SEQ ID NO: 1073333 - RNA, 19 nt, Homo sapiens
  misc_RNA (1)...(19): siRNA sense strand
ccaguucccucccuucgaa

SEQ ID NO: 1073334 - RNA, 19 nt, Homo sapiens
  misc_RNA (1)...(19): siRNA sense strand
gcggaggguucacauguau

SEQ ID NO: 1073335 - RNA, 19 nt, Homo sapiens
  misc_RNA (1)...(19): siRNA sense strand
aggaagaggacaacaaaua

SEQ ID NO: 1073336 - RNA, 19 nt, Homo sapiens
  misc_RNA (1)...(19): siRNA sense strand
uaaacuaccagucagcuuu

SEQ ID NO: 1073337 - RNA, 19 nt, Homo sapiens
  misc_RNA (1)...(19): siRNA sense strand
gggaagcuguacaccacua

SEQ ID NO: 1073338 - RNA, 19 nt, Homo sapiens
  misc_RNA (1)...(19): siRNA sense strand
caaauucuccugccuucaa

SEQ ID NO: 1073339 - RNA, 19 nt, Homo sapiens
  misc_RNA (1)...(19): siRNA sense strand
ccaaauacaagcacaaauc

SEQ ID NO: 1073340 - RNA, 19 nt, Homo sapiens
  misc_RNA (1)...(19): siRNA sense strand
ccacaucuucuuauaauuc

SEQ ID NO: 1073341 - RNA, 19 nt, Homo sapiens
  misc_RNA (1)...(19): siRNA sense strand
gcacucagacagauccauu

SEQ ID NO: 1073342 - RNA, 19 nt, Homo sapiens
  misc_RNA (1)...(19): siRNA sense strand
gaucaagagucccuucacu

SEQ ID NO: 1073343 - RNA, 19 nt, Homo sapiens
  misc_RNA (1)...(19): siRNA sense strand
ggaagaggacaacaaauac

SEQ ID NO: 1073344 - RNA, 19 nt, Homo sapiens
  misc_RNA (1)...(19): siRNA sense strand
gaagagaauacauugaucu

SEQ ID NO: 1073345 - RNA, 19 nt, Homo sapiens
  misc_RNA (1)...(19): siRNA sense strand
gaagaggacaacaaauaca

SEQ ID NO: 1073346 - RNA, 19 nt, Homo sapiens
  misc_RNA (1)...(19): siRNA sense strand
ugacucaccuuuuggauuu

SEQ ID NO: 1073347 - RNA, 19 nt, Homo sapiens
  misc_RNA (1)...(19): siRNA sense strand
gacaaugacucaccuuuug

SEQ ID NO: 1073348 - RNA, 19 nt, Homo sapiens
  misc_RNA (1)...(19): siRNA sense strand
gaagcucggaaguacauuu

SEQ ID NO: 1073349 - RNA, 19 nt, Homo sapiens
  misc_RNA (1)...(19): siRNA sense strand
ggaggguucacauguauga

SEQ ID NO: 1073350 - RNA, 19 nt, Homo sapiens
  misc_RNA (1)...(19): siRNA sense strand
acagauccauuccaacaga

SEQ ID NO: 1073351 - RNA, 19 nt, Homo sapiens
  misc_RNA (1)...(19): siRNA sense strand
gccagucgcuucagugagu

SEQ ID NO: 1073352 - RNA, 19 nt, Homo sapiens
  misc_RNA (1)...(19): siRNA sense strand
ggaggaaugcccacucuca

SEQ ID NO: 1073353 - RNA, 19 nt, Homo sapiens
  misc_RNA (1)...(19): siRNA sense strand
ggacuacaagcaacaacaa

SEQ ID NO: 1073354 - RNA, 19 nt, Homo sapiens
  misc_RNA (1)...(19): siRNA sense strand
cauugugccuccacugaaa

SEQ ID NO: 1073355 - RNA, 19 nt, Homo sapiens
  misc_RNA (1)...(19): siRNA sense strand
cgaagagaauacauugauc

SEQ ID NO: 1073356 - RNA, 19 nt, Homo sapiens
  misc_RNA (1)...(19): siRNA sense strand
gccaaggucuaaugucauc

SEQ ID NO: 1073357 - RNA, 19 nt, Homo sapiens
  misc_RNA (1)...(19): siRNA sense strand
gcucacaauugaugcagau

SEQ ID NO: 1073358 - RNA, 19 nt, Homo sapiens
  misc_RNA (1)...(19): siRNA sense strand
agaaaaugcucacaauuga

SEQ ID NO: 1073359 - RNA, 19 nt, Homo sapiens
  misc_RNA (1)...(19): siRNA sense strand
aagccaaggucuaauguca

SEQ ID NO: 1073360 - RNA, 19 nt, Homo sapiens
  misc_RNA (1)...(19): siRNA sense strand
gacucugacucuucuuuga

SEQ ID NO: 1073361 - RNA, 19 nt, Homo sapiens
  misc_RNA (1)...(19): siRNA sense strand
gaccgaagagaauacauug

SEQ ID NO: 1073362 - RNA, 19 nt, Homo sapiens
  misc_RNA (1)...(19): siRNA sense strand
ugaggaagaggacaacaaa

SEQ ID NO: 1073363 - RNA, 19 nt, Homo sapiens
  misc_RNA (1)...(19): siRNA sense strand
gauaaugcuguaccgauug

SEQ ID NO: 1073364 - RNA, 19 nt, Homo sapiens
  misc_RNA (1)...(19): siRNA sense strand
ucaaguagccaccaucaca

SEQ ID NO: 1073365 - RNA, 19 nt, Homo sapiens
  misc_RNA (1)...(19): siRNA sense strand
caaacuggacuacaagcaa

SEQ ID NO: 1073366 - RNA, 19 nt, Homo sapiens
  misc_RNA (1)...(19): siRNA sense strand
ggcaauaguggauccguuu

SEQ ID NO: 1073367 - RNA, 19 nt, Homo sapiens
  misc_RNA (1)...(19): siRNA sense strand
gcuccagucucuuccaagu

SEQ ID NO: 1073368 - RNA, 19 nt, Homo sapiens
  misc_RNA (1)...(19): siRNA sense strand
ucacaauugaugcagauaa

SEQ ID NO: 1073369 - RNA, 19 nt, Homo sapiens
  misc_RNA (1)...(19): siRNA sense strand
uggagggacucagcaaauu

SEQ ID NO: 1073370 - RNA, 19 nt, Homo sapiens
  misc_RNA (1)...(19): siRNA sense strand
caaauacaagcacaaaucu

SEQ ID NO: 1073371 - RNA, 19 nt, Homo sapiens
  misc_RNA (1)...(19): siRNA sense strand
guucuagcuuccaguucua

SEQ ID NO: 1073372 - RNA, 19 nt, Homo sapiens
  misc_RNA (1)...(19): siRNA sense strand
caaaagaagcucggaagua

SEQ ID NO: 1073373 - RNA, 19 nt, Homo sapiens
  misc_RNA (1)...(19): siRNA sense strand
ucaacagagauccuaauuu

SEQ ID NO: 1073374 - RNA, 19 nt, Homo sapiens
  misc_RNA (1)...(19): siRNA sense strand
gcucagccacuacagauuc

SEQ ID NO: 1073375 - RNA, 19 nt, Homo sapiens
  misc_RNA (1)...(19): siRNA sense strand
gagaauuaccccucuaaaa

SEQ ID NO: 1073376 - RNA, 19 nt, Homo sapiens
  misc_RNA (1)...(19): siRNA sense strand
cacaaccacucaaucuuag

SEQ ID NO: 1073377 - RNA, 19 nt, Homo sapiens
  misc_RNA (1)...(19): siRNA sense strand
ggagggacucagcaaauuc

SEQ ID NO: 1073378 - RNA, 19 nt, Homo sapiens
  misc_RNA (1)...(19): siRNA sense strand
agacagauccauuccaaca

SEQ ID NO: 1073379 - RNA, 19 nt, Homo sapiens
  misc_RNA (1)...(19): siRNA sense strand
accaugagcuucagcaauc

SEQ ID NO: 1073380 - RNA, 19 nt, Homo sapiens
  misc_RNA (1)...(19): siRNA sense strand
ccacccagauuugcacuca

SEQ ID NO: 1073381 - RNA, 19 nt, Homo sapiens
  misc_RNA (1)...(19): siRNA sense strand
caucagcccaucaucauuc

SEQ ID NO: 1073382 - RNA, 19 nt, Homo sapiens
  misc_RNA (1)...(19): siRNA sense strand
cgcaccacaucuucuuaua

SEQ ID NO: 1073383 - RNA, 19 nt, Homo sapiens
  misc_RNA (1)...(19): siRNA sense strand
aacaaagcauucuggauuc

SEQ ID NO: 1073384 - RNA, 19 nt, Homo sapiens
  misc_RNA (1)...(19): siRNA sense strand
cacaauugaugcagauaag

SEQ ID NO: 1073385 - RNA, 19 nt, Homo sapiens
  misc_RNA (1)...(19): siRNA sense strand
caaugauucuccagacucu

SEQ ID NO: 1073386 - RNA, 19 nt, Homo sapiens
  misc_RNA (1)...(19): siRNA sense strand
gcuuaagacaccugaagaa

SEQ ID NO: 1073387 - RNA, 19 nt, Homo sapiens
  misc_RNA (1)...(19): siRNA sense strand
gaugcagauaagagaauua

SEQ ID NO: 1073388 - RNA, 19 nt, Homo sapiens
  misc_RNA (1)...(19): siRNA sense strand
gacaacaacaauccaguuc

SEQ ID NO: 1073389 - RNA, 19 nt, Homo sapiens
  misc_RNA (1)...(19): siRNA sense strand
cuagcugacuggaggaaug

SEQ ID NO: 1073390 - RNA, 19 nt, Homo sapiens
  misc_RNA (1)...(19): siRNA sense strand
ggaagcuguacaccacuaa

SEQ ID NO: 1073391 - RNA, 19 nt, Homo sapiens
  misc_RNA (1)...(19): siRNA sense strand
cauucuggauucccuguga

SEQ ID NO: 1073392 - RNA, 19 nt, Homo sapiens
  misc_RNA (1)...(19): siRNA sense strand
caagcaacaacaaagcauu

SEQ ID NO: 1073393 - RNA, 19 nt, Homo sapiens
  misc_RNA (1)...(19): siRNA sense strand
gacugaagccaaggucuaa

SEQ ID NO: 1073394 - RNA, 19 nt, Homo sapiens
  misc_RNA (1)...(19): siRNA sense strand
gauuugcacucagacagau

SEQ ID NO: 1073395 - RNA, 19 nt, Homo sapiens
  misc_RNA (1)...(19): siRNA sense strand
acaaauacaagcccaguag

SEQ ID NO: 1073396 - RNA, 19 nt, Homo sapiens
  misc_RNA (1)...(19): siRNA sense strand
ugucaucacuauccgaagu

SEQ ID NO: 1073397 - RNA, 19 nt, Homo sapiens
  misc_RNA (1)...(19): siRNA sense strand
agagaaggcagaccgaaga

SEQ ID NO: 1073398 - RNA, 19 nt, Homo sapiens
  misc_RNA (1)...(19): siRNA sense strand
uagcaaucauguuaagucu

SEQ ID NO: 1073399 - RNA, 19 nt, Homo sapiens
  misc_RNA (1)...(19): siRNA sense strand
gcacuggcacccgcacuau

SEQ ID NO: 1073400 - RNA, 19 nt, Homo sapiens
  misc_RNA (1)...(19): siRNA sense strand
ggcaaccaguacagcacua

SEQ ID NO: 1073401 - RNA, 19 nt, Homo sapiens
  misc_RNA (1)...(19): siRNA sense strand
cagauucagucaggaguuc

SEQ ID NO: 1073402 - RNA, 19 nt, Homo sapiens
  misc_RNA (1)...(19): siRNA sense strand
ccgaagagaauacauugau

SEQ ID NO: 1073403 - RNA, 19 nt, Homo sapiens
  misc_RNA (1)...(19): siRNA sense strand
caucaucauuccagauacu

SEQ ID NO: 1073404 - RNA, 19 nt, Homo sapiens
  misc_RNA (1)...(19): siRNA sense strand
guuaugucacugucaauga

SEQ ID NO: 1073405 - RNA, 19 nt, Homo sapiens
  misc_RNA (1)...(19): siRNA sense strand
cuaaugucaucaguuaugu

SEQ ID NO: 1073406 - RNA, 19 nt, Homo sapiens
  misc_RNA (1)...(19): siRNA sense strand
gaaguaagaugauguuuca

SEQ ID NO: 1073407 - RNA, 19 nt, Homo sapiens
  misc_RNA (1)...(19): siRNA sense strand
gugaagaucuggaaagaaa

SEQ ID NO: 1073408 - RNA, 19 nt, Homo sapiens
  misc_RNA (1)...(19): siRNA sense strand
caaacaugguucacauuua

SEQ ID NO: 1073409 - RNA, 19 nt, Homo sapiens
  misc_RNA (1)...(19): siRNA sense strand
gaaaguguuugaagacuau

SEQ ID NO: 1073410 - RNA, 19 nt, Homo sapiens
  misc_RNA (1)...(19): siRNA sense strand
ggacauaugacccagauuu

SEQ ID NO: 1073411 - RNA, 19 nt, Homo sapiens
  misc_RNA (1)...(19): siRNA sense strand
gaaagagcuuguaccauca

SEQ ID NO: 1073412 - RNA, 19 nt, Homo sapiens
  misc_RNA (1)...(19): siRNA sense strand
ggaccagcaucuuuauauu

SEQ ID NO: 1073413 - RNA, 19 nt, Homo sapiens
  misc_RNA (1)...(19): siRNA sense strand
caacaaacaugguucacau

SEQ ID NO: 1073414 - RNA, 19 nt, Homo sapiens
  misc_RNA (1)...(19): siRNA sense strand
gcaaagccauuggauaugu

SEQ ID NO: 1073415 - RNA, 19 nt, Homo sapiens
  misc_RNA (1)...(19): siRNA sense strand
gauguucugugcuguauga

SEQ ID NO: 1073416 - RNA, 19 nt, Homo sapiens
  misc_RNA (1)...(19): siRNA sense strand
gaccagcaucuuuauauua

SEQ ID NO: 1073417 - RNA, 19 nt, Homo sapiens
  misc_RNA (1)...(19): siRNA sense strand
gaagaggacuuuggugauc

SEQ ID NO: 1073418 - RNA, 19 nt, Homo sapiens
  misc_RNA (1)...(19): siRNA sense strand
ggaaauggagggacaagaa

SEQ ID NO: 1073419 - RNA, 19 nt, Homo sapiens
  misc_RNA (1)...(19): siRNA sense strand
guaagaugauguuucaaga

SEQ ID NO: 1073420 - RNA, 19 nt, Homo sapiens
  misc_RNA (1)...(19): siRNA sense strand
gauaauacucugcaucauu

SEQ ID NO: 1073421 - RNA, 19 nt, Homo sapiens
  misc_RNA (1)...(19): siRNA sense strand
gaacacauugucuaaauuc

SEQ ID NO: 1073422 - RNA, 19 nt, Homo sapiens
  misc_RNA (1)...(19): siRNA sense strand
gaagcaaagccauuggaua

SEQ ID NO: 1073423 - RNA, 19 nt, Homo sapiens
  misc_RNA (1)...(19): siRNA sense strand
cagaacacauugucuaaau

SEQ ID NO: 1073424 - RNA, 19 nt, Homo sapiens
  misc_RNA (1)...(19): siRNA sense strand
ggaauuauagguuauggaa

SEQ ID NO: 1073425 - RNA, 19 nt, Homo sapiens
  misc_RNA (1)...(19): siRNA sense strand
gauugaaaguguuugaaga

SEQ ID NO: 1073426 - RNA, 19 nt, Homo sapiens
  misc_RNA (1)...(19): siRNA sense strand
guacaccaaucuucaggaa

SEQ ID NO: 1073427 - RNA, 19 nt, Homo sapiens
  misc_RNA (1)...(19): siRNA sense strand
caacugaaauugccaaagc

SEQ ID NO: 1073428 - RNA, 19 nt, Homo sapiens
  misc_RNA (1)...(19): siRNA sense strand
ucaaucugcugaugagaaa

SEQ ID NO: 1073429 - RNA, 19 nt, Homo sapiens
  misc_RNA (1)...(19): siRNA sense strand
gaagggcacucccaaugag

SEQ ID NO: 1073430 - RNA, 19 nt, Homo sapiens
  misc_RNA (1)...(19): siRNA sense strand
auaauacucugcaucauug

SEQ ID NO: 1073431 - RNA, 19 nt, Homo sapiens
  misc_RNA (1)...(19): siRNA sense strand
ugaaaguguuugaagacua

SEQ ID NO: 1073432 - RNA, 19 nt, Homo sapiens
  misc_RNA (1)...(19): siRNA sense strand
uaacuuugcuuucuauggu

SEQ ID NO: 1073433 - RNA, 19 nt, Homo sapiens
  misc_RNA (1)...(19): siRNA sense strand
gaaggaagcaaagccauug

SEQ ID NO: 1073434 - RNA, 19 nt, Homo sapiens
  misc_RNA (1)...(19): siRNA sense strand
gaaaugauggauccacaga

SEQ ID NO: 1073435 - RNA, 19 nt, Homo sapiens
  misc_RNA (1)...(19): siRNA sense strand
acaaggaccagcaucuuua

SEQ ID NO: 1073436 - RNA, 19 nt, Homo sapiens
  misc_RNA (1)...(19): siRNA sense strand
uguaugaucuuccuacugu

SEQ ID NO: 1073437 - RNA, 19 nt, Homo sapiens
  misc_RNA (1)...(19): siRNA sense strand
aaugauggauccacagaaa

SEQ ID NO: 1073438 - RNA, 19 nt, Homo sapiens
  misc_RNA (1)...(19): siRNA sense strand
ucuaguugcuggaaguaua

SEQ ID NO: 1073439 - RNA, 19 nt, Homo sapiens
  misc_RNA (1)...(19): siRNA sense strand
gaaaguugcaguuacagau

SEQ ID NO: 1073440 - RNA, 19 nt, Homo sapiens
  misc_RNA (1)...(19): siRNA sense strand
gugcauucgcuacuuauua

SEQ ID NO: 1073441 - RNA, 19 nt, Homo sapiens
  misc_RNA (1)...(19): siRNA sense strand
aaacuucgucauugcauua

SEQ ID NO: 1073442 - RNA, 19 nt, Homo sapiens
  misc_RNA (1)...(19): siRNA sense strand
gguauuggauucucauugg

SEQ ID NO: 1073443 - RNA, 19 nt, Homo sapiens
  misc_RNA (1)...(19): siRNA sense strand
gaagaucuggaaagaaaug

SEQ ID NO: 1073444 - RNA, 19 nt, Homo sapiens
  misc_RNA (1)...(19): siRNA sense strand
gaucaagaagcaacuaguu

SEQ ID NO: 1073445 - RNA, 19 nt, Homo sapiens
  misc_RNA (1)...(19): siRNA sense strand
caacuuauuugucuuucuc

SEQ ID NO: 1073446 - RNA, 19 nt, Homo sapiens
  misc_RNA (1)...(19): siRNA sense strand
ggaaguaagaugauguuuc

SEQ ID NO: 1073447 - RNA, 19 nt, Homo sapiens
  misc_RNA (1)...(19): siRNA sense strand
gcaguuacagaugaaguua

SEQ ID NO: 1073448 - RNA, 19 nt, Homo sapiens
  misc_RNA (1)...(19): siRNA sense strand
ccuagcauuuggaucuuua

SEQ ID NO: 1073449 - RNA, 19 nt, Homo sapiens
  misc_RNA (1)...(19): siRNA sense strand
guacaucccuaccuuccau

SEQ ID NO: 1073450 - RNA, 19 nt, Homo sapiens
  misc_RNA (1)...(19): siRNA sense strand
ggaaggaagcaaagccauu

SEQ ID NO: 1073451 - RNA, 19 nt, Homo sapiens
  misc_RNA (1)...(19): siRNA sense strand
gaugauguuucaagaugga

SEQ ID NO: 1073452 - RNA, 19 nt, Homo sapiens
  misc_RNA (1)...(19): siRNA sense strand
aagaugauguuucaagaug

SEQ ID NO: 1073453 - RNA, 19 nt, Homo sapiens
  misc_RNA (1)...(19): siRNA sense strand
caagaaguguuguagaacu

SEQ ID NO: 1073454 - RNA, 19 nt, Homo sapiens
  misc_RNA (1)...(19): siRNA sense strand
cagaaaugccuauauuaug

SEQ ID NO: 1073455 - RNA, 19 nt, Homo sapiens
  misc_RNA (1)...(19): siRNA sense strand
cacaggaucccuagcauuu

SEQ ID NO: 1073456 - RNA, 19 nt, Homo sapiens
  misc_RNA (1)...(19): siRNA sense strand
gucuuucucuggcuuauaa

SEQ ID NO: 1073457 - RNA, 19 nt, Homo sapiens
  misc_RNA (1)...(19): siRNA sense strand
aagcaaagccauuggauau

SEQ ID NO: 1073458 - RNA, 19 nt, Homo sapiens
  misc_RNA (1)...(19): siRNA sense strand
caaagccauuggauauguu

SEQ ID NO: 1073459 - RNA, 19 nt, Homo sapiens
  misc_RNA (1)...(19): siRNA sense strand
cacauugucuaaauuccua

SEQ ID NO: 1073460 - RNA, 19 nt, Homo sapiens
  misc_RNA (1)...(19): siRNA sense strand
cuuauaaacuucgucauug

SEQ ID NO: 1073461 - RNA, 19 nt, Homo sapiens
  misc_RNA (1)...(19): siRNA sense strand
ggaagacuaccgucaguuc

SEQ ID NO: 1073462 - RNA, 19 nt, Homo sapiens
  misc_RNA (1)...(19): siRNA sense strand
gcuuauaaacuucgucauu

SEQ ID NO: 1073463 - RNA, 19 nt, Homo sapiens
  misc_RNA (1)...(19): siRNA sense strand
caauaaacuucuugaugca

SEQ ID NO: 1073464 - RNA, 19 nt, Homo sapiens
  misc_RNA (1)...(19): siRNA sense strand
gcaaaugguaucaauaaac

SEQ ID NO: 1073465 - RNA, 19 nt, Homo sapiens
  misc_RNA (1)...(19): siRNA sense strand
ggagggacaagaaguguug

SEQ ID NO: 1073466 - RNA, 19 nt, Homo sapiens
  misc_RNA (1)...(19): siRNA sense strand
uaaccuauguggaaaugca

SEQ ID NO: 1073467 - RNA, 19 nt, Homo sapiens
  misc_RNA (1)...(19): siRNA sense strand
cuacagugcugccugagau

SEQ ID NO: 1073468 - RNA, 19 nt, Homo sapiens
  misc_RNA (1)...(19): siRNA sense strand
acgcccaaguucuguauua

SEQ ID NO: 1073469 - RNA, 19 nt, Homo sapiens
  misc_RNA (1)...(19): siRNA sense strand
cugcaaaugguaucaauaa

SEQ ID NO: 1073470 - RNA, 19 nt, Homo sapiens
  misc_RNA (1)...(19): siRNA sense strand
acaaacaugguucacauuu

SEQ ID NO: 1073471 - RNA, 19 nt, Homo sapiens
  misc_RNA (1)...(19): siRNA sense strand
ggaugaugauuguccaaca

SEQ ID NO: 1073472 - RNA, 19 nt, Homo sapiens
  misc_RNA (1)...(19): siRNA sense strand
guaccuguauacaaaguca

SEQ ID NO: 1073473 - RNA, 19 nt, Homo sapiens
  misc_RNA (1)...(19): siRNA sense strand
gggauucagacuaacauaa

SEQ ID NO: 1073474 - RNA, 19 nt, Homo sapiens
  misc_RNA (1)...(19): siRNA sense strand
ggaagaggacuuuggugau

SEQ ID NO: 1073475 - RNA, 19 nt, Homo sapiens
  misc_RNA (1)...(19): siRNA sense strand
gcacaaggaccagcaucuu

SEQ ID NO: 1073476 - RNA, 19 nt, Homo sapiens
  misc_RNA (1)...(19): siRNA sense strand
uaaacuucgucauugcauu

SEQ ID NO: 1073477 - RNA, 19 nt, Homo sapiens
  misc_RNA (1)...(19): siRNA sense strand
gaauccgagucgccauuau

SEQ ID NO: 1073478 - RNA, 19 nt, Homo sapiens
  misc_RNA (1)...(19): siRNA sense strand
cagcgucuaugcaaugugu

SEQ ID NO: 1073479 - RNA, 19 nt, Homo sapiens
  misc_RNA (1)...(19): siRNA sense strand
ggacgagccauacgauauc

SEQ ID NO: 1073480 - RNA, 19 nt, Homo sapiens
  misc_RNA (1)...(19): siRNA sense strand
gaaauggagggacaagaag

SEQ ID NO: 1073481 - RNA, 19 nt, Homo sapiens
  misc_RNA (1)...(19): siRNA sense strand
gguccuuaguuggauauuu

SEQ ID NO: 1073482 - RNA, 19 nt, Homo sapiens
  misc_RNA (1)...(19): siRNA sense strand
acaauaggaaguaagauga

SEQ ID NO: 1073483 - RNA, 19 nt, Homo sapiens
  misc_RNA (1)...(19): siRNA sense strand
cccagaagcagaaagagua

SEQ ID NO: 1073484 - RNA, 19 nt, Homo sapiens
  misc_RNA (1)...(19): siRNA sense strand
guucugugcuguaugaucu

SEQ ID NO: 1073485 - RNA, 19 nt, Homo sapiens
  misc_RNA (1)...(19): siRNA sense strand
gaccaccgucuuaaacgua

SEQ ID NO: 1073486 - RNA, 19 nt, Homo sapiens
  misc_RNA (1)...(19): siRNA sense strand
ggaccaccgucuuaaacgu

SEQ ID NO: 1073487 - RNA, 19 nt, Homo sapiens
  misc_RNA (1)...(19): siRNA sense strand
acaucgggauucagacuaa

SEQ ID NO: 1073488 - RNA, 19 nt, Homo sapiens
  misc_RNA (1)...(19): siRNA sense strand
uauggaauauggcacuguu

SEQ ID NO: 1073489 - RNA, 19 nt, Homo sapiens
  misc_RNA (1)...(19): siRNA sense strand
guucuggccuuccuauucu

SEQ ID NO: 1073490 - RNA, 19 nt, Homo sapiens
  misc_RNA (1)...(19): siRNA sense strand
cagaagggcacucccaaug

SEQ ID NO: 1073491 - RNA, 19 nt, Homo sapiens
  misc_RNA (1)...(19): siRNA sense strand
auuagucuauccagcuuua

SEQ ID NO: 1073492 - RNA, 19 nt, Homo sapiens
  misc_RNA (1)...(19): siRNA sense strand
uaccgucaguucuguaaga

SEQ ID NO: 1073493 - RNA, 19 nt, Homo sapiens
  misc_RNA (1)...(19): siRNA sense strand
gaucuggaaagaaaugaug

SEQ ID NO: 1073494 - RNA, 19 nt, Homo sapiens
  misc_RNA (1)...(19): siRNA sense strand
cacaaggaccagcaucuuu

SEQ ID NO: 1073495 - RNA, 19 nt, Homo sapiens
  misc_RNA (1)...(19): siRNA sense strand
gaugaugauuguccaacag

SEQ ID NO: 1073496 - RNA, 19 nt, Homo sapiens
  misc_RNA (1)...(19): siRNA sense strand
ggauucagacuaacauaag

SEQ ID NO: 1073497 - RNA, 19 nt, Homo sapiens
  misc_RNA (1)...(19): siRNA sense strand
guaccagucccuccguauu

SEQ ID NO: 1073498 - RNA, 19 nt, Homo sapiens
  misc_RNA (1)...(19): siRNA sense strand
cuucaugauuggugugauu

SEQ ID NO: 1073499 - RNA, 19 nt, Homo sapiens
  misc_RNA (1)...(19): siRNA sense strand
cauaugacccagauuucaa

SEQ ID NO: 1073500 - RNA, 19 nt, Homo sapiens
  misc_RNA (1)...(19): siRNA sense strand
aacaggaguuguacagaug

SEQ ID NO: 1073501 - RNA, 19 nt, Homo sapiens
  misc_RNA (1)...(19): siRNA sense strand
uaaccugcauggaauucug

SEQ ID NO: 1073502 - RNA, 19 nt, Homo sapiens
  misc_RNA (1)...(19): siRNA sense strand
uguguaacuuugcuuucua

SEQ ID NO: 1073503 - RNA, 19 nt, Homo sapiens
  misc_RNA (1)...(19): siRNA sense strand
cuauccagcuuuaacuuuc

SEQ ID NO: 1073504 - RNA, 19 nt, Homo sapiens
  misc_RNA (1)...(19): siRNA sense strand
gaacugcaacaaacauggu

SEQ ID NO: 1073505 - RNA, 19 nt, Homo sapiens
  misc_RNA (1)...(19): siRNA sense strand
ugaagacuaugcaagaacu

SEQ ID NO: 1073506 - RNA, 19 nt, Homo sapiens
  misc_RNA (1)...(19): siRNA sense strand
gaaccaaaccugucucuua

SEQ ID NO: 1073507 - RNA, 19 nt, Homo sapiens
  misc_RNA (1)...(19): siRNA sense strand
gaucaucugucuuugguua

SEQ ID NO: 1073508 - RNA, 19 nt, Homo sapiens
  misc_RNA (1)...(19): siRNA sense strand
gggaaucucuuaguuauaa

SEQ ID NO: 1073509 - RNA, 19 nt, Homo sapiens
  misc_RNA (1)...(19): siRNA sense strand
gcaaggaaacucaacuuua

SEQ ID NO: 1073510 - RNA, 19 nt, Homo sapiens
  misc_RNA (1)...(19): siRNA sense strand
caaugcagcuuucuauauu

SEQ ID NO: 1073511 - RNA, 19 nt, Homo sapiens
  misc_RNA (1)...(19): siRNA sense strand
uggcauaccuggauacaua

SEQ ID NO: 1073512 - RNA, 19 nt, Homo sapiens
  misc_RNA (1)...(19): siRNA sense strand
gcagacgguugcaauuaua

SEQ ID NO: 1073513 - RNA, 19 nt, Homo sapiens
  misc_RNA (1)...(19): siRNA sense strand
caaggaaacucaacuuuag

SEQ ID NO: 1073514 - RNA, 19 nt, Homo sapiens
  misc_RNA (1)...(19): siRNA sense strand
gaacacugcucauugcaau

SEQ ID NO: 1073515 - RNA, 19 nt, Homo sapiens
  misc_RNA (1)...(19): siRNA sense strand
ggauacauauuacuucuga

SEQ ID NO: 1073516 - RNA, 19 nt, Homo sapiens
  misc_RNA (1)...(19): siRNA sense strand
gaacaauggugucuacaag

SEQ ID NO: 1073517 - RNA, 19 nt, Homo sapiens
  misc_RNA (1)...(19): siRNA sense strand
ccaaagaguuuaccaagau

SEQ ID NO: 1073518 - RNA, 19 nt, Homo sapiens
  misc_RNA (1)...(19): siRNA sense strand
caucacauccuauacuuua

SEQ ID NO: 1073519 - RNA, 19 nt, Homo sapiens
  misc_RNA (1)...(19): siRNA sense strand
gaauaucccuccucagaag

SEQ ID NO: 1073520 - RNA, 19 nt, Homo sapiens
  misc_RNA (1)...(19): siRNA sense strand
uuaccaagaucccaaagua

SEQ ID NO: 1073521 - RNA, 19 nt, Homo sapiens
  misc_RNA (1)...(19): siRNA sense strand
gacacuagcucuuccaugu

SEQ ID NO: 1073522 - RNA, 19 nt, Homo sapiens
  misc_RNA (1)...(19): siRNA sense strand
ucuaauagcaggaaucaua

SEQ ID NO: 1073523 - RNA, 19 nt, Homo sapiens
  misc_RNA (1)...(19): siRNA sense strand
ucugagaaauccaaguuua

SEQ ID NO: 1073524 - RNA, 19 nt, Homo sapiens
  misc_RNA (1)...(19): siRNA sense strand
aaucuuugguuuccuguua

SEQ ID NO: 1073525 - RNA, 19 nt, Homo sapiens
  misc_RNA (1)...(19): siRNA sense strand
ucauggagcaguacaaaua

SEQ ID NO: 1073526 - RNA, 19 nt, Homo sapiens
  misc_RNA (1)...(19): siRNA sense strand
uagaggaucaugcagauua

SEQ ID NO: 1073527 - RNA, 19 nt, Homo sapiens
  misc_RNA (1)...(19): siRNA sense strand
ccaaaccugucucuuauca

SEQ ID NO: 1073528 - RNA, 19 nt, Homo sapiens
  misc_RNA (1)...(19): siRNA sense strand
cuagaucacauaaccauua

SEQ ID NO: 1073529 - RNA, 19 nt, Homo sapiens
  misc_RNA (1)...(19): siRNA sense strand
gcaggaaucauaagucuuc

SEQ ID NO: 1073530 - RNA, 19 nt, Homo sapiens
  misc_RNA (1)...(19): siRNA sense strand
agccacagcuuaagucuuu

SEQ ID NO: 1073531 - RNA, 19 nt, Homo sapiens
  misc_RNA (1)...(19): siRNA sense strand
gaacccaugugcggugaaa

SEQ ID NO: 1073532 - RNA, 19 nt, Homo sapiens
  misc_RNA (1)...(19): siRNA sense strand
gcacugggcugugaaaauu

SEQ ID NO: 1073533 - RNA, 19 nt, Homo sapiens
  misc_RNA (1)...(19): siRNA sense strand
aaaccugucucuuaucaug

SEQ ID NO: 1073534 - RNA, 19 nt, Homo sapiens
  misc_RNA (1)...(19): siRNA sense strand
cagaauaucccuccucaga

SEQ ID NO: 1073535 - RNA, 19 nt, Homo sapiens
  misc_RNA (1)...(19): siRNA sense strand
ggaaucauaagucuucuug

SEQ ID NO: 1073536 - RNA, 19 nt, Homo sapiens
  misc_RNA (1)...(19): siRNA sense strand
uaauggaaauggcaagaga

SEQ ID NO: 1073537 - RNA, 19 nt, Homo sapiens
  misc_RNA (1)...(19): siRNA sense strand
gcaauuauaggaccaaucu

SEQ ID NO: 1073538 - RNA, 19 nt, Homo sapiens
  misc_RNA (1)...(19): siRNA sense strand
gcaaauguucagagacaaa

SEQ ID NO: 1073539 - RNA, 19 nt, Homo sapiens
  misc_RNA (1)...(19): siRNA sense strand
aaccaaaccugucucuuau

SEQ ID NO: 1073540 - RNA, 19 nt, Homo sapiens
  misc_RNA (1)...(19): siRNA sense strand
caauuaccaguuucaguua

SEQ ID NO: 1073541 - RNA, 19 nt, Homo sapiens
  misc_RNA (1)...(19): siRNA sense strand
ggaauugcagcuucuaaau

SEQ ID NO: 1073542 - RNA, 19 nt, Homo sapiens
  misc_RNA (1)...(19): siRNA sense strand
ucaauuaccaguuucaguu

SEQ ID NO: 1073543 - RNA, 19 nt, Homo sapiens
  misc_RNA (1)...(19): siRNA sense strand
caagagagaaagaacaaug

SEQ ID NO: 1073544 - RNA, 19 nt, Homo sapiens
  misc_RNA (1)...(19): siRNA sense strand
aaacucccauucagccuuu

SEQ ID NO: 1073545 - RNA, 19 nt, Homo sapiens
  misc_RNA (1)...(19): siRNA sense strand
gagagaagguuugauaucc

SEQ ID NO: 1073546 - RNA, 19 nt, Homo sapiens
  misc_RNA (1)...(19): siRNA sense strand
caaagaaaauauccaguug

SEQ ID NO: 1073547 - RNA, 19 nt, Homo sapiens
  misc_RNA (1)...(19): siRNA sense strand
gaaagaacaauggugucua

SEQ ID NO: 1073548 - RNA, 19 nt, Homo sapiens
  misc_RNA (1)...(19): siRNA sense strand
ggacacuucauccaaagaa

SEQ ID NO: 1073549 - RNA, 19 nt, Homo sapiens
  misc_RNA (1)...(19): siRNA sense strand
gugccaaacuauauguuga

SEQ ID NO: 1073550 - RNA, 19 nt, Homo sapiens
  misc_RNA (1)...(19): siRNA sense strand
gauauucuccuuccuccaa

SEQ ID NO: 1073551 - RNA, 19 nt, Homo sapiens
  misc_RNA (1)...(19): siRNA sense strand
ggagcaggguguguaauca

SEQ ID NO: 1073552 - RNA, 19 nt, Homo sapiens
  misc_RNA (1)...(19): siRNA sense strand
ugaaauugggaaucucuua

SEQ ID NO: 1073553 - RNA, 19 nt, Homo sapiens
  misc_RNA (1)...(19): siRNA sense strand
auagagagaagguuugaua

SEQ ID NO: 1073554 - RNA, 19 nt, Homo sapiens
  misc_RNA (1)...(19): siRNA sense strand
gcagcaguauggacaguca

SEQ ID NO: 1073555 - RNA, 19 nt, Homo sapiens
  misc_RNA (1)...(19): siRNA sense strand
gagaggauucuaauucuuc

SEQ ID NO: 1073556 - RNA, 19 nt, Homo sapiens
  misc_RNA (1)...(19): siRNA sense strand
gguuugauaucccuucuuc

SEQ ID NO: 1073557 - RNA, 19 nt, Homo sapiens
  misc_RNA (1)...(19): siRNA sense strand
ggaaguagaggaucaugca

SEQ ID NO: 1073558 - RNA, 19 nt, Homo sapiens
  misc_RNA (1)...(19): siRNA sense strand
uaaaagauguggaaguaga

SEQ ID NO: 1073559 - RNA, 19 nt, Homo sapiens
  misc_RNA (1)...(19): siRNA sense strand
ucacacagacuaccaaaca

SEQ ID NO: 1073560 - RNA, 19 nt, Homo sapiens
  misc_RNA (1)...(19): siRNA sense strand
gacaaugcagcuuucuaua

SEQ ID NO: 1073561 - RNA, 19 nt, Homo sapiens
  misc_RNA (1)...(19): siRNA sense strand
uugccuaccuggaugauuu

SEQ ID NO: 1073562 - RNA, 19 nt, Homo sapiens
  misc_RNA (1)...(19): siRNA sense strand
aaagaacaauggugucuac

SEQ ID NO: 1073563 - RNA, 19 nt, Homo sapiens
  misc_RNA (1)...(19): siRNA sense strand
gaauugcagcuucuaaauc

SEQ ID NO: 1073564 - RNA, 19 nt, Homo sapiens
  misc_RNA (1)...(19): siRNA sense strand
gggaucaucugucuuuggu

SEQ ID NO: 1073565 - RNA, 19 nt, Homo sapiens
  misc_RNA (1)...(19): siRNA sense strand
gcaguggcccuuggaauau

SEQ ID NO: 1073566 - RNA, 19 nt, Homo sapiens
  misc_RNA (1)...(19): siRNA sense strand
ucaguucaauucucuguuc

SEQ ID NO: 1073567 - RNA, 19 nt, Homo sapiens
  misc_RNA (1)...(19): siRNA sense strand
gaaauugggaaucucuuag

SEQ ID NO: 1073568 - RNA, 19 nt, Homo sapiens
  misc_RNA (1)...(19): siRNA sense strand
aaucccagcuccaguguau

SEQ ID NO: 1073569 - RNA, 19 nt, Homo sapiens
  misc_RNA (1)...(19): siRNA sense strand
gaaaauggaaucacauaug

SEQ ID NO: 1073570 - RNA, 19 nt, Homo sapiens
  misc_RNA (1)...(19): siRNA sense strand
ugaagacaaugcagcuuuc

SEQ ID NO: 1073571 - RNA, 19 nt, Homo sapiens
  misc_RNA (1)...(19): siRNA sense strand
acaauggugucuacaagau

SEQ ID NO: 1073572 - RNA, 19 nt, Homo sapiens
  misc_RNA (1)...(19): siRNA sense strand
caacucaagaugcaaaugu

SEQ ID NO: 1073573 - RNA, 19 nt, Homo sapiens
  misc_RNA (1)...(19): siRNA sense strand
aaucauaagucuucuugca

SEQ ID NO: 1073574 - RNA, 19 nt, Homo sapiens
  misc_RNA (1)...(19): siRNA sense strand
ucagauagagagaagguuu

SEQ ID NO: 1073575 - RNA, 19 nt, Homo sapiens
  misc_RNA (1)...(19): siRNA sense strand
uacaagugaucaucugcua

SEQ ID NO: 1073576 - RNA, 19 nt, Homo sapiens
  misc_RNA (1)...(19): siRNA sense strand
gggaauugcagcuucuaaa

SEQ ID NO: 1073577 - RNA, 19 nt, Homo sapiens
  misc_RNA (1)...(19): siRNA sense strand
gguuaccuccuauuucuuu

SEQ ID NO: 1073578 - RNA, 19 nt, Homo sapiens
  misc_RNA (1)...(19): siRNA sense strand
ugacguacaaaccaaagua

SEQ ID NO: 1073579 - RNA, 19 nt, Homo sapiens
  misc_RNA (1)...(19): siRNA sense strand
caaagaguuuaccaagauc

SEQ ID NO: 1073580 - RNA, 19 nt, Homo sapiens
  misc_RNA (1)...(19): siRNA sense strand
guaaaccuagaucacauaa

SEQ ID NO: 1073581 - RNA, 19 nt, Homo sapiens
  misc_RNA (1)...(19): siRNA sense strand
cucauuaugugccaaacua

SEQ ID NO: 1073582 - RNA, 19 nt, Homo sapiens
  misc_RNA (1)...(19): siRNA sense strand
gggacuaacugugauacug

SEQ ID NO: 1073583 - RNA, 19 nt, Homo sapiens
  misc_RNA (1)...(19): siRNA sense strand
gugggaagaugucagaaag

SEQ ID NO: 1073584 - RNA, 19 nt, Homo sapiens
  misc_RNA (1)...(19): siRNA sense strand
cagcugugccuuucuggua

SEQ ID NO: 1073585 - RNA, 19 nt, Homo sapiens
  misc_RNA (1)...(19): siRNA sense strand
gcaguacaaauaugagaga

SEQ ID NO: 1073586 - RNA, 19 nt, Homo sapiens
  misc_RNA (1)...(19): siRNA sense strand
ucagaaagacaauggaugu

SEQ ID NO: 1073587 - RNA, 19 nt, Homo sapiens
  misc_RNA (1)...(19): siRNA sense strand
gacacuucauccaaagaaa

SEQ ID NO: 1073588 - RNA, 19 nt, Homo sapiens
  misc_RNA (1)...(19): siRNA sense strand
uagaugaucacacagacua

SEQ ID NO: 1073589 - RNA, 19 nt, Homo sapiens
  misc_RNA (1)...(19): siRNA sense strand
acaaugcagcuuucuauau

SEQ ID NO: 1073590 - RNA, 19 nt, Homo sapiens
  misc_RNA (1)...(19): siRNA sense strand
gugaagacaaugcagcuuu

SEQ ID NO: 1073591 - RNA, 19 nt, Homo sapiens
  misc_RNA (1)...(19): siRNA sense strand
agagucaagcagucaauua

SEQ ID NO: 1073592 - RNA, 19 nt, Homo sapiens
  misc_RNA (1)...(19): siRNA sense strand
gaugguaguuuugaaauug

SEQ ID NO: 1073593 - RNA, 19 nt, Homo sapiens
  misc_RNA (1)...(19): siRNA sense strand
ugauucaaaugucuucaga

SEQ ID NO: 1073594 - RNA, 19 nt, Homo sapiens
  misc_RNA (1)...(19): siRNA sense strand
gauacuucaugccucaaau

SEQ ID NO: 1073595 - RNA, 19 nt, Homo sapiens
  misc_RNA (1)...(19): siRNA sense strand
uaauuucagucaucacauc

SEQ ID NO: 1073596 - RNA, 19 nt, Homo sapiens
  misc_RNA (1)...(19): siRNA sense strand
ucacucagauagagagaag

SEQ ID NO: 1073597 - RNA, 19 nt, Homo sapiens
  misc_RNA (1)...(19): siRNA sense strand
guggugaacuaaagguguu

SEQ ID NO: 1073598 - RNA, 19 nt, Homo sapiens
  misc_RNA (1)...(19): siRNA sense strand
uagcaggaaucauaagucu

SEQ ID NO: 1073599 - RNA, 19 nt, Homo sapiens
  misc_RNA (1)...(19): siRNA sense strand
cuaauagcaggaaucauaa

SEQ ID NO: 1073600 - RNA, 19 nt, Homo sapiens
  misc_RNA (1)...(19): siRNA sense strand
gcagucaauuaccaguuuc

SEQ ID NO: 1073601 - RNA, 19 nt, Homo sapiens
  misc_RNA (1)...(19): siRNA sense strand
uuacuucugaggugcauua

SEQ ID NO: 1073602 - RNA, 19 nt, Homo sapiens
  misc_RNA (1)...(19): siRNA sense strand
ucagucaucacauccuaua

SEQ ID NO: 1073603 - RNA, 19 nt, Homo sapiens
  misc_RNA (1)...(19): siRNA sense strand
gggaagaugucagaaagac

SEQ ID NO: 1073604 - RNA, 19 nt, Homo sapiens
  misc_RNA (1)...(19): siRNA sense strand
aaaccuagaucacauaacc

SEQ ID NO: 1073605 - RNA, 19 nt, Homo sapiens
  misc_RNA (1)...(19): siRNA sense strand
agacaaugcagcuuucuau

SEQ ID NO: 1073606 - RNA, 19 nt, Homo sapiens
  misc_RNA (1)...(19): siRNA sense strand
ggaggaagcugugaagaug

SEQ ID NO: 1073607 - RNA, 19 nt, Homo sapiens
  misc_RNA (1)...(19): siRNA sense strand
caaggcagcucuacacuca

SEQ ID NO: 1073608 - RNA, 19 nt, Homo sapiens
  misc_RNA (1)...(19): siRNA sense strand
gagacgggcugcuccauga

SEQ ID NO: 1073609 - RNA, 19 nt, Homo sapiens
  misc_RNA (1)...(19): siRNA sense strand
gcuccuccauggcgaguuu

SEQ ID NO: 1073610 - RNA, 19 nt, Homo sapiens
  misc_RNA (1)...(19): siRNA sense strand
gggagcagguggaguaugg

SEQ ID NO: 1073611 - RNA, 19 nt, Homo sapiens
  misc_RNA (1)...(19): siRNA sense strand
ccacugcccucaccugucu

SEQ ID NO: 1073612 - RNA, 19 nt, Homo sapiens
  misc_RNA (1)...(19): siRNA sense strand
gaauggacaccuugaagca

SEQ ID NO: 1073613 - RNA, 19 nt, Homo sapiens
  misc_RNA (1)...(19): siRNA sense strand
aagcugggcuguccuucaa

SEQ ID NO: 1073614 - RNA, 19 nt, Homo sapiens
  misc_RNA (1)...(19): siRNA sense strand
ggacuuugugcucauguug

SEQ ID NO: 1073615 - RNA, 19 nt, Homo sapiens
  misc_RNA (1)...(19): siRNA sense strand
gaucaccccugaccugcua

SEQ ID NO: 1073616 - RNA, 19 nt, Homo sapiens
  misc_RNA (1)...(19): siRNA sense strand
gggaggaagcugugaagau

SEQ ID NO: 1073617 - RNA, 19 nt, Homo sapiens
  misc_RNA (1)...(19): siRNA sense strand
ccacgugcuucccaugauc

SEQ ID NO: 1073618 - RNA, 19 nt, Homo sapiens
  misc_RNA (1)...(19): siRNA sense strand
agacucagcggccuacuuc

SEQ ID NO: 1073619 - RNA, 19 nt, Homo sapiens
  misc_RNA (1)...(19): siRNA sense strand
gggacuuugugcucauguu

SEQ ID NO: 1073620 - RNA, 19 nt, Homo sapiens
  misc_RNA (1)...(19): siRNA sense strand
ucgccacacugcacaccua

SEQ ID NO: 1073621 - RNA, 19 nt, Homo sapiens
  misc_RNA (1)...(19): siRNA sense strand
uugcucaacugcucacugu

SEQ ID NO: 1073622 - RNA, 19 nt, Homo sapiens
  misc_RNA (1)...(19): siRNA sense strand
gccuggcagugguguaaga

SEQ ID NO: 1073623 - RNA, 19 nt, Homo sapiens
  misc_RNA (1)...(19): siRNA sense strand
gcugaacgggcuccuagau

SEQ ID NO: 1073624 - RNA, 19 nt, Homo sapiens
  misc_RNA (1)...(19): siRNA sense strand
agucggagcugacccuaac

SEQ ID NO: 1073625 - RNA, 19 nt, Homo sapiens
  misc_RNA (1)...(19): siRNA sense strand
gcuuugcccucacccuuac

SEQ ID NO: 1073626 - RNA, 19 nt, Homo sapiens
  misc_RNA (1)...(19): siRNA sense strand
gcagagccacucgcaccuu

SEQ ID NO: 1073627 - RNA, 19 nt, Homo sapiens
  misc_RNA (1)...(19): siRNA sense strand
agacagaacgacagaacca

SEQ ID NO: 1073628 - RNA, 19 nt, Homo sapiens
  misc_RNA (1)...(19): siRNA sense strand
cggacccacugcugucuuc

SEQ ID NO: 1073629 - RNA, 19 nt, Homo sapiens
  misc_RNA (1)...(19): siRNA sense strand
gcaaagagcagcccaguuu

SEQ ID NO: 1073630 - RNA, 19 nt, Homo sapiens
  misc_RNA (1)...(19): siRNA sense strand
gcaacagacucauauauug

SEQ ID NO: 1073631 - RNA, 19 nt, Homo sapiens
  misc_RNA (1)...(19): siRNA sense strand
gaacgaaugucccuuagau

SEQ ID NO: 1073632 - RNA, 19 nt, Homo sapiens
  misc_RNA (1)...(19): siRNA sense strand
gaacgugacuguuuaaucg

SEQ ID NO: 1073633 - RNA, 19 nt, Homo sapiens
  misc_RNA (1)...(19): siRNA sense strand
ccaaggagauaauaaaguu

SEQ ID NO: 1073634 - RNA, 19 nt, Homo sapiens
  misc_RNA (1)...(19): siRNA sense strand
gaacuacagucuaugaaca

SEQ ID NO: 1073635 - RNA, 19 nt, Homo sapiens
  misc_RNA (1)...(19): siRNA sense strand
gaaccaauauggcugugaa

SEQ ID NO: 1073636 - RNA, 19 nt, Homo sapiens
  misc_RNA (1)...(19): siRNA sense strand
gaagauauacccauuguca

SEQ ID NO: 1073637 - RNA, 19 nt, Homo sapiens
  misc_RNA (1)...(19): siRNA sense strand
uaaauuagccaguaacuug

SEQ ID NO: 1073638 - RNA, 19 nt, Homo sapiens
  misc_RNA (1)...(19): siRNA sense strand
gaaggacggucucgugaug

SEQ ID NO: 1073639 - RNA, 19 nt, Homo sapiens
  misc_RNA (1)...(19): siRNA sense strand
gcaguaaagugaaggaugu

SEQ ID NO: 1073640 - RNA, 19 nt, Homo sapiens
  misc_RNA (1)...(19): siRNA sense strand
cgacagagauuauuauggu

SEQ ID NO: 1073641 - RNA, 19 nt, Homo sapiens
  misc_RNA (1)...(19): siRNA sense strand
gaauugauacucucaugua

SEQ ID NO: 1073642 - RNA, 19 nt, Homo sapiens
  misc_RNA (1)...(19): siRNA sense strand
gacaaggcguccagaaauu

SEQ ID NO: 1073643 - RNA, 19 nt, Homo sapiens
  misc_RNA (1)...(19): siRNA sense strand
ugaaaggccuugugaaaca

SEQ ID NO: 1073644 - RNA, 19 nt, Homo sapiens
  misc_RNA (1)...(19): siRNA sense strand
ggcguugccuuguauauaa

SEQ ID NO: 1073645 - RNA, 19 nt, Homo sapiens
  misc_RNA (1)...(19): siRNA sense strand
ugacacacaucacaacuga

SEQ ID NO: 1073646 - RNA, 19 nt, Homo sapiens
  misc_RNA (1)...(19): siRNA sense strand
uaauaaaguugacgacaga

SEQ ID NO: 1073647 - RNA, 19 nt, Homo sapiens
  misc_RNA (1)...(19): siRNA sense strand
cuagagagacuaaugauuu

SEQ ID NO: 1073648 - RNA, 19 nt, Homo sapiens
  misc_RNA (1)...(19): siRNA sense strand
gugaugauaucuucaaaug

SEQ ID NO: 1073649 - RNA, 19 nt, Homo sapiens
  misc_RNA (1)...(19): siRNA sense strand
gaaacagcauauagauuca

SEQ ID NO: 1073650 - RNA, 19 nt, Homo sapiens
  misc_RNA (1)...(19): siRNA sense strand
gaaacagaauugauacucu

SEQ ID NO: 1073651 - RNA, 19 nt, Homo sapiens
  misc_RNA (1)...(19): siRNA sense strand
gagaagagcaggauauauc

SEQ ID NO: 1073652 - RNA, 19 nt, Homo sapiens
  misc_RNA (1)...(19): siRNA sense strand
gaauacauuucgacucaug

SEQ ID NO: 1073653 - RNA, 19 nt, Homo sapiens
  misc_RNA (1)...(19): siRNA sense strand
caauauggcugugaaacaa

SEQ ID NO: 1073654 - RNA, 19 nt, Homo sapiens
  misc_RNA (1)...(19): siRNA sense strand
gugaauacauuucgacuca

SEQ ID NO: 1073655 - RNA, 19 nt, Homo sapiens
  misc_RNA (1)...(19): siRNA sense strand
gaugauaucuucaaaugcu

SEQ ID NO: 1073656 - RNA, 19 nt, Homo sapiens
  misc_RNA (1)...(19): siRNA sense strand
gagucugguugaauauuua

SEQ ID NO: 1073657 - RNA, 19 nt, Homo sapiens
  misc_RNA (1)...(19): siRNA sense strand
gugcuggacuuaucccaua

SEQ ID NO: 1073658 - RNA, 19 nt, Homo sapiens
  misc_RNA (1)...(19): siRNA sense strand
aagagcagcugucuaagaa

SEQ ID NO: 1073659 - RNA, 19 nt, Homo sapiens
  misc_RNA (1)...(19): siRNA sense strand
gaaauugugcagaugauug

SEQ ID NO: 1073660 - RNA, 19 nt, Homo sapiens
  misc_RNA (1)...(19): siRNA sense strand
ccagguggcuacuucauug

SEQ ID NO: 1073661 - RNA, 19 nt, Homo sapiens
  misc_RNA (1)...(19): siRNA sense strand
aaaccuaucuggcgacaug

SEQ ID NO: 1073662 - RNA, 19 nt, Homo sapiens
  misc_RNA (1)...(19): siRNA sense strand
ucauguaucuacuagcaua

SEQ ID NO: 1073663 - RNA, 19 nt, Homo sapiens
  misc_RNA (1)...(19): siRNA sense strand
cagcgaaacagaauugaua

SEQ ID NO: 1073664 - RNA, 19 nt, Homo sapiens
  misc_RNA (1)...(19): siRNA sense strand
gacccuaugugguacuuaa

SEQ ID NO: 1073665 - RNA, 19 nt, Homo sapiens
  misc_RNA (1)...(19): siRNA sense strand
gaguagaagaugugaauuu

SEQ ID NO: 1073666 - RNA, 19 nt, Homo sapiens
  misc_RNA (1)...(19): siRNA sense strand
gagcagcugucuaagaaca

SEQ ID NO: 1073667 - RNA, 19 nt, Homo sapiens
  misc_RNA (1)...(19): siRNA sense strand
gguggcuacuucauuguua

SEQ ID NO: 1073668 - RNA, 19 nt, Homo sapiens
  misc_RNA (1)...(19): siRNA sense strand
gguaacaucuuagguguca

SEQ ID NO: 1073669 - RNA, 19 nt, Homo sapiens
  misc_RNA (1)...(19): siRNA sense strand
ggugaaaggccuugugaaa

SEQ ID NO: 1073670 - RNA, 19 nt, Homo sapiens
  misc_RNA (1)...(19): siRNA sense strand
caacagacucauauauuga

SEQ ID NO: 1073671 - RNA, 19 nt, Homo sapiens
  misc_RNA (1)...(19): siRNA sense strand
ggaaggaaguaauguacca

SEQ ID NO: 1073672 - RNA, 19 nt, Homo sapiens
  misc_RNA (1)...(19): siRNA sense strand
gaucauccgcaaugccuua

SEQ ID NO: 1073673 - RNA, 19 nt, Homo sapiens
  misc_RNA (1)...(19): siRNA sense strand
aauggaacgugacuguuua

SEQ ID NO: 1073674 - RNA, 19 nt, Homo sapiens
  misc_RNA (1)...(19): siRNA sense strand
ugaaacagcauauagauuc

SEQ ID NO: 1073675 - RNA, 19 nt, Homo sapiens
  misc_RNA (1)...(19): siRNA sense strand
caaggccucuuuagacaga

SEQ ID NO: 1073676 - RNA, 19 nt, Homo sapiens
  misc_RNA (1)...(19): siRNA sense strand
ccaaauguguuucuugucu

SEQ ID NO: 1073677 - RNA, 19 nt, Homo sapiens
  misc_RNA (1)...(19): siRNA sense strand
gcuccuggcuuccaccauu

SEQ ID NO: 1073678 - RNA, 19 nt, Homo sapiens
  misc_RNA (1)...(19): siRNA sense strand
gguuaaaacuguccaagua

SEQ ID NO: 1073679 - RNA, 19 nt, Homo sapiens
  misc_RNA (1)...(19): siRNA sense strand
ggaaauggaacgugacugu

SEQ ID NO: 1073680 - RNA, 19 nt, Homo sapiens
  misc_RNA (1)...(19): siRNA sense strand
gcauaauacuuugucagaa

SEQ ID NO: 1073681 - RNA, 19 nt, Homo sapiens
  misc_RNA (1)...(19): siRNA sense strand
gauuucaagugaugccuuu

SEQ ID NO: 1073682 - RNA, 19 nt, Homo sapiens
  misc_RNA (1)...(19): siRNA sense strand
gagcaacagacucauauau

SEQ ID NO: 1073683 - RNA, 19 nt, Homo sapiens
  misc_RNA (1)...(19): siRNA sense strand
cagaagauauacccauugu

SEQ ID NO: 1073684 - RNA, 19 nt, Homo sapiens
  misc_RNA (1)...(19): siRNA sense strand
caucuuaggugucauucga

SEQ ID NO: 1073685 - RNA, 19 nt, Homo sapiens
  misc_RNA (1)...(19): siRNA sense strand
cuaaugauuucaagugaug

SEQ ID NO: 1073686 - RNA, 19 nt, Homo sapiens
  misc_RNA (1)...(19): siRNA sense strand
gacuaaugauuucaaguga

SEQ ID NO: 1073687 - RNA, 19 nt, Homo sapiens
  misc_RNA (1)...(19): siRNA sense strand
aaacacauggugcuagaua

SEQ ID NO: 1073688 - RNA, 19 nt, Homo sapiens
  misc_RNA (1)...(19): siRNA sense strand
caaaggagcaacagacuca

SEQ ID NO: 1073689 - RNA, 19 nt, Homo sapiens
  misc_RNA (1)...(19): siRNA sense strand
ugacucagauuccuuugga

SEQ ID NO: 1073690 - RNA, 19 nt, Homo sapiens
  misc_RNA (1)...(19): siRNA sense strand
cauaauacuuugucagaag

SEQ ID NO: 1073691 - RNA, 19 nt, Homo sapiens
  misc_RNA (1)...(19): siRNA sense strand
ugaaacacauggugcuaga

SEQ ID NO: 1073692 - RNA, 19 nt, Homo sapiens
  misc_RNA (1)...(19): siRNA sense strand
acagaucgaugugucuaua

SEQ ID NO: 1073693 - RNA, 19 nt, Homo sapiens
  misc_RNA (1)...(19): siRNA sense strand
gcacugggcaugaugacaa

SEQ ID NO: 1073694 - RNA, 19 nt, Homo sapiens
  misc_RNA (1)...(19): siRNA sense strand
cgagccaaauguaucuaua

SEQ ID NO: 1073695 - RNA, 19 nt, Homo sapiens
  misc_RNA (1)...(19): siRNA sense strand
ggaauuggcaggacagcuu

SEQ ID NO: 1073696 - RNA, 19 nt, Homo sapiens
  misc_RNA (1)...(19): siRNA sense strand
gcccaaggguacaggaauu

SEQ ID NO: 1073697 - RNA, 19 nt, Homo sapiens
  misc_RNA (1)...(19): siRNA sense strand
caagagcagcugucuaaga

SEQ ID NO: 1073698 - RNA, 19 nt, Homo sapiens
  misc_RNA (1)...(19): siRNA sense strand
gagcaggauauaucaauga

SEQ ID NO: 1073699 - RNA, 19 nt, Homo sapiens
  misc_RNA (1)...(19): siRNA sense strand
guaacaagcgacuggaauu

SEQ ID NO: 1073700 - RNA, 19 nt, Homo sapiens
  misc_RNA (1)...(19): siRNA sense strand
gacagagauuauuauggua

SEQ ID NO: 1073701 - RNA, 19 nt, Homo sapiens
  misc_RNA (1)...(19): siRNA sense strand
gcuguuggagcuucaguua

SEQ ID NO: 1073702 - RNA, 19 nt, Homo sapiens
  misc_RNA (1)...(19): siRNA sense strand
gcagucacaaauaaacaua

SEQ ID NO: 1073703 - RNA, 19 nt, Homo sapiens
  misc_RNA (1)...(19): siRNA sense strand
caaggacgauuuuauuuga

SEQ ID NO: 1073704 - RNA, 19 nt, Homo sapiens
  misc_RNA (1)...(19): siRNA sense strand
ccucaugagugccguuuga

SEQ ID NO: 1073705 - RNA, 19 nt, Homo sapiens
  misc_RNA (1)...(19): siRNA sense strand
gaucccgacuguagaggaa

SEQ ID NO: 1073706 - RNA, 19 nt, Homo sapiens
  misc_RNA (1)...(19): siRNA sense strand
gauagaauuugagaaacug

SEQ ID NO: 1073707 - RNA, 19 nt, Homo sapiens
  misc_RNA (1)...(19): siRNA sense strand
agagucugguugaauauuu

SEQ ID NO: 1073708 - RNA, 19 nt, Homo sapiens
  misc_RNA (1)...(19): siRNA sense strand
gaucgaugugucuauauuu

SEQ ID NO: 1073709 - RNA, 19 nt, Homo sapiens
  misc_RNA (1)...(19): siRNA sense strand
guaagaaggcaaaggaugu

SEQ ID NO: 1073710 - RNA, 19 nt, Homo sapiens
  misc_RNA (1)...(19): siRNA sense strand
gauaaugaaagccaaugaa

SEQ ID NO: 1073711 - RNA, 19 nt, Homo sapiens
  misc_RNA (1)...(19): siRNA sense strand
gaagccagcagucacaaau

SEQ ID NO: 1073712 - RNA, 19 nt, Homo sapiens
  misc_RNA (1)...(19): siRNA sense strand
ugagagacaugacauacuc

SEQ ID NO: 1073713 - RNA, 19 nt, Homo sapiens
  misc_RNA (1)...(19): siRNA sense strand
uagagagacuaaugauuuc

SEQ ID NO: 1073714 - RNA, 19 nt, Homo sapiens
  misc_RNA (1)...(19): siRNA sense strand
cuacuagcauauccacaaa

SEQ ID NO: 1073715 - RNA, 19 nt, Homo sapiens
  misc_RNA (1)...(19): siRNA sense strand
augagagucugguugaaua

SEQ ID NO: 1073716 - RNA, 19 nt, Homo sapiens
  misc_RNA (1)...(19): siRNA sense strand
gaauuuguuuccaucucaa

SEQ ID NO: 1073717 - RNA, 19 nt, Homo sapiens
  misc_RNA (1)...(19): siRNA sense strand
uaccggaaauuggucuuua

SEQ ID NO: 1073718 - RNA, 19 nt, Homo sapiens
  misc_RNA (1)...(19): siRNA sense strand
gucagaagauauacccauu

SEQ ID NO: 1073719 - RNA, 19 nt, Homo sapiens
  misc_RNA (1)...(19): siRNA sense strand
gaacaucauccccagguua

SEQ ID NO: 1073720 - RNA, 19 nt, Homo sapiens
  misc_RNA (1)...(19): siRNA sense strand
caaccacaguacaaagaug

SEQ ID NO: 1073721 - RNA, 19 nt, Homo sapiens
  misc_RNA (1)...(19): siRNA sense strand
cagaauugauacucucaug

SEQ ID NO: 1073722 - RNA, 19 nt, Homo sapiens
  misc_RNA (1)...(19): siRNA sense strand
gguugaauauuuagaugug

SEQ ID NO: 1073723 - RNA, 19 nt, Homo sapiens
  misc_RNA (1)...(19): siRNA sense strand
caaauguguuucuugucuu

SEQ ID NO: 1073724 - RNA, 19 nt, Homo sapiens
  misc_RNA (1)...(19): siRNA sense strand
aaacuuggcccuuaugaca

SEQ ID NO: 1073725 - RNA, 19 nt, Homo sapiens
  misc_RNA (1)...(19): siRNA sense strand
gugauggugcgaagaguua

SEQ ID NO: 1073726 - RNA, 19 nt, Homo sapiens
  misc_RNA (1)...(19): siRNA sense strand
aaacaaggccucuuuagac

SEQ ID NO: 1073727 - RNA, 19 nt, Homo sapiens
  misc_RNA (1)...(19): siRNA sense strand
aaauggaacgugacuguuu

SEQ ID NO: 1073728 - RNA, 19 nt, Homo sapiens
  misc_RNA (1)...(19): siRNA sense strand
cuggcgacaugaaaucuua

SEQ ID NO: 1073729 - RNA, 19 nt, Homo sapiens
  misc_RNA (1)...(19): siRNA sense strand
ggaaagagguccuauaaau

SEQ ID NO: 1073730 - RNA, 19 nt, Homo sapiens
  misc_RNA (1)...(19): siRNA sense strand
agaaagaccuuaugaaugu

SEQ ID NO: 1073731 - RNA, 19 nt, Homo sapiens
  misc_RNA (1)...(19): siRNA sense strand
ggaaagaccaggacauuga

SEQ ID NO: 1073732 - RNA, 19 nt, Homo sapiens
  misc_RNA (1)...(19): siRNA sense strand
gaaagagaccuuaugaaug

SEQ ID NO: 1073733 - RNA, 19 nt, Homo sapiens
  misc_RNA (1)...(19): siRNA sense strand
ggagaaaucccaccaaugu

SEQ ID NO: 1073734 - RNA, 19 nt, Homo sapiens
  misc_RNA (1)...(19): siRNA sense strand
ggagaaagaccuuaugaau

SEQ ID NO: 1073735 - RNA, 19 nt, Homo sapiens
  misc_RNA (1)...(19): siRNA sense strand
gaaagagguccuauaaaug

SEQ ID NO: 1073736 - RNA, 19 nt, Homo sapiens
  misc_RNA (1)...(19): siRNA sense strand
caaauuaccuuagacuuca

SEQ ID NO: 1073737 - RNA, 19 nt, Homo sapiens
  misc_RNA (1)...(19): siRNA sense strand
gaauguaaauacuguggaa

SEQ ID NO: 1073738 - RNA, 19 nt, Homo sapiens
  misc_RNA (1)...(19): siRNA sense strand
aaagagaccuuaugaaugc

SEQ ID NO: 1073739 - RNA, 19 nt, Homo sapiens
  misc_RNA (1)...(19): siRNA sense strand
gagaaagaccuuaugaaug

SEQ ID NO: 1073740 - RNA, 19 nt, Homo sapiens
  misc_RNA (1)...(19): siRNA sense strand
cgaaagagaccuuaugaau

SEQ ID NO: 1073741 - RNA, 19 nt, Homo sapiens
  misc_RNA (1)...(19): siRNA sense strand
gaaagaccuuaugaaugua

SEQ ID NO: 1073742 - RNA, 19 nt, Homo sapiens
  misc_RNA (1)...(19): siRNA sense strand
ccagaagaaucucuacaga

SEQ ID NO: 1073743 - RNA, 19 nt, Homo sapiens
  misc_RNA (1)...(19): siRNA sense strand
ucaauuaucccaguuguuu

SEQ ID NO: 1073744 - RNA, 19 nt, Homo sapiens
  misc_RNA (1)...(19): siRNA sense strand
gaauguacaagguguggua

SEQ ID NO: 1073745 - RNA, 19 nt, Homo sapiens
  misc_RNA (1)...(19): siRNA sense strand
ggauguggcugugaacuuc

SEQ ID NO: 1073746 - RNA, 19 nt, Homo sapiens
  misc_RNA (1)...(19): siRNA sense strand
aaagagguccuauaaaugu

SEQ ID NO: 1073747 - RNA, 19 nt, Homo sapiens
  misc_RNA (1)...(19): siRNA sense strand
gaggaaaacucuacgaaug

SEQ ID NO: 1073748 - RNA, 19 nt, Homo sapiens
  misc_RNA (1)...(19): siRNA sense strand
ucacagacaugaaagaacu

SEQ ID NO: 1073749 - RNA, 19 nt, Homo sapiens
  misc_RNA (1)...(19): siRNA sense strand
ggauuaagcuaagaagucu

SEQ ID NO: 1073750 - RNA, 19 nt, Homo sapiens
  misc_RNA (1)...(19): siRNA sense strand
gguaaaaccuucaauuauc

SEQ ID NO: 1073751 - RNA, 19 nt, Homo sapiens
  misc_RNA (1)...(19): siRNA sense strand
uaucgauuaucccaguuua

SEQ ID NO: 1073752 - RNA, 19 nt, Homo sapiens
  misc_RNA (1)...(19): siRNA sense strand
ggagugggcuuugcugagu

SEQ ID NO: 1073753 - RNA, 19 nt, Homo sapiens
  misc_RNA (1)...(19): siRNA sense strand
ggagugaaaccaugcaaau

SEQ ID NO: 1073754 - RNA, 19 nt, Homo sapiens
  misc_RNA (1)...(19): siRNA sense strand
gaaaagccauaugaaugua

SEQ ID NO: 1073755 - RNA, 19 nt, Homo sapiens
  misc_RNA (1)...(19): siRNA sense strand
gagacucuguggacguaaa

SEQ ID NO: 1073756 - RNA, 19 nt, Homo sapiens
  misc_RNA (1)...(19): siRNA sense strand
ggacacaaacgaucugagu

SEQ ID NO: 1073757 - RNA, 19 nt, Homo sapiens
  misc_RNA (1)...(19): siRNA sense strand
guaaagaagggaaugaaca

SEQ ID NO: 1073758 - RNA, 19 nt, Homo sapiens
  misc_RNA (1)...(19): siRNA sense strand
ccaguucccuucacagaca

SEQ ID NO: 1073759 - RNA, 19 nt, Homo sapiens
  misc_RNA (1)...(19): siRNA sense strand
agaagggaaugaacacaga

SEQ ID NO: 1073760 - RNA, 19 nt, Homo sapiens
  misc_RNA (1)...(19): siRNA sense strand
ucaaauccaucaaagaacu

SEQ ID NO: 1073761 - RNA, 19 nt, Homo sapiens
  misc_RNA (1)...(19): siRNA sense strand
gagaaaagccauaugaaug

SEQ ID NO: 1073762 - RNA, 19 nt, Homo sapiens
  misc_RNA (1)...(19): siRNA sense strand
ucaaauuaccuuagacuuc

SEQ ID NO: 1073763 - RNA, 19 nt, Homo sapiens
  misc_RNA (1)...(19): siRNA sense strand
uaaacagugugguaaaguc

SEQ ID NO: 1073764 - RNA, 19 nt, Homo sapiens
  misc_RNA (1)...(19): siRNA sense strand
gaagacaugaaaugacuca

SEQ ID NO: 1073765 - RNA, 19 nt, Homo sapiens
  misc_RNA (1)...(19): siRNA sense strand
gcaguucccuccgaagaca

SEQ ID NO: 1073766 - RNA, 19 nt, Homo sapiens
  misc_RNA (1)...(19): siRNA sense strand
ccaccaaugucaggaaugu

SEQ ID NO: 1073767 - RNA, 19 nt, Homo sapiens
  misc_RNA (1)...(19): siRNA sense strand
gggcguagccagugcuuug

SEQ ID NO: 1073768 - RNA, 19 nt, Homo sapiens
  misc_RNA (1)...(19): siRNA sense strand
uaccuuagacuucaugaaa

SEQ ID NO: 1073769 - RNA, 19 nt, Homo sapiens
  misc_RNA (1)...(19): siRNA sense strand
guggaaaaccuaucgauua

SEQ ID NO: 1073770 - RNA, 19 nt, Homo sapiens
  misc_RNA (1)...(19): siRNA sense strand
gggaaugaacacagagaaa

SEQ ID NO: 1073771 - RNA, 19 nt, Homo sapiens
  misc_RNA (1)...(19): siRNA sense strand
ccuuagacuucaugaaaga

SEQ ID NO: 1073772 - RNA, 19 nt, Homo sapiens
  misc_RNA (1)...(19): siRNA sense strand
ccauaugaauguacaaggu

SEQ ID NO: 1073773 - RNA, 19 nt, Homo sapiens
  misc_RNA (1)...(19): siRNA sense strand
gaacucauaguggaggaaa

SEQ ID NO: 1073774 - RNA, 19 nt, Homo sapiens
  misc_RNA (1)...(19): siRNA sense strand
gauuaucccaguuuauuuc

SEQ ID NO: 1073775 - RNA, 19 nt, Homo sapiens
  misc_RNA (1)...(19): siRNA sense strand
cuggaaagagguccuauaa

SEQ ID NO: 1073776 - RNA, 19 nt, Homo sapiens
  misc_RNA (1)...(19): siRNA sense strand
aaagaacucacacuggaaa

SEQ ID NO: 1073777 - RNA, 19 nt, Homo sapiens
  misc_RNA (1)...(19): siRNA sense strand
gauuguaaacaguguggua

SEQ ID NO: 1073778 - RNA, 19 nt, Homo sapiens
  misc_RNA (1)...(19): siRNA sense strand
aagagguccuauaaaugua

SEQ ID NO: 1073779 - RNA, 19 nt, Homo sapiens
  misc_RNA (1)...(19): siRNA sense strand
gggauuaagcuaagaaguc

SEQ ID NO: 1073780 - RNA, 19 nt, Homo sapiens
  misc_RNA (1)...(19): siRNA sense strand
ccgaagacaugaaaugacu

SEQ ID NO: 1073781 - RNA, 19 nt, Homo sapiens
  misc_RNA (1)...(19): siRNA sense strand
caaagaacucacacuggaa

SEQ ID NO: 1073782 - RNA, 19 nt, Homo sapiens
  misc_RNA (1)...(19): siRNA sense strand
aagucaaacuggagugaaa

SEQ ID NO: 1073783 - RNA, 19 nt, Homo sapiens
  misc_RNA (1)...(19): siRNA sense strand
ggacacaugaaaucagauc

SEQ ID NO: 1073784 - RNA, 19 nt, Homo sapiens
  misc_RNA (1)...(19): siRNA sense strand
cacaugaaaucagaucuca

SEQ ID NO: 1073785 - RNA, 19 nt, Homo sapiens
  misc_RNA (1)...(19): siRNA sense strand
ggaaugaacacagagaaac

SEQ ID NO: 1073786 - RNA, 19 nt, Homo sapiens
  misc_RNA (1)...(19): siRNA sense strand
agaaaucccaccaauguca

SEQ ID NO: 1073787 - RNA, 19 nt, Homo sapiens
  misc_RNA (1)...(19): siRNA sense strand
cgauuaucccaguuuauuu

SEQ ID NO: 1073788 - RNA, 19 nt, Homo sapiens
  misc_RNA (1)...(19): siRNA sense strand
gaacucacacuggaaagag

SEQ ID NO: 1073789 - RNA, 19 nt, Homo sapiens
  misc_RNA (1)...(19): siRNA sense strand
gaaugaacacagagaaacu

SEQ ID NO: 1073790 - RNA, 19 nt, Homo sapiens
  misc_RNA (1)...(19): siRNA sense strand
gaaagaccaggacauugag

SEQ ID NO: 1073791 - RNA, 19 nt, Homo sapiens
  misc_RNA (1)...(19): siRNA sense strand
ucggacacaugaaaucaga

SEQ ID NO: 1073792 - RNA, 19 nt, Homo sapiens
  misc_RNA (1)...(19): siRNA sense strand
gaaaaccuaucgauuaucc

SEQ ID NO: 1073793 - RNA, 19 nt, Homo sapiens
  misc_RNA (1)...(19): siRNA sense strand
ggagaaaagccauaugaau

SEQ ID NO: 1073794 - RNA, 19 nt, Homo sapiens
  misc_RNA (1)...(19): siRNA sense strand
gugguaaaaccuucaauua

SEQ ID NO: 1073795 - RNA, 19 nt, Homo sapiens
  misc_RNA (1)...(19): siRNA sense strand
caacucgaaagagaccuua

SEQ ID NO: 1073796 - RNA, 19 nt, Homo sapiens
  misc_RNA (1)...(19): siRNA sense strand
ucgauuaucccaguuuauu

SEQ ID NO: 1073797 - RNA, 19 nt, Homo sapiens
  misc_RNA (1)...(19): siRNA sense strand
ugagagccuucacaguuuc

SEQ ID NO: 1073798 - RNA, 19 nt, Homo sapiens
  misc_RNA (1)...(19): siRNA sense strand
acagaaacaacaugggaaa

SEQ ID NO: 1073799 - RNA, 19 nt, Homo sapiens
  misc_RNA (1)...(19): siRNA sense strand
ggacauugagaaucuguac

SEQ ID NO: 1073800 - RNA, 19 nt, Homo sapiens
  misc_RNA (1)...(19): siRNA sense strand
gaaauagugagagccuuca

SEQ ID NO: 1073801 - RNA, 19 nt, Homo sapiens
  misc_RNA (1)...(19): siRNA sense strand
aaauguagggaaauaguga

SEQ ID NO: 1073802 - RNA, 19 nt, Homo sapiens
  misc_RNA (1)...(19): siRNA sense strand
guaacaccaacucgaaaga

SEQ ID NO: 1073803 - RNA, 19 nt, Homo sapiens
  misc_RNA (1)...(19): siRNA sense strand
cuucacaguuuccaguuuc

SEQ ID NO: 1073804 - RNA, 19 nt, Homo sapiens
  misc_RNA (1)...(19): siRNA sense strand
uggaaaaccuaucgauuau

SEQ ID NO: 1073805 - RNA, 19 nt, Homo sapiens
  misc_RNA (1)...(19): siRNA sense strand
gagugaaaccaugcaaaug

SEQ ID NO: 1073806 - RNA, 19 nt, Homo sapiens
  misc_RNA (1)...(19): siRNA sense strand
uguaaacaaugugguaaag

SEQ ID NO: 1073807 - RNA, 19 nt, Homo sapiens
  misc_RNA (1)...(19): siRNA sense strand
acaguaacaccaacucgaa

SEQ ID NO: 1073808 - RNA, 19 nt, Homo sapiens
  misc_RNA (1)...(19): siRNA sense strand
ggacguaaagaagggaaug

SEQ ID NO: 1073809 - RNA, 19 nt, Homo sapiens
  misc_RNA (1)...(19): siRNA sense strand
gcuaugaauguaaauacug

SEQ ID NO: 1073810 - RNA, 19 nt, Homo sapiens
  misc_RNA (1)...(19): siRNA sense strand
guaaacagugugguaaagu

SEQ ID NO: 1073811 - RNA, 19 nt, Homo sapiens
  misc_RNA (1)...(19): siRNA sense strand
gcacaugaaagagcucaca

SEQ ID NO: 1073812 - RNA, 19 nt, Homo sapiens
  misc_RNA (1)...(19): siRNA sense strand
aacaccaacucgaaagaga

SEQ ID NO: 1073813 - RNA, 19 nt, Homo sapiens
  misc_RNA (1)...(19): siRNA sense strand
gccuuuggguggugcaguu

SEQ ID NO: 1073814 - RNA, 19 nt, Homo sapiens
  misc_RNA (1)...(19): siRNA sense strand
gaaagucuuccuccgucau

SEQ ID NO: 1073815 - RNA, 19 nt, Homo sapiens
  misc_RNA (1)...(19): siRNA sense strand
uguaaacagugugguaaag

SEQ ID NO: 1073816 - RNA, 19 nt, Homo sapiens
  misc_RNA (1)...(19): siRNA sense strand
aaagccauaugaauguaca

SEQ ID NO: 1073817 - RNA, 19 nt, Homo sapiens
  misc_RNA (1)...(19): siRNA sense strand
cuggagaaaucccaccaau

SEQ ID NO: 1073818 - RNA, 19 nt, Homo sapiens
  misc_RNA (1)...(19): siRNA sense strand
gugguaaagccuucauuuc

SEQ ID NO: 1073819 - RNA, 19 nt, Homo sapiens
  misc_RNA (1)...(19): siRNA sense strand
uaaauguagggaaauagug

SEQ ID NO: 1073820 - RNA, 19 nt, Homo sapiens
  misc_RNA (1)...(19): siRNA sense strand
uugagaaucuguaccaaaa

SEQ ID NO: 1073821 - RNA, 19 nt, Homo sapiens
  misc_RNA (1)...(19): siRNA sense strand
ccuucacaguuuccaguuu

SEQ ID NO: 1073822 - RNA, 19 nt, Homo sapiens
  misc_RNA (1)...(19): siRNA sense strand
gaacucacacuggagaaaa

SEQ ID NO: 1073823 - RNA, 19 nt, Homo sapiens
  misc_RNA (1)...(19): siRNA sense strand
cacaguuuccaguuucuuu

SEQ ID NO: 1073824 - RNA, 19 nt, Homo sapiens
  misc_RNA (1)...(19): siRNA sense strand
gugcaguucccuccgaaga

SEQ ID NO: 1073825 - RNA, 19 nt, Homo sapiens
  misc_RNA (1)...(19): siRNA sense strand
uguacaaggugugguaaag

SEQ ID NO: 1073826 - RNA, 19 nt, Homo sapiens
  misc_RNA (1)...(19): siRNA sense strand
ggaaaacucuacgaauguc

SEQ ID NO: 1073827 - RNA, 19 nt, Homo sapiens
  misc_RNA (1)...(19): siRNA sense strand
gagaaaucccaccaauguc

SEQ ID NO: 1073828 - RNA, 19 nt, Homo sapiens
  misc_RNA (1)...(19): siRNA sense strand
ugugguaaagccuucauuu

SEQ ID NO: 1073829 - RNA, 19 nt, Homo sapiens
  misc_RNA (1)...(19): siRNA sense strand
acaagaagauucacgugua

SEQ ID NO: 1073830 - RNA, 19 nt, Homo sapiens
  misc_RNA (1)...(19): siRNA sense strand
ggacaucuacgacaaagug

SEQ ID NO: 1073831 - RNA, 19 nt, Homo sapiens
  misc_RNA (1)...(19): siRNA sense strand
gaagcaaggcugcgacugu

SEQ ID NO: 1073832 - RNA, 19 nt, Homo sapiens
  misc_RNA (1)...(19): siRNA sense strand
caagaagauucacguguac

SEQ ID NO: 1073833 - RNA, 19 nt, Homo sapiens
  misc_RNA (1)...(19): siRNA sense strand
ggaccucgcucucauuccu

SEQ ID NO: 1073834 - RNA, 19 nt, Homo sapiens
  misc_RNA (1)...(19): siRNA sense strand
caagugggcugaguaccau

SEQ ID NO: 1073835 - RNA, 19 nt, Homo sapiens
  misc_RNA (1)...(19): siRNA sense strand
gcuacaagugggcugagua

SEQ ID NO: 1073836 - RNA, 19 nt, Homo sapiens
  misc_RNA (1)...(19): siRNA sense strand
gcgcaucucccaccagagu

SEQ ID NO: 1073837 - RNA, 19 nt, Homo sapiens
  misc_RNA (1)...(19): siRNA sense strand
gcggacaucuacgacaaag

SEQ ID NO: 1073838 - RNA, 19 nt, Homo sapiens
  misc_RNA (1)...(19): siRNA sense strand
gaaaaucaaagccaaguac

SEQ ID NO: 1073839 - RNA, 19 nt, Homo sapiens
  misc_RNA (1)...(19): siRNA sense strand
ggcuaacgacggcuacuga

SEQ ID NO: 1073840 - RNA, 19 nt, Homo sapiens
  misc_RNA (1)...(19): siRNA sense strand
gcccagcacgccauuucaa

SEQ ID NO: 1073841 - RNA, 19 nt, Homo sapiens
  misc_RNA (1)...(19): siRNA sense strand
gaacagauauuagcgcuua

SEQ ID NO: 1073842 - RNA, 19 nt, Homo sapiens
  misc_RNA (1)...(19): siRNA sense strand
aaagaugacuuccuuguua

SEQ ID NO: 1073843 - RNA, 19 nt, Homo sapiens
  misc_RNA (1)...(19): siRNA sense strand
gaacaagaaugacaucuag

SEQ ID NO: 1073844 - RNA, 19 nt, Homo sapiens
  misc_RNA (1)...(19): siRNA sense strand
gcucucagcuucccauaua

SEQ ID NO: 1073845 - RNA, 19 nt, Homo sapiens
  misc_RNA (1)...(19): siRNA sense strand
gcaacuagcuccacuuuca

SEQ ID NO: 1073846 - RNA, 19 nt, Homo sapiens
  misc_RNA (1)...(19): siRNA sense strand
gauagugacuccauuugua

SEQ ID NO: 1073847 - RNA, 19 nt, Homo sapiens
  misc_RNA (1)...(19): siRNA sense strand
caacauuucugacaucuga

SEQ ID NO: 1073848 - RNA, 19 nt, Homo sapiens
  misc_RNA (1)...(19): siRNA sense strand
gcacauuccucuacacuau

SEQ ID NO: 1073849 - RNA, 19 nt, Homo sapiens
  misc_RNA (1)...(19): siRNA sense strand
gcaaugagauucugaggau

SEQ ID NO: 1073850 - RNA, 19 nt, Homo sapiens
  misc_RNA (1)...(19): siRNA sense strand
uaaagacacugguagauga

SEQ ID NO: 1073851 - RNA, 19 nt, Homo sapiens
  misc_RNA (1)...(19): siRNA sense strand
gcuaauuucuccauaguuu

SEQ ID NO: 1073852 - RNA, 19 nt, Homo sapiens
  misc_RNA (1)...(19): siRNA sense strand
gaaacagaauugacaucua

SEQ ID NO: 1073853 - RNA, 19 nt, Homo sapiens
  misc_RNA (1)...(19): siRNA sense strand
caacagcuguauccaaauu

SEQ ID NO: 1073854 - RNA, 19 nt, Homo sapiens
  misc_RNA (1)...(19): siRNA sense strand
ccaaugagauggaaacaga

SEQ ID NO: 1073855 - RNA, 19 nt, Homo sapiens
  misc_RNA (1)...(19): siRNA sense strand
agaagcaacucaaccaaua

SEQ ID NO: 1073856 - RNA, 19 nt, Homo sapiens
  misc_RNA (1)...(19): siRNA sense strand
gaaacagccucuaaauaca

SEQ ID NO: 1073857 - RNA, 19 nt, Homo sapiens
  misc_RNA (1)...(19): siRNA sense strand
ugacauggcucuuaucuag

SEQ ID NO: 1073858 - RNA, 19 nt, Homo sapiens
  misc_RNA (1)...(19): siRNA sense strand
gaugacaacucaagguauu

SEQ ID NO: 1073859 - RNA, 19 nt, Homo sapiens
  misc_RNA (1)...(19): siRNA sense strand
gaagacgucuggcuuguca

SEQ ID NO: 1073860 - RNA, 19 nt, Homo sapiens
  misc_RNA (1)...(19): siRNA sense strand
ggaagaugauccugcauga

SEQ ID NO: 1073861 - RNA, 19 nt, Homo sapiens
  misc_RNA (1)...(19): siRNA sense strand
gcaaacaucuacauuggau

SEQ ID NO: 1073862 - RNA, 19 nt, Homo sapiens
  misc_RNA (1)...(19): siRNA sense strand
ucaaaucuauccucaacua

SEQ ID NO: 1073863 - RNA, 19 nt, Homo sapiens
  misc_RNA (1)...(19): siRNA sense strand
uuagaacucuuccugaaua

SEQ ID NO: 1073864 - RNA, 19 nt, Homo sapiens
  misc_RNA (1)...(19): siRNA sense strand
ggcaacaacugauaugaaa

SEQ ID NO: 1073865 - RNA, 19 nt, Homo sapiens
  misc_RNA (1)...(19): siRNA sense strand
gcaauuguauuuggaggua

SEQ ID NO: 1073866 - RNA, 19 nt, Homo sapiens
  misc_RNA (1)...(19): siRNA sense strand
ggacucccuucuaaauaua

SEQ ID NO: 1073867 - RNA, 19 nt, Homo sapiens
  misc_RNA (1)...(19): siRNA sense strand
ucacacaucucugccaaua

SEQ ID NO: 1073868 - RNA, 19 nt, Homo sapiens
  misc_RNA (1)...(19): siRNA sense strand
gaacauacccacagcugaa

SEQ ID NO: 1073869 - RNA, 19 nt, Homo sapiens
  misc_RNA (1)...(19): siRNA sense strand
gaagagacaaagauuauug

SEQ ID NO: 1073870 - RNA, 19 nt, Homo sapiens
  misc_RNA (1)...(19): siRNA sense strand
uaaccaauaugccugaauu

SEQ ID NO: 1073871 - RNA, 19 nt, Homo sapiens
  misc_RNA (1)...(19): siRNA sense strand
ucaguugccucuuucauuu

SEQ ID NO: 1073872 - RNA, 19 nt, Homo sapiens
  misc_RNA (1)...(19): siRNA sense strand
gauauuagcgcuuauaaca

SEQ ID NO: 1073873 - RNA, 19 nt, Homo sapiens
  misc_RNA (1)...(19): siRNA sense strand
ccacagagccuggaaauug

SEQ ID NO: 1073874 - RNA, 19 nt, Homo sapiens
  misc_RNA (1)...(19): siRNA sense strand
ugagaacccuucauuauca

SEQ ID NO: 1073875 - RNA, 19 nt, Homo sapiens
  misc_RNA (1)...(19): siRNA sense strand
caacguccacuccuauuua

SEQ ID NO: 1073876 - RNA, 19 nt, Homo sapiens
  misc_RNA (1)...(19): siRNA sense strand
uaagagcacuggagcuauu

SEQ ID NO: 1073877 - RNA, 19 nt, Homo sapiens
  misc_RNA (1)...(19): siRNA sense strand
aggcacaccuucagaaaua

SEQ ID NO: 1073878 - RNA, 19 nt, Homo sapiens
  misc_RNA (1)...(19): siRNA sense strand
cugccuagcucuacaauaa

SEQ ID NO: 1073879 - RNA, 19 nt, Homo sapiens
  misc_RNA (1)...(19): siRNA sense strand
caccaugguuugcuaauuu

SEQ ID NO: 1073880 - RNA, 19 nt, Homo sapiens
  misc_RNA (1)...(19): siRNA sense strand
gcacagacccugagaccaa

SEQ ID NO: 1073881 - RNA, 19 nt, Homo sapiens
  misc_RNA (1)...(19): siRNA sense strand
gcaaugucaucaauuccua

SEQ ID NO: 1073882 - RNA, 19 nt, Homo sapiens
  misc_RNA (1)...(19): siRNA sense strand
ccacauccauaaccaauau

SEQ ID NO: 1073883 - RNA, 19 nt, Homo sapiens
  misc_RNA (1)...(19): siRNA sense strand
uccaguagauucuguauuu

SEQ ID NO: 1073884 - RNA, 19 nt, Homo sapiens
  misc_RNA (1)...(19): siRNA sense strand
acacuggacucccuucuaa

SEQ ID NO: 1073885 - RNA, 19 nt, Homo sapiens
  misc_RNA (1)...(19): siRNA sense strand
gcugagaucucuacuccaa

SEQ ID NO: 1073886 - RNA, 19 nt, Homo sapiens
  misc_RNA (1)...(19): siRNA sense strand
ccaauaugccugaauuuaa

SEQ ID NO: 1073887 - RNA, 19 nt, Homo sapiens
  misc_RNA (1)...(19): siRNA sense strand
gaaaagacuuccuuaacaa

SEQ ID NO: 1073888 - RNA, 19 nt, Homo sapiens
  misc_RNA (1)...(19): siRNA sense strand
cagcuggacuauauaauga

SEQ ID NO: 1073889 - RNA, 19 nt, Homo sapiens
  misc_RNA (1)...(19): siRNA sense strand
caaccaauaucucaaguag

SEQ ID NO: 1073890 - RNA, 19 nt, Homo sapiens
  misc_RNA (1)...(19): siRNA sense strand
gaacuuccuuugacaccaa

SEQ ID NO: 1073891 - RNA, 19 nt, Homo sapiens
  misc_RNA (1)...(19): siRNA sense strand
gauggacacuugcuuacuu

SEQ ID NO: 1073892 - RNA, 19 nt, Homo sapiens
  misc_RNA (1)...(19): siRNA sense strand
gaaauaagcaaugagauuc

SEQ ID NO: 1073893 - RNA, 19 nt, Homo sapiens
  misc_RNA (1)...(19): siRNA sense strand
cccauuaucuuaugagaaa

SEQ ID NO: 1073894 - RNA, 19 nt, Homo sapiens
  misc_RNA (1)...(19): siRNA sense strand
ucugacaucugacaugaua

SEQ ID NO: 1073895 - RNA, 19 nt, Homo sapiens
  misc_RNA (1)...(19): siRNA sense strand
ggaccacacucccaucaau

SEQ ID NO: 1073896 - RNA, 19 nt, Homo sapiens
  misc_RNA (1)...(19): siRNA sense strand
cuacaaugcuuccuagaga

SEQ ID NO: 1073897 - RNA, 19 nt, Homo sapiens
  misc_RNA (1)...(19): siRNA sense strand
ugacuucaguugccucuuu

SEQ ID NO: 1073898 - RNA, 19 nt, Homo sapiens
  misc_RNA (1)...(19): siRNA sense strand
gaagaugccaugucuacuu

SEQ ID NO: 1073899 - RNA, 19 nt, Homo sapiens
  misc_RNA (1)...(19): siRNA sense strand
ggauggaaaugccacaaga

SEQ ID NO: 1073900 - RNA, 19 nt, Homo sapiens
  misc_RNA (1)...(19): siRNA sense strand
guaccuacauccaaugaga

SEQ ID NO: 1073901 - RNA, 19 nt, Homo sapiens
  misc_RNA (1)...(19): siRNA sense strand
caaacuaugccacaucuuu

SEQ ID NO: 1073902 - RNA, 19 nt, Homo sapiens
  misc_RNA (1)...(19): siRNA sense strand
gcagauagucuccauacuu

SEQ ID NO: 1073903 - RNA, 19 nt, Homo sapiens
  misc_RNA (1)...(19): siRNA sense strand
gcaacagucucuucugaca

SEQ ID NO: 1073904 - RNA, 19 nt, Homo sapiens
  misc_RNA (1)...(19): siRNA sense strand
cgagugcccuuccagcaua

SEQ ID NO: 1073905 - RNA, 19 nt, Homo sapiens
  misc_RNA (1)...(19): siRNA sense strand
cacaguagguguucacauu

SEQ ID NO: 1073906 - RNA, 19 nt, Homo sapiens
  misc_RNA (1)...(19): siRNA sense strand
gcaacaacacaaagauuaa

SEQ ID NO: 1073907 - RNA, 19 nt, Homo sapiens
  misc_RNA (1)...(19): siRNA sense strand
cauggagacuugauucgua

SEQ ID NO: 1073908 - RNA, 19 nt, Homo sapiens
  misc_RNA (1)...(19): siRNA sense strand
gucaaagucuucaacauau

SEQ ID NO: 1073909 - RNA, 19 nt, Homo sapiens
  misc_RNA (1)...(19): siRNA sense strand
caaauugcuucaagaacuu

SEQ ID NO: 1073910 - RNA, 19 nt, Homo sapiens
  misc_RNA (1)...(19): siRNA sense strand
ccaauuuccaccacuauua

SEQ ID NO: 1073911 - RNA, 19 nt, Homo sapiens
  misc_RNA (1)...(19): siRNA sense strand
cuagaaagaugacuuccuu

SEQ ID NO: 1073912 - RNA, 19 nt, Homo sapiens
  misc_RNA (1)...(19): siRNA sense strand
gaucacaccuacgaccuuu

SEQ ID NO: 1073913 - RNA, 19 nt, Homo sapiens
  misc_RNA (1)...(19): siRNA sense strand
ccaggauacuucauuugua

SEQ ID NO: 1073914 - RNA, 19 nt, Homo sapiens
  misc_RNA (1)...(19): siRNA sense strand
ggaacuguaccuugguuua

SEQ ID NO: 1073915 - RNA, 19 nt, Homo sapiens
  misc_RNA (1)...(19): siRNA sense strand
uugcaaagcugaugaaaca

SEQ ID NO: 1073916 - RNA, 19 nt, Homo sapiens
  misc_RNA (1)...(19): siRNA sense strand
caucaucacccucuacuuu

SEQ ID NO: 1073917 - RNA, 19 nt, Homo sapiens
  misc_RNA (1)...(19): siRNA sense strand
cuauaaaugucacagauga

SEQ ID NO: 1073918 - RNA, 19 nt, Homo sapiens
  misc_RNA (1)...(19): siRNA sense strand
gaaagaugacuuccuuguu

SEQ ID NO: 1073919 - RNA, 19 nt, Homo sapiens
  misc_RNA (1)...(19): siRNA sense strand
cagaaucacuguuccugaa

SEQ ID NO: 1073920 - RNA, 19 nt, Homo sapiens
  misc_RNA (1)...(19): siRNA sense strand
cagaugaggcuacaacuuu

SEQ ID NO: 1073921 - RNA, 19 nt, Homo sapiens
  misc_RNA (1)...(19): siRNA sense strand
gcauccagguuguuugaaa

SEQ ID NO: 1073922 - RNA, 19 nt, Homo sapiens
  misc_RNA (1)...(19): siRNA sense strand
gaauauuuauccgcaacua

SEQ ID NO: 1073923 - RNA, 19 nt, Homo sapiens
  misc_RNA (1)...(19): siRNA sense strand
uggauggccuucucuuaua

SEQ ID NO: 1073924 - RNA, 19 nt, Homo sapiens
  misc_RNA (1)...(19): siRNA sense strand
caacuucucucccuauguc

SEQ ID NO: 1073925 - RNA, 19 nt, Homo sapiens
  misc_RNA (1)...(19): siRNA sense strand
ggaacaagaaugacaucua

SEQ ID NO: 1073926 - RNA, 19 nt, Homo sapiens
  misc_RNA (1)...(19): siRNA sense strand
gcaccucugucuuaucuuc

SEQ ID NO: 1073927 - RNA, 19 nt, Homo sapiens
  misc_RNA (1)...(19): siRNA sense strand
gcucucagaugucucaaau

SEQ ID NO: 1073928 - RNA, 19 nt, Homo sapiens
  misc_RNA (1)...(19): siRNA sense strand
gcacaaagggugacagcuu

SEQ ID NO: 1073929 - RNA, 19 nt, Homo sapiens
  misc_RNA (1)...(19): siRNA sense strand
gcaacuucccauuaucuua

SEQ ID NO: 1073930 - RNA, 19 nt, Homo sapiens
  misc_RNA (1)...(19): siRNA sense strand
gaaauaaauggugcaauug

SEQ ID NO: 1073931 - RNA, 19 nt, Homo sapiens
  misc_RNA (1)...(19): siRNA sense strand
caauaccuaugucuacaaa

SEQ ID NO: 1073932 - RNA, 19 nt, Homo sapiens
  misc_RNA (1)...(19): siRNA sense strand
gaguugcaguggugacaua

SEQ ID NO: 1073933 - RNA, 19 nt, Homo sapiens
  misc_RNA (1)...(19): siRNA sense strand
gagauaaguaugaaccuaa

SEQ ID NO: 1073934 - RNA, 19 nt, Homo sapiens
  misc_RNA (1)...(19): siRNA sense strand
gauaugggauggugugaag

SEQ ID NO: 1073935 - RNA, 19 nt, Homo sapiens
  misc_RNA (1)...(19): siRNA sense strand
ugaaacagccucuaaauac

SEQ ID NO: 1073936 - RNA, 19 nt, Homo sapiens
  misc_RNA (1)...(19): siRNA sense strand
cagauagucuccauacuuc

SEQ ID NO: 1073937 - RNA, 19 nt, Homo sapiens
  misc_RNA (1)...(19): siRNA sense strand
caacuuugcccuuuguaaa

SEQ ID NO: 1073938 - RNA, 19 nt, Homo sapiens
  misc_RNA (1)...(19): siRNA sense strand
gaucaauucuugguuguca

SEQ ID NO: 1073939 - RNA, 19 nt, Homo sapiens
  misc_RNA (1)...(19): siRNA sense strand
uggcauggcuuucagcauu

SEQ ID NO: 1073940 - RNA, 19 nt, Homo sapiens
  misc_RNA (1)...(19): siRNA sense strand
cuaaagaugucauggcaau

SEQ ID NO: 1073941 - RNA, 19 nt, Homo sapiens
  misc_RNA (1)...(19): siRNA sense strand
ggaacaagaucuccuauuu

SEQ ID NO: 1073942 - RNA, 19 nt, Homo sapiens
  misc_RNA (1)...(19): siRNA sense strand
gcagagcccugaagaaucu

SEQ ID NO: 1073943 - RNA, 19 nt, Homo sapiens
  misc_RNA (1)...(19): siRNA sense strand
gacaaagcauggaaugaaa

SEQ ID NO: 1073944 - RNA, 19 nt, Homo sapiens
  misc_RNA (1)...(19): siRNA sense strand
gaucaaagcccugcucauu

SEQ ID NO: 1073945 - RNA, 19 nt, Homo sapiens
  misc_RNA (1)...(19): siRNA sense strand
gcacaaaccuggccuacac

SEQ ID NO: 1073946 - RNA, 19 nt, Homo sapiens
  misc_RNA (1)...(19): siRNA sense strand
gaagauacaagaagcuuug

SEQ ID NO: 1073947 - RNA, 19 nt, Homo sapiens
  misc_RNA (1)...(19): siRNA sense strand
gaacaagaucuccuauuuc

SEQ ID NO: 1073948 - RNA, 19 nt, Homo sapiens
  misc_RNA (1)...(19): siRNA sense strand
cagacaagguccuagauau

SEQ ID NO: 1073949 - RNA, 19 nt, Homo sapiens
  misc_RNA (1)...(19): siRNA sense strand
ugaaauacguggccaaggu

SEQ ID NO: 1073950 - RNA, 19 nt, Homo sapiens
  misc_RNA (1)...(19): siRNA sense strand
ucaaagcccugcucauucu

SEQ ID NO: 1073951 - RNA, 19 nt, Homo sapiens
  misc_RNA (1)...(19): siRNA sense strand
gggcacagccagaagcuaa

SEQ ID NO: 1073952 - RNA, 19 nt, Homo sapiens
  misc_RNA (1)...(19): siRNA sense strand
gcugagaccuucgcuguca

SEQ ID NO: 1073953 - RNA, 19 nt, Homo sapiens
  misc_RNA (1)...(19): siRNA sense strand
cauuacaucuucaccauuc

SEQ ID NO: 1073954 - RNA, 19 nt, Homo sapiens
  misc_RNA (1)...(19): siRNA sense strand
ggacaggaagauacaagaa

SEQ ID NO: 1073955 - RNA, 19 nt, Homo sapiens
  misc_RNA (1)...(19): siRNA sense strand
gagcaugucagaaggcauu

SEQ ID NO: 1073956 - RNA, 19 nt, Homo sapiens
  misc_RNA (1)...(19): siRNA sense strand
ucuccacggucccucauua

SEQ ID NO: 1073957 - RNA, 19 nt, Homo sapiens
  misc_RNA (1)...(19): siRNA sense strand
ggagagggcagcaaagcuu

SEQ ID NO: 1073958 - RNA, 19 nt, Homo sapiens
  misc_RNA (1)...(19): siRNA sense strand
gggaauuucuauugugcuu

SEQ ID NO: 1073959 - RNA, 19 nt, Homo sapiens
  misc_RNA (1)...(19): siRNA sense strand
ccaagcaucccaaccugua

SEQ ID NO: 1073960 - RNA, 19 nt, Homo sapiens
  misc_RNA (1)...(19): siRNA sense strand
gugcucaccuggaauguca

SEQ ID NO: 1073961 - RNA, 19 nt, Homo sapiens
  misc_RNA (1)...(19): siRNA sense strand
caacagaguguaaugucaa

SEQ ID NO: 1073962 - RNA, 19 nt, Homo sapiens
  misc_RNA (1)...(19): siRNA sense strand
gugaguugcugccuucaga

SEQ ID NO: 1073963 - RNA, 19 nt, Homo sapiens
  misc_RNA (1)...(19): siRNA sense strand
ucaaguggaaccuguauga

SEQ ID NO: 1073964 - RNA, 19 nt, Homo sapiens
  misc_RNA (1)...(19): siRNA sense strand
agacaaagcauggaaugaa

SEQ ID NO: 1073965 - RNA, 19 nt, Homo sapiens
  misc_RNA (1)...(19): siRNA sense strand
ggaagauacaagaagcuuu

SEQ ID NO: 1073966 - RNA, 19 nt, Homo sapiens
  misc_RNA (1)...(19): siRNA sense strand
gaacucuccaggacacuga

SEQ ID NO: 1073967 - RNA, 19 nt, Homo sapiens
  misc_RNA (1)...(19): siRNA sense strand
ggagagacaaagcauggaa

SEQ ID NO: 1073968 - RNA, 19 nt, Homo sapiens
  misc_RNA (1)...(19): siRNA sense strand
gcaaagcuuccuccuucaa

SEQ ID NO: 1073969 - RNA, 19 nt, Homo sapiens
  misc_RNA (1)...(19): siRNA sense strand
gcuggucuccgucuaugua

SEQ ID NO: 1073970 - RNA, 19 nt, Homo sapiens
  misc_RNA (1)...(19): siRNA sense strand
gaggaggaguugggacaga

SEQ ID NO: 1073971 - RNA, 19 nt, Homo sapiens
  misc_RNA (1)...(19): siRNA sense strand
gagaggucaucauggacuu

SEQ ID NO: 1073972 - RNA, 19 nt, Homo sapiens
  misc_RNA (1)...(19): siRNA sense strand
cguaauggaacugaaauaa

SEQ ID NO: 1073973 - RNA, 19 nt, Homo sapiens
  misc_RNA (1)...(19): siRNA sense strand
gccuucagcuuacccaaug

SEQ ID NO: 1073974 - RNA, 19 nt, Homo sapiens
  misc_RNA (1)...(19): siRNA sense strand
gagccugacucuccaucug

SEQ ID NO: 1073975 - RNA, 19 nt, Homo sapiens
  misc_RNA (1)...(19): siRNA sense strand
cuauguacaucuggacuuu

SEQ ID NO: 1073976 - RNA, 19 nt, Homo sapiens
  misc_RNA (1)...(19): siRNA sense strand
gaaugaaaggauagacaga

SEQ ID NO: 1073977 - RNA, 19 nt, Homo sapiens
  misc_RNA (1)...(19): siRNA sense strand
ccaucucccuggugaguug

SEQ ID NO: 1073978 - RNA, 19 nt, Homo sapiens
  misc_RNA (1)...(19): siRNA sense strand
guaauggaacugaaauaag

SEQ ID NO: 1073979 - RNA, 19 nt, Homo sapiens
  misc_RNA (1)...(19): siRNA sense strand
cuugggagcuuccauacug

SEQ ID NO: 1073980 - RNA, 19 nt, Homo sapiens
  misc_RNA (1)...(19): siRNA sense strand
gggcuugggagcuuccaua

SEQ ID NO: 1073981 - RNA, 19 nt, Homo sapiens
  misc_RNA (1)...(19): siRNA sense strand
acaacagaguguaauguca

SEQ ID NO: 1073982 - RNA, 19 nt, Homo sapiens
  misc_RNA (1)...(19): siRNA sense strand
ccacagacaagguccuaga

SEQ ID NO: 1073983 - RNA, 19 nt, Homo sapiens
  misc_RNA (1)...(19): siRNA sense strand
ccacguuuccugcugacua

SEQ ID NO: 1073984 - RNA, 19 nt, Homo sapiens
  misc_RNA (1)...(19): siRNA sense strand
ccauuacccuccuugucaa

SEQ ID NO: 1073985 - RNA, 19 nt, Homo sapiens
  misc_RNA (1)...(19): siRNA sense strand
caucccaaccuguaaguga

SEQ ID NO: 1073986 - RNA, 19 nt, Homo sapiens
  misc_RNA (1)...(19): siRNA sense strand
cagcugcucuuugucuuuc

SEQ ID NO: 1073987 - RNA, 19 nt, Homo sapiens
  misc_RNA (1)...(19): siRNA sense strand
acagacaagguccuagaua

SEQ ID NO: 1073988 - RNA, 19 nt, Homo sapiens
  misc_RNA (1)...(19): siRNA sense strand
agggagaggucaucaugga

SEQ ID NO: 1073989 - RNA, 19 nt, Homo sapiens
  misc_RNA (1)...(19): siRNA sense strand
gagacaaagcauggaauga

SEQ ID NO: 1073990 - RNA, 19 nt, Homo sapiens
  misc_RNA (1)...(19): siRNA sense strand
gcgcuggucuccgucuaug

SEQ ID NO: 1073991 - RNA, 19 nt, Homo sapiens
  misc_RNA (1)...(19): siRNA sense strand
ccagggagaggucaucaug

SEQ ID NO: 1073992 - RNA, 19 nt, Homo sapiens
  misc_RNA (1)...(19): siRNA sense strand
gacaagguccuagauaugg

SEQ ID NO: 1073993 - RNA, 19 nt, Homo sapiens
  misc_RNA (1)...(19): siRNA sense strand
agacaagguccuagauaug

SEQ ID NO: 1073994 - RNA, 19 nt, Homo sapiens
  misc_RNA (1)...(19): siRNA sense strand
gcagcaaagcuuccuccuu

SEQ ID NO: 1073995 - RNA, 19 nt, Homo sapiens
  misc_RNA (1)...(19): siRNA sense strand
gucaaagccuccacaacca

SEQ ID NO: 1073996 - RNA, 19 nt, Homo sapiens
  misc_RNA (1)...(19): siRNA sense strand
cagggcgucuucauccuau

SEQ ID NO: 1073997 - RNA, 19 nt, Homo sapiens
  misc_RNA (1)...(19): siRNA sense strand
ccgcagagcccugaagaau

SEQ ID NO: 1073998 - RNA, 19 nt, Homo sapiens
  misc_RNA (1)...(19): siRNA sense strand
gucaggcucucagugcuuu

SEQ ID NO: 1073999 - RNA, 19 nt, Homo sapiens
  misc_RNA (1)...(19): siRNA sense strand
cauaccagcuguccaucuc

SEQ ID NO: 1074000 - RNA, 19 nt, Homo sapiens
  misc_RNA (1)...(19): siRNA sense strand
agcauggaaugaaaggaua

SEQ ID NO: 1074001 - RNA, 19 nt, Homo sapiens
  misc_RNA (1)...(19): siRNA sense strand
aacaagaucuccuauuucc

SEQ ID NO: 1074002 - RNA, 19 nt, Homo sapiens
  misc_RNA (1)...(19): siRNA sense strand
gcuuugugcuggcuguuca

SEQ ID NO: 1074003 - RNA, 19 nt, Homo sapiens
  misc_RNA (1)...(19): siRNA sense strand
gugaguacaugagcugcuu

SEQ ID NO: 1074004 - RNA, 19 nt, Homo sapiens
  misc_RNA (1)...(19): siRNA sense strand
aaagcccugcucauucuua

SEQ ID NO: 1074005 - RNA, 19 nt, Homo sapiens
  misc_RNA (1)...(19): siRNA sense strand
ggccugguccuugucauuu

SEQ ID NO: 1074006 - RNA, 19 nt, Homo sapiens
  misc_RNA (1)...(19): siRNA sense strand
cuucugcccucaaacuaug

SEQ ID NO: 1074007 - RNA, 19 nt, Homo sapiens
  misc_RNA (1)...(19): siRNA sense strand
ucuccaacaugucccauca

SEQ ID NO: 1074008 - RNA, 19 nt, Homo sapiens
  misc_RNA (1)...(19): siRNA sense strand
caagcaucccaaccuguaa

SEQ ID NO: 1074009 - RNA, 19 nt, Homo sapiens
  misc_RNA (1)...(19): siRNA sense strand
cugcagagccagcuguuug

SEQ ID NO: 1074010 - RNA, 19 nt, Homo sapiens
  misc_RNA (1)...(19): siRNA sense strand
cugaggaggugccacagau

SEQ ID NO: 1074011 - RNA, 19 nt, Homo sapiens
  misc_RNA (1)...(19): siRNA sense strand
cuccuggccuuguucacua

SEQ ID NO: 1074012 - RNA, 19 nt, Homo sapiens
  misc_RNA (1)...(19): siRNA sense strand
cauccaagagcaugucaga

SEQ ID NO: 1074013 - RNA, 19 nt, Homo sapiens
  misc_RNA (1)...(19): siRNA sense strand
ccucauggacaggaagaua

SEQ ID NO: 1074014 - RNA, 19 nt, Homo sapiens
  misc_RNA (1)...(19): siRNA sense strand
cgucuucauccuauuguuu

SEQ ID NO: 1074015 - RNA, 19 nt, Homo sapiens
  misc_RNA (1)...(19): siRNA sense strand
cacggucccucauuacauc

SEQ ID NO: 1074016 - RNA, 19 nt, Homo sapiens
  misc_RNA (1)...(19): siRNA sense strand
acaagguccuagauaugga

SEQ ID NO: 1074017 - RNA, 19 nt, Homo sapiens
  misc_RNA (1)...(19): siRNA sense strand
caaggggaauuucuauugu

SEQ ID NO: 1074018 - RNA, 19 nt, Homo sapiens
  misc_RNA (1)...(19): siRNA sense strand
cccaccagcugcucuuugu

SEQ ID NO: 1074019 - RNA, 19 nt, Homo sapiens
  misc_RNA (1)...(19): siRNA sense strand
aguguaaugucaaccacaa

SEQ ID NO: 1074020 - RNA, 19 nt, Homo sapiens
  misc_RNA (1)...(19): siRNA sense strand
ccagggcgucuucauccua

SEQ ID NO: 1074021 - RNA, 19 nt, Homo sapiens
  misc_RNA (1)...(19): siRNA sense strand
gagagacaaagcauggaau

SEQ ID NO: 1074022 - RNA, 19 nt, Homo sapiens
  misc_RNA (1)...(19): siRNA sense strand
gacaggaagauacaagaag

SEQ ID NO: 1074023 - RNA, 19 nt, Homo sapiens
  misc_RNA (1)...(19): siRNA sense strand
gcuccuggaccaagagaau

SEQ ID NO: 1074024 - RNA, 19 nt, Homo sapiens
  misc_RNA (1)...(19): siRNA sense strand
ccaagggccagacaaugug

SEQ ID NO: 1074025 - RNA, 19 nt, Homo sapiens
  misc_RNA (1)...(19): siRNA sense strand
gaccgcagagcccugaaga

SEQ ID NO: 1074026 - RNA, 19 nt, Homo sapiens
  misc_RNA (1)...(19): siRNA sense strand
gggcgucuucauccuauug

SEQ ID NO: 1074027 - RNA, 19 nt, Homo sapiens
  misc_RNA (1)...(19): siRNA sense strand
gguccguaauggaacugaa

SEQ ID NO: 1074028 - RNA, 19 nt, Homo sapiens
  misc_RNA (1)...(19): siRNA sense strand
gccucagacucacaacaga

SEQ ID NO: 1074029 - RNA, 19 nt, Homo sapiens
  misc_RNA (1)...(19): siRNA sense strand
gacaugggcacagccagaa

SEQ ID NO: 1074030 - RNA, 19 nt, Homo sapiens
  misc_RNA (1)...(19): siRNA sense strand
ggaagggaggggcguuaua

SEQ ID NO: 1074031 - RNA, 19 nt, Homo sapiens
  misc_RNA (1)...(19): siRNA sense strand
cacacacuguuccggaaga

SEQ ID NO: 1074032 - RNA, 19 nt, Homo sapiens
  misc_RNA (1)...(19): siRNA sense strand
cccaagggccagacaaugu

SEQ ID NO: 1074033 - RNA, 19 nt, Homo sapiens
  misc_RNA (1)...(19): siRNA sense strand
ggcagcuccuggaccaaga

SEQ ID NO: 1074034 - RNA, 19 nt, Homo sapiens
  misc_RNA (1)...(19): siRNA sense strand
ucacaacagaguguaaugu

SEQ ID NO: 1074035 - RNA, 19 nt, Homo sapiens
  misc_RNA (1)...(19): siRNA sense strand
cuauugugcuugccucucu

SEQ ID NO: 1074036 - RNA, 19 nt, Homo sapiens
  misc_RNA (1)...(19): siRNA sense strand
ccagcugcucuuugucuuu

SEQ ID NO: 1074037 - RNA, 19 nt, Homo sapiens
  misc_RNA (1)...(19): siRNA sense strand
ccgccuuccucugucauuu

SEQ ID NO: 1074038 - RNA, 19 nt, Homo sapiens
  misc_RNA (1)...(19): siRNA sense strand
ccacugcaggcucagauuc

SEQ ID NO: 1074039 - RNA, 19 nt, Homo sapiens
  misc_RNA (1)...(19): siRNA sense strand
accagcaucugccuccauu

SEQ ID NO: 1074040 - RNA, 19 nt, Homo sapiens
  misc_RNA (1)...(19): siRNA sense strand
ccacggucccucauuacau

SEQ ID NO: 1074041 - RNA, 19 nt, Homo sapiens
  misc_RNA (1)...(19): siRNA sense strand
gaaguggccucgucaauau

SEQ ID NO: 1074042 - RNA, 19 nt, Homo sapiens
  misc_RNA (1)...(19): siRNA sense strand
gcacugggauuccuuucuu

SEQ ID NO: 1074043 - RNA, 19 nt, Homo sapiens
  misc_RNA (1)...(19): siRNA sense strand
ggaaguggccucgucaaua

SEQ ID NO: 1074044 - RNA, 19 nt, Homo sapiens
  misc_RNA (1)...(19): siRNA sense strand
ggaggaauauuucaaagca

SEQ ID NO: 1074045 - RNA, 19 nt, Homo sapiens
  misc_RNA (1)...(19): siRNA sense strand
ggaggcgcauccaguauuu

SEQ ID NO: 1074046 - RNA, 19 nt, Homo sapiens
  misc_RNA (1)...(19): siRNA sense strand
ucaaagcaguucccagaaa

SEQ ID NO: 1074047 - RNA, 19 nt, Homo sapiens
  misc_RNA (1)...(19): siRNA sense strand
uggcugaucugaugaagaa

SEQ ID NO: 1074048 - RNA, 19 nt, Homo sapiens
  misc_RNA (1)...(19): siRNA sense strand
caaagcaguucccagaaag

SEQ ID NO: 1074049 - RNA, 19 nt, Homo sapiens
  misc_RNA (1)...(19): siRNA sense strand
ggcagcaucuggcagcaaa

SEQ ID NO: 1074050 - RNA, 19 nt, Homo sapiens
  misc_RNA (1)...(19): siRNA sense strand
cgugguggcugaucugaug

SEQ ID NO: 1074051 - RNA, 19 nt, Homo sapiens
  misc_RNA (1)...(19): siRNA sense strand
cgcagugucuccagaagaa

SEQ ID NO: 1074052 - RNA, 19 nt, Homo sapiens
  misc_RNA (1)...(19): siRNA sense strand
cagaagaaguagaauuugc

SEQ ID NO: 1074053 - RNA, 19 nt, Homo sapiens
  misc_RNA (1)...(19): siRNA sense strand
gauccaaggacugccauuu

SEQ ID NO: 1074054 - RNA, 19 nt, Homo sapiens
  misc_RNA (1)...(19): siRNA sense strand
gauggccccuucaacaaua

SEQ ID NO: 1074055 - RNA, 19 nt, Homo sapiens
  misc_RNA (1)...(19): siRNA sense strand
uccagaagaaguagaauuu

SEQ ID NO: 1074056 - RNA, 19 nt, Homo sapiens
  misc_RNA (1)...(19): siRNA sense strand
gaagaugaggauagaacau

SEQ ID NO: 1074057 - RNA, 19 nt, Homo sapiens
  misc_RNA (1)...(19): siRNA sense strand
uuucaagggaggaauauuu

SEQ ID NO: 1074058 - RNA, 19 nt, Homo sapiens
  misc_RNA (1)...(19): siRNA sense strand
aagaugaggauagaacaua

SEQ ID NO: 1074059 - RNA, 19 nt, Homo sapiens
  misc_RNA (1)...(19): siRNA sense strand
caagggaggaauauuucaa

SEQ ID NO: 1074060 - RNA, 19 nt, Homo sapiens
  misc_RNA (1)...(19): siRNA sense strand
agaugaggauagaacauau

SEQ ID NO: 1074061 - RNA, 19 nt, Homo sapiens
  misc_RNA (1)...(19): siRNA sense strand
ggacugccauuugggaacu

SEQ ID NO: 1074062 - RNA, 19 nt, Homo sapiens
  misc_RNA (1)...(19): siRNA sense strand
caacaauagcacugggauu

SEQ ID NO: 1074063 - RNA, 19 nt, Homo sapiens
  misc_RNA (1)...(19): siRNA sense strand
uuaugaagaugaggauaga

SEQ ID NO: 1074064 - RNA, 19 nt, Homo sapiens
  misc_RNA (1)...(19): siRNA sense strand
cacccgggauguucuccua

SEQ ID NO: 1074065 - RNA, 19 nt, Homo sapiens
  misc_RNA (1)...(19): siRNA sense strand
gggauuccuuucuucuaca

SEQ ID NO: 1074066 - RNA, 19 nt, Homo sapiens
  misc_RNA (1)...(19): siRNA sense strand
gaucgcagugucuccagaa

SEQ ID NO: 1074067 - RNA, 19 nt, Homo sapiens
  misc_RNA (1)...(19): siRNA sense strand
uagaacauaucuggcuuca

SEQ ID NO: 1074068 - RNA, 19 nt, Homo sapiens
  misc_RNA (1)...(19): siRNA sense strand
ggaauauuucaaagcaguu

SEQ ID NO: 1074069 - RNA, 19 nt, Homo sapiens
  misc_RNA (1)...(19): siRNA sense strand
ggauuccuuucuucuacau

SEQ ID NO: 1074070 - RNA, 19 nt, Homo sapiens
  misc_RNA (1)...(19): siRNA sense strand
ucaaggcacccagggauga

SEQ ID NO: 1074071 - RNA, 19 nt, Homo sapiens
  misc_RNA (1)...(19): siRNA sense strand
ccacaagaagauccaagga

SEQ ID NO: 1074072 - RNA, 19 nt, Homo sapiens
  misc_RNA (1)...(19): siRNA sense strand
gaugcugccagaaucagaa

SEQ ID NO: 1074073 - RNA, 19 nt, Homo sapiens
  misc_RNA (1)...(19): siRNA sense strand
ccagaagaaguagaauuug

SEQ ID NO: 1074074 - RNA, 19 nt, Homo sapiens
  misc_RNA (1)...(19): siRNA sense strand
caucguugauccggaagau

SEQ ID NO: 1074075 - RNA, 19 nt, Homo sapiens
  misc_RNA (1)...(19): siRNA sense strand
gaauauuucaaagcaguuc

SEQ ID NO: 1074076 - RNA, 19 nt, Homo sapiens
  misc_RNA (1)...(19): siRNA sense strand
gcaucuggcagcaaagcuu

SEQ ID NO: 1074077 - RNA, 19 nt, Homo sapiens
  misc_RNA (1)...(19): siRNA sense strand
gaucgugagcuccgugucu

SEQ ID NO: 1074078 - RNA, 19 nt, Homo sapiens
  misc_RNA (1)...(19): siRNA sense strand
gcgcauccaguauuucaag

SEQ ID NO: 1074079 - RNA, 19 nt, Homo sapiens
  misc_RNA (1)...(19): siRNA sense strand
ugggauuccuuucuucuac

SEQ ID NO: 1074080 - RNA, 19 nt, Homo sapiens
  misc_RNA (1)...(19): siRNA sense strand
aacaauagcacugggauuc

SEQ ID NO: 1074081 - RNA, 19 nt, Homo sapiens
  misc_RNA (1)...(19): siRNA sense strand
aagggaggaauauuucaaa

SEQ ID NO: 1074082 - RNA, 19 nt, Homo sapiens
  misc_RNA (1)...(19): siRNA sense strand
aaguagaauuugccaagca

SEQ ID NO: 1074083 - RNA, 19 nt, Homo sapiens
  misc_RNA (1)...(19): siRNA sense strand
auuccuuucuucuacauga

SEQ ID NO: 1074084 - RNA, 19 nt, Homo sapiens
  misc_RNA (1)...(19): siRNA sense strand
ugaaugguucuuuaugaag

SEQ ID NO: 1074085 - RNA, 19 nt, Homo sapiens
  misc_RNA (1)...(19): siRNA sense strand
gggaagaacuccugagcua

SEQ ID NO: 1074086 - RNA, 19 nt, Homo sapiens
  misc_RNA (1)...(19): siRNA sense strand
acucaucucugcugaauaa

SEQ ID NO: 1074087 - RNA, 19 nt, Homo sapiens
  misc_RNA (1)...(19): siRNA sense strand
gcaaccaccucaccuacuu

SEQ ID NO: 1074088 - RNA, 19 nt, Homo sapiens
  misc_RNA (1)...(19): siRNA sense strand
gcagauauguguucaagcu

SEQ ID NO: 1074089 - RNA, 19 nt, Homo sapiens
  misc_RNA (1)...(19): siRNA sense strand
caacucaucucugcugaau

SEQ ID NO: 1074090 - RNA, 19 nt, Homo sapiens
  misc_RNA (1)...(19): siRNA sense strand
caucucugcugaauaacua

SEQ ID NO: 1074091 - RNA, 19 nt, Homo sapiens
  misc_RNA (1)...(19): siRNA sense strand
uaacacgcauccacaugaa

SEQ ID NO: 1074092 - RNA, 19 nt, Homo sapiens
  misc_RNA (1)...(19): siRNA sense strand
gaagaacuccugagcuaca

SEQ ID NO: 1074093 - RNA, 19 nt, Homo sapiens
  misc_RNA (1)...(19): siRNA sense strand
gcacaggcuuccagaacau

SEQ ID NO: 1074094 - RNA, 19 nt, Homo sapiens
  misc_RNA (1)...(19): siRNA sense strand
cuacuuugcuguucucaug

SEQ ID NO: 1074095 - RNA, 19 nt, Homo sapiens
  misc_RNA (1)...(19): siRNA sense strand
ugagcuacauggagaauau

SEQ ID NO: 1074096 - RNA, 19 nt, Homo sapiens
  misc_RNA (1)...(19): siRNA sense strand
gcucuacgguuucuuccuu

SEQ ID NO: 1074097 - RNA, 19 nt, Homo sapiens
  misc_RNA (1)...(19): siRNA sense strand
gcucaucuguaucuacuuc

SEQ ID NO: 1074098 - RNA, 19 nt, Homo sapiens
  misc_RNA (1)...(19): siRNA sense strand
caacagagacaugggaaga

SEQ ID NO: 1074099 - RNA, 19 nt, Homo sapiens
  misc_RNA (1)...(19): siRNA sense strand
gaaggagggagccaggaaa

SEQ ID NO: 1074100 - RNA, 19 nt, Homo sapiens
  misc_RNA (1)...(19): siRNA sense strand
gccugugccuucugacuuu

SEQ ID NO: 1074101 - RNA, 19 nt, Homo sapiens
  misc_RNA (1)...(19): siRNA sense strand
ucacaguccugcugcacuu

SEQ ID NO: 1074102 - RNA, 19 nt, Homo sapiens
  misc_RNA (1)...(19): siRNA sense strand
gcuacaaccugaccuugca

SEQ ID NO: 1074103 - RNA, 19 nt, Homo sapiens
  misc_RNA (1)...(19): siRNA sense strand
ggaaggagggagccaggaa

SEQ ID NO: 1074104 - RNA, 19 nt, Homo sapiens
  misc_RNA (1)...(19): siRNA sense strand
guucaagcuuggugugcua

SEQ ID NO: 1074105 - RNA, 19 nt, Homo sapiens
  misc_RNA (1)...(19): siRNA sense strand
ugaccugugucuucuggaa

SEQ ID NO: 1074106 - RNA, 19 nt, Homo sapiens
  misc_RNA (1)...(19): siRNA sense strand
gccuucagcuccucccaaa

SEQ ID NO: 1074107 - RNA, 19 nt, Homo sapiens
  misc_RNA (1)...(19): siRNA sense strand
gcacaaccaaagccuggaa

SEQ ID NO: 1074108 - RNA, 19 nt, Homo sapiens
  misc_RNA (1)...(19): siRNA sense strand
ggcacaggcuuccagaaca

SEQ ID NO: 1074109 - RNA, 19 nt, Homo sapiens
  misc_RNA (1)...(19): siRNA sense strand
gggcgugucuacaacaucu

SEQ ID NO: 1074110 - RNA, 19 nt, Homo sapiens
  misc_RNA (1)...(19): siRNA sense strand
ccuggucccugcagaguug

SEQ ID NO: 1074111 - RNA, 19 nt, Homo sapiens
  misc_RNA (1)...(19): siRNA sense strand
gcugagcugugacuucucu

SEQ ID NO: 1074112 - RNA, 19 nt, Homo sapiens
  misc_RNA (1)...(19): siRNA sense strand
gaguugcuggcaccucuua

SEQ ID NO: 1074113 - RNA, 19 nt, Homo sapiens
  misc_RNA (1)...(19): siRNA sense strand
cugcugcacuuccauuuca

SEQ ID NO: 1074114 - RNA, 19 nt, Homo sapiens
  misc_RNA (1)...(19): siRNA sense strand
uccagaacauguccauaug

SEQ ID NO: 1074115 - RNA, 19 nt, Homo sapiens
  misc_RNA (1)...(19): siRNA sense strand
ccgcagauauguguucaag

SEQ ID NO: 1074116 - RNA, 19 nt, Homo sapiens
  misc_RNA (1)...(19): siRNA sense strand
uuaacacgcauccacauga

SEQ ID NO: 1074117 - RNA, 19 nt, Homo sapiens
  misc_RNA (1)...(19): siRNA sense strand
ucacgucccucuucaaccu

SEQ ID NO: 1074118 - RNA, 19 nt, Homo sapiens
  misc_RNA (1)...(19): siRNA sense strand
cagaacauguccauaugcu

SEQ ID NO: 1074119 - RNA, 19 nt, Homo sapiens
  misc_RNA (1)...(19): siRNA sense strand
cagaaugcaacaacagaga

SEQ ID NO: 1074120 - RNA, 19 nt, Homo sapiens
  misc_RNA (1)...(19): siRNA sense strand
caaccaccucaccuacuuu

SEQ ID NO: 1074121 - RNA, 19 nt, Homo sapiens
  misc_RNA (1)...(19): siRNA sense strand
gaaugcaacaacagagaca

SEQ ID NO: 1074122 - RNA, 19 nt, Homo sapiens
  misc_RNA (1)...(19): siRNA sense strand
uggcaccucuuacguacau

SEQ ID NO: 1074123 - RNA, 19 nt, Homo sapiens
  misc_RNA (1)...(19): siRNA sense strand
gcacaguguccuggucaug

SEQ ID NO: 1074124 - RNA, 19 nt, Homo sapiens
  misc_RNA (1)...(19): siRNA sense strand
gucaagagcucgguauacg

SEQ ID NO: 1074125 - RNA, 19 nt, Homo sapiens
  misc_RNA (1)...(19): siRNA sense strand
gcacagauagaggccuuca

SEQ ID NO: 1074126 - RNA, 19 nt, Homo sapiens
  misc_RNA (1)...(19): siRNA sense strand
gcggaugcaccaaguguca

SEQ ID NO: 1074127 - RNA, 19 nt, Homo sapiens
  misc_RNA (1)...(19): siRNA sense strand
gcugcaaccaccucaccua

SEQ ID NO: 1074128 - RNA, 19 nt, Homo sapiens
  misc_RNA (1)...(19): siRNA sense strand
ggccucacgucccucuuca

SEQ ID NO: 1074129 - RNA, 19 nt, Homo sapiens
  misc_RNA (1)...(19): siRNA sense strand
ucagcugccucaccuggau

SEQ ID NO: 1074130 - RNA, 19 nt, Homo sapiens
  misc_RNA (1)...(19): siRNA sense strand
uggccucgcugaucacagu

SEQ ID NO: 1074131 - RNA, 19 nt, Homo sapiens
  misc_RNA (1)...(19): siRNA sense strand
ggagggagccaggaaacag

SEQ ID NO: 1074132 - RNA, 19 nt, Homo sapiens
  misc_RNA (1)...(19): siRNA sense strand
auacggacccugcacaauc

SEQ ID NO: 1074133 - RNA, 19 nt, Homo sapiens
  misc_RNA (1)...(19): siRNA sense strand
ucaccuacuuugcuguucu

SEQ ID NO: 1074134 - RNA, 19 nt, Homo sapiens
  misc_RNA (1)...(19): siRNA sense strand
cggcucaucuguaucuacu

SEQ ID NO: 1074135 - RNA, 19 nt, Homo sapiens
  misc_RNA (1)...(19): siRNA sense strand
gggcggaugcaccaagugu

SEQ ID NO: 1074136 - RNA, 19 nt, Homo sapiens
  misc_RNA (1)...(19): siRNA sense strand
cuucagcuccucccaaaca

SEQ ID NO: 1074137 - RNA, 19 nt, Homo sapiens
  misc_RNA (1)...(19): siRNA sense strand
acagagacaugggaagaac

SEQ ID NO: 1074138 - RNA, 19 nt, Homo sapiens
  misc_RNA (1)...(19): siRNA sense strand
gcagaggccaaggcacaga

SEQ ID NO: 1074139 - RNA, 19 nt, Homo sapiens
  misc_RNA (1)...(19): siRNA sense strand
gucaugggcacgugaacaa

SEQ ID NO: 1074140 - RNA, 19 nt, Homo sapiens
  misc_RNA (1)...(19): siRNA sense strand
guuccucuucaccaucuua

SEQ ID NO: 1074141 - RNA, 19 nt, Homo sapiens
  misc_RNA (1)...(19): siRNA sense strand
caaccugaccuugcagaca

SEQ ID NO: 1074142 - RNA, 19 nt, Homo sapiens
  misc_RNA (1)...(19): siRNA sense strand
guauacggacccugcacaa

SEQ ID NO: 1074143 - RNA, 19 nt, Homo sapiens
  misc_RNA (1)...(19): siRNA sense strand
ccuccgugcugcuccugaa

SEQ ID NO: 1074144 - RNA, 19 nt, Homo sapiens
  misc_RNA (1)...(19): siRNA sense strand
uuccagaacauguccauau

SEQ ID NO: 1074145 - RNA, 19 nt, Homo sapiens
  misc_RNA (1)...(19): siRNA sense strand
gauauucccucuucauuua

SEQ ID NO: 1074146 - RNA, 19 nt, Homo sapiens
  misc_RNA (1)...(19): siRNA sense strand
agaagaagaugaugaguua

SEQ ID NO: 1074147 - RNA, 19 nt, Homo sapiens
  misc_RNA (1)...(19): siRNA sense strand
gagagaagacguaccauua

SEQ ID NO: 1074148 - RNA, 19 nt, Homo sapiens
  misc_RNA (1)...(19): siRNA sense strand
guagaugacuugcaauuug

SEQ ID NO: 1074149 - RNA, 19 nt, Homo sapiens
  misc_RNA (1)...(19): siRNA sense strand
gcaauuagugggaaucuuu

SEQ ID NO: 1074150 - RNA, 19 nt, Homo sapiens
  misc_RNA (1)...(19): siRNA sense strand
gagaagacguaccauuaug

SEQ ID NO: 1074151 - RNA, 19 nt, Homo sapiens
  misc_RNA (1)...(19): siRNA sense strand
gaacaucgucuccuauuca

SEQ ID NO: 1074152 - RNA, 19 nt, Homo sapiens
  misc_RNA (1)...(19): siRNA sense strand
ccacuucucugacagcaaa

SEQ ID NO: 1074153 - RNA, 19 nt, Homo sapiens
  misc_RNA (1)...(19): siRNA sense strand
gaagagaagaagaugauga

SEQ ID NO: 1074154 - RNA, 19 nt, Homo sapiens
  misc_RNA (1)...(19): siRNA sense strand
gaaaugaugacucugacaa

SEQ ID NO: 1074155 - RNA, 19 nt, Homo sapiens
  misc_RNA (1)...(19): siRNA sense strand
gaccaucucccaacaacua

SEQ ID NO: 1074156 - RNA, 19 nt, Homo sapiens
  misc_RNA (1)...(19): siRNA sense strand
ggauauucccucuucauuu

SEQ ID NO: 1074157 - RNA, 19 nt, Homo sapiens
  misc_RNA (1)...(19): siRNA sense strand
acaauuguguugcuccaua

SEQ ID NO: 1074158 - RNA, 19 nt, Homo sapiens
  misc_RNA (1)...(19): siRNA sense strand
gaaagcuguucguuggauu

SEQ ID NO: 1074159 - RNA, 19 nt, Homo sapiens
  misc_RNA (1)...(19): siRNA sense strand
gagaagaagaugaugaguu

SEQ ID NO: 1074160 - RNA, 19 nt, Homo sapiens
  misc_RNA (1)...(19): siRNA sense strand
caucgucuccuauucauuu

SEQ ID NO: 1074161 - RNA, 19 nt, Homo sapiens
  misc_RNA (1)...(19): siRNA sense strand
uagaugacuugcaauuuga

SEQ ID NO: 1074162 - RNA, 19 nt, Homo sapiens
  misc_RNA (1)...(19): siRNA sense strand
ggagaaacagcaaaguuau

SEQ ID NO: 1074163 - RNA, 19 nt, Homo sapiens
  misc_RNA (1)...(19): siRNA sense strand
caacuacggcuacuccaaa

SEQ ID NO: 1074164 - RNA, 19 nt, Homo sapiens
  misc_RNA (1)...(19): siRNA sense strand
uggagaaacagcaaaguua

SEQ ID NO: 1074165 - RNA, 19 nt, Homo sapiens
  misc_RNA (1)...(19): siRNA sense strand
ggaucucucuuggcaauga

SEQ ID NO: 1074166 - RNA, 19 nt, Homo sapiens
  misc_RNA (1)...(19): siRNA sense strand
ggagagaagacguaccauu

SEQ ID NO: 1074167 - RNA, 19 nt, Homo sapiens
  misc_RNA (1)...(19): siRNA sense strand
ccagaugccaccacaguaa

SEQ ID NO: 1074168 - RNA, 19 nt, Homo sapiens
  misc_RNA (1)...(19): siRNA sense strand
gcaaaguuaugaacaucgu

SEQ ID NO: 1074169 - RNA, 19 nt, Homo sapiens
  misc_RNA (1)...(19): siRNA sense strand
ccaggucuuugacagaauu

SEQ ID NO: 1074170 - RNA, 19 nt, Homo sapiens
  misc_RNA (1)...(19): siRNA sense strand
caggaucucucuuggcaau

SEQ ID NO: 1074171 - RNA, 19 nt, Homo sapiens
  misc_RNA (1)...(19): siRNA sense strand
ccaccacaguaaacauuga

SEQ ID NO: 1074172 - RNA, 19 nt, Homo sapiens
  misc_RNA (1)...(19): siRNA sense strand
gaagacguaccauuaugug

SEQ ID NO: 1074173 - RNA, 19 nt, Homo sapiens
  misc_RNA (1)...(19): siRNA sense strand
ccaagaggcucaggaagag

SEQ ID NO: 1074174 - RNA, 19 nt, Homo sapiens
  misc_RNA (1)...(19): siRNA sense strand
ugacagaauuaaaggaucu

SEQ ID NO: 1074175 - RNA, 19 nt, Homo sapiens
  misc_RNA (1)...(19): siRNA sense strand
gagaaacagcaaaguuaug

SEQ ID NO: 1074176 - RNA, 19 nt, Homo sapiens
  misc_RNA (1)...(19): siRNA sense strand
gagauugugugugucuaug

SEQ ID NO: 1074177 - RNA, 19 nt, Homo sapiens
  misc_RNA (1)...(19): siRNA sense strand
caauuguguugcuccauau

SEQ ID NO: 1074178 - RNA, 19 nt, Homo sapiens
  misc_RNA (1)...(19): siRNA sense strand
gcagcaauccagaucucua

SEQ ID NO: 1074179 - RNA, 19 nt, Homo sapiens
  misc_RNA (1)...(19): siRNA sense strand
uaaccgacgcguugcauug

SEQ ID NO: 1074180 - RNA, 19 nt, Homo sapiens
  misc_RNA (1)...(19): siRNA sense strand
gcuguucguuggauucuag

SEQ ID NO: 1074181 - RNA, 19 nt, Homo sapiens
  misc_RNA (1)...(19): siRNA sense strand
agaaacagcaaaguuauga

SEQ ID NO: 1074182 - RNA, 19 nt, Homo sapiens
  misc_RNA (1)...(19): siRNA sense strand
ugaagaauuuggcaaugca

SEQ ID NO: 1074183 - RNA, 19 nt, Homo sapiens
  misc_RNA (1)...(19): siRNA sense strand
gaaacagcaaaguuaugaa

SEQ ID NO: 1074184 - RNA, 19 nt, Homo sapiens
  misc_RNA (1)...(19): siRNA sense strand
cuauggauauucccucuuc

SEQ ID NO: 1074185 - RNA, 19 nt, Homo sapiens
  misc_RNA (1)...(19): siRNA sense strand
gauugugugugucuaugga

SEQ ID NO: 1074186 - RNA, 19 nt, Homo sapiens
  misc_RNA (1)...(19): siRNA sense strand
uuaugaacaucgucuccua

SEQ ID NO: 1074187 - RNA, 19 nt, Homo sapiens
  misc_RNA (1)...(19): siRNA sense strand
gcagcuaccaucaucuaug

SEQ ID NO: 1074188 - RNA, 19 nt, Homo sapiens
  misc_RNA (1)...(19): siRNA sense strand
cagcaaaguuaugaacauc

SEQ ID NO: 1074189 - RNA, 19 nt, Homo sapiens
  misc_RNA (1)...(19): siRNA sense strand
uaccaggucuuugacagaa

SEQ ID NO: 1074190 - RNA, 19 nt, Homo sapiens
  misc_RNA (1)...(19): siRNA sense strand
ggagauugugugugucuau

SEQ ID NO: 1074191 - RNA, 19 nt, Homo sapiens
  misc_RNA (1)...(19): siRNA sense strand
gcaaugcagccacuucucu

SEQ ID NO: 1074192 - RNA, 19 nt, Homo sapiens
  misc_RNA (1)...(19): siRNA sense strand
ugacuugcaauuugaagaa

SEQ ID NO: 1074193 - RNA, 19 nt, Homo sapiens
  misc_RNA (1)...(19): siRNA sense strand
ggucuuugacagaauuaaa

SEQ ID NO: 1074194 - RNA, 19 nt, Homo sapiens
  misc_RNA (1)...(19): siRNA sense strand
ccgcaauacuguggauuau

SEQ ID NO: 1074195 - RNA, 19 nt, Homo sapiens
  misc_RNA (1)...(19): siRNA sense strand
ugaacaucgucuccuauuc

SEQ ID NO: 1074196 - RNA, 19 nt, Homo sapiens
  misc_RNA (1)...(19): siRNA sense strand
cagcuaccaucaucuaugc

SEQ ID NO: 1074197 - RNA, 19 nt, Homo sapiens
  misc_RNA (1)...(19): siRNA sense strand
gguuauauauccgcagcaa

SEQ ID NO: 1074198 - RNA, 19 nt, Homo sapiens
  misc_RNA (1)...(19): siRNA sense strand
agagaagacguaccauuau

SEQ ID NO: 1074199 - RNA, 19 nt, Homo sapiens
  misc_RNA (1)...(19): siRNA sense strand
gaaucuuuccaacuucuug

SEQ ID NO: 1074200 - RNA, 19 nt, Homo sapiens
  misc_RNA (1)...(19): siRNA sense strand
caucucaggaucucucuug

SEQ ID NO: 1074201 - RNA, 19 nt, Homo sapiens
  misc_RNA (1)...(19): siRNA sense strand
accauuaugugcccgaauu

SEQ ID NO: 1074202 - RNA, 19 nt, Homo sapiens
  misc_RNA (1)...(19): siRNA sense strand
ucuggacauuugaauacua

SEQ ID NO: 1074203 - RNA, 19 nt, Homo sapiens
  misc_RNA (1)...(19): siRNA sense strand
acagcaaaguuaugaacau

SEQ ID NO: 1074204 - RNA, 19 nt, Homo sapiens
  misc_RNA (1)...(19): siRNA sense strand
guggagaaacagcaaaguu

SEQ ID NO: 1074205 - RNA, 19 nt, Homo sapiens
  misc_RNA (1)...(19): siRNA sense strand
cagcuguucgugaggauaa

SEQ ID NO: 1074206 - RNA, 19 nt, Homo sapiens
  misc_RNA (1)...(19): siRNA sense strand
cagcaauccagaucucuau

SEQ ID NO: 1074207 - RNA, 19 nt, Homo sapiens
  misc_RNA (1)...(19): siRNA sense strand
cccaagaggcucaggaaga

SEQ ID NO: 1074208 - RNA, 19 nt, Homo sapiens
  misc_RNA (1)...(19): siRNA sense strand
cauugaggauccuggugaa

SEQ ID NO: 1074209 - RNA, 19 nt, Homo sapiens
  misc_RNA (1)...(19): siRNA sense strand
agcaguagaugacuugcaa

SEQ ID NO: 1074210 - RNA, 19 nt, Homo sapiens
  misc_RNA (1)...(19): siRNA sense strand
guuacuugcuggacagaag

SEQ ID NO: 1074211 - RNA, 19 nt, Homo sapiens
  misc_RNA (1)...(19): siRNA sense strand
agaaagcuguucguuggau

SEQ ID NO: 1074212 - RNA, 19 nt, Homo sapiens
  misc_RNA (1)...(19): siRNA sense strand
caguagaugacuugcaauu

SEQ ID NO: 1074213 - RNA, 19 nt, Homo sapiens
  misc_RNA (1)...(19): siRNA sense strand
gcaauccagaucucuaugg

SEQ ID NO: 1074214 - RNA, 19 nt, Homo sapiens
  misc_RNA (1)...(19): siRNA sense strand
ucuuugauguggacaccua

SEQ ID NO: 1074215 - RNA, 19 nt, Homo sapiens
  misc_RNA (1)...(19): siRNA sense strand
uuauauauccgcagcaauc

SEQ ID NO: 1074216 - RNA, 19 nt, Homo sapiens
  misc_RNA (1)...(19): siRNA sense strand
uccauaugcugcuuucugu

SEQ ID NO: 1074217 - RNA, 19 nt, Homo sapiens
  misc_RNA (1)...(19): siRNA sense strand
ggaaaugaugacucugaca

SEQ ID NO: 1074218 - RNA, 19 nt, Homo sapiens
  misc_RNA (1)...(19): siRNA sense strand
aaaugaugacucugacaaa

SEQ ID NO: 1074219 - RNA, 19 nt, Homo sapiens
  misc_RNA (1)...(19): siRNA sense strand
gggcugcuuggcauacuuu

SEQ ID NO: 1074220 - RNA, 19 nt, Homo sapiens
  misc_RNA (1)...(19): siRNA sense strand
cagaugccaccacaguaaa

SEQ ID NO: 1074221 - RNA, 19 nt, Homo sapiens
  misc_RNA (1)...(19): siRNA sense strand
auucauuucuggagauugu

SEQ ID NO: 1074222 - RNA, 19 nt, Homo sapiens
  misc_RNA (1)...(19): siRNA sense strand
agaagaugaugaguuacug

SEQ ID NO: 1074223 - RNA, 19 nt, Homo sapiens
  misc_RNA (1)...(19): siRNA sense strand
gcucaggaagagaagaaga

SEQ ID NO: 1074224 - RNA, 19 nt, Homo sapiens
  misc_RNA (1)...(19): siRNA sense strand
ccuauucauuucuggagau

SEQ ID NO: 1074225 - RNA, 19 nt, Homo sapiens
  misc_RNA (1)...(19): siRNA sense strand
gaugaguuacugggaaaug

SEQ ID NO: 1074226 - RNA, 19 nt, Homo sapiens
  misc_RNA (1)...(19): siRNA sense strand
ugggaaaugaugacucuga

SEQ ID NO: 1074227 - RNA, 19 nt, Homo sapiens
  misc_RNA (1)...(19): siRNA sense strand
gacuugcaauuugaagaau

SEQ ID NO: 1074228 - RNA, 19 nt, Homo sapiens
  misc_RNA (1)...(19): siRNA sense strand
agaagacguaccauuaugu

SEQ ID NO: 1074229 - RNA, 19 nt, Homo sapiens
  misc_RNA (1)...(19): siRNA sense strand
gacauuugaauacuaccaa

SEQ ID NO: 1074230 - RNA, 19 nt, Homo sapiens
  misc_RNA (1)...(19): siRNA sense strand
uggauauucccucuucauu

SEQ ID NO: 1074231 - RNA, 19 nt, Homo sapiens
  misc_RNA (1)...(19): siRNA sense strand
aaacagcaaaguuaugaac

SEQ ID NO: 1074232 - RNA, 19 nt, Homo sapiens
  misc_RNA (1)...(19): siRNA sense strand
cauagcaauuagugggaau

SEQ ID NO: 1074233 - RNA, 19 nt, Homo sapiens
  misc_RNA (1)...(19): siRNA sense strand
ggaagagaagaagaugaug

SEQ ID NO: 1074234 - RNA, 19 nt, Homo sapiens
  misc_RNA (1)...(19): siRNA sense strand
ggauaugugccacguuggu

SEQ ID NO: 1074235 - RNA, 19 nt, Homo sapiens
  misc_RNA (1)...(19): siRNA sense strand
gugugugucuauggauauu

SEQ ID NO: 1074236 - RNA, 19 nt, Homo sapiens
  misc_RNA (1)...(19): siRNA sense strand
uuugugagguuauauaucc

SEQ ID NO: 1074237 - RNA, 19 nt, Homo sapiens
  misc_RNA (1)...(19): siRNA sense strand
augaugaguuacugggaaa

SEQ ID NO: 1074238 - RNA, 19 nt, Homo sapiens
  misc_RNA (1)...(19): siRNA sense strand
ggacauuugaauacuacca

SEQ ID NO: 1074239 - RNA, 19 nt, Homo sapiens
  misc_RNA (1)...(19): siRNA sense strand
cacguuggucuuugccaua

SEQ ID NO: 1074240 - RNA, 19 nt, Homo sapiens
  misc_RNA (1)...(19): siRNA sense strand
gaggagagcuaguuuauca

SEQ ID NO: 1074241 - RNA, 19 nt, Homo sapiens
  misc_RNA (1)...(19): siRNA sense strand
gauaguaacugguguguag

SEQ ID NO: 1074242 - RNA, 19 nt, Homo sapiens
  misc_RNA (1)...(19): siRNA sense strand
gaucaugguugcucacuuc

SEQ ID NO: 1074243 - RNA, 19 nt, Homo sapiens
  misc_RNA (1)...(19): siRNA sense strand
gcaguuugauggcgaguau

SEQ ID NO: 1074244 - RNA, 19 nt, Homo sapiens
  misc_RNA (1)...(19): siRNA sense strand
gagugaagcucguugucaa

SEQ ID NO: 1074245 - RNA, 19 nt, Homo sapiens
  misc_RNA (1)...(19): siRNA sense strand
caacauucuccuuugguua

SEQ ID NO: 1074246 - RNA, 19 nt, Homo sapiens
  misc_RNA (1)...(19): siRNA sense strand
gacacaacauucuccuuug

SEQ ID NO: 1074247 - RNA, 19 nt, Homo sapiens
  misc_RNA (1)...(19): siRNA sense strand
gugcugugcuggagaagaa

SEQ ID NO: 1074248 - RNA, 19 nt, Homo sapiens
  misc_RNA (1)...(19): siRNA sense strand
gaggcuugguggauaguaa

SEQ ID NO: 1074249 - RNA, 19 nt, Homo sapiens
  misc_RNA (1)...(19): siRNA sense strand
gggaggagagcuaguuuau

SEQ ID NO: 1074250 - RNA, 19 nt, Homo sapiens
  misc_RNA (1)...(19): siRNA sense strand
cauuguggcuucagcauca

SEQ ID NO: 1074251 - RNA, 19 nt, Homo sapiens
  misc_RNA (1)...(19): siRNA sense strand
agacacaacauucuccuuu

SEQ ID NO: 1074252 - RNA, 19 nt, Homo sapiens
  misc_RNA (1)...(19): siRNA sense strand
ccagguggcgcacacuaua

SEQ ID NO: 1074253 - RNA, 19 nt, Homo sapiens
  misc_RNA (1)...(19): siRNA sense strand
gcuguacacuggguagcua

SEQ ID NO: 1074254 - RNA, 19 nt, Homo sapiens
  misc_RNA (1)...(19): siRNA sense strand
gcaaacacaaggcuacaag

SEQ ID NO: 1074255 - RNA, 19 nt, Homo sapiens
  misc_RNA (1)...(19): siRNA sense strand
gcacagauggagggaguga

SEQ ID NO: 1074256 - RNA, 19 nt, Homo sapiens
  misc_RNA (1)...(19): siRNA sense strand
uuuagaggcuugguggaua

SEQ ID NO: 1074257 - RNA, 19 nt, Homo sapiens
  misc_RNA (1)...(19): siRNA sense strand
gggagucggugaucauggu

SEQ ID NO: 1074258 - RNA, 19 nt, Homo sapiens
  misc_RNA (1)...(19): siRNA sense strand
cuggguagcuacauugaau

SEQ ID NO: 1074259 - RNA, 19 nt, Homo sapiens
  misc_RNA (1)...(19): siRNA sense strand
cgcaacagauuccauugug

SEQ ID NO: 1074260 - RNA, 19 nt, Homo sapiens
  misc_RNA (1)...(19): siRNA sense strand
acaacauucuccuuugguu

SEQ ID NO: 1074261 - RNA, 19 nt, Homo sapiens
  misc_RNA (1)...(19): siRNA sense strand
cagggcaaaugaacagguu

SEQ ID NO: 1074262 - RNA, 19 nt, Homo sapiens
  misc_RNA (1)...(19): siRNA sense strand
ggagugaagcucguuguca

SEQ ID NO: 1074263 - RNA, 19 nt, Homo sapiens
  misc_RNA (1)...(19): siRNA sense strand
gcuacaagacacaacauuc

SEQ ID NO: 1074264 - RNA, 19 nt, Homo sapiens
  misc_RNA (1)...(19): siRNA sense strand
caccgucuaugcaaagaug

SEQ ID NO: 1074265 - RNA, 19 nt, Homo sapiens
  misc_RNA (1)...(19): siRNA sense strand
gagcuaaggcugucuucca

SEQ ID NO: 1074266 - RNA, 19 nt, Homo sapiens
  misc_RNA (1)...(19): siRNA sense strand
agacgcagcaggccaaguu

SEQ ID NO: 1074267 - RNA, 19 nt, Homo sapiens
  misc_RNA (1)...(19): siRNA sense strand
acacaacauucuccuuugg

SEQ ID NO: 1074268 - RNA, 19 nt, Homo sapiens
  misc_RNA (1)...(19): siRNA sense strand
cugcagagccucacucauc

SEQ ID NO: 1074269 - RNA, 19 nt, Homo sapiens
  misc_RNA (1)...(19): siRNA sense strand
gcgcacacuauacacauga

SEQ ID NO: 1074270 - RNA, 19 nt, Homo sapiens
  misc_RNA (1)...(19): siRNA sense strand
gaugagcugcaccgucuau

SEQ ID NO: 1074271 - RNA, 19 nt, Homo sapiens
  misc_RNA (1)...(19): siRNA sense strand
gacacuggcugggaaguac

SEQ ID NO: 1074272 - RNA, 19 nt, Homo sapiens
  misc_RNA (1)...(19): siRNA sense strand
caaacacaaggcuacaaga

SEQ ID NO: 1074273 - RNA, 19 nt, Homo sapiens
  misc_RNA (1)...(19): siRNA sense strand
cuacaagacacaacauucu

SEQ ID NO: 1074274 - RNA, 19 nt, Homo sapiens
  misc_RNA (1)...(19): siRNA sense strand
gcgcaacagauuccauugu

SEQ ID NO: 1074275 - RNA, 19 nt, Homo sapiens
  misc_RNA (1)...(19): siRNA sense strand
uaggugcugugcuggagaa

SEQ ID NO: 1074276 - RNA, 19 nt, Homo sapiens
  misc_RNA (1)...(19): siRNA sense strand
uacacuggguagcuacauu

SEQ ID NO: 1074277 - RNA, 19 nt, Homo sapiens
  misc_RNA (1)...(19): siRNA sense strand
ccacagggcaaaugaacag

SEQ ID NO: 1074278 - RNA, 19 nt, Homo sapiens
  misc_RNA (1)...(19): siRNA sense strand
uuagaggcuugguggauag

SEQ ID NO: 1074279 - RNA, 19 nt, Homo sapiens
  misc_RNA (1)...(19): siRNA sense strand
ugacacuggcugggaagua

SEQ ID NO: 1074280 - RNA, 19 nt, Homo sapiens
  misc_RNA (1)...(19): siRNA sense strand
cucaaucacuggcgcaaca

SEQ ID NO: 1074281 - RNA, 19 nt, Homo sapiens
  misc_RNA (1)...(19): siRNA sense strand
aggccaacaugguauuuag

SEQ ID NO: 1074282 - RNA, 19 nt, Homo sapiens
  misc_RNA (1)...(19): siRNA sense strand
ccuuggagccuuccucaau

SEQ ID NO: 1074283 - RNA, 19 nt, Homo sapiens
  misc_RNA (1)...(19): siRNA sense strand
ggcgcacacuauacacaug

SEQ ID NO: 1074284 - RNA, 19 nt, Homo sapiens
  misc_RNA (1)...(19): siRNA sense strand
ggauaguaacuggugugua

SEQ ID NO: 1074285 - RNA, 19 nt, Homo sapiens
  misc_RNA (1)...(19): siRNA sense strand
caggccaacaugguauuua

SEQ ID NO: 1074286 - RNA, 19 nt, Homo sapiens
  misc_RNA (1)...(19): siRNA sense strand
gccgggauaucaccuccau

SEQ ID NO: 1074287 - RNA, 19 nt, Homo sapiens
  misc_RNA (1)...(19): siRNA sense strand
acacuggguagcuacauug

SEQ ID NO: 1074288 - RNA, 19 nt, Homo sapiens
  misc_RNA (1)...(19): siRNA sense strand
ggaggagagcuaguuuauc

SEQ ID NO: 1074289 - RNA, 19 nt, Homo sapiens
  misc_RNA (1)...(19): siRNA sense strand
gcugggaggagagcuaguu

SEQ ID NO: 1074290 - RNA, 19 nt, Homo sapiens
  misc_RNA (1)...(19): siRNA sense strand
ccacucugacccuaggaaa

SEQ ID NO: 1074291 - RNA, 19 nt, Homo sapiens
  misc_RNA (1)...(19): siRNA sense strand
aggccaaguuccugacaug

SEQ ID NO: 1074292 - RNA, 19 nt, Homo sapiens
  misc_RNA (1)...(19): siRNA sense strand
uuccugacauggcaguuug

SEQ ID NO: 1074293 - RNA, 19 nt, Homo sapiens
  misc_RNA (1)...(19): siRNA sense strand
cuuggagccuuccucaauc

SEQ ID NO: 1074294 - RNA, 19 nt, Homo sapiens
  misc_RNA (1)...(19): siRNA sense strand
gauguauucccagcacaga

SEQ ID NO: 1074295 - RNA, 19 nt, Homo sapiens
  misc_RNA (1)...(19): siRNA sense strand
ugggaggagagcuaguuua

SEQ ID NO: 1074296 - RNA, 19 nt, Homo sapiens
  misc_RNA (1)...(19): siRNA sense strand
gaaaggagcucgauucuuc

SEQ ID NO: 1074297 - RNA, 19 nt, Homo sapiens
  misc_RNA (1)...(19): siRNA sense strand
acagaaagcugaaguuuac

SEQ ID NO: 1074298 - RNA, 19 nt, Homo sapiens
  misc_RNA (1)...(19): siRNA sense strand
ggaguucucugucauuuac

SEQ ID NO: 1074299 - RNA, 19 nt, Homo sapiens
  misc_RNA (1)...(19): siRNA sense strand
gaaaccaacauucgaguga

SEQ ID NO: 1074300 - RNA, 19 nt, Homo sapiens
  misc_RNA (1)...(19): siRNA sense strand
gaagauaacgaggugcuaa

SEQ ID NO: 1074301 - RNA, 19 nt, Homo sapiens
  misc_RNA (1)...(19): siRNA sense strand
gaacuuguccaccaacuca

SEQ ID NO: 1074302 - RNA, 19 nt, Homo sapiens
  misc_RNA (1)...(19): siRNA sense strand
ggucaggaguucucuguca

SEQ ID NO: 1074303 - RNA, 19 nt, Homo sapiens
  misc_RNA (1)...(19): siRNA sense strand
ggaggagcaucagaacuug

SEQ ID NO: 1074304 - RNA, 19 nt, Homo sapiens
  misc_RNA (1)...(19): siRNA sense strand
gcuaaaauaucccuaugaa

SEQ ID NO: 1074305 - RNA, 19 nt, Homo sapiens
  misc_RNA (1)...(19): siRNA sense strand
cacagaaagcugaaguuua

SEQ ID NO: 1074306 - RNA, 19 nt, Homo sapiens
  misc_RNA (1)...(19): siRNA sense strand
ccacagaaagcugaaguuu

SEQ ID NO: 1074307 - RNA, 19 nt, Homo sapiens
  misc_RNA (1)...(19): siRNA sense strand
cgagugggucuccguguua

SEQ ID NO: 1074308 - RNA, 19 nt, Homo sapiens
  misc_RNA (1)...(19): siRNA sense strand
caggaguucucugucauuu

SEQ ID NO: 1074309 - RNA, 19 nt, Homo sapiens
  misc_RNA (1)...(19): siRNA sense strand
ccaaagaaagacuggacua

SEQ ID NO: 1074310 - RNA, 19 nt, Homo sapiens
  misc_RNA (1)...(19): siRNA sense strand
ucggugaacaguauuauuu

SEQ ID NO: 1074311 - RNA, 19 nt, Homo sapiens
  misc_RNA (1)...(19): siRNA sense strand
cagagacccugggcauuga

SEQ ID NO: 1074312 - RNA, 19 nt, Homo sapiens
  misc_RNA (1)...(19): siRNA sense strand
auaacgaggugcuaaaaua

SEQ ID NO: 1074313 - RNA, 19 nt, Homo sapiens
  misc_RNA (1)...(19): siRNA sense strand
acaaauggagccacagaaa

SEQ ID NO: 1074314 - RNA, 19 nt, Homo sapiens
  misc_RNA (1)...(19): siRNA sense strand
guuagcagccaaagaaaga

SEQ ID NO: 1074315 - RNA, 19 nt, Homo sapiens
  misc_RNA (1)...(19): siRNA sense strand
agaaguucgucucauauca

SEQ ID NO: 1074316 - RNA, 19 nt, Homo sapiens
  misc_RNA (1)...(19): siRNA sense strand
gcgcaggccuuugucaagu

SEQ ID NO: 1074317 - RNA, 19 nt, Homo sapiens
  misc_RNA (1)...(19): siRNA sense strand
agaugcaaguccagaauga

SEQ ID NO: 1074318 - RNA, 19 nt, Homo sapiens
  misc_RNA (1)...(19): siRNA sense strand
ugagaagggucaggaguuc

SEQ ID NO: 1074319 - RNA, 19 nt, Homo sapiens
  misc_RNA (1)...(19): siRNA sense strand
ggugaacaguauuauuuac

SEQ ID NO: 1074320 - RNA, 19 nt, Homo sapiens
  misc_RNA (1)...(19): siRNA sense strand
gcaggccuuugucaaguuc

SEQ ID NO: 1074321 - RNA, 19 nt, Homo sapiens
  misc_RNA (1)...(19): siRNA sense strand
cguguuagcagccaaagaa

SEQ ID NO: 1074322 - RNA, 19 nt, Homo sapiens
  misc_RNA (1)...(19): siRNA sense strand
ggagaugcaaguccagaau

SEQ ID NO: 1074323 - RNA, 19 nt, Homo sapiens
  misc_RNA (1)...(19): siRNA sense strand
ccacauccgccgucuacaa

SEQ ID NO: 1074324 - RNA, 19 nt, Homo sapiens
  misc_RNA (1)...(19): siRNA sense strand
cggaagggccuguaucugu

SEQ ID NO: 1074325 - RNA, 19 nt, Homo sapiens
  misc_RNA (1)...(19): siRNA sense strand
ggugggagaagauuauuuc

SEQ ID NO: 1074326 - RNA, 19 nt, Homo sapiens
  misc_RNA (1)...(19): siRNA sense strand
cagcuacgauguggagaug

SEQ ID NO: 1074327 - RNA, 19 nt, Homo sapiens
  misc_RNA (1)...(19): siRNA sense strand
ucagagacccugggcauug

SEQ ID NO: 1074328 - RNA, 19 nt, Homo sapiens
  misc_RNA (1)...(19): siRNA sense strand
aagaaagacuggacuacgu

SEQ ID NO: 1074329 - RNA, 19 nt, Homo sapiens
  misc_RNA (1)...(19): siRNA sense strand
ggccacagccaaucgcaaa

SEQ ID NO: 1074330 - RNA, 19 nt, Homo sapiens
  misc_RNA (1)...(19): siRNA sense strand
gguggaagacgcccaguuc

SEQ ID NO: 1074331 - RNA, 19 nt, Homo sapiens
  misc_RNA (1)...(19): siRNA sense strand
gugccuaccucaucuacuc

SEQ ID NO: 1074332 - RNA, 19 nt, Homo sapiens
  misc_RNA (1)...(19): siRNA sense strand
caucaacuccgucaucuac

SEQ ID NO: 1074333 - RNA, 19 nt, Homo sapiens
  misc_RNA (1)...(19): siRNA sense strand
cagccacccugucagugaa

SEQ ID NO: 1074334 - RNA, 19 nt, Homo sapiens
  misc_RNA (1)...(19): siRNA sense strand
cggugaacaguauuauuua

SEQ ID NO: 1074335 - RNA, 19 nt, Homo sapiens
  misc_RNA (1)...(19): siRNA sense strand
gcuacgauguggagaugca

SEQ ID NO: 1074336 - RNA, 19 nt, Homo sapiens
  misc_RNA (1)...(19): siRNA sense strand
caaauggagccacagaaag

SEQ ID NO: 1074337 - RNA, 19 nt, Homo sapiens
  misc_RNA (1)...(19): siRNA sense strand
gaucaggauaguucagguu

SEQ ID NO: 1074338 - RNA, 19 nt, Homo sapiens
  misc_RNA (1)...(19): siRNA sense strand
caaguggaccgaagagaag

SEQ ID NO: 1074339 - RNA, 19 nt, Homo sapiens
  misc_RNA (1)...(19): siRNA sense strand
acaaguggaccgaagagaa

SEQ ID NO: 1074340 - RNA, 19 nt, Homo sapiens
  misc_RNA (1)...(19): siRNA sense strand
gagaugcaaguccagaaug

SEQ ID NO: 1074341 - RNA, 19 nt, Homo sapiens
  misc_RNA (1)...(19): siRNA sense strand
ggacuccagcucucaguag

SEQ ID NO: 1074342 - RNA, 19 nt, Homo sapiens
  misc_RNA (1)...(19): siRNA sense strand
ucaacuccgucaucuacga

SEQ ID NO: 1074343 - RNA, 19 nt, Homo sapiens
  misc_RNA (1)...(19): siRNA sense strand
uggaggagcaucagaacuu

SEQ ID NO: 1074344 - RNA, 19 nt, Homo sapiens
  misc_RNA (1)...(19): siRNA sense strand
gaaguucgucucauaucag

SEQ ID NO: 1074345 - RNA, 19 nt, Homo sapiens
  misc_RNA (1)...(19): siRNA sense strand
cauccgccgucuacaagug

SEQ ID NO: 1074346 - RNA, 19 nt, Homo sapiens
  misc_RNA (1)...(19): siRNA sense strand
ccagccacccugucaguga

SEQ ID NO: 1074347 - RNA, 19 nt, Homo sapiens
  misc_RNA (1)...(19): siRNA sense strand
gcacucgcaccucuacauc

SEQ ID NO: 1074348 - RNA, 19 nt, Homo sapiens
  misc_RNA (1)...(19): siRNA sense strand
gaagggccuguaucugugu

SEQ ID NO: 1074349 - RNA, 19 nt, Homo sapiens
  misc_RNA (1)...(19): siRNA sense strand
uuugagaguucccaaucuu

SEQ ID NO: 1074350 - RNA, 19 nt, Homo sapiens
  misc_RNA (1)...(19): siRNA sense strand
gcuggugccuaccucaucu

SEQ ID NO: 1074351 - RNA, 19 nt, Homo sapiens
  misc_RNA (1)...(19): siRNA sense strand
ggaaggcgacaaccacaac

SEQ ID NO: 1074352 - RNA, 19 nt, Homo sapiens
  misc_RNA (1)...(19): siRNA sense strand
caagcgggaucaggauagu

SEQ ID NO: 1074353 - RNA, 19 nt, Homo sapiens
  misc_RNA (1)...(19): siRNA sense strand
ggcaguggcuaauuuugaa

SEQ ID NO: 1074354 - RNA, 19 nt, Homo sapiens
  misc_RNA (1)...(19): siRNA sense strand
uggcaaacagucacagcua

SEQ ID NO: 1074355 - RNA, 19 nt, Homo sapiens
  misc_RNA (1)...(19): siRNA sense strand
acagugucaucuacaagug

SEQ ID NO: 1074356 - RNA, 19 nt, Homo sapiens
  misc_RNA (1)...(19): siRNA sense strand
cacccaagaggaacgagua

SEQ ID NO: 1074357 - RNA, 19 nt, Homo sapiens
  misc_RNA (1)...(19): siRNA sense strand
caaagaaagacuggacuac

SEQ ID NO: 1074358 - RNA, 19 nt, Homo sapiens
  misc_RNA (1)...(19): siRNA sense strand
accaugagcuucccagcau

SEQ ID NO: 1074359 - RNA, 19 nt, Homo sapiens
  misc_RNA (1)...(19): siRNA sense strand
gagugggucuccguguuag

SEQ ID NO: 1074360 - RNA, 19 nt, Homo sapiens
  misc_RNA (1)...(19): siRNA sense strand
ucaggauaguucagguuca

SEQ ID NO: 1074361 - RNA, 19 nt, Homo sapiens
  misc_RNA (1)...(19): siRNA sense strand
cacaagcgggaucaggaua

SEQ ID NO: 1074362 - RNA, 19 nt, Homo sapiens
  misc_RNA (1)...(19): siRNA sense strand
aaguucgucucauaucaga

SEQ ID NO: 1074363 - RNA, 19 nt, Homo sapiens
  misc_RNA (1)...(19): siRNA sense strand
gcucuggacugggaguuuu

SEQ ID NO: 1074364 - RNA, 19 nt, Homo sapiens
  misc_RNA (1)...(19): siRNA sense strand
gaaggcgacaaccacaaca

SEQ ID NO: 1074365 - RNA, 19 nt, Homo sapiens
  misc_RNA (1)...(19): siRNA sense strand
guugggagcccugcacaga

SEQ ID NO: 1074366 - RNA, 19 nt, Homo sapiens
  misc_RNA (1)...(19): siRNA sense strand
uuacaaauggagccacaga

SEQ ID NO: 1074367 - RNA, 19 nt, Homo sapiens
  misc_RNA (1)...(19): siRNA sense strand
aaauaucccuaugaaacca

SEQ ID NO: 1074368 - RNA, 19 nt, Homo sapiens
  misc_RNA (1)...(19): siRNA sense strand
ccuucucggugaacaguau

SEQ ID NO: 1074369 - RNA, 19 nt, Homo sapiens
  misc_RNA (1)...(19): siRNA sense strand
cgcaggccuuugucaaguu

SEQ ID NO: 1074370 - RNA, 19 nt, Homo sapiens
  misc_RNA (1)...(19): siRNA sense strand
ucaggaguucucugucauu

SEQ ID NO: 1074371 - RNA, 19 nt, Homo sapiens
  misc_RNA (1)...(19): siRNA sense strand
uccuggcaguggcuaauuu

SEQ ID NO: 1074372 - RNA, 19 nt, Homo sapiens
  misc_RNA (1)...(19): siRNA sense strand
aagauaacgaggugcuaaa

SEQ ID NO: 1074373 - RNA, 19 nt, Homo sapiens
  misc_RNA (1)...(19): siRNA sense strand
ccacaagcgggaucaggau

SEQ ID NO: 1074374 - RNA, 19 nt, Homo sapiens
  misc_RNA (1)...(19): siRNA sense strand
gggaaggcgacaaccacaa

SEQ ID NO: 1074375 - RNA, 19 nt, Homo sapiens
  misc_RNA (1)...(19): siRNA sense strand
gggacuccagcucucagua

SEQ ID NO: 1074376 - RNA, 19 nt, Homo sapiens
  misc_RNA (1)...(19): siRNA sense strand
acgagugggucuccguguu

SEQ ID NO: 1074377 - RNA, 19 nt, Homo sapiens
  misc_RNA (1)...(19): siRNA sense strand
cgucucauaucagaacauc

SEQ ID NO: 1074378 - RNA, 19 nt, Homo sapiens
  misc_RNA (1)...(19): siRNA sense strand
gcgacaaccacaacaucga

SEQ ID NO: 1074379 - RNA, 19 nt, Homo sapiens
  misc_RNA (1)...(19): siRNA sense strand
ggacauccuggcggaagug

SEQ ID NO: 1074380 - RNA, 19 nt, Homo sapiens
  misc_RNA (1)...(19): siRNA sense strand
gaaagaaacucuaugauug

SEQ ID NO: 1074381 - RNA, 19 nt, Homo sapiens
  misc_RNA (1)...(19): siRNA sense strand
gagagagccugugaaauua

SEQ ID NO: 1074382 - RNA, 19 nt, Homo sapiens
  misc_RNA (1)...(19): siRNA sense strand
gcacuuaccuucaaauaca

SEQ ID NO: 1074383 - RNA, 19 nt, Homo sapiens
  misc_RNA (1)...(19): siRNA sense strand
gagaaacccuaucaaugua

SEQ ID NO: 1074384 - RNA, 19 nt, Homo sapiens
  misc_RNA (1)...(19): siRNA sense strand
ggaaagaaacucuaugauu

SEQ ID NO: 1074385 - RNA, 19 nt, Homo sapiens
  misc_RNA (1)...(19): siRNA sense strand
gaaauggaccucauaaaug

SEQ ID NO: 1074386 - RNA, 19 nt, Homo sapiens
  misc_RNA (1)...(19): siRNA sense strand
gagaagccauauacacaua

SEQ ID NO: 1074387 - RNA, 19 nt, Homo sapiens
  misc_RNA (1)...(19): siRNA sense strand
ggagaaacccuauaaaugu

SEQ ID NO: 1074388 - RNA, 19 nt, Homo sapiens
  misc_RNA (1)...(19): siRNA sense strand
gaacaauccuaugaaugua

SEQ ID NO: 1074389 - RNA, 19 nt, Homo sapiens
  misc_RNA (1)...(19): siRNA sense strand
gagagaagccguauaaaug

SEQ ID NO: 1074390 - RNA, 19 nt, Homo sapiens
  misc_RNA (1)...(19): siRNA sense strand
gguaaagccuucagucauu

SEQ ID NO: 1074391 - RNA, 19 nt, Homo sapiens
  misc_RNA (1)...(19): siRNA sense strand
gaaaauaccuggaguagau

SEQ ID NO: 1074392 - RNA, 19 nt, Homo sapiens
  misc_RNA (1)...(19): siRNA sense strand
gagaaacccuauaagugua

SEQ ID NO: 1074393 - RNA, 19 nt, Homo sapiens
  misc_RNA (1)...(19): siRNA sense strand
ggaaagcauucucugauug

SEQ ID NO: 1074394 - RNA, 19 nt, Homo sapiens
  misc_RNA (1)...(19): siRNA sense strand
ggagagacccuauaaaugu

SEQ ID NO: 1074395 - RNA, 19 nt, Homo sapiens
  misc_RNA (1)...(19): siRNA sense strand
gagaagccauauaaaugua

SEQ ID NO: 1074396 - RNA, 19 nt, Homo sapiens
  misc_RNA (1)...(19): siRNA sense strand
gagagacccuauaaaugua

SEQ ID NO: 1074397 - RNA, 19 nt, Homo sapiens
  misc_RNA (1)...(19): siRNA sense strand
gaagacacaugauaacaca

SEQ ID NO: 1074398 - RNA, 19 nt, Homo sapiens
  misc_RNA (1)...(19): siRNA sense strand
ggaaauggaccucauaaau

SEQ ID NO: 1074399 - RNA, 19 nt, Homo sapiens
  misc_RNA (1)...(19): siRNA sense strand
gcaaagacaugaaagaacu

SEQ ID NO: 1074400 - RNA, 19 nt, Homo sapiens
  misc_RNA (1)...(19): siRNA sense strand
gaagagaaaccauaugaau

SEQ ID NO: 1074401 - RNA, 19 nt, Homo sapiens
  misc_RNA (1)...(19): siRNA sense strand
gagaagccguauaaaugua

SEQ ID NO: 1074402 - RNA, 19 nt, Homo sapiens
  misc_RNA (1)...(19): siRNA sense strand
guucaucucuuaauugcua

SEQ ID NO: 1074403 - RNA, 19 nt, Homo sapiens
  misc_RNA (1)...(19): siRNA sense strand
gagagaagccauauaaaug

SEQ ID NO: 1074404 - RNA, 19 nt, Homo sapiens
  misc_RNA (1)...(19): siRNA sense strand
gcuuauaguuccacucuaa

SEQ ID NO: 1074405 - RNA, 19 nt, Homo sapiens
  misc_RNA (1)...(19): siRNA sense strand
ggagaaacccuauaagugu

SEQ ID NO: 1074406 - RNA, 19 nt, Homo sapiens
  misc_RNA (1)...(19): siRNA sense strand
ggagaacaauccuaugaau

SEQ ID NO: 1074407 - RNA, 19 nt, Homo sapiens
  misc_RNA (1)...(19): siRNA sense strand
cuacagcguuuccugcuua

SEQ ID NO: 1074408 - RNA, 19 nt, Homo sapiens
  misc_RNA (1)...(19): siRNA sense strand
gggaaagccuucaguuguu

SEQ ID NO: 1074409 - RNA, 19 nt, Homo sapiens
  misc_RNA (1)...(19): siRNA sense strand
ggagauggaccucguauau

SEQ ID NO: 1074410 - RNA, 19 nt, Homo sapiens
  misc_RNA (1)...(19): siRNA sense strand
ggagagacccuauaagugu

SEQ ID NO: 1074411 - RNA, 19 nt, Homo sapiens
  misc_RNA (1)...(19): siRNA sense strand
ggagagaagccauauaaau

SEQ ID NO: 1074412 - RNA, 19 nt, Homo sapiens
  misc_RNA (1)...(19): siRNA sense strand
gggaaagcauucucugauu

SEQ ID NO: 1074413 - RNA, 19 nt, Homo sapiens
  misc_RNA (1)...(19): siRNA sense strand
agagagagccugugaaauu

SEQ ID NO: 1074414 - RNA, 19 nt, Homo sapiens
  misc_RNA (1)...(19): siRNA sense strand
gagagacccuauaagugua

SEQ ID NO: 1074415 - RNA, 19 nt, Homo sapiens
  misc_RNA (1)...(19): siRNA sense strand
gagaaacccuauaaaugug

SEQ ID NO: 1074416 - RNA, 19 nt, Homo sapiens
  misc_RNA (1)...(19): siRNA sense strand
uaucagcccugcuuucaaa

SEQ ID NO: 1074417 - RNA, 19 nt, Homo sapiens
  misc_RNA (1)...(19): siRNA sense strand
gagaugggccucauaaaug

SEQ ID NO: 1074418 - RNA, 19 nt, Homo sapiens
  misc_RNA (1)...(19): siRNA sense strand
gaaacccuaucaauguaaa

SEQ ID NO: 1074419 - RNA, 19 nt, Homo sapiens
  misc_RNA (1)...(19): siRNA sense strand
uagaagaacucacacugaa

SEQ ID NO: 1074420 - RNA, 19 nt, Homo sapiens
  misc_RNA (1)...(19): siRNA sense strand
ggagagaagccguauaaau

SEQ ID NO: 1074421 - RNA, 19 nt, Homo sapiens
  misc_RNA (1)...(19): siRNA sense strand
gaagaacucacacugaaga

SEQ ID NO: 1074422 - RNA, 19 nt, Homo sapiens
  misc_RNA (1)...(19): siRNA sense strand
gagagaaacccuaugaaug

SEQ ID NO: 1074423 - RNA, 19 nt, Homo sapiens
  misc_RNA (1)...(19): siRNA sense strand
aaauggaccucauaaaugu

SEQ ID NO: 1074424 - RNA, 19 nt, Homo sapiens
  misc_RNA (1)...(19): siRNA sense strand
ggagauggaccucauaaau

SEQ ID NO: 1074425 - RNA, 19 nt, Homo sapiens
  misc_RNA (1)...(19): siRNA sense strand
ggagauggaccucauaaau

SEQ ID NO: 1074426 - RNA, 19 nt, Homo sapiens
  misc_RNA (1)...(19): siRNA sense strand
gagagaaaccguaugaaug

SEQ ID NO: 1074427 - RNA, 19 nt, Homo sapiens
  misc_RNA (1)...(19): siRNA sense strand
gagagaaacccuaucaaug

SEQ ID NO: 1074428 - RNA, 19 nt, Homo sapiens
  misc_RNA (1)...(19): siRNA sense strand
ggaaaagccuucauuuguu

SEQ ID NO: 1074429 - RNA, 19 nt, Homo sapiens
  misc_RNA (1)...(19): siRNA sense strand
gaaaggacccacaguaugg

SEQ ID NO: 1074430 - RNA, 19 nt, Homo sapiens
  misc_RNA (1)...(19): siRNA sense strand
gaacacaaaccauaugagu

SEQ ID NO: 1074431 - RNA, 19 nt, Homo sapiens
  misc_RNA (1)...(19): siRNA sense strand
gauaacacauacuggaaau

SEQ ID NO: 1074432 - RNA, 19 nt, Homo sapiens
  misc_RNA (1)...(19): siRNA sense strand
gggaaaggcuucaggucuu

SEQ ID NO: 1074433 - RNA, 19 nt, Homo sapiens
  misc_RNA (1)...(19): siRNA sense strand
ucgaagacaugaaagaauu

SEQ ID NO: 1074434 - RNA, 19 nt, Homo sapiens
  misc_RNA (1)...(19): siRNA sense strand
gggagaaacccuauaaaug

SEQ ID NO: 1074435 - RNA, 19 nt, Homo sapiens
  misc_RNA (1)...(19): siRNA sense strand
gaacucacacugaagagaa

SEQ ID NO: 1074436 - RNA, 19 nt, Homo sapiens
  misc_RNA (1)...(19): siRNA sense strand
ggacagcuuucaguuauca

SEQ ID NO: 1074437 - RNA, 19 nt, Homo sapiens
  misc_RNA (1)...(19): siRNA sense strand
ggagaugggccucauaaau

SEQ ID NO: 1074438 - RNA, 19 nt, Homo sapiens
  misc_RNA (1)...(19): siRNA sense strand
gagagccugugaaauuaaa

SEQ ID NO: 1074439 - RNA, 19 nt, Homo sapiens
  misc_RNA (1)...(19): siRNA sense strand
gagauggaccucauaaaug

SEQ ID NO: 1074440 - RNA, 19 nt, Homo sapiens
  misc_RNA (1)...(19): siRNA sense strand
gagauggaccucauaaaug

SEQ ID NO: 1074441 - RNA, 19 nt, Homo sapiens
  misc_RNA (1)...(19): siRNA sense strand
gaaacucuaugauuguaag

SEQ ID NO: 1074442 - RNA, 19 nt, Homo sapiens
  misc_RNA (1)...(19): siRNA sense strand
gggaagcauuucauuguau

SEQ ID NO: 1074443 - RNA, 19 nt, Homo sapiens
  misc_RNA (1)...(19): siRNA sense strand
ggagagaaacccuaugaau

SEQ ID NO: 1074444 - RNA, 19 nt, Homo sapiens
  misc_RNA (1)...(19): siRNA sense strand
gaaaagccuucauuuguug

SEQ ID NO: 1074445 - RNA, 19 nt, Homo sapiens
  misc_RNA (1)...(19): siRNA sense strand
gagaaaccguaugaaugua

SEQ ID NO: 1074446 - RNA, 19 nt, Homo sapiens
  misc_RNA (1)...(19): siRNA sense strand
ggagagaaaccguaugaau

SEQ ID NO: 1074447 - RNA, 19 nt, Homo sapiens
  misc_RNA (1)...(19): siRNA sense strand
ggagagaaacccuaucaau

SEQ ID NO: 1074448 - RNA, 19 nt, Homo sapiens
  misc_RNA (1)...(19): siRNA sense strand
gaaaagcccuaugaaugua

SEQ ID NO: 1074449 - RNA, 19 nt, Homo sapiens
  misc_RNA (1)...(19): siRNA sense strand
guagagagagccugugaaa

SEQ ID NO: 1074450 - RNA, 19 nt, Homo sapiens
  misc_RNA (1)...(19): siRNA sense strand
uaucugaucucucaagcuu

SEQ ID NO: 1074451 - RNA, 19 nt, Homo sapiens
  misc_RNA (1)...(19): siRNA sense strand
ccucauaaaugcaagguau

SEQ ID NO: 1074452 - RNA, 19 nt, Homo sapiens
  misc_RNA (1)...(19): siRNA sense strand
ggucguucaucucuuaauu

SEQ ID NO: 1074453 - RNA, 19 nt, Homo sapiens
  misc_RNA (1)...(19): siRNA sense strand
gcaguguucuacagcguuu

SEQ ID NO: 1074454 - RNA, 19 nt, Homo sapiens
  misc_RNA (1)...(19): siRNA sense strand
ugaaagaccucagcaugga

SEQ ID NO: 1074455 - RNA, 19 nt, Homo sapiens
  misc_RNA (1)...(19): siRNA sense strand
gagagaagccauauacaca

SEQ ID NO: 1074456 - RNA, 19 nt, Homo sapiens
  misc_RNA (1)...(19): siRNA sense strand
uguaucaguuccuuucaua

SEQ ID NO: 1074457 - RNA, 19 nt, Homo sapiens
  misc_RNA (1)...(19): siRNA sense strand
gggaaagcauuaucugauc

SEQ ID NO: 1074458 - RNA, 19 nt, Homo sapiens
  misc_RNA (1)...(19): siRNA sense strand
uggccuaguuuauuucaua

SEQ ID NO: 1074459 - RNA, 19 nt, Homo sapiens
  misc_RNA (1)...(19): siRNA sense strand
acacaaaccauaugaguau

SEQ ID NO: 1074460 - RNA, 19 nt, Homo sapiens
  misc_RNA (1)...(19): siRNA sense strand
ggaaagccuucaguuguuc

SEQ ID NO: 1074461 - RNA, 19 nt, Homo sapiens
  misc_RNA (1)...(19): siRNA sense strand
ucaagaauauggagagaag

SEQ ID NO: 1074462 - RNA, 19 nt, Homo sapiens
  misc_RNA (1)...(19): siRNA sense strand
agauggaccucauaaaugu

SEQ ID NO: 1074463 - RNA, 19 nt, Homo sapiens
  misc_RNA (1)...(19): siRNA sense strand
agagaaacccuaucaaugu

SEQ ID NO: 1074464 - RNA, 19 nt, Homo sapiens
  misc_RNA (1)...(19): siRNA sense strand
ggaagcauuucauuguauc

SEQ ID NO: 1074465 - RNA, 19 nt, Homo sapiens
  misc_RNA (1)...(19): siRNA sense strand
ggaaagcauuaucugaucu

SEQ ID NO: 1074466 - RNA, 19 nt, Homo sapiens
  misc_RNA (1)...(19): siRNA sense strand
gagaaaagcccuaugaaug

SEQ ID NO: 1074467 - RNA, 19 nt, Homo sapiens
  misc_RNA (1)...(19): siRNA sense strand
gcauuucauuguaucaguu

SEQ ID NO: 1074468 - RNA, 19 nt, Homo sapiens
  misc_RNA (1)...(19): siRNA sense strand
ggaaaggcuucaggucuuc

SEQ ID NO: 1074469 - RNA, 19 nt, Homo sapiens
  misc_RNA (1)...(19): siRNA sense strand
agauggaccucguauaugu

SEQ ID NO: 1074470 - RNA, 19 nt, Homo sapiens
  misc_RNA (1)...(19): siRNA sense strand
gaaacccuauaaaugugaa

SEQ ID NO: 1074471 - RNA, 19 nt, Homo sapiens
  misc_RNA (1)...(19): siRNA sense strand
gggagagacccuauaaaug

SEQ ID NO: 1074472 - RNA, 19 nt, Homo sapiens
  misc_RNA (1)...(19): siRNA sense strand
ugggacagcuuucaguuau

SEQ ID NO: 1074473 - RNA, 19 nt, Homo sapiens
  misc_RNA (1)...(19): siRNA sense strand
ucuaagacaugaaagaaca

SEQ ID NO: 1074474 - RNA, 19 nt, Homo sapiens
  misc_RNA (1)...(19): siRNA sense strand
ggaaagcagugaguguaca

SEQ ID NO: 1074475 - RNA, 19 nt, Homo sapiens
  misc_RNA (1)...(19): siRNA sense strand
gaauaugagcaguguucua

SEQ ID NO: 1074476 - RNA, 19 nt, Homo sapiens
  misc_RNA (1)...(19): siRNA sense strand
guauggagaaacccuauaa

SEQ ID NO: 1074477 - RNA, 19 nt, Homo sapiens
  misc_RNA (1)...(19): siRNA sense strand
agacacaugauaacacaua

SEQ ID NO: 1074478 - RNA, 19 nt, Homo sapiens
  misc_RNA (1)...(19): siRNA sense strand
gaaaucaugaaacuacuca

SEQ ID NO: 1074479 - RNA, 19 nt, Homo sapiens
  misc_RNA (1)...(19): siRNA sense strand
caugaaaggacccacagua

SEQ ID NO: 1074480 - RNA, 19 nt, Homo sapiens
  misc_RNA (1)...(19): siRNA sense strand
gaacugggcucauccacaa

SEQ ID NO: 1074481 - RNA, 19 nt, Homo sapiens
  misc_RNA (1)...(19): siRNA sense strand
gauaucagaccaaaucaua

SEQ ID NO: 1074482 - RNA, 19 nt, Homo sapiens
  misc_RNA (1)...(19): siRNA sense strand
gaucaccuaugccaagaaa

SEQ ID NO: 1074483 - RNA, 19 nt, Homo sapiens
  misc_RNA (1)...(19): siRNA sense strand
ccagggaacuccaaauuca

SEQ ID NO: 1074484 - RNA, 19 nt, Homo sapiens
  misc_RNA (1)...(19): siRNA sense strand
gcaggccuuugucauauuu

SEQ ID NO: 1074485 - RNA, 19 nt, Homo sapiens
  misc_RNA (1)...(19): siRNA sense strand
cuaaugagaugauguuauc

SEQ ID NO: 1074486 - RNA, 19 nt, Homo sapiens
  misc_RNA (1)...(19): siRNA sense strand
uuacagggauuuaagauca

SEQ ID NO: 1074487 - RNA, 19 nt, Homo sapiens
  misc_RNA (1)...(19): siRNA sense strand
ugagacagcuacaaggauu

SEQ ID NO: 1074488 - RNA, 19 nt, Homo sapiens
  misc_RNA (1)...(19): siRNA sense strand
ucaccuaugccaagaaaua

SEQ ID NO: 1074489 - RNA, 19 nt, Homo sapiens
  misc_RNA (1)...(19): siRNA sense strand
gggcaggccuuugucauau

SEQ ID NO: 1074490 - RNA, 19 nt, Homo sapiens
  misc_RNA (1)...(19): siRNA sense strand
gcuaauacccaaggaaauu

SEQ ID NO: 1074491 - RNA, 19 nt, Homo sapiens
  misc_RNA (1)...(19): siRNA sense strand
caaggaaauucaacaccaa

SEQ ID NO: 1074492 - RNA, 19 nt, Homo sapiens
  misc_RNA (1)...(19): siRNA sense strand
uuaaagaccaugaagauga

SEQ ID NO: 1074493 - RNA, 19 nt, Homo sapiens
  misc_RNA (1)...(19): siRNA sense strand
gaacuccaaauucagcuaa

SEQ ID NO: 1074494 - RNA, 19 nt, Homo sapiens
  misc_RNA (1)...(19): siRNA sense strand
cuuaauaacuuaccagaag

SEQ ID NO: 1074495 - RNA, 19 nt, Homo sapiens
  misc_RNA (1)...(19): siRNA sense strand
gcuacaaggauuuccauuu

SEQ ID NO: 1074496 - RNA, 19 nt, Homo sapiens
  misc_RNA (1)...(19): siRNA sense strand
cuacaaggauuuccauuuu

SEQ ID NO: 1074497 - RNA, 19 nt, Homo sapiens
  misc_RNA (1)...(19): siRNA sense strand
uugaagagaucccuauaug

SEQ ID NO: 1074498 - RNA, 19 nt, Homo sapiens
  misc_RNA (1)...(19): siRNA sense strand
ugauuacccuccaaacuau

SEQ ID NO: 1074499 - RNA, 19 nt, Homo sapiens
  misc_RNA (1)...(19): siRNA sense strand
cagaccaaaucauacaauu

SEQ ID NO: 1074500 - RNA, 19 nt, Homo sapiens
  misc_RNA (1)...(19): siRNA sense strand
uauccaugcuguuuaauca

SEQ ID NO: 1074501 - RNA, 19 nt, Homo sapiens
  misc_RNA (1)...(19): siRNA sense strand
cagaagagacuaaugagau

SEQ ID NO: 1074502 - RNA, 19 nt, Homo sapiens
  misc_RNA (1)...(19): siRNA sense strand
gauguuauccaugcuguuu

SEQ ID NO: 1074503 - RNA, 19 nt, Homo sapiens
  misc_RNA (1)...(19): siRNA sense strand
agaagagacuaaugagaug

SEQ ID NO: 1074504 - RNA, 19 nt, Homo sapiens
  misc_RNA (1)...(19): siRNA sense strand
caaggaaguacgucuggua

SEQ ID NO: 1074505 - RNA, 19 nt, Homo sapiens
  misc_RNA (1)...(19): siRNA sense strand
ccacaaaugccuugagaca

SEQ ID NO: 1074506 - RNA, 19 nt, Homo sapiens
  misc_RNA (1)...(19): siRNA sense strand
uaaagaccaugaagaugag

SEQ ID NO: 1074507 - RNA, 19 nt, Homo sapiens
  misc_RNA (1)...(19): siRNA sense strand
gaauugaagagaucccuau

SEQ ID NO: 1074508 - RNA, 19 nt, Homo sapiens
  misc_RNA (1)...(19): siRNA sense strand
gaacagacugcaacaacca

SEQ ID NO: 1074509 - RNA, 19 nt, Homo sapiens
  misc_RNA (1)...(19): siRNA sense strand
ggaaauucaacaccaaauc

SEQ ID NO: 1074510 - RNA, 19 nt, Homo sapiens
  misc_RNA (1)...(19): siRNA sense strand
ugacauugcuuuuguugaa

SEQ ID NO: 1074511 - RNA, 19 nt, Homo sapiens
  misc_RNA (1)...(19): siRNA sense strand
uguuauccaugcuguuuaa

SEQ ID NO: 1074512 - RNA, 19 nt, Homo sapiens
  misc_RNA (1)...(19): siRNA sense strand
cugauuacccuccaaacua

SEQ ID NO: 1074513 - RNA, 19 nt, Homo sapiens
  misc_RNA (1)...(19): siRNA sense strand
ggaggcaugacauugcuuu

SEQ ID NO: 1074514 - RNA, 19 nt, Homo sapiens
  misc_RNA (1)...(19): siRNA sense strand
gaagagacuaaugagauga

SEQ ID NO: 1074515 - RNA, 19 nt, Homo sapiens
  misc_RNA (1)...(19): siRNA sense strand
guaaaccaaugcgaauaca

SEQ ID NO: 1074516 - RNA, 19 nt, Homo sapiens
  misc_RNA (1)...(19): siRNA sense strand
cagcuaauacccaaggaaa

SEQ ID NO: 1074517 - RNA, 19 nt, Homo sapiens
  misc_RNA (1)...(19): siRNA sense strand
ggccagggaacuccaaauu

SEQ ID NO: 1074518 - RNA, 19 nt, Homo sapiens
  misc_RNA (1)...(19): siRNA sense strand
ggcaggccuuugucauauu

SEQ ID NO: 1074519 - RNA, 19 nt, Homo sapiens
  misc_RNA (1)...(19): siRNA sense strand
cuaugaagaucaccuaugc

SEQ ID NO: 1074520 - RNA, 19 nt, Homo sapiens
  misc_RNA (1)...(19): siRNA sense strand
ucaguucccuggcuucaag

SEQ ID NO: 1074521 - RNA, 19 nt, Homo sapiens
  misc_RNA (1)...(19): siRNA sense strand
uaccagaagagacuaauga

SEQ ID NO: 1074522 - RNA, 19 nt, Homo sapiens
  misc_RNA (1)...(19): siRNA sense strand
gguggacauuguggcuuua

SEQ ID NO: 1074523 - RNA, 19 nt, Homo sapiens
  misc_RNA (1)...(19): siRNA sense strand
ggacauuguggcuuuaaag

SEQ ID NO: 1074524 - RNA, 19 nt, Homo sapiens
  misc_RNA (1)...(19): siRNA sense strand
uuaaggaacugggcucauc

SEQ ID NO: 1074525 - RNA, 19 nt, Homo sapiens
  misc_RNA (1)...(19): siRNA sense strand
gcaacaaccacaaacaaaa

SEQ ID NO: 1074526 - RNA, 19 nt, Homo sapiens
  misc_RNA (1)...(19): siRNA sense strand
gacauuguggcuuuaaaga

SEQ ID NO: 1074527 - RNA, 19 nt, Homo sapiens
  misc_RNA (1)...(19): siRNA sense strand
uaacuuaccagaagagacu

SEQ ID NO: 1074528 - RNA, 19 nt, Homo sapiens
  misc_RNA (1)...(19): siRNA sense strand
gaaauucaacaccaaaucc

SEQ ID NO: 1074529 - RNA, 19 nt, Homo sapiens
  misc_RNA (1)...(19): siRNA sense strand
gagcugccagggaugcuuu

SEQ ID NO: 1074530 - RNA, 19 nt, Homo sapiens
  misc_RNA (1)...(19): siRNA sense strand
acuccaaauucagcuaaua

SEQ ID NO: 1074531 - RNA, 19 nt, Homo sapiens
  misc_RNA (1)...(19): siRNA sense strand
gggaugcuuuacagggauu

SEQ ID NO: 1074532 - RNA, 19 nt, Homo sapiens
  misc_RNA (1)...(19): siRNA sense strand
aggaagaauugaagagauc

SEQ ID NO: 1074533 - RNA, 19 nt, Homo sapiens
  misc_RNA (1)...(19): siRNA sense strand
agacuaaugagaugauguu

SEQ ID NO: 1074534 - RNA, 19 nt, Homo sapiens
  misc_RNA (1)...(19): siRNA sense strand
gguaaaccaaugcgaauac

SEQ ID NO: 1074535 - RNA, 19 nt, Homo sapiens
  misc_RNA (1)...(19): siRNA sense strand
aaggaagaauugaagagau

SEQ ID NO: 1074536 - RNA, 19 nt, Homo sapiens
  misc_RNA (1)...(19): siRNA sense strand
ccagaagagacuaaugaga

SEQ ID NO: 1074537 - RNA, 19 nt, Homo sapiens
  misc_RNA (1)...(19): siRNA sense strand
gcuaugaagaucaccuaug

SEQ ID NO: 1074538 - RNA, 19 nt, Homo sapiens
  misc_RNA (1)...(19): siRNA sense strand
gagacagcuacaaggauuu

SEQ ID NO: 1074539 - RNA, 19 nt, Homo sapiens
  misc_RNA (1)...(19): siRNA sense strand
aaaggaagaauugaagaga

SEQ ID NO: 1074540 - RNA, 19 nt, Homo sapiens
  misc_RNA (1)...(19): siRNA sense strand
ugguggacauuguggcuuu

SEQ ID NO: 1074541 - RNA, 19 nt, Homo sapiens
  misc_RNA (1)...(19): siRNA sense strand
ggaacuccaaauucagcua

SEQ ID NO: 1074542 - RNA, 19 nt, Homo sapiens
  misc_RNA (1)...(19): siRNA sense strand
uaucagaccaaaucauaca

SEQ ID NO: 1074543 - RNA, 19 nt, Homo sapiens
  misc_RNA (1)...(19): siRNA sense strand
gauuacccuccaaacuaua

SEQ ID NO: 1074544 - RNA, 19 nt, Homo sapiens
  misc_RNA (1)...(19): siRNA sense strand
aaaccaaugcgaauacagu

SEQ ID NO: 1074545 - RNA, 19 nt, Homo sapiens
  misc_RNA (1)...(19): siRNA sense strand
gccagggaacuccaaauuc

SEQ ID NO: 1074546 - RNA, 19 nt, Homo sapiens
  misc_RNA (1)...(19): siRNA sense strand
caccuaugccaagaaauaa

SEQ ID NO: 1074547 - RNA, 19 nt, Homo sapiens
  misc_RNA (1)...(19): siRNA sense strand
uauaugcccuguuuucuca

SEQ ID NO: 1074548 - RNA, 19 nt, Homo sapiens
  misc_RNA (1)...(19): siRNA sense strand
aggccuuugucauauuuaa

SEQ ID NO: 1074549 - RNA, 19 nt, Homo sapiens
  misc_RNA (1)...(19): siRNA sense strand
ccagggaggcaugacauug

SEQ ID NO: 1074550 - RNA, 19 nt, Homo sapiens
  misc_RNA (1)...(19): siRNA sense strand
agacugcaacaaccacaaa

SEQ ID NO: 1074551 - RNA, 19 nt, Homo sapiens
  misc_RNA (1)...(19): siRNA sense strand
gcuuuaaagaccaugaaga

SEQ ID NO: 1074552 - RNA, 19 nt, Homo sapiens
  misc_RNA (1)...(19): siRNA sense strand
aagaucaccuaugccaaga

SEQ ID NO: 1074553 - RNA, 19 nt, Homo sapiens
  misc_RNA (1)...(19): siRNA sense strand
ugcaacaaccacaaacaaa

SEQ ID NO: 1074554 - RNA, 19 nt, Homo sapiens
  misc_RNA (1)...(19): siRNA sense strand
ccaugcuguuuaaucaguu

SEQ ID NO: 1074555 - RNA, 19 nt, Homo sapiens
  misc_RNA (1)...(19): siRNA sense strand
cuuuaaagaccaugaagau

SEQ ID NO: 1074556 - RNA, 19 nt, Homo sapiens
  misc_RNA (1)...(19): siRNA sense strand
ucacaccgucccaugcuau

SEQ ID NO: 1074557 - RNA, 19 nt, Homo sapiens
  misc_RNA (1)...(19): siRNA sense strand
ggcaugacauugcuuuugu

SEQ ID NO: 1074558 - RNA, 19 nt, Homo sapiens
  misc_RNA (1)...(19): siRNA sense strand
uggacauuguggcuuuaaa

SEQ ID NO: 1074559 - RNA, 19 nt, Homo sapiens
  misc_RNA (1)...(19): siRNA sense strand
gaucacaccgucccaugcu

SEQ ID NO: 1074560 - RNA, 19 nt, Homo sapiens
  misc_RNA (1)...(19): siRNA sense strand
gcuuuacagggauuuaaga

SEQ ID NO: 1074561 - RNA, 19 nt, Homo sapiens
  misc_RNA (1)...(19): siRNA sense strand
ggauaucagaccaaaucau

SEQ ID NO: 1074562 - RNA, 19 nt, Homo sapiens
  misc_RNA (1)...(19): siRNA sense strand
aucccuauaugcccuguuu

SEQ ID NO: 1074563 - RNA, 19 nt, Homo sapiens
  misc_RNA (1)...(19): siRNA sense strand
gacuaaugagaugauguua

SEQ ID NO: 1074564 - RNA, 19 nt, Homo sapiens
  misc_RNA (1)...(19): siRNA sense strand
gaacugggcucauccacaa

SEQ ID NO: 1074565 - RNA, 19 nt, Homo sapiens
  misc_RNA (1)...(19): siRNA sense strand
gauaucagaccaaaucaua

SEQ ID NO: 1074566 - RNA, 19 nt, Homo sapiens
  misc_RNA (1)...(19): siRNA sense strand
gaucaccuaugccaagaaa

SEQ ID NO: 1074567 - RNA, 19 nt, Homo sapiens
  misc_RNA (1)...(19): siRNA sense strand
ccagggaacuccaaauuca

SEQ ID NO: 1074568 - RNA, 19 nt, Homo sapiens
  misc_RNA (1)...(19): siRNA sense strand
gcaggccuuugucauauuu

SEQ ID NO: 1074569 - RNA, 19 nt, Homo sapiens
  misc_RNA (1)...(19): siRNA sense strand
cuaaugagaugauguuauc

SEQ ID NO: 1074570 - RNA, 19 nt, Homo sapiens
  misc_RNA (1)...(19): siRNA sense strand
uuacagggauuuaagauca

SEQ ID NO: 1074571 - RNA, 19 nt, Homo sapiens
  misc_RNA (1)...(19): siRNA sense strand
ugagacagcuacaaggauu

SEQ ID NO: 1074572 - RNA, 19 nt, Homo sapiens
  misc_RNA (1)...(19): siRNA sense strand
ucaccuaugccaagaaaua

SEQ ID NO: 1074573 - RNA, 19 nt, Homo sapiens
  misc_RNA (1)...(19): siRNA sense strand
gggcaggccuuugucauau

SEQ ID NO: 1074574 - RNA, 19 nt, Homo sapiens
  misc_RNA (1)...(19): siRNA sense strand
gcuaauacccaaggaaauu

SEQ ID NO: 1074575 - RNA, 19 nt, Homo sapiens
  misc_RNA (1)...(19): siRNA sense strand
caaggaaauucaacaccaa

SEQ ID NO: 1074576 - RNA, 19 nt, Homo sapiens
  misc_RNA (1)...(19): siRNA sense strand
uuaaagaccaugaagauga

SEQ ID NO: 1074577 - RNA, 19 nt, Homo sapiens
  misc_RNA (1)...(19): siRNA sense strand
gaacuccaaauucagcuaa

SEQ ID NO: 1074578 - RNA, 19 nt, Homo sapiens
  misc_RNA (1)...(19): siRNA sense strand
cuuaauaacuuaccagaag

SEQ ID NO: 1074579 - RNA, 19 nt, Homo sapiens
  misc_RNA (1)...(19): siRNA sense strand
gcuacaaggauuuccauuu

SEQ ID NO: 1074580 - RNA, 19 nt, Homo sapiens
  misc_RNA (1)...(19): siRNA sense strand
cuacaaggauuuccauuuu

SEQ ID NO: 1074581 - RNA, 19 nt, Homo sapiens
  misc_RNA (1)...(19): siRNA sense strand
uugaagagaucccuauaug

SEQ ID NO: 1074582 - RNA, 19 nt, Homo sapiens
  misc_RNA (1)...(19): siRNA sense strand
ugauuacccuccaaacuau

SEQ ID NO: 1074583 - RNA, 19 nt, Homo sapiens
  misc_RNA (1)...(19): siRNA sense strand
cagaccaaaucauacaauu

SEQ ID NO: 1074584 - RNA, 19 nt, Homo sapiens
  misc_RNA (1)...(19): siRNA sense strand
uauccaugcuguuuaauca

SEQ ID NO: 1074585 - RNA, 19 nt, Homo sapiens
  misc_RNA (1)...(19): siRNA sense strand
cagaagagacuaaugagau

SEQ ID NO: 1074586 - RNA, 19 nt, Homo sapiens
  misc_RNA (1)...(19): siRNA sense strand
gauguuauccaugcuguuu

SEQ ID NO: 1074587 - RNA, 19 nt, Homo sapiens
  misc_RNA (1)...(19): siRNA sense strand
agaagagacuaaugagaug

SEQ ID NO: 1074588 - RNA, 19 nt, Homo sapiens
  misc_RNA (1)...(19): siRNA sense strand
caaggaaguacgucuggua

SEQ ID NO: 1074589 - RNA, 19 nt, Homo sapiens
  misc_RNA (1)...(19): siRNA sense strand
ccacaaaugccuugagaca

SEQ ID NO: 1074590 - RNA, 19 nt, Homo sapiens
  misc_RNA (1)...(19): siRNA sense strand
uaaagaccaugaagaugag

SEQ ID NO: 1074591 - RNA, 19 nt, Homo sapiens
  misc_RNA (1)...(19): siRNA sense strand
gaauugaagagaucccuau

SEQ ID NO: 1074592 - RNA, 19 nt, Homo sapiens
  misc_RNA (1)...(19): siRNA sense strand
gaacagacugcaacaacca

SEQ ID NO: 1074593 - RNA, 19 nt, Homo sapiens
  misc_RNA (1)...(19): siRNA sense strand
ggaaauucaacaccaaauc

SEQ ID NO: 1074594 - RNA, 19 nt, Homo sapiens
  misc_RNA (1)...(19): siRNA sense strand
ugacauugcuuuuguugaa

SEQ ID NO: 1074595 - RNA, 19 nt, Homo sapiens
  misc_RNA (1)...(19): siRNA sense strand
uguuauccaugcuguuuaa

SEQ ID NO: 1074596 - RNA, 19 nt, Homo sapiens
  misc_RNA (1)...(19): siRNA sense strand
cugauuacccuccaaacua

SEQ ID NO: 1074597 - RNA, 19 nt, Homo sapiens
  misc_RNA (1)...(19): siRNA sense strand
ggaggcaugacauugcuuu

SEQ ID NO: 1074598 - RNA, 19 nt, Homo sapiens
  misc_RNA (1)...(19): siRNA sense strand
gaagagacuaaugagauga

SEQ ID NO: 1074599 - RNA, 19 nt, Homo sapiens
  misc_RNA (1)...(19): siRNA sense strand
guaaaccaaugcgaauaca

SEQ ID NO: 1074600 - RNA, 19 nt, Homo sapiens
  misc_RNA (1)...(19): siRNA sense strand
cagcuaauacccaaggaaa

SEQ ID NO: 1074601 - RNA, 19 nt, Homo sapiens
  misc_RNA (1)...(19): siRNA sense strand
ggccagggaacuccaaauu

SEQ ID NO: 1074602 - RNA, 19 nt, Homo sapiens
  misc_RNA (1)...(19): siRNA sense strand
ggcaggccuuugucauauu

SEQ ID NO: 1074603 - RNA, 19 nt, Homo sapiens
  misc_RNA (1)...(19): siRNA sense strand
cuaugaagaucaccuaugc

SEQ ID NO: 1074604 - RNA, 19 nt, Homo sapiens
  misc_RNA (1)...(19): siRNA sense strand
ucaguucccuggcuucaag

SEQ ID NO: 1074605 - RNA, 19 nt, Homo sapiens
  misc_RNA (1)...(19): siRNA sense strand
uaccagaagagacuaauga

SEQ ID NO: 1074606 - RNA, 19 nt, Homo sapiens
  misc_RNA (1)...(19): siRNA sense strand
gguggacauuguggcuuua

SEQ ID NO: 1074607 - RNA, 19 nt, Homo sapiens
  misc_RNA (1)...(19): siRNA sense strand
ggacauuguggcuuuaaag

SEQ ID NO: 1074608 - RNA, 19 nt, Homo sapiens
  misc_RNA (1)...(19): siRNA sense strand
uuaaggaacugggcucauc

SEQ ID NO: 1074609 - RNA, 19 nt, Homo sapiens
  misc_RNA (1)...(19): siRNA sense strand
gcaacaaccacaaacaaaa

SEQ ID NO: 1074610 - RNA, 19 nt, Homo sapiens
  misc_RNA (1)...(19): siRNA sense strand
gacauuguggcuuuaaaga

SEQ ID NO: 1074611 - RNA, 19 nt, Homo sapiens
  misc_RNA (1)...(19): siRNA sense strand
uaacuuaccagaagagacu

SEQ ID NO: 1074612 - RNA, 19 nt, Homo sapiens
  misc_RNA (1)...(19): siRNA sense strand
gaaauucaacaccaaaucc

SEQ ID NO: 1074613 - RNA, 19 nt, Homo sapiens
  misc_RNA (1)...(19): siRNA sense strand
gagcugccagggaugcuuu

SEQ ID NO: 1074614 - RNA, 19 nt, Homo sapiens
  misc_RNA (1)...(19): siRNA sense strand
acuccaaauucagcuaaua

SEQ ID NO: 1074615 - RNA, 19 nt, Homo sapiens
  misc_RNA (1)...(19): siRNA sense strand
gggaugcuuuacagggauu

SEQ ID NO: 1074616 - RNA, 19 nt, Homo sapiens
  misc_RNA (1)...(19): siRNA sense strand
aggaagaauugaagagauc

SEQ ID NO: 1074617 - RNA, 19 nt, Homo sapiens
  misc_RNA (1)...(19): siRNA sense strand
agacuaaugagaugauguu

SEQ ID NO: 1074618 - RNA, 19 nt, Homo sapiens
  misc_RNA (1)...(19): siRNA sense strand
gguaaaccaaugcgaauac

SEQ ID NO: 1074619 - RNA, 19 nt, Homo sapiens
  misc_RNA (1)...(19): siRNA sense strand
aaggaagaauugaagagau

SEQ ID NO: 1074620 - RNA, 19 nt, Homo sapiens
  misc_RNA (1)...(19): siRNA sense strand
ccagaagagacuaaugaga

SEQ ID NO: 1074621 - RNA, 19 nt, Homo sapiens
  misc_RNA (1)...(19): siRNA sense strand
gcuaugaagaucaccuaug

SEQ ID NO: 1074622 - RNA, 19 nt, Homo sapiens
  misc_RNA (1)...(19): siRNA sense strand
gagacagcuacaaggauuu

SEQ ID NO: 1074623 - RNA, 19 nt, Homo sapiens
  misc_RNA (1)...(19): siRNA sense strand
aaaggaagaauugaagaga

SEQ ID NO: 1074624 - RNA, 19 nt, Homo sapiens
  misc_RNA (1)...(19): siRNA sense strand
ugguggacauuguggcuuu

SEQ ID NO: 1074625 - RNA, 19 nt, Homo sapiens
  misc_RNA (1)...(19): siRNA sense strand
ggaacuccaaauucagcua

SEQ ID NO: 1074626 - RNA, 19 nt, Homo sapiens
  misc_RNA (1)...(19): siRNA sense strand
uaucagaccaaaucauaca

SEQ ID NO: 1074627 - RNA, 19 nt, Homo sapiens
  misc_RNA (1)...(19): siRNA sense strand
gauuacccuccaaacuaua

SEQ ID NO: 1074628 - RNA, 19 nt, Homo sapiens
  misc_RNA (1)...(19): siRNA sense strand
aaaccaaugcgaauacagu

SEQ ID NO: 1074629 - RNA, 19 nt, Homo sapiens
  misc_RNA (1)...(19): siRNA sense strand
gccagggaacuccaaauuc

SEQ ID NO: 1074630 - RNA, 19 nt, Homo sapiens
  misc_RNA (1)...(19): siRNA sense strand
caccuaugccaagaaauaa

SEQ ID NO: 1074631 - RNA, 19 nt, Homo sapiens
  misc_RNA (1)...(19): siRNA sense strand
uauaugcccuguuuucuca

SEQ ID NO: 1074632 - RNA, 19 nt, Homo sapiens
  misc_RNA (1)...(19): siRNA sense strand
aggccuuugucauauuuaa

SEQ ID NO: 1074633 - RNA, 19 nt, Homo sapiens
  misc_RNA (1)...(19): siRNA sense strand
ccagggaggcaugacauug

SEQ ID NO: 1074634 - RNA, 19 nt, Homo sapiens
  misc_RNA (1)...(19): siRNA sense strand
agacugcaacaaccacaaa

SEQ ID NO: 1074635 - RNA, 19 nt, Homo sapiens
  misc_RNA (1)...(19): siRNA sense strand
gcuuuaaagaccaugaaga

SEQ ID NO: 1074636 - RNA, 19 nt, Homo sapiens
  misc_RNA (1)...(19): siRNA sense strand
aagaucaccuaugccaaga

SEQ ID NO: 1074637 - RNA, 19 nt, Homo sapiens
  misc_RNA (1)...(19): siRNA sense strand
ugcaacaaccacaaacaaa

SEQ ID NO: 1074638 - RNA, 19 nt, Homo sapiens
  misc_RNA (1)...(19): siRNA sense strand
ccaugcuguuuaaucaguu

SEQ ID NO: 1074639 - RNA, 19 nt, Homo sapiens
  misc_RNA (1)...(19): siRNA sense strand
cuuuaaagaccaugaagau

SEQ ID NO: 1074640 - RNA, 19 nt, Homo sapiens
  misc_RNA (1)...(19): siRNA sense strand
ucacaccgucccaugcuau

SEQ ID NO: 1074641 - RNA, 19 nt, Homo sapiens
  misc_RNA (1)...(19): siRNA sense strand
ggcaugacauugcuuuugu

SEQ ID NO: 1074642 - RNA, 19 nt, Homo sapiens
  misc_RNA (1)...(19): siRNA sense strand
uggacauuguggcuuuaaa

SEQ ID NO: 1074643 - RNA, 19 nt, Homo sapiens
  misc_RNA (1)...(19): siRNA sense strand
gaucacaccgucccaugcu

SEQ ID NO: 1074644 - RNA, 19 nt, Homo sapiens
  misc_RNA (1)...(19): siRNA sense strand
gcuuuacagggauuuaaga

SEQ ID NO: 1074645 - RNA, 19 nt, Homo sapiens
  misc_RNA (1)...(19): siRNA sense strand
ggauaucagaccaaaucau

SEQ ID NO: 1074646 - RNA, 19 nt, Homo sapiens
  misc_RNA (1)...(19): siRNA sense strand
aucccuauaugcccuguuu

SEQ ID NO: 1074647 - RNA, 19 nt, Homo sapiens
  misc_RNA (1)...(19): siRNA sense strand
gacuaaugagaugauguua

SEQ ID NO: 1074648 - RNA, 19 nt, Homo sapiens
  misc_RNA (1)...(19): siRNA sense strand
ugaaagagcucauaaugga

SEQ ID NO: 1074649 - RNA, 19 nt, Homo sapiens
  misc_RNA (1)...(19): siRNA sense strand
ggauggaccuuauaaaugu

SEQ ID NO: 1074650 - RNA, 19 nt, Homo sapiens
  misc_RNA (1)...(19): siRNA sense strand
ggagaaacccuaugaaugu

SEQ ID NO: 1074651 - RNA, 19 nt, Homo sapiens
  misc_RNA (1)...(19): siRNA sense strand
gaagacacaugauuaagca

SEQ ID NO: 1074652 - RNA, 19 nt, Homo sapiens
  misc_RNA (1)...(19): siRNA sense strand
gaagacacaugauaaagca

SEQ ID NO: 1074653 - RNA, 19 nt, Homo sapiens
  misc_RNA (1)...(19): siRNA sense strand
gaagagggacucagugaaa

SEQ ID NO: 1074654 - RNA, 19 nt, Homo sapiens
  misc_RNA (1)...(19): siRNA sense strand
ggagauaaaccuuacguaa

SEQ ID NO: 1074655 - RNA, 19 nt, Homo sapiens
  misc_RNA (1)...(19): siRNA sense strand
ggagagaaaccauauaaau

SEQ ID NO: 1074656 - RNA, 19 nt, Homo sapiens
  misc_RNA (1)...(19): siRNA sense strand
gagaaacccuaugaaugua

SEQ ID NO: 1074657 - RNA, 19 nt, Homo sapiens
  misc_RNA (1)...(19): siRNA sense strand
gagauaaaccuuacguaaa

SEQ ID NO: 1074658 - RNA, 19 nt, Homo sapiens
  misc_RNA (1)...(19): siRNA sense strand
gagagaagcccuaugaaug

SEQ ID NO: 1074659 - RNA, 19 nt, Homo sapiens
  misc_RNA (1)...(19): siRNA sense strand
caucagaucucaccuugga

SEQ ID NO: 1074660 - RNA, 19 nt, Homo sapiens
  misc_RNA (1)...(19): siRNA sense strand
ggagauggaccuuauaaau

SEQ ID NO: 1074661 - RNA, 19 nt, Homo sapiens
  misc_RNA (1)...(19): siRNA sense strand
ggagauggaccuuauaaau

SEQ ID NO: 1074662 - RNA, 19 nt, Homo sapiens
  misc_RNA (1)...(19): siRNA sense strand
gagaagcccuaugaaugua

SEQ ID NO: 1074663 - RNA, 19 nt, Homo sapiens
  misc_RNA (1)...(19): siRNA sense strand
ggagauggaccuuauaaau

SEQ ID NO: 1074664 - RNA, 19 nt, Homo sapiens
  misc_RNA (1)...(19): siRNA sense strand
gagagaaaccauauaaaug

SEQ ID NO: 1074665 - RNA, 19 nt, Homo sapiens
  misc_RNA (1)...(19): siRNA sense strand
gagagaaacccuaugaaug

SEQ ID NO: 1074666 - RNA, 19 nt, Homo sapiens
  misc_RNA (1)...(19): siRNA sense strand
gggaaagcauucaauuaug

SEQ ID NO: 1074667 - RNA, 19 nt, Homo sapiens
  misc_RNA (1)...(19): siRNA sense strand
gagagaaacccuaugaaug

SEQ ID NO: 1074668 - RNA, 19 nt, Homo sapiens
  misc_RNA (1)...(19): siRNA sense strand
caucauucaucccuuagua

SEQ ID NO: 1074669 - RNA, 19 nt, Homo sapiens
  misc_RNA (1)...(19): siRNA sense strand
gagauggaccuuauaaaug

SEQ ID NO: 1074670 - RNA, 19 nt, Homo sapiens
  misc_RNA (1)...(19): siRNA sense strand
gagauggaccuuauaaaug

SEQ ID NO: 1074671 - RNA, 19 nt, Homo sapiens
  misc_RNA (1)...(19): siRNA sense strand
gagauggaccuuauaaaug

SEQ ID NO: 1074672 - RNA, 19 nt, Homo sapiens
  misc_RNA (1)...(19): siRNA sense strand
ucaggaauauggagagaaa

SEQ ID NO: 1074673 - RNA, 19 nt, Homo sapiens
  misc_RNA (1)...(19): siRNA sense strand
ucauuucucuuccaaguuu

SEQ ID NO: 1074674 - RNA, 19 nt, Homo sapiens
  misc_RNA (1)...(19): siRNA sense strand
gggaaagccuucaguucuu

SEQ ID NO: 1074675 - RNA, 19 nt, Homo sapiens
  misc_RNA (1)...(19): siRNA sense strand
ggaaagccuucaguucuug

SEQ ID NO: 1074676 - RNA, 19 nt, Homo sapiens
  misc_RNA (1)...(19): siRNA sense strand
guaagaccaugugaaugua

SEQ ID NO: 1074677 - RNA, 19 nt, Homo sapiens
  misc_RNA (1)...(19): siRNA sense strand
guucgaagacacaugauua

SEQ ID NO: 1074678 - RNA, 19 nt, Homo sapiens
  misc_RNA (1)...(19): siRNA sense strand
ggagagaaacccuaugaau

SEQ ID NO: 1074679 - RNA, 19 nt, Homo sapiens
  misc_RNA (1)...(19): siRNA sense strand
ggagagaaacccuaugaau

SEQ ID NO: 1074680 - RNA, 19 nt, Homo sapiens
  misc_RNA (1)...(19): siRNA sense strand
ggaaagucuucaugcauca

SEQ ID NO: 1074681 - RNA, 19 nt, Homo sapiens
  misc_RNA (1)...(19): siRNA sense strand
agauaaaccuuacguaaag

SEQ ID NO: 1074682 - RNA, 19 nt, Homo sapiens
  misc_RNA (1)...(19): siRNA sense strand
agauggaccuuauaaaugu

SEQ ID NO: 1074683 - RNA, 19 nt, Homo sapiens
  misc_RNA (1)...(19): siRNA sense strand
agauggaccuuauaaaugu

SEQ ID NO: 1074684 - RNA, 19 nt, Homo sapiens
  misc_RNA (1)...(19): siRNA sense strand
agauggaccuuauaaaugu

SEQ ID NO: 1074685 - RNA, 19 nt, Homo sapiens
  misc_RNA (1)...(19): siRNA sense strand
ggagagaagcccuaugaau

SEQ ID NO: 1074686 - RNA, 19 nt, Homo sapiens
  misc_RNA (1)...(19): siRNA sense strand
gaaacccuaugaauguaau

SEQ ID NO: 1074687 - RNA, 19 nt, Homo sapiens
  misc_RNA (1)...(19): siRNA sense strand
gaccagagcauugaagauu

SEQ ID NO: 1074688 - RNA, 19 nt, Homo sapiens
  misc_RNA (1)...(19): siRNA sense strand
ggauguggcugugaacuuc

SEQ ID NO: 1074689 - RNA, 19 nt, Homo sapiens
  misc_RNA (1)...(19): siRNA sense strand
uuagaaaccuggccugugu

SEQ ID NO: 1074690 - RNA, 19 nt, Homo sapiens
  misc_RNA (1)...(19): siRNA sense strand
acacaaaccauaugacuau

SEQ ID NO: 1074691 - RNA, 19 nt, Homo sapiens
  misc_RNA (1)...(19): siRNA sense strand
ccauauaaaugucaggaau

SEQ ID NO: 1074692 - RNA, 19 nt, Homo sapiens
  misc_RNA (1)...(19): siRNA sense strand
gggagaaacccuaugaaug

SEQ ID NO: 1074693 - RNA, 19 nt, Homo sapiens
  misc_RNA (1)...(19): siRNA sense strand
agagaaacccuaugaaugu

SEQ ID NO: 1074694 - RNA, 19 nt, Homo sapiens
  misc_RNA (1)...(19): siRNA sense strand
agagaaacccuaugaaugu

SEQ ID NO: 1074695 - RNA, 19 nt, Homo sapiens
  misc_RNA (1)...(19): siRNA sense strand
gggauggaccuuauaaaug

SEQ ID NO: 1074696 - RNA, 19 nt, Homo sapiens
  misc_RNA (1)...(19): siRNA sense strand
gauggaccuuauaaaugua

SEQ ID NO: 1074697 - RNA, 19 nt, Homo sapiens
  misc_RNA (1)...(19): siRNA sense strand
ggagugggcuuugcuggau

SEQ ID NO: 1074698 - RNA, 19 nt, Homo sapiens
  misc_RNA (1)...(19): siRNA sense strand
gaucucaccuuggacacaa

SEQ ID NO: 1074699 - RNA, 19 nt, Homo sapiens
  misc_RNA (1)...(19): siRNA sense strand
gauaaaccuuacguaaaga

SEQ ID NO: 1074700 - RNA, 19 nt, Homo sapiens
  misc_RNA (1)...(19): siRNA sense strand
ugagaaacccuaugcaugu

SEQ ID NO: 1074701 - RNA, 19 nt, Homo sapiens
  misc_RNA (1)...(19): siRNA sense strand
gugggaaagcauucaauua

SEQ ID NO: 1074702 - RNA, 19 nt, Homo sapiens
  misc_RNA (1)...(19): siRNA sense strand
uaaagaaugugggaaagca

SEQ ID NO: 1074703 - RNA, 19 nt, Homo sapiens
  misc_RNA (1)...(19): siRNA sense strand
gaacucauacuggagagaa

SEQ ID NO: 1074704 - RNA, 19 nt, Homo sapiens
  misc_RNA (1)...(19): siRNA sense strand
gguaaaaccuucaguucuu

SEQ ID NO: 1074705 - RNA, 19 nt, Homo sapiens
  misc_RNA (1)...(19): siRNA sense strand
ucagauacaugaaagaacu

SEQ ID NO: 1074706 - RNA, 19 nt, Homo sapiens
  misc_RNA (1)...(19): siRNA sense strand
gaauguaagcaauguggaa

SEQ ID NO: 1074707 - RNA, 19 nt, Homo sapiens
  misc_RNA (1)...(19): siRNA sense strand
cauugaagauugguacaaa

SEQ ID NO: 1074708 - RNA, 19 nt, Homo sapiens
  misc_RNA (1)...(19): siRNA sense strand
ucacacaaccuucgaauac

SEQ ID NO: 1074709 - RNA, 19 nt, Homo sapiens
  misc_RNA (1)...(19): siRNA sense strand
gaacucacacuggagagaa

SEQ ID NO: 1074710 - RNA, 19 nt, Homo sapiens
  misc_RNA (1)...(19): siRNA sense strand
gaacucacacuggagagaa

SEQ ID NO: 1074711 - RNA, 19 nt, Homo sapiens
  misc_RNA (1)...(19): siRNA sense strand
gguaugugguagagccuuu

SEQ ID NO: 1074712 - RNA, 19 nt, Homo sapiens
  misc_RNA (1)...(19): siRNA sense strand
gggacucagugaaaguaaa

SEQ ID NO: 1074713 - RNA, 19 nt, Homo sapiens
  misc_RNA (1)...(19): siRNA sense strand
cauaugacuaucaggaaua

SEQ ID NO: 1074714 - RNA, 19 nt, Homo sapiens
  misc_RNA (1)...(19): siRNA sense strand
gagaaacccuaugaauguc

SEQ ID NO: 1074715 - RNA, 19 nt, Homo sapiens
  misc_RNA (1)...(19): siRNA sense strand
gagaaacccuaugaauguc

SEQ ID NO: 1074716 - RNA, 19 nt, Homo sapiens
  misc_RNA (1)...(19): siRNA sense strand
gcacaucagaucucaccuu

SEQ ID NO: 1074717 - RNA, 19 nt, Homo sapiens
  misc_RNA (1)...(19): siRNA sense strand
ugggaaagcauucaauuau

SEQ ID NO: 1074718 - RNA, 19 nt, Homo sapiens
  misc_RNA (1)...(19): siRNA sense strand
ccuuauaaaugucagguau

SEQ ID NO: 1074719 - RNA, 19 nt, Homo sapiens
  misc_RNA (1)...(19): siRNA sense strand
gggaagaccagagcauuga

SEQ ID NO: 1074720 - RNA, 19 nt, Homo sapiens
  misc_RNA (1)...(19): siRNA sense strand
ccuuauaaaugucagguau

SEQ ID NO: 1074721 - RNA, 19 nt, Homo sapiens
  misc_RNA (1)...(19): siRNA sense strand
uaagcacacuggagaugga

SEQ ID NO: 1074722 - RNA, 19 nt, Homo sapiens
  misc_RNA (1)...(19): siRNA sense strand
ggacacaaaccauaugacu

SEQ ID NO: 1074723 - RNA, 19 nt, Homo sapiens
  misc_RNA (1)...(19): siRNA sense strand
gacacaaaccauaugacua

SEQ ID NO: 1074724 - RNA, 19 nt, Homo sapiens
  misc_RNA (1)...(19): siRNA sense strand
ggaagagggacucagugaa

SEQ ID NO: 1074725 - RNA, 19 nt, Homo sapiens
  misc_RNA (1)...(19): siRNA sense strand
ccaaguuuauuucagauac

SEQ ID NO: 1074726 - RNA, 19 nt, Homo sapiens
  misc_RNA (1)...(19): siRNA sense strand
ccauaugacuaucaggaau

SEQ ID NO: 1074727 - RNA, 19 nt, Homo sapiens
  misc_RNA (1)...(19): siRNA sense strand
gagaaacccuaugcauguc

SEQ ID NO: 1074728 - RNA, 19 nt, Homo sapiens
  misc_RNA (1)...(19): siRNA sense strand
gccuuugacuguccuaguu

SEQ ID NO: 1074729 - RNA, 19 nt, Homo sapiens
  misc_RNA (1)...(19): siRNA sense strand
ucauuucucucccaagugu

SEQ ID NO: 1074730 - RNA, 19 nt, Homo sapiens
  misc_RNA (1)...(19): siRNA sense strand
ucauuucucucccaagugu

SEQ ID NO: 1074731 - RNA, 19 nt, Homo sapiens
  misc_RNA (1)...(19): siRNA sense strand
ccaugaauguaaacagugu

SEQ ID NO: 1074732 - RNA, 19 nt, Homo sapiens
  misc_RNA (1)...(19): siRNA sense strand
agagaagcccuaugaaugu

SEQ ID NO: 1074733 - RNA, 19 nt, Homo sapiens
  misc_RNA (1)...(19): siRNA sense strand
ccaugugaauguaguuugu

SEQ ID NO: 1074734 - RNA, 19 nt, Homo sapiens
  misc_RNA (1)...(19): siRNA sense strand
uaaagaaugugggaaagcu

SEQ ID NO: 1074735 - RNA, 19 nt, Homo sapiens
  misc_RNA (1)...(19): siRNA sense strand
aaaccuggccuguguagga

SEQ ID NO: 1074736 - RNA, 19 nt, Homo sapiens
  misc_RNA (1)...(19): siRNA sense strand
uaauggagauaaaccuuac

SEQ ID NO: 1074737 - RNA, 19 nt, Homo sapiens
  misc_RNA (1)...(19): siRNA sense strand
gaacacaugaaagaacuca

SEQ ID NO: 1074738 - RNA, 19 nt, Homo sapiens
  misc_RNA (1)...(19): siRNA sense strand
gagggacucagugaaagua

SEQ ID NO: 1074739 - RNA, 19 nt, Homo sapiens
  misc_RNA (1)...(19): siRNA sense strand
gagcucauaauggagauaa

SEQ ID NO: 1074740 - RNA, 19 nt, Homo sapiens
  misc_RNA (1)...(19): siRNA sense strand
aauuaugccaguuccauua

SEQ ID NO: 1074741 - RNA, 19 nt, Homo sapiens
  misc_RNA (1)...(19): siRNA sense strand
guccgaagacacaugauaa

SEQ ID NO: 1074742 - RNA, 19 nt, Homo sapiens
  misc_RNA (1)...(19): siRNA sense strand
ccaguuauguucgaaagca

SEQ ID NO: 1074743 - RNA, 19 nt, Homo sapiens
  misc_RNA (1)...(19): siRNA sense strand
ucgaauacaugaaagaacu

SEQ ID NO: 1074744 - RNA, 19 nt, Homo sapiens
  misc_RNA (1)...(19): siRNA sense strand
aaagcacacuggagaugga

SEQ ID NO: 1074745 - RNA, 19 nt, Homo sapiens
  misc_RNA (1)...(19): siRNA sense strand
gaauaccugugaaaaugaa

SEQ ID NO: 1074746 - RNA, 19 nt, Homo sapiens
  misc_RNA (1)...(19): siRNA sense strand
ucaaauacacgaaagaacu

SEQ ID NO: 1074747 - RNA, 19 nt, Homo sapiens
  misc_RNA (1)...(19): siRNA sense strand
gaagcccuaugaauguaag

SEQ ID NO: 1074748 - RNA, 19 nt, Homo sapiens
  misc_RNA (1)...(19): siRNA sense strand
ggacaguggugaccugcua

SEQ ID NO: 1074749 - RNA, 19 nt, Homo sapiens
  misc_RNA (1)...(19): siRNA sense strand
gcagugaggugaaugucau

SEQ ID NO: 1074750 - RNA, 19 nt, Homo sapiens
  misc_RNA (1)...(19): siRNA sense strand
gagaagcggcugcuagaga

SEQ ID NO: 1074751 - RNA, 19 nt, Homo sapiens
  misc_RNA (1)...(19): siRNA sense strand
ugacgggucuccacucaug

SEQ ID NO: 1074752 - RNA, 19 nt, Homo sapiens
  misc_RNA (1)...(19): siRNA sense strand
ggagucaguccucaucgua

SEQ ID NO: 1074753 - RNA, 19 nt, Homo sapiens
  misc_RNA (1)...(19): siRNA sense strand
guagucagcaacaacauug

SEQ ID NO: 1074754 - RNA, 19 nt, Homo sapiens
  misc_RNA (1)...(19): siRNA sense strand
agaagcggcugcuagagau

SEQ ID NO: 1074755 - RNA, 19 nt, Homo sapiens
  misc_RNA (1)...(19): siRNA sense strand
ggagggcagugaggugaau

SEQ ID NO: 1074756 - RNA, 19 nt, Homo sapiens
  misc_RNA (1)...(19): siRNA sense strand
cagagaagcggcugcuaga

SEQ ID NO: 1074757 - RNA, 19 nt, Homo sapiens
  misc_RNA (1)...(19): siRNA sense strand
acacggauccugcguucuu

SEQ ID NO: 1074758 - RNA, 19 nt, Homo sapiens
  misc_RNA (1)...(19): siRNA sense strand
cgaguucgagcucuucuuc

SEQ ID NO: 1074759 - RNA, 19 nt, Homo sapiens
  misc_RNA (1)...(19): siRNA sense strand
gaucgcagggccagagaag

SEQ ID NO: 1074760 - RNA, 19 nt, Homo sapiens
  misc_RNA (1)...(19): siRNA sense strand
ucugacgggucuccacuca

SEQ ID NO: 1074761 - RNA, 19 nt, Homo sapiens
  misc_RNA (1)...(19): siRNA sense strand
ggagauccgcaaggucuuc

SEQ ID NO: 1074762 - RNA, 19 nt, Homo sapiens
  misc_RNA (1)...(19): siRNA sense strand
ggacauaccuaauacuuuc

SEQ ID NO: 1074763 - RNA, 19 nt, Homo sapiens
  misc_RNA (1)...(19): siRNA sense strand
gaggagagguugcagauga

SEQ ID NO: 1074764 - RNA, 19 nt, Homo sapiens
  misc_RNA (1)...(19): siRNA sense strand
gaagaucagucaccagaga

SEQ ID NO: 1074765 - RNA, 19 nt, Homo sapiens
  misc_RNA (1)...(19): siRNA sense strand
guaaaugggucaucagcaa

SEQ ID NO: 1074766 - RNA, 19 nt, Homo sapiens
  misc_RNA (1)...(19): siRNA sense strand
caagaucacugagcuaaau

SEQ ID NO: 1074767 - RNA, 19 nt, Homo sapiens
  misc_RNA (1)...(19): siRNA sense strand
gaacagauuggaucggaaa

SEQ ID NO: 1074768 - RNA, 19 nt, Homo sapiens
  misc_RNA (1)...(19): siRNA sense strand
ccagagagauggacugaca

SEQ ID NO: 1074769 - RNA, 19 nt, Homo sapiens
  misc_RNA (1)...(19): siRNA sense strand
ggaggguacuucauugaug

SEQ ID NO: 1074770 - RNA, 19 nt, Homo sapiens
  misc_RNA (1)...(19): siRNA sense strand
gagauggacugacaaaugc

SEQ ID NO: 1074771 - RNA, 19 nt, Homo sapiens
  misc_RNA (1)...(19): siRNA sense strand
gagaaggaaugguccacuu

SEQ ID NO: 1074772 - RNA, 19 nt, Homo sapiens
  misc_RNA (1)...(19): siRNA sense strand
ccagauugaugucauguau

SEQ ID NO: 1074773 - RNA, 19 nt, Homo sapiens
  misc_RNA (1)...(19): siRNA sense strand
gaacaacgagaaucaagau

SEQ ID NO: 1074774 - RNA, 19 nt, Homo sapiens
  misc_RNA (1)...(19): siRNA sense strand
ggauauugccuacauuuau

SEQ ID NO: 1074775 - RNA, 19 nt, Homo sapiens
  misc_RNA (1)...(19): siRNA sense strand
aggaggaggugaaugauaa

SEQ ID NO: 1074776 - RNA, 19 nt, Homo sapiens
  misc_RNA (1)...(19): siRNA sense strand
cagauuggaucggaaagua

SEQ ID NO: 1074777 - RNA, 19 nt, Homo sapiens
  misc_RNA (1)...(19): siRNA sense strand
ccacaaccauaauagaaug

SEQ ID NO: 1074778 - RNA, 19 nt, Homo sapiens
  misc_RNA (1)...(19): siRNA sense strand
gacaaaugcuggagaacug

SEQ ID NO: 1074779 - RNA, 19 nt, Homo sapiens
  misc_RNA (1)...(19): siRNA sense strand
ccuaauacuuuccagauug

SEQ ID NO: 1074780 - RNA, 19 nt, Homo sapiens
  misc_RNA (1)...(19): siRNA sense strand
cagcaaguauuguccuauu

SEQ ID NO: 1074781 - RNA, 19 nt, Homo sapiens
  misc_RNA (1)...(19): siRNA sense strand
ccagaccacuacugaauau

SEQ ID NO: 1074782 - RNA, 19 nt, Homo sapiens
  misc_RNA (1)...(19): siRNA sense strand
gcaaguauuguccuauuug

SEQ ID NO: 1074783 - RNA, 19 nt, Homo sapiens
  misc_RNA (1)...(19): siRNA sense strand
cuggagaacuggaaaguga

SEQ ID NO: 1074784 - RNA, 19 nt, Homo sapiens
  misc_RNA (1)...(19): siRNA sense strand
caauagaccucgaaaauca

SEQ ID NO: 1074785 - RNA, 19 nt, Homo sapiens
  misc_RNA (1)...(19): siRNA sense strand
ccacuuccauugaaauaca

SEQ ID NO: 1074786 - RNA, 19 nt, Homo sapiens
  misc_RNA (1)...(19): siRNA sense strand
cuaauacuuuccagauuga

SEQ ID NO: 1074787 - RNA, 19 nt, Homo sapiens
  misc_RNA (1)...(19): siRNA sense strand
cuaaggaggaggugaauga

SEQ ID NO: 1074788 - RNA, 19 nt, Homo sapiens
  misc_RNA (1)...(19): siRNA sense strand
ccucacauuuccaguacua

SEQ ID NO: 1074789 - RNA, 19 nt, Homo sapiens
  misc_RNA (1)...(19): siRNA sense strand
caaguauuguccuauuugu

SEQ ID NO: 1074790 - RNA, 19 nt, Homo sapiens
  misc_RNA (1)...(19): siRNA sense strand
caauggcucuaaugaagau

SEQ ID NO: 1074791 - RNA, 19 nt, Homo sapiens
  misc_RNA (1)...(19): siRNA sense strand
gaccagaccacuacugaau

SEQ ID NO: 1074792 - RNA, 19 nt, Homo sapiens
  misc_RNA (1)...(19): siRNA sense strand
gauaaaacucuccaagaua

SEQ ID NO: 1074793 - RNA, 19 nt, Homo sapiens
  misc_RNA (1)...(19): siRNA sense strand
gguauucccuccaccucuu

SEQ ID NO: 1074794 - RNA, 19 nt, Homo sapiens
  misc_RNA (1)...(19): siRNA sense strand
uaauggauauugccuacau

SEQ ID NO: 1074795 - RNA, 19 nt, Homo sapiens
  misc_RNA (1)...(19): siRNA sense strand
ggaggugaaugauaaaaga

SEQ ID NO: 1074796 - RNA, 19 nt, Homo sapiens
  misc_RNA (1)...(19): siRNA sense strand
gcuuauccauugaauucuu

SEQ ID NO: 1074797 - RNA, 19 nt, Homo sapiens
  misc_RNA (1)...(19): siRNA sense strand
ccauugaaauacagaguuc

SEQ ID NO: 1074798 - RNA, 19 nt, Homo sapiens
  misc_RNA (1)...(19): siRNA sense strand
guaugaggaggaaccuuua

SEQ ID NO: 1074799 - RNA, 19 nt, Homo sapiens
  misc_RNA (1)...(19): siRNA sense strand
ucacaagaccagaccacua

SEQ ID NO: 1074800 - RNA, 19 nt, Homo sapiens
  misc_RNA (1)...(19): siRNA sense strand
gauuggaucggaaaguaaa

SEQ ID NO: 1074801 - RNA, 19 nt, Homo sapiens
  misc_RNA (1)...(19): siRNA sense strand
gaccacuacugaauauaag

SEQ ID NO: 1074802 - RNA, 19 nt, Homo sapiens
  misc_RNA (1)...(19): siRNA sense strand
agaccacuacugaauauaa

SEQ ID NO: 1074803 - RNA, 19 nt, Homo sapiens
  misc_RNA (1)...(19): siRNA sense strand
ggaaaguaaacaaagacaa

SEQ ID NO: 1074804 - RNA, 19 nt, Homo sapiens
  misc_RNA (1)...(19): siRNA sense strand
guaaccaccaaucuucuuu

SEQ ID NO: 1074805 - RNA, 19 nt, Homo sapiens
  misc_RNA (1)...(19): siRNA sense strand
agagauggacugacaaaug

SEQ ID NO: 1074806 - RNA, 19 nt, Homo sapiens
  misc_RNA (1)...(19): siRNA sense strand
gaguucgaccuacuuguaa

SEQ ID NO: 1074807 - RNA, 19 nt, Homo sapiens
  misc_RNA (1)...(19): siRNA sense strand
caaugacugugaugcacuu

SEQ ID NO: 1074808 - RNA, 19 nt, Homo sapiens
  misc_RNA (1)...(19): siRNA sense strand
acaaagagaaaucuaagga

SEQ ID NO: 1074809 - RNA, 19 nt, Homo sapiens
  misc_RNA (1)...(19): siRNA sense strand
gcagaugaagauaagagaa

SEQ ID NO: 1074810 - RNA, 19 nt, Homo sapiens
  misc_RNA (1)...(19): siRNA sense strand
guaaacaaagacaaagaga

SEQ ID NO: 1074811 - RNA, 19 nt, Homo sapiens
  misc_RNA (1)...(19): siRNA sense strand
aagcuuauccauugaauuc

SEQ ID NO: 1074812 - RNA, 19 nt, Homo sapiens
  misc_RNA (1)...(19): siRNA sense strand
ccacaguuuccucacauuu

SEQ ID NO: 1074813 - RNA, 19 nt, Homo sapiens
  misc_RNA (1)...(19): siRNA sense strand
gaucggaaaguaaacaaag

SEQ ID NO: 1074814 - RNA, 19 nt, Homo sapiens
  misc_RNA (1)...(19): siRNA sense strand
caccugaugugugugcuuu

SEQ ID NO: 1074815 - RNA, 19 nt, Homo sapiens
  misc_RNA (1)...(19): siRNA sense strand
ugacugugaugcacuuaag

SEQ ID NO: 1074816 - RNA, 19 nt, Homo sapiens
  misc_RNA (1)...(19): siRNA sense strand
ccucgaaaaucaucaguaa

SEQ ID NO: 1074817 - RNA, 19 nt, Homo sapiens
  misc_RNA (1)...(19): siRNA sense strand
agaguucgaccuacuugua

SEQ ID NO: 1074818 - RNA, 19 nt, Homo sapiens
  misc_RNA (1)...(19): siRNA sense strand
aaauggacauaccuaauac

SEQ ID NO: 1074819 - RNA, 19 nt, Homo sapiens
  misc_RNA (1)...(19): siRNA sense strand
cagcagcaaugacugugau

SEQ ID NO: 1074820 - RNA, 19 nt, Homo sapiens
  misc_RNA (1)...(19): siRNA sense strand
caucgaacaacgagaauca

SEQ ID NO: 1074821 - RNA, 19 nt, Homo sapiens
  misc_RNA (1)...(19): siRNA sense strand
caacgagaaucaagaucac

SEQ ID NO: 1074822 - RNA, 19 nt, Homo sapiens
  misc_RNA (1)...(19): siRNA sense strand
gguugcagaugaagauaag

SEQ ID NO: 1074823 - RNA, 19 nt, Homo sapiens
  misc_RNA (1)...(19): siRNA sense strand
ucuccaagauauuguauac

SEQ ID NO: 1074824 - RNA, 19 nt, Homo sapiens
  misc_RNA (1)...(19): siRNA sense strand
ucagcaacuucuucugguu

SEQ ID NO: 1074825 - RNA, 19 nt, Homo sapiens
  misc_RNA (1)...(19): siRNA sense strand
gcgguaaccaccaaucuuc

SEQ ID NO: 1074826 - RNA, 19 nt, Homo sapiens
  misc_RNA (1)...(19): siRNA sense strand
ccagugcagucuccucauc

SEQ ID NO: 1074827 - RNA, 19 nt, Homo sapiens
  misc_RNA (1)...(19): siRNA sense strand
ggaggaggugaaugauaaa

SEQ ID NO: 1074828 - RNA, 19 nt, Homo sapiens
  misc_RNA (1)...(19): siRNA sense strand
aguauuguccuauuuguga

SEQ ID NO: 1074829 - RNA, 19 nt, Homo sapiens
  misc_RNA (1)...(19): siRNA sense strand
uauuugugauguccaaguu

SEQ ID NO: 1074830 - RNA, 19 nt, Homo sapiens
  misc_RNA (1)...(19): siRNA sense strand
aaauacagaguucgaccua

SEQ ID NO: 1074831 - RNA, 19 nt, Homo sapiens
  misc_RNA (1)...(19): siRNA sense strand
cagaugaagauaagagaau

SEQ ID NO: 1074832 - RNA, 19 nt, Homo sapiens
  misc_RNA (1)...(19): siRNA sense strand
ccaauggcucuaaugaaga

SEQ ID NO: 1074833 - RNA, 19 nt, Homo sapiens
  misc_RNA (1)...(19): siRNA sense strand
ggucaucagcaacuucuuc

SEQ ID NO: 1074834 - RNA, 19 nt, Homo sapiens
  misc_RNA (1)...(19): siRNA sense strand
auuuauaccuggagaagga

SEQ ID NO: 1074835 - RNA, 19 nt, Homo sapiens
  misc_RNA (1)...(19): siRNA sense strand
uggauauugccuacauuua

SEQ ID NO: 1074836 - RNA, 19 nt, Homo sapiens
  misc_RNA (1)...(19): siRNA sense strand
uguaugaggaggaaccuuu

SEQ ID NO: 1074837 - RNA, 19 nt, Homo sapiens
  misc_RNA (1)...(19): siRNA sense strand
cgaacaacgagaaucaaga

SEQ ID NO: 1074838 - RNA, 19 nt, Homo sapiens
  misc_RNA (1)...(19): siRNA sense strand
acaaagacaaagagaaauc

SEQ ID NO: 1074839 - RNA, 19 nt, Homo sapiens
  misc_RNA (1)...(19): siRNA sense strand
agcaaguauuguccuauuu

SEQ ID NO: 1074840 - RNA, 19 nt, Homo sapiens
  misc_RNA (1)...(19): siRNA sense strand
cgaccuacuuguaaaagaa

SEQ ID NO: 1074841 - RNA, 19 nt, Homo sapiens
  misc_RNA (1)...(19): siRNA sense strand
agauaaaacucuccaagau

SEQ ID NO: 1074842 - RNA, 19 nt, Homo sapiens
  misc_RNA (1)...(19): siRNA sense strand
caaccauaauagaaugucu

SEQ ID NO: 1074843 - RNA, 19 nt, Homo sapiens
  misc_RNA (1)...(19): siRNA sense strand
acugacaaaugcuggagaa

SEQ ID NO: 1074844 - RNA, 19 nt, Homo sapiens
  misc_RNA (1)...(19): siRNA sense strand
acaacgagaaucaagauca

SEQ ID NO: 1074845 - RNA, 19 nt, Homo sapiens
  misc_RNA (1)...(19): siRNA sense strand
uguggaggguacuucauug

SEQ ID NO: 1074846 - RNA, 19 nt, Homo sapiens
  misc_RNA (1)...(19): siRNA sense strand
guccacuuccauugaaaua

SEQ ID NO: 1074847 - RNA, 19 nt, Homo sapiens
  misc_RNA (1)...(19): siRNA sense strand
ggaucggaaaguaaacaaa

SEQ ID NO: 1074848 - RNA, 19 nt, Homo sapiens
  misc_RNA (1)...(19): siRNA sense strand
gguaaccaccaaucuucuu

SEQ ID NO: 1074849 - RNA, 19 nt, Homo sapiens
  misc_RNA (1)...(19): siRNA sense strand
uguaaaacguguauuguuc

SEQ ID NO: 1074850 - RNA, 19 nt, Homo sapiens
  misc_RNA (1)...(19): siRNA sense strand
gccacaaccauaauagaau

SEQ ID NO: 1074851 - RNA, 19 nt, Homo sapiens
  misc_RNA (1)...(19): siRNA sense strand
cauccacaguuuccucaca

SEQ ID NO: 1074852 - RNA, 19 nt, Homo sapiens
  misc_RNA (1)...(19): siRNA sense strand
aaagaaugaagaucaguca

SEQ ID NO: 1074853 - RNA, 19 nt, Homo sapiens
  misc_RNA (1)...(19): siRNA sense strand
cgagaaucaagaucacuga

SEQ ID NO: 1074854 - RNA, 19 nt, Homo sapiens
  misc_RNA (1)...(19): siRNA sense strand
cacauuuccaguacuauga

SEQ ID NO: 1074855 - RNA, 19 nt, Homo sapiens
  misc_RNA (1)...(19): siRNA sense strand
auacagaguucgaccuacu

SEQ ID NO: 1074856 - RNA, 19 nt, Homo sapiens
  misc_RNA (1)...(19): siRNA sense strand
aaggaggaggugaaugaua

SEQ ID NO: 1074857 - RNA, 19 nt, Homo sapiens
  misc_RNA (1)...(19): siRNA sense strand
gccaauagaccucgaaaau

SEQ ID NO: 1074858 - RNA, 19 nt, Homo sapiens
  misc_RNA (1)...(19): siRNA sense strand
ucacauuuccaguacuaug

SEQ ID NO: 1074859 - RNA, 19 nt, Homo sapiens
  misc_RNA (1)...(19): siRNA sense strand
cuccaccucuucuuguuug

SEQ ID NO: 1074860 - RNA, 19 nt, Homo sapiens
  misc_RNA (1)...(19): siRNA sense strand
agagagauggacugacaaa

SEQ ID NO: 1074861 - RNA, 19 nt, Homo sapiens
  misc_RNA (1)...(19): siRNA sense strand
gaaaaucaucaguaaaugg

SEQ ID NO: 1074862 - RNA, 19 nt, Homo sapiens
  misc_RNA (1)...(19): siRNA sense strand
aaacagaucucuccaaugu

SEQ ID NO: 1074863 - RNA, 19 nt, Homo sapiens
  misc_RNA (1)...(19): siRNA sense strand
gggagaaccucuugaguga

SEQ ID NO: 1074864 - RNA, 19 nt, Homo sapiens
  misc_RNA (1)...(19): siRNA sense strand
caagagcuguuacaauuug

SEQ ID NO: 1074865 - RNA, 19 nt, Homo sapiens
  misc_RNA (1)...(19): siRNA sense strand
ugauguagcucaagagauu

SEQ ID NO: 1074866 - RNA, 19 nt, Homo sapiens
  misc_RNA (1)...(19): siRNA sense strand
uccaagagcuguuacaauu

SEQ ID NO: 1074867 - RNA, 19 nt, Homo sapiens
  misc_RNA (1)...(19): siRNA sense strand
gagaaccucuugagugaau

SEQ ID NO: 1074868 - RNA, 19 nt, Homo sapiens
  misc_RNA (1)...(19): siRNA sense strand
gaagccaguuuauuaggaa

SEQ ID NO: 1074869 - RNA, 19 nt, Homo sapiens
  misc_RNA (1)...(19): siRNA sense strand
ggaagccaguuuauuagga

SEQ ID NO: 1074870 - RNA, 19 nt, Homo sapiens
  misc_RNA (1)...(19): siRNA sense strand
uaacaggucuuuggagaau

SEQ ID NO: 1074871 - RNA, 19 nt, Homo sapiens
  misc_RNA (1)...(19): siRNA sense strand
acaggucuuuggagaauua

SEQ ID NO: 1074872 - RNA, 19 nt, Homo sapiens
  misc_RNA (1)...(19): siRNA sense strand
gcugcaaguuuccgguuua

SEQ ID NO: 1074873 - RNA, 19 nt, Homo sapiens
  misc_RNA (1)...(19): siRNA sense strand
acucuaaauuccugucuua

SEQ ID NO: 1074874 - RNA, 19 nt, Homo sapiens
  misc_RNA (1)...(19): siRNA sense strand
gaaggaaagguuaugauca

SEQ ID NO: 1074875 - RNA, 19 nt, Homo sapiens
  misc_RNA (1)...(19): siRNA sense strand
uaugaaagauaccuuagga

SEQ ID NO: 1074876 - RNA, 19 nt, Homo sapiens
  misc_RNA (1)...(19): siRNA sense strand
ugaaagauaccuuaggaaa

SEQ ID NO: 1074877 - RNA, 19 nt, Homo sapiens
  misc_RNA (1)...(19): siRNA sense strand
gaaagauaccuuaggaaag

SEQ ID NO: 1074878 - RNA, 19 nt, Homo sapiens
  misc_RNA (1)...(19): siRNA sense strand
aaggaaagguuaugaucaa

SEQ ID NO: 1074879 - RNA, 19 nt, Homo sapiens
  misc_RNA (1)...(19): siRNA sense strand
acuaucagaucacuaagaa

SEQ ID NO: 1074880 - RNA, 19 nt, Homo sapiens
  misc_RNA (1)...(19): siRNA sense strand
ggugaugaguggcuagaau

SEQ ID NO: 1074881 - RNA, 19 nt, Homo sapiens
  misc_RNA (1)...(19): siRNA sense strand
ccagucuucuccuucagua

SEQ ID NO: 1074882 - RNA, 19 nt, Homo sapiens
  misc_RNA (1)...(19): siRNA sense strand
gaaagccagcugcuaagga

SEQ ID NO: 1074883 - RNA, 19 nt, Homo sapiens
  misc_RNA (1)...(19): siRNA sense strand
uaggaaagccagcugcuaa

SEQ ID NO: 1074884 - RNA, 19 nt, Homo sapiens
  misc_RNA (1)...(19): siRNA sense strand
ucaguaagacaucagagua

SEQ ID NO: 1074885 - RNA, 19 nt, Homo sapiens
  misc_RNA (1)...(19): siRNA sense strand
ggagauggugaucaaugua

SEQ ID NO: 1074886 - RNA, 19 nt, Homo sapiens
  misc_RNA (1)...(19): siRNA sense strand
ggaaagguuaugaucaaau

SEQ ID NO: 1074887 - RNA, 19 nt, Homo sapiens
  misc_RNA (1)...(19): siRNA sense strand
gaaaggggaagccaguuua

SEQ ID NO: 1074888 - RNA, 19 nt, Homo sapiens
  misc_RNA (1)...(19): siRNA sense strand
caaaacagaucucuccaau

SEQ ID NO: 1074889 - RNA, 19 nt, Homo sapiens
  misc_RNA (1)...(19): siRNA sense strand
guggaucacugcaaauaca

SEQ ID NO: 1074890 - RNA, 19 nt, Homo sapiens
  misc_RNA (1)...(19): siRNA sense strand
aaagauaccuuaggaaagc

SEQ ID NO: 1074891 - RNA, 19 nt, Homo sapiens
  misc_RNA (1)...(19): siRNA sense strand
ggugaucaauguacgagau

SEQ ID NO: 1074892 - RNA, 19 nt, Homo sapiens
  misc_RNA (1)...(19): siRNA sense strand
aggcguagcugcaaguuuc

SEQ ID NO: 1074893 - RNA, 19 nt, Homo sapiens
  misc_RNA (1)...(19): siRNA sense strand
guugaaaacugaacuauag

SEQ ID NO: 1074894 - RNA, 19 nt, Homo sapiens
  misc_RNA (1)...(19): siRNA sense strand
ccaagagcuguuacaauuu

SEQ ID NO: 1074895 - RNA, 19 nt, Homo sapiens
  misc_RNA (1)...(19): siRNA sense strand
cugcuaccauggugucaua

SEQ ID NO: 1074896 - RNA, 19 nt, Homo sapiens
  misc_RNA (1)...(19): siRNA sense strand
guaacgagaaggaaagguu

SEQ ID NO: 1074897 - RNA, 19 nt, Homo sapiens
  misc_RNA (1)...(19): siRNA sense strand
agccauggguucacuauau

SEQ ID NO: 1074898 - RNA, 19 nt, Homo sapiens
  misc_RNA (1)...(19): siRNA sense strand
gaagcuagggacccacuau

SEQ ID NO: 1074899 - RNA, 19 nt, Homo sapiens
  misc_RNA (1)...(19): siRNA sense strand
aaagccagcugcuaaggau

SEQ ID NO: 1074900 - RNA, 19 nt, Homo sapiens
  misc_RNA (1)...(19): siRNA sense strand
ucagaucacuaagaacaga

SEQ ID NO: 1074901 - RNA, 19 nt, Homo sapiens
  misc_RNA (1)...(19): siRNA sense strand
cuaccauggugucauagaa

SEQ ID NO: 1074902 - RNA, 19 nt, Homo sapiens
  misc_RNA (1)...(19): siRNA sense strand
cuguguggcucacuuguuu

SEQ ID NO: 1074903 - RNA, 19 nt, Homo sapiens
  misc_RNA (1)...(19): siRNA sense strand
uaucagaucacuaagaaca

SEQ ID NO: 1074904 - RNA, 19 nt, Homo sapiens
  misc_RNA (1)...(19): siRNA sense strand
gguguugagcacuuuauuu

SEQ ID NO: 1074905 - RNA, 19 nt, Homo sapiens
  misc_RNA (1)...(19): siRNA sense strand
acauggagauggugaucaa

SEQ ID NO: 1074906 - RNA, 19 nt, Homo sapiens
  misc_RNA (1)...(19): siRNA sense strand
ggagaauuacgaaccaugu

SEQ ID NO: 1074907 - RNA, 19 nt, Homo sapiens
  misc_RNA (1)...(19): siRNA sense strand
gaucaauguacgagauuau

SEQ ID NO: 1074908 - RNA, 19 nt, Homo sapiens
  misc_RNA (1)...(19): siRNA sense strand
ugaucaauguacgagauua

SEQ ID NO: 1074909 - RNA, 19 nt, Homo sapiens
  misc_RNA (1)...(19): siRNA sense strand
ggagucagguucaaaaugg

SEQ ID NO: 1074910 - RNA, 19 nt, Homo sapiens
  misc_RNA (1)...(19): siRNA sense strand
ccaaaauguugaaaacuga

SEQ ID NO: 1074911 - RNA, 19 nt, Homo sapiens
  misc_RNA (1)...(19): siRNA sense strand
gcagcacaguggccaugga

SEQ ID NO: 1074912 - RNA, 19 nt, Homo sapiens
  misc_RNA (1)...(19): siRNA sense strand
gaugauguagcucaagaga

SEQ ID NO: 1074913 - RNA, 19 nt, Homo sapiens
  misc_RNA (1)...(19): siRNA sense strand
gaagccauggguucacuau

SEQ ID NO: 1074914 - RNA, 19 nt, Homo sapiens
  misc_RNA (1)...(19): siRNA sense strand
cucaagagauugcugaaag

SEQ ID NO: 1074915 - RNA, 19 nt, Homo sapiens
  misc_RNA (1)...(19): siRNA sense strand
gagaauuacgaaccauguu

SEQ ID NO: 1074916 - RNA, 19 nt, Homo sapiens
  misc_RNA (1)...(19): siRNA sense strand
gagaaggaaagguuaugau

SEQ ID NO: 1074917 - RNA, 19 nt, Homo sapiens
  misc_RNA (1)...(19): siRNA sense strand
gccauggguucacuauauc

SEQ ID NO: 1074918 - RNA, 19 nt, Homo sapiens
  misc_RNA (1)...(19): siRNA sense strand
uggagauggugaucaaugu

SEQ ID NO: 1074919 - RNA, 19 nt, Homo sapiens
  misc_RNA (1)...(19): siRNA sense strand
gugaugaguggcuagaauu

SEQ ID NO: 1074920 - RNA, 19 nt, Homo sapiens
  misc_RNA (1)...(19): siRNA sense strand
gaaggagucagguucaaaa

SEQ ID NO: 1074921 - RNA, 19 nt, Homo sapiens
  misc_RNA (1)...(19): siRNA sense strand
gauccucucauucuucugu

SEQ ID NO: 1074922 - RNA, 19 nt, Homo sapiens
  misc_RNA (1)...(19): siRNA sense strand
agacaucagaguaccauga

SEQ ID NO: 1074923 - RNA, 19 nt, Homo sapiens
  misc_RNA (1)...(19): siRNA sense strand
gauggcagagguagucaga

SEQ ID NO: 1074924 - RNA, 19 nt, Homo sapiens
  misc_RNA (1)...(19): siRNA sense strand
uaauguaacgagaaggaaa

SEQ ID NO: 1074925 - RNA, 19 nt, Homo sapiens
  misc_RNA (1)...(19): siRNA sense strand
cagaaggagucagguucaa

SEQ ID NO: 1074926 - RNA, 19 nt, Homo sapiens
  misc_RNA (1)...(19): siRNA sense strand
ucaagagauugcugaaagg

SEQ ID NO: 1074927 - RNA, 19 nt, Homo sapiens
  misc_RNA (1)...(19): siRNA sense strand
guauccugcuuggacauuu

SEQ ID NO: 1074928 - RNA, 19 nt, Homo sapiens
  misc_RNA (1)...(19): siRNA sense strand
gcacaguggccauggaaaa

SEQ ID NO: 1074929 - RNA, 19 nt, Homo sapiens
  misc_RNA (1)...(19): siRNA sense strand
caauguccaagagcuguua

SEQ ID NO: 1074930 - RNA, 19 nt, Homo sapiens
  misc_RNA (1)...(19): siRNA sense strand
ggaaaaugacugcauguuc

SEQ ID NO: 1074931 - RNA, 19 nt, Homo sapiens
  misc_RNA (1)...(19): siRNA sense strand
cgagaaggaaagguuauga

SEQ ID NO: 1074932 - RNA, 19 nt, Homo sapiens
  misc_RNA (1)...(19): siRNA sense strand
ccugcuguuuggccaauuu

SEQ ID NO: 1074933 - RNA, 19 nt, Homo sapiens
  misc_RNA (1)...(19): siRNA sense strand
gggacccacuaucagauca

SEQ ID NO: 1074934 - RNA, 19 nt, Homo sapiens
  misc_RNA (1)...(19): siRNA sense strand
gaugauggcagagguaguc

SEQ ID NO: 1074935 - RNA, 19 nt, Homo sapiens
  misc_RNA (1)...(19): siRNA sense strand
uauaauguaacgagaagga

SEQ ID NO: 1074936 - RNA, 19 nt, Homo sapiens
  misc_RNA (1)...(19): siRNA sense strand
gcucaagagauugcugaaa

SEQ ID NO: 1074937 - RNA, 19 nt, Homo sapiens
  misc_RNA (1)...(19): siRNA sense strand
gccuggaaaucuaugaaag

SEQ ID NO: 1074938 - RNA, 19 nt, Homo sapiens
  misc_RNA (1)...(19): siRNA sense strand
uaggaaccauuugcagaug

SEQ ID NO: 1074939 - RNA, 19 nt, Homo sapiens
  misc_RNA (1)...(19): siRNA sense strand
cccacuaucagaucacuaa

SEQ ID NO: 1074940 - RNA, 19 nt, Homo sapiens
  misc_RNA (1)...(19): siRNA sense strand
ggcucuggcugcuguuguu

SEQ ID NO: 1074941 - RNA, 19 nt, Homo sapiens
  misc_RNA (1)...(19): siRNA sense strand
cugcaaguuuccgguuuaa

SEQ ID NO: 1074942 - RNA, 19 nt, Homo sapiens
  misc_RNA (1)...(19): siRNA sense strand
cuagggacccacuaucaga

SEQ ID NO: 1074943 - RNA, 19 nt, Homo sapiens
  misc_RNA (1)...(19): siRNA sense strand
ccagaaggagucagguuca

SEQ ID NO: 1074944 - RNA, 19 nt, Homo sapiens
  misc_RNA (1)...(19): siRNA sense strand
gagauggugaucaauguac

SEQ ID NO: 1074945 - RNA, 19 nt, Homo sapiens
  misc_RNA (1)...(19): siRNA sense strand
cuuauaauguaacgagaag

SEQ ID NO: 1074946 - RNA, 19 nt, Homo sapiens
  misc_RNA (1)...(19): siRNA sense strand
aaaugaugauguagcucaa

SEQ ID NO: 1074947 - RNA, 19 nt, Homo sapiens
  misc_RNA (1)...(19): siRNA sense strand
ucuuguggaucacugcaaa

SEQ ID NO: 1074948 - RNA, 19 nt, Homo sapiens
  misc_RNA (1)...(19): siRNA sense strand
ggccuggaaaucuaugaaa

SEQ ID NO: 1074949 - RNA, 19 nt, Homo sapiens
  misc_RNA (1)...(19): siRNA sense strand
aggaaagguuaugaucaaa

SEQ ID NO: 1074950 - RNA, 19 nt, Homo sapiens
  misc_RNA (1)...(19): siRNA sense strand
agaaggaaagguuaugauc

SEQ ID NO: 1074951 - RNA, 19 nt, Homo sapiens
  misc_RNA (1)...(19): siRNA sense strand
gaucacugcaaauacaagu

SEQ ID NO: 1074952 - RNA, 19 nt, Homo sapiens
  misc_RNA (1)...(19): siRNA sense strand
ccuggaaaucuaugaaaga

SEQ ID NO: 1074953 - RNA, 19 nt, Homo sapiens
  misc_RNA (1)...(19): siRNA sense strand
gaccugcuguuuggccaau

SEQ ID NO: 1074954 - RNA, 19 nt, Homo sapiens
  misc_RNA (1)...(19): siRNA sense strand
gcauauuuccgaggaucaa

SEQ ID NO: 1074955 - RNA, 19 nt, Homo sapiens
  misc_RNA (1)...(19): siRNA sense strand
ggagaaccucuugagugaa

SEQ ID NO: 1074956 - RNA, 19 nt, Homo sapiens
  misc_RNA (1)...(19): siRNA sense strand
ucacuuguuuuccauguug

SEQ ID NO: 1074957 - RNA, 19 nt, Homo sapiens
  misc_RNA (1)...(19): siRNA sense strand
ggaaagccagcugcuaagg

SEQ ID NO: 1074958 - RNA, 19 nt, Homo sapiens
  misc_RNA (1)...(19): siRNA sense strand
gaaccucuugagugaauac

SEQ ID NO: 1074959 - RNA, 19 nt, Homo sapiens
  misc_RNA (1)...(19): siRNA sense strand
ucacuauaucccagucaaa

SEQ ID NO: 1074960 - RNA, 19 nt, Homo sapiens
  misc_RNA (1)...(19): siRNA sense strand
augaguggcuagaauucuu

SEQ ID NO: 1074961 - RNA, 19 nt, Homo sapiens
  misc_RNA (1)...(19): siRNA sense strand
gaggcguagcugcaaguuu

SEQ ID NO: 1074962 - RNA, 19 nt, Homo sapiens
  misc_RNA (1)...(19): siRNA sense strand
aaacagaucucuccaaugu

SEQ ID NO: 1074963 - RNA, 19 nt, Homo sapiens
  misc_RNA (1)...(19): siRNA sense strand
gggagaaccucuugaguga

SEQ ID NO: 1074964 - RNA, 19 nt, Homo sapiens
  misc_RNA (1)...(19): siRNA sense strand
caagagcuguuacaauuug

SEQ ID NO: 1074965 - RNA, 19 nt, Homo sapiens
  misc_RNA (1)...(19): siRNA sense strand
ugauguagcucaagagauu

SEQ ID NO: 1074966 - RNA, 19 nt, Homo sapiens
  misc_RNA (1)...(19): siRNA sense strand
uccaagagcuguuacaauu

SEQ ID NO: 1074967 - RNA, 19 nt, Homo sapiens
  misc_RNA (1)...(19): siRNA sense strand
gagaaccucuugagugaau

SEQ ID NO: 1074968 - RNA, 19 nt, Homo sapiens
  misc_RNA (1)...(19): siRNA sense strand
gaagccaguuuauuaggaa

SEQ ID NO: 1074969 - RNA, 19 nt, Homo sapiens
  misc_RNA (1)...(19): siRNA sense strand
ggaagccaguuuauuagga

SEQ ID NO: 1074970 - RNA, 19 nt, Homo sapiens
  misc_RNA (1)...(19): siRNA sense strand
uaacaggucuuuggagaau

SEQ ID NO: 1074971 - RNA, 19 nt, Homo sapiens
  misc_RNA (1)...(19): siRNA sense strand
acaggucuuuggagaauua

SEQ ID NO: 1074972 - RNA, 19 nt, Homo sapiens
  misc_RNA (1)...(19): siRNA sense strand
gcugcaaguuuccgguuua

SEQ ID NO: 1074973 - RNA, 19 nt, Homo sapiens
  misc_RNA (1)...(19): siRNA sense strand
acucuaaauuccugucuua

SEQ ID NO: 1074974 - RNA, 19 nt, Homo sapiens
  misc_RNA (1)...(19): siRNA sense strand
gaaggaaagguuaugauca

SEQ ID NO: 1074975 - RNA, 19 nt, Homo sapiens
  misc_RNA (1)...(19): siRNA sense strand
uaugaaagauaccuuagga

SEQ ID NO: 1074976 - RNA, 19 nt, Homo sapiens
  misc_RNA (1)...(19): siRNA sense strand
ugaaagauaccuuaggaaa

SEQ ID NO: 1074977 - RNA, 19 nt, Homo sapiens
  misc_RNA (1)...(19): siRNA sense strand
gaaagauaccuuaggaaag

SEQ ID NO: 1074978 - RNA, 19 nt, Homo sapiens
  misc_RNA (1)...(19): siRNA sense strand
aaggaaagguuaugaucaa

SEQ ID NO: 1074979 - RNA, 19 nt, Homo sapiens
  misc_RNA (1)...(19): siRNA sense strand
acuaucagaucacuaagaa

SEQ ID NO: 1074980 - RNA, 19 nt, Homo sapiens
  misc_RNA (1)...(19): siRNA sense strand
ggugaugaguggcuagaau

SEQ ID NO: 1074981 - RNA, 19 nt, Homo sapiens
  misc_RNA (1)...(19): siRNA sense strand
ccagucuucuccuucagua

SEQ ID NO: 1074982 - RNA, 19 nt, Homo sapiens
  misc_RNA (1)...(19): siRNA sense strand
gaaagccagcugcuaagga

SEQ ID NO: 1074983 - RNA, 19 nt, Homo sapiens
  misc_RNA (1)...(19): siRNA sense strand
uaggaaagccagcugcuaa

SEQ ID NO: 1074984 - RNA, 19 nt, Homo sapiens
  misc_RNA (1)...(19): siRNA sense strand
ucaguaagacaucagagua

SEQ ID NO: 1074985 - RNA, 19 nt, Homo sapiens
  misc_RNA (1)...(19): siRNA sense strand
ggagauggugaucaaugua

SEQ ID NO: 1074986 - RNA, 19 nt, Homo sapiens
  misc_RNA (1)...(19): siRNA sense strand
ggaaagguuaugaucaaau

SEQ ID NO: 1074987 - RNA, 19 nt, Homo sapiens
  misc_RNA (1)...(19): siRNA sense strand
gaaaggggaagccaguuua

SEQ ID NO: 1074988 - RNA, 19 nt, Homo sapiens
  misc_RNA (1)...(19): siRNA sense strand
caaaacagaucucuccaau

SEQ ID NO: 1074989 - RNA, 19 nt, Homo sapiens
  misc_RNA (1)...(19): siRNA sense strand
guggaucacugcaaauaca

SEQ ID NO: 1074990 - RNA, 19 nt, Homo sapiens
  misc_RNA (1)...(19): siRNA sense strand
aaagauaccuuaggaaagc

SEQ ID NO: 1074991 - RNA, 19 nt, Homo sapiens
  misc_RNA (1)...(19): siRNA sense strand
ggugaucaauguacgagau

SEQ ID NO: 1074992 - RNA, 19 nt, Homo sapiens
  misc_RNA (1)...(19): siRNA sense strand
aggcguagcugcaaguuuc

SEQ ID NO: 1074993 - RNA, 19 nt, Homo sapiens
  misc_RNA (1)...(19): siRNA sense strand
guugaaaacugaacuauag

SEQ ID NO: 1074994 - RNA, 19 nt, Homo sapiens
  misc_RNA (1)...(19): siRNA sense strand
ccaagagcuguuacaauuu

SEQ ID NO: 1074995 - RNA, 19 nt, Homo sapiens
  misc_RNA (1)...(19): siRNA sense strand
cugcuaccauggugucaua

SEQ ID NO: 1074996 - RNA, 19 nt, Homo sapiens
  misc_RNA (1)...(19): siRNA sense strand
guaacgagaaggaaagguu

SEQ ID NO: 1074997 - RNA, 19 nt, Homo sapiens
  misc_RNA (1)...(19): siRNA sense strand
agccauggguucacuauau

SEQ ID NO: 1074998 - RNA, 19 nt, Homo sapiens
  misc_RNA (1)...(19): siRNA sense strand
gaagcuagggacccacuau

SEQ ID NO: 1074999 - RNA, 19 nt, Homo sapiens
  misc_RNA (1)...(19): siRNA sense strand
aaagccagcugcuaaggau

SEQ ID NO: 1075000 - RNA, 19 nt, Homo sapiens
  misc_RNA (1)...(19): siRNA sense strand
ucagaucacuaagaacaga

SEQ ID NO: 1075001 - RNA, 19 nt, Homo sapiens
  misc_RNA (1)...(19): siRNA sense strand
cuaccauggugucauagaa

SEQ ID NO: 1075002 - RNA, 19 nt, Homo sapiens
  misc_RNA (1)...(19): siRNA sense strand
cuguguggcucacuuguuu

SEQ ID NO: 1075003 - RNA, 19 nt, Homo sapiens
  misc_RNA (1)...(19): siRNA sense strand
uaucagaucacuaagaaca

SEQ ID NO: 1075004 - RNA, 19 nt, Homo sapiens
  misc_RNA (1)...(19): siRNA sense strand
gguguugagcacuuuauuu

SEQ ID NO: 1075005 - RNA, 19 nt, Homo sapiens
  misc_RNA (1)...(19): siRNA sense strand
acauggagauggugaucaa

SEQ ID NO: 1075006 - RNA, 19 nt, Homo sapiens
  misc_RNA (1)...(19): siRNA sense strand
ggagaauuacgaaccaugu

SEQ ID NO: 1075007 - RNA, 19 nt, Homo sapiens
  misc_RNA (1)...(19): siRNA sense strand
gaucaauguacgagauuau

SEQ ID NO: 1075008 - RNA, 19 nt, Homo sapiens
  misc_RNA (1)...(19): siRNA sense strand
ugaucaauguacgagauua

SEQ ID NO: 1075009 - RNA, 19 nt, Homo sapiens
  misc_RNA (1)...(19): siRNA sense strand
ggagucagguucaaaaugg

SEQ ID NO: 1075010 - RNA, 19 nt, Homo sapiens
  misc_RNA (1)...(19): siRNA sense strand
ccaaaauguugaaaacuga

SEQ ID NO: 1075011 - RNA, 19 nt, Homo sapiens
  misc_RNA (1)...(19): siRNA sense strand
gcagcacaguggccaugga

SEQ ID NO: 1075012 - RNA, 19 nt, Homo sapiens
  misc_RNA (1)...(19): siRNA sense strand
gaugauguagcucaagaga

SEQ ID NO: 1075013 - RNA, 19 nt, Homo sapiens
  misc_RNA (1)...(19): siRNA sense strand
gaagccauggguucacuau

SEQ ID NO: 1075014 - RNA, 19 nt, Homo sapiens
  misc_RNA (1)...(19): siRNA sense strand
cucaagagauugcugaaag

SEQ ID NO: 1075015 - RNA, 19 nt, Homo sapiens
  misc_RNA (1)...(19): siRNA sense strand
gagaauuacgaaccauguu

SEQ ID NO: 1075016 - RNA, 19 nt, Homo sapiens
  misc_RNA (1)...(19): siRNA sense strand
gagaaggaaagguuaugau

SEQ ID NO: 1075017 - RNA, 19 nt, Homo sapiens
  misc_RNA (1)...(19): siRNA sense strand
gccauggguucacuauauc

SEQ ID NO: 1075018 - RNA, 19 nt, Homo sapiens
  misc_RNA (1)...(19): siRNA sense strand
uggagauggugaucaaugu

SEQ ID NO: 1075019 - RNA, 19 nt, Homo sapiens
  misc_RNA (1)...(19): siRNA sense strand
gugaugaguggcuagaauu

SEQ ID NO: 1075020 - RNA, 19 nt, Homo sapiens
  misc_RNA (1)...(19): siRNA sense strand
gaaggagucagguucaaaa

SEQ ID NO: 1075021 - RNA, 19 nt, Homo sapiens
  misc_RNA (1)...(19): siRNA sense strand
gauccucucauucuucugu

SEQ ID NO: 1075022 - RNA, 19 nt, Homo sapiens
  misc_RNA (1)...(19): siRNA sense strand
agacaucagaguaccauga

SEQ ID NO: 1075023 - RNA, 19 nt, Homo sapiens
  misc_RNA (1)...(19): siRNA sense strand
gauggcagagguagucaga

SEQ ID NO: 1075024 - RNA, 19 nt, Homo sapiens
  misc_RNA (1)...(19): siRNA sense strand
uaauguaacgagaaggaaa

SEQ ID NO: 1075025 - RNA, 19 nt, Homo sapiens
  misc_RNA (1)...(19): siRNA sense strand
cagaaggagucagguucaa

SEQ ID NO: 1075026 - RNA, 19 nt, Homo sapiens
  misc_RNA (1)...(19): siRNA sense strand
ucaagagauugcugaaagg

SEQ ID NO: 1075027 - RNA, 19 nt, Homo sapiens
  misc_RNA (1)...(19): siRNA sense strand
guauccugcuuggacauuu

SEQ ID NO: 1075028 - RNA, 19 nt, Homo sapiens
  misc_RNA (1)...(19): siRNA sense strand
gcacaguggccauggaaaa

SEQ ID NO: 1075029 - RNA, 19 nt, Homo sapiens
  misc_RNA (1)...(19): siRNA sense strand
caauguccaagagcuguua

SEQ ID NO: 1075030 - RNA, 19 nt, Homo sapiens
  misc_RNA (1)...(19): siRNA sense strand
ggaaaaugacugcauguuc

SEQ ID NO: 1075031 - RNA, 19 nt, Homo sapiens
  misc_RNA (1)...(19): siRNA sense strand
cgagaaggaaagguuauga

SEQ ID NO: 1075032 - RNA, 19 nt, Homo sapiens
  misc_RNA (1)...(19): siRNA sense strand
ccugcuguuuggccaauuu

SEQ ID NO: 1075033 - RNA, 19 nt, Homo sapiens
  misc_RNA (1)...(19): siRNA sense strand
gggacccacuaucagauca

SEQ ID NO: 1075034 - RNA, 19 nt, Homo sapiens
  misc_RNA (1)...(19): siRNA sense strand
gaugauggcagagguaguc

SEQ ID NO: 1075035 - RNA, 19 nt, Homo sapiens
  misc_RNA (1)...(19): siRNA sense strand
uauaauguaacgagaagga

SEQ ID NO: 1075036 - RNA, 19 nt, Homo sapiens
  misc_RNA (1)...(19): siRNA sense strand
gcucaagagauugcugaaa

SEQ ID NO: 1075037 - RNA, 19 nt, Homo sapiens
  misc_RNA (1)...(19): siRNA sense strand
gccuggaaaucuaugaaag

SEQ ID NO: 1075038 - RNA, 19 nt, Homo sapiens
  misc_RNA (1)...(19): siRNA sense strand
uaggaaccauuugcagaug

SEQ ID NO: 1075039 - RNA, 19 nt, Homo sapiens
  misc_RNA (1)...(19): siRNA sense strand
cccacuaucagaucacuaa

SEQ ID NO: 1075040 - RNA, 19 nt, Homo sapiens
  misc_RNA (1)...(19): siRNA sense strand
ggcucuggcugcuguuguu

SEQ ID NO: 1075041 - RNA, 19 nt, Homo sapiens
  misc_RNA (1)...(19): siRNA sense strand
cugcaaguuuccgguuuaa

SEQ ID NO: 1075042 - RNA, 19 nt, Homo sapiens
  misc_RNA (1)...(19): siRNA sense strand
cuagggacccacuaucaga

SEQ ID NO: 1075043 - RNA, 19 nt, Homo sapiens
  misc_RNA (1)...(19): siRNA sense strand
ccagaaggagucagguuca

SEQ ID NO: 1075044 - RNA, 19 nt, Homo sapiens
  misc_RNA (1)...(19): siRNA sense strand
gagauggugaucaauguac

SEQ ID NO: 1075045 - RNA, 19 nt, Homo sapiens
  misc_RNA (1)...(19): siRNA sense strand
cuuauaauguaacgagaag

SEQ ID NO: 1075046 - RNA, 19 nt, Homo sapiens
  misc_RNA (1)...(19): siRNA sense strand
aaaugaugauguagcucaa

SEQ ID NO: 1075047 - RNA, 19 nt, Homo sapiens
  misc_RNA (1)...(19): siRNA sense strand
ucuuguggaucacugcaaa

SEQ ID NO: 1075048 - RNA, 19 nt, Homo sapiens
  misc_RNA (1)...(19): siRNA sense strand
ggccuggaaaucuaugaaa

SEQ ID NO: 1075049 - RNA, 19 nt, Homo sapiens
  misc_RNA (1)...(19): siRNA sense strand
aggaaagguuaugaucaaa

SEQ ID NO: 1075050 - RNA, 19 nt, Homo sapiens
  misc_RNA (1)...(19): siRNA sense strand
agaaggaaagguuaugauc

SEQ ID NO: 1075051 - RNA, 19 nt, Homo sapiens
  misc_RNA (1)...(19): siRNA sense strand
gaucacugcaaauacaagu

SEQ ID NO: 1075052 - RNA, 19 nt, Homo sapiens
  misc_RNA (1)...(19): siRNA sense strand
ccuggaaaucuaugaaaga

SEQ ID NO: 1075053 - RNA, 19 nt, Homo sapiens
  misc_RNA (1)...(19): siRNA sense strand
gaccugcuguuuggccaau

SEQ ID NO: 1075054 - RNA, 19 nt, Homo sapiens
  misc_RNA (1)...(19): siRNA sense strand
gcauauuuccgaggaucaa

SEQ ID NO: 1075055 - RNA, 19 nt, Homo sapiens
  misc_RNA (1)...(19): siRNA sense strand
ggagaaccucuugagugaa

SEQ ID NO: 1075056 - RNA, 19 nt, Homo sapiens
  misc_RNA (1)...(19): siRNA sense strand
ucacuuguuuuccauguug

SEQ ID NO: 1075057 - RNA, 19 nt, Homo sapiens
  misc_RNA (1)...(19): siRNA sense strand
ggaaagccagcugcuaagg

SEQ ID NO: 1075058 - RNA, 19 nt, Homo sapiens
  misc_RNA (1)...(19): siRNA sense strand
gaaccucuugagugaauac

SEQ ID NO: 1075059 - RNA, 19 nt, Homo sapiens
  misc_RNA (1)...(19): siRNA sense strand
ucacuauaucccagucaaa

SEQ ID NO: 1075060 - RNA, 19 nt, Homo sapiens
  misc_RNA (1)...(19): siRNA sense strand
augaguggcuagaauucuu

SEQ ID NO: 1075061 - RNA, 19 nt, Homo sapiens
  misc_RNA (1)...(19): siRNA sense strand
gaggcguagcugcaaguuu

SEQ ID NO: 1075062 - RNA, 19 nt, Homo sapiens
  misc_RNA (1)...(19): siRNA sense strand
ggacuaacguggaucucaa

SEQ ID NO: 1075063 - RNA, 19 nt, Homo sapiens
  misc_RNA (1)...(19): siRNA sense strand
uaacguggaucucaagaau

SEQ ID NO: 1075064 - RNA, 19 nt, Homo sapiens
  misc_RNA (1)...(19): siRNA sense strand
cugaugaaauggagaagaa

SEQ ID NO: 1075065 - RNA, 19 nt, Homo sapiens
  misc_RNA (1)...(19): siRNA sense strand
acaguaagaagguggaaua

SEQ ID NO: 1075066 - RNA, 19 nt, Homo sapiens
  misc_RNA (1)...(19): siRNA sense strand
gaacaacaauccccuguac

SEQ ID NO: 1075067 - RNA, 19 nt, Homo sapiens
  misc_RNA (1)...(19): siRNA sense strand
ggacugaggagcagccaau

SEQ ID NO: 1075068 - RNA, 19 nt, Homo sapiens
  misc_RNA (1)...(19): siRNA sense strand
acguggaucucaagaauga

SEQ ID NO: 1075069 - RNA, 19 nt, Homo sapiens
  misc_RNA (1)...(19): siRNA sense strand
cggaaggauuucaggauga

SEQ ID NO: 1075070 - RNA, 19 nt, Homo sapiens
  misc_RNA (1)...(19): siRNA sense strand
gagcagccaauggaaguuu

SEQ ID NO: 1075071 - RNA, 19 nt, Homo sapiens
  misc_RNA (1)...(19): siRNA sense strand
gaaauggagaagaacaaca

SEQ ID NO: 1075072 - RNA, 19 nt, Homo sapiens
  misc_RNA (1)...(19): siRNA sense strand
gggccaagcagcucucuuc

SEQ ID NO: 1075073 - RNA, 19 nt, Homo sapiens
  misc_RNA (1)...(19): siRNA sense strand
aaauggagaagaacaacaa

SEQ ID NO: 1075074 - RNA, 19 nt, Homo sapiens
  misc_RNA (1)...(19): siRNA sense strand
cuaccaggcccuugauuuc

SEQ ID NO: 1075075 - RNA, 19 nt, Homo sapiens
  misc_RNA (1)...(19): siRNA sense strand
gaugaaauggagaagaaca

SEQ ID NO: 1075076 - RNA, 19 nt, Homo sapiens
  misc_RNA (1)...(19): siRNA sense strand
ggaggcagagaaugaguuc

SEQ ID NO: 1075077 - RNA, 19 nt, Homo sapiens
  misc_RNA (1)...(19): siRNA sense strand
cugccugcgucuacaguaa

SEQ ID NO: 1075078 - RNA, 19 nt, Homo sapiens
  misc_RNA (1)...(19): siRNA sense strand
cccaggaggcagagaauga

SEQ ID NO: 1075079 - RNA, 19 nt, Homo sapiens
  misc_RNA (1)...(19): siRNA sense strand
ggaugcagaggaggcagua

SEQ ID NO: 1075080 - RNA, 19 nt, Homo sapiens
  misc_RNA (1)...(19): siRNA sense strand
ucuaccaggcccuugauuu

SEQ ID NO: 1075081 - RNA, 19 nt, Homo sapiens
  misc_RNA (1)...(19): siRNA sense strand
gccugcgucuacaguaaga

SEQ ID NO: 1075082 - RNA, 19 nt, Homo sapiens
  misc_RNA (1)...(19): siRNA sense strand
ucauugaggcagcguuguu

SEQ ID NO: 1075083 - RNA, 19 nt, Homo sapiens
  misc_RNA (1)...(19): siRNA sense strand
ggacuaacguggaucucaa

SEQ ID NO: 1075084 - RNA, 19 nt, Homo sapiens
  misc_RNA (1)...(19): siRNA sense strand
uaacguggaucucaagaau

SEQ ID NO: 1075085 - RNA, 19 nt, Homo sapiens
  misc_RNA (1)...(19): siRNA sense strand
cugaugaaauggagaagaa

SEQ ID NO: 1075086 - RNA, 19 nt, Homo sapiens
  misc_RNA (1)...(19): siRNA sense strand
acaguaagaagguggaaua

SEQ ID NO: 1075087 - RNA, 19 nt, Homo sapiens
  misc_RNA (1)...(19): siRNA sense strand
gaacaacaauccccuguac

SEQ ID NO: 1075088 - RNA, 19 nt, Homo sapiens
  misc_RNA (1)...(19): siRNA sense strand
ggacugaggagcagccaau

SEQ ID NO: 1075089 - RNA, 19 nt, Homo sapiens
  misc_RNA (1)...(19): siRNA sense strand
acguggaucucaagaauga

SEQ ID NO: 1075090 - RNA, 19 nt, Homo sapiens
  misc_RNA (1)...(19): siRNA sense strand
cggaaggauuucaggauga

SEQ ID NO: 1075091 - RNA, 19 nt, Homo sapiens
  misc_RNA (1)...(19): siRNA sense strand
gagcagccaauggaaguuu

SEQ ID NO: 1075092 - RNA, 19 nt, Homo sapiens
  misc_RNA (1)...(19): siRNA sense strand
gaaauggagaagaacaaca

SEQ ID NO: 1075093 - RNA, 19 nt, Homo sapiens
  misc_RNA (1)...(19): siRNA sense strand
gggccaagcagcucucuuc

SEQ ID NO: 1075094 - RNA, 19 nt, Homo sapiens
  misc_RNA (1)...(19): siRNA sense strand
aaauggagaagaacaacaa

SEQ ID NO: 1075095 - RNA, 19 nt, Homo sapiens
  misc_RNA (1)...(19): siRNA sense strand
cuaccaggcccuugauuuc

SEQ ID NO: 1075096 - RNA, 19 nt, Homo sapiens
  misc_RNA (1)...(19): siRNA sense strand
gaugaaauggagaagaaca

SEQ ID NO: 1075097 - RNA, 19 nt, Homo sapiens
  misc_RNA (1)...(19): siRNA sense strand
ggaggcagagaaugaguuc

SEQ ID NO: 1075098 - RNA, 19 nt, Homo sapiens
  misc_RNA (1)...(19): siRNA sense strand
cugccugcgucuacaguaa

SEQ ID NO: 1075099 - RNA, 19 nt, Homo sapiens
  misc_RNA (1)...(19): siRNA sense strand
cccaggaggcagagaauga

SEQ ID NO: 1075100 - RNA, 19 nt, Homo sapiens
  misc_RNA (1)...(19): siRNA sense strand
ggaugcagaggaggcagua

SEQ ID NO: 1075101 - RNA, 19 nt, Homo sapiens
  misc_RNA (1)...(19): siRNA sense strand
ucuaccaggcccuugauuu

SEQ ID NO: 1075102 - RNA, 19 nt, Homo sapiens
  misc_RNA (1)...(19): siRNA sense strand
gccugcgucuacaguaaga

SEQ ID NO: 1075103 - RNA, 19 nt, Homo sapiens
  misc_RNA (1)...(19): siRNA sense strand
ucauugaggcagcguuguu

SEQ ID NO: 1075104 - RNA, 19 nt, Homo sapiens
  misc_RNA (1)...(19): siRNA sense strand
gaagagagauguggaguuu

SEQ ID NO: 1075105 - RNA, 19 nt, Homo sapiens
  misc_RNA (1)...(19): siRNA sense strand
gaaccuccgugaucgauuu

SEQ ID NO: 1075106 - RNA, 19 nt, Homo sapiens
  misc_RNA (1)...(19): siRNA sense strand
ucaaagaaguauccaguga

SEQ ID NO: 1075107 - RNA, 19 nt, Homo sapiens
  misc_RNA (1)...(19): siRNA sense strand
ggacauugcugacaugcau

SEQ ID NO: 1075108 - RNA, 19 nt, Homo sapiens
  misc_RNA (1)...(19): siRNA sense strand
gcuaagcgauuccuggauu

SEQ ID NO: 1075109 - RNA, 19 nt, Homo sapiens
  misc_RNA (1)...(19): siRNA sense strand
gauauggacuuucucaaca

SEQ ID NO: 1075110 - RNA, 19 nt, Homo sapiens
  misc_RNA (1)...(19): siRNA sense strand
gauggucgcuuccuuaucu

SEQ ID NO: 1075111 - RNA, 19 nt, Homo sapiens
  misc_RNA (1)...(19): siRNA sense strand
gaagaaagcagcucaugca

SEQ ID NO: 1075112 - RNA, 19 nt, Homo sapiens
  misc_RNA (1)...(19): siRNA sense strand
gcauugaugaccaagauua

SEQ ID NO: 1075113 - RNA, 19 nt, Homo sapiens
  misc_RNA (1)...(19): siRNA sense strand
ggacucuggucaucaaaga

SEQ ID NO: 1075114 - RNA, 19 nt, Homo sapiens
  misc_RNA (1)...(19): siRNA sense strand
caacaagaaccagaaagua

SEQ ID NO: 1075115 - RNA, 19 nt, Homo sapiens
  misc_RNA (1)...(19): siRNA sense strand
uggagaagcugaagagaga

SEQ ID NO: 1075116 - RNA, 19 nt, Homo sapiens
  misc_RNA (1)...(19): siRNA sense strand
ggaaaagguuaaagaauug

SEQ ID NO: 1075117 - RNA, 19 nt, Homo sapiens
  misc_RNA (1)...(19): siRNA sense strand
acaagaaccagaaaguaua

SEQ ID NO: 1075118 - RNA, 19 nt, Homo sapiens
  misc_RNA (1)...(19): siRNA sense strand
caacgaagacagcuacaug

SEQ ID NO: 1075119 - RNA, 19 nt, Homo sapiens
  misc_RNA (1)...(19): siRNA sense strand
ggacuacagccuucugcua

SEQ ID NO: 1075120 - RNA, 19 nt, Homo sapiens
  misc_RNA (1)...(19): siRNA sense strand
gaguuugaguccuucauug

SEQ ID NO: 1075121 - RNA, 19 nt, Homo sapiens
  misc_RNA (1)...(19): siRNA sense strand
gaaagugaaggcagugaug

SEQ ID NO: 1075122 - RNA, 19 nt, Homo sapiens
  misc_RNA (1)...(19): siRNA sense strand
gcuccaagaucaaggucaa

SEQ ID NO: 1075123 - RNA, 19 nt, Homo sapiens
  misc_RNA (1)...(19): siRNA sense strand
gggaaaaucugcccaguca

SEQ ID NO: 1075124 - RNA, 19 nt, Homo sapiens
  misc_RNA (1)...(19): siRNA sense strand
ucaugggccucauugauau

SEQ ID NO: 1075125 - RNA, 19 nt, Homo sapiens
  misc_RNA (1)...(19): siRNA sense strand
auagcaaccucuccaacua

SEQ ID NO: 1075126 - RNA, 19 nt, Homo sapiens
  misc_RNA (1)...(19): siRNA sense strand
gaaaaucugcccagucauu

SEQ ID NO: 1075127 - RNA, 19 nt, Homo sapiens
  misc_RNA (1)...(19): siRNA sense strand
gcaguaugcuaagcgauuc

SEQ ID NO: 1075128 - RNA, 19 nt, Homo sapiens
  misc_RNA (1)...(19): siRNA sense strand
gugaugcgcaauauguuua

SEQ ID NO: 1075129 - RNA, 19 nt, Homo sapiens
  misc_RNA (1)...(19): siRNA sense strand
agaucaaggucaacaauca

SEQ ID NO: 1075130 - RNA, 19 nt, Homo sapiens
  misc_RNA (1)...(19): siRNA sense strand
caagaaccagaaaguauau

SEQ ID NO: 1075131 - RNA, 19 nt, Homo sapiens
  misc_RNA (1)...(19): siRNA sense strand
gaagccagcgauaaggaaa

SEQ ID NO: 1075132 - RNA, 19 nt, Homo sapiens
  misc_RNA (1)...(19): siRNA sense strand
agagagauguggaguuucu

SEQ ID NO: 1075133 - RNA, 19 nt, Homo sapiens
  misc_RNA (1)...(19): siRNA sense strand
agaccaagaagaagcauuu

SEQ ID NO: 1075134 - RNA, 19 nt, Homo sapiens
  misc_RNA (1)...(19): siRNA sense strand
ucauugauauccuuacaca

SEQ ID NO: 1075135 - RNA, 19 nt, Homo sapiens
  misc_RNA (1)...(19): siRNA sense strand
cuaagcgauuccuggauuu

SEQ ID NO: 1075136 - RNA, 19 nt, Homo sapiens
  misc_RNA (1)...(19): siRNA sense strand
aaagaauugcccacccuua

SEQ ID NO: 1075137 - RNA, 19 nt, Homo sapiens
  misc_RNA (1)...(19): siRNA sense strand
cgugaucgauuuggcauug

SEQ ID NO: 1075138 - RNA, 19 nt, Homo sapiens
  misc_RNA (1)...(19): siRNA sense strand
guagcccacucgaucaaug

SEQ ID NO: 1075139 - RNA, 19 nt, Homo sapiens
  misc_RNA (1)...(19): siRNA sense strand
ggaagccagcgauaaggaa

SEQ ID NO: 1075140 - RNA, 19 nt, Homo sapiens
  misc_RNA (1)...(19): siRNA sense strand
caagaucaaggucaacaau

SEQ ID NO: 1075141 - RNA, 19 nt, Homo sapiens
  misc_RNA (1)...(19): siRNA sense strand
uugauauccuuacacagua

SEQ ID NO: 1075142 - RNA, 19 nt, Homo sapiens
  misc_RNA (1)...(19): siRNA sense strand
gcccagucauuucaaguuc

SEQ ID NO: 1075143 - RNA, 19 nt, Homo sapiens
  misc_RNA (1)...(19): siRNA sense strand
ccagucauuucaaguucaa

SEQ ID NO: 1075144 - RNA, 19 nt, Homo sapiens
  misc_RNA (1)...(19): siRNA sense strand
ggauauggacuuucucaac

SEQ ID NO: 1075145 - RNA, 19 nt, Homo sapiens
  misc_RNA (1)...(19): siRNA sense strand
caggaaguaugaccucaag

SEQ ID NO: 1075146 - RNA, 19 nt, Homo sapiens
  misc_RNA (1)...(19): siRNA sense strand
uggcauugaugaccaagau

SEQ ID NO: 1075147 - RNA, 19 nt, Homo sapiens
  misc_RNA (1)...(19): siRNA sense strand
ccuccaagaccaagaagaa

SEQ ID NO: 1075148 - RNA, 19 nt, Homo sapiens
  misc_RNA (1)...(19): siRNA sense strand
aacaagaaccagaaaguau

SEQ ID NO: 1075149 - RNA, 19 nt, Homo sapiens
  misc_RNA (1)...(19): siRNA sense strand
gugaggacauugcugacau

SEQ ID NO: 1075150 - RNA, 19 nt, Homo sapiens
  misc_RNA (1)...(19): siRNA sense strand
ugaugcugcugccagauga

SEQ ID NO: 1075151 - RNA, 19 nt, Homo sapiens
  misc_RNA (1)...(19): siRNA sense strand
ggucaacaaucaccuuuuc

SEQ ID NO: 1075152 - RNA, 19 nt, Homo sapiens
  misc_RNA (1)...(19): siRNA sense strand
gcugccagaugacuuuaag

SEQ ID NO: 1075153 - RNA, 19 nt, Homo sapiens
  misc_RNA (1)...(19): siRNA sense strand
uuagggauauggacuuucu

SEQ ID NO: 1075154 - RNA, 19 nt, Homo sapiens
  misc_RNA (1)...(19): siRNA sense strand
ugaggacauugcugacaug

SEQ ID NO: 1075155 - RNA, 19 nt, Homo sapiens
  misc_RNA (1)...(19): siRNA sense strand
ugauauccuuacacaguau

SEQ ID NO: 1075156 - RNA, 19 nt, Homo sapiens
  misc_RNA (1)...(19): siRNA sense strand
guccuucauugaugucuau

SEQ ID NO: 1075157 - RNA, 19 nt, Homo sapiens
  misc_RNA (1)...(19): siRNA sense strand
ucaacaagaaccagaaagu

SEQ ID NO: 1075158 - RNA, 19 nt, Homo sapiens
  misc_RNA (1)...(19): siRNA sense strand
aaggccagcuccaagauca

SEQ ID NO: 1075159 - RNA, 19 nt, Homo sapiens
  misc_RNA (1)...(19): siRNA sense strand
uucaugggccucauugaua

SEQ ID NO: 1075160 - RNA, 19 nt, Homo sapiens
  misc_RNA (1)...(19): siRNA sense strand
cauccggagugcugaagga

SEQ ID NO: 1075161 - RNA, 19 nt, Homo sapiens
  misc_RNA (1)...(19): siRNA sense strand
gagaagcugaagagagaug

SEQ ID NO: 1075162 - RNA, 19 nt, Homo sapiens
  misc_RNA (1)...(19): siRNA sense strand
ggauguaccgagucagugu

SEQ ID NO: 1075163 - RNA, 19 nt, Homo sapiens
  misc_RNA (1)...(19): siRNA sense strand
caacuaucaccaguacauu

SEQ ID NO: 1075164 - RNA, 19 nt, Homo sapiens
  misc_RNA (1)...(19): siRNA sense strand
ccaacuaucaccaguacau

SEQ ID NO: 1075165 - RNA, 19 nt, Homo sapiens
  misc_RNA (1)...(19): siRNA sense strand
cgaagacagcuacaugcuu

SEQ ID NO: 1075166 - RNA, 19 nt, Homo sapiens
  misc_RNA (1)...(19): siRNA sense strand
ccucauugauauccuuaca

SEQ ID NO: 1075167 - RNA, 19 nt, Homo sapiens
  misc_RNA (1)...(19): siRNA sense strand
ccagaaaguauauauuggu

SEQ ID NO: 1075168 - RNA, 19 nt, Homo sapiens
  misc_RNA (1)...(19): siRNA sense strand
gggaagccagcgauaagga

SEQ ID NO: 1075169 - RNA, 19 nt, Homo sapiens
  misc_RNA (1)...(19): siRNA sense strand
aguaugaugccaagaagaa

SEQ ID NO: 1075170 - RNA, 19 nt, Homo sapiens
  misc_RNA (1)...(19): siRNA sense strand
gaagaggagaagaaaauau

SEQ ID NO: 1075171 - RNA, 19 nt, Homo sapiens
  misc_RNA (1)...(19): siRNA sense strand
ccuuagggauauggacuuu

SEQ ID NO: 1075172 - RNA, 19 nt, Homo sapiens
  misc_RNA (1)...(19): siRNA sense strand
ucaaguucaaggaguauug

SEQ ID NO: 1075173 - RNA, 19 nt, Homo sapiens
  misc_RNA (1)...(19): siRNA sense strand
cacaguaugaugccaagaa

SEQ ID NO: 1075174 - RNA, 19 nt, Homo sapiens
  misc_RNA (1)...(19): siRNA sense strand
gcugcugccagaugacuuu

SEQ ID NO: 1075175 - RNA, 19 nt, Homo sapiens
  misc_RNA (1)...(19): siRNA sense strand
accaguacauugugaagug

SEQ ID NO: 1075176 - RNA, 19 nt, Homo sapiens
  misc_RNA (1)...(19): siRNA sense strand
agcagaaggugaagguguu

SEQ ID NO: 1075177 - RNA, 19 nt, Homo sapiens
  misc_RNA (1)...(19): siRNA sense strand
gggccucauugauauccuu

SEQ ID NO: 1075178 - RNA, 19 nt, Homo sapiens
  misc_RNA (1)...(19): siRNA sense strand
ccaagaagaagcauuucgu

SEQ ID NO: 1075179 - RNA, 19 nt, Homo sapiens
  misc_RNA (1)...(19): siRNA sense strand
uagugcagcugaagaucau

SEQ ID NO: 1075180 - RNA, 19 nt, Homo sapiens
  misc_RNA (1)...(19): siRNA sense strand
gaucggacucuggucauca

SEQ ID NO: 1075181 - RNA, 19 nt, Homo sapiens
  misc_RNA (1)...(19): siRNA sense strand
acaguaugaugccaagaag

SEQ ID NO: 1075182 - RNA, 19 nt, Homo sapiens
  misc_RNA (1)...(19): siRNA sense strand
uuugaguccuucauugaug

SEQ ID NO: 1075183 - RNA, 19 nt, Homo sapiens
  misc_RNA (1)...(19): siRNA sense strand
uagcaaccucuccaacuau

SEQ ID NO: 1075184 - RNA, 19 nt, Homo sapiens
  misc_RNA (1)...(19): siRNA sense strand
agugauggucgcuuccuua

SEQ ID NO: 1075185 - RNA, 19 nt, Homo sapiens
  misc_RNA (1)...(19): siRNA sense strand
ugaagagagauguggaguu

SEQ ID NO: 1075186 - RNA, 19 nt, Homo sapiens
  misc_RNA (1)...(19): siRNA sense strand
auauggacuuucucaacaa

SEQ ID NO: 1075187 - RNA, 19 nt, Homo sapiens
  misc_RNA (1)...(19): siRNA sense strand
gagucaguguggacaacga

SEQ ID NO: 1075188 - RNA, 19 nt, Homo sapiens
  misc_RNA (1)...(19): siRNA sense strand
gauuacuuggugucccuua

SEQ ID NO: 1075189 - RNA, 19 nt, Homo sapiens
  misc_RNA (1)...(19): siRNA sense strand
uaccaacaucuuugccuaa

SEQ ID NO: 1075190 - RNA, 19 nt, Homo sapiens
  misc_RNA (1)...(19): siRNA sense strand
ugaagaucauggacuacag

SEQ ID NO: 1075191 - RNA, 19 nt, Homo sapiens
  misc_RNA (1)...(19): siRNA sense strand
agcugaagaucauggacua

SEQ ID NO: 1075192 - RNA, 19 nt, Homo sapiens
  misc_RNA (1)...(19): siRNA sense strand
uggugucccuuacccgaaa

SEQ ID NO: 1075193 - RNA, 19 nt, Homo sapiens
  misc_RNA (1)...(19): siRNA sense strand
uaucggaggcuacauccau

SEQ ID NO: 1075194 - RNA, 19 nt, Homo sapiens
  misc_RNA (1)...(19): siRNA sense strand
gugauggucgcuuccuuau

SEQ ID NO: 1075195 - RNA, 19 nt, Homo sapiens
  misc_RNA (1)...(19): siRNA sense strand
acagcuacaugcuugugau

SEQ ID NO: 1075196 - RNA, 19 nt, Homo sapiens
  misc_RNA (1)...(19): siRNA sense strand
ugugaugcgcaauauguuu

SEQ ID NO: 1075197 - RNA, 19 nt, Homo sapiens
  misc_RNA (1)...(19): siRNA sense strand
gacagcuacaugcuuguga

SEQ ID NO: 1075198 - RNA, 19 nt, Homo sapiens
  misc_RNA (1)...(19): siRNA sense strand
guaugaugccaagaagaaa

SEQ ID NO: 1075199 - RNA, 19 nt, Homo sapiens
  misc_RNA (1)...(19): siRNA sense strand
aggcauccacgacaucauu

SEQ ID NO: 1075200 - RNA, 19 nt, Homo sapiens
  misc_RNA (1)...(19): siRNA sense strand
aagaauugcccacccuuag

SEQ ID NO: 1075201 - RNA, 19 nt, Homo sapiens
  misc_RNA (1)...(19): siRNA sense strand
ccaagaccaagaagaagca

SEQ ID NO: 1075202 - RNA, 19 nt, Homo sapiens
  misc_RNA (1)...(19): siRNA sense strand
ggaaccuccgugaucgauu

SEQ ID NO: 1075203 - RNA, 19 nt, Homo sapiens
  misc_RNA (1)...(19): siRNA sense strand
gaacaugcacuacaauaaa

SEQ ID NO: 1075204 - RNA, 19 nt, Homo sapiens
  misc_RNA (1)...(19): siRNA sense strand
uacaagagcugcuucauga

SEQ ID NO: 1075205 - RNA, 19 nt, Homo sapiens
  misc_RNA (1)...(19): siRNA sense strand
gagaagaguugacauugga

SEQ ID NO: 1075206 - RNA, 19 nt, Homo sapiens
  misc_RNA (1)...(19): siRNA sense strand
ggaagaaggccauauacaa

SEQ ID NO: 1075207 - RNA, 19 nt, Homo sapiens
  misc_RNA (1)...(19): siRNA sense strand
ccaauaugcugaagaccua

SEQ ID NO: 1075208 - RNA, 19 nt, Homo sapiens
  misc_RNA (1)...(19): siRNA sense strand
guacagggcucugaacaug

SEQ ID NO: 1075209 - RNA, 19 nt, Homo sapiens
  misc_RNA (1)...(19): siRNA sense strand
cgagaaaguuacagagaaa

SEQ ID NO: 1075210 - RNA, 19 nt, Homo sapiens
  misc_RNA (1)...(19): siRNA sense strand
gaagagcugucuauaacca

SEQ ID NO: 1075211 - RNA, 19 nt, Homo sapiens
  misc_RNA (1)...(19): siRNA sense strand
gcacuacaauaaagcaaau

SEQ ID NO: 1075212 - RNA, 19 nt, Homo sapiens
  misc_RNA (1)...(19): siRNA sense strand
guaugaagaugccaugaug

SEQ ID NO: 1075213 - RNA, 19 nt, Homo sapiens
  misc_RNA (1)...(19): siRNA sense strand
ucaagugguuuagcaauuu

SEQ ID NO: 1075214 - RNA, 19 nt, Homo sapiens
  misc_RNA (1)...(19): siRNA sense strand
gaagaaggccauauacaag

SEQ ID NO: 1075215 - RNA, 19 nt, Homo sapiens
  misc_RNA (1)...(19): siRNA sense strand
ggaaauggcugaaaacaag

SEQ ID NO: 1075216 - RNA, 19 nt, Homo sapiens
  misc_RNA (1)...(19): siRNA sense strand
ggagaagaguugacauugg

SEQ ID NO: 1075217 - RNA, 19 nt, Homo sapiens
  misc_RNA (1)...(19): siRNA sense strand
ugacagcacagcccucuua

SEQ ID NO: 1075218 - RNA, 19 nt, Homo sapiens
  misc_RNA (1)...(19): siRNA sense strand
ugucugaaauaucaccuua

SEQ ID NO: 1075219 - RNA, 19 nt, Homo sapiens
  misc_RNA (1)...(19): siRNA sense strand
ugauauggaucgcuuaugu

SEQ ID NO: 1075220 - RNA, 19 nt, Homo sapiens
  misc_RNA (1)...(19): siRNA sense strand
ggaaguugcucagaucaca

SEQ ID NO: 1075221 - RNA, 19 nt, Homo sapiens
  misc_RNA (1)...(19): siRNA sense strand
acauucagauggagaagua

SEQ ID NO: 1075222 - RNA, 19 nt, Homo sapiens
  misc_RNA (1)...(19): siRNA sense strand
gaaggcaacaacaaagaaa

SEQ ID NO: 1075223 - RNA, 19 nt, Homo sapiens
  misc_RNA (1)...(19): siRNA sense strand
gaagagggcgaacucguau

SEQ ID NO: 1075224 - RNA, 19 nt, Homo sapiens
  misc_RNA (1)...(19): siRNA sense strand
gaggauauaugcagcaacu

SEQ ID NO: 1075225 - RNA, 19 nt, Homo sapiens
  misc_RNA (1)...(19): siRNA sense strand
ccucucagcucaucaagug

SEQ ID NO: 1075226 - RNA, 19 nt, Homo sapiens
  misc_RNA (1)...(19): siRNA sense strand
gaacugaacacugccaugu

SEQ ID NO: 1075227 - RNA, 19 nt, Homo sapiens
  misc_RNA (1)...(19): siRNA sense strand
gaucagagagcaggaaaug

SEQ ID NO: 1075228 - RNA, 19 nt, Homo sapiens
  misc_RNA (1)...(19): siRNA sense strand
gaggagaagaguugacauu

SEQ ID NO: 1075229 - RNA, 19 nt, Homo sapiens
  misc_RNA (1)...(19): siRNA sense strand
ccgagaaaguuacagagaa

SEQ ID NO: 1075230 - RNA, 19 nt, Homo sapiens
  misc_RNA (1)...(19): siRNA sense strand
gagaaggcaacaacaaaga

SEQ ID NO: 1075231 - RNA, 19 nt, Homo sapiens
  misc_RNA (1)...(19): siRNA sense strand
ucugcaagcuggauaguga

SEQ ID NO: 1075232 - RNA, 19 nt, Homo sapiens
  misc_RNA (1)...(19): siRNA sense strand
gcgagaaggcaacaacaaa

SEQ ID NO: 1075233 - RNA, 19 nt, Homo sapiens
  misc_RNA (1)...(19): siRNA sense strand
cugaagagcugucuauaac

SEQ ID NO: 1075234 - RNA, 19 nt, Homo sapiens
  misc_RNA (1)...(19): siRNA sense strand
ggacaccuuuggcaaugug

SEQ ID NO: 1075235 - RNA, 19 nt, Homo sapiens
  misc_RNA (1)...(19): siRNA sense strand
acuaugagccaguuugaua

SEQ ID NO: 1075236 - RNA, 19 nt, Homo sapiens
  misc_RNA (1)...(19): siRNA sense strand
gacguaaaguucaacagau

SEQ ID NO: 1075237 - RNA, 19 nt, Homo sapiens
  misc_RNA (1)...(19): siRNA sense strand
gaaaaguucuaccaaaucu

SEQ ID NO: 1075238 - RNA, 19 nt, Homo sapiens
  misc_RNA (1)...(19): siRNA sense strand
ggccagauuugcagucaau

SEQ ID NO: 1075239 - RNA, 19 nt, Homo sapiens
  misc_RNA (1)...(19): siRNA sense strand
uauacaaggucaucugcaa

SEQ ID NO: 1075240 - RNA, 19 nt, Homo sapiens
  misc_RNA (1)...(19): siRNA sense strand
ugaacaugcacuacaauaa

SEQ ID NO: 1075241 - RNA, 19 nt, Homo sapiens
  misc_RNA (1)...(19): siRNA sense strand
guacugaagagcugucuau

SEQ ID NO: 1075242 - RNA, 19 nt, Homo sapiens
  misc_RNA (1)...(19): siRNA sense strand
ugaagagggcgaacucgua

SEQ ID NO: 1075243 - RNA, 19 nt, Homo sapiens
  misc_RNA (1)...(19): siRNA sense strand
ugagcaggauguugaguau

SEQ ID NO: 1075244 - RNA, 19 nt, Homo sapiens
  misc_RNA (1)...(19): siRNA sense strand
gcuagacccaggacaguuu

SEQ ID NO: 1075245 - RNA, 19 nt, Homo sapiens
  misc_RNA (1)...(19): siRNA sense strand
guucugagcaggauguuga

SEQ ID NO: 1075246 - RNA, 19 nt, Homo sapiens
  misc_RNA (1)...(19): siRNA sense strand
aagagcugcuucaugagua

SEQ ID NO: 1075247 - RNA, 19 nt, Homo sapiens
  misc_RNA (1)...(19): siRNA sense strand
acagaugcauuaccucuca

SEQ ID NO: 1075248 - RNA, 19 nt, Homo sapiens
  misc_RNA (1)...(19): siRNA sense strand
gaugguaaccugucugaag

SEQ ID NO: 1075249 - RNA, 19 nt, Homo sapiens
  misc_RNA (1)...(19): siRNA sense strand
gaaaacaaacgcaagcaaa

SEQ ID NO: 1075250 - RNA, 19 nt, Homo sapiens
  misc_RNA (1)...(19): siRNA sense strand
gaugagcaccugagagcaa

SEQ ID NO: 1075251 - RNA, 19 nt, Homo sapiens
  misc_RNA (1)...(19): siRNA sense strand
gggccaaacuccuuacaac

SEQ ID NO: 1075252 - RNA, 19 nt, Homo sapiens
  misc_RNA (1)...(19): siRNA sense strand
aagaugccaugaugccuuu

SEQ ID NO: 1075253 - RNA, 19 nt, Homo sapiens
  misc_RNA (1)...(19): siRNA sense strand
cgacguaaaguucaacaga

SEQ ID NO: 1075254 - RNA, 19 nt, Homo sapiens
  misc_RNA (1)...(19): siRNA sense strand
ccaggagcaaccauaauuu

SEQ ID NO: 1075255 - RNA, 19 nt, Homo sapiens
  misc_RNA (1)...(19): siRNA sense strand
gcaauuuccgugaguuuua

SEQ ID NO: 1075256 - RNA, 19 nt, Homo sapiens
  misc_RNA (1)...(19): siRNA sense strand
caagugguuuagcaauuuc

SEQ ID NO: 1075257 - RNA, 19 nt, Homo sapiens
  misc_RNA (1)...(19): siRNA sense strand
caacaaagaaagagaccau

SEQ ID NO: 1075258 - RNA, 19 nt, Homo sapiens
  misc_RNA (1)...(19): siRNA sense strand
cgaaguacaucaggaggau

SEQ ID NO: 1075259 - RNA, 19 nt, Homo sapiens
  misc_RNA (1)...(19): siRNA sense strand
ccacgagucugaggaccaa

SEQ ID NO: 1075260 - RNA, 19 nt, Homo sapiens
  misc_RNA (1)...(19): siRNA sense strand
gcacugauucggaaaauga

SEQ ID NO: 1075261 - RNA, 19 nt, Homo sapiens
  misc_RNA (1)...(19): siRNA sense strand
aaacuccucugaccagucu

SEQ ID NO: 1075262 - RNA, 19 nt, Homo sapiens
  misc_RNA (1)...(19): siRNA sense strand
gcaacaacaaagaaagaga

SEQ ID NO: 1075263 - RNA, 19 nt, Homo sapiens
  misc_RNA (1)...(19): siRNA sense strand
uggaggacaugcagaaaca

SEQ ID NO: 1075264 - RNA, 19 nt, Homo sapiens
  misc_RNA (1)...(19): siRNA sense strand
cagcucaucaagugguuua

SEQ ID NO: 1075265 - RNA, 19 nt, Homo sapiens
  misc_RNA (1)...(19): siRNA sense strand
uaucccagcuccaauaugc

SEQ ID NO: 1075266 - RNA, 19 nt, Homo sapiens
  misc_RNA (1)...(19): siRNA sense strand
ggucagauaaugagaugug

SEQ ID NO: 1075267 - RNA, 19 nt, Homo sapiens
  misc_RNA (1)...(19): siRNA sense strand
gaaggucagauaaugagau

SEQ ID NO: 1075268 - RNA, 19 nt, Homo sapiens
  misc_RNA (1)...(19): siRNA sense strand
gcaggauguugaguauuca

SEQ ID NO: 1075269 - RNA, 19 nt, Homo sapiens
  misc_RNA (1)...(19): siRNA sense strand
caagcuggauagugaaguc

SEQ ID NO: 1075270 - RNA, 19 nt, Homo sapiens
  misc_RNA (1)...(19): siRNA sense strand
gcacggagcccaguuucca

SEQ ID NO: 1075271 - RNA, 19 nt, Homo sapiens
  misc_RNA (1)...(19): siRNA sense strand
ccuggaagaaggccauaua

SEQ ID NO: 1075272 - RNA, 19 nt, Homo sapiens
  misc_RNA (1)...(19): siRNA sense strand
auggaucgcuuaugugaug

SEQ ID NO: 1075273 - RNA, 19 nt, Homo sapiens
  misc_RNA (1)...(19): siRNA sense strand
uaguacaggcuccgaagua

SEQ ID NO: 1075274 - RNA, 19 nt, Homo sapiens
  misc_RNA (1)...(19): siRNA sense strand
ggagaaguacgcacgucaa

SEQ ID NO: 1075275 - RNA, 19 nt, Homo sapiens
  misc_RNA (1)...(19): siRNA sense strand
gcuccaauaugcugaagac

SEQ ID NO: 1075276 - RNA, 19 nt, Homo sapiens
  misc_RNA (1)...(19): siRNA sense strand
ccugaauccuuagacuuaa

SEQ ID NO: 1075277 - RNA, 19 nt, Homo sapiens
  misc_RNA (1)...(19): siRNA sense strand
gaguugacauuggagugaa

SEQ ID NO: 1075278 - RNA, 19 nt, Homo sapiens
  misc_RNA (1)...(19): siRNA sense strand
gagccaguuugauauggau

SEQ ID NO: 1075279 - RNA, 19 nt, Homo sapiens
  misc_RNA (1)...(19): siRNA sense strand
caagagcugcuucaugagu

SEQ ID NO: 1075280 - RNA, 19 nt, Homo sapiens
  misc_RNA (1)...(19): siRNA sense strand
gauagugaagucccugaga

SEQ ID NO: 1075281 - RNA, 19 nt, Homo sapiens
  misc_RNA (1)...(19): siRNA sense strand
uccugaauccuuagacuua

SEQ ID NO: 1075282 - RNA, 19 nt, Homo sapiens
  misc_RNA (1)...(19): siRNA sense strand
gucggaaggucagauaaug

SEQ ID NO: 1075283 - RNA, 19 nt, Homo sapiens
  misc_RNA (1)...(19): siRNA sense strand
ggaaaaugaugaagauggu

SEQ ID NO: 1075284 - RNA, 19 nt, Homo sapiens
  misc_RNA (1)...(19): siRNA sense strand
cagagugucuuuccccuuu

SEQ ID NO: 1075285 - RNA, 19 nt, Homo sapiens
  misc_RNA (1)...(19): siRNA sense strand
cuacaagagcugcuucaug

SEQ ID NO: 1075286 - RNA, 19 nt, Homo sapiens
  misc_RNA (1)...(19): siRNA sense strand
gaucacauuacgggaguuu

SEQ ID NO: 1075287 - RNA, 19 nt, Homo sapiens
  misc_RNA (1)...(19): siRNA sense strand
agcaggauguugaguauuc

SEQ ID NO: 1075288 - RNA, 19 nt, Homo sapiens
  misc_RNA (1)...(19): siRNA sense strand
gagcaggaaauggcugaaa

SEQ ID NO: 1075289 - RNA, 19 nt, Homo sapiens
  misc_RNA (1)...(19): siRNA sense strand
gacccaggacaguuuauug

SEQ ID NO: 1075290 - RNA, 19 nt, Homo sapiens
  misc_RNA (1)...(19): siRNA sense strand
ccagcggucucucuaguac

SEQ ID NO: 1075291 - RNA, 19 nt, Homo sapiens
  misc_RNA (1)...(19): siRNA sense strand
cuacuucuccgacguaaag

SEQ ID NO: 1075292 - RNA, 19 nt, Homo sapiens
  misc_RNA (1)...(19): siRNA sense strand
ccuugucgcucauaaaguc

SEQ ID NO: 1075293 - RNA, 19 nt, Homo sapiens
  misc_RNA (1)...(19): siRNA sense strand
gagccucuccugaauccuu

SEQ ID NO: 1075294 - RNA, 19 nt, Homo sapiens
  misc_RNA (1)...(19): siRNA sense strand
caaccggaaggcaaacauu

SEQ ID NO: 1075295 - RNA, 19 nt, Homo sapiens
  misc_RNA (1)...(19): siRNA sense strand
caggaaaaguucuaccaaa

SEQ ID NO: 1075296 - RNA, 19 nt, Homo sapiens
  misc_RNA (1)...(19): siRNA sense strand
gcaaugaaaaugaaagaga

SEQ ID NO: 1075297 - RNA, 19 nt, Homo sapiens
  misc_RNA (1)...(19): siRNA sense strand
gauauaugcagcaacucuu

SEQ ID NO: 1075298 - RNA, 19 nt, Homo sapiens
  misc_RNA (1)...(19): siRNA sense strand
gggcgaacucguaugaaga

SEQ ID NO: 1075299 - RNA, 19 nt, Homo sapiens
  misc_RNA (1)...(19): siRNA sense strand
ggauauaugcagcaacucu

SEQ ID NO: 1075300 - RNA, 19 nt, Homo sapiens
  misc_RNA (1)...(19): siRNA sense strand
gaaguacaucaggaggaua

SEQ ID NO: 1075301 - RNA, 19 nt, Homo sapiens
  misc_RNA (1)...(19): siRNA sense strand
acugaagagcugucuauaa

SEQ ID NO: 1075302 - RNA, 19 nt, Homo sapiens
  misc_RNA (1)...(19): siRNA sense strand
cagcacagcccucuuaagc

SEQ ID NO: 1075303 - RNA, 19 nt, Homo sapiens
  misc_RNA (1)...(19): siRNA sense strand
ggaaagagacaaaguaguu

SEQ ID NO: 1075304 - RNA, 19 nt, Homo sapiens
  misc_RNA (1)...(19): siRNA sense strand
ugacaaagcuagagaagau

SEQ ID NO: 1075305 - RNA, 19 nt, Homo sapiens
  misc_RNA (1)...(19): siRNA sense strand
gaaguuacauuaugcaucu

SEQ ID NO: 1075306 - RNA, 19 nt, Homo sapiens
  misc_RNA (1)...(19): siRNA sense strand
gaagaugacuaugaauaug

SEQ ID NO: 1075307 - RNA, 19 nt, Homo sapiens
  misc_RNA (1)...(19): siRNA sense strand
aaacaguucuuccuucaaa

SEQ ID NO: 1075308 - RNA, 19 nt, Homo sapiens
  misc_RNA (1)...(19): siRNA sense strand
gcaaugaggugaauuuuga

SEQ ID NO: 1075309 - RNA, 19 nt, Homo sapiens
  misc_RNA (1)...(19): siRNA sense strand
ugcaguaccugaaguaaua

SEQ ID NO: 1075310 - RNA, 19 nt, Homo sapiens
  misc_RNA (1)...(19): siRNA sense strand
ggaaugaccagaacucuug

SEQ ID NO: 1075311 - RNA, 19 nt, Homo sapiens
  misc_RNA (1)...(19): siRNA sense strand
ccaauuguguccaucgaua

SEQ ID NO: 1075312 - RNA, 19 nt, Homo sapiens
  misc_RNA (1)...(19): siRNA sense strand
caaaguaguugggcagauu

SEQ ID NO: 1075313 - RNA, 19 nt, Homo sapiens
  misc_RNA (1)...(19): siRNA sense strand
caaacaagcagcugacaaa

SEQ ID NO: 1075314 - RNA, 19 nt, Homo sapiens
  misc_RNA (1)...(19): siRNA sense strand
caagaaacauugaagaaac

SEQ ID NO: 1075315 - RNA, 19 nt, Homo sapiens
  misc_RNA (1)...(19): siRNA sense strand
agaaagauuugaagcacua

SEQ ID NO: 1075316 - RNA, 19 nt, Homo sapiens
  misc_RNA (1)...(19): siRNA sense strand
gaaaggcaauacaaaggau

SEQ ID NO: 1075317 - RNA, 19 nt, Homo sapiens
  misc_RNA (1)...(19): siRNA sense strand
ucagaaaggucuucgugaa

SEQ ID NO: 1075318 - RNA, 19 nt, Homo sapiens
  misc_RNA (1)...(19): siRNA sense strand
gaaagaugcagauguacuu

SEQ ID NO: 1075319 - RNA, 19 nt, Homo sapiens
  misc_RNA (1)...(19): siRNA sense strand
gaccagaacucuugauugc

SEQ ID NO: 1075320 - RNA, 19 nt, Homo sapiens
  misc_RNA (1)...(19): siRNA sense strand
gcaaguggcaaugguguua

SEQ ID NO: 1075321 - RNA, 19 nt, Homo sapiens
  misc_RNA (1)...(19): siRNA sense strand
ugagaaacaccacacuuua

SEQ ID NO: 1075322 - RNA, 19 nt, Homo sapiens
  misc_RNA (1)...(19): siRNA sense strand
gaacaggucaccauaacug

SEQ ID NO: 1075323 - RNA, 19 nt, Homo sapiens
  misc_RNA (1)...(19): siRNA sense strand
ccagaacucuugauugcuu

SEQ ID NO: 1075324 - RNA, 19 nt, Homo sapiens
  misc_RNA (1)...(19): siRNA sense strand
ucacaugcauucuaucaau

SEQ ID NO: 1075325 - RNA, 19 nt, Homo sapiens
  misc_RNA (1)...(19): siRNA sense strand
uagagaagauuugcugaaa

SEQ ID NO: 1075326 - RNA, 19 nt, Homo sapiens
  misc_RNA (1)...(19): siRNA sense strand
ccaauacucuucucacaag

SEQ ID NO: 1075327 - RNA, 19 nt, Homo sapiens
  misc_RNA (1)...(19): siRNA sense strand
agugaaagaugcagaugua

SEQ ID NO: 1075328 - RNA, 19 nt, Homo sapiens
  misc_RNA (1)...(19): siRNA sense strand
ugacugaacuuagaacugu

SEQ ID NO: 1075329 - RNA, 19 nt, Homo sapiens
  misc_RNA (1)...(19): siRNA sense strand
cggaagcuguuaccaauug

SEQ ID NO: 1075330 - RNA, 19 nt, Homo sapiens
  misc_RNA (1)...(19): siRNA sense strand
cuauaaggguguuacauga

SEQ ID NO: 1075331 - RNA, 19 nt, Homo sapiens
  misc_RNA (1)...(19): siRNA sense strand
uuacaaagcugugggacuu

SEQ ID NO: 1075332 - RNA, 19 nt, Homo sapiens
  misc_RNA (1)...(19): siRNA sense strand
caagaacaggcuacagaua

SEQ ID NO: 1075333 - RNA, 19 nt, Homo sapiens
  misc_RNA (1)...(19): siRNA sense strand
caauucagauggcccaaga

SEQ ID NO: 1075334 - RNA, 19 nt, Homo sapiens
  misc_RNA (1)...(19): siRNA sense strand
gcaaagaggacauaguuac

SEQ ID NO: 1075335 - RNA, 19 nt, Homo sapiens
  misc_RNA (1)...(19): siRNA sense strand
caccauaacugaagcaucu

SEQ ID NO: 1075336 - RNA, 19 nt, Homo sapiens
  misc_RNA (1)...(19): siRNA sense strand
gaaaacaguucuuccuuca

SEQ ID NO: 1075337 - RNA, 19 nt, Homo sapiens
  misc_RNA (1)...(19): siRNA sense strand
gaaaggagugacugaacuu

SEQ ID NO: 1075338 - RNA, 19 nt, Homo sapiens
  misc_RNA (1)...(19): siRNA sense strand
uaccaugguccucaaauua

SEQ ID NO: 1075339 - RNA, 19 nt, Homo sapiens
  misc_RNA (1)...(19): siRNA sense strand
gcagauguacuuuguaugg

SEQ ID NO: 1075340 - RNA, 19 nt, Homo sapiens
  misc_RNA (1)...(19): siRNA sense strand
gauaccagaugacaauuuu

SEQ ID NO: 1075341 - RNA, 19 nt, Homo sapiens
  misc_RNA (1)...(19): siRNA sense strand
caagaacagguauauguga

SEQ ID NO: 1075342 - RNA, 19 nt, Homo sapiens
  misc_RNA (1)...(19): siRNA sense strand
gaaagagacaaaguaguug

SEQ ID NO: 1075343 - RNA, 19 nt, Homo sapiens
  misc_RNA (1)...(19): siRNA sense strand
gaagagauaccagaugaca

SEQ ID NO: 1075344 - RNA, 19 nt, Homo sapiens
  misc_RNA (1)...(19): siRNA sense strand
ggcuacagauacugaaauu

SEQ ID NO: 1075345 - RNA, 19 nt, Homo sapiens
  misc_RNA (1)...(19): siRNA sense strand
gcaagaacagguauaugug

SEQ ID NO: 1075346 - RNA, 19 nt, Homo sapiens
  misc_RNA (1)...(19): siRNA sense strand
gcaauacaaaggauucaga

SEQ ID NO: 1075347 - RNA, 19 nt, Homo sapiens
  misc_RNA (1)...(19): siRNA sense strand
ggguugaaguuacauuaug

SEQ ID NO: 1075348 - RNA, 19 nt, Homo sapiens
  misc_RNA (1)...(19): siRNA sense strand
acacuuuacugaaggagaa

SEQ ID NO: 1075349 - RNA, 19 nt, Homo sapiens
  misc_RNA (1)...(19): siRNA sense strand
ccaugguccucaaauuaaa

SEQ ID NO: 1075350 - RNA, 19 nt, Homo sapiens
  misc_RNA (1)...(19): siRNA sense strand
gaacgugauuuucaucgaa

SEQ ID NO: 1075351 - RNA, 19 nt, Homo sapiens
  misc_RNA (1)...(19): siRNA sense strand
ggauguuaauagugaaaga

SEQ ID NO: 1075352 - RNA, 19 nt, Homo sapiens
  misc_RNA (1)...(19): siRNA sense strand
ccacaaagacauccuaguc

SEQ ID NO: 1075353 - RNA, 19 nt, Homo sapiens
  misc_RNA (1)...(19): siRNA sense strand
gaugaaaggcaauacaaag

SEQ ID NO: 1075354 - RNA, 19 nt, Homo sapiens
  misc_RNA (1)...(19): siRNA sense strand
cagaagguccuacucagaa

SEQ ID NO: 1075355 - RNA, 19 nt, Homo sapiens
  misc_RNA (1)...(19): siRNA sense strand
aaacaccacacuuuacuga

SEQ ID NO: 1075356 - RNA, 19 nt, Homo sapiens
  misc_RNA (1)...(19): siRNA sense strand
uauaugggaugcaagaaca

SEQ ID NO: 1075357 - RNA, 19 nt, Homo sapiens
  misc_RNA (1)...(19): siRNA sense strand
cagaauuucccauagauau

SEQ ID NO: 1075358 - RNA, 19 nt, Homo sapiens
  misc_RNA (1)...(19): siRNA sense strand
augaagagauaccagauga

SEQ ID NO: 1075359 - RNA, 19 nt, Homo sapiens
  misc_RNA (1)...(19): siRNA sense strand
uaacugaagcaucugaaga

SEQ ID NO: 1075360 - RNA, 19 nt, Homo sapiens
  misc_RNA (1)...(19): siRNA sense strand
gcgacaaauuggcuacuuc

SEQ ID NO: 1075361 - RNA, 19 nt, Homo sapiens
  misc_RNA (1)...(19): siRNA sense strand
cugaagaugacuaugaaua

SEQ ID NO: 1075362 - RNA, 19 nt, Homo sapiens
  misc_RNA (1)...(19): siRNA sense strand
uuaccaugguccucaaauu

SEQ ID NO: 1075363 - RNA, 19 nt, Homo sapiens
  misc_RNA (1)...(19): siRNA sense strand
cccagaaggugaagaagau

SEQ ID NO: 1075364 - RNA, 19 nt, Homo sapiens
  misc_RNA (1)...(19): siRNA sense strand
gagaaacaccacacuuuac

SEQ ID NO: 1075365 - RNA, 19 nt, Homo sapiens
  misc_RNA (1)...(19): siRNA sense strand
gcaugcaguaccugaagua

SEQ ID NO: 1075366 - RNA, 19 nt, Homo sapiens
  misc_RNA (1)...(19): siRNA sense strand
cacaagcucugcagacaag

SEQ ID NO: 1075367 - RNA, 19 nt, Homo sapiens
  misc_RNA (1)...(19): siRNA sense strand
gauaugcaaccaaauccaa

SEQ ID NO: 1075368 - RNA, 19 nt, Homo sapiens
  misc_RNA (1)...(19): siRNA sense strand
agaagguccuacucagaaa

SEQ ID NO: 1075369 - RNA, 19 nt, Homo sapiens
  misc_RNA (1)...(19): siRNA sense strand
gaagacuuucucugcaauu

SEQ ID NO: 1075370 - RNA, 19 nt, Homo sapiens
  misc_RNA (1)...(19): siRNA sense strand
aaaagaaaaugcaccagaa

SEQ ID NO: 1075371 - RNA, 19 nt, Homo sapiens
  misc_RNA (1)...(19): siRNA sense strand
gaugucuacacccagauua

SEQ ID NO: 1075372 - RNA, 19 nt, Homo sapiens
  misc_RNA (1)...(19): siRNA sense strand
gaaugcaucauaagcgaau

SEQ ID NO: 1075373 - RNA, 19 nt, Homo sapiens
  misc_RNA (1)...(19): siRNA sense strand
ggucacaugcauucuauca

SEQ ID NO: 1075374 - RNA, 19 nt, Homo sapiens
  misc_RNA (1)...(19): siRNA sense strand
uaccugaaguaauagaaga

SEQ ID NO: 1075375 - RNA, 19 nt, Homo sapiens
  misc_RNA (1)...(19): siRNA sense strand
uuugggauguuaauaguga

SEQ ID NO: 1075376 - RNA, 19 nt, Homo sapiens
  misc_RNA (1)...(19): siRNA sense strand
auaaggguguuacaugaga

SEQ ID NO: 1075377 - RNA, 19 nt, Homo sapiens
  misc_RNA (1)...(19): siRNA sense strand
aggagugacugaacuuaga

SEQ ID NO: 1075378 - RNA, 19 nt, Homo sapiens
  misc_RNA (1)...(19): siRNA sense strand
agagauaccagaugacaau

SEQ ID NO: 1075379 - RNA, 19 nt, Homo sapiens
  misc_RNA (1)...(19): siRNA sense strand
ggaagcuguuaccaauugu

SEQ ID NO: 1075380 - RNA, 19 nt, Homo sapiens
  misc_RNA (1)...(19): siRNA sense strand
gacuuucucugcaauuucu

SEQ ID NO: 1075381 - RNA, 19 nt, Homo sapiens
  misc_RNA (1)...(19): siRNA sense strand
caauacaaaggauucagaa

SEQ ID NO: 1075382 - RNA, 19 nt, Homo sapiens
  misc_RNA (1)...(19): siRNA sense strand
acaccacacuuuacugaag

SEQ ID NO: 1075383 - RNA, 19 nt, Homo sapiens
  misc_RNA (1)...(19): siRNA sense strand
ugaagaagaucuggcaaaa

SEQ ID NO: 1075384 - RNA, 19 nt, Homo sapiens
  misc_RNA (1)...(19): siRNA sense strand
ggagugacugaacuuagaa

SEQ ID NO: 1075385 - RNA, 19 nt, Homo sapiens
  misc_RNA (1)...(19): siRNA sense strand
aagacuuucucugcaauuu

SEQ ID NO: 1075386 - RNA, 19 nt, Homo sapiens
  misc_RNA (1)...(19): siRNA sense strand
ggagauucacaaauugaug

SEQ ID NO: 1075387 - RNA, 19 nt, Homo sapiens
  misc_RNA (1)...(19): siRNA sense strand
agaugcagauguacuuugu

SEQ ID NO: 1075388 - RNA, 19 nt, Homo sapiens
  misc_RNA (1)...(19): siRNA sense strand
ugaaaggcaauacaaagga

SEQ ID NO: 1075389 - RNA, 19 nt, Homo sapiens
  misc_RNA (1)...(19): siRNA sense strand
gugaagaagaucuggcaaa

SEQ ID NO: 1075390 - RNA, 19 nt, Homo sapiens
  misc_RNA (1)...(19): siRNA sense strand
cugcaaagaggacauaguu

SEQ ID NO: 1075391 - RNA, 19 nt, Homo sapiens
  misc_RNA (1)...(19): siRNA sense strand
augcugaccuccuuggaaa

SEQ ID NO: 1075392 - RNA, 19 nt, Homo sapiens
  misc_RNA (1)...(19): siRNA sense strand
gaaacaccacacuuuacug

SEQ ID NO: 1075393 - RNA, 19 nt, Homo sapiens
  misc_RNA (1)...(19): siRNA sense strand
acaaagcuagagaagauuu

SEQ ID NO: 1075394 - RNA, 19 nt, Homo sapiens
  misc_RNA (1)...(19): siRNA sense strand
cagaacucuugauugcuuu

SEQ ID NO: 1075395 - RNA, 19 nt, Homo sapiens
  misc_RNA (1)...(19): siRNA sense strand
uuucaucgaaugcaucaua

SEQ ID NO: 1075396 - RNA, 19 nt, Homo sapiens
  misc_RNA (1)...(19): siRNA sense strand
uccauuugcuagaucuuaa

SEQ ID NO: 1075397 - RNA, 19 nt, Homo sapiens
  misc_RNA (1)...(19): siRNA sense strand
gaugcaagaacagguauau

SEQ ID NO: 1075398 - RNA, 19 nt, Homo sapiens
  misc_RNA (1)...(19): siRNA sense strand
guggugacacuacaguuaa

SEQ ID NO: 1075399 - RNA, 19 nt, Homo sapiens
  misc_RNA (1)...(19): siRNA sense strand
caaauccaaaccugaaugu

SEQ ID NO: 1075400 - RNA, 19 nt, Homo sapiens
  misc_RNA (1)...(19): siRNA sense strand
ucagaauuucccauagaua

SEQ ID NO: 1075401 - RNA, 19 nt, Homo sapiens
  misc_RNA (1)...(19): siRNA sense strand
acaaagaugaaaggcaaua

SEQ ID NO: 1075402 - RNA, 19 nt, Homo sapiens
  misc_RNA (1)...(19): siRNA sense strand
ccagaagguccuacucaga

SEQ ID NO: 1075403 - RNA, 19 nt, Homo sapiens
  misc_RNA (1)...(19): siRNA sense strand
gcaaugacauggaguauga

SEQ ID NO: 1075404 - RNA, 19 nt, Homo sapiens
  misc_RNA (1)...(19): siRNA sense strand
ggaaacagccgcacaguga

SEQ ID NO: 1075405 - RNA, 19 nt, Homo sapiens
  misc_RNA (1)...(19): siRNA sense strand
ggaaggagcuacccucauc

SEQ ID NO: 1075406 - RNA, 19 nt, Homo sapiens
  misc_RNA (1)...(19): siRNA sense strand
gaaaggagugcuacgcuaa

SEQ ID NO: 1075407 - RNA, 19 nt, Homo sapiens
  misc_RNA (1)...(19): siRNA sense strand
ccaagaacauuaagacuag

SEQ ID NO: 1075408 - RNA, 19 nt, Homo sapiens
  misc_RNA (1)...(19): siRNA sense strand
gaacgucuccuaccacauc

SEQ ID NO: 1075409 - RNA, 19 nt, Homo sapiens
  misc_RNA (1)...(19): siRNA sense strand
ggagaaguccuaccuguuc

SEQ ID NO: 1075410 - RNA, 19 nt, Homo sapiens
  misc_RNA (1)...(19): siRNA sense strand
gcaacaaguacaucaacua

SEQ ID NO: 1075411 - RNA, 19 nt, Homo sapiens
  misc_RNA (1)...(19): siRNA sense strand
cagaagguguccaggguuu

SEQ ID NO: 1075412 - RNA, 19 nt, Homo sapiens
  misc_RNA (1)...(19): siRNA sense strand
uaaaguggaugagcagaug

SEQ ID NO: 1075413 - RNA, 19 nt, Homo sapiens
  misc_RNA (1)...(19): siRNA sense strand
ggacaaggagaguggguuu

SEQ ID NO: 1075414 - RNA, 19 nt, Homo sapiens
  misc_RNA (1)...(19): siRNA sense strand
caacaaguacaucaacuau

SEQ ID NO: 1075415 - RNA, 19 nt, Homo sapiens
  misc_RNA (1)...(19): siRNA sense strand
gccaagaacauuaagacua

SEQ ID NO: 1075416 - RNA, 19 nt, Homo sapiens
  misc_RNA (1)...(19): siRNA sense strand
agacacaggugaugaccaa

SEQ ID NO: 1075417 - RNA, 19 nt, Homo sapiens
  misc_RNA (1)...(19): siRNA sense strand
agacuagggugaagcagaa

SEQ ID NO: 1075418 - RNA, 19 nt, Homo sapiens
  misc_RNA (1)...(19): siRNA sense strand
cgacguggccuuugacuuc

SEQ ID NO: 1075419 - RNA, 19 nt, Homo sapiens
  misc_RNA (1)...(19): siRNA sense strand
cgacaaggguagcaacaag

SEQ ID NO: 1075420 - RNA, 19 nt, Homo sapiens
  misc_RNA (1)...(19): siRNA sense strand
cccaggagaugguguauca

SEQ ID NO: 1075421 - RNA, 19 nt, Homo sapiens
  misc_RNA (1)...(19): siRNA sense strand
cuacaaugccacugucuuu

SEQ ID NO: 1075422 - RNA, 19 nt, Homo sapiens
  misc_RNA (1)...(19): siRNA sense strand
acaaguacaucaacuaucg

SEQ ID NO: 1075423 - RNA, 19 nt, Homo sapiens
  misc_RNA (1)...(19): siRNA sense strand
gcacugggcaacugcauca

SEQ ID NO: 1075424 - RNA, 19 nt, Homo sapiens
  misc_RNA (1)...(19): siRNA sense strand
uguccuaccuggagaucua

SEQ ID NO: 1075425 - RNA, 19 nt, Homo sapiens
  misc_RNA (1)...(19): siRNA sense strand
ccucaucgcccauaaagug

SEQ ID NO: 1075426 - RNA, 19 nt, Homo sapiens
  misc_RNA (1)...(19): siRNA sense strand
gaggagaccagcaaugaca

SEQ ID NO: 1075427 - RNA, 19 nt, Homo sapiens
  misc_RNA (1)...(19): siRNA sense strand
ggacagggugagcagguuu

SEQ ID NO: 1075428 - RNA, 19 nt, Homo sapiens
  misc_RNA (1)...(19): siRNA sense strand
cuggagaucuacaaugaga

SEQ ID NO: 1075429 - RNA, 19 nt, Homo sapiens
  misc_RNA (1)...(19): siRNA sense strand
gcagauggugguucucaug

SEQ ID NO: 1075430 - RNA, 19 nt, Homo sapiens
  misc_RNA (1)...(19): siRNA sense strand
cgacucaagcgcaagauug

SEQ ID NO: 1075431 - RNA, 19 nt, Homo sapiens
  misc_RNA (1)...(19): siRNA sense strand
gagccuggcaucuauguuc

SEQ ID NO: 1075432 - RNA, 19 nt, Homo sapiens
  misc_RNA (1)...(19): siRNA sense strand
acaaggguagcaacaagua

SEQ ID NO: 1075433 - RNA, 19 nt, Homo sapiens
  misc_RNA (1)...(19): siRNA sense strand
gcagccgggucaagaacau

SEQ ID NO: 1075434 - RNA, 19 nt, Homo sapiens
  misc_RNA (1)...(19): siRNA sense strand
cgagaaggacucagacaca

SEQ ID NO: 1075435 - RNA, 19 nt, Homo sapiens
  misc_RNA (1)...(19): siRNA sense strand
gggagaaguccuaccuguu

SEQ ID NO: 1075436 - RNA, 19 nt, Homo sapiens
  misc_RNA (1)...(19): siRNA sense strand
gacaaggagaguggguuua

SEQ ID NO: 1075437 - RNA, 19 nt, Homo sapiens
  misc_RNA (1)...(19): siRNA sense strand
gcuggaagcacgagaaguc

SEQ ID NO: 1075438 - RNA, 19 nt, Homo sapiens
  misc_RNA (1)...(19): siRNA sense strand
gagcagauggugguucuca

SEQ ID NO: 1075439 - RNA, 19 nt, Homo sapiens
  misc_RNA (1)...(19): siRNA sense strand
cgaagucuccaccaucaau

SEQ ID NO: 1075440 - RNA, 19 nt, Homo sapiens
  misc_RNA (1)...(19): siRNA sense strand
accuggagaucuacaauga

SEQ ID NO: 1075441 - RNA, 19 nt, Homo sapiens
  misc_RNA (1)...(19): siRNA sense strand
gggaggagcagcgaaagga

SEQ ID NO: 1075442 - RNA, 19 nt, Homo sapiens
  misc_RNA (1)...(19): siRNA sense strand
ccuaccacaucgcccagua

SEQ ID NO: 1075443 - RNA, 19 nt, Homo sapiens
  misc_RNA (1)...(19): siRNA sense strand
gaaacagccgcacagugau

SEQ ID NO: 1075444 - RNA, 19 nt, Homo sapiens
  misc_RNA (1)...(19): siRNA sense strand
gaagucuccaccaucaaug

SEQ ID NO: 1075445 - RNA, 19 nt, Homo sapiens
  misc_RNA (1)...(19): siRNA sense strand
ccagcaaugacauggagua

SEQ ID NO: 1075446 - RNA, 19 nt, Homo sapiens
  misc_RNA (1)...(19): siRNA sense strand
ggacucagacacaggugau

SEQ ID NO: 1075447 - RNA, 19 nt, Homo sapiens
  misc_RNA (1)...(19): siRNA sense strand
caagauugaugagcagacu

SEQ ID NO: 1075448 - RNA, 19 nt, Homo sapiens
  misc_RNA (1)...(19): siRNA sense strand
aguaugaggucuccauguc

SEQ ID NO: 1075449 - RNA, 19 nt, Homo sapiens
  misc_RNA (1)...(19): siRNA sense strand
caucgagggcgucaucuca

SEQ ID NO: 1075450 - RNA, 19 nt, Homo sapiens
  misc_RNA (1)...(19): siRNA sense strand
gggacagggugagcagguu

SEQ ID NO: 1075451 - RNA, 19 nt, Homo sapiens
  misc_RNA (1)...(19): siRNA sense strand
agaagcaacugcgcaagca

SEQ ID NO: 1075452 - RNA, 19 nt, Homo sapiens
  misc_RNA (1)...(19): siRNA sense strand
ugacauccgccacauccaa

SEQ ID NO: 1075453 - RNA, 19 nt, Homo sapiens
  misc_RNA (1)...(19): siRNA sense strand
ucaccgaagucuccaccau

SEQ ID NO: 1075454 - RNA, 19 nt, Homo sapiens
  misc_RNA (1)...(19): siRNA sense strand
gacguggccuuugacuuca

SEQ ID NO: 1075455 - RNA, 19 nt, Homo sapiens
  misc_RNA (1)...(19): siRNA sense strand
ggagaccagcaaugacaug

SEQ ID NO: 1075456 - RNA, 19 nt, Homo sapiens
  misc_RNA (1)...(19): siRNA sense strand
ccacugucuuugccuaugg

SEQ ID NO: 1075457 - RNA, 19 nt, Homo sapiens
  misc_RNA (1)...(19): siRNA sense strand
uaucaggccaccaccaaga

SEQ ID NO: 1075458 - RNA, 19 nt, Homo sapiens
  misc_RNA (1)...(19): siRNA sense strand
gguagcaacaaguacauca

SEQ ID NO: 1075459 - RNA, 19 nt, Homo sapiens
  misc_RNA (1)...(19): siRNA sense strand
ucgaggagaccagcaauga

SEQ ID NO: 1075460 - RNA, 19 nt, Homo sapiens
  misc_RNA (1)...(19): siRNA sense strand
gcgccucgcagacacagaa

SEQ ID NO: 1075461 - RNA, 19 nt, Homo sapiens
  misc_RNA (1)...(19): siRNA sense strand
ggaggaucccgacgacauc

SEQ ID NO: 1075462 - RNA, 19 nt, Homo sapiens
  misc_RNA (1)...(19): siRNA sense strand
aaacagccgcacagugaug

SEQ ID NO: 1075463 - RNA, 19 nt, Homo sapiens
  misc_RNA (1)...(19): siRNA sense strand
ucaacuaucgcgacagcaa

SEQ ID NO: 1075464 - RNA, 19 nt, Homo sapiens
  misc_RNA (1)...(19): siRNA sense strand
caaggaccagcaacucaug

SEQ ID NO: 1075465 - RNA, 19 nt, Homo sapiens
  misc_RNA (1)...(19): siRNA sense strand
cgucaucucaggcuacaau

SEQ ID NO: 1075466 - RNA, 19 nt, Homo sapiens
  misc_RNA (1)...(19): siRNA sense strand
ggcgagauccagcgacuca

SEQ ID NO: 1075467 - RNA, 19 nt, Homo sapiens
  misc_RNA (1)...(19): siRNA sense strand
aaucgugggcagcguauga

SEQ ID NO: 1075468 - RNA, 19 nt, Homo sapiens
  misc_RNA (1)...(19): siRNA sense strand
ggugaugaccaaccagaca

SEQ ID NO: 1075469 - RNA, 19 nt, Homo sapiens
  misc_RNA (1)...(19): siRNA sense strand
ugaagcagaaccuccugaa

SEQ ID NO: 1075470 - RNA, 19 nt, Homo sapiens
  misc_RNA (1)...(19): siRNA sense strand
cuacccucaucgcccauaa

SEQ ID NO: 1075471 - RNA, 19 nt, Homo sapiens
  misc_RNA (1)...(19): siRNA sense strand
ucaacgcccugagcgacaa

SEQ ID NO: 1075472 - RNA, 19 nt, Homo sapiens
  misc_RNA (1)...(19): siRNA sense strand
guagcaacaaguacaucaa

SEQ ID NO: 1075473 - RNA, 19 nt, Homo sapiens
  misc_RNA (1)...(19): siRNA sense strand
gaagguguccaggguuugg

SEQ ID NO: 1075474 - RNA, 19 nt, Homo sapiens
  misc_RNA (1)...(19): siRNA sense strand
acaccaugcugggcacaga

SEQ ID NO: 1075475 - RNA, 19 nt, Homo sapiens
  misc_RNA (1)...(19): siRNA sense strand
caaggagaguggguuuagg

SEQ ID NO: 1075476 - RNA, 19 nt, Homo sapiens
  misc_RNA (1)...(19): siRNA sense strand
gaagcagaaccuccugaac

SEQ ID NO: 1075477 - RNA, 19 nt, Homo sapiens
  misc_RNA (1)...(19): siRNA sense strand
ggacuccaaggaccagcaa

SEQ ID NO: 1075478 - RNA, 19 nt, Homo sapiens
  misc_RNA (1)...(19): siRNA sense strand
gugggcagcguaugaagga

SEQ ID NO: 1075479 - RNA, 19 nt, Homo sapiens
  misc_RNA (1)...(19): siRNA sense strand
accgaagucuccaccauca

SEQ ID NO: 1075480 - RNA, 19 nt, Homo sapiens
  misc_RNA (1)...(19): siRNA sense strand
ccaaggaccagcaacucau

SEQ ID NO: 1075481 - RNA, 19 nt, Homo sapiens
  misc_RNA (1)...(19): siRNA sense strand
gaguaugaggucuccaugu

SEQ ID NO: 1075482 - RNA, 19 nt, Homo sapiens
  misc_RNA (1)...(19): siRNA sense strand
gacaaggguagcaacaagu

SEQ ID NO: 1075483 - RNA, 19 nt, Homo sapiens
  misc_RNA (1)...(19): siRNA sense strand
gccacugucuuugccuaug

SEQ ID NO: 1075484 - RNA, 19 nt, Homo sapiens
  misc_RNA (1)...(19): siRNA sense strand
gcuacaaugccacugucuu

SEQ ID NO: 1075485 - RNA, 19 nt, Homo sapiens
  misc_RNA (1)...(19): siRNA sense strand
ccaguacaccagcaucauc

SEQ ID NO: 1075486 - RNA, 19 nt, Homo sapiens
  misc_RNA (1)...(19): siRNA sense strand
gaacuuggcugucuucuau

SEQ ID NO: 1075487 - RNA, 19 nt, Homo sapiens
  misc_RNA (1)...(19): siRNA sense strand
gggcacagauugucuuuaa

SEQ ID NO: 1075488 - RNA, 19 nt, Homo sapiens
  misc_RNA (1)...(19): siRNA sense strand
ugaagaggcuggaguaauu

SEQ ID NO: 1075489 - RNA, 19 nt, Homo sapiens
  misc_RNA (1)...(19): siRNA sense strand
gcucugcucugguaucaua

SEQ ID NO: 1075490 - RNA, 19 nt, Homo sapiens
  misc_RNA (1)...(19): siRNA sense strand
caacaugucugucuguaug

SEQ ID NO: 1075491 - RNA, 19 nt, Homo sapiens
  misc_RNA (1)...(19): siRNA sense strand
ccuggaagauuuacaauaa

SEQ ID NO: 1075492 - RNA, 19 nt, Homo sapiens
  misc_RNA (1)...(19): siRNA sense strand
ggaugaagcuaaggaaauu

SEQ ID NO: 1075493 - RNA, 19 nt, Homo sapiens
  misc_RNA (1)...(19): siRNA sense strand
ugauagagcucaauuucaa

SEQ ID NO: 1075494 - RNA, 19 nt, Homo sapiens
  misc_RNA (1)...(19): siRNA sense strand
agaagaagcuaacugaaga

SEQ ID NO: 1075495 - RNA, 19 nt, Homo sapiens
  misc_RNA (1)...(19): siRNA sense strand
ggaaagccuggaagauuua

SEQ ID NO: 1075496 - RNA, 19 nt, Homo sapiens
  misc_RNA (1)...(19): siRNA sense strand
ccaaauucuucccucuuua

SEQ ID NO: 1075497 - RNA, 19 nt, Homo sapiens
  misc_RNA (1)...(19): siRNA sense strand
cgacuagagugucaaauca

SEQ ID NO: 1075498 - RNA, 19 nt, Homo sapiens
  misc_RNA (1)...(19): siRNA sense strand
gcagagcucuacuucuuca

SEQ ID NO: 1075499 - RNA, 19 nt, Homo sapiens
  misc_RNA (1)...(19): siRNA sense strand
caagaauugucagcuuaua

SEQ ID NO: 1075500 - RNA, 19 nt, Homo sapiens
  misc_RNA (1)...(19): siRNA sense strand
gagucaagcuugccaugaa

SEQ ID NO: 1075501 - RNA, 19 nt, Homo sapiens
  misc_RNA (1)...(19): siRNA sense strand
gcuguuagcuuuggauaug

SEQ ID NO: 1075502 - RNA, 19 nt, Homo sapiens
  misc_RNA (1)...(19): siRNA sense strand
guuggcaugugaugacuua

SEQ ID NO: 1075503 - RNA, 19 nt, Homo sapiens
  misc_RNA (1)...(19): siRNA sense strand
aggaaagccuggaagauuu

SEQ ID NO: 1075504 - RNA, 19 nt, Homo sapiens
  misc_RNA (1)...(19): siRNA sense strand
ccaaagcgcucuguguguu

SEQ ID NO: 1075505 - RNA, 19 nt, Homo sapiens
  misc_RNA (1)...(19): siRNA sense strand
agagagaaauucaacaugu

SEQ ID NO: 1075506 - RNA, 19 nt, Homo sapiens
  misc_RNA (1)...(19): siRNA sense strand
cagaagaugcuguucagua

SEQ ID NO: 1075507 - RNA, 19 nt, Homo sapiens
  misc_RNA (1)...(19): siRNA sense strand
cauuagcucugcucuggua

SEQ ID NO: 1075508 - RNA, 19 nt, Homo sapiens
  misc_RNA (1)...(19): siRNA sense strand
ggaugcauuugauuccuuu

SEQ ID NO: 1075509 - RNA, 19 nt, Homo sapiens
  misc_RNA (1)...(19): siRNA sense strand
ugacucaucuguuguugga

SEQ ID NO: 1075510 - RNA, 19 nt, Homo sapiens
  misc_RNA (1)...(19): siRNA sense strand
gaacguugauguccgaaaa

SEQ ID NO: 1075511 - RNA, 19 nt, Homo sapiens
  misc_RNA (1)...(19): siRNA sense strand
ggagccagcuuugucaguu

SEQ ID NO: 1075512 - RNA, 19 nt, Homo sapiens
  misc_RNA (1)...(19): siRNA sense strand
gcugugcuuucauuuguaa

SEQ ID NO: 1075513 - RNA, 19 nt, Homo sapiens
  misc_RNA (1)...(19): siRNA sense strand
gagccagcuuugucaguuu

SEQ ID NO: 1075514 - RNA, 19 nt, Homo sapiens
  misc_RNA (1)...(19): siRNA sense strand
aggcagagcucuacuucuu

SEQ ID NO: 1075515 - RNA, 19 nt, Homo sapiens
  misc_RNA (1)...(19): siRNA sense strand
gcacagauugucuuuaaag

SEQ ID NO: 1075516 - RNA, 19 nt, Homo sapiens
  misc_RNA (1)...(19): siRNA sense strand
cuacuugacugcaguuugu

SEQ ID NO: 1075517 - RNA, 19 nt, Homo sapiens
  misc_RNA (1)...(19): siRNA sense strand
gagagaaauucaacauguc

SEQ ID NO: 1075518 - RNA, 19 nt, Homo sapiens
  misc_RNA (1)...(19): siRNA sense strand
gaugaauugugucgucaga

SEQ ID NO: 1075519 - RNA, 19 nt, Homo sapiens
  misc_RNA (1)...(19): siRNA sense strand
gaauugugucgucagaaua

SEQ ID NO: 1075520 - RNA, 19 nt, Homo sapiens
  misc_RNA (1)...(19): siRNA sense strand
ggacaucaaugcccuucag

SEQ ID NO: 1075521 - RNA, 19 nt, Homo sapiens
  misc_RNA (1)...(19): siRNA sense strand
gcaguagaccagagagaaa

SEQ ID NO: 1075522 - RNA, 19 nt, Homo sapiens
  misc_RNA (1)...(19): siRNA sense strand
gaugacauuugaggaagaa

SEQ ID NO: 1075523 - RNA, 19 nt, Homo sapiens
  misc_RNA (1)...(19): siRNA sense strand
ugaauugugucgucagaau

SEQ ID NO: 1075524 - RNA, 19 nt, Homo sapiens
  misc_RNA (1)...(19): siRNA sense strand
gcauuugauuccuuugaga

SEQ ID NO: 1075525 - RNA, 19 nt, Homo sapiens
  misc_RNA (1)...(19): siRNA sense strand
auacacaaaugucuaggaa

SEQ ID NO: 1075526 - RNA, 19 nt, Homo sapiens
  misc_RNA (1)...(19): siRNA sense strand
acacaaaugucuaggaaac

SEQ ID NO: 1075527 - RNA, 19 nt, Homo sapiens
  misc_RNA (1)...(19): siRNA sense strand
gaaagcucuuccaaacugu

SEQ ID NO: 1075528 - RNA, 19 nt, Homo sapiens
  misc_RNA (1)...(19): siRNA sense strand
uccaaauucuucccucuuu

SEQ ID NO: 1075529 - RNA, 19 nt, Homo sapiens
  misc_RNA (1)...(19): siRNA sense strand
cuaggaaacucagaagaug

SEQ ID NO: 1075530 - RNA, 19 nt, Homo sapiens
  misc_RNA (1)...(19): siRNA sense strand
ccacacugcuuuggaacuu

SEQ ID NO: 1075531 - RNA, 19 nt, Homo sapiens
  misc_RNA (1)...(19): siRNA sense strand
caaauucuucccucuuuau

SEQ ID NO: 1075532 - RNA, 19 nt, Homo sapiens
  misc_RNA (1)...(19): siRNA sense strand
ggacggauacaacgacuag

SEQ ID NO: 1075533 - RNA, 19 nt, Homo sapiens
  misc_RNA (1)...(19): siRNA sense strand
uaggaaagccuggaagauu

SEQ ID NO: 1075534 - RNA, 19 nt, Homo sapiens
  misc_RNA (1)...(19): siRNA sense strand
uucaggagcuguaucagaa

SEQ ID NO: 1075535 - RNA, 19 nt, Homo sapiens
  misc_RNA (1)...(19): siRNA sense strand
agaagaugcuguucaguac

SEQ ID NO: 1075536 - RNA, 19 nt, Homo sapiens
  misc_RNA (1)...(19): siRNA sense strand
ggauggcagugauaacaag

SEQ ID NO: 1075537 - RNA, 19 nt, Homo sapiens
  misc_RNA (1)...(19): siRNA sense strand
acuuggcugucuucuauua

SEQ ID NO: 1075538 - RNA, 19 nt, Homo sapiens
  misc_RNA (1)...(19): siRNA sense strand
caugauagagcucaauuuc

SEQ ID NO: 1075539 - RNA, 19 nt, Homo sapiens
  misc_RNA (1)...(19): siRNA sense strand
uaaaugcuaucuggacauc

SEQ ID NO: 1075540 - RNA, 19 nt, Homo sapiens
  misc_RNA (1)...(19): siRNA sense strand
cagaaacucuucaaaagga

SEQ ID NO: 1075541 - RNA, 19 nt, Homo sapiens
  misc_RNA (1)...(19): siRNA sense strand
acagugccuugacaucuuu

SEQ ID NO: 1075542 - RNA, 19 nt, Homo sapiens
  misc_RNA (1)...(19): siRNA sense strand
gaagaggcuggaguaauug

SEQ ID NO: 1075543 - RNA, 19 nt, Homo sapiens
  misc_RNA (1)...(19): siRNA sense strand
caauuucaaggaugcauuu

SEQ ID NO: 1075544 - RNA, 19 nt, Homo sapiens
  misc_RNA (1)...(19): siRNA sense strand
gguggucccagugcuauua

SEQ ID NO: 1075545 - RNA, 19 nt, Homo sapiens
  misc_RNA (1)...(19): siRNA sense strand
gugcuauuaugccuacuug

SEQ ID NO: 1075546 - RNA, 19 nt, Homo sapiens
  misc_RNA (1)...(19): siRNA sense strand
guuaugaacuuggcugucu

SEQ ID NO: 1075547 - RNA, 19 nt, Homo sapiens
  misc_RNA (1)...(19): siRNA sense strand
agacugaaaggugcuguua

SEQ ID NO: 1075548 - RNA, 19 nt, Homo sapiens
  misc_RNA (1)...(19): siRNA sense strand
acucaucuguuguuggauu

SEQ ID NO: 1075549 - RNA, 19 nt, Homo sapiens
  misc_RNA (1)...(19): siRNA sense strand
caaccaaagcgcucugugu

SEQ ID NO: 1075550 - RNA, 19 nt, Homo sapiens
  misc_RNA (1)...(19): siRNA sense strand
uggcugugcuuucauuugu

SEQ ID NO: 1075551 - RNA, 19 nt, Homo sapiens
  misc_RNA (1)...(19): siRNA sense strand
aagaugcuguucaguacuu

SEQ ID NO: 1075552 - RNA, 19 nt, Homo sapiens
  misc_RNA (1)...(19): siRNA sense strand
gggagccacuggugaugug

SEQ ID NO: 1075553 - RNA, 19 nt, Homo sapiens
  misc_RNA (1)...(19): siRNA sense strand
gcaugauagagcucaauuu

SEQ ID NO: 1075554 - RNA, 19 nt, Homo sapiens
  misc_RNA (1)...(19): siRNA sense strand
cagaagaagcuaacugaag

SEQ ID NO: 1075555 - RNA, 19 nt, Homo sapiens
  misc_RNA (1)...(19): siRNA sense strand
caggagcuguaucagaaga

SEQ ID NO: 1075556 - RNA, 19 nt, Homo sapiens
  misc_RNA (1)...(19): siRNA sense strand
agacaaaccagagacugua

SEQ ID NO: 1075557 - RNA, 19 nt, Homo sapiens
  misc_RNA (1)...(19): siRNA sense strand
guaugccuguuaugaacuu

SEQ ID NO: 1075558 - RNA, 19 nt, Homo sapiens
  misc_RNA (1)...(19): siRNA sense strand
caacgacuagagugucaaa

SEQ ID NO: 1075559 - RNA, 19 nt, Homo sapiens
  misc_RNA (1)...(19): siRNA sense strand
gaauugucagcuuauauca

SEQ ID NO: 1075560 - RNA, 19 nt, Homo sapiens
  misc_RNA (1)...(19): siRNA sense strand
ggcacagauugucuuuaaa

SEQ ID NO: 1075561 - RNA, 19 nt, Homo sapiens
  misc_RNA (1)...(19): siRNA sense strand
caugaugacauuugaggaa

SEQ ID NO: 1075562 - RNA, 19 nt, Homo sapiens
  misc_RNA (1)...(19): siRNA sense strand
aaugcuaucuggacaucaa

SEQ ID NO: 1075563 - RNA, 19 nt, Homo sapiens
  misc_RNA (1)...(19): siRNA sense strand
caucuguuguuggauuaaa

SEQ ID NO: 1075564 - RNA, 19 nt, Homo sapiens
  misc_RNA (1)...(19): siRNA sense strand
ucagaggcagauaaucaua

SEQ ID NO: 1075565 - RNA, 19 nt, Homo sapiens
  misc_RNA (1)...(19): siRNA sense strand
gaggcuggaguaauugaaa

SEQ ID NO: 1075566 - RNA, 19 nt, Homo sapiens
  misc_RNA (1)...(19): siRNA sense strand
uuaagaagaacguugaugu

SEQ ID NO: 1075567 - RNA, 19 nt, Homo sapiens
  misc_RNA (1)...(19): siRNA sense strand
caacagugccuugacaucu

SEQ ID NO: 1075568 - RNA, 19 nt, Homo sapiens
  misc_RNA (1)...(19): siRNA sense strand
cuucugaugcugcaaauga

SEQ ID NO: 1075569 - RNA, 19 nt, Homo sapiens
  misc_RNA (1)...(19): siRNA sense strand
ugaaaggugcuguuagcuu

SEQ ID NO: 1075570 - RNA, 19 nt, Homo sapiens
  misc_RNA (1)...(19): siRNA sense strand
gaagcaaaccccaaccaaa

SEQ ID NO: 1075571 - RNA, 19 nt, Homo sapiens
  misc_RNA (1)...(19): siRNA sense strand
auucuucccucuuuauguu

SEQ ID NO: 1075572 - RNA, 19 nt, Homo sapiens
  misc_RNA (1)...(19): siRNA sense strand
cuucagaggcagauaauca

SEQ ID NO: 1075573 - RNA, 19 nt, Homo sapiens
  misc_RNA (1)...(19): siRNA sense strand
gauacaacgacuagagugu

SEQ ID NO: 1075574 - RNA, 19 nt, Homo sapiens
  misc_RNA (1)...(19): siRNA sense strand
ccagagagaaauucaacau

SEQ ID NO: 1075575 - RNA, 19 nt, Homo sapiens
  misc_RNA (1)...(19): siRNA sense strand
uuaccuggcugugcuuuca

SEQ ID NO: 1075576 - RNA, 19 nt, Homo sapiens
  misc_RNA (1)...(19): siRNA sense strand
auagcugacugccagguuu

SEQ ID NO: 1075577 - RNA, 19 nt, Homo sapiens
  misc_RNA (1)...(19): siRNA sense strand
aaacucagaagaugcuguu

SEQ ID NO: 1075578 - RNA, 19 nt, Homo sapiens
  misc_RNA (1)...(19): siRNA sense strand
gccuggaagauuuacaaua

SEQ ID NO: 1075579 - RNA, 19 nt, Homo sapiens
  misc_RNA (1)...(19): siRNA sense strand
acaaaugucuaggaaacuc

SEQ ID NO: 1075580 - RNA, 19 nt, Homo sapiens
  misc_RNA (1)...(19): siRNA sense strand
caaagcgcucuguguguug

SEQ ID NO: 1075581 - RNA, 19 nt, Homo sapiens
  misc_RNA (1)...(19): siRNA sense strand
uacaacgacuagaguguca

SEQ ID NO: 1075582 - RNA, 19 nt, Homo sapiens
  misc_RNA (1)...(19): siRNA sense strand
uaagaagaacguugauguc

SEQ ID NO: 1075583 - RNA, 19 nt, Homo sapiens
  misc_RNA (1)...(19): siRNA sense strand
uagcugacugccagguuua

SEQ ID NO: 1075584 - RNA, 19 nt, Homo sapiens
  misc_RNA (1)...(19): siRNA sense strand
ggcugugcuuucauuugua

SEQ ID NO: 1075585 - RNA, 19 nt, Homo sapiens
  misc_RNA (1)...(19): siRNA sense strand
ugaugacauuugaggaaga

SEQ ID NO: 1075586 - RNA, 19 nt, Homo sapiens
  misc_RNA (1)...(19): siRNA sense strand
ccaagaaccugaacuauga

SEQ ID NO: 1075587 - RNA, 19 nt, Homo sapiens
  misc_RNA (1)...(19): siRNA sense strand
gagaugauguggaggauuu

SEQ ID NO: 1075588 - RNA, 19 nt, Homo sapiens
  misc_RNA (1)...(19): siRNA sense strand
guuaaagccugaacacaga

SEQ ID NO: 1075589 - RNA, 19 nt, Homo sapiens
  misc_RNA (1)...(19): siRNA sense strand
cagacgggcuguaugagua

SEQ ID NO: 1075590 - RNA, 19 nt, Homo sapiens
  misc_RNA (1)...(19): siRNA sense strand
ggacauggccaccguguuc

SEQ ID NO: 1075591 - RNA, 19 nt, Homo sapiens
  misc_RNA (1)...(19): siRNA sense strand
ccugaacuaugacaccuuu

SEQ ID NO: 1075592 - RNA, 19 nt, Homo sapiens
  misc_RNA (1)...(19): siRNA sense strand
gggaguaauuggccucauc

SEQ ID NO: 1075593 - RNA, 19 nt, Homo sapiens
  misc_RNA (1)...(19): siRNA sense strand
gcaaggagaguggguguuc

SEQ ID NO: 1075594 - RNA, 19 nt, Homo sapiens
  misc_RNA (1)...(19): siRNA sense strand
gcccaggguucccaguuug

SEQ ID NO: 1075595 - RNA, 19 nt, Homo sapiens
  misc_RNA (1)...(19): siRNA sense strand
gcaacacuguggucauggu

SEQ ID NO: 1075596 - RNA, 19 nt, Homo sapiens
  misc_RNA (1)...(19): siRNA sense strand
caugugguauuucggauca

SEQ ID NO: 1075597 - RNA, 19 nt, Homo sapiens
  misc_RNA (1)...(19): siRNA sense strand
cggcaacacuguggucaug

SEQ ID NO: 1075598 - RNA, 19 nt, Homo sapiens
  misc_RNA (1)...(19): siRNA sense strand
uguccugccucuccaagaa

SEQ ID NO: 1075599 - RNA, 19 nt, Homo sapiens
  misc_RNA (1)...(19): siRNA sense strand
uggccgaggugauccagaa

SEQ ID NO: 1075600 - RNA, 19 nt, Homo sapiens
  misc_RNA (1)...(19): siRNA sense strand
ggagaccgggaccaucuga

SEQ ID NO: 1075601 - RNA, 19 nt, Homo sapiens
  misc_RNA (1)...(19): siRNA sense strand
gugaaugggaagugguuaa

SEQ ID NO: 1075602 - RNA, 19 nt, Homo sapiens
  misc_RNA (1)...(19): siRNA sense strand
ugaaugggaagugguuaaa

SEQ ID NO: 1075603 - RNA, 19 nt, Homo sapiens
  misc_RNA (1)...(19): siRNA sense strand
caucacaggagagaacuug

SEQ ID NO: 1075604 - RNA, 19 nt, Homo sapiens
  misc_RNA (1)...(19): siRNA sense strand
uccaagaaccugaacuaug

SEQ ID NO: 1075605 - RNA, 19 nt, Homo sapiens
  misc_RNA (1)...(19): siRNA sense strand
uccaggccaugugguauuu

SEQ ID NO: 1075606 - RNA, 19 nt, Homo sapiens
  misc_RNA (1)...(19): siRNA sense strand
ccacauucuccuuccuuga

SEQ ID NO: 1075607 - RNA, 19 nt, Homo sapiens
  misc_RNA (1)...(19): siRNA sense strand
ucuccaagaaccugaacua

SEQ ID NO: 1075608 - RNA, 19 nt, Homo sapiens
  misc_RNA (1)...(19): siRNA sense strand
uaaagccugaacacagaaa

SEQ ID NO: 1075609 - RNA, 19 nt, Homo sapiens
  misc_RNA (1)...(19): siRNA sense strand
gcugagcgcaagacgacuu

SEQ ID NO: 1075610 - RNA, 19 nt, Homo sapiens
  misc_RNA (1)...(19): siRNA sense strand
ccgaggugauccagaagca

SEQ ID NO: 1075611 - RNA, 19 nt, Homo sapiens
  misc_RNA (1)...(19): siRNA sense strand
agcccaggguucccaguuu

SEQ ID NO: 1075612 - RNA, 19 nt, Homo sapiens
  misc_RNA (1)...(19): siRNA sense strand
aaugggaagugguuaaagc

SEQ ID NO: 1075613 - RNA, 19 nt, Homo sapiens
  misc_RNA (1)...(19): siRNA sense strand
ggaggucugccaggacaug

SEQ ID NO: 1075614 - RNA, 19 nt, Homo sapiens
  misc_RNA (1)...(19): siRNA sense strand
cuucggaacgcccauucua

SEQ ID NO: 1075615 - RNA, 19 nt, Homo sapiens
  misc_RNA (1)...(19): siRNA sense strand
ucccgggaauccugaaugu

SEQ ID NO: 1075616 - RNA, 19 nt, Homo sapiens
  misc_RNA (1)...(19): siRNA sense strand
gagcccaugggaguaauug

SEQ ID NO: 1075617 - RNA, 19 nt, Homo sapiens
  misc_RNA (1)...(19): siRNA sense strand
ccagacgggcuguaugagu

SEQ ID NO: 1075618 - RNA, 19 nt, Homo sapiens
  misc_RNA (1)...(19): siRNA sense strand
gaugcuggcuuccucuaua

SEQ ID NO: 1075619 - RNA, 19 nt, Homo sapiens
  misc_RNA (1)...(19): siRNA sense strand
cuacaaggauuaugacaug

SEQ ID NO: 1075620 - RNA, 19 nt, Homo sapiens
  misc_RNA (1)...(19): siRNA sense strand
gaugggaacucuguccuaa

SEQ ID NO: 1075621 - RNA, 19 nt, Homo sapiens
  misc_RNA (1)...(19): siRNA sense strand
ggaacucuguccuaaugaa

SEQ ID NO: 1075622 - RNA, 19 nt, Homo sapiens
  misc_RNA (1)...(19): siRNA sense strand
ugaguggcgugaacaagua

SEQ ID NO: 1075623 - RNA, 19 nt, Homo sapiens
  misc_RNA (1)...(19): siRNA sense strand
gcaagcaccaccugaaaca

SEQ ID NO: 1075624 - RNA, 19 nt, Homo sapiens
  misc_RNA (1)...(19): siRNA sense strand
ugggaacucuguccuaaug

SEQ ID NO: 1075625 - RNA, 19 nt, Homo sapiens
  misc_RNA (1)...(19): siRNA sense strand
gggaaugccuacccgauac

SEQ ID NO: 1075626 - RNA, 19 nt, Homo sapiens
  misc_RNA (1)...(19): siRNA sense strand
ggucuucaccuacuucaug

SEQ ID NO: 1075627 - RNA, 19 nt, Homo sapiens
  misc_RNA (1)...(19): siRNA sense strand
gcgcaagcaccaccugaaa

SEQ ID NO: 1075628 - RNA, 19 nt, Homo sapiens
  misc_RNA (1)...(19): siRNA sense strand
agaaggacuuugucugcaa

SEQ ID NO: 1075629 - RNA, 19 nt, Homo sapiens
  misc_RNA (1)...(19): siRNA sense strand
ggacugugguggacguacu

SEQ ID NO: 1075630 - RNA, 19 nt, Homo sapiens
  misc_RNA (1)...(19): siRNA sense strand
gauacgugcccaccauaug

SEQ ID NO: 1075631 - RNA, 19 nt, Homo sapiens
  misc_RNA (1)...(19): siRNA sense strand
ggaugggaacucuguccua

SEQ ID NO: 1075632 - RNA, 19 nt, Homo sapiens
  misc_RNA (1)...(19): siRNA sense strand
gcaagaggugcauggagau

SEQ ID NO: 1075633 - RNA, 19 nt, Homo sapiens
  misc_RNA (1)...(19): siRNA sense strand
gaacucuguccuaaugaag

SEQ ID NO: 1075634 - RNA, 19 nt, Homo sapiens
  misc_RNA (1)...(19): siRNA sense strand
gagcagaaggacuuugucu

SEQ ID NO: 1075635 - RNA, 19 nt, Homo sapiens
  misc_RNA (1)...(19): siRNA sense strand
acgacaaccugagcaagaa

SEQ ID NO: 1075636 - RNA, 19 nt, Homo sapiens
  misc_RNA (1)...(19): siRNA sense strand
agaggugcauggagaucuu

SEQ ID NO: 1075637 - RNA, 19 nt, Homo sapiens
  misc_RNA (1)...(19): siRNA sense strand
caccgccucuacaaggauu

SEQ ID NO: 1075638 - RNA, 19 nt, Homo sapiens
  misc_RNA (1)...(19): siRNA sense strand
ugucugugguguucaucuu

SEQ ID NO: 1075639 - RNA, 19 nt, Homo sapiens
  misc_RNA (1)...(19): siRNA sense strand
uacgacaaccugagcaaga

SEQ ID NO: 1075640 - RNA, 19 nt, Homo sapiens
  misc_RNA (1)...(19): siRNA sense strand
ccacagcugccaucugcau

SEQ ID NO: 1075641 - RNA, 19 nt, Homo sapiens
  misc_RNA (1)...(19): siRNA sense strand
ggaugcuggcuuccucuau

SEQ ID NO: 1075642 - RNA, 19 nt, Homo sapiens
  misc_RNA (1)...(19): siRNA sense strand
gggacgaugagcagaagga

SEQ ID NO: 1075643 - RNA, 19 nt, Homo sapiens
  misc_RNA (1)...(19): siRNA sense strand
acgaugagcagaaggacuu

SEQ ID NO: 1075644 - RNA, 19 nt, Homo sapiens
  misc_RNA (1)...(19): siRNA sense strand
gcaagaagauccacuuuga

SEQ ID NO: 1075645 - RNA, 19 nt, Homo sapiens
  misc_RNA (1)...(19): siRNA sense strand
ggaaggagcuagggaaguu

SEQ ID NO: 1075646 - RNA, 19 nt, Homo sapiens
  misc_RNA (1)...(19): siRNA sense strand
acaaggaggucaucaguga

SEQ ID NO: 1075647 - RNA, 19 nt, Homo sapiens
  misc_RNA (1)...(19): siRNA sense strand
ggagugcaaugcuagugua

SEQ ID NO: 1075648 - RNA, 19 nt, Homo sapiens
  misc_RNA (1)...(19): siRNA sense strand
cagaugagcugaccuugga

SEQ ID NO: 1075649 - RNA, 19 nt, Homo sapiens
  misc_RNA (1)...(19): siRNA sense strand
gagcugaccuuggagaaga

SEQ ID NO: 1075650 - RNA, 19 nt, Homo sapiens
  misc_RNA (1)...(19): siRNA sense strand
gaagggaaagcaucuggaa

SEQ ID NO: 1075651 - RNA, 19 nt, Homo sapiens
  misc_RNA (1)...(19): siRNA sense strand
gagucuaccugcccuaugu

SEQ ID NO: 1075652 - RNA, 19 nt, Homo sapiens
  misc_RNA (1)...(19): siRNA sense strand
aauggaggcucgaagugua

SEQ ID NO: 1075653 - RNA, 19 nt, Homo sapiens
  misc_RNA (1)...(19): siRNA sense strand
gcacaugaagcaccaguuc

SEQ ID NO: 1075654 - RNA, 19 nt, Homo sapiens
  misc_RNA (1)...(19): siRNA sense strand
ggcccacgcugucuuccua

SEQ ID NO: 1075655 - RNA, 19 nt, Homo sapiens
  misc_RNA (1)...(19): siRNA sense strand
ggacaaggaggucaucagu

SEQ ID NO: 1075656 - RNA, 19 nt, Homo sapiens
  misc_RNA (1)...(19): siRNA sense strand
gagcaagaagauccacuuu

SEQ ID NO: 1075657 - RNA, 19 nt, Homo sapiens
  misc_RNA (1)...(19): siRNA sense strand
ggacaagcaguggcuguuu

SEQ ID NO: 1075658 - RNA, 19 nt, Homo sapiens
  misc_RNA (1)...(19): siRNA sense strand
ggacagcacagggcucuga

SEQ ID NO: 1075659 - RNA, 19 nt, Homo sapiens
  misc_RNA (1)...(19): siRNA sense strand
cagucucgauuccuccuua

SEQ ID NO: 1075660 - RNA, 19 nt, Homo sapiens
  misc_RNA (1)...(19): siRNA sense strand
acagggcucugaagacgaa

SEQ ID NO: 1075661 - RNA, 19 nt, Homo sapiens
  misc_RNA (1)...(19): siRNA sense strand
ggacggaaagugagaagca

SEQ ID NO: 1075662 - RNA, 19 nt, Homo sapiens
  misc_RNA (1)...(19): siRNA sense strand
gagaauaagcgagucacaa

SEQ ID NO: 1075663 - RNA, 19 nt, Homo sapiens
  misc_RNA (1)...(19): siRNA sense strand
gggaaagcaucuggaaugg

SEQ ID NO: 1075664 - RNA, 19 nt, Homo sapiens
  misc_RNA (1)...(19): siRNA sense strand
ucaagauguugguggagaa

SEQ ID NO: 1075665 - RNA, 19 nt, Homo sapiens
  misc_RNA (1)...(19): siRNA sense strand
gaauggaggcucgaagugu

SEQ ID NO: 1075666 - RNA, 19 nt, Homo sapiens
  misc_RNA (1)...(19): siRNA sense strand
ugacccggcugcacucuuc

SEQ ID NO: 1075667 - RNA, 19 nt, Homo sapiens
  misc_RNA (1)...(19): siRNA sense strand
cuagggaaguuugccguuu

SEQ ID NO: 1075668 - RNA, 19 nt, Homo sapiens
  misc_RNA (1)...(19): siRNA sense strand
ggaauggaggcucgaagug

SEQ ID NO: 1075669 - RNA, 19 nt, Homo sapiens
  misc_RNA (1)...(19): siRNA sense strand
ggguugcuauggccauuau

SEQ ID NO: 1075670 - RNA, 19 nt, Homo sapiens
  misc_RNA (1)...(19): siRNA sense strand
uuaacuccguccucuauca

SEQ ID NO: 1075671 - RNA, 19 nt, Homo sapiens
  misc_RNA (1)...(19): siRNA sense strand
ucacccgccucaagauguu

SEQ ID NO: 1075672 - RNA, 19 nt, Homo sapiens
  misc_RNA (1)...(19): siRNA sense strand
gacaagcaguggcuguuuu

SEQ ID NO: 1075673 - RNA, 19 nt, Homo sapiens
  misc_RNA (1)...(19): siRNA sense strand
gagaagcagcgauggaucu

SEQ ID NO: 1075674 - RNA, 19 nt, Homo sapiens
  misc_RNA (1)...(19): siRNA sense strand
ggacagaggaacucaucca

SEQ ID NO: 1075675 - RNA, 19 nt, Homo sapiens
  misc_RNA (1)...(19): siRNA sense strand
ccccuuaccuccuuccuua

SEQ ID NO: 1075676 - RNA, 19 nt, Homo sapiens
  misc_RNA (1)...(19): siRNA sense strand
gaauaagcgagucacaagu

SEQ ID NO: 1075677 - RNA, 19 nt, Homo sapiens
  misc_RNA (1)...(19): siRNA sense strand
acgaagacauggccaccaa

SEQ ID NO: 1075678 - RNA, 19 nt, Homo sapiens
  misc_RNA (1)...(19): siRNA sense strand
gaucacccgccucaagaug

SEQ ID NO: 1075679 - RNA, 19 nt, Homo sapiens
  misc_RNA (1)...(19): siRNA sense strand
gaggacagaggaacucauc

SEQ ID NO: 1075680 - RNA, 19 nt, Homo sapiens
  misc_RNA (1)...(19): siRNA sense strand
gaaggagcuagggaaguuu

SEQ ID NO: 1075681 - RNA, 19 nt, Homo sapiens
  misc_RNA (1)...(19): siRNA sense strand
gcuaguguacaguccauga

SEQ ID NO: 1075682 - RNA, 19 nt, Homo sapiens
  misc_RNA (1)...(19): siRNA sense strand
cgauggaucucagccuugu

SEQ ID NO: 1075683 - RNA, 19 nt, Homo sapiens
  misc_RNA (1)...(19): siRNA sense strand
ccacuuugagggcaagauu

SEQ ID NO: 1075684 - RNA, 19 nt, Homo sapiens
  misc_RNA (1)...(19): siRNA sense strand
gcaagaugcggguguacca

SEQ ID NO: 1075685 - RNA, 19 nt, Homo sapiens
  misc_RNA (1)...(19): siRNA sense strand
gaagaggacagaggaacuc

SEQ ID NO: 1075686 - RNA, 19 nt, Homo sapiens
  misc_RNA (1)...(19): siRNA sense strand
gugcaaugcuaguguacag

SEQ ID NO: 1075687 - RNA, 19 nt, Homo sapiens
  misc_RNA (1)...(19): siRNA sense strand
cagcacagggcucugaaga

SEQ ID NO: 1075688 - RNA, 19 nt, Homo sapiens
  misc_RNA (1)...(19): siRNA sense strand
ccaggaggcucagauacag

SEQ ID NO: 1075689 - RNA, 19 nt, Homo sapiens
  misc_RNA (1)...(19): siRNA sense strand
ggaaagcaucuggaaugga

SEQ ID NO: 1075690 - RNA, 19 nt, Homo sapiens
  misc_RNA (1)...(19): siRNA sense strand
gcucgaaguguagagauga

SEQ ID NO: 1075691 - RNA, 19 nt, Homo sapiens
  misc_RNA (1)...(19): siRNA sense strand
ccaccaaggccuucaaugc

SEQ ID NO: 1075692 - RNA, 19 nt, Homo sapiens
  misc_RNA (1)...(19): siRNA sense strand
agaauaagcgagucacaag

SEQ ID NO: 1075693 - RNA, 19 nt, Homo sapiens
  misc_RNA (1)...(19): siRNA sense strand
ucacaagugccaccagcaa

SEQ ID NO: 1075694 - RNA, 19 nt, Homo sapiens
  misc_RNA (1)...(19): siRNA sense strand
agggaaagcaucuggaaug

SEQ ID NO: 1075695 - RNA, 19 nt, Homo sapiens
  misc_RNA (1)...(19): siRNA sense strand
gguucggcauggagaguug

SEQ ID NO: 1075696 - RNA, 19 nt, Homo sapiens
  misc_RNA (1)...(19): siRNA sense strand
aauaagcgagucacaagug

SEQ ID NO: 1075697 - RNA, 19 nt, Homo sapiens
  misc_RNA (1)...(19): siRNA sense strand
ugcaggaggccaaguuuga

SEQ ID NO: 1075698 - RNA, 19 nt, Homo sapiens
  misc_RNA (1)...(19): siRNA sense strand
cagguucaguguguuagga

SEQ ID NO: 1075699 - RNA, 19 nt, Homo sapiens
  misc_RNA (1)...(19): siRNA sense strand
ucauccaccugagcaagaa

SEQ ID NO: 1075700 - RNA, 19 nt, Homo sapiens
  misc_RNA (1)...(19): siRNA sense strand
gcugcaggaggccaaguuu

SEQ ID NO: 1075701 - RNA, 19 nt, Homo sapiens
  misc_RNA (1)...(19): siRNA sense strand
ggagaauaagcgagucaca

SEQ ID NO: 1075702 - RNA, 19 nt, Homo sapiens
  misc_RNA (1)...(19): siRNA sense strand
ccaaacugcccgaggucaa

SEQ ID NO: 1075703 - RNA, 19 nt, Homo sapiens
  misc_RNA (1)...(19): siRNA sense strand
ccuuaacuccguccucuau

SEQ ID NO: 1075704 - RNA, 19 nt, Homo sapiens
  misc_RNA (1)...(19): siRNA sense strand
ccuggcagauggugagaag

SEQ ID NO: 1075705 - RNA, 19 nt, Homo sapiens
  misc_RNA (1)...(19): siRNA sense strand
ggcucgaaguguagagaug

SEQ ID NO: 1075706 - RNA, 19 nt, Homo sapiens
  misc_RNA (1)...(19): siRNA sense strand
cagucuaccuccaccucuu

SEQ ID NO: 1075707 - RNA, 19 nt, Homo sapiens
  misc_RNA (1)...(19): siRNA sense strand
caagaagauccacuuugag

SEQ ID NO: 1075708 - RNA, 19 nt, Homo sapiens
  misc_RNA (1)...(19): siRNA sense strand
aguguacaguccaugaaga

SEQ ID NO: 1075709 - RNA, 19 nt, Homo sapiens
  misc_RNA (1)...(19): siRNA sense strand
cacaagugccaccagcaaa

SEQ ID NO: 1075710 - RNA, 19 nt, Homo sapiens
  misc_RNA (1)...(19): siRNA sense strand
uagggaaguuugccguuuu

SEQ ID NO: 1075711 - RNA, 19 nt, Homo sapiens
  misc_RNA (1)...(19): siRNA sense strand
uuucguccaugccaagaug

SEQ ID NO: 1075712 - RNA, 19 nt, Homo sapiens
  misc_RNA (1)...(19): siRNA sense strand
gaaacaagcucuggaagaa

SEQ ID NO: 1075713 - RNA, 19 nt, Homo sapiens
  misc_RNA (1)...(19): siRNA sense strand
ggaguuaacuucucaguga

SEQ ID NO: 1075714 - RNA, 19 nt, Homo sapiens
  misc_RNA (1)...(19): siRNA sense strand
gaaauaccaugcacuuuga

SEQ ID NO: 1075715 - RNA, 19 nt, Homo sapiens
  misc_RNA (1)...(19): siRNA sense strand
aagaauagcucugagauua

SEQ ID NO: 1075716 - RNA, 19 nt, Homo sapiens
  misc_RNA (1)...(19): siRNA sense strand
ggaaauggcugcagguuca

SEQ ID NO: 1075717 - RNA, 19 nt, Homo sapiens
  misc_RNA (1)...(19): siRNA sense strand
cuacacaacucaauucuuu

SEQ ID NO: 1075718 - RNA, 19 nt, Homo sapiens
  misc_RNA (1)...(19): siRNA sense strand
gaacugaaauuacuauugc

SEQ ID NO: 1075719 - RNA, 19 nt, Homo sapiens
  misc_RNA (1)...(19): siRNA sense strand
caaugggacuccacaguua

SEQ ID NO: 1075720 - RNA, 19 nt, Homo sapiens
  misc_RNA (1)...(19): siRNA sense strand
caaagaagcacuugguuaa

SEQ ID NO: 1075721 - RNA, 19 nt, Homo sapiens
  misc_RNA (1)...(19): siRNA sense strand
caagaaagauccagaaguc

SEQ ID NO: 1075722 - RNA, 19 nt, Homo sapiens
  misc_RNA (1)...(19): siRNA sense strand
gaugaaacuuguagaaaug

SEQ ID NO: 1075723 - RNA, 19 nt, Homo sapiens
  misc_RNA (1)...(19): siRNA sense strand
caacauacagucaguuuaa

SEQ ID NO: 1075724 - RNA, 19 nt, Homo sapiens
  misc_RNA (1)...(19): siRNA sense strand
gaaaagaaccuacugaaaa

SEQ ID NO: 1075725 - RNA, 19 nt, Homo sapiens
  misc_RNA (1)...(19): siRNA sense strand
cugcaaacuuucagaauua

SEQ ID NO: 1075726 - RNA, 19 nt, Homo sapiens
  misc_RNA (1)...(19): siRNA sense strand
ggaaauaccaugcacuuug

SEQ ID NO: 1075727 - RNA, 19 nt, Homo sapiens
  misc_RNA (1)...(19): siRNA sense strand
ggagaaagaacaacacauu

SEQ ID NO: 1075728 - RNA, 19 nt, Homo sapiens
  misc_RNA (1)...(19): siRNA sense strand
cacaucagcucaagccuua

SEQ ID NO: 1075729 - RNA, 19 nt, Homo sapiens
  misc_RNA (1)...(19): siRNA sense strand
ucagaaaccuccacaccua

SEQ ID NO: 1075730 - RNA, 19 nt, Homo sapiens
  misc_RNA (1)...(19): siRNA sense strand
gaauacagagggaaguuua

SEQ ID NO: 1075731 - RNA, 19 nt, Homo sapiens
  misc_RNA (1)...(19): siRNA sense strand
guagagagccauauacaaa

SEQ ID NO: 1075732 - RNA, 19 nt, Homo sapiens
  misc_RNA (1)...(19): siRNA sense strand
ucaagaguuuccaaaguua

SEQ ID NO: 1075733 - RNA, 19 nt, Homo sapiens
  misc_RNA (1)...(19): siRNA sense strand
ggaagacccugauccugaa

SEQ ID NO: 1075734 - RNA, 19 nt, Homo sapiens
  misc_RNA (1)...(19): siRNA sense strand
agaaaggccucuacgcaua

SEQ ID NO: 1075735 - RNA, 19 nt, Homo sapiens
  misc_RNA (1)...(19): siRNA sense strand
gcacuagcagaaauaauua

SEQ ID NO: 1075736 - RNA, 19 nt, Homo sapiens
  misc_RNA (1)...(19): siRNA sense strand
aaacagagcuccaacaaaa

SEQ ID NO: 1075737 - RNA, 19 nt, Homo sapiens
  misc_RNA (1)...(19): siRNA sense strand
gagcuuuacuucucaguga

SEQ ID NO: 1075738 - RNA, 19 nt, Homo sapiens
  misc_RNA (1)...(19): siRNA sense strand
gaugaaacuuccagugcua

SEQ ID NO: 1075739 - RNA, 19 nt, Homo sapiens
  misc_RNA (1)...(19): siRNA sense strand
ucagugaacuuauggaaga

SEQ ID NO: 1075740 - RNA, 19 nt, Homo sapiens
  misc_RNA (1)...(19): siRNA sense strand
gcuguucccuuccagauuu

SEQ ID NO: 1075741 - RNA, 19 nt, Homo sapiens
  misc_RNA (1)...(19): siRNA sense strand
aaaggaagaugacaagaga

SEQ ID NO: 1075742 - RNA, 19 nt, Homo sapiens
  misc_RNA (1)...(19): siRNA sense strand
gcacaaagaauagcucuga

SEQ ID NO: 1075743 - RNA, 19 nt, Homo sapiens
  misc_RNA (1)...(19): siRNA sense strand
ggcaacuucuggaacauua

SEQ ID NO: 1075744 - RNA, 19 nt, Homo sapiens
  misc_RNA (1)...(19): siRNA sense strand
gaacugggucugcaagaaa

SEQ ID NO: 1075745 - RNA, 19 nt, Homo sapiens
  misc_RNA (1)...(19): siRNA sense strand
ccaaagggaacugaaauua

SEQ ID NO: 1075746 - RNA, 19 nt, Homo sapiens
  misc_RNA (1)...(19): siRNA sense strand
ucagugaacuccaacuuga

SEQ ID NO: 1075747 - RNA, 19 nt, Homo sapiens
  misc_RNA (1)...(19): siRNA sense strand
acagagaacuuuccacuca

SEQ ID NO: 1075748 - RNA, 19 nt, Homo sapiens
  misc_RNA (1)...(19): siRNA sense strand
gaagagcccagaaacuaaa

SEQ ID NO: 1075749 - RNA, 19 nt, Homo sapiens
  misc_RNA (1)...(19): siRNA sense strand
gaaaggccucuacgcauaa

SEQ ID NO: 1075750 - RNA, 19 nt, Homo sapiens
  misc_RNA (1)...(19): siRNA sense strand
gaagaugacaagagaagaa

SEQ ID NO: 1075751 - RNA, 19 nt, Homo sapiens
  misc_RNA (1)...(19): siRNA sense strand
aagcauggauggaucgaua

SEQ ID NO: 1075752 - RNA, 19 nt, Homo sapiens
  misc_RNA (1)...(19): siRNA sense strand
ggaaguuuaugcugagaga

SEQ ID NO: 1075753 - RNA, 19 nt, Homo sapiens
  misc_RNA (1)...(19): siRNA sense strand
gcaggcaacuucuggaaca

SEQ ID NO: 1075754 - RNA, 19 nt, Homo sapiens
  misc_RNA (1)...(19): siRNA sense strand
caacaccagcuacaguuua

SEQ ID NO: 1075755 - RNA, 19 nt, Homo sapiens
  misc_RNA (1)...(19): siRNA sense strand
auacacagauugucaguga

SEQ ID NO: 1075756 - RNA, 19 nt, Homo sapiens
  misc_RNA (1)...(19): siRNA sense strand
guaaugaaguagaaaugga

SEQ ID NO: 1075757 - RNA, 19 nt, Homo sapiens
  misc_RNA (1)...(19): siRNA sense strand
gagaaagaacaacacauuu

SEQ ID NO: 1075758 - RNA, 19 nt, Homo sapiens
  misc_RNA (1)...(19): siRNA sense strand
cuacaggccucaucauuca

SEQ ID NO: 1075759 - RNA, 19 nt, Homo sapiens
  misc_RNA (1)...(19): siRNA sense strand
gagggaggcacaaagaaua

SEQ ID NO: 1075760 - RNA, 19 nt, Homo sapiens
  misc_RNA (1)...(19): siRNA sense strand
gcacuugguuaaugaaugg

SEQ ID NO: 1075761 - RNA, 19 nt, Homo sapiens
  misc_RNA (1)...(19): siRNA sense strand
caauagaaccagaaacuga

SEQ ID NO: 1075762 - RNA, 19 nt, Homo sapiens
  misc_RNA (1)...(19): siRNA sense strand
gaacaagucagagaaagga

SEQ ID NO: 1075763 - RNA, 19 nt, Homo sapiens
  misc_RNA (1)...(19): siRNA sense strand
gaagaaugaaccagaaguu

SEQ ID NO: 1075764 - RNA, 19 nt, Homo sapiens
  misc_RNA (1)...(19): siRNA sense strand
gaaauaaagagacgcacuu

SEQ ID NO: 1075765 - RNA, 19 nt, Homo sapiens
  misc_RNA (1)...(19): siRNA sense strand
gaagagaacaagcuuugga

SEQ ID NO: 1075766 - RNA, 19 nt, Homo sapiens
  misc_RNA (1)...(19): siRNA sense strand
ggaacauuauuuacacaga

SEQ ID NO: 1075767 - RNA, 19 nt, Homo sapiens
  misc_RNA (1)...(19): siRNA sense strand
ccagauacuucucaaaaua

SEQ ID NO: 1075768 - RNA, 19 nt, Homo sapiens
  misc_RNA (1)...(19): siRNA sense strand
ggacuguuaaugacaauuu

SEQ ID NO: 1075769 - RNA, 19 nt, Homo sapiens
  misc_RNA (1)...(19): siRNA sense strand
ggguucagcuccagagauu

SEQ ID NO: 1075770 - RNA, 19 nt, Homo sapiens
  misc_RNA (1)...(19): siRNA sense strand
agaaaggaguuaucagaga

SEQ ID NO: 1075771 - RNA, 19 nt, Homo sapiens
  misc_RNA (1)...(19): siRNA sense strand
uacagauccugaaguguua

SEQ ID NO: 1075772 - RNA, 19 nt, Homo sapiens
  misc_RNA (1)...(19): siRNA sense strand
auaaauguccuaccaagua

SEQ ID NO: 1075773 - RNA, 19 nt, Homo sapiens
  misc_RNA (1)...(19): siRNA sense strand
gcucugagauuaggcaaug

SEQ ID NO: 1075774 - RNA, 19 nt, Homo sapiens
  misc_RNA (1)...(19): siRNA sense strand
gaaguuaugguacugaugu

SEQ ID NO: 1075775 - RNA, 19 nt, Homo sapiens
  misc_RNA (1)...(19): siRNA sense strand
caucaaggaccuccacuuu

SEQ ID NO: 1075776 - RNA, 19 nt, Homo sapiens
  misc_RNA (1)...(19): siRNA sense strand
gguagucuuucucaacaaa

SEQ ID NO: 1075777 - RNA, 19 nt, Homo sapiens
  misc_RNA (1)...(19): siRNA sense strand
ccacuacuauuaaaugaca

SEQ ID NO: 1075778 - RNA, 19 nt, Homo sapiens
  misc_RNA (1)...(19): siRNA sense strand
ggaaccauacaucuuuaua

SEQ ID NO: 1075779 - RNA, 19 nt, Homo sapiens
  misc_RNA (1)...(19): siRNA sense strand
gaggauggaaguuauggua

SEQ ID NO: 1075780 - RNA, 19 nt, Homo sapiens
  misc_RNA (1)...(19): siRNA sense strand
ggacagauuccaauucaca

SEQ ID NO: 1075781 - RNA, 19 nt, Homo sapiens
  misc_RNA (1)...(19): siRNA sense strand
ugagaagaaugaaccagaa

SEQ ID NO: 1075782 - RNA, 19 nt, Homo sapiens
  misc_RNA (1)...(19): siRNA sense strand
acaaagaagcacuugguua

SEQ ID NO: 1075783 - RNA, 19 nt, Homo sapiens
  misc_RNA (1)...(19): siRNA sense strand
ggaacugaaauuacuauug

SEQ ID NO: 1075784 - RNA, 19 nt, Homo sapiens
  misc_RNA (1)...(19): siRNA sense strand
cuacacaucauaccacuuu

SEQ ID NO: 1075785 - RNA, 19 nt, Homo sapiens
  misc_RNA (1)...(19): siRNA sense strand
ggucgcauauucauucuca

SEQ ID NO: 1075786 - RNA, 19 nt, Homo sapiens
  misc_RNA (1)...(19): siRNA sense strand
gcaacacucuguagcacau

SEQ ID NO: 1075787 - RNA, 19 nt, Homo sapiens
  misc_RNA (1)...(19): siRNA sense strand
gcaacauacagucaguuua

SEQ ID NO: 1075788 - RNA, 19 nt, Homo sapiens
  misc_RNA (1)...(19): siRNA sense strand
uagauucgguuuacucaga

SEQ ID NO: 1075789 - RNA, 19 nt, Homo sapiens
  misc_RNA (1)...(19): siRNA sense strand
gaaaagagagagaaaagaa

SEQ ID NO: 1075790 - RNA, 19 nt, Homo sapiens
  misc_RNA (1)...(19): siRNA sense strand
gcagauugcagaaaggaaa

SEQ ID NO: 1075791 - RNA, 19 nt, Homo sapiens
  misc_RNA (1)...(19): siRNA sense strand
ggacugugcaugccucaaa

SEQ ID NO: 1075792 - RNA, 19 nt, Homo sapiens
  misc_RNA (1)...(19): siRNA sense strand
gaaguaggcauauuuacca

SEQ ID NO: 1075793 - RNA, 19 nt, Homo sapiens
  misc_RNA (1)...(19): siRNA sense strand
ucacaucauucacacaguu

SEQ ID NO: 1075794 - RNA, 19 nt, Homo sapiens
  misc_RNA (1)...(19): siRNA sense strand
agaagcacuugguuaauga

SEQ ID NO: 1075795 - RNA, 19 nt, Homo sapiens
  misc_RNA (1)...(19): siRNA sense strand
guaaagauacacagauugu

SEQ ID NO: 1075796 - RNA, 19 nt, Homo sapiens
  misc_RNA (1)...(19): siRNA sense strand
cuaggaauuuggauaaaga

SEQ ID NO: 1075797 - RNA, 19 nt, Homo sapiens
  misc_RNA (1)...(19): siRNA sense strand
gaugauggauacaugaucu

SEQ ID NO: 1075798 - RNA, 19 nt, Homo sapiens
  misc_RNA (1)...(19): siRNA sense strand
caucaguccuuauuagcaa

SEQ ID NO: 1075799 - RNA, 19 nt, Homo sapiens
  misc_RNA (1)...(19): siRNA sense strand
ucacacaguuacauugguu

SEQ ID NO: 1075800 - RNA, 19 nt, Homo sapiens
  misc_RNA (1)...(19): siRNA sense strand
caacuggacucgacucacu

SEQ ID NO: 1075801 - RNA, 19 nt, Homo sapiens
  misc_RNA (1)...(19): siRNA sense strand
cagcagagacgucauacuu

SEQ ID NO: 1075802 - RNA, 19 nt, Homo sapiens
  misc_RNA (1)...(19): siRNA sense strand
aaagggaacugaaauuacu

SEQ ID NO: 1075803 - RNA, 19 nt, Homo sapiens
  misc_RNA (1)...(19): siRNA sense strand
gagauuaggcaauggaaau

SEQ ID NO: 1075804 - RNA, 19 nt, Homo sapiens
  misc_RNA (1)...(19): siRNA sense strand
gauguaaccaggugcauau

SEQ ID NO: 1075805 - RNA, 19 nt, Homo sapiens
  misc_RNA (1)...(19): siRNA sense strand
ccacccaccucaucaagga

SEQ ID NO: 1075806 - RNA, 19 nt, Homo sapiens
  misc_RNA (1)...(19): siRNA sense strand
ggaguuaucagagagcuuu

SEQ ID NO: 1075807 - RNA, 19 nt, Homo sapiens
  misc_RNA (1)...(19): siRNA sense strand
gagacgcacuuauagucaa

SEQ ID NO: 1075808 - RNA, 19 nt, Homo sapiens
  misc_RNA (1)...(19): siRNA sense strand
gucagcauguguucagaua

SEQ ID NO: 1075809 - RNA, 19 nt, Homo sapiens
  misc_RNA (1)...(19): siRNA sense strand
cccagaaacuaaacaaaga

SEQ ID NO: 1075810 - RNA, 19 nt, Homo sapiens
  misc_RNA (1)...(19): siRNA sense strand
gaauagcucugagauuagg

SEQ ID NO: 1075811 - RNA, 19 nt, Homo sapiens
  misc_RNA (1)...(19): siRNA sense strand
guaaccaggugcauaugug

SEQ ID NO: 1075812 - RNA, 19 nt, Homo sapiens
  misc_RNA (1)...(19): siRNA sense strand
gaaacaagcucuggaagaa

SEQ ID NO: 1075813 - RNA, 19 nt, Homo sapiens
  misc_RNA (1)...(19): siRNA sense strand
ggaguuaacuucucaguga

SEQ ID NO: 1075814 - RNA, 19 nt, Homo sapiens
  misc_RNA (1)...(19): siRNA sense strand
gaaauaccaugcacuuuga

SEQ ID NO: 1075815 - RNA, 19 nt, Homo sapiens
  misc_RNA (1)...(19): siRNA sense strand
aagaauagcucugagauua

SEQ ID NO: 1075816 - RNA, 19 nt, Homo sapiens
  misc_RNA (1)...(19): siRNA sense strand
ggaaauggcugcagguuca

SEQ ID NO: 1075817 - RNA, 19 nt, Homo sapiens
  misc_RNA (1)...(19): siRNA sense strand
cuacacaacucaauucuuu

SEQ ID NO: 1075818 - RNA, 19 nt, Homo sapiens
  misc_RNA (1)...(19): siRNA sense strand
gaacugaaauuacuauugc

SEQ ID NO: 1075819 - RNA, 19 nt, Homo sapiens
  misc_RNA (1)...(19): siRNA sense strand
caaugggacuccacaguua

SEQ ID NO: 1075820 - RNA, 19 nt, Homo sapiens
  misc_RNA (1)...(19): siRNA sense strand
caaagaagcacuugguuaa

SEQ ID NO: 1075821 - RNA, 19 nt, Homo sapiens
  misc_RNA (1)...(19): siRNA sense strand
caagaaagauccagaaguc

SEQ ID NO: 1075822 - RNA, 19 nt, Homo sapiens
  misc_RNA (1)...(19): siRNA sense strand
gaugaaacuuguagaaaug

SEQ ID NO: 1075823 - RNA, 19 nt, Homo sapiens
  misc_RNA (1)...(19): siRNA sense strand
caacauacagucaguuuaa

SEQ ID NO: 1075824 - RNA, 19 nt, Homo sapiens
  misc_RNA (1)...(19): siRNA sense strand
gaaaagaaccuacugaaaa

SEQ ID NO: 1075825 - RNA, 19 nt, Homo sapiens
  misc_RNA (1)...(19): siRNA sense strand
cugcaaacuuucagaauua

SEQ ID NO: 1075826 - RNA, 19 nt, Homo sapiens
  misc_RNA (1)...(19): siRNA sense strand
ggaaauaccaugcacuuug

SEQ ID NO: 1075827 - RNA, 19 nt, Homo sapiens
  misc_RNA (1)...(19): siRNA sense strand
ggagaaagaacaacacauu

SEQ ID NO: 1075828 - RNA, 19 nt, Homo sapiens
  misc_RNA (1)...(19): siRNA sense strand
cacaucagcucaagccuua

SEQ ID NO: 1075829 - RNA, 19 nt, Homo sapiens
  misc_RNA (1)...(19): siRNA sense strand
ucagaaaccuccacaccua

SEQ ID NO: 1075830 - RNA, 19 nt, Homo sapiens
  misc_RNA (1)...(19): siRNA sense strand
gaauacagagggaaguuua

SEQ ID NO: 1075831 - RNA, 19 nt, Homo sapiens
  misc_RNA (1)...(19): siRNA sense strand
guagagagccauauacaaa

SEQ ID NO: 1075832 - RNA, 19 nt, Homo sapiens
  misc_RNA (1)...(19): siRNA sense strand
ucaagaguuuccaaaguua

SEQ ID NO: 1075833 - RNA, 19 nt, Homo sapiens
  misc_RNA (1)...(19): siRNA sense strand
ggaagacccugauccugaa

SEQ ID NO: 1075834 - RNA, 19 nt, Homo sapiens
  misc_RNA (1)...(19): siRNA sense strand
agaaaggccucuacgcaua

SEQ ID NO: 1075835 - RNA, 19 nt, Homo sapiens
  misc_RNA (1)...(19): siRNA sense strand
gcacuagcagaaauaauua

SEQ ID NO: 1075836 - RNA, 19 nt, Homo sapiens
  misc_RNA (1)...(19): siRNA sense strand
aaacagagcuccaacaaaa

SEQ ID NO: 1075837 - RNA, 19 nt, Homo sapiens
  misc_RNA (1)...(19): siRNA sense strand
gagcuuuacuucucaguga

SEQ ID NO: 1075838 - RNA, 19 nt, Homo sapiens
  misc_RNA (1)...(19): siRNA sense strand
gaugaaacuuccagugcua

SEQ ID NO: 1075839 - RNA, 19 nt, Homo sapiens
  misc_RNA (1)...(19): siRNA sense strand
ucagugaacuuauggaaga

SEQ ID NO: 1075840 - RNA, 19 nt, Homo sapiens
  misc_RNA (1)...(19): siRNA sense strand
gcuguucccuuccagauuu

SEQ ID NO: 1075841 - RNA, 19 nt, Homo sapiens
  misc_RNA (1)...(19): siRNA sense strand
aaaggaagaugacaagaga

SEQ ID NO: 1075842 - RNA, 19 nt, Homo sapiens
  misc_RNA (1)...(19): siRNA sense strand
gcacaaagaauagcucuga

SEQ ID NO: 1075843 - RNA, 19 nt, Homo sapiens
  misc_RNA (1)...(19): siRNA sense strand
ggcaacuucuggaacauua

SEQ ID NO: 1075844 - RNA, 19 nt, Homo sapiens
  misc_RNA (1)...(19): siRNA sense strand
gaacugggucugcaagaaa

SEQ ID NO: 1075845 - RNA, 19 nt, Homo sapiens
  misc_RNA (1)...(19): siRNA sense strand
ccaaagggaacugaaauua

SEQ ID NO: 1075846 - RNA, 19 nt, Homo sapiens
  misc_RNA (1)...(19): siRNA sense strand
ucagugaacuccaacuuga

SEQ ID NO: 1075847 - RNA, 19 nt, Homo sapiens
  misc_RNA (1)...(19): siRNA sense strand
acagagaacuuuccacuca

SEQ ID NO: 1075848 - RNA, 19 nt, Homo sapiens
  misc_RNA (1)...(19): siRNA sense strand
gaagagcccagaaacuaaa

SEQ ID NO: 1075849 - RNA, 19 nt, Homo sapiens
  misc_RNA (1)...(19): siRNA sense strand
gaaaggccucuacgcauaa

SEQ ID NO: 1075850 - RNA, 19 nt, Homo sapiens
  misc_RNA (1)...(19): siRNA sense strand
gaagaugacaagagaagaa

SEQ ID NO: 1075851 - RNA, 19 nt, Homo sapiens
  misc_RNA (1)...(19): siRNA sense strand
aagcauggauggaucgaua

SEQ ID NO: 1075852 - RNA, 19 nt, Homo sapiens
  misc_RNA (1)...(19): siRNA sense strand
ggaaguuuaugcugagaga

SEQ ID NO: 1075853 - RNA, 19 nt, Homo sapiens
  misc_RNA (1)...(19): siRNA sense strand
gcaggcaacuucuggaaca

SEQ ID NO: 1075854 - RNA, 19 nt, Homo sapiens
  misc_RNA (1)...(19): siRNA sense strand
caacaccagcuacaguuua

SEQ ID NO: 1075855 - RNA, 19 nt, Homo sapiens
  misc_RNA (1)...(19): siRNA sense strand
auacacagauugucaguga

SEQ ID NO: 1075856 - RNA, 19 nt, Homo sapiens
  misc_RNA (1)...(19): siRNA sense strand
guaaugaaguagaaaugga

SEQ ID NO: 1075857 - RNA, 19 nt, Homo sapiens
  misc_RNA (1)...(19): siRNA sense strand
gagaaagaacaacacauuu

SEQ ID NO: 1075858 - RNA, 19 nt, Homo sapiens
  misc_RNA (1)...(19): siRNA sense strand
cuacaggccucaucauuca

SEQ ID NO: 1075859 - RNA, 19 nt, Homo sapiens
  misc_RNA (1)...(19): siRNA sense strand
gagggaggcacaaagaaua

SEQ ID NO: 1075860 - RNA, 19 nt, Homo sapiens
  misc_RNA (1)...(19): siRNA sense strand
gcacuugguuaaugaaugg

SEQ ID NO: 1075861 - RNA, 19 nt, Homo sapiens
  misc_RNA (1)...(19): siRNA sense strand
caauagaaccagaaacuga

SEQ ID NO: 1075862 - RNA, 19 nt, Homo sapiens
  misc_RNA (1)...(19): siRNA sense strand
gaacaagucagagaaagga

SEQ ID NO: 1075863 - RNA, 19 nt, Homo sapiens
  misc_RNA (1)...(19): siRNA sense strand
gaagaaugaaccagaaguu

SEQ ID NO: 1075864 - RNA, 19 nt, Homo sapiens
  misc_RNA (1)...(19): siRNA sense strand
gaaauaaagagacgcacuu

SEQ ID NO: 1075865 - RNA, 19 nt, Homo sapiens
  misc_RNA (1)...(19): siRNA sense strand
gaagagaacaagcuuugga

SEQ ID NO: 1075866 - RNA, 19 nt, Homo sapiens
  misc_RNA (1)...(19): siRNA sense strand
ggaacauuauuuacacaga

SEQ ID NO: 1075867 - RNA, 19 nt, Homo sapiens
  misc_RNA (1)...(19): siRNA sense strand
ccagauacuucucaaaaua

SEQ ID NO: 1075868 - RNA, 19 nt, Homo sapiens
  misc_RNA (1)...(19): siRNA sense strand
ggacuguuaaugacaauuu

SEQ ID NO: 1075869 - RNA, 19 nt, Homo sapiens
  misc_RNA (1)...(19): siRNA sense strand
ggguucagcuccagagauu

SEQ ID NO: 1075870 - RNA, 19 nt, Homo sapiens
  misc_RNA (1)...(19): siRNA sense strand
agaaaggaguuaucagaga

SEQ ID NO: 1075871 - RNA, 19 nt, Homo sapiens
  misc_RNA (1)...(19): siRNA sense strand
uacagauccugaaguguua

SEQ ID NO: 1075872 - RNA, 19 nt, Homo sapiens
  misc_RNA (1)...(19): siRNA sense strand
auaaauguccuaccaagua

SEQ ID NO: 1075873 - RNA, 19 nt, Homo sapiens
  misc_RNA (1)...(19): siRNA sense strand
gcucugagauuaggcaaug

SEQ ID NO: 1075874 - RNA, 19 nt, Homo sapiens
  misc_RNA (1)...(19): siRNA sense strand
gaaguuaugguacugaugu

SEQ ID NO: 1075875 - RNA, 19 nt, Homo sapiens
  misc_RNA (1)...(19): siRNA sense strand
caucaaggaccuccacuuu

SEQ ID NO: 1075876 - RNA, 19 nt, Homo sapiens
  misc_RNA (1)...(19): siRNA sense strand
gguagucuuucucaacaaa

SEQ ID NO: 1075877 - RNA, 19 nt, Homo sapiens
  misc_RNA (1)...(19): siRNA sense strand
ccacuacuauuaaaugaca

SEQ ID NO: 1075878 - RNA, 19 nt, Homo sapiens
  misc_RNA (1)...(19): siRNA sense strand
ggaaccauacaucuuuaua

SEQ ID NO: 1075879 - RNA, 19 nt, Homo sapiens
  misc_RNA (1)...(19): siRNA sense strand
gaggauggaaguuauggua

SEQ ID NO: 1075880 - RNA, 19 nt, Homo sapiens
  misc_RNA (1)...(19): siRNA sense strand
ggacagauuccaauucaca

SEQ ID NO: 1075881 - RNA, 19 nt, Homo sapiens
  misc_RNA (1)...(19): siRNA sense strand
ugagaagaaugaaccagaa

SEQ ID NO: 1075882 - RNA, 19 nt, Homo sapiens
  misc_RNA (1)...(19): siRNA sense strand
acaaagaagcacuugguua

SEQ ID NO: 1075883 - RNA, 19 nt, Homo sapiens
  misc_RNA (1)...(19): siRNA sense strand
ggaacugaaauuacuauug

SEQ ID NO: 1075884 - RNA, 19 nt, Homo sapiens
  misc_RNA (1)...(19): siRNA sense strand
cuacacaucauaccacuuu

SEQ ID NO: 1075885 - RNA, 19 nt, Homo sapiens
  misc_RNA (1)...(19): siRNA sense strand
ggucgcauauucauucuca

SEQ ID NO: 1075886 - RNA, 19 nt, Homo sapiens
  misc_RNA (1)...(19): siRNA sense strand
gcaacacucuguagcacau

SEQ ID NO: 1075887 - RNA, 19 nt, Homo sapiens
  misc_RNA (1)...(19): siRNA sense strand
gcaacauacagucaguuua

SEQ ID NO: 1075888 - RNA, 19 nt, Homo sapiens
  misc_RNA (1)...(19): siRNA sense strand
uagauucgguuuacucaga

SEQ ID NO: 1075889 - RNA, 19 nt, Homo sapiens
  misc_RNA (1)...(19): siRNA sense strand
gaaaagagagagaaaagaa

SEQ ID NO: 1075890 - RNA, 19 nt, Homo sapiens
  misc_RNA (1)...(19): siRNA sense strand
gcagauugcagaaaggaaa

SEQ ID NO: 1075891 - RNA, 19 nt, Homo sapiens
  misc_RNA (1)...(19): siRNA sense strand
ggacugugcaugccucaaa

SEQ ID NO: 1075892 - RNA, 19 nt, Homo sapiens
  misc_RNA (1)...(19): siRNA sense strand
gaaguaggcauauuuacca

SEQ ID NO: 1075893 - RNA, 19 nt, Homo sapiens
  misc_RNA (1)...(19): siRNA sense strand
ucacaucauucacacaguu

SEQ ID NO: 1075894 - RNA, 19 nt, Homo sapiens
  misc_RNA (1)...(19): siRNA sense strand
agaagcacuugguuaauga

SEQ ID NO: 1075895 - RNA, 19 nt, Homo sapiens
  misc_RNA (1)...(19): siRNA sense strand
guaaagauacacagauugu

SEQ ID NO: 1075896 - RNA, 19 nt, Homo sapiens
  misc_RNA (1)...(19): siRNA sense strand
cuaggaauuuggauaaaga

SEQ ID NO: 1075897 - RNA, 19 nt, Homo sapiens
  misc_RNA (1)...(19): siRNA sense strand
gaugauggauacaugaucu

SEQ ID NO: 1075898 - RNA, 19 nt, Homo sapiens
  misc_RNA (1)...(19): siRNA sense strand
caucaguccuuauuagcaa

SEQ ID NO: 1075899 - RNA, 19 nt, Homo sapiens
  misc_RNA (1)...(19): siRNA sense strand
ucacacaguuacauugguu

SEQ ID NO: 1075900 - RNA, 19 nt, Homo sapiens
  misc_RNA (1)...(19): siRNA sense strand
caacuggacucgacucacu

SEQ ID NO: 1075901 - RNA, 19 nt, Homo sapiens
  misc_RNA (1)...(19): siRNA sense strand
cagcagagacgucauacuu

SEQ ID NO: 1075902 - RNA, 19 nt, Homo sapiens
  misc_RNA (1)...(19): siRNA sense strand
aaagggaacugaaauuacu

SEQ ID NO: 1075903 - RNA, 19 nt, Homo sapiens
  misc_RNA (1)...(19): siRNA sense strand
gagauuaggcaauggaaau

SEQ ID NO: 1075904 - RNA, 19 nt, Homo sapiens
  misc_RNA (1)...(19): siRNA sense strand
gauguaaccaggugcauau

SEQ ID NO: 1075905 - RNA, 19 nt, Homo sapiens
  misc_RNA (1)...(19): siRNA sense strand
ccacccaccucaucaagga

SEQ ID NO: 1075906 - RNA, 19 nt, Homo sapiens
  misc_RNA (1)...(19): siRNA sense strand
ggaguuaucagagagcuuu

SEQ ID NO: 1075907 - RNA, 19 nt, Homo sapiens
  misc_RNA (1)...(19): siRNA sense strand
gagacgcacuuauagucaa

SEQ ID NO: 1075908 - RNA, 19 nt, Homo sapiens
  misc_RNA (1)...(19): siRNA sense strand
gucagcauguguucagaua

SEQ ID NO: 1075909 - RNA, 19 nt, Homo sapiens
  misc_RNA (1)...(19): siRNA sense strand
cccagaaacuaaacaaaga

SEQ ID NO: 1075910 - RNA, 19 nt, Homo sapiens
  misc_RNA (1)...(19): siRNA sense strand
gaauagcucugagauuagg

SEQ ID NO: 1075911 - RNA, 19 nt, Homo sapiens
  misc_RNA (1)...(19): siRNA sense strand
guaaccaggugcauaugug

SEQ ID NO: 1075912 - RNA, 19 nt, Homo sapiens
  misc_RNA (1)...(19): siRNA sense strand
ccacucagcucuccaagua

SEQ ID NO: 1075913 - RNA, 19 nt, Homo sapiens
  misc_RNA (1)...(19): siRNA sense strand
gaugaucccuauuuccaua

SEQ ID NO: 1075914 - RNA, 19 nt, Homo sapiens
  misc_RNA (1)...(19): siRNA sense strand
gaacaguuauuaugaagag

SEQ ID NO: 1075915 - RNA, 19 nt, Homo sapiens
  misc_RNA (1)...(19): siRNA sense strand
gcauggacgucuucacuga

SEQ ID NO: 1075916 - RNA, 19 nt, Homo sapiens
  misc_RNA (1)...(19): siRNA sense strand
gcacagacuuuaggcauuc

SEQ ID NO: 1075917 - RNA, 19 nt, Homo sapiens
  misc_RNA (1)...(19): siRNA sense strand
gcaggaacuuugugaagga

SEQ ID NO: 1075918 - RNA, 19 nt, Homo sapiens
  misc_RNA (1)...(19): siRNA sense strand
ugaauagccugacccuaaa

SEQ ID NO: 1075919 - RNA, 19 nt, Homo sapiens
  misc_RNA (1)...(19): siRNA sense strand
gaaugagagugccaucuuc

SEQ ID NO: 1075920 - RNA, 19 nt, Homo sapiens
  misc_RNA (1)...(19): siRNA sense strand
uacagaaggucucacaauu

SEQ ID NO: 1075921 - RNA, 19 nt, Homo sapiens
  misc_RNA (1)...(19): siRNA sense strand
ucagauagcacagacuuua

SEQ ID NO: 1075922 - RNA, 19 nt, Homo sapiens
  misc_RNA (1)...(19): siRNA sense strand
gaaagcaauucaggaaaca

SEQ ID NO: 1075923 - RNA, 19 nt, Homo sapiens
  misc_RNA (1)...(19): siRNA sense strand
gaucccuauuuccauauua

SEQ ID NO: 1075924 - RNA, 19 nt, Homo sapiens
  misc_RNA (1)...(19): siRNA sense strand
ccauggugcuccuagauuu

SEQ ID NO: 1075925 - RNA, 19 nt, Homo sapiens
  misc_RNA (1)...(19): siRNA sense strand
gaaggaagccgaggagauc

SEQ ID NO: 1075926 - RNA, 19 nt, Homo sapiens
  misc_RNA (1)...(19): siRNA sense strand
cuaaugaugaucccuauuu

SEQ ID NO: 1075927 - RNA, 19 nt, Homo sapiens
  misc_RNA (1)...(19): siRNA sense strand
ggagauuccucagcucaug

SEQ ID NO: 1075928 - RNA, 19 nt, Homo sapiens
  misc_RNA (1)...(19): siRNA sense strand
ccagaaagcaauucaggaa

SEQ ID NO: 1075929 - RNA, 19 nt, Homo sapiens
  misc_RNA (1)...(19): siRNA sense strand
aggaaacaguggagaaauu

SEQ ID NO: 1075930 - RNA, 19 nt, Homo sapiens
  misc_RNA (1)...(19): siRNA sense strand
guccaucucuuugauauca

SEQ ID NO: 1075931 - RNA, 19 nt, Homo sapiens
  misc_RNA (1)...(19): siRNA sense strand
ggaaacaguggagaaauuc

SEQ ID NO: 1075932 - RNA, 19 nt, Homo sapiens
  misc_RNA (1)...(19): siRNA sense strand
gcgcauccaccgccuguuu

SEQ ID NO: 1075933 - RNA, 19 nt, Homo sapiens
  misc_RNA (1)...(19): siRNA sense strand
augaauagccugacccuaa

SEQ ID NO: 1075934 - RNA, 19 nt, Homo sapiens
  misc_RNA (1)...(19): siRNA sense strand
uaaugaugaucccuauuuc

SEQ ID NO: 1075935 - RNA, 19 nt, Homo sapiens
  misc_RNA (1)...(19): siRNA sense strand
ccggaacaguuauuaugaa

SEQ ID NO: 1075936 - RNA, 19 nt, Homo sapiens
  misc_RNA (1)...(19): siRNA sense strand
ccaguaccgugccaucuuc

SEQ ID NO: 1075937 - RNA, 19 nt, Homo sapiens
  misc_RNA (1)...(19): siRNA sense strand
gaccuuguuccguauuuaa

SEQ ID NO: 1075938 - RNA, 19 nt, Homo sapiens
  misc_RNA (1)...(19): siRNA sense strand
gaagaaaugaacuccuaca

SEQ ID NO: 1075939 - RNA, 19 nt, Homo sapiens
  misc_RNA (1)...(19): siRNA sense strand
ggccuucgcuaacuacaag

SEQ ID NO: 1075940 - RNA, 19 nt, Homo sapiens
  misc_RNA (1)...(19): siRNA sense strand
agaaagcaauucaggaaac

SEQ ID NO: 1075941 - RNA, 19 nt, Homo sapiens
  misc_RNA (1)...(19): siRNA sense strand
cagaaggucucacaauucc

SEQ ID NO: 1075942 - RNA, 19 nt, Homo sapiens
  misc_RNA (1)...(19): siRNA sense strand
ggagcuugcagccuacgua

SEQ ID NO: 1075943 - RNA, 19 nt, Homo sapiens
  misc_RNA (1)...(19): siRNA sense strand
ucucaacaauauucugguu

SEQ ID NO: 1075944 - RNA, 19 nt, Homo sapiens
  misc_RNA (1)...(19): siRNA sense strand
agaaaugaacuccuacaug

SEQ ID NO: 1075945 - RNA, 19 nt, Homo sapiens
  misc_RNA (1)...(19): siRNA sense strand
gcucagauagcacagacuu

SEQ ID NO: 1075946 - RNA, 19 nt, Homo sapiens
  misc_RNA (1)...(19): siRNA sense strand
ugaaugagagugccaucuu

SEQ ID NO: 1075947 - RNA, 19 nt, Homo sapiens
  misc_RNA (1)...(19): siRNA sense strand
agaccuuguuccguauuua

SEQ ID NO: 1075948 - RNA, 19 nt, Homo sapiens
  misc_RNA (1)...(19): siRNA sense strand
cuacagaaggucucacaau

SEQ ID NO: 1075949 - RNA, 19 nt, Homo sapiens
  misc_RNA (1)...(19): siRNA sense strand
gaagaccuuguuccguauu

SEQ ID NO: 1075950 - RNA, 19 nt, Homo sapiens
  misc_RNA (1)...(19): siRNA sense strand
ggaacaguuauuaugaaga

SEQ ID NO: 1075951 - RNA, 19 nt, Homo sapiens
  misc_RNA (1)...(19): siRNA sense strand
ccugcuuucucaacaauau

SEQ ID NO: 1075952 - RNA, 19 nt, Homo sapiens
  misc_RNA (1)...(19): siRNA sense strand
guguccaucucuuugauau

SEQ ID NO: 1075953 - RNA, 19 nt, Homo sapiens
  misc_RNA (1)...(19): siRNA sense strand
acagaaggucucacaauuc

SEQ ID NO: 1075954 - RNA, 19 nt, Homo sapiens
  misc_RNA (1)...(19): siRNA sense strand
cagaaagcaauucaggaaa

SEQ ID NO: 1075955 - RNA, 19 nt, Homo sapiens
  misc_RNA (1)...(19): siRNA sense strand
cggaacaguuauuaugaag

SEQ ID NO: 1075956 - RNA, 19 nt, Homo sapiens
  misc_RNA (1)...(19): siRNA sense strand
ggucaguuggcuccuguuu

SEQ ID NO: 1075957 - RNA, 19 nt, Homo sapiens
  misc_RNA (1)...(19): siRNA sense strand
ucggcgagguggaggauga

SEQ ID NO: 1075958 - RNA, 19 nt, Homo sapiens
  misc_RNA (1)...(19): siRNA sense strand
cuaaaccggcacacagaaa

SEQ ID NO: 1075959 - RNA, 19 nt, Homo sapiens
  misc_RNA (1)...(19): siRNA sense strand
ucaggaaacaguggagaaa

SEQ ID NO: 1075960 - RNA, 19 nt, Homo sapiens
  misc_RNA (1)...(19): siRNA sense strand
ucaguuggcuccuguuuuc

SEQ ID NO: 1075961 - RNA, 19 nt, Homo sapiens
  misc_RNA (1)...(19): siRNA sense strand
ucacugaggcugaguugag

SEQ ID NO: 1075962 - RNA, 19 nt, Homo sapiens
  misc_RNA (1)...(19): siRNA sense strand
gguaaccuagggcauguga

SEQ ID NO: 1075963 - RNA, 19 nt, Homo sapiens
  misc_RNA (1)...(19): siRNA sense strand
uaaaccggcacacagaaau

SEQ ID NO: 1075964 - RNA, 19 nt, Homo sapiens
  misc_RNA (1)...(19): siRNA sense strand
ggccuuccaucgcgcugaa

SEQ ID NO: 1075965 - RNA, 19 nt, Homo sapiens
  misc_RNA (1)...(19): siRNA sense strand
ggguggccaucagcacuuu

SEQ ID NO: 1075966 - RNA, 19 nt, Homo sapiens
  misc_RNA (1)...(19): siRNA sense strand
gaguugagggugaaguuuc

SEQ ID NO: 1075967 - RNA, 19 nt, Homo sapiens
  misc_RNA (1)...(19): siRNA sense strand
guccggaacaguuauuaug

SEQ ID NO: 1075968 - RNA, 19 nt, Homo sapiens
  misc_RNA (1)...(19): siRNA sense strand
aaaccggcacacagaaauu

SEQ ID NO: 1075969 - RNA, 19 nt, Homo sapiens
  misc_RNA (1)...(19): siRNA sense strand
cgacuuggccuucgcuaac

SEQ ID NO: 1075970 - RNA, 19 nt, Homo sapiens
  misc_RNA (1)...(19): siRNA sense strand
gcacacagaaauuuuggaa

SEQ ID NO: 1075971 - RNA, 19 nt, Homo sapiens
  misc_RNA (1)...(19): siRNA sense strand
caggaacuuugugaaggaa

SEQ ID NO: 1075972 - RNA, 19 nt, Homo sapiens
  misc_RNA (1)...(19): siRNA sense strand
gcugggugcuacagaaggu

SEQ ID NO: 1075973 - RNA, 19 nt, Homo sapiens
  misc_RNA (1)...(19): siRNA sense strand
ugaaggaagccgaggagau

SEQ ID NO: 1075974 - RNA, 19 nt, Homo sapiens
  misc_RNA (1)...(19): siRNA sense strand
gcgcauggacgucuucacu

SEQ ID NO: 1075975 - RNA, 19 nt, Homo sapiens
  misc_RNA (1)...(19): siRNA sense strand
aagaccuuguuccguauuu

SEQ ID NO: 1075976 - RNA, 19 nt, Homo sapiens
  misc_RNA (1)...(19): siRNA sense strand
ugaucccuauuuccauauu

SEQ ID NO: 1075977 - RNA, 19 nt, Homo sapiens
  misc_RNA (1)...(19): siRNA sense strand
guaccgugccaucuucuca

SEQ ID NO: 1075978 - RNA, 19 nt, Homo sapiens
  misc_RNA (1)...(19): siRNA sense strand
ugaagaggcccuggagcuu

SEQ ID NO: 1075979 - RNA, 19 nt, Homo sapiens
  misc_RNA (1)...(19): siRNA sense strand
cugguugccuucaaugauc

SEQ ID NO: 1075980 - RNA, 19 nt, Homo sapiens
  misc_RNA (1)...(19): siRNA sense strand
gccaagguaacuaaaauaa

SEQ ID NO: 1075981 - RNA, 19 nt, Homo sapiens
  misc_RNA (1)...(19): siRNA sense strand
uaaccuagggcaugugaac

SEQ ID NO: 1075982 - RNA, 19 nt, Homo sapiens
  misc_RNA (1)...(19): siRNA sense strand
aaauaauccuggccuucca

SEQ ID NO: 1075983 - RNA, 19 nt, Homo sapiens
  misc_RNA (1)...(19): siRNA sense strand
gccaguccaugcagcugau

SEQ ID NO: 1075984 - RNA, 19 nt, Homo sapiens
  misc_RNA (1)...(19): siRNA sense strand
gcuggagaccgaccuuuac

SEQ ID NO: 1075985 - RNA, 19 nt, Homo sapiens
  misc_RNA (1)...(19): siRNA sense strand
cgaauuagcugaggagaua

SEQ ID NO: 1075986 - RNA, 19 nt, Homo sapiens
  misc_RNA (1)...(19): siRNA sense strand
gagaagaccuauauagaga

SEQ ID NO: 1075987 - RNA, 19 nt, Homo sapiens
  misc_RNA (1)...(19): siRNA sense strand
gaggacaauuggcugauua

SEQ ID NO: 1075988 - RNA, 19 nt, Homo sapiens
  misc_RNA (1)...(19): siRNA sense strand
gcacaagacccgugaagaa

SEQ ID NO: 1075989 - RNA, 19 nt, Homo sapiens
  misc_RNA (1)...(19): siRNA sense strand
gggcugggauucugcauuu

SEQ ID NO: 1075990 - RNA, 19 nt, Homo sapiens
  misc_RNA (1)...(19): siRNA sense strand
uagcugcccuggugcauua

SEQ ID NO: 1075991 - RNA, 19 nt, Homo sapiens
  misc_RNA (1)...(19): siRNA sense strand
ggaagaagauaacauugag

SEQ ID NO: 1075992 - RNA, 19 nt, Homo sapiens
  misc_RNA (1)...(19): siRNA sense strand
ucacaucuuugccgguuua

SEQ ID NO: 1075993 - RNA, 19 nt, Homo sapiens
  misc_RNA (1)...(19): siRNA sense strand
agauagaacucaaccauga

SEQ ID NO: 1075994 - RNA, 19 nt, Homo sapiens
  misc_RNA (1)...(19): siRNA sense strand
gguacuugcuguaggauuu

SEQ ID NO: 1075995 - RNA, 19 nt, Homo sapiens
  misc_RNA (1)...(19): siRNA sense strand
caacugaggaagaagauaa

SEQ ID NO: 1075996 - RNA, 19 nt, Homo sapiens
  misc_RNA (1)...(19): siRNA sense strand
gaggagaaauguggaauca

SEQ ID NO: 1075997 - RNA, 19 nt, Homo sapiens
  misc_RNA (1)...(19): siRNA sense strand
gacaauuggcugauuauuu

SEQ ID NO: 1075998 - RNA, 19 nt, Homo sapiens
  misc_RNA (1)...(19): siRNA sense strand
gcaaugaccaggcacaaga

SEQ ID NO: 1075999 - RNA, 19 nt, Homo sapiens
  misc_RNA (1)...(19): siRNA sense strand
caucgacucugaacauguu

SEQ ID NO: 1076000 - RNA, 19 nt, Homo sapiens
  misc_RNA (1)...(19): siRNA sense strand
gggauuauuugguacaugu

SEQ ID NO: 1076001 - RNA, 19 nt, Homo sapiens
  misc_RNA (1)...(19): siRNA sense strand
uaaggugggucucuuguca

SEQ ID NO: 1076002 - RNA, 19 nt, Homo sapiens
  misc_RNA (1)...(19): siRNA sense strand
gaagaccuauauagagaca

SEQ ID NO: 1076003 - RNA, 19 nt, Homo sapiens
  misc_RNA (1)...(19): siRNA sense strand
ggagaagaccuauauagag

SEQ ID NO: 1076004 - RNA, 19 nt, Homo sapiens
  misc_RNA (1)...(19): siRNA sense strand
cgucaugugugucagaauu

SEQ ID NO: 1076005 - RNA, 19 nt, Homo sapiens
  misc_RNA (1)...(19): siRNA sense strand
ggaggacaauuggcugauu

SEQ ID NO: 1076006 - RNA, 19 nt, Homo sapiens
  misc_RNA (1)...(19): siRNA sense strand
cagaauguguuccucauag

SEQ ID NO: 1076007 - RNA, 19 nt, Homo sapiens
  misc_RNA (1)...(19): siRNA sense strand
gggauccggugcaaucuug

SEQ ID NO: 1076008 - RNA, 19 nt, Homo sapiens
  misc_RNA (1)...(19): siRNA sense strand
gaggagcgacccuugauga

SEQ ID NO: 1076009 - RNA, 19 nt, Homo sapiens
  misc_RNA (1)...(19): siRNA sense strand
ccacaacugcugucagaaa

SEQ ID NO: 1076010 - RNA, 19 nt, Homo sapiens
  misc_RNA (1)...(19): siRNA sense strand
gcagaauguguuccucaua

SEQ ID NO: 1076011 - RNA, 19 nt, Homo sapiens
  misc_RNA (1)...(19): siRNA sense strand
ggacaacugaggaagaaga

SEQ ID NO: 1076012 - RNA, 19 nt, Homo sapiens
  misc_RNA (1)...(19): siRNA sense strand
caauagcaccguauauguu

SEQ ID NO: 1076013 - RNA, 19 nt, Homo sapiens
  misc_RNA (1)...(19): siRNA sense strand
uuuaguggcuucgcuauuu

SEQ ID NO: 1076014 - RNA, 19 nt, Homo sapiens
  misc_RNA (1)...(19): siRNA sense strand
ggaaggaaggagugaagaa

SEQ ID NO: 1076015 - RNA, 19 nt, Homo sapiens
  misc_RNA (1)...(19): siRNA sense strand
ccaaugaggagaagaccua

SEQ ID NO: 1076016 - RNA, 19 nt, Homo sapiens
  misc_RNA (1)...(19): siRNA sense strand
gaaauggucaacaauagca

SEQ ID NO: 1076017 - RNA, 19 nt, Homo sapiens
  misc_RNA (1)...(19): siRNA sense strand
gaagaaggaauggaaagga

SEQ ID NO: 1076018 - RNA, 19 nt, Homo sapiens
  misc_RNA (1)...(19): siRNA sense strand
gaagaacgccgugggagau

SEQ ID NO: 1076019 - RNA, 19 nt, Homo sapiens
  misc_RNA (1)...(19): siRNA sense strand
uaacaucgacucugaacau

SEQ ID NO: 1076020 - RNA, 19 nt, Homo sapiens
  misc_RNA (1)...(19): siRNA sense strand
gccaugggauguggaguaa

SEQ ID NO: 1076021 - RNA, 19 nt, Homo sapiens
  misc_RNA (1)...(19): siRNA sense strand
gaggagaagaccuauauag

SEQ ID NO: 1076022 - RNA, 19 nt, Homo sapiens
  misc_RNA (1)...(19): siRNA sense strand
guggaaauggucaacaaua

SEQ ID NO: 1076023 - RNA, 19 nt, Homo sapiens
  misc_RNA (1)...(19): siRNA sense strand
ggagauagaacucaaccau

SEQ ID NO: 1076024 - RNA, 19 nt, Homo sapiens
  misc_RNA (1)...(19): siRNA sense strand
caagacccgugaagaaugg

SEQ ID NO: 1076025 - RNA, 19 nt, Homo sapiens
  misc_RNA (1)...(19): siRNA sense strand
uauggcauguuugggauua

SEQ ID NO: 1076026 - RNA, 19 nt, Homo sapiens
  misc_RNA (1)...(19): siRNA sense strand
ugaggaagaagauaacauu

SEQ ID NO: 1076027 - RNA, 19 nt, Homo sapiens
  misc_RNA (1)...(19): siRNA sense strand
gaagaauggcagaaugugu

SEQ ID NO: 1076028 - RNA, 19 nt, Homo sapiens
  misc_RNA (1)...(19): siRNA sense strand
uuacaucauugcuaucaug

SEQ ID NO: 1076029 - RNA, 19 nt, Homo sapiens
  misc_RNA (1)...(19): siRNA sense strand
gcauuacaguggugugauc

SEQ ID NO: 1076030 - RNA, 19 nt, Homo sapiens
  misc_RNA (1)...(19): siRNA sense strand
gaagcuggaccuuuuauuu

SEQ ID NO: 1076031 - RNA, 19 nt, Homo sapiens
  misc_RNA (1)...(19): siRNA sense strand
aagauaacauugagcugaa

SEQ ID NO: 1076032 - RNA, 19 nt, Homo sapiens
  misc_RNA (1)...(19): siRNA sense strand
caacaauagcaccguauau

SEQ ID NO: 1076033 - RNA, 19 nt, Homo sapiens
  misc_RNA (1)...(19): siRNA sense strand
uggaaauggucaacaauag

SEQ ID NO: 1076034 - RNA, 19 nt, Homo sapiens
  misc_RNA (1)...(19): siRNA sense strand
cuucucaacuauauccuaa

SEQ ID NO: 1076035 - RNA, 19 nt, Homo sapiens
  misc_RNA (1)...(19): siRNA sense strand
ggucuuuggauuugcaaua

SEQ ID NO: 1076036 - RNA, 19 nt, Homo sapiens
  misc_RNA (1)...(19): siRNA sense strand
ccguauauguugauggaaa

SEQ ID NO: 1076037 - RNA, 19 nt, Homo sapiens
  misc_RNA (1)...(19): siRNA sense strand
ccaggugguuucauuucaa

SEQ ID NO: 1076038 - RNA, 19 nt, Homo sapiens
  misc_RNA (1)...(19): siRNA sense strand
ggaauggaaaggacagaga

SEQ ID NO: 1076039 - RNA, 19 nt, Homo sapiens
  misc_RNA (1)...(19): siRNA sense strand
caugggauguggaguaagu

SEQ ID NO: 1076040 - RNA, 19 nt, Homo sapiens
  misc_RNA (1)...(19): siRNA sense strand
caccguauauguugaugga

SEQ ID NO: 1076041 - RNA, 19 nt, Homo sapiens
  misc_RNA (1)...(19): siRNA sense strand
aaccacaacugcugucaga

SEQ ID NO: 1076042 - RNA, 19 nt, Homo sapiens
  misc_RNA (1)...(19): siRNA sense strand
uaaguaaggugggucucuu

SEQ ID NO: 1076043 - RNA, 19 nt, Homo sapiens
  misc_RNA (1)...(19): siRNA sense strand
gagcugccaucuucuuaac

SEQ ID NO: 1076044 - RNA, 19 nt, Homo sapiens
  misc_RNA (1)...(19): siRNA sense strand
ggagcugccaucuucuuaa

SEQ ID NO: 1076045 - RNA, 19 nt, Homo sapiens
  misc_RNA (1)...(19): siRNA sense strand
gaguugccauuguggaaau

SEQ ID NO: 1076046 - RNA, 19 nt, Homo sapiens
  misc_RNA (1)...(19): siRNA sense strand
uguuugggauuauuuggua

SEQ ID NO: 1076047 - RNA, 19 nt, Homo sapiens
  misc_RNA (1)...(19): siRNA sense strand
caggugguuucauuucaaa

SEQ ID NO: 1076048 - RNA, 19 nt, Homo sapiens
  misc_RNA (1)...(19): siRNA sense strand
acaguggugugaucuucua

SEQ ID NO: 1076049 - RNA, 19 nt, Homo sapiens
  misc_RNA (1)...(19): siRNA sense strand
gcugacauccuaccagaau

SEQ ID NO: 1076050 - RNA, 19 nt, Homo sapiens
  misc_RNA (1)...(19): siRNA sense strand
ccagaaacagugggccuua

SEQ ID NO: 1076051 - RNA, 19 nt, Homo sapiens
  misc_RNA (1)...(19): siRNA sense strand
gcagucccacacaugguua

SEQ ID NO: 1076052 - RNA, 19 nt, Homo sapiens
  misc_RNA (1)...(19): siRNA sense strand
cuaccagaaugaagagaga

SEQ ID NO: 1076053 - RNA, 19 nt, Homo sapiens
  misc_RNA (1)...(19): siRNA sense strand
ggaacccucucuggaaugg

SEQ ID NO: 1076054 - RNA, 19 nt, Homo sapiens
  misc_RNA (1)...(19): siRNA sense strand
guacuugcuguaggauuua

SEQ ID NO: 1076055 - RNA, 19 nt, Homo sapiens
  misc_RNA (1)...(19): siRNA sense strand
ucugaaaccugggaaggaa

SEQ ID NO: 1076056 - RNA, 19 nt, Homo sapiens
  misc_RNA (1)...(19): siRNA sense strand
ucaacaauagcaccguaua

SEQ ID NO: 1076057 - RNA, 19 nt, Homo sapiens
  misc_RNA (1)...(19): siRNA sense strand
cgugaagaauggcagaaug

SEQ ID NO: 1076058 - RNA, 19 nt, Homo sapiens
  misc_RNA (1)...(19): siRNA sense strand
gucuuuggauuugcaauaa

SEQ ID NO: 1076059 - RNA, 19 nt, Homo sapiens
  misc_RNA (1)...(19): siRNA sense strand
gcugccaucuucuuaacau

SEQ ID NO: 1076060 - RNA, 19 nt, Homo sapiens
  misc_RNA (1)...(19): siRNA sense strand
gcagcucauccaacaauau

SEQ ID NO: 1076061 - RNA, 19 nt, Homo sapiens
  misc_RNA (1)...(19): siRNA sense strand
ugacauccuaccagaauga

SEQ ID NO: 1076062 - RNA, 19 nt, Homo sapiens
  misc_RNA (1)...(19): siRNA sense strand
gagaggagcgacccuugau

SEQ ID NO: 1076063 - RNA, 19 nt, Homo sapiens
  misc_RNA (1)...(19): siRNA sense strand
gaggaagaagauaacauug

SEQ ID NO: 1076064 - RNA, 19 nt, Homo sapiens
  misc_RNA (1)...(19): siRNA sense strand
ggacaauuggcugauuauu

SEQ ID NO: 1076065 - RNA, 19 nt, Homo sapiens
  misc_RNA (1)...(19): siRNA sense strand
cuauauagagacaagcaua

SEQ ID NO: 1076066 - RNA, 19 nt, Homo sapiens
  misc_RNA (1)...(19): siRNA sense strand
cagaaacagugggccuuau

SEQ ID NO: 1076067 - RNA, 19 nt, Homo sapiens
  misc_RNA (1)...(19): siRNA sense strand
ggcuaucuccuuucuggua

SEQ ID NO: 1076068 - RNA, 19 nt, Homo sapiens
  misc_RNA (1)...(19): siRNA sense strand
uggcauggaggcaaccuua

SEQ ID NO: 1076069 - RNA, 19 nt, Homo sapiens
  misc_RNA (1)...(19): siRNA sense strand
uggaugguccucugucuuu

SEQ ID NO: 1076070 - RNA, 19 nt, Homo sapiens
  misc_RNA (1)...(19): siRNA sense strand
gaagccgacuggccacaac

SEQ ID NO: 1076071 - RNA, 19 nt, Homo sapiens
  misc_RNA (1)...(19): siRNA sense strand
gcaccaccuuuggagagaa

SEQ ID NO: 1076072 - RNA, 19 nt, Homo sapiens
  misc_RNA (1)...(19): siRNA sense strand
cuuuggagcugccaucuuc

SEQ ID NO: 1076073 - RNA, 19 nt, Homo sapiens
  misc_RNA (1)...(19): siRNA sense strand
gggccaacgugguuagucu

SEQ ID NO: 1076074 - RNA, 19 nt, Homo sapiens
  misc_RNA (1)...(19): siRNA sense strand
ugggacaacugaggaagaa

SEQ ID NO: 1076075 - RNA, 19 nt, Homo sapiens
  misc_RNA (1)...(19): siRNA sense strand
ugagcugaaugaagaagga

SEQ ID NO: 1076076 - RNA, 19 nt, Homo sapiens
  misc_RNA (1)...(19): siRNA sense strand
gcuucgcuauuucagguuu

SEQ ID NO: 1076077 - RNA, 19 nt, Homo sapiens
  misc_RNA (1)...(19): siRNA sense strand
gugguuggcuuuucgcaua

SEQ ID NO: 1076078 - RNA, 19 nt, Homo sapiens
  misc_RNA (1)...(19): siRNA sense strand
cccagcagcucauccaaca

SEQ ID NO: 1076079 - RNA, 19 nt, Homo sapiens
  misc_RNA (1)...(19): siRNA sense strand
gggauucugcauuuccuuu

SEQ ID NO: 1076080 - RNA, 19 nt, Homo sapiens
  misc_RNA (1)...(19): siRNA sense strand
ccaccucccagaauuguga

SEQ ID NO: 1076081 - RNA, 19 nt, Homo sapiens
  misc_RNA (1)...(19): siRNA sense strand
cauugaccaggacgaauua

SEQ ID NO: 1076082 - RNA, 19 nt, Homo sapiens
  misc_RNA (1)...(19): siRNA sense strand
ccacacaugguuaugacaa

SEQ ID NO: 1076083 - RNA, 19 nt, Homo sapiens
  misc_RNA (1)...(19): siRNA sense strand
cauccuaccagaaugaaga

SEQ ID NO: 1076084 - RNA, 19 nt, Homo sapiens
  misc_RNA (1)...(19): siRNA sense strand
cccaagcguuacaucauug

SEQ ID NO: 1076085 - RNA, 19 nt, Homo sapiens
  misc_RNA (1)...(19): siRNA sense strand
ggaccacgaugaucauuga

SEQ ID NO: 1076086 - RNA, 19 nt, Homo sapiens
  misc_RNA (1)...(19): siRNA sense strand
ccagauagaugacaacaau

SEQ ID NO: 1076087 - RNA, 19 nt, Homo sapiens
  misc_RNA (1)...(19): siRNA sense strand
cgaagcagcugacaccaaa

SEQ ID NO: 1076088 - RNA, 19 nt, Homo sapiens
  misc_RNA (1)...(19): siRNA sense strand
ggacuuaucaaacaaauag

SEQ ID NO: 1076089 - RNA, 19 nt, Homo sapiens
  misc_RNA (1)...(19): siRNA sense strand
acaaauaggagagaacuua

SEQ ID NO: 1076090 - RNA, 19 nt, Homo sapiens
  misc_RNA (1)...(19): siRNA sense strand
gaugaucauugaccauguu

SEQ ID NO: 1076091 - RNA, 19 nt, Homo sapiens
  misc_RNA (1)...(19): siRNA sense strand
gaugaccaaucccuuuaug

SEQ ID NO: 1076092 - RNA, 19 nt, Homo sapiens
  misc_RNA (1)...(19): siRNA sense strand
ccaaaucuucgccuucuaa

SEQ ID NO: 1076093 - RNA, 19 nt, Homo sapiens
  misc_RNA (1)...(19): siRNA sense strand
ggacaacuuuacccugauc

SEQ ID NO: 1076094 - RNA, 19 nt, Homo sapiens
  misc_RNA (1)...(19): siRNA sense strand
caaauaggagagaacuuaa

SEQ ID NO: 1076095 - RNA, 19 nt, Homo sapiens
  misc_RNA (1)...(19): siRNA sense strand
ucaccaaggucaugagcaa

SEQ ID NO: 1076096 - RNA, 19 nt, Homo sapiens
  misc_RNA (1)...(19): siRNA sense strand
gaucauugaccauguuguu

SEQ ID NO: 1076097 - RNA, 19 nt, Homo sapiens
  misc_RNA (1)...(19): siRNA sense strand
caacugcccuguguacauc

SEQ ID NO: 1076098 - RNA, 19 nt, Homo sapiens
  misc_RNA (1)...(19): siRNA sense strand
gguaccagcuacacccaaa

SEQ ID NO: 1076099 - RNA, 19 nt, Homo sapiens
  misc_RNA (1)...(19): siRNA sense strand
ggauggacuuaucaaacaa

SEQ ID NO: 1076100 - RNA, 19 nt, Homo sapiens
  misc_RNA (1)...(19): siRNA sense strand
ggacaaaggcgucaauucc

SEQ ID NO: 1076101 - RNA, 19 nt, Homo sapiens
  misc_RNA (1)...(19): siRNA sense strand
cuacagcacugcccagaag

SEQ ID NO: 1076102 - RNA, 19 nt, Homo sapiens
  misc_RNA (1)...(19): siRNA sense strand
cuacauggccuauaaggau

SEQ ID NO: 1076103 - RNA, 19 nt, Homo sapiens
  misc_RNA (1)...(19): siRNA sense strand
ccugggagcugugaucuug

SEQ ID NO: 1076104 - RNA, 19 nt, Homo sapiens
  misc_RNA (1)...(19): siRNA sense strand
auaaggaugucuaccaaau

SEQ ID NO: 1076105 - RNA, 19 nt, Homo sapiens
  misc_RNA (1)...(19): siRNA sense strand
ccagcucuaugaagccuuu

SEQ ID NO: 1076106 - RNA, 19 nt, Homo sapiens
  misc_RNA (1)...(19): siRNA sense strand
gguggccgcuccaacauca

SEQ ID NO: 1076107 - RNA, 19 nt, Homo sapiens
  misc_RNA (1)...(19): siRNA sense strand
ccaagaucuuuaaccugua

SEQ ID NO: 1076108 - RNA, 19 nt, Homo sapiens
  misc_RNA (1)...(19): siRNA sense strand
cuauaaggaugucuaccaa

SEQ ID NO: 1076109 - RNA, 19 nt, Homo sapiens
  misc_RNA (1)...(19): siRNA sense strand
ucaaacaaauaggagagaa

SEQ ID NO: 1076110 - RNA, 19 nt, Homo sapiens
  misc_RNA (1)...(19): siRNA sense strand
gaucuugguccaugcagaa

SEQ ID NO: 1076111 - RNA, 19 nt, Homo sapiens
  misc_RNA (1)...(19): siRNA sense strand
aaggaugucuaccaaaugu

SEQ ID NO: 1076112 - RNA, 19 nt, Homo sapiens
  misc_RNA (1)...(19): siRNA sense strand
ucaauuccuuccaagucua

SEQ ID NO: 1076113 - RNA, 19 nt, Homo sapiens
  misc_RNA (1)...(19): siRNA sense strand
ggaggauggacuuaucaaa

SEQ ID NO: 1076114 - RNA, 19 nt, Homo sapiens
  misc_RNA (1)...(19): siRNA sense strand
uuugauagcucaggaacaa

SEQ ID NO: 1076115 - RNA, 19 nt, Homo sapiens
  misc_RNA (1)...(19): siRNA sense strand
aagucuacauggccuauaa

SEQ ID NO: 1076116 - RNA, 19 nt, Homo sapiens
  misc_RNA (1)...(19): siRNA sense strand
caagaucuuuaaccuguac

SEQ ID NO: 1076117 - RNA, 19 nt, Homo sapiens
  misc_RNA (1)...(19): siRNA sense strand
aggauggacuuaucaaaca

SEQ ID NO: 1076118 - RNA, 19 nt, Homo sapiens
  misc_RNA (1)...(19): siRNA sense strand
ccaaggaaagggcggauug

SEQ ID NO: 1076119 - RNA, 19 nt, Homo sapiens
  misc_RNA (1)...(19): siRNA sense strand
cggaucaacugcccugugu

SEQ ID NO: 1076120 - RNA, 19 nt, Homo sapiens
  misc_RNA (1)...(19): siRNA sense strand
caaugcagccaagaucuuu

SEQ ID NO: 1076121 - RNA, 19 nt, Homo sapiens
  misc_RNA (1)...(19): siRNA sense strand
acaagucggcgguggagua

SEQ ID NO: 1076122 - RNA, 19 nt, Homo sapiens
  misc_RNA (1)...(19): siRNA sense strand
aaucuucgccuucuaaaca

SEQ ID NO: 1076123 - RNA, 19 nt, Homo sapiens
  misc_RNA (1)...(19): siRNA sense strand
guaugacgguccuguguac

SEQ ID NO: 1076124 - RNA, 19 nt, Homo sapiens
  misc_RNA (1)...(19): siRNA sense strand
gacugcggcugaugacuuc

SEQ ID NO: 1076125 - RNA, 19 nt, Homo sapiens
  misc_RNA (1)...(19): siRNA sense strand
ccaguccaacuucagcuua

SEQ ID NO: 1076126 - RNA, 19 nt, Homo sapiens
  misc_RNA (1)...(19): siRNA sense strand
ggcgguggcuacuggcaaa

SEQ ID NO: 1076127 - RNA, 19 nt, Homo sapiens
  misc_RNA (1)...(19): siRNA sense strand
gaggauggacuuaucaaac

SEQ ID NO: 1076128 - RNA, 19 nt, Homo sapiens
  misc_RNA (1)...(19): siRNA sense strand
gaucaacugcccuguguac

SEQ ID NO: 1076129 - RNA, 19 nt, Homo sapiens
  misc_RNA (1)...(19): siRNA sense strand
ccagccuacugaccucuuu

SEQ ID NO: 1076130 - RNA, 19 nt, Homo sapiens
  misc_RNA (1)...(19): siRNA sense strand
ggaugacugcggcugauga

SEQ ID NO: 1076131 - RNA, 19 nt, Homo sapiens
  misc_RNA (1)...(19): siRNA sense strand
aaacaucaacgucaacaag

SEQ ID NO: 1076132 - RNA, 19 nt, Homo sapiens
  misc_RNA (1)...(19): siRNA sense strand
guacaucaccaaggucaug

SEQ ID NO: 1076133 - RNA, 19 nt, Homo sapiens
  misc_RNA (1)...(19): siRNA sense strand
ggagugaagaccauugaag

SEQ ID NO: 1076134 - RNA, 19 nt, Homo sapiens
  misc_RNA (1)...(19): siRNA sense strand
gaaacaucaacgucaacaa

SEQ ID NO: 1076135 - RNA, 19 nt, Homo sapiens
  misc_RNA (1)...(19): siRNA sense strand
gcaccaaugcagccaagau

SEQ ID NO: 1076136 - RNA, 19 nt, Homo sapiens
  misc_RNA (1)...(19): siRNA sense strand
cgacagccagcucuaugaa

SEQ ID NO: 1076137 - RNA, 19 nt, Homo sapiens
  misc_RNA (1)...(19): siRNA sense strand
uaccagcuacacccaaaua

SEQ ID NO: 1076138 - RNA, 19 nt, Homo sapiens
  misc_RNA (1)...(19): siRNA sense strand
ggaaacaucaacgucaaca

SEQ ID NO: 1076139 - RNA, 19 nt, Homo sapiens
  misc_RNA (1)...(19): siRNA sense strand
gccaaaucuucgccuucua

SEQ ID NO: 1076140 - RNA, 19 nt, Homo sapiens
  misc_RNA (1)...(19): siRNA sense strand
gauggacuuaucaaacaaa

SEQ ID NO: 1076141 - RNA, 19 nt, Homo sapiens
  misc_RNA (1)...(19): siRNA sense strand
guggacggaucaucaacga

SEQ ID NO: 1076142 - RNA, 19 nt, Homo sapiens
  misc_RNA (1)...(19): siRNA sense strand
caaaucuucgccuucuaaa

SEQ ID NO: 1076143 - RNA, 19 nt, Homo sapiens
  misc_RNA (1)...(19): siRNA sense strand
uaaccuguacccaaggaaa

SEQ ID NO: 1076144 - RNA, 19 nt, Homo sapiens
  misc_RNA (1)...(19): siRNA sense strand
cagccaagaucuuuaaccu

SEQ ID NO: 1076145 - RNA, 19 nt, Homo sapiens
  misc_RNA (1)...(19): siRNA sense strand
aaagguggacggaucauca

SEQ ID NO: 1076146 - RNA, 19 nt, Homo sapiens
  misc_RNA (1)...(19): siRNA sense strand
caagagugcagccgacauc

SEQ ID NO: 1076147 - RNA, 19 nt, Homo sapiens
  misc_RNA (1)...(19): siRNA sense strand
gagugcagccgacaucauc

SEQ ID NO: 1076148 - RNA, 19 nt, Homo sapiens
  misc_RNA (1)...(19): siRNA sense strand
ugaccucuuucgagaagug

SEQ ID NO: 1076149 - RNA, 19 nt, Homo sapiens
  misc_RNA (1)...(19): siRNA sense strand
agaaggcggugggcaagga

SEQ ID NO: 1076150 - RNA, 19 nt, Homo sapiens
  misc_RNA (1)...(19): siRNA sense strand
gaccgacuccucaucaaag

SEQ ID NO: 1076151 - RNA, 19 nt, Homo sapiens
  misc_RNA (1)...(19): siRNA sense strand
uaaggaugucuaccaaaug

SEQ ID NO: 1076152 - RNA, 19 nt, Homo sapiens
  misc_RNA (1)...(19): siRNA sense strand
gucaauuccuuccaagucu

SEQ ID NO: 1076153 - RNA, 19 nt, Homo sapiens
  misc_RNA (1)...(19): siRNA sense strand
ugacugcggcugaugacuu

SEQ ID NO: 1076154 - RNA, 19 nt, Homo sapiens
  misc_RNA (1)...(19): siRNA sense strand
gacaaguugaagaccauaa

SEQ ID NO: 1076155 - RNA, 19 nt, Homo sapiens
  misc_RNA (1)...(19): siRNA sense strand
ccaaugcagccaagaucuu

SEQ ID NO: 1076156 - RNA, 19 nt, Homo sapiens
  misc_RNA (1)...(19): siRNA sense strand
cuaccacgcccgacuacuu

SEQ ID NO: 1076157 - RNA, 19 nt, Homo sapiens
  misc_RNA (1)...(19): siRNA sense strand
caccaaauccugcugugau

SEQ ID NO: 1076158 - RNA, 19 nt, Homo sapiens
  misc_RNA (1)...(19): siRNA sense strand
ugaccgacuccucaucaaa

SEQ ID NO: 1076159 - RNA, 19 nt, Homo sapiens
  misc_RNA (1)...(19): siRNA sense strand
caguccaacuucagcuuau

SEQ ID NO: 1076160 - RNA, 19 nt, Homo sapiens
  misc_RNA (1)...(19): siRNA sense strand
ccuggaggauggacuuauc

SEQ ID NO: 1076161 - RNA, 19 nt, Homo sapiens
  misc_RNA (1)...(19): siRNA sense strand
cagcuacacccaaauaugc

SEQ ID NO: 1076162 - RNA, 19 nt, Homo sapiens
  misc_RNA (1)...(19): siRNA sense strand
ccagcuacacccaaauaug

SEQ ID NO: 1076163 - RNA, 19 nt, Homo sapiens
  misc_RNA (1)...(19): siRNA sense strand
agucggcgguggaguacaa

SEQ ID NO: 1076164 - RNA, 19 nt, Homo sapiens
  misc_RNA (1)...(19): siRNA sense strand
ggugggcaaggacaacuuu

SEQ ID NO: 1076165 - RNA, 19 nt, Homo sapiens
  misc_RNA (1)...(19): siRNA sense strand
acgaugaccaaucccuuua

SEQ ID NO: 1076166 - RNA, 19 nt, Homo sapiens
  misc_RNA (1)...(19): siRNA sense strand
gcaggacaaaggcgucaau

SEQ ID NO: 1076167 - RNA, 19 nt, Homo sapiens
  misc_RNA (1)...(19): siRNA sense strand
ucaucgcucuggccaggaa

SEQ ID NO: 1076168 - RNA, 19 nt, Homo sapiens
  misc_RNA (1)...(19): siRNA sense strand
cuacuugaccucccuacug

SEQ ID NO: 1076169 - RNA, 19 nt, Homo sapiens
  misc_RNA (1)...(19): siRNA sense strand
cgaugaucauugaccaugu

SEQ ID NO: 1076170 - RNA, 19 nt, Homo sapiens
  misc_RNA (1)...(19): siRNA sense strand
caggugcccagauagauga

SEQ ID NO: 1076171 - RNA, 19 nt, Homo sapiens
  misc_RNA (1)...(19): siRNA sense strand
gaagaccauaacagccaaa

SEQ ID NO: 1076172 - RNA, 19 nt, Homo sapiens
  misc_RNA (1)...(19): siRNA sense strand
gcccugagcagaccugaag

SEQ ID NO: 1076173 - RNA, 19 nt, Homo sapiens
  misc_RNA (1)...(19): siRNA sense strand
guuauucccggagguauug

SEQ ID NO: 1076174 - RNA, 19 nt, Homo sapiens
  misc_RNA (1)...(19): siRNA sense strand
gugcccagauagaugacaa

SEQ ID NO: 1076175 - RNA, 19 nt, Homo sapiens
  misc_RNA (1)...(19): siRNA sense strand
acggaaacaucaacgucaa

SEQ ID NO: 1076176 - RNA, 19 nt, Homo sapiens
  misc_RNA (1)...(19): siRNA sense strand
gaagagcaucccgcacauc

SEQ ID NO: 1076177 - RNA, 19 nt, Homo sapiens
  misc_RNA (1)...(19): siRNA sense strand
ugaccauguuguuccugaa

SEQ ID NO: 1076178 - RNA, 19 nt, Homo sapiens
  misc_RNA (1)...(19): siRNA sense strand
gugaccgacuccucaucaa

SEQ ID NO: 1076179 - RNA, 19 nt, Homo sapiens
  misc_RNA (1)...(19): siRNA sense strand
aauaggagagaacuuaauc

SEQ ID NO: 1076180 - RNA, 19 nt, Homo sapiens
  misc_RNA (1)...(19): siRNA sense strand
agaagagcaucccgcacau

SEQ ID NO: 1076181 - RNA, 19 nt, Homo sapiens
  misc_RNA (1)...(19): siRNA sense strand
caacaucuucgaggguaug

SEQ ID NO: 1076182 - RNA, 19 nt, Homo sapiens
  misc_RNA (1)...(19): siRNA sense strand
caaguugaagaccauaaca

SEQ ID NO: 1076183 - RNA, 19 nt, Homo sapiens
  misc_RNA (1)...(19): siRNA sense strand
ggacaaggcgguggcuacu

SEQ ID NO: 1076184 - RNA, 19 nt, Homo sapiens
  misc_RNA (1)...(19): siRNA sense strand
acccauuacuggagcaaga

SEQ ID NO: 1076185 - RNA, 19 nt, Homo sapiens
  misc_RNA (1)...(19): siRNA sense strand
gagaggaacuugauacaga

SEQ ID NO: 1076186 - RNA, 19 nt, Homo sapiens
  misc_RNA (1)...(19): siRNA sense strand
ggauagagaucugauggua

SEQ ID NO: 1076187 - RNA, 19 nt, Homo sapiens
  misc_RNA (1)...(19): siRNA sense strand
aaagagaccuguacacuca

SEQ ID NO: 1076188 - RNA, 19 nt, Homo sapiens
  misc_RNA (1)...(19): siRNA sense strand
uaggaaagcuggaaagaga

SEQ ID NO: 1076189 - RNA, 19 nt, Homo sapiens
  misc_RNA (1)...(19): siRNA sense strand
uagcagagauggauagaga

SEQ ID NO: 1076190 - RNA, 19 nt, Homo sapiens
  misc_RNA (1)...(19): siRNA sense strand
gaauuuagaagaacaguug

SEQ ID NO: 1076191 - RNA, 19 nt, Homo sapiens
  misc_RNA (1)...(19): siRNA sense strand
uacaagaucuggaggaaug

SEQ ID NO: 1076192 - RNA, 19 nt, Homo sapiens
  misc_RNA (1)...(19): siRNA sense strand
gaagcugacugcagaugau

SEQ ID NO: 1076193 - RNA, 19 nt, Homo sapiens
  misc_RNA (1)...(19): siRNA sense strand
gacagagacaagcaaauua

SEQ ID NO: 1076194 - RNA, 19 nt, Homo sapiens
  misc_RNA (1)...(19): siRNA sense strand
gaaauaugacuuugguaga

SEQ ID NO: 1076195 - RNA, 19 nt, Homo sapiens
  misc_RNA (1)...(19): siRNA sense strand
gagcaacuaagugaauuua

SEQ ID NO: 1076196 - RNA, 19 nt, Homo sapiens
  misc_RNA (1)...(19): siRNA sense strand
ggacaagguuagcagagau

SEQ ID NO: 1076197 - RNA, 19 nt, Homo sapiens
  misc_RNA (1)...(19): siRNA sense strand
gaaacaaccaggucagcuu

SEQ ID NO: 1076198 - RNA, 19 nt, Homo sapiens
  misc_RNA (1)...(19): siRNA sense strand
uaacagcucuuaggaaacu

SEQ ID NO: 1076199 - RNA, 19 nt, Homo sapiens
  misc_RNA (1)...(19): siRNA sense strand
gaaaguggagauacuaaca

SEQ ID NO: 1076200 - RNA, 19 nt, Homo sapiens
  misc_RNA (1)...(19): siRNA sense strand
ggaacuugauacagaugaa

SEQ ID NO: 1076201 - RNA, 19 nt, Homo sapiens
  misc_RNA (1)...(19): siRNA sense strand
ucagauuguuugcaaagaa

SEQ ID NO: 1076202 - RNA, 19 nt, Homo sapiens
  misc_RNA (1)...(19): siRNA sense strand
cagauuguuugcaaagaaa

SEQ ID NO: 1076203 - RNA, 19 nt, Homo sapiens
  misc_RNA (1)...(19): siRNA sense strand
gagaucugaugguaggaaa

SEQ ID NO: 1076204 - RNA, 19 nt, Homo sapiens
  misc_RNA (1)...(19): siRNA sense strand
gaagaacaguuggauagac

SEQ ID NO: 1076205 - RNA, 19 nt, Homo sapiens
  misc_RNA (1)...(19): siRNA sense strand
gaaacucuggagcaacuaa

SEQ ID NO: 1076206 - RNA, 19 nt, Homo sapiens
  misc_RNA (1)...(19): siRNA sense strand
gagauacuaacagcucuua

SEQ ID NO: 1076207 - RNA, 19 nt, Homo sapiens
  misc_RNA (1)...(19): siRNA sense strand
guagaugaacuaaguggaa

SEQ ID NO: 1076208 - RNA, 19 nt, Homo sapiens
  misc_RNA (1)...(19): siRNA sense strand
gaaagacagagacaagcaa

SEQ ID NO: 1076209 - RNA, 19 nt, Homo sapiens
  misc_RNA (1)...(19): siRNA sense strand
caagcaaauuaaagcagaa

SEQ ID NO: 1076210 - RNA, 19 nt, Homo sapiens
  misc_RNA (1)...(19): siRNA sense strand
acagagacaagcaaauuaa

SEQ ID NO: 1076211 - RNA, 19 nt, Homo sapiens
  misc_RNA (1)...(19): siRNA sense strand
aaaggaaacucuggagcaa

SEQ ID NO: 1076212 - RNA, 19 nt, Homo sapiens
  misc_RNA (1)...(19): siRNA sense strand
gauagacucaugcaacaau

SEQ ID NO: 1076213 - RNA, 19 nt, Homo sapiens
  misc_RNA (1)...(19): siRNA sense strand
ggaaagagaccuguacacu

SEQ ID NO: 1076214 - RNA, 19 nt, Homo sapiens
  misc_RNA (1)...(19): siRNA sense strand
agacagagacaagcaaauu

SEQ ID NO: 1076215 - RNA, 19 nt, Homo sapiens
  misc_RNA (1)...(19): siRNA sense strand
gcuaucagccaggccuuua

SEQ ID NO: 1076216 - RNA, 19 nt, Homo sapiens
  misc_RNA (1)...(19): siRNA sense strand
uuaggaaacuuggagagaa

SEQ ID NO: 1076217 - RNA, 19 nt, Homo sapiens
  misc_RNA (1)...(19): siRNA sense strand
ggaaagacagagacaagca

SEQ ID NO: 1076218 - RNA, 19 nt, Homo sapiens
  misc_RNA (1)...(19): siRNA sense strand
uagaagaacaguuggauag

SEQ ID NO: 1076219 - RNA, 19 nt, Homo sapiens
  misc_RNA (1)...(19): siRNA sense strand
gaccuuggcucuggagaca

SEQ ID NO: 1076220 - RNA, 19 nt, Homo sapiens
  misc_RNA (1)...(19): siRNA sense strand
ggaggaaugcagagaggaa

SEQ ID NO: 1076221 - RNA, 19 nt, Homo sapiens
  misc_RNA (1)...(19): siRNA sense strand
gcagagaggaacuugauac

SEQ ID NO: 1076222 - RNA, 19 nt, Homo sapiens
  misc_RNA (1)...(19): siRNA sense strand
ggagcaacuaagugaauuu

SEQ ID NO: 1076223 - RNA, 19 nt, Homo sapiens
  misc_RNA (1)...(19): siRNA sense strand
gaggaaagacagagacaag

SEQ ID NO: 1076224 - RNA, 19 nt, Homo sapiens
  misc_RNA (1)...(19): siRNA sense strand
gucaucagauuguuugcaa

SEQ ID NO: 1076225 - RNA, 19 nt, Homo sapiens
  misc_RNA (1)...(19): siRNA sense strand
gaacaguuggauagacuca

SEQ ID NO: 1076226 - RNA, 19 nt, Homo sapiens
  misc_RNA (1)...(19): siRNA sense strand
gaggucaucagauuguuug

SEQ ID NO: 1076227 - RNA, 19 nt, Homo sapiens
  misc_RNA (1)...(19): siRNA sense strand
gcagagauggauagagauc

SEQ ID NO: 1076228 - RNA, 19 nt, Homo sapiens
  misc_RNA (1)...(19): siRNA sense strand
uggauagacucaugcaaca

SEQ ID NO: 1076229 - RNA, 19 nt, Homo sapiens
  misc_RNA (1)...(19): siRNA sense strand
acaguuggauagacucaug

SEQ ID NO: 1076230 - RNA, 19 nt, Homo sapiens
  misc_RNA (1)...(19): siRNA sense strand
cagaaaguggagauacuaa

SEQ ID NO: 1076231 - RNA, 19 nt, Homo sapiens
  misc_RNA (1)...(19): siRNA sense strand
uuugguagaugaacuaagu

SEQ ID NO: 1076232 - RNA, 19 nt, Homo sapiens
  misc_RNA (1)...(19): siRNA sense strand
gcuauacucagccaguuug

SEQ ID NO: 1076233 - RNA, 19 nt, Homo sapiens
  misc_RNA (1)...(19): siRNA sense strand
uagaugaacuaaguggaau

SEQ ID NO: 1076234 - RNA, 19 nt, Homo sapiens
  misc_RNA (1)...(19): siRNA sense strand
ccuuggcucuggagacaaa

SEQ ID NO: 1076235 - RNA, 19 nt, Homo sapiens
  misc_RNA (1)...(19): siRNA sense strand
ccagaggucaucagauugu

SEQ ID NO: 1076236 - RNA, 19 nt, Homo sapiens
  misc_RNA (1)...(19): siRNA sense strand
cagagacaagcaaauuaaa

SEQ ID NO: 1076237 - RNA, 19 nt, Homo sapiens
  misc_RNA (1)...(19): siRNA sense strand
gcaaaugcaggugcuauac

SEQ ID NO: 1076238 - RNA, 19 nt, Homo sapiens
  misc_RNA (1)...(19): siRNA sense strand
caacagaaaguggagauac

SEQ ID NO: 1076239 - RNA, 19 nt, Homo sapiens
  misc_RNA (1)...(19): siRNA sense strand
gaacuugauacagaugaau

SEQ ID NO: 1076240 - RNA, 19 nt, Homo sapiens
  misc_RNA (1)...(19): siRNA sense strand
uaggaaacuuggagagaag

SEQ ID NO: 1076241 - RNA, 19 nt, Homo sapiens
  misc_RNA (1)...(19): siRNA sense strand
agaggaacuugauacagau

SEQ ID NO: 1076242 - RNA, 19 nt, Homo sapiens
  misc_RNA (1)...(19): siRNA sense strand
gagacaagcaaauuaaagc

SEQ ID NO: 1076243 - RNA, 19 nt, Homo sapiens
  misc_RNA (1)...(19): siRNA sense strand
uagacucaugcaacaauua

SEQ ID NO: 1076244 - RNA, 19 nt, Homo sapiens
  misc_RNA (1)...(19): siRNA sense strand
cggacaagguuagcagaga

SEQ ID NO: 1076245 - RNA, 19 nt, Homo sapiens
  misc_RNA (1)...(19): siRNA sense strand
aaaugcaggugcuauacuc

SEQ ID NO: 1076246 - RNA, 19 nt, Homo sapiens
  misc_RNA (1)...(19): siRNA sense strand
ugaugaggccuucuuguca

SEQ ID NO: 1076247 - RNA, 19 nt, Homo sapiens
  misc_RNA (1)...(19): siRNA sense strand
uggagcaacuaagugaauu

SEQ ID NO: 1076248 - RNA, 19 nt, Homo sapiens
  misc_RNA (1)...(19): siRNA sense strand
ucagccaguuugagaaagu

SEQ ID NO: 1076249 - RNA, 19 nt, Homo sapiens
  misc_RNA (1)...(19): siRNA sense strand
aaagacagagacaagcaaa

SEQ ID NO: 1076250 - RNA, 19 nt, Homo sapiens
  misc_RNA (1)...(19): siRNA sense strand
aauaugacuuugguagaug

SEQ ID NO: 1076251 - RNA, 19 nt, Homo sapiens
  misc_RNA (1)...(19): siRNA sense strand
gguaggaaagcuggaaaga

SEQ ID NO: 1076252 - RNA, 19 nt, Homo sapiens
  misc_RNA (1)...(19): siRNA sense strand
uaucagccaggccuuuaaa

SEQ ID NO: 1076253 - RNA, 19 nt, Homo sapiens
  misc_RNA (1)...(19): siRNA sense strand
uuagaagaacaguuggaua

SEQ ID NO: 1076254 - RNA, 19 nt, Homo sapiens
  misc_RNA (1)...(19): siRNA sense strand
ccccagaggucaucagauu

SEQ ID NO: 1076255 - RNA, 19 nt, Homo sapiens
  misc_RNA (1)...(19): siRNA sense strand
ggaaugcagagaggaacuu

SEQ ID NO: 1076256 - RNA, 19 nt, Homo sapiens
  misc_RNA (1)...(19): siRNA sense strand
acagaaaguggagauacua

SEQ ID NO: 1076257 - RNA, 19 nt, Homo sapiens
  misc_RNA (1)...(19): siRNA sense strand
aagaacaguuggauagacu

SEQ ID NO: 1076258 - RNA, 19 nt, Homo sapiens
  misc_RNA (1)...(19): siRNA sense strand
caggucagcuucggacaag

SEQ ID NO: 1076259 - RNA, 19 nt, Homo sapiens
  misc_RNA (1)...(19): siRNA sense strand
gugcuauacucagccaguu

SEQ ID NO: 1076260 - RNA, 19 nt, Homo sapiens
  misc_RNA (1)...(19): siRNA sense strand
cuggaaauaugacuuuggu

SEQ ID NO: 1076261 - RNA, 19 nt, Homo sapiens
  misc_RNA (1)...(19): siRNA sense strand
gcaacaauuacaagaucug

SEQ ID NO: 1076262 - RNA, 19 nt, Homo sapiens
  misc_RNA (1)...(19): siRNA sense strand
gaaugcagagaggaacuug

SEQ ID NO: 1076263 - RNA, 19 nt, Homo sapiens
  misc_RNA (1)...(19): siRNA sense strand
ugucuggaaauaugacuuu

SEQ ID NO: 1076264 - RNA, 19 nt, Homo sapiens
  misc_RNA (1)...(19): siRNA sense strand
aggaaacucuggagcaacu

SEQ ID NO: 1076265 - RNA, 19 nt, Homo sapiens
  misc_RNA (1)...(19): siRNA sense strand
auagacucaugcaacaauu

SEQ ID NO: 1076266 - RNA, 19 nt, Homo sapiens
  misc_RNA (1)...(19): siRNA sense strand
caucagauuguuugcaaag

SEQ ID NO: 1076267 - RNA, 19 nt, Homo sapiens
  misc_RNA (1)...(19): siRNA sense strand
gaugaugaggccuucuugu

SEQ ID NO: 1076268 - RNA, 19 nt, Homo sapiens
  misc_RNA (1)...(19): siRNA sense strand
gagaagcugacugcagaug

SEQ ID NO: 1076269 - RNA, 19 nt, Homo sapiens
  misc_RNA (1)...(19): siRNA sense strand
augcaacaauuacaagauc

SEQ ID NO: 1076270 - RNA, 19 nt, Homo sapiens
  misc_RNA (1)...(19): siRNA sense strand
ugacuuugguagaugaacu

SEQ ID NO: 1076271 - RNA, 19 nt, Homo sapiens
  misc_RNA (1)...(19): siRNA sense strand
gaggccuucuugucagcaa

SEQ ID NO: 1076272 - RNA, 19 nt, Homo sapiens
  misc_RNA (1)...(19): siRNA sense strand
ggagauacuaacagcucuu

SEQ ID NO: 1076273 - RNA, 19 nt, Homo sapiens
  misc_RNA (1)...(19): siRNA sense strand
auaugacuuugguagauga

SEQ ID NO: 1076274 - RNA, 19 nt, Homo sapiens
  misc_RNA (1)...(19): siRNA sense strand
gacaagguuagcagagaug

SEQ ID NO: 1076275 - RNA, 19 nt, Homo sapiens
  misc_RNA (1)...(19): siRNA sense strand
ggauagacucaugcaacaa

SEQ ID NO: 1076276 - RNA, 19 nt, Homo sapiens
  misc_RNA (1)...(19): siRNA sense strand
ucaucagauuguuugcaaa

SEQ ID NO: 1076277 - RNA, 19 nt, Homo sapiens
  misc_RNA (1)...(19): siRNA sense strand
cagaggucaucagauuguu

SEQ ID NO: 1076278 - RNA, 19 nt, Homo sapiens
  misc_RNA (1)...(19): siRNA sense strand
gacuuugguagaugaacua

SEQ ID NO: 1076279 - RNA, 19 nt, Homo sapiens
  misc_RNA (1)...(19): siRNA sense strand
cagagaggaacuugauaca

SEQ ID NO: 1076280 - RNA, 19 nt, Homo sapiens
  misc_RNA (1)...(19): siRNA sense strand
gaugguaggaaagcuggaa

SEQ ID NO: 1076281 - RNA, 19 nt, Homo sapiens
  misc_RNA (1)...(19): siRNA sense strand
aagcagaauuuagaagaac

SEQ ID NO: 1076282 - RNA, 19 nt, Homo sapiens
  misc_RNA (1)...(19): siRNA sense strand
caaaugcaggugcuauacu

SEQ ID NO: 1076283 - RNA, 19 nt, Homo sapiens
  misc_RNA (1)...(19): siRNA sense strand
cagaugaugaggccuucuu

SEQ ID NO: 1076284 - RNA, 19 nt, Homo sapiens
  misc_RNA (1)...(19): siRNA sense strand
ucaacagaaaguggagaua

SEQ ID NO: 1076285 - RNA, 19 nt, Homo sapiens
  misc_RNA (1)...(19): siRNA sense strand
ggaaauaacucugaaguaa

SEQ ID NO: 1076286 - RNA, 19 nt, Homo sapiens
  misc_RNA (1)...(19): siRNA sense strand
gggauagacuccacaaaua

SEQ ID NO: 1076287 - RNA, 19 nt, Homo sapiens
  misc_RNA (1)...(19): siRNA sense strand
gcaacaaauucuagucaua

SEQ ID NO: 1076288 - RNA, 19 nt, Homo sapiens
  misc_RNA (1)...(19): siRNA sense strand
ggaaagaugugguagaaag

SEQ ID NO: 1076289 - RNA, 19 nt, Homo sapiens
  misc_RNA (1)...(19): siRNA sense strand
ggaagaauaugaagaacug

SEQ ID NO: 1076290 - RNA, 19 nt, Homo sapiens
  misc_RNA (1)...(19): siRNA sense strand
caucauaucugaacuaagu

SEQ ID NO: 1076291 - RNA, 19 nt, Homo sapiens
  misc_RNA (1)...(19): siRNA sense strand
agacaaacaucauaucuga

SEQ ID NO: 1076292 - RNA, 19 nt, Homo sapiens
  misc_RNA (1)...(19): siRNA sense strand
ggaugugauuuccauauuu

SEQ ID NO: 1076293 - RNA, 19 nt, Homo sapiens
  misc_RNA (1)...(19): siRNA sense strand
aagagaaacugcaauagaa

SEQ ID NO: 1076294 - RNA, 19 nt, Homo sapiens
  misc_RNA (1)...(19): siRNA sense strand
ccgaugcccuuaccaguua

SEQ ID NO: 1076295 - RNA, 19 nt, Homo sapiens
  misc_RNA (1)...(19): siRNA sense strand
ccagagaacuuuacugaag

SEQ ID NO: 1076296 - RNA, 19 nt, Homo sapiens
  misc_RNA (1)...(19): siRNA sense strand
uaaacuagcugaccaguac

SEQ ID NO: 1076297 - RNA, 19 nt, Homo sapiens
  misc_RNA (1)...(19): siRNA sense strand
aaacaacuguguaaucaga

SEQ ID NO: 1076298 - RNA, 19 nt, Homo sapiens
  misc_RNA (1)...(19): siRNA sense strand
ggauagacuccacaaauaa

SEQ ID NO: 1076299 - RNA, 19 nt, Homo sapiens
  misc_RNA (1)...(19): siRNA sense strand
cagaaaugaugcagggaua

SEQ ID NO: 1076300 - RNA, 19 nt, Homo sapiens
  misc_RNA (1)...(19): siRNA sense strand
uagcuugucucaugccaua

SEQ ID NO: 1076301 - RNA, 19 nt, Homo sapiens
  misc_RNA (1)...(19): siRNA sense strand
gagaauuggugccagaugu

SEQ ID NO: 1076302 - RNA, 19 nt, Homo sapiens
  misc_RNA (1)...(19): siRNA sense strand
agccaaaguugcuauguua

SEQ ID NO: 1076303 - RNA, 19 nt, Homo sapiens
  misc_RNA (1)...(19): siRNA sense strand
gaugugauuuccauauuuc

SEQ ID NO: 1076304 - RNA, 19 nt, Homo sapiens
  misc_RNA (1)...(19): siRNA sense strand
gagcucaguuguuguggaa

SEQ ID NO: 1076305 - RNA, 19 nt, Homo sapiens
  misc_RNA (1)...(19): siRNA sense strand
agcaagagcugaagaaguu

SEQ ID NO: 1076306 - RNA, 19 nt, Homo sapiens
  misc_RNA (1)...(19): siRNA sense strand
guauccagauuuccaauga

SEQ ID NO: 1076307 - RNA, 19 nt, Homo sapiens
  misc_RNA (1)...(19): siRNA sense strand
caaagaaugcaacaugaaa

SEQ ID NO: 1076308 - RNA, 19 nt, Homo sapiens
  misc_RNA (1)...(19): siRNA sense strand
gaagugggaagaauaugaa

SEQ ID NO: 1076309 - RNA, 19 nt, Homo sapiens
  misc_RNA (1)...(19): siRNA sense strand
guaugugcauuaaaucuug

SEQ ID NO: 1076310 - RNA, 19 nt, Homo sapiens
  misc_RNA (1)...(19): siRNA sense strand
uauguuaucuggagcuuug

SEQ ID NO: 1076311 - RNA, 19 nt, Homo sapiens
  misc_RNA (1)...(19): siRNA sense strand
uaagagaaacugcaauaga

SEQ ID NO: 1076312 - RNA, 19 nt, Homo sapiens
  misc_RNA (1)...(19): siRNA sense strand
gaaaguaguaccucagcuu

SEQ ID NO: 1076313 - RNA, 19 nt, Homo sapiens
  misc_RNA (1)...(19): siRNA sense strand
guggaaagaugugguagaa

SEQ ID NO: 1076314 - RNA, 19 nt, Homo sapiens
  misc_RNA (1)...(19): siRNA sense strand
gagaaaagaugaggugauu

SEQ ID NO: 1076315 - RNA, 19 nt, Homo sapiens
  misc_RNA (1)...(19): siRNA sense strand
aagaugaggugauuucuag

SEQ ID NO: 1076316 - RNA, 19 nt, Homo sapiens
  misc_RNA (1)...(19): siRNA sense strand
gaaagcaggaagaacuauu

SEQ ID NO: 1076317 - RNA, 19 nt, Homo sapiens
  misc_RNA (1)...(19): siRNA sense strand
aaacaugcagcacauuuaa

SEQ ID NO: 1076318 - RNA, 19 nt, Homo sapiens
  misc_RNA (1)...(19): siRNA sense strand
gcuauagugacuccaaaua

SEQ ID NO: 1076319 - RNA, 19 nt, Homo sapiens
  misc_RNA (1)...(19): siRNA sense strand
cagagaacuuuacugaaga

SEQ ID NO: 1076320 - RNA, 19 nt, Homo sapiens
  misc_RNA (1)...(19): siRNA sense strand
ccagacaggauguuuauga

SEQ ID NO: 1076321 - RNA, 19 nt, Homo sapiens
  misc_RNA (1)...(19): siRNA sense strand
gaaauaacucugaaguaag

SEQ ID NO: 1076322 - RNA, 19 nt, Homo sapiens
  misc_RNA (1)...(19): siRNA sense strand
aaagcaggaagaacuauua

SEQ ID NO: 1076323 - RNA, 19 nt, Homo sapiens
  misc_RNA (1)...(19): siRNA sense strand
ggguguaugugcauuaaau

SEQ ID NO: 1076324 - RNA, 19 nt, Homo sapiens
  misc_RNA (1)...(19): siRNA sense strand
gaaguuuguauccagauuu

SEQ ID NO: 1076325 - RNA, 19 nt, Homo sapiens
  misc_RNA (1)...(19): siRNA sense strand
gaaagaugugguagaaaga

SEQ ID NO: 1076326 - RNA, 19 nt, Homo sapiens
  misc_RNA (1)...(19): siRNA sense strand
gaaguaagagaaacugcaa

SEQ ID NO: 1076327 - RNA, 19 nt, Homo sapiens
  misc_RNA (1)...(19): siRNA sense strand
ucaaggaaauaacucugaa

SEQ ID NO: 1076328 - RNA, 19 nt, Homo sapiens
  misc_RNA (1)...(19): siRNA sense strand
gcaaaccauuccucaagca

SEQ ID NO: 1076329 - RNA, 19 nt, Homo sapiens
  misc_RNA (1)...(19): siRNA sense strand
ucacagucaucucauccua

SEQ ID NO: 1076330 - RNA, 19 nt, Homo sapiens
  misc_RNA (1)...(19): siRNA sense strand
gaagaaagucuggaaaguc

SEQ ID NO: 1076331 - RNA, 19 nt, Homo sapiens
  misc_RNA (1)...(19): siRNA sense strand
ugagucaucaccaguguua

SEQ ID NO: 1076332 - RNA, 19 nt, Homo sapiens
  misc_RNA (1)...(19): siRNA sense strand
caacagaaagcaggaagaa

SEQ ID NO: 1076333 - RNA, 19 nt, Homo sapiens
  misc_RNA (1)...(19): siRNA sense strand
caaaguugcuauguuaucu

SEQ ID NO: 1076334 - RNA, 19 nt, Homo sapiens
  misc_RNA (1)...(19): siRNA sense strand
gaacugcuucauuaugcua

SEQ ID NO: 1076335 - RNA, 19 nt, Homo sapiens
  misc_RNA (1)...(19): siRNA sense strand
cagacaggauguuuaugaa

SEQ ID NO: 1076336 - RNA, 19 nt, Homo sapiens
  misc_RNA (1)...(19): siRNA sense strand
gagccagacaggauguuua

SEQ ID NO: 1076337 - RNA, 19 nt, Homo sapiens
  misc_RNA (1)...(19): siRNA sense strand
ggugccagaugucagaauu

SEQ ID NO: 1076338 - RNA, 19 nt, Homo sapiens
  misc_RNA (1)...(19): siRNA sense strand
gaaauacuugugagcgauu

SEQ ID NO: 1076339 - RNA, 19 nt, Homo sapiens
  misc_RNA (1)...(19): siRNA sense strand
cacaaguguucauuccaua

SEQ ID NO: 1076340 - RNA, 19 nt, Homo sapiens
  misc_RNA (1)...(19): siRNA sense strand
gaaaugaugcagggauaga

SEQ ID NO: 1076341 - RNA, 19 nt, Homo sapiens
  misc_RNA (1)...(19): siRNA sense strand
gaccaguacuaccagagaa

SEQ ID NO: 1076342 - RNA, 19 nt, Homo sapiens
  misc_RNA (1)...(19): siRNA sense strand
cccaugagcucaguuguug

SEQ ID NO: 1076343 - RNA, 19 nt, Homo sapiens
  misc_RNA (1)...(19): siRNA sense strand
uaccucagcuuccagauca

SEQ ID NO: 1076344 - RNA, 19 nt, Homo sapiens
  misc_RNA (1)...(19): siRNA sense strand
caaauucuagucauacaga

SEQ ID NO: 1076345 - RNA, 19 nt, Homo sapiens
  misc_RNA (1)...(19): siRNA sense strand
agaauuagcagcaguuuag

SEQ ID NO: 1076346 - RNA, 19 nt, Homo sapiens
  misc_RNA (1)...(19): siRNA sense strand
gauagacuccacaaauaau

SEQ ID NO: 1076347 - RNA, 19 nt, Homo sapiens
  misc_RNA (1)...(19): siRNA sense strand
ugaagaaagucuggaaagu

SEQ ID NO: 1076348 - RNA, 19 nt, Homo sapiens
  misc_RNA (1)...(19): siRNA sense strand
gaaaagauagaguugauga

SEQ ID NO: 1076349 - RNA, 19 nt, Homo sapiens
  misc_RNA (1)...(19): siRNA sense strand
gaggugauuucuagcuugu

SEQ ID NO: 1076350 - RNA, 19 nt, Homo sapiens
  misc_RNA (1)...(19): siRNA sense strand
uacagaugcccaugaaaua

SEQ ID NO: 1076351 - RNA, 19 nt, Homo sapiens
  misc_RNA (1)...(19): siRNA sense strand
gaaaaugugcuugaucuuu

SEQ ID NO: 1076352 - RNA, 19 nt, Homo sapiens
  misc_RNA (1)...(19): siRNA sense strand
ucacaaguguucauuccau

SEQ ID NO: 1076353 - RNA, 19 nt, Homo sapiens
  misc_RNA (1)...(19): siRNA sense strand
gcaguggaaagauguggua

SEQ ID NO: 1076354 - RNA, 19 nt, Homo sapiens
  misc_RNA (1)...(19): siRNA sense strand
aagaaagucuggaaagucu

SEQ ID NO: 1076355 - RNA, 19 nt, Homo sapiens
  misc_RNA (1)...(19): siRNA sense strand
guacuaccagagaacuuua

SEQ ID NO: 1076356 - RNA, 19 nt, Homo sapiens
  misc_RNA (1)...(19): siRNA sense strand
gcgaaucggccaugucaga

SEQ ID NO: 1076357 - RNA, 19 nt, Homo sapiens
  misc_RNA (1)...(19): siRNA sense strand
caaaagcaguggaaagaug

SEQ ID NO: 1076358 - RNA, 19 nt, Homo sapiens
  misc_RNA (1)...(19): siRNA sense strand
ggaaccagaucagcucaca

SEQ ID NO: 1076359 - RNA, 19 nt, Homo sapiens
  misc_RNA (1)...(19): siRNA sense strand
caaugauuaugaagccaaa

SEQ ID NO: 1076360 - RNA, 19 nt, Homo sapiens
  misc_RNA (1)...(19): siRNA sense strand
agaaauguaugugccaaga

SEQ ID NO: 1076361 - RNA, 19 nt, Homo sapiens
  misc_RNA (1)...(19): siRNA sense strand
cuuugaagauuccaugaaa

SEQ ID NO: 1076362 - RNA, 19 nt, Homo sapiens
  misc_RNA (1)...(19): siRNA sense strand
gaauggaaaugagaaaaga

SEQ ID NO: 1076363 - RNA, 19 nt, Homo sapiens
  misc_RNA (1)...(19): siRNA sense strand
aagauagaguugaugagaa

SEQ ID NO: 1076364 - RNA, 19 nt, Homo sapiens
  misc_RNA (1)...(19): siRNA sense strand
uaccagagaacuuuacuga

SEQ ID NO: 1076365 - RNA, 19 nt, Homo sapiens
  misc_RNA (1)...(19): siRNA sense strand
caaguguucauuccauaaa

SEQ ID NO: 1076366 - RNA, 19 nt, Homo sapiens
  misc_RNA (1)...(19): siRNA sense strand
uugaagccaugacuauauu

SEQ ID NO: 1076367 - RNA, 19 nt, Homo sapiens
  misc_RNA (1)...(19): siRNA sense strand
gagcugaagaaguuuguau

SEQ ID NO: 1076368 - RNA, 19 nt, Homo sapiens
  misc_RNA (1)...(19): siRNA sense strand
guaaacuagcugaccagua

SEQ ID NO: 1076369 - RNA, 19 nt, Homo sapiens
  misc_RNA (1)...(19): siRNA sense strand
aguaagagaaacugcaaua

SEQ ID NO: 1076370 - RNA, 19 nt, Homo sapiens
  misc_RNA (1)...(19): siRNA sense strand
ucaagcaacugcagcaaaa

SEQ ID NO: 1076371 - RNA, 19 nt, Homo sapiens
  misc_RNA (1)...(19): siRNA sense strand
gcaggaagaacuauuacag

SEQ ID NO: 1076372 - RNA, 19 nt, Homo sapiens
  misc_RNA (1)...(19): siRNA sense strand
cagaaagcaggaagaacua

SEQ ID NO: 1076373 - RNA, 19 nt, Homo sapiens
  misc_RNA (1)...(19): siRNA sense strand
ucaaagaaugcaacaugaa

SEQ ID NO: 1076374 - RNA, 19 nt, Homo sapiens
  misc_RNA (1)...(19): siRNA sense strand
agagaacuuuacugaagaa

SEQ ID NO: 1076375 - RNA, 19 nt, Homo sapiens
  misc_RNA (1)...(19): siRNA sense strand
caacaaauucuagucauac

SEQ ID NO: 1076376 - RNA, 19 nt, Homo sapiens
  misc_RNA (1)...(19): siRNA sense strand
aaauguaugugccaagagu

SEQ ID NO: 1076377 - RNA, 19 nt, Homo sapiens
  misc_RNA (1)...(19): siRNA sense strand
aaagauagaguugaugaga

SEQ ID NO: 1076378 - RNA, 19 nt, Homo sapiens
  misc_RNA (1)...(19): siRNA sense strand
uguguaaucagaucaauga

SEQ ID NO: 1076379 - RNA, 19 nt, Homo sapiens
  misc_RNA (1)...(19): siRNA sense strand
aaaaugugcuugaucuuug

SEQ ID NO: 1076380 - RNA, 19 nt, Homo sapiens
  misc_RNA (1)...(19): siRNA sense strand
caucagaagaaauguaugu

SEQ ID NO: 1076381 - RNA, 19 nt, Homo sapiens
  misc_RNA (1)...(19): siRNA sense strand
gaagccaugacuauauuuc

SEQ ID NO: 1076382 - RNA, 19 nt, Homo sapiens
  misc_RNA (1)...(19): siRNA sense strand
aagccaaaguugcuauguu

SEQ ID NO: 1076383 - RNA, 19 nt, Homo sapiens
  misc_RNA (1)...(19): siRNA sense strand
gugggaagaauaugaagaa

SEQ ID NO: 1076384 - RNA, 19 nt, Homo sapiens
  misc_RNA (1)...(19): siRNA sense strand
gaauugaaggagcugcaaa

SEQ ID NO: 1076385 - RNA, 19 nt, Homo sapiens
  misc_RNA (1)...(19): siRNA sense strand
gaagauaggugucgaacuu

SEQ ID NO: 1076386 - RNA, 19 nt, Homo sapiens
  misc_RNA (1)...(19): siRNA sense strand
gagaauggcugcagauuuc

SEQ ID NO: 1076387 - RNA, 19 nt, Homo sapiens
  misc_RNA (1)...(19): siRNA sense strand
gaacuuggcugggagaaug

SEQ ID NO: 1076388 - RNA, 19 nt, Homo sapiens
  misc_RNA (1)...(19): siRNA sense strand
gaaaggauugcagauguua

SEQ ID NO: 1076389 - RNA, 19 nt, Homo sapiens
  misc_RNA (1)...(19): siRNA sense strand
caugauaucuuggcucuga

SEQ ID NO: 1076390 - RNA, 19 nt, Homo sapiens
  misc_RNA (1)...(19): siRNA sense strand
guuaugggcugaugccaaa

SEQ ID NO: 1076391 - RNA, 19 nt, Homo sapiens
  misc_RNA (1)...(19): siRNA sense strand
ggagaauggcugcagauuu

SEQ ID NO: 1076392 - RNA, 19 nt, Homo sapiens
  misc_RNA (1)...(19): siRNA sense strand
ccaacuaccuggucuucuu

SEQ ID NO: 1076393 - RNA, 19 nt, Homo sapiens
  misc_RNA (1)...(19): siRNA sense strand
ggucaucccucucauuucu

SEQ ID NO: 1076394 - RNA, 19 nt, Homo sapiens
  misc_RNA (1)...(19): siRNA sense strand
ggaagcacaauauaaaguu

SEQ ID NO: 1076395 - RNA, 19 nt, Homo sapiens
  misc_RNA (1)...(19): siRNA sense strand
ugaaccaacuccaggcuuu

SEQ ID NO: 1076396 - RNA, 19 nt, Homo sapiens
  misc_RNA (1)...(19): siRNA sense strand
guacacaaucuucaugaaa

SEQ ID NO: 1076397 - RNA, 19 nt, Homo sapiens
  misc_RNA (1)...(19): siRNA sense strand
cuugaugucuuauguggua

SEQ ID NO: 1076398 - RNA, 19 nt, Homo sapiens
  misc_RNA (1)...(19): siRNA sense strand
ggccugaauucuacgcaua

SEQ ID NO: 1076399 - RNA, 19 nt, Homo sapiens
  misc_RNA (1)...(19): siRNA sense strand
gccaagacgucaccaagug

SEQ ID NO: 1076400 - RNA, 19 nt, Homo sapiens
  misc_RNA (1)...(19): siRNA sense strand
ggagauggagcauuugaga

SEQ ID NO: 1076401 - RNA, 19 nt, Homo sapiens
  misc_RNA (1)...(19): siRNA sense strand
ccaugcuucucacaucuua

SEQ ID NO: 1076402 - RNA, 19 nt, Homo sapiens
  misc_RNA (1)...(19): siRNA sense strand
ugaaaggauugcagauguu

SEQ ID NO: 1076403 - RNA, 19 nt, Homo sapiens
  misc_RNA (1)...(19): siRNA sense strand
uaccuggucuucuugcuaa

SEQ ID NO: 1076404 - RNA, 19 nt, Homo sapiens
  misc_RNA (1)...(19): siRNA sense strand
agcaauacaugauaucuug

SEQ ID NO: 1076405 - RNA, 19 nt, Homo sapiens
  misc_RNA (1)...(19): siRNA sense strand
gaagcagucccacccagaa

SEQ ID NO: 1076406 - RNA, 19 nt, Homo sapiens
  misc_RNA (1)...(19): siRNA sense strand
gcuagaagaauaaagacaa

SEQ ID NO: 1076407 - RNA, 19 nt, Homo sapiens
  misc_RNA (1)...(19): siRNA sense strand
caaaggcagaugugaagaa

SEQ ID NO: 1076408 - RNA, 19 nt, Homo sapiens
  misc_RNA (1)...(19): siRNA sense strand
aggcagaugugaagaacuu

SEQ ID NO: 1076409 - RNA, 19 nt, Homo sapiens
  misc_RNA (1)...(19): siRNA sense strand
guugagacaucguuugaag

SEQ ID NO: 1076410 - RNA, 19 nt, Homo sapiens
  misc_RNA (1)...(19): siRNA sense strand
agacaaauauguggaagca

SEQ ID NO: 1076411 - RNA, 19 nt, Homo sapiens
  misc_RNA (1)...(19): siRNA sense strand
gcauauuggugaagauagg

SEQ ID NO: 1076412 - RNA, 19 nt, Homo sapiens
  misc_RNA (1)...(19): siRNA sense strand
gcagucccacccagaaauu

SEQ ID NO: 1076413 - RNA, 19 nt, Homo sapiens
  misc_RNA (1)...(19): siRNA sense strand
agaacuugaugucuuaugu

SEQ ID NO: 1076414 - RNA, 19 nt, Homo sapiens
  misc_RNA (1)...(19): siRNA sense strand
gaaguaaaaucggcuuguu

SEQ ID NO: 1076415 - RNA, 19 nt, Homo sapiens
  misc_RNA (1)...(19): siRNA sense strand
gaacuugaugucuuaugug

SEQ ID NO: 1076416 - RNA, 19 nt, Homo sapiens
  misc_RNA (1)...(19): siRNA sense strand
uacacaaucuucaugaaag

SEQ ID NO: 1076417 - RNA, 19 nt, Homo sapiens
  misc_RNA (1)...(19): siRNA sense strand
gaaaaggucaucccucuca

SEQ ID NO: 1076418 - RNA, 19 nt, Homo sapiens
  misc_RNA (1)...(19): siRNA sense strand
caacuacugaucaggcauu

SEQ ID NO: 1076419 - RNA, 19 nt, Homo sapiens
  misc_RNA (1)...(19): siRNA sense strand
gggccaugcuucucacauc

SEQ ID NO: 1076420 - RNA, 19 nt, Homo sapiens
  misc_RNA (1)...(19): siRNA sense strand
gcagaugugaagaacuuga

SEQ ID NO: 1076421 - RNA, 19 nt, Homo sapiens
  misc_RNA (1)...(19): siRNA sense strand
accgggagauggagcauuu

SEQ ID NO: 1076422 - RNA, 19 nt, Homo sapiens
  misc_RNA (1)...(19): siRNA sense strand
uuauuuccauuccaccuuu

SEQ ID NO: 1076423 - RNA, 19 nt, Homo sapiens
  misc_RNA (1)...(19): siRNA sense strand
ucuauauccuguacacaau

SEQ ID NO: 1076424 - RNA, 19 nt, Homo sapiens
  misc_RNA (1)...(19): siRNA sense strand
cuacgcauauuggugaaga

SEQ ID NO: 1076425 - RNA, 19 nt, Homo sapiens
  misc_RNA (1)...(19): siRNA sense strand
ugacugcucaggaaguaaa

SEQ ID NO: 1076426 - RNA, 19 nt, Homo sapiens
  misc_RNA (1)...(19): siRNA sense strand
ugaagacucauacaacugu

SEQ ID NO: 1076427 - RNA, 19 nt, Homo sapiens
  misc_RNA (1)...(19): siRNA sense strand
caacaaacugauuucuuag

SEQ ID NO: 1076428 - RNA, 19 nt, Homo sapiens
  misc_RNA (1)...(19): siRNA sense strand
caacuaccuggucuucuug

SEQ ID NO: 1076429 - RNA, 19 nt, Homo sapiens
  misc_RNA (1)...(19): siRNA sense strand
augaaaggauugcagaugu

SEQ ID NO: 1076430 - RNA, 19 nt, Homo sapiens
  misc_RNA (1)...(19): siRNA sense strand
gacaucguuugaagacuca

SEQ ID NO: 1076431 - RNA, 19 nt, Homo sapiens
  misc_RNA (1)...(19): siRNA sense strand
gaaccaacuccaggcuuug

SEQ ID NO: 1076432 - RNA, 19 nt, Homo sapiens
  misc_RNA (1)...(19): siRNA sense strand
ugagacaguuccgccaaga

SEQ ID NO: 1076433 - RNA, 19 nt, Homo sapiens
  misc_RNA (1)...(19): siRNA sense strand
ucaucccucucauuucuga

SEQ ID NO: 1076434 - RNA, 19 nt, Homo sapiens
  misc_RNA (1)...(19): siRNA sense strand
aaggucaucccucucauuu

SEQ ID NO: 1076435 - RNA, 19 nt, Homo sapiens
  misc_RNA (1)...(19): siRNA sense strand
uuucuugggucgucauuuc

SEQ ID NO: 1076436 - RNA, 19 nt, Homo sapiens
  misc_RNA (1)...(19): siRNA sense strand
uguacacaaucuucaugaa

SEQ ID NO: 1076437 - RNA, 19 nt, Homo sapiens
  misc_RNA (1)...(19): siRNA sense strand
gacgucaccaagugucuuu

SEQ ID NO: 1076438 - RNA, 19 nt, Homo sapiens
  misc_RNA (1)...(19): siRNA sense strand
cuacugaucaggcauuucu

SEQ ID NO: 1076439 - RNA, 19 nt, Homo sapiens
  misc_RNA (1)...(19): siRNA sense strand
gaugugaagaacuugaugu

SEQ ID NO: 1076440 - RNA, 19 nt, Homo sapiens
  misc_RNA (1)...(19): siRNA sense strand
ggccaugcuucucacaucu

SEQ ID NO: 1076441 - RNA, 19 nt, Homo sapiens
  misc_RNA (1)...(19): siRNA sense strand
acacaaucuucaugaaagg

SEQ ID NO: 1076442 - RNA, 19 nt, Homo sapiens
  misc_RNA (1)...(19): siRNA sense strand
ugaauucuacgcauauugg

SEQ ID NO: 1076443 - RNA, 19 nt, Homo sapiens
  misc_RNA (1)...(19): siRNA sense strand
cagcaauacaugauaucuu

SEQ ID NO: 1076444 - RNA, 19 nt, Homo sapiens
  misc_RNA (1)...(19): siRNA sense strand
caugaaaggauugcagaug

SEQ ID NO: 1076445 - RNA, 19 nt, Homo sapiens
  misc_RNA (1)...(19): siRNA sense strand
gggagaauggcugcagauu

SEQ ID NO: 1076446 - RNA, 19 nt, Homo sapiens
  misc_RNA (1)...(19): siRNA sense strand
aaaggcagaugugaagaac

SEQ ID NO: 1076447 - RNA, 19 nt, Homo sapiens
  misc_RNA (1)...(19): siRNA sense strand
ccugaauucuacgcauauu

SEQ ID NO: 1076448 - RNA, 19 nt, Homo sapiens
  misc_RNA (1)...(19): siRNA sense strand
aaaggucaucccucucauu

SEQ ID NO: 1076449 - RNA, 19 nt, Homo sapiens
  misc_RNA (1)...(19): siRNA sense strand
uauauccuguacacaaucu

SEQ ID NO: 1076450 - RNA, 19 nt, Homo sapiens
  misc_RNA (1)...(19): siRNA sense strand
acccagcaauacaugauau

SEQ ID NO: 1076451 - RNA, 19 nt, Homo sapiens
  misc_RNA (1)...(19): siRNA sense strand
ccaggcaacuacugaucag

SEQ ID NO: 1076452 - RNA, 19 nt, Homo sapiens
  misc_RNA (1)...(19): siRNA sense strand
aagcuucaccuuucuccaa

SEQ ID NO: 1076453 - RNA, 19 nt, Homo sapiens
  misc_RNA (1)...(19): siRNA sense strand
agauggagcauuugagaca

SEQ ID NO: 1076454 - RNA, 19 nt, Homo sapiens
  misc_RNA (1)...(19): siRNA sense strand
aaggcuagaagaauaaaga

SEQ ID NO: 1076455 - RNA, 19 nt, Homo sapiens
  misc_RNA (1)...(19): siRNA sense strand
ccaagacgucaccaagugu

SEQ ID NO: 1076456 - RNA, 19 nt, Homo sapiens
  misc_RNA (1)...(19): siRNA sense strand
uuugaagacucauacaacu

SEQ ID NO: 1076457 - RNA, 19 nt, Homo sapiens
  misc_RNA (1)...(19): siRNA sense strand
caccaagugucuuuuccua

SEQ ID NO: 1076458 - RNA, 19 nt, Homo sapiens
  misc_RNA (1)...(19): siRNA sense strand
cagauguuaugggcugaug

SEQ ID NO: 1076459 - RNA, 19 nt, Homo sapiens
  misc_RNA (1)...(19): siRNA sense strand
guacccacccagcaauaca

SEQ ID NO: 1076460 - RNA, 19 nt, Homo sapiens
  misc_RNA (1)...(19): siRNA sense strand
ccaaaacaacaaacugauu

SEQ ID NO: 1076461 - RNA, 19 nt, Homo sapiens
  misc_RNA (1)...(19): siRNA sense strand
cuaccuggucuucuugcua

SEQ ID NO: 1076462 - RNA, 19 nt, Homo sapiens
  misc_RNA (1)...(19): siRNA sense strand
ggaggaggccaucaucaug

SEQ ID NO: 1076463 - RNA, 19 nt, Homo sapiens
  misc_RNA (1)...(19): siRNA sense strand
ggagcauaaugaaguggaa

SEQ ID NO: 1076464 - RNA, 19 nt, Homo sapiens
  misc_RNA (1)...(19): siRNA sense strand
uacgggcacuggagcauaa

SEQ ID NO: 1076465 - RNA, 19 nt, Homo sapiens
  misc_RNA (1)...(19): siRNA sense strand
ggaccggaagugugggaua

SEQ ID NO: 1076466 - RNA, 19 nt, Homo sapiens
  misc_RNA (1)...(19): siRNA sense strand
caucauggcgguggcagua

SEQ ID NO: 1076467 - RNA, 19 nt, Homo sapiens
  misc_RNA (1)...(19): siRNA sense strand
ggauuggaacccugaucua

SEQ ID NO: 1076468 - RNA, 19 nt, Homo sapiens
  misc_RNA (1)...(19): siRNA sense strand
gcaggcgccuacaaaucga

SEQ ID NO: 1076469 - RNA, 19 nt, Homo sapiens
  misc_RNA (1)...(19): siRNA sense strand
gcacuggagcauaaugaag

SEQ ID NO: 1076470 - RNA, 19 nt, Homo sapiens
  misc_RNA (1)...(19): siRNA sense strand
caagaaccaaggcgaguca

SEQ ID NO: 1076471 - RNA, 19 nt, Homo sapiens
  misc_RNA (1)...(19): siRNA sense strand
gaccggaagugugggauac

SEQ ID NO: 1076472 - RNA, 19 nt, Homo sapiens
  misc_RNA (1)...(19): siRNA sense strand
gggcacuggagcauaauga

SEQ ID NO: 1076473 - RNA, 19 nt, Homo sapiens
  misc_RNA (1)...(19): siRNA sense strand
cggaccaucucaagugcuu

SEQ ID NO: 1076474 - RNA, 19 nt, Homo sapiens
  misc_RNA (1)...(19): siRNA sense strand
ggaggaggaggccaucauc

SEQ ID NO: 1076475 - RNA, 19 nt, Homo sapiens
  misc_RNA (1)...(19): siRNA sense strand
gaggaggaggccaucauca

SEQ ID NO: 1076476 - RNA, 19 nt, Homo sapiens
  misc_RNA (1)...(19): siRNA sense strand
gccuacaaaucgaggacuu

SEQ ID NO: 1076477 - RNA, 19 nt, Homo sapiens
  misc_RNA (1)...(19): siRNA sense strand
gcagaugcuucgggagaac

SEQ ID NO: 1076478 - RNA, 19 nt, Homo sapiens
  misc_RNA (1)...(19): siRNA sense strand
ccgcggaccaucucaagug

SEQ ID NO: 1076479 - RNA, 19 nt, Homo sapiens
  misc_RNA (1)...(19): siRNA sense strand
ggaggaccuugcagaugcu

SEQ ID NO: 1076480 - RNA, 19 nt, Homo sapiens
  misc_RNA (1)...(19): siRNA sense strand
cgacuacaaacggaacuug

SEQ ID NO: 1076481 - RNA, 19 nt, Homo sapiens
  misc_RNA (1)...(19): siRNA sense strand
gauuggaacccugaucuac

SEQ ID NO: 1076482 - RNA, 19 nt, Homo sapiens
  misc_RNA (1)...(19): siRNA sense strand
gaugagagcuaaagagaua

SEQ ID NO: 1076483 - RNA, 19 nt, Homo sapiens
  misc_RNA (1)...(19): siRNA sense strand
caaccgaacucuaucagua

SEQ ID NO: 1076484 - RNA, 19 nt, Homo sapiens
  misc_RNA (1)...(19): siRNA sense strand
gagaugaagugguauacua

SEQ ID NO: 1076485 - RNA, 19 nt, Homo sapiens
  misc_RNA (1)...(19): siRNA sense strand
gagaagagcugcagaaacu

SEQ ID NO: 1076486 - RNA, 19 nt, Homo sapiens
  misc_RNA (1)...(19): siRNA sense strand
agaaagaucugccuagaaa

SEQ ID NO: 1076487 - RNA, 19 nt, Homo sapiens
  misc_RNA (1)...(19): siRNA sense strand
gaagaaauuugguaaagca

SEQ ID NO: 1076488 - RNA, 19 nt, Homo sapiens
  misc_RNA (1)...(19): siRNA sense strand
ggauagacuucgaacauuu

SEQ ID NO: 1076489 - RNA, 19 nt, Homo sapiens
  misc_RNA (1)...(19): siRNA sense strand
gcacucggauugaagauga

SEQ ID NO: 1076490 - RNA, 19 nt, Homo sapiens
  misc_RNA (1)...(19): siRNA sense strand
gaaauuugguaaagcauca

SEQ ID NO: 1076491 - RNA, 19 nt, Homo sapiens
  misc_RNA (1)...(19): siRNA sense strand
gagcugaucagaagaaauu

SEQ ID NO: 1076492 - RNA, 19 nt, Homo sapiens
  misc_RNA (1)...(19): siRNA sense strand
gaagacagcagaucaagau

SEQ ID NO: 1076493 - RNA, 19 nt, Homo sapiens
  misc_RNA (1)...(19): siRNA sense strand
gaaagacugcugaagguuu

SEQ ID NO: 1076494 - RNA, 19 nt, Homo sapiens
  misc_RNA (1)...(19): siRNA sense strand
ggaagaagcucagaaagac

SEQ ID NO: 1076495 - RNA, 19 nt, Homo sapiens
  misc_RNA (1)...(19): siRNA sense strand
ggagaaagaucugccuaga

SEQ ID NO: 1076496 - RNA, 19 nt, Homo sapiens
  misc_RNA (1)...(19): siRNA sense strand
caagaaauccuaccucaga

SEQ ID NO: 1076497 - RNA, 19 nt, Homo sapiens
  misc_RNA (1)...(19): siRNA sense strand
aggaagagaugcagaguuu

SEQ ID NO: 1076498 - RNA, 19 nt, Homo sapiens
  misc_RNA (1)...(19): siRNA sense strand
gcagaaacuucagcagaaa

SEQ ID NO: 1076499 - RNA, 19 nt, Homo sapiens
  misc_RNA (1)...(19): siRNA sense strand
gagagaacuugccaugcua

SEQ ID NO: 1076500 - RNA, 19 nt, Homo sapiens
  misc_RNA (1)...(19): siRNA sense strand
ucacauggcuguacugucu

SEQ ID NO: 1076501 - RNA, 19 nt, Homo sapiens
  misc_RNA (1)...(19): siRNA sense strand
gauagacuucgaacauuua

SEQ ID NO: 1076502 - RNA, 19 nt, Homo sapiens
  misc_RNA (1)...(19): siRNA sense strand
caacagcgcacucggauug

SEQ ID NO: 1076503 - RNA, 19 nt, Homo sapiens
  misc_RNA (1)...(19): siRNA sense strand
cgaacucuaucaguauuua

SEQ ID NO: 1076504 - RNA, 19 nt, Homo sapiens
  misc_RNA (1)...(19): siRNA sense strand
cagagacacuggagaaaga

SEQ ID NO: 1076505 - RNA, 19 nt, Homo sapiens
  misc_RNA (1)...(19): siRNA sense strand
gaacuugccaugcuacgaa

SEQ ID NO: 1076506 - RNA, 19 nt, Homo sapiens
  misc_RNA (1)...(19): siRNA sense strand
ggacgaagaggaggcuuua

SEQ ID NO: 1076507 - RNA, 19 nt, Homo sapiens
  misc_RNA (1)...(19): siRNA sense strand
gacagcagaucaagauuuc

SEQ ID NO: 1076508 - RNA, 19 nt, Homo sapiens
  misc_RNA (1)...(19): siRNA sense strand
ugaagaagguacagaagga

SEQ ID NO: 1076509 - RNA, 19 nt, Homo sapiens
  misc_RNA (1)...(19): siRNA sense strand
uaaggaaacuuugcagaug

SEQ ID NO: 1076510 - RNA, 19 nt, Homo sapiens
  misc_RNA (1)...(19): siRNA sense strand
gaucagaagaaauuuggua

SEQ ID NO: 1076511 - RNA, 19 nt, Homo sapiens
  misc_RNA (1)...(19): siRNA sense strand
gaaguacaguuugaaaucu

SEQ ID NO: 1076512 - RNA, 19 nt, Homo sapiens
  misc_RNA (1)...(19): siRNA sense strand
gcacagacugggagaacua

SEQ ID NO: 1076513 - RNA, 19 nt, Homo sapiens
  misc_RNA (1)...(19): siRNA sense strand
gaacugccucccacuauau

SEQ ID NO: 1076514 - RNA, 19 nt, Homo sapiens
  misc_RNA (1)...(19): siRNA sense strand
ugaacugccucccacuaua

SEQ ID NO: 1076515 - RNA, 19 nt, Homo sapiens
  misc_RNA (1)...(19): siRNA sense strand
gcggaaacaugcacuaaag

SEQ ID NO: 1076516 - RNA, 19 nt, Homo sapiens
  misc_RNA (1)...(19): siRNA sense strand
gagagaauccuucacacuu

SEQ ID NO: 1076517 - RNA, 19 nt, Homo sapiens
  misc_RNA (1)...(19): siRNA sense strand
aauccuaccucagaaauaa

SEQ ID NO: 1076518 - RNA, 19 nt, Homo sapiens
  misc_RNA (1)...(19): siRNA sense strand
gaagugguauacuaugaca

SEQ ID NO: 1076519 - RNA, 19 nt, Homo sapiens
  misc_RNA (1)...(19): siRNA sense strand
gaauauagaacccaucaca

SEQ ID NO: 1076520 - RNA, 19 nt, Homo sapiens
  misc_RNA (1)...(19): siRNA sense strand
cuugaagugugaagaguua

SEQ ID NO: 1076521 - RNA, 19 nt, Homo sapiens
  misc_RNA (1)...(19): siRNA sense strand
gaacauuuaaacagaggua

SEQ ID NO: 1076522 - RNA, 19 nt, Homo sapiens
  misc_RNA (1)...(19): siRNA sense strand
gaaacaugcacuaaaggaa

SEQ ID NO: 1076523 - RNA, 19 nt, Homo sapiens
  misc_RNA (1)...(19): siRNA sense strand
gagaagaggaucccaaagu

SEQ ID NO: 1076524 - RNA, 19 nt, Homo sapiens
  misc_RNA (1)...(19): siRNA sense strand
agacagagaacacuggaua

SEQ ID NO: 1076525 - RNA, 19 nt, Homo sapiens
  misc_RNA (1)...(19): siRNA sense strand
cagaagaaauuugguaaag

SEQ ID NO: 1076526 - RNA, 19 nt, Homo sapiens
  misc_RNA (1)...(19): siRNA sense strand
cagaaagacugcugaaggu

SEQ ID NO: 1076527 - RNA, 19 nt, Homo sapiens
  misc_RNA (1)...(19): siRNA sense strand
gaaagcaucaaaagacuua

SEQ ID NO: 1076528 - RNA, 19 nt, Homo sapiens
  misc_RNA (1)...(19): siRNA sense strand
gcaacuagaaagcaucaaa

SEQ ID NO: 1076529 - RNA, 19 nt, Homo sapiens
  misc_RNA (1)...(19): siRNA sense strand
ggaaacaugcacuaaagga

SEQ ID NO: 1076530 - RNA, 19 nt, Homo sapiens
  misc_RNA (1)...(19): siRNA sense strand
ggaaagggguaaaauugaa

SEQ ID NO: 1076531 - RNA, 19 nt, Homo sapiens
  misc_RNA (1)...(19): siRNA sense strand
ggaucauugugacucuuua

SEQ ID NO: 1076532 - RNA, 19 nt, Homo sapiens
  misc_RNA (1)...(19): siRNA sense strand
cagaagcgauagcacgauu

SEQ ID NO: 1076533 - RNA, 19 nt, Homo sapiens
  misc_RNA (1)...(19): siRNA sense strand
cauguucuguuaccauaaa

SEQ ID NO: 1076534 - RNA, 19 nt, Homo sapiens
  misc_RNA (1)...(19): siRNA sense strand
gaaauccuaccucagaaau

SEQ ID NO: 1076535 - RNA, 19 nt, Homo sapiens
  misc_RNA (1)...(19): siRNA sense strand
aaagacugcugaagguuug

SEQ ID NO: 1076536 - RNA, 19 nt, Homo sapiens
  misc_RNA (1)...(19): siRNA sense strand
uagaacccaucacacagua

SEQ ID NO: 1076537 - RNA, 19 nt, Homo sapiens
  misc_RNA (1)...(19): siRNA sense strand
gagaaagaucugccuagaa

SEQ ID NO: 1076538 - RNA, 19 nt, Homo sapiens
  misc_RNA (1)...(19): siRNA sense strand
ucugggaccucgaagaauu

SEQ ID NO: 1076539 - RNA, 19 nt, Homo sapiens
  misc_RNA (1)...(19): siRNA sense strand
gaagaggaucccaaaguca

SEQ ID NO: 1076540 - RNA, 19 nt, Homo sapiens
  misc_RNA (1)...(19): siRNA sense strand
guaugcaguuucuaaggaa

SEQ ID NO: 1076541 - RNA, 19 nt, Homo sapiens
  misc_RNA (1)...(19): siRNA sense strand
aaggaaacuuugcagauga

SEQ ID NO: 1076542 - RNA, 19 nt, Homo sapiens
  misc_RNA (1)...(19): siRNA sense strand
ucaaccagauuacgacuag

SEQ ID NO: 1076543 - RNA, 19 nt, Homo sapiens
  misc_RNA (1)...(19): siRNA sense strand
cuaaagagauaugcuugga

SEQ ID NO: 1076544 - RNA, 19 nt, Homo sapiens
  misc_RNA (1)...(19): siRNA sense strand
ugugaagaguuacuauuga

SEQ ID NO: 1076545 - RNA, 19 nt, Homo sapiens
  misc_RNA (1)...(19): siRNA sense strand
caaguccuguucuccaaga

SEQ ID NO: 1076546 - RNA, 19 nt, Homo sapiens
  misc_RNA (1)...(19): siRNA sense strand
cuucgaacauuuaaacaga

SEQ ID NO: 1076547 - RNA, 19 nt, Homo sapiens
  misc_RNA (1)...(19): siRNA sense strand
caucacacaguacaacuaa

SEQ ID NO: 1076548 - RNA, 19 nt, Homo sapiens
  misc_RNA (1)...(19): siRNA sense strand
ggauugaagaugaauauag

SEQ ID NO: 1076549 - RNA, 19 nt, Homo sapiens
  misc_RNA (1)...(19): siRNA sense strand
gagagaagagcugcagaaa

SEQ ID NO: 1076550 - RNA, 19 nt, Homo sapiens
  misc_RNA (1)...(19): siRNA sense strand
cacuauaucucuuccacuu

SEQ ID NO: 1076551 - RNA, 19 nt, Homo sapiens
  misc_RNA (1)...(19): siRNA sense strand
acgacuagcucaugcaaga

SEQ ID NO: 1076552 - RNA, 19 nt, Homo sapiens
  misc_RNA (1)...(19): siRNA sense strand
guacaacuaaagagagaaa

SEQ ID NO: 1076553 - RNA, 19 nt, Homo sapiens
  misc_RNA (1)...(19): siRNA sense strand
ugcagaaacuucagcagaa

SEQ ID NO: 1076554 - RNA, 19 nt, Homo sapiens
  misc_RNA (1)...(19): siRNA sense strand
agauuuccauggagaauga

SEQ ID NO: 1076555 - RNA, 19 nt, Homo sapiens
  misc_RNA (1)...(19): siRNA sense strand
gaagaggaggcuuuaccuu

SEQ ID NO: 1076556 - RNA, 19 nt, Homo sapiens
  misc_RNA (1)...(19): siRNA sense strand
uaacacggagcauccauga

SEQ ID NO: 1076557 - RNA, 19 nt, Homo sapiens
  misc_RNA (1)...(19): siRNA sense strand
agagaauccuucacacuuc

SEQ ID NO: 1076558 - RNA, 19 nt, Homo sapiens
  misc_RNA (1)...(19): siRNA sense strand
agaagaggaucccaaaguc

SEQ ID NO: 1076559 - RNA, 19 nt, Homo sapiens
  misc_RNA (1)...(19): siRNA sense strand
gcaagacguggacggguuu

SEQ ID NO: 1076560 - RNA, 19 nt, Homo sapiens
  misc_RNA (1)...(19): siRNA sense strand
caguacaacuaaagagaga

SEQ ID NO: 1076561 - RNA, 19 nt, Homo sapiens
  misc_RNA (1)...(19): siRNA sense strand
cggaagaagcucagaaaga

SEQ ID NO: 1076562 - RNA, 19 nt, Homo sapiens
  misc_RNA (1)...(19): siRNA sense strand
ugagagaacuugccaugcu

SEQ ID NO: 1076563 - RNA, 19 nt, Homo sapiens
  misc_RNA (1)...(19): siRNA sense strand
ggaccucgaagaauugaga

SEQ ID NO: 1076564 - RNA, 19 nt, Homo sapiens
  misc_RNA (1)...(19): siRNA sense strand
ggacggguuucugccaaga

SEQ ID NO: 1076565 - RNA, 19 nt, Homo sapiens
  misc_RNA (1)...(19): siRNA sense strand
gaagagaugcagaguuugc

SEQ ID NO: 1076566 - RNA, 19 nt, Homo sapiens
  misc_RNA (1)...(19): siRNA sense strand
gaaacuuugcagaugauga

SEQ ID NO: 1076567 - RNA, 19 nt, Homo sapiens
  misc_RNA (1)...(19): siRNA sense strand
gaaaggaggggaaugagaa

SEQ ID NO: 1076568 - RNA, 19 nt, Homo sapiens
  misc_RNA (1)...(19): siRNA sense strand
uguaucaguuggaggauga

SEQ ID NO: 1076569 - RNA, 19 nt, Homo sapiens
  misc_RNA (1)...(19): siRNA sense strand
agacagcagaucaagauuu

SEQ ID NO: 1076570 - RNA, 19 nt, Homo sapiens
  misc_RNA (1)...(19): siRNA sense strand
gguauacuaugacacuuac

SEQ ID NO: 1076571 - RNA, 19 nt, Homo sapiens
  misc_RNA (1)...(19): siRNA sense strand
aaagagaugaagugguaua

SEQ ID NO: 1076572 - RNA, 19 nt, Homo sapiens
  misc_RNA (1)...(19): siRNA sense strand
gaagugugaagaguuacua

SEQ ID NO: 1076573 - RNA, 19 nt, Homo sapiens
  misc_RNA (1)...(19): siRNA sense strand
cuacagccauuccgagaca

SEQ ID NO: 1076574 - RNA, 19 nt, Homo sapiens
  misc_RNA (1)...(19): siRNA sense strand
gagcuaaagagauaugcuu

SEQ ID NO: 1076575 - RNA, 19 nt, Homo sapiens
  misc_RNA (1)...(19): siRNA sense strand
gaaagcacgccagcuggaa

SEQ ID NO: 1076576 - RNA, 19 nt, Homo sapiens
  misc_RNA (1)...(19): siRNA sense strand
gcacggaagaagcucagaa

SEQ ID NO: 1076577 - RNA, 19 nt, Homo sapiens
  misc_RNA (1)...(19): siRNA sense strand
ugaaguacaguuugaaauc

SEQ ID NO: 1076578 - RNA, 19 nt, Homo sapiens
  misc_RNA (1)...(19): siRNA sense strand
ggacaguggcccagagaca

SEQ ID NO: 1076579 - RNA, 19 nt, Homo sapiens
  misc_RNA (1)...(19): siRNA sense strand
uggauagacuucgaacauu

SEQ ID NO: 1076580 - RNA, 19 nt, Homo sapiens
  misc_RNA (1)...(19): siRNA sense strand
gaauugagagucuacaaaa

SEQ ID NO: 1076581 - RNA, 19 nt, Homo sapiens
  misc_RNA (1)...(19): siRNA sense strand
cauugugacucuuuaccaa

SEQ ID NO: 1076582 - RNA, 19 nt, Homo sapiens
  misc_RNA (1)...(19): siRNA sense strand
gaggagaucuuccacauga

SEQ ID NO: 1076583 - RNA, 19 nt, Homo sapiens
  misc_RNA (1)...(19): siRNA sense strand
gacuacaucuuccuuauug

SEQ ID NO: 1076584 - RNA, 19 nt, Homo sapiens
  misc_RNA (1)...(19): siRNA sense strand
gggaggagaucgucaacuu

SEQ ID NO: 1076585 - RNA, 19 nt, Homo sapiens
  misc_RNA (1)...(19): siRNA sense strand
ccgagaagaucaagaagaa

SEQ ID NO: 1076586 - RNA, 19 nt, Homo sapiens
  misc_RNA (1)...(19): siRNA sense strand
gaagauccacgacuacuau

SEQ ID NO: 1076587 - RNA, 19 nt, Homo sapiens
  misc_RNA (1)...(19): siRNA sense strand
gccagaagauccacgacua

SEQ ID NO: 1076588 - RNA, 19 nt, Homo sapiens
  misc_RNA (1)...(19): siRNA sense strand
acaagcagguggagcagua

SEQ ID NO: 1076589 - RNA, 19 nt, Homo sapiens
  misc_RNA (1)...(19): siRNA sense strand
uccaggagaucgucaagua

SEQ ID NO: 1076590 - RNA, 19 nt, Homo sapiens
  misc_RNA (1)...(19): siRNA sense strand
ugaccaagcucaaguucga

SEQ ID NO: 1076591 - RNA, 19 nt, Homo sapiens
  misc_RNA (1)...(19): siRNA sense strand
ggacuacaucuuccuuauu

SEQ ID NO: 1076592 - RNA, 19 nt, Homo sapiens
  misc_RNA (1)...(19): siRNA sense strand
ucauggaccugguguugaa

SEQ ID NO: 1076593 - RNA, 19 nt, Homo sapiens
  misc_RNA (1)...(19): siRNA sense strand
gggaggagaucuuccacau

SEQ ID NO: 1076594 - RNA, 19 nt, Homo sapiens
  misc_RNA (1)...(19): siRNA sense strand
gccaguaccaggagaagua

SEQ ID NO: 1076595 - RNA, 19 nt, Homo sapiens
  misc_RNA (1)...(19): siRNA sense strand
guacauguccuuccacaag

SEQ ID NO: 1076596 - RNA, 19 nt, Homo sapiens
  misc_RNA (1)...(19): siRNA sense strand
gagaagaucaagaagaagu

SEQ ID NO: 1076597 - RNA, 19 nt, Homo sapiens
  misc_RNA (1)...(19): siRNA sense strand
gaggagaucgucaacuuca

SEQ ID NO: 1076598 - RNA, 19 nt, Homo sapiens
  misc_RNA (1)...(19): siRNA sense strand
gaacuuccgcaccggcauu

SEQ ID NO: 1076599 - RNA, 19 nt, Homo sapiens
  misc_RNA (1)...(19): siRNA sense strand
gcaccggcauugugaucga

SEQ ID NO: 1076600 - RNA, 19 nt, Homo sapiens
  misc_RNA (1)...(19): siRNA sense strand
ucacuaagggcaacaagga

SEQ ID NO: 1076601 - RNA, 19 nt, Homo sapiens
  misc_RNA (1)...(19): siRNA sense strand
gggcaucaccuucuucaag

SEQ ID NO: 1076602 - RNA, 19 nt, Homo sapiens
  misc_RNA (1)...(19): siRNA sense strand
caaguacgaccgcgagaug

SEQ ID NO: 1076603 - RNA, 19 nt, Homo sapiens
  misc_RNA (1)...(19): siRNA sense strand
gaagaucaagaagaaguau

SEQ ID NO: 1076604 - RNA, 19 nt, Homo sapiens
  misc_RNA (1)...(19): siRNA sense strand
ggacaacacggagaucauc

SEQ ID NO: 1076605 - RNA, 19 nt, Homo sapiens
  misc_RNA (1)...(19): siRNA sense strand
gaccucaacucgggcguau

SEQ ID NO: 1076606 - RNA, 19 nt, Homo sapiens
  misc_RNA (1)...(19): siRNA sense strand
ggacaccuucuuccucaug

SEQ ID NO: 1076607 - RNA, 19 nt, Homo sapiens
  misc_RNA (1)...(19): siRNA sense strand
acgaggugcuggaggagua

SEQ ID NO: 1076608 - RNA, 19 nt, Homo sapiens
  misc_RNA (1)...(19): siRNA sense strand
ugggaaaccucaucaucau

SEQ ID NO: 1076609 - RNA, 19 nt, Homo sapiens
  misc_RNA (1)...(19): siRNA sense strand
ucacggccaugcugaccaa

SEQ ID NO: 1076610 - RNA, 19 nt, Homo sapiens
  misc_RNA (1)...(19): siRNA sense strand
gugggaaaccucaucauca

SEQ ID NO: 1076611 - RNA, 19 nt, Homo sapiens
  misc_RNA (1)...(19): siRNA sense strand
gaaggcaccaucgggaaga

SEQ ID NO: 1076612 - RNA, 19 nt, Homo sapiens
  misc_RNA (1)...(19): siRNA sense strand
uggacuacaucuuccuuau

SEQ ID NO: 1076613 - RNA, 19 nt, Homo sapiens
  misc_RNA (1)...(19): siRNA sense strand
gcaacaaggagaugaagcu

SEQ ID NO: 1076614 - RNA, 19 nt, Homo sapiens
  misc_RNA (1)...(19): siRNA sense strand
ggaggagaucuuccacaug

SEQ ID NO: 1076615 - RNA, 19 nt, Homo sapiens
  misc_RNA (1)...(19): siRNA sense strand
gcaagaagaauuccauccu

SEQ ID NO: 1076616 - RNA, 19 nt, Homo sapiens
  misc_RNA (1)...(19): siRNA sense strand
ggaagcugguggccuccau

SEQ ID NO: 1076617 - RNA, 19 nt, Homo sapiens
  misc_RNA (1)...(19): siRNA sense strand
ggaggagaucgucaacuuc

SEQ ID NO: 1076618 - RNA, 19 nt, Homo sapiens
  misc_RNA (1)...(19): siRNA sense strand
gaccgcaucggcaagaaga

SEQ ID NO: 1076619 - RNA, 19 nt, Homo sapiens
  misc_RNA (1)...(19): siRNA sense strand
ccucaacucgggcguauuc

SEQ ID NO: 1076620 - RNA, 19 nt, Homo sapiens
  misc_RNA (1)...(19): siRNA sense strand
agaagaucaagaagaagua

SEQ ID NO: 1076621 - RNA, 19 nt, Homo sapiens
  misc_RNA (1)...(19): siRNA sense strand
ucaccaugcugcuguucau

SEQ ID NO: 1076622 - RNA, 19 nt, Homo sapiens
  misc_RNA (1)...(19): siRNA sense strand
gcauugacuccgaggucua

SEQ ID NO: 1076623 - RNA, 19 nt, Homo sapiens
  misc_RNA (1)...(19): siRNA sense strand
ccagcgcggugaugaggau

SEQ ID NO: 1076624 - RNA, 19 nt, Homo sapiens
  misc_RNA (1)...(19): siRNA sense strand
cagcugacuuccgccagaa

SEQ ID NO: 1076625 - RNA, 19 nt, Homo sapiens
  misc_RNA (1)...(19): siRNA sense strand
agaagauccacgacuacua

SEQ ID NO: 1076626 - RNA, 19 nt, Homo sapiens
  misc_RNA (1)...(19): siRNA sense strand
gaggacaacacggagauca

SEQ ID NO: 1076627 - RNA, 19 nt, Homo sapiens
  misc_RNA (1)...(19): siRNA sense strand
ggugggaaaccucaucauc

SEQ ID NO: 1076628 - RNA, 19 nt, Homo sapiens
  misc_RNA (1)...(19): siRNA sense strand
gugaugaggaucugcaauc

SEQ ID NO: 1076629 - RNA, 19 nt, Homo sapiens
  misc_RNA (1)...(19): siRNA sense strand
gaggaucugcaaucucauc

SEQ ID NO: 1076630 - RNA, 19 nt, Homo sapiens
  misc_RNA (1)...(19): siRNA sense strand
gcgccucucguccaacuug

SEQ ID NO: 1076631 - RNA, 19 nt, Homo sapiens
  misc_RNA (1)...(19): siRNA sense strand
guggucagcgugcucacua

SEQ ID NO: 1076632 - RNA, 19 nt, Homo sapiens
  misc_RNA (1)...(19): siRNA sense strand
ggagaucgucaacuucaac

SEQ ID NO: 1076633 - RNA, 19 nt, Homo sapiens
  misc_RNA (1)...(19): siRNA sense strand
gcagguggagcaguacaug

SEQ ID NO: 1076634 - RNA, 19 nt, Homo sapiens
  misc_RNA (1)...(19): siRNA sense strand
guggacuacaucuuccuua

SEQ ID NO: 1076635 - RNA, 19 nt, Homo sapiens
  misc_RNA (1)...(19): siRNA sense strand
caacucgggcguauucaac

SEQ ID NO: 1076636 - RNA, 19 nt, Homo sapiens
  misc_RNA (1)...(19): siRNA sense strand
gauccacgacuacuaugag

SEQ ID NO: 1076637 - RNA, 19 nt, Homo sapiens
  misc_RNA (1)...(19): siRNA sense strand
cuacaucuuccuuauugug

SEQ ID NO: 1076638 - RNA, 19 nt, Homo sapiens
  misc_RNA (1)...(19): siRNA sense strand
ccucauggaccugguguug

SEQ ID NO: 1076639 - RNA, 19 nt, Homo sapiens
  misc_RNA (1)...(19): siRNA sense strand
ugaugaggaucugcaaucu

SEQ ID NO: 1076640 - RNA, 19 nt, Homo sapiens
  misc_RNA (1)...(19): siRNA sense strand
ggcccaaggugucguucuc

SEQ ID NO: 1076641 - RNA, 19 nt, Homo sapiens
  misc_RNA (1)...(19): siRNA sense strand
ccagccgggugacuacauc

SEQ ID NO: 1076642 - RNA, 19 nt, Homo sapiens
  misc_RNA (1)...(19): siRNA sense strand
gcaucggcaagaagaauuc

SEQ ID NO: 1076643 - RNA, 19 nt, Homo sapiens
  misc_RNA (1)...(19): siRNA sense strand
gagcguggacaacuucaac

SEQ ID NO: 1076644 - RNA, 19 nt, Homo sapiens
  misc_RNA (1)...(19): siRNA sense strand
ucuuccacaugaccuauga

SEQ ID NO: 1076645 - RNA, 19 nt, Homo sapiens
  misc_RNA (1)...(19): siRNA sense strand
gcugagcguggacaacuuc

SEQ ID NO: 1076646 - RNA, 19 nt, Homo sapiens
  misc_RNA (1)...(19): siRNA sense strand
ucugcaaucucaucagcau

SEQ ID NO: 1076647 - RNA, 19 nt, Homo sapiens
  misc_RNA (1)...(19): siRNA sense strand
ggaagauguuguuauguua

SEQ ID NO: 1076648 - RNA, 19 nt, Homo sapiens
  misc_RNA (1)...(19): siRNA sense strand
ggacagcacuuuaccuuug

SEQ ID NO: 1076649 - RNA, 19 nt, Homo sapiens
  misc_RNA (1)...(19): siRNA sense strand
ugacagacauugaaaguaa

SEQ ID NO: 1076650 - RNA, 19 nt, Homo sapiens
  misc_RNA (1)...(19): siRNA sense strand
gaaugaaacucucagauca

SEQ ID NO: 1076651 - RNA, 19 nt, Homo sapiens
  misc_RNA (1)...(19): siRNA sense strand
gaaaggcgcaucgugauua

SEQ ID NO: 1076652 - RNA, 19 nt, Homo sapiens
  misc_RNA (1)...(19): siRNA sense strand
gaaaguaaacagagauuug

SEQ ID NO: 1076653 - RNA, 19 nt, Homo sapiens
  misc_RNA (1)...(19): siRNA sense strand
cuacagagaugcacugaga

SEQ ID NO: 1076654 - RNA, 19 nt, Homo sapiens
  misc_RNA (1)...(19): siRNA sense strand
gaaagggugucucagaauc

SEQ ID NO: 1076655 - RNA, 19 nt, Homo sapiens
  misc_RNA (1)...(19): siRNA sense strand
gaguagaaaucuuacagaa

SEQ ID NO: 1076656 - RNA, 19 nt, Homo sapiens
  misc_RNA (1)...(19): siRNA sense strand
ggguuucucugauguauuu

SEQ ID NO: 1076657 - RNA, 19 nt, Homo sapiens
  misc_RNA (1)...(19): siRNA sense strand
gcaaauacuccuguaaauu

SEQ ID NO: 1076658 - RNA, 19 nt, Homo sapiens
  misc_RNA (1)...(19): siRNA sense strand
uaacuggacucccaacaau

SEQ ID NO: 1076659 - RNA, 19 nt, Homo sapiens
  misc_RNA (1)...(19): siRNA sense strand
guuuaugcauccuuaguua

SEQ ID NO: 1076660 - RNA, 19 nt, Homo sapiens
  misc_RNA (1)...(19): siRNA sense strand
gugauuaucucgagcaaau

SEQ ID NO: 1076661 - RNA, 19 nt, Homo sapiens
  misc_RNA (1)...(19): siRNA sense strand
gaaauucccagaggacuuu

SEQ ID NO: 1076662 - RNA, 19 nt, Homo sapiens
  misc_RNA (1)...(19): siRNA sense strand
gauuaucucgagcaaauua

SEQ ID NO: 1076663 - RNA, 19 nt, Homo sapiens
  misc_RNA (1)...(19): siRNA sense strand
gaucagcugcucuucuaua

SEQ ID NO: 1076664 - RNA, 19 nt, Homo sapiens
  misc_RNA (1)...(19): siRNA sense strand
ugaacaaccuaccaaguga

SEQ ID NO: 1076665 - RNA, 19 nt, Homo sapiens
  misc_RNA (1)...(19): siRNA sense strand
gagaugcacugagauacaa

SEQ ID NO: 1076666 - RNA, 19 nt, Homo sapiens
  misc_RNA (1)...(19): siRNA sense strand
aaacagagauuuggauucu

SEQ ID NO: 1076667 - RNA, 19 nt, Homo sapiens
  misc_RNA (1)...(19): siRNA sense strand
gcucaagcgugaugaaaca

SEQ ID NO: 1076668 - RNA, 19 nt, Homo sapiens
  misc_RNA (1)...(19): siRNA sense strand
ggcaaauacuccuguaaau

SEQ ID NO: 1076669 - RNA, 19 nt, Homo sapiens
  misc_RNA (1)...(19): siRNA sense strand
guagcuagggccuuucuua

SEQ ID NO: 1076670 - RNA, 19 nt, Homo sapiens
  misc_RNA (1)...(19): siRNA sense strand
gagcaaauuaagcacuuua

SEQ ID NO: 1076671 - RNA, 19 nt, Homo sapiens
  misc_RNA (1)...(19): siRNA sense strand
uggaagauguuguuauguu

SEQ ID NO: 1076672 - RNA, 19 nt, Homo sapiens
  misc_RNA (1)...(19): siRNA sense strand
cuaaggaacuggaaaauga

SEQ ID NO: 1076673 - RNA, 19 nt, Homo sapiens
  misc_RNA (1)...(19): siRNA sense strand
uuaguuaccuucccugguu

SEQ ID NO: 1076674 - RNA, 19 nt, Homo sapiens
  misc_RNA (1)...(19): siRNA sense strand
uggaucagcugcucuucua

SEQ ID NO: 1076675 - RNA, 19 nt, Homo sapiens
  misc_RNA (1)...(19): siRNA sense strand
gaaacucucagaucacugu

SEQ ID NO: 1076676 - RNA, 19 nt, Homo sapiens
  misc_RNA (1)...(19): siRNA sense strand
gccauuaaccuccagcuuu

SEQ ID NO: 1076677 - RNA, 19 nt, Homo sapiens
  misc_RNA (1)...(19): siRNA sense strand
gacagacauugaaaguaaa

SEQ ID NO: 1076678 - RNA, 19 nt, Homo sapiens
  misc_RNA (1)...(19): siRNA sense strand
gcuagggccuuucuuagag

SEQ ID NO: 1076679 - RNA, 19 nt, Homo sapiens
  misc_RNA (1)...(19): siRNA sense strand
ucagaucacuguauaacca

SEQ ID NO: 1076680 - RNA, 19 nt, Homo sapiens
  misc_RNA (1)...(19): siRNA sense strand
cagauuacuuggcuaagga

SEQ ID NO: 1076681 - RNA, 19 nt, Homo sapiens
  misc_RNA (1)...(19): siRNA sense strand
acucucagaucacuguaua

SEQ ID NO: 1076682 - RNA, 19 nt, Homo sapiens
  misc_RNA (1)...(19): siRNA sense strand
guaaacagagauuuggauu

SEQ ID NO: 1076683 - RNA, 19 nt, Homo sapiens
  misc_RNA (1)...(19): siRNA sense strand
cacauuagaaucaccauuu

SEQ ID NO: 1076684 - RNA, 19 nt, Homo sapiens
  misc_RNA (1)...(19): siRNA sense strand
gcucuucuauacccaaugu

SEQ ID NO: 1076685 - RNA, 19 nt, Homo sapiens
  misc_RNA (1)...(19): siRNA sense strand
caacaauacccgagaguag

SEQ ID NO: 1076686 - RNA, 19 nt, Homo sapiens
  misc_RNA (1)...(19): siRNA sense strand
gugcauuccuacuucauug

SEQ ID NO: 1076687 - RNA, 19 nt, Homo sapiens
  misc_RNA (1)...(19): siRNA sense strand
acaaaucauuggaagaugu

SEQ ID NO: 1076688 - RNA, 19 nt, Homo sapiens
  misc_RNA (1)...(19): siRNA sense strand
aagaagcagucuacagcua

SEQ ID NO: 1076689 - RNA, 19 nt, Homo sapiens
  misc_RNA (1)...(19): siRNA sense strand
gcacuuuaccuuuguacug

SEQ ID NO: 1076690 - RNA, 19 nt, Homo sapiens
  misc_RNA (1)...(19): siRNA sense strand
guacugacagacauugaaa

SEQ ID NO: 1076691 - RNA, 19 nt, Homo sapiens
  misc_RNA (1)...(19): siRNA sense strand
caagcgugaugaaacaguu

SEQ ID NO: 1076692 - RNA, 19 nt, Homo sapiens
  misc_RNA (1)...(19): siRNA sense strand
gcacuuuaacugccuguau

SEQ ID NO: 1076693 - RNA, 19 nt, Homo sapiens
  misc_RNA (1)...(19): siRNA sense strand
gcagauuacuuggcuaagg

SEQ ID NO: 1076694 - RNA, 19 nt, Homo sapiens
  misc_RNA (1)...(19): siRNA sense strand
acaacaugcugcagcugua

SEQ ID NO: 1076695 - RNA, 19 nt, Homo sapiens
  misc_RNA (1)...(19): siRNA sense strand
gauguggucucggccuuga

SEQ ID NO: 1076696 - RNA, 19 nt, Homo sapiens
  misc_RNA (1)...(19): siRNA sense strand
acagagaugcacugagaua

SEQ ID NO: 1076697 - RNA, 19 nt, Homo sapiens
  misc_RNA (1)...(19): siRNA sense strand
aaaggcaaauacuccugua

SEQ ID NO: 1076698 - RNA, 19 nt, Homo sapiens
  misc_RNA (1)...(19): siRNA sense strand
ugccauaccugauuggaau

SEQ ID NO: 1076699 - RNA, 19 nt, Homo sapiens
  misc_RNA (1)...(19): siRNA sense strand
gcagcuguaugccaguaug

SEQ ID NO: 1076700 - RNA, 19 nt, Homo sapiens
  misc_RNA (1)...(19): siRNA sense strand
gagugugcauuccuacuuc

SEQ ID NO: 1076701 - RNA, 19 nt, Homo sapiens
  misc_RNA (1)...(19): siRNA sense strand
uugaaagggugucucagaa

SEQ ID NO: 1076702 - RNA, 19 nt, Homo sapiens
  misc_RNA (1)...(19): siRNA sense strand
ucucugauguauuugaaga

SEQ ID NO: 1076703 - RNA, 19 nt, Homo sapiens
  misc_RNA (1)...(19): siRNA sense strand
uggaguagcuagggccuuu

SEQ ID NO: 1076704 - RNA, 19 nt, Homo sapiens
  misc_RNA (1)...(19): siRNA sense strand
gacagcacuuuaccuuugu

SEQ ID NO: 1076705 - RNA, 19 nt, Homo sapiens
  misc_RNA (1)...(19): siRNA sense strand
guaacuggacucccaacaa

SEQ ID NO: 1076706 - RNA, 19 nt, Homo sapiens
  misc_RNA (1)...(19): siRNA sense strand
gcacaggcugcuuuguuug

SEQ ID NO: 1076707 - RNA, 19 nt, Homo sapiens
  misc_RNA (1)...(19): siRNA sense strand
cacuuuaccuuuguacuga

SEQ ID NO: 1076708 - RNA, 19 nt, Homo sapiens
  misc_RNA (1)...(19): siRNA sense strand
cgaauccugugguauugug

SEQ ID NO: 1076709 - RNA, 19 nt, Homo sapiens
  misc_RNA (1)...(19): siRNA sense strand
ugaaugaaacucucagauc

SEQ ID NO: 1076710 - RNA, 19 nt, Homo sapiens
  misc_RNA (1)...(19): siRNA sense strand
cauugaaaguaaacagaga

SEQ ID NO: 1076711 - RNA, 19 nt, Homo sapiens
  misc_RNA (1)...(19): siRNA sense strand
ggaagggguuucucugaug

SEQ ID NO: 1076712 - RNA, 19 nt, Homo sapiens
  misc_RNA (1)...(19): siRNA sense strand
ccauuaaccuccagcuuuu

SEQ ID NO: 1076713 - RNA, 19 nt, Homo sapiens
  misc_RNA (1)...(19): siRNA sense strand
ccucauagagagagugaaa

SEQ ID NO: 1076714 - RNA, 19 nt, Homo sapiens
  misc_RNA (1)...(19): siRNA sense strand
uguauuggcaacacauaua

SEQ ID NO: 1076715 - RNA, 19 nt, Homo sapiens
  misc_RNA (1)...(19): siRNA sense strand
aaaggcgcaucgugauuau

SEQ ID NO: 1076716 - RNA, 19 nt, Homo sapiens
  misc_RNA (1)...(19): siRNA sense strand
uacagagugugccaaaguu

SEQ ID NO: 1076717 - RNA, 19 nt, Homo sapiens
  misc_RNA (1)...(19): siRNA sense strand
ggacuuuggagaccaggaa

SEQ ID NO: 1076718 - RNA, 19 nt, Homo sapiens
  misc_RNA (1)...(19): siRNA sense strand
ucuaaauacucuugcagau

SEQ ID NO: 1076719 - RNA, 19 nt, Homo sapiens
  misc_RNA (1)...(19): siRNA sense strand
gaucacuucagguggcuuu

SEQ ID NO: 1076720 - RNA, 19 nt, Homo sapiens
  misc_RNA (1)...(19): siRNA sense strand
cccgagaguagaaaucuua

SEQ ID NO: 1076721 - RNA, 19 nt, Homo sapiens
  misc_RNA (1)...(19): siRNA sense strand
cuaaauacucuugcagauu

SEQ ID NO: 1076722 - RNA, 19 nt, Homo sapiens
  misc_RNA (1)...(19): siRNA sense strand
gaacaaccuaccaagugau

SEQ ID NO: 1076723 - RNA, 19 nt, Homo sapiens
  misc_RNA (1)...(19): siRNA sense strand
caaaucauuggaagauguu

SEQ ID NO: 1076724 - RNA, 19 nt, Homo sapiens
  misc_RNA (1)...(19): siRNA sense strand
uaaauuugagugugcauuc

SEQ ID NO: 1076725 - RNA, 19 nt, Homo sapiens
  misc_RNA (1)...(19): siRNA sense strand
gaccaggaaauacuacaga

SEQ ID NO: 1076726 - RNA, 19 nt, Homo sapiens
  misc_RNA (1)...(19): siRNA sense strand
guugaaagggugucucaga

SEQ ID NO: 1076727 - RNA, 19 nt, Homo sapiens
  misc_RNA (1)...(19): siRNA sense strand
ccaacaauacccgagagua

SEQ ID NO: 1076728 - RNA, 19 nt, Homo sapiens
  misc_RNA (1)...(19): siRNA sense strand
cgagcaaauuaagcacuuu

SEQ ID NO: 1076729 - RNA, 19 nt, Homo sapiens
  misc_RNA (1)...(19): siRNA sense strand
ugaaaggcgcaucgugauu

SEQ ID NO: 1076730 - RNA, 19 nt, Homo sapiens
  misc_RNA (1)...(19): siRNA sense strand
gacauugaaaguaaacaga

SEQ ID NO: 1076731 - RNA, 19 nt, Homo sapiens
  misc_RNA (1)...(19): siRNA sense strand
ccuggaaacugccauuaac

SEQ ID NO: 1076732 - RNA, 19 nt, Homo sapiens
  misc_RNA (1)...(19): siRNA sense strand
auuggaagauguuguuaug

SEQ ID NO: 1076733 - RNA, 19 nt, Homo sapiens
  misc_RNA (1)...(19): siRNA sense strand
cuacagagugugccaaagu

SEQ ID NO: 1076734 - RNA, 19 nt, Homo sapiens
  misc_RNA (1)...(19): siRNA sense strand
gagaguagaaaucuuacag

SEQ ID NO: 1076735 - RNA, 19 nt, Homo sapiens
  misc_RNA (1)...(19): siRNA sense strand
ugauguauuugaagaagag

SEQ ID NO: 1076736 - RNA, 19 nt, Homo sapiens
  misc_RNA (1)...(19): siRNA sense strand
uuacuuggcuaaggaacug

SEQ ID NO: 1076737 - RNA, 19 nt, Homo sapiens
  misc_RNA (1)...(19): siRNA sense strand
aggcugcuuuguuuggaua

SEQ ID NO: 1076738 - RNA, 19 nt, Homo sapiens
  misc_RNA (1)...(19): siRNA sense strand
caaccuaccaagugaugug

SEQ ID NO: 1076739 - RNA, 19 nt, Homo sapiens
  misc_RNA (1)...(19): siRNA sense strand
ucgagcaaauuaagcacuu

SEQ ID NO: 1076740 - RNA, 19 nt, Homo sapiens
  misc_RNA (1)...(19): siRNA sense strand
aggcaaauacuccuguaaa

SEQ ID NO: 1076741 - RNA, 19 nt, Homo sapiens
  misc_RNA (1)...(19): siRNA sense strand
ccugugguauuguggaaau

SEQ ID NO: 1076742 - RNA, 19 nt, Homo sapiens
  misc_RNA (1)...(19): siRNA sense strand
gaagggguuucucugaugu

SEQ ID NO: 1076743 - RNA, 19 nt, Homo sapiens
  misc_RNA (1)...(19): siRNA sense strand
ugaaagggugucucagaau

SEQ ID NO: 1076744 - RNA, 19 nt, Homo sapiens
  misc_RNA (1)...(19): siRNA sense strand
uaaacagagauuuggauuc

SEQ ID NO: 1076745 - RNA, 19 nt, Homo sapiens
  misc_RNA (1)...(19): siRNA sense strand
cacuuuaacugccuguauc

SEQ ID NO: 1076746 - RNA, 19 nt, Homo sapiens
  misc_RNA (1)...(19): siRNA sense strand
acaauacccgagaguagaa

SEQ ID NO: 1076747 - RNA, 19 nt, Homo sapiens
  misc_RNA (1)...(19): siRNA sense strand
ggacagggauggacgaauu

SEQ ID NO: 1076748 - RNA, 19 nt, Homo sapiens
  misc_RNA (1)...(19): siRNA sense strand
ggauggcaccguagacuuu

SEQ ID NO: 1076749 - RNA, 19 nt, Homo sapiens
  misc_RNA (1)...(19): siRNA sense strand
ggaagaggagcaagaagga

SEQ ID NO: 1076750 - RNA, 19 nt, Homo sapiens
  misc_RNA (1)...(19): siRNA sense strand
ucgaggaguuugacacuga

SEQ ID NO: 1076751 - RNA, 19 nt, Homo sapiens
  misc_RNA (1)...(19): siRNA sense strand
gacagggauggacgaauua

SEQ ID NO: 1076752 - RNA, 19 nt, Homo sapiens
  misc_RNA (1)...(19): siRNA sense strand
cguagacuuugacgaguuu

SEQ ID NO: 1076753 - RNA, 19 nt, Homo sapiens
  misc_RNA (1)...(19): siRNA sense strand
gaacugauaggcccaaagc

SEQ ID NO: 1076754 - RNA, 19 nt, Homo sapiens
  misc_RNA (1)...(19): siRNA sense strand
ggacuuugaggaguuugua

SEQ ID NO: 1076755 - RNA, 19 nt, Homo sapiens
  misc_RNA (1)...(19): siRNA sense strand
gaugcucucccgccacuga

SEQ ID NO: 1076756 - RNA, 19 nt, Homo sapiens
  misc_RNA (1)...(19): siRNA sense strand
gagaaguggaccucaaugg

SEQ ID NO: 1076757 - RNA, 19 nt, Homo sapiens
  misc_RNA (1)...(19): siRNA sense strand
ccaggaagaggagcaagaa

SEQ ID NO: 1076758 - RNA, 19 nt, Homo sapiens
  misc_RNA (1)...(19): siRNA sense strand
ggacgagaugcuccgagaa

SEQ ID NO: 1076759 - RNA, 19 nt, Homo sapiens
  misc_RNA (1)...(19): siRNA sense strand
cuacaugcccaccgagaug

SEQ ID NO: 1076760 - RNA, 19 nt, Homo sapiens
  misc_RNA (1)...(19): siRNA sense strand
ugacgaguuugugaugaug

SEQ ID NO: 1076761 - RNA, 19 nt, Homo sapiens
  misc_RNA (1)...(19): siRNA sense strand
ccguagacuuugacgaguu

SEQ ID NO: 1076762 - RNA, 19 nt, Homo sapiens
  misc_RNA (1)...(19): siRNA sense strand
gacgagaugcuccgagaag

SEQ ID NO: 1076763 - RNA, 19 nt, Homo sapiens
  misc_RNA (1)...(19): siRNA sense strand
guguggacuuugaggaguu

SEQ ID NO: 1076764 - RNA, 19 nt, Homo sapiens
  misc_RNA (1)...(19): siRNA sense strand
cgagaugcuccgagaagug

SEQ ID NO: 1076765 - RNA, 19 nt, Homo sapiens
  misc_RNA (1)...(19): siRNA sense strand
gggauggcaccguagacuu

SEQ ID NO: 1076766 - RNA, 19 nt, Homo sapiens
  misc_RNA (1)...(19): siRNA sense strand
gcagcagggcccaaaucug

SEQ ID NO: 1076767 - RNA, 19 nt, Homo sapiens
  misc_RNA (1)...(19): siRNA sense strand
gauggcaccguagacuuug

SEQ ID NO: 1076768 - RNA, 19 nt, Homo sapiens
  misc_RNA (1)...(19): siRNA sense strand
caagaaagauugugcaaga

SEQ ID NO: 1076769 - RNA, 19 nt, Homo sapiens
  misc_RNA (1)...(19): siRNA sense strand
gauaagagguuuagaugga

SEQ ID NO: 1076770 - RNA, 19 nt, Homo sapiens
  misc_RNA (1)...(19): siRNA sense strand
gaagagaaacccuauaaau

SEQ ID NO: 1076771 - RNA, 19 nt, Homo sapiens
  misc_RNA (1)...(19): siRNA sense strand
gggaaaaccuucagaguua

SEQ ID NO: 1076772 - RNA, 19 nt, Homo sapiens
  misc_RNA (1)...(19): siRNA sense strand
agucagaacucccaccuua

SEQ ID NO: 1076773 - RNA, 19 nt, Homo sapiens
  misc_RNA (1)...(19): siRNA sense strand
gagcagccauauacuugua

SEQ ID NO: 1076774 - RNA, 19 nt, Homo sapiens
  misc_RNA (1)...(19): siRNA sense strand
gggaaaagcuucagucaaa

SEQ ID NO: 1076775 - RNA, 19 nt, Homo sapiens
  misc_RNA (1)...(19): siRNA sense strand
agaaggcccucuacaauga

SEQ ID NO: 1076776 - RNA, 19 nt, Homo sapiens
  misc_RNA (1)...(19): siRNA sense strand
aaagugaucuccugucuag

SEQ ID NO: 1076777 - RNA, 19 nt, Homo sapiens
  misc_RNA (1)...(19): siRNA sense strand
ggucaagccuucuuagaca

SEQ ID NO: 1076778 - RNA, 19 nt, Homo sapiens
  misc_RNA (1)...(19): siRNA sense strand
ggaguucagaucuuaauaa

SEQ ID NO: 1076779 - RNA, 19 nt, Homo sapiens
  misc_RNA (1)...(19): siRNA sense strand
gagaaacccuauaaauguc

SEQ ID NO: 1076780 - RNA, 19 nt, Homo sapiens
  misc_RNA (1)...(19): siRNA sense strand
gaacucccaccuuauuaaa

SEQ ID NO: 1076781 - RNA, 19 nt, Homo sapiens
  misc_RNA (1)...(19): siRNA sense strand
cagcaggcgucauaucaaa

SEQ ID NO: 1076782 - RNA, 19 nt, Homo sapiens
  misc_RNA (1)...(19): siRNA sense strand
ugucaucucucuagcauug

SEQ ID NO: 1076783 - RNA, 19 nt, Homo sapiens
  misc_RNA (1)...(19): siRNA sense strand
gaaaacagcaggcaaagaa

SEQ ID NO: 1076784 - RNA, 19 nt, Homo sapiens
  misc_RNA (1)...(19): siRNA sense strand
gccauauacuuguagcaua

SEQ ID NO: 1076785 - RNA, 19 nt, Homo sapiens
  misc_RNA (1)...(19): siRNA sense strand
agagaaacccuauaaaugu

SEQ ID NO: 1076786 - RNA, 19 nt, Homo sapiens
  misc_RNA (1)...(19): siRNA sense strand
ggaagaaugggaguuauug

SEQ ID NO: 1076787 - RNA, 19 nt, Homo sapiens
  misc_RNA (1)...(19): siRNA sense strand
gagagaagccuuuuaaaug

SEQ ID NO: 1076788 - RNA, 19 nt, Homo sapiens
  misc_RNA (1)...(19): siRNA sense strand
gaaaagcccuucacauguc

SEQ ID NO: 1076789 - RNA, 19 nt, Homo sapiens
  misc_RNA (1)...(19): siRNA sense strand
gaagagccauggguucaag

SEQ ID NO: 1076790 - RNA, 19 nt, Homo sapiens
  misc_RNA (1)...(19): siRNA sense strand
cuauaaaugucaacagugu

SEQ ID NO: 1076791 - RNA, 19 nt, Homo sapiens
  misc_RNA (1)...(19): siRNA sense strand
gcacuuaacaacacaccaa

SEQ ID NO: 1076792 - RNA, 19 nt, Homo sapiens
  misc_RNA (1)...(19): siRNA sense strand
aagagaaacccuauaaaug

SEQ ID NO: 1076793 - RNA, 19 nt, Homo sapiens
  misc_RNA (1)...(19): siRNA sense strand
gagaaaagcccuucacaug

SEQ ID NO: 1076794 - RNA, 19 nt, Homo sapiens
  misc_RNA (1)...(19): siRNA sense strand
ccaggaagaaugggaguua

SEQ ID NO: 1076795 - RNA, 19 nt, Homo sapiens
  misc_RNA (1)...(19): siRNA sense strand
ucagaacucccaccuuauu

SEQ ID NO: 1076796 - RNA, 19 nt, Homo sapiens
  misc_RNA (1)...(19): siRNA sense strand
cagaacucccaccuuauua

SEQ ID NO: 1076797 - RNA, 19 nt, Homo sapiens
  misc_RNA (1)...(19): siRNA sense strand
gaucgucacaagaaagauu

SEQ ID NO: 1076798 - RNA, 19 nt, Homo sapiens
  misc_RNA (1)...(19): siRNA sense strand
ucagaaggcccucuacaau

SEQ ID NO: 1076799 - RNA, 19 nt, Homo sapiens
  misc_RNA (1)...(19): siRNA sense strand
gaucuccugucuagagcaa

SEQ ID NO: 1076800 - RNA, 19 nt, Homo sapiens
  misc_RNA (1)...(19): siRNA sense strand
gaaacccuauaaaugucaa

SEQ ID NO: 1076801 - RNA, 19 nt, Homo sapiens
  misc_RNA (1)...(19): siRNA sense strand
caagagagaagccuuuuaa

SEQ ID NO: 1076802 - RNA, 19 nt, Homo sapiens
  misc_RNA (1)...(19): siRNA sense strand
uaacaacacaccaaggaau

SEQ ID NO: 1076803 - RNA, 19 nt, Homo sapiens
  misc_RNA (1)...(19): siRNA sense strand
cagaaggcccucuacaaug

SEQ ID NO: 1076804 - RNA, 19 nt, Homo sapiens
  misc_RNA (1)...(19): siRNA sense strand
ccagaaacuccaccuguga

SEQ ID NO: 1076805 - RNA, 19 nt, Homo sapiens
  misc_RNA (1)...(19): siRNA sense strand
uuacauacacaccaaagaa

SEQ ID NO: 1076806 - RNA, 19 nt, Homo sapiens
  misc_RNA (1)...(19): siRNA sense strand
caacacaccaaggaauaaa

SEQ ID NO: 1076807 - RNA, 19 nt, Homo sapiens
  misc_RNA (1)...(19): siRNA sense strand
cugaagagaaacccuauaa

SEQ ID NO: 1076808 - RNA, 19 nt, Homo sapiens
  misc_RNA (1)...(19): siRNA sense strand
cuaaagugaucuccugucu

SEQ ID NO: 1076809 - RNA, 19 nt, Homo sapiens
  misc_RNA (1)...(19): siRNA sense strand
gugauaagagguuuagaug

SEQ ID NO: 1076810 - RNA, 19 nt, Homo sapiens
  misc_RNA (1)...(19): siRNA sense strand
gugagcagccauauacuug

SEQ ID NO: 1076811 - RNA, 19 nt, Homo sapiens
  misc_RNA (1)...(19): siRNA sense strand
ggaaaagcuucagucaaaa

SEQ ID NO: 1076812 - RNA, 19 nt, Homo sapiens
  misc_RNA (1)...(19): siRNA sense strand
ugucaacagugugauaaga

SEQ ID NO: 1076813 - RNA, 19 nt, Homo sapiens
  misc_RNA (1)...(19): siRNA sense strand
aguuagcucugaccuuauu

SEQ ID NO: 1076814 - RNA, 19 nt, Homo sapiens
  misc_RNA (1)...(19): siRNA sense strand
accaaagaauucacacuga

SEQ ID NO: 1076815 - RNA, 19 nt, Homo sapiens
  misc_RNA (1)...(19): siRNA sense strand
agagaagccuuuuaaaugu

SEQ ID NO: 1076816 - RNA, 19 nt, Homo sapiens
  misc_RNA (1)...(19): siRNA sense strand
acacaccaaagaacucaua

SEQ ID NO: 1076817 - RNA, 19 nt, Homo sapiens
  misc_RNA (1)...(19): siRNA sense strand
ugaagagaaacccuauaaa

SEQ ID NO: 1076818 - RNA, 19 nt, Homo sapiens
  misc_RNA (1)...(19): siRNA sense strand
aacaacacaccaaggaaua

SEQ ID NO: 1076819 - RNA, 19 nt, Homo sapiens
  misc_RNA (1)...(19): siRNA sense strand
uguagcauaugcaggagaa

SEQ ID NO: 1076820 - RNA, 19 nt, Homo sapiens
  misc_RNA (1)...(19): siRNA sense strand
agaacucccaccuuauuaa

SEQ ID NO: 1076821 - RNA, 19 nt, Homo sapiens
  misc_RNA (1)...(19): siRNA sense strand
gggaagagccauggguuca

SEQ ID NO: 1076822 - RNA, 19 nt, Homo sapiens
  misc_RNA (1)...(19): siRNA sense strand
cuacaggguuaaagcucaa

SEQ ID NO: 1076823 - RNA, 19 nt, Homo sapiens
  misc_RNA (1)...(19): siRNA sense strand
ggugagcagccauauacuu

SEQ ID NO: 1076824 - RNA, 19 nt, Homo sapiens
  misc_RNA (1)...(19): siRNA sense strand
caggugagcagccauauac

SEQ ID NO: 1076825 - RNA, 19 nt, Homo sapiens
  misc_RNA (1)...(19): siRNA sense strand
uaaagugaucuccugucua

SEQ ID NO: 1076826 - RNA, 19 nt, Homo sapiens
  misc_RNA (1)...(19): siRNA sense strand
gaagaaugggaguuauugg

SEQ ID NO: 1076827 - RNA, 19 nt, Homo sapiens
  misc_RNA (1)...(19): siRNA sense strand
agaaagauugugcaagaga

SEQ ID NO: 1076828 - RNA, 19 nt, Homo sapiens
  misc_RNA (1)...(19): siRNA sense strand
uauggaucgucacaagaaa

SEQ ID NO: 1076829 - RNA, 19 nt, Homo sapiens
  misc_RNA (1)...(19): siRNA sense strand
caucagccugugucucuuu

SEQ ID NO: 1076830 - RNA, 19 nt, Homo sapiens
  misc_RNA (1)...(19): siRNA sense strand
acacaggugagcagccaua

SEQ ID NO: 1076831 - RNA, 19 nt, Homo sapiens
  misc_RNA (1)...(19): siRNA sense strand
caggaagaaugggaguuau

SEQ ID NO: 1076832 - RNA, 19 nt, Homo sapiens
  misc_RNA (1)...(19): siRNA sense strand
ugacuuagaaauacaagca

SEQ ID NO: 1076833 - RNA, 19 nt, Homo sapiens
  misc_RNA (1)...(19): siRNA sense strand
ggaagagccauggguucaa

SEQ ID NO: 1076834 - RNA, 19 nt, Homo sapiens
  misc_RNA (1)...(19): siRNA sense strand
acucccaccuuauuaaaca

SEQ ID NO: 1076835 - RNA, 19 nt, Homo sapiens
  misc_RNA (1)...(19): siRNA sense strand
gaaaagcuucagucaaaau

SEQ ID NO: 1076836 - RNA, 19 nt, Homo sapiens
  misc_RNA (1)...(19): siRNA sense strand
aaaugucaacagugugaua

SEQ ID NO: 1076837 - RNA, 19 nt, Homo sapiens
  misc_RNA (1)...(19): siRNA sense strand
auaaaugucaacaguguga

SEQ ID NO: 1076838 - RNA, 19 nt, Homo sapiens
  misc_RNA (1)...(19): siRNA sense strand
gugcaagagagaagccuuu

SEQ ID NO: 1076839 - RNA, 19 nt, Homo sapiens
  misc_RNA (1)...(19): siRNA sense strand
gcaagagagaagccuuuua

SEQ ID NO: 1076840 - RNA, 19 nt, Homo sapiens
  misc_RNA (1)...(19): siRNA sense strand
gauggaguucagaucuuaa

SEQ ID NO: 1076841 - RNA, 19 nt, Homo sapiens
  misc_RNA (1)...(19): siRNA sense strand
ccacucagaaggcccucua

SEQ ID NO: 1076842 - RNA, 19 nt, Homo sapiens
  misc_RNA (1)...(19): siRNA sense strand
uuauggaucgucacaagaa

SEQ ID NO: 1076843 - RNA, 19 nt, Homo sapiens
  misc_RNA (1)...(19): siRNA sense strand
ucaucucucuagcauuguu

SEQ ID NO: 1076844 - RNA, 19 nt, Homo sapiens
  misc_RNA (1)...(19): siRNA sense strand
acaacacaccaaggaauaa

SEQ ID NO: 1076845 - RNA, 19 nt, Homo sapiens
  misc_RNA (1)...(19): siRNA sense strand
uauuggaucccacucagaa

SEQ ID NO: 1076846 - RNA, 19 nt, Homo sapiens
  misc_RNA (1)...(19): siRNA sense strand
aguaaaaguuccccagaaa

SEQ ID NO: 1076847 - RNA, 19 nt, Homo sapiens
  misc_RNA (1)...(19): siRNA sense strand
ggaaaauggcaccaagauu

SEQ ID NO: 1076848 - RNA, 19 nt, Homo sapiens
  misc_RNA (1)...(19): siRNA sense strand
gcacagagugggaaaaugg

SEQ ID NO: 1076849 - RNA, 19 nt, Homo sapiens
  misc_RNA (1)...(19): siRNA sense strand
uuaaggauagugccggaaa

SEQ ID NO: 1076850 - RNA, 19 nt, Homo sapiens
  misc_RNA (1)...(19): siRNA sense strand
aaaaucuccuacaggguua

SEQ ID NO: 1076851 - RNA, 19 nt, Homo sapiens
  misc_RNA (1)...(19): siRNA sense strand
gagccauggguucaaguau

SEQ ID NO: 1076852 - RNA, 19 nt, Homo sapiens
  misc_RNA (1)...(19): siRNA sense strand
cccuauaaaugucaacagu

SEQ ID NO: 1076853 - RNA, 19 nt, Homo sapiens
  misc_RNA (1)...(19): siRNA sense strand
aaacgacacugaaaaucau

SEQ ID NO: 1076854 - RNA, 19 nt, Homo sapiens
  misc_RNA (1)...(19): siRNA sense strand
gcggucaagccuucuuaga

SEQ ID NO: 1076855 - RNA, 19 nt, Homo sapiens
  misc_RNA (1)...(19): siRNA sense strand
guaaaaguuccccagaaaa

SEQ ID NO: 1076856 - RNA, 19 nt, Homo sapiens
  misc_RNA (1)...(19): siRNA sense strand
ugugucucuuucugacuua

SEQ ID NO: 1076857 - RNA, 19 nt, Homo sapiens
  misc_RNA (1)...(19): siRNA sense strand
gcauaugcaggagaaacuu

SEQ ID NO: 1076858 - RNA, 19 nt, Homo sapiens
  misc_RNA (1)...(19): siRNA sense strand
acaggugagcagccauaua

SEQ ID NO: 1076859 - RNA, 19 nt, Homo sapiens
  misc_RNA (1)...(19): siRNA sense strand
aagaaugggaguuauugga

SEQ ID NO: 1076860 - RNA, 19 nt, Homo sapiens
  misc_RNA (1)...(19): siRNA sense strand
cuuaacaacacaccaagga

SEQ ID NO: 1076861 - RNA, 19 nt, Homo sapiens
  misc_RNA (1)...(19): siRNA sense strand
gaaggcccucuacaaugau

SEQ ID NO: 1076862 - RNA, 19 nt, Homo sapiens
  misc_RNA (1)...(19): siRNA sense strand
gagaagccuuuuaaauguc

SEQ ID NO: 1076863 - RNA, 19 nt, Homo sapiens
  misc_RNA (1)...(19): siRNA sense strand
aaacuuauggaucgucaca

SEQ ID NO: 1076864 - RNA, 19 nt, Homo sapiens
  misc_RNA (1)...(19): siRNA sense strand
gccauggguucaaguaucc

SEQ ID NO: 1076865 - RNA, 19 nt, Homo sapiens
  misc_RNA (1)...(19): siRNA sense strand
caccaaagaacucauacag

SEQ ID NO: 1076866 - RNA, 19 nt, Homo sapiens
  misc_RNA (1)...(19): siRNA sense strand
agaaugggaguuauuggau

SEQ ID NO: 1076867 - RNA, 19 nt, Homo sapiens
  misc_RNA (1)...(19): siRNA sense strand
acagugugauaagagguuu

SEQ ID NO: 1076868 - RNA, 19 nt, Homo sapiens
  misc_RNA (1)...(19): siRNA sense strand
gaacaccauucaaagauua

SEQ ID NO: 1076869 - RNA, 19 nt, Homo sapiens
  misc_RNA (1)...(19): siRNA sense strand
guaagaaacuggacaagaa

SEQ ID NO: 1076870 - RNA, 19 nt, Homo sapiens
  misc_RNA (1)...(19): siRNA sense strand
gaagaaagguggcgagaag

SEQ ID NO: 1076871 - RNA, 19 nt, Homo sapiens
  misc_RNA (1)...(19): siRNA sense strand
ccaaagacaucgcugaaau

SEQ ID NO: 1076872 - RNA, 19 nt, Homo sapiens
  misc_RNA (1)...(19): siRNA sense strand
gcaaagaacucugcaagac

SEQ ID NO: 1076873 - RNA, 19 nt, Homo sapiens
  misc_RNA (1)...(19): siRNA sense strand
ccuggaagcuggccuaauu

SEQ ID NO: 1076874 - RNA, 19 nt, Homo sapiens
  misc_RNA (1)...(19): siRNA sense strand
gaaaccagagcaacgcuua

SEQ ID NO: 1076875 - RNA, 19 nt, Homo sapiens
  misc_RNA (1)...(19): siRNA sense strand
agacaucgcugaaauugau

SEQ ID NO: 1076876 - RNA, 19 nt, Homo sapiens
  misc_RNA (1)...(19): siRNA sense strand
gaagauguaugccuguaag

SEQ ID NO: 1076877 - RNA, 19 nt, Homo sapiens
  misc_RNA (1)...(19): siRNA sense strand
ggccauggcuuucuugcaa

SEQ ID NO: 1076878 - RNA, 19 nt, Homo sapiens
  misc_RNA (1)...(19): siRNA sense strand
gccagaagcugucccugaa

SEQ ID NO: 1076879 - RNA, 19 nt, Homo sapiens
  misc_RNA (1)...(19): siRNA sense strand
agaagcggcugaagaagaa

SEQ ID NO: 1076880 - RNA, 19 nt, Homo sapiens
  misc_RNA (1)...(19): siRNA sense strand
gcaggaagaaauuauagaa

SEQ ID NO: 1076881 - RNA, 19 nt, Homo sapiens
  misc_RNA (1)...(19): siRNA sense strand
uuacauggcuccugagauc

SEQ ID NO: 1076882 - RNA, 19 nt, Homo sapiens
  misc_RNA (1)...(19): siRNA sense strand
gcaagacgaggucaaauuc

SEQ ID NO: 1076883 - RNA, 19 nt, Homo sapiens
  misc_RNA (1)...(19): siRNA sense strand
cgaacaccauucaaagauu

SEQ ID NO: 1076884 - RNA, 19 nt, Homo sapiens
  misc_RNA (1)...(19): siRNA sense strand
ugacaaagauaagcaguuc

SEQ ID NO: 1076885 - RNA, 19 nt, Homo sapiens
  misc_RNA (1)...(19): siRNA sense strand
gauguaugccuguaagaaa

SEQ ID NO: 1076886 - RNA, 19 nt, Homo sapiens
  misc_RNA (1)...(19): siRNA sense strand
gauaagcaguucuucaaaa

SEQ ID NO: 1076887 - RNA, 19 nt, Homo sapiens
  misc_RNA (1)...(19): siRNA sense strand
guaaagaggaucugaagca

SEQ ID NO: 1076888 - RNA, 19 nt, Homo sapiens
  misc_RNA (1)...(19): siRNA sense strand
caaagacaucgcugaaauu

SEQ ID NO: 1076889 - RNA, 19 nt, Homo sapiens
  misc_RNA (1)...(19): siRNA sense strand
acaagaagcggcugaagaa

SEQ ID NO: 1076890 - RNA, 19 nt, Homo sapiens
  misc_RNA (1)...(19): siRNA sense strand
ggacgaacaccauucaaag

SEQ ID NO: 1076891 - RNA, 19 nt, Homo sapiens
  misc_RNA (1)...(19): siRNA sense strand
ggaagaaauuauagaaacg

SEQ ID NO: 1076892 - RNA, 19 nt, Homo sapiens
  misc_RNA (1)...(19): siRNA sense strand
uaaagaggaucugaagcaa

SEQ ID NO: 1076893 - RNA, 19 nt, Homo sapiens
  misc_RNA (1)...(19): siRNA sense strand
gacaaguacuucacugagu

SEQ ID NO: 1076894 - RNA, 19 nt, Homo sapiens
  misc_RNA (1)...(19): siRNA sense strand
ucaaauuccagcaugauaa

SEQ ID NO: 1076895 - RNA, 19 nt, Homo sapiens
  misc_RNA (1)...(19): siRNA sense strand
gggaagauguaugccugua

SEQ ID NO: 1076896 - RNA, 19 nt, Homo sapiens
  misc_RNA (1)...(19): siRNA sense strand
acaaguacuucacugaguu

SEQ ID NO: 1076897 - RNA, 19 nt, Homo sapiens
  misc_RNA (1)...(19): siRNA sense strand
ggaagauguaugccuguaa

SEQ ID NO: 1076898 - RNA, 19 nt, Homo sapiens
  misc_RNA (1)...(19): siRNA sense strand
gccagacccuucagugguu

SEQ ID NO: 1076899 - RNA, 19 nt, Homo sapiens
  misc_RNA (1)...(19): siRNA sense strand
ggacaugaagccugagaau

SEQ ID NO: 1076900 - RNA, 19 nt, Homo sapiens
  misc_RNA (1)...(19): siRNA sense strand
cagcagcccuuucauuguc

SEQ ID NO: 1076901 - RNA, 19 nt, Homo sapiens
  misc_RNA (1)...(19): siRNA sense strand
gacaagaagcggcugaaga

SEQ ID NO: 1076902 - RNA, 19 nt, Homo sapiens
  misc_RNA (1)...(19): siRNA sense strand
aagaggaucugaagcaaag

SEQ ID NO: 1076903 - RNA, 19 nt, Homo sapiens
  misc_RNA (1)...(19): siRNA sense strand
gaggguaauucauccaagu

SEQ ID NO: 1076904 - RNA, 19 nt, Homo sapiens
  misc_RNA (1)...(19): siRNA sense strand
acaaguuucugcaguggaa

SEQ ID NO: 1076905 - RNA, 19 nt, Homo sapiens
  misc_RNA (1)...(19): siRNA sense strand
ggucagcagcccuuucauu

SEQ ID NO: 1076906 - RNA, 19 nt, Homo sapiens
  misc_RNA (1)...(19): siRNA sense strand
gaagcuggccuaauugaac

SEQ ID NO: 1076907 - RNA, 19 nt, Homo sapiens
  misc_RNA (1)...(19): siRNA sense strand
ugcaagagcagcccuuuaa

SEQ ID NO: 1076908 - RNA, 19 nt, Homo sapiens
  misc_RNA (1)...(19): siRNA sense strand
ccugagauccuaauggaaa

SEQ ID NO: 1076909 - RNA, 19 nt, Homo sapiens
  misc_RNA (1)...(19): siRNA sense strand
gacgaacaccauucaaaga

SEQ ID NO: 1076910 - RNA, 19 nt, Homo sapiens
  misc_RNA (1)...(19): siRNA sense strand
gcaacugcagguuaucuga

SEQ ID NO: 1076911 - RNA, 19 nt, Homo sapiens
  misc_RNA (1)...(19): siRNA sense strand
gcguguguuuguuauugua

SEQ ID NO: 1076912 - RNA, 19 nt, Homo sapiens
  misc_RNA (1)...(19): siRNA sense strand
aaaaggaaaucuuggagaa

SEQ ID NO: 1076913 - RNA, 19 nt, Homo sapiens
  misc_RNA (1)...(19): siRNA sense strand
gaaagguggcgagaagaug

SEQ ID NO: 1076914 - RNA, 19 nt, Homo sapiens
  misc_RNA (1)...(19): siRNA sense strand
aaagacaucgcugaaauug

SEQ ID NO: 1076915 - RNA, 19 nt, Homo sapiens
  misc_RNA (1)...(19): siRNA sense strand
ccucuuccgugacuuccua

SEQ ID NO: 1076916 - RNA, 19 nt, Homo sapiens
  misc_RNA (1)...(19): siRNA sense strand
ccaagucuggcguguguuu

SEQ ID NO: 1076917 - RNA, 19 nt, Homo sapiens
  misc_RNA (1)...(19): siRNA sense strand
ggaagcuggccuaauugaa

SEQ ID NO: 1076918 - RNA, 19 nt, Homo sapiens
  misc_RNA (1)...(19): siRNA sense strand
uagaggacgugcagaacug

SEQ ID NO: 1076919 - RNA, 19 nt, Homo sapiens
  misc_RNA (1)...(19): siRNA sense strand
gaccucaaguuccacaucu

SEQ ID NO: 1076920 - RNA, 19 nt, Homo sapiens
  misc_RNA (1)...(19): siRNA sense strand
uagcauggcaggaagaaau

SEQ ID NO: 1076921 - RNA, 19 nt, Homo sapiens
  misc_RNA (1)...(19): siRNA sense strand
gucagcagcccuuucauug

SEQ ID NO: 1076922 - RNA, 19 nt, Homo sapiens
  misc_RNA (1)...(19): siRNA sense strand
gcaggcucuucuuggcuaa

SEQ ID NO: 1076923 - RNA, 19 nt, Homo sapiens
  misc_RNA (1)...(19): siRNA sense strand
caugaagccugagaaugug

SEQ ID NO: 1076924 - RNA, 19 nt, Homo sapiens
  misc_RNA (1)...(19): siRNA sense strand
ggacugcgacagcaaagag

SEQ ID NO: 1076925 - RNA, 19 nt, Homo sapiens
  misc_RNA (1)...(19): siRNA sense strand
gcauggcaggaagaaauua

SEQ ID NO: 1076926 - RNA, 19 nt, Homo sapiens
  misc_RNA (1)...(19): siRNA sense strand
ccagagcaacgcuuaggaa

SEQ ID NO: 1076927 - RNA, 19 nt, Homo sapiens
  misc_RNA (1)...(19): siRNA sense strand
ggaaacucuucgagaugca

SEQ ID NO: 1076928 - RNA, 19 nt, Homo sapiens
  misc_RNA (1)...(19): siRNA sense strand
uggcguguguuuguuauug

SEQ ID NO: 1076929 - RNA, 19 nt, Homo sapiens
  misc_RNA (1)...(19): siRNA sense strand
ggguggaauuugaugacaa

SEQ ID NO: 1076930 - RNA, 19 nt, Homo sapiens
  misc_RNA (1)...(19): siRNA sense strand
gucaaauuccagcaugaua

SEQ ID NO: 1076931 - RNA, 19 nt, Homo sapiens
  misc_RNA (1)...(19): siRNA sense strand
gaggaucugaagcaaagaa

SEQ ID NO: 1076932 - RNA, 19 nt, Homo sapiens
  misc_RNA (1)...(19): siRNA sense strand
gaggagggacccaccaaag

SEQ ID NO: 1076933 - RNA, 19 nt, Homo sapiens
  misc_RNA (1)...(19): siRNA sense strand
cagaagcugucccugaacu

SEQ ID NO: 1076934 - RNA, 19 nt, Homo sapiens
  misc_RNA (1)...(19): siRNA sense strand
aagaagcggcugaagaaga

SEQ ID NO: 1076935 - RNA, 19 nt, Homo sapiens
  misc_RNA (1)...(19): siRNA sense strand
gccaagcagccaccacuga

SEQ ID NO: 1076936 - RNA, 19 nt, Homo sapiens
  misc_RNA (1)...(19): siRNA sense strand
gaucccaggaaacaucauu

SEQ ID NO: 1076937 - RNA, 19 nt, Homo sapiens
  misc_RNA (1)...(19): siRNA sense strand
gaucugaagcaaagaacuc

SEQ ID NO: 1076938 - RNA, 19 nt, Homo sapiens
  misc_RNA (1)...(19): siRNA sense strand
ccucggcaacugcagguua

SEQ ID NO: 1076939 - RNA, 19 nt, Homo sapiens
  misc_RNA (1)...(19): siRNA sense strand
aguggaaacucuucgagau

SEQ ID NO: 1076940 - RNA, 19 nt, Homo sapiens
  misc_RNA (1)...(19): siRNA sense strand
acccaucucugccuuguca

SEQ ID NO: 1076941 - RNA, 19 nt, Homo sapiens
  misc_RNA (1)...(19): siRNA sense strand
gcaagagcagcccuuuaag

SEQ ID NO: 1076942 - RNA, 19 nt, Homo sapiens
  misc_RNA (1)...(19): siRNA sense strand
gaagcaaagaacucugcaa

SEQ ID NO: 1076943 - RNA, 19 nt, Homo sapiens
  misc_RNA (1)...(19): siRNA sense strand
aaagaggaucugaagcaaa

SEQ ID NO: 1076944 - RNA, 19 nt, Homo sapiens
  misc_RNA (1)...(19): siRNA sense strand
gaaaugguugcuggacgaa

SEQ ID NO: 1076945 - RNA, 19 nt, Homo sapiens
  misc_RNA (1)...(19): siRNA sense strand
cuccugagauccuaaugga

SEQ ID NO: 1076946 - RNA, 19 nt, Homo sapiens
  misc_RNA (1)...(19): siRNA sense strand
gaacucggcaucgucuauc

SEQ ID NO: 1076947 - RNA, 19 nt, Homo sapiens
  misc_RNA (1)...(19): siRNA sense strand
gacaugagccgggugaucu

SEQ ID NO: 1076948 - RNA, 19 nt, Homo sapiens
  misc_RNA (1)...(19): siRNA sense strand
ggacaugagccgggugauc

SEQ ID NO: 1076949 - RNA, 19 nt, Homo sapiens
  misc_RNA (1)...(19): siRNA sense strand
caucgucuaucgggacaug

SEQ ID NO: 1076950 - RNA, 19 nt, Homo sapiens
  misc_RNA (1)...(19): siRNA sense strand
ggagggacccaccaaagac

SEQ ID NO: 1076951 - RNA, 19 nt, Homo sapiens
  misc_RNA (1)...(19): siRNA sense strand
cagacaaguacuucacuga

SEQ ID NO: 1076952 - RNA, 19 nt, Homo sapiens
  misc_RNA (1)...(19): siRNA sense strand
aaaggucaguaaagaggau

SEQ ID NO: 1076953 - RNA, 19 nt, Homo sapiens
  misc_RNA (1)...(19): siRNA sense strand
gacaugaagccugagaaug

SEQ ID NO: 1076954 - RNA, 19 nt, Homo sapiens
  misc_RNA (1)...(19): siRNA sense strand
uaagaaacuggacaagaag

SEQ ID NO: 1076955 - RNA, 19 nt, Homo sapiens
  misc_RNA (1)...(19): siRNA sense strand
gugaggaggguaauucauc

SEQ ID NO: 1076956 - RNA, 19 nt, Homo sapiens
  misc_RNA (1)...(19): siRNA sense strand
gccaaagacaucgcugaaa

SEQ ID NO: 1076957 - RNA, 19 nt, Homo sapiens
  misc_RNA (1)...(19): siRNA sense strand
ccagacccuucagugguuu

SEQ ID NO: 1076958 - RNA, 19 nt, Homo sapiens
  misc_RNA (1)...(19): siRNA sense strand
ucaaguuccacaucuacaa

SEQ ID NO: 1076959 - RNA, 19 nt, Homo sapiens
  misc_RNA (1)...(19): siRNA sense strand
aggcugaggccauggcuuu

SEQ ID NO: 1076960 - RNA, 19 nt, Homo sapiens
  misc_RNA (1)...(19): siRNA sense strand
ugcaagacgaggucaaauu

SEQ ID NO: 1076961 - RNA, 19 nt, Homo sapiens
  misc_RNA (1)...(19): siRNA sense strand
ggaugcugcaccuccauga

SEQ ID NO: 1076962 - RNA, 19 nt, Homo sapiens
  misc_RNA (1)...(19): siRNA sense strand
gauauuugcaggcucuucu

SEQ ID NO: 1076963 - RNA, 19 nt, Homo sapiens
  misc_RNA (1)...(19): siRNA sense strand
caaauuccagcaugauaac

SEQ ID NO: 1076964 - RNA, 19 nt, Homo sapiens
  misc_RNA (1)...(19): siRNA sense strand
aaugguugcuggacgaaca

SEQ ID NO: 1076965 - RNA, 19 nt, Homo sapiens
  misc_RNA (1)...(19): siRNA sense strand
ccuauccuguggacugguu

SEQ ID NO: 1076966 - RNA, 19 nt, Homo sapiens
  misc_RNA (1)...(19): siRNA sense strand
uggaugaccucggcaacug

SEQ ID NO: 1076967 - RNA, 19 nt, Homo sapiens
  misc_RNA (1)...(19): siRNA sense strand
gaaacucuucgagaugcaa

SEQ ID NO: 1076968 - RNA, 19 nt, Homo sapiens
  misc_RNA (1)...(19): siRNA sense strand
gaaagucucugauccaauu

SEQ ID NO: 1076969 - RNA, 19 nt, Homo sapiens
  misc_RNA (1)...(19): siRNA sense strand
ccaauucucuuccaaauga

SEQ ID NO: 1076970 - RNA, 19 nt, Homo sapiens
  misc_RNA (1)...(19): siRNA sense strand
gauauuacguugacugaga

SEQ ID NO: 1076971 - RNA, 19 nt, Homo sapiens
  misc_RNA (1)...(19): siRNA sense strand
gaaccaaagcuaaauaaug

SEQ ID NO: 1076972 - RNA, 19 nt, Homo sapiens
  misc_RNA (1)...(19): siRNA sense strand
gaauucagcuguucagaag

SEQ ID NO: 1076973 - RNA, 19 nt, Homo sapiens
  misc_RNA (1)...(19): siRNA sense strand
gaacuacucugaaauacac

SEQ ID NO: 1076974 - RNA, 19 nt, Homo sapiens
  misc_RNA (1)...(19): siRNA sense strand
ggaguuggcuggagucauc

SEQ ID NO: 1076975 - RNA, 19 nt, Homo sapiens
  misc_RNA (1)...(19): siRNA sense strand
uuaauuggcucaaccacua

SEQ ID NO: 1076976 - RNA, 19 nt, Homo sapiens
  misc_RNA (1)...(19): siRNA sense strand
ccaaggaugugaggcguua

SEQ ID NO: 1076977 - RNA, 19 nt, Homo sapiens
  misc_RNA (1)...(19): siRNA sense strand
caaauagaauucagcuguu

SEQ ID NO: 1076978 - RNA, 19 nt, Homo sapiens
  misc_RNA (1)...(19): siRNA sense strand
gcaguguaauucauuguga

SEQ ID NO: 1076979 - RNA, 19 nt, Homo sapiens
  misc_RNA (1)...(19): siRNA sense strand
guggagacauuugcaauuu

SEQ ID NO: 1076980 - RNA, 19 nt, Homo sapiens
  misc_RNA (1)...(19): siRNA sense strand
uauaacaccuucuguaucu

SEQ ID NO: 1076981 - RNA, 19 nt, Homo sapiens
  misc_RNA (1)...(19): siRNA sense strand
gcaagacaauccacuuugg

SEQ ID NO: 1076982 - RNA, 19 nt, Homo sapiens
  misc_RNA (1)...(19): siRNA sense strand
ggauaaggaucaguauguu

SEQ ID NO: 1076983 - RNA, 19 nt, Homo sapiens
  misc_RNA (1)...(19): siRNA sense strand
gauuuggacccaucuauaa

SEQ ID NO: 1076984 - RNA, 19 nt, Homo sapiens
  misc_RNA (1)...(19): siRNA sense strand
gugaaauugucaaguguaa

SEQ ID NO: 1076985 - RNA, 19 nt, Homo sapiens
  misc_RNA (1)...(19): siRNA sense strand
gcacagcggugaagaaaau

SEQ ID NO: 1076986 - RNA, 19 nt, Homo sapiens
  misc_RNA (1)...(19): siRNA sense strand
gaugugaggcguuauguug

SEQ ID NO: 1076987 - RNA, 19 nt, Homo sapiens
  misc_RNA (1)...(19): siRNA sense strand
gauagcaaauggaauccuu

SEQ ID NO: 1076988 - RNA, 19 nt, Homo sapiens
  misc_RNA (1)...(19): siRNA sense strand
ggacccaucuauaauuaca

SEQ ID NO: 1076989 - RNA, 19 nt, Homo sapiens
  misc_RNA (1)...(19): siRNA sense strand
gccaaucacuguguuuauu

SEQ ID NO: 1076990 - RNA, 19 nt, Homo sapiens
  misc_RNA (1)...(19): siRNA sense strand
gggaaauggucucuggauu

SEQ ID NO: 1076991 - RNA, 19 nt, Homo sapiens
  misc_RNA (1)...(19): siRNA sense strand
aaccaaagcuaaauaaugg

SEQ ID NO: 1076992 - RNA, 19 nt, Homo sapiens
  misc_RNA (1)...(19): siRNA sense strand
gaagguugucuguggauaa

SEQ ID NO: 1076993 - RNA, 19 nt, Homo sapiens
  misc_RNA (1)...(19): siRNA sense strand
gcuaaauaauggugaaauc

SEQ ID NO: 1076994 - RNA, 19 nt, Homo sapiens
  misc_RNA (1)...(19): siRNA sense strand
ggauuuggacccaucuaua

SEQ ID NO: 1076995 - RNA, 19 nt, Homo sapiens
  misc_RNA (1)...(19): siRNA sense strand
ggaagguugucuguggaua

SEQ ID NO: 1076996 - RNA, 19 nt, Homo sapiens
  misc_RNA (1)...(19): siRNA sense strand
gaaaccagaauuagugaau

SEQ ID NO: 1076997 - RNA, 19 nt, Homo sapiens
  misc_RNA (1)...(19): siRNA sense strand
ggaaauugaacaacuggaa

SEQ ID NO: 1076998 - RNA, 19 nt, Homo sapiens
  misc_RNA (1)...(19): siRNA sense strand
ccaggagaguuacguaaug

SEQ ID NO: 1076999 - RNA, 19 nt, Homo sapiens
  misc_RNA (1)...(19): siRNA sense strand
gaacaacuggaacuacaga

SEQ ID NO: 1077000 - RNA, 19 nt, Homo sapiens
  misc_RNA (1)...(19): siRNA sense strand
uaagcugucucuggaaauu

SEQ ID NO: 1077001 - RNA, 19 nt, Homo sapiens
  misc_RNA (1)...(19): siRNA sense strand
uauaagcugucucuggaaa

SEQ ID NO: 1077002 - RNA, 19 nt, Homo sapiens
  misc_RNA (1)...(19): siRNA sense strand
aaauggcccuggagguaua

SEQ ID NO: 1077003 - RNA, 19 nt, Homo sapiens
  misc_RNA (1)...(19): siRNA sense strand
gcagcaguguaauucauug

SEQ ID NO: 1077004 - RNA, 19 nt, Homo sapiens
  misc_RNA (1)...(19): siRNA sense strand
cgaaggcugugaacaagug

SEQ ID NO: 1077005 - RNA, 19 nt, Homo sapiens
  misc_RNA (1)...(19): siRNA sense strand
ccaaugugauucuggcuau

SEQ ID NO: 1077006 - RNA, 19 nt, Homo sapiens
  misc_RNA (1)...(19): siRNA sense strand
aaguagagauuaagacaga

SEQ ID NO: 1077007 - RNA, 19 nt, Homo sapiens
  misc_RNA (1)...(19): siRNA sense strand
gaaaauggcccuggaggua

SEQ ID NO: 1077008 - RNA, 19 nt, Homo sapiens
  misc_RNA (1)...(19): siRNA sense strand
gcaaguagagauuaagaca

SEQ ID NO: 1077009 - RNA, 19 nt, Homo sapiens
  misc_RNA (1)...(19): siRNA sense strand
cuugaucgcugcucuguug

SEQ ID NO: 1077010 - RNA, 19 nt, Homo sapiens
  misc_RNA (1)...(19): siRNA sense strand
cagaugagccuacgacugu

SEQ ID NO: 1077011 - RNA, 19 nt, Homo sapiens
  misc_RNA (1)...(19): siRNA sense strand
ggccaugccuccauuucuu

SEQ ID NO: 1077012 - RNA, 19 nt, Homo sapiens
  misc_RNA (1)...(19): siRNA sense strand
uguggagaaugaaacaaua

SEQ ID NO: 1077013 - RNA, 19 nt, Homo sapiens
  misc_RNA (1)...(19): siRNA sense strand
uuggacccaucuauaauua

SEQ ID NO: 1077014 - RNA, 19 nt, Homo sapiens
  misc_RNA (1)...(19): siRNA sense strand
ccaaucacuguguuuauuu

SEQ ID NO: 1077015 - RNA, 19 nt, Homo sapiens
  misc_RNA (1)...(19): siRNA sense strand
gaggauguguauguuguug

SEQ ID NO: 1077016 - RNA, 19 nt, Homo sapiens
  misc_RNA (1)...(19): siRNA sense strand
gcgcaagacaauccacuuu

SEQ ID NO: 1077017 - RNA, 19 nt, Homo sapiens
  misc_RNA (1)...(19): siRNA sense strand
cuacgacugugauuuguca

SEQ ID NO: 1077018 - RNA, 19 nt, Homo sapiens
  misc_RNA (1)...(19): siRNA sense strand
ccacccacuuuaucauuug

SEQ ID NO: 1077019 - RNA, 19 nt, Homo sapiens
  misc_RNA (1)...(19): siRNA sense strand
gcuacaaacccacuacaga

SEQ ID NO: 1077020 - RNA, 19 nt, Homo sapiens
  misc_RNA (1)...(19): siRNA sense strand
gaucacaaauagaauucag

SEQ ID NO: 1077021 - RNA, 19 nt, Homo sapiens
  misc_RNA (1)...(19): siRNA sense strand
gauaaggaucaguauguug

SEQ ID NO: 1077022 - RNA, 19 nt, Homo sapiens
  misc_RNA (1)...(19): siRNA sense strand
ccaugggcauuauaaacaa

SEQ ID NO: 1077023 - RNA, 19 nt, Homo sapiens
  misc_RNA (1)...(19): siRNA sense strand
caaucacuguguuuauuuc

SEQ ID NO: 1077024 - RNA, 19 nt, Homo sapiens
  misc_RNA (1)...(19): siRNA sense strand
aaugugaaauugucaagug

SEQ ID NO: 1077025 - RNA, 19 nt, Homo sapiens
  misc_RNA (1)...(19): siRNA sense strand
guugugaaguccaagauag

SEQ ID NO: 1077026 - RNA, 19 nt, Homo sapiens
  misc_RNA (1)...(19): siRNA sense strand
cgacugugauuugucagaa

SEQ ID NO: 1077027 - RNA, 19 nt, Homo sapiens
  misc_RNA (1)...(19): siRNA sense strand
caaaagaggauguguaugu

SEQ ID NO: 1077028 - RNA, 19 nt, Homo sapiens
  misc_RNA (1)...(19): siRNA sense strand
gaaauugucaaguguaagc

SEQ ID NO: 1077029 - RNA, 19 nt, Homo sapiens
  misc_RNA (1)...(19): siRNA sense strand
gcugauagcaaauggaauc

SEQ ID NO: 1077030 - RNA, 19 nt, Homo sapiens
  misc_RNA (1)...(19): siRNA sense strand
ggaacuacucugaaauaca

SEQ ID NO: 1077031 - RNA, 19 nt, Homo sapiens
  misc_RNA (1)...(19): siRNA sense strand
ggagguauauaagcugucu

SEQ ID NO: 1077032 - RNA, 19 nt, Homo sapiens
  misc_RNA (1)...(19): siRNA sense strand
gauccaauucucuuccaaa

SEQ ID NO: 1077033 - RNA, 19 nt, Homo sapiens
  misc_RNA (1)...(19): siRNA sense strand
gcauacggcuuuucuguca

SEQ ID NO: 1077034 - RNA, 19 nt, Homo sapiens
  misc_RNA (1)...(19): siRNA sense strand
ccagacaucaggaauggaa

SEQ ID NO: 1077035 - RNA, 19 nt, Homo sapiens
  misc_RNA (1)...(19): siRNA sense strand
cagacacccaggagaguua

SEQ ID NO: 1077036 - RNA, 19 nt, Homo sapiens
  misc_RNA (1)...(19): siRNA sense strand
gauggcgaauggguguaua

SEQ ID NO: 1077037 - RNA, 19 nt, Homo sapiens
  misc_RNA (1)...(19): siRNA sense strand
aagaggauguguauguugu

SEQ ID NO: 1077038 - RNA, 19 nt, Homo sapiens
  misc_RNA (1)...(19): siRNA sense strand
guagagauuaagacagauu

SEQ ID NO: 1077039 - RNA, 19 nt, Homo sapiens
  misc_RNA (1)...(19): siRNA sense strand
cuacaaacccacuacagau

SEQ ID NO: 1077040 - RNA, 19 nt, Homo sapiens
  misc_RNA (1)...(19): siRNA sense strand
cuggaacuacucugaaaua

SEQ ID NO: 1077041 - RNA, 19 nt, Homo sapiens
  misc_RNA (1)...(19): siRNA sense strand
cagaggugcccaaguguga

SEQ ID NO: 1077042 - RNA, 19 nt, Homo sapiens
  misc_RNA (1)...(19): siRNA sense strand
ggagacauuugcaauuuuc

SEQ ID NO: 1077043 - RNA, 19 nt, Homo sapiens
  misc_RNA (1)...(19): siRNA sense strand
gacugugauuugucagaaa

SEQ ID NO: 1077044 - RNA, 19 nt, Homo sapiens
  misc_RNA (1)...(19): siRNA sense strand
cuugugagcccaauaguug

SEQ ID NO: 1077045 - RNA, 19 nt, Homo sapiens
  misc_RNA (1)...(19): siRNA sense strand
aaauagaauucagcuguuc

SEQ ID NO: 1077046 - RNA, 19 nt, Homo sapiens
  misc_RNA (1)...(19): siRNA sense strand
ggcguuauguugcccugaa

SEQ ID NO: 1077047 - RNA, 19 nt, Homo sapiens
  misc_RNA (1)...(19): siRNA sense strand
gaaaaugucaccauccaau

SEQ ID NO: 1077048 - RNA, 19 nt, Homo sapiens
  misc_RNA (1)...(19): siRNA sense strand
gguugucuguggauaagga

SEQ ID NO: 1077049 - RNA, 19 nt, Homo sapiens
  misc_RNA (1)...(19): siRNA sense strand
aaaccagaauuagugaaug

SEQ ID NO: 1077050 - RNA, 19 nt, Homo sapiens
  misc_RNA (1)...(19): siRNA sense strand
cuauggagaugagauuuca

SEQ ID NO: 1077051 - RNA, 19 nt, Homo sapiens
  misc_RNA (1)...(19): siRNA sense strand
guaaugggcaaguagagau

SEQ ID NO: 1077052 - RNA, 19 nt, Homo sapiens
  misc_RNA (1)...(19): siRNA sense strand
auaaggaucaguauguuga

SEQ ID NO: 1077053 - RNA, 19 nt, Homo sapiens
  misc_RNA (1)...(19): siRNA sense strand
gaaaagucguccugccaau

SEQ ID NO: 1077054 - RNA, 19 nt, Homo sapiens
  misc_RNA (1)...(19): siRNA sense strand
gcccugaaccaaagcuaaa

SEQ ID NO: 1077055 - RNA, 19 nt, Homo sapiens
  misc_RNA (1)...(19): siRNA sense strand
ucagaucccauucaacuca

SEQ ID NO: 1077056 - RNA, 19 nt, Homo sapiens
  misc_RNA (1)...(19): siRNA sense strand
gagacacgcuucaaaacug

SEQ ID NO: 1077057 - RNA, 19 nt, Homo sapiens
  misc_RNA (1)...(19): siRNA sense strand
gggcaaguagagauuaaga

SEQ ID NO: 1077058 - RNA, 19 nt, Homo sapiens
  misc_RNA (1)...(19): siRNA sense strand
guauaacaccuucuguauc

SEQ ID NO: 1077059 - RNA, 19 nt, Homo sapiens
  misc_RNA (1)...(19): siRNA sense strand
uguauaacaccuucuguau

SEQ ID NO: 1077060 - RNA, 19 nt, Homo sapiens
  misc_RNA (1)...(19): siRNA sense strand
gcagacacccaggagaguu

SEQ ID NO: 1077061 - RNA, 19 nt, Homo sapiens
  misc_RNA (1)...(19): siRNA sense strand
gagagacagcgcaagacaa

SEQ ID NO: 1077062 - RNA, 19 nt, Homo sapiens
  misc_RNA (1)...(19): siRNA sense strand
aaacccagaggaugugaaa

SEQ ID NO: 1077063 - RNA, 19 nt, Homo sapiens
  misc_RNA (1)...(19): siRNA sense strand
acccagaggugcccaagug

SEQ ID NO: 1077064 - RNA, 19 nt, Homo sapiens
  misc_RNA (1)...(19): siRNA sense strand
acaaacccacuacagauga

SEQ ID NO: 1077065 - RNA, 19 nt, Homo sapiens
  misc_RNA (1)...(19): siRNA sense strand
aauggucucuggauuugga

SEQ ID NO: 1077066 - RNA, 19 nt, Homo sapiens
  misc_RNA (1)...(19): siRNA sense strand
cagcuguucagaaggauuu

SEQ ID NO: 1077067 - RNA, 19 nt, Homo sapiens
  misc_RNA (1)...(19): siRNA sense strand
agagacagcgcaagacaau

SEQ ID NO: 1077068 - RNA, 19 nt, Homo sapiens
  misc_RNA (1)...(19): siRNA sense strand
ggacacaacugguuuauca

SEQ ID NO: 1077069 - RNA, 19 nt, Homo sapiens
  misc_RNA (1)...(19): siRNA sense strand
ggagauauccuguggguua

SEQ ID NO: 1077070 - RNA, 19 nt, Homo sapiens
  misc_RNA (1)...(19): siRNA sense strand
gaagaagaaggacaaauua

SEQ ID NO: 1077071 - RNA, 19 nt, Homo sapiens
  misc_RNA (1)...(19): siRNA sense strand
gcauauaaguguccgauuu

SEQ ID NO: 1077072 - RNA, 19 nt, Homo sapiens
  misc_RNA (1)...(19): siRNA sense strand
gaacuuggaugccagcaaa

SEQ ID NO: 1077073 - RNA, 19 nt, Homo sapiens
  misc_RNA (1)...(19): siRNA sense strand
guacaugguuccaacauaa

SEQ ID NO: 1077074 - RNA, 19 nt, Homo sapiens
  misc_RNA (1)...(19): siRNA sense strand
cagcuaagaucucaaguaa

SEQ ID NO: 1077075 - RNA, 19 nt, Homo sapiens
  misc_RNA (1)...(19): siRNA sense strand
ggacaaccaucuaagaaga

SEQ ID NO: 1077076 - RNA, 19 nt, Homo sapiens
  misc_RNA (1)...(19): siRNA sense strand
gagaaacgcuauugguuau

SEQ ID NO: 1077077 - RNA, 19 nt, Homo sapiens
  misc_RNA (1)...(19): siRNA sense strand
ggacaaaucccauugguau

SEQ ID NO: 1077078 - RNA, 19 nt, Homo sapiens
  misc_RNA (1)...(19): siRNA sense strand
gaacaacaccugguaauug

SEQ ID NO: 1077079 - RNA, 19 nt, Homo sapiens
  misc_RNA (1)...(19): siRNA sense strand
ggaagaagaaggacaaauu

SEQ ID NO: 1077080 - RNA, 19 nt, Homo sapiens
  misc_RNA (1)...(19): siRNA sense strand
gggcugcacuucaauaauu

SEQ ID NO: 1077081 - RNA, 19 nt, Homo sapiens
  misc_RNA (1)...(19): siRNA sense strand
gaucaauuguuguggauuu

SEQ ID NO: 1077082 - RNA, 19 nt, Homo sapiens
  misc_RNA (1)...(19): siRNA sense strand
uaucagaucuggaguguga

SEQ ID NO: 1077083 - RNA, 19 nt, Homo sapiens
  misc_RNA (1)...(19): siRNA sense strand
agacagagcuuucauugga

SEQ ID NO: 1077084 - RNA, 19 nt, Homo sapiens
  misc_RNA (1)...(19): siRNA sense strand
gaagaaagaccuauaugau

SEQ ID NO: 1077085 - RNA, 19 nt, Homo sapiens
  misc_RNA (1)...(19): siRNA sense strand
aguaaaggcuacaucauua

SEQ ID NO: 1077086 - RNA, 19 nt, Homo sapiens
  misc_RNA (1)...(19): siRNA sense strand
gaaguucgcaacaaagaua

SEQ ID NO: 1077087 - RNA, 19 nt, Homo sapiens
  misc_RNA (1)...(19): siRNA sense strand
ccuguggacucucauauua

SEQ ID NO: 1077088 - RNA, 19 nt, Homo sapiens
  misc_RNA (1)...(19): siRNA sense strand
ggacuuaauucagaacaaa

SEQ ID NO: 1077089 - RNA, 19 nt, Homo sapiens
  misc_RNA (1)...(19): siRNA sense strand
gcuaagaucucaaguaaaa

SEQ ID NO: 1077090 - RNA, 19 nt, Homo sapiens
  misc_RNA (1)...(19): siRNA sense strand
gaaacgcuauugguuauug

SEQ ID NO: 1077091 - RNA, 19 nt, Homo sapiens
  misc_RNA (1)...(19): siRNA sense strand
ccaaagggcugcacuucaa

SEQ ID NO: 1077092 - RNA, 19 nt, Homo sapiens
  misc_RNA (1)...(19): siRNA sense strand
gggaagaaauggaaagaau

SEQ ID NO: 1077093 - RNA, 19 nt, Homo sapiens
  misc_RNA (1)...(19): siRNA sense strand
ggaagaaagaccuauauga

SEQ ID NO: 1077094 - RNA, 19 nt, Homo sapiens
  misc_RNA (1)...(19): siRNA sense strand
ggacaguuauaugcacuua

SEQ ID NO: 1077095 - RNA, 19 nt, Homo sapiens
  misc_RNA (1)...(19): siRNA sense strand
caaccgcacugaugauauu

SEQ ID NO: 1077096 - RNA, 19 nt, Homo sapiens
  misc_RNA (1)...(19): siRNA sense strand
ggacuaagacugaauaugg

SEQ ID NO: 1077097 - RNA, 19 nt, Homo sapiens
  misc_RNA (1)...(19): siRNA sense strand
caagggaggugaagaaagu

SEQ ID NO: 1077098 - RNA, 19 nt, Homo sapiens
  misc_RNA (1)...(19): siRNA sense strand
gaagacagagcuuucauug

SEQ ID NO: 1077099 - RNA, 19 nt, Homo sapiens
  misc_RNA (1)...(19): siRNA sense strand
ggaucucucugauauugua

SEQ ID NO: 1077100 - RNA, 19 nt, Homo sapiens
  misc_RNA (1)...(19): siRNA sense strand
gcacaugacaccacaaaga

SEQ ID NO: 1077101 - RNA, 19 nt, Homo sapiens
  misc_RNA (1)...(19): siRNA sense strand
caagacaugugggcauaua

SEQ ID NO: 1077102 - RNA, 19 nt, Homo sapiens
  misc_RNA (1)...(19): siRNA sense strand
ggagacaucuuuaugaacu

SEQ ID NO: 1077103 - RNA, 19 nt, Homo sapiens
  misc_RNA (1)...(19): siRNA sense strand
caaauggaaugguuaaugg

SEQ ID NO: 1077104 - RNA, 19 nt, Homo sapiens
  misc_RNA (1)...(19): siRNA sense strand
gaaauguucacccuaacua

SEQ ID NO: 1077105 - RNA, 19 nt, Homo sapiens
  misc_RNA (1)...(19): siRNA sense strand
guaaauggucgguggauaa

SEQ ID NO: 1077106 - RNA, 19 nt, Homo sapiens
  misc_RNA (1)...(19): siRNA sense strand
aggcaaagaugaagagaaa

SEQ ID NO: 1077107 - RNA, 19 nt, Homo sapiens
  misc_RNA (1)...(19): siRNA sense strand
ggaggaaucagacaucauu

SEQ ID NO: 1077108 - RNA, 19 nt, Homo sapiens
  misc_RNA (1)...(19): siRNA sense strand
ugagaaacgcuauugguua

SEQ ID NO: 1077109 - RNA, 19 nt, Homo sapiens
  misc_RNA (1)...(19): siRNA sense strand
caguauggaugaagacuuu

SEQ ID NO: 1077110 - RNA, 19 nt, Homo sapiens
  misc_RNA (1)...(19): siRNA sense strand
uaucaaacaucccaggaaa

SEQ ID NO: 1077111 - RNA, 19 nt, Homo sapiens
  misc_RNA (1)...(19): siRNA sense strand
gaugggaacuccugugcuu

SEQ ID NO: 1077112 - RNA, 19 nt, Homo sapiens
  misc_RNA (1)...(19): siRNA sense strand
gaacucaacaggacaaauc

SEQ ID NO: 1077113 - RNA, 19 nt, Homo sapiens
  misc_RNA (1)...(19): siRNA sense strand
caacauaacacuucugaca

SEQ ID NO: 1077114 - RNA, 19 nt, Homo sapiens
  misc_RNA (1)...(19): siRNA sense strand
caacaggacucccaagaac

SEQ ID NO: 1077115 - RNA, 19 nt, Homo sapiens
  misc_RNA (1)...(19): siRNA sense strand
ucucaaaggcugcgcauua

SEQ ID NO: 1077116 - RNA, 19 nt, Homo sapiens
  misc_RNA (1)...(19): siRNA sense strand
ggaaaggguuguagaugag

SEQ ID NO: 1077117 - RNA, 19 nt, Homo sapiens
  misc_RNA (1)...(19): siRNA sense strand
gaagaagacagcacugaug

SEQ ID NO: 1077118 - RNA, 19 nt, Homo sapiens
  misc_RNA (1)...(19): siRNA sense strand
ggacuggacgauuugauuu

SEQ ID NO: 1077119 - RNA, 19 nt, Homo sapiens
  misc_RNA (1)...(19): siRNA sense strand
gaaaguggaugcgcagagu

SEQ ID NO: 1077120 - RNA, 19 nt, Homo sapiens
  misc_RNA (1)...(19): siRNA sense strand
gaagguuuguuuaaugcuu

SEQ ID NO: 1077121 - RNA, 19 nt, Homo sapiens
  misc_RNA (1)...(19): siRNA sense strand
ggacacagcagucuaacau

SEQ ID NO: 1077122 - RNA, 19 nt, Homo sapiens
  misc_RNA (1)...(19): siRNA sense strand
guacuacuguuccaagugu

SEQ ID NO: 1077123 - RNA, 19 nt, Homo sapiens
  misc_RNA (1)...(19): siRNA sense strand
ggucgaagauagaauugga

SEQ ID NO: 1077124 - RNA, 19 nt, Homo sapiens
  misc_RNA (1)...(19): siRNA sense strand
cuuaagcgauuucaauuug

SEQ ID NO: 1077125 - RNA, 19 nt, Homo sapiens
  misc_RNA (1)...(19): siRNA sense strand
ucuaacaucugggugaaua

SEQ ID NO: 1077126 - RNA, 19 nt, Homo sapiens
  misc_RNA (1)...(19): siRNA sense strand
ggaagagacuaugaaaugg

SEQ ID NO: 1077127 - RNA, 19 nt, Homo sapiens
  misc_RNA (1)...(19): siRNA sense strand
ggcaauggcuacagcaaug

SEQ ID NO: 1077128 - RNA, 19 nt, Homo sapiens
  misc_RNA (1)...(19): siRNA sense strand
gaacuucacaaauggaaug

SEQ ID NO: 1077129 - RNA, 19 nt, Homo sapiens
  misc_RNA (1)...(19): siRNA sense strand
gugauuaaguuagauggua

SEQ ID NO: 1077130 - RNA, 19 nt, Homo sapiens
  misc_RNA (1)...(19): siRNA sense strand
ucaagcauccaguguguua

SEQ ID NO: 1077131 - RNA, 19 nt, Homo sapiens
  misc_RNA (1)...(19): siRNA sense strand
gacacaagguucccacaga

SEQ ID NO: 1077132 - RNA, 19 nt, Homo sapiens
  misc_RNA (1)...(19): siRNA sense strand
cauaacacuucugacaaua

SEQ ID NO: 1077133 - RNA, 19 nt, Homo sapiens
  misc_RNA (1)...(19): siRNA sense strand
gcuaaaugcuauggugauu

SEQ ID NO: 1077134 - RNA, 19 nt, Homo sapiens
  misc_RNA (1)...(19): siRNA sense strand
gaugguaaagucccagaua

SEQ ID NO: 1077135 - RNA, 19 nt, Homo sapiens
  misc_RNA (1)...(19): siRNA sense strand
agacagcacugaugaccaa

SEQ ID NO: 1077136 - RNA, 19 nt, Homo sapiens
  misc_RNA (1)...(19): siRNA sense strand
gauaugcgccuguggcuau

SEQ ID NO: 1077137 - RNA, 19 nt, Homo sapiens
  misc_RNA (1)...(19): siRNA sense strand
guagaaggcauacugaaug

SEQ ID NO: 1077138 - RNA, 19 nt, Homo sapiens
  misc_RNA (1)...(19): siRNA sense strand
gcaauggucagcuuggaaa

SEQ ID NO: 1077139 - RNA, 19 nt, Homo sapiens
  misc_RNA (1)...(19): siRNA sense strand
agacagauuucuccucuuc

SEQ ID NO: 1077140 - RNA, 19 nt, Homo sapiens
  misc_RNA (1)...(19): siRNA sense strand
gcagcuaagaucucaagua

SEQ ID NO: 1077141 - RNA, 19 nt, Homo sapiens
  misc_RNA (1)...(19): siRNA sense strand
gcaacaggacucccaagaa

SEQ ID NO: 1077142 - RNA, 19 nt, Homo sapiens
  misc_RNA (1)...(19): siRNA sense strand
aacaacaccugguaauuga

SEQ ID NO: 1077143 - RNA, 19 nt, Homo sapiens
  misc_RNA (1)...(19): siRNA sense strand
ucacgaauaucuaucucaa

SEQ ID NO: 1077144 - RNA, 19 nt, Homo sapiens
  misc_RNA (1)...(19): siRNA sense strand
caacauuucuacugcaucu

SEQ ID NO: 1077145 - RNA, 19 nt, Homo sapiens
  misc_RNA (1)...(19): siRNA sense strand
gaacugcagcccauccuau

SEQ ID NO: 1077146 - RNA, 19 nt, Homo sapiens
  misc_RNA (1)...(19): siRNA sense strand
gcacugaugaccaaagaga

SEQ ID NO: 1077147 - RNA, 19 nt, Homo sapiens
  misc_RNA (1)...(19): siRNA sense strand
caacaaagaagcuggaucu

SEQ ID NO: 1077148 - RNA, 19 nt, Homo sapiens
  misc_RNA (1)...(19): siRNA sense strand
acaguuauaugcacuuaga

SEQ ID NO: 1077149 - RNA, 19 nt, Homo sapiens
  misc_RNA (1)...(19): siRNA sense strand
gaagauagaauuggaagca

SEQ ID NO: 1077150 - RNA, 19 nt, Homo sapiens
  misc_RNA (1)...(19): siRNA sense strand
gcaggacacaacugguuua

SEQ ID NO: 1077151 - RNA, 19 nt, Homo sapiens
  misc_RNA (1)...(19): siRNA sense strand
aggaaaggguuguagauga

SEQ ID NO: 1077152 - RNA, 19 nt, Homo sapiens
  misc_RNA (1)...(19): siRNA sense strand
guaaaggcuacaucauuaa

SEQ ID NO: 1077153 - RNA, 19 nt, Homo sapiens
  misc_RNA (1)...(19): siRNA sense strand
gcaggucgaagauagaauu

SEQ ID NO: 1077154 - RNA, 19 nt, Homo sapiens
  misc_RNA (1)...(19): siRNA sense strand
gaaucugggaacuauguua

SEQ ID NO: 1077155 - RNA, 19 nt, Homo sapiens
  misc_RNA (1)...(19): siRNA sense strand
ggaagacagagcuuucauu

SEQ ID NO: 1077156 - RNA, 19 nt, Homo sapiens
  misc_RNA (1)...(19): siRNA sense strand
gacuaagacugaauaugga

SEQ ID NO: 1077157 - RNA, 19 nt, Homo sapiens
  misc_RNA (1)...(19): siRNA sense strand
acacaagguucccacagaa

SEQ ID NO: 1077158 - RNA, 19 nt, Homo sapiens
  misc_RNA (1)...(19): siRNA sense strand
gaaugcagaccaucaagga

SEQ ID NO: 1077159 - RNA, 19 nt, Homo sapiens
  misc_RNA (1)...(19): siRNA sense strand
gugaaaagguaaacuauga

SEQ ID NO: 1077160 - RNA, 19 nt, Homo sapiens
  misc_RNA (1)...(19): siRNA sense strand
ggaagaaauggaaagaaug

SEQ ID NO: 1077161 - RNA, 19 nt, Homo sapiens
  misc_RNA (1)...(19): siRNA sense strand
ggccuuaccuagaccaguu

SEQ ID NO: 1077162 - RNA, 19 nt, Homo sapiens
  misc_RNA (1)...(19): siRNA sense strand
gagcaaaccuggccuuacc

SEQ ID NO: 1077163 - RNA, 19 nt, Homo sapiens
  misc_RNA (1)...(19): siRNA sense strand
uggaagagacuaugaaaug

SEQ ID NO: 1077164 - RNA, 19 nt, Homo sapiens
  misc_RNA (1)...(19): siRNA sense strand
ggacaaauuauuagaggau

SEQ ID NO: 1077165 - RNA, 19 nt, Homo sapiens
  misc_RNA (1)...(19): siRNA sense strand
ggagaugucuuuuauagca

SEQ ID NO: 1077166 - RNA, 19 nt, Homo sapiens
  misc_RNA (1)...(19): siRNA sense strand
caagcaguauggaugaaga

SEQ ID NO: 1077167 - RNA, 19 nt, Homo sapiens
  misc_RNA (1)...(19): siRNA sense strand
caauauccauucacucuac

SEQ ID NO: 1077168 - RNA, 19 nt, Homo sapiens
  misc_RNA (1)...(19): siRNA sense strand
gaagauagaugcuuacaau

SEQ ID NO: 1077169 - RNA, 19 nt, Homo sapiens
  misc_RNA (1)...(19): siRNA sense strand
gcaaagaacugccuuguag

SEQ ID NO: 1077170 - RNA, 19 nt, Homo sapiens
  misc_RNA (1)...(19): siRNA sense strand
gugaagcgcuuucucaaua

SEQ ID NO: 1077171 - RNA, 19 nt, Homo sapiens
  misc_RNA (1)...(19): siRNA sense strand
ggaagaugaucacuaauga

SEQ ID NO: 1077172 - RNA, 19 nt, Homo sapiens
  misc_RNA (1)...(19): siRNA sense strand
gaaagggaauguauaugaa

SEQ ID NO: 1077173 - RNA, 19 nt, Homo sapiens
  misc_RNA (1)...(19): siRNA sense strand
uaacucaucucucuugaaa

SEQ ID NO: 1077174 - RNA, 19 nt, Homo sapiens
  misc_RNA (1)...(19): siRNA sense strand
gaacugccuuguagauaaa

SEQ ID NO: 1077175 - RNA, 19 nt, Homo sapiens
  misc_RNA (1)...(19): siRNA sense strand
guuaagauguucaguguuu

SEQ ID NO: 1077176 - RNA, 19 nt, Homo sapiens
  misc_RNA (1)...(19): siRNA sense strand
gauagaugcuuacaaugaa

SEQ ID NO: 1077177 - RNA, 19 nt, Homo sapiens
  misc_RNA (1)...(19): siRNA sense strand
ugucagcacuuucauauuu

SEQ ID NO: 1077178 - RNA, 19 nt, Homo sapiens
  misc_RNA (1)...(19): siRNA sense strand
guucaguguuuccaaauua

SEQ ID NO: 1077179 - RNA, 19 nt, Homo sapiens
  misc_RNA (1)...(19): siRNA sense strand
gugcaaaucuguucaugaa

SEQ ID NO: 1077180 - RNA, 19 nt, Homo sapiens
  misc_RNA (1)...(19): siRNA sense strand
gaagcgcuuucucaauaua

SEQ ID NO: 1077181 - RNA, 19 nt, Homo sapiens
  misc_RNA (1)...(19): siRNA sense strand
ggaucgaccuuaucaauuc

SEQ ID NO: 1077182 - RNA, 19 nt, Homo sapiens
  misc_RNA (1)...(19): siRNA sense strand
gcagaagcgucaaauacuu

SEQ ID NO: 1077183 - RNA, 19 nt, Homo sapiens
  misc_RNA (1)...(19): siRNA sense strand
gcacuauggccacaaauaa

SEQ ID NO: 1077184 - RNA, 19 nt, Homo sapiens
  misc_RNA (1)...(19): siRNA sense strand
gaacaucaccuccauagca

SEQ ID NO: 1077185 - RNA, 19 nt, Homo sapiens
  misc_RNA (1)...(19): siRNA sense strand
gaacugaaagggaauguau

SEQ ID NO: 1077186 - RNA, 19 nt, Homo sapiens
  misc_RNA (1)...(19): siRNA sense strand
gaaguuaaugguucuauga

SEQ ID NO: 1077187 - RNA, 19 nt, Homo sapiens
  misc_RNA (1)...(19): siRNA sense strand
ucaaauacuuucugaagga

SEQ ID NO: 1077188 - RNA, 19 nt, Homo sapiens
  misc_RNA (1)...(19): siRNA sense strand
auaggaagaugaucacuaa

SEQ ID NO: 1077189 - RNA, 19 nt, Homo sapiens
  misc_RNA (1)...(19): siRNA sense strand
ggauaugcccguucaguuu

SEQ ID NO: 1077190 - RNA, 19 nt, Homo sapiens
  misc_RNA (1)...(19): siRNA sense strand
gagguuagaccguuaugua

SEQ ID NO: 1077191 - RNA, 19 nt, Homo sapiens
  misc_RNA (1)...(19): siRNA sense strand
caaugaagcugcagucagu

SEQ ID NO: 1077192 - RNA, 19 nt, Homo sapiens
  misc_RNA (1)...(19): siRNA sense strand
gaaacaguguaucaaagug

SEQ ID NO: 1077193 - RNA, 19 nt, Homo sapiens
  misc_RNA (1)...(19): siRNA sense strand
gcacagauuauuauuccua

SEQ ID NO: 1077194 - RNA, 19 nt, Homo sapiens
  misc_RNA (1)...(19): siRNA sense strand
gauaugcccguucaguuua

SEQ ID NO: 1077195 - RNA, 19 nt, Homo sapiens
  misc_RNA (1)...(19): siRNA sense strand
agaacugccuuguagauaa

SEQ ID NO: 1077196 - RNA, 19 nt, Homo sapiens
  misc_RNA (1)...(19): siRNA sense strand
gugaauaccuucucucaag

SEQ ID NO: 1077197 - RNA, 19 nt, Homo sapiens
  misc_RNA (1)...(19): siRNA sense strand
caaagacuagugauguuua

SEQ ID NO: 1077198 - RNA, 19 nt, Homo sapiens
  misc_RNA (1)...(19): siRNA sense strand
uacaagauccuguuuauga

SEQ ID NO: 1077199 - RNA, 19 nt, Homo sapiens
  misc_RNA (1)...(19): siRNA sense strand
caaccucggccuccuguua

SEQ ID NO: 1077200 - RNA, 19 nt, Homo sapiens
  misc_RNA (1)...(19): siRNA sense strand
ccaaauuaauugcucaaga

SEQ ID NO: 1077201 - RNA, 19 nt, Homo sapiens
  misc_RNA (1)...(19): siRNA sense strand
guagugguguuauguauag

SEQ ID NO: 1077202 - RNA, 19 nt, Homo sapiens
  misc_RNA (1)...(19): siRNA sense strand
gauggagguuagaccguua

SEQ ID NO: 1077203 - RNA, 19 nt, Homo sapiens
  misc_RNA (1)...(19): siRNA sense strand
ugaaagggaauguauauga

SEQ ID NO: 1077204 - RNA, 19 nt, Homo sapiens
  misc_RNA (1)...(19): siRNA sense strand
gauguucaguguuuccaaa

SEQ ID NO: 1077205 - RNA, 19 nt, Homo sapiens
  misc_RNA (1)...(19): siRNA sense strand
gguguuauguauaguaaug

SEQ ID NO: 1077206 - RNA, 19 nt, Homo sapiens
  misc_RNA (1)...(19): siRNA sense strand
ucugguugcugcauauuua

SEQ ID NO: 1077207 - RNA, 19 nt, Homo sapiens
  misc_RNA (1)...(19): siRNA sense strand
cagagaaacuacugcaaug

SEQ ID NO: 1077208 - RNA, 19 nt, Homo sapiens
  misc_RNA (1)...(19): siRNA sense strand
gaucacuaaugagaagaua

SEQ ID NO: 1077209 - RNA, 19 nt, Homo sapiens
  misc_RNA (1)...(19): siRNA sense strand
gaugaucacuaaugagaag

SEQ ID NO: 1077210 - RNA, 19 nt, Homo sapiens
  misc_RNA (1)...(19): siRNA sense strand
gcacaugaaauuucucaga

SEQ ID NO: 1077211 - RNA, 19 nt, Homo sapiens
  misc_RNA (1)...(19): siRNA sense strand
gcacuuucauauuuguuug

SEQ ID NO: 1077212 - RNA, 19 nt, Homo sapiens
  misc_RNA (1)...(19): siRNA sense strand
gcaaagacuagugauguuu

SEQ ID NO: 1077213 - RNA, 19 nt, Homo sapiens
  misc_RNA (1)...(19): siRNA sense strand
gaagcugcagucaguauuu

SEQ ID NO: 1077214 - RNA, 19 nt, Homo sapiens
  misc_RNA (1)...(19): siRNA sense strand
ggaaugcuguuugcuuuua

SEQ ID NO: 1077215 - RNA, 19 nt, Homo sapiens
  misc_RNA (1)...(19): siRNA sense strand
aauaguagcaccagaaauu

SEQ ID NO: 1077216 - RNA, 19 nt, Homo sapiens
  misc_RNA (1)...(19): siRNA sense strand
agaaacuacugcaaugauu

SEQ ID NO: 1077217 - RNA, 19 nt, Homo sapiens
  misc_RNA (1)...(19): siRNA sense strand
caugaaauuucucagauca

SEQ ID NO: 1077218 - RNA, 19 nt, Homo sapiens
  misc_RNA (1)...(19): siRNA sense strand
ggcaaagacuagugauguu

SEQ ID NO: 1077219 - RNA, 19 nt, Homo sapiens
  misc_RNA (1)...(19): siRNA sense strand
gauaacucaucucucuuga

SEQ ID NO: 1077220 - RNA, 19 nt, Homo sapiens
  misc_RNA (1)...(19): siRNA sense strand
gaacuccauccgucuguuu

SEQ ID NO: 1077221 - RNA, 19 nt, Homo sapiens
  misc_RNA (1)...(19): siRNA sense strand
guuagaccguuauguaguu

SEQ ID NO: 1077222 - RNA, 19 nt, Homo sapiens
  misc_RNA (1)...(19): siRNA sense strand
caaagaagaaggaaauaag

SEQ ID NO: 1077223 - RNA, 19 nt, Homo sapiens
  misc_RNA (1)...(19): siRNA sense strand
aauaagccguguacugauu

SEQ ID NO: 1077224 - RNA, 19 nt, Homo sapiens
  misc_RNA (1)...(19): siRNA sense strand
gaaucgagcagagaaacua

SEQ ID NO: 1077225 - RNA, 19 nt, Homo sapiens
  misc_RNA (1)...(19): siRNA sense strand
uuucucagaucacuaauga

SEQ ID NO: 1077226 - RNA, 19 nt, Homo sapiens
  misc_RNA (1)...(19): siRNA sense strand
gaauggugguucagaugga

SEQ ID NO: 1077227 - RNA, 19 nt, Homo sapiens
  misc_RNA (1)...(19): siRNA sense strand
ggaugcaacuugugauuuu

SEQ ID NO: 1077228 - RNA, 19 nt, Homo sapiens
  misc_RNA (1)...(19): siRNA sense strand
ggagaucaaccacuacuuc

SEQ ID NO: 1077229 - RNA, 19 nt, Homo sapiens
  misc_RNA (1)...(19): siRNA sense strand
aaacuuggccugauuaugg

SEQ ID NO: 1077230 - RNA, 19 nt, Homo sapiens
  misc_RNA (1)...(19): siRNA sense strand
guagauggguccuguuguc

SEQ ID NO: 1077231 - RNA, 19 nt, Homo sapiens
  misc_RNA (1)...(19): siRNA sense strand
acaagauccuguuuaugaa

SEQ ID NO: 1077232 - RNA, 19 nt, Homo sapiens
  misc_RNA (1)...(19): siRNA sense strand
gaaacccuaugcucaacau

SEQ ID NO: 1077233 - RNA, 19 nt, Homo sapiens
  misc_RNA (1)...(19): siRNA sense strand
caaauacuuucugaaggaa

SEQ ID NO: 1077234 - RNA, 19 nt, Homo sapiens
  misc_RNA (1)...(19): siRNA sense strand
agaauaagccguguacuga

SEQ ID NO: 1077235 - RNA, 19 nt, Homo sapiens
  misc_RNA (1)...(19): siRNA sense strand
gaaggaaauaagcaugaaa

SEQ ID NO: 1077236 - RNA, 19 nt, Homo sapiens
  misc_RNA (1)...(19): siRNA sense strand
cuacugcaaugauucuuau

SEQ ID NO: 1077237 - RNA, 19 nt, Homo sapiens
  misc_RNA (1)...(19): siRNA sense strand
gcuuacaucuuccugaauc

SEQ ID NO: 1077238 - RNA, 19 nt, Homo sapiens
  misc_RNA (1)...(19): siRNA sense strand
augagaagauagaugcuua

SEQ ID NO: 1077239 - RNA, 19 nt, Homo sapiens
  misc_RNA (1)...(19): siRNA sense strand
gcagugaagcgcuuucuca

SEQ ID NO: 1077240 - RNA, 19 nt, Homo sapiens
  misc_RNA (1)...(19): siRNA sense strand
gaaacuacugcaaugauuc

SEQ ID NO: 1077241 - RNA, 19 nt, Homo sapiens
  misc_RNA (1)...(19): siRNA sense strand
caaagcagagugcaaugaa

SEQ ID NO: 1077242 - RNA, 19 nt, Homo sapiens
  misc_RNA (1)...(19): siRNA sense strand
ucacauuucuggagcaagu

SEQ ID NO: 1077243 - RNA, 19 nt, Homo sapiens
  misc_RNA (1)...(19): siRNA sense strand
caaaucuguucaugaagga

SEQ ID NO: 1077244 - RNA, 19 nt, Homo sapiens
  misc_RNA (1)...(19): siRNA sense strand
caaucuuucugcaaacuug

SEQ ID NO: 1077245 - RNA, 19 nt, Homo sapiens
  misc_RNA (1)...(19): siRNA sense strand
acaaacagacgaauggaaa

SEQ ID NO: 1077246 - RNA, 19 nt, Homo sapiens
  misc_RNA (1)...(19): siRNA sense strand
cuuacaagauccuguuuau

SEQ ID NO: 1077247 - RNA, 19 nt, Homo sapiens
  misc_RNA (1)...(19): siRNA sense strand
ucucucaaguggcagauuu

SEQ ID NO: 1077248 - RNA, 19 nt, Homo sapiens
  misc_RNA (1)...(19): siRNA sense strand
agauagaugcuuacaauga

SEQ ID NO: 1077249 - RNA, 19 nt, Homo sapiens
  misc_RNA (1)...(19): siRNA sense strand
gaaaauaggaagaugauca

SEQ ID NO: 1077250 - RNA, 19 nt, Homo sapiens
  misc_RNA (1)...(19): siRNA sense strand
ugaagcgcuuucucaauau

SEQ ID NO: 1077251 - RNA, 19 nt, Homo sapiens
  misc_RNA (1)...(19): siRNA sense strand
cacaugaaauuucucagau

SEQ ID NO: 1077252 - RNA, 19 nt, Homo sapiens
  misc_RNA (1)...(19): siRNA sense strand
gugguguuauguauaguaa

SEQ ID NO: 1077253 - RNA, 19 nt, Homo sapiens
  misc_RNA (1)...(19): siRNA sense strand
gagaaacuacugcaaugau

SEQ ID NO: 1077254 - RNA, 19 nt, Homo sapiens
  misc_RNA (1)...(19): siRNA sense strand
aguaauggaucgaccuuau

SEQ ID NO: 1077255 - RNA, 19 nt, Homo sapiens
  misc_RNA (1)...(19): siRNA sense strand
gcuauuuauuugccaguau

SEQ ID NO: 1077256 - RNA, 19 nt, Homo sapiens
  misc_RNA (1)...(19): siRNA sense strand
cagaagcgucaaauacuuu

SEQ ID NO: 1077257 - RNA, 19 nt, Homo sapiens
  misc_RNA (1)...(19): siRNA sense strand
gcaaagccacaugugauug

SEQ ID NO: 1077258 - RNA, 19 nt, Homo sapiens
  misc_RNA (1)...(19): siRNA sense strand
aaacaaagcagagugcaau

SEQ ID NO: 1077259 - RNA, 19 nt, Homo sapiens
  misc_RNA (1)...(19): siRNA sense strand
caucugggcuagcaguugu

SEQ ID NO: 1077260 - RNA, 19 nt, Homo sapiens
  misc_RNA (1)...(19): siRNA sense strand
acggaaugcuguuugcuuu

SEQ ID NO: 1077261 - RNA, 19 nt, Homo sapiens
  misc_RNA (1)...(19): siRNA sense strand
gaacaaacagacgaaugga

SEQ ID NO: 1077262 - RNA, 19 nt, Homo sapiens
  misc_RNA (1)...(19): siRNA sense strand
gagaacaaacagacgaaug

SEQ ID NO: 1077263 - RNA, 19 nt, Homo sapiens
  misc_RNA (1)...(19): siRNA sense strand
ggaagaauaagccguguac

SEQ ID NO: 1077264 - RNA, 19 nt, Homo sapiens
  misc_RNA (1)...(19): siRNA sense strand
uacagaguaugucagguuu

SEQ ID NO: 1077265 - RNA, 19 nt, Homo sapiens
  misc_RNA (1)...(19): siRNA sense strand
gaaauuucucagaucacua

SEQ ID NO: 1077266 - RNA, 19 nt, Homo sapiens
  misc_RNA (1)...(19): siRNA sense strand
ucaguaguuucuuucuuga

SEQ ID NO: 1077267 - RNA, 19 nt, Homo sapiens
  misc_RNA (1)...(19): siRNA sense strand
gguagugguguuauguaua

SEQ ID NO: 1077268 - RNA, 19 nt, Homo sapiens
  misc_RNA (1)...(19): siRNA sense strand
gaaacuaacccauuguaua

SEQ ID NO: 1077269 - RNA, 19 nt, Homo sapiens
  misc_RNA (1)...(19): siRNA sense strand
gcucuuagguggagguuua

SEQ ID NO: 1077270 - RNA, 19 nt, Homo sapiens
  misc_RNA (1)...(19): siRNA sense strand
ggaauuugaugaagaugua

SEQ ID NO: 1077271 - RNA, 19 nt, Homo sapiens
  misc_RNA (1)...(19): siRNA sense strand
gagagaaacuaacccauug

SEQ ID NO: 1077272 - RNA, 19 nt, Homo sapiens
  misc_RNA (1)...(19): siRNA sense strand
gacaagagaggaacauuua

SEQ ID NO: 1077273 - RNA, 19 nt, Homo sapiens
  misc_RNA (1)...(19): siRNA sense strand
ggucuggaaucauuuauug

SEQ ID NO: 1077274 - RNA, 19 nt, Homo sapiens
  misc_RNA (1)...(19): siRNA sense strand
ucaaagagaacaagucuaa

SEQ ID NO: 1077275 - RNA, 19 nt, Homo sapiens
  misc_RNA (1)...(19): siRNA sense strand
gauauuugcugugcagaaa

SEQ ID NO: 1077276 - RNA, 19 nt, Homo sapiens
  misc_RNA (1)...(19): siRNA sense strand
gcauuugccuccagacuug

SEQ ID NO: 1077277 - RNA, 19 nt, Homo sapiens
  misc_RNA (1)...(19): siRNA sense strand
uuaaugagcuuccuugcaa

SEQ ID NO: 1077278 - RNA, 19 nt, Homo sapiens
  misc_RNA (1)...(19): siRNA sense strand
caccauuacuugaugauaa

SEQ ID NO: 1077279 - RNA, 19 nt, Homo sapiens
  misc_RNA (1)...(19): siRNA sense strand
caccuuugcucuucaagua

SEQ ID NO: 1077280 - RNA, 19 nt, Homo sapiens
  misc_RNA (1)...(19): siRNA sense strand
caagauuuggucacuauua

SEQ ID NO: 1077281 - RNA, 19 nt, Homo sapiens
  misc_RNA (1)...(19): siRNA sense strand
uaaagugggugcaagacaa

SEQ ID NO: 1077282 - RNA, 19 nt, Homo sapiens
  misc_RNA (1)...(19): siRNA sense strand
aaucuuggcucaccuuuau

SEQ ID NO: 1077283 - RNA, 19 nt, Homo sapiens
  misc_RNA (1)...(19): siRNA sense strand
gaaaauagcuuggcguuac

SEQ ID NO: 1077284 - RNA, 19 nt, Homo sapiens
  misc_RNA (1)...(19): siRNA sense strand
ggaccaguaucaucuucaa

SEQ ID NO: 1077285 - RNA, 19 nt, Homo sapiens
  misc_RNA (1)...(19): siRNA sense strand
ccaaagugcuggaauugca

SEQ ID NO: 1077286 - RNA, 19 nt, Homo sapiens
  misc_RNA (1)...(19): siRNA sense strand
gagaaacuaacccauugua

SEQ ID NO: 1077287 - RNA, 19 nt, Homo sapiens
  misc_RNA (1)...(19): siRNA sense strand
gaagguucuuuacagcauu

SEQ ID NO: 1077288 - RNA, 19 nt, Homo sapiens
  misc_RNA (1)...(19): siRNA sense strand
gauggagauuggaccagua

SEQ ID NO: 1077289 - RNA, 19 nt, Homo sapiens
  misc_RNA (1)...(19): siRNA sense strand
uaaggauuaucauggauug

SEQ ID NO: 1077290 - RNA, 19 nt, Homo sapiens
  misc_RNA (1)...(19): siRNA sense strand
aaucagaugucaaagacuu

SEQ ID NO: 1077291 - RNA, 19 nt, Homo sapiens
  misc_RNA (1)...(19): siRNA sense strand
aaaggaagcuauucaccau

SEQ ID NO: 1077292 - RNA, 19 nt, Homo sapiens
  misc_RNA (1)...(19): siRNA sense strand
ggccuagggcuuuguauuu

SEQ ID NO: 1077293 - RNA, 19 nt, Homo sapiens
  misc_RNA (1)...(19): siRNA sense strand
gcagauuccucggcuuaau

SEQ ID NO: 1077294 - RNA, 19 nt, Homo sapiens
  misc_RNA (1)...(19): siRNA sense strand
ggaagcuauucaccauuga

SEQ ID NO: 1077295 - RNA, 19 nt, Homo sapiens
  misc_RNA (1)...(19): siRNA sense strand
gauuuggucacuauuauga

SEQ ID NO: 1077296 - RNA, 19 nt, Homo sapiens
  misc_RNA (1)...(19): siRNA sense strand
gaaucuuggcucaccuuua

SEQ ID NO: 1077297 - RNA, 19 nt, Homo sapiens
  misc_RNA (1)...(19): siRNA sense strand
gaggaaggauuugauggau

SEQ ID NO: 1077298 - RNA, 19 nt, Homo sapiens
  misc_RNA (1)...(19): siRNA sense strand
agagcaacgucaccaguuu

SEQ ID NO: 1077299 - RNA, 19 nt, Homo sapiens
  misc_RNA (1)...(19): siRNA sense strand
uuaccaaguuccucuaugu

SEQ ID NO: 1077300 - RNA, 19 nt, Homo sapiens
  misc_RNA (1)...(19): siRNA sense strand
ugaaucagaugucaaagac

SEQ ID NO: 1077301 - RNA, 19 nt, Homo sapiens
  misc_RNA (1)...(19): siRNA sense strand
gauccagaauaaagccauu

SEQ ID NO: 1077302 - RNA, 19 nt, Homo sapiens
  misc_RNA (1)...(19): siRNA sense strand
ucaaugggcauacuuuguu

SEQ ID NO: 1077303 - RNA, 19 nt, Homo sapiens
  misc_RNA (1)...(19): siRNA sense strand
cuucaacucucaaaguaga

SEQ ID NO: 1077304 - RNA, 19 nt, Homo sapiens
  misc_RNA (1)...(19): siRNA sense strand
caaugggcauacuuuguug

SEQ ID NO: 1077305 - RNA, 19 nt, Homo sapiens
  misc_RNA (1)...(19): siRNA sense strand
ggagauuggaccaguauca

SEQ ID NO: 1077306 - RNA, 19 nt, Homo sapiens
  misc_RNA (1)...(19): siRNA sense strand
uguaguaguuggucuggaa

SEQ ID NO: 1077307 - RNA, 19 nt, Homo sapiens
  misc_RNA (1)...(19): siRNA sense strand
gagaaaauaucuucaacuc

SEQ ID NO: 1077308 - RNA, 19 nt, Homo sapiens
  misc_RNA (1)...(19): siRNA sense strand
cagauuccucggcuuaaua

SEQ ID NO: 1077309 - RNA, 19 nt, Homo sapiens
  misc_RNA (1)...(19): siRNA sense strand
uaguuggucuggaaucauu

SEQ ID NO: 1077310 - RNA, 19 nt, Homo sapiens
  misc_RNA (1)...(19): siRNA sense strand
aggaagcuauucaccauug

SEQ ID NO: 1077311 - RNA, 19 nt, Homo sapiens
  misc_RNA (1)...(19): siRNA sense strand
caagagaggaacauuuauc

SEQ ID NO: 1077312 - RNA, 19 nt, Homo sapiens
  misc_RNA (1)...(19): siRNA sense strand
ggaaucauuuauugguucu

SEQ ID NO: 1077313 - RNA, 19 nt, Homo sapiens
  misc_RNA (1)...(19): siRNA sense strand
cauacuuacucaagcagaa

SEQ ID NO: 1077314 - RNA, 19 nt, Homo sapiens
  misc_RNA (1)...(19): siRNA sense strand
agacaagagaggaacauuu

SEQ ID NO: 1077315 - RNA, 19 nt, Homo sapiens
  misc_RNA (1)...(19): siRNA sense strand
gaacuuccagcaccauuac

SEQ ID NO: 1077316 - RNA, 19 nt, Homo sapiens
  misc_RNA (1)...(19): siRNA sense strand
agaggauccugccaacauu

SEQ ID NO: 1077317 - RNA, 19 nt, Homo sapiens
  misc_RNA (1)...(19): siRNA sense strand
cggcagauuccucggcuua

SEQ ID NO: 1077318 - RNA, 19 nt, Homo sapiens
  misc_RNA (1)...(19): siRNA sense strand
agagagaaacuaacccauu

SEQ ID NO: 1077319 - RNA, 19 nt, Homo sapiens
  misc_RNA (1)...(19): siRNA sense strand
cuugucagauguaguaguu

SEQ ID NO: 1077320 - RNA, 19 nt, Homo sapiens
  misc_RNA (1)...(19): siRNA sense strand
aagaaugccacaagaacua

SEQ ID NO: 1077321 - RNA, 19 nt, Homo sapiens
  misc_RNA (1)...(19): siRNA sense strand
gcaccauuacuugaugaua

SEQ ID NO: 1077322 - RNA, 19 nt, Homo sapiens
  misc_RNA (1)...(19): siRNA sense strand
aaagagaacaagucuaaag

SEQ ID NO: 1077323 - RNA, 19 nt, Homo sapiens
  misc_RNA (1)...(19): siRNA sense strand
ccaccacgcccagcuaauu

SEQ ID NO: 1077324 - RNA, 19 nt, Homo sapiens
  misc_RNA (1)...(19): siRNA sense strand
ccaaguuccucuauguucu

SEQ ID NO: 1077325 - RNA, 19 nt, Homo sapiens
  misc_RNA (1)...(19): siRNA sense strand
gucacagccuuaccaaguu

SEQ ID NO: 1077326 - RNA, 19 nt, Homo sapiens
  misc_RNA (1)...(19): siRNA sense strand
gaggauccugccaacauuu

SEQ ID NO: 1077327 - RNA, 19 nt, Homo sapiens
  misc_RNA (1)...(19): siRNA sense strand
uuacucaccuuugcucuuc

SEQ ID NO: 1077328 - RNA, 19 nt, Homo sapiens
  misc_RNA (1)...(19): siRNA sense strand
gccuagggcuuuguauuuc

SEQ ID NO: 1077329 - RNA, 19 nt, Homo sapiens
  misc_RNA (1)...(19): siRNA sense strand
gaauugcaggcaugagcua

SEQ ID NO: 1077330 - RNA, 19 nt, Homo sapiens
  misc_RNA (1)...(19): siRNA sense strand
uaacuugaucugugaugaa

SEQ ID NO: 1077331 - RNA, 19 nt, Homo sapiens
  misc_RNA (1)...(19): siRNA sense strand
ucacagccuuaccaaguuc

SEQ ID NO: 1077332 - RNA, 19 nt, Homo sapiens
  misc_RNA (1)...(19): siRNA sense strand
ccagcaccauuacuugaug

SEQ ID NO: 1077333 - RNA, 19 nt, Homo sapiens
  misc_RNA (1)...(19): siRNA sense strand
ggcaacagucacagccuua

SEQ ID NO: 1077334 - RNA, 19 nt, Homo sapiens
  misc_RNA (1)...(19): siRNA sense strand
uaaugagcuuccuugcaaa

SEQ ID NO: 1077335 - RNA, 19 nt, Homo sapiens
  misc_RNA (1)...(19): siRNA sense strand
gguugcaucugcuaaagag

SEQ ID NO: 1077336 - RNA, 19 nt, Homo sapiens
  misc_RNA (1)...(19): siRNA sense strand
gagccagcgugaccaacga

SEQ ID NO: 1077337 - RNA, 19 nt, Homo sapiens
  misc_RNA (1)...(19): siRNA sense strand
ccuuugcucuucaaguauu

SEQ ID NO: 1077338 - RNA, 19 nt, Homo sapiens
  misc_RNA (1)...(19): siRNA sense strand
cagcaccauuacuugauga

SEQ ID NO: 1077339 - RNA, 19 nt, Homo sapiens
  misc_RNA (1)...(19): siRNA sense strand
ccugguagcugggauuaca

SEQ ID NO: 1077340 - RNA, 19 nt, Homo sapiens
  misc_RNA (1)...(19): siRNA sense strand
uagcuuggcguuaccaguu

SEQ ID NO: 1077341 - RNA, 19 nt, Homo sapiens
  misc_RNA (1)...(19): siRNA sense strand
uuuacagcauuccacauuu

SEQ ID NO: 1077342 - RNA, 19 nt, Homo sapiens
  misc_RNA (1)...(19): siRNA sense strand
caccacgcccagcuaauuu

SEQ ID NO: 1077343 - RNA, 19 nt, Homo sapiens
  misc_RNA (1)...(19): siRNA sense strand
cagccugcaucaucacaau

SEQ ID NO: 1077344 - RNA, 19 nt, Homo sapiens
  misc_RNA (1)...(19): siRNA sense strand
uaccaguuauuacccaaga

SEQ ID NO: 1077345 - RNA, 19 nt, Homo sapiens
  misc_RNA (1)...(19): siRNA sense strand
uucaagauuuggucacuau

SEQ ID NO: 1077346 - RNA, 19 nt, Homo sapiens
  misc_RNA (1)...(19): siRNA sense strand
gagcaacgucaccaguuuc

SEQ ID NO: 1077347 - RNA, 19 nt, Homo sapiens
  misc_RNA (1)...(19): siRNA sense strand
caaagagaacaagucuaaa

SEQ ID NO: 1077348 - RNA, 19 nt, Homo sapiens
  misc_RNA (1)...(19): siRNA sense strand
ccuagggcuuuguauuuca

SEQ ID NO: 1077349 - RNA, 19 nt, Homo sapiens
  misc_RNA (1)...(19): siRNA sense strand
ugaggaaggauuugaugga

SEQ ID NO: 1077350 - RNA, 19 nt, Homo sapiens
  misc_RNA (1)...(19): siRNA sense strand
aaccuugucagauguagua

SEQ ID NO: 1077351 - RNA, 19 nt, Homo sapiens
  misc_RNA (1)...(19): siRNA sense strand
gagacaagagaggaacauu

SEQ ID NO: 1077352 - RNA, 19 nt, Homo sapiens
  misc_RNA (1)...(19): siRNA sense strand
uuacagcauuccacauuuu

SEQ ID NO: 1077353 - RNA, 19 nt, Homo sapiens
  misc_RNA (1)...(19): siRNA sense strand
ucucauacuuacucaagca

SEQ ID NO: 1077354 - RNA, 19 nt, Homo sapiens
  misc_RNA (1)...(19): siRNA sense strand
gaugaagauguauacaauc

SEQ ID NO: 1077355 - RNA, 19 nt, Homo sapiens
  misc_RNA (1)...(19): siRNA sense strand
cuagggcuuuguauuucaa

SEQ ID NO: 1077356 - RNA, 19 nt, Homo sapiens
  misc_RNA (1)...(19): siRNA sense strand
ucacaaugccaacacaucu

SEQ ID NO: 1077357 - RNA, 19 nt, Homo sapiens
  misc_RNA (1)...(19): siRNA sense strand
gauuggaccaguaucaucu

SEQ ID NO: 1077358 - RNA, 19 nt, Homo sapiens
  misc_RNA (1)...(19): siRNA sense strand
acaaugccaacacaucuga

SEQ ID NO: 1077359 - RNA, 19 nt, Homo sapiens
  misc_RNA (1)...(19): siRNA sense strand
guuggucuggaaucauuua

SEQ ID NO: 1077360 - RNA, 19 nt, Homo sapiens
  misc_RNA (1)...(19): siRNA sense strand
uaucuucaacucucaaagu

SEQ ID NO: 1077361 - RNA, 19 nt, Homo sapiens
  misc_RNA (1)...(19): siRNA sense strand
cgacagccagcaagagcaa

SEQ ID NO: 1077362 - RNA, 19 nt, Homo sapiens
  misc_RNA (1)...(19): siRNA sense strand
ccuccaggcuucucauacu

SEQ ID NO: 1077363 - RNA, 19 nt, Homo sapiens
  misc_RNA (1)...(19): siRNA sense strand
uuccucggcuuaauaacuu

SEQ ID NO: 1077364 - RNA, 19 nt, Homo sapiens
  misc_RNA (1)...(19): siRNA sense strand
agauuccucggcuuaauaa

SEQ ID NO: 1077365 - RNA, 19 nt, Homo sapiens
  misc_RNA (1)...(19): siRNA sense strand
caguuuauccagaacauca

SEQ ID NO: 1077366 - RNA, 19 nt, Homo sapiens
  misc_RNA (1)...(19): siRNA sense strand
aagaggauccugccaacau

SEQ ID NO: 1077367 - RNA, 19 nt, Homo sapiens
  misc_RNA (1)...(19): siRNA sense strand
cuggaaucauuuauugguu

SEQ ID NO: 1077368 - RNA, 19 nt, Homo sapiens
  misc_RNA (1)...(19): siRNA sense strand
gcaaagugcuggagauuca

SEQ ID NO: 1077369 - RNA, 19 nt, Homo sapiens
  misc_RNA (1)...(19): siRNA sense strand
gcagagacuuggccuuuga

SEQ ID NO: 1077370 - RNA, 19 nt, Homo sapiens
  misc_RNA (1)...(19): siRNA sense strand
ucaaagcccugcagucuga

SEQ ID NO: 1077371 - RNA, 19 nt, Homo sapiens
  misc_RNA (1)...(19): siRNA sense strand
ggacagauguauucaggau

SEQ ID NO: 1077372 - RNA, 19 nt, Homo sapiens
  misc_RNA (1)...(19): siRNA sense strand
gaggaucucuccagugugu

SEQ ID NO: 1077373 - RNA, 19 nt, Homo sapiens
  misc_RNA (1)...(19): siRNA sense strand
ccaaggaagugcuccagaa

SEQ ID NO: 1077374 - RNA, 19 nt, Homo sapiens
  misc_RNA (1)...(19): siRNA sense strand
agaacaagcuauucaacaa

SEQ ID NO: 1077375 - RNA, 19 nt, Homo sapiens
  misc_RNA (1)...(19): siRNA sense strand
gaugacaaucucagaauaa

SEQ ID NO: 1077376 - RNA, 19 nt, Homo sapiens
  misc_RNA (1)...(19): siRNA sense strand
cagccuaccuggaugcuuu

SEQ ID NO: 1077377 - RNA, 19 nt, Homo sapiens
  misc_RNA (1)...(19): siRNA sense strand
ggucagaauucccuucaau

SEQ ID NO: 1077378 - RNA, 19 nt, Homo sapiens
  misc_RNA (1)...(19): siRNA sense strand
gaagaucccaaccuugauu

SEQ ID NO: 1077379 - RNA, 19 nt, Homo sapiens
  misc_RNA (1)...(19): siRNA sense strand
agaauucccuucaauguca

SEQ ID NO: 1077380 - RNA, 19 nt, Homo sapiens
  misc_RNA (1)...(19): siRNA sense strand
ucagaaggguugacucaga

SEQ ID NO: 1077381 - RNA, 19 nt, Homo sapiens
  misc_RNA (1)...(19): siRNA sense strand
ugaugacaaucucagaaua

SEQ ID NO: 1077382 - RNA, 19 nt, Homo sapiens
  misc_RNA (1)...(19): siRNA sense strand
acagauguauucaggauga

SEQ ID NO: 1077383 - RNA, 19 nt, Homo sapiens
  misc_RNA (1)...(19): siRNA sense strand
acacaaacccauuaucuug

SEQ ID NO: 1077384 - RNA, 19 nt, Homo sapiens
  misc_RNA (1)...(19): siRNA sense strand
gcccagaaguccagucaga

SEQ ID NO: 1077385 - RNA, 19 nt, Homo sapiens
  misc_RNA (1)...(19): siRNA sense strand
gcaaagcaaagaagaaauc

SEQ ID NO: 1077386 - RNA, 19 nt, Homo sapiens
  misc_RNA (1)...(19): siRNA sense strand
ugaacggcaugucaucuuu

SEQ ID NO: 1077387 - RNA, 19 nt, Homo sapiens
  misc_RNA (1)...(19): siRNA sense strand
ccacaaacaagcucaaguu

SEQ ID NO: 1077388 - RNA, 19 nt, Homo sapiens
  misc_RNA (1)...(19): siRNA sense strand
ggacaauggcccagaacaa

SEQ ID NO: 1077389 - RNA, 19 nt, Homo sapiens
  misc_RNA (1)...(19): siRNA sense strand
ccacccaucugcugaacaa

SEQ ID NO: 1077390 - RNA, 19 nt, Homo sapiens
  misc_RNA (1)...(19): siRNA sense strand
gcaagugugagcugggaua

SEQ ID NO: 1077391 - RNA, 19 nt, Homo sapiens
  misc_RNA (1)...(19): siRNA sense strand
gagcuuugguggccuguca

SEQ ID NO: 1077392 - RNA, 19 nt, Homo sapiens
  misc_RNA (1)...(19): siRNA sense strand
ugggugugcuuucucauaa

SEQ ID NO: 1077393 - RNA, 19 nt, Homo sapiens
  misc_RNA (1)...(19): siRNA sense strand
gaauaagcaaagcaaagaa

SEQ ID NO: 1077394 - RNA, 19 nt, Homo sapiens
  misc_RNA (1)...(19): siRNA sense strand
gcaaagaagaaaucagaag

SEQ ID NO: 1077395 - RNA, 19 nt, Homo sapiens
  misc_RNA (1)...(19): siRNA sense strand
gaacaagcuauucaacaag

SEQ ID NO: 1077396 - RNA, 19 nt, Homo sapiens
  misc_RNA (1)...(19): siRNA sense strand
gggaagcccaucaccauga

SEQ ID NO: 1077397 - RNA, 19 nt, Homo sapiens
  misc_RNA (1)...(19): siRNA sense strand
ggaugagauuguggacuuu

SEQ ID NO: 1077398 - RNA, 19 nt, Homo sapiens
  misc_RNA (1)...(19): siRNA sense strand
uacagugucucgagcauau

SEQ ID NO: 1077399 - RNA, 19 nt, Homo sapiens
  misc_RNA (1)...(19): siRNA sense strand
aaucucagcuguccugcuu

SEQ ID NO: 1077400 - RNA, 19 nt, Homo sapiens
  misc_RNA (1)...(19): siRNA sense strand
ucagaucucuaaccaagca

SEQ ID NO: 1077401 - RNA, 19 nt, Homo sapiens
  misc_RNA (1)...(19): siRNA sense strand
ucaacaagauccucaaagc

SEQ ID NO: 1077402 - RNA, 19 nt, Homo sapiens
  misc_RNA (1)...(19): siRNA sense strand
ccaccacucucuccuccuu

SEQ ID NO: 1077403 - RNA, 19 nt, Homo sapiens
  misc_RNA (1)...(19): siRNA sense strand
ccagaaguccagucagauu

SEQ ID NO: 1077404 - RNA, 19 nt, Homo sapiens
  misc_RNA (1)...(19): siRNA sense strand
gagcugaggccuugucucu

SEQ ID NO: 1077405 - RNA, 19 nt, Homo sapiens
  misc_RNA (1)...(19): siRNA sense strand
ucacuacacugagcccuau

SEQ ID NO: 1077406 - RNA, 19 nt, Homo sapiens
  misc_RNA (1)...(19): siRNA sense strand
caaguccaguucuucugaa

SEQ ID NO: 1077407 - RNA, 19 nt, Homo sapiens
  misc_RNA (1)...(19): siRNA sense strand
ggaaggagagaaagaggau

SEQ ID NO: 1077408 - RNA, 19 nt, Homo sapiens
  misc_RNA (1)...(19): siRNA sense strand
ccagucagauuggaaguuc

SEQ ID NO: 1077409 - RNA, 19 nt, Homo sapiens
  misc_RNA (1)...(19): siRNA sense strand
gaacggcaugucaucuuug

SEQ ID NO: 1077410 - RNA, 19 nt, Homo sapiens
  misc_RNA (1)...(19): siRNA sense strand
ggcaggcucuggcaagugu

SEQ ID NO: 1077411 - RNA, 19 nt, Homo sapiens
  misc_RNA (1)...(19): siRNA sense strand
aagcaaagaagaaaucaga

SEQ ID NO: 1077412 - RNA, 19 nt, Homo sapiens
  misc_RNA (1)...(19): siRNA sense strand
ccaguccucuuugucauug

SEQ ID NO: 1077413 - RNA, 19 nt, Homo sapiens
  misc_RNA (1)...(19): siRNA sense strand
ccacacaaacccauuaucu

SEQ ID NO: 1077414 - RNA, 19 nt, Homo sapiens
  misc_RNA (1)...(19): siRNA sense strand
aacaagcuauucaacaaga

SEQ ID NO: 1077415 - RNA, 19 nt, Homo sapiens
  misc_RNA (1)...(19): siRNA sense strand
gcaguaagaccuccaaacg

SEQ ID NO: 1077416 - RNA, 19 nt, Homo sapiens
  misc_RNA (1)...(19): siRNA sense strand
ggccuugucucuccuacug

SEQ ID NO: 1077417 - RNA, 19 nt, Homo sapiens
  misc_RNA (1)...(19): siRNA sense strand
uaacaaaccaagcaaacuc

SEQ ID NO: 1077418 - RNA, 19 nt, Homo sapiens
  misc_RNA (1)...(19): siRNA sense strand
caggauaucagcagcaaga

SEQ ID NO: 1077419 - RNA, 19 nt, Homo sapiens
  misc_RNA (1)...(19): siRNA sense strand
aggaugagauuguggacuu

SEQ ID NO: 1077420 - RNA, 19 nt, Homo sapiens
  misc_RNA (1)...(19): siRNA sense strand
gacaaucucagaauaagca

SEQ ID NO: 1077421 - RNA, 19 nt, Homo sapiens
  misc_RNA (1)...(19): siRNA sense strand
caaacccauuaucuugauu

SEQ ID NO: 1077422 - RNA, 19 nt, Homo sapiens
  misc_RNA (1)...(19): siRNA sense strand
acaaacccauuaucuugau

SEQ ID NO: 1077423 - RNA, 19 nt, Homo sapiens
  misc_RNA (1)...(19): siRNA sense strand
ccaaacgaccgaagaucaa

SEQ ID NO: 1077424 - RNA, 19 nt, Homo sapiens
  misc_RNA (1)...(19): siRNA sense strand
guaugucacugcaguuguc

SEQ ID NO: 1077425 - RNA, 19 nt, Homo sapiens
  misc_RNA (1)...(19): siRNA sense strand
gcucuguguuucccacuuc

SEQ ID NO: 1077426 - RNA, 19 nt, Homo sapiens
  misc_RNA (1)...(19): siRNA sense strand
gagaagauucgagcugaga

SEQ ID NO: 1077427 - RNA, 19 nt, Homo sapiens
  misc_RNA (1)...(19): siRNA sense strand
ucagaauucccuucaaugu

SEQ ID NO: 1077428 - RNA, 19 nt, Homo sapiens
  misc_RNA (1)...(19): siRNA sense strand
ggugugcuuucucauaaca

SEQ ID NO: 1077429 - RNA, 19 nt, Homo sapiens
  misc_RNA (1)...(19): siRNA sense strand
caagaccucuggccuucca

SEQ ID NO: 1077430 - RNA, 19 nt, Homo sapiens
  misc_RNA (1)...(19): siRNA sense strand
ccaaguccaguucuucuga

SEQ ID NO: 1077431 - RNA, 19 nt, Homo sapiens
  misc_RNA (1)...(19): siRNA sense strand
agaauaagcaaagcaaaga

SEQ ID NO: 1077432 - RNA, 19 nt, Homo sapiens
  misc_RNA (1)...(19): siRNA sense strand
gcucuccgcugauucucau

SEQ ID NO: 1077433 - RNA, 19 nt, Homo sapiens
  misc_RNA (1)...(19): siRNA sense strand
cagccgagcaggaucacua

SEQ ID NO: 1077434 - RNA, 19 nt, Homo sapiens
  misc_RNA (1)...(19): siRNA sense strand
gagcaugguggacagaugu

SEQ ID NO: 1077435 - RNA, 19 nt, Homo sapiens
  misc_RNA (1)...(19): siRNA sense strand
uaagcaaagcaaagaagaa

SEQ ID NO: 1077436 - RNA, 19 nt, Homo sapiens
  misc_RNA (1)...(19): siRNA sense strand
ugucaguaauggaguaugu

SEQ ID NO: 1077437 - RNA, 19 nt, Homo sapiens
  misc_RNA (1)...(19): siRNA sense strand
aagcaaagcaaagaagaaa

SEQ ID NO: 1077438 - RNA, 19 nt, Homo sapiens
  misc_RNA (1)...(19): siRNA sense strand
aagcucaaguucccauuuc

SEQ ID NO: 1077439 - RNA, 19 nt, Homo sapiens
  misc_RNA (1)...(19): siRNA sense strand
caagcucaaguucccauuu

SEQ ID NO: 1077440 - RNA, 19 nt, Homo sapiens
  misc_RNA (1)...(19): siRNA sense strand
gagauuguggacuuucuga

SEQ ID NO: 1077441 - RNA, 19 nt, Homo sapiens
  misc_RNA (1)...(19): siRNA sense strand
cacaaacccauuaucuuga

SEQ ID NO: 1077442 - RNA, 19 nt, Homo sapiens
  misc_RNA (1)...(19): siRNA sense strand
gcucugaaccucgggauca

SEQ ID NO: 1077443 - RNA, 19 nt, Homo sapiens
  misc_RNA (1)...(19): siRNA sense strand
gaacagcuugguggugguu

SEQ ID NO: 1077444 - RNA, 19 nt, Homo sapiens
  misc_RNA (1)...(19): siRNA sense strand
gguuuccucugcuuacugu

SEQ ID NO: 1077445 - RNA, 19 nt, Homo sapiens
  misc_RNA (1)...(19): siRNA sense strand
gacaauggcccagaacaag

SEQ ID NO: 1077446 - RNA, 19 nt, Homo sapiens
  misc_RNA (1)...(19): siRNA sense strand
agaccaaagugaccacagu

SEQ ID NO: 1077447 - RNA, 19 nt, Homo sapiens
  misc_RNA (1)...(19): siRNA sense strand
ccgcagagacuuggccuuu

SEQ ID NO: 1077448 - RNA, 19 nt, Homo sapiens
  misc_RNA (1)...(19): siRNA sense strand
cagaacaagcuauucaaca

SEQ ID NO: 1077449 - RNA, 19 nt, Homo sapiens
  misc_RNA (1)...(19): siRNA sense strand
gugggugugcuuucucaua

SEQ ID NO: 1077450 - RNA, 19 nt, Homo sapiens
  misc_RNA (1)...(19): siRNA sense strand
gggaggagcaugucaacag

SEQ ID NO: 1077451 - RNA, 19 nt, Homo sapiens
  misc_RNA (1)...(19): siRNA sense strand
cagaaguccagucagauug

SEQ ID NO: 1077452 - RNA, 19 nt, Homo sapiens
  misc_RNA (1)...(19): siRNA sense strand
gcccagaacaagcuauuca

SEQ ID NO: 1077453 - RNA, 19 nt, Homo sapiens
  misc_RNA (1)...(19): siRNA sense strand
cagaauaagcaaagcaaag

SEQ ID NO: 1077454 - RNA, 19 nt, Homo sapiens
  misc_RNA (1)...(19): siRNA sense strand
ggaagcccaucaccaugac

SEQ ID NO: 1077455 - RNA, 19 nt, Homo sapiens
  misc_RNA (1)...(19): siRNA sense strand
ggaagaucccaaccuugau

SEQ ID NO: 1077456 - RNA, 19 nt, Homo sapiens
  misc_RNA (1)...(19): siRNA sense strand
ccacagccaaguccaguuc

SEQ ID NO: 1077457 - RNA, 19 nt, Homo sapiens
  misc_RNA (1)...(19): siRNA sense strand
gagcucacaggacuucuca

SEQ ID NO: 1077458 - RNA, 19 nt, Homo sapiens
  misc_RNA (1)...(19): siRNA sense strand
gaaaucagaaggguugacu

SEQ ID NO: 1077459 - RNA, 19 nt, Homo sapiens
  misc_RNA (1)...(19): siRNA sense strand
gggcaaggucaucccugua

SEQ ID NO: 1077460 - RNA, 19 nt, Homo sapiens
  misc_RNA (1)...(19): siRNA sense strand
ggagauucacagccauuuc

SEQ ID NO: 1077461 - RNA, 19 nt, Homo sapiens
  misc_RNA (1)...(19): siRNA sense strand
ugugcuuucucauaacaaa

SEQ ID NO: 1077462 - RNA, 19 nt, Homo sapiens
  misc_RNA (1)...(19): siRNA sense strand
ggccaccagugugaaguug

SEQ ID NO: 1077463 - RNA, 19 nt, Homo sapiens
  misc_RNA (1)...(19): siRNA sense strand
gguggccugucauguguca

SEQ ID NO: 1077464 - RNA, 19 nt, Homo sapiens
  misc_RNA (1)...(19): siRNA sense strand
gaguaugucacugcaguug

SEQ ID NO: 1077465 - RNA, 19 nt, Homo sapiens
  misc_RNA (1)...(19): siRNA sense strand
ugccaggacugaugcagau

SEQ ID NO: 1077466 - RNA, 19 nt, Homo sapiens
  misc_RNA (1)...(19): siRNA sense strand
caaagcaaagaagaaauca

SEQ ID NO: 1077467 - RNA, 19 nt, Homo sapiens
  misc_RNA (1)...(19): siRNA sense strand
aggacuggcuggacaaugg

SEQ ID NO: 1077468 - RNA, 19 nt, Homo sapiens
  misc_RNA (1)...(19): siRNA sense strand
gggaggaccuuuauuguuu

SEQ ID NO: 1077469 - RNA, 19 nt, Homo sapiens
  misc_RNA (1)...(19): siRNA sense strand
guacgaaggucaugugaau

SEQ ID NO: 1077470 - RNA, 19 nt, Homo sapiens
  misc_RNA (1)...(19): siRNA sense strand
gcguaucacucuuucagua

SEQ ID NO: 1077471 - RNA, 19 nt, Homo sapiens
  misc_RNA (1)...(19): siRNA sense strand
gaauaacuccgccuaccua

SEQ ID NO: 1077472 - RNA, 19 nt, Homo sapiens
  misc_RNA (1)...(19): siRNA sense strand
gaucugcgcuguggaaauc

SEQ ID NO: 1077473 - RNA, 19 nt, Homo sapiens
  misc_RNA (1)...(19): siRNA sense strand
caaugcaccuuccaugcua

SEQ ID NO: 1077474 - RNA, 19 nt, Homo sapiens
  misc_RNA (1)...(19): siRNA sense strand
ccagcuagguuuccucaga

SEQ ID NO: 1077475 - RNA, 19 nt, Homo sapiens
  misc_RNA (1)...(19): siRNA sense strand
gcugggaucccuccucuuu

SEQ ID NO: 1077476 - RNA, 19 nt, Homo sapiens
  misc_RNA (1)...(19): siRNA sense strand
ccauuugccugucccauga

SEQ ID NO: 1077477 - RNA, 19 nt, Homo sapiens
  misc_RNA (1)...(19): siRNA sense strand
ggagaucuuuggcauugau

SEQ ID NO: 1077478 - RNA, 19 nt, Homo sapiens
  misc_RNA (1)...(19): siRNA sense strand
ucacuuggauucccaccuu

SEQ ID NO: 1077479 - RNA, 19 nt, Homo sapiens
  misc_RNA (1)...(19): siRNA sense strand
agacaugacuggaacuauc

SEQ ID NO: 1077480 - RNA, 19 nt, Homo sapiens
  misc_RNA (1)...(19): siRNA sense strand
ccuccaagauggccaauuc

SEQ ID NO: 1077481 - RNA, 19 nt, Homo sapiens
  misc_RNA (1)...(19): siRNA sense strand
ggaggaccuuuauuguuuc

SEQ ID NO: 1077482 - RNA, 19 nt, Homo sapiens
  misc_RNA (1)...(19): siRNA sense strand
ugacuccuuugcuguuuaa

SEQ ID NO: 1077483 - RNA, 19 nt, Homo sapiens
  misc_RNA (1)...(19): siRNA sense strand
cgaccgauuuaaccgcaua

SEQ ID NO: 1077484 - RNA, 19 nt, Homo sapiens
  misc_RNA (1)...(19): siRNA sense strand
gagggccacuaaaugugua

SEQ ID NO: 1077485 - RNA, 19 nt, Homo sapiens
  misc_RNA (1)...(19): siRNA sense strand
gacuagcagugaugucuug

SEQ ID NO: 1077486 - RNA, 19 nt, Homo sapiens
  misc_RNA (1)...(19): siRNA sense strand
cgccaacuauugccguaua

SEQ ID NO: 1077487 - RNA, 19 nt, Homo sapiens
  misc_RNA (1)...(19): siRNA sense strand
gggccucacugaaucacuu

SEQ ID NO: 1077488 - RNA, 19 nt, Homo sapiens
  misc_RNA (1)...(19): siRNA sense strand
gcaugugaacgaagaagaa

SEQ ID NO: 1077489 - RNA, 19 nt, Homo sapiens
  misc_RNA (1)...(19): siRNA sense strand
ggaagcagacaagcagaaa

SEQ ID NO: 1077490 - RNA, 19 nt, Homo sapiens
  misc_RNA (1)...(19): siRNA sense strand
ggacaccagcagucauuug

SEQ ID NO: 1077491 - RNA, 19 nt, Homo sapiens
  misc_RNA (1)...(19): siRNA sense strand
acgaaggucaugugaauaa

SEQ ID NO: 1077492 - RNA, 19 nt, Homo sapiens
  misc_RNA (1)...(19): siRNA sense strand
ggacuugagggccacuaaa

SEQ ID NO: 1077493 - RNA, 19 nt, Homo sapiens
  misc_RNA (1)...(19): siRNA sense strand
gccaauuccuggugucauc

SEQ ID NO: 1077494 - RNA, 19 nt, Homo sapiens
  misc_RNA (1)...(19): siRNA sense strand
agaacgacauucccagugu

SEQ ID NO: 1077495 - RNA, 19 nt, Homo sapiens
  misc_RNA (1)...(19): siRNA sense strand
gcccagcaguuugcaauca

SEQ ID NO: 1077496 - RNA, 19 nt, Homo sapiens
  misc_RNA (1)...(19): siRNA sense strand
caugacuccuuugcuguuu

SEQ ID NO: 1077497 - RNA, 19 nt, Homo sapiens
  misc_RNA (1)...(19): siRNA sense strand
caccuuccaugcuacgaaa

SEQ ID NO: 1077498 - RNA, 19 nt, Homo sapiens
  misc_RNA (1)...(19): siRNA sense strand
cugcaaauccuccaagaug

SEQ ID NO: 1077499 - RNA, 19 nt, Homo sapiens
  misc_RNA (1)...(19): siRNA sense strand
ggaaggugaauucuaugug

SEQ ID NO: 1077500 - RNA, 19 nt, Homo sapiens
  misc_RNA (1)...(19): siRNA sense strand
cagcuagguuuccucagau

SEQ ID NO: 1077501 - RNA, 19 nt, Homo sapiens
  misc_RNA (1)...(19): siRNA sense strand
ccacgcguaucacucuuuc

SEQ ID NO: 1077502 - RNA, 19 nt, Homo sapiens
  misc_RNA (1)...(19): siRNA sense strand
guaucacucuuucaguaca

SEQ ID NO: 1077503 - RNA, 19 nt, Homo sapiens
  misc_RNA (1)...(19): siRNA sense strand
ggggagaucuuuggcauug

SEQ ID NO: 1077504 - RNA, 19 nt, Homo sapiens
  misc_RNA (1)...(19): siRNA sense strand
ucagauucgccaacuauug

SEQ ID NO: 1077505 - RNA, 19 nt, Homo sapiens
  misc_RNA (1)...(19): siRNA sense strand
gugcugggccucacugaau

SEQ ID NO: 1077506 - RNA, 19 nt, Homo sapiens
  misc_RNA (1)...(19): siRNA sense strand
gacaugacuggaacuauca

SEQ ID NO: 1077507 - RNA, 19 nt, Homo sapiens
  misc_RNA (1)...(19): siRNA sense strand
gcgucgcuguucauaggua

SEQ ID NO: 1077508 - RNA, 19 nt, Homo sapiens
  misc_RNA (1)...(19): siRNA sense strand
caggacugcuacacgagaa

SEQ ID NO: 1077509 - RNA, 19 nt, Homo sapiens
  misc_RNA (1)...(19): siRNA sense strand
ccucagauucgccaacuau

SEQ ID NO: 1077510 - RNA, 19 nt, Homo sapiens
  misc_RNA (1)...(19): siRNA sense strand
uggcgaauaccaacacuga

SEQ ID NO: 1077511 - RNA, 19 nt, Homo sapiens
  misc_RNA (1)...(19): siRNA sense strand
gcaccuuccaugcuacgaa

SEQ ID NO: 1077512 - RNA, 19 nt, Homo sapiens
  misc_RNA (1)...(19): siRNA sense strand
ugacuucucugcaaauccu

SEQ ID NO: 1077513 - RNA, 19 nt, Homo sapiens
  misc_RNA (1)...(19): siRNA sense strand
ggacuagcagugaugucuu

SEQ ID NO: 1077514 - RNA, 19 nt, Homo sapiens
  misc_RNA (1)...(19): siRNA sense strand
ccagcaguuugcaaucaug

SEQ ID NO: 1077515 - RNA, 19 nt, Homo sapiens
  misc_RNA (1)...(19): siRNA sense strand
cgggaggaccuuuauuguu

SEQ ID NO: 1077516 - RNA, 19 nt, Homo sapiens
  misc_RNA (1)...(19): siRNA sense strand
uugcaaucaugacuccuuu

SEQ ID NO: 1077517 - RNA, 19 nt, Homo sapiens
  misc_RNA (1)...(19): siRNA sense strand
ggacuugcagauacuccaa

SEQ ID NO: 1077518 - RNA, 19 nt, Homo sapiens
  misc_RNA (1)...(19): siRNA sense strand
gaaggucaugugaauaacu

SEQ ID NO: 1077519 - RNA, 19 nt, Homo sapiens
  misc_RNA (1)...(19): siRNA sense strand
ugucuuggcccagcaguuu

SEQ ID NO: 1077520 - RNA, 19 nt, Homo sapiens
  misc_RNA (1)...(19): siRNA sense strand
gcuuugcaguuuccagauc

SEQ ID NO: 1077521 - RNA, 19 nt, Homo sapiens
  misc_RNA (1)...(19): siRNA sense strand
gacuugagggccacuaaau

SEQ ID NO: 1077522 - RNA, 19 nt, Homo sapiens
  misc_RNA (1)...(19): siRNA sense strand
ugggaucccuccucuuugg

SEQ ID NO: 1077523 - RNA, 19 nt, Homo sapiens
  misc_RNA (1)...(19): siRNA sense strand
cuaucaagcugugggacuu

SEQ ID NO: 1077524 - RNA, 19 nt, Homo sapiens
  misc_RNA (1)...(19): siRNA sense strand
cuaaucggaaggugaauuc

SEQ ID NO: 1077525 - RNA, 19 nt, Homo sapiens
  misc_RNA (1)...(19): siRNA sense strand
gaggaccuuuauuguuucu

SEQ ID NO: 1077526 - RNA, 19 nt, Homo sapiens
  misc_RNA (1)...(19): siRNA sense strand
gggagaucuuuggcauuga

SEQ ID NO: 1077527 - RNA, 19 nt, Homo sapiens
  misc_RNA (1)...(19): siRNA sense strand
cuccuuugcuguuuaaugg

SEQ ID NO: 1077528 - RNA, 19 nt, Homo sapiens
  misc_RNA (1)...(19): siRNA sense strand
aaucggaaggugaauucua

SEQ ID NO: 1077529 - RNA, 19 nt, Homo sapiens
  misc_RNA (1)...(19): siRNA sense strand
cugaccagcucuucacagu

SEQ ID NO: 1077530 - RNA, 19 nt, Homo sapiens
  misc_RNA (1)...(19): siRNA sense strand
gcaagcgaccgauuuaacc

SEQ ID NO: 1077531 - RNA, 19 nt, Homo sapiens
  misc_RNA (1)...(19): siRNA sense strand
aucggaaggugaauucuau

SEQ ID NO: 1077532 - RNA, 19 nt, Homo sapiens
  misc_RNA (1)...(19): siRNA sense strand
gcauacuggcgaauaccaa

SEQ ID NO: 1077533 - RNA, 19 nt, Homo sapiens
  misc_RNA (1)...(19): siRNA sense strand
gcggguggaaggccauuug

SEQ ID NO: 1077534 - RNA, 19 nt, Homo sapiens
  misc_RNA (1)...(19): siRNA sense strand
uggcaugcuuugcaguuuc

SEQ ID NO: 1077535 - RNA, 19 nt, Homo sapiens
  misc_RNA (1)...(19): siRNA sense strand
caacacugaccagcucuuc

SEQ ID NO: 1077536 - RNA, 19 nt, Homo sapiens
  misc_RNA (1)...(19): siRNA sense strand
cgggacaccagcagucauu

SEQ ID NO: 1077537 - RNA, 19 nt, Homo sapiens
  misc_RNA (1)...(19): siRNA sense strand
cuugagggccacuaaaugu

SEQ ID NO: 1077538 - RNA, 19 nt, Homo sapiens
  misc_RNA (1)...(19): siRNA sense strand
gggacuugagggccacuaa

SEQ ID NO: 1077539 - RNA, 19 nt, Homo sapiens
  misc_RNA (1)...(19): siRNA sense strand
cagauucgccaacuauugc

SEQ ID NO: 1077540 - RNA, 19 nt, Homo sapiens
  misc_RNA (1)...(19): siRNA sense strand
ccaguguggccuucucuuc

SEQ ID NO: 1077541 - RNA, 19 nt, Homo sapiens
  misc_RNA (1)...(19): siRNA sense strand
gcuacgaaagaaccagcua

SEQ ID NO: 1077542 - RNA, 19 nt, Homo sapiens
  misc_RNA (1)...(19): siRNA sense strand
ucagacaugacuggaacua

SEQ ID NO: 1077543 - RNA, 19 nt, Homo sapiens
  misc_RNA (1)...(19): siRNA sense strand
ggcaagcgaccgauuuaac

SEQ ID NO: 1077544 - RNA, 19 nt, Homo sapiens
  misc_RNA (1)...(19): siRNA sense strand
gacaccagcagucauuugg

SEQ ID NO: 1077545 - RNA, 19 nt, Homo sapiens
  misc_RNA (1)...(19): siRNA sense strand
caaaguuggccaagaauua

SEQ ID NO: 1077546 - RNA, 19 nt, Homo sapiens
  misc_RNA (1)...(19): siRNA sense strand
aggcaaaguuggccaagaa

SEQ ID NO: 1077547 - RNA, 19 nt, Homo sapiens
  misc_RNA (1)...(19): siRNA sense strand
gcaaaguuggccaagaauu

SEQ ID NO: 1077548 - RNA, 19 nt, Homo sapiens
  misc_RNA (1)...(19): siRNA sense strand
gcagggcguuggcuaugug

SEQ ID NO: 1077549 - RNA, 19 nt, Homo sapiens
  misc_RNA (1)...(19): siRNA sense strand
ugaaagccauccaggacau

SEQ ID NO: 1077550 - RNA, 19 nt, Homo sapiens
  misc_RNA (1)...(19): siRNA sense strand
gaacaucacggugguacag

SEQ ID NO: 1077551 - RNA, 19 nt, Homo sapiens
  misc_RNA (1)...(19): siRNA sense strand
gccaagaauuacggcauga

SEQ ID NO: 1077552 - RNA, 19 nt, Homo sapiens
  misc_RNA (1)...(19): siRNA sense strand
ucacggugguacaggcaaa

SEQ ID NO: 1077553 - RNA, 19 nt, Homo sapiens
  misc_RNA (1)...(19): siRNA sense strand
gcaagguggaggacaagug

SEQ ID NO: 1077554 - RNA, 19 nt, Homo sapiens
  misc_RNA (1)...(19): siRNA sense strand
cgacaaggagggcaugauc

SEQ ID NO: 1077555 - RNA, 19 nt, Homo sapiens
  misc_RNA (1)...(19): siRNA sense strand
ggugguacaggcaaaguug

SEQ ID NO: 1077556 - RNA, 19 nt, Homo sapiens
  misc_RNA (1)...(19): siRNA sense strand
ggcguggacucuuucuauc

SEQ ID NO: 1077557 - RNA, 19 nt, Homo sapiens
  misc_RNA (1)...(19): siRNA sense strand
cgagaucuucgaugagaga

SEQ ID NO: 1077558 - RNA, 19 nt, Homo sapiens
  misc_RNA (1)...(19): siRNA sense strand
gacaaggagggcaugauca

SEQ ID NO: 1077559 - RNA, 19 nt, Homo sapiens
  misc_RNA (1)...(19): siRNA sense strand
ugaucaaccucgucauguc

SEQ ID NO: 1077560 - RNA, 19 nt, Homo sapiens
  misc_RNA (1)...(19): siRNA sense strand
acaaggagggcaugaucaa

SEQ ID NO: 1077561 - RNA, 19 nt, Homo sapiens
  misc_RNA (1)...(19): siRNA sense strand
cacaauggcgccaagaauc

SEQ ID NO: 1077562 - RNA, 19 nt, Homo sapiens
  misc_RNA (1)...(19): siRNA sense strand
acacaauggcgccaagaau

SEQ ID NO: 1077563 - RNA, 19 nt, Homo sapiens
  misc_RNA (1)...(19): siRNA sense strand
uagcgaggaggaccugaaa

SEQ ID NO: 1077564 - RNA, 19 nt, Homo sapiens
  misc_RNA (1)...(19): siRNA sense strand
gcacacaauggcgccaaga

SEQ ID NO: 1077565 - RNA, 19 nt, Homo sapiens
  misc_RNA (1)...(19): siRNA sense strand
gaaagccauccaggacaug

SEQ ID NO: 1077566 - RNA, 19 nt, Homo sapiens
  misc_RNA (1)...(19): siRNA sense strand
cgaccaccgucagcacuca

SEQ ID NO: 1077567 - RNA, 19 nt, Homo sapiens
  misc_RNA (1)...(19): siRNA sense strand
caggcaaaguuggccaaga

SEQ ID NO: 1077568 - RNA, 19 nt, Homo sapiens
  misc_RNA (1)...(19): siRNA sense strand
ucaaccucgucauguccua

SEQ ID NO: 1077569 - RNA, 19 nt, Homo sapiens
  misc_RNA (1)...(19): siRNA sense strand
gauccgcuccgugcuggaa

SEQ ID NO: 1077570 - RNA, 19 nt, Homo sapiens
  misc_RNA (1)...(19): siRNA sense strand
guagcgaggaggaccugaa

SEQ ID NO: 1077571 - RNA, 19 nt, Homo sapiens
  misc_RNA (1)...(19): siRNA sense strand
aagaauccccgcuggaaua

SEQ ID NO: 1077572 - RNA, 19 nt, Homo sapiens
  misc_RNA (1)...(19): siRNA sense strand
cguggacucuuucuaucuc

SEQ ID NO: 1077573 - RNA, 19 nt, Homo sapiens
  misc_RNA (1)...(19): siRNA sense strand
caagauuggucuaguaguu

SEQ ID NO: 1077574 - RNA, 19 nt, Homo sapiens
  misc_RNA (1)...(19): siRNA sense strand
gcaacucagucccaaacua

SEQ ID NO: 1077575 - RNA, 19 nt, Homo sapiens
  misc_RNA (1)...(19): siRNA sense strand
gcugaggaguuugucaaua

SEQ ID NO: 1077576 - RNA, 19 nt, Homo sapiens
  misc_RNA (1)...(19): siRNA sense strand
caaacaacauuucuucaac

SEQ ID NO: 1077577 - RNA, 19 nt, Homo sapiens
  misc_RNA (1)...(19): siRNA sense strand
agagaaggauaccaaagaa

SEQ ID NO: 1077578 - RNA, 19 nt, Homo sapiens
  misc_RNA (1)...(19): siRNA sense strand
gaaggauaccaaagaagaa

SEQ ID NO: 1077579 - RNA, 19 nt, Homo sapiens
  misc_RNA (1)...(19): siRNA sense strand
ccacgucucuggauuuuaa

SEQ ID NO: 1077580 - RNA, 19 nt, Homo sapiens
  misc_RNA (1)...(19): siRNA sense strand
uguggaagauugcaaguga

SEQ ID NO: 1077581 - RNA, 19 nt, Homo sapiens
  misc_RNA (1)...(19): siRNA sense strand
cugaggaguuugucaauau

SEQ ID NO: 1077582 - RNA, 19 nt, Homo sapiens
  misc_RNA (1)...(19): siRNA sense strand
acacauugccuucuaguga

SEQ ID NO: 1077583 - RNA, 19 nt, Homo sapiens
  misc_RNA (1)...(19): siRNA sense strand
gauggaaacaaacaacauu

SEQ ID NO: 1077584 - RNA, 19 nt, Homo sapiens
  misc_RNA (1)...(19): siRNA sense strand
ccaaagaagaaguaacuau

SEQ ID NO: 1077585 - RNA, 19 nt, Homo sapiens
  misc_RNA (1)...(19): siRNA sense strand
gcacuaaccaggcuguauc

SEQ ID NO: 1077586 - RNA, 19 nt, Homo sapiens
  misc_RNA (1)...(19): siRNA sense strand
cagagaaggauaccaaaga

SEQ ID NO: 1077587 - RNA, 19 nt, Homo sapiens
  misc_RNA (1)...(19): siRNA sense strand
ggauaccaaagaagaagua

SEQ ID NO: 1077588 - RNA, 19 nt, Homo sapiens
  misc_RNA (1)...(19): siRNA sense strand
ugaggaguuugucaauauu

SEQ ID NO: 1077589 - RNA, 19 nt, Homo sapiens
  misc_RNA (1)...(19): siRNA sense strand
uuucaagauuggucuagua

SEQ ID NO: 1077590 - RNA, 19 nt, Homo sapiens
  misc_RNA (1)...(19): siRNA sense strand
agauuggucuaguaguuaa

SEQ ID NO: 1077591 - RNA, 19 nt, Homo sapiens
  misc_RNA (1)...(19): siRNA sense strand
gaacacacugcuacaaggu

SEQ ID NO: 1077592 - RNA, 19 nt, Homo sapiens
  misc_RNA (1)...(19): siRNA sense strand
ccaacaauacuguguggaa

SEQ ID NO: 1077593 - RNA, 19 nt, Homo sapiens
  misc_RNA (1)...(19): siRNA sense strand
uauguuagauugccaacca

SEQ ID NO: 1077594 - RNA, 19 nt, Homo sapiens
  misc_RNA (1)...(19): siRNA sense strand
agaaggauaccaaagaaga

SEQ ID NO: 1077595 - RNA, 19 nt, Homo sapiens
  misc_RNA (1)...(19): siRNA sense strand
gaggaguuugucaauauuu

SEQ ID NO: 1077596 - RNA, 19 nt, Homo sapiens
  misc_RNA (1)...(19): siRNA sense strand
ccaaccaguucaugagcaa

SEQ ID NO: 1077597 - RNA, 19 nt, Homo sapiens
  misc_RNA (1)...(19): siRNA sense strand
caagugauugcuuccguuu

SEQ ID NO: 1077598 - RNA, 19 nt, Homo sapiens
  misc_RNA (1)...(19): siRNA sense strand
agacagagaaggauaccaa

SEQ ID NO: 1077599 - RNA, 19 nt, Homo sapiens
  misc_RNA (1)...(19): siRNA sense strand
guagagcugcugaggaguu

SEQ ID NO: 1077600 - RNA, 19 nt, Homo sapiens
  misc_RNA (1)...(19): siRNA sense strand
ucaguccacucccaacaau

SEQ ID NO: 1077601 - RNA, 19 nt, Homo sapiens
  misc_RNA (1)...(19): siRNA sense strand
gacaauggauaaaagaaga

SEQ ID NO: 1077602 - RNA, 19 nt, Homo sapiens
  misc_RNA (1)...(19): siRNA sense strand
acuaugagacaauggauaa

SEQ ID NO: 1077603 - RNA, 19 nt, Homo sapiens
  misc_RNA (1)...(19): siRNA sense strand
cuggaugcccuaaauaauu

SEQ ID NO: 1077604 - RNA, 19 nt, Homo sapiens
  misc_RNA (1)...(19): siRNA sense strand
uagagcugcugaggaguuu

SEQ ID NO: 1077605 - RNA, 19 nt, Homo sapiens
  misc_RNA (1)...(19): siRNA sense strand
aauacuguguggaagauug

SEQ ID NO: 1077606 - RNA, 19 nt, Homo sapiens
  misc_RNA (1)...(19): siRNA sense strand
ggcuggaugcccuaaauaa

SEQ ID NO: 1077607 - RNA, 19 nt, Homo sapiens
  misc_RNA (1)...(19): siRNA sense strand
caacucagucccaaacuac

SEQ ID NO: 1077608 - RNA, 19 nt, Homo sapiens
  misc_RNA (1)...(19): siRNA sense strand
cuagugaguuccaggucaa

SEQ ID NO: 1077609 - RNA, 19 nt, Homo sapiens
  misc_RNA (1)...(19): siRNA sense strand
guuccaggucaauauguua

SEQ ID NO: 1077610 - RNA, 19 nt, Homo sapiens
  misc_RNA (1)...(19): siRNA sense strand
aagauuggucuaguaguua

SEQ ID NO: 1077611 - RNA, 19 nt, Homo sapiens
  misc_RNA (1)...(19): siRNA sense strand
gcuggaugcccuaaauaau

SEQ ID NO: 1077612 - RNA, 19 nt, Homo sapiens
  misc_RNA (1)...(19): siRNA sense strand
acaauacuguguggaagau

SEQ ID NO: 1077613 - RNA, 19 nt, Homo sapiens
  misc_RNA (1)...(19): siRNA sense strand
uuugacacauugccuucua

SEQ ID NO: 1077614 - RNA, 19 nt, Homo sapiens
  misc_RNA (1)...(19): siRNA sense strand
ucagggagacagagaagga

SEQ ID NO: 1077615 - RNA, 19 nt, Homo sapiens
  misc_RNA (1)...(19): siRNA sense strand
ccacacaccagccacucaa

SEQ ID NO: 1077616 - RNA, 19 nt, Homo sapiens
  misc_RNA (1)...(19): siRNA sense strand
gacagagaaggauaccaaa

SEQ ID NO: 1077617 - RNA, 19 nt, Homo sapiens
  misc_RNA (1)...(19): siRNA sense strand
uuauguagaucaggcaugu

SEQ ID NO: 1077618 - RNA, 19 nt, Homo sapiens
  misc_RNA (1)...(19): siRNA sense strand
gagcugcugaggaguuugu

SEQ ID NO: 1077619 - RNA, 19 nt, Homo sapiens
  misc_RNA (1)...(19): siRNA sense strand
ggaagauugcaagugauug

SEQ ID NO: 1077620 - RNA, 19 nt, Homo sapiens
  misc_RNA (1)...(19): siRNA sense strand
cugugaaguuugauggaaa

SEQ ID NO: 1077621 - RNA, 19 nt, Homo sapiens
  misc_RNA (1)...(19): siRNA sense strand
ccaggucaauauguuagau

SEQ ID NO: 1077622 - RNA, 19 nt, Homo sapiens
  misc_RNA (1)...(19): siRNA sense strand
ccggacacgugaggaggua

SEQ ID NO: 1077623 - RNA, 19 nt, Homo sapiens
  misc_RNA (1)...(19): siRNA sense strand
gagaaggauaccaaagaag

SEQ ID NO: 1077624 - RNA, 19 nt, Homo sapiens
  misc_RNA (1)...(19): siRNA sense strand
uggaagauugcaagugauu

SEQ ID NO: 1077625 - RNA, 19 nt, Homo sapiens
  misc_RNA (1)...(19): siRNA sense strand
ccagaacacacugcuacaa

SEQ ID NO: 1077626 - RNA, 19 nt, Homo sapiens
  misc_RNA (1)...(19): siRNA sense strand
cagaacacacugcuacaag

SEQ ID NO: 1077627 - RNA, 19 nt, Homo sapiens
  misc_RNA (1)...(19): siRNA sense strand
gugaguuccaggucaauau

SEQ ID NO: 1077628 - RNA, 19 nt, Homo sapiens
  misc_RNA (1)...(19): siRNA sense strand
aaaagaagacgggcacuaa

SEQ ID NO: 1077629 - RNA, 19 nt, Homo sapiens
  misc_RNA (1)...(19): siRNA sense strand
uaccaaagaagaaguaacu

SEQ ID NO: 1077630 - RNA, 19 nt, Homo sapiens
  misc_RNA (1)...(19): siRNA sense strand
guagaucaggcauguagag

SEQ ID NO: 1077631 - RNA, 19 nt, Homo sapiens
  misc_RNA (1)...(19): siRNA sense strand
gauaccaaagaagaaguaa

SEQ ID NO: 1077632 - RNA, 19 nt, Homo sapiens
  misc_RNA (1)...(19): siRNA sense strand
cgccgacacugccagaaca

SEQ ID NO: 1077633 - RNA, 19 nt, Homo sapiens
  misc_RNA (1)...(19): siRNA sense strand
ggaguuugucaauauuuac

SEQ ID NO: 1077634 - RNA, 19 nt, Homo sapiens
  misc_RNA (1)...(19): siRNA sense strand
acugugaaguuugauggaa

SEQ ID NO: 1077635 - RNA, 19 nt, Homo sapiens
  misc_RNA (1)...(19): siRNA sense strand
uuagauugccaaccaguuc

SEQ ID NO: 1077636 - RNA, 19 nt, Homo sapiens
  misc_RNA (1)...(19): siRNA sense strand
gcgaugaacuggagauuau

SEQ ID NO: 1077637 - RNA, 19 nt, Homo sapiens
  misc_RNA (1)...(19): siRNA sense strand
gaagaaugcacaagagaga

SEQ ID NO: 1077638 - RNA, 19 nt, Homo sapiens
  misc_RNA (1)...(19): siRNA sense strand
caagagagaagaaaggaaa

SEQ ID NO: 1077639 - RNA, 19 nt, Homo sapiens
  misc_RNA (1)...(19): siRNA sense strand
ugacugaccugaagaaugc

SEQ ID NO: 1077640 - RNA, 19 nt, Homo sapiens
  misc_RNA (1)...(19): siRNA sense strand
uggaagacuuugaauguga

SEQ ID NO: 1077641 - RNA, 19 nt, Homo sapiens
  misc_RNA (1)...(19): siRNA sense strand
gaugaacuggagauuauuu

SEQ ID NO: 1077642 - RNA, 19 nt, Homo sapiens
  misc_RNA (1)...(19): siRNA sense strand
gagaaggaaagaagacuga

SEQ ID NO: 1077643 - RNA, 19 nt, Homo sapiens
  misc_RNA (1)...(19): siRNA sense strand
ggaagacuuugaaugugau

SEQ ID NO: 1077644 - RNA, 19 nt, Homo sapiens
  misc_RNA (1)...(19): siRNA sense strand
cuacugugcugaauacauc

SEQ ID NO: 1077645 - RNA, 19 nt, Homo sapiens
  misc_RNA (1)...(19): siRNA sense strand
gaaaagaaaaggagaagga

SEQ ID NO: 1077646 - RNA, 19 nt, Homo sapiens
  misc_RNA (1)...(19): siRNA sense strand
gccaugaucauugugguua

SEQ ID NO: 1077647 - RNA, 19 nt, Homo sapiens
  misc_RNA (1)...(19): siRNA sense strand
uauggaagacuuugaaugu

SEQ ID NO: 1077648 - RNA, 19 nt, Homo sapiens
  misc_RNA (1)...(19): siRNA sense strand
gcacaagagagaagaaagg

SEQ ID NO: 1077649 - RNA, 19 nt, Homo sapiens
  misc_RNA (1)...(19): siRNA sense strand
ggauguucauuucuauagu

SEQ ID NO: 1077650 - RNA, 19 nt, Homo sapiens
  misc_RNA (1)...(19): siRNA sense strand
gagaagaaaggaaaagaaa

SEQ ID NO: 1077651 - RNA, 19 nt, Homo sapiens
  misc_RNA (1)...(19): siRNA sense strand
cuacagaucgggcacuuuc

SEQ ID NO: 1077652 - RNA, 19 nt, Homo sapiens
  misc_RNA (1)...(19): siRNA sense strand
gaucgggcacuuucugugu

SEQ ID NO: 1077653 - RNA, 19 nt, Homo sapiens
  misc_RNA (1)...(19): siRNA sense strand
gugcugaauacaucaauga

SEQ ID NO: 1077654 - RNA, 19 nt, Homo sapiens
  misc_RNA (1)...(19): siRNA sense strand
gaagaaaggaaaagaaaag

SEQ ID NO: 1077655 - RNA, 19 nt, Homo sapiens
  misc_RNA (1)...(19): siRNA sense strand
gcuggugaaugccaugauc

SEQ ID NO: 1077656 - RNA, 19 nt, Homo sapiens
  misc_RNA (1)...(19): siRNA sense strand
gggauguucauuucuauag

SEQ ID NO: 1077657 - RNA, 19 nt, Homo sapiens
  misc_RNA (1)...(19): siRNA sense strand
cuuugaaugugaugacuga

SEQ ID NO: 1077658 - RNA, 19 nt, Homo sapiens
  misc_RNA (1)...(19): siRNA sense strand
ugugaugacugaccugaag

SEQ ID NO: 1077659 - RNA, 19 nt, Homo sapiens
  misc_RNA (1)...(19): siRNA sense strand
guauggaagacuuugaaug

SEQ ID NO: 1077660 - RNA, 19 nt, Homo sapiens
  misc_RNA (1)...(19): siRNA sense strand
ccaugaucauugugguuau

SEQ ID NO: 1077661 - RNA, 19 nt, Homo sapiens
  misc_RNA (1)...(19): siRNA sense strand
ccugaagaaugcacaagag

SEQ ID NO: 1077662 - RNA, 19 nt, Homo sapiens
  misc_RNA (1)...(19): siRNA sense strand
ucccgaagcuacagacuac

SEQ ID NO: 1077663 - RNA, 19 nt, Homo sapiens
  misc_RNA (1)...(19): siRNA sense strand
caugaucauugugguuaug

SEQ ID NO: 1077664 - RNA, 19 nt, Homo sapiens
  misc_RNA (1)...(19): siRNA sense strand
ggguauggaagacuuugaa

SEQ ID NO: 1077665 - RNA, 19 nt, Homo sapiens
  misc_RNA (1)...(19): siRNA sense strand
gaagcuacagacuacagau

SEQ ID NO: 1077666 - RNA, 19 nt, Homo sapiens
  misc_RNA (1)...(19): siRNA sense strand
gacuacagaucgggcacuu

SEQ ID NO: 1077667 - RNA, 19 nt, Homo sapiens
  misc_RNA (1)...(19): siRNA sense strand
agucuacugugcugaauac

SEQ ID NO: 1077668 - RNA, 19 nt, Homo sapiens
  misc_RNA (1)...(19): siRNA sense strand
gugguuauguggguaugga

SEQ ID NO: 1077669 - RNA, 19 nt, Homo sapiens
  misc_RNA (1)...(19): siRNA sense strand
gaaugcacaagagagaaga

SEQ ID NO: 1077670 - RNA, 19 nt, Homo sapiens
  misc_RNA (1)...(19): siRNA sense strand
aaaggagaaggaaagaaga

SEQ ID NO: 1077671 - RNA, 19 nt, Homo sapiens
  misc_RNA (1)...(19): siRNA sense strand
cacuuucugugucuaguca

SEQ ID NO: 1077672 - RNA, 19 nt, Homo sapiens
  misc_RNA (1)...(19): siRNA sense strand
gaggagauaugaaugagua

SEQ ID NO: 1077673 - RNA, 19 nt, Homo sapiens
  misc_RNA (1)...(19): siRNA sense strand
ugaaacaacugauuaagga

SEQ ID NO: 1077674 - RNA, 19 nt, Homo sapiens
  misc_RNA (1)...(19): siRNA sense strand
gcacuaagcaguaucaaga

SEQ ID NO: 1077675 - RNA, 19 nt, Homo sapiens
  misc_RNA (1)...(19): siRNA sense strand
uuacauggcuccugaaguu

SEQ ID NO: 1077676 - RNA, 19 nt, Homo sapiens
  misc_RNA (1)...(19): siRNA sense strand
gaaaggaucacauucauag

SEQ ID NO: 1077677 - RNA, 19 nt, Homo sapiens
  misc_RNA (1)...(19): siRNA sense strand
gaacuucucauuccuguga

SEQ ID NO: 1077678 - RNA, 19 nt, Homo sapiens
  misc_RNA (1)...(19): siRNA sense strand
agaagaaccugucagugua

SEQ ID NO: 1077679 - RNA, 19 nt, Homo sapiens
  misc_RNA (1)...(19): siRNA sense strand
cgaaugaaacaacugauua

SEQ ID NO: 1077680 - RNA, 19 nt, Homo sapiens
  misc_RNA (1)...(19): siRNA sense strand
cagaagcgccuauuauuug

SEQ ID NO: 1077681 - RNA, 19 nt, Homo sapiens
  misc_RNA (1)...(19): siRNA sense strand
ggaaaggaucacauucaua

SEQ ID NO: 1077682 - RNA, 19 nt, Homo sapiens
  misc_RNA (1)...(19): siRNA sense strand
ugaacuagaacucagauua

SEQ ID NO: 1077683 - RNA, 19 nt, Homo sapiens
  misc_RNA (1)...(19): siRNA sense strand
gaacuagaacucagauuag

SEQ ID NO: 1077684 - RNA, 19 nt, Homo sapiens
  misc_RNA (1)...(19): siRNA sense strand
gccaaaguacgaucuaaua

SEQ ID NO: 1077685 - RNA, 19 nt, Homo sapiens
  misc_RNA (1)...(19): siRNA sense strand
gcagugcccuggcuuucuu

SEQ ID NO: 1077686 - RNA, 19 nt, Homo sapiens
  misc_RNA (1)...(19): siRNA sense strand
gaagaaccugucaguguaa

SEQ ID NO: 1077687 - RNA, 19 nt, Homo sapiens
  misc_RNA (1)...(19): siRNA sense strand
ccagaagcgccuauuauuu

SEQ ID NO: 1077688 - RNA, 19 nt, Homo sapiens
  misc_RNA (1)...(19): siRNA sense strand
gaacuagcccuucgugagu

SEQ ID NO: 1077689 - RNA, 19 nt, Homo sapiens
  misc_RNA (1)...(19): siRNA sense strand
ccaggaaacccaaucguaa

SEQ ID NO: 1077690 - RNA, 19 nt, Homo sapiens
  misc_RNA (1)...(19): siRNA sense strand
gcucuaauucuucccuuua

SEQ ID NO: 1077691 - RNA, 19 nt, Homo sapiens
  misc_RNA (1)...(19): siRNA sense strand
aaagauagcagcugggaaa

SEQ ID NO: 1077692 - RNA, 19 nt, Homo sapiens
  misc_RNA (1)...(19): siRNA sense strand
gggcaaugcuggaaaggau

SEQ ID NO: 1077693 - RNA, 19 nt, Homo sapiens
  misc_RNA (1)...(19): siRNA sense strand
gaagcagucaucagaaaga

SEQ ID NO: 1077694 - RNA, 19 nt, Homo sapiens
  misc_RNA (1)...(19): siRNA sense strand
cagaagaaccugucagugu

SEQ ID NO: 1077695 - RNA, 19 nt, Homo sapiens
  misc_RNA (1)...(19): siRNA sense strand
ggauaccagugacuuggaa

SEQ ID NO: 1077696 - RNA, 19 nt, Homo sapiens
  misc_RNA (1)...(19): siRNA sense strand
ccugauaacauccugauuu

SEQ ID NO: 1077697 - RNA, 19 nt, Homo sapiens
  misc_RNA (1)...(19): siRNA sense strand
guuacgguguuguguauga

SEQ ID NO: 1077698 - RNA, 19 nt, Homo sapiens
  misc_RNA (1)...(19): siRNA sense strand
gaaggacauuacacagcaa

SEQ ID NO: 1077699 - RNA, 19 nt, Homo sapiens
  misc_RNA (1)...(19): siRNA sense strand
gcuuguagaaacuucauua

SEQ ID NO: 1077700 - RNA, 19 nt, Homo sapiens
  misc_RNA (1)...(19): siRNA sense strand
gauagcagcugggaaacgu

SEQ ID NO: 1077701 - RNA, 19 nt, Homo sapiens
  misc_RNA (1)...(19): siRNA sense strand
gauaacauccugauuucuc

SEQ ID NO: 1077702 - RNA, 19 nt, Homo sapiens
  misc_RNA (1)...(19): siRNA sense strand
acacagagacaaagaagga

SEQ ID NO: 1077703 - RNA, 19 nt, Homo sapiens
  misc_RNA (1)...(19): siRNA sense strand
gcgaaugaaacaacugauu

SEQ ID NO: 1077704 - RNA, 19 nt, Homo sapiens
  misc_RNA (1)...(19): siRNA sense strand
gaaacaacugauuaaggaa

SEQ ID NO: 1077705 - RNA, 19 nt, Homo sapiens
  misc_RNA (1)...(19): siRNA sense strand
gcccuggcuuucuugcaua

SEQ ID NO: 1077706 - RNA, 19 nt, Homo sapiens
  misc_RNA (1)...(19): siRNA sense strand
aggaaaugcuggcugcaaa

SEQ ID NO: 1077707 - RNA, 19 nt, Homo sapiens
  misc_RNA (1)...(19): siRNA sense strand
ucacauucauagacacaga

SEQ ID NO: 1077708 - RNA, 19 nt, Homo sapiens
  misc_RNA (1)...(19): siRNA sense strand
cugauaacauccugauuuc

SEQ ID NO: 1077709 - RNA, 19 nt, Homo sapiens
  misc_RNA (1)...(19): siRNA sense strand
guaguuacgguguugugua

SEQ ID NO: 1077710 - RNA, 19 nt, Homo sapiens
  misc_RNA (1)...(19): siRNA sense strand
gaucuuaagccugauaaca

SEQ ID NO: 1077711 - RNA, 19 nt, Homo sapiens
  misc_RNA (1)...(19): siRNA sense strand
ugaguagccagccaaagua

SEQ ID NO: 1077712 - RNA, 19 nt, Homo sapiens
  misc_RNA (1)...(19): siRNA sense strand
caggaaacccaaucguaaa

SEQ ID NO: 1077713 - RNA, 19 nt, Homo sapiens
  misc_RNA (1)...(19): siRNA sense strand
ggagaaauugccuuugauc

SEQ ID NO: 1077714 - RNA, 19 nt, Homo sapiens
  misc_RNA (1)...(19): siRNA sense strand
gagguaggccgagguaguu

SEQ ID NO: 1077715 - RNA, 19 nt, Homo sapiens
  misc_RNA (1)...(19): siRNA sense strand
ugacggaggagauaugaau

SEQ ID NO: 1077716 - RNA, 19 nt, Homo sapiens
  misc_RNA (1)...(19): siRNA sense strand
aaacaaggaacugagauug

SEQ ID NO: 1077717 - RNA, 19 nt, Homo sapiens
  misc_RNA (1)...(19): siRNA sense strand
cagccaaaguacgaucuaa

SEQ ID NO: 1077718 - RNA, 19 nt, Homo sapiens
  misc_RNA (1)...(19): siRNA sense strand
uaguuacgguguuguguau

SEQ ID NO: 1077719 - RNA, 19 nt, Homo sapiens
  misc_RNA (1)...(19): siRNA sense strand
gaaccugucaguguaaaca

SEQ ID NO: 1077720 - RNA, 19 nt, Homo sapiens
  misc_RNA (1)...(19): siRNA sense strand
cgagguaguuacgguguug

SEQ ID NO: 1077721 - RNA, 19 nt, Homo sapiens
  misc_RNA (1)...(19): siRNA sense strand
gggaggcacuucuggaaaa

SEQ ID NO: 1077722 - RNA, 19 nt, Homo sapiens
  misc_RNA (1)...(19): siRNA sense strand
ggagguaggccgagguagu

SEQ ID NO: 1077723 - RNA, 19 nt, Homo sapiens
  misc_RNA (1)...(19): siRNA sense strand
ucucauuccugugaagaaa

SEQ ID NO: 1077724 - RNA, 19 nt, Homo sapiens
  misc_RNA (1)...(19): siRNA sense strand
cccagaagcgccuauuauu

SEQ ID NO: 1077725 - RNA, 19 nt, Homo sapiens
  misc_RNA (1)...(19): siRNA sense strand
gugaguagccagccaaagu

SEQ ID NO: 1077726 - RNA, 19 nt, Homo sapiens
  misc_RNA (1)...(19): siRNA sense strand
uggaaaggaucacauucau

SEQ ID NO: 1077727 - RNA, 19 nt, Homo sapiens
  misc_RNA (1)...(19): siRNA sense strand
agaagcgccuauuauuugu

SEQ ID NO: 1077728 - RNA, 19 nt, Homo sapiens
  misc_RNA (1)...(19): siRNA sense strand
caagagccaacauccaaau

SEQ ID NO: 1077729 - RNA, 19 nt, Homo sapiens
  misc_RNA (1)...(19): siRNA sense strand
cgugaguucugggcacuaa

SEQ ID NO: 1077730 - RNA, 19 nt, Homo sapiens
  misc_RNA (1)...(19): siRNA sense strand
cagcauguggaacagauuu

SEQ ID NO: 1077731 - RNA, 19 nt, Homo sapiens
  misc_RNA (1)...(19): siRNA sense strand
gggcgaaugaaacaacuga

SEQ ID NO: 1077732 - RNA, 19 nt, Homo sapiens
  misc_RNA (1)...(19): siRNA sense strand
ugaaugggcgaaugaaaca

SEQ ID NO: 1077733 - RNA, 19 nt, Homo sapiens
  misc_RNA (1)...(19): siRNA sense strand
ucauagacacagagacaaa

SEQ ID NO: 1077734 - RNA, 19 nt, Homo sapiens
  misc_RNA (1)...(19): siRNA sense strand
gcaaugcuggaaaggauca

SEQ ID NO: 1077735 - RNA, 19 nt, Homo sapiens
  misc_RNA (1)...(19): siRNA sense strand
ucacgcaccugaaaauguu

SEQ ID NO: 1077736 - RNA, 19 nt, Homo sapiens
  misc_RNA (1)...(19): siRNA sense strand
uaacaccagcuucaugcuu

SEQ ID NO: 1077737 - RNA, 19 nt, Homo sapiens
  misc_RNA (1)...(19): siRNA sense strand
ucccacggcucuaauucuu

SEQ ID NO: 1077738 - RNA, 19 nt, Homo sapiens
  misc_RNA (1)...(19): siRNA sense strand
ucuuaagccugauaacauc

SEQ ID NO: 1077739 - RNA, 19 nt, Homo sapiens
  misc_RNA (1)...(19): siRNA sense strand
gagaucuuaagccugauaa

SEQ ID NO: 1077740 - RNA, 19 nt, Homo sapiens
  misc_RNA (1)...(19): siRNA sense strand
ccuauuauuugugguuugu

SEQ ID NO: 1077741 - RNA, 19 nt, Homo sapiens
  misc_RNA (1)...(19): siRNA sense strand
ugugguuugugauggauuu

SEQ ID NO: 1077742 - RNA, 19 nt, Homo sapiens
  misc_RNA (1)...(19): siRNA sense strand
cgagaucuuaagccugaua

SEQ ID NO: 1077743 - RNA, 19 nt, Homo sapiens
  misc_RNA (1)...(19): siRNA sense strand
gaucacauucauagacaca

SEQ ID NO: 1077744 - RNA, 19 nt, Homo sapiens
  misc_RNA (1)...(19): siRNA sense strand
caagguggcugauuuuggu

SEQ ID NO: 1077745 - RNA, 19 nt, Homo sapiens
  misc_RNA (1)...(19): siRNA sense strand
cccucaagguggcugauuu

SEQ ID NO: 1077746 - RNA, 19 nt, Homo sapiens
  misc_RNA (1)...(19): siRNA sense strand
auaacauccugauuucuca

SEQ ID NO: 1077747 - RNA, 19 nt, Homo sapiens
  misc_RNA (1)...(19): siRNA sense strand
gagcagugcccuggcuuuc

SEQ ID NO: 1077748 - RNA, 19 nt, Homo sapiens
  misc_RNA (1)...(19): siRNA sense strand
ccaaaguacgaucuaauac

SEQ ID NO: 1077749 - RNA, 19 nt, Homo sapiens
  misc_RNA (1)...(19): siRNA sense strand
ucaagagccaacauccaaa

SEQ ID NO: 1077750 - RNA, 19 nt, Homo sapiens
  misc_RNA (1)...(19): siRNA sense strand
caaaguacgaucuaauacg

SEQ ID NO: 1077751 - RNA, 19 nt, Homo sapiens
  misc_RNA (1)...(19): siRNA sense strand
cgaugucacgcaccugaaa

SEQ ID NO: 1077752 - RNA, 19 nt, Homo sapiens
  misc_RNA (1)...(19): siRNA sense strand
ggaaaaucccaaaauggaa

SEQ ID NO: 1077753 - RNA, 19 nt, Homo sapiens
  misc_RNA (1)...(19): siRNA sense strand
gaaguuugggaaggacauu

SEQ ID NO: 1077754 - RNA, 19 nt, Homo sapiens
  misc_RNA (1)...(19): siRNA sense strand
gggcagaacccagaagaac

SEQ ID NO: 1077755 - RNA, 19 nt, Homo sapiens
  misc_RNA (1)...(19): siRNA sense strand
ggcucuaauucuucccuuu

SEQ ID NO: 1077756 - RNA, 19 nt, Homo sapiens
  misc_RNA (1)...(19): siRNA sense strand
uaugaaugaguaucuguug

SEQ ID NO: 1077757 - RNA, 19 nt, Homo sapiens
  misc_RNA (1)...(19): siRNA sense strand
gcagaacccagaagaaccu

SEQ ID NO: 1077758 - RNA, 19 nt, Homo sapiens
  misc_RNA (1)...(19): siRNA sense strand
guagccagccaaaguacga

SEQ ID NO: 1077759 - RNA, 19 nt, Homo sapiens
  misc_RNA (1)...(19): siRNA sense strand
ugaaugaguaucuguuguc

SEQ ID NO: 1077760 - RNA, 19 nt, Homo sapiens
  misc_RNA (1)...(19): siRNA sense strand
ggaaaugcuggcugcaaac

SEQ ID NO: 1077761 - RNA, 19 nt, Homo sapiens
  misc_RNA (1)...(19): siRNA sense strand
ugaagaaaauucgauguca

SEQ ID NO: 1077762 - RNA, 19 nt, Homo sapiens
  misc_RNA (1)...(19): siRNA sense strand
aggaucacauucauagaca

SEQ ID NO: 1077763 - RNA, 19 nt, Homo sapiens
  misc_RNA (1)...(19): siRNA sense strand
aagaaccugucaguguaaa

SEQ ID NO: 1077764 - RNA, 19 nt, Homo sapiens
  misc_RNA (1)...(19): siRNA sense strand
uccaggaaacccaaucgua

SEQ ID NO: 1077765 - RNA, 19 nt, Homo sapiens
  misc_RNA (1)...(19): siRNA sense strand
ucccagaagcgccuauuau

SEQ ID NO: 1077766 - RNA, 19 nt, Homo sapiens
  misc_RNA (1)...(19): siRNA sense strand
uaugaaugggcgaaugaaa

SEQ ID NO: 1077767 - RNA, 19 nt, Homo sapiens
  misc_RNA (1)...(19): siRNA sense strand
ucuaugaaugggcgaauga

SEQ ID NO: 1077768 - RNA, 19 nt, Homo sapiens
  misc_RNA (1)...(19): siRNA sense strand
ccagguuggauaccaguga

SEQ ID NO: 1077769 - RNA, 19 nt, Homo sapiens
  misc_RNA (1)...(19): siRNA sense strand
gcacggguggcagugaaga

SEQ ID NO: 1077770 - RNA, 19 nt, Homo sapiens
  misc_RNA (1)...(19): siRNA sense strand
gaaacccaaucguaaaacu

SEQ ID NO: 1077771 - RNA, 19 nt, Homo sapiens
  misc_RNA (1)...(19): siRNA sense strand
aggagaaauugccuuugau

SEQ ID NO: 1077772 - RNA, 19 nt, Homo sapiens
  misc_RNA (1)...(19): siRNA sense strand
ucacugagcucuuuagcaa

SEQ ID NO: 1077773 - RNA, 19 nt, Homo sapiens
  misc_RNA (1)...(19): siRNA sense strand
gucauaagguccugaguaa

SEQ ID NO: 1077774 - RNA, 19 nt, Homo sapiens
  misc_RNA (1)...(19): siRNA sense strand
gauggcagcuucuccaaca

SEQ ID NO: 1077775 - RNA, 19 nt, Homo sapiens
  misc_RNA (1)...(19): siRNA sense strand
gaacgccgagcgaaugcua

SEQ ID NO: 1077776 - RNA, 19 nt, Homo sapiens
  misc_RNA (1)...(19): siRNA sense strand
gguuuggccuggcugauau

SEQ ID NO: 1077777 - RNA, 19 nt, Homo sapiens
  misc_RNA (1)...(19): siRNA sense strand
caagaacgccgagcgaaug

SEQ ID NO: 1077778 - RNA, 19 nt, Homo sapiens
  misc_RNA (1)...(19): siRNA sense strand
gcugcaaggugcugguaga

SEQ ID NO: 1077779 - RNA, 19 nt, Homo sapiens
  misc_RNA (1)...(19): siRNA sense strand
ccgggacccuguucaagaa

SEQ ID NO: 1077780 - RNA, 19 nt, Homo sapiens
  misc_RNA (1)...(19): siRNA sense strand
gcugauggcugugguucug

SEQ ID NO: 1077781 - RNA, 19 nt, Homo sapiens
  misc_RNA (1)...(19): siRNA sense strand
acgaggaggugcucaagug

SEQ ID NO: 1077782 - RNA, 19 nt, Homo sapiens
  misc_RNA (1)...(19): siRNA sense strand
ccgagugggugagcacaaa

SEQ ID NO: 1077783 - RNA, 19 nt, Homo sapiens
  misc_RNA (1)...(19): siRNA sense strand
acugagcucuuuagcaaca

SEQ ID NO: 1077784 - RNA, 19 nt, Homo sapiens
  misc_RNA (1)...(19): siRNA sense strand
caacaagcaguggaucuuc

SEQ ID NO: 1077785 - RNA, 19 nt, Homo sapiens
  misc_RNA (1)...(19): siRNA sense strand
agucauaagguccugagua

SEQ ID NO: 1077786 - RNA, 19 nt, Homo sapiens
  misc_RNA (1)...(19): siRNA sense strand
ccccguaccuggacaaauu

SEQ ID NO: 1077787 - RNA, 19 nt, Homo sapiens
  misc_RNA (1)...(19): siRNA sense strand
ggcgggaccuucagacacu

SEQ ID NO: 1077788 - RNA, 19 nt, Homo sapiens
  misc_RNA (1)...(19): siRNA sense strand
cauaagguccugaguaacg

SEQ ID NO: 1077789 - RNA, 19 nt, Homo sapiens
  misc_RNA (1)...(19): siRNA sense strand
gggacugccagacuccuuu

SEQ ID NO: 1077790 - RNA, 19 nt, Homo sapiens
  misc_RNA (1)...(19): siRNA sense strand
ucaagaacgccgagcgaau

SEQ ID NO: 1077791 - RNA, 19 nt, Homo sapiens
  misc_RNA (1)...(19): siRNA sense strand
uagacgcgcuucgacacaa

SEQ ID NO: 1077792 - RNA, 19 nt, Homo sapiens
  misc_RNA (1)...(19): siRNA sense strand
ccaacaagcaguggaucuu

SEQ ID NO: 1077793 - RNA, 19 nt, Homo sapiens
  misc_RNA (1)...(19): siRNA sense strand
caaaagaacggcagcagau

SEQ ID NO: 1077794 - RNA, 19 nt, Homo sapiens
  misc_RNA (1)...(19): siRNA sense strand
gagcugcaaggugcuggua

SEQ ID NO: 1077795 - RNA, 19 nt, Homo sapiens
  misc_RNA (1)...(19): siRNA sense strand
guggaucuucuucugguuu

SEQ ID NO: 1077796 - RNA, 19 nt, Homo sapiens
  misc_RNA (1)...(19): siRNA sense strand
uggaucuucuucugguuug

SEQ ID NO: 1077797 - RNA, 19 nt, Homo sapiens
  misc_RNA (1)...(19): siRNA sense strand
gccagacuccuuucacaag

SEQ ID NO: 1077798 - RNA, 19 nt, Homo sapiens
  misc_RNA (1)...(19): siRNA sense strand
guacuucaaacacagugau

SEQ ID NO: 1077799 - RNA, 19 nt, Homo sapiens
  misc_RNA (1)...(19): siRNA sense strand
ggacugccagacuccuuuc

SEQ ID NO: 1077800 - RNA, 19 nt, Homo sapiens
  misc_RNA (1)...(19): siRNA sense strand
ggacgaggaggugcucaag

SEQ ID NO: 1077801 - RNA, 19 nt, Homo sapiens
  misc_RNA (1)...(19): siRNA sense strand
caucaaucccugguacuuc

SEQ ID NO: 1077802 - RNA, 19 nt, Homo sapiens
  misc_RNA (1)...(19): siRNA sense strand
gaaauaaacugcucugaau

SEQ ID NO: 1077803 - RNA, 19 nt, Homo sapiens
  misc_RNA (1)...(19): siRNA sense strand
gaagauaucugacucaaaa

SEQ ID NO: 1077804 - RNA, 19 nt, Homo sapiens
  misc_RNA (1)...(19): siRNA sense strand
ggagggaucuuuguuugua

SEQ ID NO: 1077805 - RNA, 19 nt, Homo sapiens
  misc_RNA (1)...(19): siRNA sense strand
caacacagcuauuuugaua

SEQ ID NO: 1077806 - RNA, 19 nt, Homo sapiens
  misc_RNA (1)...(19): siRNA sense strand
gaccaucucuucauuaucu

SEQ ID NO: 1077807 - RNA, 19 nt, Homo sapiens
  misc_RNA (1)...(19): siRNA sense strand
caguagcgcuuaccucuuu

SEQ ID NO: 1077808 - RNA, 19 nt, Homo sapiens
  misc_RNA (1)...(19): siRNA sense strand
ggacuucugcugauacuuu

SEQ ID NO: 1077809 - RNA, 19 nt, Homo sapiens
  misc_RNA (1)...(19): siRNA sense strand
gaacaggauugugaagaug

SEQ ID NO: 1077810 - RNA, 19 nt, Homo sapiens
  misc_RNA (1)...(19): siRNA sense strand
cagcaaaccuggaagaaca

SEQ ID NO: 1077811 - RNA, 19 nt, Homo sapiens
  misc_RNA (1)...(19): siRNA sense strand
gaaggcauuugaagaggaa

SEQ ID NO: 1077812 - RNA, 19 nt, Homo sapiens
  misc_RNA (1)...(19): siRNA sense strand
aaacugcucugaauugugu

SEQ ID NO: 1077813 - RNA, 19 nt, Homo sapiens
  misc_RNA (1)...(19): siRNA sense strand
gcacacagcaggcuacaug

SEQ ID NO: 1077814 - RNA, 19 nt, Homo sapiens
  misc_RNA (1)...(19): siRNA sense strand
gaacuucaaagaugacuug

SEQ ID NO: 1077815 - RNA, 19 nt, Homo sapiens
  misc_RNA (1)...(19): siRNA sense strand
gaugugauccugcucauga

SEQ ID NO: 1077816 - RNA, 19 nt, Homo sapiens
  misc_RNA (1)...(19): siRNA sense strand
caacuacaaucaacugcuu

SEQ ID NO: 1077817 - RNA, 19 nt, Homo sapiens
  misc_RNA (1)...(19): siRNA sense strand
ucagacgcauggccaaaua

SEQ ID NO: 1077818 - RNA, 19 nt, Homo sapiens
  misc_RNA (1)...(19): siRNA sense strand
ccaaggagcugggcuuuag

SEQ ID NO: 1077819 - RNA, 19 nt, Homo sapiens
  misc_RNA (1)...(19): siRNA sense strand
agacaacaauuacaucuuc

SEQ ID NO: 1077820 - RNA, 19 nt, Homo sapiens
  misc_RNA (1)...(19): siRNA sense strand
ugacgugggugcugacuga

SEQ ID NO: 1077821 - RNA, 19 nt, Homo sapiens
  misc_RNA (1)...(19): siRNA sense strand
acaauucacugcaggaaga

SEQ ID NO: 1077822 - RNA, 19 nt, Homo sapiens
  misc_RNA (1)...(19): siRNA sense strand
gagaagauaucugacucaa

SEQ ID NO: 1077823 - RNA, 19 nt, Homo sapiens
  misc_RNA (1)...(19): siRNA sense strand
gcaguugucucacuuacag

SEQ ID NO: 1077824 - RNA, 19 nt, Homo sapiens
  misc_RNA (1)...(19): siRNA sense strand
ggaccucccuuguguuugg

SEQ ID NO: 1077825 - RNA, 19 nt, Homo sapiens
  misc_RNA (1)...(19): siRNA sense strand
guaaacaacgccaaagaga

SEQ ID NO: 1077826 - RNA, 19 nt, Homo sapiens
  misc_RNA (1)...(19): siRNA sense strand
guugauggcugaugugauc

SEQ ID NO: 1077827 - RNA, 19 nt, Homo sapiens
  misc_RNA (1)...(19): siRNA sense strand
caugaucucugcaagacaa

SEQ ID NO: 1077828 - RNA, 19 nt, Homo sapiens
  misc_RNA (1)...(19): siRNA sense strand
ggaaggaggagaagauauc

SEQ ID NO: 1077829 - RNA, 19 nt, Homo sapiens
  misc_RNA (1)...(19): siRNA sense strand
gcaaacaaagccagacaga

SEQ ID NO: 1077830 - RNA, 19 nt, Homo sapiens
  misc_RNA (1)...(19): siRNA sense strand
gaaacucucauucagacaa

SEQ ID NO: 1077831 - RNA, 19 nt, Homo sapiens
  misc_RNA (1)...(19): siRNA sense strand
ucaaagaccugcaguugcu

SEQ ID NO: 1077832 - RNA, 19 nt, Homo sapiens
  misc_RNA (1)...(19): siRNA sense strand
ggaagaacaggauugugaa

SEQ ID NO: 1077833 - RNA, 19 nt, Homo sapiens
  misc_RNA (1)...(19): siRNA sense strand
ugaaauaaacugcucugaa

SEQ ID NO: 1077834 - RNA, 19 nt, Homo sapiens
  misc_RNA (1)...(19): siRNA sense strand
gaagauguccagucccaau

SEQ ID NO: 1077835 - RNA, 19 nt, Homo sapiens
  misc_RNA (1)...(19): siRNA sense strand
uuucagcacucccaacaaa

SEQ ID NO: 1077836 - RNA, 19 nt, Homo sapiens
  misc_RNA (1)...(19): siRNA sense strand
acaaucaacugcuucaucu

SEQ ID NO: 1077837 - RNA, 19 nt, Homo sapiens
  misc_RNA (1)...(19): siRNA sense strand
ccaagccuauugugaacuu

SEQ ID NO: 1077838 - RNA, 19 nt, Homo sapiens
  misc_RNA (1)...(19): siRNA sense strand
gcuccaagccuauugugaa

SEQ ID NO: 1077839 - RNA, 19 nt, Homo sapiens
  misc_RNA (1)...(19): siRNA sense strand
guauuccgauguuuggauu

SEQ ID NO: 1077840 - RNA, 19 nt, Homo sapiens
  misc_RNA (1)...(19): siRNA sense strand
cuucagggcccuccucaua

SEQ ID NO: 1077841 - RNA, 19 nt, Homo sapiens
  misc_RNA (1)...(19): siRNA sense strand
uuucuugccuuuacaauuc

SEQ ID NO: 1077842 - RNA, 19 nt, Homo sapiens
  misc_RNA (1)...(19): siRNA sense strand
aaucaguccuuaaccauca

SEQ ID NO: 1077843 - RNA, 19 nt, Homo sapiens
  misc_RNA (1)...(19): siRNA sense strand
ucagggcccuccucauaug

SEQ ID NO: 1077844 - RNA, 19 nt, Homo sapiens
  misc_RNA (1)...(19): siRNA sense strand
uaaacaacgccaaagagaa

SEQ ID NO: 1077845 - RNA, 19 nt, Homo sapiens
  misc_RNA (1)...(19): siRNA sense strand
agaacaggauugugaagau

SEQ ID NO: 1077846 - RNA, 19 nt, Homo sapiens
  misc_RNA (1)...(19): siRNA sense strand
aauaaacugcucugaauug

SEQ ID NO: 1077847 - RNA, 19 nt, Homo sapiens
  misc_RNA (1)...(19): siRNA sense strand
uacaagguguuuacccaaa

SEQ ID NO: 1077848 - RNA, 19 nt, Homo sapiens
  misc_RNA (1)...(19): siRNA sense strand
uaucaaagaccugcaguug

SEQ ID NO: 1077849 - RNA, 19 nt, Homo sapiens
  misc_RNA (1)...(19): siRNA sense strand
gaaacuucaggaggucuua

SEQ ID NO: 1077850 - RNA, 19 nt, Homo sapiens
  misc_RNA (1)...(19): siRNA sense strand
aaacaacgccaaagagaag

SEQ ID NO: 1077851 - RNA, 19 nt, Homo sapiens
  misc_RNA (1)...(19): siRNA sense strand
gaccagcacccacuucugu

SEQ ID NO: 1077852 - RNA, 19 nt, Homo sapiens
  misc_RNA (1)...(19): siRNA sense strand
ggagcucaauggaaacucu

SEQ ID NO: 1077853 - RNA, 19 nt, Homo sapiens
  misc_RNA (1)...(19): siRNA sense strand
caaagccucaccugacuug

SEQ ID NO: 1077854 - RNA, 19 nt, Homo sapiens
  misc_RNA (1)...(19): siRNA sense strand
cauuuagacucagguugua

SEQ ID NO: 1077855 - RNA, 19 nt, Homo sapiens
  misc_RNA (1)...(19): siRNA sense strand
gcaagacaacaauuacauc

SEQ ID NO: 1077856 - RNA, 19 nt, Homo sapiens
  misc_RNA (1)...(19): siRNA sense strand
cagcugagugcaccuauga

SEQ ID NO: 1077857 - RNA, 19 nt, Homo sapiens
  misc_RNA (1)...(19): siRNA sense strand
ucacuuacaguagcgcuua

SEQ ID NO: 1077858 - RNA, 19 nt, Homo sapiens
  misc_RNA (1)...(19): siRNA sense strand
gugaaucaguccuuaacca

SEQ ID NO: 1077859 - RNA, 19 nt, Homo sapiens
  misc_RNA (1)...(19): siRNA sense strand
caacugcuucaucuucauu

SEQ ID NO: 1077860 - RNA, 19 nt, Homo sapiens
  misc_RNA (1)...(19): siRNA sense strand
guacaacuacaaucaacug

SEQ ID NO: 1077861 - RNA, 19 nt, Homo sapiens
  misc_RNA (1)...(19): siRNA sense strand
aggaagaacaggauuguga

SEQ ID NO: 1077862 - RNA, 19 nt, Homo sapiens
  misc_RNA (1)...(19): siRNA sense strand
ccucaagacagaccaggua

SEQ ID NO: 1077863 - RNA, 19 nt, Homo sapiens
  misc_RNA (1)...(19): siRNA sense strand
gcuguggacuucugcugau

SEQ ID NO: 1077864 - RNA, 19 nt, Homo sapiens
  misc_RNA (1)...(19): siRNA sense strand
gugccucccugucuucuca

SEQ ID NO: 1077865 - RNA, 19 nt, Homo sapiens
  misc_RNA (1)...(19): siRNA sense strand
gcucugcacccucaucugu

SEQ ID NO: 1077866 - RNA, 19 nt, Homo sapiens
  misc_RNA (1)...(19): siRNA sense strand
ggagaagauaucugacuca

SEQ ID NO: 1077867 - RNA, 19 nt, Homo sapiens
  misc_RNA (1)...(19): siRNA sense strand
cuggagggaucuuuguuug

SEQ ID NO: 1077868 - RNA, 19 nt, Homo sapiens
  misc_RNA (1)...(19): siRNA sense strand
gcaggaagaacaggauugu

SEQ ID NO: 1077869 - RNA, 19 nt, Homo sapiens
  misc_RNA (1)...(19): siRNA sense strand
gaagaacaggauugugaag

SEQ ID NO: 1077870 - RNA, 19 nt, Homo sapiens
  misc_RNA (1)...(19): siRNA sense strand
guaaucagggagaaacuuc

SEQ ID NO: 1077871 - RNA, 19 nt, Homo sapiens
  misc_RNA (1)...(19): siRNA sense strand
agaaagaggagaccaaguc

SEQ ID NO: 1077872 - RNA, 19 nt, Homo sapiens
  misc_RNA (1)...(19): siRNA sense strand
caagacaacaauuacaucu

SEQ ID NO: 1077873 - RNA, 19 nt, Homo sapiens
  misc_RNA (1)...(19): siRNA sense strand
ugaauugugugacaguuuu

SEQ ID NO: 1077874 - RNA, 19 nt, Homo sapiens
  misc_RNA (1)...(19): siRNA sense strand
cggguuaguucaguaauca

SEQ ID NO: 1077875 - RNA, 19 nt, Homo sapiens
  misc_RNA (1)...(19): siRNA sense strand
gaggaaaaccaaacaauca

SEQ ID NO: 1077876 - RNA, 19 nt, Homo sapiens
  misc_RNA (1)...(19): siRNA sense strand
aaagacguguccugcacuu

SEQ ID NO: 1077877 - RNA, 19 nt, Homo sapiens
  misc_RNA (1)...(19): siRNA sense strand
gaacauugugaccuuacug

SEQ ID NO: 1077878 - RNA, 19 nt, Homo sapiens
  misc_RNA (1)...(19): siRNA sense strand
gacgcauggccaaauauuu

SEQ ID NO: 1077879 - RNA, 19 nt, Homo sapiens
  misc_RNA (1)...(19): siRNA sense strand
gcucuucugacucuaguga

SEQ ID NO: 1077880 - RNA, 19 nt, Homo sapiens
  misc_RNA (1)...(19): siRNA sense strand
gagcucuucugacucuagu

SEQ ID NO: 1077881 - RNA, 19 nt, Homo sapiens
  misc_RNA (1)...(19): siRNA sense strand
ggucacggguuaguucagu

SEQ ID NO: 1077882 - RNA, 19 nt, Homo sapiens
  misc_RNA (1)...(19): siRNA sense strand
ucugaacauugugaccuua

SEQ ID NO: 1077883 - RNA, 19 nt, Homo sapiens
  misc_RNA (1)...(19): siRNA sense strand
gacaguggcacaucagaca

SEQ ID NO: 1077884 - RNA, 19 nt, Homo sapiens
  misc_RNA (1)...(19): siRNA sense strand
gccagaagccauggacuga

SEQ ID NO: 1077885 - RNA, 19 nt, Homo sapiens
  misc_RNA (1)...(19): siRNA sense strand
ggucugcuccugcuguaug

SEQ ID NO: 1077886 - RNA, 19 nt, Homo sapiens
  misc_RNA (1)...(19): siRNA sense strand
ggacaagagagugauuauc

SEQ ID NO: 1077887 - RNA, 19 nt, Homo sapiens
  misc_RNA (1)...(19): siRNA sense strand
guggggagcucaauggaaa

SEQ ID NO: 1077888 - RNA, 19 nt, Homo sapiens
  misc_RNA (1)...(19): siRNA sense strand
uugaaagccugcaggaaca

SEQ ID NO: 1077889 - RNA, 19 nt, Homo sapiens
  misc_RNA (1)...(19): siRNA sense strand
gaaacccacgcugguguga

SEQ ID NO: 1077890 - RNA, 19 nt, Homo sapiens
  misc_RNA (1)...(19): siRNA sense strand
acaaguaaacaacgccaaa

SEQ ID NO: 1077891 - RNA, 19 nt, Homo sapiens
  misc_RNA (1)...(19): siRNA sense strand
gcaggaacaaguaaacaac

SEQ ID NO: 1077892 - RNA, 19 nt, Homo sapiens
  misc_RNA (1)...(19): siRNA sense strand
gcuuaccucuuugggauuc

SEQ ID NO: 1077893 - RNA, 19 nt, Homo sapiens
  misc_RNA (1)...(19): siRNA sense strand
ucaccugacuugccugaac

SEQ ID NO: 1077894 - RNA, 19 nt, Homo sapiens
  misc_RNA (1)...(19): siRNA sense strand
gcuggcgacucuacaaggu

SEQ ID NO: 1077895 - RNA, 19 nt, Homo sapiens
  misc_RNA (1)...(19): siRNA sense strand
gggcaguugucucacuuac

SEQ ID NO: 1077896 - RNA, 19 nt, Homo sapiens
  misc_RNA (1)...(19): siRNA sense strand
ucacggguuaguucaguaa

SEQ ID NO: 1077897 - RNA, 19 nt, Homo sapiens
  misc_RNA (1)...(19): siRNA sense strand
agaggcaucuggagaacuc

SEQ ID NO: 1077898 - RNA, 19 nt, Homo sapiens
  misc_RNA (1)...(19): siRNA sense strand
auaaacugcucugaauugu

SEQ ID NO: 1077899 - RNA, 19 nt, Homo sapiens
  misc_RNA (1)...(19): siRNA sense strand
cuucugugcuucccgguau

SEQ ID NO: 1077900 - RNA, 19 nt, Homo sapiens
  misc_RNA (1)...(19): siRNA sense strand
gauucucagugucaguaug

SEQ ID NO: 1077901 - RNA, 19 nt, Homo sapiens
  misc_RNA (1)...(19): siRNA sense strand
cagauucucagugucagua

SEQ ID NO: 1077902 - RNA, 19 nt, Homo sapiens
  misc_RNA (1)...(19): siRNA sense strand
aagauggacuuccugcuuu

SEQ ID NO: 1077903 - RNA, 19 nt, Homo sapiens
  misc_RNA (1)...(19): siRNA sense strand
gaagcucuaugaccuggau

SEQ ID NO: 1077904 - RNA, 19 nt, Homo sapiens
  misc_RNA (1)...(19): siRNA sense strand
caagauggacuuccugcuu

SEQ ID NO: 1077905 - RNA, 19 nt, Homo sapiens
  misc_RNA (1)...(19): siRNA sense strand
cuacuuggccuuccuguuc

SEQ ID NO: 1077906 - RNA, 19 nt, Homo sapiens
  misc_RNA (1)...(19): siRNA sense strand
gugaggagcccuucaacga

SEQ ID NO: 1077907 - RNA, 19 nt, Homo sapiens
  misc_RNA (1)...(19): siRNA sense strand
gcgcauggccugcucuacu

SEQ ID NO: 1077908 - RNA, 19 nt, Homo sapiens
  misc_RNA (1)...(19): siRNA sense strand
cgcauggccugcucuacug

SEQ ID NO: 1077909 - RNA, 19 nt, Homo sapiens
  misc_RNA (1)...(19): siRNA sense strand
cgacgucgugggcaaguuc

SEQ ID NO: 1077910 - RNA, 19 nt, Homo sapiens
  misc_RNA (1)...(19): siRNA sense strand
ccacacagauccugaagug

SEQ ID NO: 1077911 - RNA, 19 nt, Homo sapiens
  misc_RNA (1)...(19): siRNA sense strand
gcaucgugcuccacaagua

SEQ ID NO: 1077912 - RNA, 19 nt, Homo sapiens
  misc_RNA (1)...(19): siRNA sense strand
gagcuugaccugucuaaca

SEQ ID NO: 1077913 - RNA, 19 nt, Homo sapiens
  misc_RNA (1)...(19): siRNA sense strand
gagggugugugaaguggaa

SEQ ID NO: 1077914 - RNA, 19 nt, Homo sapiens
  misc_RNA (1)...(19): siRNA sense strand
caaccaggacuacgaauuc

SEQ ID NO: 1077915 - RNA, 19 nt, Homo sapiens
  misc_RNA (1)...(19): siRNA sense strand
ccaccgaguuggccuacuu

SEQ ID NO: 1077916 - RNA, 19 nt, Homo sapiens
  misc_RNA (1)...(19): siRNA sense strand
uggaugggcuggcauuugu

SEQ ID NO: 1077917 - RNA, 19 nt, Homo sapiens
  misc_RNA (1)...(19): siRNA sense strand
uaaggucaauggcaaggau

SEQ ID NO: 1077918 - RNA, 19 nt, Homo sapiens
  misc_RNA (1)...(19): siRNA sense strand
gaggcugugugcguaauug

SEQ ID NO: 1077919 - RNA, 19 nt, Homo sapiens
  misc_RNA (1)...(19): siRNA sense strand
uggaauucgucuucucuga

SEQ ID NO: 1077920 - RNA, 19 nt, Homo sapiens
  misc_RNA (1)...(19): siRNA sense strand
uggagacgcugccggacaa

SEQ ID NO: 1077921 - RNA, 19 nt, Homo sapiens
  misc_RNA (1)...(19): siRNA sense strand
gggugcggaugaucucuga

SEQ ID NO: 1077922 - RNA, 19 nt, Homo sapiens
  misc_RNA (1)...(19): siRNA sense strand
gcugugugcguaauugauu

SEQ ID NO: 1077923 - RNA, 19 nt, Homo sapiens
  misc_RNA (1)...(19): siRNA sense strand
ucaaugacaaccugaaagu

SEQ ID NO: 1077924 - RNA, 19 nt, Homo sapiens
  misc_RNA (1)...(19): siRNA sense strand
gacggacuccaacaucgua

SEQ ID NO: 1077925 - RNA, 19 nt, Homo sapiens
  misc_RNA (1)...(19): siRNA sense strand
gaacacagugguggccaau

SEQ ID NO: 1077926 - RNA, 19 nt, Homo sapiens
  misc_RNA (1)...(19): siRNA sense strand
ccaaccaggacuacgaauu

SEQ ID NO: 1077927 - RNA, 19 nt, Homo sapiens
  misc_RNA (1)...(19): siRNA sense strand
acacagugguggccaaugc

SEQ ID NO: 1077928 - RNA, 19 nt, Homo sapiens
  misc_RNA (1)...(19): siRNA sense strand
cauccgagcccacaagaag

SEQ ID NO: 1077929 - RNA, 19 nt, Homo sapiens
  misc_RNA (1)...(19): siRNA sense strand
gaugggcuggcauuuguga

SEQ ID NO: 1077930 - RNA, 19 nt, Homo sapiens
  misc_RNA (1)...(19): siRNA sense strand
gcgaggaguucuuuucugu

SEQ ID NO: 1077931 - RNA, 19 nt, Homo sapiens
  misc_RNA (1)...(19): siRNA sense strand
ccaagaccauggugaacac

SEQ ID NO: 1077932 - RNA, 19 nt, Homo sapiens
  misc_RNA (1)...(19): siRNA sense strand
ccaaugccuccuucaccua

SEQ ID NO: 1077933 - RNA, 19 nt, Homo sapiens
  misc_RNA (1)...(19): siRNA sense strand
gaggagggugugugaagug

SEQ ID NO: 1077934 - RNA, 19 nt, Homo sapiens
  misc_RNA (1)...(19): siRNA sense strand
cacacaggcuggccacaag

SEQ ID NO: 1077935 - RNA, 19 nt, Homo sapiens
  misc_RNA (1)...(19): siRNA sense strand
ccgagucccucagcgaguu

SEQ ID NO: 1077936 - RNA, 19 nt, Homo sapiens
  misc_RNA (1)...(19): siRNA sense strand
acaagaagcgcuggagugu

SEQ ID NO: 1077937 - RNA, 19 nt, Homo sapiens
  misc_RNA (1)...(19): siRNA sense strand
ucacagcucacugggagaa

SEQ ID NO: 1077938 - RNA, 19 nt, Homo sapiens
  misc_RNA (1)...(19): siRNA sense strand
gaaggcccaggcggacuuu

SEQ ID NO: 1077939 - RNA, 19 nt, Homo sapiens
  misc_RNA (1)...(19): siRNA sense strand
cugaagaggaggcugagaa

SEQ ID NO: 1077940 - RNA, 19 nt, Homo sapiens
  misc_RNA (1)...(19): siRNA sense strand
ggaggcugugugcguaauu

SEQ ID NO: 1077941 - RNA, 19 nt, Homo sapiens
  misc_RNA (1)...(19): siRNA sense strand
gaugcguccucaacuuacu

SEQ ID NO: 1077942 - RNA, 19 nt, Homo sapiens
  misc_RNA (1)...(19): siRNA sense strand
gggaggcugugugcguaau

SEQ ID NO: 1077943 - RNA, 19 nt, Homo sapiens
  misc_RNA (1)...(19): siRNA sense strand
ucacacaggcuggccacaa

SEQ ID NO: 1077944 - RNA, 19 nt, Homo sapiens
  misc_RNA (1)...(19): siRNA sense strand
agcuugaccugucuaacaa

SEQ ID NO: 1077945 - RNA, 19 nt, Homo sapiens
  misc_RNA (1)...(19): siRNA sense strand
acacuggacaccaccucua

SEQ ID NO: 1077946 - RNA, 19 nt, Homo sapiens
  misc_RNA (1)...(19): siRNA sense strand
agaccauggugaacacagu

SEQ ID NO: 1077947 - RNA, 19 nt, Homo sapiens
  misc_RNA (1)...(19): siRNA sense strand
gaguggaugggcuggcauu

SEQ ID NO: 1077948 - RNA, 19 nt, Homo sapiens
  misc_RNA (1)...(19): siRNA sense strand
gaacaaccauuugcuguaa

SEQ ID NO: 1077949 - RNA, 19 nt, Homo sapiens
  misc_RNA (1)...(19): siRNA sense strand
gagaugcacuagaucauuu

SEQ ID NO: 1077950 - RNA, 19 nt, Homo sapiens
  misc_RNA (1)...(19): siRNA sense strand
ggaacaaccauuugcugua

SEQ ID NO: 1077951 - RNA, 19 nt, Homo sapiens
  misc_RNA (1)...(19): siRNA sense strand
ggacaacauugaucauagg

SEQ ID NO: 1077952 - RNA, 19 nt, Homo sapiens
  misc_RNA (1)...(19): siRNA sense strand
uggcagagaugcacuagau

SEQ ID NO: 1077953 - RNA, 19 nt, Homo sapiens
  misc_RNA (1)...(19): siRNA sense strand
gggacaacauugaucauag

SEQ ID NO: 1077954 - RNA, 19 nt, Homo sapiens
  misc_RNA (1)...(19): siRNA sense strand
uagaagaguucagguguug

SEQ ID NO: 1077955 - RNA, 19 nt, Homo sapiens
  misc_RNA (1)...(19): siRNA sense strand
gcagagaugcacuagauca

SEQ ID NO: 1077956 - RNA, 19 nt, Homo sapiens
  misc_RNA (1)...(19): siRNA sense strand
guucagguguugcugcauu

SEQ ID NO: 1077957 - RNA, 19 nt, Homo sapiens
  misc_RNA (1)...(19): siRNA sense strand
ucaacaggauggcagagau

SEQ ID NO: 1077958 - RNA, 19 nt, Homo sapiens
  misc_RNA (1)...(19): siRNA sense strand
uuagaagaguucagguguu

SEQ ID NO: 1077959 - RNA, 19 nt, Homo sapiens
  misc_RNA (1)...(19): siRNA sense strand
caacaggauggcagagaug

SEQ ID NO: 1077960 - RNA, 19 nt, Homo sapiens
  misc_RNA (1)...(19): siRNA sense strand
uaggaugguucgagaggau

SEQ ID NO: 1077961 - RNA, 19 nt, Homo sapiens
  misc_RNA (1)...(19): siRNA sense strand
ggauggcagagaugcacua

SEQ ID NO: 1077962 - RNA, 19 nt, Homo sapiens
  misc_RNA (1)...(19): siRNA sense strand
gaagaguucagguguugcu

SEQ ID NO: 1077963 - RNA, 19 nt, Homo sapiens
  misc_RNA (1)...(19): siRNA sense strand
ucgagaggaucuucaacag

SEQ ID NO: 1077964 - RNA, 19 nt, Homo sapiens
  misc_RNA (1)...(19): siRNA sense strand
agagaugcacuagaucauu

SEQ ID NO: 1077965 - RNA, 19 nt, Homo sapiens
  misc_RNA (1)...(19): siRNA sense strand
gacaacauugaucauagga

SEQ ID NO: 1077966 - RNA, 19 nt, Homo sapiens
  misc_RNA (1)...(19): siRNA sense strand
ccacugagcucaagagaaa

SEQ ID NO: 1077967 - RNA, 19 nt, Homo sapiens
  misc_RNA (1)...(19): siRNA sense strand
gcagagcccuggcaaguuu

SEQ ID NO: 1077968 - RNA, 19 nt, Homo sapiens
  misc_RNA (1)...(19): siRNA sense strand
ugaagaaggugaugacuuu

SEQ ID NO: 1077969 - RNA, 19 nt, Homo sapiens
  misc_RNA (1)...(19): siRNA sense strand
gaacaaaugaugaagauga

SEQ ID NO: 1077970 - RNA, 19 nt, Homo sapiens
  misc_RNA (1)...(19): siRNA sense strand
gaacagugaccaaaccuuu

SEQ ID NO: 1077971 - RNA, 19 nt, Homo sapiens
  misc_RNA (1)...(19): siRNA sense strand
gagagugaauugggacuua

SEQ ID NO: 1077972 - RNA, 19 nt, Homo sapiens
  misc_RNA (1)...(19): siRNA sense strand
caaagaugacagugaauua

SEQ ID NO: 1077973 - RNA, 19 nt, Homo sapiens
  misc_RNA (1)...(19): siRNA sense strand
gaagaaacgugagagaucu

SEQ ID NO: 1077974 - RNA, 19 nt, Homo sapiens
  misc_RNA (1)...(19): siRNA sense strand
ggacacagacacugaagaa

SEQ ID NO: 1077975 - RNA, 19 nt, Homo sapiens
  misc_RNA (1)...(19): siRNA sense strand
gcugggaaguuaucaauuc

SEQ ID NO: 1077976 - RNA, 19 nt, Homo sapiens
  misc_RNA (1)...(19): siRNA sense strand
acucagcuaucuacuguua

SEQ ID NO: 1077977 - RNA, 19 nt, Homo sapiens
  misc_RNA (1)...(19): siRNA sense strand
gggaacaaaugaugaagau

SEQ ID NO: 1077978 - RNA, 19 nt, Homo sapiens
  misc_RNA (1)...(19): siRNA sense strand
gaaacuggauuuuggaauu

SEQ ID NO: 1077979 - RNA, 19 nt, Homo sapiens
  misc_RNA (1)...(19): siRNA sense strand
agucagagcuggaucaaau

SEQ ID NO: 1077980 - RNA, 19 nt, Homo sapiens
  misc_RNA (1)...(19): siRNA sense strand
ggcaaaagcugggaaguua

SEQ ID NO: 1077981 - RNA, 19 nt, Homo sapiens
  misc_RNA (1)...(19): siRNA sense strand
gccugaaggugaagacuuu

SEQ ID NO: 1077982 - RNA, 19 nt, Homo sapiens
  misc_RNA (1)...(19): siRNA sense strand
gaaagaaggaacaguugga

SEQ ID NO: 1077983 - RNA, 19 nt, Homo sapiens
  misc_RNA (1)...(19): siRNA sense strand
aaugggaccuucaaccuuu

SEQ ID NO: 1077984 - RNA, 19 nt, Homo sapiens
  misc_RNA (1)...(19): siRNA sense strand
gagaaagaaggaacaguug

SEQ ID NO: 1077985 - RNA, 19 nt, Homo sapiens
  misc_RNA (1)...(19): siRNA sense strand
gccaaagaguuaucugugu

SEQ ID NO: 1077986 - RNA, 19 nt, Homo sapiens
  misc_RNA (1)...(19): siRNA sense strand
ugacagugaauuagacuuu

SEQ ID NO: 1077987 - RNA, 19 nt, Homo sapiens
  misc_RNA (1)...(19): siRNA sense strand
ggucucacccuuccucuga

SEQ ID NO: 1077988 - RNA, 19 nt, Homo sapiens
  misc_RNA (1)...(19): siRNA sense strand
gaaguuaucaauuccaaac

SEQ ID NO: 1077989 - RNA, 19 nt, Homo sapiens
  misc_RNA (1)...(19): siRNA sense strand
agaaggugaugacuuugaa

SEQ ID NO: 1077990 - RNA, 19 nt, Homo sapiens
  misc_RNA (1)...(19): siRNA sense strand
ugaauuaagccuugguuug

SEQ ID NO: 1077991 - RNA, 19 nt, Homo sapiens
  misc_RNA (1)...(19): siRNA sense strand
auacucagcuaucuacugu

SEQ ID NO: 1077992 - RNA, 19 nt, Homo sapiens
  misc_RNA (1)...(19): siRNA sense strand
ccaaaccuuucaccugaug

SEQ ID NO: 1077993 - RNA, 19 nt, Homo sapiens
  misc_RNA (1)...(19): siRNA sense strand
gaucuugggaaguuacauu

SEQ ID NO: 1077994 - RNA, 19 nt, Homo sapiens
  misc_RNA (1)...(19): siRNA sense strand
gaauugggacuuacacaag

SEQ ID NO: 1077995 - RNA, 19 nt, Homo sapiens
  misc_RNA (1)...(19): siRNA sense strand
gaauuaagccuugguuugc

SEQ ID NO: 1077996 - RNA, 19 nt, Homo sapiens
  misc_RNA (1)...(19): siRNA sense strand
ccacuguauugcagaauca

SEQ ID NO: 1077997 - RNA, 19 nt, Homo sapiens
  misc_RNA (1)...(19): siRNA sense strand
ggaagcagaagcacagcaa

SEQ ID NO: 1077998 - RNA, 19 nt, Homo sapiens
  misc_RNA (1)...(19): siRNA sense strand
ggugaugacuuugaacuac

SEQ ID NO: 1077999 - RNA, 19 nt, Homo sapiens
  misc_RNA (1)...(19): siRNA sense strand
gaaggauacacuccacaga

SEQ ID NO: 1078000 - RNA, 19 nt, Homo sapiens
  misc_RNA (1)...(19): siRNA sense strand
ugaugaagaugaauuaagc

SEQ ID NO: 1078001 - RNA, 19 nt, Homo sapiens
  misc_RNA (1)...(19): siRNA sense strand
agagaaagaaggaacaguu

SEQ ID NO: 1078002 - RNA, 19 nt, Homo sapiens
  misc_RNA (1)...(19): siRNA sense strand
ugacugcagcuaucaaaga

SEQ ID NO: 1078003 - RNA, 19 nt, Homo sapiens
  misc_RNA (1)...(19): siRNA sense strand
uuucagcucuuuguccuaa

SEQ ID NO: 1078004 - RNA, 19 nt, Homo sapiens
  misc_RNA (1)...(19): siRNA sense strand
cuucagguuuccuuucaaa

SEQ ID NO: 1078005 - RNA, 19 nt, Homo sapiens
  misc_RNA (1)...(19): siRNA sense strand
agacacuucugaugaucuu

SEQ ID NO: 1078006 - RNA, 19 nt, Homo sapiens
  misc_RNA (1)...(19): siRNA sense strand
gcagaagcacagcaaaaua

SEQ ID NO: 1078007 - RNA, 19 nt, Homo sapiens
  misc_RNA (1)...(19): siRNA sense strand
gaaaauggcaugggaacaa

SEQ ID NO: 1078008 - RNA, 19 nt, Homo sapiens
  misc_RNA (1)...(19): siRNA sense strand
cacagacacugaagaaggu

SEQ ID NO: 1078009 - RNA, 19 nt, Homo sapiens
  misc_RNA (1)...(19): siRNA sense strand
cagguuuccuuucaaaucu

SEQ ID NO: 1078010 - RNA, 19 nt, Homo sapiens
  misc_RNA (1)...(19): siRNA sense strand
gaccuucaaccuuucagaa

SEQ ID NO: 1078011 - RNA, 19 nt, Homo sapiens
  misc_RNA (1)...(19): siRNA sense strand
gcaugggaacaaaugauga

SEQ ID NO: 1078012 - RNA, 19 nt, Homo sapiens
  misc_RNA (1)...(19): siRNA sense strand
gaagcagaagcacagcaaa

SEQ ID NO: 1078013 - RNA, 19 nt, Homo sapiens
  misc_RNA (1)...(19): siRNA sense strand
acaaagaugacagugaauu

SEQ ID NO: 1078014 - RNA, 19 nt, Homo sapiens
  misc_RNA (1)...(19): siRNA sense strand
gauacacuccacagacaga

SEQ ID NO: 1078015 - RNA, 19 nt, Homo sapiens
  misc_RNA (1)...(19): siRNA sense strand
uuacgaucuugggaaguua

SEQ ID NO: 1078016 - RNA, 19 nt, Homo sapiens
  misc_RNA (1)...(19): siRNA sense strand
cagaagcacagcaaaauaa

SEQ ID NO: 1078017 - RNA, 19 nt, Homo sapiens
  misc_RNA (1)...(19): siRNA sense strand
aauugggacuuacacaaga

SEQ ID NO: 1078018 - RNA, 19 nt, Homo sapiens
  misc_RNA (1)...(19): siRNA sense strand
agaagaaacgugagagauc

SEQ ID NO: 1078019 - RNA, 19 nt, Homo sapiens
  misc_RNA (1)...(19): siRNA sense strand
ggacugauaaugggaccuu

SEQ ID NO: 1078020 - RNA, 19 nt, Homo sapiens
  misc_RNA (1)...(19): siRNA sense strand
cagcagagcccuggcaagu

SEQ ID NO: 1078021 - RNA, 19 nt, Homo sapiens
  misc_RNA (1)...(19): siRNA sense strand
guuggacaguggucacaga

SEQ ID NO: 1078022 - RNA, 19 nt, Homo sapiens
  misc_RNA (1)...(19): siRNA sense strand
ccucacgguugcugccaaa

SEQ ID NO: 1078023 - RNA, 19 nt, Homo sapiens
  misc_RNA (1)...(19): siRNA sense strand
gaagaaggugaugacuuug

SEQ ID NO: 1078024 - RNA, 19 nt, Homo sapiens
  misc_RNA (1)...(19): siRNA sense strand
gaaggaacaguuggacagu

SEQ ID NO: 1078025 - RNA, 19 nt, Homo sapiens
  misc_RNA (1)...(19): siRNA sense strand
ugaauugggacuuacacaa

SEQ ID NO: 1078026 - RNA, 19 nt, Homo sapiens
  misc_RNA (1)...(19): siRNA sense strand
ugaugacuuugaacuacuu

SEQ ID NO: 1078027 - RNA, 19 nt, Homo sapiens
  misc_RNA (1)...(19): siRNA sense strand
ucacagaccaagcaaagag

SEQ ID NO: 1078028 - RNA, 19 nt, Homo sapiens
  misc_RNA (1)...(19): siRNA sense strand
uuuacgaucuugggaaguu

SEQ ID NO: 1078029 - RNA, 19 nt, Homo sapiens
  misc_RNA (1)...(19): siRNA sense strand
uaucaaagaccaguuagag

SEQ ID NO: 1078030 - RNA, 19 nt, Homo sapiens
  misc_RNA (1)...(19): siRNA sense strand
ucagcuaucuacuguuacu

SEQ ID NO: 1078031 - RNA, 19 nt, Homo sapiens
  misc_RNA (1)...(19): siRNA sense strand
ucagagcuggaucaaauug

SEQ ID NO: 1078032 - RNA, 19 nt, Homo sapiens
  misc_RNA (1)...(19): siRNA sense strand
guuagagggugugcagcaa

SEQ ID NO: 1078033 - RNA, 19 nt, Homo sapiens
  misc_RNA (1)...(19): siRNA sense strand
aggauacacuccacagaca

SEQ ID NO: 1078034 - RNA, 19 nt, Homo sapiens
  misc_RNA (1)...(19): siRNA sense strand
gguugcugccaaagaguua

SEQ ID NO: 1078035 - RNA, 19 nt, Homo sapiens
  misc_RNA (1)...(19): siRNA sense strand
cagccacuguauugcagaa

SEQ ID NO: 1078036 - RNA, 19 nt, Homo sapiens
  misc_RNA (1)...(19): siRNA sense strand
gaugaauuaagccuugguu

SEQ ID NO: 1078037 - RNA, 19 nt, Homo sapiens
  misc_RNA (1)...(19): siRNA sense strand
caugggaacaaaugaugaa

SEQ ID NO: 1078038 - RNA, 19 nt, Homo sapiens
  misc_RNA (1)...(19): siRNA sense strand
uaaugggaccuucaaccuu

SEQ ID NO: 1078039 - RNA, 19 nt, Homo sapiens
  misc_RNA (1)...(19): siRNA sense strand
acagacgucucagagguau

SEQ ID NO: 1078040 - RNA, 19 nt, Homo sapiens
  misc_RNA (1)...(19): siRNA sense strand
gaaacgugagagaucugaa

SEQ ID NO: 1078041 - RNA, 19 nt, Homo sapiens
  misc_RNA (1)...(19): siRNA sense strand
ucagguuuccuuucaaauc

SEQ ID NO: 1078042 - RNA, 19 nt, Homo sapiens
  misc_RNA (1)...(19): siRNA sense strand
aagaaggugaugacuuuga

SEQ ID NO: 1078043 - RNA, 19 nt, Homo sapiens
  misc_RNA (1)...(19): siRNA sense strand
gacugcagcuaucaaagac

SEQ ID NO: 1078044 - RNA, 19 nt, Homo sapiens
  misc_RNA (1)...(19): siRNA sense strand
gccacuguauugcagaauc

SEQ ID NO: 1078045 - RNA, 19 nt, Homo sapiens
  misc_RNA (1)...(19): siRNA sense strand
ugaccgacccagugaggaa

SEQ ID NO: 1078046 - RNA, 19 nt, Homo sapiens
  misc_RNA (1)...(19): siRNA sense strand
ucagaagaaacgugagaga

SEQ ID NO: 1078047 - RNA, 19 nt, Homo sapiens
  misc_RNA (1)...(19): siRNA sense strand
ccuuucaccugaugagcaa

SEQ ID NO: 1078048 - RNA, 19 nt, Homo sapiens
  misc_RNA (1)...(19): siRNA sense strand
cacagacgucucagaggua

SEQ ID NO: 1078049 - RNA, 19 nt, Homo sapiens
  misc_RNA (1)...(19): siRNA sense strand
ucaauuccaaaccagauga

SEQ ID NO: 1078050 - RNA, 19 nt, Homo sapiens
  misc_RNA (1)...(19): siRNA sense strand
aagaugacagugaauuaga

SEQ ID NO: 1078051 - RNA, 19 nt, Homo sapiens
  misc_RNA (1)...(19): siRNA sense strand
aaagaugacagugaauuag

SEQ ID NO: 1078052 - RNA, 19 nt, Homo sapiens
  misc_RNA (1)...(19): siRNA sense strand
cagaagaaacgugagagau

SEQ ID NO: 1078053 - RNA, 19 nt, Homo sapiens
  misc_RNA (1)...(19): siRNA sense strand
gucuucagguuuccuuuca

SEQ ID NO: 1078054 - RNA, 19 nt, Homo sapiens
  misc_RNA (1)...(19): siRNA sense strand
gcucagccacuguauugca

SEQ ID NO: 1078055 - RNA, 19 nt, Homo sapiens
  misc_RNA (1)...(19): siRNA sense strand
uuccaaaccagaugaaaga

SEQ ID NO: 1078056 - RNA, 19 nt, Homo sapiens
  misc_RNA (1)...(19): siRNA sense strand
gguuauacucagcuaucua

SEQ ID NO: 1078057 - RNA, 19 nt, Homo sapiens
  misc_RNA (1)...(19): siRNA sense strand
ggcaugggaacaaaugaug

SEQ ID NO: 1078058 - RNA, 19 nt, Homo sapiens
  misc_RNA (1)...(19): siRNA sense strand
uuacauuccugggguuaua

SEQ ID NO: 1078059 - RNA, 19 nt, Homo sapiens
  misc_RNA (1)...(19): siRNA sense strand
gugaugacuuugaacuacu

SEQ ID NO: 1078060 - RNA, 19 nt, Homo sapiens
  misc_RNA (1)...(19): siRNA sense strand
caaccuggcuggggauguu

SEQ ID NO: 1078061 - RNA, 19 nt, Homo sapiens
  misc_RNA (1)...(19): siRNA sense strand
ggaccuucaaccuuucaga

SEQ ID NO: 1078062 - RNA, 19 nt, Homo sapiens
  misc_RNA (1)...(19): siRNA sense strand
cuccuggucuguagugugu

SEQ ID NO: 1078063 - RNA, 19 nt, Homo sapiens
  misc_RNA (1)...(19): siRNA sense strand
aagaggacacagacacuga

SEQ ID NO: 1078064 - RNA, 19 nt, Homo sapiens
  misc_RNA (1)...(19): siRNA sense strand
gugaggaaguuuucucuag

SEQ ID NO: 1078065 - RNA, 19 nt, Homo sapiens
  misc_RNA (1)...(19): siRNA sense strand
acacuucugaugaucuuga

SEQ ID NO: 1078066 - RNA, 19 nt, Homo sapiens
  misc_RNA (1)...(19): siRNA sense strand
gcagauaccucucaagaua

SEQ ID NO: 1078067 - RNA, 19 nt, Homo sapiens
  misc_RNA (1)...(19): siRNA sense strand
ggaggcaucuuucaacuua

SEQ ID NO: 1078068 - RNA, 19 nt, Homo sapiens
  misc_RNA (1)...(19): siRNA sense strand
gaagagaggugcaauagug

SEQ ID NO: 1078069 - RNA, 19 nt, Homo sapiens
  misc_RNA (1)...(19): siRNA sense strand
aaagagggcuggacaguua

SEQ ID NO: 1078070 - RNA, 19 nt, Homo sapiens
  misc_RNA (1)...(19): siRNA sense strand
gaaaggauuuaccuaauug

SEQ ID NO: 1078071 - RNA, 19 nt, Homo sapiens
  misc_RNA (1)...(19): siRNA sense strand
ucacagaccuuuaaaguug

SEQ ID NO: 1078072 - RNA, 19 nt, Homo sapiens
  misc_RNA (1)...(19): siRNA sense strand
ggaggagucuaccaaauaa

SEQ ID NO: 1078073 - RNA, 19 nt, Homo sapiens
  misc_RNA (1)...(19): siRNA sense strand
gugaugauauggauaguua

SEQ ID NO: 1078074 - RNA, 19 nt, Homo sapiens
  misc_RNA (1)...(19): siRNA sense strand
gagaauaccuggaugaaca

SEQ ID NO: 1078075 - RNA, 19 nt, Homo sapiens
  misc_RNA (1)...(19): siRNA sense strand
uaaagaagguuguacauca

SEQ ID NO: 1078076 - RNA, 19 nt, Homo sapiens
  misc_RNA (1)...(19): siRNA sense strand
gaaagaaggcagcaacauu

SEQ ID NO: 1078077 - RNA, 19 nt, Homo sapiens
  misc_RNA (1)...(19): siRNA sense strand
ccuuaaaccucucaaauuu

SEQ ID NO: 1078078 - RNA, 19 nt, Homo sapiens
  misc_RNA (1)...(19): siRNA sense strand
gaaccaugcuguugugaau

SEQ ID NO: 1078079 - RNA, 19 nt, Homo sapiens
  misc_RNA (1)...(19): siRNA sense strand
agaagaagauugacucuga

SEQ ID NO: 1078080 - RNA, 19 nt, Homo sapiens
  misc_RNA (1)...(19): siRNA sense strand
agacguacauugagaagua

SEQ ID NO: 1078081 - RNA, 19 nt, Homo sapiens
  misc_RNA (1)...(19): siRNA sense strand
gcacagugaugaugagguu

SEQ ID NO: 1078082 - RNA, 19 nt, Homo sapiens
  misc_RNA (1)...(19): siRNA sense strand
uugagaagcuggagaauaa

SEQ ID NO: 1078083 - RNA, 19 nt, Homo sapiens
  misc_RNA (1)...(19): siRNA sense strand
gaaacaauaccuagaagaa

SEQ ID NO: 1078084 - RNA, 19 nt, Homo sapiens
  misc_RNA (1)...(19): siRNA sense strand
gcucugcugugcuuuauuu

SEQ ID NO: 1078085 - RNA, 19 nt, Homo sapiens
  misc_RNA (1)...(19): siRNA sense strand
ggaaagagcacccaagugu

SEQ ID NO: 1078086 - RNA, 19 nt, Homo sapiens
  misc_RNA (1)...(19): siRNA sense strand
uuaacgaacuucugguuua

SEQ ID NO: 1078087 - RNA, 19 nt, Homo sapiens
  misc_RNA (1)...(19): siRNA sense strand
ugagagaccuuuaccaaga

SEQ ID NO: 1078088 - RNA, 19 nt, Homo sapiens
  misc_RNA (1)...(19): siRNA sense strand
aaagaaggcagcaacauua

SEQ ID NO: 1078089 - RNA, 19 nt, Homo sapiens
  misc_RNA (1)...(19): siRNA sense strand
gaagcuggagaauaaauua

SEQ ID NO: 1078090 - RNA, 19 nt, Homo sapiens
  misc_RNA (1)...(19): siRNA sense strand
acaaaucgcuuacaaccuu

SEQ ID NO: 1078091 - RNA, 19 nt, Homo sapiens
  misc_RNA (1)...(19): siRNA sense strand
gaaagacaacgacaacuug

SEQ ID NO: 1078092 - RNA, 19 nt, Homo sapiens
  misc_RNA (1)...(19): siRNA sense strand
ucacuuggcugcuuaagga

SEQ ID NO: 1078093 - RNA, 19 nt, Homo sapiens
  misc_RNA (1)...(19): siRNA sense strand
gaaccagacuauaacuaug

SEQ ID NO: 1078094 - RNA, 19 nt, Homo sapiens
  misc_RNA (1)...(19): siRNA sense strand
caccaucgcuugugcauga

SEQ ID NO: 1078095 - RNA, 19 nt, Homo sapiens
  misc_RNA (1)...(19): siRNA sense strand
gaggugacccuuucuauga

SEQ ID NO: 1078096 - RNA, 19 nt, Homo sapiens
  misc_RNA (1)...(19): siRNA sense strand
gauggaaguuaucaugaaa

SEQ ID NO: 1078097 - RNA, 19 nt, Homo sapiens
  misc_RNA (1)...(19): siRNA sense strand
gcagcaacauuaacaaauc

SEQ ID NO: 1078098 - RNA, 19 nt, Homo sapiens
  misc_RNA (1)...(19): siRNA sense strand
gaaguaacgcgaagaauag

SEQ ID NO: 1078099 - RNA, 19 nt, Homo sapiens
  misc_RNA (1)...(19): siRNA sense strand
gagauucaguccucacuug

SEQ ID NO: 1078100 - RNA, 19 nt, Homo sapiens
  misc_RNA (1)...(19): siRNA sense strand
gaaguguccuauauggaaa

SEQ ID NO: 1078101 - RNA, 19 nt, Homo sapiens
  misc_RNA (1)...(19): siRNA sense strand
ggauuuaccuaauugugaa

SEQ ID NO: 1078102 - RNA, 19 nt, Homo sapiens
  misc_RNA (1)...(19): siRNA sense strand
gauauugagucauugaugu

SEQ ID NO: 1078103 - RNA, 19 nt, Homo sapiens
  misc_RNA (1)...(19): siRNA sense strand
gaagagauagcacaggaaa

SEQ ID NO: 1078104 - RNA, 19 nt, Homo sapiens
  misc_RNA (1)...(19): siRNA sense strand
ggacaugucugacuauagc

SEQ ID NO: 1078105 - RNA, 19 nt, Homo sapiens
  misc_RNA (1)...(19): siRNA sense strand
caccaaauguucauaaugu

SEQ ID NO: 1078106 - RNA, 19 nt, Homo sapiens
  misc_RNA (1)...(19): siRNA sense strand
gacgagaacuggaacugaa

SEQ ID NO: 1078107 - RNA, 19 nt, Homo sapiens
  misc_RNA (1)...(19): siRNA sense strand
caacacaggaggcaucuuu

SEQ ID NO: 1078108 - RNA, 19 nt, Homo sapiens
  misc_RNA (1)...(19): siRNA sense strand
ugaaguaacgcgaagaaua

SEQ ID NO: 1078109 - RNA, 19 nt, Homo sapiens
  misc_RNA (1)...(19): siRNA sense strand
ggagaaacaauaccuagaa

SEQ ID NO: 1078110 - RNA, 19 nt, Homo sapiens
  misc_RNA (1)...(19): siRNA sense strand
ccagagagaugaugaggau

SEQ ID NO: 1078111 - RNA, 19 nt, Homo sapiens
  misc_RNA (1)...(19): siRNA sense strand
ggaaagacaacgacaacuu

SEQ ID NO: 1078112 - RNA, 19 nt, Homo sapiens
  misc_RNA (1)...(19): siRNA sense strand
gagaaugaccagguaauaa

SEQ ID NO: 1078113 - RNA, 19 nt, Homo sapiens
  misc_RNA (1)...(19): siRNA sense strand
guaaaggacaagauaauug

SEQ ID NO: 1078114 - RNA, 19 nt, Homo sapiens
  misc_RNA (1)...(19): siRNA sense strand
gaauaguaaugacccaguu

SEQ ID NO: 1078115 - RNA, 19 nt, Homo sapiens
  misc_RNA (1)...(19): siRNA sense strand
gcagacaacuaugaagaga

SEQ ID NO: 1078116 - RNA, 19 nt, Homo sapiens
  misc_RNA (1)...(19): siRNA sense strand
ccagcugcauuccaaguua

SEQ ID NO: 1078117 - RNA, 19 nt, Homo sapiens
  misc_RNA (1)...(19): siRNA sense strand
gcaugauucuguucacuug

SEQ ID NO: 1078118 - RNA, 19 nt, Homo sapiens
  misc_RNA (1)...(19): siRNA sense strand
gaaugccucuucugugaug

SEQ ID NO: 1078119 - RNA, 19 nt, Homo sapiens
  misc_RNA (1)...(19): siRNA sense strand
gagagaccuuuaccaagaa

SEQ ID NO: 1078120 - RNA, 19 nt, Homo sapiens
  misc_RNA (1)...(19): siRNA sense strand
gaugaacucuuccgacaag

SEQ ID NO: 1078121 - RNA, 19 nt, Homo sapiens
  misc_RNA (1)...(19): siRNA sense strand
gacaaaugcuacuuaguca

SEQ ID NO: 1078122 - RNA, 19 nt, Homo sapiens
  misc_RNA (1)...(19): siRNA sense strand
aaagcaaauuugugccuua

SEQ ID NO: 1078123 - RNA, 19 nt, Homo sapiens
  misc_RNA (1)...(19): siRNA sense strand
acaggaagcuaauaaguuc

SEQ ID NO: 1078124 - RNA, 19 nt, Homo sapiens
  misc_RNA (1)...(19): siRNA sense strand
gagagcagcugguuaaagc

SEQ ID NO: 1078125 - RNA, 19 nt, Homo sapiens
  misc_RNA (1)...(19): siRNA sense strand
ugaaaacccugaauaguaa

SEQ ID NO: 1078126 - RNA, 19 nt, Homo sapiens
  misc_RNA (1)...(19): siRNA sense strand
acgaacuucugguuuauua

SEQ ID NO: 1078127 - RNA, 19 nt, Homo sapiens
  misc_RNA (1)...(19): siRNA sense strand
gagauugguugaaagacuu

SEQ ID NO: 1078128 - RNA, 19 nt, Homo sapiens
  misc_RNA (1)...(19): siRNA sense strand
ggagagcuuuccaguagga

SEQ ID NO: 1078129 - RNA, 19 nt, Homo sapiens
  misc_RNA (1)...(19): siRNA sense strand
gcuauuaacaggaagcuaa

SEQ ID NO: 1078130 - RNA, 19 nt, Homo sapiens
  misc_RNA (1)...(19): siRNA sense strand
gauguagcauguuauggaa

SEQ ID NO: 1078131 - RNA, 19 nt, Homo sapiens
  misc_RNA (1)...(19): siRNA sense strand
aaaggcaacugaggagaua

SEQ ID NO: 1078132 - RNA, 19 nt, Homo sapiens
  misc_RNA (1)...(19): siRNA sense strand
ccaagugacucuucagauc

SEQ ID NO: 1078133 - RNA, 19 nt, Homo sapiens
  misc_RNA (1)...(19): siRNA sense strand
gggaagagaagcugagaaa

SEQ ID NO: 1078134 - RNA, 19 nt, Homo sapiens
  misc_RNA (1)...(19): siRNA sense strand
ccaguucucuuccucgauu

SEQ ID NO: 1078135 - RNA, 19 nt, Homo sapiens
  misc_RNA (1)...(19): siRNA sense strand
gcaaauuugugccuuaucg

SEQ ID NO: 1078136 - RNA, 19 nt, Homo sapiens
  misc_RNA (1)...(19): siRNA sense strand
ggucagaugcacucauuaa

SEQ ID NO: 1078137 - RNA, 19 nt, Homo sapiens
  misc_RNA (1)...(19): siRNA sense strand
uggaaugccucuucuguga

SEQ ID NO: 1078138 - RNA, 19 nt, Homo sapiens
  misc_RNA (1)...(19): siRNA sense strand
gaggaaacgucgagauugg

SEQ ID NO: 1078139 - RNA, 19 nt, Homo sapiens
  misc_RNA (1)...(19): siRNA sense strand
cagccaaaccucuaugaua

SEQ ID NO: 1078140 - RNA, 19 nt, Homo sapiens
  misc_RNA (1)...(19): siRNA sense strand
ucacacagacacuuuauga

SEQ ID NO: 1078141 - RNA, 19 nt, Homo sapiens
  misc_RNA (1)...(19): siRNA sense strand
ccaccaacauccuugaaga

SEQ ID NO: 1078142 - RNA, 19 nt, Homo sapiens
  misc_RNA (1)...(19): siRNA sense strand
acaaagaguugacagaagu

SEQ ID NO: 1078143 - RNA, 19 nt, Homo sapiens
  misc_RNA (1)...(19): siRNA sense strand
uaacaaacgugagaagaag

SEQ ID NO: 1078144 - RNA, 19 nt, Homo sapiens
  misc_RNA (1)...(19): siRNA sense strand
ccacauaccaguucucuuc

SEQ ID NO: 1078145 - RNA, 19 nt, Homo sapiens
  misc_RNA (1)...(19): siRNA sense strand
gaugacaaaugcuacuuag

SEQ ID NO: 1078146 - RNA, 19 nt, Homo sapiens
  misc_RNA (1)...(19): siRNA sense strand
ucgauucucuucaugcuaa

SEQ ID NO: 1078147 - RNA, 19 nt, Homo sapiens
  misc_RNA (1)...(19): siRNA sense strand
guuagagaaugaccaggua

SEQ ID NO: 1078148 - RNA, 19 nt, Homo sapiens
  misc_RNA (1)...(19): siRNA sense strand
gaucccaccuccuggaaug

SEQ ID NO: 1078149 - RNA, 19 nt, Homo sapiens
  misc_RNA (1)...(19): siRNA sense strand
gaagccauccugucaguau

SEQ ID NO: 1078150 - RNA, 19 nt, Homo sapiens
  misc_RNA (1)...(19): siRNA sense strand
ggaugaaucuaacacuaca

SEQ ID NO: 1078151 - RNA, 19 nt, Homo sapiens
  misc_RNA (1)...(19): siRNA sense strand
gaaugaccagguaauaauu

SEQ ID NO: 1078152 - RNA, 19 nt, Homo sapiens
  misc_RNA (1)...(19): siRNA sense strand
cagccaauauuuacaacaa

SEQ ID NO: 1078153 - RNA, 19 nt, Homo sapiens
  misc_RNA (1)...(19): siRNA sense strand
gcaaaccucagugccaaua

SEQ ID NO: 1078154 - RNA, 19 nt, Homo sapiens
  misc_RNA (1)...(19): siRNA sense strand
gagaaacaauaccuagaag

SEQ ID NO: 1078155 - RNA, 19 nt, Homo sapiens
  misc_RNA (1)...(19): siRNA sense strand
uaacgaacuucugguuuau

SEQ ID NO: 1078156 - RNA, 19 nt, Homo sapiens
  misc_RNA (1)...(19): siRNA sense strand
ggaugacaaaugcuacuua

SEQ ID NO: 1078157 - RNA, 19 nt, Homo sapiens
  misc_RNA (1)...(19): siRNA sense strand
ccaaggcucugcugugcuu

SEQ ID NO: 1078158 - RNA, 19 nt, Homo sapiens
  misc_RNA (1)...(19): siRNA sense strand
uaaaguagaucugucaaac

SEQ ID NO: 1078159 - RNA, 19 nt, Homo sapiens
  misc_RNA (1)...(19): siRNA sense strand
ugacuucaguguuuacaau

SEQ ID NO: 1078160 - RNA, 19 nt, Homo sapiens
  misc_RNA (1)...(19): siRNA sense strand
gaauaaagaagguuguaca

SEQ ID NO: 1078161 - RNA, 19 nt, Homo sapiens
  misc_RNA (1)...(19): siRNA sense strand
gacaaggguuggccagaga

SEQ ID NO: 1078162 - RNA, 19 nt, Homo sapiens
  misc_RNA (1)...(19): siRNA sense strand
auaccuggaugaacagaua

SEQ ID NO: 1078163 - RNA, 19 nt, Homo sapiens
  misc_RNA (1)...(19): siRNA sense strand
ggaggucgauucucuucau

SEQ ID NO: 1078164 - RNA, 19 nt, Homo sapiens
  misc_RNA (1)...(19): siRNA sense strand
gaaggcagcaacauuaaca

SEQ ID NO: 1078165 - RNA, 19 nt, Homo sapiens
  misc_RNA (1)...(19): siRNA sense strand
aaaauacgcuggucaagaa

SEQ ID NO: 1078166 - RNA, 19 nt, Homo sapiens
  misc_RNA (1)...(19): siRNA sense strand
gaagaaaucuggaaguuuu

SEQ ID NO: 1078167 - RNA, 19 nt, Homo sapiens
  misc_RNA (1)...(19): siRNA sense strand
ucauugaccuccagaagaa

SEQ ID NO: 1078168 - RNA, 19 nt, Homo sapiens
  misc_RNA (1)...(19): siRNA sense strand
aagcagggaagaucuauua

SEQ ID NO: 1078169 - RNA, 19 nt, Homo sapiens
  misc_RNA (1)...(19): siRNA sense strand
aggcacagcugaagaucua

SEQ ID NO: 1078170 - RNA, 19 nt, Homo sapiens
  misc_RNA (1)...(19): siRNA sense strand
ggaucguggugacguuuaa

SEQ ID NO: 1078171 - RNA, 19 nt, Homo sapiens
  misc_RNA (1)...(19): siRNA sense strand
gcacuggacuacaccaaac

SEQ ID NO: 1078172 - RNA, 19 nt, Homo sapiens
  misc_RNA (1)...(19): siRNA sense strand
gaacguggcccuguacaca

SEQ ID NO: 1078173 - RNA, 19 nt, Homo sapiens
  misc_RNA (1)...(19): siRNA sense strand
cagggaagaucuauuacau

SEQ ID NO: 1078174 - RNA, 19 nt, Homo sapiens
  misc_RNA (1)...(19): siRNA sense strand
uggcaaaccugcucaugga

SEQ ID NO: 1078175 - RNA, 19 nt, Homo sapiens
  misc_RNA (1)...(19): siRNA sense strand
gcucucggcuucacucauc

SEQ ID NO: 1078176 - RNA, 19 nt, Homo sapiens
  misc_RNA (1)...(19): siRNA sense strand
gcauuuaccggaagcagaa

SEQ ID NO: 1078177 - RNA, 19 nt, Homo sapiens
  misc_RNA (1)...(19): siRNA sense strand
ugcagaaggugaagaaugu

SEQ ID NO: 1078178 - RNA, 19 nt, Homo sapiens
  misc_RNA (1)...(19): siRNA sense strand
caggagggcuuggaguuug

SEQ ID NO: 1078179 - RNA, 19 nt, Homo sapiens
  misc_RNA (1)...(19): siRNA sense strand
gcucucagacugcuaccua

SEQ ID NO: 1078180 - RNA, 19 nt, Homo sapiens
  misc_RNA (1)...(19): siRNA sense strand
ggacuacaccaaacgaagu

SEQ ID NO: 1078181 - RNA, 19 nt, Homo sapiens
  misc_RNA (1)...(19): siRNA sense strand
uuucaucagugggcucuua

SEQ ID NO: 1078182 - RNA, 19 nt, Homo sapiens
  misc_RNA (1)...(19): siRNA sense strand
gaaagcuggccuccucaug

SEQ ID NO: 1078183 - RNA, 19 nt, Homo sapiens
  misc_RNA (1)...(19): siRNA sense strand
aaagaaauaccuccaccuu

SEQ ID NO: 1078184 - RNA, 19 nt, Homo sapiens
  misc_RNA (1)...(19): siRNA sense strand
ggagcagccucaucagcau

SEQ ID NO: 1078185 - RNA, 19 nt, Homo sapiens
  misc_RNA (1)...(19): siRNA sense strand
guggugacguuuaagacuu

SEQ ID NO: 1078186 - RNA, 19 nt, Homo sapiens
  misc_RNA (1)...(19): siRNA sense strand
ggaccaggagggcgugauu

SEQ ID NO: 1078187 - RNA, 19 nt, Homo sapiens
  misc_RNA (1)...(19): siRNA sense strand
guacagccuggacucagua

SEQ ID NO: 1078188 - RNA, 19 nt, Homo sapiens
  misc_RNA (1)...(19): siRNA sense strand
uugaagaaaucuggaaguu

SEQ ID NO: 1078189 - RNA, 19 nt, Homo sapiens
  misc_RNA (1)...(19): siRNA sense strand
ucggugacaucaucuucua

SEQ ID NO: 1078190 - RNA, 19 nt, Homo sapiens
  misc_RNA (1)...(19): siRNA sense strand
gcagggaagaucuauuaca

SEQ ID NO: 1078191 - RNA, 19 nt, Homo sapiens
  misc_RNA (1)...(19): siRNA sense strand
ugaagaaaucuggaaguuu

SEQ ID NO: 1078192 - RNA, 19 nt, Homo sapiens
  misc_RNA (1)...(19): siRNA sense strand
gggcgugauugccaacaug

SEQ ID NO: 1078193 - RNA, 19 nt, Homo sapiens
  misc_RNA (1)...(19): siRNA sense strand
ucuacuacgugaaggugua

SEQ ID NO: 1078194 - RNA, 19 nt, Homo sapiens
  misc_RNA (1)...(19): siRNA sense strand
gaaggacccguuugaugca

SEQ ID NO: 1078195 - RNA, 19 nt, Homo sapiens
  misc_RNA (1)...(19): siRNA sense strand
ggagacggccauccaaguc

SEQ ID NO: 1078196 - RNA, 19 nt, Homo sapiens
  misc_RNA (1)...(19): siRNA sense strand
gugucaagguggccucauu

SEQ ID NO: 1078197 - RNA, 19 nt, Homo sapiens
  misc_RNA (1)...(19): siRNA sense strand
cuagagcggcugcugcuuu

SEQ ID NO: 1078198 - RNA, 19 nt, Homo sapiens
  misc_RNA (1)...(19): siRNA sense strand
ugaggcggcuggagacauc

SEQ ID NO: 1078199 - RNA, 19 nt, Homo sapiens
  misc_RNA (1)...(19): siRNA sense strand
gugcggagcagccucauca

SEQ ID NO: 1078200 - RNA, 19 nt, Homo sapiens
  misc_RNA (1)...(19): siRNA sense strand
gagcugcggcugugcaaca

SEQ ID NO: 1078201 - RNA, 19 nt, Homo sapiens
  misc_RNA (1)...(19): siRNA sense strand
gggagaaagcuguguccuu

SEQ ID NO: 1078202 - RNA, 19 nt, Homo sapiens
  misc_RNA (1)...(19): siRNA sense strand
gcaguggaagccagugcua

SEQ ID NO: 1078203 - RNA, 19 nt, Homo sapiens
  misc_RNA (1)...(19): siRNA sense strand
agaagaaccgggagaagug

SEQ ID NO: 1078204 - RNA, 19 nt, Homo sapiens
  misc_RNA (1)...(19): siRNA sense strand
cacaggagaccuugcagaa

SEQ ID NO: 1078205 - RNA, 19 nt, Homo sapiens
  misc_RNA (1)...(19): siRNA sense strand
ggaggagacggccauccaa

SEQ ID NO: 1078206 - RNA, 19 nt, Homo sapiens
  misc_RNA (1)...(19): siRNA sense strand
gcaagcagggaagaucuau

SEQ ID NO: 1078207 - RNA, 19 nt, Homo sapiens
  misc_RNA (1)...(19): siRNA sense strand
gaagaaccgggagaagugu

SEQ ID NO: 1078208 - RNA, 19 nt, Homo sapiens
  misc_RNA (1)...(19): siRNA sense strand
ugagcucacugcugcuguu

SEQ ID NO: 1078209 - RNA, 19 nt, Homo sapiens
  misc_RNA (1)...(19): siRNA sense strand
uggugacguuuaagacuuu

SEQ ID NO: 1078210 - RNA, 19 nt, Homo sapiens
  misc_RNA (1)...(19): siRNA sense strand
caaccuggccagcauuuac

SEQ ID NO: 1078211 - RNA, 19 nt, Homo sapiens
  misc_RNA (1)...(19): siRNA sense strand
ccaggaccuucgccacaga

SEQ ID NO: 1078212 - RNA, 19 nt, Homo sapiens
  misc_RNA (1)...(19): siRNA sense strand
ggugcucggugacaucauc

SEQ ID NO: 1078213 - RNA, 19 nt, Homo sapiens
  misc_RNA (1)...(19): siRNA sense strand
ccaggagggcuuggaguuu

SEQ ID NO: 1078214 - RNA, 19 nt, Homo sapiens
  misc_RNA (1)...(19): siRNA sense strand
gguccggacuguggucaug

SEQ ID NO: 1078215 - RNA, 19 nt, Homo sapiens
  misc_RNA (1)...(19): siRNA sense strand
gcaagguggccgacaaggu

SEQ ID NO: 1078216 - RNA, 19 nt, Homo sapiens
  misc_RNA (1)...(19): siRNA sense strand
guggcgaccucaucgagau

SEQ ID NO: 1078217 - RNA, 19 nt, Homo sapiens
  misc_RNA (1)...(19): siRNA sense strand
caagaaggcacagcugaag

SEQ ID NO: 1078218 - RNA, 19 nt, Homo sapiens
  misc_RNA (1)...(19): siRNA sense strand
cagaagaaccgggagaagu

SEQ ID NO: 1078219 - RNA, 19 nt, Homo sapiens
  misc_RNA (1)...(19): siRNA sense strand
gcccuucuuuguccugugu

SEQ ID NO: 1078220 - RNA, 19 nt, Homo sapiens
  misc_RNA (1)...(19): siRNA sense strand
gcgagcugguggaccucua

SEQ ID NO: 1078221 - RNA, 19 nt, Homo sapiens
  misc_RNA (1)...(19): siRNA sense strand
cagcuuccguggccuguac

SEQ ID NO: 1078222 - RNA, 19 nt, Homo sapiens
  misc_RNA (1)...(19): siRNA sense strand
acaagaaggcacagcugaa

SEQ ID NO: 1078223 - RNA, 19 nt, Homo sapiens
  misc_RNA (1)...(19): siRNA sense strand
acaaauccgcacuggacua

SEQ ID NO: 1078224 - RNA, 19 nt, Homo sapiens
  misc_RNA (1)...(19): siRNA sense strand
gcacagcugaagaucuaca

SEQ ID NO: 1078225 - RNA, 19 nt, Homo sapiens
  misc_RNA (1)...(19): siRNA sense strand
ucugugagcugggagaaag

SEQ ID NO: 1078226 - RNA, 19 nt, Homo sapiens
  misc_RNA (1)...(19): siRNA sense strand
gcuuggaguuugcccacau

SEQ ID NO: 1078227 - RNA, 19 nt, Homo sapiens
  misc_RNA (1)...(19): siRNA sense strand
caccaucuaccacaacuuc

SEQ ID NO: 1078228 - RNA, 19 nt, Homo sapiens
  misc_RNA (1)...(19): siRNA sense strand
ggaccugggcaacaagaag

SEQ ID NO: 1078229 - RNA, 19 nt, Homo sapiens
  misc_RNA (1)...(19): siRNA sense strand
ccugcaagguggccgacaa

SEQ ID NO: 1078230 - RNA, 19 nt, Homo sapiens
  misc_RNA (1)...(19): siRNA sense strand
cugaaggacccguuugaug

SEQ ID NO: 1078231 - RNA, 19 nt, Homo sapiens
  misc_RNA (1)...(19): siRNA sense strand
cagagcacuucuaccucaa

SEQ ID NO: 1078232 - RNA, 19 nt, Homo sapiens
  misc_RNA (1)...(19): siRNA sense strand
cuggagacaucuucuucga

SEQ ID NO: 1078233 - RNA, 19 nt, Homo sapiens
  misc_RNA (1)...(19): siRNA sense strand
caucagugggcucuuagga

SEQ ID NO: 1078234 - RNA, 19 nt, Homo sapiens
  misc_RNA (1)...(19): siRNA sense strand
agaaggcacagcugaagau

SEQ ID NO: 1078235 - RNA, 19 nt, Homo sapiens
  misc_RNA (1)...(19): siRNA sense strand
acauccagguggcacagaa

SEQ ID NO: 1078236 - RNA, 19 nt, Homo sapiens
  misc_RNA (1)...(19): siRNA sense strand
gcugguggaccucuacauc

SEQ ID NO: 1078237 - RNA, 19 nt, Homo sapiens
  misc_RNA (1)...(19): siRNA sense strand
acuccuggcugacaucuac

SEQ ID NO: 1078238 - RNA, 19 nt, Homo sapiens
  misc_RNA (1)...(19): siRNA sense strand
uagagcggcugcugcuuuu

SEQ ID NO: 1078239 - RNA, 19 nt, Homo sapiens
  misc_RNA (1)...(19): siRNA sense strand
gcagaagaaccgggagaag

SEQ ID NO: 1078240 - RNA, 19 nt, Homo sapiens
  misc_RNA (1)...(19): siRNA sense strand
gcagaaggugaagaauguu

SEQ ID NO: 1078241 - RNA, 19 nt, Homo sapiens
  misc_RNA (1)...(19): siRNA sense strand
ggaugagaacgccuuaagg

SEQ ID NO: 1078242 - RNA, 19 nt, Homo sapiens
  misc_RNA (1)...(19): siRNA sense strand
guggaagccagugcuauug

SEQ ID NO: 1078243 - RNA, 19 nt, Homo sapiens
  misc_RNA (1)...(19): siRNA sense strand
ccacgagagccuccucauc

SEQ ID NO: 1078244 - RNA, 19 nt, Homo sapiens
  misc_RNA (1)...(19): siRNA sense strand
gcucacugcugcuguuccu

SEQ ID NO: 1078245 - RNA, 19 nt, Homo sapiens
  misc_RNA (1)...(19): siRNA sense strand
gaaggcacagcugaagauc

SEQ ID NO: 1078246 - RNA, 19 nt, Homo sapiens
  misc_RNA (1)...(19): siRNA sense strand
cgaccugaaggacccguuu

SEQ ID NO: 1078247 - RNA, 19 nt, Homo sapiens
  misc_RNA (1)...(19): siRNA sense strand
gaaagcuguguccuucuac

SEQ ID NO: 1078248 - RNA, 19 nt, Homo sapiens
  misc_RNA (1)...(19): siRNA sense strand
caaacgaagucuggggauu

SEQ ID NO: 1078249 - RNA, 19 nt, Homo sapiens
  misc_RNA (1)...(19): siRNA sense strand
ucccugccgugaccacuga

SEQ ID NO: 1078250 - RNA, 19 nt, Homo sapiens
  misc_RNA (1)...(19): siRNA sense strand
ccaaccuggccagcauuua

SEQ ID NO: 1078251 - RNA, 19 nt, Homo sapiens
  misc_RNA (1)...(19): siRNA sense strand
ccagcaagcucacaacauu

SEQ ID NO: 1078252 - RNA, 19 nt, Homo sapiens
  misc_RNA (1)...(19): siRNA sense strand
gggaacacgugcuucauga

SEQ ID NO: 1078253 - RNA, 19 nt, Homo sapiens
  misc_RNA (1)...(19): siRNA sense strand
uaagagaauuugccucaga

SEQ ID NO: 1078254 - RNA, 19 nt, Homo sapiens
  misc_RNA (1)...(19): siRNA sense strand
gagaaaggccgacagaugu

SEQ ID NO: 1078255 - RNA, 19 nt, Homo sapiens
  misc_RNA (1)...(19): siRNA sense strand
gcaugaggcucuucaccaa

SEQ ID NO: 1078256 - RNA, 19 nt, Homo sapiens
  misc_RNA (1)...(19): siRNA sense strand
gaccuggacuuaagagaau

SEQ ID NO: 1078257 - RNA, 19 nt, Homo sapiens
  misc_RNA (1)...(19): siRNA sense strand
agacccagauccagagaua

SEQ ID NO: 1078258 - RNA, 19 nt, Homo sapiens
  misc_RNA (1)...(19): siRNA sense strand
acacagcccucguggaaga

SEQ ID NO: 1078259 - RNA, 19 nt, Homo sapiens
  misc_RNA (1)...(19): siRNA sense strand
gagaauggcacacuuucaa

SEQ ID NO: 1078260 - RNA, 19 nt, Homo sapiens
  misc_RNA (1)...(19): siRNA sense strand
ccaaagaggaugugcuuga

SEQ ID NO: 1078261 - RNA, 19 nt, Homo sapiens
  misc_RNA (1)...(19): siRNA sense strand
gcaggaugcucaggaguuc

SEQ ID NO: 1078262 - RNA, 19 nt, Homo sapiens
  misc_RNA (1)...(19): siRNA sense strand
caaagaggaugugcuugau

SEQ ID NO: 1078263 - RNA, 19 nt, Homo sapiens
  misc_RNA (1)...(19): siRNA sense strand
cgagaaaggccgacagaug

SEQ ID NO: 1078264 - RNA, 19 nt, Homo sapiens
  misc_RNA (1)...(19): siRNA sense strand
cgacagauguggagaaaau

SEQ ID NO: 1078265 - RNA, 19 nt, Homo sapiens
  misc_RNA (1)...(19): siRNA sense strand
caaccaugcuguuuacaac

SEQ ID NO: 1078266 - RNA, 19 nt, Homo sapiens
  misc_RNA (1)...(19): siRNA sense strand
acacacagcccucguggaa

SEQ ID NO: 1078267 - RNA, 19 nt, Homo sapiens
  misc_RNA (1)...(19): siRNA sense strand
ucgcugacguguacagauu

SEQ ID NO: 1078268 - RNA, 19 nt, Homo sapiens
  misc_RNA (1)...(19): siRNA sense strand
ggaguuccuucgcuuucuu

SEQ ID NO: 1078269 - RNA, 19 nt, Homo sapiens
  misc_RNA (1)...(19): siRNA sense strand
acaccaaccaugcuguuua

SEQ ID NO: 1078270 - RNA, 19 nt, Homo sapiens
  misc_RNA (1)...(19): siRNA sense strand
agaaaacgguguauaaaga

SEQ ID NO: 1078271 - RNA, 19 nt, Homo sapiens
  misc_RNA (1)...(19): siRNA sense strand
gaaccucgaucaucuuccu

SEQ ID NO: 1078272 - RNA, 19 nt, Homo sapiens
  misc_RNA (1)...(19): siRNA sense strand
gccgacagauguggagaaa

SEQ ID NO: 1078273 - RNA, 19 nt, Homo sapiens
  misc_RNA (1)...(19): siRNA sense strand
gauugugguuacuguucua

SEQ ID NO: 1078274 - RNA, 19 nt, Homo sapiens
  misc_RNA (1)...(19): siRNA sense strand
gaacacgugcuucaugaac

SEQ ID NO: 1078275 - RNA, 19 nt, Homo sapiens
  misc_RNA (1)...(19): siRNA sense strand
aagagaauuugccucagaa

SEQ ID NO: 1078276 - RNA, 19 nt, Homo sapiens
  misc_RNA (1)...(19): siRNA sense strand
gagauacgcaccgcgcuuu

SEQ ID NO: 1078277 - RNA, 19 nt, Homo sapiens
  misc_RNA (1)...(19): siRNA sense strand
gaacgggaagacaguagga

SEQ ID NO: 1078278 - RNA, 19 nt, Homo sapiens
  misc_RNA (1)...(19): siRNA sense strand
gcgcuuuguuggcuauaau

SEQ ID NO: 1078279 - RNA, 19 nt, Homo sapiens
  misc_RNA (1)...(19): siRNA sense strand
auccagagguucccaaaga

SEQ ID NO: 1078280 - RNA, 19 nt, Homo sapiens
  misc_RNA (1)...(19): siRNA sense strand
ggagaauggcacacuuuca

SEQ ID NO: 1078281 - RNA, 19 nt, Homo sapiens
  misc_RNA (1)...(19): siRNA sense strand
cugagaaccucgaucaucu

SEQ ID NO: 1078282 - RNA, 19 nt, Homo sapiens
  misc_RNA (1)...(19): siRNA sense strand
acgccuaccugcucuucua

SEQ ID NO: 1078283 - RNA, 19 nt, Homo sapiens
  misc_RNA (1)...(19): siRNA sense strand
gaaaacgguguauaaagaa

SEQ ID NO: 1078284 - RNA, 19 nt, Homo sapiens
  misc_RNA (1)...(19): siRNA sense strand
gagcccaucugaguucaag

SEQ ID NO: 1078285 - RNA, 19 nt, Homo sapiens
  misc_RNA (1)...(19): siRNA sense strand
ggaacacgugcuucaugaa

SEQ ID NO: 1078286 - RNA, 19 nt, Homo sapiens
  misc_RNA (1)...(19): siRNA sense strand
ggaugugcuugauggagau

SEQ ID NO: 1078287 - RNA, 19 nt, Homo sapiens
  misc_RNA (1)...(19): siRNA sense strand
ugacauuaauggacugcau

SEQ ID NO: 1078288 - RNA, 19 nt, Homo sapiens
  misc_RNA (1)...(19): siRNA sense strand
gagaaccucgaucaucuuc

SEQ ID NO: 1078289 - RNA, 19 nt, Homo sapiens
  misc_RNA (1)...(19): siRNA sense strand
caggagaauggcacacuuu

SEQ ID NO: 1078290 - RNA, 19 nt, Homo sapiens
  misc_RNA (1)...(19): siRNA sense strand
caccaaccaugcuguuuac

SEQ ID NO: 1078291 - RNA, 19 nt, Homo sapiens
  misc_RNA (1)...(19): siRNA sense strand
gcagaaaacgguguauaaa

SEQ ID NO: 1078292 - RNA, 19 nt, Homo sapiens
  misc_RNA (1)...(19): siRNA sense strand
cggcagcaaugcacacaca

SEQ ID NO: 1078293 - RNA, 19 nt, Homo sapiens
  misc_RNA (1)...(19): siRNA sense strand
gaauuugccucagaaaaca

SEQ ID NO: 1078294 - RNA, 19 nt, Homo sapiens
  misc_RNA (1)...(19): siRNA sense strand
cagcaagcucacaacauuu

SEQ ID NO: 1078295 - RNA, 19 nt, Homo sapiens
  misc_RNA (1)...(19): siRNA sense strand
ggugagcccaucugaguuc

SEQ ID NO: 1078296 - RNA, 19 nt, Homo sapiens
  misc_RNA (1)...(19): siRNA sense strand
ccaaccaugcuguuuacaa

SEQ ID NO: 1078297 - RNA, 19 nt, Homo sapiens
  misc_RNA (1)...(19): siRNA sense strand
guggugagcccaucugagu

SEQ ID NO: 1078298 - RNA, 19 nt, Homo sapiens
  misc_RNA (1)...(19): siRNA sense strand
cucgggaguugagagauua

SEQ ID NO: 1078299 - RNA, 19 nt, Homo sapiens
  misc_RNA (1)...(19): siRNA sense strand
caccaaagaggaugugcuu

SEQ ID NO: 1078300 - RNA, 19 nt, Homo sapiens
  misc_RNA (1)...(19): siRNA sense strand
gcugacguguacagauugu

SEQ ID NO: 1078301 - RNA, 19 nt, Homo sapiens
  misc_RNA (1)...(19): siRNA sense strand
gacgagaaaggccgacaga

SEQ ID NO: 1078302 - RNA, 19 nt, Homo sapiens
  misc_RNA (1)...(19): siRNA sense strand
acaggagaauggcacacuu

SEQ ID NO: 1078303 - RNA, 19 nt, Homo sapiens
  misc_RNA (1)...(19): siRNA sense strand
guguacagauugugguuac

SEQ ID NO: 1078304 - RNA, 19 nt, Homo sapiens
  misc_RNA (1)...(19): siRNA sense strand
agaccuggacuuaagagaa

SEQ ID NO: 1078305 - RNA, 19 nt, Homo sapiens
  misc_RNA (1)...(19): siRNA sense strand
ggcagaaaacgguguauaa

SEQ ID NO: 1078306 - RNA, 19 nt, Homo sapiens
  misc_RNA (1)...(19): siRNA sense strand
ucucacugcccauugcuaa

SEQ ID NO: 1078307 - RNA, 19 nt, Homo sapiens
  misc_RNA (1)...(19): siRNA sense strand
uguacgcuguguccaauca

SEQ ID NO: 1078308 - RNA, 19 nt, Homo sapiens
  misc_RNA (1)...(19): siRNA sense strand
guacagauugugguuacug

SEQ ID NO: 1078309 - RNA, 19 nt, Homo sapiens
  misc_RNA (1)...(19): siRNA sense strand
auccugaggugacauuaau

SEQ ID NO: 1078310 - RNA, 19 nt, Homo sapiens
  misc_RNA (1)...(19): siRNA sense strand
ggaccucucacugcccauu

SEQ ID NO: 1078311 - RNA, 19 nt, Homo sapiens
  misc_RNA (1)...(19): siRNA sense strand
gggucuggcuggucuucga

SEQ ID NO: 1078312 - RNA, 19 nt, Homo sapiens
  misc_RNA (1)...(19): siRNA sense strand
ccuguacgcuguguccaau

SEQ ID NO: 1078313 - RNA, 19 nt, Homo sapiens
  misc_RNA (1)...(19): siRNA sense strand
cagauugugguuacuguuc

SEQ ID NO: 1078314 - RNA, 19 nt, Homo sapiens
  misc_RNA (1)...(19): siRNA sense strand
cagaccauauggacuucau

SEQ ID NO: 1078315 - RNA, 19 nt, Homo sapiens
  misc_RNA (1)...(19): siRNA sense strand
caacgacuccagcgucacu

SEQ ID NO: 1078316 - RNA, 19 nt, Homo sapiens
  misc_RNA (1)...(19): siRNA sense strand
gagaauuugccucagaaaa

SEQ ID NO: 1078317 - RNA, 19 nt, Homo sapiens
  misc_RNA (1)...(19): siRNA sense strand
gaaccagcaagcucacaac

SEQ ID NO: 1078318 - RNA, 19 nt, Homo sapiens
  misc_RNA (1)...(19): siRNA sense strand
uauccugaggugacauuaa

SEQ ID NO: 1078319 - RNA, 19 nt, Homo sapiens
  misc_RNA (1)...(19): siRNA sense strand
acacgugcuucaugaacuc

SEQ ID NO: 1078320 - RNA, 19 nt, Homo sapiens
  misc_RNA (1)...(19): siRNA sense strand
aacgguguauaaagaaguu

SEQ ID NO: 1078321 - RNA, 19 nt, Homo sapiens
  misc_RNA (1)...(19): siRNA sense strand
ccagcaagcucacaacauu

SEQ ID NO: 1078322 - RNA, 19 nt, Homo sapiens
  misc_RNA (1)...(19): siRNA sense strand
gggaacacgugcuucauga

SEQ ID NO: 1078323 - RNA, 19 nt, Homo sapiens
  misc_RNA (1)...(19): siRNA sense strand
uaagagaauuugccucaga

SEQ ID NO: 1078324 - RNA, 19 nt, Homo sapiens
  misc_RNA (1)...(19): siRNA sense strand
gagaaaggccgacagaugu

SEQ ID NO: 1078325 - RNA, 19 nt, Homo sapiens
  misc_RNA (1)...(19): siRNA sense strand
gcaugaggcucuucaccaa

SEQ ID NO: 1078326 - RNA, 19 nt, Homo sapiens
  misc_RNA (1)...(19): siRNA sense strand
gaccuggacuuaagagaau

SEQ ID NO: 1078327 - RNA, 19 nt, Homo sapiens
  misc_RNA (1)...(19): siRNA sense strand
agacccagauccagagaua

SEQ ID NO: 1078328 - RNA, 19 nt, Homo sapiens
  misc_RNA (1)...(19): siRNA sense strand
acacagcccucguggaaga

SEQ ID NO: 1078329 - RNA, 19 nt, Homo sapiens
  misc_RNA (1)...(19): siRNA sense strand
gagaauggcacacuuucaa

SEQ ID NO: 1078330 - RNA, 19 nt, Homo sapiens
  misc_RNA (1)...(19): siRNA sense strand
ccaaagaggaugugcuuga

SEQ ID NO: 1078331 - RNA, 19 nt, Homo sapiens
  misc_RNA (1)...(19): siRNA sense strand
gcaggaugcucaggaguuc

SEQ ID NO: 1078332 - RNA, 19 nt, Homo sapiens
  misc_RNA (1)...(19): siRNA sense strand
caaagaggaugugcuugau

SEQ ID NO: 1078333 - RNA, 19 nt, Homo sapiens
  misc_RNA (1)...(19): siRNA sense strand
cgagaaaggccgacagaug

SEQ ID NO: 1078334 - RNA, 19 nt, Homo sapiens
  misc_RNA (1)...(19): siRNA sense strand
cgacagauguggagaaaau

SEQ ID NO: 1078335 - RNA, 19 nt, Homo sapiens
  misc_RNA (1)...(19): siRNA sense strand
caaccaugcuguuuacaac

SEQ ID NO: 1078336 - RNA, 19 nt, Homo sapiens
  misc_RNA (1)...(19): siRNA sense strand
acacacagcccucguggaa

SEQ ID NO: 1078337 - RNA, 19 nt, Homo sapiens
  misc_RNA (1)...(19): siRNA sense strand
ucgcugacguguacagauu

SEQ ID NO: 1078338 - RNA, 19 nt, Homo sapiens
  misc_RNA (1)...(19): siRNA sense strand
ggaguuccuucgcuuucuu

SEQ ID NO: 1078339 - RNA, 19 nt, Homo sapiens
  misc_RNA (1)...(19): siRNA sense strand
acaccaaccaugcuguuua

SEQ ID NO: 1078340 - RNA, 19 nt, Homo sapiens
  misc_RNA (1)...(19): siRNA sense strand
agaaaacgguguauaaaga

SEQ ID NO: 1078341 - RNA, 19 nt, Homo sapiens
  misc_RNA (1)...(19): siRNA sense strand
gaaccucgaucaucuuccu

SEQ ID NO: 1078342 - RNA, 19 nt, Homo sapiens
  misc_RNA (1)...(19): siRNA sense strand
gccgacagauguggagaaa

SEQ ID NO: 1078343 - RNA, 19 nt, Homo sapiens
  misc_RNA (1)...(19): siRNA sense strand
gauugugguuacuguucua

SEQ ID NO: 1078344 - RNA, 19 nt, Homo sapiens
  misc_RNA (1)...(19): siRNA sense strand
gaacacgugcuucaugaac

SEQ ID NO: 1078345 - RNA, 19 nt, Homo sapiens
  misc_RNA (1)...(19): siRNA sense strand
aagagaauuugccucagaa

SEQ ID NO: 1078346 - RNA, 19 nt, Homo sapiens
  misc_RNA (1)...(19): siRNA sense strand
gagauacgcaccgcgcuuu

SEQ ID NO: 1078347 - RNA, 19 nt, Homo sapiens
  misc_RNA (1)...(19): siRNA sense strand
gaacgggaagacaguagga

SEQ ID NO: 1078348 - RNA, 19 nt, Homo sapiens
  misc_RNA (1)...(19): siRNA sense strand
gcgcuuuguuggcuauaau

SEQ ID NO: 1078349 - RNA, 19 nt, Homo sapiens
  misc_RNA (1)...(19): siRNA sense strand
auccagagguucccaaaga

SEQ ID NO: 1078350 - RNA, 19 nt, Homo sapiens
  misc_RNA (1)...(19): siRNA sense strand
ggagaauggcacacuuuca

SEQ ID NO: 1078351 - RNA, 19 nt, Homo sapiens
  misc_RNA (1)...(19): siRNA sense strand
cugagaaccucgaucaucu

SEQ ID NO: 1078352 - RNA, 19 nt, Homo sapiens
  misc_RNA (1)...(19): siRNA sense strand
acgccuaccugcucuucua

SEQ ID NO: 1078353 - RNA, 19 nt, Homo sapiens
  misc_RNA (1)...(19): siRNA sense strand
gaaaacgguguauaaagaa

SEQ ID NO: 1078354 - RNA, 19 nt, Homo sapiens
  misc_RNA (1)...(19): siRNA sense strand
gagcccaucugaguucaag

SEQ ID NO: 1078355 - RNA, 19 nt, Homo sapiens
  misc_RNA (1)...(19): siRNA sense strand
ggaacacgugcuucaugaa

SEQ ID NO: 1078356 - RNA, 19 nt, Homo sapiens
  misc_RNA (1)...(19): siRNA sense strand
ggaugugcuugauggagau

SEQ ID NO: 1078357 - RNA, 19 nt, Homo sapiens
  misc_RNA (1)...(19): siRNA sense strand
ugacauuaauggacugcau

SEQ ID NO: 1078358 - RNA, 19 nt, Homo sapiens
  misc_RNA (1)...(19): siRNA sense strand
gagaaccucgaucaucuuc

SEQ ID NO: 1078359 - RNA, 19 nt, Homo sapiens
  misc_RNA (1)...(19): siRNA sense strand
caggagaauggcacacuuu

SEQ ID NO: 1078360 - RNA, 19 nt, Homo sapiens
  misc_RNA (1)...(19): siRNA sense strand
caccaaccaugcuguuuac

SEQ ID NO: 1078361 - RNA, 19 nt, Homo sapiens
  misc_RNA (1)...(19): siRNA sense strand
gcagaaaacgguguauaaa

SEQ ID NO: 1078362 - RNA, 19 nt, Homo sapiens
  misc_RNA (1)...(19): siRNA sense strand
cggcagcaaugcacacaca

SEQ ID NO: 1078363 - RNA, 19 nt, Homo sapiens
  misc_RNA (1)...(19): siRNA sense strand
gaauuugccucagaaaaca

SEQ ID NO: 1078364 - RNA, 19 nt, Homo sapiens
  misc_RNA (1)...(19): siRNA sense strand
cagcaagcucacaacauuu

SEQ ID NO: 1078365 - RNA, 19 nt, Homo sapiens
  misc_RNA (1)...(19): siRNA sense strand
ggugagcccaucugaguuc

SEQ ID NO: 1078366 - RNA, 19 nt, Homo sapiens
  misc_RNA (1)...(19): siRNA sense strand
ccaaccaugcuguuuacaa

SEQ ID NO: 1078367 - RNA, 19 nt, Homo sapiens
  misc_RNA (1)...(19): siRNA sense strand
guggugagcccaucugagu

SEQ ID NO: 1078368 - RNA, 19 nt, Homo sapiens
  misc_RNA (1)...(19): siRNA sense strand
cucgggaguugagagauua

SEQ ID NO: 1078369 - RNA, 19 nt, Homo sapiens
  misc_RNA (1)...(19): siRNA sense strand
caccaaagaggaugugcuu

SEQ ID NO: 1078370 - RNA, 19 nt, Homo sapiens
  misc_RNA (1)...(19): siRNA sense strand
gcugacguguacagauugu

SEQ ID NO: 1078371 - RNA, 19 nt, Homo sapiens
  misc_RNA (1)...(19): siRNA sense strand
gacgagaaaggccgacaga

SEQ ID NO: 1078372 - RNA, 19 nt, Homo sapiens
  misc_RNA (1)...(19): siRNA sense strand
acaggagaauggcacacuu

SEQ ID NO: 1078373 - RNA, 19 nt, Homo sapiens
  misc_RNA (1)...(19): siRNA sense strand
guguacagauugugguuac

SEQ ID NO: 1078374 - RNA, 19 nt, Homo sapiens
  misc_RNA (1)...(19): siRNA sense strand
agaccuggacuuaagagaa

SEQ ID NO: 1078375 - RNA, 19 nt, Homo sapiens
  misc_RNA (1)...(19): siRNA sense strand
ggcagaaaacgguguauaa

SEQ ID NO: 1078376 - RNA, 19 nt, Homo sapiens
  misc_RNA (1)...(19): siRNA sense strand
ucucacugcccauugcuaa

SEQ ID NO: 1078377 - RNA, 19 nt, Homo sapiens
  misc_RNA (1)...(19): siRNA sense strand
uguacgcuguguccaauca

SEQ ID NO: 1078378 - RNA, 19 nt, Homo sapiens
  misc_RNA (1)...(19): siRNA sense strand
guacagauugugguuacug

SEQ ID NO: 1078379 - RNA, 19 nt, Homo sapiens
  misc_RNA (1)...(19): siRNA sense strand
auccugaggugacauuaau

SEQ ID NO: 1078380 - RNA, 19 nt, Homo sapiens
  misc_RNA (1)...(19): siRNA sense strand
ggaccucucacugcccauu

SEQ ID NO: 1078381 - RNA, 19 nt, Homo sapiens
  misc_RNA (1)...(19): siRNA sense strand
gggucuggcuggucuucga

SEQ ID NO: 1078382 - RNA, 19 nt, Homo sapiens
  misc_RNA (1)...(19): siRNA sense strand
ccuguacgcuguguccaau

SEQ ID NO: 1078383 - RNA, 19 nt, Homo sapiens
  misc_RNA (1)...(19): siRNA sense strand
cagauugugguuacuguuc

SEQ ID NO: 1078384 - RNA, 19 nt, Homo sapiens
  misc_RNA (1)...(19): siRNA sense strand
cagaccauauggacuucau

SEQ ID NO: 1078385 - RNA, 19 nt, Homo sapiens
  misc_RNA (1)...(19): siRNA sense strand
caacgacuccagcgucacu

SEQ ID NO: 1078386 - RNA, 19 nt, Homo sapiens
  misc_RNA (1)...(19): siRNA sense strand
gagaauuugccucagaaaa

SEQ ID NO: 1078387 - RNA, 19 nt, Homo sapiens
  misc_RNA (1)...(19): siRNA sense strand
gaaccagcaagcucacaac

SEQ ID NO: 1078388 - RNA, 19 nt, Homo sapiens
  misc_RNA (1)...(19): siRNA sense strand
uauccugaggugacauuaa

SEQ ID NO: 1078389 - RNA, 19 nt, Homo sapiens
  misc_RNA (1)...(19): siRNA sense strand
acacgugcuucaugaacuc

SEQ ID NO: 1078390 - RNA, 19 nt, Homo sapiens
  misc_RNA (1)...(19): siRNA sense strand
aacgguguauaaagaaguu

SEQ ID NO: 1078391 - RNA, 19 nt, Homo sapiens
  misc_RNA (1)...(19): siRNA sense strand
gaaaguacuuggagaacua

SEQ ID NO: 1078392 - RNA, 19 nt, Homo sapiens
  misc_RNA (1)...(19): siRNA sense strand
gaaaagcucuccccagaua

SEQ ID NO: 1078393 - RNA, 19 nt, Homo sapiens
  misc_RNA (1)...(19): siRNA sense strand
gaucaaaugguaugaguua

SEQ ID NO: 1078394 - RNA, 19 nt, Homo sapiens
  misc_RNA (1)...(19): siRNA sense strand
gaaagacgcuuacguacag

SEQ ID NO: 1078395 - RNA, 19 nt, Homo sapiens
  misc_RNA (1)...(19): siRNA sense strand
guagauuccuuucaaauug

SEQ ID NO: 1078396 - RNA, 19 nt, Homo sapiens
  misc_RNA (1)...(19): siRNA sense strand
ugugaaagaucaacucaua

SEQ ID NO: 1078397 - RNA, 19 nt, Homo sapiens
  misc_RNA (1)...(19): siRNA sense strand
gggcaaggaauuauuguua

SEQ ID NO: 1078398 - RNA, 19 nt, Homo sapiens
  misc_RNA (1)...(19): siRNA sense strand
gaggcaagguacccuauuu

SEQ ID NO: 1078399 - RNA, 19 nt, Homo sapiens
  misc_RNA (1)...(19): siRNA sense strand
gugaaggaaugaccaagua

SEQ ID NO: 1078400 - RNA, 19 nt, Homo sapiens
  misc_RNA (1)...(19): siRNA sense strand
caacacaagcucauaugua

SEQ ID NO: 1078401 - RNA, 19 nt, Homo sapiens
  misc_RNA (1)...(19): siRNA sense strand
ggcaaggaauuauuguuaa

SEQ ID NO: 1078402 - RNA, 19 nt, Homo sapiens
  misc_RNA (1)...(19): siRNA sense strand
caagguacccuauuuaugu

SEQ ID NO: 1078403 - RNA, 19 nt, Homo sapiens
  misc_RNA (1)...(19): siRNA sense strand
caaagaauccuauccuguu

SEQ ID NO: 1078404 - RNA, 19 nt, Homo sapiens
  misc_RNA (1)...(19): siRNA sense strand
gcucauauguaccaggaaa

SEQ ID NO: 1078405 - RNA, 19 nt, Homo sapiens
  misc_RNA (1)...(19): siRNA sense strand
caugauuguuggagucuua

SEQ ID NO: 1078406 - RNA, 19 nt, Homo sapiens
  misc_RNA (1)...(19): siRNA sense strand
guacuuggagaacuaaaua

SEQ ID NO: 1078407 - RNA, 19 nt, Homo sapiens
  misc_RNA (1)...(19): siRNA sense strand
guguugagcuuccagguaa

SEQ ID NO: 1078408 - RNA, 19 nt, Homo sapiens
  misc_RNA (1)...(19): siRNA sense strand
caugaaagacgcuuacgua

SEQ ID NO: 1078409 - RNA, 19 nt, Homo sapiens
  misc_RNA (1)...(19): siRNA sense strand
gcucuagauucuuuauuga

SEQ ID NO: 1078410 - RNA, 19 nt, Homo sapiens
  misc_RNA (1)...(19): siRNA sense strand
acaauggaaucagcuauaa

SEQ ID NO: 1078411 - RNA, 19 nt, Homo sapiens
  misc_RNA (1)...(19): siRNA sense strand
gcacuuucguggaucaaau

SEQ ID NO: 1078412 - RNA, 19 nt, Homo sapiens
  misc_RNA (1)...(19): siRNA sense strand
agacggcaguuugaauuua

SEQ ID NO: 1078413 - RNA, 19 nt, Homo sapiens
  misc_RNA (1)...(19): siRNA sense strand
uaacgaagaauuucagguu

SEQ ID NO: 1078414 - RNA, 19 nt, Homo sapiens
  misc_RNA (1)...(19): siRNA sense strand
ccacaaccauuucauaggu

SEQ ID NO: 1078415 - RNA, 19 nt, Homo sapiens
  misc_RNA (1)...(19): siRNA sense strand
gaugccagauugaaugguu

SEQ ID NO: 1078416 - RNA, 19 nt, Homo sapiens
  misc_RNA (1)...(19): siRNA sense strand
gaccaaguaugacuaccuu

SEQ ID NO: 1078417 - RNA, 19 nt, Homo sapiens
  misc_RNA (1)...(19): siRNA sense strand
agaaauuggucaagguuug

SEQ ID NO: 1078418 - RNA, 19 nt, Homo sapiens
  misc_RNA (1)...(19): siRNA sense strand
uaugugcucuagauucuuu

SEQ ID NO: 1078419 - RNA, 19 nt, Homo sapiens
  misc_RNA (1)...(19): siRNA sense strand
caaauaacacugggaagaa

SEQ ID NO: 1078420 - RNA, 19 nt, Homo sapiens
  misc_RNA (1)...(19): siRNA sense strand
uguuaaagaugccagauug

SEQ ID NO: 1078421 - RNA, 19 nt, Homo sapiens
  misc_RNA (1)...(19): siRNA sense strand
gcaagguacccuauuuaug

SEQ ID NO: 1078422 - RNA, 19 nt, Homo sapiens
  misc_RNA (1)...(19): siRNA sense strand
aaagaauccuauccuguug

SEQ ID NO: 1078423 - RNA, 19 nt, Homo sapiens
  misc_RNA (1)...(19): siRNA sense strand
uguuaaagaugcaguucua

SEQ ID NO: 1078424 - RNA, 19 nt, Homo sapiens
  misc_RNA (1)...(19): siRNA sense strand
gcauggaguugugaaugaa

SEQ ID NO: 1078425 - RNA, 19 nt, Homo sapiens
  misc_RNA (1)...(19): siRNA sense strand
caaaagauguaaagaagga

SEQ ID NO: 1078426 - RNA, 19 nt, Homo sapiens
  misc_RNA (1)...(19): siRNA sense strand
gaucaaguguuagaugaag

SEQ ID NO: 1078427 - RNA, 19 nt, Homo sapiens
  misc_RNA (1)...(19): siRNA sense strand
ugggaagaauuuagaacua

SEQ ID NO: 1078428 - RNA, 19 nt, Homo sapiens
  misc_RNA (1)...(19): siRNA sense strand
aaucauaccuccacaacca

SEQ ID NO: 1078429 - RNA, 19 nt, Homo sapiens
  misc_RNA (1)...(19): siRNA sense strand
gaaggaaugaccaaguaug

SEQ ID NO: 1078430 - RNA, 19 nt, Homo sapiens
  misc_RNA (1)...(19): siRNA sense strand
cgaagaauuucagguuguu

SEQ ID NO: 1078431 - RNA, 19 nt, Homo sapiens
  misc_RNA (1)...(19): siRNA sense strand
ugacacauuugcaacacaa

SEQ ID NO: 1078432 - RNA, 19 nt, Homo sapiens
  misc_RNA (1)...(19): siRNA sense strand
gaagaauuucagguuguua

SEQ ID NO: 1078433 - RNA, 19 nt, Homo sapiens
  misc_RNA (1)...(19): siRNA sense strand
aaguaugacuaccuuauga

SEQ ID NO: 1078434 - RNA, 19 nt, Homo sapiens
  misc_RNA (1)...(19): siRNA sense strand
cuguuugccucaugaguua

SEQ ID NO: 1078435 - RNA, 19 nt, Homo sapiens
  misc_RNA (1)...(19): siRNA sense strand
uuucguggaucaaauggua

SEQ ID NO: 1078436 - RNA, 19 nt, Homo sapiens
  misc_RNA (1)...(19): siRNA sense strand
uggaucaaguguuagauga

SEQ ID NO: 1078437 - RNA, 19 nt, Homo sapiens
  misc_RNA (1)...(19): siRNA sense strand
aagguacccuauuuaugua

SEQ ID NO: 1078438 - RNA, 19 nt, Homo sapiens
  misc_RNA (1)...(19): siRNA sense strand
gcaguuugaauuuagugua

SEQ ID NO: 1078439 - RNA, 19 nt, Homo sapiens
  misc_RNA (1)...(19): siRNA sense strand
agucuuaucucccuuucaa

SEQ ID NO: 1078440 - RNA, 19 nt, Homo sapiens
  misc_RNA (1)...(19): siRNA sense strand
aagcauguauggagacuuc

SEQ ID NO: 1078441 - RNA, 19 nt, Homo sapiens
  misc_RNA (1)...(19): siRNA sense strand
caugaguuaugaaagaaga

SEQ ID NO: 1078442 - RNA, 19 nt, Homo sapiens
  misc_RNA (1)...(19): siRNA sense strand
acgcuuacguacagaaauu

SEQ ID NO: 1078443 - RNA, 19 nt, Homo sapiens
  misc_RNA (1)...(19): siRNA sense strand
gaaugaccaaguaugacua

SEQ ID NO: 1078444 - RNA, 19 nt, Homo sapiens
  misc_RNA (1)...(19): siRNA sense strand
uauaugugcucuagauucu

SEQ ID NO: 1078445 - RNA, 19 nt, Homo sapiens
  misc_RNA (1)...(19): siRNA sense strand
caagccagccuguauguca

SEQ ID NO: 1078446 - RNA, 19 nt, Homo sapiens
  misc_RNA (1)...(19): siRNA sense strand
aaauaacacugggaagaau

SEQ ID NO: 1078447 - RNA, 19 nt, Homo sapiens
  misc_RNA (1)...(19): siRNA sense strand
ucaaauaacacugggaaga

SEQ ID NO: 1078448 - RNA, 19 nt, Homo sapiens
  misc_RNA (1)...(19): siRNA sense strand
gacggcaguuugaauuuag

SEQ ID NO: 1078449 - RNA, 19 nt, Homo sapiens
  misc_RNA (1)...(19): siRNA sense strand
uaguguagauuccuuucaa

SEQ ID NO: 1078450 - RNA, 19 nt, Homo sapiens
  misc_RNA (1)...(19): siRNA sense strand
uaaagaugccagauugaau

SEQ ID NO: 1078451 - RNA, 19 nt, Homo sapiens
  misc_RNA (1)...(19): siRNA sense strand
gugaaugaaagcacuguuu

SEQ ID NO: 1078452 - RNA, 19 nt, Homo sapiens
  misc_RNA (1)...(19): siRNA sense strand
gaccuugcauggaguugug

SEQ ID NO: 1078453 - RNA, 19 nt, Homo sapiens
  misc_RNA (1)...(19): siRNA sense strand
gaacagcaaaagaaaauug

SEQ ID NO: 1078454 - RNA, 19 nt, Homo sapiens
  misc_RNA (1)...(19): siRNA sense strand
cacaauggaaucagcuaua

SEQ ID NO: 1078455 - RNA, 19 nt, Homo sapiens
  misc_RNA (1)...(19): siRNA sense strand
gggaucaaguuauaacacu

SEQ ID NO: 1078456 - RNA, 19 nt, Homo sapiens
  misc_RNA (1)...(19): siRNA sense strand
ccaaguaugacuaccuuau

SEQ ID NO: 1078457 - RNA, 19 nt, Homo sapiens
  misc_RNA (1)...(19): siRNA sense strand
cguuauaugugcucuagau

SEQ ID NO: 1078458 - RNA, 19 nt, Homo sapiens
  misc_RNA (1)...(19): siRNA sense strand
aaagaugccagauugaaug

SEQ ID NO: 1078459 - RNA, 19 nt, Homo sapiens
  misc_RNA (1)...(19): siRNA sense strand
aaaccuagaacguuauaug

SEQ ID NO: 1078460 - RNA, 19 nt, Homo sapiens
  misc_RNA (1)...(19): siRNA sense strand
gcaacacaagcucauaugu

SEQ ID NO: 1078461 - RNA, 19 nt, Homo sapiens
  misc_RNA (1)...(19): siRNA sense strand
ucagacggcaguuugaauu

SEQ ID NO: 1078462 - RNA, 19 nt, Homo sapiens
  misc_RNA (1)...(19): siRNA sense strand
gaaagcauguauggagacu

SEQ ID NO: 1078463 - RNA, 19 nt, Homo sapiens
  misc_RNA (1)...(19): siRNA sense strand
uaugaaagaagacagauuc

SEQ ID NO: 1078464 - RNA, 19 nt, Homo sapiens
  misc_RNA (1)...(19): siRNA sense strand
caaguaugacuaccuuaug

SEQ ID NO: 1078465 - RNA, 19 nt, Homo sapiens
  misc_RNA (1)...(19): siRNA sense strand
aacacaagcucauauguac

SEQ ID NO: 1078466 - RNA, 19 nt, Homo sapiens
  misc_RNA (1)...(19): siRNA sense strand
ucaaguguuagaugaagua

SEQ ID NO: 1078467 - RNA, 19 nt, Homo sapiens
  misc_RNA (1)...(19): siRNA sense strand
ugaaugaaagcacuguuug

SEQ ID NO: 1078468 - RNA, 19 nt, Homo sapiens
  misc_RNA (1)...(19): siRNA sense strand
ugcauggaguugugaauga

SEQ ID NO: 1078469 - RNA, 19 nt, Homo sapiens
  misc_RNA (1)...(19): siRNA sense strand
ggaaugaccaaguaugacu

SEQ ID NO: 1078470 - RNA, 19 nt, Homo sapiens
  misc_RNA (1)...(19): siRNA sense strand
uuauaacacuggaucaagu

SEQ ID NO: 1078471 - RNA, 19 nt, Homo sapiens
  misc_RNA (1)...(19): siRNA sense strand
caacucauagggcaaggaa

SEQ ID NO: 1078472 - RNA, 19 nt, Homo sapiens
  misc_RNA (1)...(19): siRNA sense strand
ggcaagguacccuauuuau

SEQ ID NO: 1078473 - RNA, 19 nt, Homo sapiens
  misc_RNA (1)...(19): siRNA sense strand
ugaaagacgcuuacguaca

SEQ ID NO: 1078474 - RNA, 19 nt, Homo sapiens
  misc_RNA (1)...(19): siRNA sense strand
gaagaacagcaaaagaaaa

SEQ ID NO: 1078475 - RNA, 19 nt, Homo sapiens
  misc_RNA (1)...(19): siRNA sense strand
ucacucagacggcaguuug

SEQ ID NO: 1078476 - RNA, 19 nt, Homo sapiens
  misc_RNA (1)...(19): siRNA sense strand
cagccuguaugucagaaau

SEQ ID NO: 1078477 - RNA, 19 nt, Homo sapiens
  misc_RNA (1)...(19): siRNA sense strand
gguguugagcuuccaggua

SEQ ID NO: 1078478 - RNA, 19 nt, Homo sapiens
  misc_RNA (1)...(19): siRNA sense strand
ugcucuagauucuuuauug

SEQ ID NO: 1078479 - RNA, 19 nt, Homo sapiens
  misc_RNA (1)...(19): siRNA sense strand
acucauagggcaaggaauu

SEQ ID NO: 1078480 - RNA, 19 nt, Homo sapiens
  misc_RNA (1)...(19): siRNA sense strand
augccaagcuaaccaaaga

SEQ ID NO: 1078481 - RNA, 19 nt, Homo sapiens
  misc_RNA (1)...(19): siRNA sense strand
caguuugaauuuaguguag

SEQ ID NO: 1078482 - RNA, 19 nt, Homo sapiens
  misc_RNA (1)...(19): siRNA sense strand
cuauaaggaucuggacguu

SEQ ID NO: 1078483 - RNA, 19 nt, Homo sapiens
  misc_RNA (1)...(19): siRNA sense strand
gacagauucuccaccugau

SEQ ID NO: 1078484 - RNA, 19 nt, Homo sapiens
  misc_RNA (1)...(19): siRNA sense strand
ucauauagaagaacagcaa

SEQ ID NO: 1078485 - RNA, 19 nt, Homo sapiens
  misc_RNA (1)...(19): siRNA sense strand
gaacguuauaugugcucua

SEQ ID NO: 1078486 - RNA, 19 nt, Homo sapiens
  misc_RNA (1)...(19): siRNA sense strand
uaacacugggaagaauuua

SEQ ID NO: 1078487 - RNA, 19 nt, Homo sapiens
  misc_RNA (1)...(19): siRNA sense strand
ggaucaaguguuagaugaa

SEQ ID NO: 1078488 - RNA, 19 nt, Homo sapiens
  misc_RNA (1)...(19): siRNA sense strand
caauggagguaaaaccaaa

SEQ ID NO: 1078489 - RNA, 19 nt, Homo sapiens
  misc_RNA (1)...(19): siRNA sense strand
uuaaagaugccagauugaa

SEQ ID NO: 1078490 - RNA, 19 nt, Homo sapiens
  misc_RNA (1)...(19): siRNA sense strand
gguacccuauuuauguaau

SEQ ID NO: 1078491 - RNA, 19 nt, Homo sapiens
  misc_RNA (1)...(19): siRNA sense strand
caagugggcuggagaccua

SEQ ID NO: 1078492 - RNA, 19 nt, Homo sapiens
  misc_RNA (1)...(19): siRNA sense strand
gaagauacaccaagcacaa

SEQ ID NO: 1078493 - RNA, 19 nt, Homo sapiens
  misc_RNA (1)...(19): siRNA sense strand
ggacuuacgacucuguuaa

SEQ ID NO: 1078494 - RNA, 19 nt, Homo sapiens
  misc_RNA (1)...(19): siRNA sense strand
ggaugaggucgaauucuua

SEQ ID NO: 1078495 - RNA, 19 nt, Homo sapiens
  misc_RNA (1)...(19): siRNA sense strand
gcacagcgugggaggauaa

SEQ ID NO: 1078496 - RNA, 19 nt, Homo sapiens
  misc_RNA (1)...(19): siRNA sense strand
acaaaccgccuuccaagua

SEQ ID NO: 1078497 - RNA, 19 nt, Homo sapiens
  misc_RNA (1)...(19): siRNA sense strand
caccgagucugguaaauau

SEQ ID NO: 1078498 - RNA, 19 nt, Homo sapiens
  misc_RNA (1)...(19): siRNA sense strand
gugaugaaccuuugauuga

SEQ ID NO: 1078499 - RNA, 19 nt, Homo sapiens
  misc_RNA (1)...(19): siRNA sense strand
caaagaagacgucacagau

SEQ ID NO: 1078500 - RNA, 19 nt, Homo sapiens
  misc_RNA (1)...(19): siRNA sense strand
gaucaagaccaaaagauua

SEQ ID NO: 1078501 - RNA, 19 nt, Homo sapiens
  misc_RNA (1)...(19): siRNA sense strand
guacaaagaagacgucaca

SEQ ID NO: 1078502 - RNA, 19 nt, Homo sapiens
  misc_RNA (1)...(19): siRNA sense strand
gcagaacaaccgaucaaga

SEQ ID NO: 1078503 - RNA, 19 nt, Homo sapiens
  misc_RNA (1)...(19): siRNA sense strand
gcauggagcuagacgacau

SEQ ID NO: 1078504 - RNA, 19 nt, Homo sapiens
  misc_RNA (1)...(19): siRNA sense strand
ggagaagacaaccgaggua

SEQ ID NO: 1078505 - RNA, 19 nt, Homo sapiens
  misc_RNA (1)...(19): siRNA sense strand
gcaccgcauucuuauagug

SEQ ID NO: 1078506 - RNA, 19 nt, Homo sapiens
  misc_RNA (1)...(19): siRNA sense strand
ccuaggaguuaaugaagaa

SEQ ID NO: 1078507 - RNA, 19 nt, Homo sapiens
  misc_RNA (1)...(19): siRNA sense strand
cagugcaaguuuacaagua

SEQ ID NO: 1078508 - RNA, 19 nt, Homo sapiens
  misc_RNA (1)...(19): siRNA sense strand
gucgaauucuuacggauaa

SEQ ID NO: 1078509 - RNA, 19 nt, Homo sapiens
  misc_RNA (1)...(19): siRNA sense strand
ucccauaacucgucgaaug

SEQ ID NO: 1078510 - RNA, 19 nt, Homo sapiens
  misc_RNA (1)...(19): siRNA sense strand
ggucgaauucuuacggaua

SEQ ID NO: 1078511 - RNA, 19 nt, Homo sapiens
  misc_RNA (1)...(19): siRNA sense strand
gggauggacuuacgacucu

SEQ ID NO: 1078512 - RNA, 19 nt, Homo sapiens
  misc_RNA (1)...(19): siRNA sense strand
gaccggagcgucccaucua

SEQ ID NO: 1078513 - RNA, 19 nt, Homo sapiens
  misc_RNA (1)...(19): siRNA sense strand
ccaagaagggauggacuua

SEQ ID NO: 1078514 - RNA, 19 nt, Homo sapiens
  misc_RNA (1)...(19): siRNA sense strand
gcaaacgagugugcuucaa

SEQ ID NO: 1078515 - RNA, 19 nt, Homo sapiens
  misc_RNA (1)...(19): siRNA sense strand
caugguacuucgagccuaa

SEQ ID NO: 1078516 - RNA, 19 nt, Homo sapiens
  misc_RNA (1)...(19): siRNA sense strand
gaaaagcuguuugccaaga

SEQ ID NO: 1078517 - RNA, 19 nt, Homo sapiens
  misc_RNA (1)...(19): siRNA sense strand
ccaccgagucugguaaaua

SEQ ID NO: 1078518 - RNA, 19 nt, Homo sapiens
  misc_RNA (1)...(19): siRNA sense strand
gaagauacgcuuguuuguc

SEQ ID NO: 1078519 - RNA, 19 nt, Homo sapiens
  misc_RNA (1)...(19): siRNA sense strand
uaagaagugaugaaccuuu

SEQ ID NO: 1078520 - RNA, 19 nt, Homo sapiens
  misc_RNA (1)...(19): siRNA sense strand
uggaugaggucgaauucuu

SEQ ID NO: 1078521 - RNA, 19 nt, Homo sapiens
  misc_RNA (1)...(19): siRNA sense strand
gguguccaguuuccuacua

SEQ ID NO: 1078522 - RNA, 19 nt, Homo sapiens
  misc_RNA (1)...(19): siRNA sense strand
gcuggagaccuaggaguua

SEQ ID NO: 1078523 - RNA, 19 nt, Homo sapiens
  misc_RNA (1)...(19): siRNA sense strand
aagaagugaugaaccuuug

SEQ ID NO: 1078524 - RNA, 19 nt, Homo sapiens
  misc_RNA (1)...(19): siRNA sense strand
caaaccgccuuccaaguac

SEQ ID NO: 1078525 - RNA, 19 nt, Homo sapiens
  misc_RNA (1)...(19): siRNA sense strand
gaugaacccgacauucuug

SEQ ID NO: 1078526 - RNA, 19 nt, Homo sapiens
  misc_RNA (1)...(19): siRNA sense strand
ggagaugacaaccgaggaa

SEQ ID NO: 1078527 - RNA, 19 nt, Homo sapiens
  misc_RNA (1)...(19): siRNA sense strand
caacguagacacacaucga

SEQ ID NO: 1078528 - RNA, 19 nt, Homo sapiens
  misc_RNA (1)...(19): siRNA sense strand
guagacacacaucgagaaa

SEQ ID NO: 1078529 - RNA, 19 nt, Homo sapiens
  misc_RNA (1)...(19): siRNA sense strand
caauggaguguguuucuga

SEQ ID NO: 1078530 - RNA, 19 nt, Homo sapiens
  misc_RNA (1)...(19): siRNA sense strand
ggagcuagacgacauggau

SEQ ID NO: 1078531 - RNA, 19 nt, Homo sapiens
  misc_RNA (1)...(19): siRNA sense strand
uaagaaggcaaacgagugu

SEQ ID NO: 1078532 - RNA, 19 nt, Homo sapiens
  misc_RNA (1)...(19): siRNA sense strand
aaagauaugccuccagauc

SEQ ID NO: 1078533 - RNA, 19 nt, Homo sapiens
  misc_RNA (1)...(19): siRNA sense strand
aaagaagacgucacagaug

SEQ ID NO: 1078534 - RNA, 19 nt, Homo sapiens
  misc_RNA (1)...(19): siRNA sense strand
gaagugaugaaccuuugau

SEQ ID NO: 1078535 - RNA, 19 nt, Homo sapiens
  misc_RNA (1)...(19): siRNA sense strand
gaacuguuucaggaagaua

SEQ ID NO: 1078536 - RNA, 19 nt, Homo sapiens
  misc_RNA (1)...(19): siRNA sense strand
acaaagaagacgucacaga

SEQ ID NO: 1078537 - RNA, 19 nt, Homo sapiens
  misc_RNA (1)...(19): siRNA sense strand
gcccagagccuuccaagac

SEQ ID NO: 1078538 - RNA, 19 nt, Homo sapiens
  misc_RNA (1)...(19): siRNA sense strand
uuacgacucuguuaagacu

SEQ ID NO: 1078539 - RNA, 19 nt, Homo sapiens
  misc_RNA (1)...(19): siRNA sense strand
guucguagaggaaguggaa

SEQ ID NO: 1078540 - RNA, 19 nt, Homo sapiens
  misc_RNA (1)...(19): siRNA sense strand
cgucacagaugcaucaaaa

SEQ ID NO: 1078541 - RNA, 19 nt, Homo sapiens
  misc_RNA (1)...(19): siRNA sense strand
ugcugaaacuggauucuga

SEQ ID NO: 1078542 - RNA, 19 nt, Homo sapiens
  misc_RNA (1)...(19): siRNA sense strand
aagcccagcugaugaccaa

SEQ ID NO: 1078543 - RNA, 19 nt, Homo sapiens
  misc_RNA (1)...(19): siRNA sense strand
uguuaagacuccuauucaa

SEQ ID NO: 1078544 - RNA, 19 nt, Homo sapiens
  misc_RNA (1)...(19): siRNA sense strand
aagcaucccuuggccaugu

SEQ ID NO: 1078545 - RNA, 19 nt, Homo sapiens
  misc_RNA (1)...(19): siRNA sense strand
gcaaguuuacaaguacaaa

SEQ ID NO: 1078546 - RNA, 19 nt, Homo sapiens
  misc_RNA (1)...(19): siRNA sense strand
gaaccucccaacacucauc

SEQ ID NO: 1078547 - RNA, 19 nt, Homo sapiens
  misc_RNA (1)...(19): siRNA sense strand
gccuccagaucuccuacua

SEQ ID NO: 1078548 - RNA, 19 nt, Homo sapiens
  misc_RNA (1)...(19): siRNA sense strand
aagcaagggcuacagaaug

SEQ ID NO: 1078549 - RNA, 19 nt, Homo sapiens
  misc_RNA (1)...(19): siRNA sense strand
gaauccaucagcagucugu

SEQ ID NO: 1078550 - RNA, 19 nt, Homo sapiens
  misc_RNA (1)...(19): siRNA sense strand
cuggagaccuaggaguuaa

SEQ ID NO: 1078551 - RNA, 19 nt, Homo sapiens
  misc_RNA (1)...(19): siRNA sense strand
gaaggcguucguagaggaa

SEQ ID NO: 1078552 - RNA, 19 nt, Homo sapiens
  misc_RNA (1)...(19): siRNA sense strand
cuccagaucuccuacuaca

SEQ ID NO: 1078553 - RNA, 19 nt, Homo sapiens
  misc_RNA (1)...(19): siRNA sense strand
agaccuaggaguuaaugaa

SEQ ID NO: 1078554 - RNA, 19 nt, Homo sapiens
  misc_RNA (1)...(19): siRNA sense strand
uaagcaagggcuacagaau

SEQ ID NO: 1078555 - RNA, 19 nt, Homo sapiens
  misc_RNA (1)...(19): siRNA sense strand
uacuacaggugcugaaaca

SEQ ID NO: 1078556 - RNA, 19 nt, Homo sapiens
  misc_RNA (1)...(19): siRNA sense strand
gcagugcaaguuuacaagu

SEQ ID NO: 1078557 - RNA, 19 nt, Homo sapiens
  misc_RNA (1)...(19): siRNA sense strand
cgacauucuugacggucuu

SEQ ID NO: 1078558 - RNA, 19 nt, Homo sapiens
  misc_RNA (1)...(19): siRNA sense strand
cagaacaaccgaucaagac

SEQ ID NO: 1078559 - RNA, 19 nt, Homo sapiens
  misc_RNA (1)...(19): siRNA sense strand
cugaagauacgcuuguuug

SEQ ID NO: 1078560 - RNA, 19 nt, Homo sapiens
  misc_RNA (1)...(19): siRNA sense strand
guccucagcuucccaagac

SEQ ID NO: 1078561 - RNA, 19 nt, Homo sapiens
  misc_RNA (1)...(19): siRNA sense strand
agacuggagugucccaucu

SEQ ID NO: 1078562 - RNA, 19 nt, Homo sapiens
  misc_RNA (1)...(19): siRNA sense strand
gcccugguacugugacaaa

SEQ ID NO: 1078563 - RNA, 19 nt, Homo sapiens
  misc_RNA (1)...(19): siRNA sense strand
ugaugaacccgacauucuu

SEQ ID NO: 1078564 - RNA, 19 nt, Homo sapiens
  misc_RNA (1)...(19): siRNA sense strand
cggcaccgcauucuuauag

SEQ ID NO: 1078565 - RNA, 19 nt, Homo sapiens
  misc_RNA (1)...(19): siRNA sense strand
agacuggagugucccaucu

SEQ ID NO: 1078566 - RNA, 19 nt, Homo sapiens
  misc_RNA (1)...(19): siRNA sense strand
gcuggagugucccaucucu

SEQ ID NO: 1078567 - RNA, 19 nt, Homo sapiens
  misc_RNA (1)...(19): siRNA sense strand
caaacgagugugcuucaag

SEQ ID NO: 1078568 - RNA, 19 nt, Homo sapiens
  misc_RNA (1)...(19): siRNA sense strand
aacaaccgaucaagaccaa

SEQ ID NO: 1078569 - RNA, 19 nt, Homo sapiens
  misc_RNA (1)...(19): siRNA sense strand
gacaaaccgccuuccaagu

SEQ ID NO: 1078570 - RNA, 19 nt, Homo sapiens
  misc_RNA (1)...(19): siRNA sense strand
gaagacgcacgggcucguu

SEQ ID NO: 1078571 - RNA, 19 nt, Homo sapiens
  misc_RNA (1)...(19): siRNA sense strand
ccuggaaccucccaacacu

SEQ ID NO: 1078572 - RNA, 19 nt, Homo sapiens
  misc_RNA (1)...(19): siRNA sense strand
guggaagcccagcugauga

SEQ ID NO: 1078573 - RNA, 19 nt, Homo sapiens
  misc_RNA (1)...(19): siRNA sense strand
gugcagaacaaccgaucaa

SEQ ID NO: 1078574 - RNA, 19 nt, Homo sapiens
  misc_RNA (1)...(19): siRNA sense strand
gaccuaggaguuaaugaag

SEQ ID NO: 1078575 - RNA, 19 nt, Homo sapiens
  misc_RNA (1)...(19): siRNA sense strand
ggagaccuaggaguuaaug

SEQ ID NO: 1078576 - RNA, 19 nt, Homo sapiens
  misc_RNA (1)...(19): siRNA sense strand
cgagaaaacuccgugacuu

SEQ ID NO: 1078577 - RNA, 19 nt, Homo sapiens
  misc_RNA (1)...(19): siRNA sense strand
aagaacuguuucaggaaga

SEQ ID NO: 1078578 - RNA, 19 nt, Homo sapiens
  misc_RNA (1)...(19): siRNA sense strand
caaccgaggaacucaccaa

SEQ ID NO: 1078579 - RNA, 19 nt, Homo sapiens
  misc_RNA (1)...(19): siRNA sense strand
cucaucggguguccaguuu

SEQ ID NO: 1078580 - RNA, 19 nt, Homo sapiens
  misc_RNA (1)...(19): siRNA sense strand
cagaacuggguauuuguga

SEQ ID NO: 1078581 - RNA, 19 nt, Homo sapiens
  misc_RNA (1)...(19): siRNA sense strand
agacgucacagaugcauca

SEQ ID NO: 1078582 - RNA, 19 nt, Homo sapiens
  misc_RNA (1)...(19): siRNA sense strand
uaagacuccuauucaacgu

SEQ ID NO: 1078583 - RNA, 19 nt, Homo sapiens
  misc_RNA (1)...(19): siRNA sense strand
gugacaaaccgccuuccaa

SEQ ID NO: 1078584 - RNA, 19 nt, Homo sapiens
  misc_RNA (1)...(19): siRNA sense strand
gugcuucaaggcugaugua

SEQ ID NO: 1078585 - RNA, 19 nt, Homo sapiens
  misc_RNA (1)...(19): siRNA sense strand
ccugaagccucccaagacu

SEQ ID NO: 1078586 - RNA, 19 nt, Homo sapiens
  misc_RNA (1)...(19): siRNA sense strand
aagaagggauggacuuacg

SEQ ID NO: 1078587 - RNA, 19 nt, Homo sapiens
  misc_RNA (1)...(19): siRNA sense strand
gccaagaagggauggacuu

SEQ ID NO: 1078588 - RNA, 19 nt, Homo sapiens
  misc_RNA (1)...(19): siRNA sense strand
gagccuaaguuggggaaaa

SEQ ID NO: 1078589 - RNA, 19 nt, Homo sapiens
  misc_RNA (1)...(19): siRNA sense strand
ugaagauacgcuuguuugu

SEQ ID NO: 1078590 - RNA, 19 nt, Homo sapiens
  misc_RNA (1)...(19): siRNA sense strand
auggaccaauugccuuuaa

SEQ ID NO: 1078591 - RNA, 19 nt, Homo sapiens
  misc_RNA (1)...(19): siRNA sense strand
gaaauucagugcaucauaa

SEQ ID NO: 1078592 - RNA, 19 nt, Homo sapiens
  misc_RNA (1)...(19): siRNA sense strand
gaaauuugauccugguaua

SEQ ID NO: 1078593 - RNA, 19 nt, Homo sapiens
  misc_RNA (1)...(19): siRNA sense strand
gcacguguauacaauaaua

SEQ ID NO: 1078594 - RNA, 19 nt, Homo sapiens
  misc_RNA (1)...(19): siRNA sense strand
gcuaauggcuguugguaaa

SEQ ID NO: 1078595 - RNA, 19 nt, Homo sapiens
  misc_RNA (1)...(19): siRNA sense strand
uaucaaagcucaugugguu

SEQ ID NO: 1078596 - RNA, 19 nt, Homo sapiens
  misc_RNA (1)...(19): siRNA sense strand
caacagaaauuccucuaau

SEQ ID NO: 1078597 - RNA, 19 nt, Homo sapiens
  misc_RNA (1)...(19): siRNA sense strand
gagaugcucuugaguauca

SEQ ID NO: 1078598 - RNA, 19 nt, Homo sapiens
  misc_RNA (1)...(19): siRNA sense strand
ucaaaggacuuaaaucaga

SEQ ID NO: 1078599 - RNA, 19 nt, Homo sapiens
  misc_RNA (1)...(19): siRNA sense strand
ugacagcuaugguggaaua

SEQ ID NO: 1078600 - RNA, 19 nt, Homo sapiens
  misc_RNA (1)...(19): siRNA sense strand
guacagauauucaacaaag

SEQ ID NO: 1078601 - RNA, 19 nt, Homo sapiens
  misc_RNA (1)...(19): siRNA sense strand
uggcaaagcuccaggcaua

SEQ ID NO: 1078602 - RNA, 19 nt, Homo sapiens
  misc_RNA (1)...(19): siRNA sense strand
caagaaaguugugaugaaa

SEQ ID NO: 1078603 - RNA, 19 nt, Homo sapiens
  misc_RNA (1)...(19): siRNA sense strand
gaugugauguguucauuug

SEQ ID NO: 1078604 - RNA, 19 nt, Homo sapiens
  misc_RNA (1)...(19): siRNA sense strand
gcuaagucaucaaugguua

SEQ ID NO: 1078605 - RNA, 19 nt, Homo sapiens
  misc_RNA (1)...(19): siRNA sense strand
gagagaugaugacuauaaa

SEQ ID NO: 1078606 - RNA, 19 nt, Homo sapiens
  misc_RNA (1)...(19): siRNA sense strand
gcccagagcccauaaauug

SEQ ID NO: 1078607 - RNA, 19 nt, Homo sapiens
  misc_RNA (1)...(19): siRNA sense strand
ccaagaaaguugugaugaa

SEQ ID NO: 1078608 - RNA, 19 nt, Homo sapiens
  misc_RNA (1)...(19): siRNA sense strand
caacaaagaacagauauug

SEQ ID NO: 1078609 - RNA, 19 nt, Homo sapiens
  misc_RNA (1)...(19): siRNA sense strand
gauugcagcuuaauguuga

SEQ ID NO: 1078610 - RNA, 19 nt, Homo sapiens
  misc_RNA (1)...(19): siRNA sense strand
ggaagagucugugagaaga

SEQ ID NO: 1078611 - RNA, 19 nt, Homo sapiens
  misc_RNA (1)...(19): siRNA sense strand
gcacacugguugccaauag

SEQ ID NO: 1078612 - RNA, 19 nt, Homo sapiens
  misc_RNA (1)...(19): siRNA sense strand
aaacaugauugcagcuuaa

SEQ ID NO: 1078613 - RNA, 19 nt, Homo sapiens
  misc_RNA (1)...(19): siRNA sense strand
caaaggacuuaaaucagaa

SEQ ID NO: 1078614 - RNA, 19 nt, Homo sapiens
  misc_RNA (1)...(19): siRNA sense strand
ggaaauugaaucaguaguu

SEQ ID NO: 1078615 - RNA, 19 nt, Homo sapiens
  misc_RNA (1)...(19): siRNA sense strand
caaagcaaauucaucaagu

SEQ ID NO: 1078616 - RNA, 19 nt, Homo sapiens
  misc_RNA (1)...(19): siRNA sense strand
gaagagccagugaaggaua

SEQ ID NO: 1078617 - RNA, 19 nt, Homo sapiens
  misc_RNA (1)...(19): siRNA sense strand
gaagaauuggguacagaua

SEQ ID NO: 1078618 - RNA, 19 nt, Homo sapiens
  misc_RNA (1)...(19): siRNA sense strand
caagaauuaugcaccugua

SEQ ID NO: 1078619 - RNA, 19 nt, Homo sapiens
  misc_RNA (1)...(19): siRNA sense strand
caggaccaguucuuaauuu

SEQ ID NO: 1078620 - RNA, 19 nt, Homo sapiens
  misc_RNA (1)...(19): siRNA sense strand
ucacguauauuuagcuuuc

SEQ ID NO: 1078621 - RNA, 19 nt, Homo sapiens
  misc_RNA (1)...(19): siRNA sense strand
gagaagaauuggguacaga

SEQ ID NO: 1078622 - RNA, 19 nt, Homo sapiens
  misc_RNA (1)...(19): siRNA sense strand
gggagcgcauguauucaua

SEQ ID NO: 1078623 - RNA, 19 nt, Homo sapiens
  misc_RNA (1)...(19): siRNA sense strand
ugagagaugaugacuauaa

SEQ ID NO: 1078624 - RNA, 19 nt, Homo sapiens
  misc_RNA (1)...(19): siRNA sense strand
uagagcgaaucgauuguua

SEQ ID NO: 1078625 - RNA, 19 nt, Homo sapiens
  misc_RNA (1)...(19): siRNA sense strand
gaugacagcuaugguggaa

SEQ ID NO: 1078626 - RNA, 19 nt, Homo sapiens
  misc_RNA (1)...(19): siRNA sense strand
gcgaaucgauuguuaacca

SEQ ID NO: 1078627 - RNA, 19 nt, Homo sapiens
  misc_RNA (1)...(19): siRNA sense strand
aaacauuucaggccaauuu

SEQ ID NO: 1078628 - RNA, 19 nt, Homo sapiens
  misc_RNA (1)...(19): siRNA sense strand
gccaagaauuguagaugaa

SEQ ID NO: 1078629 - RNA, 19 nt, Homo sapiens
  misc_RNA (1)...(19): siRNA sense strand
agaauaccacggccaauua

SEQ ID NO: 1078630 - RNA, 19 nt, Homo sapiens
  misc_RNA (1)...(19): siRNA sense strand
gagccaggaucaggucuaa

SEQ ID NO: 1078631 - RNA, 19 nt, Homo sapiens
  misc_RNA (1)...(19): siRNA sense strand
ccaauuacccauccucauu

SEQ ID NO: 1078632 - RNA, 19 nt, Homo sapiens
  misc_RNA (1)...(19): siRNA sense strand
gaagaggcaauagugauuu

SEQ ID NO: 1078633 - RNA, 19 nt, Homo sapiens
  misc_RNA (1)...(19): siRNA sense strand
ggacuuaaaucagaaccau

SEQ ID NO: 1078634 - RNA, 19 nt, Homo sapiens
  misc_RNA (1)...(19): siRNA sense strand
gcgcauguauucauaugau

SEQ ID NO: 1078635 - RNA, 19 nt, Homo sapiens
  misc_RNA (1)...(19): siRNA sense strand
caucaaaagugaacgauuu

SEQ ID NO: 1078636 - RNA, 19 nt, Homo sapiens
  misc_RNA (1)...(19): siRNA sense strand
agaauuggguacagauauu

SEQ ID NO: 1078637 - RNA, 19 nt, Homo sapiens
  misc_RNA (1)...(19): siRNA sense strand
ugaagcagaugauagagau

SEQ ID NO: 1078638 - RNA, 19 nt, Homo sapiens
  misc_RNA (1)...(19): siRNA sense strand
aaucaucgcucaugugaag

SEQ ID NO: 1078639 - RNA, 19 nt, Homo sapiens
  misc_RNA (1)...(19): siRNA sense strand
gcaacuaucaggucuaaag

SEQ ID NO: 1078640 - RNA, 19 nt, Homo sapiens
  misc_RNA (1)...(19): siRNA sense strand
ggaggaagagucugugaga

SEQ ID NO: 1078641 - RNA, 19 nt, Homo sapiens
  misc_RNA (1)...(19): siRNA sense strand
gagcgcauguauucauaug

SEQ ID NO: 1078642 - RNA, 19 nt, Homo sapiens
  misc_RNA (1)...(19): siRNA sense strand
guuccaagauuuaacuaug

SEQ ID NO: 1078643 - RNA, 19 nt, Homo sapiens
  misc_RNA (1)...(19): siRNA sense strand
cuaaagaccaucauaaaca

SEQ ID NO: 1078644 - RNA, 19 nt, Homo sapiens
  misc_RNA (1)...(19): siRNA sense strand
gcaaagcuccaggcauauu

SEQ ID NO: 1078645 - RNA, 19 nt, Homo sapiens
  misc_RNA (1)...(19): siRNA sense strand
ucacaaaaguuccaagauu

SEQ ID NO: 1078646 - RNA, 19 nt, Homo sapiens
  misc_RNA (1)...(19): siRNA sense strand
ugaccgagcugcaacuauc

SEQ ID NO: 1078647 - RNA, 19 nt, Homo sapiens
  misc_RNA (1)...(19): siRNA sense strand
caagaauuguagaugaaga

SEQ ID NO: 1078648 - RNA, 19 nt, Homo sapiens
  misc_RNA (1)...(19): siRNA sense strand
gcagaccagccaagaauug

SEQ ID NO: 1078649 - RNA, 19 nt, Homo sapiens
  misc_RNA (1)...(19): siRNA sense strand
cagcuaugguggaauauca

SEQ ID NO: 1078650 - RNA, 19 nt, Homo sapiens
  misc_RNA (1)...(19): siRNA sense strand
gauccaggaccaguucuua

SEQ ID NO: 1078651 - RNA, 19 nt, Homo sapiens
  misc_RNA (1)...(19): siRNA sense strand
uuugagagaugaugacuau

SEQ ID NO: 1078652 - RNA, 19 nt, Homo sapiens
  misc_RNA (1)...(19): siRNA sense strand
acaggacuaugcucucuuu

SEQ ID NO: 1078653 - RNA, 19 nt, Homo sapiens
  misc_RNA (1)...(19): siRNA sense strand
uaaauuggguggccaucau

SEQ ID NO: 1078654 - RNA, 19 nt, Homo sapiens
  misc_RNA (1)...(19): siRNA sense strand
cuaaagagauuacuaucac

SEQ ID NO: 1078655 - RNA, 19 nt, Homo sapiens
  misc_RNA (1)...(19): siRNA sense strand
gaagugugcgcuugcagaa

SEQ ID NO: 1078656 - RNA, 19 nt, Homo sapiens
  misc_RNA (1)...(19): siRNA sense strand
guaaagcuuccaccaagaa

SEQ ID NO: 1078657 - RNA, 19 nt, Homo sapiens
  misc_RNA (1)...(19): siRNA sense strand
aaucucaccuacauaagaa

SEQ ID NO: 1078658 - RNA, 19 nt, Homo sapiens
  misc_RNA (1)...(19): siRNA sense strand
uaucguggaugcuaaguca

SEQ ID NO: 1078659 - RNA, 19 nt, Homo sapiens
  misc_RNA (1)...(19): siRNA sense strand
ucuccugucuuccuaauga

SEQ ID NO: 1078660 - RNA, 19 nt, Homo sapiens
  misc_RNA (1)...(19): siRNA sense strand
agugaaggauaugcuauua

SEQ ID NO: 1078661 - RNA, 19 nt, Homo sapiens
  misc_RNA (1)...(19): siRNA sense strand
gugaagagccagugaagga

SEQ ID NO: 1078662 - RNA, 19 nt, Homo sapiens
  misc_RNA (1)...(19): siRNA sense strand
guucagaaauucagugcau

SEQ ID NO: 1078663 - RNA, 19 nt, Homo sapiens
  misc_RNA (1)...(19): siRNA sense strand
uauuggaccuucauacaga

SEQ ID NO: 1078664 - RNA, 19 nt, Homo sapiens
  misc_RNA (1)...(19): siRNA sense strand
caauuacccauccucauuu

SEQ ID NO: 1078665 - RNA, 19 nt, Homo sapiens
  misc_RNA (1)...(19): siRNA sense strand
gaggaagagucugugagaa

SEQ ID NO: 1078666 - RNA, 19 nt, Homo sapiens
  misc_RNA (1)...(19): siRNA sense strand
gauauuggaccuucauaca

SEQ ID NO: 1078667 - RNA, 19 nt, Homo sapiens
  misc_RNA (1)...(19): siRNA sense strand
ggguacagauauucaacaa

SEQ ID NO: 1078668 - RNA, 19 nt, Homo sapiens
  misc_RNA (1)...(19): siRNA sense strand
caaagcuccaggcauauuu

SEQ ID NO: 1078669 - RNA, 19 nt, Homo sapiens
  misc_RNA (1)...(19): siRNA sense strand
ccugugacguaccacuuua

SEQ ID NO: 1078670 - RNA, 19 nt, Homo sapiens
  misc_RNA (1)...(19): siRNA sense strand
acagaaggcuggaaugcau

SEQ ID NO: 1078671 - RNA, 19 nt, Homo sapiens
  misc_RNA (1)...(19): siRNA sense strand
cacaaaaguuccaagauuu

SEQ ID NO: 1078672 - RNA, 19 nt, Homo sapiens
  misc_RNA (1)...(19): siRNA sense strand
caaagugaagcagaugaua

SEQ ID NO: 1078673 - RNA, 19 nt, Homo sapiens
  misc_RNA (1)...(19): siRNA sense strand
aauuaaacaugcacgugua

SEQ ID NO: 1078674 - RNA, 19 nt, Homo sapiens
  misc_RNA (1)...(19): siRNA sense strand
gaugaagaggcaauaguga

SEQ ID NO: 1078675 - RNA, 19 nt, Homo sapiens
  misc_RNA (1)...(19): siRNA sense strand
ucacaaucaucgcucaugu

SEQ ID NO: 1078676 - RNA, 19 nt, Homo sapiens
  misc_RNA (1)...(19): siRNA sense strand
ucucaaaggacuuaaauca

SEQ ID NO: 1078677 - RNA, 19 nt, Homo sapiens
  misc_RNA (1)...(19): siRNA sense strand
cuaauuggguugauuccau

SEQ ID NO: 1078678 - RNA, 19 nt, Homo sapiens
  misc_RNA (1)...(19): siRNA sense strand
ugauacagacauaggcuua

SEQ ID NO: 1078679 - RNA, 19 nt, Homo sapiens
  misc_RNA (1)...(19): siRNA sense strand
guucauuuguuccacauca

SEQ ID NO: 1078680 - RNA, 19 nt, Homo sapiens
  misc_RNA (1)...(19): siRNA sense strand
ggacuuuacaaccuuauca

SEQ ID NO: 1078681 - RNA, 19 nt, Homo sapiens
  misc_RNA (1)...(19): siRNA sense strand
ugaagaggcaauagugauu

SEQ ID NO: 1078682 - RNA, 19 nt, Homo sapiens
  misc_RNA (1)...(19): siRNA sense strand
gcuggaaugcauacacuuu

SEQ ID NO: 1078683 - RNA, 19 nt, Homo sapiens
  misc_RNA (1)...(19): siRNA sense strand
aagcagaugauagagauua

SEQ ID NO: 1078684 - RNA, 19 nt, Homo sapiens
  misc_RNA (1)...(19): siRNA sense strand
cagaugauagagauuauug

SEQ ID NO: 1078685 - RNA, 19 nt, Homo sapiens
  misc_RNA (1)...(19): siRNA sense strand
caccaaagcaaauucauca

SEQ ID NO: 1078686 - RNA, 19 nt, Homo sapiens
  misc_RNA (1)...(19): siRNA sense strand
gaagagucugugagaagaa

SEQ ID NO: 1078687 - RNA, 19 nt, Homo sapiens
  misc_RNA (1)...(19): siRNA sense strand
agagggagcgcauguauuc

SEQ ID NO: 1078688 - RNA, 19 nt, Homo sapiens
  misc_RNA (1)...(19): siRNA sense strand
gcagagagggagcgcaugu

SEQ ID NO: 1078689 - RNA, 19 nt, Homo sapiens
  misc_RNA (1)...(19): siRNA sense strand
cuauuagccuuucccaaug

SEQ ID NO: 1078690 - RNA, 19 nt, Homo sapiens
  misc_RNA (1)...(19): siRNA sense strand
guguaccgccucccgauua

SEQ ID NO: 1078691 - RNA, 19 nt, Homo sapiens
  misc_RNA (1)...(19): siRNA sense strand
gaaaggcucuuguguuaua

SEQ ID NO: 1078692 - RNA, 19 nt, Homo sapiens
  misc_RNA (1)...(19): siRNA sense strand
gaaagaguguguacagaua

SEQ ID NO: 1078693 - RNA, 19 nt, Homo sapiens
  misc_RNA (1)...(19): siRNA sense strand
gaagaugacuuauuugaag

SEQ ID NO: 1078694 - RNA, 19 nt, Homo sapiens
  misc_RNA (1)...(19): siRNA sense strand
gcacagaaacugaguaauu

SEQ ID NO: 1078695 - RNA, 19 nt, Homo sapiens
  misc_RNA (1)...(19): siRNA sense strand
gaugauagcuugguuguug

SEQ ID NO: 1078696 - RNA, 19 nt, Homo sapiens
  misc_RNA (1)...(19): siRNA sense strand
gaaaagaacuucagagaga

SEQ ID NO: 1078697 - RNA, 19 nt, Homo sapiens
  misc_RNA (1)...(19): siRNA sense strand
aaacuuagcuuaguacuga

SEQ ID NO: 1078698 - RNA, 19 nt, Homo sapiens
  misc_RNA (1)...(19): siRNA sense strand
gaaaugcguuugaguuuua

SEQ ID NO: 1078699 - RNA, 19 nt, Homo sapiens
  misc_RNA (1)...(19): siRNA sense strand
gcaacugugugucagauuu

SEQ ID NO: 1078700 - RNA, 19 nt, Homo sapiens
  misc_RNA (1)...(19): siRNA sense strand
gaauuaaccucccuuacau

SEQ ID NO: 1078701 - RNA, 19 nt, Homo sapiens
  misc_RNA (1)...(19): siRNA sense strand
gaaauaggauuggaagcaa

SEQ ID NO: 1078702 - RNA, 19 nt, Homo sapiens
  misc_RNA (1)...(19): siRNA sense strand
gaggaaagcuuuguuugug

SEQ ID NO: 1078703 - RNA, 19 nt, Homo sapiens
  misc_RNA (1)...(19): siRNA sense strand
caauaaugcuugugcugua

SEQ ID NO: 1078704 - RNA, 19 nt, Homo sapiens
  misc_RNA (1)...(19): siRNA sense strand
gagaaggaaugucuuguuc

SEQ ID NO: 1078705 - RNA, 19 nt, Homo sapiens
  misc_RNA (1)...(19): siRNA sense strand
gagagaaagugguaacugu

SEQ ID NO: 1078706 - RNA, 19 nt, Homo sapiens
  misc_RNA (1)...(19): siRNA sense strand
cacagaaacugaguaauuu

SEQ ID NO: 1078707 - RNA, 19 nt, Homo sapiens
  misc_RNA (1)...(19): siRNA sense strand
caucagaauucucccuaua

SEQ ID NO: 1078708 - RNA, 19 nt, Homo sapiens
  misc_RNA (1)...(19): siRNA sense strand
caaagaauuuccagaagug

SEQ ID NO: 1078709 - RNA, 19 nt, Homo sapiens
  misc_RNA (1)...(19): siRNA sense strand
ggaaagcuuuguuugugaa

SEQ ID NO: 1078710 - RNA, 19 nt, Homo sapiens
  misc_RNA (1)...(19): siRNA sense strand
gaacacccaucuaagaaag

SEQ ID NO: 1078711 - RNA, 19 nt, Homo sapiens
  misc_RNA (1)...(19): siRNA sense strand
cagaacagcuaguagagaa

SEQ ID NO: 1078712 - RNA, 19 nt, Homo sapiens
  misc_RNA (1)...(19): siRNA sense strand
cuacugacauuuccaaaga

SEQ ID NO: 1078713 - RNA, 19 nt, Homo sapiens
  misc_RNA (1)...(19): siRNA sense strand
ggaauuaaccucccuuaca

SEQ ID NO: 1078714 - RNA, 19 nt, Homo sapiens
  misc_RNA (1)...(19): siRNA sense strand
gcaaugaagaugacuuauu

SEQ ID NO: 1078715 - RNA, 19 nt, Homo sapiens
  misc_RNA (1)...(19): siRNA sense strand
cauauuacaugucagaaga

SEQ ID NO: 1078716 - RNA, 19 nt, Homo sapiens
  misc_RNA (1)...(19): siRNA sense strand
ucagaagaaugguauuuga

SEQ ID NO: 1078717 - RNA, 19 nt, Homo sapiens
  misc_RNA (1)...(19): siRNA sense strand
ggaagaaaacucucauuua

SEQ ID NO: 1078718 - RNA, 19 nt, Homo sapiens
  misc_RNA (1)...(19): siRNA sense strand
ggaagaauguacucaagag

SEQ ID NO: 1078719 - RNA, 19 nt, Homo sapiens
  misc_RNA (1)...(19): siRNA sense strand
ggaggcaugucaaagcauu

SEQ ID NO: 1078720 - RNA, 19 nt, Homo sapiens
  misc_RNA (1)...(19): siRNA sense strand
ucagaauucucccuauaaa

SEQ ID NO: 1078721 - RNA, 19 nt, Homo sapiens
  misc_RNA (1)...(19): siRNA sense strand
gcuaugcccugaauucaau

SEQ ID NO: 1078722 - RNA, 19 nt, Homo sapiens
  misc_RNA (1)...(19): siRNA sense strand
gcaguguggugacuuaugu

SEQ ID NO: 1078723 - RNA, 19 nt, Homo sapiens
  misc_RNA (1)...(19): siRNA sense strand
aaacuaggcuaugagauga

SEQ ID NO: 1078724 - RNA, 19 nt, Homo sapiens
  misc_RNA (1)...(19): siRNA sense strand
agacuuugcugcacagaaa

SEQ ID NO: 1078725 - RNA, 19 nt, Homo sapiens
  misc_RNA (1)...(19): siRNA sense strand
gugauuaaguugaguacaa

SEQ ID NO: 1078726 - RNA, 19 nt, Homo sapiens
  misc_RNA (1)...(19): siRNA sense strand
ugaaugaugugacuuuauc

SEQ ID NO: 1078727 - RNA, 19 nt, Homo sapiens
  misc_RNA (1)...(19): siRNA sense strand
gaagugagaauuuccuaau

SEQ ID NO: 1078728 - RNA, 19 nt, Homo sapiens
  misc_RNA (1)...(19): siRNA sense strand
gcucuuagaacauaugaaa

SEQ ID NO: 1078729 - RNA, 19 nt, Homo sapiens
  misc_RNA (1)...(19): siRNA sense strand
aaguggaacugaacaagua

SEQ ID NO: 1078730 - RNA, 19 nt, Homo sapiens
  misc_RNA (1)...(19): siRNA sense strand
gaagugagcaaaggaaaga

SEQ ID NO: 1078731 - RNA, 19 nt, Homo sapiens
  misc_RNA (1)...(19): siRNA sense strand
gaugugacuuuaucauugu

SEQ ID NO: 1078732 - RNA, 19 nt, Homo sapiens
  misc_RNA (1)...(19): siRNA sense strand
gcccaugacuccagauuuc

SEQ ID NO: 1078733 - RNA, 19 nt, Homo sapiens
  misc_RNA (1)...(19): siRNA sense strand
gaugaaggauggccuaagg

SEQ ID NO: 1078734 - RNA, 19 nt, Homo sapiens
  misc_RNA (1)...(19): siRNA sense strand
ucaaagaauuuccagaagu

SEQ ID NO: 1078735 - RNA, 19 nt, Homo sapiens
  misc_RNA (1)...(19): siRNA sense strand
gucaagaaguauuaaguga

SEQ ID NO: 1078736 - RNA, 19 nt, Homo sapiens
  misc_RNA (1)...(19): siRNA sense strand
gcuuaguacugauagauga

SEQ ID NO: 1078737 - RNA, 19 nt, Homo sapiens
  misc_RNA (1)...(19): siRNA sense strand
gauuucggcuucuaaagug

SEQ ID NO: 1078738 - RNA, 19 nt, Homo sapiens
  misc_RNA (1)...(19): siRNA sense strand
ugccauagcuaaacaugaa

SEQ ID NO: 1078739 - RNA, 19 nt, Homo sapiens
  misc_RNA (1)...(19): siRNA sense strand
aacaagcaaugucaucuaa

SEQ ID NO: 1078740 - RNA, 19 nt, Homo sapiens
  misc_RNA (1)...(19): siRNA sense strand
ggaaacagagaacaccauu

SEQ ID NO: 1078741 - RNA, 19 nt, Homo sapiens
  misc_RNA (1)...(19): siRNA sense strand
caaagaagaaaccuauaga

SEQ ID NO: 1078742 - RNA, 19 nt, Homo sapiens
  misc_RNA (1)...(19): siRNA sense strand
ggagaaggaaugucuuguu

SEQ ID NO: 1078743 - RNA, 19 nt, Homo sapiens
  misc_RNA (1)...(19): siRNA sense strand
guacauauuugugcaacug

SEQ ID NO: 1078744 - RNA, 19 nt, Homo sapiens
  misc_RNA (1)...(19): siRNA sense strand
gaggaagaauguacucaag

SEQ ID NO: 1078745 - RNA, 19 nt, Homo sapiens
  misc_RNA (1)...(19): siRNA sense strand
uaaccucccuuacauugug

SEQ ID NO: 1078746 - RNA, 19 nt, Homo sapiens
  misc_RNA (1)...(19): siRNA sense strand
uaaacuaggcuaugagaug

SEQ ID NO: 1078747 - RNA, 19 nt, Homo sapiens
  misc_RNA (1)...(19): siRNA sense strand
caaauuauggagagagaaa

SEQ ID NO: 1078748 - RNA, 19 nt, Homo sapiens
  misc_RNA (1)...(19): siRNA sense strand
gaguguguacagauaauua

SEQ ID NO: 1078749 - RNA, 19 nt, Homo sapiens
  misc_RNA (1)...(19): siRNA sense strand
cagacugccugacuucauu

SEQ ID NO: 1078750 - RNA, 19 nt, Homo sapiens
  misc_RNA (1)...(19): siRNA sense strand
caggggagauugaaaauuu

SEQ ID NO: 1078751 - RNA, 19 nt, Homo sapiens
  misc_RNA (1)...(19): siRNA sense strand
cauaaucucaucagaauuc

SEQ ID NO: 1078752 - RNA, 19 nt, Homo sapiens
  misc_RNA (1)...(19): siRNA sense strand
gcuuucagguugcugcuaa

SEQ ID NO: 1078753 - RNA, 19 nt, Homo sapiens
  misc_RNA (1)...(19): siRNA sense strand
gaagguguggcucuuagaa

SEQ ID NO: 1078754 - RNA, 19 nt, Homo sapiens
  misc_RNA (1)...(19): siRNA sense strand
ccaguugucuaaaggaaau

SEQ ID NO: 1078755 - RNA, 19 nt, Homo sapiens
  misc_RNA (1)...(19): siRNA sense strand
acaaacaagagaaucguua

SEQ ID NO: 1078756 - RNA, 19 nt, Homo sapiens
  misc_RNA (1)...(19): siRNA sense strand
gaacagcuaguagagaaga

SEQ ID NO: 1078757 - RNA, 19 nt, Homo sapiens
  misc_RNA (1)...(19): siRNA sense strand
gauuucagaacuggaauua

SEQ ID NO: 1078758 - RNA, 19 nt, Homo sapiens
  misc_RNA (1)...(19): siRNA sense strand
ggacacucuucacuuggaa

SEQ ID NO: 1078759 - RNA, 19 nt, Homo sapiens
  misc_RNA (1)...(19): siRNA sense strand
gcaagaaagaggaaagcuu

SEQ ID NO: 1078760 - RNA, 19 nt, Homo sapiens
  misc_RNA (1)...(19): siRNA sense strand
acagcaguguggugacuua

SEQ ID NO: 1078761 - RNA, 19 nt, Homo sapiens
  misc_RNA (1)...(19): siRNA sense strand
ggacuaaaggaauguuguu

SEQ ID NO: 1078762 - RNA, 19 nt, Homo sapiens
  misc_RNA (1)...(19): siRNA sense strand
gguccuuaauggcccuuua

SEQ ID NO: 1078763 - RNA, 19 nt, Homo sapiens
  misc_RNA (1)...(19): siRNA sense strand
aaauauccaucccuacaga

SEQ ID NO: 1078764 - RNA, 19 nt, Homo sapiens
  misc_RNA (1)...(19): siRNA sense strand
gaaagugguaacuguccua

SEQ ID NO: 1078765 - RNA, 19 nt, Homo sapiens
  misc_RNA (1)...(19): siRNA sense strand
gcagauaaagagccuacaa

SEQ ID NO: 1078766 - RNA, 19 nt, Homo sapiens
  misc_RNA (1)...(19): siRNA sense strand
cgucgcggcugcuuuauca

SEQ ID NO: 1078767 - RNA, 19 nt, Homo sapiens
  misc_RNA (1)...(19): siRNA sense strand
uaaagaucguuauguugug

SEQ ID NO: 1078768 - RNA, 19 nt, Homo sapiens
  misc_RNA (1)...(19): siRNA sense strand
gaugccaugugaaauagga

SEQ ID NO: 1078769 - RNA, 19 nt, Homo sapiens
  misc_RNA (1)...(19): siRNA sense strand
gguaucguguaauagauga

SEQ ID NO: 1078770 - RNA, 19 nt, Homo sapiens
  misc_RNA (1)...(19): siRNA sense strand
cgagugaaccaucagauug

SEQ ID NO: 1078771 - RNA, 19 nt, Homo sapiens
  misc_RNA (1)...(19): siRNA sense strand
caaaguuguuaguguguca

SEQ ID NO: 1078772 - RNA, 19 nt, Homo sapiens
  misc_RNA (1)...(19): siRNA sense strand
ucauugcccuuacucgaaa

SEQ ID NO: 1078773 - RNA, 19 nt, Homo sapiens
  misc_RNA (1)...(19): siRNA sense strand
gcaaacaagcaaugucauc

SEQ ID NO: 1078774 - RNA, 19 nt, Homo sapiens
  misc_RNA (1)...(19): siRNA sense strand
cuaaagaucguuauguugu

SEQ ID NO: 1078775 - RNA, 19 nt, Homo sapiens
  misc_RNA (1)...(19): siRNA sense strand
ucagguugcugcuaaaugg

SEQ ID NO: 1078776 - RNA, 19 nt, Homo sapiens
  misc_RNA (1)...(19): siRNA sense strand
ggagauccuugugcaguuc

SEQ ID NO: 1078777 - RNA, 19 nt, Homo sapiens
  misc_RNA (1)...(19): siRNA sense strand
gggacacucuucacuugga

SEQ ID NO: 1078778 - RNA, 19 nt, Homo sapiens
  misc_RNA (1)...(19): siRNA sense strand
ccaaagaagaaaccuauag

SEQ ID NO: 1078779 - RNA, 19 nt, Homo sapiens
  misc_RNA (1)...(19): siRNA sense strand
aaacacccauauuacaugu

SEQ ID NO: 1078780 - RNA, 19 nt, Homo sapiens
  misc_RNA (1)...(19): siRNA sense strand
gaaguggaacugaacaagu

SEQ ID NO: 1078781 - RNA, 19 nt, Homo sapiens
  misc_RNA (1)...(19): siRNA sense strand
guacugauagaugacuuua

SEQ ID NO: 1078782 - RNA, 19 nt, Homo sapiens
  misc_RNA (1)...(19): siRNA sense strand
aaucauguguugcaacugu

SEQ ID NO: 1078783 - RNA, 19 nt, Homo sapiens
  misc_RNA (1)...(19): siRNA sense strand
cauacuugaugccauguga

SEQ ID NO: 1078784 - RNA, 19 nt, Homo sapiens
  misc_RNA (1)...(19): siRNA sense strand
ccugaaugaugugacuuua

SEQ ID NO: 1078785 - RNA, 19 nt, Homo sapiens
  misc_RNA (1)...(19): siRNA sense strand
gaaugucuuguuccucuuu

SEQ ID NO: 1078786 - RNA, 19 nt, Homo sapiens
  misc_RNA (1)...(19): siRNA sense strand
aaacaagcaaugucaucua

SEQ ID NO: 1078787 - RNA, 19 nt, Homo sapiens
  misc_RNA (1)...(19): siRNA sense strand
guggugcccuuuacagaga

SEQ ID NO: 1078788 - RNA, 19 nt, Homo sapiens
  misc_RNA (1)...(19): siRNA sense strand
ugacauuuccaaagaagaa

SEQ ID NO: 1078789 - RNA, 19 nt, Homo sapiens
  misc_RNA (1)...(19): siRNA sense strand
gugaacacccaucuaagaa

SEQ ID NO: 1078790 - RNA, 19 nt, Homo sapiens
  misc_RNA (1)...(19): siRNA sense strand
aaucaggaagugagaauuu

SEQ ID NO: 1078791 - RNA, 19 nt, Homo sapiens
  misc_RNA (1)...(19): siRNA sense strand
cauggcagcugcucagaua

SEQ ID NO: 1078792 - RNA, 19 nt, Homo sapiens
  misc_RNA (1)...(19): siRNA sense strand
guugaaggaugccacaaua

SEQ ID NO: 1078793 - RNA, 19 nt, Homo sapiens
  misc_RNA (1)...(19): siRNA sense strand
gcaccugucuggcucaaug

SEQ ID NO: 1078794 - RNA, 19 nt, Homo sapiens
  misc_RNA (1)...(19): siRNA sense strand
ucgacgagguccugaaaua

SEQ ID NO: 1078795 - RNA, 19 nt, Homo sapiens
  misc_RNA (1)...(19): siRNA sense strand
gcagugagaucugugugaa

SEQ ID NO: 1078796 - RNA, 19 nt, Homo sapiens
  misc_RNA (1)...(19): siRNA sense strand
gcaaagaccacaaggaagu

SEQ ID NO: 1078797 - RNA, 19 nt, Homo sapiens
  misc_RNA (1)...(19): siRNA sense strand
gggcaaagaccacaaggaa

SEQ ID NO: 1078798 - RNA, 19 nt, Homo sapiens
  misc_RNA (1)...(19): siRNA sense strand
gcagacaugcuuugaugaa

SEQ ID NO: 1078799 - RNA, 19 nt, Homo sapiens
  misc_RNA (1)...(19): siRNA sense strand
gaaaaugaaugugagcaaa

SEQ ID NO: 1078800 - RNA, 19 nt, Homo sapiens
  misc_RNA (1)...(19): siRNA sense strand
gaaaucaugagccgaaauc

SEQ ID NO: 1078801 - RNA, 19 nt, Homo sapiens
  misc_RNA (1)...(19): siRNA sense strand
guacaccauuucugaagga

SEQ ID NO: 1078802 - RNA, 19 nt, Homo sapiens
  misc_RNA (1)...(19): siRNA sense strand
ucaagguccuccucuaugu

SEQ ID NO: 1078803 - RNA, 19 nt, Homo sapiens
  misc_RNA (1)...(19): siRNA sense strand
gaaggaugccacaauaaca

SEQ ID NO: 1078804 - RNA, 19 nt, Homo sapiens
  misc_RNA (1)...(19): siRNA sense strand
gagaugccaugccuaccuu

SEQ ID NO: 1078805 - RNA, 19 nt, Homo sapiens
  misc_RNA (1)...(19): siRNA sense strand
caaggacaaugaguuugaa

SEQ ID NO: 1078806 - RNA, 19 nt, Homo sapiens
  misc_RNA (1)...(19): siRNA sense strand
ugacaggucuacccaagca

SEQ ID NO: 1078807 - RNA, 19 nt, Homo sapiens
  misc_RNA (1)...(19): siRNA sense strand
gaucgacgagguccugaaa

SEQ ID NO: 1078808 - RNA, 19 nt, Homo sapiens
  misc_RNA (1)...(19): siRNA sense strand
ugagaaaggcuaccagugu

SEQ ID NO: 1078809 - RNA, 19 nt, Homo sapiens
  misc_RNA (1)...(19): siRNA sense strand
cuacagggccagacgcuaa

SEQ ID NO: 1078810 - RNA, 19 nt, Homo sapiens
  misc_RNA (1)...(19): siRNA sense strand
ggacucagccggucuacag

SEQ ID NO: 1078811 - RNA, 19 nt, Homo sapiens
  misc_RNA (1)...(19): siRNA sense strand
ccacgccuguacaccauuu

SEQ ID NO: 1078812 - RNA, 19 nt, Homo sapiens
  misc_RNA (1)...(19): siRNA sense strand
ugaaugagcccuggaggaa

SEQ ID NO: 1078813 - RNA, 19 nt, Homo sapiens
  misc_RNA (1)...(19): siRNA sense strand
gcacgugagcggcuuggaa

SEQ ID NO: 1078814 - RNA, 19 nt, Homo sapiens
  misc_RNA (1)...(19): siRNA sense strand
aggcagacaugcuuugaug

SEQ ID NO: 1078815 - RNA, 19 nt, Homo sapiens
  misc_RNA (1)...(19): siRNA sense strand
gggaucaccuagcaaagca

SEQ ID NO: 1078816 - RNA, 19 nt, Homo sapiens
  misc_RNA (1)...(19): siRNA sense strand
ggauggcuguguuucagau

SEQ ID NO: 1078817 - RNA, 19 nt, Homo sapiens
  misc_RNA (1)...(19): siRNA sense strand
cagacaugcuuugaugaaa

SEQ ID NO: 1078818 - RNA, 19 nt, Homo sapiens
  misc_RNA (1)...(19): siRNA sense strand
ggacaaugaguuugaagag

SEQ ID NO: 1078819 - RNA, 19 nt, Homo sapiens
  misc_RNA (1)...(19): siRNA sense strand
gaaaggcuaccagugugaa

SEQ ID NO: 1078820 - RNA, 19 nt, Homo sapiens
  misc_RNA (1)...(19): siRNA sense strand
acgagguccugaaauacua

SEQ ID NO: 1078821 - RNA, 19 nt, Homo sapiens
  misc_RNA (1)...(19): siRNA sense strand
caccauuucugaaggauac

SEQ ID NO: 1078822 - RNA, 19 nt, Homo sapiens
  misc_RNA (1)...(19): siRNA sense strand
guucuugucuguggagugu

SEQ ID NO: 1078823 - RNA, 19 nt, Homo sapiens
  misc_RNA (1)...(19): siRNA sense strand
cagccacucuugccuugga

SEQ ID NO: 1078824 - RNA, 19 nt, Homo sapiens
  misc_RNA (1)...(19): siRNA sense strand
uguggugaaugacaagauu

SEQ ID NO: 1078825 - RNA, 19 nt, Homo sapiens
  misc_RNA (1)...(19): siRNA sense strand
aaugggaacugcugucucu

SEQ ID NO: 1078826 - RNA, 19 nt, Homo sapiens
  misc_RNA (1)...(19): siRNA sense strand
cuucaaggacaaugaguuu

SEQ ID NO: 1078827 - RNA, 19 nt, Homo sapiens
  misc_RNA (1)...(19): siRNA sense strand
ccuggaggcuacuaugugu

SEQ ID NO: 1078828 - RNA, 19 nt, Homo sapiens
  misc_RNA (1)...(19): siRNA sense strand
caacggcacccaugucaac

SEQ ID NO: 1078829 - RNA, 19 nt, Homo sapiens
  misc_RNA (1)...(19): siRNA sense strand
aaugagcccuggaggaaca

SEQ ID NO: 1078830 - RNA, 19 nt, Homo sapiens
  misc_RNA (1)...(19): siRNA sense strand
gucccugucuucaaguuug

SEQ ID NO: 1078831 - RNA, 19 nt, Homo sapiens
  misc_RNA (1)...(19): siRNA sense strand
ccuagaaggcgacggcauu

SEQ ID NO: 1078832 - RNA, 19 nt, Homo sapiens
  misc_RNA (1)...(19): siRNA sense strand
cuagauccuuguucugcuu

SEQ ID NO: 1078833 - RNA, 19 nt, Homo sapiens
  misc_RNA (1)...(19): siRNA sense strand
ggaaaucaugagccgaaau

SEQ ID NO: 1078834 - RNA, 19 nt, Homo sapiens
  misc_RNA (1)...(19): siRNA sense strand
cacaugcgcuccaggaacu

SEQ ID NO: 1078835 - RNA, 19 nt, Homo sapiens
  misc_RNA (1)...(19): siRNA sense strand
aacgguggcugcagugaga

SEQ ID NO: 1078836 - RNA, 19 nt, Homo sapiens
  misc_RNA (1)...(19): siRNA sense strand
gugacucccucuacuuugg

SEQ ID NO: 1078837 - RNA, 19 nt, Homo sapiens
  misc_RNA (1)...(19): siRNA sense strand
ggcccuagauccuuguucu

SEQ ID NO: 1078838 - RNA, 19 nt, Homo sapiens
  misc_RNA (1)...(19): siRNA sense strand
acucuugccuuggaucuga

SEQ ID NO: 1078839 - RNA, 19 nt, Homo sapiens
  misc_RNA (1)...(19): siRNA sense strand
ucaacauccucuucucucu

SEQ ID NO: 1078840 - RNA, 19 nt, Homo sapiens
  misc_RNA (1)...(19): siRNA sense strand
ucagaugacucgguaaagc

SEQ ID NO: 1078841 - RNA, 19 nt, Homo sapiens
  misc_RNA (1)...(19): siRNA sense strand
agacaugcuuugaugaaaa

SEQ ID NO: 1078842 - RNA, 19 nt, Homo sapiens
  misc_RNA (1)...(19): siRNA sense strand
gugguacaguggucgaugu

SEQ ID NO: 1078843 - RNA, 19 nt, Homo sapiens
  misc_RNA (1)...(19): siRNA sense strand
ugacaggcagacaugcuuu

SEQ ID NO: 1078844 - RNA, 19 nt, Homo sapiens
  misc_RNA (1)...(19): siRNA sense strand
cuucucaccugccucuuca

SEQ ID NO: 1078845 - RNA, 19 nt, Homo sapiens
  misc_RNA (1)...(19): siRNA sense strand
uggucgauguggugaauga

SEQ ID NO: 1078846 - RNA, 19 nt, Homo sapiens
  misc_RNA (1)...(19): siRNA sense strand
aacauccucuucucucuca

SEQ ID NO: 1078847 - RNA, 19 nt, Homo sapiens
  misc_RNA (1)...(19): siRNA sense strand
cacgugagcggcuuggaaa

SEQ ID NO: 1078848 - RNA, 19 nt, Homo sapiens
  misc_RNA (1)...(19): siRNA sense strand
ugaaggaugccacaauaac

SEQ ID NO: 1078849 - RNA, 19 nt, Homo sapiens
  misc_RNA (1)...(19): siRNA sense strand
ccugaaauacuaccucauc

SEQ ID NO: 1078850 - RNA, 19 nt, Homo sapiens
  misc_RNA (1)...(19): siRNA sense strand
ucgauguggugaaugacaa

SEQ ID NO: 1078851 - RNA, 19 nt, Homo sapiens
  misc_RNA (1)...(19): siRNA sense strand
gccgugugcuaagaaguga

SEQ ID NO: 1078852 - RNA, 19 nt, Homo sapiens
  misc_RNA (1)...(19): siRNA sense strand
cauucacucuggagaucuu

SEQ ID NO: 1078853 - RNA, 19 nt, Homo sapiens
  misc_RNA (1)...(19): siRNA sense strand
gccuguacaccauuucuga

SEQ ID NO: 1078854 - RNA, 19 nt, Homo sapiens
  misc_RNA (1)...(19): siRNA sense strand
ggaacugcugucucuggaa

SEQ ID NO: 1078855 - RNA, 19 nt, Homo sapiens
  misc_RNA (1)...(19): siRNA sense strand
gacgagguccugaaauacu

SEQ ID NO: 1078856 - RNA, 19 nt, Homo sapiens
  misc_RNA (1)...(19): siRNA sense strand
ucucaagguccuccucuau

SEQ ID NO: 1078857 - RNA, 19 nt, Homo sapiens
  misc_RNA (1)...(19): siRNA sense strand
gacaugcuuugaugaaaau

SEQ ID NO: 1078858 - RNA, 19 nt, Homo sapiens
  misc_RNA (1)...(19): siRNA sense strand
cgucuacuguggucauuuu

SEQ ID NO: 1078859 - RNA, 19 nt, Homo sapiens
  misc_RNA (1)...(19): siRNA sense strand
uacuauguguaucgucuga

SEQ ID NO: 1078860 - RNA, 19 nt, Homo sapiens
  misc_RNA (1)...(19): siRNA sense strand
gaccaccaguuggaugagu

SEQ ID NO: 1078861 - RNA, 19 nt, Homo sapiens
  misc_RNA (1)...(19): siRNA sense strand
agaccacaaggaaguguuu

SEQ ID NO: 1078862 - RNA, 19 nt, Homo sapiens
  misc_RNA (1)...(19): siRNA sense strand
ggagaugccaugccuaccu

SEQ ID NO: 1078863 - RNA, 19 nt, Homo sapiens
  misc_RNA (1)...(19): siRNA sense strand
agaaaggcuaccaguguga

SEQ ID NO: 1078864 - RNA, 19 nt, Homo sapiens
  misc_RNA (1)...(19): siRNA sense strand
aaggaugccacaauaacaa

SEQ ID NO: 1078865 - RNA, 19 nt, Homo sapiens
  misc_RNA (1)...(19): siRNA sense strand
aagaagugauggcaagacu

SEQ ID NO: 1078866 - RNA, 19 nt, Homo sapiens
  misc_RNA (1)...(19): siRNA sense strand
gguuggccgugugcuaaga

SEQ ID NO: 1078867 - RNA, 19 nt, Homo sapiens
  misc_RNA (1)...(19): siRNA sense strand
gaucugugugaaccucaaa

SEQ ID NO: 1078868 - RNA, 19 nt, Homo sapiens
  misc_RNA (1)...(19): siRNA sense strand
ccggugaccugcgaguuuc

SEQ ID NO: 1078869 - RNA, 19 nt, Homo sapiens
  misc_RNA (1)...(19): siRNA sense strand
gcacugccggguucuuguc

SEQ ID NO: 1078870 - RNA, 19 nt, Homo sapiens
  misc_RNA (1)...(19): siRNA sense strand
caaagaccacaaggaagug

SEQ ID NO: 1078871 - RNA, 19 nt, Homo sapiens
  misc_RNA (1)...(19): siRNA sense strand
gacaggcagacaugcuuug

SEQ ID NO: 1078872 - RNA, 19 nt, Homo sapiens
  misc_RNA (1)...(19): siRNA sense strand
ucuugucuguggaguguug

SEQ ID NO: 1078873 - RNA, 19 nt, Homo sapiens
  misc_RNA (1)...(19): siRNA sense strand
cagaugacucgguaaagca

SEQ ID NO: 1078874 - RNA, 19 nt, Homo sapiens
  misc_RNA (1)...(19): siRNA sense strand
gaucuucaaggacaaugag

SEQ ID NO: 1078875 - RNA, 19 nt, Homo sapiens
  misc_RNA (1)...(19): siRNA sense strand
ccgaaaucaugggaucuuc

SEQ ID NO: 1078876 - RNA, 19 nt, Homo sapiens
  misc_RNA (1)...(19): siRNA sense strand
gagcucuuccugaccaaca

SEQ ID NO: 1078877 - RNA, 19 nt, Homo sapiens
  misc_RNA (1)...(19): siRNA sense strand
agaaggcgacggcauugug

SEQ ID NO: 1078878 - RNA, 19 nt, Homo sapiens
  misc_RNA (1)...(19): siRNA sense strand
gcagaagccuuauuaauga

SEQ ID NO: 1078879 - RNA, 19 nt, Homo sapiens
  misc_RNA (1)...(19): siRNA sense strand
gaaaaucgcuucagcaauu

SEQ ID NO: 1078880 - RNA, 19 nt, Homo sapiens
  misc_RNA (1)...(19): siRNA sense strand
cccaacagcuuaugcauua

SEQ ID NO: 1078881 - RNA, 19 nt, Homo sapiens
  misc_RNA (1)...(19): siRNA sense strand
gcacuugcaucuauccuaa

SEQ ID NO: 1078882 - RNA, 19 nt, Homo sapiens
  misc_RNA (1)...(19): siRNA sense strand
gcaaacagaucaaacucaa

SEQ ID NO: 1078883 - RNA, 19 nt, Homo sapiens
  misc_RNA (1)...(19): siRNA sense strand
ggagaagcaugccaagaaa

SEQ ID NO: 1078884 - RNA, 19 nt, Homo sapiens
  misc_RNA (1)...(19): siRNA sense strand
aagaaugccuuucauguug

SEQ ID NO: 1078885 - RNA, 19 nt, Homo sapiens
  misc_RNA (1)...(19): siRNA sense strand
ggcagaagccuuauuaaug

SEQ ID NO: 1078886 - RNA, 19 nt, Homo sapiens
  misc_RNA (1)...(19): siRNA sense strand
gaaucuggcauaccuaauu

SEQ ID NO: 1078887 - RNA, 19 nt, Homo sapiens
  misc_RNA (1)...(19): siRNA sense strand
gcagaaggagucagauauu

SEQ ID NO: 1078888 - RNA, 19 nt, Homo sapiens
  misc_RNA (1)...(19): siRNA sense strand
gaacaucuuucagaguugu

SEQ ID NO: 1078889 - RNA, 19 nt, Homo sapiens
  misc_RNA (1)...(19): siRNA sense strand
gaaggagucagauauuguu

SEQ ID NO: 1078890 - RNA, 19 nt, Homo sapiens
  misc_RNA (1)...(19): siRNA sense strand
cagaaggagucagauauug

SEQ ID NO: 1078891 - RNA, 19 nt, Homo sapiens
  misc_RNA (1)...(19): siRNA sense strand
uuucagaguuguauccuaa

SEQ ID NO: 1078892 - RNA, 19 nt, Homo sapiens
  misc_RNA (1)...(19): siRNA sense strand
acagagacccaacagcuua

SEQ ID NO: 1078893 - RNA, 19 nt, Homo sapiens
  misc_RNA (1)...(19): siRNA sense strand
ggcccaaacucuuuauuag

SEQ ID NO: 1078894 - RNA, 19 nt, Homo sapiens
  misc_RNA (1)...(19): siRNA sense strand
aaucuggcauaccuaauuu

SEQ ID NO: 1078895 - RNA, 19 nt, Homo sapiens
  misc_RNA (1)...(19): siRNA sense strand
gaaacuauggcuaaauuac

SEQ ID NO: 1078896 - RNA, 19 nt, Homo sapiens
  misc_RNA (1)...(19): siRNA sense strand
cagcaucguugcagaauac

SEQ ID NO: 1078897 - RNA, 19 nt, Homo sapiens
  misc_RNA (1)...(19): siRNA sense strand
agucagauauuguucucua

SEQ ID NO: 1078898 - RNA, 19 nt, Homo sapiens
  misc_RNA (1)...(19): siRNA sense strand
ugcauuagcugaacaucuu

SEQ ID NO: 1078899 - RNA, 19 nt, Homo sapiens
  misc_RNA (1)...(19): siRNA sense strand
caucuauccuaagaacaua

SEQ ID NO: 1078900 - RNA, 19 nt, Homo sapiens
  misc_RNA (1)...(19): siRNA sense strand
gcaacuugauacuccugaa

SEQ ID NO: 1078901 - RNA, 19 nt, Homo sapiens
  misc_RNA (1)...(19): siRNA sense strand
ggagucagauauuguucuc

SEQ ID NO: 1078902 - RNA, 19 nt, Homo sapiens
  misc_RNA (1)...(19): siRNA sense strand
cagaagccuuauuaaugaa

SEQ ID NO: 1078903 - RNA, 19 nt, Homo sapiens
  misc_RNA (1)...(19): siRNA sense strand
ccagcaucguugcagaaua

SEQ ID NO: 1078904 - RNA, 19 nt, Homo sapiens
  misc_RNA (1)...(19): siRNA sense strand
cuaaacaaauccgagcuau

SEQ ID NO: 1078905 - RNA, 19 nt, Homo sapiens
  misc_RNA (1)...(19): siRNA sense strand
caacaggcacuugcaucua

SEQ ID NO: 1078906 - RNA, 19 nt, Homo sapiens
  misc_RNA (1)...(19): siRNA sense strand
gcccacugcugcugauguu

SEQ ID NO: 1078907 - RNA, 19 nt, Homo sapiens
  misc_RNA (1)...(19): siRNA sense strand
ugugaaugcuuuagaucaa

SEQ ID NO: 1078908 - RNA, 19 nt, Homo sapiens
  misc_RNA (1)...(19): siRNA sense strand
aaacaaauccgagcuaugc

SEQ ID NO: 1078909 - RNA, 19 nt, Homo sapiens
  misc_RNA (1)...(19): siRNA sense strand
ccaguggcccaaacucuuu

SEQ ID NO: 1078910 - RNA, 19 nt, Homo sapiens
  misc_RNA (1)...(19): siRNA sense strand
gcaucuauccuaagaacau

SEQ ID NO: 1078911 - RNA, 19 nt, Homo sapiens
  misc_RNA (1)...(19): siRNA sense strand
aacaggcacuugcaucuau

SEQ ID NO: 1078912 - RNA, 19 nt, Homo sapiens
  misc_RNA (1)...(19): siRNA sense strand
caacuugauacuccugaaa

SEQ ID NO: 1078913 - RNA, 19 nt, Homo sapiens
  misc_RNA (1)...(19): siRNA sense strand
aaugguggaugaaguuguu

SEQ ID NO: 1078914 - RNA, 19 nt, Homo sapiens
  misc_RNA (1)...(19): siRNA sense strand
gaaguuguucauuguuugu

SEQ ID NO: 1078915 - RNA, 19 nt, Homo sapiens
  misc_RNA (1)...(19): siRNA sense strand
uggcccaaacucuuuauua

SEQ ID NO: 1078916 - RNA, 19 nt, Homo sapiens
  misc_RNA (1)...(19): siRNA sense strand
gaacauacggggaggagaa

SEQ ID NO: 1078917 - RNA, 19 nt, Homo sapiens
  misc_RNA (1)...(19): siRNA sense strand
gaauggaugguggcaggua

SEQ ID NO: 1078918 - RNA, 19 nt, Homo sapiens
  misc_RNA (1)...(19): siRNA sense strand
gcccaggaguuacacagau

SEQ ID NO: 1078919 - RNA, 19 nt, Homo sapiens
  misc_RNA (1)...(19): siRNA sense strand
gaagccuuauuaaugaaag

SEQ ID NO: 1078920 - RNA, 19 nt, Homo sapiens
  misc_RNA (1)...(19): siRNA sense strand
ugauggaguucuuauggau

SEQ ID NO: 1078921 - RNA, 19 nt, Homo sapiens
  misc_RNA (1)...(19): siRNA sense strand
cuagauaugacauuugguu

SEQ ID NO: 1078922 - RNA, 19 nt, Homo sapiens
  misc_RNA (1)...(19): siRNA sense strand
ggagcaaacagaucaaacu

SEQ ID NO: 1078923 - RNA, 19 nt, Homo sapiens
  misc_RNA (1)...(19): siRNA sense strand
ggaguuacacagaucucaa

SEQ ID NO: 1078924 - RNA, 19 nt, Homo sapiens
  misc_RNA (1)...(19): siRNA sense strand
aggagaagcaugccaagaa

SEQ ID NO: 1078925 - RNA, 19 nt, Homo sapiens
  misc_RNA (1)...(19): siRNA sense strand
gacagagacccaacagcuu

SEQ ID NO: 1078926 - RNA, 19 nt, Homo sapiens
  misc_RNA (1)...(19): siRNA sense strand
guuccuccaugcaacuuga

SEQ ID NO: 1078927 - RNA, 19 nt, Homo sapiens
  misc_RNA (1)...(19): siRNA sense strand
ugaaugcuuuagaucaaca

SEQ ID NO: 1078928 - RNA, 19 nt, Homo sapiens
  misc_RNA (1)...(19): siRNA sense strand
gagcaaacagaucaaacuc

SEQ ID NO: 1078929 - RNA, 19 nt, Homo sapiens
  misc_RNA (1)...(19): siRNA sense strand
cagauauuguucucuaugc

SEQ ID NO: 1078930 - RNA, 19 nt, Homo sapiens
  misc_RNA (1)...(19): siRNA sense strand
uuauggaucuuggguguuc

SEQ ID NO: 1078931 - RNA, 19 nt, Homo sapiens
  misc_RNA (1)...(19): siRNA sense strand
gagugcagccaggaacuuu

SEQ ID NO: 1078932 - RNA, 19 nt, Homo sapiens
  misc_RNA (1)...(19): siRNA sense strand
guuggaaucuggcauaccu

SEQ ID NO: 1078933 - RNA, 19 nt, Homo sapiens
  misc_RNA (1)...(19): siRNA sense strand
gaaugccuuucauguuggu

SEQ ID NO: 1078934 - RNA, 19 nt, Homo sapiens
  misc_RNA (1)...(19): siRNA sense strand
cugauguugugaaugcuuu

SEQ ID NO: 1078935 - RNA, 19 nt, Homo sapiens
  misc_RNA (1)...(19): siRNA sense strand
gccaggaacuuuugaugga

SEQ ID NO: 1078936 - RNA, 19 nt, Homo sapiens
  misc_RNA (1)...(19): siRNA sense strand
uaaacaaauccgagcuaug

SEQ ID NO: 1078937 - RNA, 19 nt, Homo sapiens
  misc_RNA (1)...(19): siRNA sense strand
cugcugauguugugaaugc

SEQ ID NO: 1078938 - RNA, 19 nt, Homo sapiens
  misc_RNA (1)...(19): siRNA sense strand
agaaggagucagauauugu

SEQ ID NO: 1078939 - RNA, 19 nt, Homo sapiens
  misc_RNA (1)...(19): siRNA sense strand
gcagcuugccagcaucguu

SEQ ID NO: 1078940 - RNA, 19 nt, Homo sapiens
  misc_RNA (1)...(19): siRNA sense strand
gaggagaagcaugccaaga

SEQ ID NO: 1078941 - RNA, 19 nt, Homo sapiens
  misc_RNA (1)...(19): siRNA sense strand
caguaaugguggaugaagu

SEQ ID NO: 1078942 - RNA, 19 nt, Homo sapiens
  misc_RNA (1)...(19): siRNA sense strand
gcauuagcugaacaucuuu

SEQ ID NO: 1078943 - RNA, 19 nt, Homo sapiens
  misc_RNA (1)...(19): siRNA sense strand
cugcagaaggagucagaua

SEQ ID NO: 1078944 - RNA, 19 nt, Homo sapiens
  misc_RNA (1)...(19): siRNA sense strand
gaucaacaggcacuugcau

SEQ ID NO: 1078945 - RNA, 19 nt, Homo sapiens
  misc_RNA (1)...(19): siRNA sense strand
ccuaaacaaauccgagcua

SEQ ID NO: 1078946 - RNA, 19 nt, Homo sapiens
  misc_RNA (1)...(19): siRNA sense strand
ucagauauuguucucuaug

SEQ ID NO: 1078947 - RNA, 19 nt, Homo sapiens
  misc_RNA (1)...(19): siRNA sense strand
ccacugcugcugauguugu

SEQ ID NO: 1078948 - RNA, 19 nt, Homo sapiens
  misc_RNA (1)...(19): siRNA sense strand
gucagauauuguucucuau

SEQ ID NO: 1078949 - RNA, 19 nt, Homo sapiens
  misc_RNA (1)...(19): siRNA sense strand
ggagugcagccaggaacuu

SEQ ID NO: 1078950 - RNA, 19 nt, Homo sapiens
  misc_RNA (1)...(19): siRNA sense strand
uggaaucuggcauaccuaa

SEQ ID NO: 1078951 - RNA, 19 nt, Homo sapiens
  misc_RNA (1)...(19): siRNA sense strand
ucuaugccuuggacagaga

SEQ ID NO: 1078952 - RNA, 19 nt, Homo sapiens
  misc_RNA (1)...(19): siRNA sense strand
ucagaguuguauccuaaac

SEQ ID NO: 1078953 - RNA, 19 nt, Homo sapiens
  misc_RNA (1)...(19): siRNA sense strand
cccagcagcuugccagcau

SEQ ID NO: 1078954 - RNA, 19 nt, Homo sapiens
  misc_RNA (1)...(19): siRNA sense strand
aauacauacuacagcagaa

SEQ ID NO: 1078955 - RNA, 19 nt, Homo sapiens
  misc_RNA (1)...(19): siRNA sense strand
ggaguucuuauggaucuug

SEQ ID NO: 1078956 - RNA, 19 nt, Homo sapiens
  misc_RNA (1)...(19): siRNA sense strand
ggaaucuggcauaccuaau

SEQ ID NO: 1078957 - RNA, 19 nt, Homo sapiens
  misc_RNA (1)...(19): siRNA sense strand
acuugcaucuauccuaaga

SEQ ID NO: 1078958 - RNA, 19 nt, Homo sapiens
  misc_RNA (1)...(19): siRNA sense strand
uugauggaguucuuaugga

SEQ ID NO: 1078959 - RNA, 19 nt, Homo sapiens
  misc_RNA (1)...(19): siRNA sense strand
acaaacaccugugccaaga

SEQ ID NO: 1078960 - RNA, 19 nt, Homo sapiens
  misc_RNA (1)...(19): siRNA sense strand
gccaagaccugagcuucug

SEQ ID NO: 1078961 - RNA, 19 nt, Homo sapiens
  misc_RNA (1)...(19): siRNA sense strand
ucagcggccuccuuaaugc

SEQ ID NO: 1078962 - RNA, 19 nt, Homo sapiens
  misc_RNA (1)...(19): siRNA sense strand
ccucagcggccuccuuaau

SEQ ID NO: 1078963 - RNA, 19 nt, Homo sapiens
  misc_RNA (1)...(19): siRNA sense strand
gucaauccaggacuacaaa

SEQ ID NO: 1078964 - RNA, 19 nt, Homo sapiens
  misc_RNA (1)...(19): siRNA sense strand
ugacagagcugaagacuua

SEQ ID NO: 1078965 - RNA, 19 nt, Homo sapiens
  misc_RNA (1)...(19): siRNA sense strand
gaaacgagcuauagaaaca

SEQ ID NO: 1078966 - RNA, 19 nt, Homo sapiens
  misc_RNA (1)...(19): siRNA sense strand
gguauaauauggagaaaga

SEQ ID NO: 1078967 - RNA, 19 nt, Homo sapiens
  misc_RNA (1)...(19): siRNA sense strand
cagaggagcuacuugauga

SEQ ID NO: 1078968 - RNA, 19 nt, Homo sapiens
  misc_RNA (1)...(19): siRNA sense strand
gugagaaacuggacaaaga

SEQ ID NO: 1078969 - RNA, 19 nt, Homo sapiens
  misc_RNA (1)...(19): siRNA sense strand
gcuaucagcugaagaaagu

SEQ ID NO: 1078970 - RNA, 19 nt, Homo sapiens
  misc_RNA (1)...(19): siRNA sense strand
ccaagcaguucuucacuuu

SEQ ID NO: 1078971 - RNA, 19 nt, Homo sapiens
  misc_RNA (1)...(19): siRNA sense strand
caacuuugauguagauguu

SEQ ID NO: 1078972 - RNA, 19 nt, Homo sapiens
  misc_RNA (1)...(19): siRNA sense strand
ggaauuaagcaaaguagaa

SEQ ID NO: 1078973 - RNA, 19 nt, Homo sapiens
  misc_RNA (1)...(19): siRNA sense strand
uaucaccacuugcaacuuu

SEQ ID NO: 1078974 - RNA, 19 nt, Homo sapiens
  misc_RNA (1)...(19): siRNA sense strand
ucacauauuuccuguuguu

SEQ ID NO: 1078975 - RNA, 19 nt, Homo sapiens
  misc_RNA (1)...(19): siRNA sense strand
gaagagaccaguugaacga

SEQ ID NO: 1078976 - RNA, 19 nt, Homo sapiens
  misc_RNA (1)...(19): siRNA sense strand
gaaugaagauggaaaagaa

SEQ ID NO: 1078977 - RNA, 19 nt, Homo sapiens
  misc_RNA (1)...(19): siRNA sense strand
auaauacccuggaugauaa

SEQ ID NO: 1078978 - RNA, 19 nt, Homo sapiens
  misc_RNA (1)...(19): siRNA sense strand
ugauguagauguugauuug

SEQ ID NO: 1078979 - RNA, 19 nt, Homo sapiens
  misc_RNA (1)...(19): siRNA sense strand
gaagagauuuauugaacuc

SEQ ID NO: 1078980 - RNA, 19 nt, Homo sapiens
  misc_RNA (1)...(19): siRNA sense strand
cagaagagauuuauugaac

SEQ ID NO: 1078981 - RNA, 19 nt, Homo sapiens
  misc_RNA (1)...(19): siRNA sense strand
ggagcuacuugaugaagaa

SEQ ID NO: 1078982 - RNA, 19 nt, Homo sapiens
  misc_RNA (1)...(19): siRNA sense strand
aagcagaggcuauacuuua

SEQ ID NO: 1078983 - RNA, 19 nt, Homo sapiens
  misc_RNA (1)...(19): siRNA sense strand
cuagacagacgguauaaua

SEQ ID NO: 1078984 - RNA, 19 nt, Homo sapiens
  misc_RNA (1)...(19): siRNA sense strand
ggcaggagauauggauuua

SEQ ID NO: 1078985 - RNA, 19 nt, Homo sapiens
  misc_RNA (1)...(19): siRNA sense strand
gaagcagucugagcuauca

SEQ ID NO: 1078986 - RNA, 19 nt, Homo sapiens
  misc_RNA (1)...(19): siRNA sense strand
gugccgagcuaauacagua

SEQ ID NO: 1078987 - RNA, 19 nt, Homo sapiens
  misc_RNA (1)...(19): siRNA sense strand
caagauacguuuacuacag

SEQ ID NO: 1078988 - RNA, 19 nt, Homo sapiens
  misc_RNA (1)...(19): siRNA sense strand
gaacucuaccgccagauuu

SEQ ID NO: 1078989 - RNA, 19 nt, Homo sapiens
  misc_RNA (1)...(19): siRNA sense strand
gaagagaugggugacuaua

SEQ ID NO: 1078990 - RNA, 19 nt, Homo sapiens
  misc_RNA (1)...(19): siRNA sense strand
uauaauacccuggaugaua

SEQ ID NO: 1078991 - RNA, 19 nt, Homo sapiens
  misc_RNA (1)...(19): siRNA sense strand
ggagaaggcugaggacaag

SEQ ID NO: 1078992 - RNA, 19 nt, Homo sapiens
  misc_RNA (1)...(19): siRNA sense strand
gaaggaauuaagcaaagua

SEQ ID NO: 1078993 - RNA, 19 nt, Homo sapiens
  misc_RNA (1)...(19): siRNA sense strand
ugaagaaucucgaauccau

SEQ ID NO: 1078994 - RNA, 19 nt, Homo sapiens
  misc_RNA (1)...(19): siRNA sense strand
caagaaaacucuacgauag

SEQ ID NO: 1078995 - RNA, 19 nt, Homo sapiens
  misc_RNA (1)...(19): siRNA sense strand
gagcagaggagcuacuuga

SEQ ID NO: 1078996 - RNA, 19 nt, Homo sapiens
  misc_RNA (1)...(19): siRNA sense strand
gaagauagaauccaaagcu

SEQ ID NO: 1078997 - RNA, 19 nt, Homo sapiens
  misc_RNA (1)...(19): siRNA sense strand
ugaccaagaugaccgcuau

SEQ ID NO: 1078998 - RNA, 19 nt, Homo sapiens
  misc_RNA (1)...(19): siRNA sense strand
gucaagaacaggaauuuaa

SEQ ID NO: 1078999 - RNA, 19 nt, Homo sapiens
  misc_RNA (1)...(19): siRNA sense strand
aagaagagaugggugacua

SEQ ID NO: 1079000 - RNA, 19 nt, Homo sapiens
  misc_RNA (1)...(19): siRNA sense strand
gcaagcagcccucgagaag

SEQ ID NO: 1079001 - RNA, 19 nt, Homo sapiens
  misc_RNA (1)...(19): siRNA sense strand
ugaccgcuauggcaaauga

SEQ ID NO: 1079002 - RNA, 19 nt, Homo sapiens
  misc_RNA (1)...(19): siRNA sense strand
gagaagcagucugagcuau

SEQ ID NO: 1079003 - RNA, 19 nt, Homo sapiens
  misc_RNA (1)...(19): siRNA sense strand
gaaccugagagcacuugua

SEQ ID NO: 1079004 - RNA, 19 nt, Homo sapiens
  misc_RNA (1)...(19): siRNA sense strand
gaacagauuguggaaggaa

SEQ ID NO: 1079005 - RNA, 19 nt, Homo sapiens
  misc_RNA (1)...(19): siRNA sense strand
aagcaguucuucacuuuau

SEQ ID NO: 1079006 - RNA, 19 nt, Homo sapiens
  misc_RNA (1)...(19): siRNA sense strand
gaagagcagcguauucagu

SEQ ID NO: 1079007 - RNA, 19 nt, Homo sapiens
  misc_RNA (1)...(19): siRNA sense strand
ggaaggaauuaagcaaagu

SEQ ID NO: 1079008 - RNA, 19 nt, Homo sapiens
  misc_RNA (1)...(19): siRNA sense strand
gacagacgguauaauaugg

SEQ ID NO: 1079009 - RNA, 19 nt, Homo sapiens
  misc_RNA (1)...(19): siRNA sense strand
ugacgaagaccuagacaga

SEQ ID NO: 1079010 - RNA, 19 nt, Homo sapiens
  misc_RNA (1)...(19): siRNA sense strand
cuacaucgccggaaaguca

SEQ ID NO: 1079011 - RNA, 19 nt, Homo sapiens
  misc_RNA (1)...(19): siRNA sense strand
ggacucugcucugcugaga

SEQ ID NO: 1079012 - RNA, 19 nt, Homo sapiens
  misc_RNA (1)...(19): siRNA sense strand
gcagaggagcuacuugaug

SEQ ID NO: 1079013 - RNA, 19 nt, Homo sapiens
  misc_RNA (1)...(19): siRNA sense strand
cagaggcuauacuuuaaga

SEQ ID NO: 1079014 - RNA, 19 nt, Homo sapiens
  misc_RNA (1)...(19): siRNA sense strand
gagaaacuuuacaagauac

SEQ ID NO: 1079015 - RNA, 19 nt, Homo sapiens
  misc_RNA (1)...(19): siRNA sense strand
ugacacgacuacagcaaga

SEQ ID NO: 1079016 - RNA, 19 nt, Homo sapiens
  misc_RNA (1)...(19): siRNA sense strand
gauauaaugaagccaagaa

SEQ ID NO: 1079017 - RNA, 19 nt, Homo sapiens
  misc_RNA (1)...(19): siRNA sense strand
cuacaagccagauauaaug

SEQ ID NO: 1079018 - RNA, 19 nt, Homo sapiens
  misc_RNA (1)...(19): siRNA sense strand
acaaagaaaccaagcaguu

SEQ ID NO: 1079019 - RNA, 19 nt, Homo sapiens
  misc_RNA (1)...(19): siRNA sense strand
agagaugggugacuauauc

SEQ ID NO: 1079020 - RNA, 19 nt, Homo sapiens
  misc_RNA (1)...(19): siRNA sense strand
uuaagacugugaaagaguu

SEQ ID NO: 1079021 - RNA, 19 nt, Homo sapiens
  misc_RNA (1)...(19): siRNA sense strand
uauauaauacccuggauga

SEQ ID NO: 1079022 - RNA, 19 nt, Homo sapiens
  misc_RNA (1)...(19): siRNA sense strand
gaaacuggacaaagagcaa

SEQ ID NO: 1079023 - RNA, 19 nt, Homo sapiens
  misc_RNA (1)...(19): siRNA sense strand
aaaguagaaugaagaugga

SEQ ID NO: 1079024 - RNA, 19 nt, Homo sapiens
  misc_RNA (1)...(19): siRNA sense strand
gaugaagaaucucgaaucc

SEQ ID NO: 1079025 - RNA, 19 nt, Homo sapiens
  misc_RNA (1)...(19): siRNA sense strand
caaagaaaccaagcaguuc

SEQ ID NO: 1079026 - RNA, 19 nt, Homo sapiens
  misc_RNA (1)...(19): siRNA sense strand
ggugaaacgagcuauagaa

SEQ ID NO: 1079027 - RNA, 19 nt, Homo sapiens
  misc_RNA (1)...(19): siRNA sense strand
gaagaaaucgagaaauagc

SEQ ID NO: 1079028 - RNA, 19 nt, Homo sapiens
  misc_RNA (1)...(19): siRNA sense strand
aagcagcccucgagaagau

SEQ ID NO: 1079029 - RNA, 19 nt, Homo sapiens
  misc_RNA (1)...(19): siRNA sense strand
gugaaacgagcuauagaaa

SEQ ID NO: 1079030 - RNA, 19 nt, Homo sapiens
  misc_RNA (1)...(19): siRNA sense strand
gcacuuguagccaugaaug

SEQ ID NO: 1079031 - RNA, 19 nt, Homo sapiens
  misc_RNA (1)...(19): siRNA sense strand
agcagaggcuauacuuuaa

SEQ ID NO: 1079032 - RNA, 19 nt, Homo sapiens
  misc_RNA (1)...(19): siRNA sense strand
gaccuagacagacgguaua

SEQ ID NO: 1079033 - RNA, 19 nt, Homo sapiens
  misc_RNA (1)...(19): siRNA sense strand
gaugaccgcuauggcaaau

SEQ ID NO: 1079034 - RNA, 19 nt, Homo sapiens
  misc_RNA (1)...(19): siRNA sense strand
gcaguucuucacuuuauau

SEQ ID NO: 1079035 - RNA, 19 nt, Homo sapiens
  misc_RNA (1)...(19): siRNA sense strand
acaaacagauugcgcaaaa

SEQ ID NO: 1079036 - RNA, 19 nt, Homo sapiens
  misc_RNA (1)...(19): siRNA sense strand
ccagcuacaucgccggaaa

SEQ ID NO: 1079037 - RNA, 19 nt, Homo sapiens
  misc_RNA (1)...(19): siRNA sense strand
gauguugauuugcucuuuc

SEQ ID NO: 1079038 - RNA, 19 nt, Homo sapiens
  misc_RNA (1)...(19): siRNA sense strand
gcugagaucaagcagauug

SEQ ID NO: 1079039 - RNA, 19 nt, Homo sapiens
  misc_RNA (1)...(19): siRNA sense strand
gauagaauccaaagcugau

SEQ ID NO: 1079040 - RNA, 19 nt, Homo sapiens
  misc_RNA (1)...(19): siRNA sense strand
ccaaagcugauccaaguau

SEQ ID NO: 1079041 - RNA, 19 nt, Homo sapiens
  misc_RNA (1)...(19): siRNA sense strand
caagccagauauaaugaag

SEQ ID NO: 1079042 - RNA, 19 nt, Homo sapiens
  misc_RNA (1)...(19): siRNA sense strand
caagcaguucuucacuuua

SEQ ID NO: 1079043 - RNA, 19 nt, Homo sapiens
  misc_RNA (1)...(19): siRNA sense strand
gaagacuuacagugagaaa

SEQ ID NO: 1079044 - RNA, 19 nt, Homo sapiens
  misc_RNA (1)...(19): siRNA sense strand
gcuacuugaugaagaaucu

SEQ ID NO: 1079045 - RNA, 19 nt, Homo sapiens
  misc_RNA (1)...(19): siRNA sense strand
caaagcugauccaaguauc

SEQ ID NO: 1079046 - RNA, 19 nt, Homo sapiens
  misc_RNA (1)...(19): siRNA sense strand
ucgagaagauagaauccaa

SEQ ID NO: 1079047 - RNA, 19 nt, Homo sapiens
  misc_RNA (1)...(19): siRNA sense strand
gaaucucgaauccaugcua

SEQ ID NO: 1079048 - RNA, 19 nt, Homo sapiens
  misc_RNA (1)...(19): siRNA sense strand
ggaacagauuguggaagga

SEQ ID NO: 1079049 - RNA, 19 nt, Homo sapiens
  misc_RNA (1)...(19): siRNA sense strand
gagauuuauugaacucuac

SEQ ID NO: 1079050 - RNA, 19 nt, Homo sapiens
  misc_RNA (1)...(19): siRNA sense strand
agacagacgguauaauaug

SEQ ID NO: 1079051 - RNA, 19 nt, Homo sapiens
  misc_RNA (1)...(19): siRNA sense strand
gaauuuaaagcacauuguc

SEQ ID NO: 1079052 - RNA, 19 nt, Homo sapiens
  misc_RNA (1)...(19): siRNA sense strand
gaaaagaaaaggccaucaa

SEQ ID NO: 1079053 - RNA, 19 nt, Homo sapiens
  misc_RNA (1)...(19): siRNA sense strand
guacuuggagcuguuagaa

SEQ ID NO: 1079054 - RNA, 19 nt, Homo sapiens
  misc_RNA (1)...(19): siRNA sense strand
gagaagagaccaguugaac

SEQ ID NO: 1079055 - RNA, 19 nt, Homo sapiens
  misc_RNA (1)...(19): siRNA sense strand
uaagcaaaguagaaugaag

SEQ ID NO: 1079056 - RNA, 19 nt, Homo sapiens
  misc_RNA (1)...(19): siRNA sense strand
auucacauauuuccuguug

SEQ ID NO: 1079057 - RNA, 19 nt, Homo sapiens
  misc_RNA (1)...(19): siRNA sense strand
uuucagcagugcacaaaga

SEQ ID NO: 1079058 - RNA, 19 nt, Homo sapiens
  misc_RNA (1)...(19): siRNA sense strand
gagaagauagaauccaaag

SEQ ID NO: 1079059 - RNA, 19 nt, Homo sapiens
  misc_RNA (1)...(19): siRNA sense strand
gaaggcugaggacaagaaa

SEQ ID NO: 1079060 - RNA, 19 nt, Homo sapiens
  misc_RNA (1)...(19): siRNA sense strand
gauccaaguauccuacaga

SEQ ID NO: 1079061 - RNA, 19 nt, Homo sapiens
  misc_RNA (1)...(19): siRNA sense strand
ggcuauacuuuaagacugu

SEQ ID NO: 1079062 - RNA, 19 nt, Homo sapiens
  misc_RNA (1)...(19): siRNA sense strand
uacaguaucagaagagauu

SEQ ID NO: 1079063 - RNA, 19 nt, Homo sapiens
  misc_RNA (1)...(19): siRNA sense strand
gagcacuuguagccaugaa

SEQ ID NO: 1079064 - RNA, 19 nt, Homo sapiens
  misc_RNA (1)...(19): siRNA sense strand
ggaugaagcuggaaauaaa

SEQ ID NO: 1079065 - RNA, 19 nt, Homo sapiens
  misc_RNA (1)...(19): siRNA sense strand
gcagacauguacaacuuua

SEQ ID NO: 1079066 - RNA, 19 nt, Homo sapiens
  misc_RNA (1)...(19): siRNA sense strand
aaacagaaguccuuaguga

SEQ ID NO: 1079067 - RNA, 19 nt, Homo sapiens
  misc_RNA (1)...(19): siRNA sense strand
ggaauugccugaaccuuug

SEQ ID NO: 1079068 - RNA, 19 nt, Homo sapiens
  misc_RNA (1)...(19): siRNA sense strand
gaaccaagcucacaaaucc

SEQ ID NO: 1079069 - RNA, 19 nt, Homo sapiens
  misc_RNA (1)...(19): siRNA sense strand
gggagcagcuugcaagauu

SEQ ID NO: 1079070 - RNA, 19 nt, Homo sapiens
  misc_RNA (1)...(19): siRNA sense strand
cugaagagguggaauuuaa

SEQ ID NO: 1079071 - RNA, 19 nt, Homo sapiens
  misc_RNA (1)...(19): siRNA sense strand
gaaggagacuuggugaaga

SEQ ID NO: 1079072 - RNA, 19 nt, Homo sapiens
  misc_RNA (1)...(19): siRNA sense strand
ccaagcagauuaccauaga

SEQ ID NO: 1079073 - RNA, 19 nt, Homo sapiens
  misc_RNA (1)...(19): siRNA sense strand
cagcagacauguacaacuu

SEQ ID NO: 1079074 - RNA, 19 nt, Homo sapiens
  misc_RNA (1)...(19): siRNA sense strand
cgagagcacugcccuguga

SEQ ID NO: 1079075 - RNA, 19 nt, Homo sapiens
  misc_RNA (1)...(19): siRNA sense strand
gagaacaugucagaaguug

SEQ ID NO: 1079076 - RNA, 19 nt, Homo sapiens
  misc_RNA (1)...(19): siRNA sense strand
gagguggaauuuaauguau

SEQ ID NO: 1079077 - RNA, 19 nt, Homo sapiens
  misc_RNA (1)...(19): siRNA sense strand
gaccagcgaugugaauaaa

SEQ ID NO: 1079078 - RNA, 19 nt, Homo sapiens
  misc_RNA (1)...(19): siRNA sense strand
accaacagcuuccaagaua

SEQ ID NO: 1079079 - RNA, 19 nt, Homo sapiens
  misc_RNA (1)...(19): siRNA sense strand
gagaaacaacagucagaua

SEQ ID NO: 1079080 - RNA, 19 nt, Homo sapiens
  misc_RNA (1)...(19): siRNA sense strand
caagauaagugggcggaaa

SEQ ID NO: 1079081 - RNA, 19 nt, Homo sapiens
  misc_RNA (1)...(19): siRNA sense strand
gcaugaagcagcuggcuaa

SEQ ID NO: 1079082 - RNA, 19 nt, Homo sapiens
  misc_RNA (1)...(19): siRNA sense strand
ggccagaguucuucaggaa

SEQ ID NO: 1079083 - RNA, 19 nt, Homo sapiens
  misc_RNA (1)...(19): siRNA sense strand
gaagaauggacacaaguug

SEQ ID NO: 1079084 - RNA, 19 nt, Homo sapiens
  misc_RNA (1)...(19): siRNA sense strand
gaaggaacacuugcugaaa

SEQ ID NO: 1079085 - RNA, 19 nt, Homo sapiens
  misc_RNA (1)...(19): siRNA sense strand
gaaaagacccuccccgaaa

SEQ ID NO: 1079086 - RNA, 19 nt, Homo sapiens
  misc_RNA (1)...(19): siRNA sense strand
gggaauugccugaaccuuu

SEQ ID NO: 1079087 - RNA, 19 nt, Homo sapiens
  misc_RNA (1)...(19): siRNA sense strand
gccacaugcuggaaccuua

SEQ ID NO: 1079088 - RNA, 19 nt, Homo sapiens
  misc_RNA (1)...(19): siRNA sense strand
gaagagguggaauuuaaug

SEQ ID NO: 1079089 - RNA, 19 nt, Homo sapiens
  misc_RNA (1)...(19): siRNA sense strand
uaaaggaagagauggauga

SEQ ID NO: 1079090 - RNA, 19 nt, Homo sapiens
  misc_RNA (1)...(19): siRNA sense strand
ugaagcagcuggcuaacca

SEQ ID NO: 1079091 - RNA, 19 nt, Homo sapiens
  misc_RNA (1)...(19): siRNA sense strand
cagcuugucuccaauccaa

SEQ ID NO: 1079092 - RNA, 19 nt, Homo sapiens
  misc_RNA (1)...(19): siRNA sense strand
ggaguauggcaaauucuuu

SEQ ID NO: 1079093 - RNA, 19 nt, Homo sapiens
  misc_RNA (1)...(19): siRNA sense strand
gauaguaacagacuccaau

SEQ ID NO: 1079094 - RNA, 19 nt, Homo sapiens
  misc_RNA (1)...(19): siRNA sense strand
gguggaauuuaauguauca

SEQ ID NO: 1079095 - RNA, 19 nt, Homo sapiens
  misc_RNA (1)...(19): siRNA sense strand
agauugcgcugcccauuga

SEQ ID NO: 1079096 - RNA, 19 nt, Homo sapiens
  misc_RNA (1)...(19): siRNA sense strand
gagacuuggugaagaagga

SEQ ID NO: 1079097 - RNA, 19 nt, Homo sapiens
  misc_RNA (1)...(19): siRNA sense strand
ugacagcucuugcucaaaa

SEQ ID NO: 1079098 - RNA, 19 nt, Homo sapiens
  misc_RNA (1)...(19): siRNA sense strand
acacugcgccgagcuguua

SEQ ID NO: 1079099 - RNA, 19 nt, Homo sapiens
  misc_RNA (1)...(19): siRNA sense strand
uggaugaguucuauucaga

SEQ ID NO: 1079100 - RNA, 19 nt, Homo sapiens
  misc_RNA (1)...(19): siRNA sense strand
gcuuuggacuguucuacuu

SEQ ID NO: 1079101 - RNA, 19 nt, Homo sapiens
  misc_RNA (1)...(19): siRNA sense strand
gaaaugcgagcccaucaag

SEQ ID NO: 1079102 - RNA, 19 nt, Homo sapiens
  misc_RNA (1)...(19): siRNA sense strand
ggagcagcuugcaagauug

SEQ ID NO: 1079103 - RNA, 19 nt, Homo sapiens
  misc_RNA (1)...(19): siRNA sense strand
ggaaauaaaguagaacagu

SEQ ID NO: 1079104 - RNA, 19 nt, Homo sapiens
  misc_RNA (1)...(19): siRNA sense strand
gauagcaucuggccaaaau

SEQ ID NO: 1079105 - RNA, 19 nt, Homo sapiens
  misc_RNA (1)...(19): siRNA sense strand
gagaggaagcggccugcua

SEQ ID NO: 1079106 - RNA, 19 nt, Homo sapiens
  misc_RNA (1)...(19): siRNA sense strand
uagaagcccaagcagauua

SEQ ID NO: 1079107 - RNA, 19 nt, Homo sapiens
  misc_RNA (1)...(19): siRNA sense strand
aaggaacacuugcugaaau

SEQ ID NO: 1079108 - RNA, 19 nt, Homo sapiens
  misc_RNA (1)...(19): siRNA sense strand
gcacgaagucuuuguugag

SEQ ID NO: 1079109 - RNA, 19 nt, Homo sapiens
  misc_RNA (1)...(19): siRNA sense strand
cagcaucuuuccugaagug

SEQ ID NO: 1079110 - RNA, 19 nt, Homo sapiens
  misc_RNA (1)...(19): siRNA sense strand
ggagaacaugucagaaguu

SEQ ID NO: 1079111 - RNA, 19 nt, Homo sapiens
  misc_RNA (1)...(19): siRNA sense strand
aaggagacuuggugaagaa

SEQ ID NO: 1079112 - RNA, 19 nt, Homo sapiens
  misc_RNA (1)...(19): siRNA sense strand
ggaaggagacuuggugaag

SEQ ID NO: 1079113 - RNA, 19 nt, Homo sapiens
  misc_RNA (1)...(19): siRNA sense strand
ccaugugguugcagugauu

SEQ ID NO: 1079114 - RNA, 19 nt, Homo sapiens
  misc_RNA (1)...(19): siRNA sense strand
cagaaguccuuagugaaga

SEQ ID NO: 1079115 - RNA, 19 nt, Homo sapiens
  misc_RNA (1)...(19): siRNA sense strand
aaacaacagucagauagca

SEQ ID NO: 1079116 - RNA, 19 nt, Homo sapiens
  misc_RNA (1)...(19): siRNA sense strand
cgaaggaacacuugcugaa

SEQ ID NO: 1079117 - RNA, 19 nt, Homo sapiens
  misc_RNA (1)...(19): siRNA sense strand
gagauugcgcugcccauug

SEQ ID NO: 1079118 - RNA, 19 nt, Homo sapiens
  misc_RNA (1)...(19): siRNA sense strand
gggcagagcugagaaaaca

SEQ ID NO: 1079119 - RNA, 19 nt, Homo sapiens
  misc_RNA (1)...(19): siRNA sense strand
guaacagacuccaauucca

SEQ ID NO: 1079120 - RNA, 19 nt, Homo sapiens
  misc_RNA (1)...(19): siRNA sense strand
gcaccaacagcuuccaaga

SEQ ID NO: 1079121 - RNA, 19 nt, Homo sapiens
  misc_RNA (1)...(19): siRNA sense strand
gcucagaccagcgauguga

SEQ ID NO: 1079122 - RNA, 19 nt, Homo sapiens
  misc_RNA (1)...(19): siRNA sense strand
guacaacuuuauggccaaa

SEQ ID NO: 1079123 - RNA, 19 nt, Homo sapiens
  misc_RNA (1)...(19): siRNA sense strand
ggaaccaagcucacaaauc

SEQ ID NO: 1079124 - RNA, 19 nt, Homo sapiens
  misc_RNA (1)...(19): siRNA sense strand
cgaagucuuuguugagaag

SEQ ID NO: 1079125 - RNA, 19 nt, Homo sapiens
  misc_RNA (1)...(19): siRNA sense strand
ucaccuggaugaguucuau

SEQ ID NO: 1079126 - RNA, 19 nt, Homo sapiens
  misc_RNA (1)...(19): siRNA sense strand
caagcagauuaccauagaa

SEQ ID NO: 1079127 - RNA, 19 nt, Homo sapiens
  misc_RNA (1)...(19): siRNA sense strand
guguggagaugcugagaau

SEQ ID NO: 1079128 - RNA, 19 nt, Homo sapiens
  misc_RNA (1)...(19): siRNA sense strand
ggacacggugcggucaaua

SEQ ID NO: 1079129 - RNA, 19 nt, Homo sapiens
  misc_RNA (1)...(19): siRNA sense strand
cauugaagccugugucaug

SEQ ID NO: 1079130 - RNA, 19 nt, Homo sapiens
  misc_RNA (1)...(19): siRNA sense strand
gcauuagcagucuuagaaa

SEQ ID NO: 1079131 - RNA, 19 nt, Homo sapiens
  misc_RNA (1)...(19): siRNA sense strand
guggagaugcugagaauca

SEQ ID NO: 1079132 - RNA, 19 nt, Homo sapiens
  misc_RNA (1)...(19): siRNA sense strand
gacagcagccucaccaaca

SEQ ID NO: 1079133 - RNA, 19 nt, Homo sapiens
  misc_RNA (1)...(19): siRNA sense strand
ggugauggaaggagacuug

SEQ ID NO: 1079134 - RNA, 19 nt, Homo sapiens
  misc_RNA (1)...(19): siRNA sense strand
ucugacagcucuugcucaa

SEQ ID NO: 1079135 - RNA, 19 nt, Homo sapiens
  misc_RNA (1)...(19): siRNA sense strand
cacgaagucuuuguugaga

SEQ ID NO: 1079136 - RNA, 19 nt, Homo sapiens
  misc_RNA (1)...(19): siRNA sense strand
gaaacugcacagccacaug

SEQ ID NO: 1079137 - RNA, 19 nt, Homo sapiens
  misc_RNA (1)...(19): siRNA sense strand
agaaacaacagucagauag

SEQ ID NO: 1079138 - RNA, 19 nt, Homo sapiens
  misc_RNA (1)...(19): siRNA sense strand
gggagaaacaacagucaga

SEQ ID NO: 1079139 - RNA, 19 nt, Homo sapiens
  misc_RNA (1)...(19): siRNA sense strand
caagugugcaggaucaaga

SEQ ID NO: 1079140 - RNA, 19 nt, Homo sapiens
  misc_RNA (1)...(19): siRNA sense strand
ccuuagugaagaucuauua

SEQ ID NO: 1079141 - RNA, 19 nt, Homo sapiens
  misc_RNA (1)...(19): siRNA sense strand
caacagcuuccaagauagu

SEQ ID NO: 1079142 - RNA, 19 nt, Homo sapiens
  misc_RNA (1)...(19): siRNA sense strand
ggaagcggccugcuagcau

SEQ ID NO: 1079143 - RNA, 19 nt, Homo sapiens
  misc_RNA (1)...(19): siRNA sense strand
cuacuucucaccuggauga

SEQ ID NO: 1079144 - RNA, 19 nt, Homo sapiens
  misc_RNA (1)...(19): siRNA sense strand
gaucguggacccucuguac

SEQ ID NO: 1079145 - RNA, 19 nt, Homo sapiens
  misc_RNA (1)...(19): siRNA sense strand
cacccagucugucaccaaa

SEQ ID NO: 1079146 - RNA, 19 nt, Homo sapiens
  misc_RNA (1)...(19): siRNA sense strand
agagguggaauuuaaugua

SEQ ID NO: 1079147 - RNA, 19 nt, Homo sapiens
  misc_RNA (1)...(19): siRNA sense strand
uaugaagaauggacacaag

SEQ ID NO: 1079148 - RNA, 19 nt, Homo sapiens
  misc_RNA (1)...(19): siRNA sense strand
uaaucuguaugaagaaugg

SEQ ID NO: 1079149 - RNA, 19 nt, Homo sapiens
  misc_RNA (1)...(19): siRNA sense strand
cugaaccuuugaugacuuu

SEQ ID NO: 1079150 - RNA, 19 nt, Homo sapiens
  misc_RNA (1)...(19): siRNA sense strand
gaagcuggaaauaaaguag

SEQ ID NO: 1079151 - RNA, 19 nt, Homo sapiens
  misc_RNA (1)...(19): siRNA sense strand
uggaugaagcuggaaauaa

SEQ ID NO: 1079152 - RNA, 19 nt, Homo sapiens
  misc_RNA (1)...(19): siRNA sense strand
ccaacagcuuccaagauag

SEQ ID NO: 1079153 - RNA, 19 nt, Homo sapiens
  misc_RNA (1)...(19): siRNA sense strand
ccagugagcauggacuuga

SEQ ID NO: 1079154 - RNA, 19 nt, Homo sapiens
  misc_RNA (1)...(19): siRNA sense strand
guuaugggccagaaacgaa

SEQ ID NO: 1079155 - RNA, 19 nt, Homo sapiens
  misc_RNA (1)...(19): siRNA sense strand
gauauuugaucaaguuccu

SEQ ID NO: 1079156 - RNA, 19 nt, Homo sapiens
  misc_RNA (1)...(19): siRNA sense strand
uggagaacaugucagaagu

SEQ ID NO: 1079157 - RNA, 19 nt, Homo sapiens
  misc_RNA (1)...(19): siRNA sense strand
ugaagaauggacacaaguu

SEQ ID NO: 1079158 - RNA, 19 nt, Homo sapiens
  misc_RNA (1)...(19): siRNA sense strand
uagaagaacaccugaagag

SEQ ID NO: 1079159 - RNA, 19 nt, Homo sapiens
  misc_RNA (1)...(19): siRNA sense strand
cuuccaagauaguaacaga

SEQ ID NO: 1079160 - RNA, 19 nt, Homo sapiens
  misc_RNA (1)...(19): siRNA sense strand
aggaacacuugcugaaaug

SEQ ID NO: 1079161 - RNA, 19 nt, Homo sapiens
  misc_RNA (1)...(19): siRNA sense strand
gaaaacagaaguccuuagu

SEQ ID NO: 1079162 - RNA, 19 nt, Homo sapiens
  misc_RNA (1)...(19): siRNA sense strand
gggccaaccucacaaugcu

SEQ ID NO: 1079163 - RNA, 19 nt, Homo sapiens
  misc_RNA (1)...(19): siRNA sense strand
uccagcagcuugucuccaa

SEQ ID NO: 1079164 - RNA, 19 nt, Homo sapiens
  misc_RNA (1)...(19): siRNA sense strand
gaacagacaacacugaaau

SEQ ID NO: 1079165 - RNA, 19 nt, Homo sapiens
  misc_RNA (1)...(19): siRNA sense strand
agacaacacugaaaucuca

SEQ ID NO: 1079166 - RNA, 19 nt, Homo sapiens
  misc_RNA (1)...(19): siRNA sense strand
caucaagccucaguucuuu

SEQ ID NO: 1079167 - RNA, 19 nt, Homo sapiens
  misc_RNA (1)...(19): siRNA sense strand
caagaacucugcgccauca

SEQ ID NO: 1079168 - RNA, 19 nt, Homo sapiens
  misc_RNA (1)...(19): siRNA sense strand
ugaacuaccuucccuugga

SEQ ID NO: 1079169 - RNA, 19 nt, Homo sapiens
  misc_RNA (1)...(19): siRNA sense strand
gcccagacauuuccuucuu

SEQ ID NO: 1079170 - RNA, 19 nt, Homo sapiens
  misc_RNA (1)...(19): siRNA sense strand
cgggacaacuuuaucaaga

SEQ ID NO: 1079171 - RNA, 19 nt, Homo sapiens
  misc_RNA (1)...(19): siRNA sense strand
uggcaucgcuuaugugcaa

SEQ ID NO: 1079172 - RNA, 19 nt, Homo sapiens
  misc_RNA (1)...(19): siRNA sense strand
gugcaaggcaugaaugaaa

SEQ ID NO: 1079173 - RNA, 19 nt, Homo sapiens
  misc_RNA (1)...(19): siRNA sense strand
ggaguggggucacaaauau

SEQ ID NO: 1079174 - RNA, 19 nt, Homo sapiens
  misc_RNA (1)...(19): siRNA sense strand
gagccgaauugcagauuuc

SEQ ID NO: 1079175 - RNA, 19 nt, Homo sapiens
  misc_RNA (1)...(19): siRNA sense strand
ccagggaggaugugacuuu

SEQ ID NO: 1079176 - RNA, 19 nt, Homo sapiens
  misc_RNA (1)...(19): siRNA sense strand
gagcggauccuguucaucu

SEQ ID NO: 1079177 - RNA, 19 nt, Homo sapiens
  misc_RNA (1)...(19): siRNA sense strand
ggagcuguaugcccaguuc

SEQ ID NO: 1079178 - RNA, 19 nt, Homo sapiens
  misc_RNA (1)...(19): siRNA sense strand
acaaagauguccggagguu

SEQ ID NO: 1079179 - RNA, 19 nt, Homo sapiens
  misc_RNA (1)...(19): siRNA sense strand
gaaggagcccucaauugca

SEQ ID NO: 1079180 - RNA, 19 nt, Homo sapiens
  misc_RNA (1)...(19): siRNA sense strand
ggaacagacaacacugaaa

SEQ ID NO: 1079181 - RNA, 19 nt, Homo sapiens
  misc_RNA (1)...(19): siRNA sense strand
gcacaagagccgaauugca

SEQ ID NO: 1079182 - RNA, 19 nt, Homo sapiens
  misc_RNA (1)...(19): siRNA sense strand
auaaggauguggagcucua

SEQ ID NO: 1079183 - RNA, 19 nt, Homo sapiens
  misc_RNA (1)...(19): siRNA sense strand
ugaaacccuucguaagaga

SEQ ID NO: 1079184 - RNA, 19 nt, Homo sapiens
  misc_RNA (1)...(19): siRNA sense strand
acacguacuucaaggacaa

SEQ ID NO: 1079185 - RNA, 19 nt, Homo sapiens
  misc_RNA (1)...(19): siRNA sense strand
gggaggaugugacuuuuga

SEQ ID NO: 1079186 - RNA, 19 nt, Homo sapiens
  misc_RNA (1)...(19): siRNA sense strand
gcuccaagacucaaaguag

SEQ ID NO: 1079187 - RNA, 19 nt, Homo sapiens
  misc_RNA (1)...(19): siRNA sense strand
gagauccgggacaacuuua

SEQ ID NO: 1079188 - RNA, 19 nt, Homo sapiens
  misc_RNA (1)...(19): siRNA sense strand
ugaaggagcccucaauugc

SEQ ID NO: 1079189 - RNA, 19 nt, Homo sapiens
  misc_RNA (1)...(19): siRNA sense strand
cgagauccgggacaacuuu

SEQ ID NO: 1079190 - RNA, 19 nt, Homo sapiens
  misc_RNA (1)...(19): siRNA sense strand
ugacaaccgcuuugacuuc

SEQ ID NO: 1079191 - RNA, 19 nt, Homo sapiens
  misc_RNA (1)...(19): siRNA sense strand
gagguugugcccagacauu

SEQ ID NO: 1079192 - RNA, 19 nt, Homo sapiens
  misc_RNA (1)...(19): siRNA sense strand
ccuacaagauggagaaggu

SEQ ID NO: 1079193 - RNA, 19 nt, Homo sapiens
  misc_RNA (1)...(19): siRNA sense strand
gggacaacuuuaucaagag

SEQ ID NO: 1079194 - RNA, 19 nt, Homo sapiens
  misc_RNA (1)...(19): siRNA sense strand
ccaagcagagggagcugua

SEQ ID NO: 1079195 - RNA, 19 nt, Homo sapiens
  misc_RNA (1)...(19): siRNA sense strand
uuugaaacccuucguaaga

SEQ ID NO: 1079196 - RNA, 19 nt, Homo sapiens
  misc_RNA (1)...(19): siRNA sense strand
uacuccaccuugaaagaua

SEQ ID NO: 1079197 - RNA, 19 nt, Homo sapiens
  misc_RNA (1)...(19): siRNA sense strand
acaagauggagaagguuua

SEQ ID NO: 1079198 - RNA, 19 nt, Homo sapiens
  misc_RNA (1)...(19): siRNA sense strand
uaagagaguggaacagaca

SEQ ID NO: 1079199 - RNA, 19 nt, Homo sapiens
  misc_RNA (1)...(19): siRNA sense strand
ggaacacguacuucaagga

SEQ ID NO: 1079200 - RNA, 19 nt, Homo sapiens
  misc_RNA (1)...(19): siRNA sense strand
gaugacaaccgcuuugacu

SEQ ID NO: 1079201 - RNA, 19 nt, Homo sapiens
  misc_RNA (1)...(19): siRNA sense strand
gcgccaucaucccuaaaug

SEQ ID NO: 1079202 - RNA, 19 nt, Homo sapiens
  misc_RNA (1)...(19): siRNA sense strand
aaagauguccggagguugu

SEQ ID NO: 1079203 - RNA, 19 nt, Homo sapiens
  misc_RNA (1)...(19): siRNA sense strand
ugagggaaaugaucaucca

SEQ ID NO: 1079204 - RNA, 19 nt, Homo sapiens
  misc_RNA (1)...(19): siRNA sense strand
agagccgaauugcagauuu

SEQ ID NO: 1079205 - RNA, 19 nt, Homo sapiens
  misc_RNA (1)...(19): siRNA sense strand
ugcaaggcaugaaugaaau

SEQ ID NO: 1079206 - RNA, 19 nt, Homo sapiens
  misc_RNA (1)...(19): siRNA sense strand
gguggaacacguacuucaa

SEQ ID NO: 1079207 - RNA, 19 nt, Homo sapiens
  misc_RNA (1)...(19): siRNA sense strand
uugcagauuuccaggaugu

SEQ ID NO: 1079208 - RNA, 19 nt, Homo sapiens
  misc_RNA (1)...(19): siRNA sense strand
ccagagggccacugacuac

SEQ ID NO: 1079209 - RNA, 19 nt, Homo sapiens
  misc_RNA (1)...(19): siRNA sense strand
aaggagcccucaauugcau

SEQ ID NO: 1079210 - RNA, 19 nt, Homo sapiens
  misc_RNA (1)...(19): siRNA sense strand
ugcaagagcagaacaucaa

SEQ ID NO: 1079211 - RNA, 19 nt, Homo sapiens
  misc_RNA (1)...(19): siRNA sense strand
gguuuacuccaccuugaaa

SEQ ID NO: 1079212 - RNA, 19 nt, Homo sapiens
  misc_RNA (1)...(19): siRNA sense strand
gcaaggcaugaaugaaauc

SEQ ID NO: 1079213 - RNA, 19 nt, Homo sapiens
  misc_RNA (1)...(19): siRNA sense strand
acuccaccuugaaagauaa

SEQ ID NO: 1079214 - RNA, 19 nt, Homo sapiens
  misc_RNA (1)...(19): siRNA sense strand
cugaaggagcccucaauug

SEQ ID NO: 1079215 - RNA, 19 nt, Homo sapiens
  misc_RNA (1)...(19): siRNA sense strand
cguaagagaguggaacaga

SEQ ID NO: 1079216 - RNA, 19 nt, Homo sapiens
  misc_RNA (1)...(19): siRNA sense strand
ucaccuacaagauggagaa

SEQ ID NO: 1079217 - RNA, 19 nt, Homo sapiens
  misc_RNA (1)...(19): siRNA sense strand
aauaugagcuccccacaca

SEQ ID NO: 1079218 - RNA, 19 nt, Homo sapiens
  misc_RNA (1)...(19): siRNA sense strand
ccaauagugaguggaaaga

SEQ ID NO: 1079219 - RNA, 19 nt, Homo sapiens
  misc_RNA (1)...(19): siRNA sense strand
caaggagcuccaagacuca

SEQ ID NO: 1079220 - RNA, 19 nt, Homo sapiens
  misc_RNA (1)...(19): siRNA sense strand
gcaagagcagaacaucaag

SEQ ID NO: 1079221 - RNA, 19 nt, Homo sapiens
  misc_RNA (1)...(19): siRNA sense strand
gauccgggacaacuuuauc

SEQ ID NO: 1079222 - RNA, 19 nt, Homo sapiens
  misc_RNA (1)...(19): siRNA sense strand
guggagcucuaccugaaac

SEQ ID NO: 1079223 - RNA, 19 nt, Homo sapiens
  misc_RNA (1)...(19): siRNA sense strand
ccugaaggagcccucaauu

SEQ ID NO: 1079224 - RNA, 19 nt, Homo sapiens
  misc_RNA (1)...(19): siRNA sense strand
uacaagauggagaagguuu

SEQ ID NO: 1079225 - RNA, 19 nt, Homo sapiens
  misc_RNA (1)...(19): siRNA sense strand
ccugacagccgguggaaca

SEQ ID NO: 1079226 - RNA, 19 nt, Homo sapiens
  misc_RNA (1)...(19): siRNA sense strand
cugcgggaacucagcuuua

SEQ ID NO: 1079227 - RNA, 19 nt, Homo sapiens
  misc_RNA (1)...(19): siRNA sense strand
guggaacagacaacacuga

SEQ ID NO: 1079228 - RNA, 19 nt, Homo sapiens
  misc_RNA (1)...(19): siRNA sense strand
cuugaaagauaaggaugug

SEQ ID NO: 1079229 - RNA, 19 nt, Homo sapiens
  misc_RNA (1)...(19): siRNA sense strand
acaucaagccucaguucuu

SEQ ID NO: 1079230 - RNA, 19 nt, Homo sapiens
  misc_RNA (1)...(19): siRNA sense strand
aauugcagauuuccaggau

SEQ ID NO: 1079231 - RNA, 19 nt, Homo sapiens
  misc_RNA (1)...(19): siRNA sense strand
auguggagcucuaccugaa

SEQ ID NO: 1079232 - RNA, 19 nt, Homo sapiens
  misc_RNA (1)...(19): siRNA sense strand
gaaaagcugcgggaacuca

SEQ ID NO: 1079233 - RNA, 19 nt, Homo sapiens
  misc_RNA (1)...(19): siRNA sense strand
ccaccgaccccaauaguga

SEQ ID NO: 1079234 - RNA, 19 nt, Homo sapiens
  misc_RNA (1)...(19): siRNA sense strand
gagaguggaacagacaaca

SEQ ID NO: 1079235 - RNA, 19 nt, Homo sapiens
  misc_RNA (1)...(19): siRNA sense strand
ccacugauguuaauccuua

SEQ ID NO: 1079236 - RNA, 19 nt, Homo sapiens
  misc_RNA (1)...(19): siRNA sense strand
gcaaagaacuauccaccuu

SEQ ID NO: 1079237 - RNA, 19 nt, Homo sapiens
  misc_RNA (1)...(19): siRNA sense strand
ugaagaagauugagaaaga

SEQ ID NO: 1079238 - RNA, 19 nt, Homo sapiens
  misc_RNA (1)...(19): siRNA sense strand
gaguaaagcugcugcuaaa

SEQ ID NO: 1079239 - RNA, 19 nt, Homo sapiens
  misc_RNA (1)...(19): siRNA sense strand
uaaauuaaguggccugaaa

SEQ ID NO: 1079240 - RNA, 19 nt, Homo sapiens
  misc_RNA (1)...(19): siRNA sense strand
gaaaugggauacugagaga

SEQ ID NO: 1079241 - RNA, 19 nt, Homo sapiens
  misc_RNA (1)...(19): siRNA sense strand
ugaagaaccuggaaacauu

SEQ ID NO: 1079242 - RNA, 19 nt, Homo sapiens
  misc_RNA (1)...(19): siRNA sense strand
gggaagcgguauacaauuu

SEQ ID NO: 1079243 - RNA, 19 nt, Homo sapiens
  misc_RNA (1)...(19): siRNA sense strand
guacuggaaugccuauuaa

SEQ ID NO: 1079244 - RNA, 19 nt, Homo sapiens
  misc_RNA (1)...(19): siRNA sense strand
ugccagaacugaagaaaua

SEQ ID NO: 1079245 - RNA, 19 nt, Homo sapiens
  misc_RNA (1)...(19): siRNA sense strand
gggaaagccugacucaauu

SEQ ID NO: 1079246 - RNA, 19 nt, Homo sapiens
  misc_RNA (1)...(19): siRNA sense strand
gaaagaaauccaacagaaa

SEQ ID NO: 1079247 - RNA, 19 nt, Homo sapiens
  misc_RNA (1)...(19): siRNA sense strand
ugaaggcgcuugagccaua

SEQ ID NO: 1079248 - RNA, 19 nt, Homo sapiens
  misc_RNA (1)...(19): siRNA sense strand
ggugauauauucaucugua

SEQ ID NO: 1079249 - RNA, 19 nt, Homo sapiens
  misc_RNA (1)...(19): siRNA sense strand
guacuuggauuauggagaa

SEQ ID NO: 1079250 - RNA, 19 nt, Homo sapiens
  misc_RNA (1)...(19): siRNA sense strand
ggaagaaaccaguguuaaa

SEQ ID NO: 1079251 - RNA, 19 nt, Homo sapiens
  misc_RNA (1)...(19): siRNA sense strand
ggaacaaagugauaaaugg

SEQ ID NO: 1079252 - RNA, 19 nt, Homo sapiens
  misc_RNA (1)...(19): siRNA sense strand
gaagaagaccgacaaacaa

SEQ ID NO: 1079253 - RNA, 19 nt, Homo sapiens
  misc_RNA (1)...(19): siRNA sense strand
ggucaaugcaucuaauuua

SEQ ID NO: 1079254 - RNA, 19 nt, Homo sapiens
  misc_RNA (1)...(19): siRNA sense strand
gaagaagauugagaaagaa

SEQ ID NO: 1079255 - RNA, 19 nt, Homo sapiens
  misc_RNA (1)...(19): siRNA sense strand
gaaaaugaaucgaggaauu

SEQ ID NO: 1079256 - RNA, 19 nt, Homo sapiens
  misc_RNA (1)...(19): siRNA sense strand
gcagaacauuggcuugauu

SEQ ID NO: 1079257 - RNA, 19 nt, Homo sapiens
  misc_RNA (1)...(19): siRNA sense strand
gacccaagcuauugacaaa

SEQ ID NO: 1079258 - RNA, 19 nt, Homo sapiens
  misc_RNA (1)...(19): siRNA sense strand
agaaagaaauccaacagaa

SEQ ID NO: 1079259 - RNA, 19 nt, Homo sapiens
  misc_RNA (1)...(19): siRNA sense strand
uaaguggccugaaagguaa

SEQ ID NO: 1079260 - RNA, 19 nt, Homo sapiens
  misc_RNA (1)...(19): siRNA sense strand
gacagaagguucaagaugu

SEQ ID NO: 1079261 - RNA, 19 nt, Homo sapiens
  misc_RNA (1)...(19): siRNA sense strand
gagaugcacuuauuuacau

SEQ ID NO: 1079262 - RNA, 19 nt, Homo sapiens
  misc_RNA (1)...(19): siRNA sense strand
gaagagaauuggaagaaac

SEQ ID NO: 1079263 - RNA, 19 nt, Homo sapiens
  misc_RNA (1)...(19): siRNA sense strand
ggaagaagaccgacaaaca

SEQ ID NO: 1079264 - RNA, 19 nt, Homo sapiens
  misc_RNA (1)...(19): siRNA sense strand
uguagaagaugccaacuuu

SEQ ID NO: 1079265 - RNA, 19 nt, Homo sapiens
  misc_RNA (1)...(19): siRNA sense strand
uaaaggcacuggugugguu

SEQ ID NO: 1079266 - RNA, 19 nt, Homo sapiens
  misc_RNA (1)...(19): siRNA sense strand
gaacugaagaaauacauga

SEQ ID NO: 1079267 - RNA, 19 nt, Homo sapiens
  misc_RNA (1)...(19): siRNA sense strand
ggauaaagcuaaaggaaaa

SEQ ID NO: 1079268 - RNA, 19 nt, Homo sapiens
  misc_RNA (1)...(19): siRNA sense strand
gaaauagagcuguaugguu

SEQ ID NO: 1079269 - RNA, 19 nt, Homo sapiens
  misc_RNA (1)...(19): siRNA sense strand
gcaaggagauaacugugau

SEQ ID NO: 1079270 - RNA, 19 nt, Homo sapiens
  misc_RNA (1)...(19): siRNA sense strand
ggaaagccugacucaauua

SEQ ID NO: 1079271 - RNA, 19 nt, Homo sapiens
  misc_RNA (1)...(19): siRNA sense strand
ggaagaaacagacaucuca

SEQ ID NO: 1079272 - RNA, 19 nt, Homo sapiens
  misc_RNA (1)...(19): siRNA sense strand
gaacauuggcuugauuauu

SEQ ID NO: 1079273 - RNA, 19 nt, Homo sapiens
  misc_RNA (1)...(19): siRNA sense strand
gaagaaagucaugccauuu

SEQ ID NO: 1079274 - RNA, 19 nt, Homo sapiens
  misc_RNA (1)...(19): siRNA sense strand
ugaagaaagucaugccauu

SEQ ID NO: 1079275 - RNA, 19 nt, Homo sapiens
  misc_RNA (1)...(19): siRNA sense strand
gaugagcaguggcugauug

SEQ ID NO: 1079276 - RNA, 19 nt, Homo sapiens
  misc_RNA (1)...(19): siRNA sense strand
aaagagaaauagagcugua

SEQ ID NO: 1079277 - RNA, 19 nt, Homo sapiens
  misc_RNA (1)...(19): siRNA sense strand
acacauagaagucaaguuu

SEQ ID NO: 1079278 - RNA, 19 nt, Homo sapiens
  misc_RNA (1)...(19): siRNA sense strand
caacagaaaugggauacug

SEQ ID NO: 1079279 - RNA, 19 nt, Homo sapiens
  misc_RNA (1)...(19): siRNA sense strand
ggaagcgguauacaauuua

SEQ ID NO: 1079280 - RNA, 19 nt, Homo sapiens
  misc_RNA (1)...(19): siRNA sense strand
gaaaggaguacaccgagaa

SEQ ID NO: 1079281 - RNA, 19 nt, Homo sapiens
  misc_RNA (1)...(19): siRNA sense strand
cuaauucgcuugagcuaga

SEQ ID NO: 1079282 - RNA, 19 nt, Homo sapiens
  misc_RNA (1)...(19): siRNA sense strand
gaaguaacacaugaccuua

SEQ ID NO: 1079283 - RNA, 19 nt, Homo sapiens
  misc_RNA (1)...(19): siRNA sense strand
ggacagaagguucaagaug

SEQ ID NO: 1079284 - RNA, 19 nt, Homo sapiens
  misc_RNA (1)...(19): siRNA sense strand
gacggugaauggugauaua

SEQ ID NO: 1079285 - RNA, 19 nt, Homo sapiens
  misc_RNA (1)...(19): siRNA sense strand
gccauacccaucuaaauua

SEQ ID NO: 1079286 - RNA, 19 nt, Homo sapiens
  misc_RNA (1)...(19): siRNA sense strand
ugaaguacauuggauuuga

SEQ ID NO: 1079287 - RNA, 19 nt, Homo sapiens
  misc_RNA (1)...(19): siRNA sense strand
gaggaagaaaccaguguua

SEQ ID NO: 1079288 - RNA, 19 nt, Homo sapiens
  misc_RNA (1)...(19): siRNA sense strand
ggauaaggguggauauugg

SEQ ID NO: 1079289 - RNA, 19 nt, Homo sapiens
  misc_RNA (1)...(19): siRNA sense strand
ggaaguaacacaugaccuu

SEQ ID NO: 1079290 - RNA, 19 nt, Homo sapiens
  misc_RNA (1)...(19): siRNA sense strand
caaggaaguuugggauuau

SEQ ID NO: 1079291 - RNA, 19 nt, Homo sapiens
  misc_RNA (1)...(19): siRNA sense strand
guaaagaagacuauucaga

SEQ ID NO: 1079292 - RNA, 19 nt, Homo sapiens
  misc_RNA (1)...(19): siRNA sense strand
ggaaauucuuggugcauca

SEQ ID NO: 1079293 - RNA, 19 nt, Homo sapiens
  misc_RNA (1)...(19): siRNA sense strand
gauaugaaguacauuggau

SEQ ID NO: 1079294 - RNA, 19 nt, Homo sapiens
  misc_RNA (1)...(19): siRNA sense strand
acagaagguucaagaugua

SEQ ID NO: 1079295 - RNA, 19 nt, Homo sapiens
  misc_RNA (1)...(19): siRNA sense strand
ggagauaacugugauucca

SEQ ID NO: 1079296 - RNA, 19 nt, Homo sapiens
  misc_RNA (1)...(19): siRNA sense strand
gaaaucaagcaaggagaua

SEQ ID NO: 1079297 - RNA, 19 nt, Homo sapiens
  misc_RNA (1)...(19): siRNA sense strand
gagaagagaauuggaagaa

SEQ ID NO: 1079298 - RNA, 19 nt, Homo sapiens
  misc_RNA (1)...(19): siRNA sense strand
ggcaugugcugauaaguug

SEQ ID NO: 1079299 - RNA, 19 nt, Homo sapiens
  misc_RNA (1)...(19): siRNA sense strand
gcacuggugugguuacaag

SEQ ID NO: 1079300 - RNA, 19 nt, Homo sapiens
  misc_RNA (1)...(19): siRNA sense strand
ccauacccaucuaaauuaa

SEQ ID NO: 1079301 - RNA, 19 nt, Homo sapiens
  misc_RNA (1)...(19): siRNA sense strand
ggacacacguuuucuuuau

SEQ ID NO: 1079302 - RNA, 19 nt, Homo sapiens
  misc_RNA (1)...(19): siRNA sense strand
aaucaggcguuuaaugaaa

SEQ ID NO: 1079303 - RNA, 19 nt, Homo sapiens
  misc_RNA (1)...(19): siRNA sense strand
gaggagaccaggaggaauu

SEQ ID NO: 1079304 - RNA, 19 nt, Homo sapiens
  misc_RNA (1)...(19): siRNA sense strand
aagcaaaggagaagauaua

SEQ ID NO: 1079305 - RNA, 19 nt, Homo sapiens
  misc_RNA (1)...(19): siRNA sense strand
agacucagauugcaaagga

SEQ ID NO: 1079306 - RNA, 19 nt, Homo sapiens
  misc_RNA (1)...(19): siRNA sense strand
aaagauaaguaccgugaau

SEQ ID NO: 1079307 - RNA, 19 nt, Homo sapiens
  misc_RNA (1)...(19): siRNA sense strand
guugguggauggauuuaaa

SEQ ID NO: 1079308 - RNA, 19 nt, Homo sapiens
  misc_RNA (1)...(19): siRNA sense strand
caaagucauugcuagugaa

SEQ ID NO: 1079309 - RNA, 19 nt, Homo sapiens
  misc_RNA (1)...(19): siRNA sense strand
gacuacgacucaagaacua

SEQ ID NO: 1079310 - RNA, 19 nt, Homo sapiens
  misc_RNA (1)...(19): siRNA sense strand
ucauugaaaucccagguuu

SEQ ID NO: 1079311 - RNA, 19 nt, Homo sapiens
  misc_RNA (1)...(19): siRNA sense strand
aaauucaucugacugagaa

SEQ ID NO: 1079312 - RNA, 19 nt, Homo sapiens
  misc_RNA (1)...(19): siRNA sense strand
aagccugacucaauuauga

SEQ ID NO: 1079313 - RNA, 19 nt, Homo sapiens
  misc_RNA (1)...(19): siRNA sense strand
gccagcacuuucaaugaua

SEQ ID NO: 1079314 - RNA, 19 nt, Homo sapiens
  misc_RNA (1)...(19): siRNA sense strand
cccaagcuauugacaaauu

SEQ ID NO: 1079315 - RNA, 19 nt, Homo sapiens
  misc_RNA (1)...(19): siRNA sense strand
aaagcuggaucuucuaaau

SEQ ID NO: 1079316 - RNA, 19 nt, Homo sapiens
  misc_RNA (1)...(19): siRNA sense strand
agauaacugugauuccaua

SEQ ID NO: 1079317 - RNA, 19 nt, Homo sapiens
  misc_RNA (1)...(19): siRNA sense strand
acaaagucauugcuaguga

SEQ ID NO: 1079318 - RNA, 19 nt, Homo sapiens
  misc_RNA (1)...(19): siRNA sense strand
cacaguaucuuauggaagu

SEQ ID NO: 1079319 - RNA, 19 nt, Homo sapiens
  misc_RNA (1)...(19): siRNA sense strand
ccaagcuauugacaaauuu

SEQ ID NO: 1079320 - RNA, 19 nt, Homo sapiens
  misc_RNA (1)...(19): siRNA sense strand
uaaagcaggaguuugaauu

SEQ ID NO: 1079321 - RNA, 19 nt, Homo sapiens
  misc_RNA (1)...(19): siRNA sense strand
gaaguuugggauuauguuu

SEQ ID NO: 1079322 - RNA, 19 nt, Homo sapiens
  misc_RNA (1)...(19): siRNA sense strand
uuacacaguugcacaccua

SEQ ID NO: 1079323 - RNA, 19 nt, Homo sapiens
  misc_RNA (1)...(19): siRNA sense strand
uuaaguggccugaaaggua

SEQ ID NO: 1079324 - RNA, 19 nt, Homo sapiens
  misc_RNA (1)...(19): siRNA sense strand
aagaauggguuugaaggua

SEQ ID NO: 1079325 - RNA, 19 nt, Homo sapiens
  misc_RNA (1)...(19): siRNA sense strand
gaucuauguucucccaaug

SEQ ID NO: 1079326 - RNA, 19 nt, Homo sapiens
  misc_RNA (1)...(19): siRNA sense strand
gaaguacauuggauuugag

SEQ ID NO: 1079327 - RNA, 19 nt, Homo sapiens
  misc_RNA (1)...(19): siRNA sense strand
aagugaaacugaugagauu

SEQ ID NO: 1079328 - RNA, 19 nt, Homo sapiens
  misc_RNA (1)...(19): siRNA sense strand
gaagaaaccaguguuaaaa

SEQ ID NO: 1079329 - RNA, 19 nt, Homo sapiens
  misc_RNA (1)...(19): siRNA sense strand
gaccuuagacuacgacuca

SEQ ID NO: 1079330 - RNA, 19 nt, Homo sapiens
  misc_RNA (1)...(19): siRNA sense strand
uagagugggugaaagaaau

SEQ ID NO: 1079331 - RNA, 19 nt, Homo sapiens
  misc_RNA (1)...(19): siRNA sense strand
uaccagcgauugaaaggaa

SEQ ID NO: 1079332 - RNA, 19 nt, Homo sapiens
  misc_RNA (1)...(19): siRNA sense strand
gaggcuccauuuccuaaga

SEQ ID NO: 1079333 - RNA, 19 nt, Homo sapiens
  misc_RNA (1)...(19): siRNA sense strand
gaaagccugacucaauuau

SEQ ID NO: 1079334 - RNA, 19 nt, Homo sapiens
  misc_RNA (1)...(19): siRNA sense strand
ccagcaagggcaaguauuu

SEQ ID NO: 1079335 - RNA, 19 nt, Homo sapiens
  misc_RNA (1)...(19): siRNA sense strand
gaauagaagucaaacagua

SEQ ID NO: 1079336 - RNA, 19 nt, Homo sapiens
  misc_RNA (1)...(19): siRNA sense strand
gaaagaagguuugcaguau

SEQ ID NO: 1079337 - RNA, 19 nt, Homo sapiens
  misc_RNA (1)...(19): siRNA sense strand
ggcaagagcuaaauuuauu

SEQ ID NO: 1079338 - RNA, 19 nt, Homo sapiens
  misc_RNA (1)...(19): siRNA sense strand
gcuguuagauccagacaua

SEQ ID NO: 1079339 - RNA, 19 nt, Homo sapiens
  misc_RNA (1)...(19): siRNA sense strand
gaaauucuggagcuuauua

SEQ ID NO: 1079340 - RNA, 19 nt, Homo sapiens
  misc_RNA (1)...(19): siRNA sense strand
ucacagagccuugcaaaua

SEQ ID NO: 1079341 - RNA, 19 nt, Homo sapiens
  misc_RNA (1)...(19): siRNA sense strand
ggaaggcgauguagauguu

SEQ ID NO: 1079342 - RNA, 19 nt, Homo sapiens
  misc_RNA (1)...(19): siRNA sense strand
ugaagaaacugaacaugaa

SEQ ID NO: 1079343 - RNA, 19 nt, Homo sapiens
  misc_RNA (1)...(19): siRNA sense strand
gaagaaacagcaacucaaa

SEQ ID NO: 1079344 - RNA, 19 nt, Homo sapiens
  misc_RNA (1)...(19): siRNA sense strand
gagcaacuuaucaguauua

SEQ ID NO: 1079345 - RNA, 19 nt, Homo sapiens
  misc_RNA (1)...(19): siRNA sense strand
cacagagccuugcaaauaa

SEQ ID NO: 1079346 - RNA, 19 nt, Homo sapiens
  misc_RNA (1)...(19): siRNA sense strand
uuaacuggcugcacauaua

SEQ ID NO: 1079347 - RNA, 19 nt, Homo sapiens
  misc_RNA (1)...(19): siRNA sense strand
ucaacuggcugcuagaauu

SEQ ID NO: 1079348 - RNA, 19 nt, Homo sapiens
  misc_RNA (1)...(19): siRNA sense strand
acggaaggauuguuuaaua

SEQ ID NO: 1079349 - RNA, 19 nt, Homo sapiens
  misc_RNA (1)...(19): siRNA sense strand
agaugaagaugaugacuuu

SEQ ID NO: 1079350 - RNA, 19 nt, Homo sapiens
  misc_RNA (1)...(19): siRNA sense strand
gaaggauuguuuaauaugg

SEQ ID NO: 1079351 - RNA, 19 nt, Homo sapiens
  misc_RNA (1)...(19): siRNA sense strand
ggacauaguggaagaugaa

SEQ ID NO: 1079352 - RNA, 19 nt, Homo sapiens
  misc_RNA (1)...(19): siRNA sense strand
ggaugaagaugaagaaacu

SEQ ID NO: 1079353 - RNA, 19 nt, Homo sapiens
  misc_RNA (1)...(19): siRNA sense strand
aaacaguaguggaagagua

SEQ ID NO: 1079354 - RNA, 19 nt, Homo sapiens
  misc_RNA (1)...(19): siRNA sense strand
ugacagaagucuugcugaa

SEQ ID NO: 1079355 - RNA, 19 nt, Homo sapiens
  misc_RNA (1)...(19): siRNA sense strand
ugaagaugcugaagaaaca

SEQ ID NO: 1079356 - RNA, 19 nt, Homo sapiens
  misc_RNA (1)...(19): siRNA sense strand
gcacauauaccuuaauaac

SEQ ID NO: 1079357 - RNA, 19 nt, Homo sapiens
  misc_RNA (1)...(19): siRNA sense strand
cauaaaggaugaccagauc

SEQ ID NO: 1079358 - RNA, 19 nt, Homo sapiens
  misc_RNA (1)...(19): siRNA sense strand
gaagaaacugaacaugaaa

SEQ ID NO: 1079359 - RNA, 19 nt, Homo sapiens
  misc_RNA (1)...(19): siRNA sense strand
gaggaacaaucgccagaug

SEQ ID NO: 1079360 - RNA, 19 nt, Homo sapiens
  misc_RNA (1)...(19): siRNA sense strand
caugagugcugaagagcua

SEQ ID NO: 1079361 - RNA, 19 nt, Homo sapiens
  misc_RNA (1)...(19): siRNA sense strand
cugcacauauaccuuaaua

SEQ ID NO: 1079362 - RNA, 19 nt, Homo sapiens
  misc_RNA (1)...(19): siRNA sense strand
ugaaagaagguuugcagua

SEQ ID NO: 1079363 - RNA, 19 nt, Homo sapiens
  misc_RNA (1)...(19): siRNA sense strand
uauugaagaugcugaagaa

SEQ ID NO: 1079364 - RNA, 19 nt, Homo sapiens
  misc_RNA (1)...(19): siRNA sense strand
cugaagaggucaaagaaau

SEQ ID NO: 1079365 - RNA, 19 nt, Homo sapiens
  misc_RNA (1)...(19): siRNA sense strand
cggaaggauuguuuaauau

SEQ ID NO: 1079366 - RNA, 19 nt, Homo sapiens
  misc_RNA (1)...(19): siRNA sense strand
acaccaagcuccuuugaca

SEQ ID NO: 1079367 - RNA, 19 nt, Homo sapiens
  misc_RNA (1)...(19): siRNA sense strand
cugaagagcuacaggaguu

SEQ ID NO: 1079368 - RNA, 19 nt, Homo sapiens
  misc_RNA (1)...(19): siRNA sense strand
caugaaggaugucugcuau

SEQ ID NO: 1079369 - RNA, 19 nt, Homo sapiens
  misc_RNA (1)...(19): siRNA sense strand
cgauguagauguuucagau

SEQ ID NO: 1079370 - RNA, 19 nt, Homo sapiens
  misc_RNA (1)...(19): siRNA sense strand
cagaagucuugcugaagua

SEQ ID NO: 1079371 - RNA, 19 nt, Homo sapiens
  misc_RNA (1)...(19): siRNA sense strand
gaaggaugucugcuaugua

SEQ ID NO: 1079372 - RNA, 19 nt, Homo sapiens
  misc_RNA (1)...(19): siRNA sense strand
ggaaggauuguuuaauaug

SEQ ID NO: 1079373 - RNA, 19 nt, Homo sapiens
  misc_RNA (1)...(19): siRNA sense strand
aaacagcaacucaaacuug

SEQ ID NO: 1079374 - RNA, 19 nt, Homo sapiens
  misc_RNA (1)...(19): siRNA sense strand
cuauguagaugguaagguu

SEQ ID NO: 1079375 - RNA, 19 nt, Homo sapiens
  misc_RNA (1)...(19): siRNA sense strand
ccagaaugauaccgugauu

SEQ ID NO: 1079376 - RNA, 19 nt, Homo sapiens
  misc_RNA (1)...(19): siRNA sense strand
ugaaggaugucugcuaugu

SEQ ID NO: 1079377 - RNA, 19 nt, Homo sapiens
  misc_RNA (1)...(19): siRNA sense strand
caaacccgcuggacaccuu

SEQ ID NO: 1079378 - RNA, 19 nt, Homo sapiens
  misc_RNA (1)...(19): siRNA sense strand
gaagaggucaaagaaauuc

SEQ ID NO: 1079379 - RNA, 19 nt, Homo sapiens
  misc_RNA (1)...(19): siRNA sense strand
gaucacaccaagcuccuuu

SEQ ID NO: 1079380 - RNA, 19 nt, Homo sapiens
  misc_RNA (1)...(19): siRNA sense strand
uaaggaaggcgauguagau

SEQ ID NO: 1079381 - RNA, 19 nt, Homo sapiens
  misc_RNA (1)...(19): siRNA sense strand
gauaaucuuccugcaaauu

SEQ ID NO: 1079382 - RNA, 19 nt, Homo sapiens
  misc_RNA (1)...(19): siRNA sense strand
acagaagucuugcugaagu

SEQ ID NO: 1079383 - RNA, 19 nt, Homo sapiens
  misc_RNA (1)...(19): siRNA sense strand
gaagaugaugacuuucuga

SEQ ID NO: 1079384 - RNA, 19 nt, Homo sapiens
  misc_RNA (1)...(19): siRNA sense strand
aaacaaaggaucuauaucg

SEQ ID NO: 1079385 - RNA, 19 nt, Homo sapiens
  misc_RNA (1)...(19): siRNA sense strand
gaaacagcaacucaaacuu

SEQ ID NO: 1079386 - RNA, 19 nt, Homo sapiens
  misc_RNA (1)...(19): siRNA sense strand
gcuggaaauuauauuggaa

SEQ ID NO: 1079387 - RNA, 19 nt, Homo sapiens
  misc_RNA (1)...(19): siRNA sense strand
augauaaucuuccugcaaa

SEQ ID NO: 1079388 - RNA, 19 nt, Homo sapiens
  misc_RNA (1)...(19): siRNA sense strand
gagcggaaaccugaaagaa

SEQ ID NO: 1079389 - RNA, 19 nt, Homo sapiens
  misc_RNA (1)...(19): siRNA sense strand
ccucuguaguuucaaauug

SEQ ID NO: 1079390 - RNA, 19 nt, Homo sapiens
  misc_RNA (1)...(19): siRNA sense strand
ugaagaaccagcuguuaga

SEQ ID NO: 1079391 - RNA, 19 nt, Homo sapiens
  misc_RNA (1)...(19): siRNA sense strand
aacaaaggcugguccugaa

SEQ ID NO: 1079392 - RNA, 19 nt, Homo sapiens
  misc_RNA (1)...(19): siRNA sense strand
ccacggaaggauuguuuaa

SEQ ID NO: 1079393 - RNA, 19 nt, Homo sapiens
  misc_RNA (1)...(19): siRNA sense strand
aaggaugucugcuauguag

SEQ ID NO: 1079394 - RNA, 19 nt, Homo sapiens
  misc_RNA (1)...(19): siRNA sense strand
uugagcaacuuaucaguau

SEQ ID NO: 1079395 - RNA, 19 nt, Homo sapiens
  misc_RNA (1)...(19): siRNA sense strand
aaagaagguuugcaguauc

SEQ ID NO: 1079396 - RNA, 19 nt, Homo sapiens
  misc_RNA (1)...(19): siRNA sense strand
caaguaauccugccaucau

SEQ ID NO: 1079397 - RNA, 19 nt, Homo sapiens
  misc_RNA (1)...(19): siRNA sense strand
uaagguugauaacggcaaa

SEQ ID NO: 1079398 - RNA, 19 nt, Homo sapiens
  misc_RNA (1)...(19): siRNA sense strand
gaugauaaucuuccugcaa

SEQ ID NO: 1079399 - RNA, 19 nt, Homo sapiens
  misc_RNA (1)...(19): siRNA sense strand
caugauugcuucccauuuu

SEQ ID NO: 1079400 - RNA, 19 nt, Homo sapiens
  misc_RNA (1)...(19): siRNA sense strand
gugaugagccagcuaaauc

SEQ ID NO: 1079401 - RNA, 19 nt, Homo sapiens
  misc_RNA (1)...(19): siRNA sense strand
cuacucaaguuggauguga

SEQ ID NO: 1079402 - RNA, 19 nt, Homo sapiens
  misc_RNA (1)...(19): siRNA sense strand
gggauucgcagaggcauuu

SEQ ID NO: 1079403 - RNA, 19 nt, Homo sapiens
  misc_RNA (1)...(19): siRNA sense strand
agacaugagugcugaagag

SEQ ID NO: 1079404 - RNA, 19 nt, Homo sapiens
  misc_RNA (1)...(19): siRNA sense strand
ugaagaggucaaagaaauu

SEQ ID NO: 1079405 - RNA, 19 nt, Homo sapiens
  misc_RNA (1)...(19): siRNA sense strand
gaucaucaacuggcugcua

SEQ ID NO: 1079406 - RNA, 19 nt, Homo sapiens
  misc_RNA (1)...(19): siRNA sense strand
gaagugccccagaaugaua

SEQ ID NO: 1079407 - RNA, 19 nt, Homo sapiens
  misc_RNA (1)...(19): siRNA sense strand
gcaaaacaaaggaucuaua

SEQ ID NO: 1079408 - RNA, 19 nt, Homo sapiens
  misc_RNA (1)...(19): siRNA sense strand
gacuuugaguuguugaaga

SEQ ID NO: 1079409 - RNA, 19 nt, Homo sapiens
  misc_RNA (1)...(19): siRNA sense strand
agauugccuugguugaaua

SEQ ID NO: 1079410 - RNA, 19 nt, Homo sapiens
  misc_RNA (1)...(19): siRNA sense strand
cuacaggaguucaagaaac

SEQ ID NO: 1079411 - RNA, 19 nt, Homo sapiens
  misc_RNA (1)...(19): siRNA sense strand
caaguuggaugugaaugca

SEQ ID NO: 1079412 - RNA, 19 nt, Homo sapiens
  misc_RNA (1)...(19): siRNA sense strand
ggaagaguauuuggcuuuu

SEQ ID NO: 1079413 - RNA, 19 nt, Homo sapiens
  misc_RNA (1)...(19): siRNA sense strand
gcaugauugcuucccauuu

SEQ ID NO: 1079414 - RNA, 19 nt, Homo sapiens
  misc_RNA (1)...(19): siRNA sense strand
ugaagaugaugacuuucug

SEQ ID NO: 1079415 - RNA, 19 nt, Homo sapiens
  misc_RNA (1)...(19): siRNA sense strand
caaaggcauucugcgaugu

SEQ ID NO: 1079416 - RNA, 19 nt, Homo sapiens
  misc_RNA (1)...(19): siRNA sense strand
uucuggagcuuauuauuga

SEQ ID NO: 1079417 - RNA, 19 nt, Homo sapiens
  misc_RNA (1)...(19): siRNA sense strand
caugaaauucuggagcuua

SEQ ID NO: 1079418 - RNA, 19 nt, Homo sapiens
  misc_RNA (1)...(19): siRNA sense strand
gccuagaucuuuugguuaa

SEQ ID NO: 1079419 - RNA, 19 nt, Homo sapiens
  misc_RNA (1)...(19): siRNA sense strand
ugacacgcauuuccgaagu

SEQ ID NO: 1079420 - RNA, 19 nt, Homo sapiens
  misc_RNA (1)...(19): siRNA sense strand
gggugaaacaaaugacuuu

SEQ ID NO: 1079421 - RNA, 19 nt, Homo sapiens
  misc_RNA (1)...(19): siRNA sense strand
gaagaaccagcuguuagau

SEQ ID NO: 1079422 - RNA, 19 nt, Homo sapiens
  misc_RNA (1)...(19): siRNA sense strand
cagaugcugccagucauua

SEQ ID NO: 1079423 - RNA, 19 nt, Homo sapiens
  misc_RNA (1)...(19): siRNA sense strand
cgauguugcucuccaugga

SEQ ID NO: 1079424 - RNA, 19 nt, Homo sapiens
  misc_RNA (1)...(19): siRNA sense strand
guugaagaaccagcuguua

SEQ ID NO: 1079425 - RNA, 19 nt, Homo sapiens
  misc_RNA (1)...(19): siRNA sense strand
gcugaagaggucaaagaaa

SEQ ID NO: 1079426 - RNA, 19 nt, Homo sapiens
  misc_RNA (1)...(19): siRNA sense strand
gcaugaaauucuggagcuu

SEQ ID NO: 1079427 - RNA, 19 nt, Homo sapiens
  misc_RNA (1)...(19): siRNA sense strand
acagagccuugcaaauaau

SEQ ID NO: 1079428 - RNA, 19 nt, Homo sapiens
  misc_RNA (1)...(19): siRNA sense strand
gcuacaggaguucaagaaa

SEQ ID NO: 1079429 - RNA, 19 nt, Homo sapiens
  misc_RNA (1)...(19): siRNA sense strand
uggcugcacauauaccuua

SEQ ID NO: 1079430 - RNA, 19 nt, Homo sapiens
  misc_RNA (1)...(19): siRNA sense strand
gaaacugaacaugaaacaa

SEQ ID NO: 1079431 - RNA, 19 nt, Homo sapiens
  misc_RNA (1)...(19): siRNA sense strand
ugaagaaacagcaacucaa

SEQ ID NO: 1079432 - RNA, 19 nt, Homo sapiens
  misc_RNA (1)...(19): siRNA sense strand
uuaccucuguaguuucaaa

SEQ ID NO: 1079433 - RNA, 19 nt, Homo sapiens
  misc_RNA (1)...(19): siRNA sense strand
gagacucagugcagaucug

SEQ ID NO: 1079434 - RNA, 19 nt, Homo sapiens
  misc_RNA (1)...(19): siRNA sense strand
uaaccaggauucgggaaca

SEQ ID NO: 1079435 - RNA, 19 nt, Homo sapiens
  misc_RNA (1)...(19): siRNA sense strand
ucaaguagcugagauuaua

SEQ ID NO: 1079436 - RNA, 19 nt, Homo sapiens
  misc_RNA (1)...(19): siRNA sense strand
gaaugggucuuacucuuug

SEQ ID NO: 1079437 - RNA, 19 nt, Homo sapiens
  misc_RNA (1)...(19): siRNA sense strand
gaaacagaaucgccuggaa

SEQ ID NO: 1079438 - RNA, 19 nt, Homo sapiens
  misc_RNA (1)...(19): siRNA sense strand
cgaggugacuucccaauug

SEQ ID NO: 1079439 - RNA, 19 nt, Homo sapiens
  misc_RNA (1)...(19): siRNA sense strand
gaaaaugccuuuaucaaca

SEQ ID NO: 1079440 - RNA, 19 nt, Homo sapiens
  misc_RNA (1)...(19): siRNA sense strand
caauugcccuugagcauga

SEQ ID NO: 1079441 - RNA, 19 nt, Homo sapiens
  misc_RNA (1)...(19): siRNA sense strand
gagcaugauucgaaaggaa

SEQ ID NO: 1079442 - RNA, 19 nt, Homo sapiens
  misc_RNA (1)...(19): siRNA sense strand
aaagagacccugagcuuaa

SEQ ID NO: 1079443 - RNA, 19 nt, Homo sapiens
  misc_RNA (1)...(19): siRNA sense strand
caaccaagcccacagcauu

SEQ ID NO: 1079444 - RNA, 19 nt, Homo sapiens
  misc_RNA (1)...(19): siRNA sense strand
uagcugagauuauagugaa

SEQ ID NO: 1079445 - RNA, 19 nt, Homo sapiens
  misc_RNA (1)...(19): siRNA sense strand
cuacgagucuugcuugcua

SEQ ID NO: 1079446 - RNA, 19 nt, Homo sapiens
  misc_RNA (1)...(19): siRNA sense strand
aaauugagaagcuggauua

SEQ ID NO: 1079447 - RNA, 19 nt, Homo sapiens
  misc_RNA (1)...(19): siRNA sense strand
gaagcuggauuaccaucau

SEQ ID NO: 1079448 - RNA, 19 nt, Homo sapiens
  misc_RNA (1)...(19): siRNA sense strand
cagccucacucucugguuu

SEQ ID NO: 1079449 - RNA, 19 nt, Homo sapiens
  misc_RNA (1)...(19): siRNA sense strand
caccucagccucucaagua

SEQ ID NO: 1079450 - RNA, 19 nt, Homo sapiens
  misc_RNA (1)...(19): siRNA sense strand
gacauuucccuaugaguuu

SEQ ID NO: 1079451 - RNA, 19 nt, Homo sapiens
  misc_RNA (1)...(19): siRNA sense strand
gcaaggaauccacgacaug

SEQ ID NO: 1079452 - RNA, 19 nt, Homo sapiens
  misc_RNA (1)...(19): siRNA sense strand
cagaaucgccuggaaggua

SEQ ID NO: 1079453 - RNA, 19 nt, Homo sapiens
  misc_RNA (1)...(19): siRNA sense strand
ugaaugggucuuacucuuu

SEQ ID NO: 1079454 - RNA, 19 nt, Homo sapiens
  misc_RNA (1)...(19): siRNA sense strand
ccuggaagguagaaauuga

SEQ ID NO: 1079455 - RNA, 19 nt, Homo sapiens
  misc_RNA (1)...(19): siRNA sense strand
gaagguagaaauugagaag

SEQ ID NO: 1079456 - RNA, 19 nt, Homo sapiens
  misc_RNA (1)...(19): siRNA sense strand
gaacacggugggaacaaga

SEQ ID NO: 1079457 - RNA, 19 nt, Homo sapiens
  misc_RNA (1)...(19): siRNA sense strand
gaaauugagaagcuggauu

SEQ ID NO: 1079458 - RNA, 19 nt, Homo sapiens
  misc_RNA (1)...(19): siRNA sense strand
acccugagcuuaaacaaau

SEQ ID NO: 1079459 - RNA, 19 nt, Homo sapiens
  misc_RNA (1)...(19): siRNA sense strand
gauccuaccuguccuucca

SEQ ID NO: 1079460 - RNA, 19 nt, Homo sapiens
  misc_RNA (1)...(19): siRNA sense strand
caaaugcccagacaagaug

SEQ ID NO: 1079461 - RNA, 19 nt, Homo sapiens
  misc_RNA (1)...(19): siRNA sense strand
gaugggcuuugugaaauga

SEQ ID NO: 1079462 - RNA, 19 nt, Homo sapiens
  misc_RNA (1)...(19): siRNA sense strand
ggauuaccaucauuaucug

SEQ ID NO: 1079463 - RNA, 19 nt, Homo sapiens
  misc_RNA (1)...(19): siRNA sense strand
gaauaugaaugggucuuac

SEQ ID NO: 1079464 - RNA, 19 nt, Homo sapiens
  misc_RNA (1)...(19): siRNA sense strand
uuaaacaaaugcccagaca

SEQ ID NO: 1079465 - RNA, 19 nt, Homo sapiens
  misc_RNA (1)...(19): siRNA sense strand
gaacuccggagacggcauu

SEQ ID NO: 1079466 - RNA, 19 nt, Homo sapiens
  misc_RNA (1)...(19): siRNA sense strand
gcaggggcauuuaaagaaa

SEQ ID NO: 1079467 - RNA, 19 nt, Homo sapiens
  misc_RNA (1)...(19): siRNA sense strand
cagaagagggagaacauug

SEQ ID NO: 1079468 - RNA, 19 nt, Homo sapiens
  misc_RNA (1)...(19): siRNA sense strand
caccugggcucaagugauc

SEQ ID NO: 1079469 - RNA, 19 nt, Homo sapiens
  misc_RNA (1)...(19): siRNA sense strand
ugacauuucccuaugaguu

SEQ ID NO: 1079470 - RNA, 19 nt, Homo sapiens
  misc_RNA (1)...(19): siRNA sense strand
aaacaaaugcccagacaag

SEQ ID NO: 1079471 - RNA, 19 nt, Homo sapiens
  misc_RNA (1)...(19): siRNA sense strand
cagacaagaugccgaagag

SEQ ID NO: 1079472 - RNA, 19 nt, Homo sapiens
  misc_RNA (1)...(19): siRNA sense strand
ggaacacggugggaacaag

SEQ ID NO: 1079473 - RNA, 19 nt, Homo sapiens
  misc_RNA (1)...(19): siRNA sense strand
ccaagcugcuggcacaaca

SEQ ID NO: 1079474 - RNA, 19 nt, Homo sapiens
  misc_RNA (1)...(19): siRNA sense strand
aagagacccugagcuuaaa

SEQ ID NO: 1079475 - RNA, 19 nt, Homo sapiens
  misc_RNA (1)...(19): siRNA sense strand
uugagaagcuggauuacca

SEQ ID NO: 1079476 - RNA, 19 nt, Homo sapiens
  misc_RNA (1)...(19): siRNA sense strand
gcagaagagggagaacauu

SEQ ID NO: 1079477 - RNA, 19 nt, Homo sapiens
  misc_RNA (1)...(19): siRNA sense strand
gcgaggugacuucccaauu

SEQ ID NO: 1079478 - RNA, 19 nt, Homo sapiens
  misc_RNA (1)...(19): siRNA sense strand
gaggugacuucccaauugc

SEQ ID NO: 1079479 - RNA, 19 nt, Homo sapiens
  misc_RNA (1)...(19): siRNA sense strand
agucaaagccaugaugaaa

SEQ ID NO: 1079480 - RNA, 19 nt, Homo sapiens
  misc_RNA (1)...(19): siRNA sense strand
ucaagguccuccagcaucu

SEQ ID NO: 1079481 - RNA, 19 nt, Homo sapiens
  misc_RNA (1)...(19): siRNA sense strand
gacccugagcuuaaacaaa

SEQ ID NO: 1079482 - RNA, 19 nt, Homo sapiens
  misc_RNA (1)...(19): siRNA sense strand
agucuugcuugcuaaacua

SEQ ID NO: 1079483 - RNA, 19 nt, Homo sapiens
  misc_RNA (1)...(19): siRNA sense strand
gagaaaaugccuuuaucaa

SEQ ID NO: 1079484 - RNA, 19 nt, Homo sapiens
  misc_RNA (1)...(19): siRNA sense strand
acaaaugcccagacaagau

SEQ ID NO: 1079485 - RNA, 19 nt, Homo sapiens
  misc_RNA (1)...(19): siRNA sense strand
ugaugggcuuugugaaaug

SEQ ID NO: 1079486 - RNA, 19 nt, Homo sapiens
  misc_RNA (1)...(19): siRNA sense strand
gagucuugcuugcuaaacu

SEQ ID NO: 1079487 - RNA, 19 nt, Homo sapiens
  misc_RNA (1)...(19): siRNA sense strand
gagacggcauugacuacag

SEQ ID NO: 1079488 - RNA, 19 nt, Homo sapiens
  misc_RNA (1)...(19): siRNA sense strand
agaauaugaaugggucuua

SEQ ID NO: 1079489 - RNA, 19 nt, Homo sapiens
  misc_RNA (1)...(19): siRNA sense strand
ggcaaggaauccacgacau

SEQ ID NO: 1079490 - RNA, 19 nt, Homo sapiens
  misc_RNA (1)...(19): siRNA sense strand
ucugaggguuucacaguca

SEQ ID NO: 1079491 - RNA, 19 nt, Homo sapiens
  misc_RNA (1)...(19): siRNA sense strand
gacuacagccagcagaaga

SEQ ID NO: 1079492 - RNA, 19 nt, Homo sapiens
  misc_RNA (1)...(19): siRNA sense strand
gcauuuaaagaaagaccaa

SEQ ID NO: 1079493 - RNA, 19 nt, Homo sapiens
  misc_RNA (1)...(19): siRNA sense strand
caaccuacgagucuugcuu

SEQ ID NO: 1079494 - RNA, 19 nt, Homo sapiens
  misc_RNA (1)...(19): siRNA sense strand
ggaagguagaaauugagaa

SEQ ID NO: 1079495 - RNA, 19 nt, Homo sapiens
  misc_RNA (1)...(19): siRNA sense strand
guagcugagauuauaguga

SEQ ID NO: 1079496 - RNA, 19 nt, Homo sapiens
  misc_RNA (1)...(19): siRNA sense strand
uugaugggcuuugugaaau

SEQ ID NO: 1079497 - RNA, 19 nt, Homo sapiens
  misc_RNA (1)...(19): siRNA sense strand
uggauuaccaucauuaucu

SEQ ID NO: 1079498 - RNA, 19 nt, Homo sapiens
  misc_RNA (1)...(19): siRNA sense strand
guccuuccacagcucauua

SEQ ID NO: 1079499 - RNA, 19 nt, Homo sapiens
  misc_RNA (1)...(19): siRNA sense strand
aagcuggauuaccaucauu

SEQ ID NO: 1079500 - RNA, 19 nt, Homo sapiens
  misc_RNA (1)...(19): siRNA sense strand
ggagaaaaugccuuuauca

SEQ ID NO: 1079501 - RNA, 19 nt, Homo sapiens
  misc_RNA (1)...(19): siRNA sense strand
cucacucucugguuucuga

SEQ ID NO: 1079502 - RNA, 19 nt, Homo sapiens
  misc_RNA (1)...(19): siRNA sense strand
ccagacaagaugccgaaga

SEQ ID NO: 1079503 - RNA, 19 nt, Homo sapiens
  misc_RNA (1)...(19): siRNA sense strand
aaccaagcccacagcauuu

SEQ ID NO: 1079504 - RNA, 19 nt, Homo sapiens
  misc_RNA (1)...(19): siRNA sense strand
gaaaccgacaggucaucug

SEQ ID NO: 1079505 - RNA, 19 nt, Homo sapiens
  misc_RNA (1)...(19): siRNA sense strand
ccuugagcaugauucgaaa

SEQ ID NO: 1079506 - RNA, 19 nt, Homo sapiens
  misc_RNA (1)...(19): siRNA sense strand
aucauuaucugccucuguu

SEQ ID NO: 1079507 - RNA, 19 nt, Homo sapiens
  misc_RNA (1)...(19): siRNA sense strand
gauucgaaaggaaacagaa

SEQ ID NO: 1079508 - RNA, 19 nt, Homo sapiens
  misc_RNA (1)...(19): siRNA sense strand
augaaugggucuuacucuu

SEQ ID NO: 1079509 - RNA, 19 nt, Homo sapiens
  misc_RNA (1)...(19): siRNA sense strand
uuugaugggcuuugugaaa

SEQ ID NO: 1079510 - RNA, 19 nt, Homo sapiens
  misc_RNA (1)...(19): siRNA sense strand
gcuggauuaccaucauuau

SEQ ID NO: 1079511 - RNA, 19 nt, Homo sapiens
  misc_RNA (1)...(19): siRNA sense strand
ggagaacauuggggacuug

SEQ ID NO: 1079512 - RNA, 19 nt, Homo sapiens
  misc_RNA (1)...(19): siRNA sense strand
uuaaagaaagaccaaccaa

SEQ ID NO: 1079513 - RNA, 19 nt, Homo sapiens
  misc_RNA (1)...(19): siRNA sense strand
uaaacaaaugcccagacaa

SEQ ID NO: 1079514 - RNA, 19 nt, Homo sapiens
  misc_RNA (1)...(19): siRNA sense strand
gaggagaaaaugccuuuau

SEQ ID NO: 1079515 - RNA, 19 nt, Homo sapiens
  misc_RNA (1)...(19): siRNA sense strand
ggagacggcauugacuaca

SEQ ID NO: 1079516 - RNA, 19 nt, Homo sapiens
  misc_RNA (1)...(19): siRNA sense strand
caagauccuaccuguccuu

SEQ ID NO: 1079517 - RNA, 19 nt, Homo sapiens
  misc_RNA (1)...(19): siRNA sense strand
gaacauuggggacuugauc

SEQ ID NO: 1079518 - RNA, 19 nt, Homo sapiens
  misc_RNA (1)...(19): siRNA sense strand
aaaagagacccugagcuua

SEQ ID NO: 1079519 - RNA, 19 nt, Homo sapiens
  misc_RNA (1)...(19): siRNA sense strand
gcccacagcauuucgaaaa

SEQ ID NO: 1079520 - RNA, 19 nt, Homo sapiens
  misc_RNA (1)...(19): siRNA sense strand
ggaagaagcaaucagagaa

SEQ ID NO: 1079521 - RNA, 19 nt, Homo sapiens
  misc_RNA (1)...(19): siRNA sense strand
gaagaagcaaucagagaaa

SEQ ID NO: 1079522 - RNA, 19 nt, Homo sapiens
  misc_RNA (1)...(19): siRNA sense strand
aaaggaagaagcaaucaga

SEQ ID NO: 1079523 - RNA, 19 nt, Homo sapiens
  misc_RNA (1)...(19): siRNA sense strand
uuaauucucugccugacau

SEQ ID NO: 1079524 - RNA, 19 nt, Homo sapiens
  misc_RNA (1)...(19): siRNA sense strand
gaaaggaagaagcaaucag

SEQ ID NO: 1079525 - RNA, 19 nt, Homo sapiens
  misc_RNA (1)...(19): siRNA sense strand
gcugaaaggaagaagcaau

SEQ ID NO: 1079526 - RNA, 19 nt, Homo sapiens
  misc_RNA (1)...(19): siRNA sense strand
gacauuugcuggggugaaa

SEQ ID NO: 1079527 - RNA, 19 nt, Homo sapiens
  misc_RNA (1)...(19): siRNA sense strand
cuguauaucuuggcagcaa

SEQ ID NO: 1079528 - RNA, 19 nt, Homo sapiens
  misc_RNA (1)...(19): siRNA sense strand
gaauuggaagguucuugag

SEQ ID NO: 1079529 - RNA, 19 nt, Homo sapiens
  misc_RNA (1)...(19): siRNA sense strand
caaaugcacccucauguga

SEQ ID NO: 1079530 - RNA, 19 nt, Homo sapiens
  misc_RNA (1)...(19): siRNA sense strand
cggaacagaguaacgauua

SEQ ID NO: 1079531 - RNA, 19 nt, Homo sapiens
  misc_RNA (1)...(19): siRNA sense strand
gcaaaugcacccucaugug

SEQ ID NO: 1079532 - RNA, 19 nt, Homo sapiens
  misc_RNA (1)...(19): siRNA sense strand
cggccaagaugaacuacaa

SEQ ID NO: 1079533 - RNA, 19 nt, Homo sapiens
  misc_RNA (1)...(19): siRNA sense strand
gugaucagcugcgacaaga

SEQ ID NO: 1079534 - RNA, 19 nt, Homo sapiens
  misc_RNA (1)...(19): siRNA sense strand
ggaagugcgcuuucaugga

SEQ ID NO: 1079535 - RNA, 19 nt, Homo sapiens
  misc_RNA (1)...(19): siRNA sense strand
gcacguuccgcgacaccua

SEQ ID NO: 1079536 - RNA, 19 nt, Homo sapiens
  misc_RNA (1)...(19): siRNA sense strand
gcacgcugcagaucacaga

SEQ ID NO: 1079537 - RNA, 19 nt, Homo sapiens
  misc_RNA (1)...(19): siRNA sense strand
gggcaaaugcacccucaug

SEQ ID NO: 1079538 - RNA, 19 nt, Homo sapiens
  misc_RNA (1)...(19): siRNA sense strand
ggaagcagaagaggacaga

SEQ ID NO: 1079539 - RNA, 19 nt, Homo sapiens
  misc_RNA (1)...(19): siRNA sense strand
ggagaccucggccaagaug

SEQ ID NO: 1079540 - RNA, 19 nt, Homo sapiens
  misc_RNA (1)...(19): siRNA sense strand
ggcaacaagugcgaugaga

SEQ ID NO: 1079541 - RNA, 19 nt, Homo sapiens
  misc_RNA (1)...(19): siRNA sense strand
gaguggaagugcgcuuuca

SEQ ID NO: 1079542 - RNA, 19 nt, Homo sapiens
  misc_RNA (1)...(19): siRNA sense strand
gaggacagaccgcgucaag

SEQ ID NO: 1079543 - RNA, 19 nt, Homo sapiens
  misc_RNA (1)...(19): siRNA sense strand
gaugaacuacaacgucaag

SEQ ID NO: 1079544 - RNA, 19 nt, Homo sapiens
  misc_RNA (1)...(19): siRNA sense strand
ggcaaaugcacccucaugu

SEQ ID NO: 1079545 - RNA, 19 nt, Homo sapiens
  misc_RNA (1)...(19): siRNA sense strand
ugaacuacaacgucaagga

SEQ ID NO: 1079546 - RNA, 19 nt, Homo sapiens
  misc_RNA (1)...(19): siRNA sense strand
ggaguggaagugcgcuuuc

SEQ ID NO: 1079547 - RNA, 19 nt, Homo sapiens
  misc_RNA (1)...(19): siRNA sense strand
guggaagugcgcuuucaug

SEQ ID NO: 1079548 - RNA, 19 nt, Homo sapiens
  misc_RNA (1)...(19): siRNA sense strand
caacgucaaggagcucuuc

SEQ ID NO: 1079549 - RNA, 19 nt, Homo sapiens
  misc_RNA (1)...(19): siRNA sense strand
agaccucggccaagaugaa

SEQ ID NO: 1079550 - RNA, 19 nt, Homo sapiens
  misc_RNA (1)...(19): siRNA sense strand
gcagauagcucagaacuag

SEQ ID NO: 1079551 - RNA, 19 nt, Homo sapiens
  misc_RNA (1)...(19): siRNA sense strand
gcacauaauugccuuugau

SEQ ID NO: 1079552 - RNA, 19 nt, Homo sapiens
  misc_RNA (1)...(19): siRNA sense strand
gguguaagcuggccuucua

SEQ ID NO: 1079553 - RNA, 19 nt, Homo sapiens
  misc_RNA (1)...(19): siRNA sense strand
cauagccucuucugcauua

SEQ ID NO: 1079554 - RNA, 19 nt, Homo sapiens
  misc_RNA (1)...(19): siRNA sense strand
ccagaauacuccauccaua

SEQ ID NO: 1079555 - RNA, 19 nt, Homo sapiens
  misc_RNA (1)...(19): siRNA sense strand
gcucagaacuagccuacga

SEQ ID NO: 1079556 - RNA, 19 nt, Homo sapiens
  misc_RNA (1)...(19): siRNA sense strand
gaaugucccucuacuuuuc

SEQ ID NO: 1079557 - RNA, 19 nt, Homo sapiens
  misc_RNA (1)...(19): siRNA sense strand
cugaaugucccucuacuuu

SEQ ID NO: 1079558 - RNA, 19 nt, Homo sapiens
  misc_RNA (1)...(19): siRNA sense strand
uaucacuucuggagguauu

SEQ ID NO: 1079559 - RNA, 19 nt, Homo sapiens
  misc_RNA (1)...(19): siRNA sense strand
agaaggaggccugguguaa

SEQ ID NO: 1079560 - RNA, 19 nt, Homo sapiens
  misc_RNA (1)...(19): siRNA sense strand
uaauugccuuugaugaguu

SEQ ID NO: 1079561 - RNA, 19 nt, Homo sapiens
  misc_RNA (1)...(19): siRNA sense strand
ggucaugaaugccgacacu

SEQ ID NO: 1079562 - RNA, 19 nt, Homo sapiens
  misc_RNA (1)...(19): siRNA sense strand
ucaugaaugccgacacuuu

SEQ ID NO: 1079563 - RNA, 19 nt, Homo sapiens
  misc_RNA (1)...(19): siRNA sense strand
cgagggaacgguugaggaa

SEQ ID NO: 1079564 - RNA, 19 nt, Homo sapiens
  misc_RNA (1)...(19): siRNA sense strand
cagaauacuccauccauag

SEQ ID NO: 1079565 - RNA, 19 nt, Homo sapiens
  misc_RNA (1)...(19): siRNA sense strand
caugaaugccgacacuuug

SEQ ID NO: 1079566 - RNA, 19 nt, Homo sapiens
  misc_RNA (1)...(19): siRNA sense strand
gaaggaggccugguguaag

SEQ ID NO: 1079567 - RNA, 19 nt, Homo sapiens
  misc_RNA (1)...(19): siRNA sense strand
ugcaugaucuacacuuuag

SEQ ID NO: 1079568 - RNA, 19 nt, Homo sapiens
  misc_RNA (1)...(19): siRNA sense strand
gaugaguuaaggacagauu

SEQ ID NO: 1079569 - RNA, 19 nt, Homo sapiens
  misc_RNA (1)...(19): siRNA sense strand
cauaauugccuuugaugag

SEQ ID NO: 1079570 - RNA, 19 nt, Homo sapiens
  misc_RNA (1)...(19): siRNA sense strand
ucuacuaccuuuacugcau

SEQ ID NO: 1079571 - RNA, 19 nt, Homo sapiens
  misc_RNA (1)...(19): siRNA sense strand
ccagugcaauccuguucau

SEQ ID NO: 1079572 - RNA, 19 nt, Homo sapiens
  misc_RNA (1)...(19): siRNA sense strand
cugcaugaucuacacuuua

SEQ ID NO: 1079573 - RNA, 19 nt, Homo sapiens
  misc_RNA (1)...(19): siRNA sense strand
aauugccuuugaugaguua

SEQ ID NO: 1079574 - RNA, 19 nt, Homo sapiens
  misc_RNA (1)...(19): siRNA sense strand
auaauugccuuugaugagu

SEQ ID NO: 1079575 - RNA, 19 nt, Homo sapiens
  misc_RNA (1)...(19): siRNA sense strand
gaccagugcaauccuguuc

SEQ ID NO: 1079576 - RNA, 19 nt, Homo sapiens
  misc_RNA (1)...(19): siRNA sense strand
cagaaggaggccuggugua

SEQ ID NO: 1079577 - RNA, 19 nt, Homo sapiens
  misc_RNA (1)...(19): siRNA sense strand
ccuucuaucuccucuccuu

SEQ ID NO: 1079578 - RNA, 19 nt, Homo sapiens
  misc_RNA (1)...(19): siRNA sense strand
uaucuccucuccuucuucu

SEQ ID NO: 1079579 - RNA, 19 nt, Homo sapiens
  misc_RNA (1)...(19): siRNA sense strand
agggaacgguugaggaaca

SEQ ID NO: 1079580 - RNA, 19 nt, Homo sapiens
  misc_RNA (1)...(19): siRNA sense strand
acugcaugaucuacacuuu

SEQ ID NO: 1079581 - RNA, 19 nt, Homo sapiens
  misc_RNA (1)...(19): siRNA sense strand
gggaacgguugaggaacau

SEQ ID NO: 1079582 - RNA, 19 nt, Homo sapiens
  misc_RNA (1)...(19): siRNA sense strand
gcgcaucugcuuccuucug

SEQ ID NO: 1079583 - RNA, 19 nt, Homo sapiens
  misc_RNA (1)...(19): siRNA sense strand
uaccuuuacugcaugaucu

SEQ ID NO: 1079584 - RNA, 19 nt, Homo sapiens
  misc_RNA (1)...(19): siRNA sense strand
gaguuaaggacagauuuua

SEQ ID NO: 1079585 - RNA, 19 nt, Homo sapiens
  misc_RNA (1)...(19): siRNA sense strand
guaagcuggccuucuaucu

SEQ ID NO: 1079586 - RNA, 19 nt, Homo sapiens
  misc_RNA (1)...(19): siRNA sense strand
augccgacacuuugaguua

SEQ ID NO: 1079587 - RNA, 19 nt, Homo sapiens
  misc_RNA (1)...(19): siRNA sense strand
ucuaucacuucuggaggua

SEQ ID NO: 1079588 - RNA, 19 nt, Homo sapiens
  misc_RNA (1)...(19): siRNA sense strand
gcugaaugucccucuacuu

SEQ ID NO: 1079589 - RNA, 19 nt, Homo sapiens
  misc_RNA (1)...(19): siRNA sense strand
aaggaggccugguguaagc

SEQ ID NO: 1079590 - RNA, 19 nt, Homo sapiens
  misc_RNA (1)...(19): siRNA sense strand
gaaugccgacacuuugagu

SEQ ID NO: 1079591 - RNA, 19 nt, Homo sapiens
  misc_RNA (1)...(19): siRNA sense strand
uccagcagauagcucagaa

SEQ ID NO: 1079592 - RNA, 19 nt, Homo sapiens
  misc_RNA (1)...(19): siRNA sense strand
ggaaagcugugaagaacuu

SEQ ID NO: 1079593 - RNA, 19 nt, Homo sapiens
  misc_RNA (1)...(19): siRNA sense strand
ggacaccgcccaucaguac

SEQ ID NO: 1079594 - RNA, 19 nt, Homo sapiens
  misc_RNA (1)...(19): siRNA sense strand
gcggagcacuucaucaaag

SEQ ID NO: 1079595 - RNA, 19 nt, Homo sapiens
  misc_RNA (1)...(19): siRNA sense strand
gagaaggccauucccaaga

SEQ ID NO: 1079596 - RNA, 19 nt, Homo sapiens
  misc_RNA (1)...(19): siRNA sense strand
agaaggccauucccaagaa

SEQ ID NO: 1079597 - RNA, 19 nt, Homo sapiens
  misc_RNA (1)...(19): siRNA sense strand
gcacgagggcacccagauu

SEQ ID NO: 1079598 - RNA, 19 nt, Homo sapiens
  misc_RNA (1)...(19): siRNA sense strand
gugaagaacuuuugugaug

SEQ ID NO: 1079599 - RNA, 19 nt, Homo sapiens
  misc_RNA (1)...(19): siRNA sense strand
cuacauagacaccagcauu

SEQ ID NO: 1079600 - RNA, 19 nt, Homo sapiens
  misc_RNA (1)...(19): siRNA sense strand
cccgagaucguuuccauua

SEQ ID NO: 1079601 - RNA, 19 nt, Homo sapiens
  misc_RNA (1)...(19): siRNA sense strand
gggcggagcacuucaucaa

SEQ ID NO: 1079602 - RNA, 19 nt, Homo sapiens
  misc_RNA (1)...(19): siRNA sense strand
gaacuggaaagcugugaag

SEQ ID NO: 1079603 - RNA, 19 nt, Homo sapiens
  misc_RNA (1)...(19): siRNA sense strand
ucaauggcaaguacuauga

SEQ ID NO: 1079604 - RNA, 19 nt, Homo sapiens
  misc_RNA (1)...(19): siRNA sense strand
gggccuggcuacauagaca

SEQ ID NO: 1079605 - RNA, 19 nt, Homo sapiens
  misc_RNA (1)...(19): siRNA sense strand
gaaggccauucccaagaag

SEQ ID NO: 1079606 - RNA, 19 nt, Homo sapiens
  misc_RNA (1)...(19): siRNA sense strand
cggagcacuucaucaaaga

SEQ ID NO: 1079607 - RNA, 19 nt, Homo sapiens
  misc_RNA (1)...(19): siRNA sense strand
ccacccgccuguauuugga

SEQ ID NO: 1079608 - RNA, 19 nt, Homo sapiens
  misc_RNA (1)...(19): siRNA sense strand
gagcacuucaucaaagaga

SEQ ID NO: 1079609 - RNA, 19 nt, Homo sapiens
  misc_RNA (1)...(19): siRNA sense strand
cuccaaugguuucuccuuu

SEQ ID NO: 1079610 - RNA, 19 nt, Homo sapiens
  misc_RNA (1)...(19): siRNA sense strand
uccaaugguuucuccuuug

SEQ ID NO: 1079611 - RNA, 19 nt, Homo sapiens
  misc_RNA (1)...(19): siRNA sense strand
uggcucccauggugcauuu

SEQ ID NO: 1079612 - RNA, 19 nt, Homo sapiens
  misc_RNA (1)...(19): siRNA sense strand
cggcauguacaccuacuuu

SEQ ID NO: 1079613 - RNA, 19 nt, Homo sapiens
  misc_RNA (1)...(19): siRNA sense strand
gagggcacccagauugaga

SEQ ID NO: 1079614 - RNA, 19 nt, Homo sapiens
  misc_RNA (1)...(19): siRNA sense strand
aaugguuucuccuuugguu

SEQ ID NO: 1079615 - RNA, 19 nt, Homo sapiens
  misc_RNA (1)...(19): siRNA sense strand
ggcccgagaucguuuccau

SEQ ID NO: 1079616 - RNA, 19 nt, Homo sapiens
  misc_RNA (1)...(19): siRNA sense strand
gagggccacacccacgaua

SEQ ID NO: 1079617 - RNA, 19 nt, Homo sapiens
  misc_RNA (1)...(19): siRNA sense strand
acaccuacuuugccuccaa

SEQ ID NO: 1079618 - RNA, 19 nt, Homo sapiens
  misc_RNA (1)...(19): siRNA sense strand
gcauguacaccuacuuugc

SEQ ID NO: 1079619 - RNA, 19 nt, Homo sapiens
  misc_RNA (1)...(19): siRNA sense strand
cuggaaagcugugaagaac

SEQ ID NO: 1079620 - RNA, 19 nt, Homo sapiens
  misc_RNA (1)...(19): siRNA sense strand
cacgagggcacccagauug

SEQ ID NO: 1079621 - RNA, 19 nt, Homo sapiens
  misc_RNA (1)...(19): siRNA sense strand
uacuuugccuccaaugguu

SEQ ID NO: 1079622 - RNA, 19 nt, Homo sapiens
  misc_RNA (1)...(19): siRNA sense strand
caguacagcauccagguau

SEQ ID NO: 1079623 - RNA, 19 nt, Homo sapiens
  misc_RNA (1)...(19): siRNA sense strand
cagggucaauggcaaguac

SEQ ID NO: 1079624 - RNA, 19 nt, Homo sapiens
  misc_RNA (1)...(19): siRNA sense strand
gcauucggcccuggaacaa

SEQ ID NO: 1079625 - RNA, 19 nt, Homo sapiens
  misc_RNA (1)...(19): siRNA sense strand
ucaguacagcauccaggua

SEQ ID NO: 1079626 - RNA, 19 nt, Homo sapiens
  misc_RNA (1)...(19): siRNA sense strand
cacccacccgccuguauuu

SEQ ID NO: 1079627 - RNA, 19 nt, Homo sapiens
  misc_RNA (1)...(19): siRNA sense strand
cgagaucguuuccauuacc

SEQ ID NO: 1079628 - RNA, 19 nt, Homo sapiens
  misc_RNA (1)...(19): siRNA sense strand
ggauuugacggcauguaca

SEQ ID NO: 1079629 - RNA, 19 nt, Homo sapiens
  misc_RNA (1)...(19): siRNA sense strand
aauggcaaguacuaugaga

SEQ ID NO: 1079630 - RNA, 19 nt, Homo sapiens
  misc_RNA (1)...(19): siRNA sense strand
ggucaauggcaaguacuau

SEQ ID NO: 1079631 - RNA, 19 nt, Homo sapiens
  misc_RNA (1)...(19): siRNA sense strand
aagaacagcaugggcaaga

SEQ ID NO: 1079632 - RNA, 19 nt, Homo sapiens
  misc_RNA (1)...(19): siRNA sense strand
guacagcauccagguaugg

SEQ ID NO: 1079633 - RNA, 19 nt, Homo sapiens
  misc_RNA (1)...(19): siRNA sense strand
ggcggagcacuucaucaaa

SEQ ID NO: 1079634 - RNA, 19 nt, Homo sapiens
  misc_RNA (1)...(19): siRNA sense strand
acacucaucuccaguccua

SEQ ID NO: 1079635 - RNA, 19 nt, Homo sapiens
  misc_RNA (1)...(19): siRNA sense strand
gucaagcccuucauccauu

SEQ ID NO: 1079636 - RNA, 19 nt, Homo sapiens
  misc_RNA (1)...(19): siRNA sense strand
gaguuccacugcugugauu

SEQ ID NO: 1079637 - RNA, 19 nt, Homo sapiens
  misc_RNA (1)...(19): siRNA sense strand
caacucaaauccuccuuuu

SEQ ID NO: 1079638 - RNA, 19 nt, Homo sapiens
  misc_RNA (1)...(19): siRNA sense strand
ucaucugucugaggucuua

SEQ ID NO: 1079639 - RNA, 19 nt, Homo sapiens
  misc_RNA (1)...(19): siRNA sense strand
ucaccgauguauucauuca

SEQ ID NO: 1079640 - RNA, 19 nt, Homo sapiens
  misc_RNA (1)...(19): siRNA sense strand
ccuuugggcucaagaguuc

SEQ ID NO: 1079641 - RNA, 19 nt, Homo sapiens
  misc_RNA (1)...(19): siRNA sense strand
gaagaaauccugcuuuugc

SEQ ID NO: 1079642 - RNA, 19 nt, Homo sapiens
  misc_RNA (1)...(19): siRNA sense strand
agaauguacucuugucucu

SEQ ID NO: 1079643 - RNA, 19 nt, Homo sapiens
  misc_RNA (1)...(19): siRNA sense strand
ugccaucaccucucgcuua

SEQ ID NO: 1079644 - RNA, 19 nt, Homo sapiens
  misc_RNA (1)...(19): siRNA sense strand
auucaccgauguauucauu

SEQ ID NO: 1079645 - RNA, 19 nt, Homo sapiens
  misc_RNA (1)...(19): siRNA sense strand
aagcaccuaucuuccagaa

SEQ ID NO: 1079646 - RNA, 19 nt, Homo sapiens
  misc_RNA (1)...(19): siRNA sense strand
cagacuccaugaacuuugu

SEQ ID NO: 1079647 - RNA, 19 nt, Homo sapiens
  misc_RNA (1)...(19): siRNA sense strand
ccagaagacccaccuccuu

SEQ ID NO: 1079648 - RNA, 19 nt, Homo sapiens
  misc_RNA (1)...(19): siRNA sense strand
cuucucgucuccucuaguu

SEQ ID NO: 1079649 - RNA, 19 nt, Homo sapiens
  misc_RNA (1)...(19): siRNA sense strand
gccaucaccucucgcuuac

SEQ ID NO: 1079650 - RNA, 19 nt, Homo sapiens
  misc_RNA (1)...(19): siRNA sense strand
ucaagcccuucauccauuc

SEQ ID NO: 1079651 - RNA, 19 nt, Homo sapiens
  misc_RNA (1)...(19): siRNA sense strand
gccagaauguacucuuguc

SEQ ID NO: 1079652 - RNA, 19 nt, Homo sapiens
  misc_RNA (1)...(19): siRNA sense strand
ccaacucaaauccuccuuu

SEQ ID NO: 1079653 - RNA, 19 nt, Homo sapiens
  misc_RNA (1)...(19): siRNA sense strand
gauucaugcagaacaaaga

SEQ ID NO: 1079654 - RNA, 19 nt, Homo sapiens
  misc_RNA (1)...(19): siRNA sense strand
caucaccucucgcuuaccu

SEQ ID NO: 1079655 - RNA, 19 nt, Homo sapiens
  misc_RNA (1)...(19): siRNA sense strand
ugugauucaugcagaacaa

SEQ ID NO: 1079656 - RNA, 19 nt, Homo sapiens
  misc_RNA (1)...(19): siRNA sense strand
uccauucaccgauguauuc

SEQ ID NO: 1079657 - RNA, 19 nt, Homo sapiens
  misc_RNA (1)...(19): siRNA sense strand
acucuugucucuccuucug

SEQ ID NO: 1079658 - RNA, 19 nt, Homo sapiens
  misc_RNA (1)...(19): siRNA sense strand
ucucgucuccucuaguuau

SEQ ID NO: 1079659 - RNA, 19 nt, Homo sapiens
  misc_RNA (1)...(19): siRNA sense strand
uugccagaauguacucuug

SEQ ID NO: 1079660 - RNA, 19 nt, Homo sapiens
  misc_RNA (1)...(19): siRNA sense strand
uaaugaagcuggaauacaa

SEQ ID NO: 1079661 - RNA, 19 nt, Homo sapiens
  misc_RNA (1)...(19): siRNA sense strand
caaagaagcgcccaacaaa

SEQ ID NO: 1079662 - RNA, 19 nt, Homo sapiens
  misc_RNA (1)...(19): siRNA sense strand
gcuggaugcugaugaaauu

SEQ ID NO: 1079663 - RNA, 19 nt, Homo sapiens
  misc_RNA (1)...(19): siRNA sense strand
caaccacacuggaagaaga

SEQ ID NO: 1079664 - RNA, 19 nt, Homo sapiens
  misc_RNA (1)...(19): siRNA sense strand
ccgcauagauucucugauc

SEQ ID NO: 1079665 - RNA, 19 nt, Homo sapiens
  misc_RNA (1)...(19): siRNA sense strand
ugaaauugcugccaaaugc

SEQ ID NO: 1079666 - RNA, 19 nt, Homo sapiens
  misc_RNA (1)...(19): siRNA sense strand
gaauacaaccacuuacaga

SEQ ID NO: 1079667 - RNA, 19 nt, Homo sapiens
  misc_RNA (1)...(19): siRNA sense strand
gcuggaauacaaccacuua

SEQ ID NO: 1079668 - RNA, 19 nt, Homo sapiens
  misc_RNA (1)...(19): siRNA sense strand
ccaaagaagcgcccaacaa

SEQ ID NO: 1079669 - RNA, 19 nt, Homo sapiens
  misc_RNA (1)...(19): siRNA sense strand
caacaaagacagaaucaac

SEQ ID NO: 1079670 - RNA, 19 nt, Homo sapiens
  misc_RNA (1)...(19): siRNA sense strand
gaaauaaugaagcuggaau

SEQ ID NO: 1079671 - RNA, 19 nt, Homo sapiens
  misc_RNA (1)...(19): siRNA sense strand
aagaagcgcccaacaaaga

SEQ ID NO: 1079672 - RNA, 19 nt, Homo sapiens
  misc_RNA (1)...(19): siRNA sense strand
gaccuucuccgcauagauu

SEQ ID NO: 1079673 - RNA, 19 nt, Homo sapiens
  misc_RNA (1)...(19): siRNA sense strand
guagauaccaaagggauuu

SEQ ID NO: 1079674 - RNA, 19 nt, Homo sapiens
  misc_RNA (1)...(19): siRNA sense strand
gcagcaaugccaacuacaa

SEQ ID NO: 1079675 - RNA, 19 nt, Homo sapiens
  misc_RNA (1)...(19): siRNA sense strand
caaagacagaaucaacauu

SEQ ID NO: 1079676 - RNA, 19 nt, Homo sapiens
  misc_RNA (1)...(19): siRNA sense strand
ucacagggaucagcuagag

SEQ ID NO: 1079677 - RNA, 19 nt, Homo sapiens
  misc_RNA (1)...(19): siRNA sense strand
ugaugaaauugcugccaaa

SEQ ID NO: 1079678 - RNA, 19 nt, Homo sapiens
  misc_RNA (1)...(19): siRNA sense strand
aagacagaaucaacauuug

SEQ ID NO: 1079679 - RNA, 19 nt, Homo sapiens
  misc_RNA (1)...(19): siRNA sense strand
ggaauacaaccacuuacag

SEQ ID NO: 1079680 - RNA, 19 nt, Homo sapiens
  misc_RNA (1)...(19): siRNA sense strand
uacaaccacuuacagacuu

SEQ ID NO: 1079681 - RNA, 19 nt, Homo sapiens
  misc_RNA (1)...(19): siRNA sense strand
caacauuuggguaccuuug

SEQ ID NO: 1079682 - RNA, 19 nt, Homo sapiens
  misc_RNA (1)...(19): siRNA sense strand
ggaaauaaugaagcuggaa

SEQ ID NO: 1079683 - RNA, 19 nt, Homo sapiens
  misc_RNA (1)...(19): siRNA sense strand
gaucucuuccuccuucaug

SEQ ID NO: 1079684 - RNA, 19 nt, Homo sapiens
  misc_RNA (1)...(19): siRNA sense strand
caaagggauuuuaggauca

SEQ ID NO: 1079685 - RNA, 19 nt, Homo sapiens
  misc_RNA (1)...(19): siRNA sense strand
caaccuccuccuguagaua

SEQ ID NO: 1079686 - RNA, 19 nt, Homo sapiens
  misc_RNA (1)...(19): siRNA sense strand
gcaaugccaacuacaacca

SEQ ID NO: 1079687 - RNA, 19 nt, Homo sapiens
  misc_RNA (1)...(19): siRNA sense strand
guacccagaggcagcaaug

SEQ ID NO: 1079688 - RNA, 19 nt, Homo sapiens
  misc_RNA (1)...(19): siRNA sense strand
ccacuuacagacuucacaa

SEQ ID NO: 1079689 - RNA, 19 nt, Homo sapiens
  misc_RNA (1)...(19): siRNA sense strand
cuacaaccacacuggaaga

SEQ ID NO: 1079690 - RNA, 19 nt, Homo sapiens
  misc_RNA (1)...(19): siRNA sense strand
uucacaaccuccuccugua

SEQ ID NO: 1079691 - RNA, 19 nt, Homo sapiens
  misc_RNA (1)...(19): siRNA sense strand
ucacaaccuccuccuguag

SEQ ID NO: 1079692 - RNA, 19 nt, Homo sapiens
  misc_RNA (1)...(19): siRNA sense strand
gaugaaauugcugccaaau

SEQ ID NO: 1079693 - RNA, 19 nt, Homo sapiens
  misc_RNA (1)...(19): siRNA sense strand
uacaggagcaucucaagca

SEQ ID NO: 1079694 - RNA, 19 nt, Homo sapiens
  misc_RNA (1)...(19): siRNA sense strand
gaagcgcccaacaaagaca

SEQ ID NO: 1079695 - RNA, 19 nt, Homo sapiens
  misc_RNA (1)...(19): siRNA sense strand
aaagaagcgcccaacaaag

SEQ ID NO: 1079696 - RNA, 19 nt, Homo sapiens
  misc_RNA (1)...(19): siRNA sense strand
ggucuccauuucucucucu

SEQ ID NO: 1079697 - RNA, 19 nt, Homo sapiens
  misc_RNA (1)...(19): siRNA sense strand
ugugcuggaugcugaugaa

SEQ ID NO: 1079698 - RNA, 19 nt, Homo sapiens
  misc_RNA (1)...(19): siRNA sense strand
acaaagacagaaucaacau

SEQ ID NO: 1079699 - RNA, 19 nt, Homo sapiens
  misc_RNA (1)...(19): siRNA sense strand
ucaaggggcucuggcaaga

SEQ ID NO: 1079700 - RNA, 19 nt, Homo sapiens
  misc_RNA (1)...(19): siRNA sense strand
ucccuuggugauuguauua

SEQ ID NO: 1079701 - RNA, 19 nt, Homo sapiens
  misc_RNA (1)...(19): siRNA sense strand
ggagaguucugcuguuuga

SEQ ID NO: 1079702 - RNA, 19 nt, Homo sapiens
  misc_RNA (1)...(19): siRNA sense strand
gaaugcagaugauagcaaa

SEQ ID NO: 1079703 - RNA, 19 nt, Homo sapiens
  misc_RNA (1)...(19): siRNA sense strand
gcgcaaaguucuuaauaau

SEQ ID NO: 1079704 - RNA, 19 nt, Homo sapiens
  misc_RNA (1)...(19): siRNA sense strand
gaugauagcaaacugauuu

SEQ ID NO: 1079705 - RNA, 19 nt, Homo sapiens
  misc_RNA (1)...(19): siRNA sense strand
gaaaugggauguuuaagcu

SEQ ID NO: 1079706 - RNA, 19 nt, Homo sapiens
  misc_RNA (1)...(19): siRNA sense strand
gaagaggcauauuccauca

SEQ ID NO: 1079707 - RNA, 19 nt, Homo sapiens
  misc_RNA (1)...(19): siRNA sense strand
ucaaggagauugcagauuc

SEQ ID NO: 1079708 - RNA, 19 nt, Homo sapiens
  misc_RNA (1)...(19): siRNA sense strand
gaacaucucaagccugaaa

SEQ ID NO: 1079709 - RNA, 19 nt, Homo sapiens
  misc_RNA (1)...(19): siRNA sense strand
caaacacccuggaacuauu

SEQ ID NO: 1079710 - RNA, 19 nt, Homo sapiens
  misc_RNA (1)...(19): siRNA sense strand
cagagagccugauugaauu

SEQ ID NO: 1079711 - RNA, 19 nt, Homo sapiens
  misc_RNA (1)...(19): siRNA sense strand
ccaacaauaucuucuacuu

SEQ ID NO: 1079712 - RNA, 19 nt, Homo sapiens
  misc_RNA (1)...(19): siRNA sense strand
caccaucuauugacuauga

SEQ ID NO: 1079713 - RNA, 19 nt, Homo sapiens
  misc_RNA (1)...(19): siRNA sense strand
agaaggaauucaaugagua

SEQ ID NO: 1079714 - RNA, 19 nt, Homo sapiens
  misc_RNA (1)...(19): siRNA sense strand
caaagaauacucuguuaga

SEQ ID NO: 1079715 - RNA, 19 nt, Homo sapiens
  misc_RNA (1)...(19): siRNA sense strand
gcucagacgcugcauguuu

SEQ ID NO: 1079716 - RNA, 19 nt, Homo sapiens
  misc_RNA (1)...(19): siRNA sense strand
gcagagcaaugauccaagu

SEQ ID NO: 1079717 - RNA, 19 nt, Homo sapiens
  misc_RNA (1)...(19): siRNA sense strand
ggaaagagagagacagaau

SEQ ID NO: 1079718 - RNA, 19 nt, Homo sapiens
  misc_RNA (1)...(19): siRNA sense strand
gaugauauacguucuuuca

SEQ ID NO: 1079719 - RNA, 19 nt, Homo sapiens
  misc_RNA (1)...(19): siRNA sense strand
caucaccauuuaugaauug

SEQ ID NO: 1079720 - RNA, 19 nt, Homo sapiens
  misc_RNA (1)...(19): siRNA sense strand
uguuuaagcuucuccguuu

SEQ ID NO: 1079721 - RNA, 19 nt, Homo sapiens
  misc_RNA (1)...(19): siRNA sense strand
aagauucgcucaauugugu

SEQ ID NO: 1079722 - RNA, 19 nt, Homo sapiens
  misc_RNA (1)...(19): siRNA sense strand
gggaagauucgcucaauug

SEQ ID NO: 1079723 - RNA, 19 nt, Homo sapiens
  misc_RNA (1)...(19): siRNA sense strand
gaaagagagagacagaaug

SEQ ID NO: 1079724 - RNA, 19 nt, Homo sapiens
  misc_RNA (1)...(19): siRNA sense strand
agucaaaucuugucuacug

SEQ ID NO: 1079725 - RNA, 19 nt, Homo sapiens
  misc_RNA (1)...(19): siRNA sense strand
ucaaagagccuggauguca

SEQ ID NO: 1079726 - RNA, 19 nt, Homo sapiens
  misc_RNA (1)...(19): siRNA sense strand
uaucuuugcuguuggauca

SEQ ID NO: 1079727 - RNA, 19 nt, Homo sapiens
  misc_RNA (1)...(19): siRNA sense strand
caaagagccuggaugucau

SEQ ID NO: 1079728 - RNA, 19 nt, Homo sapiens
  misc_RNA (1)...(19): siRNA sense strand
ggagaguguuccuuuagca

SEQ ID NO: 1079729 - RNA, 19 nt, Homo sapiens
  misc_RNA (1)...(19): siRNA sense strand
cuacuucgaugaacagauc

SEQ ID NO: 1079730 - RNA, 19 nt, Homo sapiens
  misc_RNA (1)...(19): siRNA sense strand
cagaaggaauucaaugagu

SEQ ID NO: 1079731 - RNA, 19 nt, Homo sapiens
  misc_RNA (1)...(19): siRNA sense strand
aaccugccaucaccauuua

SEQ ID NO: 1079732 - RNA, 19 nt, Homo sapiens
  misc_RNA (1)...(19): siRNA sense strand
cgagagauaucggcguuug

SEQ ID NO: 1079733 - RNA, 19 nt, Homo sapiens
  misc_RNA (1)...(19): siRNA sense strand
ggacacacagggaagauuc

SEQ ID NO: 1079734 - RNA, 19 nt, Homo sapiens
  misc_RNA (1)...(19): siRNA sense strand
gagcuucaguccacaggau

SEQ ID NO: 1079735 - RNA, 19 nt, Homo sapiens
  misc_RNA (1)...(19): siRNA sense strand
gauugcagauuccuugauc

SEQ ID NO: 1079736 - RNA, 19 nt, Homo sapiens
  misc_RNA (1)...(19): siRNA sense strand
aaacuacgccucaugaauc

SEQ ID NO: 1079737 - RNA, 19 nt, Homo sapiens
  misc_RNA (1)...(19): siRNA sense strand
gacaaacuacgccucauga

SEQ ID NO: 1079738 - RNA, 19 nt, Homo sapiens
  misc_RNA (1)...(19): siRNA sense strand
gacgucaccuccagaguca

SEQ ID NO: 1079739 - RNA, 19 nt, Homo sapiens
  misc_RNA (1)...(19): siRNA sense strand
ggaaaugggauguuuaagc

SEQ ID NO: 1079740 - RNA, 19 nt, Homo sapiens
  misc_RNA (1)...(19): siRNA sense strand
gaucagaccacacccucaa

SEQ ID NO: 1079741 - RNA, 19 nt, Homo sapiens
  misc_RNA (1)...(19): siRNA sense strand
gaaucgacacucagaacaa

SEQ ID NO: 1079742 - RNA, 19 nt, Homo sapiens
  misc_RNA (1)...(19): siRNA sense strand
gcagaugauagcaaacuga

SEQ ID NO: 1079743 - RNA, 19 nt, Homo sapiens
  misc_RNA (1)...(19): siRNA sense strand
gaucccacguggccaacaa

SEQ ID NO: 1079744 - RNA, 19 nt, Homo sapiens
  misc_RNA (1)...(19): siRNA sense strand
gaguguuccuuuagcaaug

SEQ ID NO: 1079745 - RNA, 19 nt, Homo sapiens
  misc_RNA (1)...(19): siRNA sense strand
ccauccgccuuuggaauua

SEQ ID NO: 1079746 - RNA, 19 nt, Homo sapiens
  misc_RNA (1)...(19): siRNA sense strand
gaagagucagggcauguug

SEQ ID NO: 1079747 - RNA, 19 nt, Homo sapiens
  misc_RNA (1)...(19): siRNA sense strand
cagaaugcgugcucaaguc

SEQ ID NO: 1079748 - RNA, 19 nt, Homo sapiens
  misc_RNA (1)...(19): siRNA sense strand
gaagauucgcucaauugug

SEQ ID NO: 1079749 - RNA, 19 nt, Homo sapiens
  misc_RNA (1)...(19): siRNA sense strand
caaacuacgccucaugaau

SEQ ID NO: 1079750 - RNA, 19 nt, Homo sapiens
  misc_RNA (1)...(19): siRNA sense strand
guucuccacucccuuccua

SEQ ID NO: 1079751 - RNA, 19 nt, Homo sapiens
  misc_RNA (1)...(19): siRNA sense strand
ccaucaccauuuaugaauu

SEQ ID NO: 1079752 - RNA, 19 nt, Homo sapiens
  misc_RNA (1)...(19): siRNA sense strand
ccacgagccuagagaacau

SEQ ID NO: 1079753 - RNA, 19 nt, Homo sapiens
  misc_RNA (1)...(19): siRNA sense strand
guacaauguggaucagaaa

SEQ ID NO: 1079754 - RNA, 19 nt, Homo sapiens
  misc_RNA (1)...(19): siRNA sense strand
ggaagauucgcucaauugu

SEQ ID NO: 1079755 - RNA, 19 nt, Homo sapiens
  misc_RNA (1)...(19): siRNA sense strand
cuuccaaguucagaaauuu

SEQ ID NO: 1079756 - RNA, 19 nt, Homo sapiens
  misc_RNA (1)...(19): siRNA sense strand
gaaccauucgugccaugaa

SEQ ID NO: 1079757 - RNA, 19 nt, Homo sapiens
  misc_RNA (1)...(19): siRNA sense strand
cagauggugcuguguauga

SEQ ID NO: 1079758 - RNA, 19 nt, Homo sapiens
  misc_RNA (1)...(19): siRNA sense strand
caacaauaucuucuacuuc

SEQ ID NO: 1079759 - RNA, 19 nt, Homo sapiens
  misc_RNA (1)...(19): siRNA sense strand
caauguggaucagaaaugg

SEQ ID NO: 1079760 - RNA, 19 nt, Homo sapiens
  misc_RNA (1)...(19): siRNA sense strand
aaaccugccaucaccauuu

SEQ ID NO: 1079761 - RNA, 19 nt, Homo sapiens
  misc_RNA (1)...(19): siRNA sense strand
ggaaugcagaugauagcaa

SEQ ID NO: 1079762 - RNA, 19 nt, Homo sapiens
  misc_RNA (1)...(19): siRNA sense strand
caccauuuaugaauuguca

SEQ ID NO: 1079763 - RNA, 19 nt, Homo sapiens
  misc_RNA (1)...(19): siRNA sense strand
ccaguaagaaccaacucua

SEQ ID NO: 1079764 - RNA, 19 nt, Homo sapiens
  misc_RNA (1)...(19): siRNA sense strand
gaaggaauucaaugaguac

SEQ ID NO: 1079765 - RNA, 19 nt, Homo sapiens
  misc_RNA (1)...(19): siRNA sense strand
cagggaagauucgcucaau

SEQ ID NO: 1079766 - RNA, 19 nt, Homo sapiens
  misc_RNA (1)...(19): siRNA sense strand
guaguaggguuugcugaca

SEQ ID NO: 1079767 - RNA, 19 nt, Homo sapiens
  misc_RNA (1)...(19): siRNA sense strand
cggaagcgcaaaguucuua

SEQ ID NO: 1079768 - RNA, 19 nt, Homo sapiens
  misc_RNA (1)...(19): siRNA sense strand
gaaucaccaucuauugacu

SEQ ID NO: 1079769 - RNA, 19 nt, Homo sapiens
  misc_RNA (1)...(19): siRNA sense strand
auucauccaucauucauug

SEQ ID NO: 1079770 - RNA, 19 nt, Homo sapiens
  misc_RNA (1)...(19): siRNA sense strand
gcagaaggaauucaaugag

SEQ ID NO: 1079771 - RNA, 19 nt, Homo sapiens
  misc_RNA (1)...(19): siRNA sense strand
cuugauccuucgagagaua

SEQ ID NO: 1079772 - RNA, 19 nt, Homo sapiens
  misc_RNA (1)...(19): siRNA sense strand
gcagucaauggaaauguga

SEQ ID NO: 1079773 - RNA, 19 nt, Homo sapiens
  misc_RNA (1)...(19): siRNA sense strand
aaacacccuggaacuauuu

SEQ ID NO: 1079774 - RNA, 19 nt, Homo sapiens
  misc_RNA (1)...(19): siRNA sense strand
gguggcugaugacaagauu

SEQ ID NO: 1079775 - RNA, 19 nt, Homo sapiens
  misc_RNA (1)...(19): siRNA sense strand
aagcgcaaaguucuuaaua

SEQ ID NO: 1079776 - RNA, 19 nt, Homo sapiens
  misc_RNA (1)...(19): siRNA sense strand
ugacacaggcaaacucuuc

SEQ ID NO: 1079777 - RNA, 19 nt, Homo sapiens
  misc_RNA (1)...(19): siRNA sense strand
agcgcaaaguucuuaauaa

SEQ ID NO: 1079778 - RNA, 19 nt, Homo sapiens
  misc_RNA (1)...(19): siRNA sense strand
ccacguggccaacaauauc

SEQ ID NO: 1079779 - RNA, 19 nt, Homo sapiens
  misc_RNA (1)...(19): siRNA sense strand
gaaguacaauguggaucag

SEQ ID NO: 1079780 - RNA, 19 nt, Homo sapiens
  misc_RNA (1)...(19): siRNA sense strand
uaaggaauaccaagaagag

SEQ ID NO: 1079781 - RNA, 19 nt, Homo sapiens
  misc_RNA (1)...(19): siRNA sense strand
gaucgauccauccgccuuu

SEQ ID NO: 1079782 - RNA, 19 nt, Homo sapiens
  misc_RNA (1)...(19): siRNA sense strand
ugaaguacaauguggauca

SEQ ID NO: 1079783 - RNA, 19 nt, Homo sapiens
  misc_RNA (1)...(19): siRNA sense strand
ccuccagagucaaaucuug

SEQ ID NO: 1079784 - RNA, 19 nt, Homo sapiens
  misc_RNA (1)...(19): siRNA sense strand
gccauugucaucucacauu

SEQ ID NO: 1079785 - RNA, 19 nt, Homo sapiens
  misc_RNA (1)...(19): siRNA sense strand
guguaugaauggaaucugu

SEQ ID NO: 1079786 - RNA, 19 nt, Homo sapiens
  misc_RNA (1)...(19): siRNA sense strand
acaaacacccuggaacuau

SEQ ID NO: 1079787 - RNA, 19 nt, Homo sapiens
  misc_RNA (1)...(19): siRNA sense strand
caggcaaacucuuccucuu

SEQ ID NO: 1079788 - RNA, 19 nt, Homo sapiens
  misc_RNA (1)...(19): siRNA sense strand
gaagcgcaaaguucuuaau

SEQ ID NO: 1079789 - RNA, 19 nt, Homo sapiens
  misc_RNA (1)...(19): siRNA sense strand
gauagcaaacugauuucug

SEQ ID NO: 1079790 - RNA, 19 nt, Homo sapiens
  misc_RNA (1)...(19): siRNA sense strand
ccuguuugcugcagucaau

SEQ ID NO: 1079791 - RNA, 19 nt, Homo sapiens
  misc_RNA (1)...(19): siRNA sense strand
ggccaacaauaucuucuac

SEQ ID NO: 1079792 - RNA, 19 nt, Homo sapiens
  misc_RNA (1)...(19): siRNA sense strand
ucuggacacuucauuguag

SEQ ID NO: 1079793 - RNA, 19 nt, Homo sapiens
  misc_RNA (1)...(19): siRNA sense strand
aaacaaacacccuggaacu

SEQ ID NO: 1079794 - RNA, 19 nt, Homo sapiens
  misc_RNA (1)...(19): siRNA sense strand
aaccaacucuacagcauca

SEQ ID NO: 1079795 - RNA, 19 nt, Homo sapiens
  misc_RNA (1)...(19): siRNA sense strand
agggagaguucugcuguuu

SEQ ID NO: 1079796 - RNA, 19 nt, Homo sapiens
  misc_RNA (1)...(19): siRNA sense strand
gagccuggaugucauucag

SEQ ID NO: 1079797 - RNA, 19 nt, Homo sapiens
  misc_RNA (1)...(19): siRNA sense strand
caucagccuucauccaucu

SEQ ID NO: 1079798 - RNA, 19 nt, Homo sapiens
  misc_RNA (1)...(19): siRNA sense strand
ggaagcgcaaaguucuuaa

SEQ ID NO: 1079799 - RNA, 19 nt, Homo sapiens
  misc_RNA (1)...(19): siRNA sense strand
ugaaacaaacacccuggaa

SEQ ID NO: 1079800 - RNA, 19 nt, Homo sapiens
  misc_RNA (1)...(19): siRNA sense strand
aguacaauguggaucagaa

SEQ ID NO: 1079801 - RNA, 19 nt, Homo sapiens
  misc_RNA (1)...(19): siRNA sense strand
caggagauauuccagauga

SEQ ID NO: 1079802 - RNA, 19 nt, Homo sapiens
  misc_RNA (1)...(19): siRNA sense strand
uggcagagcuaaaggaaca

SEQ ID NO: 1079803 - RNA, 19 nt, Homo sapiens
  misc_RNA (1)...(19): siRNA sense strand
caacugaacguguccaaca

SEQ ID NO: 1079804 - RNA, 19 nt, Homo sapiens
  misc_RNA (1)...(19): siRNA sense strand
cagcagcggucacagagau

SEQ ID NO: 1079805 - RNA, 19 nt, Homo sapiens
  misc_RNA (1)...(19): siRNA sense strand
aagcuuggguccaguauag

SEQ ID NO: 1079806 - RNA, 19 nt, Homo sapiens
  misc_RNA (1)...(19): siRNA sense strand
gaggagcccaggugugauu

SEQ ID NO: 1079807 - RNA, 19 nt, Homo sapiens
  misc_RNA (1)...(19): siRNA sense strand
ggagauauuccagaugaga

SEQ ID NO: 1079808 - RNA, 19 nt, Homo sapiens
  misc_RNA (1)...(19): siRNA sense strand
gcaccaccgccucuccuaa

SEQ ID NO: 1079809 - RNA, 19 nt, Homo sapiens
  misc_RNA (1)...(19): siRNA sense strand
ggugugauuugccagaaca

SEQ ID NO: 1079810 - RNA, 19 nt, Homo sapiens
  misc_RNA (1)...(19): siRNA sense strand
gagcuaaaggaacagaaga

SEQ ID NO: 1079811 - RNA, 19 nt, Homo sapiens
  misc_RNA (1)...(19): siRNA sense strand
gaacguguccaacauugac

SEQ ID NO: 1079812 - RNA, 19 nt, Homo sapiens
  misc_RNA (1)...(19): siRNA sense strand
acagagaucucagcaucau

SEQ ID NO: 1079813 - RNA, 19 nt, Homo sapiens
  misc_RNA (1)...(19): siRNA sense strand
cugaacguguccaacauug

SEQ ID NO: 1079814 - RNA, 19 nt, Homo sapiens
  misc_RNA (1)...(19): siRNA sense strand
gacgcgaagugaagaggau

SEQ ID NO: 1079815 - RNA, 19 nt, Homo sapiens
  misc_RNA (1)...(19): siRNA sense strand
ugccagaacaggagauauu

SEQ ID NO: 1079816 - RNA, 19 nt, Homo sapiens
  misc_RNA (1)...(19): siRNA sense strand
caccaccgccucuccuaaa

SEQ ID NO: 1079817 - RNA, 19 nt, Homo sapiens
  misc_RNA (1)...(19): siRNA sense strand
aacaggagauauuccagau

SEQ ID NO: 1079818 - RNA, 19 nt, Homo sapiens
  misc_RNA (1)...(19): siRNA sense strand
agagaucucagcaucauca

SEQ ID NO: 1079819 - RNA, 19 nt, Homo sapiens
  misc_RNA (1)...(19): siRNA sense strand
uggaggagcccagguguga

SEQ ID NO: 1079820 - RNA, 19 nt, Homo sapiens
  misc_RNA (1)...(19): siRNA sense strand
caucaaggaccaacugaac

SEQ ID NO: 1079821 - RNA, 19 nt, Homo sapiens
  misc_RNA (1)...(19): siRNA sense strand
uacgggcacugcuccaaga

SEQ ID NO: 1079822 - RNA, 19 nt, Homo sapiens
  misc_RNA (1)...(19): siRNA sense strand
caagcuuggguccaguaua

SEQ ID NO: 1079823 - RNA, 19 nt, Homo sapiens
  misc_RNA (1)...(19): siRNA sense strand
gccuggaagaggaguauuu

SEQ ID NO: 1079824 - RNA, 19 nt, Homo sapiens
  misc_RNA (1)...(19): siRNA sense strand
gagcgacgcgaagugaaga

SEQ ID NO: 1079825 - RNA, 19 nt, Homo sapiens
  misc_RNA (1)...(19): siRNA sense strand
ggagcgacgcgaagugaag

SEQ ID NO: 1079826 - RNA, 19 nt, Homo sapiens
  misc_RNA (1)...(19): siRNA sense strand
gagcccaggugugauuugc

SEQ ID NO: 1079827 - RNA, 19 nt, Homo sapiens
  misc_RNA (1)...(19): siRNA sense strand
caggugugauuugccagaa

SEQ ID NO: 1079828 - RNA, 19 nt, Homo sapiens
  misc_RNA (1)...(19): siRNA sense strand
gcuaaaggaacagaagaag

SEQ ID NO: 1079829 - RNA, 19 nt, Homo sapiens
  misc_RNA (1)...(19): siRNA sense strand
caucaucaaggaccaacug

SEQ ID NO: 1079830 - RNA, 19 nt, Homo sapiens
  misc_RNA (1)...(19): siRNA sense strand
gcagagcuaaaggaacaga

SEQ ID NO: 1079831 - RNA, 19 nt, Homo sapiens
  misc_RNA (1)...(19): siRNA sense strand
ggucucacuuggacuauuu

SEQ ID NO: 1079832 - RNA, 19 nt, Homo sapiens
  misc_RNA (1)...(19): siRNA sense strand
cagcaaguguccaugagua

SEQ ID NO: 1079833 - RNA, 19 nt, Homo sapiens
  misc_RNA (1)...(19): siRNA sense strand
gcaggagauucgagaacua

SEQ ID NO: 1079834 - RNA, 19 nt, Homo sapiens
  misc_RNA (1)...(19): siRNA sense strand
acucagcgcuucugcauug

SEQ ID NO: 1079835 - RNA, 19 nt, Homo sapiens
  misc_RNA (1)...(19): siRNA sense strand
cgacccaagugaugacauu

SEQ ID NO: 1079836 - RNA, 19 nt, Homo sapiens
  misc_RNA (1)...(19): siRNA sense strand
gcagagaucaauccagcaa

SEQ ID NO: 1079837 - RNA, 19 nt, Homo sapiens
  misc_RNA (1)...(19): siRNA sense strand
ggcgagaggcagaacuuua

SEQ ID NO: 1079838 - RNA, 19 nt, Homo sapiens
  misc_RNA (1)...(19): siRNA sense strand
gcgagaggcagaacuuuau

SEQ ID NO: 1079839 - RNA, 19 nt, Homo sapiens
  misc_RNA (1)...(19): siRNA sense strand
ggauuugggugcaacuaag

SEQ ID NO: 1079840 - RNA, 19 nt, Homo sapiens
  misc_RNA (1)...(19): siRNA sense strand
gaucagcgggugcuaagug

SEQ ID NO: 1079841 - RNA, 19 nt, Homo sapiens
  misc_RNA (1)...(19): siRNA sense strand
guacagacacuggcagaga

SEQ ID NO: 1079842 - RNA, 19 nt, Homo sapiens
  misc_RNA (1)...(19): siRNA sense strand
uaacggccagccuuuauug

SEQ ID NO: 1079843 - RNA, 19 nt, Homo sapiens
  misc_RNA (1)...(19): siRNA sense strand
gcuaacggccagccuuuau

SEQ ID NO: 1079844 - RNA, 19 nt, Homo sapiens
  misc_RNA (1)...(19): siRNA sense strand
gaacucuggcugccgaaau

SEQ ID NO: 1079845 - RNA, 19 nt, Homo sapiens
  misc_RNA (1)...(19): siRNA sense strand
gggcuggccuggucauuuu

SEQ ID NO: 1079846 - RNA, 19 nt, Homo sapiens
  misc_RNA (1)...(19): siRNA sense strand
gagccgacgccuccaaguu

SEQ ID NO: 1079847 - RNA, 19 nt, Homo sapiens
  misc_RNA (1)...(19): siRNA sense strand
caguaucuuuggucuguga

SEQ ID NO: 1079848 - RNA, 19 nt, Homo sapiens
  misc_RNA (1)...(19): siRNA sense strand
ccuugaggcuuccuggauu

SEQ ID NO: 1079849 - RNA, 19 nt, Homo sapiens
  misc_RNA (1)...(19): siRNA sense strand
agaugcagcuguacagaca

SEQ ID NO: 1079850 - RNA, 19 nt, Homo sapiens
  misc_RNA (1)...(19): siRNA sense strand
caagaucagcgggugcuaa

SEQ ID NO: 1079851 - RNA, 19 nt, Homo sapiens
  misc_RNA (1)...(19): siRNA sense strand
agagaucaauccagcaagu

SEQ ID NO: 1079852 - RNA, 19 nt, Homo sapiens
  misc_RNA (1)...(19): siRNA sense strand
gcuggugaaugcaagagau

SEQ ID NO: 1079853 - RNA, 19 nt, Homo sapiens
  misc_RNA (1)...(19): siRNA sense strand
ggagauucgagaacuacaa

SEQ ID NO: 1079854 - RNA, 19 nt, Homo sapiens
  misc_RNA (1)...(19): siRNA sense strand
gcuagggacaccacagcua

SEQ ID NO: 1079855 - RNA, 19 nt, Homo sapiens
  misc_RNA (1)...(19): siRNA sense strand
gaaaucuuggccuugcaaa

SEQ ID NO: 1079856 - RNA, 19 nt, Homo sapiens
  misc_RNA (1)...(19): siRNA sense strand
ucgcagacccgcagaggaa

SEQ ID NO: 1079857 - RNA, 19 nt, Homo sapiens
  misc_RNA (1)...(19): siRNA sense strand
caucaucaguaucuuuggu

SEQ ID NO: 1079858 - RNA, 19 nt, Homo sapiens
  misc_RNA (1)...(19): siRNA sense strand
gcggcuaucccuacaggaa

SEQ ID NO: 1079859 - RNA, 19 nt, Homo sapiens
  misc_RNA (1)...(19): siRNA sense strand
ggacaccacagcuacacau

SEQ ID NO: 1079860 - RNA, 19 nt, Homo sapiens
  misc_RNA (1)...(19): siRNA sense strand
gagaggcagaacuuuauuc

SEQ ID NO: 1079861 - RNA, 19 nt, Homo sapiens
  misc_RNA (1)...(19): siRNA sense strand
cuugaggcuuccuggauuu

SEQ ID NO: 1079862 - RNA, 19 nt, Homo sapiens
  misc_RNA (1)...(19): siRNA sense strand
gacaccacagcuacacaua

SEQ ID NO: 1079863 - RNA, 19 nt, Homo sapiens
  misc_RNA (1)...(19): siRNA sense strand
ggcuaucccuacaggaaau

SEQ ID NO: 1079864 - RNA, 19 nt, Homo sapiens
  misc_RNA (1)...(19): siRNA sense strand
uacagacacuggcagagau

SEQ ID NO: 1079865 - RNA, 19 nt, Homo sapiens
  misc_RNA (1)...(19): siRNA sense strand
caagagaugcagcuguaca

SEQ ID NO: 1079866 - RNA, 19 nt, Homo sapiens
  misc_RNA (1)...(19): siRNA sense strand
aaucuuggccuugcaaaug

SEQ ID NO: 1079867 - RNA, 19 nt, Homo sapiens
  misc_RNA (1)...(19): siRNA sense strand
ccgcuccucagcucuguua

SEQ ID NO: 1079868 - RNA, 19 nt, Homo sapiens
  misc_RNA (1)...(19): siRNA sense strand
gcgcuuggaggcagaaauc

SEQ ID NO: 1079869 - RNA, 19 nt, Homo sapiens
  misc_RNA (1)...(19): siRNA sense strand
gaacaaugaccagaaaccu

SEQ ID NO: 1079870 - RNA, 19 nt, Homo sapiens
  misc_RNA (1)...(19): siRNA sense strand
cgagaggcagaacuuuauu

SEQ ID NO: 1079871 - RNA, 19 nt, Homo sapiens
  misc_RNA (1)...(19): siRNA sense strand
ccucaucaucaguaucuuu

SEQ ID NO: 1079872 - RNA, 19 nt, Homo sapiens
  misc_RNA (1)...(19): siRNA sense strand
ggagcacaggcaucaguug

SEQ ID NO: 1079873 - RNA, 19 nt, Homo sapiens
  misc_RNA (1)...(19): siRNA sense strand
ccacccucaucaucaguau

SEQ ID NO: 1079874 - RNA, 19 nt, Homo sapiens
  misc_RNA (1)...(19): siRNA sense strand
gcacgcgauggacgggaua

SEQ ID NO: 1079875 - RNA, 19 nt, Homo sapiens
  misc_RNA (1)...(19): siRNA sense strand
gagauucgagaacuacaag

SEQ ID NO: 1079876 - RNA, 19 nt, Homo sapiens
  misc_RNA (1)...(19): siRNA sense strand
gccgacgccuccaaguugu

SEQ ID NO: 1079877 - RNA, 19 nt, Homo sapiens
  misc_RNA (1)...(19): siRNA sense strand
cagacuaccacccucauca

SEQ ID NO: 1079878 - RNA, 19 nt, Homo sapiens
  misc_RNA (1)...(19): siRNA sense strand
gcgggaggccuacauucga

SEQ ID NO: 1079879 - RNA, 19 nt, Homo sapiens
  misc_RNA (1)...(19): siRNA sense strand
uggacuauuugaccaagau

SEQ ID NO: 1079880 - RNA, 19 nt, Homo sapiens
  misc_RNA (1)...(19): siRNA sense strand
gggccuggacucacacuuc

SEQ ID NO: 1079881 - RNA, 19 nt, Homo sapiens
  misc_RNA (1)...(19): siRNA sense strand
ggagcaggagauucgagaa

SEQ ID NO: 1079882 - RNA, 19 nt, Homo sapiens
  misc_RNA (1)...(19): siRNA sense strand
cuaacggccagccuuuauu

SEQ ID NO: 1079883 - RNA, 19 nt, Homo sapiens
  misc_RNA (1)...(19): siRNA sense strand
gauggacgggauacaggaa

SEQ ID NO: 1079884 - RNA, 19 nt, Homo sapiens
  misc_RNA (1)...(19): siRNA sense strand
gcucuguuagccacccaua

SEQ ID NO: 1079885 - RNA, 19 nt, Homo sapiens
  misc_RNA (1)...(19): siRNA sense strand
gagcaggagauucgagaac

SEQ ID NO: 1079886 - RNA, 19 nt, Homo sapiens
  misc_RNA (1)...(19): siRNA sense strand
gggucucacuuggacuauu

SEQ ID NO: 1079887 - RNA, 19 nt, Homo sapiens
  misc_RNA (1)...(19): siRNA sense strand
gaagugaguugcugaauga

SEQ ID NO: 1079888 - RNA, 19 nt, Homo sapiens
  misc_RNA (1)...(19): siRNA sense strand
gaucauccuucaucauuua

SEQ ID NO: 1079889 - RNA, 19 nt, Homo sapiens
  misc_RNA (1)...(19): siRNA sense strand
gcacuugcauccacaguaa

SEQ ID NO: 1079890 - RNA, 19 nt, Homo sapiens
  misc_RNA (1)...(19): siRNA sense strand
ggacauagcugaaccucau

SEQ ID NO: 1079891 - RNA, 19 nt, Homo sapiens
  misc_RNA (1)...(19): siRNA sense strand
ggagacaacuggaaauuca

SEQ ID NO: 1079892 - RNA, 19 nt, Homo sapiens
  misc_RNA (1)...(19): siRNA sense strand
gaaagcuggucaucaguuu

SEQ ID NO: 1079893 - RNA, 19 nt, Homo sapiens
  misc_RNA (1)...(19): siRNA sense strand
gaacauuccuauugcacaa

SEQ ID NO: 1079894 - RNA, 19 nt, Homo sapiens
  misc_RNA (1)...(19): siRNA sense strand
ugaaggaacugauguaaca

SEQ ID NO: 1079895 - RNA, 19 nt, Homo sapiens
  misc_RNA (1)...(19): siRNA sense strand
aaccaaaucuucagacuuu

SEQ ID NO: 1079896 - RNA, 19 nt, Homo sapiens
  misc_RNA (1)...(19): siRNA sense strand
ggucaucaguuuggaguua

SEQ ID NO: 1079897 - RNA, 19 nt, Homo sapiens
  misc_RNA (1)...(19): siRNA sense strand
gaaagccauuggaauagaa

SEQ ID NO: 1079898 - RNA, 19 nt, Homo sapiens
  misc_RNA (1)...(19): siRNA sense strand
caaaggacccggaugauga

SEQ ID NO: 1079899 - RNA, 19 nt, Homo sapiens
  misc_RNA (1)...(19): siRNA sense strand
uaacagggauugaagaagu

SEQ ID NO: 1079900 - RNA, 19 nt, Homo sapiens
  misc_RNA (1)...(19): siRNA sense strand
gcacgcagcugcagauuuu

SEQ ID NO: 1079901 - RNA, 19 nt, Homo sapiens
  misc_RNA (1)...(19): siRNA sense strand
gaaccacugugucucuuga

SEQ ID NO: 1079902 - RNA, 19 nt, Homo sapiens
  misc_RNA (1)...(19): siRNA sense strand
gcagugaccugagagaaga

SEQ ID NO: 1079903 - RNA, 19 nt, Homo sapiens
  misc_RNA (1)...(19): siRNA sense strand
gccuucagcuuaccuauuu

SEQ ID NO: 1079904 - RNA, 19 nt, Homo sapiens
  misc_RNA (1)...(19): siRNA sense strand
gggagaauguggccaaguu

SEQ ID NO: 1079905 - RNA, 19 nt, Homo sapiens
  misc_RNA (1)...(19): siRNA sense strand
uuaaagagaucauccuuca

SEQ ID NO: 1079906 - RNA, 19 nt, Homo sapiens
  misc_RNA (1)...(19): siRNA sense strand
ccgaagauuucauguguuu

SEQ ID NO: 1079907 - RNA, 19 nt, Homo sapiens
  misc_RNA (1)...(19): siRNA sense strand
ugaaaugucuccgaagauu

SEQ ID NO: 1079908 - RNA, 19 nt, Homo sapiens
  misc_RNA (1)...(19): siRNA sense strand
ggacauguuugaucagcuu

SEQ ID NO: 1079909 - RNA, 19 nt, Homo sapiens
  misc_RNA (1)...(19): siRNA sense strand
gagaucauccuucaucauu

SEQ ID NO: 1079910 - RNA, 19 nt, Homo sapiens
  misc_RNA (1)...(19): siRNA sense strand
gaggaaagcuggucaucag

SEQ ID NO: 1079911 - RNA, 19 nt, Homo sapiens
  misc_RNA (1)...(19): siRNA sense strand
gcaacaguaugugcgauaa

SEQ ID NO: 1079912 - RNA, 19 nt, Homo sapiens
  misc_RNA (1)...(19): siRNA sense strand
ggaguuacauggcgagcaa

SEQ ID NO: 1079913 - RNA, 19 nt, Homo sapiens
  misc_RNA (1)...(19): siRNA sense strand
guggccaaguuuauuauua

SEQ ID NO: 1079914 - RNA, 19 nt, Homo sapiens
  misc_RNA (1)...(19): siRNA sense strand
uaucaaaucugcguaugaa

SEQ ID NO: 1079915 - RNA, 19 nt, Homo sapiens
  misc_RNA (1)...(19): siRNA sense strand
gagaauguggccaaguuua

SEQ ID NO: 1079916 - RNA, 19 nt, Homo sapiens
  misc_RNA (1)...(19): siRNA sense strand
gcaagugccuucagcuuac

SEQ ID NO: 1079917 - RNA, 19 nt, Homo sapiens
  misc_RNA (1)...(19): siRNA sense strand
gagaagagauccugaugcu

SEQ ID NO: 1079918 - RNA, 19 nt, Homo sapiens
  misc_RNA (1)...(19): siRNA sense strand
ccaaguacauggccuuuua

SEQ ID NO: 1079919 - RNA, 19 nt, Homo sapiens
  misc_RNA (1)...(19): siRNA sense strand
gagcaggcauuaaacuugu

SEQ ID NO: 1079920 - RNA, 19 nt, Homo sapiens
  misc_RNA (1)...(19): siRNA sense strand
gaucaaagacauaagugaa

SEQ ID NO: 1079921 - RNA, 19 nt, Homo sapiens
  misc_RNA (1)...(19): siRNA sense strand
aaacaacgcugagagaauc

SEQ ID NO: 1079922 - RNA, 19 nt, Homo sapiens
  misc_RNA (1)...(19): siRNA sense strand
caagaugauccuuaccuua

SEQ ID NO: 1079923 - RNA, 19 nt, Homo sapiens
  misc_RNA (1)...(19): siRNA sense strand
ccaccucucucaacuguau

SEQ ID NO: 1079924 - RNA, 19 nt, Homo sapiens
  misc_RNA (1)...(19): siRNA sense strand
caggagcccucaacugauu

SEQ ID NO: 1079925 - RNA, 19 nt, Homo sapiens
  misc_RNA (1)...(19): siRNA sense strand
cacagaaggugaaaccaaa

SEQ ID NO: 1079926 - RNA, 19 nt, Homo sapiens
  misc_RNA (1)...(19): siRNA sense strand
gaaauucauuggaccugau

SEQ ID NO: 1079927 - RNA, 19 nt, Homo sapiens
  misc_RNA (1)...(19): siRNA sense strand
ccucauauaccguguuuaa

SEQ ID NO: 1079928 - RNA, 19 nt, Homo sapiens
  misc_RNA (1)...(19): siRNA sense strand
cuguauagcuauccucuuu

SEQ ID NO: 1079929 - RNA, 19 nt, Homo sapiens
  misc_RNA (1)...(19): siRNA sense strand
gaaaccaaaucuucagacu

SEQ ID NO: 1079930 - RNA, 19 nt, Homo sapiens
  misc_RNA (1)...(19): siRNA sense strand
gcacagaaggugaaaccaa

SEQ ID NO: 1079931 - RNA, 19 nt, Homo sapiens
  misc_RNA (1)...(19): siRNA sense strand
gaagaaguaguaauuccaa

SEQ ID NO: 1079932 - RNA, 19 nt, Homo sapiens
  misc_RNA (1)...(19): siRNA sense strand
caacaaauagucucuugga

SEQ ID NO: 1079933 - RNA, 19 nt, Homo sapiens
  misc_RNA (1)...(19): siRNA sense strand
uuuggaaucucguucauuu

SEQ ID NO: 1079934 - RNA, 19 nt, Homo sapiens
  misc_RNA (1)...(19): siRNA sense strand
cauuaaacuuguacacuga

SEQ ID NO: 1079935 - RNA, 19 nt, Homo sapiens
  misc_RNA (1)...(19): siRNA sense strand
ggcuagaagugauuccuaa

SEQ ID NO: 1079936 - RNA, 19 nt, Homo sapiens
  misc_RNA (1)...(19): siRNA sense strand
ggaaagcuggucaucaguu

SEQ ID NO: 1079937 - RNA, 19 nt, Homo sapiens
  misc_RNA (1)...(19): siRNA sense strand
ucucucaacuguauagcua

SEQ ID NO: 1079938 - RNA, 19 nt, Homo sapiens
  misc_RNA (1)...(19): siRNA sense strand
acacugaguuacuaaacaa

SEQ ID NO: 1079939 - RNA, 19 nt, Homo sapiens
  misc_RNA (1)...(19): siRNA sense strand
gcacaaugauccgaggaau

SEQ ID NO: 1079940 - RNA, 19 nt, Homo sapiens
  misc_RNA (1)...(19): siRNA sense strand
acaaauagucucuuggauu

SEQ ID NO: 1079941 - RNA, 19 nt, Homo sapiens
  misc_RNA (1)...(19): siRNA sense strand
caggaagcauaauaagauu

SEQ ID NO: 1079942 - RNA, 19 nt, Homo sapiens
  misc_RNA (1)...(19): siRNA sense strand
aacccucgcuugcaacaua

SEQ ID NO: 1079943 - RNA, 19 nt, Homo sapiens
  misc_RNA (1)...(19): siRNA sense strand
gauuugauuugucuaaugg

SEQ ID NO: 1079944 - RNA, 19 nt, Homo sapiens
  misc_RNA (1)...(19): siRNA sense strand
gaauguggccaaguuuauu

SEQ ID NO: 1079945 - RNA, 19 nt, Homo sapiens
  misc_RNA (1)...(19): siRNA sense strand
aaaggaagcccuaaguaau

SEQ ID NO: 1079946 - RNA, 19 nt, Homo sapiens
  misc_RNA (1)...(19): siRNA sense strand
gcaaucaaccaggaacaaa

SEQ ID NO: 1079947 - RNA, 19 nt, Homo sapiens
  misc_RNA (1)...(19): siRNA sense strand
ugacugugcugcugauauc

SEQ ID NO: 1079948 - RNA, 19 nt, Homo sapiens
  misc_RNA (1)...(19): siRNA sense strand
ugaaagccauuggaauaga

SEQ ID NO: 1079949 - RNA, 19 nt, Homo sapiens
  misc_RNA (1)...(19): siRNA sense strand
gaauugagcucagaaaagu

SEQ ID NO: 1079950 - RNA, 19 nt, Homo sapiens
  misc_RNA (1)...(19): siRNA sense strand
ggaacgaauugagcucaga

SEQ ID NO: 1079951 - RNA, 19 nt, Homo sapiens
  misc_RNA (1)...(19): siRNA sense strand
ucauauaccguguuuaaug

SEQ ID NO: 1079952 - RNA, 19 nt, Homo sapiens
  misc_RNA (1)...(19): siRNA sense strand
ugacaccagugaaggcaaa

SEQ ID NO: 1079953 - RNA, 19 nt, Homo sapiens
  misc_RNA (1)...(19): siRNA sense strand
gcagugacagcgacaguga

SEQ ID NO: 1079954 - RNA, 19 nt, Homo sapiens
  misc_RNA (1)...(19): siRNA sense strand
ucaggaagcauaauaagau

SEQ ID NO: 1079955 - RNA, 19 nt, Homo sapiens
  misc_RNA (1)...(19): siRNA sense strand
gugcaacccucucaaaggu

SEQ ID NO: 1079956 - RNA, 19 nt, Homo sapiens
  misc_RNA (1)...(19): siRNA sense strand
caaagccucuguggacaug

SEQ ID NO: 1079957 - RNA, 19 nt, Homo sapiens
  misc_RNA (1)...(19): siRNA sense strand
uuuaaugccugaguacuuu

SEQ ID NO: 1079958 - RNA, 19 nt, Homo sapiens
  misc_RNA (1)...(19): siRNA sense strand
uaaaguagccguucuucag

SEQ ID NO: 1079959 - RNA, 19 nt, Homo sapiens
  misc_RNA (1)...(19): siRNA sense strand
gaacgaauugagcucagaa

SEQ ID NO: 1079960 - RNA, 19 nt, Homo sapiens
  misc_RNA (1)...(19): siRNA sense strand
ucucuuggauuuauugugu

SEQ ID NO: 1079961 - RNA, 19 nt, Homo sapiens
  misc_RNA (1)...(19): siRNA sense strand
ccaggccauugaaguagua

SEQ ID NO: 1079962 - RNA, 19 nt, Homo sapiens
  misc_RNA (1)...(19): siRNA sense strand
agaagugaguugcugaaug

SEQ ID NO: 1079963 - RNA, 19 nt, Homo sapiens
  misc_RNA (1)...(19): siRNA sense strand
gauaucaaaucugcguaug

SEQ ID NO: 1079964 - RNA, 19 nt, Homo sapiens
  misc_RNA (1)...(19): siRNA sense strand
aaugauacaucuucuccaa

SEQ ID NO: 1079965 - RNA, 19 nt, Homo sapiens
  misc_RNA (1)...(19): siRNA sense strand
ggacccggaugaugauaag

SEQ ID NO: 1079966 - RNA, 19 nt, Homo sapiens
  misc_RNA (1)...(19): siRNA sense strand
uggagacccuuuaaagaga

SEQ ID NO: 1079967 - RNA, 19 nt, Homo sapiens
  misc_RNA (1)...(19): siRNA sense strand
cagacuccaugcugaugua

SEQ ID NO: 1079968 - RNA, 19 nt, Homo sapiens
  misc_RNA (1)...(19): siRNA sense strand
ucaagaugauccuuaccuu

SEQ ID NO: 1079969 - RNA, 19 nt, Homo sapiens
  misc_RNA (1)...(19): siRNA sense strand
caaacaaugauacaucuuc

SEQ ID NO: 1079970 - RNA, 19 nt, Homo sapiens
  misc_RNA (1)...(19): siRNA sense strand
gaccugaucaacaucguaa

SEQ ID NO: 1079971 - RNA, 19 nt, Homo sapiens
  misc_RNA (1)...(19): siRNA sense strand
ggagacccuuuaaagagau

SEQ ID NO: 1079972 - RNA, 19 nt, Homo sapiens
  misc_RNA (1)...(19): siRNA sense strand
ucugaaaugucuccgaaga

SEQ ID NO: 1079973 - RNA, 19 nt, Homo sapiens
  misc_RNA (1)...(19): siRNA sense strand
ccaaauauuuucagaagga

SEQ ID NO: 1079974 - RNA, 19 nt, Homo sapiens
  misc_RNA (1)...(19): siRNA sense strand
ggagaauguggccaaguuu

SEQ ID NO: 1079975 - RNA, 19 nt, Homo sapiens
  misc_RNA (1)...(19): siRNA sense strand
gauugaagcaacaguaugu

SEQ ID NO: 1079976 - RNA, 19 nt, Homo sapiens
  misc_RNA (1)...(19): siRNA sense strand
cgauuugauuugucuaaug

SEQ ID NO: 1079977 - RNA, 19 nt, Homo sapiens
  misc_RNA (1)...(19): siRNA sense strand
ccauauuauucgccuguuu

SEQ ID NO: 1079978 - RNA, 19 nt, Homo sapiens
  misc_RNA (1)...(19): siRNA sense strand
gagcuuaugagcaggcauu

SEQ ID NO: 1079979 - RNA, 19 nt, Homo sapiens
  misc_RNA (1)...(19): siRNA sense strand
gaagcccuaaguaaucuaa

SEQ ID NO: 1079980 - RNA, 19 nt, Homo sapiens
  misc_RNA (1)...(19): siRNA sense strand
gagagaagagauccugaug

SEQ ID NO: 1079981 - RNA, 19 nt, Homo sapiens
  misc_RNA (1)...(19): siRNA sense strand
caaguucuucgauuugauu

SEQ ID NO: 1079982 - RNA, 19 nt, Homo sapiens
  misc_RNA (1)...(19): siRNA sense strand
gaauuaaugggaaagagau

SEQ ID NO: 1079983 - RNA, 19 nt, Homo sapiens
  misc_RNA (1)...(19): siRNA sense strand
aaagagaucauccuucauc

SEQ ID NO: 1079984 - RNA, 19 nt, Homo sapiens
  misc_RNA (1)...(19): siRNA sense strand
caagaucgccagccuuaca

SEQ ID NO: 1079985 - RNA, 19 nt, Homo sapiens
  misc_RNA (1)...(19): siRNA sense strand
guucuucgauuugauuugu

SEQ ID NO: 1079986 - RNA, 19 nt, Homo sapiens
  misc_RNA (1)...(19): siRNA sense strand
uaugaaagccaacccauca

SEQ ID NO: 1079987 - RNA, 19 nt, Homo sapiens
  misc_RNA (1)...(19): siRNA sense strand
ggaaauggcuacagaaaga

SEQ ID NO: 1079988 - RNA, 19 nt, Homo sapiens
  misc_RNA (1)...(19): siRNA sense strand
ccaaagagcccaguaagaa

SEQ ID NO: 1079989 - RNA, 19 nt, Homo sapiens
  misc_RNA (1)...(19): siRNA sense strand
gcagauccaugccuucuuc

SEQ ID NO: 1079990 - RNA, 19 nt, Homo sapiens
  misc_RNA (1)...(19): siRNA sense strand
uaaaggaauuguagucguu

SEQ ID NO: 1079991 - RNA, 19 nt, Homo sapiens
  misc_RNA (1)...(19): siRNA sense strand
ggcaggaaauggcuacaga

SEQ ID NO: 1079992 - RNA, 19 nt, Homo sapiens
  misc_RNA (1)...(19): siRNA sense strand
ggaauuguagucguugaaa

SEQ ID NO: 1079993 - RNA, 19 nt, Homo sapiens
  misc_RNA (1)...(19): siRNA sense strand
ccaagcauccagcaacuga

SEQ ID NO: 1079994 - RNA, 19 nt, Homo sapiens
  misc_RNA (1)...(19): siRNA sense strand
cagcagaucccaggaguug

SEQ ID NO: 1079995 - RNA, 19 nt, Homo sapiens
  misc_RNA (1)...(19): siRNA sense strand
ccaguugguucaagagcaa

SEQ ID NO: 1079996 - RNA, 19 nt, Homo sapiens
  misc_RNA (1)...(19): siRNA sense strand
gcagaucccaggaguugga

SEQ ID NO: 1079997 - RNA, 19 nt, Homo sapiens
  misc_RNA (1)...(19): siRNA sense strand
gagaugcaagggaaaauua

SEQ ID NO: 1079998 - RNA, 19 nt, Homo sapiens
  misc_RNA (1)...(19): siRNA sense strand
aaaccaaagagcccaguaa

SEQ ID NO: 1079999 - RNA, 19 nt, Homo sapiens
  misc_RNA (1)...(19): siRNA sense strand
caggaaauggcuacagaaa

SEQ ID NO: 1080000 - RNA, 19 nt, Homo sapiens
  misc_RNA (1)...(19): siRNA sense strand
gcauccagcaacugaguaa

SEQ ID NO: 1080001 - RNA, 19 nt, Homo sapiens
  misc_RNA (1)...(19): siRNA sense strand
gcaggaaauggcuacagaa

SEQ ID NO: 1080002 - RNA, 19 nt, Homo sapiens
  misc_RNA (1)...(19): siRNA sense strand
ggguuagaaauuccaauaa

SEQ ID NO: 1080003 - RNA, 19 nt, Homo sapiens
  misc_RNA (1)...(19): siRNA sense strand
gaugagugaacaauacuuc

SEQ ID NO: 1080004 - RNA, 19 nt, Homo sapiens
  misc_RNA (1)...(19): siRNA sense strand
gaauuguagucguugaaaa

SEQ ID NO: 1080005 - RNA, 19 nt, Homo sapiens
  misc_RNA (1)...(19): siRNA sense strand
cggguuagaaauuccaaua

SEQ ID NO: 1080006 - RNA, 19 nt, Homo sapiens
  misc_RNA (1)...(19): siRNA sense strand
ccggaugagugaacaauac

SEQ ID NO: 1080007 - RNA, 19 nt, Homo sapiens
  misc_RNA (1)...(19): siRNA sense strand
ucccagcccuacagaaguu

SEQ ID NO: 1080008 - RNA, 19 nt, Homo sapiens
  misc_RNA (1)...(19): siRNA sense strand
caaagagcccaguaagaac

SEQ ID NO: 1080009 - RNA, 19 nt, Homo sapiens
  misc_RNA (1)...(19): siRNA sense strand
caaaccaaagagcccagua

SEQ ID NO: 1080010 - RNA, 19 nt, Homo sapiens
  misc_RNA (1)...(19): siRNA sense strand
uggcuugacaccagacuuu

SEQ ID NO: 1080011 - RNA, 19 nt, Homo sapiens
  misc_RNA (1)...(19): siRNA sense strand
gcagguggucggacaagca

SEQ ID NO: 1080012 - RNA, 19 nt, Homo sapiens
  misc_RNA (1)...(19): siRNA sense strand
cuccagaaguuuccaagca

SEQ ID NO: 1080013 - RNA, 19 nt, Homo sapiens
  misc_RNA (1)...(19): siRNA sense strand
cugauuugguggcaggaaa

SEQ ID NO: 1080014 - RNA, 19 nt, Homo sapiens
  misc_RNA (1)...(19): siRNA sense strand
ucauccaguugguucaaga

SEQ ID NO: 1080015 - RNA, 19 nt, Homo sapiens
  misc_RNA (1)...(19): siRNA sense strand
gcaggagaugcaagggaaa

SEQ ID NO: 1080016 - RNA, 19 nt, Homo sapiens
  misc_RNA (1)...(19): siRNA sense strand
uucaagagcaaaccaaaga

SEQ ID NO: 1080017 - RNA, 19 nt, Homo sapiens
  misc_RNA (1)...(19): siRNA sense strand
gaaauggcuacagaaagag

SEQ ID NO: 1080018 - RNA, 19 nt, Homo sapiens
  misc_RNA (1)...(19): siRNA sense strand
uuucgaggauggcuugaca

SEQ ID NO: 1080019 - RNA, 19 nt, Homo sapiens
  misc_RNA (1)...(19): siRNA sense strand
ggaugagugaacaauacuu

SEQ ID NO: 1080020 - RNA, 19 nt, Homo sapiens
  misc_RNA (1)...(19): siRNA sense strand
gaacgaagcucaacucaua

SEQ ID NO: 1080021 - RNA, 19 nt, Homo sapiens
  misc_RNA (1)...(19): siRNA sense strand
gaaagacucucacaaguuu

SEQ ID NO: 1080022 - RNA, 19 nt, Homo sapiens
  misc_RNA (1)...(19): siRNA sense strand
gaaagucgauguaauccuu

SEQ ID NO: 1080023 - RNA, 19 nt, Homo sapiens
  misc_RNA (1)...(19): siRNA sense strand
caaaggaaaugcagagaaa

SEQ ID NO: 1080024 - RNA, 19 nt, Homo sapiens
  misc_RNA (1)...(19): siRNA sense strand
aaagagaacuugccaaaga

SEQ ID NO: 1080025 - RNA, 19 nt, Homo sapiens
  misc_RNA (1)...(19): siRNA sense strand
ggagacgacuuaccaguuu

SEQ ID NO: 1080026 - RNA, 19 nt, Homo sapiens
  misc_RNA (1)...(19): siRNA sense strand
ggaaagaguuagagacaga

SEQ ID NO: 1080027 - RNA, 19 nt, Homo sapiens
  misc_RNA (1)...(19): siRNA sense strand
gaauggaaguguguccuua

SEQ ID NO: 1080028 - RNA, 19 nt, Homo sapiens
  misc_RNA (1)...(19): siRNA sense strand
gacaggaacuucuaguaaa

SEQ ID NO: 1080029 - RNA, 19 nt, Homo sapiens
  misc_RNA (1)...(19): siRNA sense strand
gaacacagaaucccucauu

SEQ ID NO: 1080030 - RNA, 19 nt, Homo sapiens
  misc_RNA (1)...(19): siRNA sense strand
gaagccauuuaaacgauua

SEQ ID NO: 1080031 - RNA, 19 nt, Homo sapiens
  misc_RNA (1)...(19): siRNA sense strand
ggaaagaccacauuuaagu

SEQ ID NO: 1080032 - RNA, 19 nt, Homo sapiens
  misc_RNA (1)...(19): siRNA sense strand
ggaaugcaaugacccagaa

SEQ ID NO: 1080033 - RNA, 19 nt, Homo sapiens
  misc_RNA (1)...(19): siRNA sense strand
gaaaaccucuccuaaaaga

SEQ ID NO: 1080034 - RNA, 19 nt, Homo sapiens
  misc_RNA (1)...(19): siRNA sense strand
gcagaagcccagaaucaua

SEQ ID NO: 1080035 - RNA, 19 nt, Homo sapiens
  misc_RNA (1)...(19): siRNA sense strand
ggaaagacucucacaaguu

SEQ ID NO: 1080036 - RNA, 19 nt, Homo sapiens
  misc_RNA (1)...(19): siRNA sense strand
ggaaguguguccuuacugu

SEQ ID NO: 1080037 - RNA, 19 nt, Homo sapiens
  misc_RNA (1)...(19): siRNA sense strand
gaugauaggaccaaccaua

SEQ ID NO: 1080038 - RNA, 19 nt, Homo sapiens
  misc_RNA (1)...(19): siRNA sense strand
ggaaagagcagcuacuaca

SEQ ID NO: 1080039 - RNA, 19 nt, Homo sapiens
  misc_RNA (1)...(19): siRNA sense strand
gaugaaaggaccaaucaaa

SEQ ID NO: 1080040 - RNA, 19 nt, Homo sapiens
  misc_RNA (1)...(19): siRNA sense strand
gaaagaccacauuuaaguu

SEQ ID NO: 1080041 - RNA, 19 nt, Homo sapiens
  misc_RNA (1)...(19): siRNA sense strand
cuaaaccaaugacuacuuu

SEQ ID NO: 1080042 - RNA, 19 nt, Homo sapiens
  misc_RNA (1)...(19): siRNA sense strand
gaaaggaccaaucaaagau

SEQ ID NO: 1080043 - RNA, 19 nt, Homo sapiens
  misc_RNA (1)...(19): siRNA sense strand
ccucaacucuaccuaauga

SEQ ID NO: 1080044 - RNA, 19 nt, Homo sapiens
  misc_RNA (1)...(19): siRNA sense strand
ggagaaagucgauguaauc

SEQ ID NO: 1080045 - RNA, 19 nt, Homo sapiens
  misc_RNA (1)...(19): siRNA sense strand
ggacaaaccagaacagaca

SEQ ID NO: 1080046 - RNA, 19 nt, Homo sapiens
  misc_RNA (1)...(19): siRNA sense strand
gacagagaaugaagaaaga

SEQ ID NO: 1080047 - RNA, 19 nt, Homo sapiens
  misc_RNA (1)...(19): siRNA sense strand
gggaaagacucucacaagu

SEQ ID NO: 1080048 - RNA, 19 nt, Homo sapiens
  misc_RNA (1)...(19): siRNA sense strand
ccagagcccuuuauguuca

SEQ ID NO: 1080049 - RNA, 19 nt, Homo sapiens
  misc_RNA (1)...(19): siRNA sense strand
gaccaaccauaccuacuga

SEQ ID NO: 1080050 - RNA, 19 nt, Homo sapiens
  misc_RNA (1)...(19): siRNA sense strand
cacaguaccuccaugcauu

SEQ ID NO: 1080051 - RNA, 19 nt, Homo sapiens
  misc_RNA (1)...(19): siRNA sense strand
cuacaaaggcagauaaaga

SEQ ID NO: 1080052 - RNA, 19 nt, Homo sapiens
  misc_RNA (1)...(19): siRNA sense strand
gaaagcagaagcccagaau

SEQ ID NO: 1080053 - RNA, 19 nt, Homo sapiens
  misc_RNA (1)...(19): siRNA sense strand
ugucauauuucuccaaaga

SEQ ID NO: 1080054 - RNA, 19 nt, Homo sapiens
  misc_RNA (1)...(19): siRNA sense strand
gaaagagcagcuacuacaa

SEQ ID NO: 1080055 - RNA, 19 nt, Homo sapiens
  misc_RNA (1)...(19): siRNA sense strand
gcaaaggaaaugcagagaa

SEQ ID NO: 1080056 - RNA, 19 nt, Homo sapiens
  misc_RNA (1)...(19): siRNA sense strand
gauaaagacaucaagaauc

SEQ ID NO: 1080057 - RNA, 19 nt, Homo sapiens
  misc_RNA (1)...(19): siRNA sense strand
cagaagcccagaaucauaa

SEQ ID NO: 1080058 - RNA, 19 nt, Homo sapiens
  misc_RNA (1)...(19): siRNA sense strand
gggauucagucacaggaaa

SEQ ID NO: 1080059 - RNA, 19 nt, Homo sapiens
  misc_RNA (1)...(19): siRNA sense strand
caaacuaccucuggugauc

SEQ ID NO: 1080060 - RNA, 19 nt, Homo sapiens
  misc_RNA (1)...(19): siRNA sense strand
caucaagaauccaauccaa

SEQ ID NO: 1080061 - RNA, 19 nt, Homo sapiens
  misc_RNA (1)...(19): siRNA sense strand
ccaaagacaggaacuucua

SEQ ID NO: 1080062 - RNA, 19 nt, Homo sapiens
  misc_RNA (1)...(19): siRNA sense strand
ugaaaggaccaaucaaaga

SEQ ID NO: 1080063 - RNA, 19 nt, Homo sapiens
  misc_RNA (1)...(19): siRNA sense strand
gcagucaaguagucaaagu

SEQ ID NO: 1080064 - RNA, 19 nt, Homo sapiens
  misc_RNA (1)...(19): siRNA sense strand
cgacuuaccaguuucauuc

SEQ ID NO: 1080065 - RNA, 19 nt, Homo sapiens
  misc_RNA (1)...(19): siRNA sense strand
agacaggaacuucuaguaa

SEQ ID NO: 1080066 - RNA, 19 nt, Homo sapiens
  misc_RNA (1)...(19): siRNA sense strand
caaaauugauccccaaaga

SEQ ID NO: 1080067 - RNA, 19 nt, Homo sapiens
  misc_RNA (1)...(19): siRNA sense strand
gcagauaaagacaucaaga

SEQ ID NO: 1080068 - RNA, 19 nt, Homo sapiens
  misc_RNA (1)...(19): siRNA sense strand
gcaaugagagagauuccaa

SEQ ID NO: 1080069 - RNA, 19 nt, Homo sapiens
  misc_RNA (1)...(19): siRNA sense strand
cagggaagccucaguguug

SEQ ID NO: 1080070 - RNA, 19 nt, Homo sapiens
  misc_RNA (1)...(19): siRNA sense strand
ggacuuacccugggaguag

SEQ ID NO: 1080071 - RNA, 19 nt, Homo sapiens
  misc_RNA (1)...(19): siRNA sense strand
gaaacaagagaaaggacuu

SEQ ID NO: 1080072 - RNA, 19 nt, Homo sapiens
  misc_RNA (1)...(19): siRNA sense strand
gcuacaacauuucuucaag

SEQ ID NO: 1080073 - RNA, 19 nt, Homo sapiens
  misc_RNA (1)...(19): siRNA sense strand
guaagaagccauuuaaacg

SEQ ID NO: 1080074 - RNA, 19 nt, Homo sapiens
  misc_RNA (1)...(19): siRNA sense strand
ugacuacuuuccaagaaga

SEQ ID NO: 1080075 - RNA, 19 nt, Homo sapiens
  misc_RNA (1)...(19): siRNA sense strand
gaaguguguccuuacugua

SEQ ID NO: 1080076 - RNA, 19 nt, Homo sapiens
  misc_RNA (1)...(19): siRNA sense strand
gauagucaguuccaagcau

SEQ ID NO: 1080077 - RNA, 19 nt, Homo sapiens
  misc_RNA (1)...(19): siRNA sense strand
gauaauccacccagaaugg

SEQ ID NO: 1080078 - RNA, 19 nt, Homo sapiens
  misc_RNA (1)...(19): siRNA sense strand
gagaacuugccaaagauuu

SEQ ID NO: 1080079 - RNA, 19 nt, Homo sapiens
  misc_RNA (1)...(19): siRNA sense strand
gguaagaacauuauuaagc

SEQ ID NO: 1080080 - RNA, 19 nt, Homo sapiens
  misc_RNA (1)...(19): siRNA sense strand
gauacuucguccuguguug

SEQ ID NO: 1080081 - RNA, 19 nt, Homo sapiens
  misc_RNA (1)...(19): siRNA sense strand
aaagagcagcuacuacaaa

SEQ ID NO: 1080082 - RNA, 19 nt, Homo sapiens
  misc_RNA (1)...(19): siRNA sense strand
gcucuauccugguuaccuu

SEQ ID NO: 1080083 - RNA, 19 nt, Homo sapiens
  misc_RNA (1)...(19): siRNA sense strand
ggaccaaccauaccuacug

SEQ ID NO: 1080084 - RNA, 19 nt, Homo sapiens
  misc_RNA (1)...(19): siRNA sense strand
uguuguagcuggaguuuca

SEQ ID NO: 1080085 - RNA, 19 nt, Homo sapiens
  misc_RNA (1)...(19): siRNA sense strand
cuaaugauguacaaacuac

SEQ ID NO: 1080086 - RNA, 19 nt, Homo sapiens
  misc_RNA (1)...(19): siRNA sense strand
cagauaaagacaucaagaa

SEQ ID NO: 1080087 - RNA, 19 nt, Homo sapiens
  misc_RNA (1)...(19): siRNA sense strand
ggagaaacaagagaaagga

SEQ ID NO: 1080088 - RNA, 19 nt, Homo sapiens
  misc_RNA (1)...(19): siRNA sense strand
gcaacaccaccauaaggaa

SEQ ID NO: 1080089 - RNA, 19 nt, Homo sapiens
  misc_RNA (1)...(19): siRNA sense strand
uaagaagccauuuaaacga

SEQ ID NO: 1080090 - RNA, 19 nt, Homo sapiens
  misc_RNA (1)...(19): siRNA sense strand
gccauacuguaagaugaua

SEQ ID NO: 1080091 - RNA, 19 nt, Homo sapiens
  misc_RNA (1)...(19): siRNA sense strand
caccagggauucagucaca

SEQ ID NO: 1080092 - RNA, 19 nt, Homo sapiens
  misc_RNA (1)...(19): siRNA sense strand
aaaggcagauaaagacauc

SEQ ID NO: 1080093 - RNA, 19 nt, Homo sapiens
  misc_RNA (1)...(19): siRNA sense strand
aaccauaccuacugaucaa

SEQ ID NO: 1080094 - RNA, 19 nt, Homo sapiens
  misc_RNA (1)...(19): siRNA sense strand
ccaaagaaugucagugaug

SEQ ID NO: 1080095 - RNA, 19 nt, Homo sapiens
  misc_RNA (1)...(19): siRNA sense strand
auaaagacaucaagaaucc

SEQ ID NO: 1080096 - RNA, 19 nt, Homo sapiens
  misc_RNA (1)...(19): siRNA sense strand
aagcucaacucauauaagg

SEQ ID NO: 1080097 - RNA, 19 nt, Homo sapiens
  misc_RNA (1)...(19): siRNA sense strand
agucuugccucucuagcua

SEQ ID NO: 1080098 - RNA, 19 nt, Homo sapiens
  misc_RNA (1)...(19): siRNA sense strand
gggagacgacuuaccaguu

SEQ ID NO: 1080099 - RNA, 19 nt, Homo sapiens
  misc_RNA (1)...(19): siRNA sense strand
aagaagccauuuaaacgau

SEQ ID NO: 1080100 - RNA, 19 nt, Homo sapiens
  misc_RNA (1)...(19): siRNA sense strand
aaacaagagaaaggacuua

SEQ ID NO: 1080101 - RNA, 19 nt, Homo sapiens
  misc_RNA (1)...(19): siRNA sense strand
aaauauuccucaacucuac

SEQ ID NO: 1080102 - RNA, 19 nt, Homo sapiens
  misc_RNA (1)...(19): siRNA sense strand
gcacaguaccuccaugcau

SEQ ID NO: 1080103 - RNA, 19 nt, Homo sapiens
  misc_RNA (1)...(19): siRNA sense strand
ugccagagcccuuuauguu

SEQ ID NO: 1080104 - RNA, 19 nt, Homo sapiens
  misc_RNA (1)...(19): siRNA sense strand
gauguaaaggcauuaaugg

SEQ ID NO: 1080105 - RNA, 19 nt, Homo sapiens
  misc_RNA (1)...(19): siRNA sense strand
gucaaagucuugccucucu

SEQ ID NO: 1080106 - RNA, 19 nt, Homo sapiens
  misc_RNA (1)...(19): siRNA sense strand
ggggaaagaccacauuuaa

SEQ ID NO: 1080107 - RNA, 19 nt, Homo sapiens
  misc_RNA (1)...(19): siRNA sense strand
agacagagaaugaagaaag

SEQ ID NO: 1080108 - RNA, 19 nt, Homo sapiens
  misc_RNA (1)...(19): siRNA sense strand
uccaacuucucucuaauga

SEQ ID NO: 1080109 - RNA, 19 nt, Homo sapiens
  misc_RNA (1)...(19): siRNA sense strand
acccagaagccacaacuua

SEQ ID NO: 1080110 - RNA, 19 nt, Homo sapiens
  misc_RNA (1)...(19): siRNA sense strand
gaagaaaccaaggcucagu

SEQ ID NO: 1080111 - RNA, 19 nt, Homo sapiens
  misc_RNA (1)...(19): siRNA sense strand
aaugacuacuuuccaagaa

SEQ ID NO: 1080112 - RNA, 19 nt, Homo sapiens
  misc_RNA (1)...(19): siRNA sense strand
cuacuacaaaggcagauaa

SEQ ID NO: 1080113 - RNA, 19 nt, Homo sapiens
  misc_RNA (1)...(19): siRNA sense strand
gaagcucaacucauauaag

SEQ ID NO: 1080114 - RNA, 19 nt, Homo sapiens
  misc_RNA (1)...(19): siRNA sense strand
aagcagaagcccagaauca

SEQ ID NO: 1080115 - RNA, 19 nt, Homo sapiens
  misc_RNA (1)...(19): siRNA sense strand
cacagaaucccucauuuua

SEQ ID NO: 1080116 - RNA, 19 nt, Homo sapiens
  misc_RNA (1)...(19): siRNA sense strand
cuggugaucucaaauugga

SEQ ID NO: 1080117 - RNA, 19 nt, Homo sapiens
  misc_RNA (1)...(19): siRNA sense strand
caacucuaccuaaugaugu

SEQ ID NO: 1080118 - RNA, 19 nt, Homo sapiens
  misc_RNA (1)...(19): siRNA sense strand
ucaaagucuugccucucua

SEQ ID NO: 1080119 - RNA, 19 nt, Homo sapiens
  misc_RNA (1)...(19): siRNA sense strand
gcucuucacaggauacuuc

SEQ ID NO: 1080120 - RNA, 19 nt, Homo sapiens
  misc_RNA (1)...(19): siRNA sense strand
ggaaggcggugcaggcuau

SEQ ID NO: 1080121 - RNA, 19 nt, Homo sapiens
  misc_RNA (1)...(19): siRNA sense strand
gaaccgguguacuucaaga

SEQ ID NO: 1080122 - RNA, 19 nt, Homo sapiens
  misc_RNA (1)...(19): siRNA sense strand
gaaagugccaggcgagaug

SEQ ID NO: 1080123 - RNA, 19 nt, Homo sapiens
  misc_RNA (1)...(19): siRNA sense strand
ggaauuugccagugacuuc

SEQ ID NO: 1080124 - RNA, 19 nt, Homo sapiens
  misc_RNA (1)...(19): siRNA sense strand
cuggugagguucuuuguga

SEQ ID NO: 1080125 - RNA, 19 nt, Homo sapiens
  misc_RNA (1)...(19): siRNA sense strand
gguggucgccgaggaauuu

SEQ ID NO: 1080126 - RNA, 19 nt, Homo sapiens
  misc_RNA (1)...(19): siRNA sense strand
ccgaggaauuugccaguga

SEQ ID NO: 1080127 - RNA, 19 nt, Homo sapiens
  misc_RNA (1)...(19): siRNA sense strand
ucaacacugucguggagaa

SEQ ID NO: 1080128 - RNA, 19 nt, Homo sapiens
  misc_RNA (1)...(19): siRNA sense strand
ggaaagcccacgcccucaa

SEQ ID NO: 1080129 - RNA, 19 nt, Homo sapiens
  misc_RNA (1)...(19): siRNA sense strand
aagcacgccugccgaguca

SEQ ID NO: 1080130 - RNA, 19 nt, Homo sapiens
  misc_RNA (1)...(19): siRNA sense strand
gaaagcccacgcccucaag

SEQ ID NO: 1080131 - RNA, 19 nt, Homo sapiens
  misc_RNA (1)...(19): siRNA sense strand
uggaaccgguguacuucaa

SEQ ID NO: 1080132 - RNA, 19 nt, Homo sapiens
  misc_RNA (1)...(19): siRNA sense strand
caagcugcguggccucauc

SEQ ID NO: 1080133 - RNA, 19 nt, Homo sapiens
  misc_RNA (1)...(19): siRNA sense strand
cgugaccgcugccuacaag

SEQ ID NO: 1080134 - RNA, 19 nt, Homo sapiens
  misc_RNA (1)...(19): siRNA sense strand
caggcgagauggagaucga

SEQ ID NO: 1080135 - RNA, 19 nt, Homo sapiens
  misc_RNA (1)...(19): siRNA sense strand
ccucugugcucgcccuugu

SEQ ID NO: 1080136 - RNA, 19 nt, Homo sapiens
  misc_RNA (1)...(19): siRNA sense strand
gaccgcugccuacaaggaa

SEQ ID NO: 1080137 - RNA, 19 nt, Homo sapiens
  misc_RNA (1)...(19): siRNA sense strand
gcaguacuucagccaguuc

SEQ ID NO: 1080138 - RNA, 19 nt, Homo sapiens
  misc_RNA (1)...(19): siRNA sense strand
gauccucucuggggucauu

SEQ ID NO: 1080139 - RNA, 19 nt, Homo sapiens
  misc_RNA (1)...(19): siRNA sense strand
gcaauucccuuucuguuug

SEQ ID NO: 1080140 - RNA, 19 nt, Homo sapiens
  misc_RNA (1)...(19): siRNA sense strand
ggucagagcccaagaagaa

SEQ ID NO: 1080141 - RNA, 19 nt, Homo sapiens
  misc_RNA (1)...(19): siRNA sense strand
cacagaagcuuaugaaugg

SEQ ID NO: 1080142 - RNA, 19 nt, Homo sapiens
  misc_RNA (1)...(19): siRNA sense strand
ugacaagcauauauucuga

SEQ ID NO: 1080143 - RNA, 19 nt, Homo sapiens
  misc_RNA (1)...(19): siRNA sense strand
ccacagaagcuuaugaaug

SEQ ID NO: 1080144 - RNA, 19 nt, Homo sapiens
  misc_RNA (1)...(19): siRNA sense strand
aagauugucugcuggauau

SEQ ID NO: 1080145 - RNA, 19 nt, Homo sapiens
  misc_RNA (1)...(19): siRNA sense strand
acaagaguguucuggcuuu

SEQ ID NO: 1080146 - RNA, 19 nt, Homo sapiens
  misc_RNA (1)...(19): siRNA sense strand
aaaucuugcucuuuccaua

SEQ ID NO: 1080147 - RNA, 19 nt, Homo sapiens
  misc_RNA (1)...(19): siRNA sense strand
gggaggaccugggcuuuca

SEQ ID NO: 1080148 - RNA, 19 nt, Homo sapiens
  misc_RNA (1)...(19): siRNA sense strand
cauccacacuuucucaaau

SEQ ID NO: 1080149 - RNA, 19 nt, Homo sapiens
  misc_RNA (1)...(19): siRNA sense strand
ggacacagcggaagaccau

SEQ ID NO: 1080150 - RNA, 19 nt, Homo sapiens
  misc_RNA (1)...(19): siRNA sense strand
gagcgaauccagccacaga

SEQ ID NO: 1080151 - RNA, 19 nt, Homo sapiens
  misc_RNA (1)...(19): siRNA sense strand
uuucucaaauuccagcuua

SEQ ID NO: 1080152 - RNA, 19 nt, Homo sapiens
  misc_RNA (1)...(19): siRNA sense strand
ggucuuauacuuaugacaa

SEQ ID NO: 1080153 - RNA, 19 nt, Homo sapiens
  misc_RNA (1)...(19): siRNA sense strand
gaaagauugucugcuggau

SEQ ID NO: 1080154 - RNA, 19 nt, Homo sapiens
  misc_RNA (1)...(19): siRNA sense strand
gaaucccuaucucagaguu

SEQ ID NO: 1080155 - RNA, 19 nt, Homo sapiens
  misc_RNA (1)...(19): siRNA sense strand
caaauuccagcuuaccaaa

SEQ ID NO: 1080156 - RNA, 19 nt, Homo sapiens
  misc_RNA (1)...(19): siRNA sense strand
gaccacagaagcuuaugaa

SEQ ID NO: 1080157 - RNA, 19 nt, Homo sapiens
  misc_RNA (1)...(19): siRNA sense strand
gaaugggagccacguguug

SEQ ID NO: 1080158 - RNA, 19 nt, Homo sapiens
  misc_RNA (1)...(19): siRNA sense strand
gaggaaucccuaucucaga

SEQ ID NO: 1080159 - RNA, 19 nt, Homo sapiens
  misc_RNA (1)...(19): siRNA sense strand
gcugaccggcuccaaguuu

SEQ ID NO: 1080160 - RNA, 19 nt, Homo sapiens
  misc_RNA (1)...(19): siRNA sense strand
ggugguugcuagacugguu

SEQ ID NO: 1080161 - RNA, 19 nt, Homo sapiens
  misc_RNA (1)...(19): siRNA sense strand
caauucccuuucuguuuga

SEQ ID NO: 1080162 - RNA, 19 nt, Homo sapiens
  misc_RNA (1)...(19): siRNA sense strand
gggaagcuguggacaccau

SEQ ID NO: 1080163 - RNA, 19 nt, Homo sapiens
  misc_RNA (1)...(19): siRNA sense strand
ggacagggugaaagauugu

SEQ ID NO: 1080164 - RNA, 19 nt, Homo sapiens
  misc_RNA (1)...(19): siRNA sense strand
ucucagaguugaagaacca

SEQ ID NO: 1080165 - RNA, 19 nt, Homo sapiens
  misc_RNA (1)...(19): siRNA sense strand
gagaggcgcaggcuuccuu

SEQ ID NO: 1080166 - RNA, 19 nt, Homo sapiens
  misc_RNA (1)...(19): siRNA sense strand
gugaggcccugcagcacuu

SEQ ID NO: 1080167 - RNA, 19 nt, Homo sapiens
  misc_RNA (1)...(19): siRNA sense strand
ggagccacguguugugagu

SEQ ID NO: 1080168 - RNA, 19 nt, Homo sapiens
  misc_RNA (1)...(19): siRNA sense strand
uggacagggugaaagauug

SEQ ID NO: 1080169 - RNA, 19 nt, Homo sapiens
  misc_RNA (1)...(19): siRNA sense strand
aaagauugucugcuggaua

SEQ ID NO: 1080170 - RNA, 19 nt, Homo sapiens
  misc_RNA (1)...(19): siRNA sense strand
caucauaugacaaggacaa

SEQ ID NO: 1080171 - RNA, 19 nt, Homo sapiens
  misc_RNA (1)...(19): siRNA sense strand
uccagaccaucuauaagaa

SEQ ID NO: 1080172 - RNA, 19 nt, Homo sapiens
  misc_RNA (1)...(19): siRNA sense strand
gacaaggacaagaguguuc

SEQ ID NO: 1080173 - RNA, 19 nt, Homo sapiens
  misc_RNA (1)...(19): siRNA sense strand
gagcagccugggcagcuaa

SEQ ID NO: 1080174 - RNA, 19 nt, Homo sapiens
  misc_RNA (1)...(19): siRNA sense strand
caagaguguucuggcuuuc

SEQ ID NO: 1080175 - RNA, 19 nt, Homo sapiens
  misc_RNA (1)...(19): siRNA sense strand
gcccuuuucuggucuuaua

SEQ ID NO: 1080176 - RNA, 19 nt, Homo sapiens
  misc_RNA (1)...(19): siRNA sense strand
ccaaggugguugcuagacu

SEQ ID NO: 1080177 - RNA, 19 nt, Homo sapiens
  misc_RNA (1)...(19): siRNA sense strand
aaagaauccagccaacuau

SEQ ID NO: 1080178 - RNA, 19 nt, Homo sapiens
  misc_RNA (1)...(19): siRNA sense strand
gagacagggagccaagcua

SEQ ID NO: 1080179 - RNA, 19 nt, Homo sapiens
  misc_RNA (1)...(19): siRNA sense strand
cagcaauucccuuucuguu

SEQ ID NO: 1080180 - RNA, 19 nt, Homo sapiens
  misc_RNA (1)...(19): siRNA sense strand
aaaagaauccagccaacua

SEQ ID NO: 1080181 - RNA, 19 nt, Homo sapiens
  misc_RNA (1)...(19): siRNA sense strand
guaaucggcagcagaaggu

SEQ ID NO: 1080182 - RNA, 19 nt, Homo sapiens
  misc_RNA (1)...(19): siRNA sense strand
acugugcccuucauggaaa

SEQ ID NO: 1080183 - RNA, 19 nt, Homo sapiens
  misc_RNA (1)...(19): siRNA sense strand
ugacugugcccuucaugga

SEQ ID NO: 1080184 - RNA, 19 nt, Homo sapiens
  misc_RNA (1)...(19): siRNA sense strand
cuccagaccaucuauaaga

SEQ ID NO: 1080185 - RNA, 19 nt, Homo sapiens
  misc_RNA (1)...(19): siRNA sense strand
ucaaauuccagcuuaccaa

SEQ ID NO: 1080186 - RNA, 19 nt, Homo sapiens
  misc_RNA (1)...(19): siRNA sense strand
gucaccacauccagcaauu

SEQ ID NO: 1080187 - RNA, 19 nt, Homo sapiens
  misc_RNA (1)...(19): siRNA sense strand
ucagaggaaucccuaucuc

SEQ ID NO: 1080188 - RNA, 19 nt, Homo sapiens
  misc_RNA (1)...(19): siRNA sense strand
gcucaguguggccuggaua

SEQ ID NO: 1080189 - RNA, 19 nt, Homo sapiens
  misc_RNA (1)...(19): siRNA sense strand
cagaggaaucccuaucuca

SEQ ID NO: 1080190 - RNA, 19 nt, Homo sapiens
  misc_RNA (1)...(19): siRNA sense strand
guugaagaaccauggcauu

SEQ ID NO: 1080191 - RNA, 19 nt, Homo sapiens
  misc_RNA (1)...(19): siRNA sense strand
caucucagacucgggcuuu

SEQ ID NO: 1080192 - RNA, 19 nt, Homo sapiens
  misc_RNA (1)...(19): siRNA sense strand
gcagcuaaucuccuucagu

SEQ ID NO: 1080193 - RNA, 19 nt, Homo sapiens
  misc_RNA (1)...(19): siRNA sense strand
gggaagaaagggacuuggu

SEQ ID NO: 1080194 - RNA, 19 nt, Homo sapiens
  misc_RNA (1)...(19): siRNA sense strand
auccacacuuucucaaauu

SEQ ID NO: 1080195 - RNA, 19 nt, Homo sapiens
  misc_RNA (1)...(19): siRNA sense strand
gacugugcccuucauggaa

SEQ ID NO: 1080196 - RNA, 19 nt, Homo sapiens
  misc_RNA (1)...(19): siRNA sense strand
ucagagcccaagaagaaug

SEQ ID NO: 1080197 - RNA, 19 nt, Homo sapiens
  misc_RNA (1)...(19): siRNA sense strand
agcaauucccuuucuguuu

SEQ ID NO: 1080198 - RNA, 19 nt, Homo sapiens
  misc_RNA (1)...(19): siRNA sense strand
gggcagcuaaucuccuuca

SEQ ID NO: 1080199 - RNA, 19 nt, Homo sapiens
  misc_RNA (1)...(19): siRNA sense strand
ugaaugggagccacguguu

SEQ ID NO: 1080200 - RNA, 19 nt, Homo sapiens
  misc_RNA (1)...(19): siRNA sense strand
cugaccggcuccaaguuug

SEQ ID NO: 1080201 - RNA, 19 nt, Homo sapiens
  misc_RNA (1)...(19): siRNA sense strand
cauaugacaaggacaagag

SEQ ID NO: 1080202 - RNA, 19 nt, Homo sapiens
  misc_RNA (1)...(19): siRNA sense strand
cuugcucuuuccauaguaa

SEQ ID NO: 1080203 - RNA, 19 nt, Homo sapiens
  misc_RNA (1)...(19): siRNA sense strand
guggugaacagcuucuaug

SEQ ID NO: 1080204 - RNA, 19 nt, Homo sapiens
  misc_RNA (1)...(19): siRNA sense strand
ugaaauagcucaaccauua

SEQ ID NO: 1080205 - RNA, 19 nt, Homo sapiens
  misc_RNA (1)...(19): siRNA sense strand
gaaguuaggauaucucaua

SEQ ID NO: 1080206 - RNA, 19 nt, Homo sapiens
  misc_RNA (1)...(19): siRNA sense strand
uaauagaacuugaccagua

SEQ ID NO: 1080207 - RNA, 19 nt, Homo sapiens
  misc_RNA (1)...(19): siRNA sense strand
ucaaauaccugccuuacaa

SEQ ID NO: 1080208 - RNA, 19 nt, Homo sapiens
  misc_RNA (1)...(19): siRNA sense strand
gaugaaggguggcacauuu

SEQ ID NO: 1080209 - RNA, 19 nt, Homo sapiens
  misc_RNA (1)...(19): siRNA sense strand
ggaagaagcgacaccaaua

SEQ ID NO: 1080210 - RNA, 19 nt, Homo sapiens
  misc_RNA (1)...(19): siRNA sense strand
ggaagacccugaugacaug

SEQ ID NO: 1080211 - RNA, 19 nt, Homo sapiens
  misc_RNA (1)...(19): siRNA sense strand
gauaaugcguuagcagaua

SEQ ID NO: 1080212 - RNA, 19 nt, Homo sapiens
  misc_RNA (1)...(19): siRNA sense strand
aaaccuacccuaaccauua

SEQ ID NO: 1080213 - RNA, 19 nt, Homo sapiens
  misc_RNA (1)...(19): siRNA sense strand
gccaugaacuccacagauu

SEQ ID NO: 1080214 - RNA, 19 nt, Homo sapiens
  misc_RNA (1)...(19): siRNA sense strand
gaagcaaguuacuaauguu

SEQ ID NO: 1080215 - RNA, 19 nt, Homo sapiens
  misc_RNA (1)...(19): siRNA sense strand
gucauacccuuauuucaua

SEQ ID NO: 1080216 - RNA, 19 nt, Homo sapiens
  misc_RNA (1)...(19): siRNA sense strand
gaggaaagguuaauagaac

SEQ ID NO: 1080217 - RNA, 19 nt, Homo sapiens
  misc_RNA (1)...(19): siRNA sense strand
aaagguggcauuacaaaua

SEQ ID NO: 1080218 - RNA, 19 nt, Homo sapiens
  misc_RNA (1)...(19): siRNA sense strand
gaagguaaauuugaugaag

SEQ ID NO: 1080219 - RNA, 19 nt, Homo sapiens
  misc_RNA (1)...(19): siRNA sense strand
ccagaaagguggcauuaca

SEQ ID NO: 1080220 - RNA, 19 nt, Homo sapiens
  misc_RNA (1)...(19): siRNA sense strand
agauaugcaugcugaaaua

SEQ ID NO: 1080221 - RNA, 19 nt, Homo sapiens
  misc_RNA (1)...(19): siRNA sense strand
ggaacacucugaaccuaau

SEQ ID NO: 1080222 - RNA, 19 nt, Homo sapiens
  misc_RNA (1)...(19): siRNA sense strand
gaagaagcgacaccaauau

SEQ ID NO: 1080223 - RNA, 19 nt, Homo sapiens
  misc_RNA (1)...(19): siRNA sense strand
gcaaaagguucuacuaguu

SEQ ID NO: 1080224 - RNA, 19 nt, Homo sapiens
  misc_RNA (1)...(19): siRNA sense strand
guuaggauaucucauacaa

SEQ ID NO: 1080225 - RNA, 19 nt, Homo sapiens
  misc_RNA (1)...(19): siRNA sense strand
ugaagcaaguuacuaaugu

SEQ ID NO: 1080226 - RNA, 19 nt, Homo sapiens
  misc_RNA (1)...(19): siRNA sense strand
cauaagcgcuuuccuacuc

SEQ ID NO: 1080227 - RNA, 19 nt, Homo sapiens
  misc_RNA (1)...(19): siRNA sense strand
ugaagucuaugaagcacua

SEQ ID NO: 1080228 - RNA, 19 nt, Homo sapiens
  misc_RNA (1)...(19): siRNA sense strand
gguccugccuucagaaaga

SEQ ID NO: 1080229 - RNA, 19 nt, Homo sapiens
  misc_RNA (1)...(19): siRNA sense strand
gcucaaccauuauuacaag

SEQ ID NO: 1080230 - RNA, 19 nt, Homo sapiens
  misc_RNA (1)...(19): siRNA sense strand
auaccugccuuacaagaua

SEQ ID NO: 1080231 - RNA, 19 nt, Homo sapiens
  misc_RNA (1)...(19): siRNA sense strand
caauauggaucacaaacca

SEQ ID NO: 1080232 - RNA, 19 nt, Homo sapiens
  misc_RNA (1)...(19): siRNA sense strand
caaaagagcccauaaaucu

SEQ ID NO: 1080233 - RNA, 19 nt, Homo sapiens
  misc_RNA (1)...(19): siRNA sense strand
uagcagauaugcauccaau

SEQ ID NO: 1080234 - RNA, 19 nt, Homo sapiens
  misc_RNA (1)...(19): siRNA sense strand
gacaagaaguuaggauauc

SEQ ID NO: 1080235 - RNA, 19 nt, Homo sapiens
  misc_RNA (1)...(19): siRNA sense strand
gaaauagcucaaccauuau

SEQ ID NO: 1080236 - RNA, 19 nt, Homo sapiens
  misc_RNA (1)...(19): siRNA sense strand
ggucauacccuuauuucau

SEQ ID NO: 1080237 - RNA, 19 nt, Homo sapiens
  misc_RNA (1)...(19): siRNA sense strand
gcccauaaaucuuggucuu

SEQ ID NO: 1080238 - RNA, 19 nt, Homo sapiens
  misc_RNA (1)...(19): siRNA sense strand
gcauuuaauucacagucaa

SEQ ID NO: 1080239 - RNA, 19 nt, Homo sapiens
  misc_RNA (1)...(19): siRNA sense strand
caaauacaacagucgaauu

SEQ ID NO: 1080240 - RNA, 19 nt, Homo sapiens
  misc_RNA (1)...(19): siRNA sense strand
uuugguaacuggccucuuu

SEQ ID NO: 1080241 - RNA, 19 nt, Homo sapiens
  misc_RNA (1)...(19): siRNA sense strand
gaaagguggcauuacaaau

SEQ ID NO: 1080242 - RNA, 19 nt, Homo sapiens
  misc_RNA (1)...(19): siRNA sense strand
uaacucacgcucauccuaa

SEQ ID NO: 1080243 - RNA, 19 nt, Homo sapiens
  misc_RNA (1)...(19): siRNA sense strand
uagcagccaucuugccaaa

SEQ ID NO: 1080244 - RNA, 19 nt, Homo sapiens
  misc_RNA (1)...(19): siRNA sense strand
uccaggaucugcucaauuc

SEQ ID NO: 1080245 - RNA, 19 nt, Homo sapiens
  misc_RNA (1)...(19): siRNA sense strand
aaagaagacguuccagaaa

SEQ ID NO: 1080246 - RNA, 19 nt, Homo sapiens
  misc_RNA (1)...(19): siRNA sense strand
gcacugagucuuucaacca

SEQ ID NO: 1080247 - RNA, 19 nt, Homo sapiens
  misc_RNA (1)...(19): siRNA sense strand
gaagcgacaccaauaugga

SEQ ID NO: 1080248 - RNA, 19 nt, Homo sapiens
  misc_RNA (1)...(19): siRNA sense strand
uuacaugccuuacaaugag

SEQ ID NO: 1080249 - RNA, 19 nt, Homo sapiens
  misc_RNA (1)...(19): siRNA sense strand
gaacuccacagauuuguac

SEQ ID NO: 1080250 - RNA, 19 nt, Homo sapiens
  misc_RNA (1)...(19): siRNA sense strand
ccguugggauuacuuauau

SEQ ID NO: 1080251 - RNA, 19 nt, Homo sapiens
  misc_RNA (1)...(19): siRNA sense strand
caagauaugcaugcugaaa

SEQ ID NO: 1080252 - RNA, 19 nt, Homo sapiens
  misc_RNA (1)...(19): siRNA sense strand
uaugccaccuccucaauau

SEQ ID NO: 1080253 - RNA, 19 nt, Homo sapiens
  misc_RNA (1)...(19): siRNA sense strand
aagaagacguuccagaaag

SEQ ID NO: 1080254 - RNA, 19 nt, Homo sapiens
  misc_RNA (1)...(19): siRNA sense strand
gcagugcucugaggaaagg

SEQ ID NO: 1080255 - RNA, 19 nt, Homo sapiens
  misc_RNA (1)...(19): siRNA sense strand
gaaugacgcagugcucuga

SEQ ID NO: 1080256 - RNA, 19 nt, Homo sapiens
  misc_RNA (1)...(19): siRNA sense strand
cacaagugaucauggaaug

SEQ ID NO: 1080257 - RNA, 19 nt, Homo sapiens
  misc_RNA (1)...(19): siRNA sense strand
acaccaauauggaucacaa

SEQ ID NO: 1080258 - RNA, 19 nt, Homo sapiens
  misc_RNA (1)...(19): siRNA sense strand
guggaacacucugaaccua

SEQ ID NO: 1080259 - RNA, 19 nt, Homo sapiens
  misc_RNA (1)...(19): siRNA sense strand
gggccugucauuucagaua

SEQ ID NO: 1080260 - RNA, 19 nt, Homo sapiens
  misc_RNA (1)...(19): siRNA sense strand
gggaagacccugaugacau

SEQ ID NO: 1080261 - RNA, 19 nt, Homo sapiens
  misc_RNA (1)...(19): siRNA sense strand
ggaacaaaucuuucuccuu

SEQ ID NO: 1080262 - RNA, 19 nt, Homo sapiens
  misc_RNA (1)...(19): siRNA sense strand
auacaacagucgaauucaa

SEQ ID NO: 1080263 - RNA, 19 nt, Homo sapiens
  misc_RNA (1)...(19): siRNA sense strand
ugacaagaaguuaggauau

SEQ ID NO: 1080264 - RNA, 19 nt, Homo sapiens
  misc_RNA (1)...(19): siRNA sense strand
acaaaucuuucuccuugga

SEQ ID NO: 1080265 - RNA, 19 nt, Homo sapiens
  misc_RNA (1)...(19): siRNA sense strand
auacauaagcgcuuuccua

SEQ ID NO: 1080266 - RNA, 19 nt, Homo sapiens
  misc_RNA (1)...(19): siRNA sense strand
gaaagguuaauagaacuug

SEQ ID NO: 1080267 - RNA, 19 nt, Homo sapiens
  misc_RNA (1)...(19): siRNA sense strand
gggauuguugcaaaugaua

SEQ ID NO: 1080268 - RNA, 19 nt, Homo sapiens
  misc_RNA (1)...(19): siRNA sense strand
cgguuacgauaaugcguua

SEQ ID NO: 1080269 - RNA, 19 nt, Homo sapiens
  misc_RNA (1)...(19): siRNA sense strand
cgaauucaaccaaucauag

SEQ ID NO: 1080270 - RNA, 19 nt, Homo sapiens
  misc_RNA (1)...(19): siRNA sense strand
cauccuaaucuuacuguuu

SEQ ID NO: 1080271 - RNA, 19 nt, Homo sapiens
  misc_RNA (1)...(19): siRNA sense strand
gccaaaagaagguaaauuu

SEQ ID NO: 1080272 - RNA, 19 nt, Homo sapiens
  misc_RNA (1)...(19): siRNA sense strand
ggaaagguuaauagaacuu

SEQ ID NO: 1080273 - RNA, 19 nt, Homo sapiens
  misc_RNA (1)...(19): siRNA sense strand
ugaggaaagguuaauagaa

SEQ ID NO: 1080274 - RNA, 19 nt, Homo sapiens
  misc_RNA (1)...(19): siRNA sense strand
ggauaucucauacaaaugc

SEQ ID NO: 1080275 - RNA, 19 nt, Homo sapiens
  misc_RNA (1)...(19): siRNA sense strand
ccauaaaucuuggucuucu

SEQ ID NO: 1080276 - RNA, 19 nt, Homo sapiens
  misc_RNA (1)...(19): siRNA sense strand
gaagauagaguugccaaaa

SEQ ID NO: 1080277 - RNA, 19 nt, Homo sapiens
  misc_RNA (1)...(19): siRNA sense strand
gggaagaagcgacaccaau

SEQ ID NO: 1080278 - RNA, 19 nt, Homo sapiens
  misc_RNA (1)...(19): siRNA sense strand
guguuaaaccagcagaaua

SEQ ID NO: 1080279 - RNA, 19 nt, Homo sapiens
  misc_RNA (1)...(19): siRNA sense strand
aaauacaacagucgaauuc

SEQ ID NO: 1080280 - RNA, 19 nt, Homo sapiens
  misc_RNA (1)...(19): siRNA sense strand
ggccugucauuucagauau

SEQ ID NO: 1080281 - RNA, 19 nt, Homo sapiens
  misc_RNA (1)...(19): siRNA sense strand
caugaacuccacagauuug

SEQ ID NO: 1080282 - RNA, 19 nt, Homo sapiens
  misc_RNA (1)...(19): siRNA sense strand
agaaagguggcauuacaaa

SEQ ID NO: 1080283 - RNA, 19 nt, Homo sapiens
  misc_RNA (1)...(19): siRNA sense strand
ugaucaaucuccaguagca

SEQ ID NO: 1080284 - RNA, 19 nt, Homo sapiens
  misc_RNA (1)...(19): siRNA sense strand
gaaccuaaucaucacaagu

SEQ ID NO: 1080285 - RNA, 19 nt, Homo sapiens
  misc_RNA (1)...(19): siRNA sense strand
ccaugaacuccacagauuu

SEQ ID NO: 1080286 - RNA, 19 nt, Homo sapiens
  misc_RNA (1)...(19): siRNA sense strand
caaaagguucuacuaguuu

SEQ ID NO: 1080287 - RNA, 19 nt, Homo sapiens
  misc_RNA (1)...(19): siRNA sense strand
gugaagcaaguuacuaaug

SEQ ID NO: 1080288 - RNA, 19 nt, Homo sapiens
  misc_RNA (1)...(19): siRNA sense strand
gauccuauucggaacaaau

SEQ ID NO: 1080289 - RNA, 19 nt, Homo sapiens
  misc_RNA (1)...(19): siRNA sense strand
agauagaguugccaaaauu

SEQ ID NO: 1080290 - RNA, 19 nt, Homo sapiens
  misc_RNA (1)...(19): siRNA sense strand
auaaugcguuagcagauau

SEQ ID NO: 1080291 - RNA, 19 nt, Homo sapiens
  misc_RNA (1)...(19): siRNA sense strand
cauacuugcugcacugagu

SEQ ID NO: 1080292 - RNA, 19 nt, Homo sapiens
  misc_RNA (1)...(19): siRNA sense strand
caacgccccauuuucauua

SEQ ID NO: 1080293 - RNA, 19 nt, Homo sapiens
  misc_RNA (1)...(19): siRNA sense strand
gauagaguugccaaaauua

SEQ ID NO: 1080294 - RNA, 19 nt, Homo sapiens
  misc_RNA (1)...(19): siRNA sense strand
cucauuacaugccuuacaa

SEQ ID NO: 1080295 - RNA, 19 nt, Homo sapiens
  misc_RNA (1)...(19): siRNA sense strand
gcagcauuauagugauugu

SEQ ID NO: 1080296 - RNA, 19 nt, Homo sapiens
  misc_RNA (1)...(19): siRNA sense strand
gauggauuccguugggauu

SEQ ID NO: 1080297 - RNA, 19 nt, Homo sapiens
  misc_RNA (1)...(19): siRNA sense strand
agaagacguuccagaaagg

SEQ ID NO: 1080298 - RNA, 19 nt, Homo sapiens
  misc_RNA (1)...(19): siRNA sense strand
gauauugacaagaaguuag

SEQ ID NO: 1080299 - RNA, 19 nt, Homo sapiens
  misc_RNA (1)...(19): siRNA sense strand
agaccacuauacccugauu

SEQ ID NO: 1080300 - RNA, 19 nt, Homo sapiens
  misc_RNA (1)...(19): siRNA sense strand
uggcagcauuauagugauu

SEQ ID NO: 1080301 - RNA, 19 nt, Homo sapiens
  misc_RNA (1)...(19): siRNA sense strand
uguuaaaccagcagaauau

SEQ ID NO: 1080302 - RNA, 19 nt, Homo sapiens
  misc_RNA (1)...(19): siRNA sense strand
gauuuguacccacuacuau

SEQ ID NO: 1080303 - RNA, 19 nt, Homo sapiens
  misc_RNA (1)...(19): siRNA sense strand
ccaugguccugccuucaga

SEQ ID NO: 1080304 - RNA, 19 nt, Homo sapiens
  misc_RNA (1)...(19): siRNA sense strand
ggaagaggcugauuacuuu

SEQ ID NO: 1080305 - RNA, 19 nt, Homo sapiens
  misc_RNA (1)...(19): siRNA sense strand
ggaagcagguggacuuuaa

SEQ ID NO: 1080306 - RNA, 19 nt, Homo sapiens
  misc_RNA (1)...(19): siRNA sense strand
ccaaugaaauggagacaua

SEQ ID NO: 1080307 - RNA, 19 nt, Homo sapiens
  misc_RNA (1)...(19): siRNA sense strand
gaacguggguggcuguauu

SEQ ID NO: 1080308 - RNA, 19 nt, Homo sapiens
  misc_RNA (1)...(19): siRNA sense strand
ggagacauauucuuuaagg

SEQ ID NO: 1080309 - RNA, 19 nt, Homo sapiens
  misc_RNA (1)...(19): siRNA sense strand
gaacagacgcuauugaaaa

SEQ ID NO: 1080310 - RNA, 19 nt, Homo sapiens
  misc_RNA (1)...(19): siRNA sense strand
aaagagaggcgggaaauaa

SEQ ID NO: 1080311 - RNA, 19 nt, Homo sapiens
  misc_RNA (1)...(19): siRNA sense strand
ggugcaagcugugagagua

SEQ ID NO: 1080312 - RNA, 19 nt, Homo sapiens
  misc_RNA (1)...(19): siRNA sense strand
gaggaagaauucacagcaa

SEQ ID NO: 1080313 - RNA, 19 nt, Homo sapiens
  misc_RNA (1)...(19): siRNA sense strand
ugauggacgucuauuuaaa

SEQ ID NO: 1080314 - RNA, 19 nt, Homo sapiens
  misc_RNA (1)...(19): siRNA sense strand
agacuucugugauucauau

SEQ ID NO: 1080315 - RNA, 19 nt, Homo sapiens
  misc_RNA (1)...(19): siRNA sense strand
ggaacagacgcuauugaaa

SEQ ID NO: 1080316 - RNA, 19 nt, Homo sapiens
  misc_RNA (1)...(19): siRNA sense strand
gaguagaauuauuggugua

SEQ ID NO: 1080317 - RNA, 19 nt, Homo sapiens
  misc_RNA (1)...(19): siRNA sense strand
cgugauggacgucuauuua

SEQ ID NO: 1080318 - RNA, 19 nt, Homo sapiens
  misc_RNA (1)...(19): siRNA sense strand
gaaauggagacauauucuu

SEQ ID NO: 1080319 - RNA, 19 nt, Homo sapiens
  misc_RNA (1)...(19): siRNA sense strand
aguggucgcuuuccucuaa

SEQ ID NO: 1080320 - RNA, 19 nt, Homo sapiens
  misc_RNA (1)...(19): siRNA sense strand
cagccugucugaccauuug

SEQ ID NO: 1080321 - RNA, 19 nt, Homo sapiens
  misc_RNA (1)...(19): siRNA sense strand
gaagaggaggugcuagaug

SEQ ID NO: 1080322 - RNA, 19 nt, Homo sapiens
  misc_RNA (1)...(19): siRNA sense strand
aagaggaggugcuagaugu

SEQ ID NO: 1080323 - RNA, 19 nt, Homo sapiens
  misc_RNA (1)...(19): siRNA sense strand
ggauuaccuucauggagaa

SEQ ID NO: 1080324 - RNA, 19 nt, Homo sapiens
  misc_RNA (1)...(19): siRNA sense strand
ggaaauaauguucaguaca

SEQ ID NO: 1080325 - RNA, 19 nt, Homo sapiens
  misc_RNA (1)...(19): siRNA sense strand
gugauggacgucuauuuaa

SEQ ID NO: 1080326 - RNA, 19 nt, Homo sapiens
  misc_RNA (1)...(19): siRNA sense strand
gggaaauaauguucaguac

SEQ ID NO: 1080327 - RNA, 19 nt, Homo sapiens
  misc_RNA (1)...(19): siRNA sense strand
gauggacgucuauuuaaau

SEQ ID NO: 1080328 - RNA, 19 nt, Homo sapiens
  misc_RNA (1)...(19): siRNA sense strand
uauguucaguggucgcuuu

SEQ ID NO: 1080329 - RNA, 19 nt, Homo sapiens
  misc_RNA (1)...(19): siRNA sense strand
aggaagaauucacagcaaa

SEQ ID NO: 1080330 - RNA, 19 nt, Homo sapiens
  misc_RNA (1)...(19): siRNA sense strand
caguuuggguucuccacua

SEQ ID NO: 1080331 - RNA, 19 nt, Homo sapiens
  misc_RNA (1)...(19): siRNA sense strand
uggcaucccuuauccauac

SEQ ID NO: 1080332 - RNA, 19 nt, Homo sapiens
  misc_RNA (1)...(19): siRNA sense strand
guacagugcaauucuuuua

SEQ ID NO: 1080333 - RNA, 19 nt, Homo sapiens
  misc_RNA (1)...(19): siRNA sense strand
gaaaagguacagugcaauu

SEQ ID NO: 1080334 - RNA, 19 nt, Homo sapiens
  misc_RNA (1)...(19): siRNA sense strand
uuggagcuauuauucagua

SEQ ID NO: 1080335 - RNA, 19 nt, Homo sapiens
  misc_RNA (1)...(19): siRNA sense strand
ccgcaucgcccuacaggaa

SEQ ID NO: 1080336 - RNA, 19 nt, Homo sapiens
  misc_RNA (1)...(19): siRNA sense strand
gcaucgcccuacaggaaga

SEQ ID NO: 1080337 - RNA, 19 nt, Homo sapiens
  misc_RNA (1)...(19): siRNA sense strand
uacaggaagaggcugauua

SEQ ID NO: 1080338 - RNA, 19 nt, Homo sapiens
  misc_RNA (1)...(19): siRNA sense strand
uagcagaguugaagaaaau

SEQ ID NO: 1080339 - RNA, 19 nt, Homo sapiens
  misc_RNA (1)...(19): siRNA sense strand
guucuccacuaucuuaaca

SEQ ID NO: 1080340 - RNA, 19 nt, Homo sapiens
  misc_RNA (1)...(19): siRNA sense strand
aaugauggaugccuuugau

SEQ ID NO: 1080341 - RNA, 19 nt, Homo sapiens
  misc_RNA (1)...(19): siRNA sense strand
cgggaaauaauguucagua

SEQ ID NO: 1080342 - RNA, 19 nt, Homo sapiens
  misc_RNA (1)...(19): siRNA sense strand
gcagcugggaggaagaauu

SEQ ID NO: 1080343 - RNA, 19 nt, Homo sapiens
  misc_RNA (1)...(19): siRNA sense strand
gaagaggcugauuacuuug

SEQ ID NO: 1080344 - RNA, 19 nt, Homo sapiens
  misc_RNA (1)...(19): siRNA sense strand
gagaggcgggaaauaaugu

SEQ ID NO: 1080345 - RNA, 19 nt, Homo sapiens
  misc_RNA (1)...(19): siRNA sense strand
ggaagaauucacagcaaag

SEQ ID NO: 1080346 - RNA, 19 nt, Homo sapiens
  misc_RNA (1)...(19): siRNA sense strand
cagaagaggaggugcuaga

SEQ ID NO: 1080347 - RNA, 19 nt, Homo sapiens
  misc_RNA (1)...(19): siRNA sense strand
aggaagaggcugauuacuu

SEQ ID NO: 1080348 - RNA, 19 nt, Homo sapiens
  misc_RNA (1)...(19): siRNA sense strand
ugugagaguagaauuauug

SEQ ID NO: 1080349 - RNA, 19 nt, Homo sapiens
  misc_RNA (1)...(19): siRNA sense strand
ucauggagaaguucagauu

SEQ ID NO: 1080350 - RNA, 19 nt, Homo sapiens
  misc_RNA (1)...(19): siRNA sense strand
gaaaaugauggaugccuuu

SEQ ID NO: 1080351 - RNA, 19 nt, Homo sapiens
  misc_RNA (1)...(19): siRNA sense strand
uggcuuagucugcaauaaa

SEQ ID NO: 1080352 - RNA, 19 nt, Homo sapiens
  misc_RNA (1)...(19): siRNA sense strand
cauguuggcaucuauguuc

SEQ ID NO: 1080353 - RNA, 19 nt, Homo sapiens
  misc_RNA (1)...(19): siRNA sense strand
guucagauucccacagaug

SEQ ID NO: 1080354 - RNA, 19 nt, Homo sapiens
  misc_RNA (1)...(19): siRNA sense strand
caguacauuuggagcuauu

SEQ ID NO: 1080355 - RNA, 19 nt, Homo sapiens
  misc_RNA (1)...(19): siRNA sense strand
cuucaaggacuccauguug

SEQ ID NO: 1080356 - RNA, 19 nt, Homo sapiens
  misc_RNA (1)...(19): siRNA sense strand
uggaacagacgcuauugaa

SEQ ID NO: 1080357 - RNA, 19 nt, Homo sapiens
  misc_RNA (1)...(19): siRNA sense strand
uggguucuccacuaucuua

SEQ ID NO: 1080358 - RNA, 19 nt, Homo sapiens
  misc_RNA (1)...(19): siRNA sense strand
uccacuaucuuaacacauc

SEQ ID NO: 1080359 - RNA, 19 nt, Homo sapiens
  misc_RNA (1)...(19): siRNA sense strand
cagcugggaggaagaauuc

SEQ ID NO: 1080360 - RNA, 19 nt, Homo sapiens
  misc_RNA (1)...(19): siRNA sense strand
gcugugagaguagaauuau

SEQ ID NO: 1080361 - RNA, 19 nt, Homo sapiens
  misc_RNA (1)...(19): siRNA sense strand
ugauucauauggcuuaguc

SEQ ID NO: 1080362 - RNA, 19 nt, Homo sapiens
  misc_RNA (1)...(19): siRNA sense strand
cauggaagcagguggacuu

SEQ ID NO: 1080363 - RNA, 19 nt, Homo sapiens
  misc_RNA (1)...(19): siRNA sense strand
guacauuuggagcuauuau

SEQ ID NO: 1080364 - RNA, 19 nt, Homo sapiens
  misc_RNA (1)...(19): siRNA sense strand
ugaccgugauggacgucua

SEQ ID NO: 1080365 - RNA, 19 nt, Homo sapiens
  misc_RNA (1)...(19): siRNA sense strand
gagacauauucuuuaaggu

SEQ ID NO: 1080366 - RNA, 19 nt, Homo sapiens
  misc_RNA (1)...(19): siRNA sense strand
gaagaauucacagcaaagg

SEQ ID NO: 1080367 - RNA, 19 nt, Homo sapiens
  misc_RNA (1)...(19): siRNA sense strand
aaguucagauucccacaga

SEQ ID NO: 1080368 - RNA, 19 nt, Homo sapiens
  misc_RNA (1)...(19): siRNA sense strand
ggcuuagucugcaauaaac

SEQ ID NO: 1080369 - RNA, 19 nt, Homo sapiens
  misc_RNA (1)...(19): siRNA sense strand
gucaggggcuuguguuauu

SEQ ID NO: 1080370 - RNA, 19 nt, Homo sapiens
  misc_RNA (1)...(19): siRNA sense strand
ugauggaacagacgcuauu

SEQ ID NO: 1080371 - RNA, 19 nt, Homo sapiens
  misc_RNA (1)...(19): siRNA sense strand
ugaaauggagacauauucu

SEQ ID NO: 1080372 - RNA, 19 nt, Homo sapiens
  misc_RNA (1)...(19): siRNA sense strand
guagcagaguugaagaaaa

SEQ ID NO: 1080373 - RNA, 19 nt, Homo sapiens
  misc_RNA (1)...(19): siRNA sense strand
gaggaggugcuagauguuc

SEQ ID NO: 1080374 - RNA, 19 nt, Homo sapiens
  misc_RNA (1)...(19): siRNA sense strand
gauggaacagacgcuauug

SEQ ID NO: 1080375 - RNA, 19 nt, Homo sapiens
  misc_RNA (1)...(19): siRNA sense strand
cuagauguucuccgacuga

SEQ ID NO: 1080376 - RNA, 19 nt, Homo sapiens
  misc_RNA (1)...(19): siRNA sense strand
cauauggcuuagucugcaa

SEQ ID NO: 1080377 - RNA, 19 nt, Homo sapiens
  misc_RNA (1)...(19): siRNA sense strand
aagagaggcgggaaauaau

SEQ ID NO: 1080378 - RNA, 19 nt, Homo sapiens
  misc_RNA (1)...(19): siRNA sense strand
ggaaggccacaaggcagaa

SEQ ID NO: 1080379 - RNA, 19 nt, Homo sapiens
  misc_RNA (1)...(19): siRNA sense strand
aagguacagugcaauucuu

SEQ ID NO: 1080380 - RNA, 19 nt, Homo sapiens
  misc_RNA (1)...(19): siRNA sense strand
gaaaagcagcugggaggaa

SEQ ID NO: 1080381 - RNA, 19 nt, Homo sapiens
  misc_RNA (1)...(19): siRNA sense strand
acauuuggagcuauuauuc

SEQ ID NO: 1080382 - RNA, 19 nt, Homo sapiens
  misc_RNA (1)...(19): siRNA sense strand
agagaggcgggaaauaaug

SEQ ID NO: 1080383 - RNA, 19 nt, Homo sapiens
  misc_RNA (1)...(19): siRNA sense strand
uagauguucuccgacugaa

SEQ ID NO: 1080384 - RNA, 19 nt, Homo sapiens
  misc_RNA (1)...(19): siRNA sense strand
ucaguacauuuggagcuau

SEQ ID NO: 1080385 - RNA, 19 nt, Homo sapiens
  misc_RNA (1)...(19): siRNA sense strand
gaauuauugguguauaugc

SEQ ID NO: 1080386 - RNA, 19 nt, Homo sapiens
  misc_RNA (1)...(19): siRNA sense strand
cagcagagauggugaauaa

SEQ ID NO: 1080387 - RNA, 19 nt, Homo sapiens
  misc_RNA (1)...(19): siRNA sense strand
gagaauaugugaaaggauu

SEQ ID NO: 1080388 - RNA, 19 nt, Homo sapiens
  misc_RNA (1)...(19): siRNA sense strand
ggagaaagcugccacucuu

SEQ ID NO: 1080389 - RNA, 19 nt, Homo sapiens
  misc_RNA (1)...(19): siRNA sense strand
gguaugagaugcuccuuaa

SEQ ID NO: 1080390 - RNA, 19 nt, Homo sapiens
  misc_RNA (1)...(19): siRNA sense strand
gaaaugcuccgacuacaaa

SEQ ID NO: 1080391 - RNA, 19 nt, Homo sapiens
  misc_RNA (1)...(19): siRNA sense strand
ggaaacuacuccuagaauu

SEQ ID NO: 1080392 - RNA, 19 nt, Homo sapiens
  misc_RNA (1)...(19): siRNA sense strand
gcagcaagccauucuaaua

SEQ ID NO: 1080393 - RNA, 19 nt, Homo sapiens
  misc_RNA (1)...(19): siRNA sense strand
caaccgacuugaccucuua

SEQ ID NO: 1080394 - RNA, 19 nt, Homo sapiens
  misc_RNA (1)...(19): siRNA sense strand
ggacagauccucaaacuag

SEQ ID NO: 1080395 - RNA, 19 nt, Homo sapiens
  misc_RNA (1)...(19): siRNA sense strand
auaaaugccuuccauagua

SEQ ID NO: 1080396 - RNA, 19 nt, Homo sapiens
  misc_RNA (1)...(19): siRNA sense strand
ggaggcagcucauuaucaa

SEQ ID NO: 1080397 - RNA, 19 nt, Homo sapiens
  misc_RNA (1)...(19): siRNA sense strand
caagauggauccgagauaa

SEQ ID NO: 1080398 - RNA, 19 nt, Homo sapiens
  misc_RNA (1)...(19): siRNA sense strand
ugaaagagcuuaugucaac

SEQ ID NO: 1080399 - RNA, 19 nt, Homo sapiens
  misc_RNA (1)...(19): siRNA sense strand
gaaccuaaaugcuccuaga

SEQ ID NO: 1080400 - RNA, 19 nt, Homo sapiens
  misc_RNA (1)...(19): siRNA sense strand
gaaaggauuugauaaugca

SEQ ID NO: 1080401 - RNA, 19 nt, Homo sapiens
  misc_RNA (1)...(19): siRNA sense strand
ggacuggaaugaugcuaaa

SEQ ID NO: 1080402 - RNA, 19 nt, Homo sapiens
  misc_RNA (1)...(19): siRNA sense strand
gcagcucauuaucaaauua

SEQ ID NO: 1080403 - RNA, 19 nt, Homo sapiens
  misc_RNA (1)...(19): siRNA sense strand
gaagugacaauguguauga

SEQ ID NO: 1080404 - RNA, 19 nt, Homo sapiens
  misc_RNA (1)...(19): siRNA sense strand
gaaagagucugcugugaac

SEQ ID NO: 1080405 - RNA, 19 nt, Homo sapiens
  misc_RNA (1)...(19): siRNA sense strand
cuacaggacuccaggcaua

SEQ ID NO: 1080406 - RNA, 19 nt, Homo sapiens
  misc_RNA (1)...(19): siRNA sense strand
uaaaugccuuccauaguaa

SEQ ID NO: 1080407 - RNA, 19 nt, Homo sapiens
  misc_RNA (1)...(19): siRNA sense strand
ggaaaugcuucugacagua

SEQ ID NO: 1080408 - RNA, 19 nt, Homo sapiens
  misc_RNA (1)...(19): siRNA sense strand
gaaacuacuccuagaauug

SEQ ID NO: 1080409 - RNA, 19 nt, Homo sapiens
  misc_RNA (1)...(19): siRNA sense strand
gaaggagacuaaugagcaa

SEQ ID NO: 1080410 - RNA, 19 nt, Homo sapiens
  misc_RNA (1)...(19): siRNA sense strand
ccucuuagaucagguauuu

SEQ ID NO: 1080411 - RNA, 19 nt, Homo sapiens
  misc_RNA (1)...(19): siRNA sense strand
ggaaauugccuccugauuc

SEQ ID NO: 1080412 - RNA, 19 nt, Homo sapiens
  misc_RNA (1)...(19): siRNA sense strand
gagacauccuucagaaauu

SEQ ID NO: 1080413 - RNA, 19 nt, Homo sapiens
  misc_RNA (1)...(19): siRNA sense strand
gaaauuggcaccauuccuu

SEQ ID NO: 1080414 - RNA, 19 nt, Homo sapiens
  misc_RNA (1)...(19): siRNA sense strand
gcagcuuucuucaguauau

SEQ ID NO: 1080415 - RNA, 19 nt, Homo sapiens
  misc_RNA (1)...(19): siRNA sense strand
gcacaagaacgcuaccuuu

SEQ ID NO: 1080416 - RNA, 19 nt, Homo sapiens
  misc_RNA (1)...(19): siRNA sense strand
gaaggaggcagcucauuau

SEQ ID NO: 1080417 - RNA, 19 nt, Homo sapiens
  misc_RNA (1)...(19): siRNA sense strand
gaagaagaagacauuguaa

SEQ ID NO: 1080418 - RNA, 19 nt, Homo sapiens
  misc_RNA (1)...(19): siRNA sense strand
gaaaaucugugggagcuua

SEQ ID NO: 1080419 - RNA, 19 nt, Homo sapiens
  misc_RNA (1)...(19): siRNA sense strand
gugaggaacugaagcagaa

SEQ ID NO: 1080420 - RNA, 19 nt, Homo sapiens
  misc_RNA (1)...(19): siRNA sense strand
gaaauugccuccugauucc

SEQ ID NO: 1080421 - RNA, 19 nt, Homo sapiens
  misc_RNA (1)...(19): siRNA sense strand
gcagggaaaugaugcagau

SEQ ID NO: 1080422 - RNA, 19 nt, Homo sapiens
  misc_RNA (1)...(19): siRNA sense strand
gauccgagauaaugaagug

SEQ ID NO: 1080423 - RNA, 19 nt, Homo sapiens
  misc_RNA (1)...(19): siRNA sense strand
ugaaggaggcagcucauua

SEQ ID NO: 1080424 - RNA, 19 nt, Homo sapiens
  misc_RNA (1)...(19): siRNA sense strand
ggaaagcccucuggaacug

SEQ ID NO: 1080425 - RNA, 19 nt, Homo sapiens
  misc_RNA (1)...(19): siRNA sense strand
ucugaacccuugcuugaua

SEQ ID NO: 1080426 - RNA, 19 nt, Homo sapiens
  misc_RNA (1)...(19): siRNA sense strand
guggauaugugguuuguug

SEQ ID NO: 1080427 - RNA, 19 nt, Homo sapiens
  misc_RNA (1)...(19): siRNA sense strand
ggagacauccuucagaaau

SEQ ID NO: 1080428 - RNA, 19 nt, Homo sapiens
  misc_RNA (1)...(19): siRNA sense strand
gaagaaauucagaaacaga

SEQ ID NO: 1080429 - RNA, 19 nt, Homo sapiens
  misc_RNA (1)...(19): siRNA sense strand
gugaaaggauuugauaaug

SEQ ID NO: 1080430 - RNA, 19 nt, Homo sapiens
  misc_RNA (1)...(19): siRNA sense strand
agaaguaucuggaaacagu

SEQ ID NO: 1080431 - RNA, 19 nt, Homo sapiens
  misc_RNA (1)...(19): siRNA sense strand
cauagugaauggagaaaga

SEQ ID NO: 1080432 - RNA, 19 nt, Homo sapiens
  misc_RNA (1)...(19): siRNA sense strand
uaaggacuaucuaaggaaa

SEQ ID NO: 1080433 - RNA, 19 nt, Homo sapiens
  misc_RNA (1)...(19): siRNA sense strand
caccauuccuuaagaugua

SEQ ID NO: 1080434 - RNA, 19 nt, Homo sapiens
  misc_RNA (1)...(19): siRNA sense strand
gaacacuucagcacaagaa

SEQ ID NO: 1080435 - RNA, 19 nt, Homo sapiens
  misc_RNA (1)...(19): siRNA sense strand
gacauucacucagagguuu

SEQ ID NO: 1080436 - RNA, 19 nt, Homo sapiens
  misc_RNA (1)...(19): siRNA sense strand
gagaaagcugccacucuua

SEQ ID NO: 1080437 - RNA, 19 nt, Homo sapiens
  misc_RNA (1)...(19): siRNA sense strand
gcucagauacuucuauuca

SEQ ID NO: 1080438 - RNA, 19 nt, Homo sapiens
  misc_RNA (1)...(19): siRNA sense strand
gacuugaccucuuagauca

SEQ ID NO: 1080439 - RNA, 19 nt, Homo sapiens
  misc_RNA (1)...(19): siRNA sense strand
gcacauagugaauggagaa

SEQ ID NO: 1080440 - RNA, 19 nt, Homo sapiens
  misc_RNA (1)...(19): siRNA sense strand
gguaucagaucucaucagu

SEQ ID NO: 1080441 - RNA, 19 nt, Homo sapiens
  misc_RNA (1)...(19): siRNA sense strand
ugaauaugauggugguaaa

SEQ ID NO: 1080442 - RNA, 19 nt, Homo sapiens
  misc_RNA (1)...(19): siRNA sense strand
gcaagccauucuaauagug

SEQ ID NO: 1080443 - RNA, 19 nt, Homo sapiens
  misc_RNA (1)...(19): siRNA sense strand
gagcuuaacuuugcagcau

SEQ ID NO: 1080444 - RNA, 19 nt, Homo sapiens
  misc_RNA (1)...(19): siRNA sense strand
gauaaugaagugacaaugu

SEQ ID NO: 1080445 - RNA, 19 nt, Homo sapiens
  misc_RNA (1)...(19): siRNA sense strand
aagaaaccaucgaugcuuu

SEQ ID NO: 1080446 - RNA, 19 nt, Homo sapiens
  misc_RNA (1)...(19): siRNA sense strand
gggagaagaagaagacauu

SEQ ID NO: 1080447 - RNA, 19 nt, Homo sapiens
  misc_RNA (1)...(19): siRNA sense strand
cagaaagcuugguguguga

SEQ ID NO: 1080448 - RNA, 19 nt, Homo sapiens
  misc_RNA (1)...(19): siRNA sense strand
agaagaagaagacauugua

SEQ ID NO: 1080449 - RNA, 19 nt, Homo sapiens
  misc_RNA (1)...(19): siRNA sense strand
gagaaacgaaugcaagaau

SEQ ID NO: 1080450 - RNA, 19 nt, Homo sapiens
  misc_RNA (1)...(19): siRNA sense strand
gaaaugcuucugacaguag

SEQ ID NO: 1080451 - RNA, 19 nt, Homo sapiens
  misc_RNA (1)...(19): siRNA sense strand
ggaaaugcuccgacuacaa

SEQ ID NO: 1080452 - RNA, 19 nt, Homo sapiens
  misc_RNA (1)...(19): siRNA sense strand
gauaugugguuuguuggaa

SEQ ID NO: 1080453 - RNA, 19 nt, Homo sapiens
  misc_RNA (1)...(19): siRNA sense strand
caaaauagccaaugaacuu

SEQ ID NO: 1080454 - RNA, 19 nt, Homo sapiens
  misc_RNA (1)...(19): siRNA sense strand
gggaaaugaugcagauaag

SEQ ID NO: 1080455 - RNA, 19 nt, Homo sapiens
  misc_RNA (1)...(19): siRNA sense strand
caaaucagugguugaagaa

SEQ ID NO: 1080456 - RNA, 19 nt, Homo sapiens
  misc_RNA (1)...(19): siRNA sense strand
aaacaugacagaacguauu

SEQ ID NO: 1080457 - RNA, 19 nt, Homo sapiens
  misc_RNA (1)...(19): siRNA sense strand
gaaaugaugcagauaagac

SEQ ID NO: 1080458 - RNA, 19 nt, Homo sapiens
  misc_RNA (1)...(19): siRNA sense strand
gcuaugugguggaugaaau

SEQ ID NO: 1080459 - RNA, 19 nt, Homo sapiens
  misc_RNA (1)...(19): siRNA sense strand
gguaggcucuaaauucaca

SEQ ID NO: 1080460 - RNA, 19 nt, Homo sapiens
  misc_RNA (1)...(19): siRNA sense strand
guauggagaauaugugaaa

SEQ ID NO: 1080461 - RNA, 19 nt, Homo sapiens
  misc_RNA (1)...(19): siRNA sense strand
ucagauacuucuauucaag

SEQ ID NO: 1080462 - RNA, 19 nt, Homo sapiens
  misc_RNA (1)...(19): siRNA sense strand
gaauggagaaagagaugaa

SEQ ID NO: 1080463 - RNA, 19 nt, Homo sapiens
  misc_RNA (1)...(19): siRNA sense strand
ggugguaaauugagcaaag

SEQ ID NO: 1080464 - RNA, 19 nt, Homo sapiens
  misc_RNA (1)...(19): siRNA sense strand
gcauguggauaugugguuu

SEQ ID NO: 1080465 - RNA, 19 nt, Homo sapiens
  misc_RNA (1)...(19): siRNA sense strand
ugaagaauauccacauacu

SEQ ID NO: 1080466 - RNA, 19 nt, Homo sapiens
  misc_RNA (1)...(19): siRNA sense strand
caauaaaugccuuccauag

SEQ ID NO: 1080467 - RNA, 19 nt, Homo sapiens
  misc_RNA (1)...(19): siRNA sense strand
ccaguaagguaucagaucu

SEQ ID NO: 1080468 - RNA, 19 nt, Homo sapiens
  misc_RNA (1)...(19): siRNA sense strand
agaaacgaaugcaagaaug

SEQ ID NO: 1080469 - RNA, 19 nt, Homo sapiens
  misc_RNA (1)...(19): siRNA sense strand
gugcagcuuucuucaguau

SEQ ID NO: 1080470 - RNA, 19 nt, Homo sapiens
  misc_RNA (1)...(19): siRNA sense strand
gacaauguguaugaaaugu

SEQ ID NO: 1080471 - RNA, 19 nt, Homo sapiens
  misc_RNA (1)...(19): siRNA sense strand
gugacaauguguaugaaau

SEQ ID NO: 1080472 - RNA, 19 nt, Homo sapiens
  misc_RNA (1)...(19): siRNA sense strand
gaagaauauccacauacuu

SEQ ID NO: 1080473 - RNA, 19 nt, Homo sapiens
  misc_RNA (1)...(19): siRNA sense strand
ugaaaggauuugauaaugc

SEQ ID NO: 1080474 - RNA, 19 nt, Homo sapiens
  misc_RNA (1)...(19): siRNA sense strand
agacauccuucagaaauug

SEQ ID NO: 1080475 - RNA, 19 nt, Homo sapiens
  misc_RNA (1)...(19): siRNA sense strand
acucuuagcucagauacuu

SEQ ID NO: 1080476 - RNA, 19 nt, Homo sapiens
  misc_RNA (1)...(19): siRNA sense strand
gaaaccaagguacaagaga

SEQ ID NO: 1080477 - RNA, 19 nt, Homo sapiens
  misc_RNA (1)...(19): siRNA sense strand
uagcucagauacuucuauu

SEQ ID NO: 1080478 - RNA, 19 nt, Homo sapiens
  misc_RNA (1)...(19): siRNA sense strand
gaaagagagaacacuggaa

SEQ ID NO: 1080479 - RNA, 19 nt, Homo sapiens
  misc_RNA (1)...(19): siRNA sense strand
gaucucaucagucgcuuug

SEQ ID NO: 1080480 - RNA, 19 nt, Homo sapiens
  misc_RNA (1)...(19): siRNA sense strand
auaaugaagugacaaugug

SEQ ID NO: 1080481 - RNA, 19 nt, Homo sapiens
  misc_RNA (1)...(19): siRNA sense strand
aaucagugguugaagaaau

SEQ ID NO: 1080482 - RNA, 19 nt, Homo sapiens
  misc_RNA (1)...(19): siRNA sense strand
gguaaauugagcaaaguuu

SEQ ID NO: 1080483 - RNA, 19 nt, Homo sapiens
  misc_RNA (1)...(19): siRNA sense strand
gcaagacaaagaagaaugg

SEQ ID NO: 1080484 - RNA, 19 nt, Homo sapiens
  misc_RNA (1)...(19): siRNA sense strand
gagaagaagaagacauugu

SEQ ID NO: 1080485 - RNA, 19 nt, Homo sapiens
  misc_RNA (1)...(19): siRNA sense strand
cagcaagccauucuaauag

SEQ ID NO: 1080486 - RNA, 19 nt, Homo sapiens
  misc_RNA (1)...(19): siRNA sense strand
gaaagggacuguguugaua

SEQ ID NO: 1080487 - RNA, 19 nt, Homo sapiens
  misc_RNA (1)...(19): siRNA sense strand
gaaggaacauccagagauu

SEQ ID NO: 1080488 - RNA, 19 nt, Homo sapiens
  misc_RNA (1)...(19): siRNA sense strand
caacagaaauggaaggaaa

SEQ ID NO: 1080489 - RNA, 19 nt, Homo sapiens
  misc_RNA (1)...(19): siRNA sense strand
gaagguggaugaagugaug

SEQ ID NO: 1080490 - RNA, 19 nt, Homo sapiens
  misc_RNA (1)...(19): siRNA sense strand
aaauuaagcugccaacaga

SEQ ID NO: 1080491 - RNA, 19 nt, Homo sapiens
  misc_RNA (1)...(19): siRNA sense strand
ccaguaaguucaugacuca

SEQ ID NO: 1080492 - RNA, 19 nt, Homo sapiens
  misc_RNA (1)...(19): siRNA sense strand
uggaagaacuagaggauau

SEQ ID NO: 1080493 - RNA, 19 nt, Homo sapiens
  misc_RNA (1)...(19): siRNA sense strand
acaacaaucuggacuaaca

SEQ ID NO: 1080494 - RNA, 19 nt, Homo sapiens
  misc_RNA (1)...(19): siRNA sense strand
ggaaagggacuguguugau

SEQ ID NO: 1080495 - RNA, 19 nt, Homo sapiens
  misc_RNA (1)...(19): siRNA sense strand
ucacguggccucccaguuu

SEQ ID NO: 1080496 - RNA, 19 nt, Homo sapiens
  misc_RNA (1)...(19): siRNA sense strand
gaacuagaggauauuguga

SEQ ID NO: 1080497 - RNA, 19 nt, Homo sapiens
  misc_RNA (1)...(19): siRNA sense strand
gaaauuaagcugccaacag

SEQ ID NO: 1080498 - RNA, 19 nt, Homo sapiens
  misc_RNA (1)...(19): siRNA sense strand
gcaaccagacuuuaaagga

SEQ ID NO: 1080499 - RNA, 19 nt, Homo sapiens
  misc_RNA (1)...(19): siRNA sense strand
uggaugaagugaugacaaa

SEQ ID NO: 1080500 - RNA, 19 nt, Homo sapiens
  misc_RNA (1)...(19): siRNA sense strand
ggaaggaacauccagagau

SEQ ID NO: 1080501 - RNA, 19 nt, Homo sapiens
  misc_RNA (1)...(19): siRNA sense strand
gaguacagcuuuguguuca

SEQ ID NO: 1080502 - RNA, 19 nt, Homo sapiens
  misc_RNA (1)...(19): siRNA sense strand
gaacauccagagauucuag

SEQ ID NO: 1080503 - RNA, 19 nt, Homo sapiens
  misc_RNA (1)...(19): siRNA sense strand
auacaacaaucuggacuaa

SEQ ID NO: 1080504 - RNA, 19 nt, Homo sapiens
  misc_RNA (1)...(19): siRNA sense strand
ggcagaagguggaugaagu

SEQ ID NO: 1080505 - RNA, 19 nt, Homo sapiens
  misc_RNA (1)...(19): siRNA sense strand
gaagaacuagaggauauug

SEQ ID NO: 1080506 - RNA, 19 nt, Homo sapiens
  misc_RNA (1)...(19): siRNA sense strand
aagaagagccaguaaguuc

SEQ ID NO: 1080507 - RNA, 19 nt, Homo sapiens
  misc_RNA (1)...(19): siRNA sense strand
auccagagauucuagauga

SEQ ID NO: 1080508 - RNA, 19 nt, Homo sapiens
  misc_RNA (1)...(19): siRNA sense strand
gaagagucgugguguaucc

SEQ ID NO: 1080509 - RNA, 19 nt, Homo sapiens
  misc_RNA (1)...(19): siRNA sense strand
gcacuuauacaacaaucug

SEQ ID NO: 1080510 - RNA, 19 nt, Homo sapiens
  misc_RNA (1)...(19): siRNA sense strand
cagagauucuagaugaaga

SEQ ID NO: 1080511 - RNA, 19 nt, Homo sapiens
  misc_RNA (1)...(19): siRNA sense strand
ggaagaacuagaggauauu

SEQ ID NO: 1080512 - RNA, 19 nt, Homo sapiens
  misc_RNA (1)...(19): siRNA sense strand
gcagaagguggaugaagug

SEQ ID NO: 1080513 - RNA, 19 nt, Homo sapiens
  misc_RNA (1)...(19): siRNA sense strand
ccagcaaccagacuuuaaa

SEQ ID NO: 1080514 - RNA, 19 nt, Homo sapiens
  misc_RNA (1)...(19): siRNA sense strand
aaguuaagguucacgauuc

SEQ ID NO: 1080515 - RNA, 19 nt, Homo sapiens
  misc_RNA (1)...(19): siRNA sense strand
gagaagcacaacuuugcaa

SEQ ID NO: 1080516 - RNA, 19 nt, Homo sapiens
  misc_RNA (1)...(19): siRNA sense strand
gaagugaugacaaaagaaa

SEQ ID NO: 1080517 - RNA, 19 nt, Homo sapiens
  misc_RNA (1)...(19): siRNA sense strand
caagcagauugucacauca

SEQ ID NO: 1080518 - RNA, 19 nt, Homo sapiens
  misc_RNA (1)...(19): siRNA sense strand
ccaaaugugcgcagacugu

SEQ ID NO: 1080519 - RNA, 19 nt, Homo sapiens
  misc_RNA (1)...(19): siRNA sense strand
gaucgcguauggacagagu

SEQ ID NO: 1080520 - RNA, 19 nt, Homo sapiens
  misc_RNA (1)...(19): siRNA sense strand
ccuguaaaguuaagguuca

SEQ ID NO: 1080521 - RNA, 19 nt, Homo sapiens
  misc_RNA (1)...(19): siRNA sense strand
gcagacaagaaugagauuu

SEQ ID NO: 1080522 - RNA, 19 nt, Homo sapiens
  misc_RNA (1)...(19): siRNA sense strand
ggacuaacaccaguacaag

SEQ ID NO: 1080523 - RNA, 19 nt, Homo sapiens
  misc_RNA (1)...(19): siRNA sense strand
guacagcuuuguguucaag

SEQ ID NO: 1080524 - RNA, 19 nt, Homo sapiens
  misc_RNA (1)...(19): siRNA sense strand
gauggaagaacuagaggau

SEQ ID NO: 1080525 - RNA, 19 nt, Homo sapiens
  misc_RNA (1)...(19): siRNA sense strand
ccagcuauguguuuuauug

SEQ ID NO: 1080526 - RNA, 19 nt, Homo sapiens
  misc_RNA (1)...(19): siRNA sense strand
gaagagccaguaaguucau

SEQ ID NO: 1080527 - RNA, 19 nt, Homo sapiens
  misc_RNA (1)...(19): siRNA sense strand
aaaguuaagguucacgauu

SEQ ID NO: 1080528 - RNA, 19 nt, Homo sapiens
  misc_RNA (1)...(19): siRNA sense strand
gcugagaagcacaacuuug

SEQ ID NO: 1080529 - RNA, 19 nt, Homo sapiens
  misc_RNA (1)...(19): siRNA sense strand
gaccaaaugugcgcagacu

SEQ ID NO: 1080530 - RNA, 19 nt, Homo sapiens
  misc_RNA (1)...(19): siRNA sense strand
caaagccagugcccuugca

SEQ ID NO: 1080531 - RNA, 19 nt, Homo sapiens
  misc_RNA (1)...(19): siRNA sense strand
gagauuacagggaacucuu

SEQ ID NO: 1080532 - RNA, 19 nt, Homo sapiens
  misc_RNA (1)...(19): siRNA sense strand
uaccucagcuggcgacaag

SEQ ID NO: 1080533 - RNA, 19 nt, Homo sapiens
  misc_RNA (1)...(19): siRNA sense strand
gaugaguacagcuuugugu

SEQ ID NO: 1080534 - RNA, 19 nt, Homo sapiens
  misc_RNA (1)...(19): siRNA sense strand
ccaguuugccuccagcuau

SEQ ID NO: 1080535 - RNA, 19 nt, Homo sapiens
  misc_RNA (1)...(19): siRNA sense strand
aaagaagagccaguaaguu

SEQ ID NO: 1080536 - RNA, 19 nt, Homo sapiens
  misc_RNA (1)...(19): siRNA sense strand
cacguggccucccaguuug

SEQ ID NO: 1080537 - RNA, 19 nt, Homo sapiens
  misc_RNA (1)...(19): siRNA sense strand
caguuugccuccagcuaug

SEQ ID NO: 1080538 - RNA, 19 nt, Homo sapiens
  misc_RNA (1)...(19): siRNA sense strand
aaagcaaguucgaguacgu

SEQ ID NO: 1080539 - RNA, 19 nt, Homo sapiens
  misc_RNA (1)...(19): siRNA sense strand
cagcagacaagaaugagau

SEQ ID NO: 1080540 - RNA, 19 nt, Homo sapiens
  misc_RNA (1)...(19): siRNA sense strand
ucugggcacuuauacaaca

SEQ ID NO: 1080541 - RNA, 19 nt, Homo sapiens
  misc_RNA (1)...(19): siRNA sense strand
uaggaaagggacuguguug

SEQ ID NO: 1080542 - RNA, 19 nt, Homo sapiens
  misc_RNA (1)...(19): siRNA sense strand
gggaugcuuucuggaagga

SEQ ID NO: 1080543 - RNA, 19 nt, Homo sapiens
  misc_RNA (1)...(19): siRNA sense strand
gcagcagacaagaaugaga

SEQ ID NO: 1080544 - RNA, 19 nt, Homo sapiens
  misc_RNA (1)...(19): siRNA sense strand
aagggacuguguugauaug

SEQ ID NO: 1080545 - RNA, 19 nt, Homo sapiens
  misc_RNA (1)...(19): siRNA sense strand
cgcagacugugauggaaga

SEQ ID NO: 1080546 - RNA, 19 nt, Homo sapiens
  misc_RNA (1)...(19): siRNA sense strand
aaagggacuguguugauau

SEQ ID NO: 1080547 - RNA, 19 nt, Homo sapiens
  misc_RNA (1)...(19): siRNA sense strand
acggaagagucguggugua

SEQ ID NO: 1080548 - RNA, 19 nt, Homo sapiens
  misc_RNA (1)...(19): siRNA sense strand
ugaguacagcuuuguguuc

SEQ ID NO: 1080549 - RNA, 19 nt, Homo sapiens
  misc_RNA (1)...(19): siRNA sense strand
gaagcacaacuuugcaaaa

SEQ ID NO: 1080550 - RNA, 19 nt, Homo sapiens
  misc_RNA (1)...(19): siRNA sense strand
gggcacuuauacaacaauc

SEQ ID NO: 1080551 - RNA, 19 nt, Homo sapiens
  misc_RNA (1)...(19): siRNA sense strand
ccaauugguuuaaaagaag

SEQ ID NO: 1080552 - RNA, 19 nt, Homo sapiens
  misc_RNA (1)...(19): siRNA sense strand
agacugugauggaagaacu

SEQ ID NO: 1080553 - RNA, 19 nt, Homo sapiens
  misc_RNA (1)...(19): siRNA sense strand
ggaacauccagagauucua

SEQ ID NO: 1080554 - RNA, 19 nt, Homo sapiens
  misc_RNA (1)...(19): siRNA sense strand
gaauuuccaucgguuugcu

SEQ ID NO: 1080555 - RNA, 19 nt, Homo sapiens
  misc_RNA (1)...(19): siRNA sense strand
uauacaacaaucuggacua

SEQ ID NO: 1080556 - RNA, 19 nt, Homo sapiens
  misc_RNA (1)...(19): siRNA sense strand
ggaagagucgugguguauc

SEQ ID NO: 1080557 - RNA, 19 nt, Homo sapiens
  misc_RNA (1)...(19): siRNA sense strand
agaacuagaggauauugug

SEQ ID NO: 1080558 - RNA, 19 nt, Homo sapiens
  misc_RNA (1)...(19): siRNA sense strand
acuagaggauauugugauc

SEQ ID NO: 1080559 - RNA, 19 nt, Homo sapiens
  misc_RNA (1)...(19): siRNA sense strand
guacaagcccaagggagau

SEQ ID NO: 1080560 - RNA, 19 nt, Homo sapiens
  misc_RNA (1)...(19): siRNA sense strand
cccagcaaccagacuuuaa

SEQ ID NO: 1080561 - RNA, 19 nt, Homo sapiens
  misc_RNA (1)...(19): siRNA sense strand
cggaagagucgugguguau

SEQ ID NO: 1080562 - RNA, 19 nt, Homo sapiens
  misc_RNA (1)...(19): siRNA sense strand
gagugaugaguacagcuuu

SEQ ID NO: 1080563 - RNA, 19 nt, Homo sapiens
  misc_RNA (1)...(19): siRNA sense strand
ggacagagugaugaguaca

SEQ ID NO: 1080564 - RNA, 19 nt, Homo sapiens
  misc_RNA (1)...(19): siRNA sense strand
gaacucuugcagcagacaa

SEQ ID NO: 1080565 - RNA, 19 nt, Homo sapiens
  misc_RNA (1)...(19): siRNA sense strand
agaagcacaacuuugcaaa

SEQ ID NO: 1080566 - RNA, 19 nt, Homo sapiens
  misc_RNA (1)...(19): siRNA sense strand
gagacgguaccugagauug

SEQ ID NO: 1080567 - RNA, 19 nt, Homo sapiens
  misc_RNA (1)...(19): siRNA sense strand
uauaggaaagggacugugu

SEQ ID NO: 1080568 - RNA, 19 nt, Homo sapiens
  misc_RNA (1)...(19): siRNA sense strand
agacaagaaugagauuuug

SEQ ID NO: 1080569 - RNA, 19 nt, Homo sapiens
  misc_RNA (1)...(19): siRNA sense strand
agaagagccaguaaguuca

SEQ ID NO: 1080570 - RNA, 19 nt, Homo sapiens
  misc_RNA (1)...(19): siRNA sense strand
uaagcugccaacagaaaug

SEQ ID NO: 1080571 - RNA, 19 nt, Homo sapiens
  misc_RNA (1)...(19): siRNA sense strand
cagcugaugaccaaaugug

SEQ ID NO: 1080572 - RNA, 19 nt, Homo sapiens
  misc_RNA (1)...(19): siRNA sense strand
gcguauggacagagugaug

SEQ ID NO: 1080573 - RNA, 19 nt, Homo sapiens
  misc_RNA (1)...(19): siRNA sense strand
uauggcagaagguggauga

SEQ ID NO: 1080574 - RNA, 19 nt, Homo sapiens
  misc_RNA (1)...(19): siRNA sense strand
gccgugcucuccagcugau

SEQ ID NO: 1080575 - RNA, 19 nt, Homo sapiens
  misc_RNA (1)...(19): siRNA sense strand
gugcgcagacugugaugga

SEQ ID NO: 1080576 - RNA, 19 nt, Homo sapiens
  misc_RNA (1)...(19): siRNA sense strand
ggaccagccccuucuguau

SEQ ID NO: 1080577 - RNA, 19 nt, Homo sapiens
  misc_RNA (1)...(19): siRNA sense strand
gaauagaccugaagacaaa

SEQ ID NO: 1080578 - RNA, 19 nt, Homo sapiens
  misc_RNA (1)...(19): siRNA sense strand
gaagagagauacaagauga

SEQ ID NO: 1080579 - RNA, 19 nt, Homo sapiens
  misc_RNA (1)...(19): siRNA sense strand
gagcauaccugaagagaga

SEQ ID NO: 1080580 - RNA, 19 nt, Homo sapiens
  misc_RNA (1)...(19): siRNA sense strand
gcuaugaaguccagaaauu

SEQ ID NO: 1080581 - RNA, 19 nt, Homo sapiens
  misc_RNA (1)...(19): siRNA sense strand
gauguguccucauuaauuu

SEQ ID NO: 1080582 - RNA, 19 nt, Homo sapiens
  misc_RNA (1)...(19): siRNA sense strand
gaagaaauccauucaggaa

SEQ ID NO: 1080583 - RNA, 19 nt, Homo sapiens
  misc_RNA (1)...(19): siRNA sense strand
cuaggaaucugccugauaa

SEQ ID NO: 1080584 - RNA, 19 nt, Homo sapiens
  misc_RNA (1)...(19): siRNA sense strand
uaaagaacauccacagaau

SEQ ID NO: 1080585 - RNA, 19 nt, Homo sapiens
  misc_RNA (1)...(19): siRNA sense strand
cagaucaacuggauuuauu

SEQ ID NO: 1080586 - RNA, 19 nt, Homo sapiens
  misc_RNA (1)...(19): siRNA sense strand
gauacaagaugaagagcaa

SEQ ID NO: 1080587 - RNA, 19 nt, Homo sapiens
  misc_RNA (1)...(19): siRNA sense strand
ucagggaccuucuggauau

SEQ ID NO: 1080588 - RNA, 19 nt, Homo sapiens
  misc_RNA (1)...(19): siRNA sense strand
ggaaagagguaagcugucu

SEQ ID NO: 1080589 - RNA, 19 nt, Homo sapiens
  misc_RNA (1)...(19): siRNA sense strand
ggccagcgaugaagaaugu

SEQ ID NO: 1080590 - RNA, 19 nt, Homo sapiens
  misc_RNA (1)...(19): siRNA sense strand
aagaagcacuugauacaga

SEQ ID NO: 1080591 - RNA, 19 nt, Homo sapiens
  misc_RNA (1)...(19): siRNA sense strand
caagcagucuguucaagga

SEQ ID NO: 1080592 - RNA, 19 nt, Homo sapiens
  misc_RNA (1)...(19): siRNA sense strand
ucacuucccugggcuauga

SEQ ID NO: 1080593 - RNA, 19 nt, Homo sapiens
  misc_RNA (1)...(19): siRNA sense strand
ccagauucuuggccaauuu

SEQ ID NO: 1080594 - RNA, 19 nt, Homo sapiens
  misc_RNA (1)...(19): siRNA sense strand
aaucugauguguccucauu

SEQ ID NO: 1080595 - RNA, 19 nt, Homo sapiens
  misc_RNA (1)...(19): siRNA sense strand
gaaacugagacaagaaaga

SEQ ID NO: 1080596 - RNA, 19 nt, Homo sapiens
  misc_RNA (1)...(19): siRNA sense strand
caggaacccucaccuuguu

SEQ ID NO: 1080597 - RNA, 19 nt, Homo sapiens
  misc_RNA (1)...(19): siRNA sense strand
cuaaagaacauccacagaa

SEQ ID NO: 1080598 - RNA, 19 nt, Homo sapiens
  misc_RNA (1)...(19): siRNA sense strand
gaaucugccugauaaucga

SEQ ID NO: 1080599 - RNA, 19 nt, Homo sapiens
  misc_RNA (1)...(19): siRNA sense strand
gauuggaacagcagaguuu

SEQ ID NO: 1080600 - RNA, 19 nt, Homo sapiens
  misc_RNA (1)...(19): siRNA sense strand
caugguauaucccagauuc

SEQ ID NO: 1080601 - RNA, 19 nt, Homo sapiens
  misc_RNA (1)...(19): siRNA sense strand
ggagauucaugcccuuauc

SEQ ID NO: 1080602 - RNA, 19 nt, Homo sapiens
  misc_RNA (1)...(19): siRNA sense strand
ucugauguguccucauuaa

SEQ ID NO: 1080603 - RNA, 19 nt, Homo sapiens
  misc_RNA (1)...(19): siRNA sense strand
uaagcaaggagaagaguuu

SEQ ID NO: 1080604 - RNA, 19 nt, Homo sapiens
  misc_RNA (1)...(19): siRNA sense strand
ccaaggagaaauauuaugu

SEQ ID NO: 1080605 - RNA, 19 nt, Homo sapiens
  misc_RNA (1)...(19): siRNA sense strand
aaagaacauccacagaaua

SEQ ID NO: 1080606 - RNA, 19 nt, Homo sapiens
  misc_RNA (1)...(19): siRNA sense strand
gugccgggauguugcuaua

SEQ ID NO: 1080607 - RNA, 19 nt, Homo sapiens
  misc_RNA (1)...(19): siRNA sense strand
gugcacaguucaccgagaa

SEQ ID NO: 1080608 - RNA, 19 nt, Homo sapiens
  misc_RNA (1)...(19): siRNA sense strand
gcagggaagccaaagaugu

SEQ ID NO: 1080609 - RNA, 19 nt, Homo sapiens
  misc_RNA (1)...(19): siRNA sense strand
agaaggagaugcugcucuu

SEQ ID NO: 1080610 - RNA, 19 nt, Homo sapiens
  misc_RNA (1)...(19): siRNA sense strand
ugaagaagcacuugauaca

SEQ ID NO: 1080611 - RNA, 19 nt, Homo sapiens
  misc_RNA (1)...(19): siRNA sense strand
ggauguugcuauagaugug

SEQ ID NO: 1080612 - RNA, 19 nt, Homo sapiens
  misc_RNA (1)...(19): siRNA sense strand
agaacuauguggugucaga

SEQ ID NO: 1080613 - RNA, 19 nt, Homo sapiens
  misc_RNA (1)...(19): siRNA sense strand
uuacaggaauguucuccaa

SEQ ID NO: 1080614 - RNA, 19 nt, Homo sapiens
  misc_RNA (1)...(19): siRNA sense strand
gagaaguaaagaacaaaga

SEQ ID NO: 1080615 - RNA, 19 nt, Homo sapiens
  misc_RNA (1)...(19): siRNA sense strand
ugauguguccucauuaauu

SEQ ID NO: 1080616 - RNA, 19 nt, Homo sapiens
  misc_RNA (1)...(19): siRNA sense strand
aaacuuauccucuccuaca

SEQ ID NO: 1080617 - RNA, 19 nt, Homo sapiens
  misc_RNA (1)...(19): siRNA sense strand
cugccaaggagaaauauua

SEQ ID NO: 1080618 - RNA, 19 nt, Homo sapiens
  misc_RNA (1)...(19): siRNA sense strand
gaacauccacagaauagac

SEQ ID NO: 1080619 - RNA, 19 nt, Homo sapiens
  misc_RNA (1)...(19): siRNA sense strand
ggagaaacuaaauuugguu

SEQ ID NO: 1080620 - RNA, 19 nt, Homo sapiens
  misc_RNA (1)...(19): siRNA sense strand
gaacucaauggcuacaugu

SEQ ID NO: 1080621 - RNA, 19 nt, Homo sapiens
  misc_RNA (1)...(19): siRNA sense strand
aaacugagacaagaaagaa

SEQ ID NO: 1080622 - RNA, 19 nt, Homo sapiens
  misc_RNA (1)...(19): siRNA sense strand
ggagaacagcagccucuug

SEQ ID NO: 1080623 - RNA, 19 nt, Homo sapiens
  misc_RNA (1)...(19): siRNA sense strand
caacaagaaccagugaaga

SEQ ID NO: 1080624 - RNA, 19 nt, Homo sapiens
  misc_RNA (1)...(19): siRNA sense strand
aacaaagacuuaaggaaca

SEQ ID NO: 1080625 - RNA, 19 nt, Homo sapiens
  misc_RNA (1)...(19): siRNA sense strand
gggacaaguuacaggaaug

SEQ ID NO: 1080626 - RNA, 19 nt, Homo sapiens
  misc_RNA (1)...(19): siRNA sense strand
gcaaugagacagagcuucu

SEQ ID NO: 1080627 - RNA, 19 nt, Homo sapiens
  misc_RNA (1)...(19): siRNA sense strand
gccgggauguugcuauaga

SEQ ID NO: 1080628 - RNA, 19 nt, Homo sapiens
  misc_RNA (1)...(19): siRNA sense strand
ugaacucaauggcuacaug

SEQ ID NO: 1080629 - RNA, 19 nt, Homo sapiens
  misc_RNA (1)...(19): siRNA sense strand
cgaugaagaauguggaauu

SEQ ID NO: 1080630 - RNA, 19 nt, Homo sapiens
  misc_RNA (1)...(19): siRNA sense strand
uauccucuccuacacauaa

SEQ ID NO: 1080631 - RNA, 19 nt, Homo sapiens
  misc_RNA (1)...(19): siRNA sense strand
gaggcaagauaagcaagga

SEQ ID NO: 1080632 - RNA, 19 nt, Homo sapiens
  misc_RNA (1)...(19): siRNA sense strand
agaaacuuauccucuccua

SEQ ID NO: 1080633 - RNA, 19 nt, Homo sapiens
  misc_RNA (1)...(19): siRNA sense strand
acucugagaaagaaacuua

SEQ ID NO: 1080634 - RNA, 19 nt, Homo sapiens
  misc_RNA (1)...(19): siRNA sense strand
cagaaacugagacaagaaa

SEQ ID NO: 1080635 - RNA, 19 nt, Homo sapiens
  misc_RNA (1)...(19): siRNA sense strand
gaaauucuugcaucucagu

SEQ ID NO: 1080636 - RNA, 19 nt, Homo sapiens
  misc_RNA (1)...(19): siRNA sense strand
caagaaccagugaagaaau

SEQ ID NO: 1080637 - RNA, 19 nt, Homo sapiens
  misc_RNA (1)...(19): siRNA sense strand
guugaagaagcacuugaua

SEQ ID NO: 1080638 - RNA, 19 nt, Homo sapiens
  misc_RNA (1)...(19): siRNA sense strand
cagggaagccaaagauguu

SEQ ID NO: 1080639 - RNA, 19 nt, Homo sapiens
  misc_RNA (1)...(19): siRNA sense strand
ggaaucugccugauaaucg

SEQ ID NO: 1080640 - RNA, 19 nt, Homo sapiens
  misc_RNA (1)...(19): siRNA sense strand
gaucaacuggauuuauuag

SEQ ID NO: 1080641 - RNA, 19 nt, Homo sapiens
  misc_RNA (1)...(19): siRNA sense strand
gcagcacacucugagaaag

SEQ ID NO: 1080642 - RNA, 19 nt, Homo sapiens
  misc_RNA (1)...(19): siRNA sense strand
ucagaacuaugugguguca

SEQ ID NO: 1080643 - RNA, 19 nt, Homo sapiens
  misc_RNA (1)...(19): siRNA sense strand
ccuaggaaucugccugaua

SEQ ID NO: 1080644 - RNA, 19 nt, Homo sapiens
  misc_RNA (1)...(19): siRNA sense strand
ugggagaaguaaagaacaa

SEQ ID NO: 1080645 - RNA, 19 nt, Homo sapiens
  misc_RNA (1)...(19): siRNA sense strand
cauaaugggagaaguaaag

SEQ ID NO: 1080646 - RNA, 19 nt, Homo sapiens
  misc_RNA (1)...(19): siRNA sense strand
guacaagcagucuguucaa

SEQ ID NO: 1080647 - RNA, 19 nt, Homo sapiens
  misc_RNA (1)...(19): siRNA sense strand
gcaagauaagcaaggagaa

SEQ ID NO: 1080648 - RNA, 19 nt, Homo sapiens
  misc_RNA (1)...(19): siRNA sense strand
cccagaaacugagacaaga

SEQ ID NO: 1080649 - RNA, 19 nt, Homo sapiens
  misc_RNA (1)...(19): siRNA sense strand
gcagugccucucccagaaa

SEQ ID NO: 1080650 - RNA, 19 nt, Homo sapiens
  misc_RNA (1)...(19): siRNA sense strand
cugcugaagucauccauca

SEQ ID NO: 1080651 - RNA, 19 nt, Homo sapiens
  misc_RNA (1)...(19): siRNA sense strand
aagaaccagugaagaaauc

SEQ ID NO: 1080652 - RNA, 19 nt, Homo sapiens
  misc_RNA (1)...(19): siRNA sense strand
aacaagaaccagugaagaa

SEQ ID NO: 1080653 - RNA, 19 nt, Homo sapiens
  misc_RNA (1)...(19): siRNA sense strand
agagauuggugaggauuug

SEQ ID NO: 1080654 - RNA, 19 nt, Homo sapiens
  misc_RNA (1)...(19): siRNA sense strand
acaagaaccagugaagaaa

SEQ ID NO: 1080655 - RNA, 19 nt, Homo sapiens
  misc_RNA (1)...(19): siRNA sense strand
agaauagaccugaagacaa

SEQ ID NO: 1080656 - RNA, 19 nt, Homo sapiens
  misc_RNA (1)...(19): siRNA sense strand
cagaauagaccugaagaca

SEQ ID NO: 1080657 - RNA, 19 nt, Homo sapiens
  misc_RNA (1)...(19): siRNA sense strand
ucuuggaccuugugguuga

SEQ ID NO: 1080658 - RNA, 19 nt, Homo sapiens
  misc_RNA (1)...(19): siRNA sense strand
uggagaaacuaaauuuggu

SEQ ID NO: 1080659 - RNA, 19 nt, Homo sapiens
  misc_RNA (1)...(19): siRNA sense strand
uccuggaucuucacauuga

SEQ ID NO: 1080660 - RNA, 19 nt, Homo sapiens
  misc_RNA (1)...(19): siRNA sense strand
ggaauucaaggcucagaag

SEQ ID NO: 1080661 - RNA, 19 nt, Homo sapiens
  misc_RNA (1)...(19): siRNA sense strand
gaaggagaugcugcucuuu

SEQ ID NO: 1080662 - RNA, 19 nt, Homo sapiens
  misc_RNA (1)...(19): siRNA sense strand
ggacaaguuacaggaaugu

SEQ ID NO: 1080663 - RNA, 19 nt, Homo sapiens
  misc_RNA (1)...(19): siRNA sense strand
gaaguaaagaacaaagacu

SEQ ID NO: 1080664 - RNA, 19 nt, Homo sapiens
  misc_RNA (1)...(19): siRNA sense strand
cagcacacucugagaaaga

SEQ ID NO: 1080665 - RNA, 19 nt, Homo sapiens
  misc_RNA (1)...(19): siRNA sense strand
acuccuggaucuucacauu

SEQ ID NO: 1080666 - RNA, 19 nt, Homo sapiens
  misc_RNA (1)...(19): siRNA sense strand
gaguguguaugguguggau

SEQ ID NO: 1080667 - RNA, 19 nt, Homo sapiens
  misc_RNA (1)...(19): siRNA sense strand
gguauaucccagauucuug

SEQ ID NO: 1080668 - RNA, 19 nt, Homo sapiens
  misc_RNA (1)...(19): siRNA sense strand
gcauaccugaagagagaua

SEQ ID NO: 1080669 - RNA, 19 nt, Homo sapiens
  misc_RNA (1)...(19): siRNA sense strand
ggaacagcuuggcgcucaa

SEQ ID NO: 1080670 - RNA, 19 nt, Homo sapiens
  misc_RNA (1)...(19): siRNA sense strand
aagaacauccacagaauag

SEQ ID NO: 1080671 - RNA, 19 nt, Homo sapiens
  misc_RNA (1)...(19): siRNA sense strand
gucagggaccuucuggaua

SEQ ID NO: 1080672 - RNA, 19 nt, Homo sapiens
  misc_RNA (1)...(19): siRNA sense strand
ucaauggcuacauguauga

SEQ ID NO: 1080673 - RNA, 19 nt, Homo sapiens
  misc_RNA (1)...(19): siRNA sense strand
caucucaguaugcauggua

SEQ ID NO: 1080674 - RNA, 19 nt, Homo sapiens
  misc_RNA (1)...(19): siRNA sense strand
uggcugaacugcucuacag

SEQ ID NO: 1080675 - RNA, 19 nt, Homo sapiens
  misc_RNA (1)...(19): siRNA sense strand
gcucaacaagaaccaguga

SEQ ID NO: 1080676 - RNA, 19 nt, Homo sapiens
  misc_RNA (1)...(19): siRNA sense strand
caaggagcagggacaaguu

SEQ ID NO: 1080677 - RNA, 19 nt, Homo sapiens
  misc_RNA (1)...(19): siRNA sense strand
caacagaccucauauuagu

SEQ ID NO: 1080678 - RNA, 19 nt, Homo sapiens
  misc_RNA (1)...(19): siRNA sense strand
cagaauaccugaaauauag

SEQ ID NO: 1080679 - RNA, 19 nt, Homo sapiens
  misc_RNA (1)...(19): siRNA sense strand
gaagcuaaauguaaguuga

SEQ ID NO: 1080680 - RNA, 19 nt, Homo sapiens
  misc_RNA (1)...(19): siRNA sense strand
ugaaagagcuggacaacau

SEQ ID NO: 1080681 - RNA, 19 nt, Homo sapiens
  misc_RNA (1)...(19): siRNA sense strand
gcacaggugaauacaauua

SEQ ID NO: 1080682 - RNA, 19 nt, Homo sapiens
  misc_RNA (1)...(19): siRNA sense strand
guacauaucaugcagcuaa

SEQ ID NO: 1080683 - RNA, 19 nt, Homo sapiens
  misc_RNA (1)...(19): siRNA sense strand
gaugggaauugcagugaua

SEQ ID NO: 1080684 - RNA, 19 nt, Homo sapiens
  misc_RNA (1)...(19): siRNA sense strand
auacaaacguggagagaua

SEQ ID NO: 1080685 - RNA, 19 nt, Homo sapiens
  misc_RNA (1)...(19): siRNA sense strand
gaguucagcuugaccuuaa

SEQ ID NO: 1080686 - RNA, 19 nt, Homo sapiens
  misc_RNA (1)...(19): siRNA sense strand
gaaccugaaccacgaauuu

SEQ ID NO: 1080687 - RNA, 19 nt, Homo sapiens
  misc_RNA (1)...(19): siRNA sense strand
gcuuagaaaucgcuauaaa

SEQ ID NO: 1080688 - RNA, 19 nt, Homo sapiens
  misc_RNA (1)...(19): siRNA sense strand
acaaggagauguuucuuug

SEQ ID NO: 1080689 - RNA, 19 nt, Homo sapiens
  misc_RNA (1)...(19): siRNA sense strand
ucacagaucguuaaagaaa

SEQ ID NO: 1080690 - RNA, 19 nt, Homo sapiens
  misc_RNA (1)...(19): siRNA sense strand
ggaagaguauugcaugaca

SEQ ID NO: 1080691 - RNA, 19 nt, Homo sapiens
  misc_RNA (1)...(19): siRNA sense strand
ugugaaaucucccugcaua

SEQ ID NO: 1080692 - RNA, 19 nt, Homo sapiens
  misc_RNA (1)...(19): siRNA sense strand
gucaacagaccucauauua

SEQ ID NO: 1080693 - RNA, 19 nt, Homo sapiens
  misc_RNA (1)...(19): siRNA sense strand
gaaccaacuucuaaucuac

SEQ ID NO: 1080694 - RNA, 19 nt, Homo sapiens
  misc_RNA (1)...(19): siRNA sense strand
agaaaucgcuauaaagcaa

SEQ ID NO: 1080695 - RNA, 19 nt, Homo sapiens
  misc_RNA (1)...(19): siRNA sense strand
gaagggagacauauucaau

SEQ ID NO: 1080696 - RNA, 19 nt, Homo sapiens
  misc_RNA (1)...(19): siRNA sense strand
uaucugaacuagcauaugu

SEQ ID NO: 1080697 - RNA, 19 nt, Homo sapiens
  misc_RNA (1)...(19): siRNA sense strand
uaagccagauggaagagua

SEQ ID NO: 1080698 - RNA, 19 nt, Homo sapiens
  misc_RNA (1)...(19): siRNA sense strand
ucaagaagcuaaauguaag

SEQ ID NO: 1080699 - RNA, 19 nt, Homo sapiens
  misc_RNA (1)...(19): siRNA sense strand
uuguaaggcugcaauguua

SEQ ID NO: 1080700 - RNA, 19 nt, Homo sapiens
  misc_RNA (1)...(19): siRNA sense strand
uaaaggaucagcccagauu

SEQ ID NO: 1080701 - RNA, 19 nt, Homo sapiens
  misc_RNA (1)...(19): siRNA sense strand
gaaauccuacuuacaacaa

SEQ ID NO: 1080702 - RNA, 19 nt, Homo sapiens
  misc_RNA (1)...(19): siRNA sense strand
agagauaaauccuguguca

SEQ ID NO: 1080703 - RNA, 19 nt, Homo sapiens
  misc_RNA (1)...(19): siRNA sense strand
caucagcaguauacuuauu

SEQ ID NO: 1080704 - RNA, 19 nt, Homo sapiens
  misc_RNA (1)...(19): siRNA sense strand
gcacaaaugcagcgaguuc

SEQ ID NO: 1080705 - RNA, 19 nt, Homo sapiens
  misc_RNA (1)...(19): siRNA sense strand
cgacaaagacgauaacuac

SEQ ID NO: 1080706 - RNA, 19 nt, Homo sapiens
  misc_RNA (1)...(19): siRNA sense strand
gaacuagcauauguuucaa

SEQ ID NO: 1080707 - RNA, 19 nt, Homo sapiens
  misc_RNA (1)...(19): siRNA sense strand
uaaggaaacugugacaaca

SEQ ID NO: 1080708 - RNA, 19 nt, Homo sapiens
  misc_RNA (1)...(19): siRNA sense strand
gcaauguuaagucgguuua

SEQ ID NO: 1080709 - RNA, 19 nt, Homo sapiens
  misc_RNA (1)...(19): siRNA sense strand
uacaucagcaguauacuua

SEQ ID NO: 1080710 - RNA, 19 nt, Homo sapiens
  misc_RNA (1)...(19): siRNA sense strand
gacaacuucugcucuucua

SEQ ID NO: 1080711 - RNA, 19 nt, Homo sapiens
  misc_RNA (1)...(19): siRNA sense strand
gaaauauagcaguucauug

SEQ ID NO: 1080712 - RNA, 19 nt, Homo sapiens
  misc_RNA (1)...(19): siRNA sense strand
gcaaguaacggguaauuuu

SEQ ID NO: 1080713 - RNA, 19 nt, Homo sapiens
  misc_RNA (1)...(19): siRNA sense strand
guugaaauccuacuuacaa

SEQ ID NO: 1080714 - RNA, 19 nt, Homo sapiens
  misc_RNA (1)...(19): siRNA sense strand
ucuaaucuacucacucuua

SEQ ID NO: 1080715 - RNA, 19 nt, Homo sapiens
  misc_RNA (1)...(19): siRNA sense strand
uuucacagaucguuaaaga

SEQ ID NO: 1080716 - RNA, 19 nt, Homo sapiens
  misc_RNA (1)...(19): siRNA sense strand
gaaaguuccccauuuaaaa

SEQ ID NO: 1080717 - RNA, 19 nt, Homo sapiens
  misc_RNA (1)...(19): siRNA sense strand
gcauagagcaauuuaacau

SEQ ID NO: 1080718 - RNA, 19 nt, Homo sapiens
  misc_RNA (1)...(19): siRNA sense strand
caucagguccuccuccuuu

SEQ ID NO: 1080719 - RNA, 19 nt, Homo sapiens
  misc_RNA (1)...(19): siRNA sense strand
cuaaucuacucacucuuaa

SEQ ID NO: 1080720 - RNA, 19 nt, Homo sapiens
  misc_RNA (1)...(19): siRNA sense strand
acagaucguuaaagaaaga

SEQ ID NO: 1080721 - RNA, 19 nt, Homo sapiens
  misc_RNA (1)...(19): siRNA sense strand
gggaagaucacugaaaguu

SEQ ID NO: 1080722 - RNA, 19 nt, Homo sapiens
  misc_RNA (1)...(19): siRNA sense strand
ccaguugccuaaaggauca

SEQ ID NO: 1080723 - RNA, 19 nt, Homo sapiens
  misc_RNA (1)...(19): siRNA sense strand
uaaccugcuugccaaagaa

SEQ ID NO: 1080724 - RNA, 19 nt, Homo sapiens
  misc_RNA (1)...(19): siRNA sense strand
gcaagucggcuuuguaagg

SEQ ID NO: 1080725 - RNA, 19 nt, Homo sapiens
  misc_RNA (1)...(19): siRNA sense strand
guccucaagugacaaauug

SEQ ID NO: 1080726 - RNA, 19 nt, Homo sapiens
  misc_RNA (1)...(19): siRNA sense strand
cuaaagaugguguuaauag

SEQ ID NO: 1080727 - RNA, 19 nt, Homo sapiens
  misc_RNA (1)...(19): siRNA sense strand
caacauuugccuuuacaug

SEQ ID NO: 1080728 - RNA, 19 nt, Homo sapiens
  misc_RNA (1)...(19): siRNA sense strand
aaucauugguuucagaguu

SEQ ID NO: 1080729 - RNA, 19 nt, Homo sapiens
  misc_RNA (1)...(19): siRNA sense strand
ccagauuaagucacaguua

SEQ ID NO: 1080730 - RNA, 19 nt, Homo sapiens
  misc_RNA (1)...(19): siRNA sense strand
acuugaagcugguacauau

SEQ ID NO: 1080731 - RNA, 19 nt, Homo sapiens
  misc_RNA (1)...(19): siRNA sense strand
aacaugagguuguagcuau

SEQ ID NO: 1080732 - RNA, 19 nt, Homo sapiens
  misc_RNA (1)...(19): siRNA sense strand
cauccaagguuacgcaagu

SEQ ID NO: 1080733 - RNA, 19 nt, Homo sapiens
  misc_RNA (1)...(19): siRNA sense strand
cagauuaagucacaguuac

SEQ ID NO: 1080734 - RNA, 19 nt, Homo sapiens
  misc_RNA (1)...(19): siRNA sense strand
gaucagcccagauuaaguc

SEQ ID NO: 1080735 - RNA, 19 nt, Homo sapiens
  misc_RNA (1)...(19): siRNA sense strand
acauuugccuuuacaugaa

SEQ ID NO: 1080736 - RNA, 19 nt, Homo sapiens
  misc_RNA (1)...(19): siRNA sense strand
ggaugguccucagaaaguu

SEQ ID NO: 1080737 - RNA, 19 nt, Homo sapiens
  misc_RNA (1)...(19): siRNA sense strand
ggagagauaaauccugugu

SEQ ID NO: 1080738 - RNA, 19 nt, Homo sapiens
  misc_RNA (1)...(19): siRNA sense strand
ggaagaucacugaaaguuc

SEQ ID NO: 1080739 - RNA, 19 nt, Homo sapiens
  misc_RNA (1)...(19): siRNA sense strand
gugggaagaucacugaaag

SEQ ID NO: 1080740 - RNA, 19 nt, Homo sapiens
  misc_RNA (1)...(19): siRNA sense strand
aaggagauguuucuuugga

SEQ ID NO: 1080741 - RNA, 19 nt, Homo sapiens
  misc_RNA (1)...(19): siRNA sense strand
gaauugggcacaaggagau

SEQ ID NO: 1080742 - RNA, 19 nt, Homo sapiens
  misc_RNA (1)...(19): siRNA sense strand
gauaccagaggcuuagaaa

SEQ ID NO: 1080743 - RNA, 19 nt, Homo sapiens
  misc_RNA (1)...(19): siRNA sense strand
gaaagagcuggacaacaug

SEQ ID NO: 1080744 - RNA, 19 nt, Homo sapiens
  misc_RNA (1)...(19): siRNA sense strand
aaaauuagcucuugaugag

SEQ ID NO: 1080745 - RNA, 19 nt, Homo sapiens
  misc_RNA (1)...(19): siRNA sense strand
cagcuugaccuuaaggaaa

SEQ ID NO: 1080746 - RNA, 19 nt, Homo sapiens
  misc_RNA (1)...(19): siRNA sense strand
ggaagugcuugguguacag

SEQ ID NO: 1080747 - RNA, 19 nt, Homo sapiens
  misc_RNA (1)...(19): siRNA sense strand
aaauauagcaguucauugg

SEQ ID NO: 1080748 - RNA, 19 nt, Homo sapiens
  misc_RNA (1)...(19): siRNA sense strand
gaugguccucagaaaguua

SEQ ID NO: 1080749 - RNA, 19 nt, Homo sapiens
  misc_RNA (1)...(19): siRNA sense strand
gaccauauuuugccuuuug

SEQ ID NO: 1080750 - RNA, 19 nt, Homo sapiens
  misc_RNA (1)...(19): siRNA sense strand
ugcagaaccuguuguuuua

SEQ ID NO: 1080751 - RNA, 19 nt, Homo sapiens
  misc_RNA (1)...(19): siRNA sense strand
aggcacaggugaauacaau

SEQ ID NO: 1080752 - RNA, 19 nt, Homo sapiens
  misc_RNA (1)...(19): siRNA sense strand
acaugagguuguagcuaua

SEQ ID NO: 1080753 - RNA, 19 nt, Homo sapiens
  misc_RNA (1)...(19): siRNA sense strand
ggacugggacaaaauaaaa

SEQ ID NO: 1080754 - RNA, 19 nt, Homo sapiens
  misc_RNA (1)...(19): siRNA sense strand
acaacaacauggcuaugga

SEQ ID NO: 1080755 - RNA, 19 nt, Homo sapiens
  misc_RNA (1)...(19): siRNA sense strand
guguaugucugccuccuau

SEQ ID NO: 1080756 - RNA, 19 nt, Homo sapiens
  misc_RNA (1)...(19): siRNA sense strand
gcauauccccuucaaauga

SEQ ID NO: 1080757 - RNA, 19 nt, Homo sapiens
  misc_RNA (1)...(19): siRNA sense strand
gcaguauguccucaaguga

SEQ ID NO: 1080758 - RNA, 19 nt, Homo sapiens
  misc_RNA (1)...(19): siRNA sense strand
augcaaagauuucacagau

SEQ ID NO: 1080759 - RNA, 19 nt, Homo sapiens
  misc_RNA (1)...(19): siRNA sense strand
aaaggagucuagauccaau

SEQ ID NO: 1080760 - RNA, 19 nt, Homo sapiens
  misc_RNA (1)...(19): siRNA sense strand
acaacuggaugaaccugaa

SEQ ID NO: 1080761 - RNA, 19 nt, Homo sapiens
  misc_RNA (1)...(19): siRNA sense strand
gaaaucucccugcauagag

SEQ ID NO: 1080762 - RNA, 19 nt, Homo sapiens
  misc_RNA (1)...(19): siRNA sense strand
gauuguggauggccugagu

SEQ ID NO: 1080763 - RNA, 19 nt, Homo sapiens
  misc_RNA (1)...(19): siRNA sense strand
uaccagaggcuuagaaauc

SEQ ID NO: 1080764 - RNA, 19 nt, Homo sapiens
  misc_RNA (1)...(19): siRNA sense strand
uaccugaaauauagcaguu

SEQ ID NO: 1080765 - RNA, 19 nt, Homo sapiens
  misc_RNA (1)...(19): siRNA sense strand
ugaaaucucccugcauaga

SEQ ID NO: 1080766 - RNA, 19 nt, Homo sapiens
  misc_RNA (1)...(19): siRNA sense strand
gcgacaaagacgauaacua

SEQ ID NO: 1080767 - RNA, 19 nt, Homo sapiens
  misc_RNA (1)...(19): siRNA sense strand
acagaccucauauuaguuu

SEQ ID NO: 1080768 - RNA, 19 nt, Homo sapiens
  misc_RNA (1)...(19): siRNA sense strand
augaugcacucacuucaaa

SEQ ID NO: 1080769 - RNA, 19 nt, Homo sapiens
  misc_RNA (1)...(19): siRNA sense strand
gaugaugcacucacuucaa

SEQ ID NO: 1080770 - RNA, 19 nt, Homo sapiens
  misc_RNA (1)...(19): siRNA sense strand
gccuuuacaugaaccaguu

SEQ ID NO: 1080771 - RNA, 19 nt, Homo sapiens
  misc_RNA (1)...(19): siRNA sense strand
uggaugguauucaguacaa

SEQ ID NO: 1080772 - RNA, 19 nt, Homo sapiens
  misc_RNA (1)...(19): siRNA sense strand
uggcaagucggcuuuguaa

SEQ ID NO: 1080773 - RNA, 19 nt, Homo sapiens
  misc_RNA (1)...(19): siRNA sense strand
gggaagugcuugguguaca

SEQ ID NO: 1080774 - RNA, 19 nt, Homo sapiens
  misc_RNA (1)...(19): siRNA sense strand
cagcccagauuaagucaca

SEQ ID NO: 1080775 - RNA, 19 nt, Homo sapiens
  misc_RNA (1)...(19): siRNA sense strand
ugacacucaugcuguuguu

SEQ ID NO: 1080776 - RNA, 19 nt, Homo sapiens
  misc_RNA (1)...(19): siRNA sense strand
uugaugagcuucuacaacu

SEQ ID NO: 1080777 - RNA, 19 nt, Homo sapiens
  misc_RNA (1)...(19): siRNA sense strand
ggacagauguuucaauacu

SEQ ID NO: 1080778 - RNA, 19 nt, Homo sapiens
  misc_RNA (1)...(19): siRNA sense strand
aaggacagauguuucaaua

SEQ ID NO: 1080779 - RNA, 19 nt, Homo sapiens
  misc_RNA (1)...(19): siRNA sense strand
gcgaucaacuuuagacaug

SEQ ID NO: 1080780 - RNA, 19 nt, Homo sapiens
  misc_RNA (1)...(19): siRNA sense strand
ggaacaaccucagcaaaca

SEQ ID NO: 1080781 - RNA, 19 nt, Homo sapiens
  misc_RNA (1)...(19): siRNA sense strand
aggcacagcuccugaaauu

SEQ ID NO: 1080782 - RNA, 19 nt, Homo sapiens
  misc_RNA (1)...(19): siRNA sense strand
caagacagcaacaguauga

SEQ ID NO: 1080783 - RNA, 19 nt, Homo sapiens
  misc_RNA (1)...(19): siRNA sense strand
gcuguagaccaaacuauua

SEQ ID NO: 1080784 - RNA, 19 nt, Homo sapiens
  misc_RNA (1)...(19): siRNA sense strand
aaacaagacagcaacagua

SEQ ID NO: 1080785 - RNA, 19 nt, Homo sapiens
  misc_RNA (1)...(19): siRNA sense strand
gacagauguuucaauacua

SEQ ID NO: 1080786 - RNA, 19 nt, Homo sapiens
  misc_RNA (1)...(19): siRNA sense strand
gagcagauaccauucuaug

SEQ ID NO: 1080787 - RNA, 19 nt, Homo sapiens
  misc_RNA (1)...(19): siRNA sense strand
ugaaauugcugugauguca

SEQ ID NO: 1080788 - RNA, 19 nt, Homo sapiens
  misc_RNA (1)...(19): siRNA sense strand
aagaagcgaucaacuuuag

SEQ ID NO: 1080789 - RNA, 19 nt, Homo sapiens
  misc_RNA (1)...(19): siRNA sense strand
gcacagcuccugaaauugc

SEQ ID NO: 1080790 - RNA, 19 nt, Homo sapiens
  misc_RNA (1)...(19): siRNA sense strand
caaaaugccucaagagcaa

SEQ ID NO: 1080791 - RNA, 19 nt, Homo sapiens
  misc_RNA (1)...(19): siRNA sense strand
ucaauacuauccaguuuac

SEQ ID NO: 1080792 - RNA, 19 nt, Homo sapiens
  misc_RNA (1)...(19): siRNA sense strand
accauucuaugcucaauuu

SEQ ID NO: 1080793 - RNA, 19 nt, Homo sapiens
  misc_RNA (1)...(19): siRNA sense strand
gagcaaggacagauguuuc

SEQ ID NO: 1080794 - RNA, 19 nt, Homo sapiens
  misc_RNA (1)...(19): siRNA sense strand
gcagauaccauucuaugcu

SEQ ID NO: 1080795 - RNA, 19 nt, Homo sapiens
  misc_RNA (1)...(19): siRNA sense strand
ggacagcagcaacuagcuu

SEQ ID NO: 1080796 - RNA, 19 nt, Homo sapiens
  misc_RNA (1)...(19): siRNA sense strand
caaccaauguuuucacuuc

SEQ ID NO: 1080797 - RNA, 19 nt, Homo sapiens
  misc_RNA (1)...(19): siRNA sense strand
gacagcagcaacuagcuuu

SEQ ID NO: 1080798 - RNA, 19 nt, Homo sapiens
  misc_RNA (1)...(19): siRNA sense strand
caaacaagacagcaacagu

SEQ ID NO: 1080799 - RNA, 19 nt, Homo sapiens
  misc_RNA (1)...(19): siRNA sense strand
gaaauugcugugaugucaa

SEQ ID NO: 1080800 - RNA, 19 nt, Homo sapiens
  misc_RNA (1)...(19): siRNA sense strand
aagagaaggacaagacuga

SEQ ID NO: 1080801 - RNA, 19 nt, Homo sapiens
  misc_RNA (1)...(19): siRNA sense strand
caagagcaaggacagaugu

SEQ ID NO: 1080802 - RNA, 19 nt, Homo sapiens
  misc_RNA (1)...(19): siRNA sense strand
gagaaggacaagacugaca

SEQ ID NO: 1080803 - RNA, 19 nt, Homo sapiens
  misc_RNA (1)...(19): siRNA sense strand
gggaacaaccucagcaaac

SEQ ID NO: 1080804 - RNA, 19 nt, Homo sapiens
  misc_RNA (1)...(19): siRNA sense strand
cagccuaagggaaccauaa

SEQ ID NO: 1080805 - RNA, 19 nt, Homo sapiens
  misc_RNA (1)...(19): siRNA sense strand
aaacccagcacaaccaaug

SEQ ID NO: 1080806 - RNA, 19 nt, Homo sapiens
  misc_RNA (1)...(19): siRNA sense strand
ggauacauuccacaacuag

SEQ ID NO: 1080807 - RNA, 19 nt, Homo sapiens
  misc_RNA (1)...(19): siRNA sense strand
gaacaaccucagcaaacag

SEQ ID NO: 1080808 - RNA, 19 nt, Homo sapiens
  misc_RNA (1)...(19): siRNA sense strand
gaucaacuuuagacaugac

SEQ ID NO: 1080809 - RNA, 19 nt, Homo sapiens
  misc_RNA (1)...(19): siRNA sense strand
gcccucaacuucaccaaaa

SEQ ID NO: 1080810 - RNA, 19 nt, Homo sapiens
  misc_RNA (1)...(19): siRNA sense strand
gacaagacugacagccuaa

SEQ ID NO: 1080811 - RNA, 19 nt, Homo sapiens
  misc_RNA (1)...(19): siRNA sense strand
aggagcagauaccauucua

SEQ ID NO: 1080812 - RNA, 19 nt, Homo sapiens
  misc_RNA (1)...(19): siRNA sense strand
gaagcgaucaacuuuagac

SEQ ID NO: 1080813 - RNA, 19 nt, Homo sapiens
  misc_RNA (1)...(19): siRNA sense strand
caaggacagauguuucaau

SEQ ID NO: 1080814 - RNA, 19 nt, Homo sapiens
  misc_RNA (1)...(19): siRNA sense strand
cgaucaacuuuagacauga

SEQ ID NO: 1080815 - RNA, 19 nt, Homo sapiens
  misc_RNA (1)...(19): siRNA sense strand
ccagagcucccagaagaga

SEQ ID NO: 1080816 - RNA, 19 nt, Homo sapiens
  misc_RNA (1)...(19): siRNA sense strand
ccccagagcucccagaaga

SEQ ID NO: 1080817 - RNA, 19 nt, Homo sapiens
  misc_RNA (1)...(19): siRNA sense strand
cagaagagaaggacaagac

SEQ ID NO: 1080818 - RNA, 19 nt, Homo sapiens
  misc_RNA (1)...(19): siRNA sense strand
cagcaaacaguuccaaggu

SEQ ID NO: 1080819 - RNA, 19 nt, Homo sapiens
  misc_RNA (1)...(19): siRNA sense strand
gcaaggacagauguuucaa

SEQ ID NO: 1080820 - RNA, 19 nt, Homo sapiens
  misc_RNA (1)...(19): siRNA sense strand
gaugucaacaggagaagag

SEQ ID NO: 1080821 - RNA, 19 nt, Homo sapiens
  misc_RNA (1)...(19): siRNA sense strand
auucuaugcucaauuugga

SEQ ID NO: 1080822 - RNA, 19 nt, Homo sapiens
  misc_RNA (1)...(19): siRNA sense strand
acaugacagugcaggaguu

SEQ ID NO: 1080823 - RNA, 19 nt, Homo sapiens
  misc_RNA (1)...(19): siRNA sense strand
cuauguauucuccuucaaa

SEQ ID NO: 1080824 - RNA, 19 nt, Homo sapiens
  misc_RNA (1)...(19): siRNA sense strand
caaccucagcaaacaguuc

SEQ ID NO: 1080825 - RNA, 19 nt, Homo sapiens
  misc_RNA (1)...(19): siRNA sense strand
gguccuacccugggaacaa

SEQ ID NO: 1080826 - RNA, 19 nt, Homo sapiens
  misc_RNA (1)...(19): siRNA sense strand
ggaggacagcagcaacuag

SEQ ID NO: 1080827 - RNA, 19 nt, Homo sapiens
  misc_RNA (1)...(19): siRNA sense strand
ucuaugcucaauuuggaua

SEQ ID NO: 1080828 - RNA, 19 nt, Homo sapiens
  misc_RNA (1)...(19): siRNA sense strand
aacaagacagcaacaguau

SEQ ID NO: 1080829 - RNA, 19 nt, Homo sapiens
  misc_RNA (1)...(19): siRNA sense strand
ucaacaaacaagacagcaa

SEQ ID NO: 1080830 - RNA, 19 nt, Homo sapiens
  misc_RNA (1)...(19): siRNA sense strand
aaauugcugugaugucaac

SEQ ID NO: 1080831 - RNA, 19 nt, Homo sapiens
  misc_RNA (1)...(19): siRNA sense strand
ggagcagauaccauucuau

SEQ ID NO: 1080832 - RNA, 19 nt, Homo sapiens
  misc_RNA (1)...(19): siRNA sense strand
ucaagagcaaggacagaug

SEQ ID NO: 1080833 - RNA, 19 nt, Homo sapiens
  misc_RNA (1)...(19): siRNA sense strand
gaggagcagauaccauucu

SEQ ID NO: 1080834 - RNA, 19 nt, Homo sapiens
  misc_RNA (1)...(19): siRNA sense strand
caacuuuagacaugacagu

SEQ ID NO: 1080835 - RNA, 19 nt, Homo sapiens
  misc_RNA (1)...(19): siRNA sense strand
gccaagauguccucuguga

SEQ ID NO: 1080836 - RNA, 19 nt, Homo sapiens
  misc_RNA (1)...(19): siRNA sense strand
gcgaauccuuguccaguga

SEQ ID NO: 1080837 - RNA, 19 nt, Homo sapiens
  misc_RNA (1)...(19): siRNA sense strand
gcagccagguacuaaagga

SEQ ID NO: 1080838 - RNA, 19 nt, Homo sapiens
  misc_RNA (1)...(19): siRNA sense strand
gauguccucugugaaguug

SEQ ID NO: 1080839 - RNA, 19 nt, Homo sapiens
  misc_RNA (1)...(19): siRNA sense strand
gacaggggauugauuauga

SEQ ID NO: 1080840 - RNA, 19 nt, Homo sapiens
  misc_RNA (1)...(19): siRNA sense strand
caagauguccucugugaag

SEQ ID NO: 1080841 - RNA, 19 nt, Homo sapiens
  misc_RNA (1)...(19): siRNA sense strand
caguggcagugcugaguuu

SEQ ID NO: 1080842 - RNA, 19 nt, Homo sapiens
  misc_RNA (1)...(19): siRNA sense strand
uggccaagauguccucugu

SEQ ID NO: 1080843 - RNA, 19 nt, Homo sapiens
  misc_RNA (1)...(19): siRNA sense strand
ggauugauuaugagaagau

SEQ ID NO: 1080844 - RNA, 19 nt, Homo sapiens
  misc_RNA (1)...(19): siRNA sense strand
cggcugacgccaaguuuga

SEQ ID NO: 1080845 - RNA, 19 nt, Homo sapiens
  misc_RNA (1)...(19): siRNA sense strand
gggauugauuaugagaaga

SEQ ID NO: 1080846 - RNA, 19 nt, Homo sapiens
  misc_RNA (1)...(19): siRNA sense strand
ccucucagcagacaaguuc

SEQ ID NO: 1080847 - RNA, 19 nt, Homo sapiens
  misc_RNA (1)...(19): siRNA sense strand
guuaugaggagaagcaaag

SEQ ID NO: 1080848 - RNA, 19 nt, Homo sapiens
  misc_RNA (1)...(19): siRNA sense strand
gcucugcagccagguacua

SEQ ID NO: 1080849 - RNA, 19 nt, Homo sapiens
  misc_RNA (1)...(19): siRNA sense strand
ucacggcugacgccaaguu

SEQ ID NO: 1080850 - RNA, 19 nt, Homo sapiens
  misc_RNA (1)...(19): siRNA sense strand
gcacgugucuucucaauga

SEQ ID NO: 1080851 - RNA, 19 nt, Homo sapiens
  misc_RNA (1)...(19): siRNA sense strand
gaagaaggguuacuuugaa

SEQ ID NO: 1080852 - RNA, 19 nt, Homo sapiens
  misc_RNA (1)...(19): siRNA sense strand
gcacaccuguaaacggaua

SEQ ID NO: 1080853 - RNA, 19 nt, Homo sapiens
  misc_RNA (1)...(19): siRNA sense strand
caugaaaccuccaacauca

SEQ ID NO: 1080854 - RNA, 19 nt, Homo sapiens
  misc_RNA (1)...(19): siRNA sense strand
gcgaugagcccuuccagua

SEQ ID NO: 1080855 - RNA, 19 nt, Homo sapiens
  misc_RNA (1)...(19): siRNA sense strand
ugaagacuuuggagugaua

SEQ ID NO: 1080856 - RNA, 19 nt, Homo sapiens
  misc_RNA (1)...(19): siRNA sense strand
gacaaugcccgacgucuaa

SEQ ID NO: 1080857 - RNA, 19 nt, Homo sapiens
  misc_RNA (1)...(19): siRNA sense strand
ggagaagaaggguuacuuu

SEQ ID NO: 1080858 - RNA, 19 nt, Homo sapiens
  misc_RNA (1)...(19): siRNA sense strand
ggacaaugcccgacgucua

SEQ ID NO: 1080859 - RNA, 19 nt, Homo sapiens
  misc_RNA (1)...(19): siRNA sense strand
ccaaguguguggaagaguu

SEQ ID NO: 1080860 - RNA, 19 nt, Homo sapiens
  misc_RNA (1)...(19): siRNA sense strand
gaaaguccaggccauguau

SEQ ID NO: 1080861 - RNA, 19 nt, Homo sapiens
  misc_RNA (1)...(19): siRNA sense strand
gagaagaaggguuacuuug

SEQ ID NO: 1080862 - RNA, 19 nt, Homo sapiens
  misc_RNA (1)...(19): siRNA sense strand
gagaaggacugcgcugcaa

SEQ ID NO: 1080863 - RNA, 19 nt, Homo sapiens
  misc_RNA (1)...(19): siRNA sense strand
gaugagcccuuccaguaca

SEQ ID NO: 1080864 - RNA, 19 nt, Homo sapiens
  misc_RNA (1)...(19): siRNA sense strand
uagcaaccuuugauccuaa

SEQ ID NO: 1080865 - RNA, 19 nt, Homo sapiens
  misc_RNA (1)...(19): siRNA sense strand
gcaggaguauacccucaug

SEQ ID NO: 1080866 - RNA, 19 nt, Homo sapiens
  misc_RNA (1)...(19): siRNA sense strand
ccacauccgugccuaugau

SEQ ID NO: 1080867 - RNA, 19 nt, Homo sapiens
  misc_RNA (1)...(19): siRNA sense strand
uaagcaagcggcaccagua

SEQ ID NO: 1080868 - RNA, 19 nt, Homo sapiens
  misc_RNA (1)...(19): siRNA sense strand
ggaggagaauggucugaag

SEQ ID NO: 1080869 - RNA, 19 nt, Homo sapiens
  misc_RNA (1)...(19): siRNA sense strand
gaucgaugguacuggagaa

SEQ ID NO: 1080870 - RNA, 19 nt, Homo sapiens
  misc_RNA (1)...(19): siRNA sense strand
gccaggagaagaaggguua

SEQ ID NO: 1080871 - RNA, 19 nt, Homo sapiens
  misc_RNA (1)...(19): siRNA sense strand
agaauggucugaaguacau

SEQ ID NO: 1080872 - RNA, 19 nt, Homo sapiens
  misc_RNA (1)...(19): siRNA sense strand
gcauggagcaggaguauac

SEQ ID NO: 1080873 - RNA, 19 nt, Homo sapiens
  misc_RNA (1)...(19): siRNA sense strand
agaagaaggguuacuuuga

SEQ ID NO: 1080874 - RNA, 19 nt, Homo sapiens
  misc_RNA (1)...(19): siRNA sense strand
gaaggacugcgcugcaaga

SEQ ID NO: 1080875 - RNA, 19 nt, Homo sapiens
  misc_RNA (1)...(19): siRNA sense strand
guaaacggauaauggacau

SEQ ID NO: 1080876 - RNA, 19 nt, Homo sapiens
  misc_RNA (1)...(19): siRNA sense strand
ggagugauagcaaccuuug

SEQ ID NO: 1080877 - RNA, 19 nt, Homo sapiens
  misc_RNA (1)...(19): siRNA sense strand
uaauggacauggugagcaa

SEQ ID NO: 1080878 - RNA, 19 nt, Homo sapiens
  misc_RNA (1)...(19): siRNA sense strand
ucaagcagguguacauguc

SEQ ID NO: 1080879 - RNA, 19 nt, Homo sapiens
  misc_RNA (1)...(19): siRNA sense strand
ggagaauggucugaaguac

SEQ ID NO: 1080880 - RNA, 19 nt, Homo sapiens
  misc_RNA (1)...(19): siRNA sense strand
guaaggacccuaacaagcu

SEQ ID NO: 1080881 - RNA, 19 nt, Homo sapiens
  misc_RNA (1)...(19): siRNA sense strand
cgaggaggccauugagaaa

SEQ ID NO: 1080882 - RNA, 19 nt, Homo sapiens
  misc_RNA (1)...(19): siRNA sense strand
caucuugcaucgugugugu

SEQ ID NO: 1080883 - RNA, 19 nt, Homo sapiens
  misc_RNA (1)...(19): siRNA sense strand
gaaggguuacuuugaagau

SEQ ID NO: 1080884 - RNA, 19 nt, Homo sapiens
  misc_RNA (1)...(19): siRNA sense strand
acaagcugguguuauguga

SEQ ID NO: 1080885 - RNA, 19 nt, Homo sapiens
  misc_RNA (1)...(19): siRNA sense strand
uaaauaaaggcaucaagca

SEQ ID NO: 1080886 - RNA, 19 nt, Homo sapiens
  misc_RNA (1)...(19): siRNA sense strand
ccaguacuuuacagucuga

SEQ ID NO: 1080887 - RNA, 19 nt, Homo sapiens
  misc_RNA (1)...(19): siRNA sense strand
ggaggccauugagaaacua

SEQ ID NO: 1080888 - RNA, 19 nt, Homo sapiens
  misc_RNA (1)...(19): siRNA sense strand
acagugagcccaagugugu

SEQ ID NO: 1080889 - RNA, 19 nt, Homo sapiens
  misc_RNA (1)...(19): siRNA sense strand
ggacagugagcccaagugu

SEQ ID NO: 1080890 - RNA, 19 nt, Homo sapiens
  misc_RNA (1)...(19): siRNA sense strand
ggaaucagcaugggagauc

SEQ ID NO: 1080891 - RNA, 19 nt, Homo sapiens
  misc_RNA (1)...(19): siRNA sense strand
ugugaagacuuuggaguga

SEQ ID NO: 1080892 - RNA, 19 nt, Homo sapiens
  misc_RNA (1)...(19): siRNA sense strand
ccagugggaauuucagauu

SEQ ID NO: 1080893 - RNA, 19 nt, Homo sapiens
  misc_RNA (1)...(19): siRNA sense strand
gagaauggucugaaguaca

SEQ ID NO: 1080894 - RNA, 19 nt, Homo sapiens
  misc_RNA (1)...(19): siRNA sense strand
cagugggaauuucagauug

SEQ ID NO: 1080895 - RNA, 19 nt, Homo sapiens
  misc_RNA (1)...(19): siRNA sense strand
cgauggcuccaguacuuua

SEQ ID NO: 1080896 - RNA, 19 nt, Homo sapiens
  misc_RNA (1)...(19): siRNA sense strand
gaaucagcaugggagauca

SEQ ID NO: 1080897 - RNA, 19 nt, Homo sapiens
  misc_RNA (1)...(19): siRNA sense strand
gguggcccguuucaucuug

SEQ ID NO: 1080898 - RNA, 19 nt, Homo sapiens
  misc_RNA (1)...(19): siRNA sense strand
ggacuaaugccgaggucau

SEQ ID NO: 1080899 - RNA, 19 nt, Homo sapiens
  misc_RNA (1)...(19): siRNA sense strand
cgaugguacuggagaagga

SEQ ID NO: 1080900 - RNA, 19 nt, Homo sapiens
  misc_RNA (1)...(19): siRNA sense strand
gcaucaagcagguguacau

SEQ ID NO: 1080901 - RNA, 19 nt, Homo sapiens
  misc_RNA (1)...(19): siRNA sense strand
ucaaugaaaccggcgauga

SEQ ID NO: 1080902 - RNA, 19 nt, Homo sapiens
  misc_RNA (1)...(19): siRNA sense strand
gagcagacagagccuaugg

SEQ ID NO: 1080903 - RNA, 19 nt, Homo sapiens
  misc_RNA (1)...(19): siRNA sense strand
ccaugaaaccuccaacauc

SEQ ID NO: 1080904 - RNA, 19 nt, Homo sapiens
  misc_RNA (1)...(19): siRNA sense strand
guacaucgaggaggccauu

SEQ ID NO: 1080905 - RNA, 19 nt, Homo sapiens
  misc_RNA (1)...(19): siRNA sense strand
agaaaguccaggccaugua

SEQ ID NO: 1080906 - RNA, 19 nt, Homo sapiens
  misc_RNA (1)...(19): siRNA sense strand
caagggaggccuggacaau

SEQ ID NO: 1080907 - RNA, 19 nt, Homo sapiens
  misc_RNA (1)...(19): siRNA sense strand
ggccugcagagaccaauuu

SEQ ID NO: 1080908 - RNA, 19 nt, Homo sapiens
  misc_RNA (1)...(19): siRNA sense strand
gagaaaguccaggccaugu

SEQ ID NO: 1080909 - RNA, 19 nt, Homo sapiens
  misc_RNA (1)...(19): siRNA sense strand
ccuccaacaucaacgacuu

SEQ ID NO: 1080910 - RNA, 19 nt, Homo sapiens
  misc_RNA (1)...(19): siRNA sense strand
auagcaaccuuugauccua

SEQ ID NO: 1080911 - RNA, 19 nt, Homo sapiens
  misc_RNA (1)...(19): siRNA sense strand
gguguuaugugaaguuuuc

SEQ ID NO: 1080912 - RNA, 19 nt, Homo sapiens
  misc_RNA (1)...(19): siRNA sense strand
guggaagaguugccugagu

SEQ ID NO: 1080913 - RNA, 19 nt, Homo sapiens
  misc_RNA (1)...(19): siRNA sense strand
ccgcacgugucuucucaau

SEQ ID NO: 1080914 - RNA, 19 nt, Homo sapiens
  misc_RNA (1)...(19): siRNA sense strand
cgacuuuucugcuggugua

SEQ ID NO: 1080915 - RNA, 19 nt, Homo sapiens
  misc_RNA (1)...(19): siRNA sense strand
uucgauggcuccaguacuu

SEQ ID NO: 1080916 - RNA, 19 nt, Homo sapiens
  misc_RNA (1)...(19): siRNA sense strand
gcaagcggcaccaguacca

SEQ ID NO: 1080917 - RNA, 19 nt, Homo sapiens
  misc_RNA (1)...(19): siRNA sense strand
ucgaggaggccauugagaa

SEQ ID NO: 1080918 - RNA, 19 nt, Homo sapiens
  misc_RNA (1)...(19): siRNA sense strand
ucgugugugugaagacuuu

SEQ ID NO: 1080919 - RNA, 19 nt, Homo sapiens
  misc_RNA (1)...(19): siRNA sense strand
guuccaacagugacaugua

SEQ ID NO: 1080920 - RNA, 19 nt, Homo sapiens
  misc_RNA (1)...(19): siRNA sense strand
caaugaaaccggcgaugag

SEQ ID NO: 1080921 - RNA, 19 nt, Homo sapiens
  misc_RNA (1)...(19): siRNA sense strand
aggagaauggucugaagua

SEQ ID NO: 1080922 - RNA, 19 nt, Homo sapiens
  misc_RNA (1)...(19): siRNA sense strand
uuccaacagugacauguau

SEQ ID NO: 1080923 - RNA, 19 nt, Homo sapiens
  misc_RNA (1)...(19): siRNA sense strand
aagaaggguuacuuugaag

SEQ ID NO: 1080924 - RNA, 19 nt, Homo sapiens
  misc_RNA (1)...(19): siRNA sense strand
ggacuguuggccaggagaa

SEQ ID NO: 1080925 - RNA, 19 nt, Homo sapiens
  misc_RNA (1)...(19): siRNA sense strand
aagcugguguuaugugaag

SEQ ID NO: 1080926 - RNA, 19 nt, Homo sapiens
  misc_RNA (1)...(19): siRNA sense strand
gcugguguagccaaucgua

SEQ ID NO: 1080927 - RNA, 19 nt, Homo sapiens
  misc_RNA (1)...(19): siRNA sense strand
cagauuggaccuugugaag

SEQ ID NO: 1080928 - RNA, 19 nt, Homo sapiens
  misc_RNA (1)...(19): siRNA sense strand
cgugccugcugccauguuu

SEQ ID NO: 1080929 - RNA, 19 nt, Homo sapiens
  misc_RNA (1)...(19): siRNA sense strand
gaggagaauggucugaagu

SEQ ID NO: 1080930 - RNA, 19 nt, Homo sapiens
  misc_RNA (1)...(19): siRNA sense strand
ccauguauaucuggaucga

SEQ ID NO: 1080931 - RNA, 19 nt, Homo sapiens
  misc_RNA (1)...(19): siRNA sense strand
caaguguguggaagaguug

SEQ ID NO: 1080932 - RNA, 19 nt, Homo sapiens
  misc_RNA (1)...(19): siRNA sense strand
gggagcagacagagccuau

SEQ ID NO: 1080933 - RNA, 19 nt, Homo sapiens
  misc_RNA (1)...(19): siRNA sense strand
aagaguugccugaguggaa

SEQ ID NO: 1080934 - RNA, 19 nt, Homo sapiens
  misc_RNA (1)...(19): siRNA sense strand
aaucguagcgccagcauac

SEQ ID NO: 1080935 - RNA, 19 nt, Homo sapiens
  misc_RNA (1)...(19): siRNA sense strand
gauagcaaccuuugauccu

SEQ ID NO: 1080936 - RNA, 19 nt, Homo sapiens
  misc_RNA (1)...(19): siRNA sense strand
gugaagacuuuggagugau

SEQ ID NO: 1080937 - RNA, 19 nt, Homo sapiens
  misc_RNA (1)...(19): siRNA sense strand
agaguugccugaguggaau

SEQ ID NO: 1080938 - RNA, 19 nt, Homo sapiens
  misc_RNA (1)...(19): siRNA sense strand
ccuguaaacggauaaugga

SEQ ID NO: 1080939 - RNA, 19 nt, Homo sapiens
  misc_RNA (1)...(19): siRNA sense strand
ggugacagaagcccucauc

SEQ ID NO: 1080940 - RNA, 19 nt, Homo sapiens
  misc_RNA (1)...(19): siRNA sense strand
gcccaaguguguggaagag

SEQ ID NO: 1080941 - RNA, 19 nt, Homo sapiens
  misc_RNA (1)...(19): siRNA sense strand
gggaggagaauggucugaa

SEQ ID NO: 1080942 - RNA, 19 nt, Homo sapiens
  misc_RNA (1)...(19): siRNA sense strand
gaaggccugcagagaccaa

SEQ ID NO: 1080943 - RNA, 19 nt, Homo sapiens
  misc_RNA (1)...(19): siRNA sense strand
gaacaagaauguaagaaga

SEQ ID NO: 1080944 - RNA, 19 nt, Homo sapiens
  misc_RNA (1)...(19): siRNA sense strand
gaaacagucuuccaaccua

SEQ ID NO: 1080945 - RNA, 19 nt, Homo sapiens
  misc_RNA (1)...(19): siRNA sense strand
gaacguaguuguuguugau

SEQ ID NO: 1080946 - RNA, 19 nt, Homo sapiens
  misc_RNA (1)...(19): siRNA sense strand
ccacauaucuggguuuguu

SEQ ID NO: 1080947 - RNA, 19 nt, Homo sapiens
  misc_RNA (1)...(19): siRNA sense strand
ucgaggagcuacaacuuua

SEQ ID NO: 1080948 - RNA, 19 nt, Homo sapiens
  misc_RNA (1)...(19): siRNA sense strand
agagagagcugcaccauca

SEQ ID NO: 1080949 - RNA, 19 nt, Homo sapiens
  misc_RNA (1)...(19): siRNA sense strand
ggacauuaccaucaaauug

SEQ ID NO: 1080950 - RNA, 19 nt, Homo sapiens
  misc_RNA (1)...(19): siRNA sense strand
gcccagaguugcaguugua

SEQ ID NO: 1080951 - RNA, 19 nt, Homo sapiens
  misc_RNA (1)...(19): siRNA sense strand
ucagaaauaucaccaagug

SEQ ID NO: 1080952 - RNA, 19 nt, Homo sapiens
  misc_RNA (1)...(19): siRNA sense strand
gguaugaucuuguccugau

SEQ ID NO: 1080953 - RNA, 19 nt, Homo sapiens
  misc_RNA (1)...(19): siRNA sense strand
guaccugucuucccugaga

SEQ ID NO: 1080954 - RNA, 19 nt, Homo sapiens
  misc_RNA (1)...(19): siRNA sense strand
gagcuucucuugaugacau

SEQ ID NO: 1080955 - RNA, 19 nt, Homo sapiens
  misc_RNA (1)...(19): siRNA sense strand
agaaacauguccuucauuc

SEQ ID NO: 1080956 - RNA, 19 nt, Homo sapiens
  misc_RNA (1)...(19): siRNA sense strand
gaucuuguccugauggaaa

SEQ ID NO: 1080957 - RNA, 19 nt, Homo sapiens
  misc_RNA (1)...(19): siRNA sense strand
gcaauuuccuugauguucu

SEQ ID NO: 1080958 - RNA, 19 nt, Homo sapiens
  misc_RNA (1)...(19): siRNA sense strand
cugcauguaucauuacuuu

SEQ ID NO: 1080959 - RNA, 19 nt, Homo sapiens
  misc_RNA (1)...(19): siRNA sense strand
ggaaagauccuccaaugac

SEQ ID NO: 1080960 - RNA, 19 nt, Homo sapiens
  misc_RNA (1)...(19): siRNA sense strand
ggaauuuauugaccagaug

SEQ ID NO: 1080961 - RNA, 19 nt, Homo sapiens
  misc_RNA (1)...(19): siRNA sense strand
ggagaggccucagcugugu

SEQ ID NO: 1080962 - RNA, 19 nt, Homo sapiens
  misc_RNA (1)...(19): siRNA sense strand
uaaaguggcugcaauuucc

SEQ ID NO: 1080963 - RNA, 19 nt, Homo sapiens
  misc_RNA (1)...(19): siRNA sense strand
ggagcuacaacuuuaauau

SEQ ID NO: 1080964 - RNA, 19 nt, Homo sapiens
  misc_RNA (1)...(19): siRNA sense strand
gauaaaguggcugcaauuu

SEQ ID NO: 1080965 - RNA, 19 nt, Homo sapiens
  misc_RNA (1)...(19): siRNA sense strand
ggauaaaguggcugcaauu

SEQ ID NO: 1080966 - RNA, 19 nt, Homo sapiens
  misc_RNA (1)...(19): siRNA sense strand
gagucuacuugcaagauuu

SEQ ID NO: 1080967 - RNA, 19 nt, Homo sapiens
  misc_RNA (1)...(19): siRNA sense strand
gaacccaccacauuucaga

SEQ ID NO: 1080968 - RNA, 19 nt, Homo sapiens
  misc_RNA (1)...(19): siRNA sense strand
uuggauggaugacuuagua

SEQ ID NO: 1080969 - RNA, 19 nt, Homo sapiens
  misc_RNA (1)...(19): siRNA sense strand
cagauuagaucccagugau

SEQ ID NO: 1080970 - RNA, 19 nt, Homo sapiens
  misc_RNA (1)...(19): siRNA sense strand
gcauguaucauuacuuugu

SEQ ID NO: 1080971 - RNA, 19 nt, Homo sapiens
  misc_RNA (1)...(19): siRNA sense strand
cauucugcauguaucauua

SEQ ID NO: 1080972 - RNA, 19 nt, Homo sapiens
  misc_RNA (1)...(19): siRNA sense strand
ugacgaaggcauucuuuga

SEQ ID NO: 1080973 - RNA, 19 nt, Homo sapiens
  misc_RNA (1)...(19): siRNA sense strand
uaaaggguuugcucucugu

SEQ ID NO: 1080974 - RNA, 19 nt, Homo sapiens
  misc_RNA (1)...(19): siRNA sense strand
ggaacaagaauguaagaag

SEQ ID NO: 1080975 - RNA, 19 nt, Homo sapiens
  misc_RNA (1)...(19): siRNA sense strand
acaaggagccauuaggaaa

SEQ ID NO: 1080976 - RNA, 19 nt, Homo sapiens
  misc_RNA (1)...(19): siRNA sense strand
uuugggaacuugaauguga

SEQ ID NO: 1080977 - RNA, 19 nt, Homo sapiens
  misc_RNA (1)...(19): siRNA sense strand
gggaaagauccuccaauga

SEQ ID NO: 1080978 - RNA, 19 nt, Homo sapiens
  misc_RNA (1)...(19): siRNA sense strand
ugggaggauuucaguauuu

SEQ ID NO: 1080979 - RNA, 19 nt, Homo sapiens
  misc_RNA (1)...(19): siRNA sense strand
ggagagauguacgauggau

SEQ ID NO: 1080980 - RNA, 19 nt, Homo sapiens
  misc_RNA (1)...(19): siRNA sense strand
gguacaagcucaggauucu

SEQ ID NO: 1080981 - RNA, 19 nt, Homo sapiens
  misc_RNA (1)...(19): siRNA sense strand
caaccuggcugccccaaaa

SEQ ID NO: 1080982 - RNA, 19 nt, Homo sapiens
  misc_RNA (1)...(19): siRNA sense strand
gauguucucuacaggaucu

SEQ ID NO: 1080983 - RNA, 19 nt, Homo sapiens
  misc_RNA (1)...(19): siRNA sense strand
gagagcccauucugcaugu

SEQ ID NO: 1080984 - RNA, 19 nt, Homo sapiens
  misc_RNA (1)...(19): siRNA sense strand
gccauggucuugaaggaau

SEQ ID NO: 1080985 - RNA, 19 nt, Homo sapiens
  misc_RNA (1)...(19): siRNA sense strand
gagauucuacuuauucauc

SEQ ID NO: 1080986 - RNA, 19 nt, Homo sapiens
  misc_RNA (1)...(19): siRNA sense strand
gaaacauguccuucauuca

SEQ ID NO: 1080987 - RNA, 19 nt, Homo sapiens
  misc_RNA (1)...(19): siRNA sense strand
ugagucuacuugcaagauu

SEQ ID NO: 1080988 - RNA, 19 nt, Homo sapiens
  misc_RNA (1)...(19): siRNA sense strand
cuacccaaauggaggauug

SEQ ID NO: 1080989 - RNA, 19 nt, Homo sapiens
  misc_RNA (1)...(19): siRNA sense strand
gaccagauguuggcagaag

SEQ ID NO: 1080990 - RNA, 19 nt, Homo sapiens
  misc_RNA (1)...(19): siRNA sense strand
ggauggaugacuuaguaaa

SEQ ID NO: 1080991 - RNA, 19 nt, Homo sapiens
  misc_RNA (1)...(19): siRNA sense strand
aaacagucuuccaaccuau

SEQ ID NO: 1080992 - RNA, 19 nt, Homo sapiens
  misc_RNA (1)...(19): siRNA sense strand
gguacgggacuaaauguga

SEQ ID NO: 1080993 - RNA, 19 nt, Homo sapiens
  misc_RNA (1)...(19): siRNA sense strand
acccaugccucuaguaaga

SEQ ID NO: 1080994 - RNA, 19 nt, Homo sapiens
  misc_RNA (1)...(19): siRNA sense strand
gacaugaacguaguuguug

SEQ ID NO: 1080995 - RNA, 19 nt, Homo sapiens
  misc_RNA (1)...(19): siRNA sense strand
ggucuugaaggaauuuauu

SEQ ID NO: 1080996 - RNA, 19 nt, Homo sapiens
  misc_RNA (1)...(19): siRNA sense strand
ucaccaggcugagcuuuca

SEQ ID NO: 1080997 - RNA, 19 nt, Homo sapiens
  misc_RNA (1)...(19): siRNA sense strand
cuaccaggauuauaggaau

SEQ ID NO: 1080998 - RNA, 19 nt, Homo sapiens
  misc_RNA (1)...(19): siRNA sense strand
ggggaaagauccuccaaug

SEQ ID NO: 1080999 - RNA, 19 nt, Homo sapiens
  misc_RNA (1)...(19): siRNA sense strand
ucuacaggaucucuaauag

SEQ ID NO: 1081000 - RNA, 19 nt, Homo sapiens
  misc_RNA (1)...(19): siRNA sense strand
gcagaagaaacauguccuu

SEQ ID NO: 1081001 - RNA, 19 nt, Homo sapiens
  misc_RNA (1)...(19): siRNA sense strand
ucaugaacccaccacauuu

SEQ ID NO: 1081002 - RNA, 19 nt, Homo sapiens
  misc_RNA (1)...(19): siRNA sense strand
aaacaccacagaauccaaa

SEQ ID NO: 1081003 - RNA, 19 nt, Homo sapiens
  misc_RNA (1)...(19): siRNA sense strand
guugagauucuacuuauuc

SEQ ID NO: 1081004 - RNA, 19 nt, Homo sapiens
  misc_RNA (1)...(19): siRNA sense strand
caagaaaaccaccuucauu

SEQ ID NO: 1081005 - RNA, 19 nt, Homo sapiens
  misc_RNA (1)...(19): siRNA sense strand
aucaagaucuggauaaagu

SEQ ID NO: 1081006 - RNA, 19 nt, Homo sapiens
  misc_RNA (1)...(19): siRNA sense strand
gaaggcauucuuugacaca

SEQ ID NO: 1081007 - RNA, 19 nt, Homo sapiens
  misc_RNA (1)...(19): siRNA sense strand
gaagacaugaacguaguug

SEQ ID NO: 1081008 - RNA, 19 nt, Homo sapiens
  misc_RNA (1)...(19): siRNA sense strand
caagaucagacgcagaaga

SEQ ID NO: 1081009 - RNA, 19 nt, Homo sapiens
  misc_RNA (1)...(19): siRNA sense strand
gaaacaccacagaauccaa

SEQ ID NO: 1081010 - RNA, 19 nt, Homo sapiens
  misc_RNA (1)...(19): siRNA sense strand
agacaugaacguaguuguu

SEQ ID NO: 1081011 - RNA, 19 nt, Homo sapiens
  misc_RNA (1)...(19): siRNA sense strand
ucuaggagcccacauaucu

SEQ ID NO: 1081012 - RNA, 19 nt, Homo sapiens
  misc_RNA (1)...(19): siRNA sense strand
gcugcaauuuccuugaugu

SEQ ID NO: 1081013 - RNA, 19 nt, Homo sapiens
  misc_RNA (1)...(19): siRNA sense strand
ggagccauuaggaaacaua

SEQ ID NO: 1081014 - RNA, 19 nt, Homo sapiens
  misc_RNA (1)...(19): siRNA sense strand
cuacaaggagccauuagga

SEQ ID NO: 1081015 - RNA, 19 nt, Homo sapiens
  misc_RNA (1)...(19): siRNA sense strand
cgggaaaccucaccaagac

SEQ ID NO: 1081016 - RNA, 19 nt, Homo sapiens
  misc_RNA (1)...(19): siRNA sense strand
gugaugcgcaguuuguuga

SEQ ID NO: 1081017 - RNA, 19 nt, Homo sapiens
  misc_RNA (1)...(19): siRNA sense strand
guaagaagaggggacauua

SEQ ID NO: 1081018 - RNA, 19 nt, Homo sapiens
  misc_RNA (1)...(19): siRNA sense strand
ugaacguaguuguuguuga

SEQ ID NO: 1081019 - RNA, 19 nt, Homo sapiens
  misc_RNA (1)...(19): siRNA sense strand
uggauaaaguggcugcaau

SEQ ID NO: 1081020 - RNA, 19 nt, Homo sapiens
  misc_RNA (1)...(19): siRNA sense strand
gcuggaaacaccacagaau

SEQ ID NO: 1081021 - RNA, 19 nt, Homo sapiens
  misc_RNA (1)...(19): siRNA sense strand
aaccugaccugcgcacaaa

SEQ ID NO: 1081022 - RNA, 19 nt, Homo sapiens
  misc_RNA (1)...(19): siRNA sense strand
gaucggaguaagucuagga

SEQ ID NO: 1081023 - RNA, 19 nt, Homo sapiens
  misc_RNA (1)...(19): siRNA sense strand
gucaagaucagacgcagaa

SEQ ID NO: 1081024 - RNA, 19 nt, Homo sapiens
  misc_RNA (1)...(19): siRNA sense strand
gauggaugacuuaguaaag

SEQ ID NO: 1081025 - RNA, 19 nt, Homo sapiens
  misc_RNA (1)...(19): siRNA sense strand
ccucagcugugucgguaug

SEQ ID NO: 1081026 - RNA, 19 nt, Homo sapiens
  misc_RNA (1)...(19): siRNA sense strand
aagaucagacgcagaagaa

SEQ ID NO: 1081027 - RNA, 19 nt, Homo sapiens
  misc_RNA (1)...(19): siRNA sense strand
aaacaauauugggaggauu

SEQ ID NO: 1081028 - RNA, 19 nt, Homo sapiens
  misc_RNA (1)...(19): siRNA sense strand
gaucagacgcagaagaaac

SEQ ID NO: 1081029 - RNA, 19 nt, Homo sapiens
  misc_RNA (1)...(19): siRNA sense strand
gaggagcuacaacuuuaau

SEQ ID NO: 1081030 - RNA, 19 nt, Homo sapiens
  misc_RNA (1)...(19): siRNA sense strand
ccagugaugcgcaguuugu

SEQ ID NO: 1081031 - RNA, 19 nt, Homo sapiens
  misc_RNA (1)...(19): siRNA sense strand
gcucucuguugaagacaug

SEQ ID NO: 1081032 - RNA, 19 nt, Homo sapiens
  misc_RNA (1)...(19): siRNA sense strand
cuaauaggcccaagguaca

SEQ ID NO: 1081033 - RNA, 19 nt, Homo sapiens
  misc_RNA (1)...(19): siRNA sense strand
uuauaggaauggcaagugu

SEQ ID NO: 1081034 - RNA, 19 nt, Homo sapiens
  misc_RNA (1)...(19): siRNA sense strand
ucaccaagacagauuagau

SEQ ID NO: 1081035 - RNA, 19 nt, Homo sapiens
  misc_RNA (1)...(19): siRNA sense strand
gaauuuauugaccagaugu

SEQ ID NO: 1081036 - RNA, 19 nt, Homo sapiens
  misc_RNA (1)...(19): siRNA sense strand
gggacauuaccaucaaauu

SEQ ID NO: 1081037 - RNA, 19 nt, Homo sapiens
  misc_RNA (1)...(19): siRNA sense strand
gaaaccucaccaagacaga

SEQ ID NO: 1081038 - RNA, 19 nt, Homo sapiens
  misc_RNA (1)...(19): siRNA sense strand
cugaugcucuacacaagga

SEQ ID NO: 1081039 - RNA, 19 nt, Homo sapiens
  misc_RNA (1)...(19): siRNA sense strand
caaauggaggauuggauca

SEQ ID NO: 1081040 - RNA, 19 nt, Homo sapiens
  misc_RNA (1)...(19): siRNA sense strand
gaugcgcaguuuguugaug

SEQ ID NO: 1081041 - RNA, 19 nt, Homo sapiens
  misc_RNA (1)...(19): siRNA sense strand
caugaacccaccacauuuc

SEQ ID NO: 1081042 - RNA, 19 nt, Homo sapiens
  misc_RNA (1)...(19): siRNA sense strand
caagguacaagcucaggau

SEQ ID NO: 1081043 - RNA, 19 nt, Homo sapiens
  misc_RNA (1)...(19): siRNA sense strand
cagcagcuuucccuguuga

SEQ ID NO: 1081044 - RNA, 19 nt, Homo sapiens
  misc_RNA (1)...(19): siRNA sense strand
caacugcagcucuccauca

SEQ ID NO: 1081045 - RNA, 19 nt, Homo sapiens
  misc_RNA (1)...(19): siRNA sense strand
cugaauggaugcugcagau

SEQ ID NO: 1081046 - RNA, 19 nt, Homo sapiens
  misc_RNA (1)...(19): siRNA sense strand
gagagccgccugcuugagu

SEQ ID NO: 1081047 - RNA, 19 nt, Homo sapiens
  misc_RNA (1)...(19): siRNA sense strand
uccagcagcuuucccuguu

SEQ ID NO: 1081048 - RNA, 19 nt, Homo sapiens
  misc_RNA (1)...(19): siRNA sense strand
ccagcagcuuucccuguug

SEQ ID NO: 1081049 - RNA, 19 nt, Homo sapiens
  misc_RNA (1)...(19): siRNA sense strand
cacuguguccggcaacaua

SEQ ID NO: 1081050 - RNA, 19 nt, Homo sapiens
  misc_RNA (1)...(19): siRNA sense strand
ccggcaacauacugacuau

SEQ ID NO: 1081051 - RNA, 19 nt, Homo sapiens
  misc_RNA (1)...(19): siRNA sense strand
cagcuuucccuguugaugu

SEQ ID NO: 1081052 - RNA, 19 nt, Homo sapiens
  misc_RNA (1)...(19): siRNA sense strand
gccgccugcuugaguucua

SEQ ID NO: 1081053 - RNA, 19 nt, Homo sapiens
  misc_RNA (1)...(19): siRNA sense strand
agagccgccugcuugaguu

SEQ ID NO: 1081054 - RNA, 19 nt, Homo sapiens
  misc_RNA (1)...(19): siRNA sense strand
ugacaaggaucaacaauuu

SEQ ID NO: 1081055 - RNA, 19 nt, Homo sapiens
  misc_RNA (1)...(19): siRNA sense strand
uacccuaucuggcuuauua

SEQ ID NO: 1081056 - RNA, 19 nt, Homo sapiens
  misc_RNA (1)...(19): siRNA sense strand
ggacugaacugaagagacu

SEQ ID NO: 1081057 - RNA, 19 nt, Homo sapiens
  misc_RNA (1)...(19): siRNA sense strand
ucaaugaccugcacaacuu

SEQ ID NO: 1081058 - RNA, 19 nt, Homo sapiens
  misc_RNA (1)...(19): siRNA sense strand
ccgaagaggucccaagauu

SEQ ID NO: 1081059 - RNA, 19 nt, Homo sapiens
  misc_RNA (1)...(19): siRNA sense strand
ccucaaaccuaccuaauca

SEQ ID NO: 1081060 - RNA, 19 nt, Homo sapiens
  misc_RNA (1)...(19): siRNA sense strand
gaacugaagagacucaaug

SEQ ID NO: 1081061 - RNA, 19 nt, Homo sapiens
  misc_RNA (1)...(19): siRNA sense strand
uggcauagcuugcgugugu

SEQ ID NO: 1081062 - RNA, 19 nt, Homo sapiens
  misc_RNA (1)...(19): siRNA sense strand
ggaaugcgccagauauaug

SEQ ID NO: 1081063 - RNA, 19 nt, Homo sapiens
  misc_RNA (1)...(19): siRNA sense strand
aaaccuaccuaaucauaug

SEQ ID NO: 1081064 - RNA, 19 nt, Homo sapiens
  misc_RNA (1)...(19): siRNA sense strand
gaaccuauuuguagugaac

SEQ ID NO: 1081065 - RNA, 19 nt, Homo sapiens
  misc_RNA (1)...(19): siRNA sense strand
gaagaggucccaagauucu

SEQ ID NO: 1081066 - RNA, 19 nt, Homo sapiens
  misc_RNA (1)...(19): siRNA sense strand
gaucugccacuauuggaua

SEQ ID NO: 1081067 - RNA, 19 nt, Homo sapiens
  misc_RNA (1)...(19): siRNA sense strand
ggagauuuguuaagaagag

SEQ ID NO: 1081068 - RNA, 19 nt, Homo sapiens
  misc_RNA (1)...(19): siRNA sense strand
cauggaacccagagacuua

SEQ ID NO: 1081069 - RNA, 19 nt, Homo sapiens
  misc_RNA (1)...(19): siRNA sense strand
ucaaaccuaccuaaucaua

SEQ ID NO: 1081070 - RNA, 19 nt, Homo sapiens
  misc_RNA (1)...(19): siRNA sense strand
gcagaugcguuacccuauc

SEQ ID NO: 1081071 - RNA, 19 nt, Homo sapiens
  misc_RNA (1)...(19): siRNA sense strand
gauaucaaggcauugcaua

SEQ ID NO: 1081072 - RNA, 19 nt, Homo sapiens
  misc_RNA (1)...(19): siRNA sense strand
ccacgaauguagccucugu

SEQ ID NO: 1081073 - RNA, 19 nt, Homo sapiens
  misc_RNA (1)...(19): siRNA sense strand
agaaagaggcugagaguca

SEQ ID NO: 1081074 - RNA, 19 nt, Homo sapiens
  misc_RNA (1)...(19): siRNA sense strand
ucauaugggucauuaccaa

SEQ ID NO: 1081075 - RNA, 19 nt, Homo sapiens
  misc_RNA (1)...(19): siRNA sense strand
augcggagcuacuguguuu

SEQ ID NO: 1081076 - RNA, 19 nt, Homo sapiens
  misc_RNA (1)...(19): siRNA sense strand
gaguuguccuggucaucua

SEQ ID NO: 1081077 - RNA, 19 nt, Homo sapiens
  misc_RNA (1)...(19): siRNA sense strand
gugcugcugcuccucauua

SEQ ID NO: 1081078 - RNA, 19 nt, Homo sapiens
  misc_RNA (1)...(19): siRNA sense strand
ggaccuuccuccuccaaag

SEQ ID NO: 1081079 - RNA, 19 nt, Homo sapiens
  misc_RNA (1)...(19): siRNA sense strand
ucaaggcauugcauaagga

SEQ ID NO: 1081080 - RNA, 19 nt, Homo sapiens
  misc_RNA (1)...(19): siRNA sense strand
cuacuguguuugagacuga

SEQ ID NO: 1081081 - RNA, 19 nt, Homo sapiens
  misc_RNA (1)...(19): siRNA sense strand
gacgguaccagcauuagaa

SEQ ID NO: 1081082 - RNA, 19 nt, Homo sapiens
  misc_RNA (1)...(19): siRNA sense strand
ucaacaauuucaugaugga

SEQ ID NO: 1081083 - RNA, 19 nt, Homo sapiens
  misc_RNA (1)...(19): siRNA sense strand
cacagaaccacacauacua

SEQ ID NO: 1081084 - RNA, 19 nt, Homo sapiens
  misc_RNA (1)...(19): siRNA sense strand
ccaauuguguuuccaccau

SEQ ID NO: 1081085 - RNA, 19 nt, Homo sapiens
  misc_RNA (1)...(19): siRNA sense strand
ucucucuacuggucacaua

SEQ ID NO: 1081086 - RNA, 19 nt, Homo sapiens
  misc_RNA (1)...(19): siRNA sense strand
gugaaccuauuuguaguga

SEQ ID NO: 1081087 - RNA, 19 nt, Homo sapiens
  misc_RNA (1)...(19): siRNA sense strand
uauuggauaucaaggcauu

SEQ ID NO: 1081088 - RNA, 19 nt, Homo sapiens
  misc_RNA (1)...(19): siRNA sense strand
gugcgacuguaucugguuu

SEQ ID NO: 1081089 - RNA, 19 nt, Homo sapiens
  misc_RNA (1)...(19): siRNA sense strand
gcggagcuacuguguuuga

SEQ ID NO: 1081090 - RNA, 19 nt, Homo sapiens
  misc_RNA (1)...(19): siRNA sense strand
uaugggucauuaccaauug

SEQ ID NO: 1081091 - RNA, 19 nt, Homo sapiens
  misc_RNA (1)...(19): siRNA sense strand
aucaagaucugccacuauu

SEQ ID NO: 1081092 - RNA, 19 nt, Homo sapiens
  misc_RNA (1)...(19): siRNA sense strand
caacgacgggcaccuggaa

SEQ ID NO: 1081093 - RNA, 19 nt, Homo sapiens
  misc_RNA (1)...(19): siRNA sense strand
guuugagacugaugugaug

SEQ ID NO: 1081094 - RNA, 19 nt, Homo sapiens
  misc_RNA (1)...(19): siRNA sense strand
guacaucgggcucguccuu

SEQ ID NO: 1081095 - RNA, 19 nt, Homo sapiens
  misc_RNA (1)...(19): siRNA sense strand
gucauuaccaauuguguuu

SEQ ID NO: 1081096 - RNA, 19 nt, Homo sapiens
  misc_RNA (1)...(19): siRNA sense strand
gcucuucucucugcuuugg

SEQ ID NO: 1081097 - RNA, 19 nt, Homo sapiens
  misc_RNA (1)...(19): siRNA sense strand
ccucaaccuuuccaucaug

SEQ ID NO: 1081098 - RNA, 19 nt, Homo sapiens
  misc_RNA (1)...(19): siRNA sense strand
agaacacccugauguccuu

SEQ ID NO: 1081099 - RNA, 19 nt, Homo sapiens
  misc_RNA (1)...(19): siRNA sense strand
acauaugcauccuugcuau

SEQ ID NO: 1081100 - RNA, 19 nt, Homo sapiens
  misc_RNA (1)...(19): siRNA sense strand
caaaccuaccuaaucauau

SEQ ID NO: 1081101 - RNA, 19 nt, Homo sapiens
  misc_RNA (1)...(19): siRNA sense strand
ccacagaaccacacauacu

SEQ ID NO: 1081102 - RNA, 19 nt, Homo sapiens
  misc_RNA (1)...(19): siRNA sense strand
ucagacgguaccagcauua

SEQ ID NO: 1081103 - RNA, 19 nt, Homo sapiens
  misc_RNA (1)...(19): siRNA sense strand
gagauuuguuaagaagaga

SEQ ID NO: 1081104 - RNA, 19 nt, Homo sapiens
  misc_RNA (1)...(19): siRNA sense strand
caagaucugccacuauugg

SEQ ID NO: 1081105 - RNA, 19 nt, Homo sapiens
  misc_RNA (1)...(19): siRNA sense strand
cgaagaggucccaagauuc

SEQ ID NO: 1081106 - RNA, 19 nt, Homo sapiens
  misc_RNA (1)...(19): siRNA sense strand
gagaggccccaguuucuua

SEQ ID NO: 1081107 - RNA, 19 nt, Homo sapiens
  misc_RNA (1)...(19): siRNA sense strand
cugcagcccucaaccuuuc

SEQ ID NO: 1081108 - RNA, 19 nt, Homo sapiens
  misc_RNA (1)...(19): siRNA sense strand
acaaggaucaacaauuuca

SEQ ID NO: 1081109 - RNA, 19 nt, Homo sapiens
  misc_RNA (1)...(19): siRNA sense strand
aaggagauuuguuaagaag

SEQ ID NO: 1081110 - RNA, 19 nt, Homo sapiens
  misc_RNA (1)...(19): siRNA sense strand
aggcauugcauaaggauaa

SEQ ID NO: 1081111 - RNA, 19 nt, Homo sapiens
  misc_RNA (1)...(19): siRNA sense strand
gaacggagaggccccaguu

SEQ ID NO: 1081112 - RNA, 19 nt, Homo sapiens
  misc_RNA (1)...(19): siRNA sense strand
aggauaaugucucggugaa

SEQ ID NO: 1081113 - RNA, 19 nt, Homo sapiens
  misc_RNA (1)...(19): siRNA sense strand
gcccucaaccuuuccauca

SEQ ID NO: 1081114 - RNA, 19 nt, Homo sapiens
  misc_RNA (1)...(19): siRNA sense strand
uggauucggucaccaccaa

SEQ ID NO: 1081115 - RNA, 19 nt, Homo sapiens
  misc_RNA (1)...(19): siRNA sense strand
gaaugcgccagauauaugg

SEQ ID NO: 1081116 - RNA, 19 nt, Homo sapiens
  misc_RNA (1)...(19): siRNA sense strand
ucccugagcuggcuguaca

SEQ ID NO: 1081117 - RNA, 19 nt, Homo sapiens
  misc_RNA (1)...(19): siRNA sense strand
ggucauuaccaauuguguu

SEQ ID NO: 1081118 - RNA, 19 nt, Homo sapiens
  misc_RNA (1)...(19): siRNA sense strand
cagcaggaguggcauagcu

SEQ ID NO: 1081119 - RNA, 19 nt, Homo sapiens
  misc_RNA (1)...(19): siRNA sense strand
gggcucguccuucucaaug

SEQ ID NO: 1081120 - RNA, 19 nt, Homo sapiens
  misc_RNA (1)...(19): siRNA sense strand
gaaaacuggcuuagaaaca

SEQ ID NO: 1081121 - RNA, 19 nt, Homo sapiens
  misc_RNA (1)...(19): siRNA sense strand
cuaucaagaucugccacua

SEQ ID NO: 1081122 - RNA, 19 nt, Homo sapiens
  misc_RNA (1)...(19): siRNA sense strand
ugccuccacugccuguaua

SEQ ID NO: 1081123 - RNA, 19 nt, Homo sapiens
  misc_RNA (1)...(19): siRNA sense strand
cagcaggaccacgaaugua

SEQ ID NO: 1081124 - RNA, 19 nt, Homo sapiens
  misc_RNA (1)...(19): siRNA sense strand
uuccucaccuuccuccuuu

SEQ ID NO: 1081125 - RNA, 19 nt, Homo sapiens
  misc_RNA (1)...(19): siRNA sense strand
ccagagagaggaugcaaac

SEQ ID NO: 1081126 - RNA, 19 nt, Homo sapiens
  misc_RNA (1)...(19): siRNA sense strand
uaucaagaucugccacuau

SEQ ID NO: 1081127 - RNA, 19 nt, Homo sapiens
  misc_RNA (1)...(19): siRNA sense strand
gcugcagcccucaaccuuu

SEQ ID NO: 1081128 - RNA, 19 nt, Homo sapiens
  misc_RNA (1)...(19): siRNA sense strand
gucagacgguaccagcauu

SEQ ID NO: 1081129 - RNA, 19 nt, Homo sapiens
  misc_RNA (1)...(19): siRNA sense strand
ggauccugguuccuagaga

SEQ ID NO: 1081130 - RNA, 19 nt, Homo sapiens
  misc_RNA (1)...(19): siRNA sense strand
ggagcuacuguguuugaga

SEQ ID NO: 1081131 - RNA, 19 nt, Homo sapiens
  misc_RNA (1)...(19): siRNA sense strand
gaaugcggagcuacugugu

SEQ ID NO: 1081132 - RNA, 19 nt, Homo sapiens
  misc_RNA (1)...(19): siRNA sense strand
uggcucuucucucugcuuu

SEQ ID NO: 1081133 - RNA, 19 nt, Homo sapiens
  misc_RNA (1)...(19): siRNA sense strand
caaccuuuccaucauguuc

SEQ ID NO: 1081134 - RNA, 19 nt, Homo sapiens
  misc_RNA (1)...(19): siRNA sense strand
cgaauguagccucuguauu

SEQ ID NO: 1081135 - RNA, 19 nt, Homo sapiens
  misc_RNA (1)...(19): siRNA sense strand
ggaguuguccuggucaucu

SEQ ID NO: 1081136 - RNA, 19 nt, Homo sapiens
  misc_RNA (1)...(19): siRNA sense strand
gacaaggaucaacaauuuc

SEQ ID NO: 1081137 - RNA, 19 nt, Homo sapiens
  misc_RNA (1)...(19): siRNA sense strand
agggaaaacuggcuuagaa

SEQ ID NO: 1081138 - RNA, 19 nt, Homo sapiens
  misc_RNA (1)...(19): siRNA sense strand
gagacugugcugaaugcaa

SEQ ID NO: 1081139 - RNA, 19 nt, Homo sapiens
  misc_RNA (1)...(19): siRNA sense strand
gguaccagcauuagaagag

SEQ ID NO: 1081140 - RNA, 19 nt, Homo sapiens
  misc_RNA (1)...(19): siRNA sense strand
ggcucguccuucucaauga

SEQ ID NO: 1081141 - RNA, 19 nt, Homo sapiens
  misc_RNA (1)...(19): siRNA sense strand
ucggugaaccuauuuguag

SEQ ID NO: 1081142 - RNA, 19 nt, Homo sapiens
  misc_RNA (1)...(19): siRNA sense strand
gaugaagaucgggcuaaug

SEQ ID NO: 1081143 - RNA, 19 nt, Homo sapiens
  misc_RNA (1)...(19): siRNA sense strand
cugauguccuugcggaaga

SEQ ID NO: 1081144 - RNA, 19 nt, Homo sapiens
  misc_RNA (1)...(19): siRNA sense strand
gaccugcacaacuucaaug

SEQ ID NO: 1081145 - RNA, 19 nt, Homo sapiens
  misc_RNA (1)...(19): siRNA sense strand
caccgaagaggucccaaga

SEQ ID NO: 1081146 - RNA, 19 nt, Homo sapiens
  misc_RNA (1)...(19): siRNA sense strand
cgucagggaggcaacagaa

SEQ ID NO: 1081147 - RNA, 19 nt, Homo sapiens
  misc_RNA (1)...(19): siRNA sense strand
acagaaccacacauacuau

SEQ ID NO: 1081148 - RNA, 19 nt, Homo sapiens
  misc_RNA (1)...(19): siRNA sense strand
cauaugcauccuugcuauu

SEQ ID NO: 1081149 - RNA, 19 nt, Homo sapiens
  misc_RNA (1)...(19): siRNA sense strand
cacauaugcauccuugcua

SEQ ID NO: 1081150 - RNA, 19 nt, Homo sapiens
  misc_RNA (1)...(19): siRNA sense strand
cauuggagacugugcugaa

SEQ ID NO: 1081151 - RNA, 19 nt, Homo sapiens
  misc_RNA (1)...(19): siRNA sense strand
augaagaucgggcuaaugu

SEQ ID NO: 1081152 - RNA, 19 nt, Homo sapiens
  misc_RNA (1)...(19): siRNA sense strand
agaugaagaucgggcuaau

SEQ ID NO: 1081153 - RNA, 19 nt, Homo sapiens
  misc_RNA (1)...(19): siRNA sense strand
cagaugaagaucgggcuaa

SEQ ID NO: 1081154 - RNA, 19 nt, Homo sapiens
  misc_RNA (1)...(19): siRNA sense strand
caacauacauccauaauug

SEQ ID NO: 1081155 - RNA, 19 nt, Homo sapiens
  misc_RNA (1)...(19): siRNA sense strand
gaaugaagaucgauaguaa

SEQ ID NO: 1081156 - RNA, 19 nt, Homo sapiens
  misc_RNA (1)...(19): siRNA sense strand
gcacagguguagcaaguaa

SEQ ID NO: 1081157 - RNA, 19 nt, Homo sapiens
  misc_RNA (1)...(19): siRNA sense strand
gugcacauuuggagaauua

SEQ ID NO: 1081158 - RNA, 19 nt, Homo sapiens
  misc_RNA (1)...(19): siRNA sense strand
gcaguugggugauaaugaa

SEQ ID NO: 1081159 - RNA, 19 nt, Homo sapiens
  misc_RNA (1)...(19): siRNA sense strand
ggagaauuaugcuuugaaa

SEQ ID NO: 1081160 - RNA, 19 nt, Homo sapiens
  misc_RNA (1)...(19): siRNA sense strand
acaaaaggcucucaaguua

SEQ ID NO: 1081161 - RNA, 19 nt, Homo sapiens
  misc_RNA (1)...(19): siRNA sense strand
gcagugcuuugcaguauga

SEQ ID NO: 1081162 - RNA, 19 nt, Homo sapiens
  misc_RNA (1)...(19): siRNA sense strand
ggaaugaagaucgauagua

SEQ ID NO: 1081163 - RNA, 19 nt, Homo sapiens
  misc_RNA (1)...(19): siRNA sense strand
gcacugcuguccagaaucu

SEQ ID NO: 1081164 - RNA, 19 nt, Homo sapiens
  misc_RNA (1)...(19): siRNA sense strand
caaaguuaauggaucaguu

SEQ ID NO: 1081165 - RNA, 19 nt, Homo sapiens
  misc_RNA (1)...(19): siRNA sense strand
guuaauggaucaguuagaa

SEQ ID NO: 1081166 - RNA, 19 nt, Homo sapiens
  misc_RNA (1)...(19): siRNA sense strand
gcucagaaguacugcaaau

SEQ ID NO: 1081167 - RNA, 19 nt, Homo sapiens
  misc_RNA (1)...(19): siRNA sense strand
caucaucaucuucaacuua

SEQ ID NO: 1081168 - RNA, 19 nt, Homo sapiens
  misc_RNA (1)...(19): siRNA sense strand
cagaaguacugcaaauaug

SEQ ID NO: 1081169 - RNA, 19 nt, Homo sapiens
  misc_RNA (1)...(19): siRNA sense strand
ccagauggaaggcaacaua

SEQ ID NO: 1081170 - RNA, 19 nt, Homo sapiens
  misc_RNA (1)...(19): siRNA sense strand
gacuauaccugccauugau

SEQ ID NO: 1081171 - RNA, 19 nt, Homo sapiens
  misc_RNA (1)...(19): siRNA sense strand
gcuuauuacugucguuuau

SEQ ID NO: 1081172 - RNA, 19 nt, Homo sapiens
  misc_RNA (1)...(19): siRNA sense strand
gcaacauacauccauaauu

SEQ ID NO: 1081173 - RNA, 19 nt, Homo sapiens
  misc_RNA (1)...(19): siRNA sense strand
gagacccugugguggcuua

SEQ ID NO: 1081174 - RNA, 19 nt, Homo sapiens
  misc_RNA (1)...(19): siRNA sense strand
uuggagaacucacugauga

SEQ ID NO: 1081175 - RNA, 19 nt, Homo sapiens
  misc_RNA (1)...(19): siRNA sense strand
caacuauacuggaauacag

SEQ ID NO: 1081176 - RNA, 19 nt, Homo sapiens
  misc_RNA (1)...(19): siRNA sense strand
gaagcuauuacucaagaaa

SEQ ID NO: 1081177 - RNA, 19 nt, Homo sapiens
  misc_RNA (1)...(19): siRNA sense strand
cagcacagguguagcaagu

SEQ ID NO: 1081178 - RNA, 19 nt, Homo sapiens
  misc_RNA (1)...(19): siRNA sense strand
ggagaacucacugaugaaa

SEQ ID NO: 1081179 - RNA, 19 nt, Homo sapiens
  misc_RNA (1)...(19): siRNA sense strand
ggaaguaugccagauggaa

SEQ ID NO: 1081180 - RNA, 19 nt, Homo sapiens
  misc_RNA (1)...(19): siRNA sense strand
ugauagaugucauaacagu

SEQ ID NO: 1081181 - RNA, 19 nt, Homo sapiens
  misc_RNA (1)...(19): siRNA sense strand
ucagaaguacugcaaauau

SEQ ID NO: 1081182 - RNA, 19 nt, Homo sapiens
  misc_RNA (1)...(19): siRNA sense strand
caacucagccaucaucauc

SEQ ID NO: 1081183 - RNA, 19 nt, Homo sapiens
  misc_RNA (1)...(19): siRNA sense strand
aagaagcaguugggugaua

SEQ ID NO: 1081184 - RNA, 19 nt, Homo sapiens
  misc_RNA (1)...(19): siRNA sense strand
gaucaaguccuucuauacu

SEQ ID NO: 1081185 - RNA, 19 nt, Homo sapiens
  misc_RNA (1)...(19): siRNA sense strand
agaagcaguugggugauaa

SEQ ID NO: 1081186 - RNA, 19 nt, Homo sapiens
  misc_RNA (1)...(19): siRNA sense strand
aggcaacuauacuggaaua

SEQ ID NO: 1081187 - RNA, 19 nt, Homo sapiens
  misc_RNA (1)...(19): siRNA sense strand
ucaggcaacuauacuggaa

SEQ ID NO: 1081188 - RNA, 19 nt, Homo sapiens
  misc_RNA (1)...(19): siRNA sense strand
gaagaucgauaguaaaacu

SEQ ID NO: 1081189 - RNA, 19 nt, Homo sapiens
  misc_RNA (1)...(19): siRNA sense strand
gcaaugcagacuggaauga

SEQ ID NO: 1081190 - RNA, 19 nt, Homo sapiens
  misc_RNA (1)...(19): siRNA sense strand
ccagaagacuuugcuagag

SEQ ID NO: 1081191 - RNA, 19 nt, Homo sapiens
  misc_RNA (1)...(19): siRNA sense strand
caacuuaugacccaagcaa

SEQ ID NO: 1081192 - RNA, 19 nt, Homo sapiens
  misc_RNA (1)...(19): siRNA sense strand
ugugguggcuuauuacugu

SEQ ID NO: 1081193 - RNA, 19 nt, Homo sapiens
  misc_RNA (1)...(19): siRNA sense strand
acccugugguggcuuauua

SEQ ID NO: 1081194 - RNA, 19 nt, Homo sapiens
  misc_RNA (1)...(19): siRNA sense strand
gacgacaggcagagaauga

SEQ ID NO: 1081195 - RNA, 19 nt, Homo sapiens
  misc_RNA (1)...(19): siRNA sense strand
ucaagagcauacagcauca

SEQ ID NO: 1081196 - RNA, 19 nt, Homo sapiens
  misc_RNA (1)...(19): siRNA sense strand
gauagaugucauaacagua

SEQ ID NO: 1081197 - RNA, 19 nt, Homo sapiens
  misc_RNA (1)...(19): siRNA sense strand
caaccuacuccacagacua

SEQ ID NO: 1081198 - RNA, 19 nt, Homo sapiens
  misc_RNA (1)...(19): siRNA sense strand
gaaggcaacauacauccau

SEQ ID NO: 1081199 - RNA, 19 nt, Homo sapiens
  misc_RNA (1)...(19): siRNA sense strand
uccugaaugucgcaaauuu

SEQ ID NO: 1081200 - RNA, 19 nt, Homo sapiens
  misc_RNA (1)...(19): siRNA sense strand
gagcauacagcaucaucug

SEQ ID NO: 1081201 - RNA, 19 nt, Homo sapiens
  misc_RNA (1)...(19): siRNA sense strand
gcaagucuuuugauagaug

SEQ ID NO: 1081202 - RNA, 19 nt, Homo sapiens
  misc_RNA (1)...(19): siRNA sense strand
cagccucucugcccacuca

SEQ ID NO: 1081203 - RNA, 19 nt, Homo sapiens
  misc_RNA (1)...(19): siRNA sense strand
acagguguagcaaguaaua

SEQ ID NO: 1081204 - RNA, 19 nt, Homo sapiens
  misc_RNA (1)...(19): siRNA sense strand
auagugggcugugcacauu

SEQ ID NO: 1081205 - RNA, 19 nt, Homo sapiens
  misc_RNA (1)...(19): siRNA sense strand
uggcagugcuuugcaguau

SEQ ID NO: 1081206 - RNA, 19 nt, Homo sapiens
  misc_RNA (1)...(19): siRNA sense strand
gagcucagaaguacugcaa

SEQ ID NO: 1081207 - RNA, 19 nt, Homo sapiens
  misc_RNA (1)...(19): siRNA sense strand
cauaacaguauuuggagaa

SEQ ID NO: 1081208 - RNA, 19 nt, Homo sapiens
  misc_RNA (1)...(19): siRNA sense strand
gcacauuuggagaauuaug

SEQ ID NO: 1081209 - RNA, 19 nt, Homo sapiens
  misc_RNA (1)...(19): siRNA sense strand
gcaacuauacuggaauaca

SEQ ID NO: 1081210 - RNA, 19 nt, Homo sapiens
  misc_RNA (1)...(19): siRNA sense strand
ggaauugaagaagauaaug

SEQ ID NO: 1081211 - RNA, 19 nt, Homo sapiens
  misc_RNA (1)...(19): siRNA sense strand
gauggaaggcaacauacau

SEQ ID NO: 1081212 - RNA, 19 nt, Homo sapiens
  misc_RNA (1)...(19): siRNA sense strand
ugucauaacaguauuugga

SEQ ID NO: 1081213 - RNA, 19 nt, Homo sapiens
  misc_RNA (1)...(19): siRNA sense strand
gcuggacgauuucacaaaa

SEQ ID NO: 1081214 - RNA, 19 nt, Homo sapiens
  misc_RNA (1)...(19): siRNA sense strand
augaucaaguccuucuaua

SEQ ID NO: 1081215 - RNA, 19 nt, Homo sapiens
  misc_RNA (1)...(19): siRNA sense strand
agacuauaccugccauuga

SEQ ID NO: 1081216 - RNA, 19 nt, Homo sapiens
  misc_RNA (1)...(19): siRNA sense strand
uaauacaccagcagaagug

SEQ ID NO: 1081217 - RNA, 19 nt, Homo sapiens
  misc_RNA (1)...(19): siRNA sense strand
agacuggaaugaagaucga

SEQ ID NO: 1081218 - RNA, 19 nt, Homo sapiens
  misc_RNA (1)...(19): siRNA sense strand
augaagcuauuacucaaga

SEQ ID NO: 1081219 - RNA, 19 nt, Homo sapiens
  misc_RNA (1)...(19): siRNA sense strand
aaggcaacauacauccaua

SEQ ID NO: 1081220 - RNA, 19 nt, Homo sapiens
  misc_RNA (1)...(19): siRNA sense strand
uaguaaaacuccugaaugu

SEQ ID NO: 1081221 - RNA, 19 nt, Homo sapiens
  misc_RNA (1)...(19): siRNA sense strand
gcacaguucaagagcauac

SEQ ID NO: 1081222 - RNA, 19 nt, Homo sapiens
  misc_RNA (1)...(19): siRNA sense strand
gcugugcacauuuggagaa

SEQ ID NO: 1081223 - RNA, 19 nt, Homo sapiens
  misc_RNA (1)...(19): siRNA sense strand
ucacagcacagguguagca

SEQ ID NO: 1081224 - RNA, 19 nt, Homo sapiens
  misc_RNA (1)...(19): siRNA sense strand
gugaaacacaggaaguaug

SEQ ID NO: 1081225 - RNA, 19 nt, Homo sapiens
  misc_RNA (1)...(19): siRNA sense strand
gggugauaaugaagcuauu

SEQ ID NO: 1081226 - RNA, 19 nt, Homo sapiens
  misc_RNA (1)...(19): siRNA sense strand
gcuaauacaccagcagaag

SEQ ID NO: 1081227 - RNA, 19 nt, Homo sapiens
  misc_RNA (1)...(19): siRNA sense strand
acucagccaucaucaucuu

SEQ ID NO: 1081228 - RNA, 19 nt, Homo sapiens
  misc_RNA (1)...(19): siRNA sense strand
caugaucaaguccuucuau

SEQ ID NO: 1081229 - RNA, 19 nt, Homo sapiens
  misc_RNA (1)...(19): siRNA sense strand
ccgcacaguucaagagcau

SEQ ID NO: 1081230 - RNA, 19 nt, Homo sapiens
  misc_RNA (1)...(19): siRNA sense strand
gugcuuugcaguaugaaga

SEQ ID NO: 1081231 - RNA, 19 nt, Homo sapiens
  misc_RNA (1)...(19): siRNA sense strand
gcgcacgcuccagcuaaua

SEQ ID NO: 1081232 - RNA, 19 nt, Homo sapiens
  misc_RNA (1)...(19): siRNA sense strand
gaugucauaacaguauuug

SEQ ID NO: 1081233 - RNA, 19 nt, Homo sapiens
  misc_RNA (1)...(19): siRNA sense strand
caaugcagacuggaaugaa

SEQ ID NO: 1081234 - RNA, 19 nt, Homo sapiens
  misc_RNA (1)...(19): siRNA sense strand
agaacucacugaugaaaau

SEQ ID NO: 1081235 - RNA, 19 nt, Homo sapiens
  misc_RNA (1)...(19): siRNA sense strand
ugaagcuauuacucaagaa

SEQ ID NO: 1081236 - RNA, 19 nt, Homo sapiens
  misc_RNA (1)...(19): siRNA sense strand
ggcagugcuuugcaguaug

SEQ ID NO: 1081237 - RNA, 19 nt, Homo sapiens
  misc_RNA (1)...(19): siRNA sense strand
ucagccaacucagccauca

SEQ ID NO: 1081238 - RNA, 19 nt, Homo sapiens
  misc_RNA (1)...(19): siRNA sense strand
guaugcagacaaugaagau

SEQ ID NO: 1081239 - RNA, 19 nt, Homo sapiens
  misc_RNA (1)...(19): siRNA sense strand
ugaaacacaggaaguaugc

SEQ ID NO: 1081240 - RNA, 19 nt, Homo sapiens
  misc_RNA (1)...(19): siRNA sense strand
gaagcaguugggugauaau

SEQ ID NO: 1081241 - RNA, 19 nt, Homo sapiens
  misc_RNA (1)...(19): siRNA sense strand
ggcaacauacauccauaau

SEQ ID NO: 1081242 - RNA, 19 nt, Homo sapiens
  misc_RNA (1)...(19): siRNA sense strand
cugcaagucuuuugauaga

SEQ ID NO: 1081243 - RNA, 19 nt, Homo sapiens
  misc_RNA (1)...(19): siRNA sense strand
gaaguacugcaaauaugcu

SEQ ID NO: 1081244 - RNA, 19 nt, Homo sapiens
  misc_RNA (1)...(19): siRNA sense strand
cccagaagacuuugcuaga

SEQ ID NO: 1081245 - RNA, 19 nt, Homo sapiens
  misc_RNA (1)...(19): siRNA sense strand
gugcgcacgcuccagcuaa

SEQ ID NO: 1081246 - RNA, 19 nt, Homo sapiens
  misc_RNA (1)...(19): siRNA sense strand
uuuggagaauuaugcuuug

SEQ ID NO: 1081247 - RNA, 19 nt, Homo sapiens
  misc_RNA (1)...(19): siRNA sense strand
uuugcaguaugaagaugua

SEQ ID NO: 1081248 - RNA, 19 nt, Homo sapiens
  misc_RNA (1)...(19): siRNA sense strand
cuagagcucagaaguacug

SEQ ID NO: 1081249 - RNA, 19 nt, Homo sapiens
  misc_RNA (1)...(19): siRNA sense strand
uugcuagagcucagaagua

SEQ ID NO: 1081250 - RNA, 19 nt, Homo sapiens
  misc_RNA (1)...(19): siRNA sense strand
ccaucaucaucuucaacuu

SEQ ID NO: 1081251 - RNA, 19 nt, Homo sapiens
  misc_RNA (1)...(19): siRNA sense strand
cuaauacaccagcagaagu

SEQ ID NO: 1081252 - RNA, 19 nt, Homo sapiens
  misc_RNA (1)...(19): siRNA sense strand
agugggcugugcacauuug

SEQ ID NO: 1081253 - RNA, 19 nt, Homo sapiens
  misc_RNA (1)...(19): siRNA sense strand
cagacuauaccugccauug

SEQ ID NO: 1081254 - RNA, 19 nt, Homo sapiens
  misc_RNA (1)...(19): siRNA sense strand
gcagaagaauggugaaaua

SEQ ID NO: 1081255 - RNA, 19 nt, Homo sapiens
  misc_RNA (1)...(19): siRNA sense strand
gggagaaguuuaucgauua

SEQ ID NO: 1081256 - RNA, 19 nt, Homo sapiens
  misc_RNA (1)...(19): siRNA sense strand
gaacuccucucuuguaaau

SEQ ID NO: 1081257 - RNA, 19 nt, Homo sapiens
  misc_RNA (1)...(19): siRNA sense strand
gaaagggucucaaacugaa

SEQ ID NO: 1081258 - RNA, 19 nt, Homo sapiens
  misc_RNA (1)...(19): siRNA sense strand
gagcuaaacuagaugaauu

SEQ ID NO: 1081259 - RNA, 19 nt, Homo sapiens
  misc_RNA (1)...(19): siRNA sense strand
gaacagaugcagagaauga

SEQ ID NO: 1081260 - RNA, 19 nt, Homo sapiens
  misc_RNA (1)...(19): siRNA sense strand
gauaacaacuugcaauuag

SEQ ID NO: 1081261 - RNA, 19 nt, Homo sapiens
  misc_RNA (1)...(19): siRNA sense strand
gaaagcaugucuucagaga

SEQ ID NO: 1081262 - RNA, 19 nt, Homo sapiens
  misc_RNA (1)...(19): siRNA sense strand
aaucaaagcuucaaacaga

SEQ ID NO: 1081263 - RNA, 19 nt, Homo sapiens
  misc_RNA (1)...(19): siRNA sense strand
ggauaaaugucguaaugaa

SEQ ID NO: 1081264 - RNA, 19 nt, Homo sapiens
  misc_RNA (1)...(19): siRNA sense strand
gaaauuggaagaacaacua

SEQ ID NO: 1081265 - RNA, 19 nt, Homo sapiens
  misc_RNA (1)...(19): siRNA sense strand
gaugcuggcucuucaaauu

SEQ ID NO: 1081266 - RNA, 19 nt, Homo sapiens
  misc_RNA (1)...(19): siRNA sense strand
gagaacagaugcagagaau

SEQ ID NO: 1081267 - RNA, 19 nt, Homo sapiens
  misc_RNA (1)...(19): siRNA sense strand
ugacagaaauggagaguau

SEQ ID NO: 1081268 - RNA, 19 nt, Homo sapiens
  misc_RNA (1)...(19): siRNA sense strand
gaacgucagcuuaucagua

SEQ ID NO: 1081269 - RNA, 19 nt, Homo sapiens
  misc_RNA (1)...(19): siRNA sense strand
cagguuagcugcugaauca

SEQ ID NO: 1081270 - RNA, 19 nt, Homo sapiens
  misc_RNA (1)...(19): siRNA sense strand
gaagcaguuucuuacuaua

SEQ ID NO: 1081271 - RNA, 19 nt, Homo sapiens
  misc_RNA (1)...(19): siRNA sense strand
gcugaggccuuaagugaaa

SEQ ID NO: 1081272 - RNA, 19 nt, Homo sapiens
  misc_RNA (1)...(19): siRNA sense strand
gcaauggaacgucagcuua

SEQ ID NO: 1081273 - RNA, 19 nt, Homo sapiens
  misc_RNA (1)...(19): siRNA sense strand
ccagugcccucaacaguaa

SEQ ID NO: 1081274 - RNA, 19 nt, Homo sapiens
  misc_RNA (1)...(19): siRNA sense strand
ugaagugccuguacugaaa

SEQ ID NO: 1081275 - RNA, 19 nt, Homo sapiens
  misc_RNA (1)...(19): siRNA sense strand
gaaaguggaauuagaugaa

SEQ ID NO: 1081276 - RNA, 19 nt, Homo sapiens
  misc_RNA (1)...(19): siRNA sense strand
ccaaguagaucaucagaag

SEQ ID NO: 1081277 - RNA, 19 nt, Homo sapiens
  misc_RNA (1)...(19): siRNA sense strand
gaagaccacccucaaagaa

SEQ ID NO: 1081278 - RNA, 19 nt, Homo sapiens
  misc_RNA (1)...(19): siRNA sense strand
aaauugagcugacagaaau

SEQ ID NO: 1081279 - RNA, 19 nt, Homo sapiens
  misc_RNA (1)...(19): siRNA sense strand
gaagaacaacuaagcagaa

SEQ ID NO: 1081280 - RNA, 19 nt, Homo sapiens
  misc_RNA (1)...(19): siRNA sense strand
guaugaaagucaaguauca

SEQ ID NO: 1081281 - RNA, 19 nt, Homo sapiens
  misc_RNA (1)...(19): siRNA sense strand
gaacuacaauacagacaag

SEQ ID NO: 1081282 - RNA, 19 nt, Homo sapiens
  misc_RNA (1)...(19): siRNA sense strand
agagaaagcucguguagca

SEQ ID NO: 1081283 - RNA, 19 nt, Homo sapiens
  misc_RNA (1)...(19): siRNA sense strand
ggaagugaaugaacuaaaa

SEQ ID NO: 1081284 - RNA, 19 nt, Homo sapiens
  misc_RNA (1)...(19): siRNA sense strand
guaaugaaaugaugaccau

SEQ ID NO: 1081285 - RNA, 19 nt, Homo sapiens
  misc_RNA (1)...(19): siRNA sense strand
aaaucaagaucuucaggua

SEQ ID NO: 1081286 - RNA, 19 nt, Homo sapiens
  misc_RNA (1)...(19): siRNA sense strand
aaaugcaccuggagaaauu

SEQ ID NO: 1081287 - RNA, 19 nt, Homo sapiens
  misc_RNA (1)...(19): siRNA sense strand
gcagauauaaucacaaauc

SEQ ID NO: 1081288 - RNA, 19 nt, Homo sapiens
  misc_RNA (1)...(19): siRNA sense strand
gaagauaacaacuugcaau

SEQ ID NO: 1081289 - RNA, 19 nt, Homo sapiens
  misc_RNA (1)...(19): siRNA sense strand
gcucaaagaggcugaagaa

SEQ ID NO: 1081290 - RNA, 19 nt, Homo sapiens
  misc_RNA (1)...(19): siRNA sense strand
ccagcgggcucuagauauu

SEQ ID NO: 1081291 - RNA, 19 nt, Homo sapiens
  misc_RNA (1)...(19): siRNA sense strand
agaugaagcuggauaacuu

SEQ ID NO: 1081292 - RNA, 19 nt, Homo sapiens
  misc_RNA (1)...(19): siRNA sense strand
uggaagauaacaccuauua

SEQ ID NO: 1081293 - RNA, 19 nt, Homo sapiens
  misc_RNA (1)...(19): siRNA sense strand
caaauugagcugacagaaa

SEQ ID NO: 1081294 - RNA, 19 nt, Homo sapiens
  misc_RNA (1)...(19): siRNA sense strand
ugaaagcacuaaaggugaa

SEQ ID NO: 1081295 - RNA, 19 nt, Homo sapiens
  misc_RNA (1)...(19): siRNA sense strand
gaaauggagaguaugaaga

SEQ ID NO: 1081296 - RNA, 19 nt, Homo sapiens
  misc_RNA (1)...(19): siRNA sense strand
gaaagucaaguaucaguca

SEQ ID NO: 1081297 - RNA, 19 nt, Homo sapiens
  misc_RNA (1)...(19): siRNA sense strand
gaaacugagagcuaaacua

SEQ ID NO: 1081298 - RNA, 19 nt, Homo sapiens
  misc_RNA (1)...(19): siRNA sense strand
ggaggcagauauaaucaca

SEQ ID NO: 1081299 - RNA, 19 nt, Homo sapiens
  misc_RNA (1)...(19): siRNA sense strand
gaaagcucguguagcaaau

SEQ ID NO: 1081300 - RNA, 19 nt, Homo sapiens
  misc_RNA (1)...(19): siRNA sense strand
gaaaugugugaaacucaua

SEQ ID NO: 1081301 - RNA, 19 nt, Homo sapiens
  misc_RNA (1)...(19): siRNA sense strand
ggauauaaccaccgcuaaa

SEQ ID NO: 1081302 - RNA, 19 nt, Homo sapiens
  misc_RNA (1)...(19): siRNA sense strand
gaaauugaaagcacuaaag

SEQ ID NO: 1081303 - RNA, 19 nt, Homo sapiens
  misc_RNA (1)...(19): siRNA sense strand
gaccaugacugagaguuau

SEQ ID NO: 1081304 - RNA, 19 nt, Homo sapiens
  misc_RNA (1)...(19): siRNA sense strand
gaagcuggauaacuuaaac

SEQ ID NO: 1081305 - RNA, 19 nt, Homo sapiens
  misc_RNA (1)...(19): siRNA sense strand
gaugaagcuggauaacuua

SEQ ID NO: 1081306 - RNA, 19 nt, Homo sapiens
  misc_RNA (1)...(19): siRNA sense strand
aagcaugucuucagagaug

SEQ ID NO: 1081307 - RNA, 19 nt, Homo sapiens
  misc_RNA (1)...(19): siRNA sense strand
aauauacccuucaaagaga

SEQ ID NO: 1081308 - RNA, 19 nt, Homo sapiens
  misc_RNA (1)...(19): siRNA sense strand
ccacguugcuacagaugaa

SEQ ID NO: 1081309 - RNA, 19 nt, Homo sapiens
  misc_RNA (1)...(19): siRNA sense strand
ugagaguuaugaacaagaa

SEQ ID NO: 1081310 - RNA, 19 nt, Homo sapiens
  misc_RNA (1)...(19): siRNA sense strand
gaaugaaguuacaaauugc

SEQ ID NO: 1081311 - RNA, 19 nt, Homo sapiens
  misc_RNA (1)...(19): siRNA sense strand
cagaagccauggacaggaa

SEQ ID NO: 1081312 - RNA, 19 nt, Homo sapiens
  misc_RNA (1)...(19): siRNA sense strand
ugaaugaacuacaauacag

SEQ ID NO: 1081313 - RNA, 19 nt, Homo sapiens
  misc_RNA (1)...(19): siRNA sense strand
agaagugaaugaacuacaa

SEQ ID NO: 1081314 - RNA, 19 nt, Homo sapiens
  misc_RNA (1)...(19): siRNA sense strand
ucaaagaagaagugaauga

SEQ ID NO: 1081315 - RNA, 19 nt, Homo sapiens
  misc_RNA (1)...(19): siRNA sense strand
gugaagcuauuaaacaaca

SEQ ID NO: 1081316 - RNA, 19 nt, Homo sapiens
  misc_RNA (1)...(19): siRNA sense strand
gaaaagaaacuucaagcaa

SEQ ID NO: 1081317 - RNA, 19 nt, Homo sapiens
  misc_RNA (1)...(19): siRNA sense strand
ucaaguaucagucacuaaa

SEQ ID NO: 1081318 - RNA, 19 nt, Homo sapiens
  misc_RNA (1)...(19): siRNA sense strand
acaguaugguuuacaacua

SEQ ID NO: 1081319 - RNA, 19 nt, Homo sapiens
  misc_RNA (1)...(19): siRNA sense strand
ggagaaauuggaagaacaa

SEQ ID NO: 1081320 - RNA, 19 nt, Homo sapiens
  misc_RNA (1)...(19): siRNA sense strand
caaagaagaagugaaugaa

SEQ ID NO: 1081321 - RNA, 19 nt, Homo sapiens
  misc_RNA (1)...(19): siRNA sense strand
guccugcccuaacaguuua

SEQ ID NO: 1081322 - RNA, 19 nt, Homo sapiens
  misc_RNA (1)...(19): siRNA sense strand
aggcagauauaaucacaaa

SEQ ID NO: 1081323 - RNA, 19 nt, Homo sapiens
  misc_RNA (1)...(19): siRNA sense strand
gauuaccgccucagaaaga

SEQ ID NO: 1081324 - RNA, 19 nt, Homo sapiens
  misc_RNA (1)...(19): siRNA sense strand
ugaaagggucucaaacuga

SEQ ID NO: 1081325 - RNA, 19 nt, Homo sapiens
  misc_RNA (1)...(19): siRNA sense strand
gcaguuucuuacuauaaug

SEQ ID NO: 1081326 - RNA, 19 nt, Homo sapiens
  misc_RNA (1)...(19): siRNA sense strand
ggagaaguuuaucgauuac

SEQ ID NO: 1081327 - RNA, 19 nt, Homo sapiens
  misc_RNA (1)...(19): siRNA sense strand
acugagagcuaaacuagau

SEQ ID NO: 1081328 - RNA, 19 nt, Homo sapiens
  misc_RNA (1)...(19): siRNA sense strand
cuggauaacuuaaacaaag

SEQ ID NO: 1081329 - RNA, 19 nt, Homo sapiens
  misc_RNA (1)...(19): siRNA sense strand
cugguacucuggaagauaa

SEQ ID NO: 1081330 - RNA, 19 nt, Homo sapiens
  misc_RNA (1)...(19): siRNA sense strand
aaacugagagcuaaacuag

SEQ ID NO: 1081331 - RNA, 19 nt, Homo sapiens
  misc_RNA (1)...(19): siRNA sense strand
ggccuuaagugaaagaagu

SEQ ID NO: 1081332 - RNA, 19 nt, Homo sapiens
  misc_RNA (1)...(19): siRNA sense strand
gacaggaagugaaugaacu

SEQ ID NO: 1081333 - RNA, 19 nt, Homo sapiens
  misc_RNA (1)...(19): siRNA sense strand
gaaaagaaaugugugaaac

SEQ ID NO: 1081334 - RNA, 19 nt, Homo sapiens
  misc_RNA (1)...(19): siRNA sense strand
acacaguccugcccuaaca

SEQ ID NO: 1081335 - RNA, 19 nt, Homo sapiens
  misc_RNA (1)...(19): siRNA sense strand
ggugcucccuguggauaua

SEQ ID NO: 1081336 - RNA, 19 nt, Homo sapiens
  misc_RNA (1)...(19): siRNA sense strand
agaccacccucaaagaaga

SEQ ID NO: 1081337 - RNA, 19 nt, Homo sapiens
  misc_RNA (1)...(19): siRNA sense strand
uuggauaaaugucguaaug

SEQ ID NO: 1081338 - RNA, 19 nt, Homo sapiens
  misc_RNA (1)...(19): siRNA sense strand
gaaugaacuacaauacaga

SEQ ID NO: 1081339 - RNA, 19 nt, Homo sapiens
  misc_RNA (1)...(19): siRNA sense strand
ugaccaugacugagaguua

SEQ ID NO: 1081340 - RNA, 19 nt, Homo sapiens
  misc_RNA (1)...(19): siRNA sense strand
aacgucagcuuaucaguau

SEQ ID NO: 1081341 - RNA, 19 nt, Homo sapiens
  misc_RNA (1)...(19): siRNA sense strand
gaugaaagggucucaaacu

SEQ ID NO: 1081342 - RNA, 19 nt, Homo sapiens
  misc_RNA (1)...(19): siRNA sense strand
gcacuaaaggugaauuguc

SEQ ID NO: 1081343 - RNA, 19 nt, Homo sapiens
  misc_RNA (1)...(19): siRNA sense strand
cagaagaauggugaaauaa

SEQ ID NO: 1081344 - RNA, 19 nt, Homo sapiens
  misc_RNA (1)...(19): siRNA sense strand
gcgaaugugaagcuauuaa

SEQ ID NO: 1081345 - RNA, 19 nt, Homo sapiens
  misc_RNA (1)...(19): siRNA sense strand
aaagaaaugugugaaacuc

SEQ ID NO: 1081346 - RNA, 19 nt, Homo sapiens
  misc_RNA (1)...(19): siRNA sense strand
aaauauacccuucaaagag

SEQ ID NO: 1081347 - RNA, 19 nt, Homo sapiens
  misc_RNA (1)...(19): siRNA sense strand
gagaugcuggcucuucaaa

SEQ ID NO: 1081348 - RNA, 19 nt, Homo sapiens
  misc_RNA (1)...(19): siRNA sense strand
ugaaagaugccuccagcuu

SEQ ID NO: 1081349 - RNA, 19 nt, Homo sapiens
  misc_RNA (1)...(19): siRNA sense strand
aagaagaagugaaugaacu

SEQ ID NO: 1081350 - RNA, 19 nt, Homo sapiens
  misc_RNA (1)...(19): siRNA sense strand
caacuaguagagagucaaa

SEQ ID NO: 1081351 - RNA, 19 nt, Homo sapiens
  misc_RNA (1)...(19): siRNA sense strand
gaagugaaugaacuacaau

SEQ ID NO: 1081352 - RNA, 19 nt, Homo sapiens
  misc_RNA (1)...(19): siRNA sense strand
cgaaugugaagcuauuaaa

SEQ ID NO: 1081353 - RNA, 19 nt, Homo sapiens
  misc_RNA (1)...(19): siRNA sense strand
gcagcugaagcaccaagua

SEQ ID NO: 1081354 - RNA, 19 nt, Homo sapiens
  misc_RNA (1)...(19): siRNA sense strand
caccauugcugcugagaaa

SEQ ID NO: 1081355 - RNA, 19 nt, Homo sapiens
  misc_RNA (1)...(19): siRNA sense strand
ggaccuugcggauggauuu

SEQ ID NO: 1081356 - RNA, 19 nt, Homo sapiens
  misc_RNA (1)...(19): siRNA sense strand
cguuauaacuuucccaauc

SEQ ID NO: 1081357 - RNA, 19 nt, Homo sapiens
  misc_RNA (1)...(19): siRNA sense strand
guuauaacuuucccaaucu

SEQ ID NO: 1081358 - RNA, 19 nt, Homo sapiens
  misc_RNA (1)...(19): siRNA sense strand
uagauaugcugcaaggaau

SEQ ID NO: 1081359 - RNA, 19 nt, Homo sapiens
  misc_RNA (1)...(19): siRNA sense strand
ucauucuuauucaccguua

SEQ ID NO: 1081360 - RNA, 19 nt, Homo sapiens
  misc_RNA (1)...(19): siRNA sense strand
ugucuucccucugcccaua

SEQ ID NO: 1081361 - RNA, 19 nt, Homo sapiens
  misc_RNA (1)...(19): siRNA sense strand
aaacucaacaauugucuuc

SEQ ID NO: 1081362 - RNA, 19 nt, Homo sapiens
  misc_RNA (1)...(19): siRNA sense strand
uaacuuucccaaucucaau

SEQ ID NO: 1081363 - RNA, 19 nt, Homo sapiens
  misc_RNA (1)...(19): siRNA sense strand
gaaggagaaaugaaugcau

SEQ ID NO: 1081364 - RNA, 19 nt, Homo sapiens
  misc_RNA (1)...(19): siRNA sense strand
gguggcguucucauucuua

SEQ ID NO: 1081365 - RNA, 19 nt, Homo sapiens
  misc_RNA (1)...(19): siRNA sense strand
ugaaagaagccuccauggu

SEQ ID NO: 1081366 - RNA, 19 nt, Homo sapiens
  misc_RNA (1)...(19): siRNA sense strand
cauccagggcucugaaaga

SEQ ID NO: 1081367 - RNA, 19 nt, Homo sapiens
  misc_RNA (1)...(19): siRNA sense strand
auagauaugcugcaaggaa

SEQ ID NO: 1081368 - RNA, 19 nt, Homo sapiens
  misc_RNA (1)...(19): siRNA sense strand
ccuccauggucaucacuga

SEQ ID NO: 1081369 - RNA, 19 nt, Homo sapiens
  misc_RNA (1)...(19): siRNA sense strand
gcaaaacacagccaucuag

SEQ ID NO: 1081370 - RNA, 19 nt, Homo sapiens
  misc_RNA (1)...(19): siRNA sense strand
ggcguucucauucuuauuc

SEQ ID NO: 1081371 - RNA, 19 nt, Homo sapiens
  misc_RNA (1)...(19): siRNA sense strand
gauaugcugcaaggaauca

SEQ ID NO: 1081372 - RNA, 19 nt, Homo sapiens
  misc_RNA (1)...(19): siRNA sense strand
auccagggcucugaaagaa

SEQ ID NO: 1081373 - RNA, 19 nt, Homo sapiens
  misc_RNA (1)...(19): siRNA sense strand
uauugcagccgaaggagaa

SEQ ID NO: 1081374 - RNA, 19 nt, Homo sapiens
  misc_RNA (1)...(19): siRNA sense strand
guggcguucucauucuuau

SEQ ID NO: 1081375 - RNA, 19 nt, Homo sapiens
  misc_RNA (1)...(19): siRNA sense strand
gcagacacugaccaccauu

SEQ ID NO: 1081376 - RNA, 19 nt, Homo sapiens
  misc_RNA (1)...(19): siRNA sense strand
uucccaaucucaauaugga

SEQ ID NO: 1081377 - RNA, 19 nt, Homo sapiens
  misc_RNA (1)...(19): siRNA sense strand
gguuauugcagccgaagga

SEQ ID NO: 1081378 - RNA, 19 nt, Homo sapiens
  misc_RNA (1)...(19): siRNA sense strand
uccgauaccugcagacacu

SEQ ID NO: 1081379 - RNA, 19 nt, Homo sapiens
  misc_RNA (1)...(19): siRNA sense strand
caccauugcugcugagaaa

SEQ ID NO: 1081380 - RNA, 19 nt, Homo sapiens
  misc_RNA (1)...(19): siRNA sense strand
ggaccuugcggauggauuu

SEQ ID NO: 1081381 - RNA, 19 nt, Homo sapiens
  misc_RNA (1)...(19): siRNA sense strand
cguuauaacuuucccaauc

SEQ ID NO: 1081382 - RNA, 19 nt, Homo sapiens
  misc_RNA (1)...(19): siRNA sense strand
guuauaacuuucccaaucu

SEQ ID NO: 1081383 - RNA, 19 nt, Homo sapiens
  misc_RNA (1)...(19): siRNA sense strand
uagauaugcugcaaggaau

SEQ ID NO: 1081384 - RNA, 19 nt, Homo sapiens
  misc_RNA (1)...(19): siRNA sense strand
ucauucuuauucaccguua

SEQ ID NO: 1081385 - RNA, 19 nt, Homo sapiens
  misc_RNA (1)...(19): siRNA sense strand
ugucuucccucugcccaua

SEQ ID NO: 1081386 - RNA, 19 nt, Homo sapiens
  misc_RNA (1)...(19): siRNA sense strand
aaacucaacaauugucuuc

SEQ ID NO: 1081387 - RNA, 19 nt, Homo sapiens
  misc_RNA (1)...(19): siRNA sense strand
uaacuuucccaaucucaau

SEQ ID NO: 1081388 - RNA, 19 nt, Homo sapiens
  misc_RNA (1)...(19): siRNA sense strand
gaaggagaaaugaaugcau

SEQ ID NO: 1081389 - RNA, 19 nt, Homo sapiens
  misc_RNA (1)...(19): siRNA sense strand
gguggcguucucauucuua

SEQ ID NO: 1081390 - RNA, 19 nt, Homo sapiens
  misc_RNA (1)...(19): siRNA sense strand
ugaaagaagccuccauggu

SEQ ID NO: 1081391 - RNA, 19 nt, Homo sapiens
  misc_RNA (1)...(19): siRNA sense strand
cauccagggcucugaaaga

SEQ ID NO: 1081392 - RNA, 19 nt, Homo sapiens
  misc_RNA (1)...(19): siRNA sense strand
auagauaugcugcaaggaa

SEQ ID NO: 1081393 - RNA, 19 nt, Homo sapiens
  misc_RNA (1)...(19): siRNA sense strand
ccuccauggucaucacuga

SEQ ID NO: 1081394 - RNA, 19 nt, Homo sapiens
  misc_RNA (1)...(19): siRNA sense strand
gcaaaacacagccaucuag

SEQ ID NO: 1081395 - RNA, 19 nt, Homo sapiens
  misc_RNA (1)...(19): siRNA sense strand
ggcguucucauucuuauuc

SEQ ID NO: 1081396 - RNA, 19 nt, Homo sapiens
  misc_RNA (1)...(19): siRNA sense strand
gauaugcugcaaggaauca

SEQ ID NO: 1081397 - RNA, 19 nt, Homo sapiens
  misc_RNA (1)...(19): siRNA sense strand
auccagggcucugaaagaa

SEQ ID NO: 1081398 - RNA, 19 nt, Homo sapiens
  misc_RNA (1)...(19): siRNA sense strand
uauugcagccgaaggagaa

SEQ ID NO: 1081399 - RNA, 19 nt, Homo sapiens
  misc_RNA (1)...(19): siRNA sense strand
guggcguucucauucuuau

SEQ ID NO: 1081400 - RNA, 19 nt, Homo sapiens
  misc_RNA (1)...(19): siRNA sense strand
gcagacacugaccaccauu

SEQ ID NO: 1081401 - RNA, 19 nt, Homo sapiens
  misc_RNA (1)...(19): siRNA sense strand
uucccaaucucaauaugga

SEQ ID NO: 1081402 - RNA, 19 nt, Homo sapiens
  misc_RNA (1)...(19): siRNA sense strand
gguuauugcagccgaagga

SEQ ID NO: 1081403 - RNA, 19 nt, Homo sapiens
  misc_RNA (1)...(19): siRNA sense strand
uccgauaccugcagacacu

SEQ ID NO: 1081404 - RNA, 19 nt, Homo sapiens
  misc_RNA (1)...(19): siRNA sense strand
gaacacagcccuccacaug

SEQ ID NO: 1081405 - RNA, 19 nt, Homo sapiens
  misc_RNA (1)...(19): siRNA sense strand
gagcucacaugcuggcuuu

SEQ ID NO: 1081406 - RNA, 19 nt, Homo sapiens
  misc_RNA (1)...(19): siRNA sense strand
gagacaggcuggauugugu

SEQ ID NO: 1081407 - RNA, 19 nt, Homo sapiens
  misc_RNA (1)...(19): siRNA sense strand
gcuggacccuggagaguuu

SEQ ID NO: 1081408 - RNA, 19 nt, Homo sapiens
  misc_RNA (1)...(19): siRNA sense strand
cgccaggccuguccucuua

SEQ ID NO: 1081409 - RNA, 19 nt, Homo sapiens
  misc_RNA (1)...(19): siRNA sense strand
gcaaaugggugcuaaucac

SEQ ID NO: 1081410 - RNA, 19 nt, Homo sapiens
  misc_RNA (1)...(19): siRNA sense strand
guaccggcgucuugacauu

SEQ ID NO: 1081411 - RNA, 19 nt, Homo sapiens
  misc_RNA (1)...(19): siRNA sense strand
gccaggagaucaagagcaa

SEQ ID NO: 1081412 - RNA, 19 nt, Homo sapiens
  misc_RNA (1)...(19): siRNA sense strand
caacgcaaaccgugaagaa

SEQ ID NO: 1081413 - RNA, 19 nt, Homo sapiens
  misc_RNA (1)...(19): siRNA sense strand
ggaccuuugucaacaugaa

SEQ ID NO: 1081414 - RNA, 19 nt, Homo sapiens
  misc_RNA (1)...(19): siRNA sense strand
caagccuucuggcaugaaa

SEQ ID NO: 1081415 - RNA, 19 nt, Homo sapiens
  misc_RNA (1)...(19): siRNA sense strand
acaagacaguucugcacuu

SEQ ID NO: 1081416 - RNA, 19 nt, Homo sapiens
  misc_RNA (1)...(19): siRNA sense strand
ucagggacguucggucuug

SEQ ID NO: 1081417 - RNA, 19 nt, Homo sapiens
  misc_RNA (1)...(19): siRNA sense strand
gagaucaagagcaacaaga

SEQ ID NO: 1081418 - RNA, 19 nt, Homo sapiens
  misc_RNA (1)...(19): siRNA sense strand
caugaaacgcugagaagau

SEQ ID NO: 1081419 - RNA, 19 nt, Homo sapiens
  misc_RNA (1)...(19): siRNA sense strand
gaucaagagcaacaagaca

SEQ ID NO: 1081420 - RNA, 19 nt, Homo sapiens
  misc_RNA (1)...(19): siRNA sense strand
ugcgcaaccuggagaauga

SEQ ID NO: 1081421 - RNA, 19 nt, Homo sapiens
  misc_RNA (1)...(19): siRNA sense strand
cauccuggcccuuaacguu

SEQ ID NO: 1081422 - RNA, 19 nt, Homo sapiens
  misc_RNA (1)...(19): siRNA sense strand
agaaugagcagcccguuca

SEQ ID NO: 1081423 - RNA, 19 nt, Homo sapiens
  misc_RNA (1)...(19): siRNA sense strand
gcaugaaacgcugagaaga

SEQ ID NO: 1081424 - RNA, 19 nt, Homo sapiens
  misc_RNA (1)...(19): siRNA sense strand
cugaggugcuccaggugua

SEQ ID NO: 1081425 - RNA, 19 nt, Homo sapiens
  misc_RNA (1)...(19): siRNA sense strand
ggagaccugcggaccuuug

SEQ ID NO: 1081426 - RNA, 19 nt, Homo sapiens
  misc_RNA (1)...(19): siRNA sense strand
gauuguggaggaucuguug

SEQ ID NO: 1081427 - RNA, 19 nt, Homo sapiens
  misc_RNA (1)...(19): siRNA sense strand
caaaugggugcuaaucaca

SEQ ID NO: 1081428 - RNA, 19 nt, Homo sapiens
  misc_RNA (1)...(19): siRNA sense strand
augaaacgcugagaagaug

SEQ ID NO: 1081429 - RNA, 19 nt, Homo sapiens
  misc_RNA (1)...(19): siRNA sense strand
gcggaccuuugucaacaug

SEQ ID NO: 1081430 - RNA, 19 nt, Homo sapiens
  misc_RNA (1)...(19): siRNA sense strand
ccaaugccgcugaccauca

SEQ ID NO: 1081431 - RNA, 19 nt, Homo sapiens
  misc_RNA (1)...(19): siRNA sense strand
uggaggaucuguugaaccu

SEQ ID NO: 1081432 - RNA, 19 nt, Homo sapiens
  misc_RNA (1)...(19): siRNA sense strand
gaccugcggaccuuuguca

SEQ ID NO: 1081433 - RNA, 19 nt, Homo sapiens
  misc_RNA (1)...(19): siRNA sense strand
ggagaucaagagcaacaag

SEQ ID NO: 1081434 - RNA, 19 nt, Homo sapiens
  misc_RNA (1)...(19): siRNA sense strand
caagagcaacaagacaguu

SEQ ID NO: 1081435 - RNA, 19 nt, Homo sapiens
  misc_RNA (1)...(19): siRNA sense strand
ugacauucgugagcauaag

SEQ ID NO: 1081436 - RNA, 19 nt, Homo sapiens
  misc_RNA (1)...(19): siRNA sense strand
cugcggaccuuugucaaca

SEQ ID NO: 1081437 - RNA, 19 nt, Homo sapiens
  misc_RNA (1)...(19): siRNA sense strand
acacgcuccuucaccuguu

SEQ ID NO: 1081438 - RNA, 19 nt, Homo sapiens
  misc_RNA (1)...(19): siRNA sense strand
caggagaucaagagcaaca

SEQ ID NO: 1081439 - RNA, 19 nt, Homo sapiens
  misc_RNA (1)...(19): siRNA sense strand
gcccaacgcaaaccgugaa

SEQ ID NO: 1081440 - RNA, 19 nt, Homo sapiens
  misc_RNA (1)...(19): siRNA sense strand
ggcaugaaacgcugagaag

SEQ ID NO: 1081441 - RNA, 19 nt, Homo sapiens
  misc_RNA (1)...(19): siRNA sense strand
ggacacgccuuuccugaca

SEQ ID NO: 1081442 - RNA, 19 nt, Homo sapiens
  misc_RNA (1)...(19): siRNA sense strand
ccacagauccuuaccaaca

SEQ ID NO: 1081443 - RNA, 19 nt, Homo sapiens
  misc_RNA (1)...(19): siRNA sense strand
cagaucagaccuauuguga

SEQ ID NO: 1081444 - RNA, 19 nt, Homo sapiens
  misc_RNA (1)...(19): siRNA sense strand
ucuuauacguccacucuug

SEQ ID NO: 1081445 - RNA, 19 nt, Homo sapiens
  misc_RNA (1)...(19): siRNA sense strand
cacagauccuuaccaacaa

SEQ ID NO: 1081446 - RNA, 19 nt, Homo sapiens
  misc_RNA (1)...(19): siRNA sense strand
cugcguaaguuccacauca

SEQ ID NO: 1081447 - RNA, 19 nt, Homo sapiens
  misc_RNA (1)...(19): siRNA sense strand
gccaugggcgcuugaguga

SEQ ID NO: 1081448 - RNA, 19 nt, Homo sapiens
  misc_RNA (1)...(19): siRNA sense strand
cacaggcagugcagauguu

SEQ ID NO: 1081449 - RNA, 19 nt, Homo sapiens
  misc_RNA (1)...(19): siRNA sense strand
uccuccagcugaaccguua

SEQ ID NO: 1081450 - RNA, 19 nt, Homo sapiens
  misc_RNA (1)...(19): siRNA sense strand
gggaucccuucaugucugu

SEQ ID NO: 1081451 - RNA, 19 nt, Homo sapiens
  misc_RNA (1)...(19): siRNA sense strand
caucuuauacguccacucu

SEQ ID NO: 1081452 - RNA, 19 nt, Homo sapiens
  misc_RNA (1)...(19): siRNA sense strand
ccacaucaccaaccaugca

SEQ ID NO: 1081453 - RNA, 19 nt, Homo sapiens
  misc_RNA (1)...(19): siRNA sense strand
guaaguuccacaucaccaa

SEQ ID NO: 1081454 - RNA, 19 nt, Homo sapiens
  misc_RNA (1)...(19): siRNA sense strand
acccacagauccuuaccaa

SEQ ID NO: 1081455 - RNA, 19 nt, Homo sapiens
  misc_RNA (1)...(19): siRNA sense strand
ccacggggaucccuucaug

SEQ ID NO: 1081456 - RNA, 19 nt, Homo sapiens
  misc_RNA (1)...(19): siRNA sense strand
ucaccaaccaugcaugcuu

SEQ ID NO: 1081457 - RNA, 19 nt, Homo sapiens
  misc_RNA (1)...(19): siRNA sense strand
gggacugccaggaguucua

SEQ ID NO: 1081458 - RNA, 19 nt, Homo sapiens
  misc_RNA (1)...(19): siRNA sense strand
ggucucugucucccacuuu

SEQ ID NO: 1081459 - RNA, 19 nt, Homo sapiens
  misc_RNA (1)...(19): siRNA sense strand
cagcauggggcaucuuaua

SEQ ID NO: 1081460 - RNA, 19 nt, Homo sapiens
  misc_RNA (1)...(19): siRNA sense strand
cuaccgagcccuguauauc

SEQ ID NO: 1081461 - RNA, 19 nt, Homo sapiens
  misc_RNA (1)...(19): siRNA sense strand
guggacagcaaccuuguuc

SEQ ID NO: 1081462 - RNA, 19 nt, Homo sapiens
  misc_RNA (1)...(19): siRNA sense strand
ggacaaaucugcaaacuug

SEQ ID NO: 1081463 - RNA, 19 nt, Homo sapiens
  misc_RNA (1)...(19): siRNA sense strand
caacucauuuguucaauug

SEQ ID NO: 1081464 - RNA, 19 nt, Homo sapiens
  misc_RNA (1)...(19): siRNA sense strand
ggaaggaccugcuauugag

SEQ ID NO: 1081465 - RNA, 19 nt, Homo sapiens
  misc_RNA (1)...(19): siRNA sense strand
gaagagaucagugcaaaca

SEQ ID NO: 1081466 - RNA, 19 nt, Homo sapiens
  misc_RNA (1)...(19): siRNA sense strand
gggaaggaccugcuauuga

SEQ ID NO: 1081467 - RNA, 19 nt, Homo sapiens
  misc_RNA (1)...(19): siRNA sense strand
ccaacucauuuguucaauu

SEQ ID NO: 1081468 - RNA, 19 nt, Homo sapiens
  misc_RNA (1)...(19): siRNA sense strand
gcucaagcccgacguuugu

SEQ ID NO: 1081469 - RNA, 19 nt, Homo sapiens
  misc_RNA (1)...(19): siRNA sense strand
ugucagagcccuucaugga

SEQ ID NO: 1081470 - RNA, 19 nt, Homo sapiens
  misc_RNA (1)...(19): siRNA sense strand
cgacguuugugugaagaaa

SEQ ID NO: 1081471 - RNA, 19 nt, Homo sapiens
  misc_RNA (1)...(19): siRNA sense strand
agagaucagugcaaacaca

SEQ ID NO: 1081472 - RNA, 19 nt, Homo sapiens
  misc_RNA (1)...(19): siRNA sense strand
augaagagaucagugcaaa

SEQ ID NO: 1081473 - RNA, 19 nt, Homo sapiens
  misc_RNA (1)...(19): siRNA sense strand
uggcccaacucauuuguuc

SEQ ID NO: 1081474 - RNA, 19 nt, Homo sapiens
  misc_RNA (1)...(19): siRNA sense strand
agcagucccugacggagua

SEQ ID NO: 1081475 - RNA, 19 nt, Homo sapiens
  misc_RNA (1)...(19): siRNA sense strand
gcccaacucauuuguucaa

SEQ ID NO: 1081476 - RNA, 19 nt, Homo sapiens
  misc_RNA (1)...(19): siRNA sense strand
gggacaaaucugcaaacuu

SEQ ID NO: 1081477 - RNA, 19 nt, Homo sapiens
  misc_RNA (1)...(19): siRNA sense strand
gcccgacguuugugugaag

SEQ ID NO: 1081478 - RNA, 19 nt, Homo sapiens
  misc_RNA (1)...(19): siRNA sense strand
ggaagcagggacaaaucug

SEQ ID NO: 1081479 - RNA, 19 nt, Homo sapiens
  misc_RNA (1)...(19): siRNA sense strand
caguuugccucaagcucaa

SEQ ID NO: 1081480 - RNA, 19 nt, Homo sapiens
  misc_RNA (1)...(19): siRNA sense strand
gaaggaccugcuauugagu

SEQ ID NO: 1081481 - RNA, 19 nt, Homo sapiens
  misc_RNA (1)...(19): siRNA sense strand
ccugggagacccuagaaga

SEQ ID NO: 1081482 - RNA, 19 nt, Homo sapiens
  misc_RNA (1)...(19): siRNA sense strand
gggaagcagggacaaaucu

SEQ ID NO: 1081483 - RNA, 19 nt, Homo sapiens
  misc_RNA (1)...(19): siRNA sense strand
gugggaaggaccugcuauu

SEQ ID NO: 1081484 - RNA, 19 nt, Homo sapiens
  misc_RNA (1)...(19): siRNA sense strand
ggugucagagcccuucaug

SEQ ID NO: 1081485 - RNA, 19 nt, Homo sapiens
  misc_RNA (1)...(19): siRNA sense strand
gaucuagucuuucgaguua

SEQ ID NO: 1081486 - RNA, 19 nt, Homo sapiens
  misc_RNA (1)...(19): siRNA sense strand
ggaagaaguuucaccaaug

SEQ ID NO: 1081487 - RNA, 19 nt, Homo sapiens
  misc_RNA (1)...(19): siRNA sense strand
gaaauaaucccgugucauc

SEQ ID NO: 1081488 - RNA, 19 nt, Homo sapiens
  misc_RNA (1)...(19): siRNA sense strand
caacgaagcacauguaaug

SEQ ID NO: 1081489 - RNA, 19 nt, Homo sapiens
  misc_RNA (1)...(19): siRNA sense strand
gaucaugcauuacacuuug

SEQ ID NO: 1081490 - RNA, 19 nt, Homo sapiens
  misc_RNA (1)...(19): siRNA sense strand
gaaauguucuuccaguugu

SEQ ID NO: 1081491 - RNA, 19 nt, Homo sapiens
  misc_RNA (1)...(19): siRNA sense strand
gaaaugguacugaaaguug

SEQ ID NO: 1081492 - RNA, 19 nt, Homo sapiens
  misc_RNA (1)...(19): siRNA sense strand
aauuaaagcuguaccagua

SEQ ID NO: 1081493 - RNA, 19 nt, Homo sapiens
  misc_RNA (1)...(19): siRNA sense strand
gaucagagguagagauuac

SEQ ID NO: 1081494 - RNA, 19 nt, Homo sapiens
  misc_RNA (1)...(19): siRNA sense strand
cagaugaaaucacagauga

SEQ ID NO: 1081495 - RNA, 19 nt, Homo sapiens
  misc_RNA (1)...(19): siRNA sense strand
ggaauuggcuauggauaau

SEQ ID NO: 1081496 - RNA, 19 nt, Homo sapiens
  misc_RNA (1)...(19): siRNA sense strand
agaaagagaugauggaagu

SEQ ID NO: 1081497 - RNA, 19 nt, Homo sapiens
  misc_RNA (1)...(19): siRNA sense strand
aaaaguaucugccucauuu

SEQ ID NO: 1081498 - RNA, 19 nt, Homo sapiens
  misc_RNA (1)...(19): siRNA sense strand
gggaagaaguuucaccaau

SEQ ID NO: 1081499 - RNA, 19 nt, Homo sapiens
  misc_RNA (1)...(19): siRNA sense strand
gaagcaagcacaugccaaa

SEQ ID NO: 1081500 - RNA, 19 nt, Homo sapiens
  misc_RNA (1)...(19): siRNA sense strand
gaucaaaccuggugcuacu

SEQ ID NO: 1081501 - RNA, 19 nt, Homo sapiens
  misc_RNA (1)...(19): siRNA sense strand
gaaguguuaccauuacuaa

SEQ ID NO: 1081502 - RNA, 19 nt, Homo sapiens
  misc_RNA (1)...(19): siRNA sense strand
gaagaaguuucaccaaugc

SEQ ID NO: 1081503 - RNA, 19 nt, Homo sapiens
  misc_RNA (1)...(19): siRNA sense strand
caacuuccuuguaucagaa

SEQ ID NO: 1081504 - RNA, 19 nt, Homo sapiens
  misc_RNA (1)...(19): siRNA sense strand
ggaauuccaucugagaaga

SEQ ID NO: 1081505 - RNA, 19 nt, Homo sapiens
  misc_RNA (1)...(19): siRNA sense strand
aaagugagauuacaucagu

SEQ ID NO: 1081506 - RNA, 19 nt, Homo sapiens
  misc_RNA (1)...(19): siRNA sense strand
gaaagaaagagaugaugga

SEQ ID NO: 1081507 - RNA, 19 nt, Homo sapiens
  misc_RNA (1)...(19): siRNA sense strand
aaagggaaauguugucgaa

SEQ ID NO: 1081508 - RNA, 19 nt, Homo sapiens
  misc_RNA (1)...(19): siRNA sense strand
cgaagcacauguaauggaa

SEQ ID NO: 1081509 - RNA, 19 nt, Homo sapiens
  misc_RNA (1)...(19): siRNA sense strand
caagaaccaugcauacauc

SEQ ID NO: 1081510 - RNA, 19 nt, Homo sapiens
  misc_RNA (1)...(19): siRNA sense strand
gauuaugccuauacuggaa

SEQ ID NO: 1081511 - RNA, 19 nt, Homo sapiens
  misc_RNA (1)...(19): siRNA sense strand
uaugugaccuuuccaccua

SEQ ID NO: 1081512 - RNA, 19 nt, Homo sapiens
  misc_RNA (1)...(19): siRNA sense strand
gauaucuguuagcccauua

SEQ ID NO: 1081513 - RNA, 19 nt, Homo sapiens
  misc_RNA (1)...(19): siRNA sense strand
gaagaaaugguacugaaag

SEQ ID NO: 1081514 - RNA, 19 nt, Homo sapiens
  misc_RNA (1)...(19): siRNA sense strand
ugaaaguuguccuuaguug

SEQ ID NO: 1081515 - RNA, 19 nt, Homo sapiens
  misc_RNA (1)...(19): siRNA sense strand
gccaggugauucaguuuaa

SEQ ID NO: 1081516 - RNA, 19 nt, Homo sapiens
  misc_RNA (1)...(19): siRNA sense strand
caucauuucuucaaguuuc

SEQ ID NO: 1081517 - RNA, 19 nt, Homo sapiens
  misc_RNA (1)...(19): siRNA sense strand
uuacaauccucuuuccaaa

SEQ ID NO: 1081518 - RNA, 19 nt, Homo sapiens
  misc_RNA (1)...(19): siRNA sense strand
gauguugaaucuuacaauc

SEQ ID NO: 1081519 - RNA, 19 nt, Homo sapiens
  misc_RNA (1)...(19): siRNA sense strand
gaggaucccgggacauuaa

SEQ ID NO: 1081520 - RNA, 19 nt, Homo sapiens
  misc_RNA (1)...(19): siRNA sense strand
guaucugccucauuugauu

SEQ ID NO: 1081521 - RNA, 19 nt, Homo sapiens
  misc_RNA (1)...(19): siRNA sense strand
aagaagaaaugguacugaa

SEQ ID NO: 1081522 - RNA, 19 nt, Homo sapiens
  misc_RNA (1)...(19): siRNA sense strand
guacugaaaguuguccuua

SEQ ID NO: 1081523 - RNA, 19 nt, Homo sapiens
  misc_RNA (1)...(19): siRNA sense strand
cagaugaagugcaggucua

SEQ ID NO: 1081524 - RNA, 19 nt, Homo sapiens
  misc_RNA (1)...(19): siRNA sense strand
uagcagaguuugggcaauu

SEQ ID NO: 1081525 - RNA, 19 nt, Homo sapiens
  misc_RNA (1)...(19): siRNA sense strand
gaagaagaaaugguacuga

SEQ ID NO: 1081526 - RNA, 19 nt, Homo sapiens
  misc_RNA (1)...(19): siRNA sense strand
ggaaguguuaccauuacua

SEQ ID NO: 1081527 - RNA, 19 nt, Homo sapiens
  misc_RNA (1)...(19): siRNA sense strand
auacagagacccaugguuu

SEQ ID NO: 1081528 - RNA, 19 nt, Homo sapiens
  misc_RNA (1)...(19): siRNA sense strand
ggauaucuguuagcccauu

SEQ ID NO: 1081529 - RNA, 19 nt, Homo sapiens
  misc_RNA (1)...(19): siRNA sense strand
gguggacucuucccugaug

SEQ ID NO: 1081530 - RNA, 19 nt, Homo sapiens
  misc_RNA (1)...(19): siRNA sense strand
aaauguuccugaagaagaa

SEQ ID NO: 1081531 - RNA, 19 nt, Homo sapiens
  misc_RNA (1)...(19): siRNA sense strand
ccuagagccuuaacagaau

SEQ ID NO: 1081532 - RNA, 19 nt, Homo sapiens
  misc_RNA (1)...(19): siRNA sense strand
aaucauggaugcaauuaag

SEQ ID NO: 1081533 - RNA, 19 nt, Homo sapiens
  misc_RNA (1)...(19): siRNA sense strand
gggcuauguuugaaguaaa

SEQ ID NO: 1081534 - RNA, 19 nt, Homo sapiens
  misc_RNA (1)...(19): siRNA sense strand
cgaaggaucuuuugagugu

SEQ ID NO: 1081535 - RNA, 19 nt, Homo sapiens
  misc_RNA (1)...(19): siRNA sense strand
gcaagcacaugccaaaaug

SEQ ID NO: 1081536 - RNA, 19 nt, Homo sapiens
  misc_RNA (1)...(19): siRNA sense strand
uaaauguuccugaagaaga

SEQ ID NO: 1081537 - RNA, 19 nt, Homo sapiens
  misc_RNA (1)...(19): siRNA sense strand
guaaaagcauuucucgauu

SEQ ID NO: 1081538 - RNA, 19 nt, Homo sapiens
  misc_RNA (1)...(19): siRNA sense strand
cauccacaacugagaaaua

SEQ ID NO: 1081539 - RNA, 19 nt, Homo sapiens
  misc_RNA (1)...(19): siRNA sense strand
ugaaaucacagaugaagug

SEQ ID NO: 1081540 - RNA, 19 nt, Homo sapiens
  misc_RNA (1)...(19): siRNA sense strand
aagcacauguaauggaauu

SEQ ID NO: 1081541 - RNA, 19 nt, Homo sapiens
  misc_RNA (1)...(19): siRNA sense strand
ccagugauuucuuagagau

SEQ ID NO: 1081542 - RNA, 19 nt, Homo sapiens
  misc_RNA (1)...(19): siRNA sense strand
gccuagagccuuaacagaa

SEQ ID NO: 1081543 - RNA, 19 nt, Homo sapiens
  misc_RNA (1)...(19): siRNA sense strand
uuaaagcuguaccaguaaa

SEQ ID NO: 1081544 - RNA, 19 nt, Homo sapiens
  misc_RNA (1)...(19): siRNA sense strand
ucacaaaacugaggaaaau

SEQ ID NO: 1081545 - RNA, 19 nt, Homo sapiens
  misc_RNA (1)...(19): siRNA sense strand
cucgauagauuauuuguca

SEQ ID NO: 1081546 - RNA, 19 nt, Homo sapiens
  misc_RNA (1)...(19): siRNA sense strand
cauauacuauccagaagca

SEQ ID NO: 1081547 - RNA, 19 nt, Homo sapiens
  misc_RNA (1)...(19): siRNA sense strand
aggacugucuguucaauga

SEQ ID NO: 1081548 - RNA, 19 nt, Homo sapiens
  misc_RNA (1)...(19): siRNA sense strand
uuauggcucucgauagauu

SEQ ID NO: 1081549 - RNA, 19 nt, Homo sapiens
  misc_RNA (1)...(19): siRNA sense strand
uuacuaauuuguccuccaa

SEQ ID NO: 1081550 - RNA, 19 nt, Homo sapiens
  misc_RNA (1)...(19): siRNA sense strand
caggugauucaguuuaaua

SEQ ID NO: 1081551 - RNA, 19 nt, Homo sapiens
  misc_RNA (1)...(19): siRNA sense strand
accaaugccuagagccuua

SEQ ID NO: 1081552 - RNA, 19 nt, Homo sapiens
  misc_RNA (1)...(19): siRNA sense strand
gaaccaugcauacaucagu

SEQ ID NO: 1081553 - RNA, 19 nt, Homo sapiens
  misc_RNA (1)...(19): siRNA sense strand
ggagacacuucaggacugu

SEQ ID NO: 1081554 - RNA, 19 nt, Homo sapiens
  misc_RNA (1)...(19): siRNA sense strand
ggaaaauacugccgcaauc

SEQ ID NO: 1081555 - RNA, 19 nt, Homo sapiens
  misc_RNA (1)...(19): siRNA sense strand
ccaaagaauggauaucugu

SEQ ID NO: 1081556 - RNA, 19 nt, Homo sapiens
  misc_RNA (1)...(19): siRNA sense strand
ccaagaaccaugcauacau

SEQ ID NO: 1081557 - RNA, 19 nt, Homo sapiens
  misc_RNA (1)...(19): siRNA sense strand
gcucgaccauccacaacug

SEQ ID NO: 1081558 - RNA, 19 nt, Homo sapiens
  misc_RNA (1)...(19): siRNA sense strand
guauauaugugaccuuucc

SEQ ID NO: 1081559 - RNA, 19 nt, Homo sapiens
  misc_RNA (1)...(19): siRNA sense strand
ccaccaguuuguuugauca

SEQ ID NO: 1081560 - RNA, 19 nt, Homo sapiens
  misc_RNA (1)...(19): siRNA sense strand
aagaauggauaucuguuag

SEQ ID NO: 1081561 - RNA, 19 nt, Homo sapiens
  misc_RNA (1)...(19): siRNA sense strand
caaagaauggauaucuguu

SEQ ID NO: 1081562 - RNA, 19 nt, Homo sapiens
  misc_RNA (1)...(19): siRNA sense strand
ggcucucgauagauuauuu

SEQ ID NO: 1081563 - RNA, 19 nt, Homo sapiens
  misc_RNA (1)...(19): siRNA sense strand
gucaucauuucuucaaguu

SEQ ID NO: 1081564 - RNA, 19 nt, Homo sapiens
  misc_RNA (1)...(19): siRNA sense strand
cuagagccuuaacagaauu

SEQ ID NO: 1081565 - RNA, 19 nt, Homo sapiens
  misc_RNA (1)...(19): siRNA sense strand
aguuauggcucucgauaga

SEQ ID NO: 1081566 - RNA, 19 nt, Homo sapiens
  misc_RNA (1)...(19): siRNA sense strand
ucaguuauggcucucgaua

SEQ ID NO: 1081567 - RNA, 19 nt, Homo sapiens
  misc_RNA (1)...(19): siRNA sense strand
acaccaagaaccaugcaua

SEQ ID NO: 1081568 - RNA, 19 nt, Homo sapiens
  misc_RNA (1)...(19): siRNA sense strand
aaucaacgaagcacaugua

SEQ ID NO: 1081569 - RNA, 19 nt, Homo sapiens
  misc_RNA (1)...(19): siRNA sense strand
cuucaggacugucuguuca

SEQ ID NO: 1081570 - RNA, 19 nt, Homo sapiens
  misc_RNA (1)...(19): siRNA sense strand
agagaugauggaaguguua

SEQ ID NO: 1081571 - RNA, 19 nt, Homo sapiens
  misc_RNA (1)...(19): siRNA sense strand
cuugacaggugguugcaaa

SEQ ID NO: 1081572 - RNA, 19 nt, Homo sapiens
  misc_RNA (1)...(19): siRNA sense strand
ggaucuagucuuucgaguu

SEQ ID NO: 1081573 - RNA, 19 nt, Homo sapiens
  misc_RNA (1)...(19): siRNA sense strand
caaguuuccuuccuaucca

SEQ ID NO: 1081574 - RNA, 19 nt, Homo sapiens
  misc_RNA (1)...(19): siRNA sense strand
gaauuccaucugagaagaa

SEQ ID NO: 1081575 - RNA, 19 nt, Homo sapiens
  misc_RNA (1)...(19): siRNA sense strand
gaugaaaucacagaugaag

SEQ ID NO: 1081576 - RNA, 19 nt, Homo sapiens
  misc_RNA (1)...(19): siRNA sense strand
gcuauggcuccaccaguuu

SEQ ID NO: 1081577 - RNA, 19 nt, Homo sapiens
  misc_RNA (1)...(19): siRNA sense strand
uugccaggaucuagucuuu

SEQ ID NO: 1081578 - RNA, 19 nt, Homo sapiens
  misc_RNA (1)...(19): siRNA sense strand
aaaguuguccuuaguugga

SEQ ID NO: 1081579 - RNA, 19 nt, Homo sapiens
  misc_RNA (1)...(19): siRNA sense strand
gaauuaaauguuccugaag

SEQ ID NO: 1081580 - RNA, 19 nt, Homo sapiens
  misc_RNA (1)...(19): siRNA sense strand
gugauuaugcaccagauga

SEQ ID NO: 1081581 - RNA, 19 nt, Homo sapiens
  misc_RNA (1)...(19): siRNA sense strand
gaaucuuacaauccucuuu

SEQ ID NO: 1081582 - RNA, 19 nt, Homo sapiens
  misc_RNA (1)...(19): siRNA sense strand
aaaagucucuuagauguug

SEQ ID NO: 1081583 - RNA, 19 nt, Homo sapiens
  misc_RNA (1)...(19): siRNA sense strand
ucagggcuauguuugaagu

SEQ ID NO: 1081584 - RNA, 19 nt, Homo sapiens
  misc_RNA (1)...(19): siRNA sense strand
uggaugcaauuaagugugu

SEQ ID NO: 1081585 - RNA, 19 nt, Homo sapiens
  misc_RNA (1)...(19): siRNA sense strand
gaucuagucuuucgaguua

SEQ ID NO: 1081586 - RNA, 19 nt, Homo sapiens
  misc_RNA (1)...(19): siRNA sense strand
ggaagaaguuucaccaaug

SEQ ID NO: 1081587 - RNA, 19 nt, Homo sapiens
  misc_RNA (1)...(19): siRNA sense strand
gaaauaaucccgugucauc

SEQ ID NO: 1081588 - RNA, 19 nt, Homo sapiens
  misc_RNA (1)...(19): siRNA sense strand
caacgaagcacauguaaug

SEQ ID NO: 1081589 - RNA, 19 nt, Homo sapiens
  misc_RNA (1)...(19): siRNA sense strand
gaucaugcauuacacuuug

SEQ ID NO: 1081590 - RNA, 19 nt, Homo sapiens
  misc_RNA (1)...(19): siRNA sense strand
gaaauguucuuccaguugu

SEQ ID NO: 1081591 - RNA, 19 nt, Homo sapiens
  misc_RNA (1)...(19): siRNA sense strand
gaaaugguacugaaaguug

SEQ ID NO: 1081592 - RNA, 19 nt, Homo sapiens
  misc_RNA (1)...(19): siRNA sense strand
aauuaaagcuguaccagua

SEQ ID NO: 1081593 - RNA, 19 nt, Homo sapiens
  misc_RNA (1)...(19): siRNA sense strand
gaucagagguagagauuac

SEQ ID NO: 1081594 - RNA, 19 nt, Homo sapiens
  misc_RNA (1)...(19): siRNA sense strand
cagaugaaaucacagauga

SEQ ID NO: 1081595 - RNA, 19 nt, Homo sapiens
  misc_RNA (1)...(19): siRNA sense strand
ggaauuggcuauggauaau

SEQ ID NO: 1081596 - RNA, 19 nt, Homo sapiens
  misc_RNA (1)...(19): siRNA sense strand
agaaagagaugauggaagu

SEQ ID NO: 1081597 - RNA, 19 nt, Homo sapiens
  misc_RNA (1)...(19): siRNA sense strand
aaaaguaucugccucauuu

SEQ ID NO: 1081598 - RNA, 19 nt, Homo sapiens
  misc_RNA (1)...(19): siRNA sense strand
gggaagaaguuucaccaau

SEQ ID NO: 1081599 - RNA, 19 nt, Homo sapiens
  misc_RNA (1)...(19): siRNA sense strand
gaagcaagcacaugccaaa

SEQ ID NO: 1081600 - RNA, 19 nt, Homo sapiens
  misc_RNA (1)...(19): siRNA sense strand
gaucaaaccuggugcuacu

SEQ ID NO: 1081601 - RNA, 19 nt, Homo sapiens
  misc_RNA (1)...(19): siRNA sense strand
gaaguguuaccauuacuaa

SEQ ID NO: 1081602 - RNA, 19 nt, Homo sapiens
  misc_RNA (1)...(19): siRNA sense strand
gaagaaguuucaccaaugc

SEQ ID NO: 1081603 - RNA, 19 nt, Homo sapiens
  misc_RNA (1)...(19): siRNA sense strand
caacuuccuuguaucagaa

SEQ ID NO: 1081604 - RNA, 19 nt, Homo sapiens
  misc_RNA (1)...(19): siRNA sense strand
ggaauuccaucugagaaga

SEQ ID NO: 1081605 - RNA, 19 nt, Homo sapiens
  misc_RNA (1)...(19): siRNA sense strand
aaagugagauuacaucagu

SEQ ID NO: 1081606 - RNA, 19 nt, Homo sapiens
  misc_RNA (1)...(19): siRNA sense strand
gaaagaaagagaugaugga

SEQ ID NO: 1081607 - RNA, 19 nt, Homo sapiens
  misc_RNA (1)...(19): siRNA sense strand
aaagggaaauguugucgaa

SEQ ID NO: 1081608 - RNA, 19 nt, Homo sapiens
  misc_RNA (1)...(19): siRNA sense strand
cgaagcacauguaauggaa

SEQ ID NO: 1081609 - RNA, 19 nt, Homo sapiens
  misc_RNA (1)...(19): siRNA sense strand
caagaaccaugcauacauc

SEQ ID NO: 1081610 - RNA, 19 nt, Homo sapiens
  misc_RNA (1)...(19): siRNA sense strand
gauuaugccuauacuggaa

SEQ ID NO: 1081611 - RNA, 19 nt, Homo sapiens
  misc_RNA (1)...(19): siRNA sense strand
uaugugaccuuuccaccua

SEQ ID NO: 1081612 - RNA, 19 nt, Homo sapiens
  misc_RNA (1)...(19): siRNA sense strand
gauaucuguuagcccauua

SEQ ID NO: 1081613 - RNA, 19 nt, Homo sapiens
  misc_RNA (1)...(19): siRNA sense strand
gaagaaaugguacugaaag

SEQ ID NO: 1081614 - RNA, 19 nt, Homo sapiens
  misc_RNA (1)...(19): siRNA sense strand
ugaaaguuguccuuaguug

SEQ ID NO: 1081615 - RNA, 19 nt, Homo sapiens
  misc_RNA (1)...(19): siRNA sense strand
gccaggugauucaguuuaa

SEQ ID NO: 1081616 - RNA, 19 nt, Homo sapiens
  misc_RNA (1)...(19): siRNA sense strand
caucauuucuucaaguuuc

SEQ ID NO: 1081617 - RNA, 19 nt, Homo sapiens
  misc_RNA (1)...(19): siRNA sense strand
uuacaauccucuuuccaaa

SEQ ID NO: 1081618 - RNA, 19 nt, Homo sapiens
  misc_RNA (1)...(19): siRNA sense strand
gauguugaaucuuacaauc

SEQ ID NO: 1081619 - RNA, 19 nt, Homo sapiens
  misc_RNA (1)...(19): siRNA sense strand
gaggaucccgggacauuaa

SEQ ID NO: 1081620 - RNA, 19 nt, Homo sapiens
  misc_RNA (1)...(19): siRNA sense strand
guaucugccucauuugauu

SEQ ID NO: 1081621 - RNA, 19 nt, Homo sapiens
  misc_RNA (1)...(19): siRNA sense strand
aagaagaaaugguacugaa

SEQ ID NO: 1081622 - RNA, 19 nt, Homo sapiens
  misc_RNA (1)...(19): siRNA sense strand
guacugaaaguuguccuua

SEQ ID NO: 1081623 - RNA, 19 nt, Homo sapiens
  misc_RNA (1)...(19): siRNA sense strand
cagaugaagugcaggucua

SEQ ID NO: 1081624 - RNA, 19 nt, Homo sapiens
  misc_RNA (1)...(19): siRNA sense strand
uagcagaguuugggcaauu

SEQ ID NO: 1081625 - RNA, 19 nt, Homo sapiens
  misc_RNA (1)...(19): siRNA sense strand
gaagaagaaaugguacuga

SEQ ID NO: 1081626 - RNA, 19 nt, Homo sapiens
  misc_RNA (1)...(19): siRNA sense strand
ggaaguguuaccauuacua

SEQ ID NO: 1081627 - RNA, 19 nt, Homo sapiens
  misc_RNA (1)...(19): siRNA sense strand
auacagagacccaugguuu

SEQ ID NO: 1081628 - RNA, 19 nt, Homo sapiens
  misc_RNA (1)...(19): siRNA sense strand
ggauaucuguuagcccauu

SEQ ID NO: 1081629 - RNA, 19 nt, Homo sapiens
  misc_RNA (1)...(19): siRNA sense strand
gguggacucuucccugaug

SEQ ID NO: 1081630 - RNA, 19 nt, Homo sapiens
  misc_RNA (1)...(19): siRNA sense strand
aaauguuccugaagaagaa

SEQ ID NO: 1081631 - RNA, 19 nt, Homo sapiens
  misc_RNA (1)...(19): siRNA sense strand
ccuagagccuuaacagaau

SEQ ID NO: 1081632 - RNA, 19 nt, Homo sapiens
  misc_RNA (1)...(19): siRNA sense strand
aaucauggaugcaauuaag

SEQ ID NO: 1081633 - RNA, 19 nt, Homo sapiens
  misc_RNA (1)...(19): siRNA sense strand
gggcuauguuugaaguaaa

SEQ ID NO: 1081634 - RNA, 19 nt, Homo sapiens
  misc_RNA (1)...(19): siRNA sense strand
cgaaggaucuuuugagugu

SEQ ID NO: 1081635 - RNA, 19 nt, Homo sapiens
  misc_RNA (1)...(19): siRNA sense strand
gcaagcacaugccaaaaug

SEQ ID NO: 1081636 - RNA, 19 nt, Homo sapiens
  misc_RNA (1)...(19): siRNA sense strand
uaaauguuccugaagaaga

SEQ ID NO: 1081637 - RNA, 19 nt, Homo sapiens
  misc_RNA (1)...(19): siRNA sense strand
guaaaagcauuucucgauu

SEQ ID NO: 1081638 - RNA, 19 nt, Homo sapiens
  misc_RNA (1)...(19): siRNA sense strand
cauccacaacugagaaaua

SEQ ID NO: 1081639 - RNA, 19 nt, Homo sapiens
  misc_RNA (1)...(19): siRNA sense strand
ugaaaucacagaugaagug

SEQ ID NO: 1081640 - RNA, 19 nt, Homo sapiens
  misc_RNA (1)...(19): siRNA sense strand
aagcacauguaauggaauu

SEQ ID NO: 1081641 - RNA, 19 nt, Homo sapiens
  misc_RNA (1)...(19): siRNA sense strand
ccagugauuucuuagagau

SEQ ID NO: 1081642 - RNA, 19 nt, Homo sapiens
  misc_RNA (1)...(19): siRNA sense strand
gccuagagccuuaacagaa

SEQ ID NO: 1081643 - RNA, 19 nt, Homo sapiens
  misc_RNA (1)...(19): siRNA sense strand
uuaaagcuguaccaguaaa

SEQ ID NO: 1081644 - RNA, 19 nt, Homo sapiens
  misc_RNA (1)...(19): siRNA sense strand
ucacaaaacugaggaaaau

SEQ ID NO: 1081645 - RNA, 19 nt, Homo sapiens
  misc_RNA (1)...(19): siRNA sense strand
cucgauagauuauuuguca

SEQ ID NO: 1081646 - RNA, 19 nt, Homo sapiens
  misc_RNA (1)...(19): siRNA sense strand
cauauacuauccagaagca

SEQ ID NO: 1081647 - RNA, 19 nt, Homo sapiens
  misc_RNA (1)...(19): siRNA sense strand
aggacugucuguucaauga

SEQ ID NO: 1081648 - RNA, 19 nt, Homo sapiens
  misc_RNA (1)...(19): siRNA sense strand
uuauggcucucgauagauu

SEQ ID NO: 1081649 - RNA, 19 nt, Homo sapiens
  misc_RNA (1)...(19): siRNA sense strand
uuacuaauuuguccuccaa

SEQ ID NO: 1081650 - RNA, 19 nt, Homo sapiens
  misc_RNA (1)...(19): siRNA sense strand
caggugauucaguuuaaua

SEQ ID NO: 1081651 - RNA, 19 nt, Homo sapiens
  misc_RNA (1)...(19): siRNA sense strand
accaaugccuagagccuua

SEQ ID NO: 1081652 - RNA, 19 nt, Homo sapiens
  misc_RNA (1)...(19): siRNA sense strand
gaaccaugcauacaucagu

SEQ ID NO: 1081653 - RNA, 19 nt, Homo sapiens
  misc_RNA (1)...(19): siRNA sense strand
ggagacacuucaggacugu

SEQ ID NO: 1081654 - RNA, 19 nt, Homo sapiens
  misc_RNA (1)...(19): siRNA sense strand
ggaaaauacugccgcaauc

SEQ ID NO: 1081655 - RNA, 19 nt, Homo sapiens
  misc_RNA (1)...(19): siRNA sense strand
ccaaagaauggauaucugu

SEQ ID NO: 1081656 - RNA, 19 nt, Homo sapiens
  misc_RNA (1)...(19): siRNA sense strand
ccaagaaccaugcauacau

SEQ ID NO: 1081657 - RNA, 19 nt, Homo sapiens
  misc_RNA (1)...(19): siRNA sense strand
gcucgaccauccacaacug

SEQ ID NO: 1081658 - RNA, 19 nt, Homo sapiens
  misc_RNA (1)...(19): siRNA sense strand
guauauaugugaccuuucc

SEQ ID NO: 1081659 - RNA, 19 nt, Homo sapiens
  misc_RNA (1)...(19): siRNA sense strand
ccaccaguuuguuugauca

SEQ ID NO: 1081660 - RNA, 19 nt, Homo sapiens
  misc_RNA (1)...(19): siRNA sense strand
aagaauggauaucuguuag

SEQ ID NO: 1081661 - RNA, 19 nt, Homo sapiens
  misc_RNA (1)...(19): siRNA sense strand
caaagaauggauaucuguu

SEQ ID NO: 1081662 - RNA, 19 nt, Homo sapiens
  misc_RNA (1)...(19): siRNA sense strand
ggcucucgauagauuauuu

SEQ ID NO: 1081663 - RNA, 19 nt, Homo sapiens
  misc_RNA (1)...(19): siRNA sense strand
gucaucauuucuucaaguu

SEQ ID NO: 1081664 - RNA, 19 nt, Homo sapiens
  misc_RNA (1)...(19): siRNA sense strand
cuagagccuuaacagaauu

SEQ ID NO: 1081665 - RNA, 19 nt, Homo sapiens
  misc_RNA (1)...(19): siRNA sense strand
aguuauggcucucgauaga

SEQ ID NO: 1081666 - RNA, 19 nt, Homo sapiens
  misc_RNA (1)...(19): siRNA sense strand
ucaguuauggcucucgaua

SEQ ID NO: 1081667 - RNA, 19 nt, Homo sapiens
  misc_RNA (1)...(19): siRNA sense strand
acaccaagaaccaugcaua

SEQ ID NO: 1081668 - RNA, 19 nt, Homo sapiens
  misc_RNA (1)...(19): siRNA sense strand
aaucaacgaagcacaugua

SEQ ID NO: 1081669 - RNA, 19 nt, Homo sapiens
  misc_RNA (1)...(19): siRNA sense strand
cuucaggacugucuguuca

SEQ ID NO: 1081670 - RNA, 19 nt, Homo sapiens
  misc_RNA (1)...(19): siRNA sense strand
agagaugauggaaguguua

SEQ ID NO: 1081671 - RNA, 19 nt, Homo sapiens
  misc_RNA (1)...(19): siRNA sense strand
cuugacaggugguugcaaa

SEQ ID NO: 1081672 - RNA, 19 nt, Homo sapiens
  misc_RNA (1)...(19): siRNA sense strand
ggaucuagucuuucgaguu

SEQ ID NO: 1081673 - RNA, 19 nt, Homo sapiens
  misc_RNA (1)...(19): siRNA sense strand
caaguuuccuuccuaucca

SEQ ID NO: 1081674 - RNA, 19 nt, Homo sapiens
  misc_RNA (1)...(19): siRNA sense strand
gaauuccaucugagaagaa

SEQ ID NO: 1081675 - RNA, 19 nt, Homo sapiens
  misc_RNA (1)...(19): siRNA sense strand
gaugaaaucacagaugaag

SEQ ID NO: 1081676 - RNA, 19 nt, Homo sapiens
  misc_RNA (1)...(19): siRNA sense strand
gcuauggcuccaccaguuu

SEQ ID NO: 1081677 - RNA, 19 nt, Homo sapiens
  misc_RNA (1)...(19): siRNA sense strand
uugccaggaucuagucuuu

SEQ ID NO: 1081678 - RNA, 19 nt, Homo sapiens
  misc_RNA (1)...(19): siRNA sense strand
aaaguuguccuuaguugga

SEQ ID NO: 1081679 - RNA, 19 nt, Homo sapiens
  misc_RNA (1)...(19): siRNA sense strand
gaauuaaauguuccugaag

SEQ ID NO: 1081680 - RNA, 19 nt, Homo sapiens
  misc_RNA (1)...(19): siRNA sense strand
gugauuaugcaccagauga

SEQ ID NO: 1081681 - RNA, 19 nt, Homo sapiens
  misc_RNA (1)...(19): siRNA sense strand
gaaucuuacaauccucuuu

SEQ ID NO: 1081682 - RNA, 19 nt, Homo sapiens
  misc_RNA (1)...(19): siRNA sense strand
aaaagucucuuagauguug

SEQ ID NO: 1081683 - RNA, 19 nt, Homo sapiens
  misc_RNA (1)...(19): siRNA sense strand
ucagggcuauguuugaagu

SEQ ID NO: 1081684 - RNA, 19 nt, Homo sapiens
  misc_RNA (1)...(19): siRNA sense strand
uggaugcaauuaagugugu

SEQ ID NO: 1081685 - RNA, 19 nt, Homo sapiens
  misc_RNA (1)...(19): siRNA sense strand
gaucauggauugcaaauau

SEQ ID NO: 1081686 - RNA, 19 nt, Homo sapiens
  misc_RNA (1)...(19): siRNA sense strand
ggaagaagaugaagaggaa

SEQ ID NO: 1081687 - RNA, 19 nt, Homo sapiens
  misc_RNA (1)...(19): siRNA sense strand
ggaagaagcucacuacaag

SEQ ID NO: 1081688 - RNA, 19 nt, Homo sapiens
  misc_RNA (1)...(19): siRNA sense strand
gaaaggauccugagagaaa

SEQ ID NO: 1081689 - RNA, 19 nt, Homo sapiens
  misc_RNA (1)...(19): siRNA sense strand
ggaaucugaugaugaguuu

SEQ ID NO: 1081690 - RNA, 19 nt, Homo sapiens
  misc_RNA (1)...(19): siRNA sense strand
gaagugagaugcaugaaac

SEQ ID NO: 1081691 - RNA, 19 nt, Homo sapiens
  misc_RNA (1)...(19): siRNA sense strand
gaaucugccucccaaguug

SEQ ID NO: 1081692 - RNA, 19 nt, Homo sapiens
  misc_RNA (1)...(19): siRNA sense strand
ggaugaaggagauauguuu

SEQ ID NO: 1081693 - RNA, 19 nt, Homo sapiens
  misc_RNA (1)...(19): siRNA sense strand
acagagagaucccaagaga

SEQ ID NO: 1081694 - RNA, 19 nt, Homo sapiens
  misc_RNA (1)...(19): siRNA sense strand
guggaucucuugcauauuc

SEQ ID NO: 1081695 - RNA, 19 nt, Homo sapiens
  misc_RNA (1)...(19): siRNA sense strand
gaauguagucuucuuugaa

SEQ ID NO: 1081696 - RNA, 19 nt, Homo sapiens
  misc_RNA (1)...(19): siRNA sense strand
gaaaagaccaucucuguga

SEQ ID NO: 1081697 - RNA, 19 nt, Homo sapiens
  misc_RNA (1)...(19): siRNA sense strand
uggaaagauugcuggauua

SEQ ID NO: 1081698 - RNA, 19 nt, Homo sapiens
  misc_RNA (1)...(19): siRNA sense strand
gcagauaccaccacugaau

SEQ ID NO: 1081699 - RNA, 19 nt, Homo sapiens
  misc_RNA (1)...(19): siRNA sense strand
caacagguauaaccauauc

SEQ ID NO: 1081700 - RNA, 19 nt, Homo sapiens
  misc_RNA (1)...(19): siRNA sense strand
uaaagaguguaaagaccua

SEQ ID NO: 1081701 - RNA, 19 nt, Homo sapiens
  misc_RNA (1)...(19): siRNA sense strand
gaaagauugcuggauuaua

SEQ ID NO: 1081702 - RNA, 19 nt, Homo sapiens
  misc_RNA (1)...(19): siRNA sense strand
gugaaacacugacaaugau

SEQ ID NO: 1081703 - RNA, 19 nt, Homo sapiens
  misc_RNA (1)...(19): siRNA sense strand
gcaccaaguacauuauuga

SEQ ID NO: 1081704 - RNA, 19 nt, Homo sapiens
  misc_RNA (1)...(19): siRNA sense strand
gaauuggaacggauaaaga

SEQ ID NO: 1081705 - RNA, 19 nt, Homo sapiens
  misc_RNA (1)...(19): siRNA sense strand
gaacggauaaagagcaaga

SEQ ID NO: 1081706 - RNA, 19 nt, Homo sapiens
  misc_RNA (1)...(19): siRNA sense strand
aagaugaccucccugaguu

SEQ ID NO: 1081707 - RNA, 19 nt, Homo sapiens
  misc_RNA (1)...(19): siRNA sense strand
ggaagugagaugcaugaaa

SEQ ID NO: 1081708 - RNA, 19 nt, Homo sapiens
  misc_RNA (1)...(19): siRNA sense strand
ugaggagggucuuaaugaa

SEQ ID NO: 1081709 - RNA, 19 nt, Homo sapiens
  misc_RNA (1)...(19): siRNA sense strand
gggaagaagcucacuacaa

SEQ ID NO: 1081710 - RNA, 19 nt, Homo sapiens
  misc_RNA (1)...(19): siRNA sense strand
uagaagcccuggaaaccaa

SEQ ID NO: 1081711 - RNA, 19 nt, Homo sapiens
  misc_RNA (1)...(19): siRNA sense strand
gagcacaacagcaucauuc

SEQ ID NO: 1081712 - RNA, 19 nt, Homo sapiens
  misc_RNA (1)...(19): siRNA sense strand
gcuacaaaguauaacauuc

SEQ ID NO: 1081713 - RNA, 19 nt, Homo sapiens
  misc_RNA (1)...(19): siRNA sense strand
uaacaucguccgccuuuau

SEQ ID NO: 1081714 - RNA, 19 nt, Homo sapiens
  misc_RNA (1)...(19): siRNA sense strand
cccaggaccuugaggauga

SEQ ID NO: 1081715 - RNA, 19 nt, Homo sapiens
  misc_RNA (1)...(19): siRNA sense strand
gcucagauaguucaugcua

SEQ ID NO: 1081716 - RNA, 19 nt, Homo sapiens
  misc_RNA (1)...(19): siRNA sense strand
cagaccaaacuauaucuua

SEQ ID NO: 1081717 - RNA, 19 nt, Homo sapiens
  misc_RNA (1)...(19): siRNA sense strand
gggagcaccaaguacauua

SEQ ID NO: 1081718 - RNA, 19 nt, Homo sapiens
  misc_RNA (1)...(19): siRNA sense strand
ggagaccagugaugaugau

SEQ ID NO: 1081719 - RNA, 19 nt, Homo sapiens
  misc_RNA (1)...(19): siRNA sense strand
ggaucgagacgccauugua

SEQ ID NO: 1081720 - RNA, 19 nt, Homo sapiens
  misc_RNA (1)...(19): siRNA sense strand
gaaggagauauguuugauu

SEQ ID NO: 1081721 - RNA, 19 nt, Homo sapiens
  misc_RNA (1)...(19): siRNA sense strand
gaccaucucugugaacauc

SEQ ID NO: 1081722 - RNA, 19 nt, Homo sapiens
  misc_RNA (1)...(19): siRNA sense strand
gggcggaagugucuguuca

SEQ ID NO: 1081723 - RNA, 19 nt, Homo sapiens
  misc_RNA (1)...(19): siRNA sense strand
gaaauucugcuuggugaug

SEQ ID NO: 1081724 - RNA, 19 nt, Homo sapiens
  misc_RNA (1)...(19): siRNA sense strand
ggaaagauugcuggauuau

SEQ ID NO: 1081725 - RNA, 19 nt, Homo sapiens
  misc_RNA (1)...(19): siRNA sense strand
agagaaaucuacguggaaa

SEQ ID NO: 1081726 - RNA, 19 nt, Homo sapiens
  misc_RNA (1)...(19): siRNA sense strand
gguuaaagaugaauauagc

SEQ ID NO: 1081727 - RNA, 19 nt, Homo sapiens
  misc_RNA (1)...(19): siRNA sense strand
ugacucagcuaagaaagau

SEQ ID NO: 1081728 - RNA, 19 nt, Homo sapiens
  misc_RNA (1)...(19): siRNA sense strand
caagagaaagaaauacaga

SEQ ID NO: 1081729 - RNA, 19 nt, Homo sapiens
  misc_RNA (1)...(19): siRNA sense strand
gaaguauuuugcucagaua

SEQ ID NO: 1081730 - RNA, 19 nt, Homo sapiens
  misc_RNA (1)...(19): siRNA sense strand
gaccagugaugaugauucu

SEQ ID NO: 1081731 - RNA, 19 nt, Homo sapiens
  misc_RNA (1)...(19): siRNA sense strand
caucccaugugucuaaaga

SEQ ID NO: 1081732 - RNA, 19 nt, Homo sapiens
  misc_RNA (1)...(19): siRNA sense strand
gaaacacugacaaugauca

SEQ ID NO: 1081733 - RNA, 19 nt, Homo sapiens
  misc_RNA (1)...(19): siRNA sense strand
ggauugcaaauauacagua

SEQ ID NO: 1081734 - RNA, 19 nt, Homo sapiens
  misc_RNA (1)...(19): siRNA sense strand
cugaaaggauccugagaga

SEQ ID NO: 1081735 - RNA, 19 nt, Homo sapiens
  misc_RNA (1)...(19): siRNA sense strand
gagaaaagcaagagaaaga

SEQ ID NO: 1081736 - RNA, 19 nt, Homo sapiens
  misc_RNA (1)...(19): siRNA sense strand
ucaagaagccaaugacagu

SEQ ID NO: 1081737 - RNA, 19 nt, Homo sapiens
  misc_RNA (1)...(19): siRNA sense strand
gagcaccaaguacauuauu

SEQ ID NO: 1081738 - RNA, 19 nt, Homo sapiens
  misc_RNA (1)...(19): siRNA sense strand
uugagcagguuaaagauga

SEQ ID NO: 1081739 - RNA, 19 nt, Homo sapiens
  misc_RNA (1)...(19): siRNA sense strand
caauaucaaggcccaguuu

SEQ ID NO: 1081740 - RNA, 19 nt, Homo sapiens
  misc_RNA (1)...(19): siRNA sense strand
ugaaggagauauguuugau

SEQ ID NO: 1081741 - RNA, 19 nt, Homo sapiens
  misc_RNA (1)...(19): siRNA sense strand
uaccaccacugaauuggaa

SEQ ID NO: 1081742 - RNA, 19 nt, Homo sapiens
  misc_RNA (1)...(19): siRNA sense strand
gugaaaagguggcaguaaa

SEQ ID NO: 1081743 - RNA, 19 nt, Homo sapiens
  misc_RNA (1)...(19): siRNA sense strand
gcaccugcaguagauauuu

SEQ ID NO: 1081744 - RNA, 19 nt, Homo sapiens
  misc_RNA (1)...(19): siRNA sense strand
auauuccgcuccagaaauu

SEQ ID NO: 1081745 - RNA, 19 nt, Homo sapiens
  misc_RNA (1)...(19): siRNA sense strand
gcuauaucuuauugccaua

SEQ ID NO: 1081746 - RNA, 19 nt, Homo sapiens
  misc_RNA (1)...(19): siRNA sense strand
aaacuggacacucuagcua

SEQ ID NO: 1081747 - RNA, 19 nt, Homo sapiens
  misc_RNA (1)...(19): siRNA sense strand
ccagugaugaugauucuga

SEQ ID NO: 1081748 - RNA, 19 nt, Homo sapiens
  misc_RNA (1)...(19): siRNA sense strand
aauauagcuucuccaggua

SEQ ID NO: 1081749 - RNA, 19 nt, Homo sapiens
  misc_RNA (1)...(19): siRNA sense strand
gcagguuaaagaugaauau

SEQ ID NO: 1081750 - RNA, 19 nt, Homo sapiens
  misc_RNA (1)...(19): siRNA sense strand
ugacauggaugagaaucug

SEQ ID NO: 1081751 - RNA, 19 nt, Homo sapiens
  misc_RNA (1)...(19): siRNA sense strand
uaucacagccacauacuuc

SEQ ID NO: 1081752 - RNA, 19 nt, Homo sapiens
  misc_RNA (1)...(19): siRNA sense strand
caccagcuacaaaguauaa

SEQ ID NO: 1081753 - RNA, 19 nt, Homo sapiens
  misc_RNA (1)...(19): siRNA sense strand
gcgaggguaugauggaaag

SEQ ID NO: 1081754 - RNA, 19 nt, Homo sapiens
  misc_RNA (1)...(19): siRNA sense strand
uggauuauaugaucuggau

SEQ ID NO: 1081755 - RNA, 19 nt, Homo sapiens
  misc_RNA (1)...(19): siRNA sense strand
gcauauuccgcuccagaaa

SEQ ID NO: 1081756 - RNA, 19 nt, Homo sapiens
  misc_RNA (1)...(19): siRNA sense strand
gaugaaggagauauguuug

SEQ ID NO: 1081757 - RNA, 19 nt, Homo sapiens
  misc_RNA (1)...(19): siRNA sense strand
auggaaagauugcuggauu

SEQ ID NO: 1081758 - RNA, 19 nt, Homo sapiens
  misc_RNA (1)...(19): siRNA sense strand
gauuuaagcgaggguauga

SEQ ID NO: 1081759 - RNA, 19 nt, Homo sapiens
  misc_RNA (1)...(19): siRNA sense strand
accaacagguauaaccaua

SEQ ID NO: 1081760 - RNA, 19 nt, Homo sapiens
  misc_RNA (1)...(19): siRNA sense strand
gaucgagacgccauuguag

SEQ ID NO: 1081761 - RNA, 19 nt, Homo sapiens
  misc_RNA (1)...(19): siRNA sense strand
ccaugugucuaaagagugu

SEQ ID NO: 1081762 - RNA, 19 nt, Homo sapiens
  misc_RNA (1)...(19): siRNA sense strand
ugagaugcaugaaacuagu

SEQ ID NO: 1081763 - RNA, 19 nt, Homo sapiens
  misc_RNA (1)...(19): siRNA sense strand
gugugaaaguccaagagaa

SEQ ID NO: 1081764 - RNA, 19 nt, Homo sapiens
  misc_RNA (1)...(19): siRNA sense strand
cauuauugauccacagaau

SEQ ID NO: 1081765 - RNA, 19 nt, Homo sapiens
  misc_RNA (1)...(19): siRNA sense strand
guaguucggagaccaguga

SEQ ID NO: 1081766 - RNA, 19 nt, Homo sapiens
  misc_RNA (1)...(19): siRNA sense strand
ccaugucccucucaacaca

SEQ ID NO: 1081767 - RNA, 19 nt, Homo sapiens
  misc_RNA (1)...(19): siRNA sense strand
ggagcaaaggccuguguga

SEQ ID NO: 1081768 - RNA, 19 nt, Homo sapiens
  misc_RNA (1)...(19): siRNA sense strand
ucugcaagcccgagcaaua

SEQ ID NO: 1081769 - RNA, 19 nt, Homo sapiens
  misc_RNA (1)...(19): siRNA sense strand
uaccaucccaugugucuaa

SEQ ID NO: 1081770 - RNA, 19 nt, Homo sapiens
  misc_RNA (1)...(19): siRNA sense strand
gaaaguccaagagaaaucu

SEQ ID NO: 1081771 - RNA, 19 nt, Homo sapiens
  misc_RNA (1)...(19): siRNA sense strand
gagaaucugccucccaagu

SEQ ID NO: 1081772 - RNA, 19 nt, Homo sapiens
  misc_RNA (1)...(19): siRNA sense strand
acacccagaccaaacuaua

SEQ ID NO: 1081773 - RNA, 19 nt, Homo sapiens
  misc_RNA (1)...(19): siRNA sense strand
cagauaccaccacugaauu

SEQ ID NO: 1081774 - RNA, 19 nt, Homo sapiens
  misc_RNA (1)...(19): siRNA sense strand
gggaaucugaugaugaguu

SEQ ID NO: 1081775 - RNA, 19 nt, Homo sapiens
  misc_RNA (1)...(19): siRNA sense strand
gaaaagcaagagaaagaaa

SEQ ID NO: 1081776 - RNA, 19 nt, Homo sapiens
  misc_RNA (1)...(19): siRNA sense strand
cuacagagagaucccaaga

SEQ ID NO: 1081777 - RNA, 19 nt, Homo sapiens
  misc_RNA (1)...(19): siRNA sense strand
cuguggaucucuugcauau

SEQ ID NO: 1081778 - RNA, 19 nt, Homo sapiens
  misc_RNA (1)...(19): siRNA sense strand
caccugcaguagauauuug

SEQ ID NO: 1081779 - RNA, 19 nt, Homo sapiens
  misc_RNA (1)...(19): siRNA sense strand
uggcagauaccaccacuga

SEQ ID NO: 1081780 - RNA, 19 nt, Homo sapiens
  misc_RNA (1)...(19): siRNA sense strand
ugugaaaguccaagagaaa

SEQ ID NO: 1081781 - RNA, 19 nt, Homo sapiens
  misc_RNA (1)...(19): siRNA sense strand
ggcuccagcugcaguaguu

SEQ ID NO: 1081782 - RNA, 19 nt, Homo sapiens
  misc_RNA (1)...(19): siRNA sense strand
gcaagcccgagcaauauca

SEQ ID NO: 1081783 - RNA, 19 nt, Homo sapiens
  misc_RNA (1)...(19): siRNA sense strand
agagagaucccaagagaag

SEQ ID NO: 1081784 - RNA, 19 nt, Homo sapiens
  misc_RNA (1)...(19): siRNA sense strand
ggagugauccuuuucaugu

SEQ ID NO: 1081785 - RNA, 19 nt, Homo sapiens
  misc_RNA (1)...(19): siRNA sense strand
ucacagagguucaacagaa

SEQ ID NO: 1081786 - RNA, 19 nt, Homo sapiens
  misc_RNA (1)...(19): siRNA sense strand
gaacguauaugggagaaga

SEQ ID NO: 1081787 - RNA, 19 nt, Homo sapiens
  misc_RNA (1)...(19): siRNA sense strand
ugacggagcugucucuuug

SEQ ID NO: 1081788 - RNA, 19 nt, Homo sapiens
  misc_RNA (1)...(19): siRNA sense strand
gaaacacgccagaggcuuu

SEQ ID NO: 1081789 - RNA, 19 nt, Homo sapiens
  misc_RNA (1)...(19): siRNA sense strand
uaaacaaguugaucugugu

SEQ ID NO: 1081790 - RNA, 19 nt, Homo sapiens
  misc_RNA (1)...(19): siRNA sense strand
gaagaugagcuugcaauga

SEQ ID NO: 1081791 - RNA, 19 nt, Homo sapiens
  misc_RNA (1)...(19): siRNA sense strand
gaggagagcugaggagaag

SEQ ID NO: 1081792 - RNA, 19 nt, Homo sapiens
  misc_RNA (1)...(19): siRNA sense strand
caucuuaaagccagaaaua

SEQ ID NO: 1081793 - RNA, 19 nt, Homo sapiens
  misc_RNA (1)...(19): siRNA sense strand
cagauacauuggugaagua

SEQ ID NO: 1081794 - RNA, 19 nt, Homo sapiens
  misc_RNA (1)...(19): siRNA sense strand
gaagagaagcucauugcau

SEQ ID NO: 1081795 - RNA, 19 nt, Homo sapiens
  misc_RNA (1)...(19): siRNA sense strand
ugaaguaggagacaucgua

SEQ ID NO: 1081796 - RNA, 19 nt, Homo sapiens
  misc_RNA (1)...(19): siRNA sense strand
ggagagaguaaacaaguug

SEQ ID NO: 1081797 - RNA, 19 nt, Homo sapiens
  misc_RNA (1)...(19): siRNA sense strand
cgaggagccugaaauaugg

SEQ ID NO: 1081798 - RNA, 19 nt, Homo sapiens
  misc_RNA (1)...(19): siRNA sense strand
gguggaagguggagaccaa

SEQ ID NO: 1081799 - RNA, 19 nt, Homo sapiens
  misc_RNA (1)...(19): siRNA sense strand
ccucagugauucucgguaa

SEQ ID NO: 1081800 - RNA, 19 nt, Homo sapiens
  misc_RNA (1)...(19): siRNA sense strand
gaaauaauggaggagauug

SEQ ID NO: 1081801 - RNA, 19 nt, Homo sapiens
  misc_RNA (1)...(19): siRNA sense strand
aagcaucccuuccacauca

SEQ ID NO: 1081802 - RNA, 19 nt, Homo sapiens
  misc_RNA (1)...(19): siRNA sense strand
aagaugagcuugcaaugag

SEQ ID NO: 1081803 - RNA, 19 nt, Homo sapiens
  misc_RNA (1)...(19): siRNA sense strand
agaggaugaugcuguauga

SEQ ID NO: 1081804 - RNA, 19 nt, Homo sapiens
  misc_RNA (1)...(19): siRNA sense strand
gcaaugagagguuucuuac

SEQ ID NO: 1081805 - RNA, 19 nt, Homo sapiens
  misc_RNA (1)...(19): siRNA sense strand
gaagcucauugcaucuguu

SEQ ID NO: 1081806 - RNA, 19 nt, Homo sapiens
  misc_RNA (1)...(19): siRNA sense strand
gcacaaagaagaggaagca

SEQ ID NO: 1081807 - RNA, 19 nt, Homo sapiens
  misc_RNA (1)...(19): siRNA sense strand
acacgaggagccugaaaua

SEQ ID NO: 1081808 - RNA, 19 nt, Homo sapiens
  misc_RNA (1)...(19): siRNA sense strand
cagaagacccacuuucaug

SEQ ID NO: 1081809 - RNA, 19 nt, Homo sapiens
  misc_RNA (1)...(19): siRNA sense strand
ccagauacauuggugaagu

SEQ ID NO: 1081810 - RNA, 19 nt, Homo sapiens
  misc_RNA (1)...(19): siRNA sense strand
gcagaagacccacuuucau

SEQ ID NO: 1081811 - RNA, 19 nt, Homo sapiens
  misc_RNA (1)...(19): siRNA sense strand
auacauuggugaaguagga

SEQ ID NO: 1081812 - RNA, 19 nt, Homo sapiens
  misc_RNA (1)...(19): siRNA sense strand
uggaggagauugugaugga

SEQ ID NO: 1081813 - RNA, 19 nt, Homo sapiens
  misc_RNA (1)...(19): siRNA sense strand
ggagaagaucugcagaaga

SEQ ID NO: 1081814 - RNA, 19 nt, Homo sapiens
  misc_RNA (1)...(19): siRNA sense strand
gaggagaagaucugcagaa

SEQ ID NO: 1081815 - RNA, 19 nt, Homo sapiens
  misc_RNA (1)...(19): siRNA sense strand
agacccacuuucaugauuu

SEQ ID NO: 1081816 - RNA, 19 nt, Homo sapiens
  misc_RNA (1)...(19): siRNA sense strand
gagaagagaagcucauugc

SEQ ID NO: 1081817 - RNA, 19 nt, Homo sapiens
  misc_RNA (1)...(19): siRNA sense strand
gaagacccacuuucaugau

SEQ ID NO: 1081818 - RNA, 19 nt, Homo sapiens
  misc_RNA (1)...(19): siRNA sense strand
caaguugaucugugugaaa

SEQ ID NO: 1081819 - RNA, 19 nt, Homo sapiens
  misc_RNA (1)...(19): siRNA sense strand
ggaggagauugugauggaa

SEQ ID NO: 1081820 - RNA, 19 nt, Homo sapiens
  misc_RNA (1)...(19): siRNA sense strand
caacaccugagcacaaaga

SEQ ID NO: 1081821 - RNA, 19 nt, Homo sapiens
  misc_RNA (1)...(19): siRNA sense strand
gacccacuuucaugauuug

SEQ ID NO: 1081822 - RNA, 19 nt, Homo sapiens
  misc_RNA (1)...(19): siRNA sense strand
aaugagagguuucuuacag

SEQ ID NO: 1081823 - RNA, 19 nt, Homo sapiens
  misc_RNA (1)...(19): siRNA sense strand
ggagaagagaagcucauug

SEQ ID NO: 1081824 - RNA, 19 nt, Homo sapiens
  misc_RNA (1)...(19): siRNA sense strand
ucaucucgcugguaacuca

SEQ ID NO: 1081825 - RNA, 19 nt, Homo sapiens
  misc_RNA (1)...(19): siRNA sense strand
ugcaucaucucgcugguaa

SEQ ID NO: 1081826 - RNA, 19 nt, Homo sapiens
  misc_RNA (1)...(19): siRNA sense strand
ggaggagagcugaggagaa

SEQ ID NO: 1081827 - RNA, 19 nt, Homo sapiens
  misc_RNA (1)...(19): siRNA sense strand
gaggagauugugauggaaa

SEQ ID NO: 1081828 - RNA, 19 nt, Homo sapiens
  misc_RNA (1)...(19): siRNA sense strand
aggaugaugcuguaugaua

SEQ ID NO: 1081829 - RNA, 19 nt, Homo sapiens
  misc_RNA (1)...(19): siRNA sense strand
caccugagcacaaagaaga

SEQ ID NO: 1081830 - RNA, 19 nt, Homo sapiens
  misc_RNA (1)...(19): siRNA sense strand
ggcagaagacccacuuuca

SEQ ID NO: 1081831 - RNA, 19 nt, Homo sapiens
  misc_RNA (1)...(19): siRNA sense strand
cagaaauaauggaggagau

SEQ ID NO: 1081832 - RNA, 19 nt, Homo sapiens
  misc_RNA (1)...(19): siRNA sense strand
ccugaaauauggaaaacua

SEQ ID NO: 1081833 - RNA, 19 nt, Homo sapiens
  misc_RNA (1)...(19): siRNA sense strand
cccaacaccugagcacaaa

SEQ ID NO: 1081834 - RNA, 19 nt, Homo sapiens
  misc_RNA (1)...(19): siRNA sense strand
agaagacccacuuucauga

SEQ ID NO: 1081835 - RNA, 19 nt, Homo sapiens
  misc_RNA (1)...(19): siRNA sense strand
uugcugcucucguccauga

SEQ ID NO: 1081836 - RNA, 19 nt, Homo sapiens
  misc_RNA (1)...(19): siRNA sense strand
cuucggaacugcaucaucu

SEQ ID NO: 1081837 - RNA, 19 nt, Homo sapiens
  misc_RNA (1)...(19): siRNA sense strand
aagacccacuuucaugauu

SEQ ID NO: 1081838 - RNA, 19 nt, Homo sapiens
  misc_RNA (1)...(19): siRNA sense strand
ggagagcugaggagaagau

SEQ ID NO: 1081839 - RNA, 19 nt, Homo sapiens
  misc_RNA (1)...(19): siRNA sense strand
gagcugaggagaagaucug

SEQ ID NO: 1081840 - RNA, 19 nt, Homo sapiens
  misc_RNA (1)...(19): siRNA sense strand
acgaggagccugaaauaug

SEQ ID NO: 1081841 - RNA, 19 nt, Homo sapiens
  misc_RNA (1)...(19): siRNA sense strand
ugaucugugugaaagcuuu

SEQ ID NO: 1081842 - RNA, 19 nt, Homo sapiens
  misc_RNA (1)...(19): siRNA sense strand
cacaucagaucaaagacau

SEQ ID NO: 1081843 - RNA, 19 nt, Homo sapiens
  misc_RNA (1)...(19): siRNA sense strand
uggagagaguaaacaaguu

SEQ ID NO: 1081844 - RNA, 19 nt, Homo sapiens
  misc_RNA (1)...(19): siRNA sense strand
cuuaaagccagaaauaaug

SEQ ID NO: 1081845 - RNA, 19 nt, Homo sapiens
  misc_RNA (1)...(19): siRNA sense strand
gguaacaacggcuucaucu

SEQ ID NO: 1081846 - RNA, 19 nt, Homo sapiens
  misc_RNA (1)...(19): siRNA sense strand
gcacacgaggagccugaaa

SEQ ID NO: 1081847 - RNA, 19 nt, Homo sapiens
  misc_RNA (1)...(19): siRNA sense strand
gagcuugcaaugagagguu

SEQ ID NO: 1081848 - RNA, 19 nt, Homo sapiens
  misc_RNA (1)...(19): siRNA sense strand
caucuggauuuacccaaca

SEQ ID NO: 1081849 - RNA, 19 nt, Homo sapiens
  misc_RNA (1)...(19): siRNA sense strand
ugcaaugagagguuucuua

SEQ ID NO: 1081850 - RNA, 19 nt, Homo sapiens
  misc_RNA (1)...(19): siRNA sense strand
ccacaucagaucaaagaca

SEQ ID NO: 1081851 - RNA, 19 nt, Homo sapiens
  misc_RNA (1)...(19): siRNA sense strand
ucacuacggacacaggauu

SEQ ID NO: 1081852 - RNA, 19 nt, Homo sapiens
  misc_RNA (1)...(19): siRNA sense strand
gagagaguaaacaaguuga

SEQ ID NO: 1081853 - RNA, 19 nt, Homo sapiens
  misc_RNA (1)...(19): siRNA sense strand
cucagaggaugaugcugua

SEQ ID NO: 1081854 - RNA, 19 nt, Homo sapiens
  misc_RNA (1)...(19): siRNA sense strand
cagaagaugagcuugcaau

SEQ ID NO: 1081855 - RNA, 19 nt, Homo sapiens
  misc_RNA (1)...(19): siRNA sense strand
gagaguaaacaaguugauc

SEQ ID NO: 1081856 - RNA, 19 nt, Homo sapiens
  misc_RNA (1)...(19): siRNA sense strand
guggagagaguaaacaagu

SEQ ID NO: 1081857 - RNA, 19 nt, Homo sapiens
  misc_RNA (1)...(19): siRNA sense strand
gggagaagagaagcucauu

SEQ ID NO: 1081858 - RNA, 19 nt, Homo sapiens
  misc_RNA (1)...(19): siRNA sense strand
cacagagguucaacagaag

SEQ ID NO: 1081859 - RNA, 19 nt, Homo sapiens
  misc_RNA (1)...(19): siRNA sense strand
agaaauaauggaggagauu

SEQ ID NO: 1081860 - RNA, 19 nt, Homo sapiens
  misc_RNA (1)...(19): siRNA sense strand
acaaguugaucugugugaa

SEQ ID NO: 1081861 - RNA, 19 nt, Homo sapiens
  misc_RNA (1)...(19): siRNA sense strand
caacggcuucaucuggauu

SEQ ID NO: 1081862 - RNA, 19 nt, Homo sapiens
  misc_RNA (1)...(19): siRNA sense strand
uccaggcaguguucucuga

SEQ ID NO: 1081863 - RNA, 19 nt, Homo sapiens
  misc_RNA (1)...(19): siRNA sense strand
gagagguuucuuacaggaa

SEQ ID NO: 1081864 - RNA, 19 nt, Homo sapiens
  misc_RNA (1)...(19): siRNA sense strand
gaguaaacaaguugaucug

SEQ ID NO: 1081865 - RNA, 19 nt, Homo sapiens
  misc_RNA (1)...(19): siRNA sense strand
caggcuggauucggucuug

SEQ ID NO: 1081866 - RNA, 19 nt, Homo sapiens
  misc_RNA (1)...(19): siRNA sense strand
gagaagcucauugcaucug

SEQ ID NO: 1081867 - RNA, 19 nt, Homo sapiens
  misc_RNA (1)...(19): siRNA sense strand
guauaugggagaagagaag

SEQ ID NO: 1081868 - RNA, 19 nt, Homo sapiens
  misc_RNA (1)...(19): siRNA sense strand
gccagaggcuuuuggaaca

SEQ ID NO: 1081869 - RNA, 19 nt, Homo sapiens
  misc_RNA (1)...(19): siRNA sense strand
agaagcucauugcaucugu

SEQ ID NO: 1081870 - RNA, 19 nt, Homo sapiens
  misc_RNA (1)...(19): siRNA sense strand
cagaggaugaugcuguaug

SEQ ID NO: 1081871 - RNA, 19 nt, Homo sapiens
  misc_RNA (1)...(19): siRNA sense strand
ccuggagccugucucucuu

SEQ ID NO: 1081872 - RNA, 19 nt, Homo sapiens
  misc_RNA (1)...(19): siRNA sense strand
ggaagguggagaccaacuc

SEQ ID NO: 1081873 - RNA, 19 nt, Homo sapiens
  misc_RNA (1)...(19): siRNA sense strand
cauccuguacugcuaugaa

SEQ ID NO: 1081874 - RNA, 19 nt, Homo sapiens
  misc_RNA (1)...(19): siRNA sense strand
agaugagcuugcaaugaga

SEQ ID NO: 1081875 - RNA, 19 nt, Homo sapiens
  misc_RNA (1)...(19): siRNA sense strand
aggagaagaucugcagaag

SEQ ID NO: 1081876 - RNA, 19 nt, Homo sapiens
  misc_RNA (1)...(19): siRNA sense strand
gaagaugaauugagaauga

SEQ ID NO: 1081877 - RNA, 19 nt, Homo sapiens
  misc_RNA (1)...(19): siRNA sense strand
gacagaagcucauggauuu

SEQ ID NO: 1081878 - RNA, 19 nt, Homo sapiens
  misc_RNA (1)...(19): siRNA sense strand
gaagagaccuacagaguug

SEQ ID NO: 1081879 - RNA, 19 nt, Homo sapiens
  misc_RNA (1)...(19): siRNA sense strand
gaaaugaucgugaguauga

SEQ ID NO: 1081880 - RNA, 19 nt, Homo sapiens
  misc_RNA (1)...(19): siRNA sense strand
aaagacagcugccauagua

SEQ ID NO: 1081881 - RNA, 19 nt, Homo sapiens
  misc_RNA (1)...(19): siRNA sense strand
ggaaugacccuaugaguaa

SEQ ID NO: 1081882 - RNA, 19 nt, Homo sapiens
  misc_RNA (1)...(19): siRNA sense strand
agaagaagcuggugcauaa

SEQ ID NO: 1081883 - RNA, 19 nt, Homo sapiens
  misc_RNA (1)...(19): siRNA sense strand
ggaggaagcugagaaacua

SEQ ID NO: 1081884 - RNA, 19 nt, Homo sapiens
  misc_RNA (1)...(19): siRNA sense strand
gauuguggcuucccuguua

SEQ ID NO: 1081885 - RNA, 19 nt, Homo sapiens
  misc_RNA (1)...(19): siRNA sense strand
ggaguaggcugucuauaug

SEQ ID NO: 1081886 - RNA, 19 nt, Homo sapiens
  misc_RNA (1)...(19): siRNA sense strand
ggaagacccucguuuacaa

SEQ ID NO: 1081887 - RNA, 19 nt, Homo sapiens
  misc_RNA (1)...(19): siRNA sense strand
gacagaagcuucacaggaa

SEQ ID NO: 1081888 - RNA, 19 nt, Homo sapiens
  misc_RNA (1)...(19): siRNA sense strand
ggagaagcaucauuacuug

SEQ ID NO: 1081889 - RNA, 19 nt, Homo sapiens
  misc_RNA (1)...(19): siRNA sense strand
gaaagagaccacuagauuu

SEQ ID NO: 1081890 - RNA, 19 nt, Homo sapiens
  misc_RNA (1)...(19): siRNA sense strand
gcaggaagacccucguuua

SEQ ID NO: 1081891 - RNA, 19 nt, Homo sapiens
  misc_RNA (1)...(19): siRNA sense strand
caacaucaguguagcagaa

SEQ ID NO: 1081892 - RNA, 19 nt, Homo sapiens
  misc_RNA (1)...(19): siRNA sense strand
gagaaaugaucgugaguau

SEQ ID NO: 1081893 - RNA, 19 nt, Homo sapiens
  misc_RNA (1)...(19): siRNA sense strand
acacaacccucaauaaaug

SEQ ID NO: 1081894 - RNA, 19 nt, Homo sapiens
  misc_RNA (1)...(19): siRNA sense strand
gaaguaauaugagcaggaa

SEQ ID NO: 1081895 - RNA, 19 nt, Homo sapiens
  misc_RNA (1)...(19): siRNA sense strand
agaauuagcugacucugaa

SEQ ID NO: 1081896 - RNA, 19 nt, Homo sapiens
  misc_RNA (1)...(19): siRNA sense strand
ucacaucucucaagaaauc

SEQ ID NO: 1081897 - RNA, 19 nt, Homo sapiens
  misc_RNA (1)...(19): siRNA sense strand
gaaaaggagucaaugaaaa

SEQ ID NO: 1081898 - RNA, 19 nt, Homo sapiens
  misc_RNA (1)...(19): siRNA sense strand
gcgaauggcccaaacuaua

SEQ ID NO: 1081899 - RNA, 19 nt, Homo sapiens
  misc_RNA (1)...(19): siRNA sense strand
gggcagagcuggacagaag

SEQ ID NO: 1081900 - RNA, 19 nt, Homo sapiens
  misc_RNA (1)...(19): siRNA sense strand
gaaagagucuauggguaaa

SEQ ID NO: 1081901 - RNA, 19 nt, Homo sapiens
  misc_RNA (1)...(19): siRNA sense strand
gaaagaagaaucaacaaca

SEQ ID NO: 1081902 - RNA, 19 nt, Homo sapiens
  misc_RNA (1)...(19): siRNA sense strand
auaaugcucuggcaaauuu

SEQ ID NO: 1081903 - RNA, 19 nt, Homo sapiens
  misc_RNA (1)...(19): siRNA sense strand
gaaugaugauugcgaaaga

SEQ ID NO: 1081904 - RNA, 19 nt, Homo sapiens
  misc_RNA (1)...(19): siRNA sense strand
gaaguaagaauccuauuuc

SEQ ID NO: 1081905 - RNA, 19 nt, Homo sapiens
  misc_RNA (1)...(19): siRNA sense strand
ggacagaagcucauggauu

SEQ ID NO: 1081906 - RNA, 19 nt, Homo sapiens
  misc_RNA (1)...(19): siRNA sense strand
ggagauacagaugaaauua

SEQ ID NO: 1081907 - RNA, 19 nt, Homo sapiens
  misc_RNA (1)...(19): siRNA sense strand
caucauuacuugagaaaga

SEQ ID NO: 1081908 - RNA, 19 nt, Homo sapiens
  misc_RNA (1)...(19): siRNA sense strand
gaauugagaaugaugauug

SEQ ID NO: 1081909 - RNA, 19 nt, Homo sapiens
  misc_RNA (1)...(19): siRNA sense strand
ggacugugguaaagagaaa

SEQ ID NO: 1081910 - RNA, 19 nt, Homo sapiens
  misc_RNA (1)...(19): siRNA sense strand
gguggaacauuacaaauuc

SEQ ID NO: 1081911 - RNA, 19 nt, Homo sapiens
  misc_RNA (1)...(19): siRNA sense strand
ccucacaucucucaagaaa

SEQ ID NO: 1081912 - RNA, 19 nt, Homo sapiens
  misc_RNA (1)...(19): siRNA sense strand
gaagagcggucugauucaa

SEQ ID NO: 1081913 - RNA, 19 nt, Homo sapiens
  misc_RNA (1)...(19): siRNA sense strand
ggaaagaugaccaaggaaa

SEQ ID NO: 1081914 - RNA, 19 nt, Homo sapiens
  misc_RNA (1)...(19): siRNA sense strand
gaugauaagccaagagaaa

SEQ ID NO: 1081915 - RNA, 19 nt, Homo sapiens
  misc_RNA (1)...(19): siRNA sense strand
cagggaagcuguuugauag

SEQ ID NO: 1081916 - RNA, 19 nt, Homo sapiens
  misc_RNA (1)...(19): siRNA sense strand
caaaagaagugcagaagaa

SEQ ID NO: 1081917 - RNA, 19 nt, Homo sapiens
  misc_RNA (1)...(19): siRNA sense strand
gggaaugacccuaugagua

SEQ ID NO: 1081918 - RNA, 19 nt, Homo sapiens
  misc_RNA (1)...(19): siRNA sense strand
ggaguaggaaguaauauga

SEQ ID NO: 1081919 - RNA, 19 nt, Homo sapiens
  misc_RNA (1)...(19): siRNA sense strand
caaaucaggcguucacaaa

SEQ ID NO: 1081920 - RNA, 19 nt, Homo sapiens
  misc_RNA (1)...(19): siRNA sense strand
uguaagggaugauuucaaa

SEQ ID NO: 1081921 - RNA, 19 nt, Homo sapiens
  misc_RNA (1)...(19): siRNA sense strand
cagcagauuuggagaaguu

SEQ ID NO: 1081922 - RNA, 19 nt, Homo sapiens
  misc_RNA (1)...(19): siRNA sense strand
auggaaagguggaacauua

SEQ ID NO: 1081923 - RNA, 19 nt, Homo sapiens
  misc_RNA (1)...(19): siRNA sense strand
agaaagagaccacuagauu

SEQ ID NO: 1081924 - RNA, 19 nt, Homo sapiens
  misc_RNA (1)...(19): siRNA sense strand
ggaagagaccuacagaguu

SEQ ID NO: 1081925 - RNA, 19 nt, Homo sapiens
  misc_RNA (1)...(19): siRNA sense strand
cuaaagacauaaaggaaga

SEQ ID NO: 1081926 - RNA, 19 nt, Homo sapiens
  misc_RNA (1)...(19): siRNA sense strand
ugcaaagacucacaacaua

SEQ ID NO: 1081927 - RNA, 19 nt, Homo sapiens
  misc_RNA (1)...(19): siRNA sense strand
cagccugacuugggaauua

SEQ ID NO: 1081928 - RNA, 19 nt, Homo sapiens
  misc_RNA (1)...(19): siRNA sense strand
gggaguaggcugucuauau

SEQ ID NO: 1081929 - RNA, 19 nt, Homo sapiens
  misc_RNA (1)...(19): siRNA sense strand
ggaagauguuacugaagaa

SEQ ID NO: 1081930 - RNA, 19 nt, Homo sapiens
  misc_RNA (1)...(19): siRNA sense strand
ugaaagagucuauggguaa

SEQ ID NO: 1081931 - RNA, 19 nt, Homo sapiens
  misc_RNA (1)...(19): siRNA sense strand
aauaugaucccucaaagua

SEQ ID NO: 1081932 - RNA, 19 nt, Homo sapiens
  misc_RNA (1)...(19): siRNA sense strand
ggagaggaguaggaaguaa

SEQ ID NO: 1081933 - RNA, 19 nt, Homo sapiens
  misc_RNA (1)...(19): siRNA sense strand
ggagaacaccuguggcaaa

SEQ ID NO: 1081934 - RNA, 19 nt, Homo sapiens
  misc_RNA (1)...(19): siRNA sense strand
aaacagaaaccaaaggaaa

SEQ ID NO: 1081935 - RNA, 19 nt, Homo sapiens
  misc_RNA (1)...(19): siRNA sense strand
ucaagguucugacuuauuc

SEQ ID NO: 1081936 - RNA, 19 nt, Homo sapiens
  misc_RNA (1)...(19): siRNA sense strand
aaacgaagcgccuuuaugu

SEQ ID NO: 1081937 - RNA, 19 nt, Homo sapiens
  misc_RNA (1)...(19): siRNA sense strand
gaaacgaagcgccuuuaug

SEQ ID NO: 1081938 - RNA, 19 nt, Homo sapiens
  misc_RNA (1)...(19): siRNA sense strand
gaagaaacagaucacagaa

SEQ ID NO: 1081939 - RNA, 19 nt, Homo sapiens
  misc_RNA (1)...(19): siRNA sense strand
gcaaaucaacuuaagcaau

SEQ ID NO: 1081940 - RNA, 19 nt, Homo sapiens
  misc_RNA (1)...(19): siRNA sense strand
gaugugagugcuaaagaua

SEQ ID NO: 1081941 - RNA, 19 nt, Homo sapiens
  misc_RNA (1)...(19): siRNA sense strand
gaucagaauuccaugaaac

SEQ ID NO: 1081942 - RNA, 19 nt, Homo sapiens
  misc_RNA (1)...(19): siRNA sense strand
gaggaaaacuuacagagaa

SEQ ID NO: 1081943 - RNA, 19 nt, Homo sapiens
  misc_RNA (1)...(19): siRNA sense strand
ucaaacaccauuccuauau

SEQ ID NO: 1081944 - RNA, 19 nt, Homo sapiens
  misc_RNA (1)...(19): siRNA sense strand
agugaaaccuggaaagauu

SEQ ID NO: 1081945 - RNA, 19 nt, Homo sapiens
  misc_RNA (1)...(19): siRNA sense strand
gaagaugacaguaauaggu

SEQ ID NO: 1081946 - RNA, 19 nt, Homo sapiens
  misc_RNA (1)...(19): siRNA sense strand
uaagagugauggaccagaa

SEQ ID NO: 1081947 - RNA, 19 nt, Homo sapiens
  misc_RNA (1)...(19): siRNA sense strand
caaauaugaucccucaaag

SEQ ID NO: 1081948 - RNA, 19 nt, Homo sapiens
  misc_RNA (1)...(19): siRNA sense strand
caagagaaaguaaagcaaa

SEQ ID NO: 1081949 - RNA, 19 nt, Homo sapiens
  misc_RNA (1)...(19): siRNA sense strand
caccaaaggucucauccaa

SEQ ID NO: 1081950 - RNA, 19 nt, Homo sapiens
  misc_RNA (1)...(19): siRNA sense strand
ugaaggaggugaggaguau

SEQ ID NO: 1081951 - RNA, 19 nt, Homo sapiens
  misc_RNA (1)...(19): siRNA sense strand
ucacaaacugcauucuuua

SEQ ID NO: 1081952 - RNA, 19 nt, Homo sapiens
  misc_RNA (1)...(19): siRNA sense strand
cuacacaacccucaauaaa

SEQ ID NO: 1081953 - RNA, 19 nt, Homo sapiens
  misc_RNA (1)...(19): siRNA sense strand
gaagaaucaacaacaggua

SEQ ID NO: 1081954 - RNA, 19 nt, Homo sapiens
  misc_RNA (1)...(19): siRNA sense strand
gaacaaccaaccugcguau

SEQ ID NO: 1081955 - RNA, 19 nt, Homo sapiens
  misc_RNA (1)...(19): siRNA sense strand
uaagaaugaugaacgacuu

SEQ ID NO: 1081956 - RNA, 19 nt, Homo sapiens
  misc_RNA (1)...(19): siRNA sense strand
gaagcaucauuacuugaga

SEQ ID NO: 1081957 - RNA, 19 nt, Homo sapiens
  misc_RNA (1)...(19): siRNA sense strand
ggaaugaggacugugguaa

SEQ ID NO: 1081958 - RNA, 19 nt, Homo sapiens
  misc_RNA (1)...(19): siRNA sense strand
cauaagaauuggguuguga

SEQ ID NO: 1081959 - RNA, 19 nt, Homo sapiens
  misc_RNA (1)...(19): siRNA sense strand
agaaagcccugaauguugu

SEQ ID NO: 1081960 - RNA, 19 nt, Homo sapiens
  misc_RNA (1)...(19): siRNA sense strand
cauggacucucgauuucua

SEQ ID NO: 1081961 - RNA, 19 nt, Homo sapiens
  misc_RNA (1)...(19): siRNA sense strand
uagcugauuuggaacaauu

SEQ ID NO: 1081962 - RNA, 19 nt, Homo sapiens
  misc_RNA (1)...(19): siRNA sense strand
cacuuuagcugauuuggaa

SEQ ID NO: 1081963 - RNA, 19 nt, Homo sapiens
  misc_RNA (1)...(19): siRNA sense strand
ggaauuagaaggagggaau

SEQ ID NO: 1081964 - RNA, 19 nt, Homo sapiens
  misc_RNA (1)...(19): siRNA sense strand
ucaaauaugaucccucaaa

SEQ ID NO: 1081965 - RNA, 19 nt, Homo sapiens
  misc_RNA (1)...(19): siRNA sense strand
ggaguauaaugccaugaug

SEQ ID NO: 1081966 - RNA, 19 nt, Homo sapiens
  misc_RNA (1)...(19): siRNA sense strand
ccaaggaaacccacagaaa

SEQ ID NO: 1081967 - RNA, 19 nt, Homo sapiens
  misc_RNA (1)...(19): siRNA sense strand
agaggaagauguuacugaa

SEQ ID NO: 1081968 - RNA, 19 nt, Homo sapiens
  misc_RNA (1)...(19): siRNA sense strand
gaaugaggacugugguaaa

SEQ ID NO: 1081969 - RNA, 19 nt, Homo sapiens
  misc_RNA (1)...(19): siRNA sense strand
ugaggugucuaaagaaaug

SEQ ID NO: 1081970 - RNA, 19 nt, Homo sapiens
  misc_RNA (1)...(19): siRNA sense strand
aaacugauuucucacuuuc

SEQ ID NO: 1081971 - RNA, 19 nt, Homo sapiens
  misc_RNA (1)...(19): siRNA sense strand
gcaaacagaaaccaaagga

SEQ ID NO: 1081972 - RNA, 19 nt, Homo sapiens
  misc_RNA (1)...(19): siRNA sense strand
gacaaagacagcugccaua

SEQ ID NO: 1081973 - RNA, 19 nt, Homo sapiens
  misc_RNA (1)...(19): siRNA sense strand
cuauggaucugaaagaaau

SEQ ID NO: 1081974 - RNA, 19 nt, Homo sapiens
  misc_RNA (1)...(19): siRNA sense strand
aaagaaagcccugaauguu

SEQ ID NO: 1081975 - RNA, 19 nt, Homo sapiens
  misc_RNA (1)...(19): siRNA sense strand
gagaaacgaagcgccuuua

SEQ ID NO: 1081976 - RNA, 19 nt, Homo sapiens
  misc_RNA (1)...(19): siRNA sense strand
gcaaagagcugcuaagacu

SEQ ID NO: 1081977 - RNA, 19 nt, Homo sapiens
  misc_RNA (1)...(19): siRNA sense strand
caaaugaacugcccugcuu

SEQ ID NO: 1081978 - RNA, 19 nt, Homo sapiens
  misc_RNA (1)...(19): siRNA sense strand
gaaagaugccaacaaguuu

SEQ ID NO: 1081979 - RNA, 19 nt, Homo sapiens
  misc_RNA (1)...(19): siRNA sense strand
ggaaacagacugaaagaug

SEQ ID NO: 1081980 - RNA, 19 nt, Homo sapiens
  misc_RNA (1)...(19): siRNA sense strand
agaagaaacuguccuacaa

SEQ ID NO: 1081981 - RNA, 19 nt, Homo sapiens
  misc_RNA (1)...(19): siRNA sense strand
caccaaagauggagucaug

SEQ ID NO: 1081982 - RNA, 19 nt, Homo sapiens
  misc_RNA (1)...(19): siRNA sense strand
cugaugaccugaccuguaa

SEQ ID NO: 1081983 - RNA, 19 nt, Homo sapiens
  misc_RNA (1)...(19): siRNA sense strand
gaaguccucucuacagaag

SEQ ID NO: 1081984 - RNA, 19 nt, Homo sapiens
  misc_RNA (1)...(19): siRNA sense strand
caaggaaguuucgggauga

SEQ ID NO: 1081985 - RNA, 19 nt, Homo sapiens
  misc_RNA (1)...(19): siRNA sense strand
ugaaagaugccaacaaguu

SEQ ID NO: 1081986 - RNA, 19 nt, Homo sapiens
  misc_RNA (1)...(19): siRNA sense strand
uuaauugccucccagaaga

SEQ ID NO: 1081987 - RNA, 19 nt, Homo sapiens
  misc_RNA (1)...(19): siRNA sense strand
ggaggacccugcacauuuu

SEQ ID NO: 1081988 - RNA, 19 nt, Homo sapiens
  misc_RNA (1)...(19): siRNA sense strand
aagauggagucauggauuu

SEQ ID NO: 1081989 - RNA, 19 nt, Homo sapiens
  misc_RNA (1)...(19): siRNA sense strand
guuaccaccuccugccaua

SEQ ID NO: 1081990 - RNA, 19 nt, Homo sapiens
  misc_RNA (1)...(19): siRNA sense strand
guauguuccuugcagguuu

SEQ ID NO: 1081991 - RNA, 19 nt, Homo sapiens
  misc_RNA (1)...(19): siRNA sense strand
caaggaauacugcuuagga

SEQ ID NO: 1081992 - RNA, 19 nt, Homo sapiens
  misc_RNA (1)...(19): siRNA sense strand
gaauacugcuuaggaccaa

SEQ ID NO: 1081993 - RNA, 19 nt, Homo sapiens
  misc_RNA (1)...(19): siRNA sense strand
agacaggcauggcaaggaa

SEQ ID NO: 1081994 - RNA, 19 nt, Homo sapiens
  misc_RNA (1)...(19): siRNA sense strand
gcacagugucucaugaguu

SEQ ID NO: 1081995 - RNA, 19 nt, Homo sapiens
  misc_RNA (1)...(19): siRNA sense strand
cacagugucucaugaguuc

SEQ ID NO: 1081996 - RNA, 19 nt, Homo sapiens
  misc_RNA (1)...(19): siRNA sense strand
gaagaaacuguccuacaag

SEQ ID NO: 1081997 - RNA, 19 nt, Homo sapiens
  misc_RNA (1)...(19): siRNA sense strand
gaagggcugcugacaagau

SEQ ID NO: 1081998 - RNA, 19 nt, Homo sapiens
  misc_RNA (1)...(19): siRNA sense strand
gggcaaagagcugcuaaga

SEQ ID NO: 1081999 - RNA, 19 nt, Homo sapiens
  misc_RNA (1)...(19): siRNA sense strand
uggaggacccugcacauuu

SEQ ID NO: 1082000 - RNA, 19 nt, Homo sapiens
  misc_RNA (1)...(19): siRNA sense strand
ggaagccauuacggccuua

SEQ ID NO: 1082001 - RNA, 19 nt, Homo sapiens
  misc_RNA (1)...(19): siRNA sense strand
ggccugaucuacccagcaa

SEQ ID NO: 1082002 - RNA, 19 nt, Homo sapiens
  misc_RNA (1)...(19): siRNA sense strand
gagguuuggugucagaaca

SEQ ID NO: 1082003 - RNA, 19 nt, Homo sapiens
  misc_RNA (1)...(19): siRNA sense strand
uggcaaggaauacugcuua

SEQ ID NO: 1082004 - RNA, 19 nt, Homo sapiens
  misc_RNA (1)...(19): siRNA sense strand
accaaguacucauccauuu

SEQ ID NO: 1082005 - RNA, 19 nt, Homo sapiens
  misc_RNA (1)...(19): siRNA sense strand
ccuacagccugguguguga

SEQ ID NO: 1082006 - RNA, 19 nt, Homo sapiens
  misc_RNA (1)...(19): siRNA sense strand
ggaccggcuugccaucugu

SEQ ID NO: 1082007 - RNA, 19 nt, Homo sapiens
  misc_RNA (1)...(19): siRNA sense strand
gcugcugucucguguguuc

SEQ ID NO: 1082008 - RNA, 19 nt, Homo sapiens
  misc_RNA (1)...(19): siRNA sense strand
aaagauggagucauggauu

SEQ ID NO: 1082009 - RNA, 19 nt, Homo sapiens
  misc_RNA (1)...(19): siRNA sense strand
aaccaacccuggcugaaau

SEQ ID NO: 1082010 - RNA, 19 nt, Homo sapiens
  misc_RNA (1)...(19): siRNA sense strand
ccauugaaguccucucuac

SEQ ID NO: 1082011 - RNA, 19 nt, Homo sapiens
  misc_RNA (1)...(19): siRNA sense strand
caucggaaacagacugaaa

SEQ ID NO: 1082012 - RNA, 19 nt, Homo sapiens
  misc_RNA (1)...(19): siRNA sense strand
ggagucauggauuuacuga

SEQ ID NO: 1082013 - RNA, 19 nt, Homo sapiens
  misc_RNA (1)...(19): siRNA sense strand
acugaaagaugccaacaag

SEQ ID NO: 1082014 - RNA, 19 nt, Homo sapiens
  misc_RNA (1)...(19): siRNA sense strand
aaaccaacccuggcugaaa

SEQ ID NO: 1082015 - RNA, 19 nt, Homo sapiens
  misc_RNA (1)...(19): siRNA sense strand
uaccaccuccugccauaua

SEQ ID NO: 1082016 - RNA, 19 nt, Homo sapiens
  misc_RNA (1)...(19): siRNA sense strand
caagugacaaggaaguuuc

SEQ ID NO: 1082017 - RNA, 19 nt, Homo sapiens
  misc_RNA (1)...(19): siRNA sense strand
gacgacaggacccaucuga

SEQ ID NO: 1082018 - RNA, 19 nt, Homo sapiens
  misc_RNA (1)...(19): siRNA sense strand
caagcuagggcugccauuu

SEQ ID NO: 1082019 - RNA, 19 nt, Homo sapiens
  misc_RNA (1)...(19): siRNA sense strand
cagaagaaacuguccuaca

SEQ ID NO: 1082020 - RNA, 19 nt, Homo sapiens
  misc_RNA (1)...(19): siRNA sense strand
gccagggcccauugacuaa

SEQ ID NO: 1082021 - RNA, 19 nt, Homo sapiens
  misc_RNA (1)...(19): siRNA sense strand
ggcaaggaauacugcuuag

SEQ ID NO: 1082022 - RNA, 19 nt, Homo sapiens
  misc_RNA (1)...(19): siRNA sense strand
ccaaagauggagucaugga

SEQ ID NO: 1082023 - RNA, 19 nt, Homo sapiens
  misc_RNA (1)...(19): siRNA sense strand
uugaaguccucucuacaga

SEQ ID NO: 1082024 - RNA, 19 nt, Homo sapiens
  misc_RNA (1)...(19): siRNA sense strand
caaugucuguggcaaacca

SEQ ID NO: 1082025 - RNA, 19 nt, Homo sapiens
  misc_RNA (1)...(19): siRNA sense strand
ccaagugacaaggaaguuu

SEQ ID NO: 1082026 - RNA, 19 nt, Homo sapiens
  misc_RNA (1)...(19): siRNA sense strand
gggacuugaugggcaaaga

SEQ ID NO: 1082027 - RNA, 19 nt, Homo sapiens
  misc_RNA (1)...(19): siRNA sense strand
aaagaugccaacaaguuug

SEQ ID NO: 1082028 - RNA, 19 nt, Homo sapiens
  misc_RNA (1)...(19): siRNA sense strand
gaugaccugaccuguaaga

SEQ ID NO: 1082029 - RNA, 19 nt, Homo sapiens
  misc_RNA (1)...(19): siRNA sense strand
ucaaugcccaguuuaccaa

SEQ ID NO: 1082030 - RNA, 19 nt, Homo sapiens
  misc_RNA (1)...(19): siRNA sense strand
uuaccaagccugccucauc

SEQ ID NO: 1082031 - RNA, 19 nt, Homo sapiens
  misc_RNA (1)...(19): siRNA sense strand
cauggagacacuagacuug

SEQ ID NO: 1082032 - RNA, 19 nt, Homo sapiens
  misc_RNA (1)...(19): siRNA sense strand
ugccagggcccauugacua

SEQ ID NO: 1082033 - RNA, 19 nt, Homo sapiens
  misc_RNA (1)...(19): siRNA sense strand
caacauggagacacuagac

SEQ ID NO: 1082034 - RNA, 19 nt, Homo sapiens
  misc_RNA (1)...(19): siRNA sense strand
ucugaugaccugaccugua

SEQ ID NO: 1082035 - RNA, 19 nt, Homo sapiens
  misc_RNA (1)...(19): siRNA sense strand
gccgagaguuuuacaugaa

SEQ ID NO: 1082036 - RNA, 19 nt, Homo sapiens
  misc_RNA (1)...(19): siRNA sense strand
caaagauggagucauggau

SEQ ID NO: 1082037 - RNA, 19 nt, Homo sapiens
  misc_RNA (1)...(19): siRNA sense strand
cagcuucucagccaacaug

SEQ ID NO: 1082038 - RNA, 19 nt, Homo sapiens
  misc_RNA (1)...(19): siRNA sense strand
aagcuagggcugccauuug

SEQ ID NO: 1082039 - RNA, 19 nt, Homo sapiens
  misc_RNA (1)...(19): siRNA sense strand
acaggcauggcaaggaaua

SEQ ID NO: 1082040 - RNA, 19 nt, Homo sapiens
  misc_RNA (1)...(19): siRNA sense strand
ugaaguccucucuacagaa

SEQ ID NO: 1082041 - RNA, 19 nt, Homo sapiens
  misc_RNA (1)...(19): siRNA sense strand
uguaccaagugacaaggaa

SEQ ID NO: 1082042 - RNA, 19 nt, Homo sapiens
  misc_RNA (1)...(19): siRNA sense strand
aggaccaacucacgaggaa

SEQ ID NO: 1082043 - RNA, 19 nt, Homo sapiens
  misc_RNA (1)...(19): siRNA sense strand
uggccuuccucaccaaaga

SEQ ID NO: 1082044 - RNA, 19 nt, Homo sapiens
  misc_RNA (1)...(19): siRNA sense strand
gcuguacgaccacaucaca

SEQ ID NO: 1082045 - RNA, 19 nt, Homo sapiens
  misc_RNA (1)...(19): siRNA sense strand
caaagagcugcuaagacuu

SEQ ID NO: 1082046 - RNA, 19 nt, Homo sapiens
  misc_RNA (1)...(19): siRNA sense strand
gagacaggcauggcaagga

SEQ ID NO: 1082047 - RNA, 19 nt, Homo sapiens
  misc_RNA (1)...(19): siRNA sense strand
cuaagaagggcaguaagga

SEQ ID NO: 1082048 - RNA, 19 nt, Homo sapiens
  misc_RNA (1)...(19): siRNA sense strand
uaccaaguacucauccauu

SEQ ID NO: 1082049 - RNA, 19 nt, Homo sapiens
  misc_RNA (1)...(19): siRNA sense strand
cagccaacauggagacacu

SEQ ID NO: 1082050 - RNA, 19 nt, Homo sapiens
  misc_RNA (1)...(19): siRNA sense strand
caaaccaacccuggcugaa

SEQ ID NO: 1082051 - RNA, 19 nt, Homo sapiens
  misc_RNA (1)...(19): siRNA sense strand
gugauaaucgcuggcaaga

SEQ ID NO: 1082052 - RNA, 19 nt, Homo sapiens
  misc_RNA (1)...(19): siRNA sense strand
caucugaccaucggaaaca

SEQ ID NO: 1082053 - RNA, 19 nt, Homo sapiens
  misc_RNA (1)...(19): siRNA sense strand
gcucauagggcagcuguac

SEQ ID NO: 1082054 - RNA, 19 nt, Homo sapiens
  misc_RNA (1)...(19): siRNA sense strand
ggacuugaugggcaaagag

SEQ ID NO: 1082055 - RNA, 19 nt, Homo sapiens
  misc_RNA (1)...(19): siRNA sense strand
ucauagggcagcuguacga

SEQ ID NO: 1082056 - RNA, 19 nt, Homo sapiens
  misc_RNA (1)...(19): siRNA sense strand
ugcuauggcuuggguguga

SEQ ID NO: 1082057 - RNA, 19 nt, Homo sapiens
  misc_RNA (1)...(19): siRNA sense strand
uaauugccucccagaagaa

SEQ ID NO: 1082058 - RNA, 19 nt, Homo sapiens
  misc_RNA (1)...(19): siRNA sense strand
agauggagucauggauuua

SEQ ID NO: 1082059 - RNA, 19 nt, Homo sapiens
  misc_RNA (1)...(19): siRNA sense strand
gcagcuguacgaccacauc

SEQ ID NO: 1082060 - RNA, 19 nt, Homo sapiens
  misc_RNA (1)...(19): siRNA sense strand
caaccggugggacuugaug

SEQ ID NO: 1082061 - RNA, 19 nt, Homo sapiens
  misc_RNA (1)...(19): siRNA sense strand
ggccgagaguuuuacauga

SEQ ID NO: 1082062 - RNA, 19 nt, Homo sapiens
  misc_RNA (1)...(19): siRNA sense strand
ggcacagugucucaugagu

SEQ ID NO: 1082063 - RNA, 19 nt, Homo sapiens
  misc_RNA (1)...(19): siRNA sense strand
aagggcugcugacaagaug

SEQ ID NO: 1082064 - RNA, 19 nt, Homo sapiens
  misc_RNA (1)...(19): siRNA sense strand
gaacaucgauggcgccaaa

SEQ ID NO: 1082065 - RNA, 19 nt, Homo sapiens
  misc_RNA (1)...(19): siRNA sense strand
ggaaguaaaccuuucauuu

SEQ ID NO: 1082066 - RNA, 19 nt, Homo sapiens
  misc_RNA (1)...(19): siRNA sense strand
ggacggacaucuauuguuc

SEQ ID NO: 1082067 - RNA, 19 nt, Homo sapiens
  misc_RNA (1)...(19): siRNA sense strand
gaaagauaccaaccaguua

SEQ ID NO: 1082068 - RNA, 19 nt, Homo sapiens
  misc_RNA (1)...(19): siRNA sense strand
ggacaucuauuguucaucu

SEQ ID NO: 1082069 - RNA, 19 nt, Homo sapiens
  misc_RNA (1)...(19): siRNA sense strand
ggaaagauaccaaccaguu

SEQ ID NO: 1082070 - RNA, 19 nt, Homo sapiens
  misc_RNA (1)...(19): siRNA sense strand
gaauggcgauggguugaua

SEQ ID NO: 1082071 - RNA, 19 nt, Homo sapiens
  misc_RNA (1)...(19): siRNA sense strand
caaauaaggaacaugguua

SEQ ID NO: 1082072 - RNA, 19 nt, Homo sapiens
  misc_RNA (1)...(19): siRNA sense strand
cacaagaucuggaaaugaa

SEQ ID NO: 1082073 - RNA, 19 nt, Homo sapiens
  misc_RNA (1)...(19): siRNA sense strand
ggaaacagaggauucauug

SEQ ID NO: 1082074 - RNA, 19 nt, Homo sapiens
  misc_RNA (1)...(19): siRNA sense strand
gaaacauggugacuagaug

SEQ ID NO: 1082075 - RNA, 19 nt, Homo sapiens
  misc_RNA (1)...(19): siRNA sense strand
caacaaggacggacaucua

SEQ ID NO: 1082076 - RNA, 19 nt, Homo sapiens
  misc_RNA (1)...(19): siRNA sense strand
guggagauaucgagaacua

SEQ ID NO: 1082077 - RNA, 19 nt, Homo sapiens
  misc_RNA (1)...(19): siRNA sense strand
ggacaaacugcauaaucua

SEQ ID NO: 1082078 - RNA, 19 nt, Homo sapiens
  misc_RNA (1)...(19): siRNA sense strand
ugacagaauucaaguaugg

SEQ ID NO: 1082079 - RNA, 19 nt, Homo sapiens
  misc_RNA (1)...(19): siRNA sense strand
ggauaaccaugacaaucaa

SEQ ID NO: 1082080 - RNA, 19 nt, Homo sapiens
  misc_RNA (1)...(19): siRNA sense strand
ugauauugcucuugaaugu

SEQ ID NO: 1082081 - RNA, 19 nt, Homo sapiens
  misc_RNA (1)...(19): siRNA sense strand
gaacuacaaugaugcuacu

SEQ ID NO: 1082082 - RNA, 19 nt, Homo sapiens
  misc_RNA (1)...(19): siRNA sense strand
gugacuagauguaacaaug

SEQ ID NO: 1082083 - RNA, 19 nt, Homo sapiens
  misc_RNA (1)...(19): siRNA sense strand
gcacaagaucuggaaauga

SEQ ID NO: 1082084 - RNA, 19 nt, Homo sapiens
  misc_RNA (1)...(19): siRNA sense strand
gacaaacugcauaaucuaa

SEQ ID NO: 1082085 - RNA, 19 nt, Homo sapiens
  misc_RNA (1)...(19): siRNA sense strand
ugucauuucuggagauaaa

SEQ ID NO: 1082086 - RNA, 19 nt, Homo sapiens
  misc_RNA (1)...(19): siRNA sense strand
gaugucauuucuggagaua

SEQ ID NO: 1082087 - RNA, 19 nt, Homo sapiens
  misc_RNA (1)...(19): siRNA sense strand
gcacaguuauucgcaagug

SEQ ID NO: 1082088 - RNA, 19 nt, Homo sapiens
  misc_RNA (1)...(19): siRNA sense strand
guucaggucucuccaccaa

SEQ ID NO: 1082089 - RNA, 19 nt, Homo sapiens
  misc_RNA (1)...(19): siRNA sense strand
ugaaugugagcgauauuua

SEQ ID NO: 1082090 - RNA, 19 nt, Homo sapiens
  misc_RNA (1)...(19): siRNA sense strand
uuagaaacauggugacuag

SEQ ID NO: 1082091 - RNA, 19 nt, Homo sapiens
  misc_RNA (1)...(19): siRNA sense strand
caaggacggacaucuauug

SEQ ID NO: 1082092 - RNA, 19 nt, Homo sapiens
  misc_RNA (1)...(19): siRNA sense strand
gcaaugacugggucuguga

SEQ ID NO: 1082093 - RNA, 19 nt, Homo sapiens
  misc_RNA (1)...(19): siRNA sense strand
uuauguggaugcuguaauu

SEQ ID NO: 1082094 - RNA, 19 nt, Homo sapiens
  misc_RNA (1)...(19): siRNA sense strand
ggguugauauugcucuuga

SEQ ID NO: 1082095 - RNA, 19 nt, Homo sapiens
  misc_RNA (1)...(19): siRNA sense strand
ucaggucucuccaccaaau

SEQ ID NO: 1082096 - RNA, 19 nt, Homo sapiens
  misc_RNA (1)...(19): siRNA sense strand
ccaaccaguuagcuauaaa

SEQ ID NO: 1082097 - RNA, 19 nt, Homo sapiens
  misc_RNA (1)...(19): siRNA sense strand
gaaguggagauaucgagaa

SEQ ID NO: 1082098 - RNA, 19 nt, Homo sapiens
  misc_RNA (1)...(19): siRNA sense strand
gaaguucuuucuguugcuu

SEQ ID NO: 1082099 - RNA, 19 nt, Homo sapiens
  misc_RNA (1)...(19): siRNA sense strand
cuacucaggucagagauug

SEQ ID NO: 1082100 - RNA, 19 nt, Homo sapiens
  misc_RNA (1)...(19): siRNA sense strand
caaguggaauggagagaag

SEQ ID NO: 1082101 - RNA, 19 nt, Homo sapiens
  misc_RNA (1)...(19): siRNA sense strand
gaaugugagcgauauuuag

SEQ ID NO: 1082102 - RNA, 19 nt, Homo sapiens
  misc_RNA (1)...(19): siRNA sense strand
caucgauggcgccaaauaa

SEQ ID NO: 1082103 - RNA, 19 nt, Homo sapiens
  misc_RNA (1)...(19): siRNA sense strand
ggagacauaaaggcaauuu

SEQ ID NO: 1082104 - RNA, 19 nt, Homo sapiens
  misc_RNA (1)...(19): siRNA sense strand
ggagauaucgagaacuaca

SEQ ID NO: 1082105 - RNA, 19 nt, Homo sapiens
  misc_RNA (1)...(19): siRNA sense strand
ccaaauaaggaacaugguu

SEQ ID NO: 1082106 - RNA, 19 nt, Homo sapiens
  misc_RNA (1)...(19): siRNA sense strand
ggugacagaauucaaguau

SEQ ID NO: 1082107 - RNA, 19 nt, Homo sapiens
  misc_RNA (1)...(19): siRNA sense strand
auauugcucuugaauguga

SEQ ID NO: 1082108 - RNA, 19 nt, Homo sapiens
  misc_RNA (1)...(19): siRNA sense strand
gagaggaaacagaggauuc

SEQ ID NO: 1082109 - RNA, 19 nt, Homo sapiens
  misc_RNA (1)...(19): siRNA sense strand
caaauugguaugauaaugg

SEQ ID NO: 1082110 - RNA, 19 nt, Homo sapiens
  misc_RNA (1)...(19): siRNA sense strand
caaacugcauaaucuaaac

SEQ ID NO: 1082111 - RNA, 19 nt, Homo sapiens
  misc_RNA (1)...(19): siRNA sense strand
uggacaaacugcauaaucu

SEQ ID NO: 1082112 - RNA, 19 nt, Homo sapiens
  misc_RNA (1)...(19): siRNA sense strand
gaccuuggugggaaagaua

SEQ ID NO: 1082113 - RNA, 19 nt, Homo sapiens
  misc_RNA (1)...(19): siRNA sense strand
gauaccaaccaguuagcua

SEQ ID NO: 1082114 - RNA, 19 nt, Homo sapiens
  misc_RNA (1)...(19): siRNA sense strand
ggagcaaccaaguggcuuu

SEQ ID NO: 1082115 - RNA, 19 nt, Homo sapiens
  misc_RNA (1)...(19): siRNA sense strand
gcaaguggaauggagagaa

SEQ ID NO: 1082116 - RNA, 19 nt, Homo sapiens
  misc_RNA (1)...(19): siRNA sense strand
gcaguaccuguggaaguua

SEQ ID NO: 1082117 - RNA, 19 nt, Homo sapiens
  misc_RNA (1)...(19): siRNA sense strand
gaauucaaguauggugcaa

SEQ ID NO: 1082118 - RNA, 19 nt, Homo sapiens
  misc_RNA (1)...(19): siRNA sense strand
cugcauaaucuaaacagua

SEQ ID NO: 1082119 - RNA, 19 nt, Homo sapiens
  misc_RNA (1)...(19): siRNA sense strand
guugcaggguucagacuug

SEQ ID NO: 1082120 - RNA, 19 nt, Homo sapiens
  misc_RNA (1)...(19): siRNA sense strand
gcaggaaguaaaccuuuca

SEQ ID NO: 1082121 - RNA, 19 nt, Homo sapiens
  misc_RNA (1)...(19): siRNA sense strand
caucuauuguucaucuguu

SEQ ID NO: 1082122 - RNA, 19 nt, Homo sapiens
  misc_RNA (1)...(19): siRNA sense strand
uguggaugcuguaauuaau

SEQ ID NO: 1082123 - RNA, 19 nt, Homo sapiens
  misc_RNA (1)...(19): siRNA sense strand
uggauaaccaugacaauca

SEQ ID NO: 1082124 - RNA, 19 nt, Homo sapiens
  misc_RNA (1)...(19): siRNA sense strand
gaugguaaauguaaaacug

SEQ ID NO: 1082125 - RNA, 19 nt, Homo sapiens
  misc_RNA (1)...(19): siRNA sense strand
uggaugcuguaauuaauca

SEQ ID NO: 1082126 - RNA, 19 nt, Homo sapiens
  misc_RNA (1)...(19): siRNA sense strand
caagaucuggaaaugaaga

SEQ ID NO: 1082127 - RNA, 19 nt, Homo sapiens
  misc_RNA (1)...(19): siRNA sense strand
gaaacagaggauucauugu

SEQ ID NO: 1082128 - RNA, 19 nt, Homo sapiens
  misc_RNA (1)...(19): siRNA sense strand
gcagucccauauucuggau

SEQ ID NO: 1082129 - RNA, 19 nt, Homo sapiens
  misc_RNA (1)...(19): siRNA sense strand
agacacuacuuguggcaau

SEQ ID NO: 1082130 - RNA, 19 nt, Homo sapiens
  misc_RNA (1)...(19): siRNA sense strand
ggcgauggguugauauugc

SEQ ID NO: 1082131 - RNA, 19 nt, Homo sapiens
  misc_RNA (1)...(19): siRNA sense strand
gcaggguucagacuugaug

SEQ ID NO: 1082132 - RNA, 19 nt, Homo sapiens
  misc_RNA (1)...(19): siRNA sense strand
cacgaguaaugucaagcua

SEQ ID NO: 1082133 - RNA, 19 nt, Homo sapiens
  misc_RNA (1)...(19): siRNA sense strand
gugacagaauucaaguaug

SEQ ID NO: 1082134 - RNA, 19 nt, Homo sapiens
  misc_RNA (1)...(19): siRNA sense strand
aaagauaccaaccaguuag

SEQ ID NO: 1082135 - RNA, 19 nt, Homo sapiens
  misc_RNA (1)...(19): siRNA sense strand
aauggcaguuggauuuaug

SEQ ID NO: 1082136 - RNA, 19 nt, Homo sapiens
  misc_RNA (1)...(19): siRNA sense strand
uaaaggcaauuuuggacaa

SEQ ID NO: 1082137 - RNA, 19 nt, Homo sapiens
  misc_RNA (1)...(19): siRNA sense strand
aagauugccgaauauauga

SEQ ID NO: 1082138 - RNA, 19 nt, Homo sapiens
  misc_RNA (1)...(19): siRNA sense strand
ggaauggagagaagauguc

SEQ ID NO: 1082139 - RNA, 19 nt, Homo sapiens
  misc_RNA (1)...(19): siRNA sense strand
ggagaggaaacagaggauu

SEQ ID NO: 1082140 - RNA, 19 nt, Homo sapiens
  misc_RNA (1)...(19): siRNA sense strand
caaccaguuagcuauaaau

SEQ ID NO: 1082141 - RNA, 19 nt, Homo sapiens
  misc_RNA (1)...(19): siRNA sense strand
gacacuacuuguggcaaug

SEQ ID NO: 1082142 - RNA, 19 nt, Homo sapiens
  misc_RNA (1)...(19): siRNA sense strand
agcaguaccuguggaaguu

SEQ ID NO: 1082143 - RNA, 19 nt, Homo sapiens
  misc_RNA (1)...(19): siRNA sense strand
gcgauggguugauauugcu

SEQ ID NO: 1082144 - RNA, 19 nt, Homo sapiens
  misc_RNA (1)...(19): siRNA sense strand
ggccagccuuuuacaaauu

SEQ ID NO: 1082145 - RNA, 19 nt, Homo sapiens
  misc_RNA (1)...(19): siRNA sense strand
cgauggcgccaaauaagga

SEQ ID NO: 1082146 - RNA, 19 nt, Homo sapiens
  misc_RNA (1)...(19): siRNA sense strand
gagauaucgagaacuacaa

SEQ ID NO: 1082147 - RNA, 19 nt, Homo sapiens
  misc_RNA (1)...(19): siRNA sense strand
uaccaaccaguuagcuaua

SEQ ID NO: 1082148 - RNA, 19 nt, Homo sapiens
  misc_RNA (1)...(19): siRNA sense strand
ggauuuaugcuugcucauc

SEQ ID NO: 1082149 - RNA, 19 nt, Homo sapiens
  misc_RNA (1)...(19): siRNA sense strand
gacaaucaacgaggacaug

SEQ ID NO: 1082150 - RNA, 19 nt, Homo sapiens
  misc_RNA (1)...(19): siRNA sense strand
agaaacauggugacuagau

SEQ ID NO: 1082151 - RNA, 19 nt, Homo sapiens
  misc_RNA (1)...(19): siRNA sense strand
accaaccaguuagcuauaa

SEQ ID NO: 1082152 - RNA, 19 nt, Homo sapiens
  misc_RNA (1)...(19): siRNA sense strand
auacugugaugucauuucu

SEQ ID NO: 1082153 - RNA, 19 nt, Homo sapiens
  misc_RNA (1)...(19): siRNA sense strand
ugacuagauguaacaaugu

SEQ ID NO: 1082154 - RNA, 19 nt, Homo sapiens
  misc_RNA (1)...(19): siRNA sense strand
ugcacaagaucuggaaaug

SEQ ID NO: 1082155 - RNA, 19 nt, Homo sapiens
  misc_RNA (1)...(19): siRNA sense strand
uuccagcagucccauauuc

SEQ ID NO: 1082156 - RNA, 19 nt, Homo sapiens
  misc_RNA (1)...(19): siRNA sense strand
gccaccaaauaauaaugga

SEQ ID NO: 1082157 - RNA, 19 nt, Homo sapiens
  misc_RNA (1)...(19): siRNA sense strand
guggauggccagccuuuua

SEQ ID NO: 1082158 - RNA, 19 nt, Homo sapiens
  misc_RNA (1)...(19): siRNA sense strand
gcuacucaggucagagauu

SEQ ID NO: 1082159 - RNA, 19 nt, Homo sapiens
  misc_RNA (1)...(19): siRNA sense strand
guugauauugcucuugaau

SEQ ID NO: 1082160 - RNA, 19 nt, Homo sapiens
  misc_RNA (1)...(19): siRNA sense strand
ccauuuauugcaauucaug

SEQ ID NO: 1082161 - RNA, 19 nt, Homo sapiens
  misc_RNA (1)...(19): siRNA sense strand
gaggauucauuguuuucaa

SEQ ID NO: 1082162 - RNA, 19 nt, Homo sapiens
  misc_RNA (1)...(19): siRNA sense strand
acaucgauggcgccaaaua

SEQ ID NO: 1082163 - RNA, 19 nt, Homo sapiens
  misc_RNA (1)...(19): siRNA sense strand
aucgagaacuacaaugaug

SEQ ID NO: 1082164 - RNA, 19 nt, Homo sapiens
  misc_RNA (1)...(19): siRNA sense strand
gaagauaugcacuuauuug

SEQ ID NO: 1082165 - RNA, 19 nt, Homo sapiens
  misc_RNA (1)...(19): siRNA sense strand
caauguagauuuagaagag

SEQ ID NO: 1082166 - RNA, 19 nt, Homo sapiens
  misc_RNA (1)...(19): siRNA sense strand
gcacuuauuuggccauuac

SEQ ID NO: 1082167 - RNA, 19 nt, Homo sapiens
  misc_RNA (1)...(19): siRNA sense strand
gagguuaugaggcuuaaua

SEQ ID NO: 1082168 - RNA, 19 nt, Homo sapiens
  misc_RNA (1)...(19): siRNA sense strand
gaagagcaauggcgacacu

SEQ ID NO: 1082169 - RNA, 19 nt, Homo sapiens
  misc_RNA (1)...(19): siRNA sense strand
cgacuucuaucucguagug

SEQ ID NO: 1082170 - RNA, 19 nt, Homo sapiens
  misc_RNA (1)...(19): siRNA sense strand
caagacaacaggagaaaug

SEQ ID NO: 1082171 - RNA, 19 nt, Homo sapiens
  misc_RNA (1)...(19): siRNA sense strand
cuccgacaauguagauuua

SEQ ID NO: 1082172 - RNA, 19 nt, Homo sapiens
  misc_RNA (1)...(19): siRNA sense strand
ggagaaagcaagacaacag

SEQ ID NO: 1082173 - RNA, 19 nt, Homo sapiens
  misc_RNA (1)...(19): siRNA sense strand
acacugcuccgacaaugua

SEQ ID NO: 1082174 - RNA, 19 nt, Homo sapiens
  misc_RNA (1)...(19): siRNA sense strand
caacaagaaggaagagcaa

SEQ ID NO: 1082175 - RNA, 19 nt, Homo sapiens
  misc_RNA (1)...(19): siRNA sense strand
gcuccgacaauguagauuu

SEQ ID NO: 1082176 - RNA, 19 nt, Homo sapiens
  misc_RNA (1)...(19): siRNA sense strand
cgacaauguagauuuagaa

SEQ ID NO: 1082177 - RNA, 19 nt, Homo sapiens
  misc_RNA (1)...(19): siRNA sense strand
gccauuacccagcacauga

SEQ ID NO: 1082178 - RNA, 19 nt, Homo sapiens
  misc_RNA (1)...(19): siRNA sense strand
gcacaugacgacuucuauc

SEQ ID NO: 1082179 - RNA, 19 nt, Homo sapiens
  misc_RNA (1)...(19): siRNA sense strand
agagaagcaucagguguga

SEQ ID NO: 1082180 - RNA, 19 nt, Homo sapiens
  misc_RNA (1)...(19): siRNA sense strand
ccgacaauguagauuuaga

SEQ ID NO: 1082181 - RNA, 19 nt, Homo sapiens
  misc_RNA (1)...(19): siRNA sense strand
gggagguuaugaggcuuaa

SEQ ID NO: 1082182 - RNA, 19 nt, Homo sapiens
  misc_RNA (1)...(19): siRNA sense strand
gacaacaggagaaaugaag

SEQ ID NO: 1082183 - RNA, 19 nt, Homo sapiens
  misc_RNA (1)...(19): siRNA sense strand
agagagcagccaagccaua

SEQ ID NO: 1082184 - RNA, 19 nt, Homo sapiens
  misc_RNA (1)...(19): siRNA sense strand
gcagccaagccauagagaa

SEQ ID NO: 1082185 - RNA, 19 nt, Homo sapiens
  misc_RNA (1)...(19): siRNA sense strand
gcacugcgggagaaagcaa

SEQ ID NO: 1082186 - RNA, 19 nt, Homo sapiens
  misc_RNA (1)...(19): siRNA sense strand
uuacacugcuccgacaaug

SEQ ID NO: 1082187 - RNA, 19 nt, Homo sapiens
  misc_RNA (1)...(19): siRNA sense strand
gccaagccauagagaagca

SEQ ID NO: 1082188 - RNA, 19 nt, Homo sapiens
  misc_RNA (1)...(19): siRNA sense strand
cagcacaugacgacuucua

SEQ ID NO: 1082189 - RNA, 19 nt, Homo sapiens
  misc_RNA (1)...(19): siRNA sense strand
gagagcagccaagccauag

SEQ ID NO: 1082190 - RNA, 19 nt, Homo sapiens
  misc_RNA (1)...(19): siRNA sense strand
caagaaggaagagcaaugg

SEQ ID NO: 1082191 - RNA, 19 nt, Homo sapiens
  misc_RNA (1)...(19): siRNA sense strand
gcaagacaacaggagaaau

SEQ ID NO: 1082192 - RNA, 19 nt, Homo sapiens
  misc_RNA (1)...(19): siRNA sense strand
acaagaaggaagagcaaug

SEQ ID NO: 1082193 - RNA, 19 nt, Homo sapiens
  misc_RNA (1)...(19): siRNA sense strand
gaggcuuaauaaagaagau

SEQ ID NO: 1082194 - RNA, 19 nt, Homo sapiens
  misc_RNA (1)...(19): siRNA sense strand
cgucggagcguucucgaau

SEQ ID NO: 1082195 - RNA, 19 nt, Homo sapiens
  misc_RNA (1)...(19): siRNA sense strand
ggaggcguuucugggcaaa

SEQ ID NO: 1082196 - RNA, 19 nt, Homo sapiens
  misc_RNA (1)...(19): siRNA sense strand
gagcagccaagccauagag

SEQ ID NO: 1082197 - RNA, 19 nt, Homo sapiens
  misc_RNA (1)...(19): siRNA sense strand
cagccaagccauagagaag

SEQ ID NO: 1082198 - RNA, 19 nt, Homo sapiens
  misc_RNA (1)...(19): siRNA sense strand
agaagaggcuggaaaagag

SEQ ID NO: 1082199 - RNA, 19 nt, Homo sapiens
  misc_RNA (1)...(19): siRNA sense strand
aaagcaacaagaaggaaga

SEQ ID NO: 1082200 - RNA, 19 nt, Homo sapiens
  misc_RNA (1)...(19): siRNA sense strand
cccagcacaugacgacuuc

SEQ ID NO: 1082201 - RNA, 19 nt, Homo sapiens
  misc_RNA (1)...(19): siRNA sense strand
gacaauguagauuuagaag

SEQ ID NO: 1082202 - RNA, 19 nt, Homo sapiens
  misc_RNA (1)...(19): siRNA sense strand
ggucgucaagccacagguu

SEQ ID NO: 1082203 - RNA, 19 nt, Homo sapiens
  misc_RNA (1)...(19): siRNA sense strand
agacaacaggagaaaugaa

SEQ ID NO: 1082204 - RNA, 19 nt, Homo sapiens
  misc_RNA (1)...(19): siRNA sense strand
ccaaagagcuucagaaugu

SEQ ID NO: 1082205 - RNA, 19 nt, Homo sapiens
  misc_RNA (1)...(19): siRNA sense strand
caacagaauuggacuuuga

SEQ ID NO: 1082206 - RNA, 19 nt, Homo sapiens
  misc_RNA (1)...(19): siRNA sense strand
ccacagagcuccaggugaa

SEQ ID NO: 1082207 - RNA, 19 nt, Homo sapiens
  misc_RNA (1)...(19): siRNA sense strand
uaacuaaaguggacuguga

SEQ ID NO: 1082208 - RNA, 19 nt, Homo sapiens
  misc_RNA (1)...(19): siRNA sense strand
gagaaucgcauccagauaa

SEQ ID NO: 1082209 - RNA, 19 nt, Homo sapiens
  misc_RNA (1)...(19): siRNA sense strand
gaaguuaucagcaucauug

SEQ ID NO: 1082210 - RNA, 19 nt, Homo sapiens
  misc_RNA (1)...(19): siRNA sense strand
gaacagggcuuaccccaaa

SEQ ID NO: 1082211 - RNA, 19 nt, Homo sapiens
  misc_RNA (1)...(19): siRNA sense strand
gcaggugaauugagacaaa

SEQ ID NO: 1082212 - RNA, 19 nt, Homo sapiens
  misc_RNA (1)...(19): siRNA sense strand
gaacgagccaccucaguuu

SEQ ID NO: 1082213 - RNA, 19 nt, Homo sapiens
  misc_RNA (1)...(19): siRNA sense strand
ggaaacauaugaauucaac

SEQ ID NO: 1082214 - RNA, 19 nt, Homo sapiens
  misc_RNA (1)...(19): siRNA sense strand
gaaacaggaccaaacauau

SEQ ID NO: 1082215 - RNA, 19 nt, Homo sapiens
  misc_RNA (1)...(19): siRNA sense strand
gaaccaucguggccaauau

SEQ ID NO: 1082216 - RNA, 19 nt, Homo sapiens
  misc_RNA (1)...(19): siRNA sense strand
ggaagaagaugagcugagu

SEQ ID NO: 1082217 - RNA, 19 nt, Homo sapiens
  misc_RNA (1)...(19): siRNA sense strand
ccaaguggcccaaaggaua

SEQ ID NO: 1082218 - RNA, 19 nt, Homo sapiens
  misc_RNA (1)...(19): siRNA sense strand
ugacuaugcugguggguuu

SEQ ID NO: 1082219 - RNA, 19 nt, Homo sapiens
  misc_RNA (1)...(19): siRNA sense strand
gauaagaucugggacuaca

SEQ ID NO: 1082220 - RNA, 19 nt, Homo sapiens
  misc_RNA (1)...(19): siRNA sense strand
ggaggauccugaugaugaa

SEQ ID NO: 1082221 - RNA, 19 nt, Homo sapiens
  misc_RNA (1)...(19): siRNA sense strand
gagaagcacuacaccuaau

SEQ ID NO: 1082222 - RNA, 19 nt, Homo sapiens
  misc_RNA (1)...(19): siRNA sense strand
ugaaacaggaccaaacaua

SEQ ID NO: 1082223 - RNA, 19 nt, Homo sapiens
  misc_RNA (1)...(19): siRNA sense strand
gaaaguuggcacaaauauu

SEQ ID NO: 1082224 - RNA, 19 nt, Homo sapiens
  misc_RNA (1)...(19): siRNA sense strand
ggagaagcacuacaccuaa

SEQ ID NO: 1082225 - RNA, 19 nt, Homo sapiens
  misc_RNA (1)...(19): siRNA sense strand
gaugaacacuaucuuugau

SEQ ID NO: 1082226 - RNA, 19 nt, Homo sapiens
  misc_RNA (1)...(19): siRNA sense strand
gaacaaggaaccucugaca

SEQ ID NO: 1082227 - RNA, 19 nt, Homo sapiens
  misc_RNA (1)...(19): siRNA sense strand
cuaaacaaguucugcuuug

SEQ ID NO: 1082228 - RNA, 19 nt, Homo sapiens
  misc_RNA (1)...(19): siRNA sense strand
gaaacuauccagaugaaca

SEQ ID NO: 1082229 - RNA, 19 nt, Homo sapiens
  misc_RNA (1)...(19): siRNA sense strand
gaacauccuugaagaaaau

SEQ ID NO: 1082230 - RNA, 19 nt, Homo sapiens
  misc_RNA (1)...(19): siRNA sense strand
uaaacaaguucugcuuuga

SEQ ID NO: 1082231 - RNA, 19 nt, Homo sapiens
  misc_RNA (1)...(19): siRNA sense strand
gacgaagucccucgcuuua

SEQ ID NO: 1082232 - RNA, 19 nt, Homo sapiens
  misc_RNA (1)...(19): siRNA sense strand
gggagaagcacuacaccua

SEQ ID NO: 1082233 - RNA, 19 nt, Homo sapiens
  misc_RNA (1)...(19): siRNA sense strand
cagguaacgucaacaauca

SEQ ID NO: 1082234 - RNA, 19 nt, Homo sapiens
  misc_RNA (1)...(19): siRNA sense strand
aaguucaccuucagcauua

SEQ ID NO: 1082235 - RNA, 19 nt, Homo sapiens
  misc_RNA (1)...(19): siRNA sense strand
ggauggaacaacuagauuu

SEQ ID NO: 1082236 - RNA, 19 nt, Homo sapiens
  misc_RNA (1)...(19): siRNA sense strand
acaaggaaccucugacaaa

SEQ ID NO: 1082237 - RNA, 19 nt, Homo sapiens
  misc_RNA (1)...(19): siRNA sense strand
gaucugggacuacaagcua

SEQ ID NO: 1082238 - RNA, 19 nt, Homo sapiens
  misc_RNA (1)...(19): siRNA sense strand
aaacaggaccaaacauauu

SEQ ID NO: 1082239 - RNA, 19 nt, Homo sapiens
  misc_RNA (1)...(19): siRNA sense strand
ccagauaaccuucauugug

SEQ ID NO: 1082240 - RNA, 19 nt, Homo sapiens
  misc_RNA (1)...(19): siRNA sense strand
caacuuggcagaaggucua

SEQ ID NO: 1082241 - RNA, 19 nt, Homo sapiens
  misc_RNA (1)...(19): siRNA sense strand
gaaauccagccuucaugaa

SEQ ID NO: 1082242 - RNA, 19 nt, Homo sapiens
  misc_RNA (1)...(19): siRNA sense strand
caaggaaccucugacaaag

SEQ ID NO: 1082243 - RNA, 19 nt, Homo sapiens
  misc_RNA (1)...(19): siRNA sense strand
ccaaagccauccacagaca

SEQ ID NO: 1082244 - RNA, 19 nt, Homo sapiens
  misc_RNA (1)...(19): siRNA sense strand
cuaauccucuuaccugcua

SEQ ID NO: 1082245 - RNA, 19 nt, Homo sapiens
  misc_RNA (1)...(19): siRNA sense strand
agauuuaugugaaggauga

SEQ ID NO: 1082246 - RNA, 19 nt, Homo sapiens
  misc_RNA (1)...(19): siRNA sense strand
cuacguaacugaugacaac

SEQ ID NO: 1082247 - RNA, 19 nt, Homo sapiens
  misc_RNA (1)...(19): siRNA sense strand
gacacaagccgaaacauuc

SEQ ID NO: 1082248 - RNA, 19 nt, Homo sapiens
  misc_RNA (1)...(19): siRNA sense strand
caccuccucuacagcauua

SEQ ID NO: 1082249 - RNA, 19 nt, Homo sapiens
  misc_RNA (1)...(19): siRNA sense strand
uaaaguggacugugaaaca

SEQ ID NO: 1082250 - RNA, 19 nt, Homo sapiens
  misc_RNA (1)...(19): siRNA sense strand
guacuccaaacucuuauuu

SEQ ID NO: 1082251 - RNA, 19 nt, Homo sapiens
  misc_RNA (1)...(19): siRNA sense strand
aaaguuggcacaaauauuc

SEQ ID NO: 1082252 - RNA, 19 nt, Homo sapiens
  misc_RNA (1)...(19): siRNA sense strand
gcaaacccuggauucauuu

SEQ ID NO: 1082253 - RNA, 19 nt, Homo sapiens
  misc_RNA (1)...(19): siRNA sense strand
ggaagauugugcugauugg

SEQ ID NO: 1082254 - RNA, 19 nt, Homo sapiens
  misc_RNA (1)...(19): siRNA sense strand
ggacaguggaggccucaaa

SEQ ID NO: 1082255 - RNA, 19 nt, Homo sapiens
  misc_RNA (1)...(19): siRNA sense strand
gaagacacaagccgaaaca

SEQ ID NO: 1082256 - RNA, 19 nt, Homo sapiens
  misc_RNA (1)...(19): siRNA sense strand
cacagaaguuuccaucuca

SEQ ID NO: 1082257 - RNA, 19 nt, Homo sapiens
  misc_RNA (1)...(19): siRNA sense strand
cacaagcucugucacuguu

SEQ ID NO: 1082258 - RNA, 19 nt, Homo sapiens
  misc_RNA (1)...(19): siRNA sense strand
cgucuacguuuauauccua

SEQ ID NO: 1082259 - RNA, 19 nt, Homo sapiens
  misc_RNA (1)...(19): siRNA sense strand
cgacgaagucccucgcuuu

SEQ ID NO: 1082260 - RNA, 19 nt, Homo sapiens
  misc_RNA (1)...(19): siRNA sense strand
gaagcaggacacagaaguu

SEQ ID NO: 1082261 - RNA, 19 nt, Homo sapiens
  misc_RNA (1)...(19): siRNA sense strand
ggccaaagccauccacaga

SEQ ID NO: 1082262 - RNA, 19 nt, Homo sapiens
  misc_RNA (1)...(19): siRNA sense strand
gaaagcggaggcucuuguu

SEQ ID NO: 1082263 - RNA, 19 nt, Homo sapiens
  misc_RNA (1)...(19): siRNA sense strand
gcugguggguuugauaaga

SEQ ID NO: 1082264 - RNA, 19 nt, Homo sapiens
  misc_RNA (1)...(19): siRNA sense strand
ggagaaucgcauccagaua

SEQ ID NO: 1082265 - RNA, 19 nt, Homo sapiens
  misc_RNA (1)...(19): siRNA sense strand
gaaacauuccccucaguua

SEQ ID NO: 1082266 - RNA, 19 nt, Homo sapiens
  misc_RNA (1)...(19): siRNA sense strand
gccagaaaguggaaagauc

SEQ ID NO: 1082267 - RNA, 19 nt, Homo sapiens
  misc_RNA (1)...(19): siRNA sense strand
aaaguggacugugaaacaa

SEQ ID NO: 1082268 - RNA, 19 nt, Homo sapiens
  misc_RNA (1)...(19): siRNA sense strand
gaacuccagcugguaacua

SEQ ID NO: 1082269 - RNA, 19 nt, Homo sapiens
  misc_RNA (1)...(19): siRNA sense strand
uagcagccggcaauaaaua

SEQ ID NO: 1082270 - RNA, 19 nt, Homo sapiens
  misc_RNA (1)...(19): siRNA sense strand
uuaccacuguuagcaaaua

SEQ ID NO: 1082271 - RNA, 19 nt, Homo sapiens
  misc_RNA (1)...(19): siRNA sense strand
ggaaccaucguggccaaua

SEQ ID NO: 1082272 - RNA, 19 nt, Homo sapiens
  misc_RNA (1)...(19): siRNA sense strand
gcaauguggcagagaauuc

SEQ ID NO: 1082273 - RNA, 19 nt, Homo sapiens
  misc_RNA (1)...(19): siRNA sense strand
gcaccaaacaacagauuca

SEQ ID NO: 1082274 - RNA, 19 nt, Homo sapiens
  misc_RNA (1)...(19): siRNA sense strand
ccacuguuagcaaauauuu

SEQ ID NO: 1082275 - RNA, 19 nt, Homo sapiens
  misc_RNA (1)...(19): siRNA sense strand
cggaggauccugaugauga

SEQ ID NO: 1082276 - RNA, 19 nt, Homo sapiens
  misc_RNA (1)...(19): siRNA sense strand
cauuaccacuguuagcaaa

SEQ ID NO: 1082277 - RNA, 19 nt, Homo sapiens
  misc_RNA (1)...(19): siRNA sense strand
caaguuuucugugaaguua

SEQ ID NO: 1082278 - RNA, 19 nt, Homo sapiens
  misc_RNA (1)...(19): siRNA sense strand
caaagaaaggagaaacgaa

SEQ ID NO: 1082279 - RNA, 19 nt, Homo sapiens
  misc_RNA (1)...(19): siRNA sense strand
aggaaccucugacaaagaa

SEQ ID NO: 1082280 - RNA, 19 nt, Homo sapiens
  misc_RNA (1)...(19): siRNA sense strand
gcaagacugggaagaacaa

SEQ ID NO: 1082281 - RNA, 19 nt, Homo sapiens
  misc_RNA (1)...(19): siRNA sense strand
gcagccggcaauaaauaua

SEQ ID NO: 1082282 - RNA, 19 nt, Homo sapiens
  misc_RNA (1)...(19): siRNA sense strand
ccacugggauggaacaacu

SEQ ID NO: 1082283 - RNA, 19 nt, Homo sapiens
  misc_RNA (1)...(19): siRNA sense strand
cguaacugaugacaacuug

SEQ ID NO: 1082284 - RNA, 19 nt, Homo sapiens
  misc_RNA (1)...(19): siRNA sense strand
ucugaaaguuggcacaaau

SEQ ID NO: 1082285 - RNA, 19 nt, Homo sapiens
  misc_RNA (1)...(19): siRNA sense strand
uggaagacgucaacgacaa

SEQ ID NO: 1082286 - RNA, 19 nt, Homo sapiens
  misc_RNA (1)...(19): siRNA sense strand
agaccgagaugcaggugaa

SEQ ID NO: 1082287 - RNA, 19 nt, Homo sapiens
  misc_RNA (1)...(19): siRNA sense strand
acacagaaguuuccaucuc

SEQ ID NO: 1082288 - RNA, 19 nt, Homo sapiens
  misc_RNA (1)...(19): siRNA sense strand
agcaaacccuggauucauu

SEQ ID NO: 1082289 - RNA, 19 nt, Homo sapiens
  misc_RNA (1)...(19): siRNA sense strand
ggaugagguuggugucaca

SEQ ID NO: 1082290 - RNA, 19 nt, Homo sapiens
  misc_RNA (1)...(19): siRNA sense strand
ccagaucuuuccguuauuc

SEQ ID NO: 1082291 - RNA, 19 nt, Homo sapiens
  misc_RNA (1)...(19): siRNA sense strand
ccuagcagccggcaauaaa

SEQ ID NO: 1082292 - RNA, 19 nt, Homo sapiens
  misc_RNA (1)...(19): siRNA sense strand
gggaagauugugcugauug

SEQ ID NO: 1082293 - RNA, 19 nt, Homo sapiens
  misc_RNA (1)...(19): siRNA sense strand
ggucuacaccucuacauag

SEQ ID NO: 1082294 - RNA, 19 nt, Homo sapiens
  misc_RNA (1)...(19): siRNA sense strand
gcagauuuaugugaaggau

SEQ ID NO: 1082295 - RNA, 19 nt, Homo sapiens
  misc_RNA (1)...(19): siRNA sense strand
guaccuggucguccuauug

SEQ ID NO: 1082296 - RNA, 19 nt, Homo sapiens
  misc_RNA (1)...(19): siRNA sense strand
caugguacgugccguuugu

SEQ ID NO: 1082297 - RNA, 19 nt, Homo sapiens
  misc_RNA (1)...(19): siRNA sense strand
gaugaaaagccaauuugua

SEQ ID NO: 1082298 - RNA, 19 nt, Homo sapiens
  misc_RNA (1)...(19): siRNA sense strand
gugaacauccuugaagaaa

SEQ ID NO: 1082299 - RNA, 19 nt, Homo sapiens
  misc_RNA (1)...(19): siRNA sense strand
ccuccaguauccaaaugua

SEQ ID NO: 1082300 - RNA, 19 nt, Homo sapiens
  misc_RNA (1)...(19): siRNA sense strand
aacaacagauucaacuuca

SEQ ID NO: 1082301 - RNA, 19 nt, Homo sapiens
  misc_RNA (1)...(19): siRNA sense strand
aaaguucaccuucagcauu

SEQ ID NO: 1082302 - RNA, 19 nt, Homo sapiens
  misc_RNA (1)...(19): siRNA sense strand
agacacaagccgaaacauu

SEQ ID NO: 1082303 - RNA, 19 nt, Homo sapiens
  misc_RNA (1)...(19): siRNA sense strand
aaacaacagauucaacuuc

SEQ ID NO: 1082304 - RNA, 19 nt, Homo sapiens
  misc_RNA (1)...(19): siRNA sense strand
gaacugcugucucacgaaa

SEQ ID NO: 1082305 - RNA, 19 nt, Homo sapiens
  misc_RNA (1)...(19): siRNA sense strand
ucaaacugcuguacuugua

SEQ ID NO: 1082306 - RNA, 19 nt, Homo sapiens
  misc_RNA (1)...(19): siRNA sense strand
gcagagcucuccucagaca

SEQ ID NO: 1082307 - RNA, 19 nt, Homo sapiens
  misc_RNA (1)...(19): siRNA sense strand
ggaucaaacugcuguacuu

SEQ ID NO: 1082308 - RNA, 19 nt, Homo sapiens
  misc_RNA (1)...(19): siRNA sense strand
gagagggauucgcaacuuu

SEQ ID NO: 1082309 - RNA, 19 nt, Homo sapiens
  misc_RNA (1)...(19): siRNA sense strand
gacuuuggcuaacuccuua

SEQ ID NO: 1082310 - RNA, 19 nt, Homo sapiens
  misc_RNA (1)...(19): siRNA sense strand
ugaacaaccuuaccagaga

SEQ ID NO: 1082311 - RNA, 19 nt, Homo sapiens
  misc_RNA (1)...(19): siRNA sense strand
gcacugggcggaucuauca

SEQ ID NO: 1082312 - RNA, 19 nt, Homo sapiens
  misc_RNA (1)...(19): siRNA sense strand
aaagaggacucaaugacaa

SEQ ID NO: 1082313 - RNA, 19 nt, Homo sapiens
  misc_RNA (1)...(19): siRNA sense strand
ggaaaggacuagaccaaaa

SEQ ID NO: 1082314 - RNA, 19 nt, Homo sapiens
  misc_RNA (1)...(19): siRNA sense strand
aaucucagcuggacucuau

SEQ ID NO: 1082315 - RNA, 19 nt, Homo sapiens
  misc_RNA (1)...(19): siRNA sense strand
ccaagucucuuacccuuca

SEQ ID NO: 1082316 - RNA, 19 nt, Homo sapiens
  misc_RNA (1)...(19): siRNA sense strand
cagcuacacuucaucauca

SEQ ID NO: 1082317 - RNA, 19 nt, Homo sapiens
  misc_RNA (1)...(19): siRNA sense strand
caaagaaggagagaaacua

SEQ ID NO: 1082318 - RNA, 19 nt, Homo sapiens
  misc_RNA (1)...(19): siRNA sense strand
gagauugggugcagauucu

SEQ ID NO: 1082319 - RNA, 19 nt, Homo sapiens
  misc_RNA (1)...(19): siRNA sense strand
agacaacaaccuccaauuu

SEQ ID NO: 1082320 - RNA, 19 nt, Homo sapiens
  misc_RNA (1)...(19): siRNA sense strand
ugaaggcuuugacguguuu

SEQ ID NO: 1082321 - RNA, 19 nt, Homo sapiens
  misc_RNA (1)...(19): siRNA sense strand
ucacaucucuugccucucu

SEQ ID NO: 1082322 - RNA, 19 nt, Homo sapiens
  misc_RNA (1)...(19): siRNA sense strand
uugcagagcucuccucaga

SEQ ID NO: 1082323 - RNA, 19 nt, Homo sapiens
  misc_RNA (1)...(19): siRNA sense strand
cagcuaaccauguggauaa

SEQ ID NO: 1082324 - RNA, 19 nt, Homo sapiens
  misc_RNA (1)...(19): siRNA sense strand
cagcuggacucuauauugu

SEQ ID NO: 1082325 - RNA, 19 nt, Homo sapiens
  misc_RNA (1)...(19): siRNA sense strand
caaauuacagggaugagaa

SEQ ID NO: 1082326 - RNA, 19 nt, Homo sapiens
  misc_RNA (1)...(19): siRNA sense strand
ucaagaccaugaggaaauu

SEQ ID NO: 1082327 - RNA, 19 nt, Homo sapiens
  misc_RNA (1)...(19): siRNA sense strand
uuacagggaugagaagauu

SEQ ID NO: 1082328 - RNA, 19 nt, Homo sapiens
  misc_RNA (1)...(19): siRNA sense strand
gacaacaaccuccaauuuc

SEQ ID NO: 1082329 - RNA, 19 nt, Homo sapiens
  misc_RNA (1)...(19): siRNA sense strand
gagagaaacuaaaagaaga

SEQ ID NO: 1082330 - RNA, 19 nt, Homo sapiens
  misc_RNA (1)...(19): siRNA sense strand
ccucauaacucaggucuca

SEQ ID NO: 1082331 - RNA, 19 nt, Homo sapiens
  misc_RNA (1)...(19): siRNA sense strand
caccauucauuccucauaa

SEQ ID NO: 1082332 - RNA, 19 nt, Homo sapiens
  misc_RNA (1)...(19): siRNA sense strand
gcaccauucauuccucaua

SEQ ID NO: 1082333 - RNA, 19 nt, Homo sapiens
  misc_RNA (1)...(19): siRNA sense strand
acaacuugcugaaggcuuu

SEQ ID NO: 1082334 - RNA, 19 nt, Homo sapiens
  misc_RNA (1)...(19): siRNA sense strand
gcuaacuccuuacccaaug

SEQ ID NO: 1082335 - RNA, 19 nt, Homo sapiens
  misc_RNA (1)...(19): siRNA sense strand
aaauuaaacuggccagaag

SEQ ID NO: 1082336 - RNA, 19 nt, Homo sapiens
  misc_RNA (1)...(19): siRNA sense strand
caagaacucaagaccauga

SEQ ID NO: 1082337 - RNA, 19 nt, Homo sapiens
  misc_RNA (1)...(19): siRNA sense strand
ucagcgaguuggcaaagaa

SEQ ID NO: 1082338 - RNA, 19 nt, Homo sapiens
  misc_RNA (1)...(19): siRNA sense strand
caaauuaaacuggccagaa

SEQ ID NO: 1082339 - RNA, 19 nt, Homo sapiens
  misc_RNA (1)...(19): siRNA sense strand
gcuggacucuauauuguca

SEQ ID NO: 1082340 - RNA, 19 nt, Homo sapiens
  misc_RNA (1)...(19): siRNA sense strand
gaacuuccaguggugaauu

SEQ ID NO: 1082341 - RNA, 19 nt, Homo sapiens
  misc_RNA (1)...(19): siRNA sense strand
caaccuccaauuucccuua

SEQ ID NO: 1082342 - RNA, 19 nt, Homo sapiens
  misc_RNA (1)...(19): siRNA sense strand
uacaagaacucaagaccau

SEQ ID NO: 1082343 - RNA, 19 nt, Homo sapiens
  misc_RNA (1)...(19): siRNA sense strand
gaauucaucagcuggauca

SEQ ID NO: 1082344 - RNA, 19 nt, Homo sapiens
  misc_RNA (1)...(19): siRNA sense strand
aaagaaggagagaaacuaa

SEQ ID NO: 1082345 - RNA, 19 nt, Homo sapiens
  misc_RNA (1)...(19): siRNA sense strand
gaggagagccgcguucuag

SEQ ID NO: 1082346 - RNA, 19 nt, Homo sapiens
  misc_RNA (1)...(19): siRNA sense strand
gagccgcguucuaggauuc

SEQ ID NO: 1082347 - RNA, 19 nt, Homo sapiens
  misc_RNA (1)...(19): siRNA sense strand
ggucucagcuacacuucau

SEQ ID NO: 1082348 - RNA, 19 nt, Homo sapiens
  misc_RNA (1)...(19): siRNA sense strand
ccuccaauuucccuuauau

SEQ ID NO: 1082349 - RNA, 19 nt, Homo sapiens
  misc_RNA (1)...(19): siRNA sense strand
caauaaaagucuucacaga

SEQ ID NO: 1082350 - RNA, 19 nt, Homo sapiens
  misc_RNA (1)...(19): siRNA sense strand
guucuaggauucggcauug

SEQ ID NO: 1082351 - RNA, 19 nt, Homo sapiens
  misc_RNA (1)...(19): siRNA sense strand
ggagagccgcguucuagga

SEQ ID NO: 1082352 - RNA, 19 nt, Homo sapiens
  misc_RNA (1)...(19): siRNA sense strand
ggacuagaccaaaauauug

SEQ ID NO: 1082353 - RNA, 19 nt, Homo sapiens
  misc_RNA (1)...(19): siRNA sense strand
gcaaagaaggagagaaacu

SEQ ID NO: 1082354 - RNA, 19 nt, Homo sapiens
  misc_RNA (1)...(19): siRNA sense strand
ggugguggccucugagcua

SEQ ID NO: 1082355 - RNA, 19 nt, Homo sapiens
  misc_RNA (1)...(19): siRNA sense strand
ggacggcauugcucuacca

SEQ ID NO: 1082356 - RNA, 19 nt, Homo sapiens
  misc_RNA (1)...(19): siRNA sense strand
uggcaaagaaggagagaaa

SEQ ID NO: 1082357 - RNA, 19 nt, Homo sapiens
  misc_RNA (1)...(19): siRNA sense strand
gcaaauuacagggaugaga

SEQ ID NO: 1082358 - RNA, 19 nt, Homo sapiens
  misc_RNA (1)...(19): siRNA sense strand
gaucaaacugcuguacuug

SEQ ID NO: 1082359 - RNA, 19 nt, Homo sapiens
  misc_RNA (1)...(19): siRNA sense strand
uuccucagauccagaagua

SEQ ID NO: 1082360 - RNA, 19 nt, Homo sapiens
  misc_RNA (1)...(19): siRNA sense strand
caaacugcuguacuuguaa

SEQ ID NO: 1082361 - RNA, 19 nt, Homo sapiens
  misc_RNA (1)...(19): siRNA sense strand
ggaggagagccgcguucua

SEQ ID NO: 1082362 - RNA, 19 nt, Homo sapiens
  misc_RNA (1)...(19): siRNA sense strand
uggaaccucuuacugugaa

SEQ ID NO: 1082363 - RNA, 19 nt, Homo sapiens
  misc_RNA (1)...(19): siRNA sense strand
agagagggauucgcaacuu

SEQ ID NO: 1082364 - RNA, 19 nt, Homo sapiens
  misc_RNA (1)...(19): siRNA sense strand
gauucuacaggaucaaauu

SEQ ID NO: 1082365 - RNA, 19 nt, Homo sapiens
  misc_RNA (1)...(19): siRNA sense strand
ugagaagauugcugaacga

SEQ ID NO: 1082366 - RNA, 19 nt, Homo sapiens
  misc_RNA (1)...(19): siRNA sense strand
ucagcuggacucuauauug

SEQ ID NO: 1082367 - RNA, 19 nt, Homo sapiens
  misc_RNA (1)...(19): siRNA sense strand
gcaaauucaagcaguugga

SEQ ID NO: 1082368 - RNA, 19 nt, Homo sapiens
  misc_RNA (1)...(19): siRNA sense strand
gacaagacuuuggcuaacu

SEQ ID NO: 1082369 - RNA, 19 nt, Homo sapiens
  misc_RNA (1)...(19): siRNA sense strand
gcggaucuaucagcgaguu

SEQ ID NO: 1082370 - RNA, 19 nt, Homo sapiens
  misc_RNA (1)...(19): siRNA sense strand
gaaucaccuuccucagauc

SEQ ID NO: 1082371 - RNA, 19 nt, Homo sapiens
  misc_RNA (1)...(19): siRNA sense strand
gaccaugaggaaauuaaug

SEQ ID NO: 1082372 - RNA, 19 nt, Homo sapiens
  misc_RNA (1)...(19): siRNA sense strand
ugacaagacuuuggcuaac

SEQ ID NO: 1082373 - RNA, 19 nt, Homo sapiens
  misc_RNA (1)...(19): siRNA sense strand
gagcucuccucagacaaug

SEQ ID NO: 1082374 - RNA, 19 nt, Homo sapiens
  misc_RNA (1)...(19): siRNA sense strand
gugcagcggugacccuagu

SEQ ID NO: 1082375 - RNA, 19 nt, Homo sapiens
  misc_RNA (1)...(19): siRNA sense strand
gaaagacuggacggcauug

SEQ ID NO: 1082376 - RNA, 19 nt, Homo sapiens
  misc_RNA (1)...(19): siRNA sense strand
ccaaaccagccaagacuuc

SEQ ID NO: 1082377 - RNA, 19 nt, Homo sapiens
  misc_RNA (1)...(19): siRNA sense strand
acaacaaccuccaauuucc

SEQ ID NO: 1082378 - RNA, 19 nt, Homo sapiens
  misc_RNA (1)...(19): siRNA sense strand
ugaaagacuggacggcauu

SEQ ID NO: 1082379 - RNA, 19 nt, Homo sapiens
  misc_RNA (1)...(19): siRNA sense strand
caagaccaugaggaaauua

SEQ ID NO: 1082380 - RNA, 19 nt, Homo sapiens
  misc_RNA (1)...(19): siRNA sense strand
gaaaggacuagaccaaaau

SEQ ID NO: 1082381 - RNA, 19 nt, Homo sapiens
  misc_RNA (1)...(19): siRNA sense strand
uauggcacccguucuagaa

SEQ ID NO: 1082382 - RNA, 19 nt, Homo sapiens
  misc_RNA (1)...(19): siRNA sense strand
agucuggccuccacguuug

SEQ ID NO: 1082383 - RNA, 19 nt, Homo sapiens
  misc_RNA (1)...(19): siRNA sense strand
ggaaccucuuacugugaaa

SEQ ID NO: 1082384 - RNA, 19 nt, Homo sapiens
  misc_RNA (1)...(19): siRNA sense strand
caaauucaagcaguuggaa

SEQ ID NO: 1082385 - RNA, 19 nt, Homo sapiens
  misc_RNA (1)...(19): siRNA sense strand
gacucuauauugucaaacu

SEQ ID NO: 1082386 - RNA, 19 nt, Homo sapiens
  misc_RNA (1)...(19): siRNA sense strand
auucauuccucauaacuca

SEQ ID NO: 1082387 - RNA, 19 nt, Homo sapiens
  misc_RNA (1)...(19): siRNA sense strand
ggaaaagaggacucaauga

SEQ ID NO: 1082388 - RNA, 19 nt, Homo sapiens
  misc_RNA (1)...(19): siRNA sense strand
caacguugcaggccauucu

SEQ ID NO: 1082389 - RNA, 19 nt, Homo sapiens
  misc_RNA (1)...(19): siRNA sense strand
caguauggcacccguucua

SEQ ID NO: 1082390 - RNA, 19 nt, Homo sapiens
  misc_RNA (1)...(19): siRNA sense strand
gaucgcggacagugaugaa

SEQ ID NO: 1082391 - RNA, 19 nt, Homo sapiens
  misc_RNA (1)...(19): siRNA sense strand
aaaagaggcucagcagaga

SEQ ID NO: 1082392 - RNA, 19 nt, Homo sapiens
  misc_RNA (1)...(19): siRNA sense strand
caagagauugggugcagau

SEQ ID NO: 1082393 - RNA, 19 nt, Homo sapiens
  misc_RNA (1)...(19): siRNA sense strand
gagagccgcguucuaggau

SEQ ID NO: 1082394 - RNA, 19 nt, Homo sapiens
  misc_RNA (1)...(19): siRNA sense strand
ggagagaaacuaaaagaag

SEQ ID NO: 1082395 - RNA, 19 nt, Homo sapiens
  misc_RNA (1)...(19): siRNA sense strand
cagacaacaaccuccaauu

SEQ ID NO: 1082396 - RNA, 19 nt, Homo sapiens
  misc_RNA (1)...(19): siRNA sense strand
gaaaagaggacucaaugac

SEQ ID NO: 1082397 - RNA, 19 nt, Homo sapiens
  misc_RNA (1)...(19): siRNA sense strand
uggacucuauauugucaaa

SEQ ID NO: 1082398 - RNA, 19 nt, Homo sapiens
  misc_RNA (1)...(19): siRNA sense strand
aaugcaaauucaagcaguu

SEQ ID NO: 1082399 - RNA, 19 nt, Homo sapiens
  misc_RNA (1)...(19): siRNA sense strand
caaccuuaccagagacaga

SEQ ID NO: 1082400 - RNA, 19 nt, Homo sapiens
  misc_RNA (1)...(19): siRNA sense strand
cacgugguguguggaauga

SEQ ID NO: 1082401 - RNA, 19 nt, Homo sapiens
  misc_RNA (1)...(19): siRNA sense strand
cggcauuguucuggaauca

SEQ ID NO: 1082402 - RNA, 19 nt, Homo sapiens
  misc_RNA (1)...(19): siRNA sense strand
acugcugucucacgaaaga

SEQ ID NO: 1082403 - RNA, 19 nt, Homo sapiens
  misc_RNA (1)...(19): siRNA sense strand
guauggcacccguucuaga

SEQ ID NO: 1082404 - RNA, 19 nt, Homo sapiens
  misc_RNA (1)...(19): siRNA sense strand
gaauuuaacucaaccuuuc

SEQ ID NO: 1082405 - RNA, 19 nt, Homo sapiens
  misc_RNA (1)...(19): siRNA sense strand
ccaguacgauguaauguuu

SEQ ID NO: 1082406 - RNA, 19 nt, Homo sapiens
  misc_RNA (1)...(19): siRNA sense strand
gaagacagcauuagucaug

SEQ ID NO: 1082407 - RNA, 19 nt, Homo sapiens
  misc_RNA (1)...(19): siRNA sense strand
gauguaauguuucuuggaa

SEQ ID NO: 1082408 - RNA, 19 nt, Homo sapiens
  misc_RNA (1)...(19): siRNA sense strand
gauaugcuccuacuucuaa

SEQ ID NO: 1082409 - RNA, 19 nt, Homo sapiens
  misc_RNA (1)...(19): siRNA sense strand
ggaccaacguucaagagaa

SEQ ID NO: 1082410 - RNA, 19 nt, Homo sapiens
  misc_RNA (1)...(19): siRNA sense strand
ggaaaugcaugcucucgau

SEQ ID NO: 1082411 - RNA, 19 nt, Homo sapiens
  misc_RNA (1)...(19): siRNA sense strand
gaaacgaaaucgaagacau

SEQ ID NO: 1082412 - RNA, 19 nt, Homo sapiens
  misc_RNA (1)...(19): siRNA sense strand
ggaagcacaugcaggaaau

SEQ ID NO: 1082413 - RNA, 19 nt, Homo sapiens
  misc_RNA (1)...(19): siRNA sense strand
gcacagaugcgacacuuau

SEQ ID NO: 1082414 - RNA, 19 nt, Homo sapiens
  misc_RNA (1)...(19): siRNA sense strand
caaccuuucuggaauguau

SEQ ID NO: 1082415 - RNA, 19 nt, Homo sapiens
  misc_RNA (1)...(19): siRNA sense strand
gaaggauucugggauguau

SEQ ID NO: 1082416 - RNA, 19 nt, Homo sapiens
  misc_RNA (1)...(19): siRNA sense strand
gaaaugaagaagaaacgaa

SEQ ID NO: 1082417 - RNA, 19 nt, Homo sapiens
  misc_RNA (1)...(19): siRNA sense strand
ggacaucgaagacagcauu

SEQ ID NO: 1082418 - RNA, 19 nt, Homo sapiens
  misc_RNA (1)...(19): siRNA sense strand
gaaggucaaggaucuauug

SEQ ID NO: 1082419 - RNA, 19 nt, Homo sapiens
  misc_RNA (1)...(19): siRNA sense strand
cauuggaacuguccucaaa

SEQ ID NO: 1082420 - RNA, 19 nt, Homo sapiens
  misc_RNA (1)...(19): siRNA sense strand
ccucaaaguugucagcauu

SEQ ID NO: 1082421 - RNA, 19 nt, Homo sapiens
  misc_RNA (1)...(19): siRNA sense strand
gaccaacguucaagagaau

SEQ ID NO: 1082422 - RNA, 19 nt, Homo sapiens
  misc_RNA (1)...(19): siRNA sense strand
gaagaaacgaaaucgaaga

SEQ ID NO: 1082423 - RNA, 19 nt, Homo sapiens
  misc_RNA (1)...(19): siRNA sense strand
gaaaugcaugcucucgaua

SEQ ID NO: 1082424 - RNA, 19 nt, Homo sapiens
  misc_RNA (1)...(19): siRNA sense strand
uagugaagcugacuuugaa

SEQ ID NO: 1082425 - RNA, 19 nt, Homo sapiens
  misc_RNA (1)...(19): siRNA sense strand
ggcacucugugauguauaa

SEQ ID NO: 1082426 - RNA, 19 nt, Homo sapiens
  misc_RNA (1)...(19): siRNA sense strand
uaacucaaccuuucuggaa

SEQ ID NO: 1082427 - RNA, 19 nt, Homo sapiens
  misc_RNA (1)...(19): siRNA sense strand
guacauugguucccgagau

SEQ ID NO: 1082428 - RNA, 19 nt, Homo sapiens
  misc_RNA (1)...(19): siRNA sense strand
gaaguuugcagaagaagga

SEQ ID NO: 1082429 - RNA, 19 nt, Homo sapiens
  misc_RNA (1)...(19): siRNA sense strand
gcaguaugaugggagaauu

SEQ ID NO: 1082430 - RNA, 19 nt, Homo sapiens
  misc_RNA (1)...(19): siRNA sense strand
gcacucaucaaucaucuug

SEQ ID NO: 1082431 - RNA, 19 nt, Homo sapiens
  misc_RNA (1)...(19): siRNA sense strand
ccaacaagcaacuauuaaa

SEQ ID NO: 1082432 - RNA, 19 nt, Homo sapiens
  misc_RNA (1)...(19): siRNA sense strand
gaagcccgaugaaagaauc

SEQ ID NO: 1082433 - RNA, 19 nt, Homo sapiens
  misc_RNA (1)...(19): siRNA sense strand
acaagcaacuauuaaaugg

SEQ ID NO: 1082434 - RNA, 19 nt, Homo sapiens
  misc_RNA (1)...(19): siRNA sense strand
ggaauaugggcuacugauu

SEQ ID NO: 1082435 - RNA, 19 nt, Homo sapiens
  misc_RNA (1)...(19): siRNA sense strand
uggaggaguugcagauauu

SEQ ID NO: 1082436 - RNA, 19 nt, Homo sapiens
  misc_RNA (1)...(19): siRNA sense strand
uacaaagacuacauccaaa

SEQ ID NO: 1082437 - RNA, 19 nt, Homo sapiens
  misc_RNA (1)...(19): siRNA sense strand
gagaagcggagacagagaa

SEQ ID NO: 1082438 - RNA, 19 nt, Homo sapiens
  misc_RNA (1)...(19): siRNA sense strand
ugaagcagcaacaauugua

SEQ ID NO: 1082439 - RNA, 19 nt, Homo sapiens
  misc_RNA (1)...(19): siRNA sense strand
gacuacauccaaauccuua

SEQ ID NO: 1082440 - RNA, 19 nt, Homo sapiens
  misc_RNA (1)...(19): siRNA sense strand
gagaaugaacagauggaaa

SEQ ID NO: 1082441 - RNA, 19 nt, Homo sapiens
  misc_RNA (1)...(19): siRNA sense strand
gaagcugacuuugaauguc

SEQ ID NO: 1082442 - RNA, 19 nt, Homo sapiens
  misc_RNA (1)...(19): siRNA sense strand
ccuaugacccacugauuaa

SEQ ID NO: 1082443 - RNA, 19 nt, Homo sapiens
  misc_RNA (1)...(19): siRNA sense strand
gauuacagacugacacaga

SEQ ID NO: 1082444 - RNA, 19 nt, Homo sapiens
  misc_RNA (1)...(19): siRNA sense strand
uaaggaaagugcagaccau

SEQ ID NO: 1082445 - RNA, 19 nt, Homo sapiens
  misc_RNA (1)...(19): siRNA sense strand
ugucaucaguuucauaaag

SEQ ID NO: 1082446 - RNA, 19 nt, Homo sapiens
  misc_RNA (1)...(19): siRNA sense strand
gaagaagaaacgaaaucga

SEQ ID NO: 1082447 - RNA, 19 nt, Homo sapiens
  misc_RNA (1)...(19): siRNA sense strand
ugcaggaaaugaagaagaa

SEQ ID NO: 1082448 - RNA, 19 nt, Homo sapiens
  misc_RNA (1)...(19): siRNA sense strand
gcuagacgccaagauguaa

SEQ ID NO: 1082449 - RNA, 19 nt, Homo sapiens
  misc_RNA (1)...(19): siRNA sense strand
auacaaagacuacauccaa

SEQ ID NO: 1082450 - RNA, 19 nt, Homo sapiens
  misc_RNA (1)...(19): siRNA sense strand
cuagagcuguagccacgua

SEQ ID NO: 1082451 - RNA, 19 nt, Homo sapiens
  misc_RNA (1)...(19): siRNA sense strand
gaaagugcagaccaucguu

SEQ ID NO: 1082452 - RNA, 19 nt, Homo sapiens
  misc_RNA (1)...(19): siRNA sense strand
aagaagaaacgaaaucgaa

SEQ ID NO: 1082453 - RNA, 19 nt, Homo sapiens
  misc_RNA (1)...(19): siRNA sense strand
gcacaugcaggaaaugaag

SEQ ID NO: 1082454 - RNA, 19 nt, Homo sapiens
  misc_RNA (1)...(19): siRNA sense strand
gaccaguacugcgaacaga

SEQ ID NO: 1082455 - RNA, 19 nt, Homo sapiens
  misc_RNA (1)...(19): siRNA sense strand
guugaagcccgaugaaaga

SEQ ID NO: 1082456 - RNA, 19 nt, Homo sapiens
  misc_RNA (1)...(19): siRNA sense strand
uucaagcacucaucaauca

SEQ ID NO: 1082457 - RNA, 19 nt, Homo sapiens
  misc_RNA (1)...(19): siRNA sense strand
cgaaaucgaagacaucaca

SEQ ID NO: 1082458 - RNA, 19 nt, Homo sapiens
  misc_RNA (1)...(19): siRNA sense strand
caaagacuacauccaaauc

SEQ ID NO: 1082459 - RNA, 19 nt, Homo sapiens
  misc_RNA (1)...(19): siRNA sense strand
ucauaaagcggcacucugu

SEQ ID NO: 1082460 - RNA, 19 nt, Homo sapiens
  misc_RNA (1)...(19): siRNA sense strand
gagcuagacgccaagaugu

SEQ ID NO: 1082461 - RNA, 19 nt, Homo sapiens
  misc_RNA (1)...(19): siRNA sense strand
gauauucaagcacucauca

SEQ ID NO: 1082462 - RNA, 19 nt, Homo sapiens
  misc_RNA (1)...(19): siRNA sense strand
gaauauggaagagguagug

SEQ ID NO: 1082463 - RNA, 19 nt, Homo sapiens
  misc_RNA (1)...(19): siRNA sense strand
gaugggagaauuccuuauc

SEQ ID NO: 1082464 - RNA, 19 nt, Homo sapiens
  misc_RNA (1)...(19): siRNA sense strand
gcaggaggaccaacguuca

SEQ ID NO: 1082465 - RNA, 19 nt, Homo sapiens
  misc_RNA (1)...(19): siRNA sense strand
agacagcauuagucaugaa

SEQ ID NO: 1082466 - RNA, 19 nt, Homo sapiens
  misc_RNA (1)...(19): siRNA sense strand
ugggauguauuacugcaaa

SEQ ID NO: 1082467 - RNA, 19 nt, Homo sapiens
  misc_RNA (1)...(19): siRNA sense strand
ucccaacaagcaacuauua

SEQ ID NO: 1082468 - RNA, 19 nt, Homo sapiens
  misc_RNA (1)...(19): siRNA sense strand
ugucagcauuucaaaggaa

SEQ ID NO: 1082469 - RNA, 19 nt, Homo sapiens
  misc_RNA (1)...(19): siRNA sense strand
gcuacugauucgaaguuug

SEQ ID NO: 1082470 - RNA, 19 nt, Homo sapiens
  misc_RNA (1)...(19): siRNA sense strand
uggaauguauaccuaaauc

SEQ ID NO: 1082471 - RNA, 19 nt, Homo sapiens
  misc_RNA (1)...(19): siRNA sense strand
aacauggaauugucucuga

SEQ ID NO: 1082472 - RNA, 19 nt, Homo sapiens
  misc_RNA (1)...(19): siRNA sense strand
ucaaaguugucagcauuuc

SEQ ID NO: 1082473 - RNA, 19 nt, Homo sapiens
  misc_RNA (1)...(19): siRNA sense strand
agugguggaucaugucauu

SEQ ID NO: 1082474 - RNA, 19 nt, Homo sapiens
  misc_RNA (1)...(19): siRNA sense strand
cagcauuagucaugaaacu

SEQ ID NO: 1082475 - RNA, 19 nt, Homo sapiens
  misc_RNA (1)...(19): siRNA sense strand
aggauucugggauguauua

SEQ ID NO: 1082476 - RNA, 19 nt, Homo sapiens
  misc_RNA (1)...(19): siRNA sense strand
ggaggaccaacguucaaga

SEQ ID NO: 1082477 - RNA, 19 nt, Homo sapiens
  misc_RNA (1)...(19): siRNA sense strand
gagucacgguugagauaca

SEQ ID NO: 1082478 - RNA, 19 nt, Homo sapiens
  misc_RNA (1)...(19): siRNA sense strand
ggaaggucaaggaucuauu

SEQ ID NO: 1082479 - RNA, 19 nt, Homo sapiens
  misc_RNA (1)...(19): siRNA sense strand
ggaguugaagcccgaugaa

SEQ ID NO: 1082480 - RNA, 19 nt, Homo sapiens
  misc_RNA (1)...(19): siRNA sense strand
uuucuggaauguauaccua

SEQ ID NO: 1082481 - RNA, 19 nt, Homo sapiens
  misc_RNA (1)...(19): siRNA sense strand
gcagcaacaauuguacauu

SEQ ID NO: 1082482 - RNA, 19 nt, Homo sapiens
  misc_RNA (1)...(19): siRNA sense strand
gauggccaguacgauguaa

SEQ ID NO: 1082483 - RNA, 19 nt, Homo sapiens
  misc_RNA (1)...(19): siRNA sense strand
uuacagacugacacagaua

SEQ ID NO: 1082484 - RNA, 19 nt, Homo sapiens
  misc_RNA (1)...(19): siRNA sense strand
caagagaaucaauguggau

SEQ ID NO: 1082485 - RNA, 19 nt, Homo sapiens
  misc_RNA (1)...(19): siRNA sense strand
aaacgaaaucgaagacauc

SEQ ID NO: 1082486 - RNA, 19 nt, Homo sapiens
  misc_RNA (1)...(19): siRNA sense strand
gagauacaaagacuacauc

SEQ ID NO: 1082487 - RNA, 19 nt, Homo sapiens
  misc_RNA (1)...(19): siRNA sense strand
gcggcacucugugauguau

SEQ ID NO: 1082488 - RNA, 19 nt, Homo sapiens
  misc_RNA (1)...(19): siRNA sense strand
ucuggaauguauaccuaaa

SEQ ID NO: 1082489 - RNA, 19 nt, Homo sapiens
  misc_RNA (1)...(19): siRNA sense strand
aaauauggcgacccaauca

SEQ ID NO: 1082490 - RNA, 19 nt, Homo sapiens
  misc_RNA (1)...(19): siRNA sense strand
gaaagcuugcgcagacugu

SEQ ID NO: 1082491 - RNA, 19 nt, Homo sapiens
  misc_RNA (1)...(19): siRNA sense strand
ggaaagugcagaccaucgu

SEQ ID NO: 1082492 - RNA, 19 nt, Homo sapiens
  misc_RNA (1)...(19): siRNA sense strand
gaucaugucauugcagaag

SEQ ID NO: 1082493 - RNA, 19 nt, Homo sapiens
  misc_RNA (1)...(19): siRNA sense strand
ccauagugaagcugacuuu

SEQ ID NO: 1082494 - RNA, 19 nt, Homo sapiens
  misc_RNA (1)...(19): siRNA sense strand
auucgaaguuugcagaaga

SEQ ID NO: 1082495 - RNA, 19 nt, Homo sapiens
  misc_RNA (1)...(19): siRNA sense strand
gggcuacugauucgaaguu

SEQ ID NO: 1082496 - RNA, 19 nt, Homo sapiens
  misc_RNA (1)...(19): siRNA sense strand
gacaucgaagacagcauua

SEQ ID NO: 1082497 - RNA, 19 nt, Homo sapiens
  misc_RNA (1)...(19): siRNA sense strand
gcagauauucaagcacuca

SEQ ID NO: 1082498 - RNA, 19 nt, Homo sapiens
  misc_RNA (1)...(19): siRNA sense strand
agauagugguggaucaugu

SEQ ID NO: 1082499 - RNA, 19 nt, Homo sapiens
  misc_RNA (1)...(19): siRNA sense strand
caaaguggaagcacaugca

SEQ ID NO: 1082500 - RNA, 19 nt, Homo sapiens
  misc_RNA (1)...(19): siRNA sense strand
cuggaggaguugcagauau

SEQ ID NO: 1082501 - RNA, 19 nt, Homo sapiens
  misc_RNA (1)...(19): siRNA sense strand
ccugguacauguccaagca

SEQ ID NO: 1082502 - RNA, 19 nt, Homo sapiens
  misc_RNA (1)...(19): siRNA sense strand
ggagaagcggagacagaga

SEQ ID NO: 1082503 - RNA, 19 nt, Homo sapiens
  misc_RNA (1)...(19): siRNA sense strand
acaaagacuacauccaaau

SEQ ID NO: 1082504 - RNA, 19 nt, Homo sapiens
  misc_RNA (1)...(19): siRNA sense strand
gaagaggccuuagagaauu

SEQ ID NO: 1082505 - RNA, 19 nt, Homo sapiens
  misc_RNA (1)...(19): siRNA sense strand
ucacauaccucaagaagca

SEQ ID NO: 1082506 - RNA, 19 nt, Homo sapiens
  misc_RNA (1)...(19): siRNA sense strand
ggaggacgaugacacagaa

SEQ ID NO: 1082507 - RNA, 19 nt, Homo sapiens
  misc_RNA (1)...(19): siRNA sense strand
ggaagagacacgugccuua

SEQ ID NO: 1082508 - RNA, 19 nt, Homo sapiens
  misc_RNA (1)...(19): siRNA sense strand
ggaagaggccuuagagaau

SEQ ID NO: 1082509 - RNA, 19 nt, Homo sapiens
  misc_RNA (1)...(19): siRNA sense strand
ggaggaguuugaagacauu

SEQ ID NO: 1082510 - RNA, 19 nt, Homo sapiens
  misc_RNA (1)...(19): siRNA sense strand
ugaaaggccuagugcagaa

SEQ ID NO: 1082511 - RNA, 19 nt, Homo sapiens
  misc_RNA (1)...(19): siRNA sense strand
gcaaaugcgaaguguguaa

SEQ ID NO: 1082512 - RNA, 19 nt, Homo sapiens
  misc_RNA (1)...(19): siRNA sense strand
gggcugggauguugaagga

SEQ ID NO: 1082513 - RNA, 19 nt, Homo sapiens
  misc_RNA (1)...(19): siRNA sense strand
gagcggauccuggacuaua

SEQ ID NO: 1082514 - RNA, 19 nt, Homo sapiens
  misc_RNA (1)...(19): siRNA sense strand
gagacaagaugaccaagac

SEQ ID NO: 1082515 - RNA, 19 nt, Homo sapiens
  misc_RNA (1)...(19): siRNA sense strand
ggaaaggagaucacagaug

SEQ ID NO: 1082516 - RNA, 19 nt, Homo sapiens
  misc_RNA (1)...(19): siRNA sense strand
ggaagaggaggaagaggaa

SEQ ID NO: 1082517 - RNA, 19 nt, Homo sapiens
  misc_RNA (1)...(19): siRNA sense strand
gaccauggcaacacugaaa

SEQ ID NO: 1082518 - RNA, 19 nt, Homo sapiens
  misc_RNA (1)...(19): siRNA sense strand
caggaaacuuggacuggaa

SEQ ID NO: 1082519 - RNA, 19 nt, Homo sapiens
  misc_RNA (1)...(19): siRNA sense strand
ugaaggaggaggacgauga

SEQ ID NO: 1082520 - RNA, 19 nt, Homo sapiens
  misc_RNA (1)...(19): siRNA sense strand
ggagacaagaugaccaaga

SEQ ID NO: 1082521 - RNA, 19 nt, Homo sapiens
  misc_RNA (1)...(19): siRNA sense strand
gagcagccccuacaaaauu

SEQ ID NO: 1082522 - RNA, 19 nt, Homo sapiens
  misc_RNA (1)...(19): siRNA sense strand
cagcaaaugcgaagugugu

SEQ ID NO: 1082523 - RNA, 19 nt, Homo sapiens
  misc_RNA (1)...(19): siRNA sense strand
uuacagcguuucagagaca

SEQ ID NO: 1082524 - RNA, 19 nt, Homo sapiens
  misc_RNA (1)...(19): siRNA sense strand
uggaagaggccuuagagaa

SEQ ID NO: 1082525 - RNA, 19 nt, Homo sapiens
  misc_RNA (1)...(19): siRNA sense strand
ugaccgagaagaucuuuga

SEQ ID NO: 1082526 - RNA, 19 nt, Homo sapiens
  misc_RNA (1)...(19): siRNA sense strand
aagaggccuuagagaauuu

SEQ ID NO: 1082527 - RNA, 19 nt, Homo sapiens
  misc_RNA (1)...(19): siRNA sense strand
gugagcggauccuggacua

SEQ ID NO: 1082528 - RNA, 19 nt, Homo sapiens
  misc_RNA (1)...(19): siRNA sense strand
ggaggaggacgaugacaca

SEQ ID NO: 1082529 - RNA, 19 nt, Homo sapiens
  misc_RNA (1)...(19): siRNA sense strand
ggaucccucuggagcuuug

SEQ ID NO: 1082530 - RNA, 19 nt, Homo sapiens
  misc_RNA (1)...(19): siRNA sense strand
gauccuggacuauaguguu

SEQ ID NO: 1082531 - RNA, 19 nt, Homo sapiens
  misc_RNA (1)...(19): siRNA sense strand
gaagagacacgugccuuac

SEQ ID NO: 1082532 - RNA, 19 nt, Homo sapiens
  misc_RNA (1)...(19): siRNA sense strand
ccuuagagaauuuauguga

SEQ ID NO: 1082533 - RNA, 19 nt, Homo sapiens
  misc_RNA (1)...(19): siRNA sense strand
gauacaggcaagaggaaga

SEQ ID NO: 1082534 - RNA, 19 nt, Homo sapiens
  misc_RNA (1)...(19): siRNA sense strand
ggccuuagagaauuuaugu

SEQ ID NO: 1082535 - RNA, 19 nt, Homo sapiens
  misc_RNA (1)...(19): siRNA sense strand
ggucacauaccucaagaag

SEQ ID NO: 1082536 - RNA, 19 nt, Homo sapiens
  misc_RNA (1)...(19): siRNA sense strand
ccugugcgguugggaauau

SEQ ID NO: 1082537 - RNA, 19 nt, Homo sapiens
  misc_RNA (1)...(19): siRNA sense strand
caaacuugaccgagaagau

SEQ ID NO: 1082538 - RNA, 19 nt, Homo sapiens
  misc_RNA (1)...(19): siRNA sense strand
aaacuuggacuggaaagga

SEQ ID NO: 1082539 - RNA, 19 nt, Homo sapiens
  misc_RNA (1)...(19): siRNA sense strand
ggcuugggcugggauguug

SEQ ID NO: 1082540 - RNA, 19 nt, Homo sapiens
  misc_RNA (1)...(19): siRNA sense strand
ggaguuugaagacauugug

SEQ ID NO: 1082541 - RNA, 19 nt, Homo sapiens
  misc_RNA (1)...(19): siRNA sense strand
gcagugugagaccauguug

SEQ ID NO: 1082542 - RNA, 19 nt, Homo sapiens
  misc_RNA (1)...(19): siRNA sense strand
uggaggaguuugaagacau

SEQ ID NO: 1082543 - RNA, 19 nt, Homo sapiens
  misc_RNA (1)...(19): siRNA sense strand
gaaaacagaaggggaggaa

SEQ ID NO: 1082544 - RNA, 19 nt, Homo sapiens
  misc_RNA (1)...(19): siRNA sense strand
aaacuugaccgagaagauc

SEQ ID NO: 1082545 - RNA, 19 nt, Homo sapiens
  misc_RNA (1)...(19): siRNA sense strand
ggaggaagaggaggaagag

SEQ ID NO: 1082546 - RNA, 19 nt, Homo sapiens
  misc_RNA (1)...(19): siRNA sense strand
ggaggaggaagaggaggaa

SEQ ID NO: 1082547 - RNA, 19 nt, Homo sapiens
  misc_RNA (1)...(19): siRNA sense strand
ugcugaaacugcaugucua

SEQ ID NO: 1082548 - RNA, 19 nt, Homo sapiens
  misc_RNA (1)...(19): siRNA sense strand
ggaagccaccccaaacuug

SEQ ID NO: 1082549 - RNA, 19 nt, Homo sapiens
  misc_RNA (1)...(19): siRNA sense strand
agagacacgugccuuacag

SEQ ID NO: 1082550 - RNA, 19 nt, Homo sapiens
  misc_RNA (1)...(19): siRNA sense strand
gaaggaggaggacgaugac

SEQ ID NO: 1082551 - RNA, 19 nt, Homo sapiens
  misc_RNA (1)...(19): siRNA sense strand
gcaggaggaggaggaggaa

SEQ ID NO: 1082552 - RNA, 19 nt, Homo sapiens
  misc_RNA (1)...(19): siRNA sense strand
ccuuacagcguuucagaga

SEQ ID NO: 1082553 - RNA, 19 nt, Homo sapiens
  misc_RNA (1)...(19): siRNA sense strand
gaccauguuggaggaguuu

SEQ ID NO: 1082554 - RNA, 19 nt, Homo sapiens
  misc_RNA (1)...(19): siRNA sense strand
gagcuacaggcggaacuga

SEQ ID NO: 1082555 - RNA, 19 nt, Homo sapiens
  misc_RNA (1)...(19): siRNA sense strand
gcuggaagaggccuuagag

SEQ ID NO: 1082556 - RNA, 19 nt, Homo sapiens
  misc_RNA (1)...(19): siRNA sense strand
gaagccaccccaaacuuga

SEQ ID NO: 1082557 - RNA, 19 nt, Homo sapiens
  misc_RNA (1)...(19): siRNA sense strand
gaucacagauggggaagag

SEQ ID NO: 1082558 - RNA, 19 nt, Homo sapiens
  misc_RNA (1)...(19): siRNA sense strand
agaccauguuggaggaguu

SEQ ID NO: 1082559 - RNA, 19 nt, Homo sapiens
  misc_RNA (1)...(19): siRNA sense strand
cucuggagcuuugggauga

SEQ ID NO: 1082560 - RNA, 19 nt, Homo sapiens
  misc_RNA (1)...(19): siRNA sense strand
gcuacaggcggaacugagu

SEQ ID NO: 1082561 - RNA, 19 nt, Homo sapiens
  misc_RNA (1)...(19): siRNA sense strand
aagaugaccaagacaggaa

SEQ ID NO: 1082562 - RNA, 19 nt, Homo sapiens
  misc_RNA (1)...(19): siRNA sense strand
gguaggaacuuuaauauuc

SEQ ID NO: 1082563 - RNA, 19 nt, Homo sapiens
  misc_RNA (1)...(19): siRNA sense strand
uuacuaagcuucuuuguga

SEQ ID NO: 1082564 - RNA, 19 nt, Homo sapiens
  misc_RNA (1)...(19): siRNA sense strand
gaaagaugauuacugugaa

SEQ ID NO: 1082565 - RNA, 19 nt, Homo sapiens
  misc_RNA (1)...(19): siRNA sense strand
ucagaaagaugauuacugu

SEQ ID NO: 1082566 - RNA, 19 nt, Homo sapiens
  misc_RNA (1)...(19): siRNA sense strand
gagcaugcauugccauuau

SEQ ID NO: 1082567 - RNA, 19 nt, Homo sapiens
  misc_RNA (1)...(19): siRNA sense strand
gcgagcugauguagaauua

SEQ ID NO: 1082568 - RNA, 19 nt, Homo sapiens
  misc_RNA (1)...(19): siRNA sense strand
gacacaagcacuucgauua

SEQ ID NO: 1082569 - RNA, 19 nt, Homo sapiens
  misc_RNA (1)...(19): siRNA sense strand
gcacuucgauuagucagaa

SEQ ID NO: 1082570 - RNA, 19 nt, Homo sapiens
  misc_RNA (1)...(19): siRNA sense strand
ggacuaaacaccaucuuga

SEQ ID NO: 1082571 - RNA, 19 nt, Homo sapiens
  misc_RNA (1)...(19): siRNA sense strand
aaacugggcuuucacuaug

SEQ ID NO: 1082572 - RNA, 19 nt, Homo sapiens
  misc_RNA (1)...(19): siRNA sense strand
gagcugauguagaauuaga

SEQ ID NO: 1082573 - RNA, 19 nt, Homo sapiens
  misc_RNA (1)...(19): siRNA sense strand
gcauugccauuaucuguga

SEQ ID NO: 1082574 - RNA, 19 nt, Homo sapiens
  misc_RNA (1)...(19): siRNA sense strand
ucugauaacuuaagagaga

SEQ ID NO: 1082575 - RNA, 19 nt, Homo sapiens
  misc_RNA (1)...(19): siRNA sense strand
gugaccaacucauuaauug

SEQ ID NO: 1082576 - RNA, 19 nt, Homo sapiens
  misc_RNA (1)...(19): siRNA sense strand
gaaaugauggacuucaaga

SEQ ID NO: 1082577 - RNA, 19 nt, Homo sapiens
  misc_RNA (1)...(19): siRNA sense strand
cagggaguaucaaauauga

SEQ ID NO: 1082578 - RNA, 19 nt, Homo sapiens
  misc_RNA (1)...(19): siRNA sense strand
ugugaaugcuuccuuguuu

SEQ ID NO: 1082579 - RNA, 19 nt, Homo sapiens
  misc_RNA (1)...(19): siRNA sense strand
gaacuagcacuucagaauc

SEQ ID NO: 1082580 - RNA, 19 nt, Homo sapiens
  misc_RNA (1)...(19): siRNA sense strand
cauaauuuguuugcgguua

SEQ ID NO: 1082581 - RNA, 19 nt, Homo sapiens
  misc_RNA (1)...(19): siRNA sense strand
auaaaugaggcccuaauua

SEQ ID NO: 1082582 - RNA, 19 nt, Homo sapiens
  misc_RNA (1)...(19): siRNA sense strand
gagguaggaacuuuaauau

SEQ ID NO: 1082583 - RNA, 19 nt, Homo sapiens
  misc_RNA (1)...(19): siRNA sense strand
uaaaugaggcccuaauuac

SEQ ID NO: 1082584 - RNA, 19 nt, Homo sapiens
  misc_RNA (1)...(19): siRNA sense strand
ggacacaagcacuucgauu

SEQ ID NO: 1082585 - RNA, 19 nt, Homo sapiens
  misc_RNA (1)...(19): siRNA sense strand
ugugcgagcugauguagaa

SEQ ID NO: 1082586 - RNA, 19 nt, Homo sapiens
  misc_RNA (1)...(19): siRNA sense strand
gccauuaucugugaacuag

SEQ ID NO: 1082587 - RNA, 19 nt, Homo sapiens
  misc_RNA (1)...(19): siRNA sense strand
agaaagaugauuacuguga

SEQ ID NO: 1082588 - RNA, 19 nt, Homo sapiens
  misc_RNA (1)...(19): siRNA sense strand
cugaauaacuuuacuaagc

SEQ ID NO: 1082589 - RNA, 19 nt, Homo sapiens
  misc_RNA (1)...(19): siRNA sense strand
agagguaggaacuuuaaua

SEQ ID NO: 1082590 - RNA, 19 nt, Homo sapiens
  misc_RNA (1)...(19): siRNA sense strand
uaauugcaguuggaaauga

SEQ ID NO: 1082591 - RNA, 19 nt, Homo sapiens
  misc_RNA (1)...(19): siRNA sense strand
gcagggaguaucaaauaug

SEQ ID NO: 1082592 - RNA, 19 nt, Homo sapiens
  misc_RNA (1)...(19): siRNA sense strand
gcuacgagcgcuucgauau

SEQ ID NO: 1082593 - RNA, 19 nt, Homo sapiens
  misc_RNA (1)...(19): siRNA sense strand
uccaaagacucgacaguau

SEQ ID NO: 1082594 - RNA, 19 nt, Homo sapiens
  misc_RNA (1)...(19): siRNA sense strand
gaauaaaugaggcccuaau

SEQ ID NO: 1082595 - RNA, 19 nt, Homo sapiens
  misc_RNA (1)...(19): siRNA sense strand
caagaaagagacagaaugg

SEQ ID NO: 1082596 - RNA, 19 nt, Homo sapiens
  misc_RNA (1)...(19): siRNA sense strand
ugauggacuucaagaaaga

SEQ ID NO: 1082597 - RNA, 19 nt, Homo sapiens
  misc_RNA (1)...(19): siRNA sense strand
aagcuaggccaucugaaua

SEQ ID NO: 1082598 - RNA, 19 nt, Homo sapiens
  misc_RNA (1)...(19): siRNA sense strand
caaagacucgacaguaugu

SEQ ID NO: 1082599 - RNA, 19 nt, Homo sapiens
  misc_RNA (1)...(19): siRNA sense strand
gggaguaucaaauaugaga

SEQ ID NO: 1082600 - RNA, 19 nt, Homo sapiens
  misc_RNA (1)...(19): siRNA sense strand
uuuaauagcuaggugcauu

SEQ ID NO: 1082601 - RNA, 19 nt, Homo sapiens
  misc_RNA (1)...(19): siRNA sense strand
ugagaaagcuaggccaucu

SEQ ID NO: 1082602 - RNA, 19 nt, Homo sapiens
  misc_RNA (1)...(19): siRNA sense strand
gauauuggccacagugaag

SEQ ID NO: 1082603 - RNA, 19 nt, Homo sapiens
  misc_RNA (1)...(19): siRNA sense strand
ugauguagaauuagaggua

SEQ ID NO: 1082604 - RNA, 19 nt, Homo sapiens
  misc_RNA (1)...(19): siRNA sense strand
gaagaaccuccgaguacga

SEQ ID NO: 1082605 - RNA, 19 nt, Homo sapiens
  misc_RNA (1)...(19): siRNA sense strand
aaugaggcccuaauuacua

SEQ ID NO: 1082606 - RNA, 19 nt, Homo sapiens
  misc_RNA (1)...(19): siRNA sense strand
aauuagagguaggaacuuu

SEQ ID NO: 1082607 - RNA, 19 nt, Homo sapiens
  misc_RNA (1)...(19): siRNA sense strand
aaugauggacuucaagaaa

SEQ ID NO: 1082608 - RNA, 19 nt, Homo sapiens
  misc_RNA (1)...(19): siRNA sense strand
gaucugacccgagaaccuu

SEQ ID NO: 1082609 - RNA, 19 nt, Homo sapiens
  misc_RNA (1)...(19): siRNA sense strand
uugcagggaguaucaaaua

SEQ ID NO: 1082610 - RNA, 19 nt, Homo sapiens
  misc_RNA (1)...(19): siRNA sense strand
ccaaagacucgacaguaug

SEQ ID NO: 1082611 - RNA, 19 nt, Homo sapiens
  misc_RNA (1)...(19): siRNA sense strand
uucgauaucucauccaaga

SEQ ID NO: 1082612 - RNA, 19 nt, Homo sapiens
  misc_RNA (1)...(19): siRNA sense strand
gacuaaacaccaucuugaa

SEQ ID NO: 1082613 - RNA, 19 nt, Homo sapiens
  misc_RNA (1)...(19): siRNA sense strand
cauccaagacuccaguauu

SEQ ID NO: 1082614 - RNA, 19 nt, Homo sapiens
  misc_RNA (1)...(19): siRNA sense strand
uaggccaucugaauaacuu

SEQ ID NO: 1082615 - RNA, 19 nt, Homo sapiens
  misc_RNA (1)...(19): siRNA sense strand
ucaagaaagagacagaaug

SEQ ID NO: 1082616 - RNA, 19 nt, Homo sapiens
  misc_RNA (1)...(19): siRNA sense strand
gugaaugcuuccuuguuuc

SEQ ID NO: 1082617 - RNA, 19 nt, Homo sapiens
  misc_RNA (1)...(19): siRNA sense strand
ggccaucugaauaacuuua

SEQ ID NO: 1082618 - RNA, 19 nt, Homo sapiens
  misc_RNA (1)...(19): siRNA sense strand
guacgagggcggaaugaca

SEQ ID NO: 1082619 - RNA, 19 nt, Homo sapiens
  misc_RNA (1)...(19): siRNA sense strand
ggaaaugauggacuucaag

SEQ ID NO: 1082620 - RNA, 19 nt, Homo sapiens
  misc_RNA (1)...(19): siRNA sense strand
cgauuagucagaaagauga

SEQ ID NO: 1082621 - RNA, 19 nt, Homo sapiens
  misc_RNA (1)...(19): siRNA sense strand
uggaaaugauggacuucaa

SEQ ID NO: 1082622 - RNA, 19 nt, Homo sapiens
  misc_RNA (1)...(19): siRNA sense strand
cauuaucugugaacuagca

SEQ ID NO: 1082623 - RNA, 19 nt, Homo sapiens
  misc_RNA (1)...(19): siRNA sense strand
cacaagcacuucgauuagu

SEQ ID NO: 1082624 - RNA, 19 nt, Homo sapiens
  misc_RNA (1)...(19): siRNA sense strand
uuagagguaggaacuuuaa

SEQ ID NO: 1082625 - RNA, 19 nt, Homo sapiens
  misc_RNA (1)...(19): siRNA sense strand
gaccaacucauuaauugca

SEQ ID NO: 1082626 - RNA, 19 nt, Homo sapiens
  misc_RNA (1)...(19): siRNA sense strand
cuaagcuucuuugugauau

SEQ ID NO: 1082627 - RNA, 19 nt, Homo sapiens
  misc_RNA (1)...(19): siRNA sense strand
aauaaaugaggcccuaauu

SEQ ID NO: 1082628 - RNA, 19 nt, Homo sapiens
  misc_RNA (1)...(19): siRNA sense strand
aaagcuaggccaucugaau

SEQ ID NO: 1082629 - RNA, 19 nt, Homo sapiens
  misc_RNA (1)...(19): siRNA sense strand
auccaagacuccaguauuc

SEQ ID NO: 1082630 - RNA, 19 nt, Homo sapiens
  misc_RNA (1)...(19): siRNA sense strand
agaaagcuaggccaucuga

SEQ ID NO: 1082631 - RNA, 19 nt, Homo sapiens
  misc_RNA (1)...(19): siRNA sense strand
gcuucgauaucucauccaa

SEQ ID NO: 1082632 - RNA, 19 nt, Homo sapiens
  misc_RNA (1)...(19): siRNA sense strand
aagcuucuuugugauauug

SEQ ID NO: 1082633 - RNA, 19 nt, Homo sapiens
  misc_RNA (1)...(19): siRNA sense strand
acuaagcuucuuugugaua

SEQ ID NO: 1082634 - RNA, 19 nt, Homo sapiens
  misc_RNA (1)...(19): siRNA sense strand
acuaaacaccaucuugaaa

SEQ ID NO: 1082635 - RNA, 19 nt, Homo sapiens
  misc_RNA (1)...(19): siRNA sense strand
acacaagcacuucgauuag

SEQ ID NO: 1082636 - RNA, 19 nt, Homo sapiens
  misc_RNA (1)...(19): siRNA sense strand
cuaggugcauugacauaca

SEQ ID NO: 1082637 - RNA, 19 nt, Homo sapiens
  misc_RNA (1)...(19): siRNA sense strand
acaagcacuucgauuaguc

SEQ ID NO: 1082638 - RNA, 19 nt, Homo sapiens
  misc_RNA (1)...(19): siRNA sense strand
uacgagcgcuucgauaucu

SEQ ID NO: 1082639 - RNA, 19 nt, Homo sapiens
  misc_RNA (1)...(19): siRNA sense strand
ggacuucaagaaagagaca

SEQ ID NO: 1082640 - RNA, 19 nt, Homo sapiens
  misc_RNA (1)...(19): siRNA sense strand
guucugugaccaacucauu

SEQ ID NO: 1082641 - RNA, 19 nt, Homo sapiens
  misc_RNA (1)...(19): siRNA sense strand
uccagaaggugcuaaaauu

SEQ ID NO: 1082642 - RNA, 19 nt, Homo sapiens
  misc_RNA (1)...(19): siRNA sense strand
cgagcaugcauugccauua

SEQ ID NO: 1082643 - RNA, 19 nt, Homo sapiens
  misc_RNA (1)...(19): siRNA sense strand
uaggugcauugacauacaa

SEQ ID NO: 1082644 - RNA, 19 nt, Homo sapiens
  misc_RNA (1)...(19): siRNA sense strand
auagcuaggugcauugaca

SEQ ID NO: 1082645 - RNA, 19 nt, Homo sapiens
  misc_RNA (1)...(19): siRNA sense strand
gaaccuucugauaacuuaa

SEQ ID NO: 1082646 - RNA, 19 nt, Homo sapiens
  misc_RNA (1)...(19): siRNA sense strand
gaugauuacugugaaugcu

SEQ ID NO: 1082647 - RNA, 19 nt, Homo sapiens
  misc_RNA (1)...(19): siRNA sense strand
ugcagggaguaucaaauau

SEQ ID NO: 1082648 - RNA, 19 nt, Homo sapiens
  misc_RNA (1)...(19): siRNA sense strand
ggcuuucacuaugaggaua

SEQ ID NO: 1082649 - RNA, 19 nt, Homo sapiens
  misc_RNA (1)...(19): siRNA sense strand
gaacgucccgcuggaucug

SEQ ID NO: 1082650 - RNA, 19 nt, Homo sapiens
  misc_RNA (1)...(19): siRNA sense strand
gagaggacacaagcacuuc

SEQ ID NO: 1082651 - RNA, 19 nt, Homo sapiens
  misc_RNA (1)...(19): siRNA sense strand
gaauuagagguaggaacuu

SEQ ID NO: 1082652 - RNA, 19 nt, Homo sapiens
  misc_RNA (1)...(19): siRNA sense strand
gauugcagggaguaucaaa

SEQ ID NO: 1082653 - RNA, 19 nt, Homo sapiens
  misc_RNA (1)...(19): siRNA sense strand
ucugugaccaacucauuaa

SEQ ID NO: 1082654 - RNA, 19 nt, Homo sapiens
  misc_RNA (1)...(19): siRNA sense strand
gaaagcuaggccaucugaa

SEQ ID NO: 1082655 - RNA, 19 nt, Homo sapiens
  misc_RNA (1)...(19): siRNA sense strand
guaugugcgagcugaugua

SEQ ID NO: 1082656 - RNA, 19 nt, Homo sapiens
  misc_RNA (1)...(19): siRNA sense strand
aaugcuuccuuguuuccua

SEQ ID NO: 1082657 - RNA, 19 nt, Homo sapiens
  misc_RNA (1)...(19): siRNA sense strand
cagauugcagggaguauca

SEQ ID NO: 1082658 - RNA, 19 nt, Homo sapiens
  misc_RNA (1)...(19): siRNA sense strand
cugaagaaccuccgaguac

SEQ ID NO: 1082659 - RNA, 19 nt, Homo sapiens
  misc_RNA (1)...(19): siRNA sense strand
ucugaagaaccuccgagua

SEQ ID NO: 1082660 - RNA, 19 nt, Homo sapiens
  misc_RNA (1)...(19): siRNA sense strand
ggaguaucaaauaugagaa

SEQ ID NO: 1082661 - RNA, 19 nt, Homo sapiens
  misc_RNA (1)...(19): siRNA sense strand
ugugaccaacucauuaauu

SEQ ID NO: 1082662 - RNA, 19 nt, Homo sapiens
  misc_RNA (1)...(19): siRNA sense strand
gcagaaacuuugacuuaaa

SEQ ID NO: 1082663 - RNA, 19 nt, Homo sapiens
  misc_RNA (1)...(19): siRNA sense strand
gcaaaggaccugacuagga

SEQ ID NO: 1082664 - RNA, 19 nt, Homo sapiens
  misc_RNA (1)...(19): siRNA sense strand
gcaagaaacugcucaaccu

SEQ ID NO: 1082665 - RNA, 19 nt, Homo sapiens
  misc_RNA (1)...(19): siRNA sense strand
gcuacgaggugccgucaaa

SEQ ID NO: 1082666 - RNA, 19 nt, Homo sapiens
  misc_RNA (1)...(19): siRNA sense strand
gcgagaagcaguacaaaug

SEQ ID NO: 1082667 - RNA, 19 nt, Homo sapiens
  misc_RNA (1)...(19): siRNA sense strand
caaccuaaccuuccauaug

SEQ ID NO: 1082668 - RNA, 19 nt, Homo sapiens
  misc_RNA (1)...(19): siRNA sense strand
guuuaacgcucacuauaau

SEQ ID NO: 1082669 - RNA, 19 nt, Homo sapiens
  misc_RNA (1)...(19): siRNA sense strand
aaagaaacaugugcgcaaa

SEQ ID NO: 1082670 - RNA, 19 nt, Homo sapiens
  misc_RNA (1)...(19): siRNA sense strand
uugcagaaacuuugacuua

SEQ ID NO: 1082671 - RNA, 19 nt, Homo sapiens
  misc_RNA (1)...(19): siRNA sense strand
gagcagguacugaaggaaa

SEQ ID NO: 1082672 - RNA, 19 nt, Homo sapiens
  misc_RNA (1)...(19): siRNA sense strand
gcggcucgcucuacuacuu

SEQ ID NO: 1082673 - RNA, 19 nt, Homo sapiens
  misc_RNA (1)...(19): siRNA sense strand
ugcagaaacuuugacuuaa

SEQ ID NO: 1082674 - RNA, 19 nt, Homo sapiens
  misc_RNA (1)...(19): siRNA sense strand
ggaacuacaagaaccacaa

SEQ ID NO: 1082675 - RNA, 19 nt, Homo sapiens
  misc_RNA (1)...(19): siRNA sense strand
gugcaaagucugcggcaaa

SEQ ID NO: 1082676 - RNA, 19 nt, Homo sapiens
  misc_RNA (1)...(19): siRNA sense strand
aaccuaaccuuccauaugc

SEQ ID NO: 1082677 - RNA, 19 nt, Homo sapiens
  misc_RNA (1)...(19): siRNA sense strand
gaacuacaagaaccacaag

SEQ ID NO: 1082678 - RNA, 19 nt, Homo sapiens
  misc_RNA (1)...(19): siRNA sense strand
cgagaagcaguacaaaugu

SEQ ID NO: 1082679 - RNA, 19 nt, Homo sapiens
  misc_RNA (1)...(19): siRNA sense strand
guguuuaacgcucacuaua

SEQ ID NO: 1082680 - RNA, 19 nt, Homo sapiens
  misc_RNA (1)...(19): siRNA sense strand
ccagaccguucgugugcaa

SEQ ID NO: 1082681 - RNA, 19 nt, Homo sapiens
  misc_RNA (1)...(19): siRNA sense strand
uguuuaacgcucacuauaa

SEQ ID NO: 1082682 - RNA, 19 nt, Homo sapiens
  misc_RNA (1)...(19): siRNA sense strand
ccaagacacuggccuuuuc

SEQ ID NO: 1082683 - RNA, 19 nt, Homo sapiens
  misc_RNA (1)...(19): siRNA sense strand
acaaauguaccaucugcaa

SEQ ID NO: 1082684 - RNA, 19 nt, Homo sapiens
  misc_RNA (1)...(19): siRNA sense strand
cgucuggccuccucaaugc

SEQ ID NO: 1082685 - RNA, 19 nt, Homo sapiens
  misc_RNA (1)...(19): siRNA sense strand
uggagcagguacugaagga

SEQ ID NO: 1082686 - RNA, 19 nt, Homo sapiens
  misc_RNA (1)...(19): siRNA sense strand
ccgcaaaggaccugacuag

SEQ ID NO: 1082687 - RNA, 19 nt, Homo sapiens
  misc_RNA (1)...(19): siRNA sense strand
gcucuacuacuucaacuac

SEQ ID NO: 1082688 - RNA, 19 nt, Homo sapiens
  misc_RNA (1)...(19): siRNA sense strand
agaaacaugugcgcaaacu

SEQ ID NO: 1082689 - RNA, 19 nt, Homo sapiens
  misc_RNA (1)...(19): siRNA sense strand
gcagauggcaagcccaaaa

SEQ ID NO: 1082690 - RNA, 19 nt, Homo sapiens
  misc_RNA (1)...(19): siRNA sense strand
gagcgcaucauggccaaga

SEQ ID NO: 1082691 - RNA, 19 nt, Homo sapiens
  misc_RNA (1)...(19): siRNA sense strand
acaacgacaagaagccuuu

SEQ ID NO: 1082692 - RNA, 19 nt, Homo sapiens
  misc_RNA (1)...(19): siRNA sense strand
ggaaaagccacauaaaugc

SEQ ID NO: 1082693 - RNA, 19 nt, Homo sapiens
  misc_RNA (1)...(19): siRNA sense strand
gccagcggcuugugcaaaa

SEQ ID NO: 1082694 - RNA, 19 nt, Homo sapiens
  misc_RNA (1)...(19): siRNA sense strand
ugacuuaaagaaacaugug

SEQ ID NO: 1082695 - RNA, 19 nt, Homo sapiens
  misc_RNA (1)...(19): siRNA sense strand
gcacacccacaacgacaag

SEQ ID NO: 1082696 - RNA, 19 nt, Homo sapiens
  misc_RNA (1)...(19): siRNA sense strand
aaauguaccaucugcaaca

SEQ ID NO: 1082697 - RNA, 19 nt, Homo sapiens
  misc_RNA (1)...(19): siRNA sense strand
cggcuucccuggagaccau

SEQ ID NO: 1082698 - RNA, 19 nt, Homo sapiens
  misc_RNA (1)...(19): siRNA sense strand
ucaagccgcaggucaucaa

SEQ ID NO: 1082699 - RNA, 19 nt, Homo sapiens
  misc_RNA (1)...(19): siRNA sense strand
gguguuuaacgcucacuau

SEQ ID NO: 1082700 - RNA, 19 nt, Homo sapiens
  misc_RNA (1)...(19): siRNA sense strand
ggcgagaagcaguacaaau

SEQ ID NO: 1082701 - RNA, 19 nt, Homo sapiens
  misc_RNA (1)...(19): siRNA sense strand
gcggcgagaagcaguacaa

SEQ ID NO: 1082702 - RNA, 19 nt, Homo sapiens
  misc_RNA (1)...(19): siRNA sense strand
gcacagcacucgacuauga

SEQ ID NO: 1082703 - RNA, 19 nt, Homo sapiens
  misc_RNA (1)...(19): siRNA sense strand
gaaaugauauucaggagaa

SEQ ID NO: 1082704 - RNA, 19 nt, Homo sapiens
  misc_RNA (1)...(19): siRNA sense strand
gaaauuugcugaagaacuu

SEQ ID NO: 1082705 - RNA, 19 nt, Homo sapiens
  misc_RNA (1)...(19): siRNA sense strand
ggaaacagaagaagaguua

SEQ ID NO: 1082706 - RNA, 19 nt, Homo sapiens
  misc_RNA (1)...(19): siRNA sense strand
gaaaaugccuugaguaaaa

SEQ ID NO: 1082707 - RNA, 19 nt, Homo sapiens
  misc_RNA (1)...(19): siRNA sense strand
ggacuccugucuaauguua

SEQ ID NO: 1082708 - RNA, 19 nt, Homo sapiens
  misc_RNA (1)...(19): siRNA sense strand
uaaaguugguucaucguua

SEQ ID NO: 1082709 - RNA, 19 nt, Homo sapiens
  misc_RNA (1)...(19): siRNA sense strand
gagauugggugaagacauu

SEQ ID NO: 1082710 - RNA, 19 nt, Homo sapiens
  misc_RNA (1)...(19): siRNA sense strand
gcaggugacucuccuuuga

SEQ ID NO: 1082711 - RNA, 19 nt, Homo sapiens
  misc_RNA (1)...(19): siRNA sense strand
caaauuugcuucccagaga

SEQ ID NO: 1082712 - RNA, 19 nt, Homo sapiens
  misc_RNA (1)...(19): siRNA sense strand
gagcaugcauuucucugua

SEQ ID NO: 1082713 - RNA, 19 nt, Homo sapiens
  misc_RNA (1)...(19): siRNA sense strand
cuaaaggaauucaggauaa

SEQ ID NO: 1082714 - RNA, 19 nt, Homo sapiens
  misc_RNA (1)...(19): siRNA sense strand
gcauuucucuguauuaauc

SEQ ID NO: 1082715 - RNA, 19 nt, Homo sapiens
  misc_RNA (1)...(19): siRNA sense strand
gaugaaagcaagcauugua

SEQ ID NO: 1082716 - RNA, 19 nt, Homo sapiens
  misc_RNA (1)...(19): siRNA sense strand
uuaaaggagugguaacuaa

SEQ ID NO: 1082717 - RNA, 19 nt, Homo sapiens
  misc_RNA (1)...(19): siRNA sense strand
auacagagauugaaaggaa

SEQ ID NO: 1082718 - RNA, 19 nt, Homo sapiens
  misc_RNA (1)...(19): siRNA sense strand
gaagaaacaggaaacagaa

SEQ ID NO: 1082719 - RNA, 19 nt, Homo sapiens
  misc_RNA (1)...(19): siRNA sense strand
ggagaaguguguaaagcuu

SEQ ID NO: 1082720 - RNA, 19 nt, Homo sapiens
  misc_RNA (1)...(19): siRNA sense strand
ugaagaaucuggaauggau

SEQ ID NO: 1082721 - RNA, 19 nt, Homo sapiens
  misc_RNA (1)...(19): siRNA sense strand
ugaauugccuagaugauga

SEQ ID NO: 1082722 - RNA, 19 nt, Homo sapiens
  misc_RNA (1)...(19): siRNA sense strand
uaaccgaaguucuuaagga

SEQ ID NO: 1082723 - RNA, 19 nt, Homo sapiens
  misc_RNA (1)...(19): siRNA sense strand
caacagaaauuugcugaag

SEQ ID NO: 1082724 - RNA, 19 nt, Homo sapiens
  misc_RNA (1)...(19): siRNA sense strand
ggaguuuacuuccacauca

SEQ ID NO: 1082725 - RNA, 19 nt, Homo sapiens
  misc_RNA (1)...(19): siRNA sense strand
gaaagcaagcauuguagaa

SEQ ID NO: 1082726 - RNA, 19 nt, Homo sapiens
  misc_RNA (1)...(19): siRNA sense strand
guaucaggcuguuccagua

SEQ ID NO: 1082727 - RNA, 19 nt, Homo sapiens
  misc_RNA (1)...(19): siRNA sense strand
guuaguaccucgaaaauaa

SEQ ID NO: 1082728 - RNA, 19 nt, Homo sapiens
  misc_RNA (1)...(19): siRNA sense strand
gagcacagcacucgacuau

SEQ ID NO: 1082729 - RNA, 19 nt, Homo sapiens
  misc_RNA (1)...(19): siRNA sense strand
acagaaauuugcugaagaa

SEQ ID NO: 1082730 - RNA, 19 nt, Homo sapiens
  misc_RNA (1)...(19): siRNA sense strand
gaaauacaaaggacaacaa

SEQ ID NO: 1082731 - RNA, 19 nt, Homo sapiens
  misc_RNA (1)...(19): siRNA sense strand
cuaagaauauccaguaaag

SEQ ID NO: 1082732 - RNA, 19 nt, Homo sapiens
  misc_RNA (1)...(19): siRNA sense strand
ccaguaauauuaagucauc

SEQ ID NO: 1082733 - RNA, 19 nt, Homo sapiens
  misc_RNA (1)...(19): siRNA sense strand
gaauaaagaaaccaagaga

SEQ ID NO: 1082734 - RNA, 19 nt, Homo sapiens
  misc_RNA (1)...(19): siRNA sense strand
aaaguugguucaucguuaa

SEQ ID NO: 1082735 - RNA, 19 nt, Homo sapiens
  misc_RNA (1)...(19): siRNA sense strand
augaugaacuggauucuuu

SEQ ID NO: 1082736 - RNA, 19 nt, Homo sapiens
  misc_RNA (1)...(19): siRNA sense strand
caucuaagaauauccagua

SEQ ID NO: 1082737 - RNA, 19 nt, Homo sapiens
  misc_RNA (1)...(19): siRNA sense strand
agauagacauucaggcuaa

SEQ ID NO: 1082738 - RNA, 19 nt, Homo sapiens
  misc_RNA (1)...(19): siRNA sense strand
caucagaucagucagauau

SEQ ID NO: 1082739 - RNA, 19 nt, Homo sapiens
  misc_RNA (1)...(19): siRNA sense strand
uuaaagguguugaagaaga

SEQ ID NO: 1082740 - RNA, 19 nt, Homo sapiens
  misc_RNA (1)...(19): siRNA sense strand
gagauaaaguugguucauc

SEQ ID NO: 1082741 - RNA, 19 nt, Homo sapiens
  misc_RNA (1)...(19): siRNA sense strand
guucaagcacguuuagaua

SEQ ID NO: 1082742 - RNA, 19 nt, Homo sapiens
  misc_RNA (1)...(19): siRNA sense strand
ucugaugcuucaagaaaua

SEQ ID NO: 1082743 - RNA, 19 nt, Homo sapiens
  misc_RNA (1)...(19): siRNA sense strand
cuaaauccuugcagccuuu

SEQ ID NO: 1082744 - RNA, 19 nt, Homo sapiens
  misc_RNA (1)...(19): siRNA sense strand
gcacguaaaugugaauugc

SEQ ID NO: 1082745 - RNA, 19 nt, Homo sapiens
  misc_RNA (1)...(19): siRNA sense strand
guacgaguuuaugacaaua

SEQ ID NO: 1082746 - RNA, 19 nt, Homo sapiens
  misc_RNA (1)...(19): siRNA sense strand
caagcacguuuagauaauu

SEQ ID NO: 1082747 - RNA, 19 nt, Homo sapiens
  misc_RNA (1)...(19): siRNA sense strand
ucaagcacguuuagauaau

SEQ ID NO: 1082748 - RNA, 19 nt, Homo sapiens
  misc_RNA (1)...(19): siRNA sense strand
ucagaucagucagauauau

SEQ ID NO: 1082749 - RNA, 19 nt, Homo sapiens
  misc_RNA (1)...(19): siRNA sense strand
gaaacaggaaacagaagaa

SEQ ID NO: 1082750 - RNA, 19 nt, Homo sapiens
  misc_RNA (1)...(19): siRNA sense strand
cagaagaagaguuaauuga

SEQ ID NO: 1082751 - RNA, 19 nt, Homo sapiens
  misc_RNA (1)...(19): siRNA sense strand
gcauuugauucucuuuguu

SEQ ID NO: 1082752 - RNA, 19 nt, Homo sapiens
  misc_RNA (1)...(19): siRNA sense strand
caaagugaaacaugaagaa

SEQ ID NO: 1082753 - RNA, 19 nt, Homo sapiens
  misc_RNA (1)...(19): siRNA sense strand
cagaggaaguacgaguuua

SEQ ID NO: 1082754 - RNA, 19 nt, Homo sapiens
  misc_RNA (1)...(19): siRNA sense strand
caacuaauacgaccucauc

SEQ ID NO: 1082755 - RNA, 19 nt, Homo sapiens
  misc_RNA (1)...(19): siRNA sense strand
agacagcugcuuucuuuaa

SEQ ID NO: 1082756 - RNA, 19 nt, Homo sapiens
  misc_RNA (1)...(19): siRNA sense strand
gaaguacgaguuuaugaca

SEQ ID NO: 1082757 - RNA, 19 nt, Homo sapiens
  misc_RNA (1)...(19): siRNA sense strand
ugaagaaacaggaaacaga

SEQ ID NO: 1082758 - RNA, 19 nt, Homo sapiens
  misc_RNA (1)...(19): siRNA sense strand
gcaugcauuucucuguauu

SEQ ID NO: 1082759 - RNA, 19 nt, Homo sapiens
  misc_RNA (1)...(19): siRNA sense strand
uaaaggagugguaacuaaa

SEQ ID NO: 1082760 - RNA, 19 nt, Homo sapiens
  misc_RNA (1)...(19): siRNA sense strand
ggaugccauuugugaauau

SEQ ID NO: 1082761 - RNA, 19 nt, Homo sapiens
  misc_RNA (1)...(19): siRNA sense strand
guaaagcuuuugccucuaa

SEQ ID NO: 1082762 - RNA, 19 nt, Homo sapiens
  misc_RNA (1)...(19): siRNA sense strand
ggacugaguguuguaguga

SEQ ID NO: 1082763 - RNA, 19 nt, Homo sapiens
  misc_RNA (1)...(19): siRNA sense strand
caagaaauacaaaggacaa

SEQ ID NO: 1082764 - RNA, 19 nt, Homo sapiens
  misc_RNA (1)...(19): siRNA sense strand
caggugauuuggauaucua

SEQ ID NO: 1082765 - RNA, 19 nt, Homo sapiens
  misc_RNA (1)...(19): siRNA sense strand
ccagagaaaugauauucag

SEQ ID NO: 1082766 - RNA, 19 nt, Homo sapiens
  misc_RNA (1)...(19): siRNA sense strand
acaggaagauagacauuca

SEQ ID NO: 1082767 - RNA, 19 nt, Homo sapiens
  misc_RNA (1)...(19): siRNA sense strand
aaagaaaccaagagacuga

SEQ ID NO: 1082768 - RNA, 19 nt, Homo sapiens
  misc_RNA (1)...(19): siRNA sense strand
ugaaagagaacaacugcuu

SEQ ID NO: 1082769 - RNA, 19 nt, Homo sapiens
  misc_RNA (1)...(19): siRNA sense strand
uuuaagagcuccaauuugc

SEQ ID NO: 1082770 - RNA, 19 nt, Homo sapiens
  misc_RNA (1)...(19): siRNA sense strand
gcacucgacuaugacauca

SEQ ID NO: 1082771 - RNA, 19 nt, Homo sapiens
  misc_RNA (1)...(19): siRNA sense strand
aaucuggaauggaugguaa

SEQ ID NO: 1082772 - RNA, 19 nt, Homo sapiens
  misc_RNA (1)...(19): siRNA sense strand
uuagcaaagugaaacauga

SEQ ID NO: 1082773 - RNA, 19 nt, Homo sapiens
  misc_RNA (1)...(19): siRNA sense strand
gaaguucccaugcuguuca

SEQ ID NO: 1082774 - RNA, 19 nt, Homo sapiens
  misc_RNA (1)...(19): siRNA sense strand
ggauaauucuccacagcau

SEQ ID NO: 1082775 - RNA, 19 nt, Homo sapiens
  misc_RNA (1)...(19): siRNA sense strand
gaaauugcagugugaaacu

SEQ ID NO: 1082776 - RNA, 19 nt, Homo sapiens
  misc_RNA (1)...(19): siRNA sense strand
ucaggcuguuccaguaaua

SEQ ID NO: 1082777 - RNA, 19 nt, Homo sapiens
  misc_RNA (1)...(19): siRNA sense strand
gcaaagugaaacaugaaga

SEQ ID NO: 1082778 - RNA, 19 nt, Homo sapiens
  misc_RNA (1)...(19): siRNA sense strand
gaagaaaacaggaagauag

SEQ ID NO: 1082779 - RNA, 19 nt, Homo sapiens
  misc_RNA (1)...(19): siRNA sense strand
acaguuaaaugaagcaagu

SEQ ID NO: 1082780 - RNA, 19 nt, Homo sapiens
  misc_RNA (1)...(19): siRNA sense strand
gaacaccauugggcagcuu

SEQ ID NO: 1082781 - RNA, 19 nt, Homo sapiens
  misc_RNA (1)...(19): siRNA sense strand
ggacuugaagacagaagaa

SEQ ID NO: 1082782 - RNA, 19 nt, Homo sapiens
  misc_RNA (1)...(19): siRNA sense strand
gauagacauucaggcuaaa

SEQ ID NO: 1082783 - RNA, 19 nt, Homo sapiens
  misc_RNA (1)...(19): siRNA sense strand
gaaacugcagcacaacaga

SEQ ID NO: 1082784 - RNA, 19 nt, Homo sapiens
  misc_RNA (1)...(19): siRNA sense strand
aagaauauccaguaaagga

SEQ ID NO: 1082785 - RNA, 19 nt, Homo sapiens
  misc_RNA (1)...(19): siRNA sense strand
gaagacagaagaaggaaaa

SEQ ID NO: 1082786 - RNA, 19 nt, Homo sapiens
  misc_RNA (1)...(19): siRNA sense strand
agugguaacuaaaggaauu

SEQ ID NO: 1082787 - RNA, 19 nt, Homo sapiens
  misc_RNA (1)...(19): siRNA sense strand
cagagcagcuacaguggau

SEQ ID NO: 1082788 - RNA, 19 nt, Homo sapiens
  misc_RNA (1)...(19): siRNA sense strand
gagaaguguguaaagcuuu

SEQ ID NO: 1082789 - RNA, 19 nt, Homo sapiens
  misc_RNA (1)...(19): siRNA sense strand
uuaaugggcaaguuuauga

SEQ ID NO: 1082790 - RNA, 19 nt, Homo sapiens
  misc_RNA (1)...(19): siRNA sense strand
ggcauuugauucucuuugu

SEQ ID NO: 1082791 - RNA, 19 nt, Homo sapiens
  misc_RNA (1)...(19): siRNA sense strand
uaaccaagcagucuuuuaa

SEQ ID NO: 1082792 - RNA, 19 nt, Homo sapiens
  misc_RNA (1)...(19): siRNA sense strand
gauaguuugcuccagauga

SEQ ID NO: 1082793 - RNA, 19 nt, Homo sapiens
  misc_RNA (1)...(19): siRNA sense strand
gacagcugcuuucuuuaag

SEQ ID NO: 1082794 - RNA, 19 nt, Homo sapiens
  misc_RNA (1)...(19): siRNA sense strand
aaaugaagcaagugaagaa

SEQ ID NO: 1082795 - RNA, 19 nt, Homo sapiens
  misc_RNA (1)...(19): siRNA sense strand
uaaagguguugaagaagag

SEQ ID NO: 1082796 - RNA, 19 nt, Homo sapiens
  misc_RNA (1)...(19): siRNA sense strand
gacaagcggaguuuacuuc

SEQ ID NO: 1082797 - RNA, 19 nt, Homo sapiens
  misc_RNA (1)...(19): siRNA sense strand
gcuguuccaguaauauuaa

SEQ ID NO: 1082798 - RNA, 19 nt, Homo sapiens
  misc_RNA (1)...(19): siRNA sense strand
uggaugccauuugugaaua

SEQ ID NO: 1082799 - RNA, 19 nt, Homo sapiens
  misc_RNA (1)...(19): siRNA sense strand
gauuucggaucaucaucuu

SEQ ID NO: 1082800 - RNA, 19 nt, Homo sapiens
  misc_RNA (1)...(19): siRNA sense strand
aaccgaaguucuuaaggaa

SEQ ID NO: 1082801 - RNA, 19 nt, Homo sapiens
  misc_RNA (1)...(19): siRNA sense strand
aaacccagagcaugcauuu

SEQ ID NO: 1082802 - RNA, 19 nt, Homo sapiens
  misc_RNA (1)...(19): siRNA sense strand
gcucagaccuucccagaua

SEQ ID NO: 1082803 - RNA, 19 nt, Homo sapiens
  misc_RNA (1)...(19): siRNA sense strand
ggauuuaggucacuucuuu

SEQ ID NO: 1082804 - RNA, 19 nt, Homo sapiens
  misc_RNA (1)...(19): siRNA sense strand
gguaagggcuucagucgua

SEQ ID NO: 1082805 - RNA, 19 nt, Homo sapiens
  misc_RNA (1)...(19): siRNA sense strand
ucaaagagaucacaucaga

SEQ ID NO: 1082806 - RNA, 19 nt, Homo sapiens
  misc_RNA (1)...(19): siRNA sense strand
gggaaaggguuuggauuua

SEQ ID NO: 1082807 - RNA, 19 nt, Homo sapiens
  misc_RNA (1)...(19): siRNA sense strand
gaauuuacauggaagagaa

SEQ ID NO: 1082808 - RNA, 19 nt, Homo sapiens
  misc_RNA (1)...(19): siRNA sense strand
gcagagagaaacauuauaa

SEQ ID NO: 1082809 - RNA, 19 nt, Homo sapiens
  misc_RNA (1)...(19): siRNA sense strand
ggaaagugcuucaguuaca

SEQ ID NO: 1082810 - RNA, 19 nt, Homo sapiens
  misc_RNA (1)...(19): siRNA sense strand
guacacaccuucacauuca

SEQ ID NO: 1082811 - RNA, 19 nt, Homo sapiens
  misc_RNA (1)...(19): siRNA sense strand
gagagaagcccuacaaaug

SEQ ID NO: 1082812 - RNA, 19 nt, Homo sapiens
  misc_RNA (1)...(19): siRNA sense strand
uaaguuaccuuucgcaaga

SEQ ID NO: 1082813 - RNA, 19 nt, Homo sapiens
  misc_RNA (1)...(19): siRNA sense strand
caagagagaggcccuauaa

SEQ ID NO: 1082814 - RNA, 19 nt, Homo sapiens
  misc_RNA (1)...(19): siRNA sense strand
gaucuuaucguucauugua

SEQ ID NO: 1082815 - RNA, 19 nt, Homo sapiens
  misc_RNA (1)...(19): siRNA sense strand
gagccaagaucuuaucguu

SEQ ID NO: 1082816 - RNA, 19 nt, Homo sapiens
  misc_RNA (1)...(19): siRNA sense strand
gcaagacucccuaugaauu

SEQ ID NO: 1082817 - RNA, 19 nt, Homo sapiens
  misc_RNA (1)...(19): siRNA sense strand
gaggaaagccaacauaaug

SEQ ID NO: 1082818 - RNA, 19 nt, Homo sapiens
  misc_RNA (1)...(19): siRNA sense strand
ggauguggcuguugucuuc

SEQ ID NO: 1082819 - RNA, 19 nt, Homo sapiens
  misc_RNA (1)...(19): siRNA sense strand
gcauuucucuucagauuuc

SEQ ID NO: 1082820 - RNA, 19 nt, Homo sapiens
  misc_RNA (1)...(19): siRNA sense strand
gagagaaaccauauaaaug

SEQ ID NO: 1082821 - RNA, 19 nt, Homo sapiens
  misc_RNA (1)...(19): siRNA sense strand
gccaagaucuuaucguuca

SEQ ID NO: 1082822 - RNA, 19 nt, Homo sapiens
  misc_RNA (1)...(19): siRNA sense strand
ucacagcacucaccuagga

SEQ ID NO: 1082823 - RNA, 19 nt, Homo sapiens
  misc_RNA (1)...(19): siRNA sense strand
gagaggcccuauaagugua

SEQ ID NO: 1082824 - RNA, 19 nt, Homo sapiens
  misc_RNA (1)...(19): siRNA sense strand
gggaagggcuuugaucaga

SEQ ID NO: 1082825 - RNA, 19 nt, Homo sapiens
  misc_RNA (1)...(19): siRNA sense strand
ggaaaggguuuggauuuag

SEQ ID NO: 1082826 - RNA, 19 nt, Homo sapiens
  misc_RNA (1)...(19): siRNA sense strand
ccacagccuuucccaugua

SEQ ID NO: 1082827 - RNA, 19 nt, Homo sapiens
  misc_RNA (1)...(19): siRNA sense strand
agacaaacccuacaaaugu

SEQ ID NO: 1082828 - RNA, 19 nt, Homo sapiens
  misc_RNA (1)...(19): siRNA sense strand
gagacaaacccuacaaaug

SEQ ID NO: 1082829 - RNA, 19 nt, Homo sapiens
  misc_RNA (1)...(19): siRNA sense strand
aggaagagcuggcacuauu

SEQ ID NO: 1082830 - RNA, 19 nt, Homo sapiens
  misc_RNA (1)...(19): siRNA sense strand
agauaaaccuguaccaaga

SEQ ID NO: 1082831 - RNA, 19 nt, Homo sapiens
  misc_RNA (1)...(19): siRNA sense strand
gagaaaccauauaaaugug

SEQ ID NO: 1082832 - RNA, 19 nt, Homo sapiens
  misc_RNA (1)...(19): siRNA sense strand
uaagggaauuuacauggaa

SEQ ID NO: 1082833 - RNA, 19 nt, Homo sapiens
  misc_RNA (1)...(19): siRNA sense strand
cuucauugcuggcagauuu

SEQ ID NO: 1082834 - RNA, 19 nt, Homo sapiens
  misc_RNA (1)...(19): siRNA sense strand
gagcagagagaaacauuau

SEQ ID NO: 1082835 - RNA, 19 nt, Homo sapiens
  misc_RNA (1)...(19): siRNA sense strand
gagagaggcccuauaagug

SEQ ID NO: 1082836 - RNA, 19 nt, Homo sapiens
  misc_RNA (1)...(19): siRNA sense strand
ucagagagaaaccauauaa

SEQ ID NO: 1082837 - RNA, 19 nt, Homo sapiens
  misc_RNA (1)...(19): siRNA sense strand
gcguauagcucuguucuuc

SEQ ID NO: 1082838 - RNA, 19 nt, Homo sapiens
  misc_RNA (1)...(19): siRNA sense strand
gaaaggauuuugcguauag

SEQ ID NO: 1082839 - RNA, 19 nt, Homo sapiens
  misc_RNA (1)...(19): siRNA sense strand
gggaagauauaagggaauu

SEQ ID NO: 1082840 - RNA, 19 nt, Homo sapiens
  misc_RNA (1)...(19): siRNA sense strand
ggagagaagcccuacaaau

SEQ ID NO: 1082841 - RNA, 19 nt, Homo sapiens
  misc_RNA (1)...(19): siRNA sense strand
ucacuuacaucaaagagau

SEQ ID NO: 1082842 - RNA, 19 nt, Homo sapiens
  misc_RNA (1)...(19): siRNA sense strand
uaacugugagucaggauua

SEQ ID NO: 1082843 - RNA, 19 nt, Homo sapiens
  misc_RNA (1)...(19): siRNA sense strand
ggagaaaccauacaaaugc

SEQ ID NO: 1082844 - RNA, 19 nt, Homo sapiens
  misc_RNA (1)...(19): siRNA sense strand
ccuaugggcugcaaacaga

SEQ ID NO: 1082845 - RNA, 19 nt, Homo sapiens
  misc_RNA (1)...(19): siRNA sense strand
gaaaggguuuggauuuagg

SEQ ID NO: 1082846 - RNA, 19 nt, Homo sapiens
  misc_RNA (1)...(19): siRNA sense strand
gcaggcauuucucuucaga

SEQ ID NO: 1082847 - RNA, 19 nt, Homo sapiens
  misc_RNA (1)...(19): siRNA sense strand
ggaauucagaucuuaaugu

SEQ ID NO: 1082848 - RNA, 19 nt, Homo sapiens
  misc_RNA (1)...(19): siRNA sense strand
ggcaagugcuuuaguucaa

SEQ ID NO: 1082849 - RNA, 19 nt, Homo sapiens
  misc_RNA (1)...(19): siRNA sense strand
gagaagcccuacaaaugca

SEQ ID NO: 1082850 - RNA, 19 nt, Homo sapiens
  misc_RNA (1)...(19): siRNA sense strand
ucaggaaccucauguuagu

SEQ ID NO: 1082851 - RNA, 19 nt, Homo sapiens
  misc_RNA (1)...(19): siRNA sense strand
gggagaaaccauacaaaug

SEQ ID NO: 1082852 - RNA, 19 nt, Homo sapiens
  misc_RNA (1)...(19): siRNA sense strand
gaugacagccucaguugga

SEQ ID NO: 1082853 - RNA, 19 nt, Homo sapiens
  misc_RNA (1)...(19): siRNA sense strand
uuaggucacuucuuuguau

SEQ ID NO: 1082854 - RNA, 19 nt, Homo sapiens
  misc_RNA (1)...(19): siRNA sense strand
cuacaaaugcgaugaaugu

SEQ ID NO: 1082855 - RNA, 19 nt, Homo sapiens
  misc_RNA (1)...(19): siRNA sense strand
gagcuggcacuauuggaua

SEQ ID NO: 1082856 - RNA, 19 nt, Homo sapiens
  misc_RNA (1)...(19): siRNA sense strand
caucaugagucccaagaau

SEQ ID NO: 1082857 - RNA, 19 nt, Homo sapiens
  misc_RNA (1)...(19): siRNA sense strand
ggaggaaagccaacauaau

SEQ ID NO: 1082858 - RNA, 19 nt, Homo sapiens
  misc_RNA (1)...(19): siRNA sense strand
caucagagagugcauauag

SEQ ID NO: 1082859 - RNA, 19 nt, Homo sapiens
  misc_RNA (1)...(19): siRNA sense strand
guggaaagugcuucaguua

SEQ ID NO: 1082860 - RNA, 19 nt, Homo sapiens
  misc_RNA (1)...(19): siRNA sense strand
ccagaacucucagggaaga

SEQ ID NO: 1082861 - RNA, 19 nt, Homo sapiens
  misc_RNA (1)...(19): siRNA sense strand
gggcuucagucguaauuca

SEQ ID NO: 1082862 - RNA, 19 nt, Homo sapiens
  misc_RNA (1)...(19): siRNA sense strand
gagaucacaucagagagaa

SEQ ID NO: 1082863 - RNA, 19 nt, Homo sapiens
  misc_RNA (1)...(19): siRNA sense strand
aaagagaucacaucagaga

SEQ ID NO: 1082864 - RNA, 19 nt, Homo sapiens
  misc_RNA (1)...(19): siRNA sense strand
gcucuguucuucacacuca

SEQ ID NO: 1082865 - RNA, 19 nt, Homo sapiens
  misc_RNA (1)...(19): siRNA sense strand
cuauaaaugugaagagugu

SEQ ID NO: 1082866 - RNA, 19 nt, Homo sapiens
  misc_RNA (1)...(19): siRNA sense strand
ggagacaaacccuacaaau

SEQ ID NO: 1082867 - RNA, 19 nt, Homo sapiens
  misc_RNA (1)...(19): siRNA sense strand
gggcaggcauuucucuuca

SEQ ID NO: 1082868 - RNA, 19 nt, Homo sapiens
  misc_RNA (1)...(19): siRNA sense strand
ggauaaagcccagauaaac

SEQ ID NO: 1082869 - RNA, 19 nt, Homo sapiens
  misc_RNA (1)...(19): siRNA sense strand
gagaaaccauacaaaugca

SEQ ID NO: 1082870 - RNA, 19 nt, Homo sapiens
  misc_RNA (1)...(19): siRNA sense strand
ggagaugcccuacaaaugc

SEQ ID NO: 1082871 - RNA, 19 nt, Homo sapiens
  misc_RNA (1)...(19): siRNA sense strand
uggcaagacucccuaugaa

SEQ ID NO: 1082872 - RNA, 19 nt, Homo sapiens
  misc_RNA (1)...(19): siRNA sense strand
aaacuuggguaugaaauca

SEQ ID NO: 1082873 - RNA, 19 nt, Homo sapiens
  misc_RNA (1)...(19): siRNA sense strand
ucaaggauguggcuguugu

SEQ ID NO: 1082874 - RNA, 19 nt, Homo sapiens
  misc_RNA (1)...(19): siRNA sense strand
ccauacaaaugcaaugugu

SEQ ID NO: 1082875 - RNA, 19 nt, Homo sapiens
  misc_RNA (1)...(19): siRNA sense strand
ccauauaaaugugaagugu

SEQ ID NO: 1082876 - RNA, 19 nt, Homo sapiens
  misc_RNA (1)...(19): siRNA sense strand
agucagagccaagaucuua

SEQ ID NO: 1082877 - RNA, 19 nt, Homo sapiens
  misc_RNA (1)...(19): siRNA sense strand
gcucuucccuucacaacca

SEQ ID NO: 1082878 - RNA, 19 nt, Homo sapiens
  misc_RNA (1)...(19): siRNA sense strand
gaagagugggcaggcauuu

SEQ ID NO: 1082879 - RNA, 19 nt, Homo sapiens
  misc_RNA (1)...(19): siRNA sense strand
guaagggcuucagucguaa

SEQ ID NO: 1082880 - RNA, 19 nt, Homo sapiens
  misc_RNA (1)...(19): siRNA sense strand
caucagagagaaaccauau

SEQ ID NO: 1082881 - RNA, 19 nt, Homo sapiens
  misc_RNA (1)...(19): siRNA sense strand
ggaagagcuggcacuauug

SEQ ID NO: 1082882 - RNA, 19 nt, Homo sapiens
  misc_RNA (1)...(19): siRNA sense strand
gggagaugcccuacaaaug

SEQ ID NO: 1082883 - RNA, 19 nt, Homo sapiens
  misc_RNA (1)...(19): siRNA sense strand
aggcauuucucuucagauu

SEQ ID NO: 1082884 - RNA, 19 nt, Homo sapiens
  misc_RNA (1)...(19): siRNA sense strand
gaagaguguuccccacauu

SEQ ID NO: 1082885 - RNA, 19 nt, Homo sapiens
  misc_RNA (1)...(19): siRNA sense strand
cuucaggaaccucauguua

SEQ ID NO: 1082886 - RNA, 19 nt, Homo sapiens
  misc_RNA (1)...(19): siRNA sense strand
caagacucccuaugaauuc

SEQ ID NO: 1082887 - RNA, 19 nt, Homo sapiens
  misc_RNA (1)...(19): siRNA sense strand
cagccuuucccauguaaua

SEQ ID NO: 1082888 - RNA, 19 nt, Homo sapiens
  misc_RNA (1)...(19): siRNA sense strand
gaaagugcuucaguuacag

SEQ ID NO: 1082889 - RNA, 19 nt, Homo sapiens
  misc_RNA (1)...(19): siRNA sense strand
ggaaaggauuuugcguaua

SEQ ID NO: 1082890 - RNA, 19 nt, Homo sapiens
  misc_RNA (1)...(19): siRNA sense strand
gaguguggcaagugcuuua

SEQ ID NO: 1082891 - RNA, 19 nt, Homo sapiens
  misc_RNA (1)...(19): siRNA sense strand
ucacuucuuuguauucauc

SEQ ID NO: 1082892 - RNA, 19 nt, Homo sapiens
  misc_RNA (1)...(19): siRNA sense strand
gcaagugcuuuaguucaag

SEQ ID NO: 1082893 - RNA, 19 nt, Homo sapiens
  misc_RNA (1)...(19): siRNA sense strand
ccauauaaaugugaugagu

SEQ ID NO: 1082894 - RNA, 19 nt, Homo sapiens
  misc_RNA (1)...(19): siRNA sense strand
caucaaagagaucacauca

SEQ ID NO: 1082895 - RNA, 19 nt, Homo sapiens
  misc_RNA (1)...(19): siRNA sense strand
ccauauagguguggugagu

SEQ ID NO: 1082896 - RNA, 19 nt, Homo sapiens
  misc_RNA (1)...(19): siRNA sense strand
caagaugugaugcuggaaa

SEQ ID NO: 1082897 - RNA, 19 nt, Homo sapiens
  misc_RNA (1)...(19): siRNA sense strand
ggucacuucuuuguauuca

SEQ ID NO: 1082898 - RNA, 19 nt, Homo sapiens
  misc_RNA (1)...(19): siRNA sense strand
gaagagcuggcacuauugg

SEQ ID NO: 1082899 - RNA, 19 nt, Homo sapiens
  misc_RNA (1)...(19): siRNA sense strand
agagagaggcccuauaagu

SEQ ID NO: 1082900 - RNA, 19 nt, Homo sapiens
  misc_RNA (1)...(19): siRNA sense strand
caauguguguggaaaggau

SEQ ID NO: 1082901 - RNA, 19 nt, Homo sapiens
  misc_RNA (1)...(19): siRNA sense strand
gaaaccauacaaaugcaau

SEQ ID NO: 1082902 - RNA, 19 nt, Homo sapiens
  misc_RNA (1)...(19): siRNA sense strand
ggacagggcuugagaguga

SEQ ID NO: 1082903 - RNA, 19 nt, Homo sapiens
  misc_RNA (1)...(19): siRNA sense strand
gaaggaagcucaugagaag

SEQ ID NO: 1082904 - RNA, 19 nt, Homo sapiens
  misc_RNA (1)...(19): siRNA sense strand
gauaaggacaucuaaguua

SEQ ID NO: 1082905 - RNA, 19 nt, Homo sapiens
  misc_RNA (1)...(19): siRNA sense strand
ugacaacguugcagaauaa

SEQ ID NO: 1082906 - RNA, 19 nt, Homo sapiens
  misc_RNA (1)...(19): siRNA sense strand
gaaagaaggaagcucauga

SEQ ID NO: 1082907 - RNA, 19 nt, Homo sapiens
  misc_RNA (1)...(19): siRNA sense strand
ggaaagggaccaaagagaa

SEQ ID NO: 1082908 - RNA, 19 nt, Homo sapiens
  misc_RNA (1)...(19): siRNA sense strand
ggagaaagaggaagaguug

SEQ ID NO: 1082909 - RNA, 19 nt, Homo sapiens
  misc_RNA (1)...(19): siRNA sense strand
caacggaucuaacaguaau

SEQ ID NO: 1082910 - RNA, 19 nt, Homo sapiens
  misc_RNA (1)...(19): siRNA sense strand
uauaaucgcugugauauuc

SEQ ID NO: 1082911 - RNA, 19 nt, Homo sapiens
  misc_RNA (1)...(19): siRNA sense strand
ggaacggguuaacuuguuu

SEQ ID NO: 1082912 - RNA, 19 nt, Homo sapiens
  misc_RNA (1)...(19): siRNA sense strand
gauaauugguccugugauc

SEQ ID NO: 1082913 - RNA, 19 nt, Homo sapiens
  misc_RNA (1)...(19): siRNA sense strand
gaaagggaccaaagagaau

SEQ ID NO: 1082914 - RNA, 19 nt, Homo sapiens
  misc_RNA (1)...(19): siRNA sense strand
agaaucugauccugacuua

SEQ ID NO: 1082915 - RNA, 19 nt, Homo sapiens
  misc_RNA (1)...(19): siRNA sense strand
gaugggaucuggccuugau

SEQ ID NO: 1082916 - RNA, 19 nt, Homo sapiens
  misc_RNA (1)...(19): siRNA sense strand
ccaauagacucaccuuaag

SEQ ID NO: 1082917 - RNA, 19 nt, Homo sapiens
  misc_RNA (1)...(19): siRNA sense strand
ccucaguucucccagauaa

SEQ ID NO: 1082918 - RNA, 19 nt, Homo sapiens
  misc_RNA (1)...(19): siRNA sense strand
gaaaggcacaaaucaacaa

SEQ ID NO: 1082919 - RNA, 19 nt, Homo sapiens
  misc_RNA (1)...(19): siRNA sense strand
ggagaggagguaccacaua

SEQ ID NO: 1082920 - RNA, 19 nt, Homo sapiens
  misc_RNA (1)...(19): siRNA sense strand
ccaaaggccaguuuaaaga

SEQ ID NO: 1082921 - RNA, 19 nt, Homo sapiens
  misc_RNA (1)...(19): siRNA sense strand
caacguugcagaauaaaga

SEQ ID NO: 1082922 - RNA, 19 nt, Homo sapiens
  misc_RNA (1)...(19): siRNA sense strand
gagaggagguaccacauac

SEQ ID NO: 1082923 - RNA, 19 nt, Homo sapiens
  misc_RNA (1)...(19): siRNA sense strand
gacaaggagccaggaauua

SEQ ID NO: 1082924 - RNA, 19 nt, Homo sapiens
  misc_RNA (1)...(19): siRNA sense strand
ggagcuaucagucaugaaa

SEQ ID NO: 1082925 - RNA, 19 nt, Homo sapiens
  misc_RNA (1)...(19): siRNA sense strand
cggguuaacuuguuugguu

SEQ ID NO: 1082926 - RNA, 19 nt, Homo sapiens
  misc_RNA (1)...(19): siRNA sense strand
ggaagaccgacuaaagaaa

SEQ ID NO: 1082927 - RNA, 19 nt, Homo sapiens
  misc_RNA (1)...(19): siRNA sense strand
uuacagcucucugguuuga

SEQ ID NO: 1082928 - RNA, 19 nt, Homo sapiens
  misc_RNA (1)...(19): siRNA sense strand
ggaauuacugcuucugcua

SEQ ID NO: 1082929 - RNA, 19 nt, Homo sapiens
  misc_RNA (1)...(19): siRNA sense strand
caaaggccaguuuaaagaa

SEQ ID NO: 1082930 - RNA, 19 nt, Homo sapiens
  misc_RNA (1)...(19): siRNA sense strand
gaaagaggaagaguuggaa

SEQ ID NO: 1082931 - RNA, 19 nt, Homo sapiens
  misc_RNA (1)...(19): siRNA sense strand
cagaacagaucagcauuca

SEQ ID NO: 1082932 - RNA, 19 nt, Homo sapiens
  misc_RNA (1)...(19): siRNA sense strand
gggccaagcaauacgguua

SEQ ID NO: 1082933 - RNA, 19 nt, Homo sapiens
  misc_RNA (1)...(19): siRNA sense strand
aagcaaccaugaagaaugu

SEQ ID NO: 1082934 - RNA, 19 nt, Homo sapiens
  misc_RNA (1)...(19): siRNA sense strand
ggguuaacuuguuugguuu

SEQ ID NO: 1082935 - RNA, 19 nt, Homo sapiens
  misc_RNA (1)...(19): siRNA sense strand
aaucaagucuuaccaaugc

SEQ ID NO: 1082936 - RNA, 19 nt, Homo sapiens
  misc_RNA (1)...(19): siRNA sense strand
uaaguaccaugugacguuu

SEQ ID NO: 1082937 - RNA, 19 nt, Homo sapiens
  misc_RNA (1)...(19): siRNA sense strand
uaaagaagaauguggaaag

SEQ ID NO: 1082938 - RNA, 19 nt, Homo sapiens
  misc_RNA (1)...(19): siRNA sense strand
gagauuguccagauuguuc

SEQ ID NO: 1082939 - RNA, 19 nt, Homo sapiens
  misc_RNA (1)...(19): siRNA sense strand
caggaagaccgacuaaaga

SEQ ID NO: 1082940 - RNA, 19 nt, Homo sapiens
  misc_RNA (1)...(19): siRNA sense strand
acuuacagcucucugguuu

SEQ ID NO: 1082941 - RNA, 19 nt, Homo sapiens
  misc_RNA (1)...(19): siRNA sense strand
ucaacaugcuaaagaacuu

SEQ ID NO: 1082942 - RNA, 19 nt, Homo sapiens
  misc_RNA (1)...(19): siRNA sense strand
uugauucccugccgucuaa

SEQ ID NO: 1082943 - RNA, 19 nt, Homo sapiens
  misc_RNA (1)...(19): siRNA sense strand
caagcaagcagagaagaaa

SEQ ID NO: 1082944 - RNA, 19 nt, Homo sapiens
  misc_RNA (1)...(19): siRNA sense strand
aaagaaaggcacaaaucaa

SEQ ID NO: 1082945 - RNA, 19 nt, Homo sapiens
  misc_RNA (1)...(19): siRNA sense strand
gcagaacagaucagcauuc

SEQ ID NO: 1082946 - RNA, 19 nt, Homo sapiens
  misc_RNA (1)...(19): siRNA sense strand
gugcauggaucccagucaa

SEQ ID NO: 1082947 - RNA, 19 nt, Homo sapiens
  misc_RNA (1)...(19): siRNA sense strand
gcagaauaaagaagaaugu

SEQ ID NO: 1082948 - RNA, 19 nt, Homo sapiens
  misc_RNA (1)...(19): siRNA sense strand
aagaagaaauccaauagac

SEQ ID NO: 1082949 - RNA, 19 nt, Homo sapiens
  misc_RNA (1)...(19): siRNA sense strand
ggagguaccacauacucaa

SEQ ID NO: 1082950 - RNA, 19 nt, Homo sapiens
  misc_RNA (1)...(19): siRNA sense strand
gaggagauuguccagauug

SEQ ID NO: 1082951 - RNA, 19 nt, Homo sapiens
  misc_RNA (1)...(19): siRNA sense strand
gaagaccgacuaaagaaaa

SEQ ID NO: 1082952 - RNA, 19 nt, Homo sapiens
  misc_RNA (1)...(19): siRNA sense strand
uccaauagacucaccuuaa

SEQ ID NO: 1082953 - RNA, 19 nt, Homo sapiens
  misc_RNA (1)...(19): siRNA sense strand
ugaggagauuguccagauu

SEQ ID NO: 1082954 - RNA, 19 nt, Homo sapiens
  misc_RNA (1)...(19): siRNA sense strand
cagucaacaugcuaaagaa

SEQ ID NO: 1082955 - RNA, 19 nt, Homo sapiens
  misc_RNA (1)...(19): siRNA sense strand
ccagucaacaugcuaaaga

SEQ ID NO: 1082956 - RNA, 19 nt, Homo sapiens
  misc_RNA (1)...(19): siRNA sense strand
cuaaguaccaugugacguu

SEQ ID NO: 1082957 - RNA, 19 nt, Homo sapiens
  misc_RNA (1)...(19): siRNA sense strand
ggccaggcaugauagaauc

SEQ ID NO: 1082958 - RNA, 19 nt, Homo sapiens
  misc_RNA (1)...(19): siRNA sense strand
caguauaaucgcugugaua

SEQ ID NO: 1082959 - RNA, 19 nt, Homo sapiens
  misc_RNA (1)...(19): siRNA sense strand
aaggagagauaagugguuu

SEQ ID NO: 1082960 - RNA, 19 nt, Homo sapiens
  misc_RNA (1)...(19): siRNA sense strand
ccacauacucaagagauuu

SEQ ID NO: 1082961 - RNA, 19 nt, Homo sapiens
  misc_RNA (1)...(19): siRNA sense strand
gaaaugacugcagccagaa

SEQ ID NO: 1082962 - RNA, 19 nt, Homo sapiens
  misc_RNA (1)...(19): siRNA sense strand
gcaagcagagaagaaagaa

SEQ ID NO: 1082963 - RNA, 19 nt, Homo sapiens
  misc_RNA (1)...(19): siRNA sense strand
agacaaggagccaggaauu

SEQ ID NO: 1082964 - RNA, 19 nt, Homo sapiens
  misc_RNA (1)...(19): siRNA sense strand
ucuuaccaaugcagaauuu

SEQ ID NO: 1082965 - RNA, 19 nt, Homo sapiens
  misc_RNA (1)...(19): siRNA sense strand
cuaagaagaaauccaauag

SEQ ID NO: 1082966 - RNA, 19 nt, Homo sapiens
  misc_RNA (1)...(19): siRNA sense strand
agaaggaagcucaugagaa

SEQ ID NO: 1082967 - RNA, 19 nt, Homo sapiens
  misc_RNA (1)...(19): siRNA sense strand
gccaaaggccaguuuaaag

SEQ ID NO: 1082968 - RNA, 19 nt, Homo sapiens
  misc_RNA (1)...(19): siRNA sense strand
agacucaccuuaagcaaaa

SEQ ID NO: 1082969 - RNA, 19 nt, Homo sapiens
  misc_RNA (1)...(19): siRNA sense strand
gagaaaacagacccaauuu

SEQ ID NO: 1082970 - RNA, 19 nt, Homo sapiens
  misc_RNA (1)...(19): siRNA sense strand
gcaguauaaucgcugugau

SEQ ID NO: 1082971 - RNA, 19 nt, Homo sapiens
  misc_RNA (1)...(19): siRNA sense strand
ucaguucucccagauaauu

SEQ ID NO: 1082972 - RNA, 19 nt, Homo sapiens
  misc_RNA (1)...(19): siRNA sense strand
augacaacguugcagaaua

SEQ ID NO: 1082973 - RNA, 19 nt, Homo sapiens
  misc_RNA (1)...(19): siRNA sense strand
gauccugcacccucuaaga

SEQ ID NO: 1082974 - RNA, 19 nt, Homo sapiens
  misc_RNA (1)...(19): siRNA sense strand
aaacaguucaggaucauuc

SEQ ID NO: 1082975 - RNA, 19 nt, Homo sapiens
  misc_RNA (1)...(19): siRNA sense strand
ucaacaagcaagcagagaa

SEQ ID NO: 1082976 - RNA, 19 nt, Homo sapiens
  misc_RNA (1)...(19): siRNA sense strand
gaacggguuaacuuguuug

SEQ ID NO: 1082977 - RNA, 19 nt, Homo sapiens
  misc_RNA (1)...(19): siRNA sense strand
gagacagaggccaggauaa

SEQ ID NO: 1082978 - RNA, 19 nt, Homo sapiens
  misc_RNA (1)...(19): siRNA sense strand
gaacauugaccccucaguu

SEQ ID NO: 1082979 - RNA, 19 nt, Homo sapiens
  misc_RNA (1)...(19): siRNA sense strand
ucaagagauuucagugucu

SEQ ID NO: 1082980 - RNA, 19 nt, Homo sapiens
  misc_RNA (1)...(19): siRNA sense strand
aaaggaggaaggagagaaa

SEQ ID NO: 1082981 - RNA, 19 nt, Homo sapiens
  misc_RNA (1)...(19): siRNA sense strand
caacaagcaagcagagaag

SEQ ID NO: 1082982 - RNA, 19 nt, Homo sapiens
  misc_RNA (1)...(19): siRNA sense strand
uucaacggaucuaacagua

SEQ ID NO: 1082983 - RNA, 19 nt, Homo sapiens
  misc_RNA (1)...(19): siRNA sense strand
aggaacggguuaacuuguu

SEQ ID NO: 1082984 - RNA, 19 nt, Homo sapiens
  misc_RNA (1)...(19): siRNA sense strand
ucaagaggcagaacagauc

SEQ ID NO: 1082985 - RNA, 19 nt, Homo sapiens
  misc_RNA (1)...(19): siRNA sense strand
aaagaagaauguggaaagg

SEQ ID NO: 1082986 - RNA, 19 nt, Homo sapiens
  misc_RNA (1)...(19): siRNA sense strand
agagacagaggccaggaua

SEQ ID NO: 1082987 - RNA, 19 nt, Homo sapiens
  misc_RNA (1)...(19): siRNA sense strand
guauaaucgcugugauauu

SEQ ID NO: 1082988 - RNA, 19 nt, Homo sapiens
  misc_RNA (1)...(19): siRNA sense strand
uugaggagauuguccagau

SEQ ID NO: 1082989 - RNA, 19 nt, Homo sapiens
  misc_RNA (1)...(19): siRNA sense strand
ugacuuaggggaauauuuu

SEQ ID NO: 1082990 - RNA, 19 nt, Homo sapiens
  misc_RNA (1)...(19): siRNA sense strand
agagugauguggccuaugc

SEQ ID NO: 1082991 - RNA, 19 nt, Homo sapiens
  misc_RNA (1)...(19): siRNA sense strand
aaagcaaccaugaagaaug

SEQ ID NO: 1082992 - RNA, 19 nt, Homo sapiens
  misc_RNA (1)...(19): siRNA sense strand
cuacugauacugauaaugc

SEQ ID NO: 1082993 - RNA, 19 nt, Homo sapiens
  misc_RNA (1)...(19): siRNA sense strand
acaggaagaccgacuaaag

SEQ ID NO: 1082994 - RNA, 19 nt, Homo sapiens
  misc_RNA (1)...(19): siRNA sense strand
ucaacggaucuaacaguaa

SEQ ID NO: 1082995 - RNA, 19 nt, Homo sapiens
  misc_RNA (1)...(19): siRNA sense strand
ucaggaacggguuaacuug

SEQ ID NO: 1082996 - RNA, 19 nt, Homo sapiens
  misc_RNA (1)...(19): siRNA sense strand
cagauaauugguccuguga

SEQ ID NO: 1082997 - RNA, 19 nt, Homo sapiens
  misc_RNA (1)...(19): siRNA sense strand
gaaaacaguucaggaucau

SEQ ID NO: 1082998 - RNA, 19 nt, Homo sapiens
  misc_RNA (1)...(19): siRNA sense strand
gaugacaacguugcagaau

SEQ ID NO: 1082999 - RNA, 19 nt, Homo sapiens
  misc_RNA (1)...(19): siRNA sense strand
guugcagaauaaagaagaa

SEQ ID NO: 1083000 - RNA, 19 nt, Homo sapiens
  misc_RNA (1)...(19): siRNA sense strand
gcauggaucccagucaaca

SEQ ID NO: 1083001 - RNA, 19 nt, Homo sapiens
  misc_RNA (1)...(19): siRNA sense strand
agaaagaggaagaguugga

SEQ ID NO: 1083002 - RNA, 19 nt, Homo sapiens
  misc_RNA (1)...(19): siRNA sense strand
gaacuuggccguauugauu

SEQ ID NO: 1083003 - RNA, 19 nt, Homo sapiens
  misc_RNA (1)...(19): siRNA sense strand
caucaaaccucaguauauu

SEQ ID NO: 1083004 - RNA, 19 nt, Homo sapiens
  misc_RNA (1)...(19): siRNA sense strand
ccagagagaccucauuuaa

SEQ ID NO: 1083005 - RNA, 19 nt, Homo sapiens
  misc_RNA (1)...(19): siRNA sense strand
ggaaucaaacccaacauuu

SEQ ID NO: 1083006 - RNA, 19 nt, Homo sapiens
  misc_RNA (1)...(19): siRNA sense strand
cauaugaccugcucacaau

SEQ ID NO: 1083007 - RNA, 19 nt, Homo sapiens
  misc_RNA (1)...(19): siRNA sense strand
gaucagaaagcaaauacaa

SEQ ID NO: 1083008 - RNA, 19 nt, Homo sapiens
  misc_RNA (1)...(19): siRNA sense strand
uaagugauaugcuauacug

SEQ ID NO: 1083009 - RNA, 19 nt, Homo sapiens
  misc_RNA (1)...(19): siRNA sense strand
ugaaggaugugaccauaug

SEQ ID NO: 1083010 - RNA, 19 nt, Homo sapiens
  misc_RNA (1)...(19): siRNA sense strand
gcaagcacuuuacaaccuu

SEQ ID NO: 1083011 - RNA, 19 nt, Homo sapiens
  misc_RNA (1)...(19): siRNA sense strand
agagagaccucauuuaagg

SEQ ID NO: 1083012 - RNA, 19 nt, Homo sapiens
  misc_RNA (1)...(19): siRNA sense strand
guuguuaagugauaugcua

SEQ ID NO: 1083013 - RNA, 19 nt, Homo sapiens
  misc_RNA (1)...(19): siRNA sense strand
gaagacuccaucaaguaua

SEQ ID NO: 1083014 - RNA, 19 nt, Homo sapiens
  misc_RNA (1)...(19): siRNA sense strand
gguagaaccaggaaucaaa

SEQ ID NO: 1083015 - RNA, 19 nt, Homo sapiens
  misc_RNA (1)...(19): siRNA sense strand
gcagaggaaugcccagaag

SEQ ID NO: 1083016 - RNA, 19 nt, Homo sapiens
  misc_RNA (1)...(19): siRNA sense strand
gcccagaaguguccaaagu

SEQ ID NO: 1083017 - RNA, 19 nt, Homo sapiens
  misc_RNA (1)...(19): siRNA sense strand
ccagcgaacugaaggaugu

SEQ ID NO: 1083018 - RNA, 19 nt, Homo sapiens
  misc_RNA (1)...(19): siRNA sense strand
aagacuccaucaaguauaa

SEQ ID NO: 1083019 - RNA, 19 nt, Homo sapiens
  misc_RNA (1)...(19): siRNA sense strand
gaaaucaaaugccccauca

SEQ ID NO: 1083020 - RNA, 19 nt, Homo sapiens
  misc_RNA (1)...(19): siRNA sense strand
caugaagacuccaucaagu

SEQ ID NO: 1083021 - RNA, 19 nt, Homo sapiens
  misc_RNA (1)...(19): siRNA sense strand
ggccauagcgguuguaauc

SEQ ID NO: 1083022 - RNA, 19 nt, Homo sapiens
  misc_RNA (1)...(19): siRNA sense strand
caauucgucugguguuuua

SEQ ID NO: 1083023 - RNA, 19 nt, Homo sapiens
  misc_RNA (1)...(19): siRNA sense strand
uguaaucguugaggaaauu

SEQ ID NO: 1083024 - RNA, 19 nt, Homo sapiens
  misc_RNA (1)...(19): siRNA sense strand
gcaccucuaauuaugguuu

SEQ ID NO: 1083025 - RNA, 19 nt, Homo sapiens
  misc_RNA (1)...(19): siRNA sense strand
gcucacaauguaacacuaa

SEQ ID NO: 1083026 - RNA, 19 nt, Homo sapiens
  misc_RNA (1)...(19): siRNA sense strand
cauugcaccucuaauuaug

SEQ ID NO: 1083027 - RNA, 19 nt, Homo sapiens
  misc_RNA (1)...(19): siRNA sense strand
gcaugaagacuccaucaag

SEQ ID NO: 1083028 - RNA, 19 nt, Homo sapiens
  misc_RNA (1)...(19): siRNA sense strand
gagcaugggcagaggaaug

SEQ ID NO: 1083029 - RNA, 19 nt, Homo sapiens
  misc_RNA (1)...(19): siRNA sense strand
guauaaguacuucuuggaa

SEQ ID NO: 1083030 - RNA, 19 nt, Homo sapiens
  misc_RNA (1)...(19): siRNA sense strand
ccuguguuguuaagugaua

SEQ ID NO: 1083031 - RNA, 19 nt, Homo sapiens
  misc_RNA (1)...(19): siRNA sense strand
gcuggaaaauuauucauug

SEQ ID NO: 1083032 - RNA, 19 nt, Homo sapiens
  misc_RNA (1)...(19): siRNA sense strand
uaacuuaacgcaugaagac

SEQ ID NO: 1083033 - RNA, 19 nt, Homo sapiens
  misc_RNA (1)...(19): siRNA sense strand
ugaagacuccaucaaguau

SEQ ID NO: 1083034 - RNA, 19 nt, Homo sapiens
  misc_RNA (1)...(19): siRNA sense strand
gaaggaugugaccauauga

SEQ ID NO: 1083035 - RNA, 19 nt, Homo sapiens
  misc_RNA (1)...(19): siRNA sense strand
ucuauaacuuaacgcauga

SEQ ID NO: 1083036 - RNA, 19 nt, Homo sapiens
  misc_RNA (1)...(19): siRNA sense strand
cauagcgguuguaaucguu

SEQ ID NO: 1083037 - RNA, 19 nt, Homo sapiens
  misc_RNA (1)...(19): siRNA sense strand
agucugugcuggaaaauua

SEQ ID NO: 1083038 - RNA, 19 nt, Homo sapiens
  misc_RNA (1)...(19): siRNA sense strand
uuaccgauguggugagaga

SEQ ID NO: 1083039 - RNA, 19 nt, Homo sapiens
  misc_RNA (1)...(19): siRNA sense strand
gccaauucgucugguguuu

SEQ ID NO: 1083040 - RNA, 19 nt, Homo sapiens
  misc_RNA (1)...(19): siRNA sense strand
uuuccuaucuauugccuuu

SEQ ID NO: 1083041 - RNA, 19 nt, Homo sapiens
  misc_RNA (1)...(19): siRNA sense strand
cagccuguguuguuaagug

SEQ ID NO: 1083042 - RNA, 19 nt, Homo sapiens
  misc_RNA (1)...(19): siRNA sense strand
uauacugccugaaacaagu

SEQ ID NO: 1083043 - RNA, 19 nt, Homo sapiens
  misc_RNA (1)...(19): siRNA sense strand
acaucaaaccucaguauau

SEQ ID NO: 1083044 - RNA, 19 nt, Homo sapiens
  misc_RNA (1)...(19): siRNA sense strand
acugaaggaugugaccaua

SEQ ID NO: 1083045 - RNA, 19 nt, Homo sapiens
  misc_RNA (1)...(19): siRNA sense strand
ucauugcaccucuaauuau

SEQ ID NO: 1083046 - RNA, 19 nt, Homo sapiens
  misc_RNA (1)...(19): siRNA sense strand
aaaccucaguauauuugga

SEQ ID NO: 1083047 - RNA, 19 nt, Homo sapiens
  misc_RNA (1)...(19): siRNA sense strand
ccagaucagaaagcaaaua

SEQ ID NO: 1083048 - RNA, 19 nt, Homo sapiens
  misc_RNA (1)...(19): siRNA sense strand
cacaucaaaccucaguaua

SEQ ID NO: 1083049 - RNA, 19 nt, Homo sapiens
  misc_RNA (1)...(19): siRNA sense strand
ccaaguagaaaucaaaugc

SEQ ID NO: 1083050 - RNA, 19 nt, Homo sapiens
  misc_RNA (1)...(19): siRNA sense strand
ccauaugaccugcucacaa

SEQ ID NO: 1083051 - RNA, 19 nt, Homo sapiens
  misc_RNA (1)...(19): siRNA sense strand
acacaucaaaccucaguau

SEQ ID NO: 1083052 - RNA, 19 nt, Homo sapiens
  misc_RNA (1)...(19): siRNA sense strand
ccauagcgguuguaaucgu

SEQ ID NO: 1083053 - RNA, 19 nt, Homo sapiens
  misc_RNA (1)...(19): siRNA sense strand
gaggaaugcccagaagugu

SEQ ID NO: 1083054 - RNA, 19 nt, Homo sapiens
  misc_RNA (1)...(19): siRNA sense strand
uucauugcaccucuaauua

SEQ ID NO: 1083055 - RNA, 19 nt, Homo sapiens
  misc_RNA (1)...(19): siRNA sense strand
gaccucauuuaaggagauu

SEQ ID NO: 1083056 - RNA, 19 nt, Homo sapiens
  misc_RNA (1)...(19): siRNA sense strand
cagagagaccucauuuaag

SEQ ID NO: 1083057 - RNA, 19 nt, Homo sapiens
  misc_RNA (1)...(19): siRNA sense strand
gaaagcaaauacaaaaucc

SEQ ID NO: 1083058 - RNA, 19 nt, Homo sapiens
  misc_RNA (1)...(19): siRNA sense strand
uaacugcaaggaguacaaa

SEQ ID NO: 1083059 - RNA, 19 nt, Homo sapiens
  misc_RNA (1)...(19): siRNA sense strand
ccacucuccuuggcaugaa

SEQ ID NO: 1083060 - RNA, 19 nt, Homo sapiens
  misc_RNA (1)...(19): siRNA sense strand
guuaagugauaugcuauac

SEQ ID NO: 1083061 - RNA, 19 nt, Homo sapiens
  misc_RNA (1)...(19): siRNA sense strand
ggaacuuggccguauugau

SEQ ID NO: 1083062 - RNA, 19 nt, Homo sapiens
  misc_RNA (1)...(19): siRNA sense strand
ccacauccagcgaacugaa

SEQ ID NO: 1083063 - RNA, 19 nt, Homo sapiens
  misc_RNA (1)...(19): siRNA sense strand
ccacacaucaaaccucagu

SEQ ID NO: 1083064 - RNA, 19 nt, Homo sapiens
  misc_RNA (1)...(19): siRNA sense strand
augaagacuccaucaagua

SEQ ID NO: 1083065 - RNA, 19 nt, Homo sapiens
  misc_RNA (1)...(19): siRNA sense strand
gagagaccucauuuaagga

SEQ ID NO: 1083066 - RNA, 19 nt, Homo sapiens
  misc_RNA (1)...(19): siRNA sense strand
uggaaccucauaaguggua

SEQ ID NO: 1083067 - RNA, 19 nt, Homo sapiens
  misc_RNA (1)...(19): siRNA sense strand
gcacuuuacaaccuucaag

SEQ ID NO: 1083068 - RNA, 19 nt, Homo sapiens
  misc_RNA (1)...(19): siRNA sense strand
uaugcuauacugccugaaa

SEQ ID NO: 1083069 - RNA, 19 nt, Homo sapiens
  misc_RNA (1)...(19): siRNA sense strand
ucacagaguguuuugaauu

SEQ ID NO: 1083070 - RNA, 19 nt, Homo sapiens
  misc_RNA (1)...(19): siRNA sense strand
cuuuacaaccuucaagaaa

SEQ ID NO: 1083071 - RNA, 19 nt, Homo sapiens
  misc_RNA (1)...(19): siRNA sense strand
ucccagagagaccucauuu

SEQ ID NO: 1083072 - RNA, 19 nt, Homo sapiens
  misc_RNA (1)...(19): siRNA sense strand
auaaguacuucuuggaacu

SEQ ID NO: 1083073 - RNA, 19 nt, Homo sapiens
  misc_RNA (1)...(19): siRNA sense strand
ccuaucuauugccuuugua

SEQ ID NO: 1083074 - RNA, 19 nt, Homo sapiens
  misc_RNA (1)...(19): siRNA sense strand
gcuauacugccugaaacaa

SEQ ID NO: 1083075 - RNA, 19 nt, Homo sapiens
  misc_RNA (1)...(19): siRNA sense strand
ccaggaaucaaacccaaca

SEQ ID NO: 1083076 - RNA, 19 nt, Homo sapiens
  misc_RNA (1)...(19): siRNA sense strand
auucauugcaccucuaauu

SEQ ID NO: 1083077 - RNA, 19 nt, Homo sapiens
  misc_RNA (1)...(19): siRNA sense strand
cccagagagaccucauuua

SEQ ID NO: 1083078 - RNA, 19 nt, Homo sapiens
  misc_RNA (1)...(19): siRNA sense strand
uuggagaccacacaucaaa

SEQ ID NO: 1083079 - RNA, 19 nt, Homo sapiens
  misc_RNA (1)...(19): siRNA sense strand
agaggaaugcccagaagug

SEQ ID NO: 1083080 - RNA, 19 nt, Homo sapiens
  misc_RNA (1)...(19): siRNA sense strand
augaagguguuaacugcaa

SEQ ID NO: 1083081 - RNA, 19 nt, Homo sapiens
  misc_RNA (1)...(19): siRNA sense strand
caaagugcaagauccacau

SEQ ID NO: 1083082 - RNA, 19 nt, Homo sapiens
  misc_RNA (1)...(19): siRNA sense strand
agaaguguccaaagugcaa

SEQ ID NO: 1083083 - RNA, 19 nt, Homo sapiens
  misc_RNA (1)...(19): siRNA sense strand
uagcgguuguaaucguuga

SEQ ID NO: 1083084 - RNA, 19 nt, Homo sapiens
  misc_RNA (1)...(19): siRNA sense strand
uuacuggaaccucauaagu

SEQ ID NO: 1083085 - RNA, 19 nt, Homo sapiens
  misc_RNA (1)...(19): siRNA sense strand
guuguaaucguugaggaaa

SEQ ID NO: 1083086 - RNA, 19 nt, Homo sapiens
  misc_RNA (1)...(19): siRNA sense strand
gguuguaaucguugaggaa

SEQ ID NO: 1083087 - RNA, 19 nt, Homo sapiens
  misc_RNA (1)...(19): siRNA sense strand
agaccucauuuaaggagau

SEQ ID NO: 1083088 - RNA, 19 nt, Homo sapiens
  misc_RNA (1)...(19): siRNA sense strand
ucaaaugccccaucacaga

SEQ ID NO: 1083089 - RNA, 19 nt, Homo sapiens
  misc_RNA (1)...(19): siRNA sense strand
gaaaccaucucccgucaga

SEQ ID NO: 1083090 - RNA, 19 nt, Homo sapiens
  misc_RNA (1)...(19): siRNA sense strand
ggagaaagggcauuugaug

SEQ ID NO: 1083091 - RNA, 19 nt, Homo sapiens
  misc_RNA (1)...(19): siRNA sense strand
agagggagauuagcaauga

SEQ ID NO: 1083092 - RNA, 19 nt, Homo sapiens
  misc_RNA (1)...(19): siRNA sense strand
gauuagcaaugaagcuuuc

SEQ ID NO: 1083093 - RNA, 19 nt, Homo sapiens
  misc_RNA (1)...(19): siRNA sense strand
ugucgggccuggagcauuu

SEQ ID NO: 1083094 - RNA, 19 nt, Homo sapiens
  misc_RNA (1)...(19): siRNA sense strand
gccacucccugccaucuga

SEQ ID NO: 1083095 - RNA, 19 nt, Homo sapiens
  misc_RNA (1)...(19): siRNA sense strand
gcauuuccuccuucacuuu

SEQ ID NO: 1083096 - RNA, 19 nt, Homo sapiens
  misc_RNA (1)...(19): siRNA sense strand
cacuugaccucuucaggaa

SEQ ID NO: 1083097 - RNA, 19 nt, Homo sapiens
  misc_RNA (1)...(19): siRNA sense strand
ccuucaagaucaacaguga

SEQ ID NO: 1083098 - RNA, 19 nt, Homo sapiens
  misc_RNA (1)...(19): siRNA sense strand
ccacacccuucaagaucaa

SEQ ID NO: 1083099 - RNA, 19 nt, Homo sapiens
  misc_RNA (1)...(19): siRNA sense strand
gagauuagcaaugaagcuu

SEQ ID NO: 1083100 - RNA, 19 nt, Homo sapiens
  misc_RNA (1)...(19): siRNA sense strand
gagggagauuagcaaugaa

SEQ ID NO: 1083101 - RNA, 19 nt, Homo sapiens
  misc_RNA (1)...(19): siRNA sense strand
gugcuuugcuucccugucu

SEQ ID NO: 1083102 - RNA, 19 nt, Homo sapiens
  misc_RNA (1)...(19): siRNA sense strand
gcuacagcaugccucagau

SEQ ID NO: 1083103 - RNA, 19 nt, Homo sapiens
  misc_RNA (1)...(19): siRNA sense strand
uagcaaugaagcuuucuga

SEQ ID NO: 1083104 - RNA, 19 nt, Homo sapiens
  misc_RNA (1)...(19): siRNA sense strand
gagcauuuccuccuucacu

SEQ ID NO: 1083105 - RNA, 19 nt, Homo sapiens
  misc_RNA (1)...(19): siRNA sense strand
cccacacccuucaagauca

SEQ ID NO: 1083106 - RNA, 19 nt, Homo sapiens
  misc_RNA (1)...(19): siRNA sense strand
cgagggagaaagggcauuu

SEQ ID NO: 1083107 - RNA, 19 nt, Homo sapiens
  misc_RNA (1)...(19): siRNA sense strand
gggagaaagggcauuugau

SEQ ID NO: 1083108 - RNA, 19 nt, Homo sapiens
  misc_RNA (1)...(19): siRNA sense strand
cuacagcaugccucagauu

SEQ ID NO: 1083109 - RNA, 19 nt, Homo sapiens
  misc_RNA (1)...(19): siRNA sense strand
ucuauccacuugaccucuu

SEQ ID NO: 1083110 - RNA, 19 nt, Homo sapiens
  misc_RNA (1)...(19): siRNA sense strand
ggcuacagcaugccucaga

SEQ ID NO: 1083111 - RNA, 19 nt, Homo sapiens
  misc_RNA (1)...(19): siRNA sense strand
cuugaccucuucaggaaca

SEQ ID NO: 1083112 - RNA, 19 nt, Homo sapiens
  misc_RNA (1)...(19): siRNA sense strand
gaaagcccaugaacuguua

SEQ ID NO: 1083113 - RNA, 19 nt, Homo sapiens
  misc_RNA (1)...(19): siRNA sense strand
gaaaagcacuugagaaaga

SEQ ID NO: 1083114 - RNA, 19 nt, Homo sapiens
  misc_RNA (1)...(19): siRNA sense strand
gagcuguacuugccacuaa

SEQ ID NO: 1083115 - RNA, 19 nt, Homo sapiens
  misc_RNA (1)...(19): siRNA sense strand
gauaagaucuggcgagaac

SEQ ID NO: 1083116 - RNA, 19 nt, Homo sapiens
  misc_RNA (1)...(19): siRNA sense strand
gggcgaaggucguauugaa

SEQ ID NO: 1083117 - RNA, 19 nt, Homo sapiens
  misc_RNA (1)...(19): siRNA sense strand
caagaaagcccaugaacug

SEQ ID NO: 1083118 - RNA, 19 nt, Homo sapiens
  misc_RNA (1)...(19): siRNA sense strand
gauguuggcagcugcuuua

SEQ ID NO: 1083119 - RNA, 19 nt, Homo sapiens
  misc_RNA (1)...(19): siRNA sense strand
gagagugucuauaaaugug

SEQ ID NO: 1083120 - RNA, 19 nt, Homo sapiens
  misc_RNA (1)...(19): siRNA sense strand
ugaaugguguuguagugua

SEQ ID NO: 1083121 - RNA, 19 nt, Homo sapiens
  misc_RNA (1)...(19): siRNA sense strand
gaacuuacagcuucagcaa

SEQ ID NO: 1083122 - RNA, 19 nt, Homo sapiens
  misc_RNA (1)...(19): siRNA sense strand
caacuugaaggucauuuaa

SEQ ID NO: 1083123 - RNA, 19 nt, Homo sapiens
  misc_RNA (1)...(19): siRNA sense strand
gaaugguguuguaguguau

SEQ ID NO: 1083124 - RNA, 19 nt, Homo sapiens
  misc_RNA (1)...(19): siRNA sense strand
gaauaugccguugcaauga

SEQ ID NO: 1083125 - RNA, 19 nt, Homo sapiens
  misc_RNA (1)...(19): siRNA sense strand
gaaacucuuugugaauaug

SEQ ID NO: 1083126 - RNA, 19 nt, Homo sapiens
  misc_RNA (1)...(19): siRNA sense strand
gagaaaagcacuugagaaa

SEQ ID NO: 1083127 - RNA, 19 nt, Homo sapiens
  misc_RNA (1)...(19): siRNA sense strand
cguauugaaugguguugua

SEQ ID NO: 1083128 - RNA, 19 nt, Homo sapiens
  misc_RNA (1)...(19): siRNA sense strand
ucucucuccuucuuucuua

SEQ ID NO: 1083129 - RNA, 19 nt, Homo sapiens
  misc_RNA (1)...(19): siRNA sense strand
uaaauaugcaugagucuuc

SEQ ID NO: 1083130 - RNA, 19 nt, Homo sapiens
  misc_RNA (1)...(19): siRNA sense strand
uaacccauuucugaaguuu

SEQ ID NO: 1083131 - RNA, 19 nt, Homo sapiens
  misc_RNA (1)...(19): siRNA sense strand
uaaccaaccucagcuuuac

SEQ ID NO: 1083132 - RNA, 19 nt, Homo sapiens
  misc_RNA (1)...(19): siRNA sense strand
caagaaguaccgagaagug

SEQ ID NO: 1083133 - RNA, 19 nt, Homo sapiens
  misc_RNA (1)...(19): siRNA sense strand
gcgaaggucguauugaaug

SEQ ID NO: 1083134 - RNA, 19 nt, Homo sapiens
  misc_RNA (1)...(19): siRNA sense strand
gcagcugcuuuaacccauu

SEQ ID NO: 1083135 - RNA, 19 nt, Homo sapiens
  misc_RNA (1)...(19): siRNA sense strand
uuaaccaaccucagcuuua

SEQ ID NO: 1083136 - RNA, 19 nt, Homo sapiens
  misc_RNA (1)...(19): siRNA sense strand
gcaagaaagcccaugaacu

SEQ ID NO: 1083137 - RNA, 19 nt, Homo sapiens
  misc_RNA (1)...(19): siRNA sense strand
cagcugcuuuaacccauuu

SEQ ID NO: 1083138 - RNA, 19 nt, Homo sapiens
  misc_RNA (1)...(19): siRNA sense strand
gagaacacugugaggauga

SEQ ID NO: 1083139 - RNA, 19 nt, Homo sapiens
  misc_RNA (1)...(19): siRNA sense strand
ugaauaugccguugcaaug

SEQ ID NO: 1083140 - RNA, 19 nt, Homo sapiens
  misc_RNA (1)...(19): siRNA sense strand
gcacaggaugcuacagaug

SEQ ID NO: 1083141 - RNA, 19 nt, Homo sapiens
  misc_RNA (1)...(19): siRNA sense strand
aauaugccguugcaaugaa

SEQ ID NO: 1083142 - RNA, 19 nt, Homo sapiens
  misc_RNA (1)...(19): siRNA sense strand
ccacuccagccuuaaauau

SEQ ID NO: 1083143 - RNA, 19 nt, Homo sapiens
  misc_RNA (1)...(19): siRNA sense strand
gugauuuccugaacuuaca

SEQ ID NO: 1083144 - RNA, 19 nt, Homo sapiens
  misc_RNA (1)...(19): siRNA sense strand
gaagugggagauuuugaua

SEQ ID NO: 1083145 - RNA, 19 nt, Homo sapiens
  misc_RNA (1)...(19): siRNA sense strand
ggaaacuggagcaggagaa

SEQ ID NO: 1083146 - RNA, 19 nt, Homo sapiens
  misc_RNA (1)...(19): siRNA sense strand
acccauuucugaaguuuga

SEQ ID NO: 1083147 - RNA, 19 nt, Homo sapiens
  misc_RNA (1)...(19): siRNA sense strand
uauuguaccugcuguagag

SEQ ID NO: 1083148 - RNA, 19 nt, Homo sapiens
  misc_RNA (1)...(19): siRNA sense strand
gugaauaugccguugcaau

SEQ ID NO: 1083149 - RNA, 19 nt, Homo sapiens
  misc_RNA (1)...(19): siRNA sense strand
aaugugauuuccugaacuu

SEQ ID NO: 1083150 - RNA, 19 nt, Homo sapiens
  misc_RNA (1)...(19): siRNA sense strand
uguaguguaugcagagaau

SEQ ID NO: 1083151 - RNA, 19 nt, Homo sapiens
  misc_RNA (1)...(19): siRNA sense strand
acccugaauuuauaacuga

SEQ ID NO: 1083152 - RNA, 19 nt, Homo sapiens
  misc_RNA (1)...(19): siRNA sense strand
cagauaaucauugggcaaa

SEQ ID NO: 1083153 - RNA, 19 nt, Homo sapiens
  misc_RNA (1)...(19): siRNA sense strand
gcacuugagaaagaugaaa

SEQ ID NO: 1083154 - RNA, 19 nt, Homo sapiens
  misc_RNA (1)...(19): siRNA sense strand
gcgagaacacugugaggau

SEQ ID NO: 1083155 - RNA, 19 nt, Homo sapiens
  misc_RNA (1)...(19): siRNA sense strand
gcuacaagccucaggaaaa

SEQ ID NO: 1083156 - RNA, 19 nt, Homo sapiens
  misc_RNA (1)...(19): siRNA sense strand
cgaaggucguauugaaugg

SEQ ID NO: 1083157 - RNA, 19 nt, Homo sapiens
  misc_RNA (1)...(19): siRNA sense strand
gcagagaauauuuccaaaa

SEQ ID NO: 1083158 - RNA, 19 nt, Homo sapiens
  misc_RNA (1)...(19): siRNA sense strand
agaaagcccaugaacuguu

SEQ ID NO: 1083159 - RNA, 19 nt, Homo sapiens
  misc_RNA (1)...(19): siRNA sense strand
uaacuguuggcauagauau

SEQ ID NO: 1083160 - RNA, 19 nt, Homo sapiens
  misc_RNA (1)...(19): siRNA sense strand
gcaagaaguaccgagaagu

SEQ ID NO: 1083161 - RNA, 19 nt, Homo sapiens
  misc_RNA (1)...(19): siRNA sense strand
uggcauagauauuguaccu

SEQ ID NO: 1083162 - RNA, 19 nt, Homo sapiens
  misc_RNA (1)...(19): siRNA sense strand
gauauuguaccugcuguag

SEQ ID NO: 1083163 - RNA, 19 nt, Homo sapiens
  misc_RNA (1)...(19): siRNA sense strand
gcuuuaacccauuucugaa

SEQ ID NO: 1083164 - RNA, 19 nt, Homo sapiens
  misc_RNA (1)...(19): siRNA sense strand
gaucuggcgagaacacugu

SEQ ID NO: 1083165 - RNA, 19 nt, Homo sapiens
  misc_RNA (1)...(19): siRNA sense strand
auuucuaacuguuggcaua

SEQ ID NO: 1083166 - RNA, 19 nt, Homo sapiens
  misc_RNA (1)...(19): siRNA sense strand
cuuuacaaacccugaauuu

SEQ ID NO: 1083167 - RNA, 19 nt, Homo sapiens
  misc_RNA (1)...(19): siRNA sense strand
guuggcagcugcuuuaacc

SEQ ID NO: 1083168 - RNA, 19 nt, Homo sapiens
  misc_RNA (1)...(19): siRNA sense strand
gagugucuauaaaugugau

SEQ ID NO: 1083169 - RNA, 19 nt, Homo sapiens
  misc_RNA (1)...(19): siRNA sense strand
accgagaagugggagauuu

SEQ ID NO: 1083170 - RNA, 19 nt, Homo sapiens
  misc_RNA (1)...(19): siRNA sense strand
agagagugucuauaaaugu

SEQ ID NO: 1083171 - RNA, 19 nt, Homo sapiens
  misc_RNA (1)...(19): siRNA sense strand
gaaacuggagcaggagaag

SEQ ID NO: 1083172 - RNA, 19 nt, Homo sapiens
  misc_RNA (1)...(19): siRNA sense strand
uuaacccauuucugaaguu

SEQ ID NO: 1083173 - RNA, 19 nt, Homo sapiens
  misc_RNA (1)...(19): siRNA sense strand
cgcaagaaguaccgagaag

SEQ ID NO: 1083174 - RNA, 19 nt, Homo sapiens
  misc_RNA (1)...(19): siRNA sense strand
acacugugaggaugaagaa

SEQ ID NO: 1083175 - RNA, 19 nt, Homo sapiens
  misc_RNA (1)...(19): siRNA sense strand
guguaugcagagaauauuu

SEQ ID NO: 1083176 - RNA, 19 nt, Homo sapiens
  misc_RNA (1)...(19): siRNA sense strand
gagggcgaaggucguauug

SEQ ID NO: 1083177 - RNA, 19 nt, Homo sapiens
  misc_RNA (1)...(19): siRNA sense strand
gaccacuccagccuuaaau

SEQ ID NO: 1083178 - RNA, 19 nt, Homo sapiens
  misc_RNA (1)...(19): siRNA sense strand
cuaacuguuggcauagaua

SEQ ID NO: 1083179 - RNA, 19 nt, Homo sapiens
  misc_RNA (1)...(19): siRNA sense strand
agaacacugugaggaugaa

SEQ ID NO: 1083180 - RNA, 19 nt, Homo sapiens
  misc_RNA (1)...(19): siRNA sense strand
ugcagagaauauuuccaaa

SEQ ID NO: 1083181 - RNA, 19 nt, Homo sapiens
  misc_RNA (1)...(19): siRNA sense strand
gcugcaagaaagcccauga

SEQ ID NO: 1083182 - RNA, 19 nt, Homo sapiens
  misc_RNA (1)...(19): siRNA sense strand
caaccucagcuuuacaaac

SEQ ID NO: 1083183 - RNA, 19 nt, Homo sapiens
  misc_RNA (1)...(19): siRNA sense strand
agaccacuccagccuuaaa

SEQ ID NO: 1083184 - RNA, 19 nt, Homo sapiens
  misc_RNA (1)...(19): siRNA sense strand
uaguguaugcagagaauau

SEQ ID NO: 1083185 - RNA, 19 nt, Homo sapiens
  misc_RNA (1)...(19): siRNA sense strand
ggcgaaggucguauugaau

SEQ ID NO: 1083186 - RNA, 19 nt, Homo sapiens
  misc_RNA (1)...(19): siRNA sense strand
aaccucagcuuuacaaacc

SEQ ID NO: 1083187 - RNA, 19 nt, Homo sapiens
  misc_RNA (1)...(19): siRNA sense strand
acaaagaggcccaguacua

SEQ ID NO: 1083188 - RNA, 19 nt, Homo sapiens
  misc_RNA (1)...(19): siRNA sense strand
uuggagaugugcugaauuu

SEQ ID NO: 1083189 - RNA, 19 nt, Homo sapiens
  misc_RNA (1)...(19): siRNA sense strand
caaagaggcccaguacuau

SEQ ID NO: 1083190 - RNA, 19 nt, Homo sapiens
  misc_RNA (1)...(19): siRNA sense strand
gcacacacuuuggagaugu

SEQ ID NO: 1083191 - RNA, 19 nt, Homo sapiens
  misc_RNA (1)...(19): siRNA sense strand
gaaggugcgccaagcguuu

SEQ ID NO: 1083192 - RNA, 19 nt, Homo sapiens
  misc_RNA (1)...(19): siRNA sense strand
ggaguuuccugagguuguu

SEQ ID NO: 1083193 - RNA, 19 nt, Homo sapiens
  misc_RNA (1)...(19): siRNA sense strand
ggcuguggcugauguuuau

SEQ ID NO: 1083194 - RNA, 19 nt, Homo sapiens
  misc_RNA (1)...(19): siRNA sense strand
gaacaugcagccacugaag

SEQ ID NO: 1083195 - RNA, 19 nt, Homo sapiens
  misc_RNA (1)...(19): siRNA sense strand
caaggucugugucuucaag

SEQ ID NO: 1083196 - RNA, 19 nt, Homo sapiens
  misc_RNA (1)...(19): siRNA sense strand
gagagugacgggcagcuuu

SEQ ID NO: 1083197 - RNA, 19 nt, Homo sapiens
  misc_RNA (1)...(19): siRNA sense strand
cgagauggcacacacuuug

SEQ ID NO: 1083198 - RNA, 19 nt, Homo sapiens
  misc_RNA (1)...(19): siRNA sense strand
gagaacaugcagccacuga

SEQ ID NO: 1083199 - RNA, 19 nt, Homo sapiens
  misc_RNA (1)...(19): siRNA sense strand
ggacucaugcccuauuaca

SEQ ID NO: 1083200 - RNA, 19 nt, Homo sapiens
  misc_RNA (1)...(19): siRNA sense strand
cuacgaagacaccauguug

SEQ ID NO: 1083201 - RNA, 19 nt, Homo sapiens
  misc_RNA (1)...(19): siRNA sense strand
gggaggcuguggcugaugu

SEQ ID NO: 1083202 - RNA, 19 nt, Homo sapiens
  misc_RNA (1)...(19): siRNA sense strand
gagaugugcugaauuuccu

SEQ ID NO: 1083203 - RNA, 19 nt, Homo sapiens
  misc_RNA (1)...(19): siRNA sense strand
gcucaaggucugugucuuc

SEQ ID NO: 1083204 - RNA, 19 nt, Homo sapiens
  misc_RNA (1)...(19): siRNA sense strand
ugggacucaugcccuauua

SEQ ID NO: 1083205 - RNA, 19 nt, Homo sapiens
  misc_RNA (1)...(19): siRNA sense strand
acucaugcccuauuacaaa

SEQ ID NO: 1083206 - RNA, 19 nt, Homo sapiens
  misc_RNA (1)...(19): siRNA sense strand
uggagcagcuggagaacau

SEQ ID NO: 1083207 - RNA, 19 nt, Homo sapiens
  misc_RNA (1)...(19): siRNA sense strand
acaagcaccucgugaacca

SEQ ID NO: 1083208 - RNA, 19 nt, Homo sapiens
  misc_RNA (1)...(19): siRNA sense strand
gugaaguggaugugucuuu

SEQ ID NO: 1083209 - RNA, 19 nt, Homo sapiens
  misc_RNA (1)...(19): siRNA sense strand
ccucaacucccugcgauuu

SEQ ID NO: 1083210 - RNA, 19 nt, Homo sapiens
  misc_RNA (1)...(19): siRNA sense strand
ugacgccgaagacgacuuu

SEQ ID NO: 1083211 - RNA, 19 nt, Homo sapiens
  misc_RNA (1)...(19): siRNA sense strand
cuacacgccuguccacacu

SEQ ID NO: 1083212 - RNA, 19 nt, Homo sapiens
  misc_RNA (1)...(19): siRNA sense strand
uguucgagcuguguacaaa

SEQ ID NO: 1083213 - RNA, 19 nt, Homo sapiens
  misc_RNA (1)...(19): siRNA sense strand
ggcacacacuuuggagaug

SEQ ID NO: 1083214 - RNA, 19 nt, Homo sapiens
  misc_RNA (1)...(19): siRNA sense strand
ggagaugugcugaauuucc

SEQ ID NO: 1083215 - RNA, 19 nt, Homo sapiens
  misc_RNA (1)...(19): siRNA sense strand
ugaaguggaugugucuuuu

SEQ ID NO: 1083216 - RNA, 19 nt, Homo sapiens
  misc_RNA (1)...(19): siRNA sense strand
aaagaggcccaguacuaug

SEQ ID NO: 1083217 - RNA, 19 nt, Homo sapiens
  misc_RNA (1)...(19): siRNA sense strand
gugacaagcaccucgugaa

SEQ ID NO: 1083218 - RNA, 19 nt, Homo sapiens
  misc_RNA (1)...(19): siRNA sense strand
gcuacgaagacaccauguu

SEQ ID NO: 1083219 - RNA, 19 nt, Homo sapiens
  misc_RNA (1)...(19): siRNA sense strand
guacuucaucgaccgagau

SEQ ID NO: 1083220 - RNA, 19 nt, Homo sapiens
  misc_RNA (1)...(19): siRNA sense strand
uucgagcuguguacaaaga

SEQ ID NO: 1083221 - RNA, 19 nt, Homo sapiens
  misc_RNA (1)...(19): siRNA sense strand
aggcuguggcugauguuua

SEQ ID NO: 1083222 - RNA, 19 nt, Homo sapiens
  misc_RNA (1)...(19): siRNA sense strand
aaacagaaguccaggaaga

SEQ ID NO: 1083223 - RNA, 19 nt, Homo sapiens
  misc_RNA (1)...(19): siRNA sense strand
caacgaacccuguaaauac

SEQ ID NO: 1083224 - RNA, 19 nt, Homo sapiens
  misc_RNA (1)...(19): siRNA sense strand
ggacaugggugagcucagu

SEQ ID NO: 1083225 - RNA, 19 nt, Homo sapiens
  misc_RNA (1)...(19): siRNA sense strand
caacggagaggccaucuug

SEQ ID NO: 1083226 - RNA, 19 nt, Homo sapiens
  misc_RNA (1)...(19): siRNA sense strand
ucaacgaacccuguaaaua

SEQ ID NO: 1083227 - RNA, 19 nt, Homo sapiens
  misc_RNA (1)...(19): siRNA sense strand
ggaaggagccugggaaagc

SEQ ID NO: 1083228 - RNA, 19 nt, Homo sapiens
  misc_RNA (1)...(19): siRNA sense strand
caccaucccucuucagcau

SEQ ID NO: 1083229 - RNA, 19 nt, Homo sapiens
  misc_RNA (1)...(19): siRNA sense strand
ccaagcucaucgaccacua

SEQ ID NO: 1083230 - RNA, 19 nt, Homo sapiens
  misc_RNA (1)...(19): siRNA sense strand
acacgguucuucccuaguc

SEQ ID NO: 1083231 - RNA, 19 nt, Homo sapiens
  misc_RNA (1)...(19): siRNA sense strand
ugguguccauuccaacuuu

SEQ ID NO: 1083232 - RNA, 19 nt, Homo sapiens
  misc_RNA (1)...(19): siRNA sense strand
ccucugguguccauuccaa

SEQ ID NO: 1083233 - RNA, 19 nt, Homo sapiens
  misc_RNA (1)...(19): siRNA sense strand
gaccuuuggccuccacaga

SEQ ID NO: 1083234 - RNA, 19 nt, Homo sapiens
  misc_RNA (1)...(19): siRNA sense strand
gcucacgggacccuguuug

SEQ ID NO: 1083235 - RNA, 19 nt, Homo sapiens
  misc_RNA (1)...(19): siRNA sense strand
cguacauccuacugaccua

SEQ ID NO: 1083236 - RNA, 19 nt, Homo sapiens
  misc_RNA (1)...(19): siRNA sense strand
gugaccgacuggacuugug

SEQ ID NO: 1083237 - RNA, 19 nt, Homo sapiens
  misc_RNA (1)...(19): siRNA sense strand
gagaagaaacuaaguguga

SEQ ID NO: 1083238 - RNA, 19 nt, Homo sapiens
  misc_RNA (1)...(19): siRNA sense strand
ccagcaagcuccaagaauu

SEQ ID NO: 1083239 - RNA, 19 nt, Homo sapiens
  misc_RNA (1)...(19): siRNA sense strand
ugagagaccugaaggaaga

SEQ ID NO: 1083240 - RNA, 19 nt, Homo sapiens
  misc_RNA (1)...(19): siRNA sense strand
ugacgagauuauugaguua

SEQ ID NO: 1083241 - RNA, 19 nt, Homo sapiens
  misc_RNA (1)...(19): siRNA sense strand
acagacaccuucagaguga

SEQ ID NO: 1083242 - RNA, 19 nt, Homo sapiens
  misc_RNA (1)...(19): siRNA sense strand
gagaggagauucagacacu

SEQ ID NO: 1083243 - RNA, 19 nt, Homo sapiens
  misc_RNA (1)...(19): siRNA sense strand
gaggagauucagacacuua

SEQ ID NO: 1083244 - RNA, 19 nt, Homo sapiens
  misc_RNA (1)...(19): siRNA sense strand
ggaaggaccggcagauaga

SEQ ID NO: 1083245 - RNA, 19 nt, Homo sapiens
  misc_RNA (1)...(19): siRNA sense strand
ggacacgagucaccuuauc

SEQ ID NO: 1083246 - RNA, 19 nt, Homo sapiens
  misc_RNA (1)...(19): siRNA sense strand
gcagugcccuccugagcuu

SEQ ID NO: 1083247 - RNA, 19 nt, Homo sapiens
  misc_RNA (1)...(19): siRNA sense strand
gcaaagccaggaagucuga

SEQ ID NO: 1083248 - RNA, 19 nt, Homo sapiens
  misc_RNA (1)...(19): siRNA sense strand
gaaagaagagaaagaggau

SEQ ID NO: 1083249 - RNA, 19 nt, Homo sapiens
  misc_RNA (1)...(19): siRNA sense strand
ggaucgccauggagacaua

SEQ ID NO: 1083250 - RNA, 19 nt, Homo sapiens
  misc_RNA (1)...(19): siRNA sense strand
ugcaagaaaugaagaaaga

SEQ ID NO: 1083251 - RNA, 19 nt, Homo sapiens
  misc_RNA (1)...(19): siRNA sense strand
gaugccaguugggucauua

SEQ ID NO: 1083252 - RNA, 19 nt, Homo sapiens
  misc_RNA (1)...(19): siRNA sense strand
gaagaaagaagagaaagag

SEQ ID NO: 1083253 - RNA, 19 nt, Homo sapiens
  misc_RNA (1)...(19): siRNA sense strand
gagaggagguuuugagaga

SEQ ID NO: 1083254 - RNA, 19 nt, Homo sapiens
  misc_RNA (1)...(19): siRNA sense strand
ggacaucucacgcggacaa

SEQ ID NO: 1083255 - RNA, 19 nt, Homo sapiens
  misc_RNA (1)...(19): siRNA sense strand
agauauguaugacgagauu

SEQ ID NO: 1083256 - RNA, 19 nt, Homo sapiens
  misc_RNA (1)...(19): siRNA sense strand
gaagaaacuaagugugaug

SEQ ID NO: 1083257 - RNA, 19 nt, Homo sapiens
  misc_RNA (1)...(19): siRNA sense strand
ggacggcaccaucagcaaa

SEQ ID NO: 1083258 - RNA, 19 nt, Homo sapiens
  misc_RNA (1)...(19): siRNA sense strand
cgagucaccuuaucucucu

SEQ ID NO: 1083259 - RNA, 19 nt, Homo sapiens
  misc_RNA (1)...(19): siRNA sense strand
gaaaugaagaaagaagaga

SEQ ID NO: 1083260 - RNA, 19 nt, Homo sapiens
  misc_RNA (1)...(19): siRNA sense strand
gugaagaggccacaucuca

SEQ ID NO: 1083261 - RNA, 19 nt, Homo sapiens
  misc_RNA (1)...(19): siRNA sense strand
gacgucaacuccgaugauu

SEQ ID NO: 1083262 - RNA, 19 nt, Homo sapiens
  misc_RNA (1)...(19): siRNA sense strand
gcaaagcacauggcucaga

SEQ ID NO: 1083263 - RNA, 19 nt, Homo sapiens
  misc_RNA (1)...(19): siRNA sense strand
uccaggagcucacggaaga

SEQ ID NO: 1083264 - RNA, 19 nt, Homo sapiens
  misc_RNA (1)...(19): siRNA sense strand
cuaccaaccuggaagagau

SEQ ID NO: 1083265 - RNA, 19 nt, Homo sapiens
  misc_RNA (1)...(19): siRNA sense strand
gagaaggacggcaccauca

SEQ ID NO: 1083266 - RNA, 19 nt, Homo sapiens
  misc_RNA (1)...(19): siRNA sense strand
gcaaacuccagaccgauau

SEQ ID NO: 1083267 - RNA, 19 nt, Homo sapiens
  misc_RNA (1)...(19): siRNA sense strand
acaaagcucuuagcaagca

SEQ ID NO: 1083268 - RNA, 19 nt, Homo sapiens
  misc_RNA (1)...(19): siRNA sense strand
ccaagaauugcaagaaaug

SEQ ID NO: 1083269 - RNA, 19 nt, Homo sapiens
  misc_RNA (1)...(19): siRNA sense strand
agagagauuuggaggugaa

SEQ ID NO: 1083270 - RNA, 19 nt, Homo sapiens
  misc_RNA (1)...(19): siRNA sense strand
gaagacuaccaaccuggaa

SEQ ID NO: 1083271 - RNA, 19 nt, Homo sapiens
  misc_RNA (1)...(19): siRNA sense strand
gagcuggagaagaaacuaa

SEQ ID NO: 1083272 - RNA, 19 nt, Homo sapiens
  misc_RNA (1)...(19): siRNA sense strand
uuguggagcuggagaagaa

SEQ ID NO: 1083273 - RNA, 19 nt, Homo sapiens
  misc_RNA (1)...(19): siRNA sense strand
cagcaagcuccaagaauug

SEQ ID NO: 1083274 - RNA, 19 nt, Homo sapiens
  misc_RNA (1)...(19): siRNA sense strand
ugacagacaccuucagagu

SEQ ID NO: 1083275 - RNA, 19 nt, Homo sapiens
  misc_RNA (1)...(19): siRNA sense strand
ggaggaggccaucgucauc

SEQ ID NO: 1083276 - RNA, 19 nt, Homo sapiens
  misc_RNA (1)...(19): siRNA sense strand
cuccaagaauugcaagaaa

SEQ ID NO: 1083277 - RNA, 19 nt, Homo sapiens
  misc_RNA (1)...(19): siRNA sense strand
gcaagaaaugaagaaagaa

SEQ ID NO: 1083278 - RNA, 19 nt, Homo sapiens
  misc_RNA (1)...(19): siRNA sense strand
gcucuuagcaagcaaagca

SEQ ID NO: 1083279 - RNA, 19 nt, Homo sapiens
  misc_RNA (1)...(19): siRNA sense strand
ugaagaaagaagagaaaga

SEQ ID NO: 1083280 - RNA, 19 nt, Homo sapiens
  misc_RNA (1)...(19): siRNA sense strand
agaccgauaugaagacuac

SEQ ID NO: 1083281 - RNA, 19 nt, Homo sapiens
  misc_RNA (1)...(19): siRNA sense strand
uccaagaauugcaagaaau

SEQ ID NO: 1083282 - RNA, 19 nt, Homo sapiens
  misc_RNA (1)...(19): siRNA sense strand
aagaagagaaagaggauug

SEQ ID NO: 1083283 - RNA, 19 nt, Homo sapiens
  misc_RNA (1)...(19): siRNA sense strand
caagaaaugaagaaagaag

SEQ ID NO: 1083284 - RNA, 19 nt, Homo sapiens
  misc_RNA (1)...(19): siRNA sense strand
guucugaaaccaccggaaa

SEQ ID NO: 1083285 - RNA, 19 nt, Homo sapiens
  misc_RNA (1)...(19): siRNA sense strand
gaauugcaagaaaugaaga

SEQ ID NO: 1083286 - RNA, 19 nt, Homo sapiens
  misc_RNA (1)...(19): siRNA sense strand
gacguggaccugaugagaa

SEQ ID NO: 1083287 - RNA, 19 nt, Homo sapiens
  misc_RNA (1)...(19): siRNA sense strand
caggaaggaccggcagaua

SEQ ID NO: 1083288 - RNA, 19 nt, Homo sapiens
  misc_RNA (1)...(19): siRNA sense strand
augacgagauuauugaguu

SEQ ID NO: 1083289 - RNA, 19 nt, Homo sapiens
  misc_RNA (1)...(19): siRNA sense strand
aaaaggcuguucuggauga

SEQ ID NO: 1083290 - RNA, 19 nt, Homo sapiens
  misc_RNA (1)...(19): siRNA sense strand
caagaauugcaagaaauga

SEQ ID NO: 1083291 - RNA, 19 nt, Homo sapiens
  misc_RNA (1)...(19): siRNA sense strand
agaagaaacuaagugugau

SEQ ID NO: 1083292 - RNA, 19 nt, Homo sapiens
  misc_RNA (1)...(19): siRNA sense strand
ccgcagagccagucagauc

SEQ ID NO: 1083293 - RNA, 19 nt, Homo sapiens
  misc_RNA (1)...(19): siRNA sense strand
gcuccaagaauugcaagaa

SEQ ID NO: 1083294 - RNA, 19 nt, Homo sapiens
  misc_RNA (1)...(19): siRNA sense strand
gaggauugcccggaaguuc

SEQ ID NO: 1083295 - RNA, 19 nt, Homo sapiens
  misc_RNA (1)...(19): siRNA sense strand
ugaaaccaccggaaagaag

SEQ ID NO: 1083296 - RNA, 19 nt, Homo sapiens
  misc_RNA (1)...(19): siRNA sense strand
uguaugacgagauuauuga

SEQ ID NO: 1083297 - RNA, 19 nt, Homo sapiens
  misc_RNA (1)...(19): siRNA sense strand
ucuccaagacacaggguua

SEQ ID NO: 1083298 - RNA, 19 nt, Homo sapiens
  misc_RNA (1)...(19): siRNA sense strand
ccaagacacaggguuaugu

SEQ ID NO: 1083299 - RNA, 19 nt, Homo sapiens
  misc_RNA (1)...(19): siRNA sense strand
gguguacaagcacaagaaa

SEQ ID NO: 1083300 - RNA, 19 nt, Homo sapiens
  misc_RNA (1)...(19): siRNA sense strand
aguggaagguguacaagca

SEQ ID NO: 1083301 - RNA, 19 nt, Homo sapiens
  misc_RNA (1)...(19): siRNA sense strand
aggccgaccuggagaagga

SEQ ID NO: 1083302 - RNA, 19 nt, Homo sapiens
  misc_RNA (1)...(19): siRNA sense strand
cgacguggaccugaugaga

SEQ ID NO: 1083303 - RNA, 19 nt, Homo sapiens
  misc_RNA (1)...(19): siRNA sense strand
cgagauuauugaguuaaag

SEQ ID NO: 1083304 - RNA, 19 nt, Homo sapiens
  misc_RNA (1)...(19): siRNA sense strand
cgaugauuccgacgauauu

SEQ ID NO: 1083305 - RNA, 19 nt, Homo sapiens
  misc_RNA (1)...(19): siRNA sense strand
gacgagauuauugaguuaa

SEQ ID NO: 1083306 - RNA, 19 nt, Homo sapiens
  misc_RNA (1)...(19): siRNA sense strand
ugaagcagaggauccugaa

SEQ ID NO: 1083307 - RNA, 19 nt, Homo sapiens
  misc_RNA (1)...(19): siRNA sense strand
gaugauuccgacgauauug

SEQ ID NO: 1083308 - RNA, 19 nt, Homo sapiens
  misc_RNA (1)...(19): siRNA sense strand
gagcgacguggaccugaug

SEQ ID NO: 1083309 - RNA, 19 nt, Homo sapiens
  misc_RNA (1)...(19): siRNA sense strand
ggaagguguacaagcacaa

SEQ ID NO: 1083310 - RNA, 19 nt, Homo sapiens
  misc_RNA (1)...(19): siRNA sense strand
gagagaggagauucagaca

SEQ ID NO: 1083311 - RNA, 19 nt, Homo sapiens
  misc_RNA (1)...(19): siRNA sense strand
ccaaaaggcagaagaagau

SEQ ID NO: 1083312 - RNA, 19 nt, Homo sapiens
  misc_RNA (1)...(19): siRNA sense strand
gaggaggccaucgucauca

SEQ ID NO: 1083313 - RNA, 19 nt, Homo sapiens
  misc_RNA (1)...(19): siRNA sense strand
cgacgauauugucauugca

SEQ ID NO: 1083314 - RNA, 19 nt, Homo sapiens
  misc_RNA (1)...(19): siRNA sense strand
ccgaugauuccgacgauau

SEQ ID NO: 1083315 - RNA, 19 nt, Homo sapiens
  misc_RNA (1)...(19): siRNA sense strand
ccauggagacauacuacga

SEQ ID NO: 1083316 - RNA, 19 nt, Homo sapiens
  misc_RNA (1)...(19): siRNA sense strand
gauauguaugacgagauua

SEQ ID NO: 1083317 - RNA, 19 nt, Homo sapiens
  misc_RNA (1)...(19): siRNA sense strand
gcgaggaggagaggagaga

SEQ ID NO: 1083318 - RNA, 19 nt, Homo sapiens
  misc_RNA (1)...(19): siRNA sense strand
gagauuuggaggugaagca

SEQ ID NO: 1083319 - RNA, 19 nt, Homo sapiens
  misc_RNA (1)...(19): siRNA sense strand
ggagcuggagaagaaacua

SEQ ID NO: 1083320 - RNA, 19 nt, Homo sapiens
  misc_RNA (1)...(19): siRNA sense strand
ccgacgauauugucauugc

SEQ ID NO: 1083321 - RNA, 19 nt, Homo sapiens
  misc_RNA (1)...(19): siRNA sense strand
uuccgacgauauugucauu

SEQ ID NO: 1083322 - RNA, 19 nt, Homo sapiens
  misc_RNA (1)...(19): siRNA sense strand
gcaggaaggaccggcagau

SEQ ID NO: 1083323 - RNA, 19 nt, Homo sapiens
  misc_RNA (1)...(19): siRNA sense strand
ugaggcggcuguggugcuu

SEQ ID NO: 1083324 - RNA, 19 nt, Homo sapiens
  misc_RNA (1)...(19): siRNA sense strand
gagauucagacacuuacca

SEQ ID NO: 1083325 - RNA, 19 nt, Homo sapiens
  misc_RNA (1)...(19): siRNA sense strand
gagugaagaggccacaucu

SEQ ID NO: 1083326 - RNA, 19 nt, Homo sapiens
  misc_RNA (1)...(19): siRNA sense strand
caaagcucuuagcaagcaa

SEQ ID NO: 1083327 - RNA, 19 nt, Homo sapiens
  misc_RNA (1)...(19): siRNA sense strand
cgaaggccgaccuggagaa

SEQ ID NO: 1083328 - RNA, 19 nt, Homo sapiens
  misc_RNA (1)...(19): siRNA sense strand
gcauuguggagcuggagaa

SEQ ID NO: 1083329 - RNA, 19 nt, Homo sapiens
  misc_RNA (1)...(19): siRNA sense strand
ggaugcagcuggcuuguag

SEQ ID NO: 1083330 - RNA, 19 nt, Homo sapiens
  misc_RNA (1)...(19): siRNA sense strand
gugauccgcgucugccuua

SEQ ID NO: 1083331 - RNA, 19 nt, Homo sapiens
  misc_RNA (1)...(19): siRNA sense strand
acgcacgccugccaucaaa

SEQ ID NO: 1083332 - RNA, 19 nt, Homo sapiens
  misc_RNA (1)...(19): siRNA sense strand
gcagagagaguggcucaca

SEQ ID NO: 1083333 - RNA, 19 nt, Homo sapiens
  misc_RNA (1)...(19): siRNA sense strand
ggaacgaggaggucuuuug

SEQ ID NO: 1083334 - RNA, 19 nt, Homo sapiens
  misc_RNA (1)...(19): siRNA sense strand
gagggcagcuugcaacuug

SEQ ID NO: 1083335 - RNA, 19 nt, Homo sapiens
  misc_RNA (1)...(19): siRNA sense strand
gcgagaagcccaacaagug

SEQ ID NO: 1083336 - RNA, 19 nt, Homo sapiens
  misc_RNA (1)...(19): siRNA sense strand
gcacccaccuagacacgaa

SEQ ID NO: 1083337 - RNA, 19 nt, Homo sapiens
  misc_RNA (1)...(19): siRNA sense strand
gcuacaagcugcucaucca

SEQ ID NO: 1083338 - RNA, 19 nt, Homo sapiens
  misc_RNA (1)...(19): siRNA sense strand
ggucaccuguguaaaugga

SEQ ID NO: 1083339 - RNA, 19 nt, Homo sapiens
  misc_RNA (1)...(19): siRNA sense strand
caaggcccauucagccaaa

SEQ ID NO: 1083340 - RNA, 19 nt, Homo sapiens
  misc_RNA (1)...(19): siRNA sense strand
gaagcggugcugugucuug

SEQ ID NO: 1083341 - RNA, 19 nt, Homo sapiens
  misc_RNA (1)...(19): siRNA sense strand
gagcagcaggugcguaaga

SEQ ID NO: 1083342 - RNA, 19 nt, Homo sapiens
  misc_RNA (1)...(19): siRNA sense strand
cgaggacuguggcuucuuc

SEQ ID NO: 1083343 - RNA, 19 nt, Homo sapiens
  misc_RNA (1)...(19): siRNA sense strand
gcgaggacuucaccugcuu

SEQ ID NO: 1083344 - RNA, 19 nt, Homo sapiens
  misc_RNA (1)...(19): siRNA sense strand
ggccuccucucaccaauag

SEQ ID NO: 1083345 - RNA, 19 nt, Homo sapiens
  misc_RNA (1)...(19): siRNA sense strand
gcuccaagcgcuacacaga

SEQ ID NO: 1083346 - RNA, 19 nt, Homo sapiens
  misc_RNA (1)...(19): siRNA sense strand
gcacgucaaggcccauuca

SEQ ID NO: 1083347 - RNA, 19 nt, Homo sapiens
  misc_RNA (1)...(19): siRNA sense strand
cgacgucaccuccaucauc

SEQ ID NO: 1083348 - RNA, 19 nt, Homo sapiens
  misc_RNA (1)...(19): siRNA sense strand
aagagcagcaggugcguaa

SEQ ID NO: 1083349 - RNA, 19 nt, Homo sapiens
  misc_RNA (1)...(19): siRNA sense strand
ccacagcagccaucugaag

SEQ ID NO: 1083350 - RNA, 19 nt, Homo sapiens
  misc_RNA (1)...(19): siRNA sense strand
ucucuggucaccuguguaa

SEQ ID NO: 1083351 - RNA, 19 nt, Homo sapiens
  misc_RNA (1)...(19): siRNA sense strand
cugaagcggugcugugucu

SEQ ID NO: 1083352 - RNA, 19 nt, Homo sapiens
  misc_RNA (1)...(19): siRNA sense strand
cacagcagccaucugaaga

SEQ ID NO: 1083353 - RNA, 19 nt, Homo sapiens
  misc_RNA (1)...(19): siRNA sense strand
acaagcugcucauccacau

SEQ ID NO: 1083354 - RNA, 19 nt, Homo sapiens
  misc_RNA (1)...(19): siRNA sense strand
ugccacagcagccaucuga

SEQ ID NO: 1083355 - RNA, 19 nt, Homo sapiens
  misc_RNA (1)...(19): siRNA sense strand
gggcagcuugcaacuugaa

SEQ ID NO: 1083356 - RNA, 19 nt, Homo sapiens
  misc_RNA (1)...(19): siRNA sense strand
cuggucaccuguguaaaug

SEQ ID NO: 1083357 - RNA, 19 nt, Homo sapiens
  misc_RNA (1)...(19): siRNA sense strand
gccguacgccugucagauc

SEQ ID NO: 1083358 - RNA, 19 nt, Homo sapiens
  misc_RNA (1)...(19): siRNA sense strand
ucuggucaccuguguaaau

SEQ ID NO: 1083359 - RNA, 19 nt, Homo sapiens
  misc_RNA (1)...(19): siRNA sense strand
gaagcucgaugaagauuua

SEQ ID NO: 1083360 - RNA, 19 nt, Homo sapiens
  misc_RNA (1)...(19): siRNA sense strand
gcagaaauaugcagaagaa

SEQ ID NO: 1083361 - RNA, 19 nt, Homo sapiens
  misc_RNA (1)...(19): siRNA sense strand
gaaggacacuuaacuuugu

SEQ ID NO: 1083362 - RNA, 19 nt, Homo sapiens
  misc_RNA (1)...(19): siRNA sense strand
ggaaacacaugucacagaa

SEQ ID NO: 1083363 - RNA, 19 nt, Homo sapiens
  misc_RNA (1)...(19): siRNA sense strand
cagaaaggcugaaacacua

SEQ ID NO: 1083364 - RNA, 19 nt, Homo sapiens
  misc_RNA (1)...(19): siRNA sense strand
ggaauuauaugacuggaau

SEQ ID NO: 1083365 - RNA, 19 nt, Homo sapiens
  misc_RNA (1)...(19): siRNA sense strand
gcaagacgcacaggaauua

SEQ ID NO: 1083366 - RNA, 19 nt, Homo sapiens
  misc_RNA (1)...(19): siRNA sense strand
caacauagacuacacgauu

SEQ ID NO: 1083367 - RNA, 19 nt, Homo sapiens
  misc_RNA (1)...(19): siRNA sense strand
gaagcucuuuggugaauaa

SEQ ID NO: 1083368 - RNA, 19 nt, Homo sapiens
  misc_RNA (1)...(19): siRNA sense strand
gcaagggcauucacauuga

SEQ ID NO: 1083369 - RNA, 19 nt, Homo sapiens
  misc_RNA (1)...(19): siRNA sense strand
ccaacucccucgaggauua

SEQ ID NO: 1083370 - RNA, 19 nt, Homo sapiens
  misc_RNA (1)...(19): siRNA sense strand
ggaauuaggcacagcauuu

SEQ ID NO: 1083371 - RNA, 19 nt, Homo sapiens
  misc_RNA (1)...(19): siRNA sense strand
cugaagacaucaagaaaua

SEQ ID NO: 1083372 - RNA, 19 nt, Homo sapiens
  misc_RNA (1)...(19): siRNA sense strand
aauaggagcuguuuacuug

SEQ ID NO: 1083373 - RNA, 19 nt, Homo sapiens
  misc_RNA (1)...(19): siRNA sense strand
agacgaagcucgaugaaga

SEQ ID NO: 1083374 - RNA, 19 nt, Homo sapiens
  misc_RNA (1)...(19): siRNA sense strand
gaaaugaggugggaaagag

SEQ ID NO: 1083375 - RNA, 19 nt, Homo sapiens
  misc_RNA (1)...(19): siRNA sense strand
ggccaacuguuauagaaua

SEQ ID NO: 1083376 - RNA, 19 nt, Homo sapiens
  misc_RNA (1)...(19): siRNA sense strand
ccaaugccuuguccuaaua

SEQ ID NO: 1083377 - RNA, 19 nt, Homo sapiens
  misc_RNA (1)...(19): siRNA sense strand
gaaguacagacaagaguua

SEQ ID NO: 1083378 - RNA, 19 nt, Homo sapiens
  misc_RNA (1)...(19): siRNA sense strand
caacaaugcuggcagacuu

SEQ ID NO: 1083379 - RNA, 19 nt, Homo sapiens
  misc_RNA (1)...(19): siRNA sense strand
gaaaggaagugcuguccau

SEQ ID NO: 1083380 - RNA, 19 nt, Homo sapiens
  misc_RNA (1)...(19): siRNA sense strand
ggacugccauuguucagaa

SEQ ID NO: 1083381 - RNA, 19 nt, Homo sapiens
  misc_RNA (1)...(19): siRNA sense strand
gcaaauagucccaaaguca

SEQ ID NO: 1083382 - RNA, 19 nt, Homo sapiens
  misc_RNA (1)...(19): siRNA sense strand
ucagacaucucccuccaua

SEQ ID NO: 1083383 - RNA, 19 nt, Homo sapiens
  misc_RNA (1)...(19): siRNA sense strand
ggaggaagccaagcaguua

SEQ ID NO: 1083384 - RNA, 19 nt, Homo sapiens
  misc_RNA (1)...(19): siRNA sense strand
guacagaucugauuaugac

SEQ ID NO: 1083385 - RNA, 19 nt, Homo sapiens
  misc_RNA (1)...(19): siRNA sense strand
gaacggaaguacagacaag

SEQ ID NO: 1083386 - RNA, 19 nt, Homo sapiens
  misc_RNA (1)...(19): siRNA sense strand
gaauuaggcacagcauuua

SEQ ID NO: 1083387 - RNA, 19 nt, Homo sapiens
  misc_RNA (1)...(19): siRNA sense strand
gcagaagaauacaaugaga

SEQ ID NO: 1083388 - RNA, 19 nt, Homo sapiens
  misc_RNA (1)...(19): siRNA sense strand
gaccaugccugacaagaau

SEQ ID NO: 1083389 - RNA, 19 nt, Homo sapiens
  misc_RNA (1)...(19): siRNA sense strand
gggauuaacaccuugauaa

SEQ ID NO: 1083390 - RNA, 19 nt, Homo sapiens
  misc_RNA (1)...(19): siRNA sense strand
gaauucggcagcccaaaua

SEQ ID NO: 1083391 - RNA, 19 nt, Homo sapiens
  misc_RNA (1)...(19): siRNA sense strand
ugaaagggcuugaacucuu

SEQ ID NO: 1083392 - RNA, 19 nt, Homo sapiens
  misc_RNA (1)...(19): siRNA sense strand
gaguaggcuucgugacuua

SEQ ID NO: 1083393 - RNA, 19 nt, Homo sapiens
  misc_RNA (1)...(19): siRNA sense strand
gcaaaggcaugauuguuac

SEQ ID NO: 1083394 - RNA, 19 nt, Homo sapiens
  misc_RNA (1)...(19): siRNA sense strand
aaacacaugucacagaaug

SEQ ID NO: 1083395 - RNA, 19 nt, Homo sapiens
  misc_RNA (1)...(19): siRNA sense strand
caaacaaacugacaaacag

SEQ ID NO: 1083396 - RNA, 19 nt, Homo sapiens
  misc_RNA (1)...(19): siRNA sense strand
gauaggauauacuuuccaa

SEQ ID NO: 1083397 - RNA, 19 nt, Homo sapiens
  misc_RNA (1)...(19): siRNA sense strand
gcaaagacaagaacuauac

SEQ ID NO: 1083398 - RNA, 19 nt, Homo sapiens
  misc_RNA (1)...(19): siRNA sense strand
gauacgcccugcacaguug

SEQ ID NO: 1083399 - RNA, 19 nt, Homo sapiens
  misc_RNA (1)...(19): siRNA sense strand
gacaagaacuauaccucaa

SEQ ID NO: 1083400 - RNA, 19 nt, Homo sapiens
  misc_RNA (1)...(19): siRNA sense strand
ggaaggaguuacgguuuau

SEQ ID NO: 1083401 - RNA, 19 nt, Homo sapiens
  misc_RNA (1)...(19): siRNA sense strand
gcaaugaugcuaccuguuc

SEQ ID NO: 1083402 - RNA, 19 nt, Homo sapiens
  misc_RNA (1)...(19): siRNA sense strand
ggauauacuuuccaagauc

SEQ ID NO: 1083403 - RNA, 19 nt, Homo sapiens
  misc_RNA (1)...(19): siRNA sense strand
ggaaagagagcaucaagag

SEQ ID NO: 1083404 - RNA, 19 nt, Homo sapiens
  misc_RNA (1)...(19): siRNA sense strand
uauaagagaucuggaagga

SEQ ID NO: 1083405 - RNA, 19 nt, Homo sapiens
  misc_RNA (1)...(19): siRNA sense strand
gcucuuuggugaauaauag

SEQ ID NO: 1083406 - RNA, 19 nt, Homo sapiens
  misc_RNA (1)...(19): siRNA sense strand
ggauuaacaccuugauaaa

SEQ ID NO: 1083407 - RNA, 19 nt, Homo sapiens
  misc_RNA (1)...(19): siRNA sense strand
uggaaggaguuacgguuua

SEQ ID NO: 1083408 - RNA, 19 nt, Homo sapiens
  misc_RNA (1)...(19): siRNA sense strand
gaagaaggaggauuagcaa

SEQ ID NO: 1083409 - RNA, 19 nt, Homo sapiens
  misc_RNA (1)...(19): siRNA sense strand
ugaagaagcaauuggagua

SEQ ID NO: 1083410 - RNA, 19 nt, Homo sapiens
  misc_RNA (1)...(19): siRNA sense strand
gaucgacaacuuauugaaa

SEQ ID NO: 1083411 - RNA, 19 nt, Homo sapiens
  misc_RNA (1)...(19): siRNA sense strand
gacgcuugcucuuuaauga

SEQ ID NO: 1083412 - RNA, 19 nt, Homo sapiens
  misc_RNA (1)...(19): siRNA sense strand
gaguauaucuuugaaggau

SEQ ID NO: 1083413 - RNA, 19 nt, Homo sapiens
  misc_RNA (1)...(19): siRNA sense strand
ggaaaugggagcagcaaug

SEQ ID NO: 1083414 - RNA, 19 nt, Homo sapiens
  misc_RNA (1)...(19): siRNA sense strand
gggaaaggaccaaguauuc

SEQ ID NO: 1083415 - RNA, 19 nt, Homo sapiens
  misc_RNA (1)...(19): siRNA sense strand
guacaagacucugcagaca

SEQ ID NO: 1083416 - RNA, 19 nt, Homo sapiens
  misc_RNA (1)...(19): siRNA sense strand
gcagcgcuguacacugaua

SEQ ID NO: 1083417 - RNA, 19 nt, Homo sapiens
  misc_RNA (1)...(19): siRNA sense strand
gaagaagcaauuggaguaa

SEQ ID NO: 1083418 - RNA, 19 nt, Homo sapiens
  misc_RNA (1)...(19): siRNA sense strand
ggaggaagaagaagaacuu

SEQ ID NO: 1083419 - RNA, 19 nt, Homo sapiens
  misc_RNA (1)...(19): siRNA sense strand
caacuacaagagccaaaua

SEQ ID NO: 1083420 - RNA, 19 nt, Homo sapiens
  misc_RNA (1)...(19): siRNA sense strand
gaacuauaccucaaucaag

SEQ ID NO: 1083421 - RNA, 19 nt, Homo sapiens
  misc_RNA (1)...(19): siRNA sense strand
guggaagaguuaugugaaa

SEQ ID NO: 1083422 - RNA, 19 nt, Homo sapiens
  misc_RNA (1)...(19): siRNA sense strand
gaaauaugcagaagaaugc

SEQ ID NO: 1083423 - RNA, 19 nt, Homo sapiens
  misc_RNA (1)...(19): siRNA sense strand
gaucacgaguauaucuuug

SEQ ID NO: 1083424 - RNA, 19 nt, Homo sapiens
  misc_RNA (1)...(19): siRNA sense strand
gagagaagguccccagaaa

SEQ ID NO: 1083425 - RNA, 19 nt, Homo sapiens
  misc_RNA (1)...(19): siRNA sense strand
gaaagagagcaucaagaga

SEQ ID NO: 1083426 - RNA, 19 nt, Homo sapiens
  misc_RNA (1)...(19): siRNA sense strand
gauaaggauuuggaauaug

SEQ ID NO: 1083427 - RNA, 19 nt, Homo sapiens
  misc_RNA (1)...(19): siRNA sense strand
gcgaagcucuuuggugaau

SEQ ID NO: 1083428 - RNA, 19 nt, Homo sapiens
  misc_RNA (1)...(19): siRNA sense strand
ugagaacugugggauuuaa

SEQ ID NO: 1083429 - RNA, 19 nt, Homo sapiens
  misc_RNA (1)...(19): siRNA sense strand
ggaagaaggaggauuagca

SEQ ID NO: 1083430 - RNA, 19 nt, Homo sapiens
  misc_RNA (1)...(19): siRNA sense strand
gugaugcuguuguugaauu

SEQ ID NO: 1083431 - RNA, 19 nt, Homo sapiens
  misc_RNA (1)...(19): siRNA sense strand
ggaauucauuaucuaacug

SEQ ID NO: 1083432 - RNA, 19 nt, Homo sapiens
  misc_RNA (1)...(19): siRNA sense strand
gagcuggaguggcagaaau

SEQ ID NO: 1083433 - RNA, 19 nt, Homo sapiens
  misc_RNA (1)...(19): siRNA sense strand
gcaccgagaucacagucau

SEQ ID NO: 1083434 - RNA, 19 nt, Homo sapiens
  misc_RNA (1)...(19): siRNA sense strand
uugcagcgcuguacacuga

SEQ ID NO: 1083435 - RNA, 19 nt, Homo sapiens
  misc_RNA (1)...(19): siRNA sense strand
ugaacuggauccauuuaug

SEQ ID NO: 1083436 - RNA, 19 nt, Homo sapiens
  misc_RNA (1)...(19): siRNA sense strand
gccaggaauucauuaucua

SEQ ID NO: 1083437 - RNA, 19 nt, Homo sapiens
  misc_RNA (1)...(19): siRNA sense strand
ucauccaagucaucauuua

SEQ ID NO: 1083438 - RNA, 19 nt, Homo sapiens
  misc_RNA (1)...(19): siRNA sense strand
cgaugaagauuuagagagu

SEQ ID NO: 1083439 - RNA, 19 nt, Homo sapiens
  misc_RNA (1)...(19): siRNA sense strand
caaagacgaagcucgauga

SEQ ID NO: 1083440 - RNA, 19 nt, Homo sapiens
  misc_RNA (1)...(19): siRNA sense strand
gaaugaggaggaagaagaa

SEQ ID NO: 1083441 - RNA, 19 nt, Homo sapiens
  misc_RNA (1)...(19): siRNA sense strand
caagaacuauaccucaauc

SEQ ID NO: 1083442 - RNA, 19 nt, Homo sapiens
  misc_RNA (1)...(19): siRNA sense strand
caagacagccgguacagau

SEQ ID NO: 1083443 - RNA, 19 nt, Homo sapiens
  misc_RNA (1)...(19): siRNA sense strand
uacaagagccaaauacuga

SEQ ID NO: 1083444 - RNA, 19 nt, Homo sapiens
  misc_RNA (1)...(19): siRNA sense strand
uuuggacgcuugcucuuua

SEQ ID NO: 1083445 - RNA, 19 nt, Homo sapiens
  misc_RNA (1)...(19): siRNA sense strand
ugcaaaggcaugauuguua

SEQ ID NO: 1083446 - RNA, 19 nt, Homo sapiens
  misc_RNA (1)...(19): siRNA sense strand
acagaguacuuauucauuc

SEQ ID NO: 1083447 - RNA, 19 nt, Homo sapiens
  misc_RNA (1)...(19): siRNA sense strand
aaagaaacuugaacuggau

SEQ ID NO: 1083448 - RNA, 19 nt, Homo sapiens
  misc_RNA (1)...(19): siRNA sense strand
ccaagaucguugucuguug

SEQ ID NO: 1083449 - RNA, 19 nt, Homo sapiens
  misc_RNA (1)...(19): siRNA sense strand
gcuaauaacagcaguaguc

SEQ ID NO: 1083450 - RNA, 19 nt, Homo sapiens
  misc_RNA (1)...(19): siRNA sense strand
ucacgggccugaccuuugu

SEQ ID NO: 1083451 - RNA, 19 nt, Homo sapiens
  misc_RNA (1)...(19): siRNA sense strand
uuagagaguuccagugaau

SEQ ID NO: 1083452 - RNA, 19 nt, Homo sapiens
  misc_RNA (1)...(19): siRNA sense strand
cuacacgauucauuucauu

SEQ ID NO: 1083453 - RNA, 19 nt, Homo sapiens
  misc_RNA (1)...(19): siRNA sense strand
gcuguacacugauaaggau

SEQ ID NO: 1083454 - RNA, 19 nt, Homo sapiens
  misc_RNA (1)...(19): siRNA sense strand
gcauucacauugagaacug

SEQ ID NO: 1083455 - RNA, 19 nt, Homo sapiens
  misc_RNA (1)...(19): siRNA sense strand
ugaccagcguccauuugua

SEQ ID NO: 1083456 - RNA, 19 nt, Homo sapiens
  misc_RNA (1)...(19): siRNA sense strand
acaaugaacgguuggaauu

SEQ ID NO: 1083457 - RNA, 19 nt, Homo sapiens
  misc_RNA (1)...(19): siRNA sense strand
acaaugagacgagaaguaa

SEQ ID NO: 1083458 - RNA, 19 nt, Homo sapiens
  misc_RNA (1)...(19): siRNA sense strand
caaauagucccaaagucaa

SEQ ID NO: 1083459 - RNA, 19 nt, Homo sapiens
  misc_RNA (1)...(19): siRNA sense strand
gaacaaagcuuacuccaau

SEQ ID NO: 1083460 - RNA, 19 nt, Homo sapiens
  misc_RNA (1)...(19): siRNA sense strand
caucgcagcucaauaaaua

SEQ ID NO: 1083461 - RNA, 19 nt, Homo sapiens
  misc_RNA (1)...(19): siRNA sense strand
ugaaagagcugggaagaua

SEQ ID NO: 1083462 - RNA, 19 nt, Homo sapiens
  misc_RNA (1)...(19): siRNA sense strand
gcaaauggaucccagaguu

SEQ ID NO: 1083463 - RNA, 19 nt, Homo sapiens
  misc_RNA (1)...(19): siRNA sense strand
gaagaaaguuacagaagga

SEQ ID NO: 1083464 - RNA, 19 nt, Homo sapiens
  misc_RNA (1)...(19): siRNA sense strand
ggaaaguacucuuggugua

SEQ ID NO: 1083465 - RNA, 19 nt, Homo sapiens
  misc_RNA (1)...(19): siRNA sense strand
ugaguuaguuccuguauuu

SEQ ID NO: 1083466 - RNA, 19 nt, Homo sapiens
  misc_RNA (1)...(19): siRNA sense strand
ucacagagcugcugcuaug

SEQ ID NO: 1083467 - RNA, 19 nt, Homo sapiens
  misc_RNA (1)...(19): siRNA sense strand
gaacggguaaagaaacuua

SEQ ID NO: 1083468 - RNA, 19 nt, Homo sapiens
  misc_RNA (1)...(19): siRNA sense strand
ggaaacaauuaaagcagaa

SEQ ID NO: 1083469 - RNA, 19 nt, Homo sapiens
  misc_RNA (1)...(19): siRNA sense strand
gcagagaguuaaaguucuu

SEQ ID NO: 1083470 - RNA, 19 nt, Homo sapiens
  misc_RNA (1)...(19): siRNA sense strand
caaacucuguacuacguua

SEQ ID NO: 1083471 - RNA, 19 nt, Homo sapiens
  misc_RNA (1)...(19): siRNA sense strand
caauaucacuugcuaaugg

SEQ ID NO: 1083472 - RNA, 19 nt, Homo sapiens
  misc_RNA (1)...(19): siRNA sense strand
guuagaagaugcaaaggaa

SEQ ID NO: 1083473 - RNA, 19 nt, Homo sapiens
  misc_RNA (1)...(19): siRNA sense strand
gaaaccaugcagagaguua

SEQ ID NO: 1083474 - RNA, 19 nt, Homo sapiens
  misc_RNA (1)...(19): siRNA sense strand
gaucucaacuacagaggaa

SEQ ID NO: 1083475 - RNA, 19 nt, Homo sapiens
  misc_RNA (1)...(19): siRNA sense strand
ccaacaauaucacuugcua

SEQ ID NO: 1083476 - RNA, 19 nt, Homo sapiens
  misc_RNA (1)...(19): siRNA sense strand
cuucaaggccuuauucuua

SEQ ID NO: 1083477 - RNA, 19 nt, Homo sapiens
  misc_RNA (1)...(19): siRNA sense strand
gaacaaauggaugcaguaa

SEQ ID NO: 1083478 - RNA, 19 nt, Homo sapiens
  misc_RNA (1)...(19): siRNA sense strand
gggcaccaccagaauauua

SEQ ID NO: 1083479 - RNA, 19 nt, Homo sapiens
  misc_RNA (1)...(19): siRNA sense strand
caaauggaucccagaguua

SEQ ID NO: 1083480 - RNA, 19 nt, Homo sapiens
  misc_RNA (1)...(19): siRNA sense strand
guaugaagaugaguuaguu

SEQ ID NO: 1083481 - RNA, 19 nt, Homo sapiens
  misc_RNA (1)...(19): siRNA sense strand
acaaauggaugcaguaaag

SEQ ID NO: 1083482 - RNA, 19 nt, Homo sapiens
  misc_RNA (1)...(19): siRNA sense strand
gcaaggaggaaacuaauuc

SEQ ID NO: 1083483 - RNA, 19 nt, Homo sapiens
  misc_RNA (1)...(19): siRNA sense strand
ggagacagcaucuuaaugg

SEQ ID NO: 1083484 - RNA, 19 nt, Homo sapiens
  misc_RNA (1)...(19): siRNA sense strand
ggacagcggcuauguaucu

SEQ ID NO: 1083485 - RNA, 19 nt, Homo sapiens
  misc_RNA (1)...(19): siRNA sense strand
gagcugggaagauauauga

SEQ ID NO: 1083486 - RNA, 19 nt, Homo sapiens
  misc_RNA (1)...(19): siRNA sense strand
aaaguacucuugguguaua

SEQ ID NO: 1083487 - RNA, 19 nt, Homo sapiens
  misc_RNA (1)...(19): siRNA sense strand
guguaagccuggauaauug

SEQ ID NO: 1083488 - RNA, 19 nt, Homo sapiens
  misc_RNA (1)...(19): siRNA sense strand
ccuagaggcugugaaguuu

SEQ ID NO: 1083489 - RNA, 19 nt, Homo sapiens
  misc_RNA (1)...(19): siRNA sense strand
cgacuuaugauggaauuua

SEQ ID NO: 1083490 - RNA, 19 nt, Homo sapiens
  misc_RNA (1)...(19): siRNA sense strand
gacaaacucuguacuacgu

SEQ ID NO: 1083491 - RNA, 19 nt, Homo sapiens
  misc_RNA (1)...(19): siRNA sense strand
gaaaguacucuugguguau

SEQ ID NO: 1083492 - RNA, 19 nt, Homo sapiens
  misc_RNA (1)...(19): siRNA sense strand
cuacagaggaaacaauuaa

SEQ ID NO: 1083493 - RNA, 19 nt, Homo sapiens
  misc_RNA (1)...(19): siRNA sense strand
gaaaguuacagaaggaguu

SEQ ID NO: 1083494 - RNA, 19 nt, Homo sapiens
  misc_RNA (1)...(19): siRNA sense strand
gccaucagaauucuuaaua

SEQ ID NO: 1083495 - RNA, 19 nt, Homo sapiens
  misc_RNA (1)...(19): siRNA sense strand
gggaagauauaugaauuuc

SEQ ID NO: 1083496 - RNA, 19 nt, Homo sapiens
  misc_RNA (1)...(19): siRNA sense strand
cagaaggaguuguagaugu

SEQ ID NO: 1083497 - RNA, 19 nt, Homo sapiens
  misc_RNA (1)...(19): siRNA sense strand
gaaguuuauuggugugugu

SEQ ID NO: 1083498 - RNA, 19 nt, Homo sapiens
  misc_RNA (1)...(19): siRNA sense strand
acaaagcuuacuccaauua

SEQ ID NO: 1083499 - RNA, 19 nt, Homo sapiens
  misc_RNA (1)...(19): siRNA sense strand
gaaagagguggaugaggaa

SEQ ID NO: 1083500 - RNA, 19 nt, Homo sapiens
  misc_RNA (1)...(19): siRNA sense strand
ggucagauuaguccaaauu

SEQ ID NO: 1083501 - RNA, 19 nt, Homo sapiens
  misc_RNA (1)...(19): siRNA sense strand
aaaagaagaagcccaauua

SEQ ID NO: 1083502 - RNA, 19 nt, Homo sapiens
  misc_RNA (1)...(19): siRNA sense strand
uuaaugaucucaacuacag

SEQ ID NO: 1083503 - RNA, 19 nt, Homo sapiens
  misc_RNA (1)...(19): siRNA sense strand
guuaguuccuguauuugaa

SEQ ID NO: 1083504 - RNA, 19 nt, Homo sapiens
  misc_RNA (1)...(19): siRNA sense strand
gcaguaaugcauuuggauu

SEQ ID NO: 1083505 - RNA, 19 nt, Homo sapiens
  misc_RNA (1)...(19): siRNA sense strand
aacacuagcuaaaccagua

SEQ ID NO: 1083506 - RNA, 19 nt, Homo sapiens
  misc_RNA (1)...(19): siRNA sense strand
gaaagagcugggaagauau

SEQ ID NO: 1083507 - RNA, 19 nt, Homo sapiens
  misc_RNA (1)...(19): siRNA sense strand
ggaacaaagcuuacuccaa

SEQ ID NO: 1083508 - RNA, 19 nt, Homo sapiens
  misc_RNA (1)...(19): siRNA sense strand
ggaacaaauggaugcagua

SEQ ID NO: 1083509 - RNA, 19 nt, Homo sapiens
  misc_RNA (1)...(19): siRNA sense strand
gagcaaguauugagguaac

SEQ ID NO: 1083510 - RNA, 19 nt, Homo sapiens
  misc_RNA (1)...(19): siRNA sense strand
ggaauaugaaucucacaga

SEQ ID NO: 1083511 - RNA, 19 nt, Homo sapiens
  misc_RNA (1)...(19): siRNA sense strand
aaagagcugggaagauaua

SEQ ID NO: 1083512 - RNA, 19 nt, Homo sapiens
  misc_RNA (1)...(19): siRNA sense strand
ggaaaagacugguuacaac

SEQ ID NO: 1083513 - RNA, 19 nt, Homo sapiens
  misc_RNA (1)...(19): siRNA sense strand
gggcugacccagagaaaga

SEQ ID NO: 1083514 - RNA, 19 nt, Homo sapiens
  misc_RNA (1)...(19): siRNA sense strand
gaaauucgaccagggaagu

SEQ ID NO: 1083515 - RNA, 19 nt, Homo sapiens
  misc_RNA (1)...(19): siRNA sense strand
caaguccgccugaaguuga

SEQ ID NO: 1083516 - RNA, 19 nt, Homo sapiens
  misc_RNA (1)...(19): siRNA sense strand
gauggaauuuaguggugaa

SEQ ID NO: 1083517 - RNA, 19 nt, Homo sapiens
  misc_RNA (1)...(19): siRNA sense strand
aaagacugguuacaacaug

SEQ ID NO: 1083518 - RNA, 19 nt, Homo sapiens
  misc_RNA (1)...(19): siRNA sense strand
cugggaagauauaugaauu

SEQ ID NO: 1083519 - RNA, 19 nt, Homo sapiens
  misc_RNA (1)...(19): siRNA sense strand
gaaaauggacaaaggaaau

SEQ ID NO: 1083520 - RNA, 19 nt, Homo sapiens
  misc_RNA (1)...(19): siRNA sense strand
ugccaugucuguuaugaau

SEQ ID NO: 1083521 - RNA, 19 nt, Homo sapiens
  misc_RNA (1)...(19): siRNA sense strand
agaaggaguuguagauguc

SEQ ID NO: 1083522 - RNA, 19 nt, Homo sapiens
  misc_RNA (1)...(19): siRNA sense strand
ggcuauguaucuccaauca

SEQ ID NO: 1083523 - RNA, 19 nt, Homo sapiens
  misc_RNA (1)...(19): siRNA sense strand
ugagguaacacuagcuaaa

SEQ ID NO: 1083524 - RNA, 19 nt, Homo sapiens
  misc_RNA (1)...(19): siRNA sense strand
uugcauuuguggaauauga

SEQ ID NO: 1083525 - RNA, 19 nt, Homo sapiens
  misc_RNA (1)...(19): siRNA sense strand
caacaauaucacuugcuaa

SEQ ID NO: 1083526 - RNA, 19 nt, Homo sapiens
  misc_RNA (1)...(19): siRNA sense strand
ccagcgugcuuccuuauac

SEQ ID NO: 1083527 - RNA, 19 nt, Homo sapiens
  misc_RNA (1)...(19): siRNA sense strand
uuacuugcuuugauggaaa

SEQ ID NO: 1083528 - RNA, 19 nt, Homo sapiens
  misc_RNA (1)...(19): siRNA sense strand
gcuaaaccaguaaauaaag

SEQ ID NO: 1083529 - RNA, 19 nt, Homo sapiens
  misc_RNA (1)...(19): siRNA sense strand
gaaaaucgagguuaugcuu

SEQ ID NO: 1083530 - RNA, 19 nt, Homo sapiens
  misc_RNA (1)...(19): siRNA sense strand
uauccaggcuauccuuugu

SEQ ID NO: 1083531 - RNA, 19 nt, Homo sapiens
  misc_RNA (1)...(19): siRNA sense strand
ggauuauuacugcaacaaa

SEQ ID NO: 1083532 - RNA, 19 nt, Homo sapiens
  misc_RNA (1)...(19): siRNA sense strand
cgccugaaguugaaagaug

SEQ ID NO: 1083533 - RNA, 19 nt, Homo sapiens
  misc_RNA (1)...(19): siRNA sense strand
caacuacagaggaaacaau

SEQ ID NO: 1083534 - RNA, 19 nt, Homo sapiens
  misc_RNA (1)...(19): siRNA sense strand
uguguaagccuggauaauu

SEQ ID NO: 1083535 - RNA, 19 nt, Homo sapiens
  misc_RNA (1)...(19): siRNA sense strand
gcaguugaacggguaaaga

SEQ ID NO: 1083536 - RNA, 19 nt, Homo sapiens
  misc_RNA (1)...(19): siRNA sense strand
gcagcucaauaaauagucu

SEQ ID NO: 1083537 - RNA, 19 nt, Homo sapiens
  misc_RNA (1)...(19): siRNA sense strand
gagacagcaucuuaauggu

SEQ ID NO: 1083538 - RNA, 19 nt, Homo sapiens
  misc_RNA (1)...(19): siRNA sense strand
caacaugguucaggaaaau

SEQ ID NO: 1083539 - RNA, 19 nt, Homo sapiens
  misc_RNA (1)...(19): siRNA sense strand
cuagcuaaaccaguaaaua

SEQ ID NO: 1083540 - RNA, 19 nt, Homo sapiens
  misc_RNA (1)...(19): siRNA sense strand
cagagaaagagguggauga

SEQ ID NO: 1083541 - RNA, 19 nt, Homo sapiens
  misc_RNA (1)...(19): siRNA sense strand
uuagccaucagaauucuua

SEQ ID NO: 1083542 - RNA, 19 nt, Homo sapiens
  misc_RNA (1)...(19): siRNA sense strand
gaagcccaauuagccauca

SEQ ID NO: 1083543 - RNA, 19 nt, Homo sapiens
  misc_RNA (1)...(19): siRNA sense strand
gacuuaugauggaauuuag

SEQ ID NO: 1083544 - RNA, 19 nt, Homo sapiens
  misc_RNA (1)...(19): siRNA sense strand
ccaaucaggccuccuucuu

SEQ ID NO: 1083545 - RNA, 19 nt, Homo sapiens
  misc_RNA (1)...(19): siRNA sense strand
uggagcaaguauugaggua

SEQ ID NO: 1083546 - RNA, 19 nt, Homo sapiens
  misc_RNA (1)...(19): siRNA sense strand
gcugccaugucuguuauga

SEQ ID NO: 1083547 - RNA, 19 nt, Homo sapiens
  misc_RNA (1)...(19): siRNA sense strand
aaauaccucgugauaugua

SEQ ID NO: 1083548 - RNA, 19 nt, Homo sapiens
  misc_RNA (1)...(19): siRNA sense strand
caaucaggccuccuucuuc

SEQ ID NO: 1083549 - RNA, 19 nt, Homo sapiens
  misc_RNA (1)...(19): siRNA sense strand
ucaccaacaauaucacuug

SEQ ID NO: 1083550 - RNA, 19 nt, Homo sapiens
  misc_RNA (1)...(19): siRNA sense strand
uucaaggccuuauucuuau

SEQ ID NO: 1083551 - RNA, 19 nt, Homo sapiens
  misc_RNA (1)...(19): siRNA sense strand
uauccuggaacaaagcuua

SEQ ID NO: 1083552 - RNA, 19 nt, Homo sapiens
  misc_RNA (1)...(19): siRNA sense strand
aagaagagagccacccaaa

SEQ ID NO: 1083553 - RNA, 19 nt, Homo sapiens
  misc_RNA (1)...(19): siRNA sense strand
aguuguagaugucauuguu

SEQ ID NO: 1083554 - RNA, 19 nt, Homo sapiens
  misc_RNA (1)...(19): siRNA sense strand
ucagauuaguccaaauucu

SEQ ID NO: 1083555 - RNA, 19 nt, Homo sapiens
  misc_RNA (1)...(19): siRNA sense strand
aaucaggccuccuucuucu

SEQ ID NO: 1083556 - RNA, 19 nt, Homo sapiens
  misc_RNA (1)...(19): siRNA sense strand
uuccaucgcagcucaauaa

SEQ ID NO: 1083557 - RNA, 19 nt, Homo sapiens
  misc_RNA (1)...(19): siRNA sense strand
aagucaagaugggaaagua

SEQ ID NO: 1083558 - RNA, 19 nt, Homo sapiens
  misc_RNA (1)...(19): siRNA sense strand
gcagcccaguuuacauuac

SEQ ID NO: 1083559 - RNA, 19 nt, Homo sapiens
  misc_RNA (1)...(19): siRNA sense strand
ggaaucugcuggcaccuua

SEQ ID NO: 1083560 - RNA, 19 nt, Homo sapiens
  misc_RNA (1)...(19): siRNA sense strand
gaggguggcugucugcaaa

SEQ ID NO: 1083561 - RNA, 19 nt, Homo sapiens
  misc_RNA (1)...(19): siRNA sense strand
gagcugcaguguucugaau

SEQ ID NO: 1083562 - RNA, 19 nt, Homo sapiens
  misc_RNA (1)...(19): siRNA sense strand
cauggugucugcuuaaugu

SEQ ID NO: 1083563 - RNA, 19 nt, Homo sapiens
  misc_RNA (1)...(19): siRNA sense strand
ggagacugcuggugaacuc

SEQ ID NO: 1083564 - RNA, 19 nt, Homo sapiens
  misc_RNA (1)...(19): siRNA sense strand
agagagcccucaccaggaa

SEQ ID NO: 1083565 - RNA, 19 nt, Homo sapiens
  misc_RNA (1)...(19): siRNA sense strand
aggcugagcugcaguguuc

SEQ ID NO: 1083566 - RNA, 19 nt, Homo sapiens
  misc_RNA (1)...(19): siRNA sense strand
gcaccuuaaucuuggacuu

SEQ ID NO: 1083567 - RNA, 19 nt, Homo sapiens
  misc_RNA (1)...(19): siRNA sense strand
gcugcaguguucugaauag

SEQ ID NO: 1083568 - RNA, 19 nt, Homo sapiens
  misc_RNA (1)...(19): siRNA sense strand
uaucaagccagauuucaug

SEQ ID NO: 1083569 - RNA, 19 nt, Homo sapiens
  misc_RNA (1)...(19): siRNA sense strand
gcuccaggcugcggauuuu

SEQ ID NO: 1083570 - RNA, 19 nt, Homo sapiens
  misc_RNA (1)...(19): siRNA sense strand
uggugucugcuuaauguua

SEQ ID NO: 1083571 - RNA, 19 nt, Homo sapiens
  misc_RNA (1)...(19): siRNA sense strand
gcucggaggcagagaaagg

SEQ ID NO: 1083572 - RNA, 19 nt, Homo sapiens
  misc_RNA (1)...(19): siRNA sense strand
gaaucugcuggcaccuuaa

SEQ ID NO: 1083573 - RNA, 19 nt, Homo sapiens
  misc_RNA (1)...(19): siRNA sense strand
aggguuaauuggaguuuua

SEQ ID NO: 1083574 - RNA, 19 nt, Homo sapiens
  misc_RNA (1)...(19): siRNA sense strand
gacagacgcugguguauag

SEQ ID NO: 1083575 - RNA, 19 nt, Homo sapiens
  misc_RNA (1)...(19): siRNA sense strand
caacaaguuuacacugauu

SEQ ID NO: 1083576 - RNA, 19 nt, Homo sapiens
  misc_RNA (1)...(19): siRNA sense strand
caaaggcggugcccaggaa

SEQ ID NO: 1083577 - RNA, 19 nt, Homo sapiens
  misc_RNA (1)...(19): siRNA sense strand
ggacagacgcugguguaua

SEQ ID NO: 1083578 - RNA, 19 nt, Homo sapiens
  misc_RNA (1)...(19): siRNA sense strand
gcgcaagccuaacgaccua

SEQ ID NO: 1083579 - RNA, 19 nt, Homo sapiens
  misc_RNA (1)...(19): siRNA sense strand
ugcaguaucucuucauuga

SEQ ID NO: 1083580 - RNA, 19 nt, Homo sapiens
  misc_RNA (1)...(19): siRNA sense strand
gacggugacugguacuuug

SEQ ID NO: 1083581 - RNA, 19 nt, Homo sapiens
  misc_RNA (1)...(19): siRNA sense strand
acaauaaccugcagacacu

SEQ ID NO: 1083582 - RNA, 19 nt, Homo sapiens
  misc_RNA (1)...(19): siRNA sense strand
acaccgaccuggaguuugu

SEQ ID NO: 1083583 - RNA, 19 nt, Homo sapiens
  misc_RNA (1)...(19): siRNA sense strand
uuacucaacuccaacaagu

SEQ ID NO: 1083584 - RNA, 19 nt, Homo sapiens
  misc_RNA (1)...(19): siRNA sense strand
ccaacaaguuuacacugau

SEQ ID NO: 1083585 - RNA, 19 nt, Homo sapiens
  misc_RNA (1)...(19): siRNA sense strand
gaagugggacuauguugag

SEQ ID NO: 1083586 - RNA, 19 nt, Homo sapiens
  misc_RNA (1)...(19): siRNA sense strand
ggucguggcccagcuguuu

SEQ ID NO: 1083587 - RNA, 19 nt, Homo sapiens
  misc_RNA (1)...(19): siRNA sense strand
uccaacaaguuuacacuga

SEQ ID NO: 1083588 - RNA, 19 nt, Homo sapiens
  misc_RNA (1)...(19): siRNA sense strand
ggacauccugaaugacuug

SEQ ID NO: 1083589 - RNA, 19 nt, Homo sapiens
  misc_RNA (1)...(19): siRNA sense strand
ucaccaggcugcaagacau

SEQ ID NO: 1083590 - RNA, 19 nt, Homo sapiens
  misc_RNA (1)...(19): siRNA sense strand
gggcaacucacucaacugu

SEQ ID NO: 1083591 - RNA, 19 nt, Homo sapiens
  misc_RNA (1)...(19): siRNA sense strand
gaugagggacgacagaagu

SEQ ID NO: 1083592 - RNA, 19 nt, Homo sapiens
  misc_RNA (1)...(19): siRNA sense strand
uuuggcggcucuuacauuu

SEQ ID NO: 1083593 - RNA, 19 nt, Homo sapiens
  misc_RNA (1)...(19): siRNA sense strand
cagcuucgagacuaugaua

SEQ ID NO: 1083594 - RNA, 19 nt, Homo sapiens
  misc_RNA (1)...(19): siRNA sense strand
cuacuccagugaccucuau

SEQ ID NO: 1083595 - RNA, 19 nt, Homo sapiens
  misc_RNA (1)...(19): siRNA sense strand
ccaggcacccgucaucuau

SEQ ID NO: 1083596 - RNA, 19 nt, Homo sapiens
  misc_RNA (1)...(19): siRNA sense strand
cugcaguucuuguuacuca

SEQ ID NO: 1083597 - RNA, 19 nt, Homo sapiens
  misc_RNA (1)...(19): siRNA sense strand
aaugacaucugggcacuau

SEQ ID NO: 1083598 - RNA, 19 nt, Homo sapiens
  misc_RNA (1)...(19): siRNA sense strand
ggugaaugccgccuucuca

SEQ ID NO: 1083599 - RNA, 19 nt, Homo sapiens
  misc_RNA (1)...(19): siRNA sense strand
gcacccagaagcaguuugu

SEQ ID NO: 1083600 - RNA, 19 nt, Homo sapiens
  misc_RNA (1)...(19): siRNA sense strand
gauugcaucaccacagauu

SEQ ID NO: 1083601 - RNA, 19 nt, Homo sapiens
  misc_RNA (1)...(19): siRNA sense strand
ugaagugggacuauguuga

SEQ ID NO: 1083602 - RNA, 19 nt, Homo sapiens
  misc_RNA (1)...(19): siRNA sense strand
ugucgcaccugcaguaucu

SEQ ID NO: 1083603 - RNA, 19 nt, Homo sapiens
  misc_RNA (1)...(19): siRNA sense strand
ugacaccgaccuggaguuu

SEQ ID NO: 1083604 - RNA, 19 nt, Homo sapiens
  misc_RNA (1)...(19): siRNA sense strand
ucgauugcaucaccacaga

SEQ ID NO: 1083605 - RNA, 19 nt, Homo sapiens
  misc_RNA (1)...(19): siRNA sense strand
gcugagcccuuccucuacu

SEQ ID NO: 1083606 - RNA, 19 nt, Homo sapiens
  misc_RNA (1)...(19): siRNA sense strand
gcaccugcaguaucucuuc

SEQ ID NO: 1083607 - RNA, 19 nt, Homo sapiens
  misc_RNA (1)...(19): siRNA sense strand
gcaucgacggugacuggua

SEQ ID NO: 1083608 - RNA, 19 nt, Homo sapiens
  misc_RNA (1)...(19): siRNA sense strand
uggcggcucuuacauuuac

SEQ ID NO: 1083609 - RNA, 19 nt, Homo sapiens
  misc_RNA (1)...(19): siRNA sense strand
cccuggacauccugaauga

SEQ ID NO: 1083610 - RNA, 19 nt, Homo sapiens
  misc_RNA (1)...(19): siRNA sense strand
ucugggcacuauccaaguu

SEQ ID NO: 1083611 - RNA, 19 nt, Homo sapiens
  misc_RNA (1)...(19): siRNA sense strand
gagggacgacagaaguuug

SEQ ID NO: 1083612 - RNA, 19 nt, Homo sapiens
  misc_RNA (1)...(19): siRNA sense strand
cgacggugacugguacuuu

SEQ ID NO: 1083613 - RNA, 19 nt, Homo sapiens
  misc_RNA (1)...(19): siRNA sense strand
ccugcaguaucucuucauu

SEQ ID NO: 1083614 - RNA, 19 nt, Homo sapiens
  misc_RNA (1)...(19): siRNA sense strand
cccaagcugugaaacacuu

SEQ ID NO: 1083615 - RNA, 19 nt, Homo sapiens
  misc_RNA (1)...(19): siRNA sense strand
ugaaugccgccuucucaga

SEQ ID NO: 1083616 - RNA, 19 nt, Homo sapiens
  misc_RNA (1)...(19): siRNA sense strand
acugcaaggugaagugguu

SEQ ID NO: 1083617 - RNA, 19 nt, Homo sapiens
  misc_RNA (1)...(19): siRNA sense strand
ggcagugauuucuccuuca

SEQ ID NO: 1083618 - RNA, 19 nt, Homo sapiens
  misc_RNA (1)...(19): siRNA sense strand
aggcacccgucaucuauca

SEQ ID NO: 1083619 - RNA, 19 nt, Homo sapiens
  misc_RNA (1)...(19): siRNA sense strand
ccucgggccuucugcuaca

SEQ ID NO: 1083620 - RNA, 19 nt, Homo sapiens
  misc_RNA (1)...(19): siRNA sense strand
gcaagccuaacgaccuaga

SEQ ID NO: 1083621 - RNA, 19 nt, Homo sapiens
  misc_RNA (1)...(19): siRNA sense strand
gcggcagcuucgagacuau

SEQ ID NO: 1083622 - RNA, 19 nt, Homo sapiens
  misc_RNA (1)...(19): siRNA sense strand
ggacgacagaaguuuguac

SEQ ID NO: 1083623 - RNA, 19 nt, Homo sapiens
  misc_RNA (1)...(19): siRNA sense strand
ugccucagccgcuacauug

SEQ ID NO: 1083624 - RNA, 19 nt, Homo sapiens
  misc_RNA (1)...(19): siRNA sense strand
caacaauaaccugcagaca

SEQ ID NO: 1083625 - RNA, 19 nt, Homo sapiens
  misc_RNA (1)...(19): siRNA sense strand
agacgcugguguauagaca

SEQ ID NO: 1083626 - RNA, 19 nt, Homo sapiens
  misc_RNA (1)...(19): siRNA sense strand
ugagggacgacagaaguuu

SEQ ID NO: 1083627 - RNA, 19 nt, Homo sapiens
  misc_RNA (1)...(19): siRNA sense strand
gcacccgucaucuaucagu

SEQ ID NO: 1083628 - RNA, 19 nt, Homo sapiens
  misc_RNA (1)...(19): siRNA sense strand
guuuggcggcucuuacauu

SEQ ID NO: 1083629 - RNA, 19 nt, Homo sapiens
  misc_RNA (1)...(19): siRNA sense strand
gcugcugcauccacccuua

SEQ ID NO: 1083630 - RNA, 19 nt, Homo sapiens
  misc_RNA (1)...(19): siRNA sense strand
gcugcggcaucuucacaga

SEQ ID NO: 1083631 - RNA, 19 nt, Homo sapiens
  misc_RNA (1)...(19): siRNA sense strand
cgacacgcaccaagacaug

SEQ ID NO: 1083632 - RNA, 19 nt, Homo sapiens
  misc_RNA (1)...(19): siRNA sense strand
ugaggcagcugcggcaucu

SEQ ID NO: 1083633 - RNA, 19 nt, Homo sapiens
  misc_RNA (1)...(19): siRNA sense strand
gcucugccgucccugucau

SEQ ID NO: 1083634 - RNA, 19 nt, Homo sapiens
  misc_RNA (1)...(19): siRNA sense strand
aaacacccguggauucuua

SEQ ID NO: 1083635 - RNA, 19 nt, Homo sapiens
  misc_RNA (1)...(19): siRNA sense strand
gagaaacacccguggauuc

SEQ ID NO: 1083636 - RNA, 19 nt, Homo sapiens
  misc_RNA (1)...(19): siRNA sense strand
gcccuucgcucuugcuuuc

SEQ ID NO: 1083637 - RNA, 19 nt, Homo sapiens
  misc_RNA (1)...(19): siRNA sense strand
gcaggcagauggaaauucg

SEQ ID NO: 1083638 - RNA, 19 nt, Homo sapiens
  misc_RNA (1)...(19): siRNA sense strand
gaacaagucccuggucucu

SEQ ID NO: 1083639 - RNA, 19 nt, Homo sapiens
  misc_RNA (1)...(19): siRNA sense strand
cuugauugcuccucaugua

SEQ ID NO: 1083640 - RNA, 19 nt, Homo sapiens
  misc_RNA (1)...(19): siRNA sense strand
gcgguucccuccucugaga

SEQ ID NO: 1083641 - RNA, 19 nt, Homo sapiens
  misc_RNA (1)...(19): siRNA sense strand
uuacugaagugaacaaguc

SEQ ID NO: 1083642 - RNA, 19 nt, Homo sapiens
  misc_RNA (1)...(19): siRNA sense strand
gcuuucagcuagucauugu

SEQ ID NO: 1083643 - RNA, 19 nt, Homo sapiens
  misc_RNA (1)...(19): siRNA sense strand
cagaggccauccuuugaga

SEQ ID NO: 1083644 - RNA, 19 nt, Homo sapiens
  misc_RNA (1)...(19): siRNA sense strand
gaggccauccuuugagaaa

SEQ ID NO: 1083645 - RNA, 19 nt, Homo sapiens
  misc_RNA (1)...(19): siRNA sense strand
ggccauccuuugagaaaca

SEQ ID NO: 1083646 - RNA, 19 nt, Homo sapiens
  misc_RNA (1)...(19): siRNA sense strand
gccaagcccuggaguuacu

SEQ ID NO: 1083647 - RNA, 19 nt, Homo sapiens
  misc_RNA (1)...(19): siRNA sense strand
gccagaggccauccuuuga

SEQ ID NO: 1083648 - RNA, 19 nt, Homo sapiens
  misc_RNA (1)...(19): siRNA sense strand
gccggcagcucuuuaaagc

SEQ ID NO: 1083649 - RNA, 19 nt, Homo sapiens
  misc_RNA (1)...(19): siRNA sense strand
gaaacacccguggauucuu

SEQ ID NO: 1083650 - RNA, 19 nt, Homo sapiens
  misc_RNA (1)...(19): siRNA sense strand
gcccuggaguuacugaagu

SEQ ID NO: 1083651 - RNA, 19 nt, Homo sapiens
  misc_RNA (1)...(19): siRNA sense strand
uugccaagcccuggaguua

SEQ ID NO: 1083652 - RNA, 19 nt, Homo sapiens
  misc_RNA (1)...(19): siRNA sense strand
gcucuugcuuucagcuagu

SEQ ID NO: 1083653 - RNA, 19 nt, Homo sapiens
  misc_RNA (1)...(19): siRNA sense strand
ugagaaacacccguggauu

SEQ ID NO: 1083654 - RNA, 19 nt, Homo sapiens
  misc_RNA (1)...(19): siRNA sense strand
ucagccggcagcucuuuaa

SEQ ID NO: 1083655 - RNA, 19 nt, Homo sapiens
  misc_RNA (1)...(19): siRNA sense strand
ucaccaaccucauucacaa

SEQ ID NO: 1083656 - RNA, 19 nt, Homo sapiens
  misc_RNA (1)...(19): siRNA sense strand
gggagcagauggauuaugg

SEQ ID NO: 1083657 - RNA, 19 nt, Homo sapiens
  misc_RNA (1)...(19): siRNA sense strand
caaccucauucacaacaug

SEQ ID NO: 1083658 - RNA, 19 nt, Homo sapiens
  misc_RNA (1)...(19): siRNA sense strand
ucacacccaucgugcugua

SEQ ID NO: 1083659 - RNA, 19 nt, Homo sapiens
  misc_RNA (1)...(19): siRNA sense strand
ucaccagcuucuacacuaa

SEQ ID NO: 1083660 - RNA, 19 nt, Homo sapiens
  misc_RNA (1)...(19): siRNA sense strand
cggaaguucuugaccauca

SEQ ID NO: 1083661 - RNA, 19 nt, Homo sapiens
  misc_RNA (1)...(19): siRNA sense strand
acugggagcagauggauua

SEQ ID NO: 1083662 - RNA, 19 nt, Homo sapiens
  misc_RNA (1)...(19): siRNA sense strand
gcaucuggcucuccuacgu

SEQ ID NO: 1083663 - RNA, 19 nt, Homo sapiens
  misc_RNA (1)...(19): siRNA sense strand
gagcaucccguuugugagu

SEQ ID NO: 1083664 - RNA, 19 nt, Homo sapiens
  misc_RNA (1)...(19): siRNA sense strand
ccaacacgcgggugaugaa

SEQ ID NO: 1083665 - RNA, 19 nt, Homo sapiens
  misc_RNA (1)...(19): siRNA sense strand
uggaaucaauaaguacuga

SEQ ID NO: 1083666 - RNA, 19 nt, Homo sapiens
  misc_RNA (1)...(19): siRNA sense strand
cucaccagcuucuacacua

SEQ ID NO: 1083667 - RNA, 19 nt, Homo sapiens
  misc_RNA (1)...(19): siRNA sense strand
gcaucccguuugugagugu

SEQ ID NO: 1083668 - RNA, 19 nt, Homo sapiens
  misc_RNA (1)...(19): siRNA sense strand
gacccucaccaaccucauu

SEQ ID NO: 1083669 - RNA, 19 nt, Homo sapiens
  misc_RNA (1)...(19): siRNA sense strand
cugagcaucccguuuguga

SEQ ID NO: 1083670 - RNA, 19 nt, Homo sapiens
  misc_RNA (1)...(19): siRNA sense strand
aguacgaccagauccauuu

SEQ ID NO: 1083671 - RNA, 19 nt, Homo sapiens
  misc_RNA (1)...(19): siRNA sense strand
ggcaaggcgaggcugcuaa

SEQ ID NO: 1083672 - RNA, 19 nt, Homo sapiens
  misc_RNA (1)...(19): siRNA sense strand
gcaaggcgaggcugcuaac

SEQ ID NO: 1083673 - RNA, 19 nt, Homo sapiens
  misc_RNA (1)...(19): siRNA sense strand
gaaguucuugaccaucaca

SEQ ID NO: 1083674 - RNA, 19 nt, Homo sapiens
  misc_RNA (1)...(19): siRNA sense strand
ccaaagaggugacauugug

SEQ ID NO: 1083675 - RNA, 19 nt, Homo sapiens
  misc_RNA (1)...(19): siRNA sense strand
gauauugucuuugcagaaa

SEQ ID NO: 1083676 - RNA, 19 nt, Homo sapiens
  misc_RNA (1)...(19): siRNA sense strand
gaggacgaaucuucuuuaa

SEQ ID NO: 1083677 - RNA, 19 nt, Homo sapiens
  misc_RNA (1)...(19): siRNA sense strand
cuacagaauucuacagauu

SEQ ID NO: 1083678 - RNA, 19 nt, Homo sapiens
  misc_RNA (1)...(19): siRNA sense strand
caauggagccuacaauuca

SEQ ID NO: 1083679 - RNA, 19 nt, Homo sapiens
  misc_RNA (1)...(19): siRNA sense strand
gugacaaucuacagaauuc

SEQ ID NO: 1083680 - RNA, 19 nt, Homo sapiens
  misc_RNA (1)...(19): siRNA sense strand
ccacuaguccaucagauuu

SEQ ID NO: 1083681 - RNA, 19 nt, Homo sapiens
  misc_RNA (1)...(19): siRNA sense strand
gaaggugacaaucuacaga

SEQ ID NO: 1083682 - RNA, 19 nt, Homo sapiens
  misc_RNA (1)...(19): siRNA sense strand
gaggugacauugugauugc

SEQ ID NO: 1083683 - RNA, 19 nt, Homo sapiens
  misc_RNA (1)...(19): siRNA sense strand
ugaauacguuggugguguu

SEQ ID NO: 1083684 - RNA, 19 nt, Homo sapiens
  misc_RNA (1)...(19): siRNA sense strand
ggucauguuugguuagaag

SEQ ID NO: 1083685 - RNA, 19 nt, Homo sapiens
  misc_RNA (1)...(19): siRNA sense strand
aagaguaauugguuuggaa

SEQ ID NO: 1083686 - RNA, 19 nt, Homo sapiens
  misc_RNA (1)...(19): siRNA sense strand
ggacuaauaagaggacgaa

SEQ ID NO: 1083687 - RNA, 19 nt, Homo sapiens
  misc_RNA (1)...(19): siRNA sense strand
uuuaagauuuggccucuga

SEQ ID NO: 1083688 - RNA, 19 nt, Homo sapiens
  misc_RNA (1)...(19): siRNA sense strand
gacaaucuacagaauucua

SEQ ID NO: 1083689 - RNA, 19 nt, Homo sapiens
  misc_RNA (1)...(19): siRNA sense strand
cuuguuggcuauacuauuc

SEQ ID NO: 1083690 - RNA, 19 nt, Homo sapiens
  misc_RNA (1)...(19): siRNA sense strand
ucaauggagccuacaauuc

SEQ ID NO: 1083691 - RNA, 19 nt, Homo sapiens
  misc_RNA (1)...(19): siRNA sense strand
agaggacgaaucuucuuua

SEQ ID NO: 1083692 - RNA, 19 nt, Homo sapiens
  misc_RNA (1)...(19): siRNA sense strand
caaagaggugacauuguga

SEQ ID NO: 1083693 - RNA, 19 nt, Homo sapiens
  misc_RNA (1)...(19): siRNA sense strand
gacaaaauccucaccacua

SEQ ID NO: 1083694 - RNA, 19 nt, Homo sapiens
  misc_RNA (1)...(19): siRNA sense strand
aaugggucauguuugguua

SEQ ID NO: 1083695 - RNA, 19 nt, Homo sapiens
  misc_RNA (1)...(19): siRNA sense strand
cuaauaagaggacgaaucu

SEQ ID NO: 1083696 - RNA, 19 nt, Homo sapiens
  misc_RNA (1)...(19): siRNA sense strand
ggugacaaucuacagaauu

SEQ ID NO: 1083697 - RNA, 19 nt, Homo sapiens
  misc_RNA (1)...(19): siRNA sense strand
cauguguucuggaccauca

SEQ ID NO: 1083698 - RNA, 19 nt, Homo sapiens
  misc_RNA (1)...(19): siRNA sense strand
gaaaaucuuagucgacauu

SEQ ID NO: 1083699 - RNA, 19 nt, Homo sapiens
  misc_RNA (1)...(19): siRNA sense strand
guccaucagauuucuuuaa

SEQ ID NO: 1083700 - RNA, 19 nt, Homo sapiens
  misc_RNA (1)...(19): siRNA sense strand
agauuuggccucugaguga

SEQ ID NO: 1083701 - RNA, 19 nt, Homo sapiens
  misc_RNA (1)...(19): siRNA sense strand
ccucaccacuaguccauca

SEQ ID NO: 1083702 - RNA, 19 nt, Homo sapiens
  misc_RNA (1)...(19): siRNA sense strand
cgacuuguuggcuauacua

SEQ ID NO: 1083703 - RNA, 19 nt, Homo sapiens
  misc_RNA (1)...(19): siRNA sense strand
guauagcucauugugcuuu

SEQ ID NO: 1083704 - RNA, 19 nt, Homo sapiens
  misc_RNA (1)...(19): siRNA sense strand
ccauauggacuaauaagag

SEQ ID NO: 1083705 - RNA, 19 nt, Homo sapiens
  misc_RNA (1)...(19): siRNA sense strand
caaugggucauguuugguu

SEQ ID NO: 1083706 - RNA, 19 nt, Homo sapiens
  misc_RNA (1)...(19): siRNA sense strand
gcccuaauggccacagauu

SEQ ID NO: 1083707 - RNA, 19 nt, Homo sapiens
  misc_RNA (1)...(19): siRNA sense strand
aaagaguaauugguuugga

SEQ ID NO: 1083708 - RNA, 19 nt, Homo sapiens
  misc_RNA (1)...(19): siRNA sense strand
gugccaaugggucauguuu

SEQ ID NO: 1083709 - RNA, 19 nt, Homo sapiens
  misc_RNA (1)...(19): siRNA sense strand
gugacauugugauugcaaa

SEQ ID NO: 1083710 - RNA, 19 nt, Homo sapiens
  misc_RNA (1)...(19): siRNA sense strand
aauggagccuacaauucaa

SEQ ID NO: 1083711 - RNA, 19 nt, Homo sapiens
  misc_RNA (1)...(19): siRNA sense strand
cuacagauuccaggugcua

SEQ ID NO: 1083712 - RNA, 19 nt, Homo sapiens
  misc_RNA (1)...(19): siRNA sense strand
auucagauauugucuuugc

SEQ ID NO: 1083713 - RNA, 19 nt, Homo sapiens
  misc_RNA (1)...(19): siRNA sense strand
uuacgugccagcccuaaug

SEQ ID NO: 1083714 - RNA, 19 nt, Homo sapiens
  misc_RNA (1)...(19): siRNA sense strand
uauccaaagaggugacauu

SEQ ID NO: 1083715 - RNA, 19 nt, Homo sapiens
  misc_RNA (1)...(19): siRNA sense strand
gauuuggccucugagugau

SEQ ID NO: 1083716 - RNA, 19 nt, Homo sapiens
  misc_RNA (1)...(19): siRNA sense strand
gguuagaaggugacaaucu

SEQ ID NO: 1083717 - RNA, 19 nt, Homo sapiens
  misc_RNA (1)...(19): siRNA sense strand
aguaauugguuuggaagga

SEQ ID NO: 1083718 - RNA, 19 nt, Homo sapiens
  misc_RNA (1)...(19): siRNA sense strand
gugguguugucauguguuc

SEQ ID NO: 1083719 - RNA, 19 nt, Homo sapiens
  misc_RNA (1)...(19): siRNA sense strand
ccuaauggccacagauuuu

SEQ ID NO: 1083720 - RNA, 19 nt, Homo sapiens
  misc_RNA (1)...(19): siRNA sense strand
caucaauggagccuacaau

SEQ ID NO: 1083721 - RNA, 19 nt, Homo sapiens
  misc_RNA (1)...(19): siRNA sense strand
acaaaauccucaccacuag

SEQ ID NO: 1083722 - RNA, 19 nt, Homo sapiens
  misc_RNA (1)...(19): siRNA sense strand
ucugagugauuuuggauuu

SEQ ID NO: 1083723 - RNA, 19 nt, Homo sapiens
  misc_RNA (1)...(19): siRNA sense strand
ucuacagaauucuacagau

SEQ ID NO: 1083724 - RNA, 19 nt, Homo sapiens
  misc_RNA (1)...(19): siRNA sense strand
acaguuccaucaagaguua

SEQ ID NO: 1083725 - RNA, 19 nt, Homo sapiens
  misc_RNA (1)...(19): siRNA sense strand
gagaaggccgcuaugagua

SEQ ID NO: 1083726 - RNA, 19 nt, Homo sapiens
  misc_RNA (1)...(19): siRNA sense strand
gcaguuccagcaacaguua

SEQ ID NO: 1083727 - RNA, 19 nt, Homo sapiens
  misc_RNA (1)...(19): siRNA sense strand
ggagaaggccgcuaugagu

SEQ ID NO: 1083728 - RNA, 19 nt, Homo sapiens
  misc_RNA (1)...(19): siRNA sense strand
ggaggccacucacccaaug

SEQ ID NO: 1083729 - RNA, 19 nt, Homo sapiens
  misc_RNA (1)...(19): siRNA sense strand
gagugaccauuacggaaga

SEQ ID NO: 1083730 - RNA, 19 nt, Homo sapiens
  misc_RNA (1)...(19): siRNA sense strand
caacagcggaggccacuca

SEQ ID NO: 1083731 - RNA, 19 nt, Homo sapiens
  misc_RNA (1)...(19): siRNA sense strand
caacagcggaggccacuca

SEQ ID NO: 1083732 - RNA, 19 nt, Homo sapiens
  misc_RNA (1)...(19): siRNA sense strand
ccaccgcuauggaggagaa

SEQ ID NO: 1083733 - RNA, 19 nt, Homo sapiens
  misc_RNA (1)...(19): siRNA sense strand
gaggaggccacuacgaaga

SEQ ID NO: 1083734 - RNA, 19 nt, Homo sapiens
  misc_RNA (1)...(19): siRNA sense strand
gaggagaaggccgcuauga

SEQ ID NO: 1083735 - RNA, 19 nt, Homo sapiens
  misc_RNA (1)...(19): siRNA sense strand
caacagcggaggccguuca

SEQ ID NO: 1083736 - RNA, 19 nt, Homo sapiens
  misc_RNA (1)...(19): siRNA sense strand
acaguuccagcaacaguua

SEQ ID NO: 1083737 - RNA, 19 nt, Homo sapiens
  misc_RNA (1)...(19): siRNA sense strand
caacaguuccaacaacagu

SEQ ID NO: 1083738 - RNA, 19 nt, Homo sapiens
  misc_RNA (1)...(19): siRNA sense strand
ccagagcgaccacuaugga

SEQ ID NO: 1083739 - RNA, 19 nt, Homo sapiens
  misc_RNA (1)...(19): siRNA sense strand
ccucaacaguuccaacaac

SEQ ID NO: 1083740 - RNA, 19 nt, Homo sapiens
  misc_RNA (1)...(19): siRNA sense strand
cgugacaguuccagcaaca

SEQ ID NO: 1083741 - RNA, 19 nt, Homo sapiens
  misc_RNA (1)...(19): siRNA sense strand
gaagaggaggcugcuacga

SEQ ID NO: 1083742 - RNA, 19 nt, Homo sapiens
  misc_RNA (1)...(19): siRNA sense strand
cgcgacaguuccaucaaga

SEQ ID NO: 1083743 - RNA, 19 nt, Homo sapiens
  misc_RNA (1)...(19): siRNA sense strand
ccagagcaaccgcuaugga

SEQ ID NO: 1083744 - RNA, 19 nt, Homo sapiens
  misc_RNA (1)...(19): siRNA sense strand
gacaguuccaucaagaguu

SEQ ID NO: 1083745 - RNA, 19 nt, Homo sapiens
  misc_RNA (1)...(19): siRNA sense strand
cacagcaguuccagcaaca

SEQ ID NO: 1083746 - RNA, 19 nt, Homo sapiens
  misc_RNA (1)...(19): siRNA sense strand
ggagaaccgaggucacucu

SEQ ID NO: 1083747 - RNA, 19 nt, Homo sapiens
  misc_RNA (1)...(19): siRNA sense strand
gccgcucccuugaugacaa

SEQ ID NO: 1083748 - RNA, 19 nt, Homo sapiens
  misc_RNA (1)...(19): siRNA sense strand
cgacaguuccaucaagagu

SEQ ID NO: 1083749 - RNA, 19 nt, Homo sapiens
  misc_RNA (1)...(19): siRNA sense strand
ggaggccacuacgaagagu

SEQ ID NO: 1083750 - RNA, 19 nt, Homo sapiens
  misc_RNA (1)...(19): siRNA sense strand
gaggagaaccgaggucacu

SEQ ID NO: 1083751 - RNA, 19 nt, Homo sapiens
  misc_RNA (1)...(19): siRNA sense strand
ccagagccaccgcuaugga

SEQ ID NO: 1083752 - RNA, 19 nt, Homo sapiens
  misc_RNA (1)...(19): siRNA sense strand
ggagaaccgaggccacucu

SEQ ID NO: 1083753 - RNA, 19 nt, Homo sapiens
  misc_RNA (1)...(19): siRNA sense strand
ccgcgacaguuccaucaag

SEQ ID NO: 1083754 - RNA, 19 nt, Homo sapiens
  misc_RNA (1)...(19): siRNA sense strand
gacaguuccagcaacaguu

SEQ ID NO: 1083755 - RNA, 19 nt, Homo sapiens
  misc_RNA (1)...(19): siRNA sense strand
ggaggcugcuacgaggaau

SEQ ID NO: 1083756 - RNA, 19 nt, Homo sapiens
  misc_RNA (1)...(19): siRNA sense strand
aggaggaggccacuacgaa

SEQ ID NO: 1083757 - RNA, 19 nt, Homo sapiens
  misc_RNA (1)...(19): siRNA sense strand
cucaacaguuccaacaaca

SEQ ID NO: 1083758 - RNA, 19 nt, Homo sapiens
  misc_RNA (1)...(19): siRNA sense strand
gaggcugcuacgaggaaua

SEQ ID NO: 1083759 - RNA, 19 nt, Homo sapiens
  misc_RNA (1)...(19): siRNA sense strand
ggaggagaaggccgcuaug

SEQ ID NO: 1083760 - RNA, 19 nt, Homo sapiens
  misc_RNA (1)...(19): siRNA sense strand
gcacauauauucagaagaa

SEQ ID NO: 1083761 - RNA, 19 nt, Homo sapiens
  misc_RNA (1)...(19): siRNA sense strand
ggacugacauuucuccaua

SEQ ID NO: 1083762 - RNA, 19 nt, Homo sapiens
  misc_RNA (1)...(19): siRNA sense strand
gaagaaagaugacauaacu

SEQ ID NO: 1083763 - RNA, 19 nt, Homo sapiens
  misc_RNA (1)...(19): siRNA sense strand
gaaagugacugggauggua

SEQ ID NO: 1083764 - RNA, 19 nt, Homo sapiens
  misc_RNA (1)...(19): siRNA sense strand
gaagaaggacugguaaaua

SEQ ID NO: 1083765 - RNA, 19 nt, Homo sapiens
  misc_RNA (1)...(19): siRNA sense strand
gcagaggacuguuccacua

SEQ ID NO: 1083766 - RNA, 19 nt, Homo sapiens
  misc_RNA (1)...(19): siRNA sense strand
ugacaaugcucuuaggaua

SEQ ID NO: 1083767 - RNA, 19 nt, Homo sapiens
  misc_RNA (1)...(19): siRNA sense strand
guaaaggacuucagaauac

SEQ ID NO: 1083768 - RNA, 19 nt, Homo sapiens
  misc_RNA (1)...(19): siRNA sense strand
aagaaggacugguaaauaa

SEQ ID NO: 1083769 - RNA, 19 nt, Homo sapiens
  misc_RNA (1)...(19): siRNA sense strand
gauggucguugguuaauaa

SEQ ID NO: 1083770 - RNA, 19 nt, Homo sapiens
  misc_RNA (1)...(19): siRNA sense strand
gcgauggauugcucuauua

SEQ ID NO: 1083771 - RNA, 19 nt, Homo sapiens
  misc_RNA (1)...(19): siRNA sense strand
gaaggacugguaaauaaua

SEQ ID NO: 1083772 - RNA, 19 nt, Homo sapiens
  misc_RNA (1)...(19): siRNA sense strand
gaagaaaacuggacccauu

SEQ ID NO: 1083773 - RNA, 19 nt, Homo sapiens
  misc_RNA (1)...(19): siRNA sense strand
gauauaacuucuuguggaa

SEQ ID NO: 1083774 - RNA, 19 nt, Homo sapiens
  misc_RNA (1)...(19): siRNA sense strand
ggacucggcuccucucaau

SEQ ID NO: 1083775 - RNA, 19 nt, Homo sapiens
  misc_RNA (1)...(19): siRNA sense strand
gaaagaaucaggcccauca

SEQ ID NO: 1083776 - RNA, 19 nt, Homo sapiens
  misc_RNA (1)...(19): siRNA sense strand
uuaaaccaguugacaguua

SEQ ID NO: 1083777 - RNA, 19 nt, Homo sapiens
  misc_RNA (1)...(19): siRNA sense strand
ggucauagugcuccucuua

SEQ ID NO: 1083778 - RNA, 19 nt, Homo sapiens
  misc_RNA (1)...(19): siRNA sense strand
ggaugaugcuggacagaaa

SEQ ID NO: 1083779 - RNA, 19 nt, Homo sapiens
  misc_RNA (1)...(19): siRNA sense strand
caaaagaguugaagaaaga

SEQ ID NO: 1083780 - RNA, 19 nt, Homo sapiens
  misc_RNA (1)...(19): siRNA sense strand
ugacugggaugguaucauu

SEQ ID NO: 1083781 - RNA, 19 nt, Homo sapiens
  misc_RNA (1)...(19): siRNA sense strand
gcaagaguuuccacaccua

SEQ ID NO: 1083782 - RNA, 19 nt, Homo sapiens
  misc_RNA (1)...(19): siRNA sense strand
gagcuugggacauggauua

SEQ ID NO: 1083783 - RNA, 19 nt, Homo sapiens
  misc_RNA (1)...(19): siRNA sense strand
caggauaucugcuguaugg

SEQ ID NO: 1083784 - RNA, 19 nt, Homo sapiens
  misc_RNA (1)...(19): siRNA sense strand
gaagaauaccugcaguuga

SEQ ID NO: 1083785 - RNA, 19 nt, Homo sapiens
  misc_RNA (1)...(19): siRNA sense strand
caaucacucuucaaucaaa

SEQ ID NO: 1083786 - RNA, 19 nt, Homo sapiens
  misc_RNA (1)...(19): siRNA sense strand
ggaauuaucagaaaucuac

SEQ ID NO: 1083787 - RNA, 19 nt, Homo sapiens
  misc_RNA (1)...(19): siRNA sense strand
ggacaccaaggccaaauaa

SEQ ID NO: 1083788 - RNA, 19 nt, Homo sapiens
  misc_RNA (1)...(19): siRNA sense strand
guagaaguaucagaagaaa

SEQ ID NO: 1083789 - RNA, 19 nt, Homo sapiens
  misc_RNA (1)...(19): siRNA sense strand
agaggaagcucgugaaagu

SEQ ID NO: 1083790 - RNA, 19 nt, Homo sapiens
  misc_RNA (1)...(19): siRNA sense strand
caucaggaauugaaacaga

SEQ ID NO: 1083791 - RNA, 19 nt, Homo sapiens
  misc_RNA (1)...(19): siRNA sense strand
gaauuuaucuaugguccaa

SEQ ID NO: 1083792 - RNA, 19 nt, Homo sapiens
  misc_RNA (1)...(19): siRNA sense strand
aauaagagcuugggacaug

SEQ ID NO: 1083793 - RNA, 19 nt, Homo sapiens
  misc_RNA (1)...(19): siRNA sense strand
gguccaauauuucccugua

SEQ ID NO: 1083794 - RNA, 19 nt, Homo sapiens
  misc_RNA (1)...(19): siRNA sense strand
cuaggaagauugucagaga

SEQ ID NO: 1083795 - RNA, 19 nt, Homo sapiens
  misc_RNA (1)...(19): siRNA sense strand
gauaguacauaccuuuaag

SEQ ID NO: 1083796 - RNA, 19 nt, Homo sapiens
  misc_RNA (1)...(19): siRNA sense strand
cguaaaggacuucagaaua

SEQ ID NO: 1083797 - RNA, 19 nt, Homo sapiens
  misc_RNA (1)...(19): siRNA sense strand
gcaguugacuuuugauaaa

SEQ ID NO: 1083798 - RNA, 19 nt, Homo sapiens
  misc_RNA (1)...(19): siRNA sense strand
gagauaguacauaccuuua

SEQ ID NO: 1083799 - RNA, 19 nt, Homo sapiens
  misc_RNA (1)...(19): siRNA sense strand
cagauuaugucccuucaau

SEQ ID NO: 1083800 - RNA, 19 nt, Homo sapiens
  misc_RNA (1)...(19): siRNA sense strand
cauagaaacuaggaagauu

SEQ ID NO: 1083801 - RNA, 19 nt, Homo sapiens
  misc_RNA (1)...(19): siRNA sense strand
gcucacaagggaucuguua

SEQ ID NO: 1083802 - RNA, 19 nt, Homo sapiens
  misc_RNA (1)...(19): siRNA sense strand
cagaauaccaugucaguga

SEQ ID NO: 1083803 - RNA, 19 nt, Homo sapiens
  misc_RNA (1)...(19): siRNA sense strand
cuugggacauggauuaaua

SEQ ID NO: 1083804 - RNA, 19 nt, Homo sapiens
  misc_RNA (1)...(19): siRNA sense strand
caacagcaguggauauaac

SEQ ID NO: 1083805 - RNA, 19 nt, Homo sapiens
  misc_RNA (1)...(19): siRNA sense strand
ggaccaccuuggaauuuau

SEQ ID NO: 1083806 - RNA, 19 nt, Homo sapiens
  misc_RNA (1)...(19): siRNA sense strand
gaagauugucagagaguuu

SEQ ID NO: 1083807 - RNA, 19 nt, Homo sapiens
  misc_RNA (1)...(19): siRNA sense strand
acugauggcauucuuauua

SEQ ID NO: 1083808 - RNA, 19 nt, Homo sapiens
  misc_RNA (1)...(19): siRNA sense strand
aggcauaccuugcauuguu

SEQ ID NO: 1083809 - RNA, 19 nt, Homo sapiens
  misc_RNA (1)...(19): siRNA sense strand
aaaggaaccacccaaagua

SEQ ID NO: 1083810 - RNA, 19 nt, Homo sapiens
  misc_RNA (1)...(19): siRNA sense strand
uacaauaggcgcuuacuuu

SEQ ID NO: 1083811 - RNA, 19 nt, Homo sapiens
  misc_RNA (1)...(19): siRNA sense strand
gugcuccucuuaccaauau

SEQ ID NO: 1083812 - RNA, 19 nt, Homo sapiens
  misc_RNA (1)...(19): siRNA sense strand
aacccaagauguagaagua

SEQ ID NO: 1083813 - RNA, 19 nt, Homo sapiens
  misc_RNA (1)...(19): siRNA sense strand
gaaacuaggaagauuguca

SEQ ID NO: 1083814 - RNA, 19 nt, Homo sapiens
  misc_RNA (1)...(19): siRNA sense strand
gauuagucuuugcugcuua

SEQ ID NO: 1083815 - RNA, 19 nt, Homo sapiens
  misc_RNA (1)...(19): siRNA sense strand
uaucauugcuugccaucaa

SEQ ID NO: 1083816 - RNA, 19 nt, Homo sapiens
  misc_RNA (1)...(19): siRNA sense strand
caaggaagccugcaguugu

SEQ ID NO: 1083817 - RNA, 19 nt, Homo sapiens
  misc_RNA (1)...(19): siRNA sense strand
gaugacuucuccauuagug

SEQ ID NO: 1083818 - RNA, 19 nt, Homo sapiens
  misc_RNA (1)...(19): siRNA sense strand
ggucguugguuaauaagug

SEQ ID NO: 1083819 - RNA, 19 nt, Homo sapiens
  misc_RNA (1)...(19): siRNA sense strand
ggaagcccauguggccaua

SEQ ID NO: 1083820 - RNA, 19 nt, Homo sapiens
  misc_RNA (1)...(19): siRNA sense strand
uaccuugcauuguuucuaa

SEQ ID NO: 1083821 - RNA, 19 nt, Homo sapiens
  misc_RNA (1)...(19): siRNA sense strand
caaaggaaccacccaaagu

SEQ ID NO: 1083822 - RNA, 19 nt, Homo sapiens
  misc_RNA (1)...(19): siRNA sense strand
agaaccaagugaugaauug

SEQ ID NO: 1083823 - RNA, 19 nt, Homo sapiens
  misc_RNA (1)...(19): siRNA sense strand
gauuaugucccuucaauag

SEQ ID NO: 1083824 - RNA, 19 nt, Homo sapiens
  misc_RNA (1)...(19): siRNA sense strand
gugaaggauuacucaaauu

SEQ ID NO: 1083825 - RNA, 19 nt, Homo sapiens
  misc_RNA (1)...(19): siRNA sense strand
caggaacuguagauguaua

SEQ ID NO: 1083826 - RNA, 19 nt, Homo sapiens
  misc_RNA (1)...(19): siRNA sense strand
ggcagcugauggcagauua

SEQ ID NO: 1083827 - RNA, 19 nt, Homo sapiens
  misc_RNA (1)...(19): siRNA sense strand
ugcaaucacucuucaauca

SEQ ID NO: 1083828 - RNA, 19 nt, Homo sapiens
  misc_RNA (1)...(19): siRNA sense strand
uggaaacuuugcuguaauu

SEQ ID NO: 1083829 - RNA, 19 nt, Homo sapiens
  misc_RNA (1)...(19): siRNA sense strand
gguaagcuaucuugcucaa

SEQ ID NO: 1083830 - RNA, 19 nt, Homo sapiens
  misc_RNA (1)...(19): siRNA sense strand
ggacagcagauucuaagug

SEQ ID NO: 1083831 - RNA, 19 nt, Homo sapiens
  misc_RNA (1)...(19): siRNA sense strand
gauggcagauuagucuuug

SEQ ID NO: 1083832 - RNA, 19 nt, Homo sapiens
  misc_RNA (1)...(19): siRNA sense strand
caaguuaucauucacaaca

SEQ ID NO: 1083833 - RNA, 19 nt, Homo sapiens
  misc_RNA (1)...(19): siRNA sense strand
ggcauaccuugcauuguuu

SEQ ID NO: 1083834 - RNA, 19 nt, Homo sapiens
  misc_RNA (1)...(19): siRNA sense strand
gaaucaggcccaucaggaa

SEQ ID NO: 1083835 - RNA, 19 nt, Homo sapiens
  misc_RNA (1)...(19): siRNA sense strand
ccagcagucuaaaguggua

SEQ ID NO: 1083836 - RNA, 19 nt, Homo sapiens
  misc_RNA (1)...(19): siRNA sense strand
gagacuuucuggcaacuuc

SEQ ID NO: 1083837 - RNA, 19 nt, Homo sapiens
  misc_RNA (1)...(19): siRNA sense strand
cucaaauucuggaacuuua

SEQ ID NO: 1083838 - RNA, 19 nt, Homo sapiens
  misc_RNA (1)...(19): siRNA sense strand
uguggaaacuuugcuguaa

SEQ ID NO: 1083839 - RNA, 19 nt, Homo sapiens
  misc_RNA (1)...(19): siRNA sense strand
ggacccauuacuucaauuu

SEQ ID NO: 1083840 - RNA, 19 nt, Homo sapiens
  misc_RNA (1)...(19): siRNA sense strand
gauauuugaugguccuaca

SEQ ID NO: 1083841 - RNA, 19 nt, Homo sapiens
  misc_RNA (1)...(19): siRNA sense strand
agauggaacucuucaguca

SEQ ID NO: 1083842 - RNA, 19 nt, Homo sapiens
  misc_RNA (1)...(19): siRNA sense strand
ugacacugcucucaaccuu

SEQ ID NO: 1083843 - RNA, 19 nt, Homo sapiens
  misc_RNA (1)...(19): siRNA sense strand
cagauaugcugcaccugaa

SEQ ID NO: 1083844 - RNA, 19 nt, Homo sapiens
  misc_RNA (1)...(19): siRNA sense strand
gaagaaacaguagaaccaa

SEQ ID NO: 1083845 - RNA, 19 nt, Homo sapiens
  misc_RNA (1)...(19): siRNA sense strand
ggaagauugucagagaguu

SEQ ID NO: 1083846 - RNA, 19 nt, Homo sapiens
  misc_RNA (1)...(19): siRNA sense strand
gcaaggaucaagcucacaa

SEQ ID NO: 1083847 - RNA, 19 nt, Homo sapiens
  misc_RNA (1)...(19): siRNA sense strand
gcagaggaagcucgugaaa

SEQ ID NO: 1083848 - RNA, 19 nt, Homo sapiens
  misc_RNA (1)...(19): siRNA sense strand
uuaaugaaguuucgucaag

SEQ ID NO: 1083849 - RNA, 19 nt, Homo sapiens
  misc_RNA (1)...(19): siRNA sense strand
ggacagaaagcgugauuuu

SEQ ID NO: 1083850 - RNA, 19 nt, Homo sapiens
  misc_RNA (1)...(19): siRNA sense strand
caaauaucauguugcuaca

SEQ ID NO: 1083851 - RNA, 19 nt, Homo sapiens
  misc_RNA (1)...(19): siRNA sense strand
gagcaauuggugacucuuu

SEQ ID NO: 1083852 - RNA, 19 nt, Homo sapiens
  misc_RNA (1)...(19): siRNA sense strand
accaagugaugaauugaua

SEQ ID NO: 1083853 - RNA, 19 nt, Homo sapiens
  misc_RNA (1)...(19): siRNA sense strand
gauacugauggcauucuua

SEQ ID NO: 1083854 - RNA, 19 nt, Homo sapiens
  misc_RNA (1)...(19): siRNA sense strand
acaaugcucuuaggauaug

SEQ ID NO: 1083855 - RNA, 19 nt, Homo sapiens
  misc_RNA (1)...(19): siRNA sense strand
uaaugaaguuucgucaaga

SEQ ID NO: 1083856 - RNA, 19 nt, Homo sapiens
  misc_RNA (1)...(19): siRNA sense strand
gcauuugcccguaauaaag

SEQ ID NO: 1083857 - RNA, 19 nt, Homo sapiens
  misc_RNA (1)...(19): siRNA sense strand
uggaccaccuuggaauuua

SEQ ID NO: 1083858 - RNA, 19 nt, Homo sapiens
  misc_RNA (1)...(19): siRNA sense strand
caccaaggccaaauaaaug

SEQ ID NO: 1083859 - RNA, 19 nt, Homo sapiens
  misc_RNA (1)...(19): siRNA sense strand
cuauauacauuuccaggau

SEQ ID NO: 1083860 - RNA, 19 nt, Homo sapiens
  misc_RNA (1)...(19): siRNA sense strand
gcacgaaguucacgcuguu

SEQ ID NO: 1083861 - RNA, 19 nt, Homo sapiens
  misc_RNA (1)...(19): siRNA sense strand
gaagggaacuugccgaaaa

SEQ ID NO: 1083862 - RNA, 19 nt, Homo sapiens
  misc_RNA (1)...(19): siRNA sense strand
ggguuugguuuaagaauaa

SEQ ID NO: 1083863 - RNA, 19 nt, Homo sapiens
  misc_RNA (1)...(19): siRNA sense strand
gaagacaaagugcggguuu

SEQ ID NO: 1083864 - RNA, 19 nt, Homo sapiens
  misc_RNA (1)...(19): siRNA sense strand
aaacuuaggugugacugaa

SEQ ID NO: 1083865 - RNA, 19 nt, Homo sapiens
  misc_RNA (1)...(19): siRNA sense strand
uggaggagcuggaaagugu

SEQ ID NO: 1083866 - RNA, 19 nt, Homo sapiens
  misc_RNA (1)...(19): siRNA sense strand
aauuaaugcucgccaauga

SEQ ID NO: 1083867 - RNA, 19 nt, Homo sapiens
  misc_RNA (1)...(19): siRNA sense strand
cggguuugguuuaagaaua

SEQ ID NO: 1083868 - RNA, 19 nt, Homo sapiens
  misc_RNA (1)...(19): siRNA sense strand
ggaacuugccgaaaacuua

SEQ ID NO: 1083869 - RNA, 19 nt, Homo sapiens
  misc_RNA (1)...(19): siRNA sense strand
aaagugcggguuugguuua

SEQ ID NO: 1083870 - RNA, 19 nt, Homo sapiens
  misc_RNA (1)...(19): siRNA sense strand
cgacaucagagagaauuaa

SEQ ID NO: 1083871 - RNA, 19 nt, Homo sapiens
  misc_RNA (1)...(19): siRNA sense strand
gaauuaaugcucgccaaug

SEQ ID NO: 1083872 - RNA, 19 nt, Homo sapiens
  misc_RNA (1)...(19): siRNA sense strand
gugcggguuugguuuaaga

SEQ ID NO: 1083873 - RNA, 19 nt, Homo sapiens
  misc_RNA (1)...(19): siRNA sense strand
cuccaggccucauggguaa

SEQ ID NO: 1083874 - RNA, 19 nt, Homo sapiens
  misc_RNA (1)...(19): siRNA sense strand
gaacaugcagccacgaacu

SEQ ID NO: 1083875 - RNA, 19 nt, Homo sapiens
  misc_RNA (1)...(19): siRNA sense strand
gagaacaugcagccacgaa

SEQ ID NO: 1083876 - RNA, 19 nt, Homo sapiens
  misc_RNA (1)...(19): siRNA sense strand
gaggagcuggaaaguguuu

SEQ ID NO: 1083877 - RNA, 19 nt, Homo sapiens
  misc_RNA (1)...(19): siRNA sense strand
caucagagagaauuaaugc

SEQ ID NO: 1083878 - RNA, 19 nt, Homo sapiens
  misc_RNA (1)...(19): siRNA sense strand
ucuacugccugaguguaua

SEQ ID NO: 1083879 - RNA, 19 nt, Homo sapiens
  misc_RNA (1)...(19): siRNA sense strand
gccgaaaacuuagguguga

SEQ ID NO: 1083880 - RNA, 19 nt, Homo sapiens
  misc_RNA (1)...(19): siRNA sense strand
aggugugacugaagacaaa

SEQ ID NO: 1083881 - RNA, 19 nt, Homo sapiens
  misc_RNA (1)...(19): siRNA sense strand
gcgacaucagagagaauua

SEQ ID NO: 1083882 - RNA, 19 nt, Homo sapiens
  misc_RNA (1)...(19): siRNA sense strand
ccaggccucauggguaaua

SEQ ID NO: 1083883 - RNA, 19 nt, Homo sapiens
  misc_RNA (1)...(19): siRNA sense strand
gacaucagagagaauuaau

SEQ ID NO: 1083884 - RNA, 19 nt, Homo sapiens
  misc_RNA (1)...(19): siRNA sense strand
gcagguggaggagcuggaa

SEQ ID NO: 1083885 - RNA, 19 nt, Homo sapiens
  misc_RNA (1)...(19): siRNA sense strand
gcucgccaaugaacuacgu

SEQ ID NO: 1083886 - RNA, 19 nt, Homo sapiens
  misc_RNA (1)...(19): siRNA sense strand
guaggcgacaucagagaga

SEQ ID NO: 1083887 - RNA, 19 nt, Homo sapiens
  misc_RNA (1)...(19): siRNA sense strand
gaauaaaagggccagaugu

SEQ ID NO: 1083888 - RNA, 19 nt, Homo sapiens
  misc_RNA (1)...(19): siRNA sense strand
gaacugguuuggaauccua

SEQ ID NO: 1083889 - RNA, 19 nt, Homo sapiens
  misc_RNA (1)...(19): siRNA sense strand
gcaguaugcuucccacaug

SEQ ID NO: 1083890 - RNA, 19 nt, Homo sapiens
  misc_RNA (1)...(19): siRNA sense strand
gcagcuggccgcagacaua

SEQ ID NO: 1083891 - RNA, 19 nt, Homo sapiens
  misc_RNA (1)...(19): siRNA sense strand
ggaaacgaacgguguugaa

SEQ ID NO: 1083892 - RNA, 19 nt, Homo sapiens
  misc_RNA (1)...(19): siRNA sense strand
ccuaguuccucacagucua

SEQ ID NO: 1083893 - RNA, 19 nt, Homo sapiens
  misc_RNA (1)...(19): siRNA sense strand
gaaacgaacgguguugaac

SEQ ID NO: 1083894 - RNA, 19 nt, Homo sapiens
  misc_RNA (1)...(19): siRNA sense strand
gaaguucaagguggugaga

SEQ ID NO: 1083895 - RNA, 19 nt, Homo sapiens
  misc_RNA (1)...(19): siRNA sense strand
gggaaacgaacgguguuga

SEQ ID NO: 1083896 - RNA, 19 nt, Homo sapiens
  misc_RNA (1)...(19): siRNA sense strand
aauccuaguuccucacagu

SEQ ID NO: 1083897 - RNA, 19 nt, Homo sapiens
  misc_RNA (1)...(19): siRNA sense strand
gagggacuccagaaguuca

SEQ ID NO: 1083898 - RNA, 19 nt, Homo sapiens
  misc_RNA (1)...(19): siRNA sense strand
ggacuccaagagaaacuca

SEQ ID NO: 1083899 - RNA, 19 nt, Homo sapiens
  misc_RNA (1)...(19): siRNA sense strand
gaaagcaucugccguguag

SEQ ID NO: 1083900 - RNA, 19 nt, Homo sapiens
  misc_RNA (1)...(19): siRNA sense strand
guagaaacguuauccaugu

SEQ ID NO: 1083901 - RNA, 19 nt, Homo sapiens
  misc_RNA (1)...(19): siRNA sense strand
ugaaaugagugccaauaaa

SEQ ID NO: 1083902 - RNA, 19 nt, Homo sapiens
  misc_RNA (1)...(19): siRNA sense strand
gaagccagauuugguguug

SEQ ID NO: 1083903 - RNA, 19 nt, Homo sapiens
  misc_RNA (1)...(19): siRNA sense strand
cagauuugguguuguguaa

SEQ ID NO: 1083904 - RNA, 19 nt, Homo sapiens
  misc_RNA (1)...(19): siRNA sense strand
gaacuagaucgagcugaua

SEQ ID NO: 1083905 - RNA, 19 nt, Homo sapiens
  misc_RNA (1)...(19): siRNA sense strand
ucagauuacuucauuguuc

SEQ ID NO: 1083906 - RNA, 19 nt, Homo sapiens
  misc_RNA (1)...(19): siRNA sense strand
ucucucagauuacuucauu

SEQ ID NO: 1083907 - RNA, 19 nt, Homo sapiens
  misc_RNA (1)...(19): siRNA sense strand
cuacucaccuagacauuau

SEQ ID NO: 1083908 - RNA, 19 nt, Homo sapiens
  misc_RNA (1)...(19): siRNA sense strand
agaaagugaucauugucua

SEQ ID NO: 1083909 - RNA, 19 nt, Homo sapiens
  misc_RNA (1)...(19): siRNA sense strand
gauagagacccuaguaaca

SEQ ID NO: 1083910 - RNA, 19 nt, Homo sapiens
  misc_RNA (1)...(19): siRNA sense strand
gaaaugagugccaauaaaa

SEQ ID NO: 1083911 - RNA, 19 nt, Homo sapiens
  misc_RNA (1)...(19): siRNA sense strand
gaugaaaugagugccaaua

SEQ ID NO: 1083912 - RNA, 19 nt, Homo sapiens
  misc_RNA (1)...(19): siRNA sense strand
gcugauagagacccuagua

SEQ ID NO: 1083913 - RNA, 19 nt, Homo sapiens
  misc_RNA (1)...(19): siRNA sense strand
cuaguaacauguauaccaa

SEQ ID NO: 1083914 - RNA, 19 nt, Homo sapiens
  misc_RNA (1)...(19): siRNA sense strand
cagauuacuucauuguuca

SEQ ID NO: 1083915 - RNA, 19 nt, Homo sapiens
  misc_RNA (1)...(19): siRNA sense strand
uaacggaccaggaacaugu

SEQ ID NO: 1083916 - RNA, 19 nt, Homo sapiens
  misc_RNA (1)...(19): siRNA sense strand
ggugugcguucucguucua

SEQ ID NO: 1083917 - RNA, 19 nt, Homo sapiens
  misc_RNA (1)...(19): siRNA sense strand
ugaacuagaucgagcugau

SEQ ID NO: 1083918 - RNA, 19 nt, Homo sapiens
  misc_RNA (1)...(19): siRNA sense strand
gaucauugucuacguugaa

SEQ ID NO: 1083919 - RNA, 19 nt, Homo sapiens
  misc_RNA (1)...(19): siRNA sense strand
uagagacccuaguaacaug

SEQ ID NO: 1083920 - RNA, 19 nt, Homo sapiens
  misc_RNA (1)...(19): siRNA sense strand
gggagucucucaguaucuu

SEQ ID NO: 1083921 - RNA, 19 nt, Homo sapiens
  misc_RNA (1)...(19): siRNA sense strand
ugacacugaugaaaugagu

SEQ ID NO: 1083922 - RNA, 19 nt, Homo sapiens
  misc_RNA (1)...(19): siRNA sense strand
gggauacuaggaauaaaga

SEQ ID NO: 1083923 - RNA, 19 nt, Homo sapiens
  misc_RNA (1)...(19): siRNA sense strand
gcgaauauggguagugcuu

SEQ ID NO: 1083924 - RNA, 19 nt, Homo sapiens
  misc_RNA (1)...(19): siRNA sense strand
gaaagugaucauugucuac

SEQ ID NO: 1083925 - RNA, 19 nt, Homo sapiens
  misc_RNA (1)...(19): siRNA sense strand
ggaauaaagaaagugauca

SEQ ID NO: 1083926 - RNA, 19 nt, Homo sapiens
  misc_RNA (1)...(19): siRNA sense strand
uaccuugggcgaauuguuu

SEQ ID NO: 1083927 - RNA, 19 nt, Homo sapiens
  misc_RNA (1)...(19): siRNA sense strand
uccaaugccuacucaccua

SEQ ID NO: 1083928 - RNA, 19 nt, Homo sapiens
  misc_RNA (1)...(19): siRNA sense strand
caagaagccgggagguuca

SEQ ID NO: 1083929 - RNA, 19 nt, Homo sapiens
  misc_RNA (1)...(19): siRNA sense strand
ccuacucaccuagacauua

SEQ ID NO: 1083930 - RNA, 19 nt, Homo sapiens
  misc_RNA (1)...(19): siRNA sense strand
ugaaagcaucugccgugua

SEQ ID NO: 1083931 - RNA, 19 nt, Homo sapiens
  misc_RNA (1)...(19): siRNA sense strand
gacccuaguaacauguaua

SEQ ID NO: 1083932 - RNA, 19 nt, Homo sapiens
  misc_RNA (1)...(19): siRNA sense strand
gauucuguuucaucucuca

SEQ ID NO: 1083933 - RNA, 19 nt, Homo sapiens
  misc_RNA (1)...(19): siRNA sense strand
cguuauccauguccggaaa

SEQ ID NO: 1083934 - RNA, 19 nt, Homo sapiens
  misc_RNA (1)...(19): siRNA sense strand
uagaaacguuauccauguc

SEQ ID NO: 1083935 - RNA, 19 nt, Homo sapiens
  misc_RNA (1)...(19): siRNA sense strand
aagcaucugccguguagaa

SEQ ID NO: 1083936 - RNA, 19 nt, Homo sapiens
  misc_RNA (1)...(19): siRNA sense strand
guuccuaucuguguaucug

SEQ ID NO: 1083937 - RNA, 19 nt, Homo sapiens
  misc_RNA (1)...(19): siRNA sense strand
gagacccuaguaacaugua

SEQ ID NO: 1083938 - RNA, 19 nt, Homo sapiens
  misc_RNA (1)...(19): siRNA sense strand
uuccuaauccugcgaauau

SEQ ID NO: 1083939 - RNA, 19 nt, Homo sapiens
  misc_RNA (1)...(19): siRNA sense strand
gauuugguguuguguaacg

SEQ ID NO: 1083940 - RNA, 19 nt, Homo sapiens
  misc_RNA (1)...(19): siRNA sense strand
ccauguggcucuccuuucc

SEQ ID NO: 1083941 - RNA, 19 nt, Homo sapiens
  misc_RNA (1)...(19): siRNA sense strand
cuaggaauaaagaaaguga

SEQ ID NO: 1083942 - RNA, 19 nt, Homo sapiens
  misc_RNA (1)...(19): siRNA sense strand
gguguaccuugggcgaauu

SEQ ID NO: 1083943 - RNA, 19 nt, Homo sapiens
  misc_RNA (1)...(19): siRNA sense strand
ccagauuugguguugugua

SEQ ID NO: 1083944 - RNA, 19 nt, Homo sapiens
  misc_RNA (1)...(19): siRNA sense strand
caucugccguguagaaacg

SEQ ID NO: 1083945 - RNA, 19 nt, Homo sapiens
  misc_RNA (1)...(19): siRNA sense strand
ugcugacacugaugaaaug

SEQ ID NO: 1083946 - RNA, 19 nt, Homo sapiens
  misc_RNA (1)...(19): siRNA sense strand
ccuaguaacauguauacca

SEQ ID NO: 1083947 - RNA, 19 nt, Homo sapiens
  misc_RNA (1)...(19): siRNA sense strand
agugaucauugucuacguu

SEQ ID NO: 1083948 - RNA, 19 nt, Homo sapiens
  misc_RNA (1)...(19): siRNA sense strand
cuugggauacuaggaauaa

SEQ ID NO: 1083949 - RNA, 19 nt, Homo sapiens
  misc_RNA (1)...(19): siRNA sense strand
augaaaugagugccaauaa

SEQ ID NO: 1083950 - RNA, 19 nt, Homo sapiens
  misc_RNA (1)...(19): siRNA sense strand
ccgggagucucucaguauc

SEQ ID NO: 1083951 - RNA, 19 nt, Homo sapiens
  misc_RNA (1)...(19): siRNA sense strand
guccggaaagauucuguuu

SEQ ID NO: 1083952 - RNA, 19 nt, Homo sapiens
  misc_RNA (1)...(19): siRNA sense strand
gcagauugcuugaaaguuu

SEQ ID NO: 1083953 - RNA, 19 nt, Homo sapiens
  misc_RNA (1)...(19): siRNA sense strand
ggacggaacuucuauaauc

SEQ ID NO: 1083954 - RNA, 19 nt, Homo sapiens
  misc_RNA (1)...(19): siRNA sense strand
cgacagaacugaauauguu

SEQ ID NO: 1083955 - RNA, 19 nt, Homo sapiens
  misc_RNA (1)...(19): siRNA sense strand
gaagagaaaugacaacagu

SEQ ID NO: 1083956 - RNA, 19 nt, Homo sapiens
  misc_RNA (1)...(19): siRNA sense strand
gaacuggcuuguccuguuu

SEQ ID NO: 1083957 - RNA, 19 nt, Homo sapiens
  misc_RNA (1)...(19): siRNA sense strand
gcacaaagcauucauaaag

SEQ ID NO: 1083958 - RNA, 19 nt, Homo sapiens
  misc_RNA (1)...(19): siRNA sense strand
gcaccgagaucaccuaugu

SEQ ID NO: 1083959 - RNA, 19 nt, Homo sapiens
  misc_RNA (1)...(19): siRNA sense strand
cagaagaccuauuaugauu

SEQ ID NO: 1083960 - RNA, 19 nt, Homo sapiens
  misc_RNA (1)...(19): siRNA sense strand
aaacaggacuuuauggauu

SEQ ID NO: 1083961 - RNA, 19 nt, Homo sapiens
  misc_RNA (1)...(19): siRNA sense strand
ucaaagaggugagacuaua

SEQ ID NO: 1083962 - RNA, 19 nt, Homo sapiens
  misc_RNA (1)...(19): siRNA sense strand
gcagagacuuacauucaaa

SEQ ID NO: 1083963 - RNA, 19 nt, Homo sapiens
  misc_RNA (1)...(19): siRNA sense strand
uaacagaaccuacuccauu

SEQ ID NO: 1083964 - RNA, 19 nt, Homo sapiens
  misc_RNA (1)...(19): siRNA sense strand
uugaauaccugguugauuu

SEQ ID NO: 1083965 - RNA, 19 nt, Homo sapiens
  misc_RNA (1)...(19): siRNA sense strand
gaaaugaaccgcacuguac

SEQ ID NO: 1083966 - RNA, 19 nt, Homo sapiens
  misc_RNA (1)...(19): siRNA sense strand
gcugugggcuguggaaaua

SEQ ID NO: 1083967 - RNA, 19 nt, Homo sapiens
  misc_RNA (1)...(19): siRNA sense strand
gaacuucuauaauccuuca

SEQ ID NO: 1083968 - RNA, 19 nt, Homo sapiens
  misc_RNA (1)...(19): siRNA sense strand
gaauaccaaugcucgcuuu

SEQ ID NO: 1083969 - RNA, 19 nt, Homo sapiens
  misc_RNA (1)...(19): siRNA sense strand
ugacugauguugcagauug

SEQ ID NO: 1083970 - RNA, 19 nt, Homo sapiens
  misc_RNA (1)...(19): siRNA sense strand
gcaaggacgugaugguugu

SEQ ID NO: 1083971 - RNA, 19 nt, Homo sapiens
  misc_RNA (1)...(19): siRNA sense strand
gcacaugugagaaauugua

SEQ ID NO: 1083972 - RNA, 19 nt, Homo sapiens
  misc_RNA (1)...(19): siRNA sense strand
gaccauaugcagagacuua

SEQ ID NO: 1083973 - RNA, 19 nt, Homo sapiens
  misc_RNA (1)...(19): siRNA sense strand
cagcacaaauuaucccuuu

SEQ ID NO: 1083974 - RNA, 19 nt, Homo sapiens
  misc_RNA (1)...(19): siRNA sense strand
ccauuucugugucauauuu

SEQ ID NO: 1083975 - RNA, 19 nt, Homo sapiens
  misc_RNA (1)...(19): siRNA sense strand
gcagaauccggcucaaaua

SEQ ID NO: 1083976 - RNA, 19 nt, Homo sapiens
  misc_RNA (1)...(19): siRNA sense strand
ucaccuauguggauuacua

SEQ ID NO: 1083977 - RNA, 19 nt, Homo sapiens
  misc_RNA (1)...(19): siRNA sense strand
gcauccaggucuucaauau

SEQ ID NO: 1083978 - RNA, 19 nt, Homo sapiens
  misc_RNA (1)...(19): siRNA sense strand
ccugagcucugcuuucuaa

SEQ ID NO: 1083979 - RNA, 19 nt, Homo sapiens
  misc_RNA (1)...(19): siRNA sense strand
gcucggaccuugaauaaac

SEQ ID NO: 1083980 - RNA, 19 nt, Homo sapiens
  misc_RNA (1)...(19): siRNA sense strand
gaaccuacuccauugauga

SEQ ID NO: 1083981 - RNA, 19 nt, Homo sapiens
  misc_RNA (1)...(19): siRNA sense strand
uaacgaaugguaugacuuu

SEQ ID NO: 1083982 - RNA, 19 nt, Homo sapiens
  misc_RNA (1)...(19): siRNA sense strand
aaacagggcaugaugauga

SEQ ID NO: 1083983 - RNA, 19 nt, Homo sapiens
  misc_RNA (1)...(19): siRNA sense strand
gacaacauccagaggaaua

SEQ ID NO: 1083984 - RNA, 19 nt, Homo sapiens
  misc_RNA (1)...(19): siRNA sense strand
gaagcauccucuagcaaug

SEQ ID NO: 1083985 - RNA, 19 nt, Homo sapiens
  misc_RNA (1)...(19): siRNA sense strand
cacaaagcauucauaaaga

SEQ ID NO: 1083986 - RNA, 19 nt, Homo sapiens
  misc_RNA (1)...(19): siRNA sense strand
gcacuguuguggauucaga

SEQ ID NO: 1083987 - RNA, 19 nt, Homo sapiens
  misc_RNA (1)...(19): siRNA sense strand
gaaccgcacuguacagaac

SEQ ID NO: 1083988 - RNA, 19 nt, Homo sapiens
  misc_RNA (1)...(19): siRNA sense strand
caagaucgcuaugcagaug

SEQ ID NO: 1083989 - RNA, 19 nt, Homo sapiens
  misc_RNA (1)...(19): siRNA sense strand
gcugagaauugcuuuacuu

SEQ ID NO: 1083990 - RNA, 19 nt, Homo sapiens
  misc_RNA (1)...(19): siRNA sense strand
ccacgauucuuuaccgaaa

SEQ ID NO: 1083991 - RNA, 19 nt, Homo sapiens
  misc_RNA (1)...(19): siRNA sense strand
gaugaaggcuguggcugaa

SEQ ID NO: 1083992 - RNA, 19 nt, Homo sapiens
  misc_RNA (1)...(19): siRNA sense strand
aagcagcaguaugauauua

SEQ ID NO: 1083993 - RNA, 19 nt, Homo sapiens
  misc_RNA (1)...(19): siRNA sense strand
gaucucaaccaacgauaaa

SEQ ID NO: 1083994 - RNA, 19 nt, Homo sapiens
  misc_RNA (1)...(19): siRNA sense strand
gaauaaacagggcaugaug

SEQ ID NO: 1083995 - RNA, 19 nt, Homo sapiens
  misc_RNA (1)...(19): siRNA sense strand
gaggugagacuauaaagau

SEQ ID NO: 1083996 - RNA, 19 nt, Homo sapiens
  misc_RNA (1)...(19): siRNA sense strand
uuagagcuauacagcaaua

SEQ ID NO: 1083997 - RNA, 19 nt, Homo sapiens
  misc_RNA (1)...(19): siRNA sense strand
guauugaugucuguaaaga

SEQ ID NO: 1083998 - RNA, 19 nt, Homo sapiens
  misc_RNA (1)...(19): siRNA sense strand
caaagaggugagacuauaa

SEQ ID NO: 1083999 - RNA, 19 nt, Homo sapiens
  misc_RNA (1)...(19): siRNA sense strand
guuagucuguuaaagaaga

SEQ ID NO: 1084000 - RNA, 19 nt, Homo sapiens
  misc_RNA (1)...(19): siRNA sense strand
gcucaagacugucggugau

SEQ ID NO: 1084001 - RNA, 19 nt, Homo sapiens
  misc_RNA (1)...(19): siRNA sense strand
acaaaccucuuuaacuuag

SEQ ID NO: 1084002 - RNA, 19 nt, Homo sapiens
  misc_RNA (1)...(19): siRNA sense strand
ggaauuagccaaccaucuc

SEQ ID NO: 1084003 - RNA, 19 nt, Homo sapiens
  misc_RNA (1)...(19): siRNA sense strand
gccgagagcuuucugaacu

SEQ ID NO: 1084004 - RNA, 19 nt, Homo sapiens
  misc_RNA (1)...(19): siRNA sense strand
aaucagcccaugcuuguua

SEQ ID NO: 1084005 - RNA, 19 nt, Homo sapiens
  misc_RNA (1)...(19): siRNA sense strand
gagaucaccuauguggauu

SEQ ID NO: 1084006 - RNA, 19 nt, Homo sapiens
  misc_RNA (1)...(19): siRNA sense strand
aaacaaacaggacuuuaug

SEQ ID NO: 1084007 - RNA, 19 nt, Homo sapiens
  misc_RNA (1)...(19): siRNA sense strand
cagcacggauaauugugua

SEQ ID NO: 1084008 - RNA, 19 nt, Homo sapiens
  misc_RNA (1)...(19): siRNA sense strand
ggaacaagcaggaucucaa

SEQ ID NO: 1084009 - RNA, 19 nt, Homo sapiens
  misc_RNA (1)...(19): siRNA sense strand
acaaaguccuccggaauga

SEQ ID NO: 1084010 - RNA, 19 nt, Homo sapiens
  misc_RNA (1)...(19): siRNA sense strand
cacaaaagcuagaagaaaa

SEQ ID NO: 1084011 - RNA, 19 nt, Homo sapiens
  misc_RNA (1)...(19): siRNA sense strand
agagggagcugccaucaag

SEQ ID NO: 1084012 - RNA, 19 nt, Homo sapiens
  misc_RNA (1)...(19): siRNA sense strand
cgaaaugaaccgcacugua

SEQ ID NO: 1084013 - RNA, 19 nt, Homo sapiens
  misc_RNA (1)...(19): siRNA sense strand
caagcaggaucucaaccaa

SEQ ID NO: 1084014 - RNA, 19 nt, Homo sapiens
  misc_RNA (1)...(19): siRNA sense strand
gaagaccuauuaugauucc

SEQ ID NO: 1084015 - RNA, 19 nt, Homo sapiens
  misc_RNA (1)...(19): siRNA sense strand
uaaaugcacagucuuugaa

SEQ ID NO: 1084016 - RNA, 19 nt, Homo sapiens
  misc_RNA (1)...(19): siRNA sense strand
gauauucgaacuugcaaga

SEQ ID NO: 1084017 - RNA, 19 nt, Homo sapiens
  misc_RNA (1)...(19): siRNA sense strand
ggucuucaauaucaucuuc

SEQ ID NO: 1084018 - RNA, 19 nt, Homo sapiens
  misc_RNA (1)...(19): siRNA sense strand
uaccaaugcucgcuuugaa

SEQ ID NO: 1084019 - RNA, 19 nt, Homo sapiens
  misc_RNA (1)...(19): siRNA sense strand
caacacguaacgaauggua

SEQ ID NO: 1084020 - RNA, 19 nt, Homo sapiens
  misc_RNA (1)...(19): siRNA sense strand
ggucagcuggaaacacuua

SEQ ID NO: 1084021 - RNA, 19 nt, Homo sapiens
  misc_RNA (1)...(19): siRNA sense strand
gaccuauuaugauuccauu

SEQ ID NO: 1084022 - RNA, 19 nt, Homo sapiens
  misc_RNA (1)...(19): siRNA sense strand
gcaauauguugauccugau

SEQ ID NO: 1084023 - RNA, 19 nt, Homo sapiens
  misc_RNA (1)...(19): siRNA sense strand
gcugacugguccaaggaua

SEQ ID NO: 1084024 - RNA, 19 nt, Homo sapiens
  misc_RNA (1)...(19): siRNA sense strand
ucuagaaggcugagaauug

SEQ ID NO: 1084025 - RNA, 19 nt, Homo sapiens
  misc_RNA (1)...(19): siRNA sense strand
gaacuguuaguccuaccua

SEQ ID NO: 1084026 - RNA, 19 nt, Homo sapiens
  misc_RNA (1)...(19): siRNA sense strand
ccaccaagaucgcuaugca

SEQ ID NO: 1084027 - RNA, 19 nt, Homo sapiens
  misc_RNA (1)...(19): siRNA sense strand
uauucgaacuugcaagauu

SEQ ID NO: 1084028 - RNA, 19 nt, Homo sapiens
  misc_RNA (1)...(19): siRNA sense strand
gaaugagacgguucuggaa

SEQ ID NO: 1084029 - RNA, 19 nt, Homo sapiens
  misc_RNA (1)...(19): siRNA sense strand
gugcaugccacgauucuuu

SEQ ID NO: 1084030 - RNA, 19 nt, Homo sapiens
  misc_RNA (1)...(19): siRNA sense strand
aacaggacuuuauggauuu

SEQ ID NO: 1084031 - RNA, 19 nt, Homo sapiens
  misc_RNA (1)...(19): siRNA sense strand
gaauccggcucaaauacca

SEQ ID NO: 1084032 - RNA, 19 nt, Homo sapiens
  misc_RNA (1)...(19): siRNA sense strand
agagaacaaugacugaugu

SEQ ID NO: 1084033 - RNA, 19 nt, Homo sapiens
  misc_RNA (1)...(19): siRNA sense strand
guaaagaugcacucagcaa

SEQ ID NO: 1084034 - RNA, 19 nt, Homo sapiens
  misc_RNA (1)...(19): siRNA sense strand
ccacacacaccuuucagaa

SEQ ID NO: 1084035 - RNA, 19 nt, Homo sapiens
  misc_RNA (1)...(19): siRNA sense strand
agaacuggcuuguccuguu

SEQ ID NO: 1084036 - RNA, 19 nt, Homo sapiens
  misc_RNA (1)...(19): siRNA sense strand
auagugaacuuuccaacga

SEQ ID NO: 1084037 - RNA, 19 nt, Homo sapiens
  misc_RNA (1)...(19): siRNA sense strand
gaagcaacacguaacgaau

SEQ ID NO: 1084038 - RNA, 19 nt, Homo sapiens
  misc_RNA (1)...(19): siRNA sense strand
acagaguugucaagugaaa

SEQ ID NO: 1084039 - RNA, 19 nt, Homo sapiens
  misc_RNA (1)...(19): siRNA sense strand
gagacuuacauucaaauug

SEQ ID NO: 1084040 - RNA, 19 nt, Homo sapiens
  misc_RNA (1)...(19): siRNA sense strand
gcuggaaacacuuauugaa

SEQ ID NO: 1084041 - RNA, 19 nt, Homo sapiens
  misc_RNA (1)...(19): siRNA sense strand
cuggagcacucaacaaaug

SEQ ID NO: 1084042 - RNA, 19 nt, Homo sapiens
  misc_RNA (1)...(19): siRNA sense strand
caacgauaaauaugggaua

SEQ ID NO: 1084043 - RNA, 19 nt, Homo sapiens
  misc_RNA (1)...(19): siRNA sense strand
acaagcagcaguaugauau

SEQ ID NO: 1084044 - RNA, 19 nt, Homo sapiens
  misc_RNA (1)...(19): siRNA sense strand
aacagaaccuacuccauug

SEQ ID NO: 1084045 - RNA, 19 nt, Homo sapiens
  misc_RNA (1)...(19): siRNA sense strand
cugugaaacugguuacaaa

SEQ ID NO: 1084046 - RNA, 19 nt, Homo sapiens
  misc_RNA (1)...(19): siRNA sense strand
agaagugcaugccacgauu

SEQ ID NO: 1084047 - RNA, 19 nt, Homo sapiens
  misc_RNA (1)...(19): siRNA sense strand
aauaccagcucaagacugu

SEQ ID NO: 1084048 - RNA, 19 nt, Homo sapiens
  misc_RNA (1)...(19): siRNA sense strand
ggacuaccccaaaaucaua

SEQ ID NO: 1084049 - RNA, 19 nt, Homo sapiens
  misc_RNA (1)...(19): siRNA sense strand
gcagguuccaugggauuua

SEQ ID NO: 1084050 - RNA, 19 nt, Homo sapiens
  misc_RNA (1)...(19): siRNA sense strand
ucucaaccaacgauaaaua

SEQ ID NO: 1084051 - RNA, 19 nt, Homo sapiens
  misc_RNA (1)...(19): siRNA sense strand
gaacaagcaggaucucaac

SEQ ID NO: 1084052 - RNA, 19 nt, Homo sapiens
  misc_RNA (1)...(19): siRNA sense strand
caacaugccugauuauaug

SEQ ID NO: 1084053 - RNA, 19 nt, Homo sapiens
  misc_RNA (1)...(19): siRNA sense strand
guaagggccuccucaagaa

SEQ ID NO: 1084054 - RNA, 19 nt, Homo sapiens
  misc_RNA (1)...(19): siRNA sense strand
ggcaacagauggacucuuu

SEQ ID NO: 1084055 - RNA, 19 nt, Homo sapiens
  misc_RNA (1)...(19): siRNA sense strand
cagaugagcagcagcauua

SEQ ID NO: 1084056 - RNA, 19 nt, Homo sapiens
  misc_RNA (1)...(19): siRNA sense strand
gaaggacgguucguaccua

SEQ ID NO: 1084057 - RNA, 19 nt, Homo sapiens
  misc_RNA (1)...(19): siRNA sense strand
ggacgguucguaccuagua

SEQ ID NO: 1084058 - RNA, 19 nt, Homo sapiens
  misc_RNA (1)...(19): siRNA sense strand
cagcaaaccugggcgauuc

SEQ ID NO: 1084059 - RNA, 19 nt, Homo sapiens
  misc_RNA (1)...(19): siRNA sense strand
caacagauggacucuuuga

SEQ ID NO: 1084060 - RNA, 19 nt, Homo sapiens
  misc_RNA (1)...(19): siRNA sense strand
cagauggacucuuugacaa

SEQ ID NO: 1084061 - RNA, 19 nt, Homo sapiens
  misc_RNA (1)...(19): siRNA sense strand
gagagacuauggaguugau

SEQ ID NO: 1084062 - RNA, 19 nt, Homo sapiens
  misc_RNA (1)...(19): siRNA sense strand
uugacaacaugccugauua

SEQ ID NO: 1084063 - RNA, 19 nt, Homo sapiens
  misc_RNA (1)...(19): siRNA sense strand
gacaacaugccugauuaua

SEQ ID NO: 1084064 - RNA, 19 nt, Homo sapiens
  misc_RNA (1)...(19): siRNA sense strand
gacaucaccguccuucuuu

SEQ ID NO: 1084065 - RNA, 19 nt, Homo sapiens
  misc_RNA (1)...(19): siRNA sense strand
ccuaugacccaaauuauau

SEQ ID NO: 1084066 - RNA, 19 nt, Homo sapiens
  misc_RNA (1)...(19): siRNA sense strand
gccuaugacccaaauuaua

SEQ ID NO: 1084067 - RNA, 19 nt, Homo sapiens
  misc_RNA (1)...(19): siRNA sense strand
caccguccuucuuucaaua

SEQ ID NO: 1084068 - RNA, 19 nt, Homo sapiens
  misc_RNA (1)...(19): siRNA sense strand
guaggaggcuggagagacu

SEQ ID NO: 1084069 - RNA, 19 nt, Homo sapiens
  misc_RNA (1)...(19): siRNA sense strand
gauggacucuuugacaaca

SEQ ID NO: 1084070 - RNA, 19 nt, Homo sapiens
  misc_RNA (1)...(19): siRNA sense strand
cguaagggccuccucaaga

SEQ ID NO: 1084071 - RNA, 19 nt, Homo sapiens
  misc_RNA (1)...(19): siRNA sense strand
gguugcagaugguguagga

SEQ ID NO: 1084072 - RNA, 19 nt, Homo sapiens
  misc_RNA (1)...(19): siRNA sense strand
ucaauucucagggacuuua

SEQ ID NO: 1084073 - RNA, 19 nt, Homo sapiens
  misc_RNA (1)...(19): siRNA sense strand
ugacaucaccguccuucuu

SEQ ID NO: 1084074 - RNA, 19 nt, Homo sapiens
  misc_RNA (1)...(19): siRNA sense strand
acaacaugccugauuauau

SEQ ID NO: 1084075 - RNA, 19 nt, Homo sapiens
  misc_RNA (1)...(19): siRNA sense strand
cagaaccagccaccgcuua

SEQ ID NO: 1084076 - RNA, 19 nt, Homo sapiens
  misc_RNA (1)...(19): siRNA sense strand
ucaccguccuucuuucaau

SEQ ID NO: 1084077 - RNA, 19 nt, Homo sapiens
  misc_RNA (1)...(19): siRNA sense strand
ugauccaucucaauucuca

SEQ ID NO: 1084078 - RNA, 19 nt, Homo sapiens
  misc_RNA (1)...(19): siRNA sense strand
gcagcagcauuacuucaac

SEQ ID NO: 1084079 - RNA, 19 nt, Homo sapiens
  misc_RNA (1)...(19): siRNA sense strand
aauaguggcugaguauaca

SEQ ID NO: 1084080 - RNA, 19 nt, Homo sapiens
  misc_RNA (1)...(19): siRNA sense strand
uggccuaugacccaaauua

SEQ ID NO: 1084081 - RNA, 19 nt, Homo sapiens
  misc_RNA (1)...(19): siRNA sense strand
gacgguucguaccuaguaa

SEQ ID NO: 1084082 - RNA, 19 nt, Homo sapiens
  misc_RNA (1)...(19): siRNA sense strand
caacagacugccagaagca

SEQ ID NO: 1084083 - RNA, 19 nt, Homo sapiens
  misc_RNA (1)...(19): siRNA sense strand
ggaauucucaccacaagcu

SEQ ID NO: 1084084 - RNA, 19 nt, Homo sapiens
  misc_RNA (1)...(19): siRNA sense strand
cuaguaaucccauuggaau

SEQ ID NO: 1084085 - RNA, 19 nt, Homo sapiens
  misc_RNA (1)...(19): siRNA sense strand
uagcacgucuuucgauguc

SEQ ID NO: 1084086 - RNA, 19 nt, Homo sapiens
  misc_RNA (1)...(19): siRNA sense strand
gcugauagcacgucuuucg

SEQ ID NO: 1084087 - RNA, 19 nt, Homo sapiens
  misc_RNA (1)...(19): siRNA sense strand
uuucaauaguggcugagua

SEQ ID NO: 1084088 - RNA, 19 nt, Homo sapiens
  misc_RNA (1)...(19): siRNA sense strand
guaccuaguaaucccauug

SEQ ID NO: 1084089 - RNA, 19 nt, Homo sapiens
  misc_RNA (1)...(19): siRNA sense strand
gagcagcagcauuacuuca

SEQ ID NO: 1084090 - RNA, 19 nt, Homo sapiens
  misc_RNA (1)...(19): siRNA sense strand
uaugagaguauacaacaga

SEQ ID NO: 1084091 - RNA, 19 nt, Homo sapiens
  misc_RNA (1)...(19): siRNA sense strand
caauaguggcugaguauac

SEQ ID NO: 1084092 - RNA, 19 nt, Homo sapiens
  misc_RNA (1)...(19): siRNA sense strand
ggagagacuauggaguuga

SEQ ID NO: 1084093 - RNA, 19 nt, Homo sapiens
  misc_RNA (1)...(19): siRNA sense strand
cagcagcauuacuucaaca

SEQ ID NO: 1084094 - RNA, 19 nt, Homo sapiens
  misc_RNA (1)...(19): siRNA sense strand
gagguggaaagccagauga

SEQ ID NO: 1084095 - RNA, 19 nt, Homo sapiens
  misc_RNA (1)...(19): siRNA sense strand
caugccugauuauaugauu

SEQ ID NO: 1084096 - RNA, 19 nt, Homo sapiens
  misc_RNA (1)...(19): siRNA sense strand
guaaucccauuggaauucu

SEQ ID NO: 1084097 - RNA, 19 nt, Homo sapiens
  misc_RNA (1)...(19): siRNA sense strand
ugacaacaugccugauuau

SEQ ID NO: 1084098 - RNA, 19 nt, Homo sapiens
  misc_RNA (1)...(19): siRNA sense strand
cagcaccgccugcauugug

SEQ ID NO: 1084099 - RNA, 19 nt, Homo sapiens
  misc_RNA (1)...(19): siRNA sense strand
acagauggacucuuugaca

SEQ ID NO: 1084100 - RNA, 19 nt, Homo sapiens
  misc_RNA (1)...(19): siRNA sense strand
gcuggccuaugacccaaau

SEQ ID NO: 1084101 - RNA, 19 nt, Homo sapiens
  misc_RNA (1)...(19): siRNA sense strand
gaauucucaccacaagcua

SEQ ID NO: 1084102 - RNA, 19 nt, Homo sapiens
  misc_RNA (1)...(19): siRNA sense strand
cuggagagacuauggaguu

SEQ ID NO: 1084103 - RNA, 19 nt, Homo sapiens
  misc_RNA (1)...(19): siRNA sense strand
gucuuucgauguccagcua

SEQ ID NO: 1084104 - RNA, 19 nt, Homo sapiens
  misc_RNA (1)...(19): siRNA sense strand
ggccuaugacccaaauuau

SEQ ID NO: 1084105 - RNA, 19 nt, Homo sapiens
  misc_RNA (1)...(19): siRNA sense strand
guggaaagccagaugacau

SEQ ID NO: 1084106 - RNA, 19 nt, Homo sapiens
  misc_RNA (1)...(19): siRNA sense strand
uggagagacuauggaguug

SEQ ID NO: 1084107 - RNA, 19 nt, Homo sapiens
  misc_RNA (1)...(19): siRNA sense strand
gcaacagauggacucuuug

SEQ ID NO: 1084108 - RNA, 19 nt, Homo sapiens
  misc_RNA (1)...(19): siRNA sense strand
ccuaguaaucccauuggaa

SEQ ID NO: 1084109 - RNA, 19 nt, Homo sapiens
  misc_RNA (1)...(19): siRNA sense strand
ucaauaguggcugaguaua

SEQ ID NO: 1084110 - RNA, 19 nt, Homo sapiens
  misc_RNA (1)...(19): siRNA sense strand
gaaccagccaccgcuuaca

SEQ ID NO: 1084111 - RNA, 19 nt, Homo sapiens
  misc_RNA (1)...(19): siRNA sense strand
caucaccguccuucuuuca

SEQ ID NO: 1084112 - RNA, 19 nt, Homo sapiens
  misc_RNA (1)...(19): siRNA sense strand
gaaugugagagguggaaag

SEQ ID NO: 1084113 - RNA, 19 nt, Homo sapiens
  misc_RNA (1)...(19): siRNA sense strand
cagacugccagaagcauug

SEQ ID NO: 1084114 - RNA, 19 nt, Homo sapiens
  misc_RNA (1)...(19): siRNA sense strand
guccagcuaggagacauua

SEQ ID NO: 1084115 - RNA, 19 nt, Homo sapiens
  misc_RNA (1)...(19): siRNA sense strand
ccagcuaggagacauuauc

SEQ ID NO: 1084116 - RNA, 19 nt, Homo sapiens
  misc_RNA (1)...(19): siRNA sense strand
guuugcaugugacaaugga

SEQ ID NO: 1084117 - RNA, 19 nt, Homo sapiens
  misc_RNA (1)...(19): siRNA sense strand
ucagaugagcagcagcauu

SEQ ID NO: 1084118 - RNA, 19 nt, Homo sapiens
  misc_RNA (1)...(19): siRNA sense strand
uggcugaguauacagacua

SEQ ID NO: 1084119 - RNA, 19 nt, Homo sapiens
  misc_RNA (1)...(19): siRNA sense strand
ucucaauucucagggacuu

SEQ ID NO: 1084120 - RNA, 19 nt, Homo sapiens
  misc_RNA (1)...(19): siRNA sense strand
ccauagagcuguccugguu

SEQ ID NO: 1084121 - RNA, 19 nt, Homo sapiens
  misc_RNA (1)...(19): siRNA sense strand
ggacuucgcucgcuuacac

SEQ ID NO: 1084122 - RNA, 19 nt, Homo sapiens
  misc_RNA (1)...(19): siRNA sense strand
ggcagacgcuuccucuuug

SEQ ID NO: 1084123 - RNA, 19 nt, Homo sapiens
  misc_RNA (1)...(19): siRNA sense strand
ccucuuugcugcuugcuuu

SEQ ID NO: 1084124 - RNA, 19 nt, Homo sapiens
  misc_RNA (1)...(19): siRNA sense strand
gcguagagcccuucuccua

SEQ ID NO: 1084125 - RNA, 19 nt, Homo sapiens
  misc_RNA (1)...(19): siRNA sense strand
gauugaggacgaugcauuu

SEQ ID NO: 1084126 - RNA, 19 nt, Homo sapiens
  misc_RNA (1)...(19): siRNA sense strand
gccggcagcuuccugagaa

SEQ ID NO: 1084127 - RNA, 19 nt, Homo sapiens
  misc_RNA (1)...(19): siRNA sense strand
caccuaagccuggccaaua

SEQ ID NO: 1084128 - RNA, 19 nt, Homo sapiens
  misc_RNA (1)...(19): siRNA sense strand
cggcagacgcuuccucuuu

SEQ ID NO: 1084129 - RNA, 19 nt, Homo sapiens
  misc_RNA (1)...(19): siRNA sense strand
gcgcugcuccugcucuaaa

SEQ ID NO: 1084130 - RNA, 19 nt, Homo sapiens
  misc_RNA (1)...(19): siRNA sense strand
accuaagccuggccaauaa

SEQ ID NO: 1084131 - RNA, 19 nt, Homo sapiens
  misc_RNA (1)...(19): siRNA sense strand
caucgaggacaaugagauu

SEQ ID NO: 1084132 - RNA, 19 nt, Homo sapiens
  misc_RNA (1)...(19): siRNA sense strand
ggaccaacuggccauccua

SEQ ID NO: 1084133 - RNA, 19 nt, Homo sapiens
  misc_RNA (1)...(19): siRNA sense strand
caacuccuucuccgugauu

SEQ ID NO: 1084134 - RNA, 19 nt, Homo sapiens
  misc_RNA (1)...(19): siRNA sense strand
ugcaguaccucuucaucga

SEQ ID NO: 1084135 - RNA, 19 nt, Homo sapiens
  misc_RNA (1)...(19): siRNA sense strand
gcagacgcuuccucuuugc

SEQ ID NO: 1084136 - RNA, 19 nt, Homo sapiens
  misc_RNA (1)...(19): siRNA sense strand
ugggacggcuccauguuuc

SEQ ID NO: 1084137 - RNA, 19 nt, Homo sapiens
  misc_RNA (1)...(19): siRNA sense strand
ggcuccaucucuaagaaug

SEQ ID NO: 1084138 - RNA, 19 nt, Homo sapiens
  misc_RNA (1)...(19): siRNA sense strand
ugauugaggacgaugcauu

SEQ ID NO: 1084139 - RNA, 19 nt, Homo sapiens
  misc_RNA (1)...(19): siRNA sense strand
cuaccagcaucacgagauc

SEQ ID NO: 1084140 - RNA, 19 nt, Homo sapiens
  misc_RNA (1)...(19): siRNA sense strand
gcucaucgccagggaccaa

SEQ ID NO: 1084141 - RNA, 19 nt, Homo sapiens
  misc_RNA (1)...(19): siRNA sense strand
agaggacuucgcucgcuua

SEQ ID NO: 1084142 - RNA, 19 nt, Homo sapiens
  misc_RNA (1)...(19): siRNA sense strand
cauccuaggcagcgacuuc

SEQ ID NO: 1084143 - RNA, 19 nt, Homo sapiens
  misc_RNA (1)...(19): siRNA sense strand
ggaacaaggaucccaucuu

SEQ ID NO: 1084144 - RNA, 19 nt, Homo sapiens
  misc_RNA (1)...(19): siRNA sense strand
ggucuccgcuccucaacgu

SEQ ID NO: 1084145 - RNA, 19 nt, Homo sapiens
  misc_RNA (1)...(19): siRNA sense strand
ucacagaacugcaggagaa

SEQ ID NO: 1084146 - RNA, 19 nt, Homo sapiens
  misc_RNA (1)...(19): siRNA sense strand
caacgucuaugucaaguuc

SEQ ID NO: 1084147 - RNA, 19 nt, Homo sapiens
  misc_RNA (1)...(19): siRNA sense strand
gccaggagguguucacaga

SEQ ID NO: 1084148 - RNA, 19 nt, Homo sapiens
  misc_RNA (1)...(19): siRNA sense strand
ggacugagaaggacaaggu

SEQ ID NO: 1084149 - RNA, 19 nt, Homo sapiens
  misc_RNA (1)...(19): siRNA sense strand
gcucccggcuucacaacaa

SEQ ID NO: 1084150 - RNA, 19 nt, Homo sapiens
  misc_RNA (1)...(19): siRNA sense strand
cgagguggcuucugcaacu

SEQ ID NO: 1084151 - RNA, 19 nt, Homo sapiens
  misc_RNA (1)...(19): siRNA sense strand
gagaggaaccaucgguguu

SEQ ID NO: 1084152 - RNA, 19 nt, Homo sapiens
  misc_RNA (1)...(19): siRNA sense strand
cagaacugcaggagaagua

SEQ ID NO: 1084153 - RNA, 19 nt, Homo sapiens
  misc_RNA (1)...(19): siRNA sense strand
gaacugcaggagaaguaug

SEQ ID NO: 1084154 - RNA, 19 nt, Homo sapiens
  misc_RNA (1)...(19): siRNA sense strand
gaaugugugcgacaaccuu

SEQ ID NO: 1084155 - RNA, 19 nt, Homo sapiens
  misc_RNA (1)...(19): siRNA sense strand
ggagaaguauggggagauu

SEQ ID NO: 1084156 - RNA, 19 nt, Homo sapiens
  misc_RNA (1)...(19): siRNA sense strand
gagauugaagagaugaaug

SEQ ID NO: 1084157 - RNA, 19 nt, Homo sapiens
  misc_RNA (1)...(19): siRNA sense strand
gggcaacgucuaugucaag

SEQ ID NO: 1084158 - RNA, 19 nt, Homo sapiens
  misc_RNA (1)...(19): siRNA sense strand
cugagaaggacaagguuaa

SEQ ID NO: 1084159 - RNA, 19 nt, Homo sapiens
  misc_RNA (1)...(19): siRNA sense strand
ggagauugaagagaugaau

SEQ ID NO: 1084160 - RNA, 19 nt, Homo sapiens
  misc_RNA (1)...(19): siRNA sense strand
guuccauacuggccacaau

SEQ ID NO: 1084161 - RNA, 19 nt, Homo sapiens
  misc_RNA (1)...(19): siRNA sense strand
gagguggcuucugcaacuu

SEQ ID NO: 1084162 - RNA, 19 nt, Homo sapiens
  misc_RNA (1)...(19): siRNA sense strand
cugaauauuuagcuucgau

SEQ ID NO: 1084163 - RNA, 19 nt, Homo sapiens
  misc_RNA (1)...(19): siRNA sense strand
cacaacaagccgacauuca

SEQ ID NO: 1084164 - RNA, 19 nt, Homo sapiens
  misc_RNA (1)...(19): siRNA sense strand
gguggcuucugcaacuuca

SEQ ID NO: 1084165 - RNA, 19 nt, Homo sapiens
  misc_RNA (1)...(19): siRNA sense strand
gauauucgggacugagaag

SEQ ID NO: 1084166 - RNA, 19 nt, Homo sapiens
  misc_RNA (1)...(19): siRNA sense strand
gcaacgucuaugucaaguu

SEQ ID NO: 1084167 - RNA, 19 nt, Homo sapiens
  misc_RNA (1)...(19): siRNA sense strand
agaaggacaagguuaacug

SEQ ID NO: 1084168 - RNA, 19 nt, Homo sapiens
  misc_RNA (1)...(19): siRNA sense strand
acaacaagccgacauucag

SEQ ID NO: 1084169 - RNA, 19 nt, Homo sapiens
  misc_RNA (1)...(19): siRNA sense strand
cuagguaacuugacaauca

SEQ ID NO: 1084170 - RNA, 19 nt, Homo sapiens
  misc_RNA (1)...(19): siRNA sense strand
ucaugaagcuggccuguga

SEQ ID NO: 1084171 - RNA, 19 nt, Homo sapiens
  misc_RNA (1)...(19): siRNA sense strand
uaauaggccucccugguuu

SEQ ID NO: 1084172 - RNA, 19 nt, Homo sapiens
  misc_RNA (1)...(19): siRNA sense strand
gcacuugcgucucucaugu

SEQ ID NO: 1084173 - RNA, 19 nt, Homo sapiens
  misc_RNA (1)...(19): siRNA sense strand
ccacuaccauccaguuuga

SEQ ID NO: 1084174 - RNA, 19 nt, Homo sapiens
  misc_RNA (1)...(19): siRNA sense strand
ccaauauccuuucccauuc

SEQ ID NO: 1084175 - RNA, 19 nt, Homo sapiens
  misc_RNA (1)...(19): siRNA sense strand
gcuacauacuucauccuaa

SEQ ID NO: 1084176 - RNA, 19 nt, Homo sapiens
  misc_RNA (1)...(19): siRNA sense strand
ucucauaucugcuuauucu

SEQ ID NO: 1084177 - RNA, 19 nt, Homo sapiens
  misc_RNA (1)...(19): siRNA sense strand
ggcaaugaauccagugcua

SEQ ID NO: 1084178 - RNA, 19 nt, Homo sapiens
  misc_RNA (1)...(19): siRNA sense strand
ccaauugucuauggaguga

SEQ ID NO: 1084179 - RNA, 19 nt, Homo sapiens
  misc_RNA (1)...(19): siRNA sense strand
cuacauacuucauccuaau

SEQ ID NO: 1084180 - RNA, 19 nt, Homo sapiens
  misc_RNA (1)...(19): siRNA sense strand
ucaagcagcugcccuucug

SEQ ID NO: 1084181 - RNA, 19 nt, Homo sapiens
  misc_RNA (1)...(19): siRNA sense strand
gaugauauccgggucaaug

SEQ ID NO: 1084182 - RNA, 19 nt, Homo sapiens
  misc_RNA (1)...(19): siRNA sense strand
gaagcuggccugugaugau

SEQ ID NO: 1084183 - RNA, 19 nt, Homo sapiens
  misc_RNA (1)...(19): siRNA sense strand
cagcgcauccuucgacuuu

SEQ ID NO: 1084184 - RNA, 19 nt, Homo sapiens
  misc_RNA (1)...(19): siRNA sense strand
cuauguaccuuucauugga

SEQ ID NO: 1084185 - RNA, 19 nt, Homo sapiens
  misc_RNA (1)...(19): siRNA sense strand
aagcuggccugugaugaua

SEQ ID NO: 1084186 - RNA, 19 nt, Homo sapiens
  misc_RNA (1)...(19): siRNA sense strand
ggccuggacucacuucuca

SEQ ID NO: 1084187 - RNA, 19 nt, Homo sapiens
  misc_RNA (1)...(19): siRNA sense strand
gagcccauguauauauuuc

SEQ ID NO: 1084188 - RNA, 19 nt, Homo sapiens
  misc_RNA (1)...(19): siRNA sense strand
caauaucuaucugcugguu

SEQ ID NO: 1084189 - RNA, 19 nt, Homo sapiens
  misc_RNA (1)...(19): siRNA sense strand
caucuuggccaauaucuau

SEQ ID NO: 1084190 - RNA, 19 nt, Homo sapiens
  misc_RNA (1)...(19): siRNA sense strand
acaccaagaugucaugaag

SEQ ID NO: 1084191 - RNA, 19 nt, Homo sapiens
  misc_RNA (1)...(19): siRNA sense strand
ucuauggagugaagacaaa

SEQ ID NO: 1084192 - RNA, 19 nt, Homo sapiens
  misc_RNA (1)...(19): siRNA sense strand
cuaauaggccucccugguu

SEQ ID NO: 1084193 - RNA, 19 nt, Homo sapiens
  misc_RNA (1)...(19): siRNA sense strand
gcccauguauauauuucuu

SEQ ID NO: 1084194 - RNA, 19 nt, Homo sapiens
  misc_RNA (1)...(19): siRNA sense strand
caacccaauugucuaugga

SEQ ID NO: 1084195 - RNA, 19 nt, Homo sapiens
  misc_RNA (1)...(19): siRNA sense strand
gcauugacauccucaucuc

SEQ ID NO: 1084196 - RNA, 19 nt, Homo sapiens
  misc_RNA (1)...(19): siRNA sense strand
gccaucuucugguucaauu

SEQ ID NO: 1084197 - RNA, 19 nt, Homo sapiens
  misc_RNA (1)...(19): siRNA sense strand
ucucaucuccuucucauau

SEQ ID NO: 1084198 - RNA, 19 nt, Homo sapiens
  misc_RNA (1)...(19): siRNA sense strand
gcucaacccaauugucuau

SEQ ID NO: 1084199 - RNA, 19 nt, Homo sapiens
  misc_RNA (1)...(19): siRNA sense strand
guuugaugcuugucugcua

SEQ ID NO: 1084200 - RNA, 19 nt, Homo sapiens
  misc_RNA (1)...(19): siRNA sense strand
gugcuguguucauauucua

SEQ ID NO: 1084201 - RNA, 19 nt, Homo sapiens
  misc_RNA (1)...(19): siRNA sense strand
cuccuuaucuggcauggaa

SEQ ID NO: 1084202 - RNA, 19 nt, Homo sapiens
  misc_RNA (1)...(19): siRNA sense strand
uccaauauccuuucccauu

SEQ ID NO: 1084203 - RNA, 19 nt, Homo sapiens
  misc_RNA (1)...(19): siRNA sense strand
ugugugugcuguguucaua

SEQ ID NO: 1084204 - RNA, 19 nt, Homo sapiens
  misc_RNA (1)...(19): siRNA sense strand
uuauugcugugcuagguaa

SEQ ID NO: 1084205 - RNA, 19 nt, Homo sapiens
  misc_RNA (1)...(19): siRNA sense strand
ugugugcuguguucauauu

SEQ ID NO: 1084206 - RNA, 19 nt, Homo sapiens
  misc_RNA (1)...(19): siRNA sense strand
ccaaaaugcuggccaucuu

SEQ ID NO: 1084207 - RNA, 19 nt, Homo sapiens
  misc_RNA (1)...(19): siRNA sense strand
ggaucccaauggcaaugaa

SEQ ID NO: 1084208 - RNA, 19 nt, Homo sapiens
  misc_RNA (1)...(19): siRNA sense strand
gucaucaucuccgccauug

SEQ ID NO: 1084209 - RNA, 19 nt, Homo sapiens
  misc_RNA (1)...(19): siRNA sense strand
ugaauccagugcuacauac

SEQ ID NO: 1084210 - RNA, 19 nt, Homo sapiens
  misc_RNA (1)...(19): siRNA sense strand
ucaugugugugcuguguuc

SEQ ID NO: 1084211 - RNA, 19 nt, Homo sapiens
  misc_RNA (1)...(19): siRNA sense strand
cccgucaucuuggccaaua

SEQ ID NO: 1084212 - RNA, 19 nt, Homo sapiens
  misc_RNA (1)...(19): siRNA sense strand
guaacuugacaaucaucua

SEQ ID NO: 1084213 - RNA, 19 nt, Homo sapiens
  misc_RNA (1)...(19): siRNA sense strand
aggccucccugguuuagaa

SEQ ID NO: 1084214 - RNA, 19 nt, Homo sapiens
  misc_RNA (1)...(19): siRNA sense strand
ccgggucaaugucgucuau

SEQ ID NO: 1084215 - RNA, 19 nt, Homo sapiens
  misc_RNA (1)...(19): siRNA sense strand
uaacuugacaaucaucuac

SEQ ID NO: 1084216 - RNA, 19 nt, Homo sapiens
  misc_RNA (1)...(19): siRNA sense strand
ucaacccaauugucuaugg

SEQ ID NO: 1084217 - RNA, 19 nt, Homo sapiens
  misc_RNA (1)...(19): siRNA sense strand
gggucaaugucgucuaugg

SEQ ID NO: 1084218 - RNA, 19 nt, Homo sapiens
  misc_RNA (1)...(19): siRNA sense strand
uugcgucucucaugugugu

SEQ ID NO: 1084219 - RNA, 19 nt, Homo sapiens
  misc_RNA (1)...(19): siRNA sense strand
gaagacaaaggagauucga

SEQ ID NO: 1084220 - RNA, 19 nt, Homo sapiens
  misc_RNA (1)...(19): siRNA sense strand
gccauccacuccuuaucug

SEQ ID NO: 1084221 - RNA, 19 nt, Homo sapiens
  misc_RNA (1)...(19): siRNA sense strand
cuucucauaucugcuuauu

SEQ ID NO: 1084222 - RNA, 19 nt, Homo sapiens
  misc_RNA (1)...(19): siRNA sense strand
ccuacugccuacaccaaga

SEQ ID NO: 1084223 - RNA, 19 nt, Homo sapiens
  misc_RNA (1)...(19): siRNA sense strand
gcuauguggccaucuguca

SEQ ID NO: 1084224 - RNA, 19 nt, Homo sapiens
  misc_RNA (1)...(19): siRNA sense strand
cgccaugccacaguacuua

SEQ ID NO: 1084225 - RNA, 19 nt, Homo sapiens
  misc_RNA (1)...(19): siRNA sense strand
gagugaagacaaaggagau

SEQ ID NO: 1084226 - RNA, 19 nt, Homo sapiens
  misc_RNA (1)...(19): siRNA sense strand
caaugaauccagugcuaca

SEQ ID NO: 1084227 - RNA, 19 nt, Homo sapiens
  misc_RNA (1)...(19): siRNA sense strand
gugaugauauccgggucaa

SEQ ID NO: 1084228 - RNA, 19 nt, Homo sapiens
  misc_RNA (1)...(19): siRNA sense strand
ggccuuaucgucaucaucu

SEQ ID NO: 1084229 - RNA, 19 nt, Homo sapiens
  misc_RNA (1)...(19): siRNA sense strand
gcuggccugugaugauauc

SEQ ID NO: 1084230 - RNA, 19 nt, Homo sapiens
  misc_RNA (1)...(19): siRNA sense strand
ccauuggccuggacucacu

SEQ ID NO: 1084231 - RNA, 19 nt, Homo sapiens
  misc_RNA (1)...(19): siRNA sense strand
uagguaacuugacaaucau

SEQ ID NO: 1084232 - RNA, 19 nt, Homo sapiens
  misc_RNA (1)...(19): siRNA sense strand
ugucgucuauggccuuauc

SEQ ID NO: 1084233 - RNA, 19 nt, Homo sapiens
  misc_RNA (1)...(19): siRNA sense strand
aaugucgucuauggccuua

SEQ ID NO: 1084234 - RNA, 19 nt, Homo sapiens
  misc_RNA (1)...(19): siRNA sense strand
aauaggccucccugguuua

SEQ ID NO: 1084235 - RNA, 19 nt, Homo sapiens
  misc_RNA (1)...(19): siRNA sense strand
gugcucaacccaauugucu

SEQ ID NO: 1084236 - RNA, 19 nt, Homo sapiens
  misc_RNA (1)...(19): siRNA sense strand
ucucaugugugugcugugu

SEQ ID NO: 1084237 - RNA, 19 nt, Homo sapiens
  misc_RNA (1)...(19): siRNA sense strand
caauauccuuucccauucc

SEQ ID NO: 1084238 - RNA, 19 nt, Homo sapiens
  misc_RNA (1)...(19): siRNA sense strand
ucuauggccuuaucgucau

SEQ ID NO: 1084239 - RNA, 19 nt, Homo sapiens
  misc_RNA (1)...(19): siRNA sense strand
uauguaccuuucauuggau

SEQ ID NO: 1084240 - RNA, 19 nt, Homo sapiens
  misc_RNA (1)...(19): siRNA sense strand
cuaccuuauugcugugcua

SEQ ID NO: 1084241 - RNA, 19 nt, Homo sapiens
  misc_RNA (1)...(19): siRNA sense strand
cugguuggccuucccauug

SEQ ID NO: 1084242 - RNA, 19 nt, Homo sapiens
  misc_RNA (1)...(19): siRNA sense strand
ugugcucccucuaccuuau

SEQ ID NO: 1084243 - RNA, 19 nt, Homo sapiens
  misc_RNA (1)...(19): siRNA sense strand
ggacagaacuugggagaga

SEQ ID NO: 1084244 - RNA, 19 nt, Homo sapiens
  misc_RNA (1)...(19): siRNA sense strand
gcacaucccucucacacaa

SEQ ID NO: 1084245 - RNA, 19 nt, Homo sapiens
  misc_RNA (1)...(19): siRNA sense strand
gaaagagggaggagagaua

SEQ ID NO: 1084246 - RNA, 19 nt, Homo sapiens
  misc_RNA (1)...(19): siRNA sense strand
ggauggagcuucaguaggu

SEQ ID NO: 1084247 - RNA, 19 nt, Homo sapiens
  misc_RNA (1)...(19): siRNA sense strand
ugacaaagccauccaagaa

SEQ ID NO: 1084248 - RNA, 19 nt, Homo sapiens
  misc_RNA (1)...(19): siRNA sense strand
caaccucacuggcuuaauc

SEQ ID NO: 1084249 - RNA, 19 nt, Homo sapiens
  misc_RNA (1)...(19): siRNA sense strand
gccauuaccuggacaaaca

SEQ ID NO: 1084250 - RNA, 19 nt, Homo sapiens
  misc_RNA (1)...(19): siRNA sense strand
ggacugcucuguggaagug

SEQ ID NO: 1084251 - RNA, 19 nt, Homo sapiens
  misc_RNA (1)...(19): siRNA sense strand
gggacacacugggccauua

SEQ ID NO: 1084252 - RNA, 19 nt, Homo sapiens
  misc_RNA (1)...(19): siRNA sense strand
gaaggauucccacaucuug

SEQ ID NO: 1084253 - RNA, 19 nt, Homo sapiens
  misc_RNA (1)...(19): siRNA sense strand
gagcaagccaucuacugua

SEQ ID NO: 1084254 - RNA, 19 nt, Homo sapiens
  misc_RNA (1)...(19): siRNA sense strand
agacauauaccucuucaga

SEQ ID NO: 1084255 - RNA, 19 nt, Homo sapiens
  misc_RNA (1)...(19): siRNA sense strand
ggagcaagccaucuacugu

SEQ ID NO: 1084256 - RNA, 19 nt, Homo sapiens
  misc_RNA (1)...(19): siRNA sense strand
acaugaagcugcuagaagu

SEQ ID NO: 1084257 - RNA, 19 nt, Homo sapiens
  misc_RNA (1)...(19): siRNA sense strand
uccaagaggugcugauguu

SEQ ID NO: 1084258 - RNA, 19 nt, Homo sapiens
  misc_RNA (1)...(19): siRNA sense strand
ggaaggaaaggaggagaaa

SEQ ID NO: 1084259 - RNA, 19 nt, Homo sapiens
  misc_RNA (1)...(19): siRNA sense strand
caguguaccucgucaggaa

SEQ ID NO: 1084260 - RNA, 19 nt, Homo sapiens
  misc_RNA (1)...(19): siRNA sense strand
caaugucucuaacuucauc

SEQ ID NO: 1084261 - RNA, 19 nt, Homo sapiens
  misc_RNA (1)...(19): siRNA sense strand
caaagacuccgagccauug

SEQ ID NO: 1084262 - RNA, 19 nt, Homo sapiens
  misc_RNA (1)...(19): siRNA sense strand
ucacagacccagccuacaa

SEQ ID NO: 1084263 - RNA, 19 nt, Homo sapiens
  misc_RNA (1)...(19): siRNA sense strand
agaacguggugcuguguuu

SEQ ID NO: 1084264 - RNA, 19 nt, Homo sapiens
  misc_RNA (1)...(19): siRNA sense strand
gagcuuuccuggugcuaca

SEQ ID NO: 1084265 - RNA, 19 nt, Homo sapiens
  misc_RNA (1)...(19): siRNA sense strand
gccaagggcacccacauga

SEQ ID NO: 1084266 - RNA, 19 nt, Homo sapiens
  misc_RNA (1)...(19): siRNA sense strand
ucaagucgagugagcagua

SEQ ID NO: 1084267 - RNA, 19 nt, Homo sapiens
  misc_RNA (1)...(19): siRNA sense strand
caacaugaagcugcuagaa

SEQ ID NO: 1084268 - RNA, 19 nt, Homo sapiens
  misc_RNA (1)...(19): siRNA sense strand
ugacaaagccaaggcaugu

SEQ ID NO: 1084269 - RNA, 19 nt, Homo sapiens
  misc_RNA (1)...(19): siRNA sense strand
gcguggcgcuuugguguug

SEQ ID NO: 1084270 - RNA, 19 nt, Homo sapiens
  misc_RNA (1)...(19): siRNA sense strand
ccaagagggucccguccau

SEQ ID NO: 1084271 - RNA, 19 nt, Homo sapiens
  misc_RNA (1)...(19): siRNA sense strand
guccaaggccuaaccaaga

SEQ ID NO: 1084272 - RNA, 19 nt, Homo sapiens
  misc_RNA (1)...(19): siRNA sense strand
ccaacacccucaucuucau

SEQ ID NO: 1084273 - RNA, 19 nt, Homo sapiens
  misc_RNA (1)...(19): siRNA sense strand
gcaguucuccauggucaaa

SEQ ID NO: 1084274 - RNA, 19 nt, Homo sapiens
  misc_RNA (1)...(19): siRNA sense strand
acaaggagcaagccaucua

SEQ ID NO: 1084275 - RNA, 19 nt, Homo sapiens
  misc_RNA (1)...(19): siRNA sense strand
ggccaagggugcguucuuc

SEQ ID NO: 1084276 - RNA, 19 nt, Homo sapiens
  misc_RNA (1)...(19): siRNA sense strand
ccacaucuuggguucauga

SEQ ID NO: 1084277 - RNA, 19 nt, Homo sapiens
  misc_RNA (1)...(19): siRNA sense strand
gaacguggugcuguguuug

SEQ ID NO: 1084278 - RNA, 19 nt, Homo sapiens
  misc_RNA (1)...(19): siRNA sense strand
acaaagccauccaagaacu

SEQ ID NO: 1084279 - RNA, 19 nt, Homo sapiens
  misc_RNA (1)...(19): siRNA sense strand
ucuaugggcuggacaucga

SEQ ID NO: 1084280 - RNA, 19 nt, Homo sapiens
  misc_RNA (1)...(19): siRNA sense strand
ggucucucaucccaucuug

SEQ ID NO: 1084281 - RNA, 19 nt, Homo sapiens
  misc_RNA (1)...(19): siRNA sense strand
ggaaagagggaggagagau

SEQ ID NO: 1084282 - RNA, 19 nt, Homo sapiens
  misc_RNA (1)...(19): siRNA sense strand
aaggaaaggaggagaaaga

SEQ ID NO: 1084283 - RNA, 19 nt, Homo sapiens
  misc_RNA (1)...(19): siRNA sense strand
acaaagacuccgagccauu

SEQ ID NO: 1084284 - RNA, 19 nt, Homo sapiens
  misc_RNA (1)...(19): siRNA sense strand
gaagaacguggugcugugu

SEQ ID NO: 1084285 - RNA, 19 nt, Homo sapiens
  misc_RNA (1)...(19): siRNA sense strand
caucgacgcagccaacuuc

SEQ ID NO: 1084286 - RNA, 19 nt, Homo sapiens
  misc_RNA (1)...(19): siRNA sense strand
aaagggauaucagcaagag

SEQ ID NO: 1084287 - RNA, 19 nt, Homo sapiens
  misc_RNA (1)...(19): siRNA sense strand
caggauggacccucacaga

SEQ ID NO: 1084288 - RNA, 19 nt, Homo sapiens
  misc_RNA (1)...(19): siRNA sense strand
gcacccacaugaggaaggu

SEQ ID NO: 1084289 - RNA, 19 nt, Homo sapiens
  misc_RNA (1)...(19): siRNA sense strand
caaagggauaucagcaaga

SEQ ID NO: 1084290 - RNA, 19 nt, Homo sapiens
  misc_RNA (1)...(19): siRNA sense strand
ggccgagacccacagugua

SEQ ID NO: 1084291 - RNA, 19 nt, Homo sapiens
  misc_RNA (1)...(19): siRNA sense strand
aagcugagacccaggauuc

SEQ ID NO: 1084292 - RNA, 19 nt, Homo sapiens
  misc_RNA (1)...(19): siRNA sense strand
gaagcugagacccaggauu

SEQ ID NO: 1084293 - RNA, 19 nt, Homo sapiens
  misc_RNA (1)...(19): siRNA sense strand
acgccaacguugucacuga

SEQ ID NO: 1084294 - RNA, 19 nt, Homo sapiens
  misc_RNA (1)...(19): siRNA sense strand
uggaggccaugaaggaaga

SEQ ID NO: 1084295 - RNA, 19 nt, Homo sapiens
  misc_RNA (1)...(19): siRNA sense strand
ggaggaggaggaaggaaag

SEQ ID NO: 1084296 - RNA, 19 nt, Homo sapiens
  misc_RNA (1)...(19): siRNA sense strand
aagaggugcugauguucga

SEQ ID NO: 1084297 - RNA, 19 nt, Homo sapiens
  misc_RNA (1)...(19): siRNA sense strand
ggccaccaccaaagggaua

SEQ ID NO: 1084298 - RNA, 19 nt, Homo sapiens
  misc_RNA (1)...(19): siRNA sense strand
gcccaagcccagaagauuc

SEQ ID NO: 1084299 - RNA, 19 nt, Homo sapiens
  misc_RNA (1)...(19): siRNA sense strand
caggacugcucggcuucua

SEQ ID NO: 1084300 - RNA, 19 nt, Homo sapiens
  misc_RNA (1)...(19): siRNA sense strand
ggacacacugggccauuac

SEQ ID NO: 1084301 - RNA, 19 nt, Homo sapiens
  misc_RNA (1)...(19): siRNA sense strand
uccaaggccuaaccaagau

SEQ ID NO: 1084302 - RNA, 19 nt, Homo sapiens
  misc_RNA (1)...(19): siRNA sense strand
ccauugaggccaccaccaa

SEQ ID NO: 1084303 - RNA, 19 nt, Homo sapiens
  misc_RNA (1)...(19): siRNA sense strand
ugaaguaaggguacaggau

SEQ ID NO: 1084304 - RNA, 19 nt, Homo sapiens
  misc_RNA (1)...(19): siRNA sense strand
gcaguauccggccuuucaa

SEQ ID NO: 1084305 - RNA, 19 nt, Homo sapiens
  misc_RNA (1)...(19): siRNA sense strand
gacaaagccauccaagaac

SEQ ID NO: 1084306 - RNA, 19 nt, Homo sapiens
  misc_RNA (1)...(19): siRNA sense strand
gcaacaugaagcugcuaga

SEQ ID NO: 1084307 - RNA, 19 nt, Homo sapiens
  misc_RNA (1)...(19): siRNA sense strand
ggugcguucuuccaguuca

SEQ ID NO: 1084308 - RNA, 19 nt, Homo sapiens
  misc_RNA (1)...(19): siRNA sense strand
ggacugcucggcuucuacu

SEQ ID NO: 1084309 - RNA, 19 nt, Homo sapiens
  misc_RNA (1)...(19): siRNA sense strand
agagugggcccaggacaaa

SEQ ID NO: 1084310 - RNA, 19 nt, Homo sapiens
  misc_RNA (1)...(19): siRNA sense strand
ggaccgggaagccucaaag

SEQ ID NO: 1084311 - RNA, 19 nt, Homo sapiens
  misc_RNA (1)...(19): siRNA sense strand
gaaccccaccccacaaaga

SEQ ID NO: 1084312 - RNA, 19 nt, Homo sapiens
  misc_RNA (1)...(19): siRNA sense strand
gguggauggagcuucagua

SEQ ID NO: 1084313 - RNA, 19 nt, Homo sapiens
  misc_RNA (1)...(19): siRNA sense strand
ccggguggauggagcuuca

SEQ ID NO: 1084314 - RNA, 19 nt, Homo sapiens
  misc_RNA (1)...(19): siRNA sense strand
ccuguggacuggaagacau

SEQ ID NO: 1084315 - RNA, 19 nt, Homo sapiens
  misc_RNA (1)...(19): siRNA sense strand
cagagugggcccaggacaa

SEQ ID NO: 1084316 - RNA, 19 nt, Homo sapiens
  misc_RNA (1)...(19): siRNA sense strand
gaaggaaaggaggagaaag

SEQ ID NO: 1084317 - RNA, 19 nt, Homo sapiens
  misc_RNA (1)...(19): siRNA sense strand
gggauuacaucuacuacaa

SEQ ID NO: 1084318 - RNA, 19 nt, Homo sapiens
  misc_RNA (1)...(19): siRNA sense strand
ucaacgaucuguacuucua

SEQ ID NO: 1084319 - RNA, 19 nt, Homo sapiens
  misc_RNA (1)...(19): siRNA sense strand
gagagcaguucuaccacua

SEQ ID NO: 1084320 - RNA, 19 nt, Homo sapiens
  misc_RNA (1)...(19): siRNA sense strand
ugagaaagaugaguuaauc

SEQ ID NO: 1084321 - RNA, 19 nt, Homo sapiens
  misc_RNA (1)...(19): siRNA sense strand
gcaagaagggcaagaagga

SEQ ID NO: 1084322 - RNA, 19 nt, Homo sapiens
  misc_RNA (1)...(19): siRNA sense strand
ggacagcugugggucuuug

SEQ ID NO: 1084323 - RNA, 19 nt, Homo sapiens
  misc_RNA (1)...(19): siRNA sense strand
gaagacaaguggguuugga

SEQ ID NO: 1084324 - RNA, 19 nt, Homo sapiens
  misc_RNA (1)...(19): siRNA sense strand
gaaacagagaguuaagaaa

SEQ ID NO: 1084325 - RNA, 19 nt, Homo sapiens
  misc_RNA (1)...(19): siRNA sense strand
auaacgagcucuaugucua

SEQ ID NO: 1084326 - RNA, 19 nt, Homo sapiens
  misc_RNA (1)...(19): siRNA sense strand
cgacguguaugccuuuaau

SEQ ID NO: 1084327 - RNA, 19 nt, Homo sapiens
  misc_RNA (1)...(19): siRNA sense strand
gaaagaugaguuaauccuu

SEQ ID NO: 1084328 - RNA, 19 nt, Homo sapiens
  misc_RNA (1)...(19): siRNA sense strand
ccgccaagauggagaagaa

SEQ ID NO: 1084329 - RNA, 19 nt, Homo sapiens
  misc_RNA (1)...(19): siRNA sense strand
gaaaguacacgggauuaca

SEQ ID NO: 1084330 - RNA, 19 nt, Homo sapiens
  misc_RNA (1)...(19): siRNA sense strand
aaacagagaguuaagaaag

SEQ ID NO: 1084331 - RNA, 19 nt, Homo sapiens
  misc_RNA (1)...(19): siRNA sense strand
gaacaagucaaaucaacag

SEQ ID NO: 1084332 - RNA, 19 nt, Homo sapiens
  misc_RNA (1)...(19): siRNA sense strand
cgaaacagagaguuaagaa

SEQ ID NO: 1084333 - RNA, 19 nt, Homo sapiens
  misc_RNA (1)...(19): siRNA sense strand
gacaauugauccuguuugg

SEQ ID NO: 1084334 - RNA, 19 nt, Homo sapiens
  misc_RNA (1)...(19): siRNA sense strand
gaaaggacaccuggaccaa

SEQ ID NO: 1084335 - RNA, 19 nt, Homo sapiens
  misc_RNA (1)...(19): siRNA sense strand
gggaacaagucaaaucaac

SEQ ID NO: 1084336 - RNA, 19 nt, Homo sapiens
  misc_RNA (1)...(19): siRNA sense strand
ugaagggacccaagucuga

SEQ ID NO: 1084337 - RNA, 19 nt, Homo sapiens
  misc_RNA (1)...(19): siRNA sense strand
ggaaggccuugguggagau

SEQ ID NO: 1084338 - RNA, 19 nt, Homo sapiens
  misc_RNA (1)...(19): siRNA sense strand
guacacgggauuacaucua

SEQ ID NO: 1084339 - RNA, 19 nt, Homo sapiens
  misc_RNA (1)...(19): siRNA sense strand
ggagauggacccagaaacu

SEQ ID NO: 1084340 - RNA, 19 nt, Homo sapiens
  misc_RNA (1)...(19): siRNA sense strand
caacgacguguaugccuuu

SEQ ID NO: 1084341 - RNA, 19 nt, Homo sapiens
  misc_RNA (1)...(19): siRNA sense strand
gagcaguucuaccacuaca

SEQ ID NO: 1084342 - RNA, 19 nt, Homo sapiens
  misc_RNA (1)...(19): siRNA sense strand
uuugguggcuuccaugaaa

SEQ ID NO: 1084343 - RNA, 19 nt, Homo sapiens
  misc_RNA (1)...(19): siRNA sense strand
ccaagaggacucagacugu

SEQ ID NO: 1084344 - RNA, 19 nt, Homo sapiens
  misc_RNA (1)...(19): siRNA sense strand
gaagggacccaagucugaa

SEQ ID NO: 1084345 - RNA, 19 nt, Homo sapiens
  misc_RNA (1)...(19): siRNA sense strand
ggacggaagagaagacaag

SEQ ID NO: 1084346 - RNA, 19 nt, Homo sapiens
  misc_RNA (1)...(19): siRNA sense strand
ggaacaagucaaaucaaca

SEQ ID NO: 1084347 - RNA, 19 nt, Homo sapiens
  misc_RNA (1)...(19): siRNA sense strand
ggacucagacuguggaacu

SEQ ID NO: 1084348 - RNA, 19 nt, Homo sapiens
  misc_RNA (1)...(19): siRNA sense strand
ggaggaggaagaccuggaa

SEQ ID NO: 1084349 - RNA, 19 nt, Homo sapiens
  misc_RNA (1)...(19): siRNA sense strand
aacagagaguuaagaaaga

SEQ ID NO: 1084350 - RNA, 19 nt, Homo sapiens
  misc_RNA (1)...(19): siRNA sense strand
uggagaagaaggugucuaa

SEQ ID NO: 1084351 - RNA, 19 nt, Homo sapiens
  misc_RNA (1)...(19): siRNA sense strand
gaccugggaacaagucaaa

SEQ ID NO: 1084352 - RNA, 19 nt, Homo sapiens
  misc_RNA (1)...(19): siRNA sense strand
gcacacggcacucagacau

SEQ ID NO: 1084353 - RNA, 19 nt, Homo sapiens
  misc_RNA (1)...(19): siRNA sense strand
ggacgaagacagccuugag

SEQ ID NO: 1084354 - RNA, 19 nt, Homo sapiens
  misc_RNA (1)...(19): siRNA sense strand
gaagccagaggacggaaga

SEQ ID NO: 1084355 - RNA, 19 nt, Homo sapiens
  misc_RNA (1)...(19): siRNA sense strand
cgagcucuaugucuacaau

SEQ ID NO: 1084356 - RNA, 19 nt, Homo sapiens
  misc_RNA (1)...(19): siRNA sense strand
gagaagacaaguggguuug

SEQ ID NO: 1084357 - RNA, 19 nt, Homo sapiens
  misc_RNA (1)...(19): siRNA sense strand
ccuuuaaucuggacaccuu

SEQ ID NO: 1084358 - RNA, 19 nt, Homo sapiens
  misc_RNA (1)...(19): siRNA sense strand
gcggacagcugugggucuu

SEQ ID NO: 1084359 - RNA, 19 nt, Homo sapiens
  misc_RNA (1)...(19): siRNA sense strand
uaagaaagacguggacaag

SEQ ID NO: 1084360 - RNA, 19 nt, Homo sapiens
  misc_RNA (1)...(19): siRNA sense strand
ggacaccuggaccaaaguu

SEQ ID NO: 1084361 - RNA, 19 nt, Homo sapiens
  misc_RNA (1)...(19): siRNA sense strand
gagaagaaggugucuaagc

SEQ ID NO: 1084362 - RNA, 19 nt, Homo sapiens
  misc_RNA (1)...(19): siRNA sense strand
gaugguggccuggaagaga

SEQ ID NO: 1084363 - RNA, 19 nt, Homo sapiens
  misc_RNA (1)...(19): siRNA sense strand
gcaguucuaccacuacaag

SEQ ID NO: 1084364 - RNA, 19 nt, Homo sapiens
  misc_RNA (1)...(19): siRNA sense strand
acacggcacucagacaugu

SEQ ID NO: 1084365 - RNA, 19 nt, Homo sapiens
  misc_RNA (1)...(19): siRNA sense strand
gagacaauugauccuguuu

SEQ ID NO: 1084366 - RNA, 19 nt, Homo sapiens
  misc_RNA (1)...(19): siRNA sense strand
agagacaauugauccuguu

SEQ ID NO: 1084367 - RNA, 19 nt, Homo sapiens
  misc_RNA (1)...(19): siRNA sense strand
cuucaacgaucuguacuuc

SEQ ID NO: 1084368 - RNA, 19 nt, Homo sapiens
  misc_RNA (1)...(19): siRNA sense strand
cgaaucaccagacacuguu

SEQ ID NO: 1084369 - RNA, 19 nt, Homo sapiens
  misc_RNA (1)...(19): siRNA sense strand
aaggacaccuggaccaaag

SEQ ID NO: 1084370 - RNA, 19 nt, Homo sapiens
  misc_RNA (1)...(19): siRNA sense strand
caugaaaguacacgggauu

SEQ ID NO: 1084371 - RNA, 19 nt, Homo sapiens
  misc_RNA (1)...(19): siRNA sense strand
cagaucaggcugccagaug

SEQ ID NO: 1084372 - RNA, 19 nt, Homo sapiens
  misc_RNA (1)...(19): siRNA sense strand
gggugucugugacgaggaa

SEQ ID NO: 1084373 - RNA, 19 nt, Homo sapiens
  misc_RNA (1)...(19): siRNA sense strand
caacggagagcaguucuac

SEQ ID NO: 1084374 - RNA, 19 nt, Homo sapiens
  misc_RNA (1)...(19): siRNA sense strand
agaucaggcugccagaugu

SEQ ID NO: 1084375 - RNA, 19 nt, Homo sapiens
  misc_RNA (1)...(19): siRNA sense strand
cuggacaccuucacaugga

SEQ ID NO: 1084376 - RNA, 19 nt, Homo sapiens
  misc_RNA (1)...(19): siRNA sense strand
gccagaggacggaagagaa

SEQ ID NO: 1084377 - RNA, 19 nt, Homo sapiens
  misc_RNA (1)...(19): siRNA sense strand
cauagcccauuuccagaca

SEQ ID NO: 1084378 - RNA, 19 nt, Homo sapiens
  misc_RNA (1)...(19): siRNA sense strand
gaagcgcucauagcccauu

SEQ ID NO: 1084379 - RNA, 19 nt, Homo sapiens
  misc_RNA (1)...(19): siRNA sense strand
gagcucuaugucuacaaua

SEQ ID NO: 1084380 - RNA, 19 nt, Homo sapiens
  misc_RNA (1)...(19): siRNA sense strand
agagaagacaaguggguuu

SEQ ID NO: 1084381 - RNA, 19 nt, Homo sapiens
  misc_RNA (1)...(19): siRNA sense strand
gggcuacucgaaacagaga

SEQ ID NO: 1084382 - RNA, 19 nt, Homo sapiens
  misc_RNA (1)...(19): siRNA sense strand
acaccuggaccaaaguuga

SEQ ID NO: 1084383 - RNA, 19 nt, Homo sapiens
  misc_RNA (1)...(19): siRNA sense strand
cugugcagcuggucaagga

SEQ ID NO: 1084384 - RNA, 19 nt, Homo sapiens
  misc_RNA (1)...(19): siRNA sense strand
ggacccaagucugaaaaga

SEQ ID NO: 1084385 - RNA, 19 nt, Homo sapiens
  misc_RNA (1)...(19): siRNA sense strand
ccagaggacggaagagaag

SEQ ID NO: 1084386 - RNA, 19 nt, Homo sapiens
  misc_RNA (1)...(19): siRNA sense strand
gaauauuucaacggccaaa

SEQ ID NO: 1084387 - RNA, 19 nt, Homo sapiens
  misc_RNA (1)...(19): siRNA sense strand
gaggagcccgaagguggua

SEQ ID NO: 1084388 - RNA, 19 nt, Homo sapiens
  misc_RNA (1)...(19): siRNA sense strand
uaacgagcucuaugucuac

SEQ ID NO: 1084389 - RNA, 19 nt, Homo sapiens
  misc_RNA (1)...(19): siRNA sense strand
gagauggacccagaaacuc

SEQ ID NO: 1084390 - RNA, 19 nt, Homo sapiens
  misc_RNA (1)...(19): siRNA sense strand
ccgaaucaccagacacugu

SEQ ID NO: 1084391 - RNA, 19 nt, Homo sapiens
  misc_RNA (1)...(19): siRNA sense strand
uguauaacgagcucuaugu

SEQ ID NO: 1084392 - RNA, 19 nt, Homo sapiens
  misc_RNA (1)...(19): siRNA sense strand
aaaguacacgggauuacau

SEQ ID NO: 1084393 - RNA, 19 nt, Homo sapiens
  misc_RNA (1)...(19): siRNA sense strand
aaaggacaccuggaccaaa

SEQ ID NO: 1084394 - RNA, 19 nt, Homo sapiens
  misc_RNA (1)...(19): siRNA sense strand
uacacgggauuacaucuac

SEQ ID NO: 1084395 - RNA, 19 nt, Homo sapiens
  misc_RNA (1)...(19): siRNA sense strand
guauaacgagcucuauguc

SEQ ID NO: 1084396 - RNA, 19 nt, Homo sapiens
  misc_RNA (1)...(19): siRNA sense strand
uuaagaaagacguggacaa

SEQ ID NO: 1084397 - RNA, 19 nt, Homo sapiens
  misc_RNA (1)...(19): siRNA sense strand
gcgaguucuucaacgaucu

SEQ ID NO: 1084398 - RNA, 19 nt, Homo sapiens
  misc_RNA (1)...(19): siRNA sense strand
gcgcaaagcugauucugau

SEQ ID NO: 1084399 - RNA, 19 nt, Homo sapiens
  misc_RNA (1)...(19): siRNA sense strand
ggaagggauucucagauga

SEQ ID NO: 1084400 - RNA, 19 nt, Homo sapiens
  misc_RNA (1)...(19): siRNA sense strand
caaagaagaagaaagaaga

SEQ ID NO: 1084401 - RNA, 19 nt, Homo sapiens
  misc_RNA (1)...(19): siRNA sense strand
gaagaaagaagagucagaa

SEQ ID NO: 1084402 - RNA, 19 nt, Homo sapiens
  misc_RNA (1)...(19): siRNA sense strand
gaggagagcaaaccaaaga

SEQ ID NO: 1084403 - RNA, 19 nt, Homo sapiens
  misc_RNA (1)...(19): siRNA sense strand
gaagaagaaagaagaguca

SEQ ID NO: 1084404 - RNA, 19 nt, Homo sapiens
  misc_RNA (1)...(19): siRNA sense strand
gcaaagcugauucugauuc

SEQ ID NO: 1084405 - RNA, 19 nt, Homo sapiens
  misc_RNA (1)...(19): siRNA sense strand
gcaaaccaaagaagaagaa

SEQ ID NO: 1084406 - RNA, 19 nt, Homo sapiens
  misc_RNA (1)...(19): siRNA sense strand
gagaggagagcaaaccaaa

SEQ ID NO: 1084407 - RNA, 19 nt, Homo sapiens
  misc_RNA (1)...(19): siRNA sense strand
cagaagagaaccuggauug

SEQ ID NO: 1084408 - RNA, 19 nt, Homo sapiens
  misc_RNA (1)...(19): siRNA sense strand
gcccacagguugucauauc

SEQ ID NO: 1084409 - RNA, 19 nt, Homo sapiens
  misc_RNA (1)...(19): siRNA sense strand
uggaagggauucucagaug

SEQ ID NO: 1084410 - RNA, 19 nt, Homo sapiens
  misc_RNA (1)...(19): siRNA sense strand
gaaaggcugacguggcauu

SEQ ID NO: 1084411 - RNA, 19 nt, Homo sapiens
  misc_RNA (1)...(19): siRNA sense strand
ggaggaagaggaauaugug

SEQ ID NO: 1084412 - RNA, 19 nt, Homo sapiens
  misc_RNA (1)...(19): siRNA sense strand
caaggaagccaaugucaag

SEQ ID NO: 1084413 - RNA, 19 nt, Homo sapiens
  misc_RNA (1)...(19): siRNA sense strand
aaacagcacaugagacaga

SEQ ID NO: 1084414 - RNA, 19 nt, Homo sapiens
  misc_RNA (1)...(19): siRNA sense strand
gagagcaaaccaaagaaga

SEQ ID NO: 1084415 - RNA, 19 nt, Homo sapiens
  misc_RNA (1)...(19): siRNA sense strand
gcacaugagacagauaaau

SEQ ID NO: 1084416 - RNA, 19 nt, Homo sapiens
  misc_RNA (1)...(19): siRNA sense strand
gaaaacagcacaugagaca

SEQ ID NO: 1084417 - RNA, 19 nt, Homo sapiens
  misc_RNA (1)...(19): siRNA sense strand
caaagcugauucugauucu

SEQ ID NO: 1084418 - RNA, 19 nt, Homo sapiens
  misc_RNA (1)...(19): siRNA sense strand
cagcacaugagacagauaa

SEQ ID NO: 1084419 - RNA, 19 nt, Homo sapiens
  misc_RNA (1)...(19): siRNA sense strand
gaaagaagagucagaaaag

SEQ ID NO: 1084420 - RNA, 19 nt, Homo sapiens
  misc_RNA (1)...(19): siRNA sense strand
gagccggagcggauuauug

SEQ ID NO: 1084421 - RNA, 19 nt, Homo sapiens
  misc_RNA (1)...(19): siRNA sense strand
aaccaaagaagaagaaaga

SEQ ID NO: 1084422 - RNA, 19 nt, Homo sapiens
  misc_RNA (1)...(19): siRNA sense strand
cagaugaggacaacacaug

SEQ ID NO: 1084423 - RNA, 19 nt, Homo sapiens
  misc_RNA (1)...(19): siRNA sense strand
caugggagccagaagagaa

SEQ ID NO: 1084424 - RNA, 19 nt, Homo sapiens
  misc_RNA (1)...(19): siRNA sense strand
gauucugauucugaagaua

SEQ ID NO: 1084425 - RNA, 19 nt, Homo sapiens
  misc_RNA (1)...(19): siRNA sense strand
guggagagcucauguuccu

SEQ ID NO: 1084426 - RNA, 19 nt, Homo sapiens
  misc_RNA (1)...(19): siRNA sense strand
agaggaauaugugguggaa

SEQ ID NO: 1084427 - RNA, 19 nt, Homo sapiens
  misc_RNA (1)...(19): siRNA sense strand
ggagaggagagcaaaccaa

SEQ ID NO: 1084428 - RNA, 19 nt, Homo sapiens
  misc_RNA (1)...(19): siRNA sense strand
ccaaggaagccaaugucaa

SEQ ID NO: 1084429 - RNA, 19 nt, Homo sapiens
  misc_RNA (1)...(19): siRNA sense strand
aagaggaggaagaggaaua

SEQ ID NO: 1084430 - RNA, 19 nt, Homo sapiens
  misc_RNA (1)...(19): siRNA sense strand
uaaagggcaaaguggagua

SEQ ID NO: 1084431 - RNA, 19 nt, Homo sapiens
  misc_RNA (1)...(19): siRNA sense strand
ccuggucccugccaaggaa

SEQ ID NO: 1084432 - RNA, 19 nt, Homo sapiens
  misc_RNA (1)...(19): siRNA sense strand
ggagagcaaaccaaagaag

SEQ ID NO: 1084433 - RNA, 19 nt, Homo sapiens
  misc_RNA (1)...(19): siRNA sense strand
ccaaagaagaagaaagaag

SEQ ID NO: 1084434 - RNA, 19 nt, Homo sapiens
  misc_RNA (1)...(19): siRNA sense strand
cacaugagacagauaaauc

SEQ ID NO: 1084435 - RNA, 19 nt, Homo sapiens
  misc_RNA (1)...(19): siRNA sense strand
gagcaaaccaaagaagaag

SEQ ID NO: 1084436 - RNA, 19 nt, Homo sapiens
  misc_RNA (1)...(19): siRNA sense strand
agagcaaaccaaagaagaa

SEQ ID NO: 1084437 - RNA, 19 nt, Homo sapiens
  misc_RNA (1)...(19): siRNA sense strand
aggcuuugcucgagguuug

SEQ ID NO: 1084438 - RNA, 19 nt, Homo sapiens
  misc_RNA (1)...(19): siRNA sense strand
acacaugggagccagaaga

SEQ ID NO: 1084439 - RNA, 19 nt, Homo sapiens
  misc_RNA (1)...(19): siRNA sense strand
aagcugauucugauucuga

SEQ ID NO: 1084440 - RNA, 19 nt, Homo sapiens
  misc_RNA (1)...(19): siRNA sense strand
caacacaugggagccagaa

SEQ ID NO: 1084441 - RNA, 19 nt, Homo sapiens
  misc_RNA (1)...(19): siRNA sense strand
uaagggagaggagagcaaa

SEQ ID NO: 1084442 - RNA, 19 nt, Homo sapiens
  misc_RNA (1)...(19): siRNA sense strand
aggaauaugugguggaaaa

SEQ ID NO: 1084443 - RNA, 19 nt, Homo sapiens
  misc_RNA (1)...(19): siRNA sense strand
agaagaggaggaagaggaa

SEQ ID NO: 1084444 - RNA, 19 nt, Homo sapiens
  misc_RNA (1)...(19): siRNA sense strand
cucggaggaugaugacaaa

SEQ ID NO: 1084445 - RNA, 19 nt, Homo sapiens
  misc_RNA (1)...(19): siRNA sense strand
gagcggauuauuggagcua

SEQ ID NO: 1084446 - RNA, 19 nt, Homo sapiens
  misc_RNA (1)...(19): siRNA sense strand
ugauucugauucugaagau

SEQ ID NO: 1084447 - RNA, 19 nt, Homo sapiens
  misc_RNA (1)...(19): siRNA sense strand
acaugagacagauaaauca

SEQ ID NO: 1084448 - RNA, 19 nt, Homo sapiens
  misc_RNA (1)...(19): siRNA sense strand
gagagcucauguuccugau

SEQ ID NO: 1084449 - RNA, 19 nt, Homo sapiens
  misc_RNA (1)...(19): siRNA sense strand
agaagaaagaagagucaga

SEQ ID NO: 1084450 - RNA, 19 nt, Homo sapiens
  misc_RNA (1)...(19): siRNA sense strand
ggcaagcgcaaagcugauu

SEQ ID NO: 1084451 - RNA, 19 nt, Homo sapiens
  misc_RNA (1)...(19): siRNA sense strand
gcaagcgcaaagcugauuc

SEQ ID NO: 1084452 - RNA, 19 nt, Homo sapiens
  misc_RNA (1)...(19): siRNA sense strand
cacagguugucauauccuu

SEQ ID NO: 1084453 - RNA, 19 nt, Homo sapiens
  misc_RNA (1)...(19): siRNA sense strand
gccaaggaagccaauguca

SEQ ID NO: 1084454 - RNA, 19 nt, Homo sapiens
  misc_RNA (1)...(19): siRNA sense strand
aagaaagaagagucagaaa

SEQ ID NO: 1084455 - RNA, 19 nt, Homo sapiens
  misc_RNA (1)...(19): siRNA sense strand
gaagagggcuuuaucuauu

SEQ ID NO: 1084456 - RNA, 19 nt, Homo sapiens
  misc_RNA (1)...(19): siRNA sense strand
caaauacacucuggaaaua

SEQ ID NO: 1084457 - RNA, 19 nt, Homo sapiens
  misc_RNA (1)...(19): siRNA sense strand
gcaaacaguuaacaacaaa

SEQ ID NO: 1084458 - RNA, 19 nt, Homo sapiens
  misc_RNA (1)...(19): siRNA sense strand
gaaggcagaugcuaagaga

SEQ ID NO: 1084459 - RNA, 19 nt, Homo sapiens
  misc_RNA (1)...(19): siRNA sense strand
gaacagagacugccucauc

SEQ ID NO: 1084460 - RNA, 19 nt, Homo sapiens
  misc_RNA (1)...(19): siRNA sense strand
ugaagaagcugagucauga

SEQ ID NO: 1084461 - RNA, 19 nt, Homo sapiens
  misc_RNA (1)...(19): siRNA sense strand
ggagaguggugaucggaua

SEQ ID NO: 1084462 - RNA, 19 nt, Homo sapiens
  misc_RNA (1)...(19): siRNA sense strand
gaugagaucuggcuucaca

SEQ ID NO: 1084463 - RNA, 19 nt, Homo sapiens
  misc_RNA (1)...(19): siRNA sense strand
gcaaauacacucuggaaau

SEQ ID NO: 1084464 - RNA, 19 nt, Homo sapiens
  misc_RNA (1)...(19): siRNA sense strand
gauaagacccugugcuuga

SEQ ID NO: 1084465 - RNA, 19 nt, Homo sapiens
  misc_RNA (1)...(19): siRNA sense strand
ggaagauccucuacacaga

SEQ ID NO: 1084466 - RNA, 19 nt, Homo sapiens
  misc_RNA (1)...(19): siRNA sense strand
gaacgggacuucucugcau

SEQ ID NO: 1084467 - RNA, 19 nt, Homo sapiens
  misc_RNA (1)...(19): siRNA sense strand
caucuaaucuucaacaaca

SEQ ID NO: 1084468 - RNA, 19 nt, Homo sapiens
  misc_RNA (1)...(19): siRNA sense strand
gaaacaagaucaccaucag

SEQ ID NO: 1084469 - RNA, 19 nt, Homo sapiens
  misc_RNA (1)...(19): siRNA sense strand
gaagaaucgugccaaagug

SEQ ID NO: 1084470 - RNA, 19 nt, Homo sapiens
  misc_RNA (1)...(19): siRNA sense strand
gacaugggauccugugaaa

SEQ ID NO: 1084471 - RNA, 19 nt, Homo sapiens
  misc_RNA (1)...(19): siRNA sense strand
ccaaggagcugaagagcau

SEQ ID NO: 1084472 - RNA, 19 nt, Homo sapiens
  misc_RNA (1)...(19): siRNA sense strand
ucagcaaggucaaguacua

SEQ ID NO: 1084473 - RNA, 19 nt, Homo sapiens
  misc_RNA (1)...(19): siRNA sense strand
ggacagaggucaccaucac

SEQ ID NO: 1084474 - RNA, 19 nt, Homo sapiens
  misc_RNA (1)...(19): siRNA sense strand
gcagagcaccacugacgua

SEQ ID NO: 1084475 - RNA, 19 nt, Homo sapiens
  misc_RNA (1)...(19): siRNA sense strand
caagaucgaggauaaaguu

SEQ ID NO: 1084476 - RNA, 19 nt, Homo sapiens
  misc_RNA (1)...(19): siRNA sense strand
gggucaagaucgaggauaa

SEQ ID NO: 1084477 - RNA, 19 nt, Homo sapiens
  misc_RNA (1)...(19): siRNA sense strand
ggcaaacaguuaacaacaa

SEQ ID NO: 1084478 - RNA, 19 nt, Homo sapiens
  misc_RNA (1)...(19): siRNA sense strand
cgagaagaaucgugccaaa

SEQ ID NO: 1084479 - RNA, 19 nt, Homo sapiens
  misc_RNA (1)...(19): siRNA sense strand
caacguggaguacaugaaa

SEQ ID NO: 1084480 - RNA, 19 nt, Homo sapiens
  misc_RNA (1)...(19): siRNA sense strand
gcaccacccuggaugagau

SEQ ID NO: 1084481 - RNA, 19 nt, Homo sapiens
  misc_RNA (1)...(19): siRNA sense strand
agaagggacuggaagagaa

SEQ ID NO: 1084482 - RNA, 19 nt, Homo sapiens
  misc_RNA (1)...(19): siRNA sense strand
gaugccagauggucaguau

SEQ ID NO: 1084483 - RNA, 19 nt, Homo sapiens
  misc_RNA (1)...(19): siRNA sense strand
gaaggagacucgcuuucag

SEQ ID NO: 1084484 - RNA, 19 nt, Homo sapiens
  misc_RNA (1)...(19): siRNA sense strand
gaagcugagucaugagauc

SEQ ID NO: 1084485 - RNA, 19 nt, Homo sapiens
  misc_RNA (1)...(19): siRNA sense strand
ggacaagggaauuuacaga

SEQ ID NO: 1084486 - RNA, 19 nt, Homo sapiens
  misc_RNA (1)...(19): siRNA sense strand
ggaaacaagaucaccauca

SEQ ID NO: 1084487 - RNA, 19 nt, Homo sapiens
  misc_RNA (1)...(19): siRNA sense strand
ggaggacgacaccauauug

SEQ ID NO: 1084488 - RNA, 19 nt, Homo sapiens
  misc_RNA (1)...(19): siRNA sense strand
gcaagauccugggcuacuu

SEQ ID NO: 1084489 - RNA, 19 nt, Homo sapiens
  misc_RNA (1)...(19): siRNA sense strand
gaagggacuggaagagaaa

SEQ ID NO: 1084490 - RNA, 19 nt, Homo sapiens
  misc_RNA (1)...(19): siRNA sense strand
aagagggcuuuaucuauuu

SEQ ID NO: 1084491 - RNA, 19 nt, Homo sapiens
  misc_RNA (1)...(19): siRNA sense strand
cagagcuccuggguuauua

SEQ ID NO: 1084492 - RNA, 19 nt, Homo sapiens
  misc_RNA (1)...(19): siRNA sense strand
ugagaggucugccggaugu

SEQ ID NO: 1084493 - RNA, 19 nt, Homo sapiens
  misc_RNA (1)...(19): siRNA sense strand
ccaaggucauccugaaaga

SEQ ID NO: 1084494 - RNA, 19 nt, Homo sapiens
  misc_RNA (1)...(19): siRNA sense strand
gagcaccacugacguacuc

SEQ ID NO: 1084495 - RNA, 19 nt, Homo sapiens
  misc_RNA (1)...(19): siRNA sense strand
ccaccugguuccacaaaga

SEQ ID NO: 1084496 - RNA, 19 nt, Homo sapiens
  misc_RNA (1)...(19): siRNA sense strand
gaaacccagugaucaaacu

SEQ ID NO: 1084497 - RNA, 19 nt, Homo sapiens
  misc_RNA (1)...(19): siRNA sense strand
ucaccuuccuugaccgaua

SEQ ID NO: 1084498 - RNA, 19 nt, Homo sapiens
  misc_RNA (1)...(19): siRNA sense strand
gaucgagguugguguggau

SEQ ID NO: 1084499 - RNA, 19 nt, Homo sapiens
  misc_RNA (1)...(19): siRNA sense strand
gaagugaucauccagaacu

SEQ ID NO: 1084500 - RNA, 19 nt, Homo sapiens
  misc_RNA (1)...(19): siRNA sense strand
gaucgaggauaaaguuaac

SEQ ID NO: 1084501 - RNA, 19 nt, Homo sapiens
  misc_RNA (1)...(19): siRNA sense strand
ugaagagggcuuuaucuau

SEQ ID NO: 1084502 - RNA, 19 nt, Homo sapiens
  misc_RNA (1)...(19): siRNA sense strand
agacagagauccccuuuga

SEQ ID NO: 1084503 - RNA, 19 nt, Homo sapiens
  misc_RNA (1)...(19): siRNA sense strand
ugaaaucucuuggcugaag

SEQ ID NO: 1084504 - RNA, 19 nt, Homo sapiens
  misc_RNA (1)...(19): siRNA sense strand
ugagcuacaucuaaucuuc

SEQ ID NO: 1084505 - RNA, 19 nt, Homo sapiens
  misc_RNA (1)...(19): siRNA sense strand
ccgcugagcuacaucuaau

SEQ ID NO: 1084506 - RNA, 19 nt, Homo sapiens
  misc_RNA (1)...(19): siRNA sense strand
ggacuggcaugcggucaau

SEQ ID NO: 1084507 - RNA, 19 nt, Homo sapiens
  misc_RNA (1)...(19): siRNA sense strand
caugggauccugugaaaga

SEQ ID NO: 1084508 - RNA, 19 nt, Homo sapiens
  misc_RNA (1)...(19): siRNA sense strand
gggcaccuacucagucaua

SEQ ID NO: 1084509 - RNA, 19 nt, Homo sapiens
  misc_RNA (1)...(19): siRNA sense strand
gcuccuggguuauuacauc

SEQ ID NO: 1084510 - RNA, 19 nt, Homo sapiens
  misc_RNA (1)...(19): siRNA sense strand
ggagaagucagucauaggu

SEQ ID NO: 1084511 - RNA, 19 nt, Homo sapiens
  misc_RNA (1)...(19): siRNA sense strand
cggcagcucucaacagauc

SEQ ID NO: 1084512 - RNA, 19 nt, Homo sapiens
  misc_RNA (1)...(19): siRNA sense strand
uugacaagcuucugaggaa

SEQ ID NO: 1084513 - RNA, 19 nt, Homo sapiens
  misc_RNA (1)...(19): siRNA sense strand
gcacccagcagccuguuug

SEQ ID NO: 1084514 - RNA, 19 nt, Homo sapiens
  misc_RNA (1)...(19): siRNA sense strand
gagaagucagucauaggua

SEQ ID NO: 1084515 - RNA, 19 nt, Homo sapiens
  misc_RNA (1)...(19): siRNA sense strand
gaggauaaaguuaacaagu

SEQ ID NO: 1084516 - RNA, 19 nt, Homo sapiens
  misc_RNA (1)...(19): siRNA sense strand
gggcaaauacacucuggaa

SEQ ID NO: 1084517 - RNA, 19 nt, Homo sapiens
  misc_RNA (1)...(19): siRNA sense strand
caagaaggagacucgcuuu

SEQ ID NO: 1084518 - RNA, 19 nt, Homo sapiens
  misc_RNA (1)...(19): siRNA sense strand
gagaagggacuggaagaga

SEQ ID NO: 1084519 - RNA, 19 nt, Homo sapiens
  misc_RNA (1)...(19): siRNA sense strand
gcacagacgcuuuugaaga

SEQ ID NO: 1084520 - RNA, 19 nt, Homo sapiens
  misc_RNA (1)...(19): siRNA sense strand
ggauguggccacuaucaug

SEQ ID NO: 1084521 - RNA, 19 nt, Homo sapiens
  misc_RNA (1)...(19): siRNA sense strand
ucacugaugccgaugaaga

SEQ ID NO: 1084522 - RNA, 19 nt, Homo sapiens
  misc_RNA (1)...(19): siRNA sense strand
gagaucagaaacccaguga

SEQ ID NO: 1084523 - RNA, 19 nt, Homo sapiens
  misc_RNA (1)...(19): siRNA sense strand
gaggucaccaucaccauug

SEQ ID NO: 1084524 - RNA, 19 nt, Homo sapiens
  misc_RNA (1)...(19): siRNA sense strand
gcugaacaccagagacuga

SEQ ID NO: 1084525 - RNA, 19 nt, Homo sapiens
  misc_RNA (1)...(19): siRNA sense strand
ggcaccagguuuacaguuc

SEQ ID NO: 1084526 - RNA, 19 nt, Homo sapiens
  misc_RNA (1)...(19): siRNA sense strand
cgagaugggagccuacuga

SEQ ID NO: 1084527 - RNA, 19 nt, Homo sapiens
  misc_RNA (1)...(19): siRNA sense strand
gaugguuucugacgaucga

SEQ ID NO: 1084528 - RNA, 19 nt, Homo sapiens
  misc_RNA (1)...(19): siRNA sense strand
ugaggaaggcagaugcuaa

SEQ ID NO: 1084529 - RNA, 19 nt, Homo sapiens
  misc_RNA (1)...(19): siRNA sense strand
ccugaggguuuccgacuug

SEQ ID NO: 1084530 - RNA, 19 nt, Homo sapiens
  misc_RNA (1)...(19): siRNA sense strand
agaagggccugguggaagu

SEQ ID NO: 1084531 - RNA, 19 nt, Homo sapiens
  misc_RNA (1)...(19): siRNA sense strand
gagaguggugaucggauaa

SEQ ID NO: 1084532 - RNA, 19 nt, Homo sapiens
  misc_RNA (1)...(19): siRNA sense strand
cgucgaaggucagagcuau

SEQ ID NO: 1084533 - RNA, 19 nt, Homo sapiens
  misc_RNA (1)...(19): siRNA sense strand
gggaggacgacaccauauu

SEQ ID NO: 1084534 - RNA, 19 nt, Homo sapiens
  misc_RNA (1)...(19): siRNA sense strand
gcucaacuccgagauggaa

SEQ ID NO: 1084535 - RNA, 19 nt, Homo sapiens
  misc_RNA (1)...(19): siRNA sense strand
ucagaaacccagugaucaa

SEQ ID NO: 1084536 - RNA, 19 nt, Homo sapiens
  misc_RNA (1)...(19): siRNA sense strand
aggauaaaguuaacaaguc

SEQ ID NO: 1084537 - RNA, 19 nt, Homo sapiens
  misc_RNA (1)...(19): siRNA sense strand
ggaugaagagggcuuuauc

SEQ ID NO: 1084538 - RNA, 19 nt, Homo sapiens
  misc_RNA (1)...(19): siRNA sense strand
gaacugcgggaagaaugaa

SEQ ID NO: 1084539 - RNA, 19 nt, Homo sapiens
  misc_RNA (1)...(19): siRNA sense strand
uaacaacaaacccauccaa

SEQ ID NO: 1084540 - RNA, 19 nt, Homo sapiens
  misc_RNA (1)...(19): siRNA sense strand
guucaagcuuucagagaca

SEQ ID NO: 1084541 - RNA, 19 nt, Homo sapiens
  misc_RNA (1)...(19): siRNA sense strand
agaagaaucgugccaaagu

SEQ ID NO: 1084542 - RNA, 19 nt, Homo sapiens
  misc_RNA (1)...(19): siRNA sense strand
ccuugacacugguggauga

SEQ ID NO: 1084543 - RNA, 19 nt, Homo sapiens
  misc_RNA (1)...(19): siRNA sense strand
ggcuuuggcuggaaguaga

SEQ ID NO: 1084544 - RNA, 19 nt, Homo sapiens
  misc_RNA (1)...(19): siRNA sense strand
aggaaagaguuacguguuc

SEQ ID NO: 1084545 - RNA, 19 nt, Homo sapiens
  misc_RNA (1)...(19): siRNA sense strand
gagcaaugaaccaguaugg

SEQ ID NO: 1084546 - RNA, 19 nt, Homo sapiens
  misc_RNA (1)...(19): siRNA sense strand
gcucucaacagaucucuca

SEQ ID NO: 1084547 - RNA, 19 nt, Homo sapiens
  misc_RNA (1)...(19): siRNA sense strand
gaacguccgaugccuggau

SEQ ID NO: 1084548 - RNA, 19 nt, Homo sapiens
  misc_RNA (1)...(19): siRNA sense strand
caggcuaucacgucaguuu

SEQ ID NO: 1084549 - RNA, 19 nt, Homo sapiens
  misc_RNA (1)...(19): siRNA sense strand
ccuacgugcuugugagaga

SEQ ID NO: 1084550 - RNA, 19 nt, Homo sapiens
  misc_RNA (1)...(19): siRNA sense strand
gcaaggucaaguacuacaa

SEQ ID NO: 1084551 - RNA, 19 nt, Homo sapiens
  misc_RNA (1)...(19): siRNA sense strand
caacaacaaggagaucuuc

SEQ ID NO: 1084552 - RNA, 19 nt, Homo sapiens
  misc_RNA (1)...(19): siRNA sense strand
caggaaagaguuacguguu

SEQ ID NO: 1084553 - RNA, 19 nt, Homo sapiens
  misc_RNA (1)...(19): siRNA sense strand
gccuggaugugaacagaga

SEQ ID NO: 1084554 - RNA, 19 nt, Homo sapiens
  misc_RNA (1)...(19): siRNA sense strand
gaggaaggcagaugcuaag

SEQ ID NO: 1084555 - RNA, 19 nt, Homo sapiens
  misc_RNA (1)...(19): siRNA sense strand
ugaagcagcugucgaagua

SEQ ID NO: 1084556 - RNA, 19 nt, Homo sapiens
  misc_RNA (1)...(19): siRNA sense strand
uggagaaacucaagaauga

SEQ ID NO: 1084557 - RNA, 19 nt, Homo sapiens
  misc_RNA (1)...(19): siRNA sense strand
ucaacaagaucgacaagaa

SEQ ID NO: 1084558 - RNA, 19 nt, Homo sapiens
  misc_RNA (1)...(19): siRNA sense strand
ggcagaagcuggucaguca

SEQ ID NO: 1084559 - RNA, 19 nt, Homo sapiens
  misc_RNA (1)...(19): siRNA sense strand
gcagcagcaucuaauuaaa

SEQ ID NO: 1084560 - RNA, 19 nt, Homo sapiens
  misc_RNA (1)...(19): siRNA sense strand
cagcagcagcaucuaauua

SEQ ID NO: 1084561 - RNA, 19 nt, Homo sapiens
  misc_RNA (1)...(19): siRNA sense strand
acaaggaccucccaagugu

SEQ ID NO: 1084562 - RNA, 19 nt, Homo sapiens
  misc_RNA (1)...(19): siRNA sense strand
ucaccugucuucaaccauu

SEQ ID NO: 1084563 - RNA, 19 nt, Homo sapiens
  misc_RNA (1)...(19): siRNA sense strand
gcagacagcaguacagaca

SEQ ID NO: 1084564 - RNA, 19 nt, Homo sapiens
  misc_RNA (1)...(19): siRNA sense strand
ccaagacccgggacgaaua

SEQ ID NO: 1084565 - RNA, 19 nt, Homo sapiens
  misc_RNA (1)...(19): siRNA sense strand
gcucacagcccaacuccaa

SEQ ID NO: 1084566 - RNA, 19 nt, Homo sapiens
  misc_RNA (1)...(19): siRNA sense strand
ccaaacagcaguaccuaug

SEQ ID NO: 1084567 - RNA, 19 nt, Homo sapiens
  misc_RNA (1)...(19): siRNA sense strand
gaaccaaccaucacaacuc

SEQ ID NO: 1084568 - RNA, 19 nt, Homo sapiens
  misc_RNA (1)...(19): siRNA sense strand
cgacaagaacgaagacaga

SEQ ID NO: 1084569 - RNA, 19 nt, Homo sapiens
  misc_RNA (1)...(19): siRNA sense strand
gacaaggaccucccaagug

SEQ ID NO: 1084570 - RNA, 19 nt, Homo sapiens
  misc_RNA (1)...(19): siRNA sense strand
caaccaccacugaaauuug

SEQ ID NO: 1084571 - RNA, 19 nt, Homo sapiens
  misc_RNA (1)...(19): siRNA sense strand
aacaagaaaucucaagcuu

SEQ ID NO: 1084572 - RNA, 19 nt, Homo sapiens
  misc_RNA (1)...(19): siRNA sense strand
ccaggcucauuauccauuu

SEQ ID NO: 1084573 - RNA, 19 nt, Homo sapiens
  misc_RNA (1)...(19): siRNA sense strand
cgucagugauccuaugaau

SEQ ID NO: 1084574 - RNA, 19 nt, Homo sapiens
  misc_RNA (1)...(19): siRNA sense strand
ugagaucgcccuggagaaa

SEQ ID NO: 1084575 - RNA, 19 nt, Homo sapiens
  misc_RNA (1)...(19): siRNA sense strand
gagaaacucaagaaugaca

SEQ ID NO: 1084576 - RNA, 19 nt, Homo sapiens
  misc_RNA (1)...(19): siRNA sense strand
ccaaagcccgcuguggaua

SEQ ID NO: 1084577 - RNA, 19 nt, Homo sapiens
  misc_RNA (1)...(19): siRNA sense strand
gagacauucauaacaagaa

SEQ ID NO: 1084578 - RNA, 19 nt, Homo sapiens
  misc_RNA (1)...(19): siRNA sense strand
gaaacucaagaaugacaug

SEQ ID NO: 1084579 - RNA, 19 nt, Homo sapiens
  misc_RNA (1)...(19): siRNA sense strand
gcagcagcagcaucuaauu

SEQ ID NO: 1084580 - RNA, 19 nt, Homo sapiens
  misc_RNA (1)...(19): siRNA sense strand
gcauggcugucgugucuac

SEQ ID NO: 1084581 - RNA, 19 nt, Homo sapiens
  misc_RNA (1)...(19): siRNA sense strand
ucugcaagcuggaugacaa

SEQ ID NO: 1084582 - RNA, 19 nt, Homo sapiens
  misc_RNA (1)...(19): siRNA sense strand
ccaaccaccacugaaauuu

SEQ ID NO: 1084583 - RNA, 19 nt, Homo sapiens
  misc_RNA (1)...(19): siRNA sense strand
cagcagcaucuaauuaaau

SEQ ID NO: 1084584 - RNA, 19 nt, Homo sapiens
  misc_RNA (1)...(19): siRNA sense strand
ucagugauccuaugaaugc

SEQ ID NO: 1084585 - RNA, 19 nt, Homo sapiens
  misc_RNA (1)...(19): siRNA sense strand
cagcagcagcagcaucuaa

SEQ ID NO: 1084586 - RNA, 19 nt, Homo sapiens
  misc_RNA (1)...(19): siRNA sense strand
aaccaccacugaaauuugu

SEQ ID NO: 1084587 - RNA, 19 nt, Homo sapiens
  misc_RNA (1)...(19): siRNA sense strand
cagaagcuggucagucaaa

SEQ ID NO: 1084588 - RNA, 19 nt, Homo sapiens
  misc_RNA (1)...(19): siRNA sense strand
ugacaaggaccucccaagu

SEQ ID NO: 1084589 - RNA, 19 nt, Homo sapiens
  misc_RNA (1)...(19): siRNA sense strand
caagaucgacaagaacgaa

SEQ ID NO: 1084590 - RNA, 19 nt, Homo sapiens
  misc_RNA (1)...(19): siRNA sense strand
gcagcaguuccaagcagua

SEQ ID NO: 1084591 - RNA, 19 nt, Homo sapiens
  misc_RNA (1)...(19): siRNA sense strand
gcucaccugucuucaacca

SEQ ID NO: 1084592 - RNA, 19 nt, Homo sapiens
  misc_RNA (1)...(19): siRNA sense strand
gacaagaacgaagacagaa

SEQ ID NO: 1084593 - RNA, 19 nt, Homo sapiens
  misc_RNA (1)...(19): siRNA sense strand
ucacaacucccgccacagu

SEQ ID NO: 1084594 - RNA, 19 nt, Homo sapiens
  misc_RNA (1)...(19): siRNA sense strand
gcaguuccaagcaguagug

SEQ ID NO: 1084595 - RNA, 19 nt, Homo sapiens
  misc_RNA (1)...(19): siRNA sense strand
gaccaaacagcaguaccua

SEQ ID NO: 1084596 - RNA, 19 nt, Homo sapiens
  misc_RNA (1)...(19): siRNA sense strand
gacccagccuuugguguca

SEQ ID NO: 1084597 - RNA, 19 nt, Homo sapiens
  misc_RNA (1)...(19): siRNA sense strand
gaagcuggucagucaaauc

SEQ ID NO: 1084598 - RNA, 19 nt, Homo sapiens
  misc_RNA (1)...(19): siRNA sense strand
gaggaugccaugaggaaag

SEQ ID NO: 1084599 - RNA, 19 nt, Homo sapiens
  misc_RNA (1)...(19): siRNA sense strand
ucaccuggaccuuuaaaca

SEQ ID NO: 1084600 - RNA, 19 nt, Homo sapiens
  misc_RNA (1)...(19): siRNA sense strand
aaaaggaccugaguaagau

SEQ ID NO: 1084601 - RNA, 19 nt, Homo sapiens
  misc_RNA (1)...(19): siRNA sense strand
caacaagaucgacaagaac

SEQ ID NO: 1084602 - RNA, 19 nt, Homo sapiens
  misc_RNA (1)...(19): siRNA sense strand
uucgagacauucauaacaa

SEQ ID NO: 1084603 - RNA, 19 nt, Homo sapiens
  misc_RNA (1)...(19): siRNA sense strand
ccaaguuccugguaaaccu

SEQ ID NO: 1084604 - RNA, 19 nt, Homo sapiens
  misc_RNA (1)...(19): siRNA sense strand
caagcucucccuggacaaa

SEQ ID NO: 1084605 - RNA, 19 nt, Homo sapiens
  misc_RNA (1)...(19): siRNA sense strand
ugacuauccugcccaaagc

SEQ ID NO: 1084606 - RNA, 19 nt, Homo sapiens
  misc_RNA (1)...(19): siRNA sense strand
gcaagcuggaugacaagga

SEQ ID NO: 1084607 - RNA, 19 nt, Homo sapiens
  misc_RNA (1)...(19): siRNA sense strand
caagaacgaagacagaaaa

SEQ ID NO: 1084608 - RNA, 19 nt, Homo sapiens
  misc_RNA (1)...(19): siRNA sense strand
acaagaacgaagacagaaa

SEQ ID NO: 1084609 - RNA, 19 nt, Homo sapiens
  misc_RNA (1)...(19): siRNA sense strand
uaacaagaaaucucaagcu

SEQ ID NO: 1084610 - RNA, 19 nt, Homo sapiens
  misc_RNA (1)...(19): siRNA sense strand
gaccugaguaagaugaaga

SEQ ID NO: 1084611 - RNA, 19 nt, Homo sapiens
  misc_RNA (1)...(19): siRNA sense strand
ggaccugaguaagaugaag

SEQ ID NO: 1084612 - RNA, 19 nt, Homo sapiens
  misc_RNA (1)...(19): siRNA sense strand
agcagcagcaucuaauuaa

SEQ ID NO: 1084613 - RNA, 19 nt, Homo sapiens
  misc_RNA (1)...(19): siRNA sense strand
aaagcccgcuguggauaga

SEQ ID NO: 1084614 - RNA, 19 nt, Homo sapiens
  misc_RNA (1)...(19): siRNA sense strand
caaagcccgcuguggauag

SEQ ID NO: 1084615 - RNA, 19 nt, Homo sapiens
  misc_RNA (1)...(19): siRNA sense strand
ccgcucaccugucuucaac

SEQ ID NO: 1084616 - RNA, 19 nt, Homo sapiens
  misc_RNA (1)...(19): siRNA sense strand
gccaggcucauuauccauu

SEQ ID NO: 1084617 - RNA, 19 nt, Homo sapiens
  misc_RNA (1)...(19): siRNA sense strand
aagcagcugucgaaguaca

SEQ ID NO: 1084618 - RNA, 19 nt, Homo sapiens
  misc_RNA (1)...(19): siRNA sense strand
cgagacauucauaacaaga

SEQ ID NO: 1084619 - RNA, 19 nt, Homo sapiens
  misc_RNA (1)...(19): siRNA sense strand
cuucaaccauucccuguac

SEQ ID NO: 1084620 - RNA, 19 nt, Homo sapiens
  misc_RNA (1)...(19): siRNA sense strand
cugaagaccuugcaaaagu

SEQ ID NO: 1084621 - RNA, 19 nt, Homo sapiens
  misc_RNA (1)...(19): siRNA sense strand
gcaggcccagccaccaauu

SEQ ID NO: 1084622 - RNA, 19 nt, Homo sapiens
  misc_RNA (1)...(19): siRNA sense strand
guuccaggcucagcagagu

SEQ ID NO: 1084623 - RNA, 19 nt, Homo sapiens
  misc_RNA (1)...(19): siRNA sense strand
gcacuguccaccugaucug

SEQ ID NO: 1084624 - RNA, 19 nt, Homo sapiens
  misc_RNA (1)...(19): siRNA sense strand
gcagcagcagacagcagua

SEQ ID NO: 1084625 - RNA, 19 nt, Homo sapiens
  misc_RNA (1)...(19): siRNA sense strand
gcgcaggcuugaggaugau

SEQ ID NO: 1084626 - RNA, 19 nt, Homo sapiens
  misc_RNA (1)...(19): siRNA sense strand
cuggagaaacucaagaaug

SEQ ID NO: 1084627 - RNA, 19 nt, Homo sapiens
  misc_RNA (1)...(19): siRNA sense strand
cagcagacagcaguacaga

SEQ ID NO: 1084628 - RNA, 19 nt, Homo sapiens
  misc_RNA (1)...(19): siRNA sense strand
gccaugggacagccaaugu

SEQ ID NO: 1084629 - RNA, 19 nt, Homo sapiens
  misc_RNA (1)...(19): siRNA sense strand
ucgaggaugccaugaggaa

SEQ ID NO: 1084630 - RNA, 19 nt, Homo sapiens
  misc_RNA (1)...(19): siRNA sense strand
ccccucaccuggaccuuua

SEQ ID NO: 1084631 - RNA, 19 nt, Homo sapiens
  misc_RNA (1)...(19): siRNA sense strand
gccaagacccgggacgaau

SEQ ID NO: 1084632 - RNA, 19 nt, Homo sapiens
  misc_RNA (1)...(19): siRNA sense strand
cccaaccaccacugaaauu

SEQ ID NO: 1084633 - RNA, 19 nt, Homo sapiens
  misc_RNA (1)...(19): siRNA sense strand
caccauaccuggacaaaua

SEQ ID NO: 1084634 - RNA, 19 nt, Homo sapiens
  misc_RNA (1)...(19): siRNA sense strand
gcaaagcacugcaaagaca

SEQ ID NO: 1084635 - RNA, 19 nt, Homo sapiens
  misc_RNA (1)...(19): siRNA sense strand
agacaggccucccaaagua

SEQ ID NO: 1084636 - RNA, 19 nt, Homo sapiens
  misc_RNA (1)...(19): siRNA sense strand
ugaagaggaucaaguugua

SEQ ID NO: 1084637 - RNA, 19 nt, Homo sapiens
  misc_RNA (1)...(19): siRNA sense strand
uaacuccgaugaagacaaa

SEQ ID NO: 1084638 - RNA, 19 nt, Homo sapiens
  misc_RNA (1)...(19): siRNA sense strand
ccaaaagccuuccgucuua

SEQ ID NO: 1084639 - RNA, 19 nt, Homo sapiens
  misc_RNA (1)...(19): siRNA sense strand
gaaccuuugucaccgagua

SEQ ID NO: 1084640 - RNA, 19 nt, Homo sapiens
  misc_RNA (1)...(19): siRNA sense strand
ggagaucagagucccauua

SEQ ID NO: 1084641 - RNA, 19 nt, Homo sapiens
  misc_RNA (1)...(19): siRNA sense strand
gaagaagguuaguucaaca

SEQ ID NO: 1084642 - RNA, 19 nt, Homo sapiens
  misc_RNA (1)...(19): siRNA sense strand
gagguggaauuccuaacua

SEQ ID NO: 1084643 - RNA, 19 nt, Homo sapiens
  misc_RNA (1)...(19): siRNA sense strand
cagcagaucucagcuaugu

SEQ ID NO: 1084644 - RNA, 19 nt, Homo sapiens
  misc_RNA (1)...(19): siRNA sense strand
ggaagaagguuaguucaac

SEQ ID NO: 1084645 - RNA, 19 nt, Homo sapiens
  misc_RNA (1)...(19): siRNA sense strand
gggaccagcuggcuccuuu

SEQ ID NO: 1084646 - RNA, 19 nt, Homo sapiens
  misc_RNA (1)...(19): siRNA sense strand
caaaguaccgccaagagaa

SEQ ID NO: 1084647 - RNA, 19 nt, Homo sapiens
  misc_RNA (1)...(19): siRNA sense strand
gagaucagagucccauuaa

SEQ ID NO: 1084648 - RNA, 19 nt, Homo sapiens
  misc_RNA (1)...(19): siRNA sense strand
acucuacacuuucugauuu

SEQ ID NO: 1084649 - RNA, 19 nt, Homo sapiens
  misc_RNA (1)...(19): siRNA sense strand
acacagagcuucuccuaac

SEQ ID NO: 1084650 - RNA, 19 nt, Homo sapiens
  misc_RNA (1)...(19): siRNA sense strand
cgaaggaucugccaguaag

SEQ ID NO: 1084651 - RNA, 19 nt, Homo sapiens
  misc_RNA (1)...(19): siRNA sense strand
ccuaugugguuucuccuua

SEQ ID NO: 1084652 - RNA, 19 nt, Homo sapiens
  misc_RNA (1)...(19): siRNA sense strand
ggaagcagaagaaacaaau

SEQ ID NO: 1084653 - RNA, 19 nt, Homo sapiens
  misc_RNA (1)...(19): siRNA sense strand
ccagcuggcuccuuuaaca

SEQ ID NO: 1084654 - RNA, 19 nt, Homo sapiens
  misc_RNA (1)...(19): siRNA sense strand
gaagacaggccucccaaag

SEQ ID NO: 1084655 - RNA, 19 nt, Homo sapiens
  misc_RNA (1)...(19): siRNA sense strand
aaagccagauuauagaaga

SEQ ID NO: 1084656 - RNA, 19 nt, Homo sapiens
  misc_RNA (1)...(19): siRNA sense strand
gaaaaugggaagaagguua

SEQ ID NO: 1084657 - RNA, 19 nt, Homo sapiens
  misc_RNA (1)...(19): siRNA sense strand
gagcaccuauagugaugaa

SEQ ID NO: 1084658 - RNA, 19 nt, Homo sapiens
  misc_RNA (1)...(19): siRNA sense strand
ggacaaaucaacuaugcau

SEQ ID NO: 1084659 - RNA, 19 nt, Homo sapiens
  misc_RNA (1)...(19): siRNA sense strand
gcagaucucagcuaugugu

SEQ ID NO: 1084660 - RNA, 19 nt, Homo sapiens
  misc_RNA (1)...(19): siRNA sense strand
aagguuaguucaacacauu

SEQ ID NO: 1084661 - RNA, 19 nt, Homo sapiens
  misc_RNA (1)...(19): siRNA sense strand
gaucagagucccauuaaaa

SEQ ID NO: 1084662 - RNA, 19 nt, Homo sapiens
  misc_RNA (1)...(19): siRNA sense strand
cagcaaagcacugcaaaga

SEQ ID NO: 1084663 - RNA, 19 nt, Homo sapiens
  misc_RNA (1)...(19): siRNA sense strand
caccgaagauuaagaaggu

SEQ ID NO: 1084664 - RNA, 19 nt, Homo sapiens
  misc_RNA (1)...(19): siRNA sense strand
gaagguuaguucaacacau

SEQ ID NO: 1084665 - RNA, 19 nt, Homo sapiens
  misc_RNA (1)...(19): siRNA sense strand
gcaccuauagugaugaaga

SEQ ID NO: 1084666 - RNA, 19 nt, Homo sapiens
  misc_RNA (1)...(19): siRNA sense strand
caagccagccauaaggaua

SEQ ID NO: 1084667 - RNA, 19 nt, Homo sapiens
  misc_RNA (1)...(19): siRNA sense strand
ggaauaugaggaagaccua

SEQ ID NO: 1084668 - RNA, 19 nt, Homo sapiens
  misc_RNA (1)...(19): siRNA sense strand
caaaucugcuccgaugaau

SEQ ID NO: 1084669 - RNA, 19 nt, Homo sapiens
  misc_RNA (1)...(19): siRNA sense strand
guaaagccagauuauagaa

SEQ ID NO: 1084670 - RNA, 19 nt, Homo sapiens
  misc_RNA (1)...(19): siRNA sense strand
ccaguaaagccagauuaua

SEQ ID NO: 1084671 - RNA, 19 nt, Homo sapiens
  misc_RNA (1)...(19): siRNA sense strand
gaugaauggccacugcuuu

SEQ ID NO: 1084672 - RNA, 19 nt, Homo sapiens
  misc_RNA (1)...(19): siRNA sense strand
ccaaguaugucagcagcaa

SEQ ID NO: 1084673 - RNA, 19 nt, Homo sapiens
  misc_RNA (1)...(19): siRNA sense strand
caguaaagccagauuauag

SEQ ID NO: 1084674 - RNA, 19 nt, Homo sapiens
  misc_RNA (1)...(19): siRNA sense strand
gaccaguaaagccagauua

SEQ ID NO: 1084675 - RNA, 19 nt, Homo sapiens
  misc_RNA (1)...(19): siRNA sense strand
ccaaaucugcuccgaugaa

SEQ ID NO: 1084676 - RNA, 19 nt, Homo sapiens
  misc_RNA (1)...(19): siRNA sense strand
caaguuguaugugguuuua

SEQ ID NO: 1084677 - RNA, 19 nt, Homo sapiens
  misc_RNA (1)...(19): siRNA sense strand
gcgaaggaucugccaguaa

SEQ ID NO: 1084678 - RNA, 19 nt, Homo sapiens
  misc_RNA (1)...(19): siRNA sense strand
auaaggauauccaacuguu

SEQ ID NO: 1084679 - RNA, 19 nt, Homo sapiens
  misc_RNA (1)...(19): siRNA sense strand
ucagacccaccgaagauua

SEQ ID NO: 1084680 - RNA, 19 nt, Homo sapiens
  misc_RNA (1)...(19): siRNA sense strand
ugacugcgguauaucuuca

SEQ ID NO: 1084681 - RNA, 19 nt, Homo sapiens
  misc_RNA (1)...(19): siRNA sense strand
aaauggaggugucccagau

SEQ ID NO: 1084682 - RNA, 19 nt, Homo sapiens
  misc_RNA (1)...(19): siRNA sense strand
gcauucugcccauuauuga

SEQ ID NO: 1084683 - RNA, 19 nt, Homo sapiens
  misc_RNA (1)...(19): siRNA sense strand
ccaaaguaccgccaagaga

SEQ ID NO: 1084684 - RNA, 19 nt, Homo sapiens
  misc_RNA (1)...(19): siRNA sense strand
gaccagcuggcuccuuuaa

SEQ ID NO: 1084685 - RNA, 19 nt, Homo sapiens
  misc_RNA (1)...(19): siRNA sense strand
uagcucagauacagacuuc

SEQ ID NO: 1084686 - RNA, 19 nt, Homo sapiens
  misc_RNA (1)...(19): siRNA sense strand
gccaagagaaccuuuguca

SEQ ID NO: 1084687 - RNA, 19 nt, Homo sapiens
  misc_RNA (1)...(19): siRNA sense strand
ccauaaggauauccaacug

SEQ ID NO: 1084688 - RNA, 19 nt, Homo sapiens
  misc_RNA (1)...(19): siRNA sense strand
gaagauggucagcagaagu

SEQ ID NO: 1084689 - RNA, 19 nt, Homo sapiens
  misc_RNA (1)...(19): siRNA sense strand
gggaagaagguuaguucaa

SEQ ID NO: 1084690 - RNA, 19 nt, Homo sapiens
  misc_RNA (1)...(19): siRNA sense strand
gaucaaguuguaugugguu

SEQ ID NO: 1084691 - RNA, 19 nt, Homo sapiens
  misc_RNA (1)...(19): siRNA sense strand
gcagucgcagugaguuuaa

SEQ ID NO: 1084692 - RNA, 19 nt, Homo sapiens
  misc_RNA (1)...(19): siRNA sense strand
gacaaaucaacuaugcaua

SEQ ID NO: 1084693 - RNA, 19 nt, Homo sapiens
  misc_RNA (1)...(19): siRNA sense strand
ccuacagucugaacucuuc

SEQ ID NO: 1084694 - RNA, 19 nt, Homo sapiens
  misc_RNA (1)...(19): siRNA sense strand
gagcagucgcagugaguuu

SEQ ID NO: 1084695 - RNA, 19 nt, Homo sapiens
  misc_RNA (1)...(19): siRNA sense strand
uaacaagccagccauaagg

SEQ ID NO: 1084696 - RNA, 19 nt, Homo sapiens
  misc_RNA (1)...(19): siRNA sense strand
cuaacuagcucagauacag

SEQ ID NO: 1084697 - RNA, 19 nt, Homo sapiens
  misc_RNA (1)...(19): siRNA sense strand
gcgcccaaauccagccauu

SEQ ID NO: 1084698 - RNA, 19 nt, Homo sapiens
  misc_RNA (1)...(19): siRNA sense strand
gaagaggaucaaguuguau

SEQ ID NO: 1084699 - RNA, 19 nt, Homo sapiens
  misc_RNA (1)...(19): siRNA sense strand
gaagcagaagaaacaaaug

SEQ ID NO: 1084700 - RNA, 19 nt, Homo sapiens
  misc_RNA (1)...(19): siRNA sense strand
ggaccagcuggcuccuuua

SEQ ID NO: 1084701 - RNA, 19 nt, Homo sapiens
  misc_RNA (1)...(19): siRNA sense strand
aaacuugggaccacaugaa

SEQ ID NO: 1084702 - RNA, 19 nt, Homo sapiens
  misc_RNA (1)...(19): siRNA sense strand
cagaaaagccagacucaaa

SEQ ID NO: 1084703 - RNA, 19 nt, Homo sapiens
  misc_RNA (1)...(19): siRNA sense strand
gcacugcaaagacagaaca

SEQ ID NO: 1084704 - RNA, 19 nt, Homo sapiens
  misc_RNA (1)...(19): siRNA sense strand
gggcaugcuuccaaaucug

SEQ ID NO: 1084705 - RNA, 19 nt, Homo sapiens
  misc_RNA (1)...(19): siRNA sense strand
guggacaaaucaacuaugc

SEQ ID NO: 1084706 - RNA, 19 nt, Homo sapiens
  misc_RNA (1)...(19): siRNA sense strand
ucagauacagacuuccuuu

SEQ ID NO: 1084707 - RNA, 19 nt, Homo sapiens
  misc_RNA (1)...(19): siRNA sense strand
gauacagacuuccuuuuag

SEQ ID NO: 1084708 - RNA, 19 nt, Homo sapiens
  misc_RNA (1)...(19): siRNA sense strand
uagggaagcagaagaaaca

SEQ ID NO: 1084709 - RNA, 19 nt, Homo sapiens
  misc_RNA (1)...(19): siRNA sense strand
uagaagauggucagcagaa

SEQ ID NO: 1084710 - RNA, 19 nt, Homo sapiens
  misc_RNA (1)...(19): siRNA sense strand
gggaagcagaagaaacaaa

SEQ ID NO: 1084711 - RNA, 19 nt, Homo sapiens
  misc_RNA (1)...(19): siRNA sense strand
ucgagcaccuauagugaug

SEQ ID NO: 1084712 - RNA, 19 nt, Homo sapiens
  misc_RNA (1)...(19): siRNA sense strand
gguguggacaaaucaacua

SEQ ID NO: 1084713 - RNA, 19 nt, Homo sapiens
  misc_RNA (1)...(19): siRNA sense strand
agauuaagaaggucucauu

SEQ ID NO: 1084714 - RNA, 19 nt, Homo sapiens
  misc_RNA (1)...(19): siRNA sense strand
cagacccaccgaagauuaa

SEQ ID NO: 1084715 - RNA, 19 nt, Homo sapiens
  misc_RNA (1)...(19): siRNA sense strand
gggaccacaugaagaggau

SEQ ID NO: 1084716 - RNA, 19 nt, Homo sapiens
  misc_RNA (1)...(19): siRNA sense strand
gauuaagaaggucucauuc

SEQ ID NO: 1084717 - RNA, 19 nt, Homo sapiens
  misc_RNA (1)...(19): siRNA sense strand
acaugaagaggaucaaguu

SEQ ID NO: 1084718 - RNA, 19 nt, Homo sapiens
  misc_RNA (1)...(19): siRNA sense strand
acgugaagcguaaacauuu

SEQ ID NO: 1084719 - RNA, 19 nt, Homo sapiens
  misc_RNA (1)...(19): siRNA sense strand
gcccaaauccagccauuac

SEQ ID NO: 1084720 - RNA, 19 nt, Homo sapiens
  misc_RNA (1)...(19): siRNA sense strand
auacacagagcuucuccua

SEQ ID NO: 1084721 - RNA, 19 nt, Homo sapiens
  misc_RNA (1)...(19): siRNA sense strand
ggaggugucccagauccaa

SEQ ID NO: 1084722 - RNA, 19 nt, Homo sapiens
  misc_RNA (1)...(19): siRNA sense strand
ccucagacccaccgaagau

SEQ ID NO: 1084723 - RNA, 19 nt, Homo sapiens
  misc_RNA (1)...(19): siRNA sense strand
cacgugaagcguaaacauu

SEQ ID NO: 1084724 - RNA, 19 nt, Homo sapiens
  misc_RNA (1)...(19): siRNA sense strand
agaucagagucccauuaaa

SEQ ID NO: 1084725 - RNA, 19 nt, Homo sapiens
  misc_RNA (1)...(19): siRNA sense strand
gcgcacaccgagucccaaa

SEQ ID NO: 1084726 - RNA, 19 nt, Homo sapiens
  misc_RNA (1)...(19): siRNA sense strand
gagcgccuaauaccacuug

SEQ ID NO: 1084727 - RNA, 19 nt, Homo sapiens
  misc_RNA (1)...(19): siRNA sense strand
ugcagcagaucucagcuau

SEQ ID NO: 1084728 - RNA, 19 nt, Homo sapiens
  misc_RNA (1)...(19): siRNA sense strand
gacucuacacuuucugauu

SEQ ID NO: 1084729 - RNA, 19 nt, Homo sapiens
  misc_RNA (1)...(19): siRNA sense strand
guggccacgugaagcguaa

SEQ ID NO: 1084730 - RNA, 19 nt, Homo sapiens
  misc_RNA (1)...(19): siRNA sense strand
uuacuucgagcaccuauag

SEQ ID NO: 1084731 - RNA, 19 nt, Homo sapiens
  misc_RNA (1)...(19): siRNA sense strand
cgauaaccauggccuacag

SEQ ID NO: 1084732 - RNA, 19 nt, Homo sapiens
  misc_RNA (1)...(19): siRNA sense strand
cauaccuccuagaccagua

SEQ ID NO: 1084733 - RNA, 19 nt, Homo sapiens
  misc_RNA (1)...(19): siRNA sense strand
ggagguggaugcagcagua

SEQ ID NO: 1084734 - RNA, 19 nt, Homo sapiens
  misc_RNA (1)...(19): siRNA sense strand
gaagagaagauuaucauug

SEQ ID NO: 1084735 - RNA, 19 nt, Homo sapiens
  misc_RNA (1)...(19): siRNA sense strand
ucaaggagcuggaguuucu

SEQ ID NO: 1084736 - RNA, 19 nt, Homo sapiens
  misc_RNA (1)...(19): siRNA sense strand
gcaacaccaugaaccaguu

SEQ ID NO: 1084737 - RNA, 19 nt, Homo sapiens
  misc_RNA (1)...(19): siRNA sense strand
ccaaggaggagcaguuuaa

SEQ ID NO: 1084738 - RNA, 19 nt, Homo sapiens
  misc_RNA (1)...(19): siRNA sense strand
ccacguagcccgaaugaca

SEQ ID NO: 1084739 - RNA, 19 nt, Homo sapiens
  misc_RNA (1)...(19): siRNA sense strand
gauuaucauugacaaggaa

SEQ ID NO: 1084740 - RNA, 19 nt, Homo sapiens
  misc_RNA (1)...(19): siRNA sense strand
cagacaaguucaagacaga

SEQ ID NO: 1084741 - RNA, 19 nt, Homo sapiens
  misc_RNA (1)...(19): siRNA sense strand
ggaagagaagauuaucauu

SEQ ID NO: 1084742 - RNA, 19 nt, Homo sapiens
  misc_RNA (1)...(19): siRNA sense strand
caaguucaauguccucuac

SEQ ID NO: 1084743 - RNA, 19 nt, Homo sapiens
  misc_RNA (1)...(19): siRNA sense strand
ggagugacugggaguguuu

SEQ ID NO: 1084744 - RNA, 19 nt, Homo sapiens
  misc_RNA (1)...(19): siRNA sense strand
cgaaauaucgaggugauga

SEQ ID NO: 1084745 - RNA, 19 nt, Homo sapiens
  misc_RNA (1)...(19): siRNA sense strand
gaaauaucgaggugaugaa

SEQ ID NO: 1084746 - RNA, 19 nt, Homo sapiens
  misc_RNA (1)...(19): siRNA sense strand
ggaggccuaugcucugugu

SEQ ID NO: 1084747 - RNA, 19 nt, Homo sapiens
  misc_RNA (1)...(19): siRNA sense strand
gcacagacaaguucaagac

SEQ ID NO: 1084748 - RNA, 19 nt, Homo sapiens
  misc_RNA (1)...(19): siRNA sense strand
gagaagauuaucauugaca

SEQ ID NO: 1084749 - RNA, 19 nt, Homo sapiens
  misc_RNA (1)...(19): siRNA sense strand
cagcacagcgccaucaaga

SEQ ID NO: 1084750 - RNA, 19 nt, Homo sapiens
  misc_RNA (1)...(19): siRNA sense strand
gcucagcacagacaaguuc

SEQ ID NO: 1084751 - RNA, 19 nt, Homo sapiens
  misc_RNA (1)...(19): siRNA sense strand
gcaggagggccgaaauauc

SEQ ID NO: 1084752 - RNA, 19 nt, Homo sapiens
  misc_RNA (1)...(19): siRNA sense strand
gcaggugugugagaucauc

SEQ ID NO: 1084753 - RNA, 19 nt, Homo sapiens
  misc_RNA (1)...(19): siRNA sense strand
gugauggccugcggaguga

SEQ ID NO: 1084754 - RNA, 19 nt, Homo sapiens
  misc_RNA (1)...(19): siRNA sense strand
gcacagcacagcgccauca

SEQ ID NO: 1084755 - RNA, 19 nt, Homo sapiens
  misc_RNA (1)...(19): siRNA sense strand
gccgaaauaucgaggugau

SEQ ID NO: 1084756 - RNA, 19 nt, Homo sapiens
  misc_RNA (1)...(19): siRNA sense strand
caauggagaggccacaaug

SEQ ID NO: 1084757 - RNA, 19 nt, Homo sapiens
  misc_RNA (1)...(19): siRNA sense strand
caaggcaucggcaggagaa

SEQ ID NO: 1084758 - RNA, 19 nt, Homo sapiens
  misc_RNA (1)...(19): siRNA sense strand
agaggaagcggaacgcauu

SEQ ID NO: 1084759 - RNA, 19 nt, Homo sapiens
  misc_RNA (1)...(19): siRNA sense strand
aagcaggagggccgaaaua

SEQ ID NO: 1084760 - RNA, 19 nt, Homo sapiens
  misc_RNA (1)...(19): siRNA sense strand
gcaacaggcaguggagaga

SEQ ID NO: 1084761 - RNA, 19 nt, Homo sapiens
  misc_RNA (1)...(19): siRNA sense strand
caaggaggagcaguuuaaa

SEQ ID NO: 1084762 - RNA, 19 nt, Homo sapiens
  misc_RNA (1)...(19): siRNA sense strand
gaucuuccugucagcguuu

SEQ ID NO: 1084763 - RNA, 19 nt, Homo sapiens
  misc_RNA (1)...(19): siRNA sense strand
caacaccaugaaccaguuu

SEQ ID NO: 1084764 - RNA, 19 nt, Homo sapiens
  misc_RNA (1)...(19): siRNA sense strand
gacaaguucaagacagauu

SEQ ID NO: 1084765 - RNA, 19 nt, Homo sapiens
  misc_RNA (1)...(19): siRNA sense strand
ggaacgcauugguguagac

SEQ ID NO: 1084766 - RNA, 19 nt, Homo sapiens
  misc_RNA (1)...(19): siRNA sense strand
uugagucugucauugauau

SEQ ID NO: 1084767 - RNA, 19 nt, Homo sapiens
  misc_RNA (1)...(19): siRNA sense strand
guucaaggagcuggaguuu

SEQ ID NO: 1084768 - RNA, 19 nt, Homo sapiens
  misc_RNA (1)...(19): siRNA sense strand
gagucugucauugauauaa

SEQ ID NO: 1084769 - RNA, 19 nt, Homo sapiens
  misc_RNA (1)...(19): siRNA sense strand
uccauaagcagguguguga

SEQ ID NO: 1084770 - RNA, 19 nt, Homo sapiens
  misc_RNA (1)...(19): siRNA sense strand
gcaagcaggagggccgaaa

SEQ ID NO: 1084771 - RNA, 19 nt, Homo sapiens
  misc_RNA (1)...(19): siRNA sense strand
gaccacguagcccgaauga

SEQ ID NO: 1084772 - RNA, 19 nt, Homo sapiens
  misc_RNA (1)...(19): siRNA sense strand
caggagggccgaaauaucg

SEQ ID NO: 1084773 - RNA, 19 nt, Homo sapiens
  misc_RNA (1)...(19): siRNA sense strand
ggagagguccccuuuaauc

SEQ ID NO: 1084774 - RNA, 19 nt, Homo sapiens
  misc_RNA (1)...(19): siRNA sense strand
caacaggcaguggagagaa

SEQ ID NO: 1084775 - RNA, 19 nt, Homo sapiens
  misc_RNA (1)...(19): siRNA sense strand
ugaccaagcacacagaucu

SEQ ID NO: 1084776 - RNA, 19 nt, Homo sapiens
  misc_RNA (1)...(19): siRNA sense strand
gaguuucuggguugguaua

SEQ ID NO: 1084777 - RNA, 19 nt, Homo sapiens
  misc_RNA (1)...(19): siRNA sense strand
gaagauuaucauugacaag

SEQ ID NO: 1084778 - RNA, 19 nt, Homo sapiens
  misc_RNA (1)...(19): siRNA sense strand
ccaugaaccaguuugugaa

SEQ ID NO: 1084779 - RNA, 19 nt, Homo sapiens
  misc_RNA (1)...(19): siRNA sense strand
cauaagcaggugugugaga

SEQ ID NO: 1084780 - RNA, 19 nt, Homo sapiens
  misc_RNA (1)...(19): siRNA sense strand
aggaggagcaguuuaaaca

SEQ ID NO: 1084781 - RNA, 19 nt, Homo sapiens
  misc_RNA (1)...(19): siRNA sense strand
uggaguuucuggguuggua

SEQ ID NO: 1084782 - RNA, 19 nt, Homo sapiens
  misc_RNA (1)...(19): siRNA sense strand
aagcaggugugugagauca

SEQ ID NO: 1084783 - RNA, 19 nt, Homo sapiens
  misc_RNA (1)...(19): siRNA sense strand
aaacgugcaacaccaugaa

SEQ ID NO: 1084784 - RNA, 19 nt, Homo sapiens
  misc_RNA (1)...(19): siRNA sense strand
gaggugaugaacuccuuug

SEQ ID NO: 1084785 - RNA, 19 nt, Homo sapiens
  misc_RNA (1)...(19): siRNA sense strand
acaaguucaagacagauuu

SEQ ID NO: 1084786 - RNA, 19 nt, Homo sapiens
  misc_RNA (1)...(19): siRNA sense strand
gaggaagcggaacgcauug

SEQ ID NO: 1084787 - RNA, 19 nt, Homo sapiens
  misc_RNA (1)...(19): siRNA sense strand
guacgucaaggccucugaa

SEQ ID NO: 1084788 - RNA, 19 nt, Homo sapiens
  misc_RNA (1)...(19): siRNA sense strand
gagguccccuuuaaucaug

SEQ ID NO: 1084789 - RNA, 19 nt, Homo sapiens
  misc_RNA (1)...(19): siRNA sense strand
agauuaucauugacaagga

SEQ ID NO: 1084790 - RNA, 19 nt, Homo sapiens
  misc_RNA (1)...(19): siRNA sense strand
uugcugagcugaccuacac

SEQ ID NO: 1084791 - RNA, 19 nt, Homo sapiens
  misc_RNA (1)...(19): siRNA sense strand
caccaaggaggagcaguuu

SEQ ID NO: 1084792 - RNA, 19 nt, Homo sapiens
  misc_RNA (1)...(19): siRNA sense strand
cggagugacugggaguguu

SEQ ID NO: 1084793 - RNA, 19 nt, Homo sapiens
  misc_RNA (1)...(19): siRNA sense strand
gcggaacgcauugguguag

SEQ ID NO: 1084794 - RNA, 19 nt, Homo sapiens
  misc_RNA (1)...(19): siRNA sense strand
gagaggccacaaugcuguu

SEQ ID NO: 1084795 - RNA, 19 nt, Homo sapiens
  misc_RNA (1)...(19): siRNA sense strand
gaccaagcacacagaucuu

SEQ ID NO: 1084796 - RNA, 19 nt, Homo sapiens
  misc_RNA (1)...(19): siRNA sense strand
uggaagagaagauuaucau

SEQ ID NO: 1084797 - RNA, 19 nt, Homo sapiens
  misc_RNA (1)...(19): siRNA sense strand
ucgaggugaugaacuccuu

SEQ ID NO: 1084798 - RNA, 19 nt, Homo sapiens
  misc_RNA (1)...(19): siRNA sense strand
ugaacccuaugaccaagca

SEQ ID NO: 1084799 - RNA, 19 nt, Homo sapiens
  misc_RNA (1)...(19): siRNA sense strand
acaccaaggaggagcaguu

SEQ ID NO: 1084800 - RNA, 19 nt, Homo sapiens
  misc_RNA (1)...(19): siRNA sense strand
auaagcaggugugugagau

SEQ ID NO: 1084801 - RNA, 19 nt, Homo sapiens
  misc_RNA (1)...(19): siRNA sense strand
gaugagaauuauacaggua

SEQ ID NO: 1084802 - RNA, 19 nt, Homo sapiens
  misc_RNA (1)...(19): siRNA sense strand
gggcgugaauuuagucuuu

SEQ ID NO: 1084803 - RNA, 19 nt, Homo sapiens
  misc_RNA (1)...(19): siRNA sense strand
gaacgggcgugaauuuagu

SEQ ID NO: 1084804 - RNA, 19 nt, Homo sapiens
  misc_RNA (1)...(19): siRNA sense strand
ccaagaaaguccaggaguu

SEQ ID NO: 1084805 - RNA, 19 nt, Homo sapiens
  misc_RNA (1)...(19): siRNA sense strand
caagaacgggcgugaauuu

SEQ ID NO: 1084806 - RNA, 19 nt, Homo sapiens
  misc_RNA (1)...(19): siRNA sense strand
caagaaaguccaggaguuu

SEQ ID NO: 1084807 - RNA, 19 nt, Homo sapiens
  misc_RNA (1)...(19): siRNA sense strand
caucgaggcuagaagaaau

SEQ ID NO: 1084808 - RNA, 19 nt, Homo sapiens
  misc_RNA (1)...(19): siRNA sense strand
ccagccaggugcaguauga

SEQ ID NO: 1084809 - RNA, 19 nt, Homo sapiens
  misc_RNA (1)...(19): siRNA sense strand
gcaaggaggcagcuuaugg

SEQ ID NO: 1084810 - RNA, 19 nt, Homo sapiens
  misc_RNA (1)...(19): siRNA sense strand
ccaagguugaugagaauua

SEQ ID NO: 1084811 - RNA, 19 nt, Homo sapiens
  misc_RNA (1)...(19): siRNA sense strand
ggaagaggcagaucgaaca

SEQ ID NO: 1084812 - RNA, 19 nt, Homo sapiens
  misc_RNA (1)...(19): siRNA sense strand
caaccuaucuuaguuacag

SEQ ID NO: 1084813 - RNA, 19 nt, Homo sapiens
  misc_RNA (1)...(19): siRNA sense strand
caagguugaugagaauuau

SEQ ID NO: 1084814 - RNA, 19 nt, Homo sapiens
  misc_RNA (1)...(19): siRNA sense strand
cacgucagcuggccaagaa

SEQ ID NO: 1084815 - RNA, 19 nt, Homo sapiens
  misc_RNA (1)...(19): siRNA sense strand
gggcuuccaaccuaucuua

SEQ ID NO: 1084816 - RNA, 19 nt, Homo sapiens
  misc_RNA (1)...(19): siRNA sense strand
gcuagaagaaaucgagaaa

SEQ ID NO: 1084817 - RNA, 19 nt, Homo sapiens
  misc_RNA (1)...(19): siRNA sense strand
gaaggaagaggcagaucga

SEQ ID NO: 1084818 - RNA, 19 nt, Homo sapiens
  misc_RNA (1)...(19): siRNA sense strand
caaaaccgauucuucaaug

SEQ ID NO: 1084819 - RNA, 19 nt, Homo sapiens
  misc_RNA (1)...(19): siRNA sense strand
ggugcaguaugauguggua

SEQ ID NO: 1084820 - RNA, 19 nt, Homo sapiens
  misc_RNA (1)...(19): siRNA sense strand
aagccaagguugaugagaa

SEQ ID NO: 1084821 - RNA, 19 nt, Homo sapiens
  misc_RNA (1)...(19): siRNA sense strand
gucaacagauaccaaggaa

SEQ ID NO: 1084822 - RNA, 19 nt, Homo sapiens
  misc_RNA (1)...(19): siRNA sense strand
agaagcagcagcucaagaa

SEQ ID NO: 1084823 - RNA, 19 nt, Homo sapiens
  misc_RNA (1)...(19): siRNA sense strand
cuuccaaccuaucuuaguu

SEQ ID NO: 1084824 - RNA, 19 nt, Homo sapiens
  misc_RNA (1)...(19): siRNA sense strand
cagccagccugcaguacuu

SEQ ID NO: 1084825 - RNA, 19 nt, Homo sapiens
  misc_RNA (1)...(19): siRNA sense strand
gcaguaugaugugguaguc

SEQ ID NO: 1084826 - RNA, 19 nt, Homo sapiens
  misc_RNA (1)...(19): siRNA sense strand
guaccagccaggugcagua

SEQ ID NO: 1084827 - RNA, 19 nt, Homo sapiens
  misc_RNA (1)...(19): siRNA sense strand
aagaacgggcgugaauuua

SEQ ID NO: 1084828 - RNA, 19 nt, Homo sapiens
  misc_RNA (1)...(19): siRNA sense strand
ggacacacggcugagaaug

SEQ ID NO: 1084829 - RNA, 19 nt, Homo sapiens
  misc_RNA (1)...(19): siRNA sense strand
cgacaaaaccgauucuuca

SEQ ID NO: 1084830 - RNA, 19 nt, Homo sapiens
  misc_RNA (1)...(19): siRNA sense strand
gcaacagcaagccaagguu

SEQ ID NO: 1084831 - RNA, 19 nt, Homo sapiens
  misc_RNA (1)...(19): siRNA sense strand
ucgggaagcagcagaaaga

SEQ ID NO: 1084832 - RNA, 19 nt, Homo sapiens
  misc_RNA (1)...(19): siRNA sense strand
ggcaacagcaggagcaaca

SEQ ID NO: 1084833 - RNA, 19 nt, Homo sapiens
  misc_RNA (1)...(19): siRNA sense strand
acacacggcugagaaugca

SEQ ID NO: 1084834 - RNA, 19 nt, Homo sapiens
  misc_RNA (1)...(19): siRNA sense strand
caaggaggcagcuuauggu

SEQ ID NO: 1084835 - RNA, 19 nt, Homo sapiens
  misc_RNA (1)...(19): siRNA sense strand
ugugguaguccagauguua

SEQ ID NO: 1084836 - RNA, 19 nt, Homo sapiens
  misc_RNA (1)...(19): siRNA sense strand
uaguccagauguuagagaa

SEQ ID NO: 1084837 - RNA, 19 nt, Homo sapiens
  misc_RNA (1)...(19): siRNA sense strand
ggcgugaauuuagucuuug

SEQ ID NO: 1084838 - RNA, 19 nt, Homo sapiens
  misc_RNA (1)...(19): siRNA sense strand
guucagguacaacuuggaa

SEQ ID NO: 1084839 - RNA, 19 nt, Homo sapiens
  misc_RNA (1)...(19): siRNA sense strand
ucaagaacgggcgugaauu

SEQ ID NO: 1084840 - RNA, 19 nt, Homo sapiens
  misc_RNA (1)...(19): siRNA sense strand
gaugugguaguccagaugu

SEQ ID NO: 1084841 - RNA, 19 nt, Homo sapiens
  misc_RNA (1)...(19): siRNA sense strand
cagaagcagcagcucaaga

SEQ ID NO: 1084842 - RNA, 19 nt, Homo sapiens
  misc_RNA (1)...(19): siRNA sense strand
agaacgggcgugaauuuag

SEQ ID NO: 1084843 - RNA, 19 nt, Homo sapiens
  misc_RNA (1)...(19): siRNA sense strand
agccaagguugaugagaau

SEQ ID NO: 1084844 - RNA, 19 nt, Homo sapiens
  misc_RNA (1)...(19): siRNA sense strand
aaaccgauucuucaaugug

SEQ ID NO: 1084845 - RNA, 19 nt, Homo sapiens
  misc_RNA (1)...(19): siRNA sense strand
ccaucgaggcuagaagaaa

SEQ ID NO: 1084846 - RNA, 19 nt, Homo sapiens
  misc_RNA (1)...(19): siRNA sense strand
gcacauguuuggaggauuu

SEQ ID NO: 1084847 - RNA, 19 nt, Homo sapiens
  misc_RNA (1)...(19): siRNA sense strand
caauaugccuugaagaauu

SEQ ID NO: 1084848 - RNA, 19 nt, Homo sapiens
  misc_RNA (1)...(19): siRNA sense strand
cauaaaggcugcauagaug

SEQ ID NO: 1084849 - RNA, 19 nt, Homo sapiens
  misc_RNA (1)...(19): siRNA sense strand
ggauuuaagugcccuguau

SEQ ID NO: 1084850 - RNA, 19 nt, Homo sapiens
  misc_RNA (1)...(19): siRNA sense strand
cugcauagaugaaugguuu

SEQ ID NO: 1084851 - RNA, 19 nt, Homo sapiens
  misc_RNA (1)...(19): siRNA sense strand
gaugaaugguuugaaguaa

SEQ ID NO: 1084852 - RNA, 19 nt, Homo sapiens
  misc_RNA (1)...(19): siRNA sense strand
ggauuugcaucuuguaaug

SEQ ID NO: 1084853 - RNA, 19 nt, Homo sapiens
  misc_RNA (1)...(19): siRNA sense strand
gcagggagauacuauagca

SEQ ID NO: 1084854 - RNA, 19 nt, Homo sapiens
  misc_RNA (1)...(19): siRNA sense strand
ugagcacccuucagauuaa

SEQ ID NO: 1084855 - RNA, 19 nt, Homo sapiens
  misc_RNA (1)...(19): siRNA sense strand
gcacgacugccuugucuau

SEQ ID NO: 1084856 - RNA, 19 nt, Homo sapiens
  misc_RNA (1)...(19): siRNA sense strand
ccacgaauaaccuauaaug

SEQ ID NO: 1084857 - RNA, 19 nt, Homo sapiens
  misc_RNA (1)...(19): siRNA sense strand
uuaacaaagccacgaauaa

SEQ ID NO: 1084858 - RNA, 19 nt, Homo sapiens
  misc_RNA (1)...(19): siRNA sense strand
gcaauaugccuugaagaau

SEQ ID NO: 1084859 - RNA, 19 nt, Homo sapiens
  misc_RNA (1)...(19): siRNA sense strand
aauaugccuugaagaauug

SEQ ID NO: 1084860 - RNA, 19 nt, Homo sapiens
  misc_RNA (1)...(19): siRNA sense strand
uaaugaggauguacugagu

SEQ ID NO: 1084861 - RNA, 19 nt, Homo sapiens
  misc_RNA (1)...(19): siRNA sense strand
gcagcagggagauacuaua

SEQ ID NO: 1084862 - RNA, 19 nt, Homo sapiens
  misc_RNA (1)...(19): siRNA sense strand
aaauuuguauccucagaug

SEQ ID NO: 1084863 - RNA, 19 nt, Homo sapiens
  misc_RNA (1)...(19): siRNA sense strand
ucauaaaggcugcauagau

SEQ ID NO: 1084864 - RNA, 19 nt, Homo sapiens
  misc_RNA (1)...(19): siRNA sense strand
uaacaaagccacgaauaac

SEQ ID NO: 1084865 - RNA, 19 nt, Homo sapiens
  misc_RNA (1)...(19): siRNA sense strand
gguuugaaguaaauagauc

SEQ ID NO: 1084866 - RNA, 19 nt, Homo sapiens
  misc_RNA (1)...(19): siRNA sense strand
caaagccacgaauaaccua

SEQ ID NO: 1084867 - RNA, 19 nt, Homo sapiens
  misc_RNA (1)...(19): siRNA sense strand
gaauugcagcagggagaua

SEQ ID NO: 1084868 - RNA, 19 nt, Homo sapiens
  misc_RNA (1)...(19): siRNA sense strand
uaaccuauaaugaggaugu

SEQ ID NO: 1084869 - RNA, 19 nt, Homo sapiens
  misc_RNA (1)...(19): siRNA sense strand
uaaaggcugcauagaugaa

SEQ ID NO: 1084870 - RNA, 19 nt, Homo sapiens
  misc_RNA (1)...(19): siRNA sense strand
agaugaaugguuugaagua

SEQ ID NO: 1084871 - RNA, 19 nt, Homo sapiens
  misc_RNA (1)...(19): siRNA sense strand
ugcaauaugccuugaagaa

SEQ ID NO: 1084872 - RNA, 19 nt, Homo sapiens
  misc_RNA (1)...(19): siRNA sense strand
uaucauaaaggcugcauag

SEQ ID NO: 1084873 - RNA, 19 nt, Homo sapiens
  misc_RNA (1)...(19): siRNA sense strand
uagcacgacugccuugucu

SEQ ID NO: 1084874 - RNA, 19 nt, Homo sapiens
  misc_RNA (1)...(19): siRNA sense strand
gcauagaugaaugguuuga

SEQ ID NO: 1084875 - RNA, 19 nt, Homo sapiens
  misc_RNA (1)...(19): siRNA sense strand
auagaugaaugguuugaag

SEQ ID NO: 1084876 - RNA, 19 nt, Homo sapiens
  misc_RNA (1)...(19): siRNA sense strand
ugccuugucuaugcauaua

SEQ ID NO: 1084877 - RNA, 19 nt, Homo sapiens
  misc_RNA (1)...(19): siRNA sense strand
agccacgaauaaccuauaa

SEQ ID NO: 1084878 - RNA, 19 nt, Homo sapiens
  misc_RNA (1)...(19): siRNA sense strand
cgacugccuugucuaugca

SEQ ID NO: 1084879 - RNA, 19 nt, Homo sapiens
  misc_RNA (1)...(19): siRNA sense strand
cagcagggagauacuauag

SEQ ID NO: 1084880 - RNA, 19 nt, Homo sapiens
  misc_RNA (1)...(19): siRNA sense strand
cacgaauaaccuauaauga

SEQ ID NO: 1084881 - RNA, 19 nt, Homo sapiens
  misc_RNA (1)...(19): siRNA sense strand
uuuaacaaagccacgaaua

SEQ ID NO: 1084882 - RNA, 19 nt, Homo sapiens
  misc_RNA (1)...(19): siRNA sense strand
uaaagaugcuggggaaugu

SEQ ID NO: 1084883 - RNA, 19 nt, Homo sapiens
  misc_RNA (1)...(19): siRNA sense strand
acgaauaaccuauaaugag

SEQ ID NO: 1084884 - RNA, 19 nt, Homo sapiens
  misc_RNA (1)...(19): siRNA sense strand
ucggaucuaccuuccagua

SEQ ID NO: 1084885 - RNA, 19 nt, Homo sapiens
  misc_RNA (1)...(19): siRNA sense strand
guacucgggcucggaucua

SEQ ID NO: 1084886 - RNA, 19 nt, Homo sapiens
  misc_RNA (1)...(19): siRNA sense strand
gauuuaagugcccuguaug

SEQ ID NO: 1084887 - RNA, 19 nt, Homo sapiens
  misc_RNA (1)...(19): siRNA sense strand
ggugaucggcuccuuacca

SEQ ID NO: 1084888 - RNA, 19 nt, Homo sapiens
  misc_RNA (1)...(19): siRNA sense strand
aagccacgaauaaccuaua

SEQ ID NO: 1084889 - RNA, 19 nt, Homo sapiens
  misc_RNA (1)...(19): siRNA sense strand
ggaaagaccuucaucaagu

SEQ ID NO: 1084890 - RNA, 19 nt, Homo sapiens
  misc_RNA (1)...(19): siRNA sense strand
caacagauacuuccgguaa

SEQ ID NO: 1084891 - RNA, 19 nt, Homo sapiens
  misc_RNA (1)...(19): siRNA sense strand
gacgagggcuacuaugauu

SEQ ID NO: 1084892 - RNA, 19 nt, Homo sapiens
  misc_RNA (1)...(19): siRNA sense strand
gaaagaccuucaucaaguc

SEQ ID NO: 1084893 - RNA, 19 nt, Homo sapiens
  misc_RNA (1)...(19): siRNA sense strand
gaaacaagacugaggacuu

SEQ ID NO: 1084894 - RNA, 19 nt, Homo sapiens
  misc_RNA (1)...(19): siRNA sense strand
gaccagaggugucgagauc

SEQ ID NO: 1084895 - RNA, 19 nt, Homo sapiens
  misc_RNA (1)...(19): siRNA sense strand
gaagaucagcucaaacgaa

SEQ ID NO: 1084896 - RNA, 19 nt, Homo sapiens
  misc_RNA (1)...(19): siRNA sense strand
gaagaggauuucccugaag

SEQ ID NO: 1084897 - RNA, 19 nt, Homo sapiens
  misc_RNA (1)...(19): siRNA sense strand
gaggaaagaccuucaucaa

SEQ ID NO: 1084898 - RNA, 19 nt, Homo sapiens
  misc_RNA (1)...(19): siRNA sense strand
gaucgacuaccgccacuuu

SEQ ID NO: 1084899 - RNA, 19 nt, Homo sapiens
  misc_RNA (1)...(19): siRNA sense strand
gaagugcuuucggaaccua

SEQ ID NO: 1084900 - RNA, 19 nt, Homo sapiens
  misc_RNA (1)...(19): siRNA sense strand
ccaagagcaucccgaggaa

SEQ ID NO: 1084901 - RNA, 19 nt, Homo sapiens
  misc_RNA (1)...(19): siRNA sense strand
gacacgaggucacucugaa

SEQ ID NO: 1084902 - RNA, 19 nt, Homo sapiens
  misc_RNA (1)...(19): siRNA sense strand
ugaagaggcccaagaagug

SEQ ID NO: 1084903 - RNA, 19 nt, Homo sapiens
  misc_RNA (1)...(19): siRNA sense strand
gaaggcuuguucuccucua

SEQ ID NO: 1084904 - RNA, 19 nt, Homo sapiens
  misc_RNA (1)...(19): siRNA sense strand
gggagguguucgcagauga

SEQ ID NO: 1084905 - RNA, 19 nt, Homo sapiens
  misc_RNA (1)...(19): siRNA sense strand
gcaaggagugccugcugaa

SEQ ID NO: 1084906 - RNA, 19 nt, Homo sapiens
  misc_RNA (1)...(19): siRNA sense strand
ucaaaccggugcgaaagug

SEQ ID NO: 1084907 - RNA, 19 nt, Homo sapiens
  misc_RNA (1)...(19): siRNA sense strand
aagaggauuucccugaaga

SEQ ID NO: 1084908 - RNA, 19 nt, Homo sapiens
  misc_RNA (1)...(19): siRNA sense strand
gaauccguguccacaagug

SEQ ID NO: 1084909 - RNA, 19 nt, Homo sapiens
  misc_RNA (1)...(19): siRNA sense strand
ccucugacuucaccagguu

SEQ ID NO: 1084910 - RNA, 19 nt, Homo sapiens
  misc_RNA (1)...(19): siRNA sense strand
gagcugaagagaggaaaga

SEQ ID NO: 1084911 - RNA, 19 nt, Homo sapiens
  misc_RNA (1)...(19): siRNA sense strand
acacugagcucgccaucac

SEQ ID NO: 1084912 - RNA, 19 nt, Homo sapiens
  misc_RNA (1)...(19): siRNA sense strand
gugacgagggcuacuauga

SEQ ID NO: 1084913 - RNA, 19 nt, Homo sapiens
  misc_RNA (1)...(19): siRNA sense strand
gcaagacucacgacagcau

SEQ ID NO: 1084914 - RNA, 19 nt, Homo sapiens
  misc_RNA (1)...(19): siRNA sense strand
gaagagacacgaggucacu

SEQ ID NO: 1084915 - RNA, 19 nt, Homo sapiens
  misc_RNA (1)...(19): siRNA sense strand
caagugacgagggcuacua

SEQ ID NO: 1084916 - RNA, 19 nt, Homo sapiens
  misc_RNA (1)...(19): siRNA sense strand
caugggcagugggcucuuu

SEQ ID NO: 1084917 - RNA, 19 nt, Homo sapiens
  misc_RNA (1)...(19): siRNA sense strand
ccuggccgaugcauccuuu

SEQ ID NO: 1084918 - RNA, 19 nt, Homo sapiens
  misc_RNA (1)...(19): siRNA sense strand
gccugggccucacuuugaa

SEQ ID NO: 1084919 - RNA, 19 nt, Homo sapiens
  misc_RNA (1)...(19): siRNA sense strand
ccgaauccguguccacaag

SEQ ID NO: 1084920 - RNA, 19 nt, Homo sapiens
  misc_RNA (1)...(19): siRNA sense strand
agaaugaagccucugacuu

SEQ ID NO: 1084921 - RNA, 19 nt, Homo sapiens
  misc_RNA (1)...(19): siRNA sense strand
cgacagaugccccaacaaa

SEQ ID NO: 1084922 - RNA, 19 nt, Homo sapiens
  misc_RNA (1)...(19): siRNA sense strand
gaaagccugggccucacuu

SEQ ID NO: 1084923 - RNA, 19 nt, Homo sapiens
  misc_RNA (1)...(19): siRNA sense strand
ugacgagggcuacuaugau

SEQ ID NO: 1084924 - RNA, 19 nt, Homo sapiens
  misc_RNA (1)...(19): siRNA sense strand
aacagauacuuccgguaaa

SEQ ID NO: 1084925 - RNA, 19 nt, Homo sapiens
  misc_RNA (1)...(19): siRNA sense strand
gaccugugcgugucugaga

SEQ ID NO: 1084926 - RNA, 19 nt, Homo sapiens
  misc_RNA (1)...(19): siRNA sense strand
gagaggaaagaccuucauc

SEQ ID NO: 1084927 - RNA, 19 nt, Homo sapiens
  misc_RNA (1)...(19): siRNA sense strand
ccacuucgacaacagauac

SEQ ID NO: 1084928 - RNA, 19 nt, Homo sapiens
  misc_RNA (1)...(19): siRNA sense strand
ccagaggugucgagaucgu

SEQ ID NO: 1084929 - RNA, 19 nt, Homo sapiens
  misc_RNA (1)...(19): siRNA sense strand
gaucagcucaaacgaacag

SEQ ID NO: 1084930 - RNA, 19 nt, Homo sapiens
  misc_RNA (1)...(19): siRNA sense strand
cgacuaccgccacuuugug

SEQ ID NO: 1084931 - RNA, 19 nt, Homo sapiens
  misc_RNA (1)...(19): siRNA sense strand
cuagggcacccacagagaa

SEQ ID NO: 1084932 - RNA, 19 nt, Homo sapiens
  misc_RNA (1)...(19): siRNA sense strand
ugccaucucuagagcugaa

SEQ ID NO: 1084933 - RNA, 19 nt, Homo sapiens
  misc_RNA (1)...(19): siRNA sense strand
aagagcaucccgaggaaga

SEQ ID NO: 1084934 - RNA, 19 nt, Homo sapiens
  misc_RNA (1)...(19): siRNA sense strand
cugaagaggcccaagaagu

SEQ ID NO: 1084935 - RNA, 19 nt, Homo sapiens
  misc_RNA (1)...(19): siRNA sense strand
cacauucggagaaacaaga

SEQ ID NO: 1084936 - RNA, 19 nt, Homo sapiens
  misc_RNA (1)...(19): siRNA sense strand
ccagggccaccauccagaa

SEQ ID NO: 1084937 - RNA, 19 nt, Homo sapiens
  misc_RNA (1)...(19): siRNA sense strand
ccuugcagcucagcacaga

SEQ ID NO: 1084938 - RNA, 19 nt, Homo sapiens
  misc_RNA (1)...(19): siRNA sense strand
gcagccacuucgacaacag

SEQ ID NO: 1084939 - RNA, 19 nt, Homo sapiens
  misc_RNA (1)...(19): siRNA sense strand
caagggacuggcacacugu

SEQ ID NO: 1084940 - RNA, 19 nt, Homo sapiens
  misc_RNA (1)...(19): siRNA sense strand
gcucggugccaucucuaga

SEQ ID NO: 1084941 - RNA, 19 nt, Homo sapiens
  misc_RNA (1)...(19): siRNA sense strand
guacagagcugauucauga

SEQ ID NO: 1084942 - RNA, 19 nt, Homo sapiens
  misc_RNA (1)...(19): siRNA sense strand
gaaaguauuugcugacuga

SEQ ID NO: 1084943 - RNA, 19 nt, Homo sapiens
  misc_RNA (1)...(19): siRNA sense strand
gcaaggagcuuaguuuaga

SEQ ID NO: 1084944 - RNA, 19 nt, Homo sapiens
  misc_RNA (1)...(19): siRNA sense strand
caaaggauauaauggagua

SEQ ID NO: 1084945 - RNA, 19 nt, Homo sapiens
  misc_RNA (1)...(19): siRNA sense strand
ggaagaggauuuacaagga

SEQ ID NO: 1084946 - RNA, 19 nt, Homo sapiens
  misc_RNA (1)...(19): siRNA sense strand
gaaauggaauacuggguuu

SEQ ID NO: 1084947 - RNA, 19 nt, Homo sapiens
  misc_RNA (1)...(19): siRNA sense strand
gaagaaguauggcaguuug

SEQ ID NO: 1084948 - RNA, 19 nt, Homo sapiens
  misc_RNA (1)...(19): siRNA sense strand
gcaagugccucgccuuaga

SEQ ID NO: 1084949 - RNA, 19 nt, Homo sapiens
  misc_RNA (1)...(19): siRNA sense strand
uagaugagguuaugaagaa

SEQ ID NO: 1084950 - RNA, 19 nt, Homo sapiens
  misc_RNA (1)...(19): siRNA sense strand
caacuuaaccaacauagaa

SEQ ID NO: 1084951 - RNA, 19 nt, Homo sapiens
  misc_RNA (1)...(19): siRNA sense strand
aaacguggaucaaggauga

SEQ ID NO: 1084952 - RNA, 19 nt, Homo sapiens
  misc_RNA (1)...(19): siRNA sense strand
gaggaaaggaauccacuua

SEQ ID NO: 1084953 - RNA, 19 nt, Homo sapiens
  misc_RNA (1)...(19): siRNA sense strand
cagagaagcuguugucauc

SEQ ID NO: 1084954 - RNA, 19 nt, Homo sapiens
  misc_RNA (1)...(19): siRNA sense strand
gcaguggacucaaacuaga

SEQ ID NO: 1084955 - RNA, 19 nt, Homo sapiens
  misc_RNA (1)...(19): siRNA sense strand
gaaguccacuggucucuca

SEQ ID NO: 1084956 - RNA, 19 nt, Homo sapiens
  misc_RNA (1)...(19): siRNA sense strand
uaaccaacauagaaggaua

SEQ ID NO: 1084957 - RNA, 19 nt, Homo sapiens
  misc_RNA (1)...(19): siRNA sense strand
gaaaggacgcuaaacacuu

SEQ ID NO: 1084958 - RNA, 19 nt, Homo sapiens
  misc_RNA (1)...(19): siRNA sense strand
ggaaagaacagucagaaag

SEQ ID NO: 1084959 - RNA, 19 nt, Homo sapiens
  misc_RNA (1)...(19): siRNA sense strand
gaacaccuuugugcuaaga

SEQ ID NO: 1084960 - RNA, 19 nt, Homo sapiens
  misc_RNA (1)...(19): siRNA sense strand
agaaguccuuggaagauua

SEQ ID NO: 1084961 - RNA, 19 nt, Homo sapiens
  misc_RNA (1)...(19): siRNA sense strand
gaaggccaguuacuuggaa

SEQ ID NO: 1084962 - RNA, 19 nt, Homo sapiens
  misc_RNA (1)...(19): siRNA sense strand
ccaaaaggcuguucaaaau

SEQ ID NO: 1084963 - RNA, 19 nt, Homo sapiens
  misc_RNA (1)...(19): siRNA sense strand
caacacuugugcauucuga

SEQ ID NO: 1084964 - RNA, 19 nt, Homo sapiens
  misc_RNA (1)...(19): siRNA sense strand
gaugaacaccuuugugcua

SEQ ID NO: 1084965 - RNA, 19 nt, Homo sapiens
  misc_RNA (1)...(19): siRNA sense strand
gggcaaggagcuuaguuua

SEQ ID NO: 1084966 - RNA, 19 nt, Homo sapiens
  misc_RNA (1)...(19): siRNA sense strand
caaagaauucugaccauga

SEQ ID NO: 1084967 - RNA, 19 nt, Homo sapiens
  misc_RNA (1)...(19): siRNA sense strand
aaagaauucugaccaugaa

SEQ ID NO: 1084968 - RNA, 19 nt, Homo sapiens
  misc_RNA (1)...(19): siRNA sense strand
uaacuuccguaucuucuau

SEQ ID NO: 1084969 - RNA, 19 nt, Homo sapiens
  misc_RNA (1)...(19): siRNA sense strand
uaucuccucuuaugaugua

SEQ ID NO: 1084970 - RNA, 19 nt, Homo sapiens
  misc_RNA (1)...(19): siRNA sense strand
gaacaaccauaagagaaag

SEQ ID NO: 1084971 - RNA, 19 nt, Homo sapiens
  misc_RNA (1)...(19): siRNA sense strand
aaauguaacuuccguaucu

SEQ ID NO: 1084972 - RNA, 19 nt, Homo sapiens
  misc_RNA (1)...(19): siRNA sense strand
aaaggacgcuaaacacuuc

SEQ ID NO: 1084973 - RNA, 19 nt, Homo sapiens
  misc_RNA (1)...(19): siRNA sense strand
gaagcuggguacagaaagu

SEQ ID NO: 1084974 - RNA, 19 nt, Homo sapiens
  misc_RNA (1)...(19): siRNA sense strand
caccaacacuugugcauuc

SEQ ID NO: 1084975 - RNA, 19 nt, Homo sapiens
  misc_RNA (1)...(19): siRNA sense strand
aagcagagcauucuuaguu

SEQ ID NO: 1084976 - RNA, 19 nt, Homo sapiens
  misc_RNA (1)...(19): siRNA sense strand
ggaaaggaauccacuuagc

SEQ ID NO: 1084977 - RNA, 19 nt, Homo sapiens
  misc_RNA (1)...(19): siRNA sense strand
uuacugacuuuccaucaaa

SEQ ID NO: 1084978 - RNA, 19 nt, Homo sapiens
  misc_RNA (1)...(19): siRNA sense strand
gacacucucuaaucgaauu

SEQ ID NO: 1084979 - RNA, 19 nt, Homo sapiens
  misc_RNA (1)...(19): siRNA sense strand
cuaauaccauguucauuuc

SEQ ID NO: 1084980 - RNA, 19 nt, Homo sapiens
  misc_RNA (1)...(19): siRNA sense strand
caaguucugucagugauga

SEQ ID NO: 1084981 - RNA, 19 nt, Homo sapiens
  misc_RNA (1)...(19): siRNA sense strand
cccacaaccuucugacuuu

SEQ ID NO: 1084982 - RNA, 19 nt, Homo sapiens
  misc_RNA (1)...(19): siRNA sense strand
auaaacacaugcuggauau

SEQ ID NO: 1084983 - RNA, 19 nt, Homo sapiens
  misc_RNA (1)...(19): siRNA sense strand
cagccguacuuuccagaua

SEQ ID NO: 1084984 - RNA, 19 nt, Homo sapiens
  misc_RNA (1)...(19): siRNA sense strand
guccacuggucucucauua

SEQ ID NO: 1084985 - RNA, 19 nt, Homo sapiens
  misc_RNA (1)...(19): siRNA sense strand
cgaaguguauuccacaaca

SEQ ID NO: 1084986 - RNA, 19 nt, Homo sapiens
  misc_RNA (1)...(19): siRNA sense strand
ggaauagacaguugagaca

SEQ ID NO: 1084987 - RNA, 19 nt, Homo sapiens
  misc_RNA (1)...(19): siRNA sense strand
agagcagccuuuccaguuu

SEQ ID NO: 1084988 - RNA, 19 nt, Homo sapiens
  misc_RNA (1)...(19): siRNA sense strand
ggugugcaguggacucaaa

SEQ ID NO: 1084989 - RNA, 19 nt, Homo sapiens
  misc_RNA (1)...(19): siRNA sense strand
gcacgauuguggucaccuu

SEQ ID NO: 1084990 - RNA, 19 nt, Homo sapiens
  misc_RNA (1)...(19): siRNA sense strand
caugaauacugcagagaga

SEQ ID NO: 1084991 - RNA, 19 nt, Homo sapiens
  misc_RNA (1)...(19): siRNA sense strand
aauagacaguugagacauu

SEQ ID NO: 1084992 - RNA, 19 nt, Homo sapiens
  misc_RNA (1)...(19): siRNA sense strand
gaaagaacagucagaaagc

SEQ ID NO: 1084993 - RNA, 19 nt, Homo sapiens
  misc_RNA (1)...(19): siRNA sense strand
ugaacaaccauaagagaaa

SEQ ID NO: 1084994 - RNA, 19 nt, Homo sapiens
  misc_RNA (1)...(19): siRNA sense strand
gcuaagaccaaguucaaug

SEQ ID NO: 1084995 - RNA, 19 nt, Homo sapiens
  misc_RNA (1)...(19): siRNA sense strand
gugacacucucuaaucgaa

SEQ ID NO: 1084996 - RNA, 19 nt, Homo sapiens
  misc_RNA (1)...(19): siRNA sense strand
ccacuggucucucauuacu

SEQ ID NO: 1084997 - RNA, 19 nt, Homo sapiens
  misc_RNA (1)...(19): siRNA sense strand
agaaagcucuucaaaucca

SEQ ID NO: 1084998 - RNA, 19 nt, Homo sapiens
  misc_RNA (1)...(19): siRNA sense strand
gcagagcauucuuaguucu

SEQ ID NO: 1084999 - RNA, 19 nt, Homo sapiens
  misc_RNA (1)...(19): siRNA sense strand
aaagaaaggacgcuaaaca

SEQ ID NO: 1085000 - RNA, 19 nt, Homo sapiens
  misc_RNA (1)...(19): siRNA sense strand
gaaaagaaaggacgcuaaa

SEQ ID NO: 1085001 - RNA, 19 nt, Homo sapiens
  misc_RNA (1)...(19): siRNA sense strand
guuaguacuuuguccucua

SEQ ID NO: 1085002 - RNA, 19 nt, Homo sapiens
  misc_RNA (1)...(19): siRNA sense strand
gcuaaacacuucauuuccu

SEQ ID NO: 1085003 - RNA, 19 nt, Homo sapiens
  misc_RNA (1)...(19): siRNA sense strand
ggagcuuaguuuagacgaa

SEQ ID NO: 1085004 - RNA, 19 nt, Homo sapiens
  misc_RNA (1)...(19): siRNA sense strand
gguacaggauucucagauc

SEQ ID NO: 1085005 - RNA, 19 nt, Homo sapiens
  misc_RNA (1)...(19): siRNA sense strand
gagaagcuguugucaucag

SEQ ID NO: 1085006 - RNA, 19 nt, Homo sapiens
  misc_RNA (1)...(19): siRNA sense strand
aaaaggcuguucaaaauga

SEQ ID NO: 1085007 - RNA, 19 nt, Homo sapiens
  misc_RNA (1)...(19): siRNA sense strand
aauaaacacaugcuggaua

SEQ ID NO: 1085008 - RNA, 19 nt, Homo sapiens
  misc_RNA (1)...(19): siRNA sense strand
gaaguccuuggaagauuaa

SEQ ID NO: 1085009 - RNA, 19 nt, Homo sapiens
  misc_RNA (1)...(19): siRNA sense strand
agacugcuguuacgaagug

SEQ ID NO: 1085010 - RNA, 19 nt, Homo sapiens
  misc_RNA (1)...(19): siRNA sense strand
guuacugacuuuccaucaa

SEQ ID NO: 1085011 - RNA, 19 nt, Homo sapiens
  misc_RNA (1)...(19): siRNA sense strand
gaaguauggcaguuugguu

SEQ ID NO: 1085012 - RNA, 19 nt, Homo sapiens
  misc_RNA (1)...(19): siRNA sense strand
ccaggucauuaauauguau

SEQ ID NO: 1085013 - RNA, 19 nt, Homo sapiens
  misc_RNA (1)...(19): siRNA sense strand
auagacaguugagacauuu

SEQ ID NO: 1085014 - RNA, 19 nt, Homo sapiens
  misc_RNA (1)...(19): siRNA sense strand
uagagcagccuuuccaguu

SEQ ID NO: 1085015 - RNA, 19 nt, Homo sapiens
  misc_RNA (1)...(19): siRNA sense strand
ucugagaaauggaauacug

SEQ ID NO: 1085016 - RNA, 19 nt, Homo sapiens
  misc_RNA (1)...(19): siRNA sense strand
gacuuuccaucaaauagug

SEQ ID NO: 1085017 - RNA, 19 nt, Homo sapiens
  misc_RNA (1)...(19): siRNA sense strand
gaccagucauccuguucuu

SEQ ID NO: 1085018 - RNA, 19 nt, Homo sapiens
  misc_RNA (1)...(19): siRNA sense strand
gugcuaagaccaaguucaa

SEQ ID NO: 1085019 - RNA, 19 nt, Homo sapiens
  misc_RNA (1)...(19): siRNA sense strand
guaaccaaaggauauaaug

SEQ ID NO: 1085020 - RNA, 19 nt, Homo sapiens
  misc_RNA (1)...(19): siRNA sense strand
ggaugcagucccagacaaa

SEQ ID NO: 1085021 - RNA, 19 nt, Homo sapiens
  misc_RNA (1)...(19): siRNA sense strand
aagaaguccuuggaagauu

SEQ ID NO: 1085022 - RNA, 19 nt, Homo sapiens
  misc_RNA (1)...(19): siRNA sense strand
gcgaagcuggguacagaaa

SEQ ID NO: 1085023 - RNA, 19 nt, Homo sapiens
  misc_RNA (1)...(19): siRNA sense strand
gcagagaagcuguugucau

SEQ ID NO: 1085024 - RNA, 19 nt, Homo sapiens
  misc_RNA (1)...(19): siRNA sense strand
uccaucaaauagugcuuua

SEQ ID NO: 1085025 - RNA, 19 nt, Homo sapiens
  misc_RNA (1)...(19): siRNA sense strand
uauguauggugagcugaua

SEQ ID NO: 1085026 - RNA, 19 nt, Homo sapiens
  misc_RNA (1)...(19): siRNA sense strand
caaacuaucgggccagaca

SEQ ID NO: 1085027 - RNA, 19 nt, Homo sapiens
  misc_RNA (1)...(19): siRNA sense strand
ggaauccacuuagccuuuu

SEQ ID NO: 1085028 - RNA, 19 nt, Homo sapiens
  misc_RNA (1)...(19): siRNA sense strand
ggugagaguggcacgauug

SEQ ID NO: 1085029 - RNA, 19 nt, Homo sapiens
  misc_RNA (1)...(19): siRNA sense strand
ugaagaaguauggcaguuu

SEQ ID NO: 1085030 - RNA, 19 nt, Homo sapiens
  misc_RNA (1)...(19): siRNA sense strand
gagcagccuuuccaguuuu

SEQ ID NO: 1085031 - RNA, 19 nt, Homo sapiens
  misc_RNA (1)...(19): siRNA sense strand
gaaguguauuccacaacag

SEQ ID NO: 1085032 - RNA, 19 nt, Homo sapiens
  misc_RNA (1)...(19): siRNA sense strand
ggaaggccaguuacuugga

SEQ ID NO: 1085033 - RNA, 19 nt, Homo sapiens
  misc_RNA (1)...(19): siRNA sense strand
agucuucuguugauuccua

SEQ ID NO: 1085034 - RNA, 19 nt, Homo sapiens
  misc_RNA (1)...(19): siRNA sense strand
ccaguuacuuggaauagac

SEQ ID NO: 1085035 - RNA, 19 nt, Homo sapiens
  misc_RNA (1)...(19): siRNA sense strand
cgauuguggucaccuugaa

SEQ ID NO: 1085036 - RNA, 19 nt, Homo sapiens
  misc_RNA (1)...(19): siRNA sense strand
caauguggcuacucaaaau

SEQ ID NO: 1085037 - RNA, 19 nt, Homo sapiens
  misc_RNA (1)...(19): siRNA sense strand
ccacaaccuucugacuuuc

SEQ ID NO: 1085038 - RNA, 19 nt, Homo sapiens
  misc_RNA (1)...(19): siRNA sense strand
ccucuaaagugaaaagaaa

SEQ ID NO: 1085039 - RNA, 19 nt, Homo sapiens
  misc_RNA (1)...(19): siRNA sense strand
ugaauacugcagagagaaa

SEQ ID NO: 1085040 - RNA, 19 nt, Homo sapiens
  misc_RNA (1)...(19): siRNA sense strand
auggugagcugauaaugga

SEQ ID NO: 1085041 - RNA, 19 nt, Homo sapiens
  misc_RNA (1)...(19): siRNA sense strand
ggacuuugcugccuaaauu

SEQ ID NO: 1085042 - RNA, 19 nt, Homo sapiens
  misc_RNA (1)...(19): siRNA sense strand
ggaaagccgugguacauga

SEQ ID NO: 1085043 - RNA, 19 nt, Homo sapiens
  misc_RNA (1)...(19): siRNA sense strand
gaaaggugccauccaguua

SEQ ID NO: 1085044 - RNA, 19 nt, Homo sapiens
  misc_RNA (1)...(19): siRNA sense strand
cugcagagcuucaagauaa

SEQ ID NO: 1085045 - RNA, 19 nt, Homo sapiens
  misc_RNA (1)...(19): siRNA sense strand
caauauagaucaugcacaa

SEQ ID NO: 1085046 - RNA, 19 nt, Homo sapiens
  misc_RNA (1)...(19): siRNA sense strand
gcagugagccgcugauuga

SEQ ID NO: 1085047 - RNA, 19 nt, Homo sapiens
  misc_RNA (1)...(19): siRNA sense strand
uuaagacacuccaacauaa

SEQ ID NO: 1085048 - RNA, 19 nt, Homo sapiens
  misc_RNA (1)...(19): siRNA sense strand
gaucuagacuucuuacaag

SEQ ID NO: 1085049 - RNA, 19 nt, Homo sapiens
  misc_RNA (1)...(19): siRNA sense strand
gcaagaacauucggauugu

SEQ ID NO: 1085050 - RNA, 19 nt, Homo sapiens
  misc_RNA (1)...(19): siRNA sense strand
gcaacgcaguauuuaagaa

SEQ ID NO: 1085051 - RNA, 19 nt, Homo sapiens
  misc_RNA (1)...(19): siRNA sense strand
caggagagacaacauauaa

SEQ ID NO: 1085052 - RNA, 19 nt, Homo sapiens
  misc_RNA (1)...(19): siRNA sense strand
gcagacagguggcaagaac

SEQ ID NO: 1085053 - RNA, 19 nt, Homo sapiens
  misc_RNA (1)...(19): siRNA sense strand
gcacaacgagagcccuuaa

SEQ ID NO: 1085054 - RNA, 19 nt, Homo sapiens
  misc_RNA (1)...(19): siRNA sense strand
ggaggccgaugaccauaug

SEQ ID NO: 1085055 - RNA, 19 nt, Homo sapiens
  misc_RNA (1)...(19): siRNA sense strand
caucugaggugccuuaugc

SEQ ID NO: 1085056 - RNA, 19 nt, Homo sapiens
  misc_RNA (1)...(19): siRNA sense strand
gcaacuccugcauuacuua

SEQ ID NO: 1085057 - RNA, 19 nt, Homo sapiens
  misc_RNA (1)...(19): siRNA sense strand
aguggcaacuccugcauua

SEQ ID NO: 1085058 - RNA, 19 nt, Homo sapiens
  misc_RNA (1)...(19): siRNA sense strand
ggcaagaacauucggauug

SEQ ID NO: 1085059 - RNA, 19 nt, Homo sapiens
  misc_RNA (1)...(19): siRNA sense strand
uacaaugccuuccguuuca

SEQ ID NO: 1085060 - RNA, 19 nt, Homo sapiens
  misc_RNA (1)...(19): siRNA sense strand
gugguucccuguucuaugu

SEQ ID NO: 1085061 - RNA, 19 nt, Homo sapiens
  misc_RNA (1)...(19): siRNA sense strand
ccagaacccucggacuuug

SEQ ID NO: 1085062 - RNA, 19 nt, Homo sapiens
  misc_RNA (1)...(19): siRNA sense strand
caaaggcucaaccuacaaa

SEQ ID NO: 1085063 - RNA, 19 nt, Homo sapiens
  misc_RNA (1)...(19): siRNA sense strand
uaaauucuuuggacuguac

SEQ ID NO: 1085064 - RNA, 19 nt, Homo sapiens
  misc_RNA (1)...(19): siRNA sense strand
ccacagccauggaauucau

SEQ ID NO: 1085065 - RNA, 19 nt, Homo sapiens
  misc_RNA (1)...(19): siRNA sense strand
ggagagacaacauauaaaa

SEQ ID NO: 1085066 - RNA, 19 nt, Homo sapiens
  misc_RNA (1)...(19): siRNA sense strand
ucuacagucuuacacguuu

SEQ ID NO: 1085067 - RNA, 19 nt, Homo sapiens
  misc_RNA (1)...(19): siRNA sense strand
uaagacacuccaacauaaa

SEQ ID NO: 1085068 - RNA, 19 nt, Homo sapiens
  misc_RNA (1)...(19): siRNA sense strand
gcuucaagauaauggacua

SEQ ID NO: 1085069 - RNA, 19 nt, Homo sapiens
  misc_RNA (1)...(19): siRNA sense strand
gccauccaguuaggcauua

SEQ ID NO: 1085070 - RNA, 19 nt, Homo sapiens
  misc_RNA (1)...(19): siRNA sense strand
uggcaucccugcucagaau

SEQ ID NO: 1085071 - RNA, 19 nt, Homo sapiens
  misc_RNA (1)...(19): siRNA sense strand
gugauguccucaugcaaga

SEQ ID NO: 1085072 - RNA, 19 nt, Homo sapiens
  misc_RNA (1)...(19): siRNA sense strand
caugugcaacgcaguauuu

SEQ ID NO: 1085073 - RNA, 19 nt, Homo sapiens
  misc_RNA (1)...(19): siRNA sense strand
gcaaguggagccagguguu

SEQ ID NO: 1085074 - RNA, 19 nt, Homo sapiens
  misc_RNA (1)...(19): siRNA sense strand
auuaagacacuccaacaua

SEQ ID NO: 1085075 - RNA, 19 nt, Homo sapiens
  misc_RNA (1)...(19): siRNA sense strand
gaccucagaauccaccuuu

SEQ ID NO: 1085076 - RNA, 19 nt, Homo sapiens
  misc_RNA (1)...(19): siRNA sense strand
ggcaacuccugcauuacuu

SEQ ID NO: 1085077 - RNA, 19 nt, Homo sapiens
  misc_RNA (1)...(19): siRNA sense strand
uggcaucauugacauucua

SEQ ID NO: 1085078 - RNA, 19 nt, Homo sapiens
  misc_RNA (1)...(19): siRNA sense strand
gcugucaauccacaauaua

SEQ ID NO: 1085079 - RNA, 19 nt, Homo sapiens
  misc_RNA (1)...(19): siRNA sense strand
ugaaaggugccauccaguu

SEQ ID NO: 1085080 - RNA, 19 nt, Homo sapiens
  misc_RNA (1)...(19): siRNA sense strand
gccagaacccucggacuuu

SEQ ID NO: 1085081 - RNA, 19 nt, Homo sapiens
  misc_RNA (1)...(19): siRNA sense strand
caagaacauucggauugug

SEQ ID NO: 1085082 - RNA, 19 nt, Homo sapiens
  misc_RNA (1)...(19): siRNA sense strand
ggcugucaauccacaauau

SEQ ID NO: 1085083 - RNA, 19 nt, Homo sapiens
  misc_RNA (1)...(19): siRNA sense strand
gauguccucaugcaagauu

SEQ ID NO: 1085084 - RNA, 19 nt, Homo sapiens
  misc_RNA (1)...(19): siRNA sense strand
ccucaggagagacaacaua

SEQ ID NO: 1085085 - RNA, 19 nt, Homo sapiens
  misc_RNA (1)...(19): siRNA sense strand
ucaggagagacaacauaua

SEQ ID NO: 1085086 - RNA, 19 nt, Homo sapiens
  misc_RNA (1)...(19): siRNA sense strand
ccagaaagagcgagagaag

SEQ ID NO: 1085087 - RNA, 19 nt, Homo sapiens
  misc_RNA (1)...(19): siRNA sense strand
ucaaauaugaccucaaagg

SEQ ID NO: 1085088 - RNA, 19 nt, Homo sapiens
  misc_RNA (1)...(19): siRNA sense strand
cucagcaucuggaaucuug

SEQ ID NO: 1085089 - RNA, 19 nt, Homo sapiens
  misc_RNA (1)...(19): siRNA sense strand
cuacaaugccuuccguuuc

SEQ ID NO: 1085090 - RNA, 19 nt, Homo sapiens
  misc_RNA (1)...(19): siRNA sense strand
gguggagaguaucuucuuc

SEQ ID NO: 1085091 - RNA, 19 nt, Homo sapiens
  misc_RNA (1)...(19): siRNA sense strand
ccuaaauucuuuggacugu

SEQ ID NO: 1085092 - RNA, 19 nt, Homo sapiens
  misc_RNA (1)...(19): siRNA sense strand
ggaacacaagucacaagug

SEQ ID NO: 1085093 - RNA, 19 nt, Homo sapiens
  misc_RNA (1)...(19): siRNA sense strand
gugcaacgcaguauuuaag

SEQ ID NO: 1085094 - RNA, 19 nt, Homo sapiens
  misc_RNA (1)...(19): siRNA sense strand
caacgagagcccuuaagca

SEQ ID NO: 1085095 - RNA, 19 nt, Homo sapiens
  misc_RNA (1)...(19): siRNA sense strand
gcugcagagcuucaagaua

SEQ ID NO: 1085096 - RNA, 19 nt, Homo sapiens
  misc_RNA (1)...(19): siRNA sense strand
uuaagaagauccccuugaa

SEQ ID NO: 1085097 - RNA, 19 nt, Homo sapiens
  misc_RNA (1)...(19): siRNA sense strand
uauauuggcaucauugaca

SEQ ID NO: 1085098 - RNA, 19 nt, Homo sapiens
  misc_RNA (1)...(19): siRNA sense strand
caacgcaguauuuaagaag

SEQ ID NO: 1085099 - RNA, 19 nt, Homo sapiens
  misc_RNA (1)...(19): siRNA sense strand
agucuuacacguuucuuaa

SEQ ID NO: 1085100 - RNA, 19 nt, Homo sapiens
  misc_RNA (1)...(19): siRNA sense strand
uugacauucuacagucuua

SEQ ID NO: 1085101 - RNA, 19 nt, Homo sapiens
  misc_RNA (1)...(19): siRNA sense strand
gcuagugguucccuguucu

SEQ ID NO: 1085102 - RNA, 19 nt, Homo sapiens
  misc_RNA (1)...(19): siRNA sense strand
gaaagccgugguacaugau

SEQ ID NO: 1085103 - RNA, 19 nt, Homo sapiens
  misc_RNA (1)...(19): siRNA sense strand
gcagcgacacucuucaagu

SEQ ID NO: 1085104 - RNA, 19 nt, Homo sapiens
  misc_RNA (1)...(19): siRNA sense strand
cuaaauucuuuggacugua

SEQ ID NO: 1085105 - RNA, 19 nt, Homo sapiens
  misc_RNA (1)...(19): siRNA sense strand
gugagccgcugauugaacu

SEQ ID NO: 1085106 - RNA, 19 nt, Homo sapiens
  misc_RNA (1)...(19): siRNA sense strand
gucaaucgacacucaaaga

SEQ ID NO: 1085107 - RNA, 19 nt, Homo sapiens
  misc_RNA (1)...(19): siRNA sense strand
cucaaaggcucaaccuaca

SEQ ID NO: 1085108 - RNA, 19 nt, Homo sapiens
  misc_RNA (1)...(19): siRNA sense strand
auaaagaggcggaguuucu

SEQ ID NO: 1085109 - RNA, 19 nt, Homo sapiens
  misc_RNA (1)...(19): siRNA sense strand
gcuuuauauuggcaucauu

SEQ ID NO: 1085110 - RNA, 19 nt, Homo sapiens
  misc_RNA (1)...(19): siRNA sense strand
uuaucuuucucucugcaua

SEQ ID NO: 1085111 - RNA, 19 nt, Homo sapiens
  misc_RNA (1)...(19): siRNA sense strand
uggcaugcccaucaagaaa

SEQ ID NO: 1085112 - RNA, 19 nt, Homo sapiens
  misc_RNA (1)...(19): siRNA sense strand
ccucagaccucagaaucca

SEQ ID NO: 1085113 - RNA, 19 nt, Homo sapiens
  misc_RNA (1)...(19): siRNA sense strand
gcagagcuucaagauaaug

SEQ ID NO: 1085114 - RNA, 19 nt, Homo sapiens
  misc_RNA (1)...(19): siRNA sense strand
acauaaagaggcggaguuu

SEQ ID NO: 1085115 - RNA, 19 nt, Homo sapiens
  misc_RNA (1)...(19): siRNA sense strand
uauagaucaugcacaacga

SEQ ID NO: 1085116 - RNA, 19 nt, Homo sapiens
  misc_RNA (1)...(19): siRNA sense strand
ggugaugaacaaucuuuua

SEQ ID NO: 1085117 - RNA, 19 nt, Homo sapiens
  misc_RNA (1)...(19): siRNA sense strand
acaaugcucucuguaagac

SEQ ID NO: 1085118 - RNA, 19 nt, Homo sapiens
  misc_RNA (1)...(19): siRNA sense strand
gaugcugacacguacaaug

SEQ ID NO: 1085119 - RNA, 19 nt, Homo sapiens
  misc_RNA (1)...(19): siRNA sense strand
uuugcugccuaaauucuuu

SEQ ID NO: 1085120 - RNA, 19 nt, Homo sapiens
  misc_RNA (1)...(19): siRNA sense strand
ccucuggcaugcccaucaa

SEQ ID NO: 1085121 - RNA, 19 nt, Homo sapiens
  misc_RNA (1)...(19): siRNA sense strand
aaaguuucggucuggcuua

SEQ ID NO: 1085122 - RNA, 19 nt, Homo sapiens
  misc_RNA (1)...(19): siRNA sense strand
aggcuucugcuuuauauug

SEQ ID NO: 1085123 - RNA, 19 nt, Homo sapiens
  misc_RNA (1)...(19): siRNA sense strand
cacguacaaugcucucugu

SEQ ID NO: 1085124 - RNA, 19 nt, Homo sapiens
  misc_RNA (1)...(19): siRNA sense strand
gaugaacaaucuuuuacca

SEQ ID NO: 1085125 - RNA, 19 nt, Homo sapiens
  misc_RNA (1)...(19): siRNA sense strand
guggugaugaacaaucuuu

SEQ ID NO: 1085126 - RNA, 19 nt, Homo sapiens
  misc_RNA (1)...(19): siRNA sense strand
gagcuagugguucccuguu

SEQ ID NO: 1085127 - RNA, 19 nt, Homo sapiens
  misc_RNA (1)...(19): siRNA sense strand
gaggaacacaagucacaag

SEQ ID NO: 1085128 - RNA, 19 nt, Homo sapiens
  misc_RNA (1)...(19): siRNA sense strand
ccaguuaggcauuacuuac

SEQ ID NO: 1085129 - RNA, 19 nt, Homo sapiens
  misc_RNA (1)...(19): siRNA sense strand
agaucuagacuucuuacaa

SEQ ID NO: 1085130 - RNA, 19 nt, Homo sapiens
  misc_RNA (1)...(19): siRNA sense strand
ucuuuggacuguacugugu

SEQ ID NO: 1085131 - RNA, 19 nt, Homo sapiens
  misc_RNA (1)...(19): siRNA sense strand
gagccugaguaccaaacca

SEQ ID NO: 1085132 - RNA, 19 nt, Homo sapiens
  misc_RNA (1)...(19): siRNA sense strand
uucgggagcuauuugguau

SEQ ID NO: 1085133 - RNA, 19 nt, Homo sapiens
  misc_RNA (1)...(19): siRNA sense strand
guuuggugcugcagagcuu

SEQ ID NO: 1085134 - RNA, 19 nt, Homo sapiens
  misc_RNA (1)...(19): siRNA sense strand
ucccacauuuaaagaucua

SEQ ID NO: 1085135 - RNA, 19 nt, Homo sapiens
  misc_RNA (1)...(19): siRNA sense strand
ucaaaggcucaaccuacaa

SEQ ID NO: 1085136 - RNA, 19 nt, Homo sapiens
  misc_RNA (1)...(19): siRNA sense strand
caagauccgucaaaaugca

SEQ ID NO: 1085137 - RNA, 19 nt, Homo sapiens
  misc_RNA (1)...(19): siRNA sense strand
uaaagaggcggaguuucug

SEQ ID NO: 1085138 - RNA, 19 nt, Homo sapiens
  misc_RNA (1)...(19): siRNA sense strand
uuggagcacucuuggaaag

SEQ ID NO: 1085139 - RNA, 19 nt, Homo sapiens
  misc_RNA (1)...(19): siRNA sense strand
cuuggucguucugauguuu

SEQ ID NO: 1085140 - RNA, 19 nt, Homo sapiens
  misc_RNA (1)...(19): siRNA sense strand
ucuacgugguggagaguau

SEQ ID NO: 1085141 - RNA, 19 nt, Homo sapiens
  misc_RNA (1)...(19): siRNA sense strand
ggacagauccuucaaguug

SEQ ID NO: 1085142 - RNA, 19 nt, Homo sapiens
  misc_RNA (1)...(19): siRNA sense strand
gaaggcaucuuuagugauc

SEQ ID NO: 1085143 - RNA, 19 nt, Homo sapiens
  misc_RNA (1)...(19): siRNA sense strand
ccacaggacugacgcauca

SEQ ID NO: 1085144 - RNA, 19 nt, Homo sapiens
  misc_RNA (1)...(19): siRNA sense strand
cagaaggcaucuuuaguga

SEQ ID NO: 1085145 - RNA, 19 nt, Homo sapiens
  misc_RNA (1)...(19): siRNA sense strand
gcagaaggcaucuuuagug

SEQ ID NO: 1085146 - RNA, 19 nt, Homo sapiens
  misc_RNA (1)...(19): siRNA sense strand
ucacuugguucaggaauaa

SEQ ID NO: 1085147 - RNA, 19 nt, Homo sapiens
  misc_RNA (1)...(19): siRNA sense strand
gaccgaaccuuccuucagu

SEQ ID NO: 1085148 - RNA, 19 nt, Homo sapiens
  misc_RNA (1)...(19): siRNA sense strand
gcuccuugcugcucacaaa

SEQ ID NO: 1085149 - RNA, 19 nt, Homo sapiens
  misc_RNA (1)...(19): siRNA sense strand
aauaucaccugguuucaug

SEQ ID NO: 1085150 - RNA, 19 nt, Homo sapiens
  misc_RNA (1)...(19): siRNA sense strand
ccacacaguuggaagacau

SEQ ID NO: 1085151 - RNA, 19 nt, Homo sapiens
  misc_RNA (1)...(19): siRNA sense strand
cuuuagugauccaagauua

SEQ ID NO: 1085152 - RNA, 19 nt, Homo sapiens
  misc_RNA (1)...(19): siRNA sense strand
ucagcugccuugcucagaa

SEQ ID NO: 1085153 - RNA, 19 nt, Homo sapiens
  misc_RNA (1)...(19): siRNA sense strand
gucacuugguucaggaaua

SEQ ID NO: 1085154 - RNA, 19 nt, Homo sapiens
  misc_RNA (1)...(19): siRNA sense strand
ggacugacgcaucacaucu

SEQ ID NO: 1085155 - RNA, 19 nt, Homo sapiens
  misc_RNA (1)...(19): siRNA sense strand
ggucacccugucccuaaua

SEQ ID NO: 1085156 - RNA, 19 nt, Homo sapiens
  misc_RNA (1)...(19): siRNA sense strand
ccuaauaucaccugguuuc

SEQ ID NO: 1085157 - RNA, 19 nt, Homo sapiens
  misc_RNA (1)...(19): siRNA sense strand
ucccuaauaucaccugguu

SEQ ID NO: 1085158 - RNA, 19 nt, Homo sapiens
  misc_RNA (1)...(19): siRNA sense strand
gaacagcacggaggucaac

SEQ ID NO: 1085159 - RNA, 19 nt, Homo sapiens
  misc_RNA (1)...(19): siRNA sense strand
gccugaagcugaagucacu

SEQ ID NO: 1085160 - RNA, 19 nt, Homo sapiens
  misc_RNA (1)...(19): siRNA sense strand
gguccuggguccugggaau

SEQ ID NO: 1085161 - RNA, 19 nt, Homo sapiens
  misc_RNA (1)...(19): siRNA sense strand
ggaccgaaccuuccuucag

SEQ ID NO: 1085162 - RNA, 19 nt, Homo sapiens
  misc_RNA (1)...(19): siRNA sense strand
cagcugccuugcucagaau

SEQ ID NO: 1085163 - RNA, 19 nt, Homo sapiens
  misc_RNA (1)...(19): siRNA sense strand
ugaggugccugcugaacag

SEQ ID NO: 1085164 - RNA, 19 nt, Homo sapiens
  misc_RNA (1)...(19): siRNA sense strand
aggagugccugaagcugaa

SEQ ID NO: 1085165 - RNA, 19 nt, Homo sapiens
  misc_RNA (1)...(19): siRNA sense strand
cuuggcagcuggacagauc

SEQ ID NO: 1085166 - RNA, 19 nt, Homo sapiens
  misc_RNA (1)...(19): siRNA sense strand
cuggacagauccuucaagu

SEQ ID NO: 1085167 - RNA, 19 nt, Homo sapiens
  misc_RNA (1)...(19): siRNA sense strand
ccacugcgcagggaagguu

SEQ ID NO: 1085168 - RNA, 19 nt, Homo sapiens
  misc_RNA (1)...(19): siRNA sense strand
ugggaauucugcucuccuu

SEQ ID NO: 1085169 - RNA, 19 nt, Homo sapiens
  misc_RNA (1)...(19): siRNA sense strand
ggaauucagcugccuugcu

SEQ ID NO: 1085170 - RNA, 19 nt, Homo sapiens
  misc_RNA (1)...(19): siRNA sense strand
cuucaaguugcaaaccuua

SEQ ID NO: 1085171 - RNA, 19 nt, Homo sapiens
  misc_RNA (1)...(19): siRNA sense strand
cacccugucccuaauauca

SEQ ID NO: 1085172 - RNA, 19 nt, Homo sapiens
  misc_RNA (1)...(19): siRNA sense strand
aaggucacccugucccuaa

SEQ ID NO: 1085173 - RNA, 19 nt, Homo sapiens
  misc_RNA (1)...(19): siRNA sense strand
acagauccuucaaguugca

SEQ ID NO: 1085174 - RNA, 19 nt, Homo sapiens
  misc_RNA (1)...(19): siRNA sense strand
acugacgcaucacaucuug

SEQ ID NO: 1085175 - RNA, 19 nt, Homo sapiens
  misc_RNA (1)...(19): siRNA sense strand
gguggucagccaauuguca

SEQ ID NO: 1085176 - RNA, 19 nt, Homo sapiens
  misc_RNA (1)...(19): siRNA sense strand
gucacccugucccuaauau

SEQ ID NO: 1085177 - RNA, 19 nt, Homo sapiens
  misc_RNA (1)...(19): siRNA sense strand
gcucagccuccugugguaa

SEQ ID NO: 1085178 - RNA, 19 nt, Homo sapiens
  misc_RNA (1)...(19): siRNA sense strand
guucaggaauaaaagcaaa

SEQ ID NO: 1085179 - RNA, 19 nt, Homo sapiens
  misc_RNA (1)...(19): siRNA sense strand
ucaugguggucagccaauu

SEQ ID NO: 1085180 - RNA, 19 nt, Homo sapiens
  misc_RNA (1)...(19): siRNA sense strand
uaauaaagcugccuucaaa

SEQ ID NO: 1085181 - RNA, 19 nt, Homo sapiens
  misc_RNA (1)...(19): siRNA sense strand
uaaagcugccuucaaauua

SEQ ID NO: 1085182 - RNA, 19 nt, Homo sapiens
  misc_RNA (1)...(19): siRNA sense strand
ggacuugcauugugacugu

SEQ ID NO: 1085183 - RNA, 19 nt, Homo sapiens
  misc_RNA (1)...(19): siRNA sense strand
gaucguauuuguuugaugu

SEQ ID NO: 1085184 - RNA, 19 nt, Homo sapiens
  misc_RNA (1)...(19): siRNA sense strand
gcaagccggcucugucuaa

SEQ ID NO: 1085185 - RNA, 19 nt, Homo sapiens
  misc_RNA (1)...(19): siRNA sense strand
ggagugagaugcccagaac

SEQ ID NO: 1085186 - RNA, 19 nt, Homo sapiens
  misc_RNA (1)...(19): siRNA sense strand
ugaccaaccuuccaucuag

SEQ ID NO: 1085187 - RNA, 19 nt, Homo sapiens
  misc_RNA (1)...(19): siRNA sense strand
cggcagaucguauuuguuu

SEQ ID NO: 1085188 - RNA, 19 nt, Homo sapiens
  misc_RNA (1)...(19): siRNA sense strand
gcagaucguauuuguuuga

SEQ ID NO: 1085189 - RNA, 19 nt, Homo sapiens
  misc_RNA (1)...(19): siRNA sense strand
aaagcugccuucaaauuau

SEQ ID NO: 1085190 - RNA, 19 nt, Homo sapiens
  misc_RNA (1)...(19): siRNA sense strand
gacauggacuugcauugug

SEQ ID NO: 1085191 - RNA, 19 nt, Homo sapiens
  misc_RNA (1)...(19): siRNA sense strand
acaccuaucuacaggaguu

SEQ ID NO: 1085192 - RNA, 19 nt, Homo sapiens
  misc_RNA (1)...(19): siRNA sense strand
gggacgcgcucuaugaucu

SEQ ID NO: 1085193 - RNA, 19 nt, Homo sapiens
  misc_RNA (1)...(19): siRNA sense strand
ggacgacaccuaucuacag

SEQ ID NO: 1085194 - RNA, 19 nt, Homo sapiens
  misc_RNA (1)...(19): siRNA sense strand
auaaagcugccuucaaauu

SEQ ID NO: 1085195 - RNA, 19 nt, Homo sapiens
  misc_RNA (1)...(19): siRNA sense strand
gacucuaagaucccuauua

SEQ ID NO: 1085196 - RNA, 19 nt, Homo sapiens
  misc_RNA (1)...(19): siRNA sense strand
gaaaagcuuugacucucuu

SEQ ID NO: 1085197 - RNA, 19 nt, Homo sapiens
  misc_RNA (1)...(19): siRNA sense strand
ccaagcacccggagaagga

SEQ ID NO: 1085198 - RNA, 19 nt, Homo sapiens
  misc_RNA (1)...(19): siRNA sense strand
caagccggcucugucuaaa

SEQ ID NO: 1085199 - RNA, 19 nt, Homo sapiens
  misc_RNA (1)...(19): siRNA sense strand
aagcugccuucaaauuauu

SEQ ID NO: 1085200 - RNA, 19 nt, Homo sapiens
  misc_RNA (1)...(19): siRNA sense strand
acauggacuugcauuguga

SEQ ID NO: 1085201 - RNA, 19 nt, Homo sapiens
  misc_RNA (1)...(19): siRNA sense strand
ucucgcugcugaagaagaa

SEQ ID NO: 1085202 - RNA, 19 nt, Homo sapiens
  misc_RNA (1)...(19): siRNA sense strand
gcaucaagcaccugaccaa

SEQ ID NO: 1085203 - RNA, 19 nt, Homo sapiens
  misc_RNA (1)...(19): siRNA sense strand
gcugaaggacucuaagauc

SEQ ID NO: 1085204 - RNA, 19 nt, Homo sapiens
  misc_RNA (1)...(19): siRNA sense strand
gccuucaaauuauucaaga

SEQ ID NO: 1085205 - RNA, 19 nt, Homo sapiens
  misc_RNA (1)...(19): siRNA sense strand
cggcagacauggacuugca

SEQ ID NO: 1085206 - RNA, 19 nt, Homo sapiens
  misc_RNA (1)...(19): siRNA sense strand
ggagaaggagcagcaggaa

SEQ ID NO: 1085207 - RNA, 19 nt, Homo sapiens
  misc_RNA (1)...(19): siRNA sense strand
gcagacauggacuugcauu

SEQ ID NO: 1085208 - RNA, 19 nt, Homo sapiens
  misc_RNA (1)...(19): siRNA sense strand
uuaauaaagcugccuucaa

SEQ ID NO: 1085209 - RNA, 19 nt, Homo sapiens
  misc_RNA (1)...(19): siRNA sense strand
ucaagcaccugaccaaccu

SEQ ID NO: 1085210 - RNA, 19 nt, Homo sapiens
  misc_RNA (1)...(19): siRNA sense strand
gucggcagaucguauuugu

SEQ ID NO: 1085211 - RNA, 19 nt, Homo sapiens
  misc_RNA (1)...(19): siRNA sense strand
gcaggucccagcugugaca

SEQ ID NO: 1085212 - RNA, 19 nt, Homo sapiens
  misc_RNA (1)...(19): siRNA sense strand
gcucuaugaucucuaugcu

SEQ ID NO: 1085213 - RNA, 19 nt, Homo sapiens
  misc_RNA (1)...(19): siRNA sense strand
agacauggacuugcauugu

SEQ ID NO: 1085214 - RNA, 19 nt, Homo sapiens
  misc_RNA (1)...(19): siRNA sense strand
ggcagaucguauuuguuug

SEQ ID NO: 1085215 - RNA, 19 nt, Homo sapiens
  misc_RNA (1)...(19): siRNA sense strand
gugcugguccgcagaguca

SEQ ID NO: 1085216 - RNA, 19 nt, Homo sapiens
  misc_RNA (1)...(19): siRNA sense strand
gugagaugcccagaacaaa

SEQ ID NO: 1085217 - RNA, 19 nt, Homo sapiens
  misc_RNA (1)...(19): siRNA sense strand
ccaagucgcacagcuucuu

SEQ ID NO: 1085218 - RNA, 19 nt, Homo sapiens
  misc_RNA (1)...(19): siRNA sense strand
ucaaccggauucccaucga

SEQ ID NO: 1085219 - RNA, 19 nt, Homo sapiens
  misc_RNA (1)...(19): siRNA sense strand
aaacaaaggggacgggaaa

SEQ ID NO: 1085220 - RNA, 19 nt, Homo sapiens
  misc_RNA (1)...(19): siRNA sense strand
cuaaggaggagcccaagca

SEQ ID NO: 1085221 - RNA, 19 nt, Homo sapiens
  misc_RNA (1)...(19): siRNA sense strand
aaaucccgguuuccaaagu

SEQ ID NO: 1085222 - RNA, 19 nt, Homo sapiens
  misc_RNA (1)...(19): siRNA sense strand
cagaucguauuuguuugau

SEQ ID NO: 1085223 - RNA, 19 nt, Homo sapiens
  misc_RNA (1)...(19): siRNA sense strand
ggacguguuugaugccuau

SEQ ID NO: 1085224 - RNA, 19 nt, Homo sapiens
  misc_RNA (1)...(19): siRNA sense strand
gggagccgcuggcagaaau

SEQ ID NO: 1085225 - RNA, 19 nt, Homo sapiens
  misc_RNA (1)...(19): siRNA sense strand
uaacaucacccacggaucu

SEQ ID NO: 1085226 - RNA, 19 nt, Homo sapiens
  misc_RNA (1)...(19): siRNA sense strand
ucaaggaggugcgcuucuu

SEQ ID NO: 1085227 - RNA, 19 nt, Homo sapiens
  misc_RNA (1)...(19): siRNA sense strand
gcgcugcccuuugccaaga

SEQ ID NO: 1085228 - RNA, 19 nt, Homo sapiens
  misc_RNA (1)...(19): siRNA sense strand
caaccuguccgaccucuuc

SEQ ID NO: 1085229 - RNA, 19 nt, Homo sapiens
  misc_RNA (1)...(19): siRNA sense strand
ggugugccguagccacgua

SEQ ID NO: 1085230 - RNA, 19 nt, Homo sapiens
  misc_RNA (1)...(19): siRNA sense strand
gacauggacguguuugaug

SEQ ID NO: 1085231 - RNA, 19 nt, Homo sapiens
  misc_RNA (1)...(19): siRNA sense strand
caaccucgcccuugaucug

SEQ ID NO: 1085232 - RNA, 19 nt, Homo sapiens
  misc_RNA (1)...(19): siRNA sense strand
cccgacgucuucuaccuaa

SEQ ID NO: 1085233 - RNA, 19 nt, Homo sapiens
  misc_RNA (1)...(19): siRNA sense strand
cgacgucuucuaccuaaug

SEQ ID NO: 1085234 - RNA, 19 nt, Homo sapiens
  misc_RNA (1)...(19): siRNA sense strand
cucgaggccuggauccaua

SEQ ID NO: 1085235 - RNA, 19 nt, Homo sapiens
  misc_RNA (1)...(19): siRNA sense strand
gaccuuccuccuccucuuu

SEQ ID NO: 1085236 - RNA, 19 nt, Homo sapiens
  misc_RNA (1)...(19): siRNA sense strand
cgacauggacguguuugau

SEQ ID NO: 1085237 - RNA, 19 nt, Homo sapiens
  misc_RNA (1)...(19): siRNA sense strand
cggcuucacuugggcauca

SEQ ID NO: 1085238 - RNA, 19 nt, Homo sapiens
  misc_RNA (1)...(19): siRNA sense strand
cuccuccucuuucugguuu

SEQ ID NO: 1085239 - RNA, 19 nt, Homo sapiens
  misc_RNA (1)...(19): siRNA sense strand
agaaauccgugcgcucuac

SEQ ID NO: 1085240 - RNA, 19 nt, Homo sapiens
  misc_RNA (1)...(19): siRNA sense strand
caaggaggugcgcuucuuc

SEQ ID NO: 1085241 - RNA, 19 nt, Homo sapiens
  misc_RNA (1)...(19): siRNA sense strand
gccacguggugcucaagga

SEQ ID NO: 1085242 - RNA, 19 nt, Homo sapiens
  misc_RNA (1)...(19): siRNA sense strand
ucaagacuucguccaggaa

SEQ ID NO: 1085243 - RNA, 19 nt, Homo sapiens
  misc_RNA (1)...(19): siRNA sense strand
ggaggugcgcuucuucaac

SEQ ID NO: 1085244 - RNA, 19 nt, Homo sapiens
  misc_RNA (1)...(19): siRNA sense strand
cagaaauccgugcgcucua

SEQ ID NO: 1085245 - RNA, 19 nt, Homo sapiens
  misc_RNA (1)...(19): siRNA sense strand
gaaaagagcagacuuauua

SEQ ID NO: 1085246 - RNA, 19 nt, Homo sapiens
  misc_RNA (1)...(19): siRNA sense strand
gagaaagccuccaagcaaa

SEQ ID NO: 1085247 - RNA, 19 nt, Homo sapiens
  misc_RNA (1)...(19): siRNA sense strand
ggaaugagcaucucucuga

SEQ ID NO: 1085248 - RNA, 19 nt, Homo sapiens
  misc_RNA (1)...(19): siRNA sense strand
ggacacgacugacuauguu

SEQ ID NO: 1085249 - RNA, 19 nt, Homo sapiens
  misc_RNA (1)...(19): siRNA sense strand
ucgcagagcuugucacauu

SEQ ID NO: 1085250 - RNA, 19 nt, Homo sapiens
  misc_RNA (1)...(19): siRNA sense strand
ucaccuacguggucaagua

SEQ ID NO: 1085251 - RNA, 19 nt, Homo sapiens
  misc_RNA (1)...(19): siRNA sense strand
gaaguucugcgcucaauga

SEQ ID NO: 1085252 - RNA, 19 nt, Homo sapiens
  misc_RNA (1)...(19): siRNA sense strand
gacagagucuuugacagua

SEQ ID NO: 1085253 - RNA, 19 nt, Homo sapiens
  misc_RNA (1)...(19): siRNA sense strand
gcucagaccacccauacua

SEQ ID NO: 1085254 - RNA, 19 nt, Homo sapiens
  misc_RNA (1)...(19): siRNA sense strand
ggaagacacuuaggagaca

SEQ ID NO: 1085255 - RNA, 19 nt, Homo sapiens
  misc_RNA (1)...(19): siRNA sense strand
ggacagagucuuugacagu

SEQ ID NO: 1085256 - RNA, 19 nt, Homo sapiens
  misc_RNA (1)...(19): siRNA sense strand
uauaaccgcuucaggaaug

SEQ ID NO: 1085257 - RNA, 19 nt, Homo sapiens
  misc_RNA (1)...(19): siRNA sense strand
ccaccuacgucaacacuca

SEQ ID NO: 1085258 - RNA, 19 nt, Homo sapiens
  misc_RNA (1)...(19): siRNA sense strand
gaaagagcaaccuccaguu

SEQ ID NO: 1085259 - RNA, 19 nt, Homo sapiens
  misc_RNA (1)...(19): siRNA sense strand
ugacuaaggacccuguuaa

SEQ ID NO: 1085260 - RNA, 19 nt, Homo sapiens
  misc_RNA (1)...(19): siRNA sense strand
gagcuccgguuuaagcaau

SEQ ID NO: 1085261 - RNA, 19 nt, Homo sapiens
  misc_RNA (1)...(19): siRNA sense strand
ccuuugagcuccgguuuaa

SEQ ID NO: 1085262 - RNA, 19 nt, Homo sapiens
  misc_RNA (1)...(19): siRNA sense strand
ggcgaagacuggcagcaaa

SEQ ID NO: 1085263 - RNA, 19 nt, Homo sapiens
  misc_RNA (1)...(19): siRNA sense strand
ucucuugacuucaguacaa

SEQ ID NO: 1085264 - RNA, 19 nt, Homo sapiens
  misc_RNA (1)...(19): siRNA sense strand
aaagagcaaccuccaguuu

SEQ ID NO: 1085265 - RNA, 19 nt, Homo sapiens
  misc_RNA (1)...(19): siRNA sense strand
agagaaagccuccaagcaa

SEQ ID NO: 1085266 - RNA, 19 nt, Homo sapiens
  misc_RNA (1)...(19): siRNA sense strand
aaugaggucucuugacuuc

SEQ ID NO: 1085267 - RNA, 19 nt, Homo sapiens
  misc_RNA (1)...(19): siRNA sense strand
gagagcagcccaaggaaag

SEQ ID NO: 1085268 - RNA, 19 nt, Homo sapiens
  misc_RNA (1)...(19): siRNA sense strand
gaacuccggacuccaaaca

SEQ ID NO: 1085269 - RNA, 19 nt, Homo sapiens
  misc_RNA (1)...(19): siRNA sense strand
uugcauaugugacuaagga

SEQ ID NO: 1085270 - RNA, 19 nt, Homo sapiens
  misc_RNA (1)...(19): siRNA sense strand
ggaaugacucggugacauc

SEQ ID NO: 1085271 - RNA, 19 nt, Homo sapiens
  misc_RNA (1)...(19): siRNA sense strand
ugaagaugcucucaagaac

SEQ ID NO: 1085272 - RNA, 19 nt, Homo sapiens
  misc_RNA (1)...(19): siRNA sense strand
caugaaaccuuuugaagau

SEQ ID NO: 1085273 - RNA, 19 nt, Homo sapiens
  misc_RNA (1)...(19): siRNA sense strand
caucaaccaccaccuagaa

SEQ ID NO: 1085274 - RNA, 19 nt, Homo sapiens
  misc_RNA (1)...(19): siRNA sense strand
ccaagaugcuggaggaacu

SEQ ID NO: 1085275 - RNA, 19 nt, Homo sapiens
  misc_RNA (1)...(19): siRNA sense strand
ucacgggcaugcacaaugg

SEQ ID NO: 1085276 - RNA, 19 nt, Homo sapiens
  misc_RNA (1)...(19): siRNA sense strand
gcacgauccagacaaagga

SEQ ID NO: 1085277 - RNA, 19 nt, Homo sapiens
  misc_RNA (1)...(19): siRNA sense strand
ggacuccaaacagaucaua

SEQ ID NO: 1085278 - RNA, 19 nt, Homo sapiens
  misc_RNA (1)...(19): siRNA sense strand
aaggagagaugagcaggaa

SEQ ID NO: 1085279 - RNA, 19 nt, Homo sapiens
  misc_RNA (1)...(19): siRNA sense strand
ucuuugacaugaaaccuuu

SEQ ID NO: 1085280 - RNA, 19 nt, Homo sapiens
  misc_RNA (1)...(19): siRNA sense strand
gagaagcacccaccuacgu

SEQ ID NO: 1085281 - RNA, 19 nt, Homo sapiens
  misc_RNA (1)...(19): siRNA sense strand
ugacuucaguacaagaaca

SEQ ID NO: 1085282 - RNA, 19 nt, Homo sapiens
  misc_RNA (1)...(19): siRNA sense strand
agaccucuuugacaugaaa

SEQ ID NO: 1085283 - RNA, 19 nt, Homo sapiens
  misc_RNA (1)...(19): siRNA sense strand
aaacagaucauagcgaauc

SEQ ID NO: 1085284 - RNA, 19 nt, Homo sapiens
  misc_RNA (1)...(19): siRNA sense strand
guacaagaacacaaauuac

SEQ ID NO: 1085285 - RNA, 19 nt, Homo sapiens
  misc_RNA (1)...(19): siRNA sense strand
cauagcgaaucaccacaug

SEQ ID NO: 1085286 - RNA, 19 nt, Homo sapiens
  misc_RNA (1)...(19): siRNA sense strand
cuaaggacccuguuaaucg

SEQ ID NO: 1085287 - RNA, 19 nt, Homo sapiens
  misc_RNA (1)...(19): siRNA sense strand
cagcccaguuugcaggaaa

SEQ ID NO: 1085288 - RNA, 19 nt, Homo sapiens
  misc_RNA (1)...(19): siRNA sense strand
gaaggcacgauccagacaa

SEQ ID NO: 1085289 - RNA, 19 nt, Homo sapiens
  misc_RNA (1)...(19): siRNA sense strand
gcacccaccuacgucaaca

SEQ ID NO: 1085290 - RNA, 19 nt, Homo sapiens
  misc_RNA (1)...(19): siRNA sense strand
acaguguccuaccaagauu

SEQ ID NO: 1085291 - RNA, 19 nt, Homo sapiens
  misc_RNA (1)...(19): siRNA sense strand
cgucaacacucagcagauc

SEQ ID NO: 1085292 - RNA, 19 nt, Homo sapiens
  misc_RNA (1)...(19): siRNA sense strand
cgcagagcuugucacauuu

SEQ ID NO: 1085293 - RNA, 19 nt, Homo sapiens
  misc_RNA (1)...(19): siRNA sense strand
aagaugcucucaagaacca

SEQ ID NO: 1085294 - RNA, 19 nt, Homo sapiens
  misc_RNA (1)...(19): siRNA sense strand
gaccacccauacuacaaca

SEQ ID NO: 1085295 - RNA, 19 nt, Homo sapiens
  misc_RNA (1)...(19): siRNA sense strand
acagagucuuugacaguau

SEQ ID NO: 1085296 - RNA, 19 nt, Homo sapiens
  misc_RNA (1)...(19): siRNA sense strand
aaggcacgauccagacaaa

SEQ ID NO: 1085297 - RNA, 19 nt, Homo sapiens
  misc_RNA (1)...(19): siRNA sense strand
ggaaaagagcagacuuauu

SEQ ID NO: 1085298 - RNA, 19 nt, Homo sapiens
  misc_RNA (1)...(19): siRNA sense strand
gcaucucucugaccaucuc

SEQ ID NO: 1085299 - RNA, 19 nt, Homo sapiens
  misc_RNA (1)...(19): siRNA sense strand
gugacuaaggacccuguua

SEQ ID NO: 1085300 - RNA, 19 nt, Homo sapiens
  misc_RNA (1)...(19): siRNA sense strand
gggcuuucuugauacuaga

SEQ ID NO: 1085301 - RNA, 19 nt, Homo sapiens
  misc_RNA (1)...(19): siRNA sense strand
gauucccgcucuccaugau

SEQ ID NO: 1085302 - RNA, 19 nt, Homo sapiens
  misc_RNA (1)...(19): siRNA sense strand
gacuaaggacccuguuaau

SEQ ID NO: 1085303 - RNA, 19 nt, Homo sapiens
  misc_RNA (1)...(19): siRNA sense strand
ugaggucucuugacuucag

SEQ ID NO: 1085304 - RNA, 19 nt, Homo sapiens
  misc_RNA (1)...(19): siRNA sense strand
ccucaucaaccaccaccua

SEQ ID NO: 1085305 - RNA, 19 nt, Homo sapiens
  misc_RNA (1)...(19): siRNA sense strand
gaacugcaagccgagacuu

SEQ ID NO: 1085306 - RNA, 19 nt, Homo sapiens
  misc_RNA (1)...(19): siRNA sense strand
ugagagcagcccaaggaaa

SEQ ID NO: 1085307 - RNA, 19 nt, Homo sapiens
  misc_RNA (1)...(19): siRNA sense strand
ccagggaagacacuuagga

SEQ ID NO: 1085308 - RNA, 19 nt, Homo sapiens
  misc_RNA (1)...(19): siRNA sense strand
acaacagcaucccaagcaa

SEQ ID NO: 1085309 - RNA, 19 nt, Homo sapiens
  misc_RNA (1)...(19): siRNA sense strand
uggcagcaaacaccuuuaa

SEQ ID NO: 1085310 - RNA, 19 nt, Homo sapiens
  misc_RNA (1)...(19): siRNA sense strand
caauauuuacaguguccua

SEQ ID NO: 1085311 - RNA, 19 nt, Homo sapiens
  misc_RNA (1)...(19): siRNA sense strand
cagagucuuugacaguauc

SEQ ID NO: 1085312 - RNA, 19 nt, Homo sapiens
  misc_RNA (1)...(19): siRNA sense strand
uuaccagggaagacacuua

SEQ ID NO: 1085313 - RNA, 19 nt, Homo sapiens
  misc_RNA (1)...(19): siRNA sense strand
ugacacagcccaguuugca

SEQ ID NO: 1085314 - RNA, 19 nt, Homo sapiens
  misc_RNA (1)...(19): siRNA sense strand
aagagcaaccuccaguuug

SEQ ID NO: 1085315 - RNA, 19 nt, Homo sapiens
  misc_RNA (1)...(19): siRNA sense strand
caggaaaagagcagacuua

SEQ ID NO: 1085316 - RNA, 19 nt, Homo sapiens
  misc_RNA (1)...(19): siRNA sense strand
ccuacguggucaaguacuu

SEQ ID NO: 1085317 - RNA, 19 nt, Homo sapiens
  misc_RNA (1)...(19): siRNA sense strand
ucagccaccucaucaacca

SEQ ID NO: 1085318 - RNA, 19 nt, Homo sapiens
  misc_RNA (1)...(19): siRNA sense strand
ucaggaagagcaccaccaa

SEQ ID NO: 1085319 - RNA, 19 nt, Homo sapiens
  misc_RNA (1)...(19): siRNA sense strand
gugcaucagcccuguguca

SEQ ID NO: 1085320 - RNA, 19 nt, Homo sapiens
  misc_RNA (1)...(19): siRNA sense strand
guauaaccgcuucaggaau

SEQ ID NO: 1085321 - RNA, 19 nt, Homo sapiens
  misc_RNA (1)...(19): siRNA sense strand
caagauucccgcucuccau

SEQ ID NO: 1085322 - RNA, 19 nt, Homo sapiens
  misc_RNA (1)...(19): siRNA sense strand
acuccggacuccaaacaga

SEQ ID NO: 1085323 - RNA, 19 nt, Homo sapiens
  misc_RNA (1)...(19): siRNA sense strand
ccgguuuaagcaauauuua

SEQ ID NO: 1085324 - RNA, 19 nt, Homo sapiens
  misc_RNA (1)...(19): siRNA sense strand
aguauaaccgcuucaggaa

SEQ ID NO: 1085325 - RNA, 19 nt, Homo sapiens
  misc_RNA (1)...(19): siRNA sense strand
caucagccgcgucugugaa

SEQ ID NO: 1085326 - RNA, 19 nt, Homo sapiens
  misc_RNA (1)...(19): siRNA sense strand
caaugaggucucuugacuu

SEQ ID NO: 1085327 - RNA, 19 nt, Homo sapiens
  misc_RNA (1)...(19): siRNA sense strand
gcuccgguuuaagcaauau

SEQ ID NO: 1085328 - RNA, 19 nt, Homo sapiens
  misc_RNA (1)...(19): siRNA sense strand
cagcacgccagaagggaaa

SEQ ID NO: 1085329 - RNA, 19 nt, Homo sapiens
  misc_RNA (1)...(19): siRNA sense strand
uguccagcaucuugggaaa

SEQ ID NO: 1085330 - RNA, 19 nt, Homo sapiens
  misc_RNA (1)...(19): siRNA sense strand
gagacccggacacgacuga

SEQ ID NO: 1085331 - RNA, 19 nt, Homo sapiens
  misc_RNA (1)...(19): siRNA sense strand
uacaacagcaucccaagca

SEQ ID NO: 1085332 - RNA, 19 nt, Homo sapiens
  misc_RNA (1)...(19): siRNA sense strand
gcagagcuugucacauuuu

SEQ ID NO: 1085333 - RNA, 19 nt, Homo sapiens
  misc_RNA (1)...(19): siRNA sense strand
uacaguguccuaccaagau

SEQ ID NO: 1085334 - RNA, 19 nt, Homo sapiens
  misc_RNA (1)...(19): siRNA sense strand
gccuuugagcuccgguuua

SEQ ID NO: 1085335 - RNA, 19 nt, Homo sapiens
  misc_RNA (1)...(19): siRNA sense strand
ccaagaaauugauugagua

SEQ ID NO: 1085336 - RNA, 19 nt, Homo sapiens
  misc_RNA (1)...(19): siRNA sense strand
gcucaaaccauuagaggua

SEQ ID NO: 1085337 - RNA, 19 nt, Homo sapiens
  misc_RNA (1)...(19): siRNA sense strand
gaagaggagaugcgugaua

SEQ ID NO: 1085338 - RNA, 19 nt, Homo sapiens
  misc_RNA (1)...(19): siRNA sense strand
uagaagaccuuucagaauc

SEQ ID NO: 1085339 - RNA, 19 nt, Homo sapiens
  misc_RNA (1)...(19): siRNA sense strand
gccaagaaauugauugagu

SEQ ID NO: 1085340 - RNA, 19 nt, Homo sapiens
  misc_RNA (1)...(19): siRNA sense strand
gaagagagaagaggagaug

SEQ ID NO: 1085341 - RNA, 19 nt, Homo sapiens
  misc_RNA (1)...(19): siRNA sense strand
gaagaccuuucagaaucua

SEQ ID NO: 1085342 - RNA, 19 nt, Homo sapiens
  misc_RNA (1)...(19): siRNA sense strand
gcggauaccugaccaacuc

SEQ ID NO: 1085343 - RNA, 19 nt, Homo sapiens
  misc_RNA (1)...(19): siRNA sense strand
ugacauguuugaagugugu

SEQ ID NO: 1085344 - RNA, 19 nt, Homo sapiens
  misc_RNA (1)...(19): siRNA sense strand
ccaaagaggaugcaaccaa

SEQ ID NO: 1085345 - RNA, 19 nt, Homo sapiens
  misc_RNA (1)...(19): siRNA sense strand
caaacacucggguccuaua

SEQ ID NO: 1085346 - RNA, 19 nt, Homo sapiens
  misc_RNA (1)...(19): siRNA sense strand
cauauucucuacuccaaag

SEQ ID NO: 1085347 - RNA, 19 nt, Homo sapiens
  misc_RNA (1)...(19): siRNA sense strand
cacugaagauuaugacaug

SEQ ID NO: 1085348 - RNA, 19 nt, Homo sapiens
  misc_RNA (1)...(19): siRNA sense strand
ccuagaagaccuuucagaa

SEQ ID NO: 1085349 - RNA, 19 nt, Homo sapiens
  misc_RNA (1)...(19): siRNA sense strand
cacaaggaccugcuaguga

SEQ ID NO: 1085350 - RNA, 19 nt, Homo sapiens
  misc_RNA (1)...(19): siRNA sense strand
acacucggguccuauacuu

SEQ ID NO: 1085351 - RNA, 19 nt, Homo sapiens
  misc_RNA (1)...(19): siRNA sense strand
gagaagcucaaaccauuag

SEQ ID NO: 1085352 - RNA, 19 nt, Homo sapiens
  misc_RNA (1)...(19): siRNA sense strand
caagggaacagggcggaua

SEQ ID NO: 1085353 - RNA, 19 nt, Homo sapiens
  misc_RNA (1)...(19): siRNA sense strand
cccauuaacucucgcaagu

SEQ ID NO: 1085354 - RNA, 19 nt, Homo sapiens
  misc_RNA (1)...(19): siRNA sense strand
cuagaagaccuuucagaau

SEQ ID NO: 1085355 - RNA, 19 nt, Homo sapiens
  misc_RNA (1)...(19): siRNA sense strand
gccauauucucuacuccaa

SEQ ID NO: 1085356 - RNA, 19 nt, Homo sapiens
  misc_RNA (1)...(19): siRNA sense strand
gaagagauugcaaaaguug

SEQ ID NO: 1085357 - RNA, 19 nt, Homo sapiens
  misc_RNA (1)...(19): siRNA sense strand
ccuuccaucugcccauuaa

SEQ ID NO: 1085358 - RNA, 19 nt, Homo sapiens
  misc_RNA (1)...(19): siRNA sense strand
agaagaccuuucagaaucu

SEQ ID NO: 1085359 - RNA, 19 nt, Homo sapiens
  misc_RNA (1)...(19): siRNA sense strand
gauuaugacauguuugaag

SEQ ID NO: 1085360 - RNA, 19 nt, Homo sapiens
  misc_RNA (1)...(19): siRNA sense strand
gagcugcgacgccuagaag

SEQ ID NO: 1085361 - RNA, 19 nt, Homo sapiens
  misc_RNA (1)...(19): siRNA sense strand
aacaaacacucggguccua

SEQ ID NO: 1085362 - RNA, 19 nt, Homo sapiens
  misc_RNA (1)...(19): siRNA sense strand
agauucugcuggccauauu

SEQ ID NO: 1085363 - RNA, 19 nt, Homo sapiens
  misc_RNA (1)...(19): siRNA sense strand
uaugacauguuugaagugu

SEQ ID NO: 1085364 - RNA, 19 nt, Homo sapiens
  misc_RNA (1)...(19): siRNA sense strand
ccuuuaccacugaagauua

SEQ ID NO: 1085365 - RNA, 19 nt, Homo sapiens
  misc_RNA (1)...(19): siRNA sense strand
cgagaucuccgaccagucu

SEQ ID NO: 1085366 - RNA, 19 nt, Homo sapiens
  misc_RNA (1)...(19): siRNA sense strand
ucacaaggaccugcuagug

SEQ ID NO: 1085367 - RNA, 19 nt, Homo sapiens
  misc_RNA (1)...(19): siRNA sense strand
gaagauuaugacauguuug

SEQ ID NO: 1085368 - RNA, 19 nt, Homo sapiens
  misc_RNA (1)...(19): siRNA sense strand
cuuuaccacugaagauuau

SEQ ID NO: 1085369 - RNA, 19 nt, Homo sapiens
  misc_RNA (1)...(19): siRNA sense strand
cgaagagauugcaaaaguu

SEQ ID NO: 1085370 - RNA, 19 nt, Homo sapiens
  misc_RNA (1)...(19): siRNA sense strand
ucaaaccauuagagguaga

SEQ ID NO: 1085371 - RNA, 19 nt, Homo sapiens
  misc_RNA (1)...(19): siRNA sense strand
cuucaaggccaagaaauug

SEQ ID NO: 1085372 - RNA, 19 nt, Homo sapiens
  misc_RNA (1)...(19): siRNA sense strand
gauaccaacgagucaacaa

SEQ ID NO: 1085373 - RNA, 19 nt, Homo sapiens
  misc_RNA (1)...(19): siRNA sense strand
aagaggagaugcgugauac

SEQ ID NO: 1085374 - RNA, 19 nt, Homo sapiens
  misc_RNA (1)...(19): siRNA sense strand
ccacugaagauuaugacau

SEQ ID NO: 1085375 - RNA, 19 nt, Homo sapiens
  misc_RNA (1)...(19): siRNA sense strand
gaagcucaaaccauuagag

SEQ ID NO: 1085376 - RNA, 19 nt, Homo sapiens
  misc_RNA (1)...(19): siRNA sense strand
acgaagagauugcaaaagu

SEQ ID NO: 1085377 - RNA, 19 nt, Homo sapiens
  misc_RNA (1)...(19): siRNA sense strand
ccguuagcguugcugcuuu

SEQ ID NO: 1085378 - RNA, 19 nt, Homo sapiens
  misc_RNA (1)...(19): siRNA sense strand
caccucaggaucacagauu

SEQ ID NO: 1085379 - RNA, 19 nt, Homo sapiens
  misc_RNA (1)...(19): siRNA sense strand
guccuauacuucagcaucu

SEQ ID NO: 1085380 - RNA, 19 nt, Homo sapiens
  misc_RNA (1)...(19): siRNA sense strand
gaccuuucagaaucuauug

SEQ ID NO: 1085381 - RNA, 19 nt, Homo sapiens
  misc_RNA (1)...(19): siRNA sense strand
caaggccaagaaauugauu

SEQ ID NO: 1085382 - RNA, 19 nt, Homo sapiens
  misc_RNA (1)...(19): siRNA sense strand
cagcaucuuuucaauguuc

SEQ ID NO: 1085383 - RNA, 19 nt, Homo sapiens
  misc_RNA (1)...(19): siRNA sense strand
caacgagucaacaaacacu

SEQ ID NO: 1085384 - RNA, 19 nt, Homo sapiens
  misc_RNA (1)...(19): siRNA sense strand
gauuuugccuacaugaaga

SEQ ID NO: 1085385 - RNA, 19 nt, Homo sapiens
  misc_RNA (1)...(19): siRNA sense strand
aauuugccuuuaccacuga

SEQ ID NO: 1085386 - RNA, 19 nt, Homo sapiens
  misc_RNA (1)...(19): siRNA sense strand
gaggagaugcgugauacca

SEQ ID NO: 1085387 - RNA, 19 nt, Homo sapiens
  misc_RNA (1)...(19): siRNA sense strand
gauaagugguuucugauuu

SEQ ID NO: 1085388 - RNA, 19 nt, Homo sapiens
  misc_RNA (1)...(19): siRNA sense strand
ggacgaagaugguaucgau

SEQ ID NO: 1085389 - RNA, 19 nt, Homo sapiens
  misc_RNA (1)...(19): siRNA sense strand
ggaagaggaugcacuacuu

SEQ ID NO: 1085390 - RNA, 19 nt, Homo sapiens
  misc_RNA (1)...(19): siRNA sense strand
cacaagacauuuggcauua

SEQ ID NO: 1085391 - RNA, 19 nt, Homo sapiens
  misc_RNA (1)...(19): siRNA sense strand
gaacugcgaggacucaauu

SEQ ID NO: 1085392 - RNA, 19 nt, Homo sapiens
  misc_RNA (1)...(19): siRNA sense strand
uaacugggauguccucuuc

SEQ ID NO: 1085393 - RNA, 19 nt, Homo sapiens
  misc_RNA (1)...(19): siRNA sense strand
uaacuuggccuugguguuu

SEQ ID NO: 1085394 - RNA, 19 nt, Homo sapiens
  misc_RNA (1)...(19): siRNA sense strand
gauccagagugcacgcaua

SEQ ID NO: 1085395 - RNA, 19 nt, Homo sapiens
  misc_RNA (1)...(19): siRNA sense strand
gaagaggaugcacuacuuu

SEQ ID NO: 1085396 - RNA, 19 nt, Homo sapiens
  misc_RNA (1)...(19): siRNA sense strand
caagagagaguccaggaaa

SEQ ID NO: 1085397 - RNA, 19 nt, Homo sapiens
  misc_RNA (1)...(19): siRNA sense strand
ucagcuacuucuuuccuua

SEQ ID NO: 1085398 - RNA, 19 nt, Homo sapiens
  misc_RNA (1)...(19): siRNA sense strand
aaacaaagcuggggauuga

SEQ ID NO: 1085399 - RNA, 19 nt, Homo sapiens
  misc_RNA (1)...(19): siRNA sense strand
aagcaagccuucugaugaa

SEQ ID NO: 1085400 - RNA, 19 nt, Homo sapiens
  misc_RNA (1)...(19): siRNA sense strand
aaagcaagccuucugauga

SEQ ID NO: 1085401 - RNA, 19 nt, Homo sapiens
  misc_RNA (1)...(19): siRNA sense strand
gcacugcccguucccauga

SEQ ID NO: 1085402 - RNA, 19 nt, Homo sapiens
  misc_RNA (1)...(19): siRNA sense strand
ucagcuccgugaagaauuu

SEQ ID NO: 1085403 - RNA, 19 nt, Homo sapiens
  misc_RNA (1)...(19): siRNA sense strand
ggagcaagaccgcccauug

SEQ ID NO: 1085404 - RNA, 19 nt, Homo sapiens
  misc_RNA (1)...(19): siRNA sense strand
uggaagagguccuggugaa

SEQ ID NO: 1085405 - RNA, 19 nt, Homo sapiens
  misc_RNA (1)...(19): siRNA sense strand
gauggaagaggaugcacua

SEQ ID NO: 1085406 - RNA, 19 nt, Homo sapiens
  misc_RNA (1)...(19): siRNA sense strand
ugaagaauuugaucaaggu

SEQ ID NO: 1085407 - RNA, 19 nt, Homo sapiens
  misc_RNA (1)...(19): siRNA sense strand
cgcaggaacuugaggaaga

SEQ ID NO: 1085408 - RNA, 19 nt, Homo sapiens
  misc_RNA (1)...(19): siRNA sense strand
ggauaagugguuucugauu

SEQ ID NO: 1085409 - RNA, 19 nt, Homo sapiens
  misc_RNA (1)...(19): siRNA sense strand
gcaggaacuugaggaagau

SEQ ID NO: 1085410 - RNA, 19 nt, Homo sapiens
  misc_RNA (1)...(19): siRNA sense strand
aaaggaaaguuuggcaaga

SEQ ID NO: 1085411 - RNA, 19 nt, Homo sapiens
  misc_RNA (1)...(19): siRNA sense strand
gaggcuugcugccaauuca

SEQ ID NO: 1085412 - RNA, 19 nt, Homo sapiens
  misc_RNA (1)...(19): siRNA sense strand
gaacucguggccagacauu

SEQ ID NO: 1085413 - RNA, 19 nt, Homo sapiens
  misc_RNA (1)...(19): siRNA sense strand
caaagcaagccuucugaug

SEQ ID NO: 1085414 - RNA, 19 nt, Homo sapiens
  misc_RNA (1)...(19): siRNA sense strand
uuggauaagugguuucuga

SEQ ID NO: 1085415 - RNA, 19 nt, Homo sapiens
  misc_RNA (1)...(19): siRNA sense strand
gaaaguuuggcaagagaga

SEQ ID NO: 1085416 - RNA, 19 nt, Homo sapiens
  misc_RNA (1)...(19): siRNA sense strand
ccaauuggccaacgacuuc

SEQ ID NO: 1085417 - RNA, 19 nt, Homo sapiens
  misc_RNA (1)...(19): siRNA sense strand
gcugaaggcccugcauaaa

SEQ ID NO: 1085418 - RNA, 19 nt, Homo sapiens
  misc_RNA (1)...(19): siRNA sense strand
uggcauugauggacaguug

SEQ ID NO: 1085419 - RNA, 19 nt, Homo sapiens
  misc_RNA (1)...(19): siRNA sense strand
agagacugcuuaccacgaa

SEQ ID NO: 1085420 - RNA, 19 nt, Homo sapiens
  misc_RNA (1)...(19): siRNA sense strand
gcaagagagaguccaggaa

SEQ ID NO: 1085421 - RNA, 19 nt, Homo sapiens
  misc_RNA (1)...(19): siRNA sense strand
acacaagacauuuggcauu

SEQ ID NO: 1085422 - RNA, 19 nt, Homo sapiens
  misc_RNA (1)...(19): siRNA sense strand
cagccacgaugcagguuga

SEQ ID NO: 1085423 - RNA, 19 nt, Homo sapiens
  misc_RNA (1)...(19): siRNA sense strand
ccgaacaccuuggauaagu

SEQ ID NO: 1085424 - RNA, 19 nt, Homo sapiens
  misc_RNA (1)...(19): siRNA sense strand
ugaucaaggucuggaugua

SEQ ID NO: 1085425 - RNA, 19 nt, Homo sapiens
  misc_RNA (1)...(19): siRNA sense strand
acaaucagaaugugcauga

SEQ ID NO: 1085426 - RNA, 19 nt, Homo sapiens
  misc_RNA (1)...(19): siRNA sense strand
gcuaagcgcguguggaagu

SEQ ID NO: 1085427 - RNA, 19 nt, Homo sapiens
  misc_RNA (1)...(19): siRNA sense strand
guccgaacaccuuggauaa

SEQ ID NO: 1085428 - RNA, 19 nt, Homo sapiens
  misc_RNA (1)...(19): siRNA sense strand
aggaugcacuacuuucuga

SEQ ID NO: 1085429 - RNA, 19 nt, Homo sapiens
  misc_RNA (1)...(19): siRNA sense strand
ugugguccgugccaugaua

SEQ ID NO: 1085430 - RNA, 19 nt, Homo sapiens
  misc_RNA (1)...(19): siRNA sense strand
cuauguugcuucugucaau

SEQ ID NO: 1085431 - RNA, 19 nt, Homo sapiens
  misc_RNA (1)...(19): siRNA sense strand
ccacuaacuuggccuuggu

SEQ ID NO: 1085432 - RNA, 19 nt, Homo sapiens
  misc_RNA (1)...(19): siRNA sense strand
cgaacaccuuggauaagug

SEQ ID NO: 1085433 - RNA, 19 nt, Homo sapiens
  misc_RNA (1)...(19): siRNA sense strand
uggaucugcucuccugaaa

SEQ ID NO: 1085434 - RNA, 19 nt, Homo sapiens
  misc_RNA (1)...(19): siRNA sense strand
aaacuggcgucagcuacuu

SEQ ID NO: 1085435 - RNA, 19 nt, Homo sapiens
  misc_RNA (1)...(19): siRNA sense strand
gcucaaagcaagccuucug

SEQ ID NO: 1085436 - RNA, 19 nt, Homo sapiens
  misc_RNA (1)...(19): siRNA sense strand
guggaaaccucugcugaag

SEQ ID NO: 1085437 - RNA, 19 nt, Homo sapiens
  misc_RNA (1)...(19): siRNA sense strand
ggaugacaaucagaaugug

SEQ ID NO: 1085438 - RNA, 19 nt, Homo sapiens
  misc_RNA (1)...(19): siRNA sense strand
ggcgucagcuacuucuuuc

SEQ ID NO: 1085439 - RNA, 19 nt, Homo sapiens
  misc_RNA (1)...(19): siRNA sense strand
cggaagcacuugauuuuau

SEQ ID NO: 1085440 - RNA, 19 nt, Homo sapiens
  misc_RNA (1)...(19): siRNA sense strand
ugaaggcccugcauaaaau

SEQ ID NO: 1085441 - RNA, 19 nt, Homo sapiens
  misc_RNA (1)...(19): siRNA sense strand
caagacauuuggcauuagc

SEQ ID NO: 1085442 - RNA, 19 nt, Homo sapiens
  misc_RNA (1)...(19): siRNA sense strand
cagagugcacgcauaaaga

SEQ ID NO: 1085443 - RNA, 19 nt, Homo sapiens
  misc_RNA (1)...(19): siRNA sense strand
gcccggaagcacuugauuu

SEQ ID NO: 1085444 - RNA, 19 nt, Homo sapiens
  misc_RNA (1)...(19): siRNA sense strand
ccacgaugcagguugaaga

SEQ ID NO: 1085445 - RNA, 19 nt, Homo sapiens
  misc_RNA (1)...(19): siRNA sense strand
gaucaaggucuggauguag

SEQ ID NO: 1085446 - RNA, 19 nt, Homo sapiens
  misc_RNA (1)...(19): siRNA sense strand
guuguuguccgccuucauu

SEQ ID NO: 1085447 - RNA, 19 nt, Homo sapiens
  misc_RNA (1)...(19): siRNA sense strand
guccgugccaugauagaua

SEQ ID NO: 1085448 - RNA, 19 nt, Homo sapiens
  misc_RNA (1)...(19): siRNA sense strand
cgaauucaaaccugacaga

SEQ ID NO: 1085449 - RNA, 19 nt, Homo sapiens
  misc_RNA (1)...(19): siRNA sense strand
caccuuggauaagugguuu

SEQ ID NO: 1085450 - RNA, 19 nt, Homo sapiens
  misc_RNA (1)...(19): siRNA sense strand
ccaugacgaugaggaagga

SEQ ID NO: 1085451 - RNA, 19 nt, Homo sapiens
  misc_RNA (1)...(19): siRNA sense strand
ccaggcaaccguaugacuu

SEQ ID NO: 1085452 - RNA, 19 nt, Homo sapiens
  misc_RNA (1)...(19): siRNA sense strand
ggaagcacuugauuuuauc

SEQ ID NO: 1085453 - RNA, 19 nt, Homo sapiens
  misc_RNA (1)...(19): siRNA sense strand
uccgugccaugauagauaa

SEQ ID NO: 1085454 - RNA, 19 nt, Homo sapiens
  misc_RNA (1)...(19): siRNA sense strand
ggugcagugucuguggaua

SEQ ID NO: 1085455 - RNA, 19 nt, Homo sapiens
  misc_RNA (1)...(19): siRNA sense strand
ccagagugcacgcauaaag

SEQ ID NO: 1085456 - RNA, 19 nt, Homo sapiens
  misc_RNA (1)...(19): siRNA sense strand
cguccgaacaccuuggaua

SEQ ID NO: 1085457 - RNA, 19 nt, Homo sapiens
  misc_RNA (1)...(19): siRNA sense strand
gacgaagaugguaucgaua

SEQ ID NO: 1085458 - RNA, 19 nt, Homo sapiens
  misc_RNA (1)...(19): siRNA sense strand
cguaugacuuccacuaacu

SEQ ID NO: 1085459 - RNA, 19 nt, Homo sapiens
  misc_RNA (1)...(19): siRNA sense strand
ccuccugacagcaacuuua

SEQ ID NO: 1085460 - RNA, 19 nt, Homo sapiens
  misc_RNA (1)...(19): siRNA sense strand
gaggaugcacuacuuucug

SEQ ID NO: 1085461 - RNA, 19 nt, Homo sapiens
  misc_RNA (1)...(19): siRNA sense strand
ccaggugccuccccauauu

SEQ ID NO: 1085462 - RNA, 19 nt, Homo sapiens
  misc_RNA (1)...(19): siRNA sense strand
aggaaaguuuggcaagaga

SEQ ID NO: 1085463 - RNA, 19 nt, Homo sapiens
  misc_RNA (1)...(19): siRNA sense strand
gcaggacgaagaugguauc

SEQ ID NO: 1085464 - RNA, 19 nt, Homo sapiens
  misc_RNA (1)...(19): siRNA sense strand
uggauguagugcuggauga

SEQ ID NO: 1085465 - RNA, 19 nt, Homo sapiens
  misc_RNA (1)...(19): siRNA sense strand
cgucugaagcugcaagaga

SEQ ID NO: 1085466 - RNA, 19 nt, Homo sapiens
  misc_RNA (1)...(19): siRNA sense strand
ccacccugccacagugaua

SEQ ID NO: 1085467 - RNA, 19 nt, Homo sapiens
  misc_RNA (1)...(19): siRNA sense strand
gggauugaucacuauguug

SEQ ID NO: 1085468 - RNA, 19 nt, Homo sapiens
  misc_RNA (1)...(19): siRNA sense strand
uggcgucagcuacuucuuu

SEQ ID NO: 1085469 - RNA, 19 nt, Homo sapiens
  misc_RNA (1)...(19): siRNA sense strand
cgauacacagccucucuga

SEQ ID NO: 1085470 - RNA, 19 nt, Homo sapiens
  misc_RNA (1)...(19): siRNA sense strand
gugcacgcauaaagaugga

SEQ ID NO: 1085471 - RNA, 19 nt, Homo sapiens
  misc_RNA (1)...(19): siRNA sense strand
aagagguccuggugaacga

SEQ ID NO: 1085472 - RNA, 19 nt, Homo sapiens
  misc_RNA (1)...(19): siRNA sense strand
uccgugacaugaaggauuc

SEQ ID NO: 1085473 - RNA, 19 nt, Homo sapiens
  misc_RNA (1)...(19): siRNA sense strand
gcgucgaggugcagugucu

SEQ ID NO: 1085474 - RNA, 19 nt, Homo sapiens
  misc_RNA (1)...(19): siRNA sense strand
acaagacauuuggcauuag

SEQ ID NO: 1085475 - RNA, 19 nt, Homo sapiens
  misc_RNA (1)...(19): siRNA sense strand
ggggauugaucacuauguu

SEQ ID NO: 1085476 - RNA, 19 nt, Homo sapiens
  misc_RNA (1)...(19): siRNA sense strand
aaggaaaguuuggcaagag

SEQ ID NO: 1085477 - RNA, 19 nt, Homo sapiens
  misc_RNA (1)...(19): siRNA sense strand
uggaugacaaucagaaugu

SEQ ID NO: 1085478 - RNA, 19 nt, Homo sapiens
  misc_RNA (1)...(19): siRNA sense strand
cgaggacucaauuggcauu

SEQ ID NO: 1085479 - RNA, 19 nt, Homo sapiens
  misc_RNA (1)...(19): siRNA sense strand
uaucagacgcaggaacuug

SEQ ID NO: 1085480 - RNA, 19 nt, Homo sapiens
  misc_RNA (1)...(19): siRNA sense strand
uugcuaagcgcguguggaa

SEQ ID NO: 1085481 - RNA, 19 nt, Homo sapiens
  misc_RNA (1)...(19): siRNA sense strand
guugaggcuugcugccaau

SEQ ID NO: 1085482 - RNA, 19 nt, Homo sapiens
  misc_RNA (1)...(19): siRNA sense strand
gaugcacuacuuucugauc

SEQ ID NO: 1085483 - RNA, 19 nt, Homo sapiens
  misc_RNA (1)...(19): siRNA sense strand
cgugaagaauuugaucaag

SEQ ID NO: 1085484 - RNA, 19 nt, Homo sapiens
  misc_RNA (1)...(19): siRNA sense strand
gcagggaggucggaggaaa

SEQ ID NO: 1085485 - RNA, 19 nt, Homo sapiens
  misc_RNA (1)...(19): siRNA sense strand
gcuccuggcuguaguuugg

SEQ ID NO: 1085486 - RNA, 19 nt, Homo sapiens
  misc_RNA (1)...(19): siRNA sense strand
gaugauucccguucucuca

SEQ ID NO: 1085487 - RNA, 19 nt, Homo sapiens
  misc_RNA (1)...(19): siRNA sense strand
gcuguaguuuggaugauuc

SEQ ID NO: 1085488 - RNA, 19 nt, Homo sapiens
  misc_RNA (1)...(19): siRNA sense strand
gcgguuaugucuccuccau

SEQ ID NO: 1085489 - RNA, 19 nt, Homo sapiens
  misc_RNA (1)...(19): siRNA sense strand
ggacccaugccuuucugaa

SEQ ID NO: 1085490 - RNA, 19 nt, Homo sapiens
  misc_RNA (1)...(19): siRNA sense strand
cccagagggucaaggaaug

SEQ ID NO: 1085491 - RNA, 19 nt, Homo sapiens
  misc_RNA (1)...(19): siRNA sense strand
ggcuguaguuuggaugauu

SEQ ID NO: 1085492 - RNA, 19 nt, Homo sapiens
  misc_RNA (1)...(19): siRNA sense strand
ucaccucgcaccugcugua

SEQ ID NO: 1085493 - RNA, 19 nt, Homo sapiens
  misc_RNA (1)...(19): siRNA sense strand
gcccagagggucaaggaau

SEQ ID NO: 1085494 - RNA, 19 nt, Homo sapiens
  misc_RNA (1)...(19): siRNA sense strand
ggaggccucacguccauuc

SEQ ID NO: 1085495 - RNA, 19 nt, Homo sapiens
  misc_RNA (1)...(19): siRNA sense strand
aagaauccguccaguccau

SEQ ID NO: 1085496 - RNA, 19 nt, Homo sapiens
  misc_RNA (1)...(19): siRNA sense strand
gcgagcaccuucacaagaa

SEQ ID NO: 1085497 - RNA, 19 nt, Homo sapiens
  misc_RNA (1)...(19): siRNA sense strand
gaacaacgagaacuccaau

SEQ ID NO: 1085498 - RNA, 19 nt, Homo sapiens
  misc_RNA (1)...(19): siRNA sense strand
gagaccagcuacugcuuca

SEQ ID NO: 1085499 - RNA, 19 nt, Homo sapiens
  misc_RNA (1)...(19): siRNA sense strand
ccacacaggucagcaacug

SEQ ID NO: 1085500 - RNA, 19 nt, Homo sapiens
  misc_RNA (1)...(19): siRNA sense strand
gucagcaacugguucaaga

SEQ ID NO: 1085501 - RNA, 19 nt, Homo sapiens
  misc_RNA (1)...(19): siRNA sense strand
gcucaaggcacacuacauc

SEQ ID NO: 1085502 - RNA, 19 nt, Homo sapiens
  misc_RNA (1)...(19): siRNA sense strand
ccaaggaaagggagaacaa

SEQ ID NO: 1085503 - RNA, 19 nt, Homo sapiens
  misc_RNA (1)...(19): siRNA sense strand
aaagggagaacaacgagaa

SEQ ID NO: 1085504 - RNA, 19 nt, Homo sapiens
  misc_RNA (1)...(19): siRNA sense strand
gagcggacccacugcaaca

SEQ ID NO: 1085505 - RNA, 19 nt, Homo sapiens
  misc_RNA (1)...(19): siRNA sense strand
acaacgagaacuccaauuc

SEQ ID NO: 1085506 - RNA, 19 nt, Homo sapiens
  misc_RNA (1)...(19): siRNA sense strand
ccagaccacucaucaucca

SEQ ID NO: 1085507 - RNA, 19 nt, Homo sapiens
  misc_RNA (1)...(19): siRNA sense strand
gcagcucggaggaugagaa

SEQ ID NO: 1085508 - RNA, 19 nt, Homo sapiens
  misc_RNA (1)...(19): siRNA sense strand
gaaugaaagcgugcucaag

SEQ ID NO: 1085509 - RNA, 19 nt, Homo sapiens
  misc_RNA (1)...(19): siRNA sense strand
cagcuacugcuucaaggaa

SEQ ID NO: 1085510 - RNA, 19 nt, Homo sapiens
  misc_RNA (1)...(19): siRNA sense strand
gaccagcuacugcuucaag

SEQ ID NO: 1085511 - RNA, 19 nt, Homo sapiens
  misc_RNA (1)...(19): siRNA sense strand
gcacaaccccuacccuuca

SEQ ID NO: 1085512 - RNA, 19 nt, Homo sapiens
  misc_RNA (1)...(19): siRNA sense strand
uccgcgagcucuacaagau

SEQ ID NO: 1085513 - RNA, 19 nt, Homo sapiens
  misc_RNA (1)...(19): siRNA sense strand
cgagcaccuucacaagaau

SEQ ID NO: 1085514 - RNA, 19 nt, Homo sapiens
  misc_RNA (1)...(19): siRNA sense strand
gcaacuuccgcgagcucua

SEQ ID NO: 1085515 - RNA, 19 nt, Homo sapiens
  misc_RNA (1)...(19): siRNA sense strand
gcgaggagaccagcuacug

SEQ ID NO: 1085516 - RNA, 19 nt, Homo sapiens
  misc_RNA (1)...(19): siRNA sense strand
cagcggcaagucgguguua

SEQ ID NO: 1085517 - RNA, 19 nt, Homo sapiens
  misc_RNA (1)...(19): siRNA sense strand
gccacaacccgcugaaugg

SEQ ID NO: 1085518 - RNA, 19 nt, Homo sapiens
  misc_RNA (1)...(19): siRNA sense strand
gagcaccuucacaagaaug

SEQ ID NO: 1085519 - RNA, 19 nt, Homo sapiens
  misc_RNA (1)...(19): siRNA sense strand
gcucggaggaugagaagac

SEQ ID NO: 1085520 - RNA, 19 nt, Homo sapiens
  misc_RNA (1)...(19): siRNA sense strand
acaacuggaugaacauuaa

SEQ ID NO: 1085521 - RNA, 19 nt, Homo sapiens
  misc_RNA (1)...(19): siRNA sense strand
gacaacuggaugaacauua

SEQ ID NO: 1085522 - RNA, 19 nt, Homo sapiens
  misc_RNA (1)...(19): siRNA sense strand
gaacauuaaccugcgagaa

SEQ ID NO: 1085523 - RNA, 19 nt, Homo sapiens
  misc_RNA (1)...(19): siRNA sense strand
gcagaggccagccagagaa

SEQ ID NO: 1085524 - RNA, 19 nt, Homo sapiens
  misc_RNA (1)...(19): siRNA sense strand
ugaagacggcucagaauca

SEQ ID NO: 1085525 - RNA, 19 nt, Homo sapiens
  misc_RNA (1)...(19): siRNA sense strand
gaagacggcucagaaucac

SEQ ID NO: 1085526 - RNA, 19 nt, Homo sapiens
  misc_RNA (1)...(19): siRNA sense strand
gaggccagccagagaagaa

SEQ ID NO: 1085527 - RNA, 19 nt, Homo sapiens
  misc_RNA (1)...(19): siRNA sense strand
ucaucgacauggucaagga

SEQ ID NO: 1085528 - RNA, 19 nt, Homo sapiens
  misc_RNA (1)...(19): siRNA sense strand
agaagaagccuggcagaca

SEQ ID NO: 1085529 - RNA, 19 nt, Homo sapiens
  misc_RNA (1)...(19): siRNA sense strand
gcggcagcaccaucaagua

SEQ ID NO: 1085530 - RNA, 19 nt, Homo sapiens
  misc_RNA (1)...(19): siRNA sense strand
ccgacgagaucaucgacau

SEQ ID NO: 1085531 - RNA, 19 nt, Homo sapiens
  misc_RNA (1)...(19): siRNA sense strand
ccauguugguggagcugaa

SEQ ID NO: 1085532 - RNA, 19 nt, Homo sapiens
  misc_RNA (1)...(19): siRNA sense strand
acauuaaccugcgagaagu

SEQ ID NO: 1085533 - RNA, 19 nt, Homo sapiens
  misc_RNA (1)...(19): siRNA sense strand
gaucaucgacauggucaag

SEQ ID NO: 1085534 - RNA, 19 nt, Homo sapiens
  misc_RNA (1)...(19): siRNA sense strand
ugcgacaacuggaugaaca

SEQ ID NO: 1085535 - RNA, 19 nt, Homo sapiens
  misc_RNA (1)...(19): siRNA sense strand
gcagcaccaucaaguaccu

SEQ ID NO: 1085536 - RNA, 19 nt, Homo sapiens
  misc_RNA (1)...(19): siRNA sense strand
cgacaacuggaugaacauu

SEQ ID NO: 1085537 - RNA, 19 nt, Homo sapiens
  misc_RNA (1)...(19): siRNA sense strand
cagcagaagcagcagaaag

SEQ ID NO: 1085538 - RNA, 19 nt, Homo sapiens
  misc_RNA (1)...(19): siRNA sense strand
gaacugaaguggucucaua

SEQ ID NO: 1085539 - RNA, 19 nt, Homo sapiens
  misc_RNA (1)...(19): siRNA sense strand
gaaagaagauauugacauc

SEQ ID NO: 1085540 - RNA, 19 nt, Homo sapiens
  misc_RNA (1)...(19): siRNA sense strand
gaaguggucucauauugaa

SEQ ID NO: 1085541 - RNA, 19 nt, Homo sapiens
  misc_RNA (1)...(19): siRNA sense strand
gcaaagaaaugauaaugca

SEQ ID NO: 1085542 - RNA, 19 nt, Homo sapiens
  misc_RNA (1)...(19): siRNA sense strand
gaacacaguagaccaauug

SEQ ID NO: 1085543 - RNA, 19 nt, Homo sapiens
  misc_RNA (1)...(19): siRNA sense strand
caaaaggacuuaaacagua

SEQ ID NO: 1085544 - RNA, 19 nt, Homo sapiens
  misc_RNA (1)...(19): siRNA sense strand
caugagaaauuuagccaaa

SEQ ID NO: 1085545 - RNA, 19 nt, Homo sapiens
  misc_RNA (1)...(19): siRNA sense strand
guauaaaggucaaccaagu

SEQ ID NO: 1085546 - RNA, 19 nt, Homo sapiens
  misc_RNA (1)...(19): siRNA sense strand
aaacccaucuuuggaagua

SEQ ID NO: 1085547 - RNA, 19 nt, Homo sapiens
  misc_RNA (1)...(19): siRNA sense strand
gaccgaauaugaagucugu

SEQ ID NO: 1085548 - RNA, 19 nt, Homo sapiens
  misc_RNA (1)...(19): siRNA sense strand
ggagaagaaagaagauauu

SEQ ID NO: 1085549 - RNA, 19 nt, Homo sapiens
  misc_RNA (1)...(19): siRNA sense strand
gaacacaacaacaggugaa

SEQ ID NO: 1085550 - RNA, 19 nt, Homo sapiens
  misc_RNA (1)...(19): siRNA sense strand
caacaacaggugaauuuau

SEQ ID NO: 1085551 - RNA, 19 nt, Homo sapiens
  misc_RNA (1)...(19): siRNA sense strand
gugauuccaucuaaacuga

SEQ ID NO: 1085552 - RNA, 19 nt, Homo sapiens
  misc_RNA (1)...(19): siRNA sense strand
gaagaaagaagauauugac

SEQ ID NO: 1085553 - RNA, 19 nt, Homo sapiens
  misc_RNA (1)...(19): siRNA sense strand
guucguccauccucuguuu

SEQ ID NO: 1085554 - RNA, 19 nt, Homo sapiens
  misc_RNA (1)...(19): siRNA sense strand
ggaaguaaauucagauacc

SEQ ID NO: 1085555 - RNA, 19 nt, Homo sapiens
  misc_RNA (1)...(19): siRNA sense strand
caggugaauuuauccauga

SEQ ID NO: 1085556 - RNA, 19 nt, Homo sapiens
  misc_RNA (1)...(19): siRNA sense strand
cauauugaauggucacaga

SEQ ID NO: 1085557 - RNA, 19 nt, Homo sapiens
  misc_RNA (1)...(19): siRNA sense strand
cacaacaacaggugaauuu

SEQ ID NO: 1085558 - RNA, 19 nt, Homo sapiens
  misc_RNA (1)...(19): siRNA sense strand
caucauaaacccaucuuug

SEQ ID NO: 1085559 - RNA, 19 nt, Homo sapiens
  misc_RNA (1)...(19): siRNA sense strand
gagaagaaagaagauauug

SEQ ID NO: 1085560 - RNA, 19 nt, Homo sapiens
  misc_RNA (1)...(19): siRNA sense strand
gaauaugaagucugugaga

SEQ ID NO: 1085561 - RNA, 19 nt, Homo sapiens
  misc_RNA (1)...(19): siRNA sense strand
gauuccaucuaaacugauu

SEQ ID NO: 1085562 - RNA, 19 nt, Homo sapiens
  misc_RNA (1)...(19): siRNA sense strand
caaaacagcuccucguauc

SEQ ID NO: 1085563 - RNA, 19 nt, Homo sapiens
  misc_RNA (1)...(19): siRNA sense strand
cugaaguggucucauauug

SEQ ID NO: 1085564 - RNA, 19 nt, Homo sapiens
  misc_RNA (1)...(19): siRNA sense strand
gugaauuuauccaugagaa

SEQ ID NO: 1085565 - RNA, 19 nt, Homo sapiens
  misc_RNA (1)...(19): siRNA sense strand
cagauaccguggaauuuca

SEQ ID NO: 1085566 - RNA, 19 nt, Homo sapiens
  misc_RNA (1)...(19): siRNA sense strand
guaucacacucuugcauuc

SEQ ID NO: 1085567 - RNA, 19 nt, Homo sapiens
  misc_RNA (1)...(19): siRNA sense strand
cauaaacccaucuuuggaa

SEQ ID NO: 1085568 - RNA, 19 nt, Homo sapiens
  misc_RNA (1)...(19): siRNA sense strand
gggagaagaaagaagauau

SEQ ID NO: 1085569 - RNA, 19 nt, Homo sapiens
  misc_RNA (1)...(19): siRNA sense strand
ugaaguggucucauauuga

SEQ ID NO: 1085570 - RNA, 19 nt, Homo sapiens
  misc_RNA (1)...(19): siRNA sense strand
gaugaguccuuggcaguca

SEQ ID NO: 1085571 - RNA, 19 nt, Homo sapiens
  misc_RNA (1)...(19): siRNA sense strand
uaugaagucugugagaaug

SEQ ID NO: 1085572 - RNA, 19 nt, Homo sapiens
  misc_RNA (1)...(19): siRNA sense strand
ugaacacaguagaccaauu

SEQ ID NO: 1085573 - RNA, 19 nt, Homo sapiens
  misc_RNA (1)...(19): siRNA sense strand
gaacucggccacuccucaa

SEQ ID NO: 1085574 - RNA, 19 nt, Homo sapiens
  misc_RNA (1)...(19): siRNA sense strand
aacaacaggugaauuuauc

SEQ ID NO: 1085575 - RNA, 19 nt, Homo sapiens
  misc_RNA (1)...(19): siRNA sense strand
gugagaauguggguuuguu

SEQ ID NO: 1085576 - RNA, 19 nt, Homo sapiens
  misc_RNA (1)...(19): siRNA sense strand
aaauucagauaccguggaa

SEQ ID NO: 1085577 - RNA, 19 nt, Homo sapiens
  misc_RNA (1)...(19): siRNA sense strand
aauaugaagucugugagaa

SEQ ID NO: 1085578 - RNA, 19 nt, Homo sapiens
  misc_RNA (1)...(19): siRNA sense strand
ggacaucuggagaacacaa

SEQ ID NO: 1085579 - RNA, 19 nt, Homo sapiens
  misc_RNA (1)...(19): siRNA sense strand
ccaagugucagcugcaguu

SEQ ID NO: 1085580 - RNA, 19 nt, Homo sapiens
  misc_RNA (1)...(19): siRNA sense strand
aagaagauauugacaucgu

SEQ ID NO: 1085581 - RNA, 19 nt, Homo sapiens
  misc_RNA (1)...(19): siRNA sense strand
gcacugggagaagaaagaa

SEQ ID NO: 1085582 - RNA, 19 nt, Homo sapiens
  misc_RNA (1)...(19): siRNA sense strand
uuguugcccuuggaaauua

SEQ ID NO: 1085583 - RNA, 19 nt, Homo sapiens
  misc_RNA (1)...(19): siRNA sense strand
acaacaacaggugaauuua

SEQ ID NO: 1085584 - RNA, 19 nt, Homo sapiens
  misc_RNA (1)...(19): siRNA sense strand
ucacagaccgaauaugaag

SEQ ID NO: 1085585 - RNA, 19 nt, Homo sapiens
  misc_RNA (1)...(19): siRNA sense strand
ugacaucgugaacacagua

SEQ ID NO: 1085586 - RNA, 19 nt, Homo sapiens
  misc_RNA (1)...(19): siRNA sense strand
auaaugcacugggagaaga

SEQ ID NO: 1085587 - RNA, 19 nt, Homo sapiens
  misc_RNA (1)...(19): siRNA sense strand
cguccauccucuguuuaua

SEQ ID NO: 1085588 - RNA, 19 nt, Homo sapiens
  misc_RNA (1)...(19): siRNA sense strand
ucauaaacccaucuuugga

SEQ ID NO: 1085589 - RNA, 19 nt, Homo sapiens
  misc_RNA (1)...(19): siRNA sense strand
ugaagucugugagaaugug

SEQ ID NO: 1085590 - RNA, 19 nt, Homo sapiens
  misc_RNA (1)...(19): siRNA sense strand
ucagauaccguggaauuuc

SEQ ID NO: 1085591 - RNA, 19 nt, Homo sapiens
  misc_RNA (1)...(19): siRNA sense strand
ucacuucccgcguguugaa

SEQ ID NO: 1085592 - RNA, 19 nt, Homo sapiens
  misc_RNA (1)...(19): siRNA sense strand
caccgugauuccaucuaaa

SEQ ID NO: 1085593 - RNA, 19 nt, Homo sapiens
  misc_RNA (1)...(19): siRNA sense strand
ccgaauaugaagucuguga

SEQ ID NO: 1085594 - RNA, 19 nt, Homo sapiens
  misc_RNA (1)...(19): siRNA sense strand
gauauugacaucgugaaca

SEQ ID NO: 1085595 - RNA, 19 nt, Homo sapiens
  misc_RNA (1)...(19): siRNA sense strand
agugucagcugcaguugga

SEQ ID NO: 1085596 - RNA, 19 nt, Homo sapiens
  misc_RNA (1)...(19): siRNA sense strand
ccuuggaaauuaucagaag

SEQ ID NO: 1085597 - RNA, 19 nt, Homo sapiens
  misc_RNA (1)...(19): siRNA sense strand
aaaggucaaccaaguguca

SEQ ID NO: 1085598 - RNA, 19 nt, Homo sapiens
  misc_RNA (1)...(19): siRNA sense strand
gauaaugcacugggagaag

SEQ ID NO: 1085599 - RNA, 19 nt, Homo sapiens
  misc_RNA (1)...(19): siRNA sense strand
caucacuucccgcguguug

SEQ ID NO: 1085600 - RNA, 19 nt, Homo sapiens
  misc_RNA (1)...(19): siRNA sense strand
cuacaaggcccaaaacaug

SEQ ID NO: 1085601 - RNA, 19 nt, Homo sapiens
  misc_RNA (1)...(19): siRNA sense strand
uauaaaggucaaccaagug

SEQ ID NO: 1085602 - RNA, 19 nt, Homo sapiens
  misc_RNA (1)...(19): siRNA sense strand
ucugugagaauguggguuu

SEQ ID NO: 1085603 - RNA, 19 nt, Homo sapiens
  misc_RNA (1)...(19): siRNA sense strand
gacaaaacagcuccucgua

SEQ ID NO: 1085604 - RNA, 19 nt, Homo sapiens
  misc_RNA (1)...(19): siRNA sense strand
ggguauaaaggucaaccaa

SEQ ID NO: 1085605 - RNA, 19 nt, Homo sapiens
  misc_RNA (1)...(19): siRNA sense strand
cguaucacacucuugcauu

SEQ ID NO: 1085606 - RNA, 19 nt, Homo sapiens
  misc_RNA (1)...(19): siRNA sense strand
gcuacgggauuuacaucac

SEQ ID NO: 1085607 - RNA, 19 nt, Homo sapiens
  misc_RNA (1)...(19): siRNA sense strand
gcauuccccuucucaagug

SEQ ID NO: 1085608 - RNA, 19 nt, Homo sapiens
  misc_RNA (1)...(19): siRNA sense strand
cuacgggauuuacaucacu

SEQ ID NO: 1085609 - RNA, 19 nt, Homo sapiens
  misc_RNA (1)...(19): siRNA sense strand
ugagaauguggguuuguug

SEQ ID NO: 1085610 - RNA, 19 nt, Homo sapiens
  misc_RNA (1)...(19): siRNA sense strand
caaguggggcuccugaaaa

SEQ ID NO: 1085611 - RNA, 19 nt, Homo sapiens
  misc_RNA (1)...(19): siRNA sense strand
caucuuuggaaguaaauuc

SEQ ID NO: 1085612 - RNA, 19 nt, Homo sapiens
  misc_RNA (1)...(19): siRNA sense strand
acccaucuuuggaaguaaa

SEQ ID NO: 1085613 - RNA, 19 nt, Homo sapiens
  misc_RNA (1)...(19): siRNA sense strand
ccaaaaggacuuaaacagu

SEQ ID NO: 1085614 - RNA, 19 nt, Homo sapiens
  misc_RNA (1)...(19): siRNA sense strand
acacaacaacaggugaauu

SEQ ID NO: 1085615 - RNA, 19 nt, Homo sapiens
  misc_RNA (1)...(19): siRNA sense strand
ggagaaagccgcagaucug

SEQ ID NO: 1085616 - RNA, 19 nt, Homo sapiens
  misc_RNA (1)...(19): siRNA sense strand
gcaggacacagccucguua

SEQ ID NO: 1085617 - RNA, 19 nt, Homo sapiens
  misc_RNA (1)...(19): siRNA sense strand
ggccagagguggaagaaca

SEQ ID NO: 1085618 - RNA, 19 nt, Homo sapiens
  misc_RNA (1)...(19): siRNA sense strand
gcaagugggagacgugauu

SEQ ID NO: 1085619 - RNA, 19 nt, Homo sapiens
  misc_RNA (1)...(19): siRNA sense strand
ccaaagcugggcauugaua

SEQ ID NO: 1085620 - RNA, 19 nt, Homo sapiens
  misc_RNA (1)...(19): siRNA sense strand
ggacacagccucguuaacu

SEQ ID NO: 1085621 - RNA, 19 nt, Homo sapiens
  misc_RNA (1)...(19): siRNA sense strand
cagaggacccuucacuuga

SEQ ID NO: 1085622 - RNA, 19 nt, Homo sapiens
  misc_RNA (1)...(19): siRNA sense strand
acacaagcgugccuucugu

SEQ ID NO: 1085623 - RNA, 19 nt, Homo sapiens
  misc_RNA (1)...(19): siRNA sense strand
gcgccagggucuucaggaa

SEQ ID NO: 1085624 - RNA, 19 nt, Homo sapiens
  misc_RNA (1)...(19): siRNA sense strand
ggaagugaaugggcuuugg

SEQ ID NO: 1085625 - RNA, 19 nt, Homo sapiens
  misc_RNA (1)...(19): siRNA sense strand
gugaacggguauccuguug

SEQ ID NO: 1085626 - RNA, 19 nt, Homo sapiens
  misc_RNA (1)...(19): siRNA sense strand
ggguguugcugacaguauu

SEQ ID NO: 1085627 - RNA, 19 nt, Homo sapiens
  misc_RNA (1)...(19): siRNA sense strand
caaagcugggcauugauaa

SEQ ID NO: 1085628 - RNA, 19 nt, Homo sapiens
  misc_RNA (1)...(19): siRNA sense strand
cagcucagccucacugguu

SEQ ID NO: 1085629 - RNA, 19 nt, Homo sapiens
  misc_RNA (1)...(19): siRNA sense strand
gcaaagaggagggcaagag

SEQ ID NO: 1085630 - RNA, 19 nt, Homo sapiens
  misc_RNA (1)...(19): siRNA sense strand
acagaggacccuucacuug

SEQ ID NO: 1085631 - RNA, 19 nt, Homo sapiens
  misc_RNA (1)...(19): siRNA sense strand
ccucuuggcucccgacagu

SEQ ID NO: 1085632 - RNA, 19 nt, Homo sapiens
  misc_RNA (1)...(19): siRNA sense strand
aagaggagggcaagaguuu

SEQ ID NO: 1085633 - RNA, 19 nt, Homo sapiens
  misc_RNA (1)...(19): siRNA sense strand
gagacgugauucuggaagu

SEQ ID NO: 1085634 - RNA, 19 nt, Homo sapiens
  misc_RNA (1)...(19): siRNA sense strand
gcaaucaggguccuuucug

SEQ ID NO: 1085635 - RNA, 19 nt, Homo sapiens
  misc_RNA (1)...(19): siRNA sense strand
ccucgcuucuguuuacuga

SEQ ID NO: 1085636 - RNA, 19 nt, Homo sapiens
  misc_RNA (1)...(19): siRNA sense strand
gacacagccucguuaacuc

SEQ ID NO: 1085637 - RNA, 19 nt, Homo sapiens
  misc_RNA (1)...(19): siRNA sense strand
ugaaagaugagggugguuu

SEQ ID NO: 1085638 - RNA, 19 nt, Homo sapiens
  misc_RNA (1)...(19): siRNA sense strand
caaagaggagggcaagagu

SEQ ID NO: 1085639 - RNA, 19 nt, Homo sapiens
  misc_RNA (1)...(19): siRNA sense strand
gccacauagugaaagauga

SEQ ID NO: 1085640 - RNA, 19 nt, Homo sapiens
  misc_RNA (1)...(19): siRNA sense strand
gacagaggacccuucacuu

SEQ ID NO: 1085641 - RNA, 19 nt, Homo sapiens
  misc_RNA (1)...(19): siRNA sense strand
gcucuggccucggaucuac

SEQ ID NO: 1085642 - RNA, 19 nt, Homo sapiens
  misc_RNA (1)...(19): siRNA sense strand
cggccucgcuucuguuuac

SEQ ID NO: 1085643 - RNA, 19 nt, Homo sapiens
  misc_RNA (1)...(19): siRNA sense strand
cagugggccucgucucuuc

SEQ ID NO: 1085644 - RNA, 19 nt, Homo sapiens
  misc_RNA (1)...(19): siRNA sense strand
gaaagaugagggugguuuu

SEQ ID NO: 1085645 - RNA, 19 nt, Homo sapiens
  misc_RNA (1)...(19): siRNA sense strand
agaagaugcccaccucugu

SEQ ID NO: 1085646 - RNA, 19 nt, Homo sapiens
  misc_RNA (1)...(19): siRNA sense strand
gaaugggcuuuggcagagu

SEQ ID NO: 1085647 - RNA, 19 nt, Homo sapiens
  misc_RNA (1)...(19): siRNA sense strand
aaagaggagggcaagaguu

SEQ ID NO: 1085648 - RNA, 19 nt, Homo sapiens
  misc_RNA (1)...(19): siRNA sense strand
gacacaagcgugccuucug

SEQ ID NO: 1085649 - RNA, 19 nt, Homo sapiens
  misc_RNA (1)...(19): siRNA sense strand
gguuuuggcuucaguguca

SEQ ID NO: 1085650 - RNA, 19 nt, Homo sapiens
  misc_RNA (1)...(19): siRNA sense strand
gauccuggcggugaacaau

SEQ ID NO: 1085651 - RNA, 19 nt, Homo sapiens
  misc_RNA (1)...(19): siRNA sense strand
caggacacagccucguuaa

SEQ ID NO: 1085652 - RNA, 19 nt, Homo sapiens
  misc_RNA (1)...(19): siRNA sense strand
ccacauagugaaagaugag

SEQ ID NO: 1085653 - RNA, 19 nt, Homo sapiens
  misc_RNA (1)...(19): siRNA sense strand
uccuggcggugaacaauga

SEQ ID NO: 1085654 - RNA, 19 nt, Homo sapiens
  misc_RNA (1)...(19): siRNA sense strand
ccaagaaggcugggaugca

SEQ ID NO: 1085655 - RNA, 19 nt, Homo sapiens
  misc_RNA (1)...(19): siRNA sense strand
agcuauggcuuccgacuca

SEQ ID NO: 1085656 - RNA, 19 nt, Homo sapiens
  misc_RNA (1)...(19): siRNA sense strand
ucuguuuacugagcaaaga

SEQ ID NO: 1085657 - RNA, 19 nt, Homo sapiens
  misc_RNA (1)...(19): siRNA sense strand
uguggaacacgaagacuau

SEQ ID NO: 1085658 - RNA, 19 nt, Homo sapiens
  misc_RNA (1)...(19): siRNA sense strand
agacgugauucuggaagug

SEQ ID NO: 1085659 - RNA, 19 nt, Homo sapiens
  misc_RNA (1)...(19): siRNA sense strand
agacagaggacccuucacu

SEQ ID NO: 1085660 - RNA, 19 nt, Homo sapiens
  misc_RNA (1)...(19): siRNA sense strand
cagccucguuaacucugaa

SEQ ID NO: 1085661 - RNA, 19 nt, Homo sapiens
  misc_RNA (1)...(19): siRNA sense strand
ugagacagaggacccuuca

SEQ ID NO: 1085662 - RNA, 19 nt, Homo sapiens
  misc_RNA (1)...(19): siRNA sense strand
guaggaagaucauguauua

SEQ ID NO: 1085663 - RNA, 19 nt, Homo sapiens
  misc_RNA (1)...(19): siRNA sense strand
ggacagaaguuaccacuga

SEQ ID NO: 1085664 - RNA, 19 nt, Homo sapiens
  misc_RNA (1)...(19): siRNA sense strand
gcaaacagaucaacaucaa

SEQ ID NO: 1085665 - RNA, 19 nt, Homo sapiens
  misc_RNA (1)...(19): siRNA sense strand
gaagacaaguuucaaagga

SEQ ID NO: 1085666 - RNA, 19 nt, Homo sapiens
  misc_RNA (1)...(19): siRNA sense strand
gaaagcugguguacugaua

SEQ ID NO: 1085667 - RNA, 19 nt, Homo sapiens
  misc_RNA (1)...(19): siRNA sense strand
gaagcaagauucuguaaca

SEQ ID NO: 1085668 - RNA, 19 nt, Homo sapiens
  misc_RNA (1)...(19): siRNA sense strand
gaagaaaucacuacuaugu

SEQ ID NO: 1085669 - RNA, 19 nt, Homo sapiens
  misc_RNA (1)...(19): siRNA sense strand
gcaaaccagugaauuuauu

SEQ ID NO: 1085670 - RNA, 19 nt, Homo sapiens
  misc_RNA (1)...(19): siRNA sense strand
gcaaacccuucuaaugaua

SEQ ID NO: 1085671 - RNA, 19 nt, Homo sapiens
  misc_RNA (1)...(19): siRNA sense strand
gcagugaccuuaaacuuca

SEQ ID NO: 1085672 - RNA, 19 nt, Homo sapiens
  misc_RNA (1)...(19): siRNA sense strand
gaagaacauuuaugacuca

SEQ ID NO: 1085673 - RNA, 19 nt, Homo sapiens
  misc_RNA (1)...(19): siRNA sense strand
caacaucaauaaucccuuu

SEQ ID NO: 1085674 - RNA, 19 nt, Homo sapiens
  misc_RNA (1)...(19): siRNA sense strand
aaggaugacucuauucuua

SEQ ID NO: 1085675 - RNA, 19 nt, Homo sapiens
  misc_RNA (1)...(19): siRNA sense strand
gaaaccgccucaugugauu

SEQ ID NO: 1085676 - RNA, 19 nt, Homo sapiens
  misc_RNA (1)...(19): siRNA sense strand
ggaagaucauguauuauuc

SEQ ID NO: 1085677 - RNA, 19 nt, Homo sapiens
  misc_RNA (1)...(19): siRNA sense strand
cagcugaaauuccuaauau

SEQ ID NO: 1085678 - RNA, 19 nt, Homo sapiens
  misc_RNA (1)...(19): siRNA sense strand
gaauggaugcucuuccuua

SEQ ID NO: 1085679 - RNA, 19 nt, Homo sapiens
  misc_RNA (1)...(19): siRNA sense strand
gauggcuucuuucugauua

SEQ ID NO: 1085680 - RNA, 19 nt, Homo sapiens
  misc_RNA (1)...(19): siRNA sense strand
gaagauaggcacuuaaugg

SEQ ID NO: 1085681 - RNA, 19 nt, Homo sapiens
  misc_RNA (1)...(19): siRNA sense strand
acaagaagauaggcacuua

SEQ ID NO: 1085682 - RNA, 19 nt, Homo sapiens
  misc_RNA (1)...(19): siRNA sense strand
ggagaagacuguguaagug

SEQ ID NO: 1085683 - RNA, 19 nt, Homo sapiens
  misc_RNA (1)...(19): siRNA sense strand
uaacaacugugauauugga

SEQ ID NO: 1085684 - RNA, 19 nt, Homo sapiens
  misc_RNA (1)...(19): siRNA sense strand
gaaguaggaagaucaugua

SEQ ID NO: 1085685 - RNA, 19 nt, Homo sapiens
  misc_RNA (1)...(19): siRNA sense strand
ucaagagcauggaucauuu

SEQ ID NO: 1085686 - RNA, 19 nt, Homo sapiens
  misc_RNA (1)...(19): siRNA sense strand
guuaccagcugcagaaauu

SEQ ID NO: 1085687 - RNA, 19 nt, Homo sapiens
  misc_RNA (1)...(19): siRNA sense strand
auagauggcuucuuucuga

SEQ ID NO: 1085688 - RNA, 19 nt, Homo sapiens
  misc_RNA (1)...(19): siRNA sense strand
ggacauauuuggagaagac

SEQ ID NO: 1085689 - RNA, 19 nt, Homo sapiens
  misc_RNA (1)...(19): siRNA sense strand
gaaaaugucuguugauuac

SEQ ID NO: 1085690 - RNA, 19 nt, Homo sapiens
  misc_RNA (1)...(19): siRNA sense strand
agaaugaaauggccagauu

SEQ ID NO: 1085691 - RNA, 19 nt, Homo sapiens
  misc_RNA (1)...(19): siRNA sense strand
ggagcuggcugcacagaga

SEQ ID NO: 1085692 - RNA, 19 nt, Homo sapiens
  misc_RNA (1)...(19): siRNA sense strand
gauccacccuggccuagaa

SEQ ID NO: 1085693 - RNA, 19 nt, Homo sapiens
  misc_RNA (1)...(19): siRNA sense strand
cagaagcagugaccuuaaa

SEQ ID NO: 1085694 - RNA, 19 nt, Homo sapiens
  misc_RNA (1)...(19): siRNA sense strand
ggacccauauccaugagaa

SEQ ID NO: 1085695 - RNA, 19 nt, Homo sapiens
  misc_RNA (1)...(19): siRNA sense strand
cagcaaaccagugaauuua

SEQ ID NO: 1085696 - RNA, 19 nt, Homo sapiens
  misc_RNA (1)...(19): siRNA sense strand
caucaugucugaaccugaa

SEQ ID NO: 1085697 - RNA, 19 nt, Homo sapiens
  misc_RNA (1)...(19): siRNA sense strand
cgagacagauuuggaagaa

SEQ ID NO: 1085698 - RNA, 19 nt, Homo sapiens
  misc_RNA (1)...(19): siRNA sense strand
ugaaauggccagauugaaa

SEQ ID NO: 1085699 - RNA, 19 nt, Homo sapiens
  misc_RNA (1)...(19): siRNA sense strand
uaaaugccaugaaugacaa

SEQ ID NO: 1085700 - RNA, 19 nt, Homo sapiens
  misc_RNA (1)...(19): siRNA sense strand
cuugcgaccuguccaauua

SEQ ID NO: 1085701 - RNA, 19 nt, Homo sapiens
  misc_RNA (1)...(19): siRNA sense strand
uggcuuauccagagaauua

SEQ ID NO: 1085702 - RNA, 19 nt, Homo sapiens
  misc_RNA (1)...(19): siRNA sense strand
gaaauugacaggugaugug

SEQ ID NO: 1085703 - RNA, 19 nt, Homo sapiens
  misc_RNA (1)...(19): siRNA sense strand
uggcaaacccuucuaauga

SEQ ID NO: 1085704 - RNA, 19 nt, Homo sapiens
  misc_RNA (1)...(19): siRNA sense strand
uggaugcucuuccuuauau

SEQ ID NO: 1085705 - RNA, 19 nt, Homo sapiens
  misc_RNA (1)...(19): siRNA sense strand
caggugauguggaagaauu

SEQ ID NO: 1085706 - RNA, 19 nt, Homo sapiens
  misc_RNA (1)...(19): siRNA sense strand
cugaagaaaucacuacuau

SEQ ID NO: 1085707 - RNA, 19 nt, Homo sapiens
  misc_RNA (1)...(19): siRNA sense strand
guacacuggugauuucuca

SEQ ID NO: 1085708 - RNA, 19 nt, Homo sapiens
  misc_RNA (1)...(19): siRNA sense strand
guaacacuguccacgauau

SEQ ID NO: 1085709 - RNA, 19 nt, Homo sapiens
  misc_RNA (1)...(19): siRNA sense strand
uguaaaggaugacucuauu

SEQ ID NO: 1085710 - RNA, 19 nt, Homo sapiens
  misc_RNA (1)...(19): siRNA sense strand
gaaauggccagauugaaag

SEQ ID NO: 1085711 - RNA, 19 nt, Homo sapiens
  misc_RNA (1)...(19): siRNA sense strand
gacacggacuguagaaugu

SEQ ID NO: 1085712 - RNA, 19 nt, Homo sapiens
  misc_RNA (1)...(19): siRNA sense strand
gcaagaaguaggaagauca

SEQ ID NO: 1085713 - RNA, 19 nt, Homo sapiens
  misc_RNA (1)...(19): siRNA sense strand
guucauaauccucggaaua

SEQ ID NO: 1085714 - RNA, 19 nt, Homo sapiens
  misc_RNA (1)...(19): siRNA sense strand
gaagauaacgaugaaguuc

SEQ ID NO: 1085715 - RNA, 19 nt, Homo sapiens
  misc_RNA (1)...(19): siRNA sense strand
gcagacgacaugcuguaua

SEQ ID NO: 1085716 - RNA, 19 nt, Homo sapiens
  misc_RNA (1)...(19): siRNA sense strand
ggcaaacccuucuaaugau

SEQ ID NO: 1085717 - RNA, 19 nt, Homo sapiens
  misc_RNA (1)...(19): siRNA sense strand
ccuuuaauuugcucuguua

SEQ ID NO: 1085718 - RNA, 19 nt, Homo sapiens
  misc_RNA (1)...(19): siRNA sense strand
cuacaugacauuccaauau

SEQ ID NO: 1085719 - RNA, 19 nt, Homo sapiens
  misc_RNA (1)...(19): siRNA sense strand
gcagcugaaauuccuaaua

SEQ ID NO: 1085720 - RNA, 19 nt, Homo sapiens
  misc_RNA (1)...(19): siRNA sense strand
gaugaguacuggcagaauc

SEQ ID NO: 1085721 - RNA, 19 nt, Homo sapiens
  misc_RNA (1)...(19): siRNA sense strand
agaagacuguguaagugua

SEQ ID NO: 1085722 - RNA, 19 nt, Homo sapiens
  misc_RNA (1)...(19): siRNA sense strand
gcaagagguuggagaucau

SEQ ID NO: 1085723 - RNA, 19 nt, Homo sapiens
  misc_RNA (1)...(19): siRNA sense strand
gaucuccuauuaauuaguc

SEQ ID NO: 1085724 - RNA, 19 nt, Homo sapiens
  misc_RNA (1)...(19): siRNA sense strand
ucacauagagguucauaau

SEQ ID NO: 1085725 - RNA, 19 nt, Homo sapiens
  misc_RNA (1)...(19): siRNA sense strand
ccagcaaaccagugaauuu

SEQ ID NO: 1085726 - RNA, 19 nt, Homo sapiens
  misc_RNA (1)...(19): siRNA sense strand
aguaacaacugugauauug

SEQ ID NO: 1085727 - RNA, 19 nt, Homo sapiens
  misc_RNA (1)...(19): siRNA sense strand
auacuggucccuuuaauuu

SEQ ID NO: 1085728 - RNA, 19 nt, Homo sapiens
  misc_RNA (1)...(19): siRNA sense strand
uagccaagguuaugggauu

SEQ ID NO: 1085729 - RNA, 19 nt, Homo sapiens
  misc_RNA (1)...(19): siRNA sense strand
gaagaaagcauggacaaaa

SEQ ID NO: 1085730 - RNA, 19 nt, Homo sapiens
  misc_RNA (1)...(19): siRNA sense strand
gaagacuguguaaguguaa

SEQ ID NO: 1085731 - RNA, 19 nt, Homo sapiens
  misc_RNA (1)...(19): siRNA sense strand
gaagcagacccaagccauu

SEQ ID NO: 1085732 - RNA, 19 nt, Homo sapiens
  misc_RNA (1)...(19): siRNA sense strand
ucacacggauuaccagcaa

SEQ ID NO: 1085733 - RNA, 19 nt, Homo sapiens
  misc_RNA (1)...(19): siRNA sense strand
caucaauaaucccuuuguu

SEQ ID NO: 1085734 - RNA, 19 nt, Homo sapiens
  misc_RNA (1)...(19): siRNA sense strand
agaaguguauggcagugua

SEQ ID NO: 1085735 - RNA, 19 nt, Homo sapiens
  misc_RNA (1)...(19): siRNA sense strand
gcagaaucacccagaacua

SEQ ID NO: 1085736 - RNA, 19 nt, Homo sapiens
  misc_RNA (1)...(19): siRNA sense strand
gaaucaaguuuugguguua

SEQ ID NO: 1085737 - RNA, 19 nt, Homo sapiens
  misc_RNA (1)...(19): siRNA sense strand
guaaaugccaugaaugaca

SEQ ID NO: 1085738 - RNA, 19 nt, Homo sapiens
  misc_RNA (1)...(19): siRNA sense strand
gaagugaagacgaugaauc

SEQ ID NO: 1085739 - RNA, 19 nt, Homo sapiens
  misc_RNA (1)...(19): siRNA sense strand
gcucuuccuuauauugauu

SEQ ID NO: 1085740 - RNA, 19 nt, Homo sapiens
  misc_RNA (1)...(19): siRNA sense strand
agaaaucacuacuaugucu

SEQ ID NO: 1085741 - RNA, 19 nt, Homo sapiens
  misc_RNA (1)...(19): siRNA sense strand
agacagauuuggaagaaag

SEQ ID NO: 1085742 - RNA, 19 nt, Homo sapiens
  misc_RNA (1)...(19): siRNA sense strand
gaugaaucccuccgagaaa

SEQ ID NO: 1085743 - RNA, 19 nt, Homo sapiens
  misc_RNA (1)...(19): siRNA sense strand
gcucugcccugguuucuac

SEQ ID NO: 1085744 - RNA, 19 nt, Homo sapiens
  misc_RNA (1)...(19): siRNA sense strand
gacagaaguuaccacugaa

SEQ ID NO: 1085745 - RNA, 19 nt, Homo sapiens
  misc_RNA (1)...(19): siRNA sense strand
ggaagaaagcauggacaaa

SEQ ID NO: 1085746 - RNA, 19 nt, Homo sapiens
  misc_RNA (1)...(19): siRNA sense strand
ugacauuggucccaguguu

SEQ ID NO: 1085747 - RNA, 19 nt, Homo sapiens
  misc_RNA (1)...(19): siRNA sense strand
uauuggaaguucagucaaa

SEQ ID NO: 1085748 - RNA, 19 nt, Homo sapiens
  misc_RNA (1)...(19): siRNA sense strand
gauauuggaaguucaguca

SEQ ID NO: 1085749 - RNA, 19 nt, Homo sapiens
  misc_RNA (1)...(19): siRNA sense strand
caacugugauauuggaagu

SEQ ID NO: 1085750 - RNA, 19 nt, Homo sapiens
  misc_RNA (1)...(19): siRNA sense strand
ccagagaauuauuugaaag

SEQ ID NO: 1085751 - RNA, 19 nt, Homo sapiens
  misc_RNA (1)...(19): siRNA sense strand
ucucagcucacacggauua

SEQ ID NO: 1085752 - RNA, 19 nt, Homo sapiens
  misc_RNA (1)...(19): siRNA sense strand
uuugaaagcugguguacug

SEQ ID NO: 1085753 - RNA, 19 nt, Homo sapiens
  misc_RNA (1)...(19): siRNA sense strand
ggacaaaauugaaacuauc

SEQ ID NO: 1085754 - RNA, 19 nt, Homo sapiens
  misc_RNA (1)...(19): siRNA sense strand
gacccaagccauuccauau

SEQ ID NO: 1085755 - RNA, 19 nt, Homo sapiens
  misc_RNA (1)...(19): siRNA sense strand
ucucaggaauacuuguuaa

SEQ ID NO: 1085756 - RNA, 19 nt, Homo sapiens
  misc_RNA (1)...(19): siRNA sense strand
gaaugaaauggccagauug

SEQ ID NO: 1085757 - RNA, 19 nt, Homo sapiens
  misc_RNA (1)...(19): siRNA sense strand
cuuaauggcagcugaaauu

SEQ ID NO: 1085758 - RNA, 19 nt, Homo sapiens
  misc_RNA (1)...(19): siRNA sense strand
ggugauuucucaagacaag

SEQ ID NO: 1085759 - RNA, 19 nt, Homo sapiens
  misc_RNA (1)...(19): siRNA sense strand
ccaugcaggucacguccua

SEQ ID NO: 1085760 - RNA, 19 nt, Homo sapiens
  misc_RNA (1)...(19): siRNA sense strand
caaaggaagaacauuuaug

SEQ ID NO: 1085761 - RNA, 19 nt, Homo sapiens
  misc_RNA (1)...(19): siRNA sense strand
gaucaugcuccaggacaua

SEQ ID NO: 1085762 - RNA, 19 nt, Homo sapiens
  misc_RNA (1)...(19): siRNA sense strand
guacagcgauuacgucaag

SEQ ID NO: 1085763 - RNA, 19 nt, Homo sapiens
  misc_RNA (1)...(19): siRNA sense strand
ccaccaagauguccauaca

SEQ ID NO: 1085764 - RNA, 19 nt, Homo sapiens
  misc_RNA (1)...(19): siRNA sense strand
gcgauuacgucaagaggau

SEQ ID NO: 1085765 - RNA, 19 nt, Homo sapiens
  misc_RNA (1)...(19): siRNA sense strand
gaggaagacucgggaaucu

SEQ ID NO: 1085766 - RNA, 19 nt, Homo sapiens
  misc_RNA (1)...(19): siRNA sense strand
gguaccaccugacgacgaa

SEQ ID NO: 1085767 - RNA, 19 nt, Homo sapiens
  misc_RNA (1)...(19): siRNA sense strand
guagcagcauacaggauuu

SEQ ID NO: 1085768 - RNA, 19 nt, Homo sapiens
  misc_RNA (1)...(19): siRNA sense strand
cggcugaggucucgugguu

SEQ ID NO: 1085769 - RNA, 19 nt, Homo sapiens
  misc_RNA (1)...(19): siRNA sense strand
gguagcagcauacaggauu

SEQ ID NO: 1085770 - RNA, 19 nt, Homo sapiens
  misc_RNA (1)...(19): siRNA sense strand
caugcuaggugcuguguac

SEQ ID NO: 1085771 - RNA, 19 nt, Homo sapiens
  misc_RNA (1)...(19): siRNA sense strand
aaucuccacuggugccuau

SEQ ID NO: 1085772 - RNA, 19 nt, Homo sapiens
  misc_RNA (1)...(19): siRNA sense strand
gcuuggugguagcagcaua

SEQ ID NO: 1085773 - RNA, 19 nt, Homo sapiens
  misc_RNA (1)...(19): siRNA sense strand
acaggaugcuggagagaag

SEQ ID NO: 1085774 - RNA, 19 nt, Homo sapiens
  misc_RNA (1)...(19): siRNA sense strand
acacaauguacagcgauua

SEQ ID NO: 1085775 - RNA, 19 nt, Homo sapiens
  misc_RNA (1)...(19): siRNA sense strand
uagcagcauacaggauuua

SEQ ID NO: 1085776 - RNA, 19 nt, Homo sapiens
  misc_RNA (1)...(19): siRNA sense strand
gcacaggaugcuggagaga

SEQ ID NO: 1085777 - RNA, 19 nt, Homo sapiens
  misc_RNA (1)...(19): siRNA sense strand
gaacauugcuuacagaaau

SEQ ID NO: 1085778 - RNA, 19 nt, Homo sapiens
  misc_RNA (1)...(19): siRNA sense strand
caaagaauauccaugagau

SEQ ID NO: 1085779 - RNA, 19 nt, Homo sapiens
  misc_RNA (1)...(19): siRNA sense strand
guuaaagacuucacaacaa

SEQ ID NO: 1085780 - RNA, 19 nt, Homo sapiens
  misc_RNA (1)...(19): siRNA sense strand
gaauauccaugagauuuca

SEQ ID NO: 1085781 - RNA, 19 nt, Homo sapiens
  misc_RNA (1)...(19): siRNA sense strand
acacaaagaauauccauga

SEQ ID NO: 1085782 - RNA, 19 nt, Homo sapiens
  misc_RNA (1)...(19): siRNA sense strand
ggacuguguuaaagacuuc

SEQ ID NO: 1085783 - RNA, 19 nt, Homo sapiens
  misc_RNA (1)...(19): siRNA sense strand
ccaugagauuucaggaaua

SEQ ID NO: 1085784 - RNA, 19 nt, Homo sapiens
  misc_RNA (1)...(19): siRNA sense strand
caugagauuucaggaauau

SEQ ID NO: 1085785 - RNA, 19 nt, Homo sapiens
  misc_RNA (1)...(19): siRNA sense strand
ucagaacauugcuuacaga

SEQ ID NO: 1085786 - RNA, 19 nt, Homo sapiens
  misc_RNA (1)...(19): siRNA sense strand
uuaaagacuucacaacaag

SEQ ID NO: 1085787 - RNA, 19 nt, Homo sapiens
  misc_RNA (1)...(19): siRNA sense strand
gaagagaccaccuguucag

SEQ ID NO: 1085788 - RNA, 19 nt, Homo sapiens
  misc_RNA (1)...(19): siRNA sense strand
gaccuacaauaaacuuaca

SEQ ID NO: 1085789 - RNA, 19 nt, Homo sapiens
  misc_RNA (1)...(19): siRNA sense strand
uccaugagauuucaggaau

SEQ ID NO: 1085790 - RNA, 19 nt, Homo sapiens
  misc_RNA (1)...(19): siRNA sense strand
acaaagaauauccaugaga

SEQ ID NO: 1085791 - RNA, 19 nt, Homo sapiens
  misc_RNA (1)...(19): siRNA sense strand
ugagauuucaggaauauca

SEQ ID NO: 1085792 - RNA, 19 nt, Homo sapiens
  misc_RNA (1)...(19): siRNA sense strand
ggaccuacaauaaacuuac

SEQ ID NO: 1085793 - RNA, 19 nt, Homo sapiens
  misc_RNA (1)...(19): siRNA sense strand
cugaagagaccaccuguuc

SEQ ID NO: 1085794 - RNA, 19 nt, Homo sapiens
  misc_RNA (1)...(19): siRNA sense strand
uaaagacuucacaacaaga

SEQ ID NO: 1085795 - RNA, 19 nt, Homo sapiens
  misc_RNA (1)...(19): siRNA sense strand
ucacaacaagagaaguaaa

SEQ ID NO: 1085796 - RNA, 19 nt, Homo sapiens
  misc_RNA (1)...(19): siRNA sense strand
agagaccaccuguucagaa

SEQ ID NO: 1085797 - RNA, 19 nt, Homo sapiens
  misc_RNA (1)...(19): siRNA sense strand
gaaguaaaaccugaagaga

SEQ ID NO: 1085798 - RNA, 19 nt, Homo sapiens
  misc_RNA (1)...(19): siRNA sense strand
cagaacauugcuuacagaa

SEQ ID NO: 1085799 - RNA, 19 nt, Homo sapiens
  misc_RNA (1)...(19): siRNA sense strand
gggaccuacaauaaacuua

SEQ ID NO: 1085800 - RNA, 19 nt, Homo sapiens
  misc_RNA (1)...(19): siRNA sense strand
agacuucacaacaagagaa

SEQ ID NO: 1085801 - RNA, 19 nt, Homo sapiens
  misc_RNA (1)...(19): siRNA sense strand
cacaaagaauauccaugag

SEQ ID NO: 1085802 - RNA, 19 nt, Homo sapiens
  misc_RNA (1)...(19): siRNA sense strand
agaauauccaugagauuuc

SEQ ID NO: 1085803 - RNA, 19 nt, Homo sapiens
  misc_RNA (1)...(19): siRNA sense strand
cugcacaaauaccagaauc

SEQ ID NO: 1085804 - RNA, 19 nt, Homo sapiens
  misc_RNA (1)...(19): siRNA sense strand
uggacuguguuaaagacuu

SEQ ID NO: 1085805 - RNA, 19 nt, Homo sapiens
  misc_RNA (1)...(19): siRNA sense strand
gaacuuugccuauuucuua

SEQ ID NO: 1085806 - RNA, 19 nt, Homo sapiens
  misc_RNA (1)...(19): siRNA sense strand
gaaagcagauacucuagaa

SEQ ID NO: 1085807 - RNA, 19 nt, Homo sapiens
  misc_RNA (1)...(19): siRNA sense strand
caacaaggcuguguacuca

SEQ ID NO: 1085808 - RNA, 19 nt, Homo sapiens
  misc_RNA (1)...(19): siRNA sense strand
gcaaugaaaccaauaaaug

SEQ ID NO: 1085809 - RNA, 19 nt, Homo sapiens
  misc_RNA (1)...(19): siRNA sense strand
caacagacauggcaacaag

SEQ ID NO: 1085810 - RNA, 19 nt, Homo sapiens
  misc_RNA (1)...(19): siRNA sense strand
ucacaaagaucuaggaaag

SEQ ID NO: 1085811 - RNA, 19 nt, Homo sapiens
  misc_RNA (1)...(19): siRNA sense strand
ggcaaacccuucuaucaaa

SEQ ID NO: 1085812 - RNA, 19 nt, Homo sapiens
  misc_RNA (1)...(19): siRNA sense strand
caaaugauccugcgguauu

SEQ ID NO: 1085813 - RNA, 19 nt, Homo sapiens
  misc_RNA (1)...(19): siRNA sense strand
gcaaugugcugugaaugaa

SEQ ID NO: 1085814 - RNA, 19 nt, Homo sapiens
  misc_RNA (1)...(19): siRNA sense strand
acaaagaucuaggaaagaa

SEQ ID NO: 1085815 - RNA, 19 nt, Homo sapiens
  misc_RNA (1)...(19): siRNA sense strand
gaaggaagauacgauugug

SEQ ID NO: 1085816 - RNA, 19 nt, Homo sapiens
  misc_RNA (1)...(19): siRNA sense strand
gcaaacccuucuaucaaau

SEQ ID NO: 1085817 - RNA, 19 nt, Homo sapiens
  misc_RNA (1)...(19): siRNA sense strand
guaccaagaacucaaauga

SEQ ID NO: 1085818 - RNA, 19 nt, Homo sapiens
  misc_RNA (1)...(19): siRNA sense strand
gaagaaaggacuuauugca

SEQ ID NO: 1085819 - RNA, 19 nt, Homo sapiens
  misc_RNA (1)...(19): siRNA sense strand
uacaacaucuccuccauga

SEQ ID NO: 1085820 - RNA, 19 nt, Homo sapiens
  misc_RNA (1)...(19): siRNA sense strand
ccagaaaucauaauucaga

SEQ ID NO: 1085821 - RNA, 19 nt, Homo sapiens
  misc_RNA (1)...(19): siRNA sense strand
ucaccaagauagccucaaa

SEQ ID NO: 1085822 - RNA, 19 nt, Homo sapiens
  misc_RNA (1)...(19): siRNA sense strand
gaaagaggccauccaaggu

SEQ ID NO: 1085823 - RNA, 19 nt, Homo sapiens
  misc_RNA (1)...(19): siRNA sense strand
gggcaaacccuucuaucaa

SEQ ID NO: 1085824 - RNA, 19 nt, Homo sapiens
  misc_RNA (1)...(19): siRNA sense strand
ccacugaagacgucgaaua

SEQ ID NO: 1085825 - RNA, 19 nt, Homo sapiens
  misc_RNA (1)...(19): siRNA sense strand
caacaucuccuccaugaag

SEQ ID NO: 1085826 - RNA, 19 nt, Homo sapiens
  misc_RNA (1)...(19): siRNA sense strand
cagagacaguguacaguga

SEQ ID NO: 1085827 - RNA, 19 nt, Homo sapiens
  misc_RNA (1)...(19): siRNA sense strand
gaucuggucccaucaccua

SEQ ID NO: 1085828 - RNA, 19 nt, Homo sapiens
  misc_RNA (1)...(19): siRNA sense strand
ggaaagaaggacacagaga

SEQ ID NO: 1085829 - RNA, 19 nt, Homo sapiens
  misc_RNA (1)...(19): siRNA sense strand
gcacagagaguuauuuuau

SEQ ID NO: 1085830 - RNA, 19 nt, Homo sapiens
  misc_RNA (1)...(19): siRNA sense strand
ggacuuauugcagugguua

SEQ ID NO: 1085831 - RNA, 19 nt, Homo sapiens
  misc_RNA (1)...(19): siRNA sense strand
gggugacacuggacaagaa

SEQ ID NO: 1085832 - RNA, 19 nt, Homo sapiens
  misc_RNA (1)...(19): siRNA sense strand
gaacuccaacaacgagaaa

SEQ ID NO: 1085833 - RNA, 19 nt, Homo sapiens
  misc_RNA (1)...(19): siRNA sense strand
gcaacacaguccagauagu

SEQ ID NO: 1085834 - RNA, 19 nt, Homo sapiens
  misc_RNA (1)...(19): siRNA sense strand
caagaaagaggccauccaa

SEQ ID NO: 1085835 - RNA, 19 nt, Homo sapiens
  misc_RNA (1)...(19): siRNA sense strand
accagaugcuguucuauaa

SEQ ID NO: 1085836 - RNA, 19 nt, Homo sapiens
  misc_RNA (1)...(19): siRNA sense strand
gaugagguccagauuucua

SEQ ID NO: 1085837 - RNA, 19 nt, Homo sapiens
  misc_RNA (1)...(19): siRNA sense strand
cacauuaagugcaccauuc

SEQ ID NO: 1085838 - RNA, 19 nt, Homo sapiens
  misc_RNA (1)...(19): siRNA sense strand
gaaaaccacugcagaguac

SEQ ID NO: 1085839 - RNA, 19 nt, Homo sapiens
  misc_RNA (1)...(19): siRNA sense strand
ggaaagcagauacucuaga

SEQ ID NO: 1085840 - RNA, 19 nt, Homo sapiens
  misc_RNA (1)...(19): siRNA sense strand
ugucacagacucaagauuu

SEQ ID NO: 1085841 - RNA, 19 nt, Homo sapiens
  misc_RNA (1)...(19): siRNA sense strand
caccagaugcuguucuaua

SEQ ID NO: 1085842 - RNA, 19 nt, Homo sapiens
  misc_RNA (1)...(19): siRNA sense strand
caacuacacgugcaaagug

SEQ ID NO: 1085843 - RNA, 19 nt, Homo sapiens
  misc_RNA (1)...(19): siRNA sense strand
ugaagagcacagagaguua

SEQ ID NO: 1085844 - RNA, 19 nt, Homo sapiens
  misc_RNA (1)...(19): siRNA sense strand
ucuaucaaaugaccucaaa

SEQ ID NO: 1085845 - RNA, 19 nt, Homo sapiens
  misc_RNA (1)...(19): siRNA sense strand
ccagauuucuauccuguca

SEQ ID NO: 1085846 - RNA, 19 nt, Homo sapiens
  misc_RNA (1)...(19): siRNA sense strand
gaagagcacagagaguuau

SEQ ID NO: 1085847 - RNA, 19 nt, Homo sapiens
  misc_RNA (1)...(19): siRNA sense strand
cagaaucuaccaagaguga

SEQ ID NO: 1085848 - RNA, 19 nt, Homo sapiens
  misc_RNA (1)...(19): siRNA sense strand
caaguaaaguuuuggagaa

SEQ ID NO: 1085849 - RNA, 19 nt, Homo sapiens
  misc_RNA (1)...(19): siRNA sense strand
gaaucuuccuucacacauc

SEQ ID NO: 1085850 - RNA, 19 nt, Homo sapiens
  misc_RNA (1)...(19): siRNA sense strand
gaacaggagggagaguauu

SEQ ID NO: 1085851 - RNA, 19 nt, Homo sapiens
  misc_RNA (1)...(19): siRNA sense strand
ccggaaagcugucccugau

SEQ ID NO: 1085852 - RNA, 19 nt, Homo sapiens
  misc_RNA (1)...(19): siRNA sense strand
uaaauguacugugauugug

SEQ ID NO: 1085853 - RNA, 19 nt, Homo sapiens
  misc_RNA (1)...(19): siRNA sense strand
guggaaagcagauacucua

SEQ ID NO: 1085854 - RNA, 19 nt, Homo sapiens
  misc_RNA (1)...(19): siRNA sense strand
uaucaaaugaccucaaaug

SEQ ID NO: 1085855 - RNA, 19 nt, Homo sapiens
  misc_RNA (1)...(19): siRNA sense strand
aagcaacacaguccagaua

SEQ ID NO: 1085856 - RNA, 19 nt, Homo sapiens
  misc_RNA (1)...(19): siRNA sense strand
cagcaucguggucaacaua

SEQ ID NO: 1085857 - RNA, 19 nt, Homo sapiens
  misc_RNA (1)...(19): siRNA sense strand
gcaacaaggcuguguacuc

SEQ ID NO: 1085858 - RNA, 19 nt, Homo sapiens
  misc_RNA (1)...(19): siRNA sense strand
aguggaacuuugccuauuu

SEQ ID NO: 1085859 - RNA, 19 nt, Homo sapiens
  misc_RNA (1)...(19): siRNA sense strand
gcagaugccaguggaaaug

SEQ ID NO: 1085860 - RNA, 19 nt, Homo sapiens
  misc_RNA (1)...(19): siRNA sense strand
ggaacaggagggagaguau

SEQ ID NO: 1085861 - RNA, 19 nt, Homo sapiens
  misc_RNA (1)...(19): siRNA sense strand
aaacccuucuaucaaauga

SEQ ID NO: 1085862 - RNA, 19 nt, Homo sapiens
  misc_RNA (1)...(19): siRNA sense strand
accaagaacucaaaugauc

SEQ ID NO: 1085863 - RNA, 19 nt, Homo sapiens
  misc_RNA (1)...(19): siRNA sense strand
uuucuauccugucaaguaa

SEQ ID NO: 1085864 - RNA, 19 nt, Homo sapiens
  misc_RNA (1)...(19): siRNA sense strand
gaacucagacgugcaguac

SEQ ID NO: 1085865 - RNA, 19 nt, Homo sapiens
  misc_RNA (1)...(19): siRNA sense strand
ggaacaggaccgcguuuua

SEQ ID NO: 1085866 - RNA, 19 nt, Homo sapiens
  misc_RNA (1)...(19): siRNA sense strand
uggaagaaaggacuuauug

SEQ ID NO: 1085867 - RNA, 19 nt, Homo sapiens
  misc_RNA (1)...(19): siRNA sense strand
gcugcaaugugcugugaau

SEQ ID NO: 1085868 - RNA, 19 nt, Homo sapiens
  misc_RNA (1)...(19): siRNA sense strand
ccagaaggaagauacgauu

SEQ ID NO: 1085869 - RNA, 19 nt, Homo sapiens
  misc_RNA (1)...(19): siRNA sense strand
gcaguacacggaaguucaa

SEQ ID NO: 1085870 - RNA, 19 nt, Homo sapiens
  misc_RNA (1)...(19): siRNA sense strand
ucccaucaccuauaaguuu

SEQ ID NO: 1085871 - RNA, 19 nt, Homo sapiens
  misc_RNA (1)...(19): siRNA sense strand
cagaugcuguucuauaagg

SEQ ID NO: 1085872 - RNA, 19 nt, Homo sapiens
  misc_RNA (1)...(19): siRNA sense strand
guacacggaaguucaagug

SEQ ID NO: 1085873 - RNA, 19 nt, Homo sapiens
  misc_RNA (1)...(19): siRNA sense strand
aaugucagaucccaauaug

SEQ ID NO: 1085874 - RNA, 19 nt, Homo sapiens
  misc_RNA (1)...(19): siRNA sense strand
gcucagcuccacauuaagu

SEQ ID NO: 1085875 - RNA, 19 nt, Homo sapiens
  misc_RNA (1)...(19): siRNA sense strand
cccaauacacuucacaauu

SEQ ID NO: 1085876 - RNA, 19 nt, Homo sapiens
  misc_RNA (1)...(19): siRNA sense strand
caagauuucaccaagauag

SEQ ID NO: 1085877 - RNA, 19 nt, Homo sapiens
  misc_RNA (1)...(19): siRNA sense strand
guacagugaaguccggaaa

SEQ ID NO: 1085878 - RNA, 19 nt, Homo sapiens
  misc_RNA (1)...(19): siRNA sense strand
ugucagaucccaauaugga

SEQ ID NO: 1085879 - RNA, 19 nt, Homo sapiens
  misc_RNA (1)...(19): siRNA sense strand
aacaggagggagaguauua

SEQ ID NO: 1085880 - RNA, 19 nt, Homo sapiens
  misc_RNA (1)...(19): siRNA sense strand
gagaauaguaccaagaacu

SEQ ID NO: 1085881 - RNA, 19 nt, Homo sapiens
  misc_RNA (1)...(19): siRNA sense strand
cgaaguccguugcgaaucg

SEQ ID NO: 1085882 - RNA, 19 nt, Homo sapiens
  misc_RNA (1)...(19): siRNA sense strand
gcacugcagguauugacaa

SEQ ID NO: 1085883 - RNA, 19 nt, Homo sapiens
  misc_RNA (1)...(19): siRNA sense strand
gaacaggaccgcguuuuau

SEQ ID NO: 1085884 - RNA, 19 nt, Homo sapiens
  misc_RNA (1)...(19): siRNA sense strand
ggaaagccaaggccaagca

SEQ ID NO: 1085885 - RNA, 19 nt, Homo sapiens
  misc_RNA (1)...(19): siRNA sense strand
gccuauuucuuaccaacuu

SEQ ID NO: 1085886 - RNA, 19 nt, Homo sapiens
  misc_RNA (1)...(19): siRNA sense strand
caguggaacuuugccuauu

SEQ ID NO: 1085887 - RNA, 19 nt, Homo sapiens
  misc_RNA (1)...(19): siRNA sense strand
ggagcacaguggcaacuac

SEQ ID NO: 1085888 - RNA, 19 nt, Homo sapiens
  misc_RNA (1)...(19): siRNA sense strand
ccaccggaaugaucaugga

SEQ ID NO: 1085889 - RNA, 19 nt, Homo sapiens
  misc_RNA (1)...(19): siRNA sense strand
gaaaaugucagaucccaau

SEQ ID NO: 1085890 - RNA, 19 nt, Homo sapiens
  misc_RNA (1)...(19): siRNA sense strand
augcagaccucagaaucua

SEQ ID NO: 1085891 - RNA, 19 nt, Homo sapiens
  misc_RNA (1)...(19): siRNA sense strand
ggagaauaguaccaagaac

SEQ ID NO: 1085892 - RNA, 19 nt, Homo sapiens
  misc_RNA (1)...(19): siRNA sense strand
guggaacuuugccuauuuc

SEQ ID NO: 1085893 - RNA, 19 nt, Homo sapiens
  misc_RNA (1)...(19): siRNA sense strand
gucacagacucaagauuuc

SEQ ID NO: 1085894 - RNA, 19 nt, Homo sapiens
  misc_RNA (1)...(19): siRNA sense strand
ggaagauacgauuguguca

SEQ ID NO: 1085895 - RNA, 19 nt, Homo sapiens
  misc_RNA (1)...(19): siRNA sense strand
uaagugcaccauucaagug

SEQ ID NO: 1085896 - RNA, 19 nt, Homo sapiens
  misc_RNA (1)...(19): siRNA sense strand
uaggaaagaaggacacaga

SEQ ID NO: 1085897 - RNA, 19 nt, Homo sapiens
  misc_RNA (1)...(19): siRNA sense strand
cugcacagccuucaacaga

SEQ ID NO: 1085898 - RNA, 19 nt, Homo sapiens
  misc_RNA (1)...(19): siRNA sense strand
ccaguguguugcagauaau

SEQ ID NO: 1085899 - RNA, 19 nt, Homo sapiens
  misc_RNA (1)...(19): siRNA sense strand
gcccaggauuucuuaugau

SEQ ID NO: 1085900 - RNA, 19 nt, Homo sapiens
  misc_RNA (1)...(19): siRNA sense strand
cugcagguauugacaaagu

SEQ ID NO: 1085901 - RNA, 19 nt, Homo sapiens
  misc_RNA (1)...(19): siRNA sense strand
gagcaccuccagccaacuu

SEQ ID NO: 1085902 - RNA, 19 nt, Homo sapiens
  misc_RNA (1)...(19): siRNA sense strand
gcaacuacacgugcaaagu

SEQ ID NO: 1085903 - RNA, 19 nt, Homo sapiens
  misc_RNA (1)...(19): siRNA sense strand
gugcugcaaugugcuguga

SEQ ID NO: 1085904 - RNA, 19 nt, Homo sapiens
  misc_RNA (1)...(19): siRNA sense strand
uauggaagcuaacagucau

SEQ ID NO: 1085905 - RNA, 19 nt, Homo sapiens
  misc_RNA (1)...(19): siRNA sense strand
guacuaggauuauacauug

SEQ ID NO: 1085906 - RNA, 19 nt, Homo sapiens
  misc_RNA (1)...(19): siRNA sense strand
gagcagaaccuuuaaauuc

SEQ ID NO: 1085907 - RNA, 19 nt, Homo sapiens
  misc_RNA (1)...(19): siRNA sense strand
ugaaagccaugaacgagua

SEQ ID NO: 1085908 - RNA, 19 nt, Homo sapiens
  misc_RNA (1)...(19): siRNA sense strand
gaacgaguauucagcucuu

SEQ ID NO: 1085909 - RNA, 19 nt, Homo sapiens
  misc_RNA (1)...(19): siRNA sense strand
agaaaucgaugaagaaaca

SEQ ID NO: 1085910 - RNA, 19 nt, Homo sapiens
  misc_RNA (1)...(19): siRNA sense strand
gaccagaccauuaauuuga

SEQ ID NO: 1085911 - RNA, 19 nt, Homo sapiens
  misc_RNA (1)...(19): siRNA sense strand
uguaagaggugacaacguu

SEQ ID NO: 1085912 - RNA, 19 nt, Homo sapiens
  misc_RNA (1)...(19): siRNA sense strand
ggagaaaucgaugaagaaa

SEQ ID NO: 1085913 - RNA, 19 nt, Homo sapiens
  misc_RNA (1)...(19): siRNA sense strand
gaacaagugguacuaggau

SEQ ID NO: 1085914 - RNA, 19 nt, Homo sapiens
  misc_RNA (1)...(19): siRNA sense strand
ugggaacacugaaagguuu

SEQ ID NO: 1085915 - RNA, 19 nt, Homo sapiens
  misc_RNA (1)...(19): siRNA sense strand
gguacuaggauuauacauu

SEQ ID NO: 1085916 - RNA, 19 nt, Homo sapiens
  misc_RNA (1)...(19): siRNA sense strand
acaagugguacuaggauua

SEQ ID NO: 1085917 - RNA, 19 nt, Homo sapiens
  misc_RNA (1)...(19): siRNA sense strand
ccagaccauuaauuugauu

SEQ ID NO: 1085918 - RNA, 19 nt, Homo sapiens
  misc_RNA (1)...(19): siRNA sense strand
gagaaugauugugggaaca

SEQ ID NO: 1085919 - RNA, 19 nt, Homo sapiens
  misc_RNA (1)...(19): siRNA sense strand
gaacuguugccguuauuac

SEQ ID NO: 1085920 - RNA, 19 nt, Homo sapiens
  misc_RNA (1)...(19): siRNA sense strand
ucagaugggagaaugauug

SEQ ID NO: 1085921 - RNA, 19 nt, Homo sapiens
  misc_RNA (1)...(19): siRNA sense strand
ggaugaaagccaugaacga

SEQ ID NO: 1085922 - RNA, 19 nt, Homo sapiens
  misc_RNA (1)...(19): siRNA sense strand
caacguugcagucauugga

SEQ ID NO: 1085923 - RNA, 19 nt, Homo sapiens
  misc_RNA (1)...(19): siRNA sense strand
uuggagaaaucgaugaaga

SEQ ID NO: 1085924 - RNA, 19 nt, Homo sapiens
  misc_RNA (1)...(19): siRNA sense strand
cgagcagaaccuuuaaauu

SEQ ID NO: 1085925 - RNA, 19 nt, Homo sapiens
  misc_RNA (1)...(19): siRNA sense strand
uauucgagcagaaccuuua

SEQ ID NO: 1085926 - RNA, 19 nt, Homo sapiens
  misc_RNA (1)...(19): siRNA sense strand
gguagaacaagugguacua

SEQ ID NO: 1085927 - RNA, 19 nt, Homo sapiens
  misc_RNA (1)...(19): siRNA sense strand
ugaccagaccauuaauuug

SEQ ID NO: 1085928 - RNA, 19 nt, Homo sapiens
  misc_RNA (1)...(19): siRNA sense strand
caagugguacuaggauuau

SEQ ID NO: 1085929 - RNA, 19 nt, Homo sapiens
  misc_RNA (1)...(19): siRNA sense strand
cuacaucaaccgaacuguu

SEQ ID NO: 1085930 - RNA, 19 nt, Homo sapiens
  misc_RNA (1)...(19): siRNA sense strand
cgaacuguugccguuauua

SEQ ID NO: 1085931 - RNA, 19 nt, Homo sapiens
  misc_RNA (1)...(19): siRNA sense strand
ccgaacuguugccguuauu

SEQ ID NO: 1085932 - RNA, 19 nt, Homo sapiens
  misc_RNA (1)...(19): siRNA sense strand
gaaagccaugaacgaguau

SEQ ID NO: 1085933 - RNA, 19 nt, Homo sapiens
  misc_RNA (1)...(19): siRNA sense strand
uugaccagaccauuaauuu

SEQ ID NO: 1085934 - RNA, 19 nt, Homo sapiens
  misc_RNA (1)...(19): siRNA sense strand
cguccgcuuuggagaacua

SEQ ID NO: 1085935 - RNA, 19 nt, Homo sapiens
  misc_RNA (1)...(19): siRNA sense strand
uggagaaaucgaugaagaa

SEQ ID NO: 1085936 - RNA, 19 nt, Homo sapiens
  misc_RNA (1)...(19): siRNA sense strand
gugggaacacugaaagguu

SEQ ID NO: 1085937 - RNA, 19 nt, Homo sapiens
  misc_RNA (1)...(19): siRNA sense strand
gaaccuuuaaauucuguag

SEQ ID NO: 1085938 - RNA, 19 nt, Homo sapiens
  misc_RNA (1)...(19): siRNA sense strand
gaacuacaucaaccgaacu

SEQ ID NO: 1085939 - RNA, 19 nt, Homo sapiens
  misc_RNA (1)...(19): siRNA sense strand
gauugugggaacacugaaa

SEQ ID NO: 1085940 - RNA, 19 nt, Homo sapiens
  misc_RNA (1)...(19): siRNA sense strand
aacaagugguacuaggauu

SEQ ID NO: 1085941 - RNA, 19 nt, Homo sapiens
  misc_RNA (1)...(19): siRNA sense strand
agaacaagugguacuagga

SEQ ID NO: 1085942 - RNA, 19 nt, Homo sapiens
  misc_RNA (1)...(19): siRNA sense strand
ucgagcagaaccuuuaaau

SEQ ID NO: 1085943 - RNA, 19 nt, Homo sapiens
  misc_RNA (1)...(19): siRNA sense strand
ugacggagcuggacaagau

SEQ ID NO: 1085944 - RNA, 19 nt, Homo sapiens
  misc_RNA (1)...(19): siRNA sense strand
ucaagaagcugaauuucca

SEQ ID NO: 1085945 - RNA, 19 nt, Homo sapiens
  misc_RNA (1)...(19): siRNA sense strand
cgagauggcuaucguguuc

SEQ ID NO: 1085946 - RNA, 19 nt, Homo sapiens
  misc_RNA (1)...(19): siRNA sense strand
ucacagaccuccugaacca

SEQ ID NO: 1085947 - RNA, 19 nt, Homo sapiens
  misc_RNA (1)...(19): siRNA sense strand
gagcucauccggaagauug

SEQ ID NO: 1085948 - RNA, 19 nt, Homo sapiens
  misc_RNA (1)...(19): siRNA sense strand
gagaagaacggcuugacuu

SEQ ID NO: 1085949 - RNA, 19 nt, Homo sapiens
  misc_RNA (1)...(19): siRNA sense strand
gaagccgaccagaaugaua

SEQ ID NO: 1085950 - RNA, 19 nt, Homo sapiens
  misc_RNA (1)...(19): siRNA sense strand
gaagauugaggccuacaug

SEQ ID NO: 1085951 - RNA, 19 nt, Homo sapiens
  misc_RNA (1)...(19): siRNA sense strand
gcaucgacaucaucaucaa

SEQ ID NO: 1085952 - RNA, 19 nt, Homo sapiens
  misc_RNA (1)...(19): siRNA sense strand
gaagaacggcuugacuuuc

SEQ ID NO: 1085953 - RNA, 19 nt, Homo sapiens
  misc_RNA (1)...(19): siRNA sense strand
ggaagagaguuggcuacug

SEQ ID NO: 1085954 - RNA, 19 nt, Homo sapiens
  misc_RNA (1)...(19): siRNA sense strand
cggcuugacuuucccauuc

SEQ ID NO: 1085955 - RNA, 19 nt, Homo sapiens
  misc_RNA (1)...(19): siRNA sense strand
ccacaacgccguccuguac

SEQ ID NO: 1085956 - RNA, 19 nt, Homo sapiens
  misc_RNA (1)...(19): siRNA sense strand
gauugaggccuacauggaa

SEQ ID NO: 1085957 - RNA, 19 nt, Homo sapiens
  misc_RNA (1)...(19): siRNA sense strand
gcuacuggcugagcgagaa

SEQ ID NO: 1085958 - RNA, 19 nt, Homo sapiens
  misc_RNA (1)...(19): siRNA sense strand
gcacugggcgugucacucu

SEQ ID NO: 1085959 - RNA, 19 nt, Homo sapiens
  misc_RNA (1)...(19): siRNA sense strand
agaagaacggcuugacuuu

SEQ ID NO: 1085960 - RNA, 19 nt, Homo sapiens
  misc_RNA (1)...(19): siRNA sense strand
ugagcgaguucuucacaga

SEQ ID NO: 1085961 - RNA, 19 nt, Homo sapiens
  misc_RNA (1)...(19): siRNA sense strand
guacaagguguucgugguu

SEQ ID NO: 1085962 - RNA, 19 nt, Homo sapiens
  misc_RNA (1)...(19): siRNA sense strand
ccaugcggcugcuggagaa

SEQ ID NO: 1085963 - RNA, 19 nt, Homo sapiens
  misc_RNA (1)...(19): siRNA sense strand
caagaucgagggcguguuc

SEQ ID NO: 1085964 - RNA, 19 nt, Homo sapiens
  misc_RNA (1)...(19): siRNA sense strand
ggcccucacucaagaacuu

SEQ ID NO: 1085965 - RNA, 19 nt, Homo sapiens
  misc_RNA (1)...(19): siRNA sense strand
gaguccaucuucuucaaca

SEQ ID NO: 1085966 - RNA, 19 nt, Homo sapiens
  misc_RNA (1)...(19): siRNA sense strand
caacagccacaacguguca

SEQ ID NO: 1085967 - RNA, 19 nt, Homo sapiens
  misc_RNA (1)...(19): siRNA sense strand
gugaguccaucuucuucaa

SEQ ID NO: 1085968 - RNA, 19 nt, Homo sapiens
  misc_RNA (1)...(19): siRNA sense strand
agaauuucaucaaccacaa

SEQ ID NO: 1085969 - RNA, 19 nt, Homo sapiens
  misc_RNA (1)...(19): siRNA sense strand
guugugcagcugaaccuua

SEQ ID NO: 1085970 - RNA, 19 nt, Homo sapiens
  misc_RNA (1)...(19): siRNA sense strand
ugaaccacaucgccacugu

SEQ ID NO: 1085971 - RNA, 19 nt, Homo sapiens
  misc_RNA (1)...(19): siRNA sense strand
ccugcgugguccagaauuu

SEQ ID NO: 1085972 - RNA, 19 nt, Homo sapiens
  misc_RNA (1)...(19): siRNA sense strand
ugacuuucccauucauuug

SEQ ID NO: 1085973 - RNA, 19 nt, Homo sapiens
  misc_RNA (1)...(19): siRNA sense strand
ggagaagaacggcuugacu

SEQ ID NO: 1085974 - RNA, 19 nt, Homo sapiens
  misc_RNA (1)...(19): siRNA sense strand
ccaaggccuccucccagua

SEQ ID NO: 1085975 - RNA, 19 nt, Homo sapiens
  misc_RNA (1)...(19): siRNA sense strand
acaacgccguccuguacaa

SEQ ID NO: 1085976 - RNA, 19 nt, Homo sapiens
  misc_RNA (1)...(19): siRNA sense strand
gguccagaauuucaucaac

SEQ ID NO: 1085977 - RNA, 19 nt, Homo sapiens
  misc_RNA (1)...(19): siRNA sense strand
gaccgugaguccaucuucu

SEQ ID NO: 1085978 - RNA, 19 nt, Homo sapiens
  misc_RNA (1)...(19): siRNA sense strand
ucgccgagcugugcaggaa

SEQ ID NO: 1085979 - RNA, 19 nt, Homo sapiens
  misc_RNA (1)...(19): siRNA sense strand
caucagaccgugaguccau

SEQ ID NO: 1085980 - RNA, 19 nt, Homo sapiens
  misc_RNA (1)...(19): siRNA sense strand
gcaggaagcgagggaugga

SEQ ID NO: 1085981 - RNA, 19 nt, Homo sapiens
  misc_RNA (1)...(19): siRNA sense strand
caaggccuccucccaguag

SEQ ID NO: 1085982 - RNA, 19 nt, Homo sapiens
  misc_RNA (1)...(19): siRNA sense strand
aagaacggcuugacuuucc

SEQ ID NO: 1085983 - RNA, 19 nt, Homo sapiens
  misc_RNA (1)...(19): siRNA sense strand
ccuugaagccgaccagaau

SEQ ID NO: 1085984 - RNA, 19 nt, Homo sapiens
  misc_RNA (1)...(19): siRNA sense strand
ggcuugacuuucccauuca

SEQ ID NO: 1085985 - RNA, 19 nt, Homo sapiens
  misc_RNA (1)...(19): siRNA sense strand
gaagcgagggauggagguu

SEQ ID NO: 1085986 - RNA, 19 nt, Homo sapiens
  misc_RNA (1)...(19): siRNA sense strand
caaagccggagucgucauc

SEQ ID NO: 1085987 - RNA, 19 nt, Homo sapiens
  misc_RNA (1)...(19): siRNA sense strand
caagcugccgcaccagaga

SEQ ID NO: 1085988 - RNA, 19 nt, Homo sapiens
  misc_RNA (1)...(19): siRNA sense strand
ggcagcacgccgucauuga

SEQ ID NO: 1085989 - RNA, 19 nt, Homo sapiens
  misc_RNA (1)...(19): siRNA sense strand
gcacagguuccaggaguac

SEQ ID NO: 1085990 - RNA, 19 nt, Homo sapiens
  misc_RNA (1)...(19): siRNA sense strand
agauggcuaucguguucaa

SEQ ID NO: 1085991 - RNA, 19 nt, Homo sapiens
  misc_RNA (1)...(19): siRNA sense strand
ggaagauugaggccuacau

SEQ ID NO: 1085992 - RNA, 19 nt, Homo sapiens
  misc_RNA (1)...(19): siRNA sense strand
caucaucaacaaccagaca

SEQ ID NO: 1085993 - RNA, 19 nt, Homo sapiens
  misc_RNA (1)...(19): siRNA sense strand
ggacgucaucauccacaag

SEQ ID NO: 1085994 - RNA, 19 nt, Homo sapiens
  misc_RNA (1)...(19): siRNA sense strand
gcucgccacccuucaugga

SEQ ID NO: 1085995 - RNA, 19 nt, Homo sapiens
  misc_RNA (1)...(19): siRNA sense strand
gcgaagggccuacucauua

SEQ ID NO: 1085996 - RNA, 19 nt, Homo sapiens
  misc_RNA (1)...(19): siRNA sense strand
gggcagagcuccagcaaga

SEQ ID NO: 1085997 - RNA, 19 nt, Homo sapiens
  misc_RNA (1)...(19): siRNA sense strand
gagaaaggacucuacauca

SEQ ID NO: 1085998 - RNA, 19 nt, Homo sapiens
  misc_RNA (1)...(19): siRNA sense strand
agaaaggacucuacaucaa

SEQ ID NO: 1085999 - RNA, 19 nt, Homo sapiens
  misc_RNA (1)...(19): siRNA sense strand
ggacgaggaugcccugaag

SEQ ID NO: 1086000 - RNA, 19 nt, Homo sapiens
  misc_RNA (1)...(19): siRNA sense strand
gaaguuccaccaagacuga

SEQ ID NO: 1086001 - RNA, 19 nt, Homo sapiens
  misc_RNA (1)...(19): siRNA sense strand
agacugagaugucggcuau

SEQ ID NO: 1086002 - RNA, 19 nt, Homo sapiens
  misc_RNA (1)...(19): siRNA sense strand
ggagaaaggacucuacauc

SEQ ID NO: 1086003 - RNA, 19 nt, Homo sapiens
  misc_RNA (1)...(19): siRNA sense strand
aagaggaacuccagcaaga

SEQ ID NO: 1086004 - RNA, 19 nt, Homo sapiens
  misc_RNA (1)...(19): siRNA sense strand
gcagagcuccagcgagauu

SEQ ID NO: 1086005 - RNA, 19 nt, Homo sapiens
  misc_RNA (1)...(19): siRNA sense strand
ggaccucaccuacuaugaa

SEQ ID NO: 1086006 - RNA, 19 nt, Homo sapiens
  misc_RNA (1)...(19): siRNA sense strand
ggacccagcccaagucuca

SEQ ID NO: 1086007 - RNA, 19 nt, Homo sapiens
  misc_RNA (1)...(19): siRNA sense strand
ccaggaugcugcuccagaa

SEQ ID NO: 1086008 - RNA, 19 nt, Homo sapiens
  misc_RNA (1)...(19): siRNA sense strand
gggccagacucuacaacuu

SEQ ID NO: 1086009 - RNA, 19 nt, Homo sapiens
  misc_RNA (1)...(19): siRNA sense strand
ccaccaagacugaggcuuu

SEQ ID NO: 1086010 - RNA, 19 nt, Homo sapiens
  misc_RNA (1)...(19): siRNA sense strand
ggcaugagcucaacuucca

SEQ ID NO: 1086011 - RNA, 19 nt, Homo sapiens
  misc_RNA (1)...(19): siRNA sense strand
gaaaggacucuacaucaac

SEQ ID NO: 1086012 - RNA, 19 nt, Homo sapiens
  misc_RNA (1)...(19): siRNA sense strand
ccaaagccaugggugauuc

SEQ ID NO: 1086013 - RNA, 19 nt, Homo sapiens
  misc_RNA (1)...(19): siRNA sense strand
gaacaacagggaggcacua

SEQ ID NO: 1086014 - RNA, 19 nt, Homo sapiens
  misc_RNA (1)...(19): siRNA sense strand
ggccagacucuacaacuuu

SEQ ID NO: 1086015 - RNA, 19 nt, Homo sapiens
  misc_RNA (1)...(19): siRNA sense strand
ggaugcugcuccagaagau

SEQ ID NO: 1086016 - RNA, 19 nt, Homo sapiens
  misc_RNA (1)...(19): siRNA sense strand
cgaagggccuacucauuac

SEQ ID NO: 1086017 - RNA, 19 nt, Homo sapiens
  misc_RNA (1)...(19): siRNA sense strand
gcaagaccaaggccacuau

SEQ ID NO: 1086018 - RNA, 19 nt, Homo sapiens
  misc_RNA (1)...(19): siRNA sense strand
gaccucaccuacuaugaag

SEQ ID NO: 1086019 - RNA, 19 nt, Homo sapiens
  misc_RNA (1)...(19): siRNA sense strand
ccgaggcgauugcuucuuc

SEQ ID NO: 1086020 - RNA, 19 nt, Homo sapiens
  misc_RNA (1)...(19): siRNA sense strand
aggcggaacuccagcaaga

SEQ ID NO: 1086021 - RNA, 19 nt, Homo sapiens
  misc_RNA (1)...(19): siRNA sense strand
aggcggaacuccagcaaga

SEQ ID NO: 1086022 - RNA, 19 nt, Homo sapiens
  misc_RNA (1)...(19): siRNA sense strand
ccaaaggucacaggguuaa

SEQ ID NO: 1086023 - RNA, 19 nt, Homo sapiens
  misc_RNA (1)...(19): siRNA sense strand
cuacagggacaaugccuuu

SEQ ID NO: 1086024 - RNA, 19 nt, Homo sapiens
  misc_RNA (1)...(19): siRNA sense strand
caaggcagaggcccagaaa

SEQ ID NO: 1086025 - RNA, 19 nt, Homo sapiens
  misc_RNA (1)...(19): siRNA sense strand
gauccugcagcacaucuuu

SEQ ID NO: 1086026 - RNA, 19 nt, Homo sapiens
  misc_RNA (1)...(19): siRNA sense strand
ggcaagagccagggcauga

SEQ ID NO: 1086027 - RNA, 19 nt, Homo sapiens
  misc_RNA (1)...(19): siRNA sense strand
caaggccacuauacacaag

SEQ ID NO: 1086028 - RNA, 19 nt, Homo sapiens
  misc_RNA (1)...(19): siRNA sense strand
caagaccaaggccacuaua

SEQ ID NO: 1086029 - RNA, 19 nt, Homo sapiens
  misc_RNA (1)...(19): siRNA sense strand
gggacgagcagcaggagaa

SEQ ID NO: 1086030 - RNA, 19 nt, Homo sapiens
  misc_RNA (1)...(19): siRNA sense strand
ugaaggugcuggacauggu

SEQ ID NO: 1086031 - RNA, 19 nt, Homo sapiens
  misc_RNA (1)...(19): siRNA sense strand
gccagacucuacaacuuuc

SEQ ID NO: 1086032 - RNA, 19 nt, Homo sapiens
  misc_RNA (1)...(19): siRNA sense strand
gcagugugccuuccuggau

SEQ ID NO: 1086033 - RNA, 19 nt, Homo sapiens
  misc_RNA (1)...(19): siRNA sense strand
ccacuguccugcuccucaa

SEQ ID NO: 1086034 - RNA, 19 nt, Homo sapiens
  misc_RNA (1)...(19): siRNA sense strand
gguggacuucuaugccuua

SEQ ID NO: 1086035 - RNA, 19 nt, Homo sapiens
  misc_RNA (1)...(19): siRNA sense strand
aucaggaccucaccuacua

SEQ ID NO: 1086036 - RNA, 19 nt, Homo sapiens
  misc_RNA (1)...(19): siRNA sense strand
ggacugcuccgaaguucca

SEQ ID NO: 1086037 - RNA, 19 nt, Homo sapiens
  misc_RNA (1)...(19): siRNA sense strand
ucaaagucagggaauacua

SEQ ID NO: 1086038 - RNA, 19 nt, Homo sapiens
  misc_RNA (1)...(19): siRNA sense strand
cagcccaagucucagcaaa

SEQ ID NO: 1086039 - RNA, 19 nt, Homo sapiens
  misc_RNA (1)...(19): siRNA sense strand
aggaugcccugaagguuga

SEQ ID NO: 1086040 - RNA, 19 nt, Homo sapiens
  misc_RNA (1)...(19): siRNA sense strand
gaaaccaugcuuccguuac

SEQ ID NO: 1086041 - RNA, 19 nt, Homo sapiens
  misc_RNA (1)...(19): siRNA sense strand
cccagaaggcccaguacua

SEQ ID NO: 1086042 - RNA, 19 nt, Homo sapiens
  misc_RNA (1)...(19): siRNA sense strand
gaucaggaccucaccuacu

SEQ ID NO: 1086043 - RNA, 19 nt, Homo sapiens
  misc_RNA (1)...(19): siRNA sense strand
gcugaugaccaaccucuuc

SEQ ID NO: 1086044 - RNA, 19 nt, Homo sapiens
  misc_RNA (1)...(19): siRNA sense strand
ggacgagcagcaggagaaa

SEQ ID NO: 1086045 - RNA, 19 nt, Homo sapiens
  misc_RNA (1)...(19): siRNA sense strand
caccaagacugaggcuuuc

SEQ ID NO: 1086046 - RNA, 19 nt, Homo sapiens
  misc_RNA (1)...(19): siRNA sense strand
ccacuauacacaagaggaa

SEQ ID NO: 1086047 - RNA, 19 nt, Homo sapiens
  misc_RNA (1)...(19): siRNA sense strand
ccaaggccacuauacacaa

SEQ ID NO: 1086048 - RNA, 19 nt, Homo sapiens
  misc_RNA (1)...(19): siRNA sense strand
caacagggaggcacuaagc

SEQ ID NO: 1086049 - RNA, 19 nt, Homo sapiens
  misc_RNA (1)...(19): siRNA sense strand
caaagucagggaauacuac

SEQ ID NO: 1086050 - RNA, 19 nt, Homo sapiens
  misc_RNA (1)...(19): siRNA sense strand
gcagagccuuagcaagacu

SEQ ID NO: 1086051 - RNA, 19 nt, Homo sapiens
  misc_RNA (1)...(19): siRNA sense strand
caccaacgccgaugucuac

SEQ ID NO: 1086052 - RNA, 19 nt, Homo sapiens
  misc_RNA (1)...(19): siRNA sense strand
ggagacccagcaagguuga

SEQ ID NO: 1086053 - RNA, 19 nt, Homo sapiens
  misc_RNA (1)...(19): siRNA sense strand
uggaugcccugaaugucuu

SEQ ID NO: 1086054 - RNA, 19 nt, Homo sapiens
  misc_RNA (1)...(19): siRNA sense strand
gagcccagcaagaccaaga

SEQ ID NO: 1086055 - RNA, 19 nt, Homo sapiens
  misc_RNA (1)...(19): siRNA sense strand
gcagagcuccagcaagacu

SEQ ID NO: 1086056 - RNA, 19 nt, Homo sapiens
  misc_RNA (1)...(19): siRNA sense strand
caagguggcgucccugucu

SEQ ID NO: 1086057 - RNA, 19 nt, Homo sapiens
  misc_RNA (1)...(19): siRNA sense strand
ccaccaacgccgaugucua

SEQ ID NO: 1086058 - RNA, 19 nt, Homo sapiens
  misc_RNA (1)...(19): siRNA sense strand
gcugaccuacaacgacuuu

SEQ ID NO: 1086059 - RNA, 19 nt, Homo sapiens
  misc_RNA (1)...(19): siRNA sense strand
caaacuggagccucagcaa

SEQ ID NO: 1086060 - RNA, 19 nt, Homo sapiens
  misc_RNA (1)...(19): siRNA sense strand
ccagaaggcccaguacuac

SEQ ID NO: 1086061 - RNA, 19 nt, Homo sapiens
  misc_RNA (1)...(19): siRNA sense strand
gcgugcugcugcugaacaa

SEQ ID NO: 1086062 - RNA, 19 nt, Homo sapiens
  misc_RNA (1)...(19): siRNA sense strand
agaaaccaugcuuccguua

SEQ ID NO: 1086063 - RNA, 19 nt, Homo sapiens
  misc_RNA (1)...(19): siRNA sense strand
ggaccacaggcaccucaga

SEQ ID NO: 1086064 - RNA, 19 nt, Homo sapiens
  misc_RNA (1)...(19): siRNA sense strand
gcgccuugcuguugaaucc

SEQ ID NO: 1086065 - RNA, 19 nt, Homo sapiens
  misc_RNA (1)...(19): siRNA sense strand
gaagggccuacucauuaca

SEQ ID NO: 1086066 - RNA, 19 nt, Homo sapiens
  misc_RNA (1)...(19): siRNA sense strand
cuacuaugaagcugucuga

SEQ ID NO: 1086067 - RNA, 19 nt, Homo sapiens
  misc_RNA (1)...(19): siRNA sense strand
cuccgaaguuccaccaaga

SEQ ID NO: 1086068 - RNA, 19 nt, Homo sapiens
  misc_RNA (1)...(19): siRNA sense strand
ggaacuccagcaagaccaa

SEQ ID NO: 1086069 - RNA, 19 nt, Homo sapiens
  misc_RNA (1)...(19): siRNA sense strand
ggaacuccagcaagaccaa

SEQ ID NO: 1086070 - RNA, 19 nt, Homo sapiens
  misc_RNA (1)...(19): siRNA sense strand
ucagagcucauaccuagca

SEQ ID NO: 1086071 - RNA, 19 nt, Homo sapiens
  misc_RNA (1)...(19): siRNA sense strand
gaccaaggccacccaaagc

SEQ ID NO: 1086072 - RNA, 19 nt, Homo sapiens
  misc_RNA (1)...(19): siRNA sense strand
agaccaaggccacuauaca

SEQ ID NO: 1086073 - RNA, 19 nt, Homo sapiens
  misc_RNA (1)...(19): siRNA sense strand
gccucacgcucaucaccaa

SEQ ID NO: 1086074 - RNA, 19 nt, Homo sapiens
  misc_RNA (1)...(19): siRNA sense strand
gcaaaacugagguugauca

SEQ ID NO: 1086075 - RNA, 19 nt, Homo sapiens
  misc_RNA (1)...(19): siRNA sense strand
cagcaaaacugagguugau

SEQ ID NO: 1086076 - RNA, 19 nt, Homo sapiens
  misc_RNA (1)...(19): siRNA sense strand
cacagcugguggacuucua

SEQ ID NO: 1086077 - RNA, 19 nt, Homo sapiens
  misc_RNA (1)...(19): siRNA sense strand
gaccaaggccacuauacac

SEQ ID NO: 1086078 - RNA, 19 nt, Homo sapiens
  misc_RNA (1)...(19): siRNA sense strand
gccgugacauucucugacu

SEQ ID NO: 1086079 - RNA, 19 nt, Homo sapiens
  misc_RNA (1)...(19): siRNA sense strand
gaaggccaccccugagauu

SEQ ID NO: 1086080 - RNA, 19 nt, Homo sapiens
  misc_RNA (1)...(19): siRNA sense strand
gcaggagaaaggacucuac

SEQ ID NO: 1086081 - RNA, 19 nt, Homo sapiens
  misc_RNA (1)...(19): siRNA sense strand
caaggcaggagcccagcaa

SEQ ID NO: 1086082 - RNA, 19 nt, Homo sapiens
  misc_RNA (1)...(19): siRNA sense strand
gcaggcagacugggagaca

SEQ ID NO: 1086083 - RNA, 19 nt, Homo sapiens
  misc_RNA (1)...(19): siRNA sense strand
ccagccacguguuccaaag

SEQ ID NO: 1086084 - RNA, 19 nt, Homo sapiens
  misc_RNA (1)...(19): siRNA sense strand
uggagcgccucaccuuugu

SEQ ID NO: 1086085 - RNA, 19 nt, Homo sapiens
  misc_RNA (1)...(19): siRNA sense strand
ggcgcaagcaguuccagaa

SEQ ID NO: 1086086 - RNA, 19 nt, Homo sapiens
  misc_RNA (1)...(19): siRNA sense strand
ugaagcaggacaccaccaa

SEQ ID NO: 1086087 - RNA, 19 nt, Homo sapiens
  misc_RNA (1)...(19): siRNA sense strand
ucggcuaucugccaggaau

SEQ ID NO: 1086088 - RNA, 19 nt, Homo sapiens
  misc_RNA (1)...(19): siRNA sense strand
cauuacagcaggacaacug

SEQ ID NO: 1086089 - RNA, 19 nt, Homo sapiens
  misc_RNA (1)...(19): siRNA sense strand
cggcagcccacaaggcauu

SEQ ID NO: 1086090 - RNA, 19 nt, Homo sapiens
  misc_RNA (1)...(19): siRNA sense strand
uaacagugccccucaaagu

SEQ ID NO: 1086091 - RNA, 19 nt, Homo sapiens
  misc_RNA (1)...(19): siRNA sense strand
ccaaggcagaggcccagaa

SEQ ID NO: 1086092 - RNA, 19 nt, Homo sapiens
  misc_RNA (1)...(19): siRNA sense strand
cgaaacagcucaucacuga

SEQ ID NO: 1086093 - RNA, 19 nt, Homo sapiens
  misc_RNA (1)...(19): siRNA sense strand
ggacuuggcacauuucuuu

SEQ ID NO: 1086094 - RNA, 19 nt, Homo sapiens
  misc_RNA (1)...(19): siRNA sense strand
caaagagucugguuacuuc

SEQ ID NO: 1086095 - RNA, 19 nt, Homo sapiens
  misc_RNA (1)...(19): siRNA sense strand
gaaaggaauuuaugaugag

SEQ ID NO: 1086096 - RNA, 19 nt, Homo sapiens
  misc_RNA (1)...(19): siRNA sense strand
guacaacugugaagccaaa

SEQ ID NO: 1086097 - RNA, 19 nt, Homo sapiens
  misc_RNA (1)...(19): siRNA sense strand
uaacauuccuccuagaaga

SEQ ID NO: 1086098 - RNA, 19 nt, Homo sapiens
  misc_RNA (1)...(19): siRNA sense strand
cagaagcugugucaucuuu

SEQ ID NO: 1086099 - RNA, 19 nt, Homo sapiens
  misc_RNA (1)...(19): siRNA sense strand
cgagcagucuugauugaua

SEQ ID NO: 1086100 - RNA, 19 nt, Homo sapiens
  misc_RNA (1)...(19): siRNA sense strand
gaagcugugucaucuuuau

SEQ ID NO: 1086101 - RNA, 19 nt, Homo sapiens
  misc_RNA (1)...(19): siRNA sense strand
ugaauaacauuguggcaaa

SEQ ID NO: 1086102 - RNA, 19 nt, Homo sapiens
  misc_RNA (1)...(19): siRNA sense strand
gaucuggacuuggcacauu

SEQ ID NO: 1086103 - RNA, 19 nt, Homo sapiens
  misc_RNA (1)...(19): siRNA sense strand
guacaaauuucagaucuuc

SEQ ID NO: 1086104 - RNA, 19 nt, Homo sapiens
  misc_RNA (1)...(19): siRNA sense strand
ggugaauucuggaaaguug

SEQ ID NO: 1086105 - RNA, 19 nt, Homo sapiens
  misc_RNA (1)...(19): siRNA sense strand
ucaugaggcucuacaagaa

SEQ ID NO: 1086106 - RNA, 19 nt, Homo sapiens
  misc_RNA (1)...(19): siRNA sense strand
ggaacaggaucuggacuug

SEQ ID NO: 1086107 - RNA, 19 nt, Homo sapiens
  misc_RNA (1)...(19): siRNA sense strand
gggccauucucauucguua

SEQ ID NO: 1086108 - RNA, 19 nt, Homo sapiens
  misc_RNA (1)...(19): siRNA sense strand
gcaugaauuuaguuccuuu

SEQ ID NO: 1086109 - RNA, 19 nt, Homo sapiens
  misc_RNA (1)...(19): siRNA sense strand
gaagacgaauucccagaag

SEQ ID NO: 1086110 - RNA, 19 nt, Homo sapiens
  misc_RNA (1)...(19): siRNA sense strand
gaaguauacagauuuguga

SEQ ID NO: 1086111 - RNA, 19 nt, Homo sapiens
  misc_RNA (1)...(19): siRNA sense strand
ccagaaguauacagauuug

SEQ ID NO: 1086112 - RNA, 19 nt, Homo sapiens
  misc_RNA (1)...(19): siRNA sense strand
gagcagucuugauugauau

SEQ ID NO: 1086113 - RNA, 19 nt, Homo sapiens
  misc_RNA (1)...(19): siRNA sense strand
gcaaugaaggaacuuaaug

SEQ ID NO: 1086114 - RNA, 19 nt, Homo sapiens
  misc_RNA (1)...(19): siRNA sense strand
gcaugcagacuguguauug

SEQ ID NO: 1086115 - RNA, 19 nt, Homo sapiens
  misc_RNA (1)...(19): siRNA sense strand
gaucagauguuuucagaug

SEQ ID NO: 1086116 - RNA, 19 nt, Homo sapiens
  misc_RNA (1)...(19): siRNA sense strand
gaucuucguagaaauauug

SEQ ID NO: 1086117 - RNA, 19 nt, Homo sapiens
  misc_RNA (1)...(19): siRNA sense strand
gauuugugacuuccauuua

SEQ ID NO: 1086118 - RNA, 19 nt, Homo sapiens
  misc_RNA (1)...(19): siRNA sense strand
caauuugucuccuggaauc

SEQ ID NO: 1086119 - RNA, 19 nt, Homo sapiens
  misc_RNA (1)...(19): siRNA sense strand
ucagaucuucguagaaaua

SEQ ID NO: 1086120 - RNA, 19 nt, Homo sapiens
  misc_RNA (1)...(19): siRNA sense strand
gaagauuggaucagauguu

SEQ ID NO: 1086121 - RNA, 19 nt, Homo sapiens
  misc_RNA (1)...(19): siRNA sense strand
uaacaccucuguauacacu

SEQ ID NO: 1086122 - RNA, 19 nt, Homo sapiens
  misc_RNA (1)...(19): siRNA sense strand
ggccgugggucacaaaguu

SEQ ID NO: 1086123 - RNA, 19 nt, Homo sapiens
  misc_RNA (1)...(19): siRNA sense strand
uaaccucaccuuauaauag

SEQ ID NO: 1086124 - RNA, 19 nt, Homo sapiens
  misc_RNA (1)...(19): siRNA sense strand
gaauaacauuguggcaaau

SEQ ID NO: 1086125 - RNA, 19 nt, Homo sapiens
  misc_RNA (1)...(19): siRNA sense strand
gaaggaacuuaaugagcau

SEQ ID NO: 1086126 - RNA, 19 nt, Homo sapiens
  misc_RNA (1)...(19): siRNA sense strand
aauagcaucuuggcaauga

SEQ ID NO: 1086127 - RNA, 19 nt, Homo sapiens
  misc_RNA (1)...(19): siRNA sense strand
aagauuggaucagauguuu

SEQ ID NO: 1086128 - RNA, 19 nt, Homo sapiens
  misc_RNA (1)...(19): siRNA sense strand
aacgagcucugcaagauuu

SEQ ID NO: 1086129 - RNA, 19 nt, Homo sapiens
  misc_RNA (1)...(19): siRNA sense strand
caaugaaggaacuuaauga

SEQ ID NO: 1086130 - RNA, 19 nt, Homo sapiens
  misc_RNA (1)...(19): siRNA sense strand
gugauugcuugcaguguuu

SEQ ID NO: 1086131 - RNA, 19 nt, Homo sapiens
  misc_RNA (1)...(19): siRNA sense strand
caaauuugcuccucaaccu

SEQ ID NO: 1086132 - RNA, 19 nt, Homo sapiens
  misc_RNA (1)...(19): siRNA sense strand
gcacgagcagucuugauug

SEQ ID NO: 1086133 - RNA, 19 nt, Homo sapiens
  misc_RNA (1)...(19): siRNA sense strand
ggugaugguggaaguauuu

SEQ ID NO: 1086134 - RNA, 19 nt, Homo sapiens
  misc_RNA (1)...(19): siRNA sense strand
cauaagaagcccuuugaug

SEQ ID NO: 1086135 - RNA, 19 nt, Homo sapiens
  misc_RNA (1)...(19): siRNA sense strand
guauacagauuugugacuu

SEQ ID NO: 1086136 - RNA, 19 nt, Homo sapiens
  misc_RNA (1)...(19): siRNA sense strand
ccuagaagauuggaucaga

SEQ ID NO: 1086137 - RNA, 19 nt, Homo sapiens
  misc_RNA (1)...(19): siRNA sense strand
cuaacgagcucugcaagau

SEQ ID NO: 1086138 - RNA, 19 nt, Homo sapiens
  misc_RNA (1)...(19): siRNA sense strand
agacgaauucccagaagua

SEQ ID NO: 1086139 - RNA, 19 nt, Homo sapiens
  misc_RNA (1)...(19): siRNA sense strand
gcacucaugguuagaggaa

SEQ ID NO: 1086140 - RNA, 19 nt, Homo sapiens
  misc_RNA (1)...(19): siRNA sense strand
uguauacacugacagaugu

SEQ ID NO: 1086141 - RNA, 19 nt, Homo sapiens
  misc_RNA (1)...(19): siRNA sense strand
cagaaaggaauuuaugaug

SEQ ID NO: 1086142 - RNA, 19 nt, Homo sapiens
  misc_RNA (1)...(19): siRNA sense strand
ccaaagagucugguuacuu

SEQ ID NO: 1086143 - RNA, 19 nt, Homo sapiens
  misc_RNA (1)...(19): siRNA sense strand
cacgagcagucuugauuga

SEQ ID NO: 1086144 - RNA, 19 nt, Homo sapiens
  misc_RNA (1)...(19): siRNA sense strand
acugagagauguauuugau

SEQ ID NO: 1086145 - RNA, 19 nt, Homo sapiens
  misc_RNA (1)...(19): siRNA sense strand
cagcacucauacaggaaua

SEQ ID NO: 1086146 - RNA, 19 nt, Homo sapiens
  misc_RNA (1)...(19): siRNA sense strand
gaauuuaugaugaggcaau

SEQ ID NO: 1086147 - RNA, 19 nt, Homo sapiens
  misc_RNA (1)...(19): siRNA sense strand
uuucagaugccuuuaguaa

SEQ ID NO: 1086148 - RNA, 19 nt, Homo sapiens
  misc_RNA (1)...(19): siRNA sense strand
gaagcccuuugaugcaaug

SEQ ID NO: 1086149 - RNA, 19 nt, Homo sapiens
  misc_RNA (1)...(19): siRNA sense strand
ucccagaaguauacagauu

SEQ ID NO: 1086150 - RNA, 19 nt, Homo sapiens
  misc_RNA (1)...(19): siRNA sense strand
acaggaauaugaccaacug

SEQ ID NO: 1086151 - RNA, 19 nt, Homo sapiens
  misc_RNA (1)...(19): siRNA sense strand
ccauucucauucguuauua

SEQ ID NO: 1086152 - RNA, 19 nt, Homo sapiens
  misc_RNA (1)...(19): siRNA sense strand
uaacauuguggcaaauuug

SEQ ID NO: 1086153 - RNA, 19 nt, Homo sapiens
  misc_RNA (1)...(19): siRNA sense strand
aaaucgaccucauggugaa

SEQ ID NO: 1086154 - RNA, 19 nt, Homo sapiens
  misc_RNA (1)...(19): siRNA sense strand
gacuguguauugcccauug

SEQ ID NO: 1086155 - RNA, 19 nt, Homo sapiens
  misc_RNA (1)...(19): siRNA sense strand
aggcucaccuucaucacua

SEQ ID NO: 1086156 - RNA, 19 nt, Homo sapiens
  misc_RNA (1)...(19): siRNA sense strand
uaucucgugucaagccuaa

SEQ ID NO: 1086157 - RNA, 19 nt, Homo sapiens
  misc_RNA (1)...(19): siRNA sense strand
uaaugagcaugcagacugu

SEQ ID NO: 1086158 - RNA, 19 nt, Homo sapiens
  misc_RNA (1)...(19): siRNA sense strand
gcccuuugaugcaaugaau

SEQ ID NO: 1086159 - RNA, 19 nt, Homo sapiens
  misc_RNA (1)...(19): siRNA sense strand
aaaggugcuugaagacgaa

SEQ ID NO: 1086160 - RNA, 19 nt, Homo sapiens
  misc_RNA (1)...(19): siRNA sense strand
ggaagaccagccuguguuc

SEQ ID NO: 1086161 - RNA, 19 nt, Homo sapiens
  misc_RNA (1)...(19): siRNA sense strand
gaaauguggacaccagagu

SEQ ID NO: 1086162 - RNA, 19 nt, Homo sapiens
  misc_RNA (1)...(19): siRNA sense strand
uaacgagcucugcaagauu

SEQ ID NO: 1086163 - RNA, 19 nt, Homo sapiens
  misc_RNA (1)...(19): siRNA sense strand
cgaauucccagaaguauac

SEQ ID NO: 1086164 - RNA, 19 nt, Homo sapiens
  misc_RNA (1)...(19): siRNA sense strand
uaagaagcccuuugaugca

SEQ ID NO: 1086165 - RNA, 19 nt, Homo sapiens
  misc_RNA (1)...(19): siRNA sense strand
gccauucucauucguuauu

SEQ ID NO: 1086166 - RNA, 19 nt, Homo sapiens
  misc_RNA (1)...(19): siRNA sense strand
caaccagaaaggaauuuau

SEQ ID NO: 1086167 - RNA, 19 nt, Homo sapiens
  misc_RNA (1)...(19): siRNA sense strand
ccuaacaccucuguauaca

SEQ ID NO: 1086168 - RNA, 19 nt, Homo sapiens
  misc_RNA (1)...(19): siRNA sense strand
ucaccuucaucacuaucua

SEQ ID NO: 1086169 - RNA, 19 nt, Homo sapiens
  misc_RNA (1)...(19): siRNA sense strand
ucaucacuaucuacaaguu

SEQ ID NO: 1086170 - RNA, 19 nt, Homo sapiens
  misc_RNA (1)...(19): siRNA sense strand
cggcagagcacugugauug

SEQ ID NO: 1086171 - RNA, 19 nt, Homo sapiens
  misc_RNA (1)...(19): siRNA sense strand
ccagaaaggaauuuaugau

SEQ ID NO: 1086172 - RNA, 19 nt, Homo sapiens
  misc_RNA (1)...(19): siRNA sense strand
caaauuucagaucuucgua

SEQ ID NO: 1086173 - RNA, 19 nt, Homo sapiens
  misc_RNA (1)...(19): siRNA sense strand
guuaacauuccuccuagaa

SEQ ID NO: 1086174 - RNA, 19 nt, Homo sapiens
  misc_RNA (1)...(19): siRNA sense strand
aagaagcccuuugaugcaa

SEQ ID NO: 1086175 - RNA, 19 nt, Homo sapiens
  misc_RNA (1)...(19): siRNA sense strand
gagcaugcagacuguguau

SEQ ID NO: 1086176 - RNA, 19 nt, Homo sapiens
  misc_RNA (1)...(19): siRNA sense strand
ugugauugcuugcaguguu

SEQ ID NO: 1086177 - RNA, 19 nt, Homo sapiens
  misc_RNA (1)...(19): siRNA sense strand
cuugcaguguuucuuuaua

SEQ ID NO: 1086178 - RNA, 19 nt, Homo sapiens
  misc_RNA (1)...(19): siRNA sense strand
acaccucuguauacacuga

SEQ ID NO: 1086179 - RNA, 19 nt, Homo sapiens
  misc_RNA (1)...(19): siRNA sense strand
gauacgaaacagcucauca

SEQ ID NO: 1086180 - RNA, 19 nt, Homo sapiens
  misc_RNA (1)...(19): siRNA sense strand
ugaagacgaauucccagaa

SEQ ID NO: 1086181 - RNA, 19 nt, Homo sapiens
  misc_RNA (1)...(19): siRNA sense strand
ggucaaccagaaaggaauu

SEQ ID NO: 1086182 - RNA, 19 nt, Homo sapiens
  misc_RNA (1)...(19): siRNA sense strand
ccacugagagauguauuug

SEQ ID NO: 1086183 - RNA, 19 nt, Homo sapiens
  misc_RNA (1)...(19): siRNA sense strand
cuagaagauuggaucagau

SEQ ID NO: 1086184 - RNA, 19 nt, Homo sapiens
  misc_RNA (1)...(19): siRNA sense strand
caggauuuacccagacuaa

SEQ ID NO: 1086185 - RNA, 19 nt, Homo sapiens
  misc_RNA (1)...(19): siRNA sense strand
cuucaucacuaucuacaag

SEQ ID NO: 1086186 - RNA, 19 nt, Homo sapiens
  misc_RNA (1)...(19): siRNA sense strand
auaauagcaucuuggcaau

SEQ ID NO: 1086187 - RNA, 19 nt, Homo sapiens
  misc_RNA (1)...(19): siRNA sense strand
cagaucggcugcugcuucu

SEQ ID NO: 1086188 - RNA, 19 nt, Homo sapiens
  misc_RNA (1)...(19): siRNA sense strand
cauggugaauucuggaaag

SEQ ID NO: 1086189 - RNA, 19 nt, Homo sapiens
  misc_RNA (1)...(19): siRNA sense strand
ccuuugaugcaaugaauaa

SEQ ID NO: 1086190 - RNA, 19 nt, Homo sapiens
  misc_RNA (1)...(19): siRNA sense strand
uugaagggauggaagaaag

SEQ ID NO: 1086191 - RNA, 19 nt, Homo sapiens
  misc_RNA (1)...(19): siRNA sense strand
gguuagaggaaauguacaa

SEQ ID NO: 1086192 - RNA, 19 nt, Homo sapiens
  misc_RNA (1)...(19): siRNA sense strand
gaagcacucucacuuauua

SEQ ID NO: 1086193 - RNA, 19 nt, Homo sapiens
  misc_RNA (1)...(19): siRNA sense strand
gcaaagaccuacccagaua

SEQ ID NO: 1086194 - RNA, 19 nt, Homo sapiens
  misc_RNA (1)...(19): siRNA sense strand
gagggaagauuguuguuua

SEQ ID NO: 1086195 - RNA, 19 nt, Homo sapiens
  misc_RNA (1)...(19): siRNA sense strand
gaaaugaugucaagaaugg

SEQ ID NO: 1086196 - RNA, 19 nt, Homo sapiens
  misc_RNA (1)...(19): siRNA sense strand
gccaagaauucauaagaua

SEQ ID NO: 1086197 - RNA, 19 nt, Homo sapiens
  misc_RNA (1)...(19): siRNA sense strand
gcaagaauggcaucucuaa

SEQ ID NO: 1086198 - RNA, 19 nt, Homo sapiens
  misc_RNA (1)...(19): siRNA sense strand
caaccuagcuguuuauggu

SEQ ID NO: 1086199 - RNA, 19 nt, Homo sapiens
  misc_RNA (1)...(19): siRNA sense strand
gguggaagaugcagaaaug

SEQ ID NO: 1086200 - RNA, 19 nt, Homo sapiens
  misc_RNA (1)...(19): siRNA sense strand
gguggaagcugccaagguu

SEQ ID NO: 1086201 - RNA, 19 nt, Homo sapiens
  misc_RNA (1)...(19): siRNA sense strand
ggaaagcuauaugcaagaa

SEQ ID NO: 1086202 - RNA, 19 nt, Homo sapiens
  misc_RNA (1)...(19): siRNA sense strand
ggacagacaucaacuuuug

SEQ ID NO: 1086203 - RNA, 19 nt, Homo sapiens
  misc_RNA (1)...(19): siRNA sense strand
gggaagcacucucacuuau

SEQ ID NO: 1086204 - RNA, 19 nt, Homo sapiens
  misc_RNA (1)...(19): siRNA sense strand
gcagaaaugaugucaagaa

SEQ ID NO: 1086205 - RNA, 19 nt, Homo sapiens
  misc_RNA (1)...(19): siRNA sense strand
ggagaagaaucagcuguga

SEQ ID NO: 1086206 - RNA, 19 nt, Homo sapiens
  misc_RNA (1)...(19): siRNA sense strand
gagcaaauauccagaacag

SEQ ID NO: 1086207 - RNA, 19 nt, Homo sapiens
  misc_RNA (1)...(19): siRNA sense strand
gaauguugcugcugcuguu

SEQ ID NO: 1086208 - RNA, 19 nt, Homo sapiens
  misc_RNA (1)...(19): siRNA sense strand
gaagcaagagggaagauug

SEQ ID NO: 1086209 - RNA, 19 nt, Homo sapiens
  misc_RNA (1)...(19): siRNA sense strand
gaagaaaugcugccuaggu

SEQ ID NO: 1086210 - RNA, 19 nt, Homo sapiens
  misc_RNA (1)...(19): siRNA sense strand
gagccagucuacuugauga

SEQ ID NO: 1086211 - RNA, 19 nt, Homo sapiens
  misc_RNA (1)...(19): siRNA sense strand
ucacacagguauucaggaa

SEQ ID NO: 1086212 - RNA, 19 nt, Homo sapiens
  misc_RNA (1)...(19): siRNA sense strand
uaaccaaccuuacaucaac

SEQ ID NO: 1086213 - RNA, 19 nt, Homo sapiens
  misc_RNA (1)...(19): siRNA sense strand
gagaagggccucagaagca

SEQ ID NO: 1086214 - RNA, 19 nt, Homo sapiens
  misc_RNA (1)...(19): siRNA sense strand
cagaaaugaugucaagaau

SEQ ID NO: 1086215 - RNA, 19 nt, Homo sapiens
  misc_RNA (1)...(19): siRNA sense strand
ucaucaaccuagcuguuua

SEQ ID NO: 1086216 - RNA, 19 nt, Homo sapiens
  misc_RNA (1)...(19): siRNA sense strand
gagccaagaauucauaaga

SEQ ID NO: 1086217 - RNA, 19 nt, Homo sapiens
  misc_RNA (1)...(19): siRNA sense strand
gauuggcacuucugguuga

SEQ ID NO: 1086218 - RNA, 19 nt, Homo sapiens
  misc_RNA (1)...(19): siRNA sense strand
uaagaggacuuuugaagaa

SEQ ID NO: 1086219 - RNA, 19 nt, Homo sapiens
  misc_RNA (1)...(19): siRNA sense strand
ggaagaugcagaaaugaug

SEQ ID NO: 1086220 - RNA, 19 nt, Homo sapiens
  misc_RNA (1)...(19): siRNA sense strand
ggugaccucuuucgaugaa

SEQ ID NO: 1086221 - RNA, 19 nt, Homo sapiens
  misc_RNA (1)...(19): siRNA sense strand
aaagcuauaugcaagaaug

SEQ ID NO: 1086222 - RNA, 19 nt, Homo sapiens
  misc_RNA (1)...(19): siRNA sense strand
ggaagcacucucacuuauu

SEQ ID NO: 1086223 - RNA, 19 nt, Homo sapiens
  misc_RNA (1)...(19): siRNA sense strand
cuuccaguauuaucaguua

SEQ ID NO: 1086224 - RNA, 19 nt, Homo sapiens
  misc_RNA (1)...(19): siRNA sense strand
caacuacagucuggugaug

SEQ ID NO: 1086225 - RNA, 19 nt, Homo sapiens
  misc_RNA (1)...(19): siRNA sense strand
aagaugggcuggagaaagu

SEQ ID NO: 1086226 - RNA, 19 nt, Homo sapiens
  misc_RNA (1)...(19): siRNA sense strand
gcuguuguuucuuauguug

SEQ ID NO: 1086227 - RNA, 19 nt, Homo sapiens
  misc_RNA (1)...(19): siRNA sense strand
gcaagagggaagauuguug

SEQ ID NO: 1086228 - RNA, 19 nt, Homo sapiens
  misc_RNA (1)...(19): siRNA sense strand
gcagagaagggccucagaa

SEQ ID NO: 1086229 - RNA, 19 nt, Homo sapiens
  misc_RNA (1)...(19): siRNA sense strand
gggcuguuguuucuuaugu

SEQ ID NO: 1086230 - RNA, 19 nt, Homo sapiens
  misc_RNA (1)...(19): siRNA sense strand
ggucuuggcagcagcauug

SEQ ID NO: 1086231 - RNA, 19 nt, Homo sapiens
  misc_RNA (1)...(19): siRNA sense strand
ccaaagcagaugaauguug

SEQ ID NO: 1086232 - RNA, 19 nt, Homo sapiens
  misc_RNA (1)...(19): siRNA sense strand
aagaauggcaucucuaaga

SEQ ID NO: 1086233 - RNA, 19 nt, Homo sapiens
  misc_RNA (1)...(19): siRNA sense strand
gggaagauuguuguuuaua

SEQ ID NO: 1086234 - RNA, 19 nt, Homo sapiens
  misc_RNA (1)...(19): siRNA sense strand
gaagaugcagaaaugaugu

SEQ ID NO: 1086235 - RNA, 19 nt, Homo sapiens
  misc_RNA (1)...(19): siRNA sense strand
gaagaacaagguggaguug

SEQ ID NO: 1086236 - RNA, 19 nt, Homo sapiens
  misc_RNA (1)...(19): siRNA sense strand
guaaagcccagaacagauc

SEQ ID NO: 1086237 - RNA, 19 nt, Homo sapiens
  misc_RNA (1)...(19): siRNA sense strand
ugacgcaggaaccuucuua

SEQ ID NO: 1086238 - RNA, 19 nt, Homo sapiens
  misc_RNA (1)...(19): siRNA sense strand
guuggugccuuccaguauu

SEQ ID NO: 1086239 - RNA, 19 nt, Homo sapiens
  misc_RNA (1)...(19): siRNA sense strand
gcgauuggcacuucugguu

SEQ ID NO: 1086240 - RNA, 19 nt, Homo sapiens
  misc_RNA (1)...(19): siRNA sense strand
uuugggcuguuguuucuua

SEQ ID NO: 1086241 - RNA, 19 nt, Homo sapiens
  misc_RNA (1)...(19): siRNA sense strand
gagaagggacagacaucaa

SEQ ID NO: 1086242 - RNA, 19 nt, Homo sapiens
  misc_RNA (1)...(19): siRNA sense strand
ucgaugaacugcagagaag

SEQ ID NO: 1086243 - RNA, 19 nt, Homo sapiens
  misc_RNA (1)...(19): siRNA sense strand
agagaucacugggagcaaa

SEQ ID NO: 1086244 - RNA, 19 nt, Homo sapiens
  misc_RNA (1)...(19): siRNA sense strand
gguggagccuuuauaucau

SEQ ID NO: 1086245 - RNA, 19 nt, Homo sapiens
  misc_RNA (1)...(19): siRNA sense strand
ugauggcgguggagccuuu

SEQ ID NO: 1086246 - RNA, 19 nt, Homo sapiens
  misc_RNA (1)...(19): siRNA sense strand
caaauauccagaacagguu

SEQ ID NO: 1086247 - RNA, 19 nt, Homo sapiens
  misc_RNA (1)...(19): siRNA sense strand
acucaaggacggugcaaua

SEQ ID NO: 1086248 - RNA, 19 nt, Homo sapiens
  misc_RNA (1)...(19): siRNA sense strand
uugcagacauggaagaaau

SEQ ID NO: 1086249 - RNA, 19 nt, Homo sapiens
  misc_RNA (1)...(19): siRNA sense strand
gauacugauuccuucaaca

SEQ ID NO: 1086250 - RNA, 19 nt, Homo sapiens
  misc_RNA (1)...(19): siRNA sense strand
gguaaauauuuccaacuac

SEQ ID NO: 1086251 - RNA, 19 nt, Homo sapiens
  misc_RNA (1)...(19): siRNA sense strand
ccacugggcugcaauucac

SEQ ID NO: 1086252 - RNA, 19 nt, Homo sapiens
  misc_RNA (1)...(19): siRNA sense strand
caagagggaagauuguugu

SEQ ID NO: 1086253 - RNA, 19 nt, Homo sapiens
  misc_RNA (1)...(19): siRNA sense strand
caucuacaguccucacaca

SEQ ID NO: 1086254 - RNA, 19 nt, Homo sapiens
  misc_RNA (1)...(19): siRNA sense strand
cauugggacuccuccagaa

SEQ ID NO: 1086255 - RNA, 19 nt, Homo sapiens
  misc_RNA (1)...(19): siRNA sense strand
uacaucaacuacucaagga

SEQ ID NO: 1086256 - RNA, 19 nt, Homo sapiens
  misc_RNA (1)...(19): siRNA sense strand
cgguggagccuuuauauca

SEQ ID NO: 1086257 - RNA, 19 nt, Homo sapiens
  misc_RNA (1)...(19): siRNA sense strand
uuggugccuuccaguauua

SEQ ID NO: 1086258 - RNA, 19 nt, Homo sapiens
  misc_RNA (1)...(19): siRNA sense strand
ugggaagcacucucacuua

SEQ ID NO: 1086259 - RNA, 19 nt, Homo sapiens
  misc_RNA (1)...(19): siRNA sense strand
guggagccuuuauaucaug

SEQ ID NO: 1086260 - RNA, 19 nt, Homo sapiens
  misc_RNA (1)...(19): siRNA sense strand
gcuuuggcaucucucauuc

SEQ ID NO: 1086261 - RNA, 19 nt, Homo sapiens
  misc_RNA (1)...(19): siRNA sense strand
guggagauguugcuaaagc

SEQ ID NO: 1086262 - RNA, 19 nt, Homo sapiens
  misc_RNA (1)...(19): siRNA sense strand
gauccaaagcagaugaaug

SEQ ID NO: 1086263 - RNA, 19 nt, Homo sapiens
  misc_RNA (1)...(19): siRNA sense strand
agaacaagguggaguuggu

SEQ ID NO: 1086264 - RNA, 19 nt, Homo sapiens
  misc_RNA (1)...(19): siRNA sense strand
cacucucacuuauuaaaga

SEQ ID NO: 1086265 - RNA, 19 nt, Homo sapiens
  misc_RNA (1)...(19): siRNA sense strand
ccaagaauucauaagauag

SEQ ID NO: 1086266 - RNA, 19 nt, Homo sapiens
  misc_RNA (1)...(19): siRNA sense strand
ggagaagggacagacauca

SEQ ID NO: 1086267 - RNA, 19 nt, Homo sapiens
  misc_RNA (1)...(19): siRNA sense strand
uaugagcgauuggcacuuc

SEQ ID NO: 1086268 - RNA, 19 nt, Homo sapiens
  misc_RNA (1)...(19): siRNA sense strand
cuggacagcugggauguug

SEQ ID NO: 1086269 - RNA, 19 nt, Homo sapiens
  misc_RNA (1)...(19): siRNA sense strand
gcccagaacagauccuaug

SEQ ID NO: 1086270 - RNA, 19 nt, Homo sapiens
  misc_RNA (1)...(19): siRNA sense strand
cuaaagcaaucaucaaccu

SEQ ID NO: 1086271 - RNA, 19 nt, Homo sapiens
  misc_RNA (1)...(19): siRNA sense strand
gguaaagcccagaacagau

SEQ ID NO: 1086272 - RNA, 19 nt, Homo sapiens
  misc_RNA (1)...(19): siRNA sense strand
agaccuacccagauacuga

SEQ ID NO: 1086273 - RNA, 19 nt, Homo sapiens
  misc_RNA (1)...(19): siRNA sense strand
gaggacuuuugaagaaaua

SEQ ID NO: 1086274 - RNA, 19 nt, Homo sapiens
  misc_RNA (1)...(19): siRNA sense strand
gaguuggugccuuccagua

SEQ ID NO: 1086275 - RNA, 19 nt, Homo sapiens
  misc_RNA (1)...(19): siRNA sense strand
gcacucucacuuauuaaag

SEQ ID NO: 1086276 - RNA, 19 nt, Homo sapiens
  misc_RNA (1)...(19): siRNA sense strand
uaaagcaaucaucaaccua

SEQ ID NO: 1086277 - RNA, 19 nt, Homo sapiens
  misc_RNA (1)...(19): siRNA sense strand
gcaagaugggcuggagaaa

SEQ ID NO: 1086278 - RNA, 19 nt, Homo sapiens
  misc_RNA (1)...(19): siRNA sense strand
acaaguauuucuucuucca

SEQ ID NO: 1086279 - RNA, 19 nt, Homo sapiens
  misc_RNA (1)...(19): siRNA sense strand
ggagccagucuacuugaug

SEQ ID NO: 1086280 - RNA, 19 nt, Homo sapiens
  misc_RNA (1)...(19): siRNA sense strand
gaucacugggagcaaauau

SEQ ID NO: 1086281 - RNA, 19 nt, Homo sapiens
  misc_RNA (1)...(19): siRNA sense strand
caggauggcgugcccaaga

SEQ ID NO: 1086282 - RNA, 19 nt, Homo sapiens
  misc_RNA (1)...(19): siRNA sense strand
agaagggccucagaagcaa

SEQ ID NO: 1086283 - RNA, 19 nt, Homo sapiens
  misc_RNA (1)...(19): siRNA sense strand
gaugcuggagccaagaauu

SEQ ID NO: 1086284 - RNA, 19 nt, Homo sapiens
  misc_RNA (1)...(19): siRNA sense strand
cuguggagauguugcuaaa

SEQ ID NO: 1086285 - RNA, 19 nt, Homo sapiens
  misc_RNA (1)...(19): siRNA sense strand
ggaucaaaauugucauuca

SEQ ID NO: 1086286 - RNA, 19 nt, Homo sapiens
  misc_RNA (1)...(19): siRNA sense strand
ggcaaagaccuacccagau

SEQ ID NO: 1086287 - RNA, 19 nt, Homo sapiens
  misc_RNA (1)...(19): siRNA sense strand
cagauccuaugagcgauug

SEQ ID NO: 1086288 - RNA, 19 nt, Homo sapiens
  misc_RNA (1)...(19): siRNA sense strand
agaaggcauuacagcagaa

SEQ ID NO: 1086289 - RNA, 19 nt, Homo sapiens
  misc_RNA (1)...(19): siRNA sense strand
agaagaacaagguggaguu

SEQ ID NO: 1086290 - RNA, 19 nt, Homo sapiens
  misc_RNA (1)...(19): siRNA sense strand
gggaaagcuauaugcaaga

SEQ ID NO: 1086291 - RNA, 19 nt, Homo sapiens
  misc_RNA (1)...(19): siRNA sense strand
augcagaaaugaugucaag

SEQ ID NO: 1086292 - RNA, 19 nt, Homo sapiens
  misc_RNA (1)...(19): siRNA sense strand
ggacagaacuugugcaaau

SEQ ID NO: 1086293 - RNA, 19 nt, Homo sapiens
  misc_RNA (1)...(19): siRNA sense strand
gcaaagaacuauccauaug

SEQ ID NO: 1086294 - RNA, 19 nt, Homo sapiens
  misc_RNA (1)...(19): siRNA sense strand
gcaaauagccuagcaauca

SEQ ID NO: 1086295 - RNA, 19 nt, Homo sapiens
  misc_RNA (1)...(19): siRNA sense strand
gaccaagacuuaccuuuga

SEQ ID NO: 1086296 - RNA, 19 nt, Homo sapiens
  misc_RNA (1)...(19): siRNA sense strand
cuauucagcuucagaguua

SEQ ID NO: 1086297 - RNA, 19 nt, Homo sapiens
  misc_RNA (1)...(19): siRNA sense strand
ggaagcgccucaaaucuau

SEQ ID NO: 1086298 - RNA, 19 nt, Homo sapiens
  misc_RNA (1)...(19): siRNA sense strand
uuaaauaucuggucucuca

SEQ ID NO: 1086299 - RNA, 19 nt, Homo sapiens
  misc_RNA (1)...(19): siRNA sense strand
caaagaagccuugaugaaa

SEQ ID NO: 1086300 - RNA, 19 nt, Homo sapiens
  misc_RNA (1)...(19): siRNA sense strand
gaacuauccauaugaacua

SEQ ID NO: 1086301 - RNA, 19 nt, Homo sapiens
  misc_RNA (1)...(19): siRNA sense strand
agugagagcugcauuugua

SEQ ID NO: 1086302 - RNA, 19 nt, Homo sapiens
  misc_RNA (1)...(19): siRNA sense strand
gaaguacaguccaaagcaa

SEQ ID NO: 1086303 - RNA, 19 nt, Homo sapiens
  misc_RNA (1)...(19): siRNA sense strand
ucaaaucuaugcuaaggaa

SEQ ID NO: 1086304 - RNA, 19 nt, Homo sapiens
  misc_RNA (1)...(19): siRNA sense strand
ggccgacgaugauuccuua

SEQ ID NO: 1086305 - RNA, 19 nt, Homo sapiens
  misc_RNA (1)...(19): siRNA sense strand
cagaugcacuucauauguu

SEQ ID NO: 1086306 - RNA, 19 nt, Homo sapiens
  misc_RNA (1)...(19): siRNA sense strand
ggaccaagacuuaccuuug

SEQ ID NO: 1086307 - RNA, 19 nt, Homo sapiens
  misc_RNA (1)...(19): siRNA sense strand
guccaaagcaaaccauuua

SEQ ID NO: 1086308 - RNA, 19 nt, Homo sapiens
  misc_RNA (1)...(19): siRNA sense strand
guggauacauugcaaauag

SEQ ID NO: 1086309 - RNA, 19 nt, Homo sapiens
  misc_RNA (1)...(19): siRNA sense strand
caaagaacuauccauauga

SEQ ID NO: 1086310 - RNA, 19 nt, Homo sapiens
  misc_RNA (1)...(19): siRNA sense strand
gugcaaagaacuauccaua

SEQ ID NO: 1086311 - RNA, 19 nt, Homo sapiens
  misc_RNA (1)...(19): siRNA sense strand
ggagauauaaugcucauca

SEQ ID NO: 1086312 - RNA, 19 nt, Homo sapiens
  misc_RNA (1)...(19): siRNA sense strand
cauaugggauacaguaguu

SEQ ID NO: 1086313 - RNA, 19 nt, Homo sapiens
  misc_RNA (1)...(19): siRNA sense strand
ggaguugcaguuaauguaa

SEQ ID NO: 1086314 - RNA, 19 nt, Homo sapiens
  misc_RNA (1)...(19): siRNA sense strand
gacagaacuugugcaaauu

SEQ ID NO: 1086315 - RNA, 19 nt, Homo sapiens
  misc_RNA (1)...(19): siRNA sense strand
aaacagagagagauacuga

SEQ ID NO: 1086316 - RNA, 19 nt, Homo sapiens
  misc_RNA (1)...(19): siRNA sense strand
gaacuugugcaaauuguca

SEQ ID NO: 1086317 - RNA, 19 nt, Homo sapiens
  misc_RNA (1)...(19): siRNA sense strand
guacaugcuuugggagauu

SEQ ID NO: 1086318 - RNA, 19 nt, Homo sapiens
  misc_RNA (1)...(19): siRNA sense strand
caaauagccuagcaaucau

SEQ ID NO: 1086319 - RNA, 19 nt, Homo sapiens
  misc_RNA (1)...(19): siRNA sense strand
gaguguuggugugcuaaua

SEQ ID NO: 1086320 - RNA, 19 nt, Homo sapiens
  misc_RNA (1)...(19): siRNA sense strand
cugcauacaucauacgauu

SEQ ID NO: 1086321 - RNA, 19 nt, Homo sapiens
  misc_RNA (1)...(19): siRNA sense strand
gauguacuauucagcuuca

SEQ ID NO: 1086322 - RNA, 19 nt, Homo sapiens
  misc_RNA (1)...(19): siRNA sense strand
ugggauuccucuuauauga

SEQ ID NO: 1086323 - RNA, 19 nt, Homo sapiens
  misc_RNA (1)...(19): siRNA sense strand
ccaaagcaaaccauuuauu

SEQ ID NO: 1086324 - RNA, 19 nt, Homo sapiens
  misc_RNA (1)...(19): siRNA sense strand
caccgcagcuguuggaguu

SEQ ID NO: 1086325 - RNA, 19 nt, Homo sapiens
  misc_RNA (1)...(19): siRNA sense strand
ggauuccucuuauaugaag

SEQ ID NO: 1086326 - RNA, 19 nt, Homo sapiens
  misc_RNA (1)...(19): siRNA sense strand
aaagccagguugaccauug

SEQ ID NO: 1086327 - RNA, 19 nt, Homo sapiens
  misc_RNA (1)...(19): siRNA sense strand
ucagaguucuagucccuaa

SEQ ID NO: 1086328 - RNA, 19 nt, Homo sapiens
  misc_RNA (1)...(19): siRNA sense strand
gaaggugugccaagccauu

SEQ ID NO: 1086329 - RNA, 19 nt, Homo sapiens
  misc_RNA (1)...(19): siRNA sense strand
agaugcacuucauauguua

SEQ ID NO: 1086330 - RNA, 19 nt, Homo sapiens
  misc_RNA (1)...(19): siRNA sense strand
guagguggauacauugcaa

SEQ ID NO: 1086331 - RNA, 19 nt, Homo sapiens
  misc_RNA (1)...(19): siRNA sense strand
ccuggaaguucaucuaaau

SEQ ID NO: 1086332 - RNA, 19 nt, Homo sapiens
  misc_RNA (1)...(19): siRNA sense strand
aaagaagccuugaugaaaa

SEQ ID NO: 1086333 - RNA, 19 nt, Homo sapiens
  misc_RNA (1)...(19): siRNA sense strand
gcauacaucauacgauuca

SEQ ID NO: 1086334 - RNA, 19 nt, Homo sapiens
  misc_RNA (1)...(19): siRNA sense strand
gagauuugguacagagugu

SEQ ID NO: 1086335 - RNA, 19 nt, Homo sapiens
  misc_RNA (1)...(19): siRNA sense strand
cagcaaacagagagagaua

SEQ ID NO: 1086336 - RNA, 19 nt, Homo sapiens
  misc_RNA (1)...(19): siRNA sense strand
gcaaauugucagaguucua

SEQ ID NO: 1086337 - RNA, 19 nt, Homo sapiens
  misc_RNA (1)...(19): siRNA sense strand
gggauacaguaguuauaau

SEQ ID NO: 1086338 - RNA, 19 nt, Homo sapiens
  misc_RNA (1)...(19): siRNA sense strand
uuucaucgcuuagagguuu

SEQ ID NO: 1086339 - RNA, 19 nt, Homo sapiens
  misc_RNA (1)...(19): siRNA sense strand
aagauucaccuuuggauuu

SEQ ID NO: 1086340 - RNA, 19 nt, Homo sapiens
  misc_RNA (1)...(19): siRNA sense strand
ugaccuaagcgccaucaua

SEQ ID NO: 1086341 - RNA, 19 nt, Homo sapiens
  misc_RNA (1)...(19): siRNA sense strand
ugacagaugcacuucauau

SEQ ID NO: 1086342 - RNA, 19 nt, Homo sapiens
  misc_RNA (1)...(19): siRNA sense strand
gaccauugcugccguucug

SEQ ID NO: 1086343 - RNA, 19 nt, Homo sapiens
  misc_RNA (1)...(19): siRNA sense strand
agagagagauacugaagca

SEQ ID NO: 1086344 - RNA, 19 nt, Homo sapiens
  misc_RNA (1)...(19): siRNA sense strand
cgacgaugauuccuuacug

SEQ ID NO: 1086345 - RNA, 19 nt, Homo sapiens
  misc_RNA (1)...(19): siRNA sense strand
ggaaguacaguccaaagca

SEQ ID NO: 1086346 - RNA, 19 nt, Homo sapiens
  misc_RNA (1)...(19): siRNA sense strand
uuagugugcuguuggugua

SEQ ID NO: 1086347 - RNA, 19 nt, Homo sapiens
  misc_RNA (1)...(19): siRNA sense strand
uaucuggucucucacuuca

SEQ ID NO: 1086348 - RNA, 19 nt, Homo sapiens
  misc_RNA (1)...(19): siRNA sense strand
agauguauauucagucgaa

SEQ ID NO: 1086349 - RNA, 19 nt, Homo sapiens
  misc_RNA (1)...(19): siRNA sense strand
caucuguacauacguauuu

SEQ ID NO: 1086350 - RNA, 19 nt, Homo sapiens
  misc_RNA (1)...(19): siRNA sense strand
gaagcugugcaaagaacua

SEQ ID NO: 1086351 - RNA, 19 nt, Homo sapiens
  misc_RNA (1)...(19): siRNA sense strand
acagucagcugaguuugaa

SEQ ID NO: 1086352 - RNA, 19 nt, Homo sapiens
  misc_RNA (1)...(19): siRNA sense strand
gggaggaaguacaguccaa

SEQ ID NO: 1086353 - RNA, 19 nt, Homo sapiens
  misc_RNA (1)...(19): siRNA sense strand
aaucauaugggauacagua

SEQ ID NO: 1086354 - RNA, 19 nt, Homo sapiens
  misc_RNA (1)...(19): siRNA sense strand
auaugaagcugugcaaaga

SEQ ID NO: 1086355 - RNA, 19 nt, Homo sapiens
  misc_RNA (1)...(19): siRNA sense strand
uggaagcgccucaaaucua

SEQ ID NO: 1086356 - RNA, 19 nt, Homo sapiens
  misc_RNA (1)...(19): siRNA sense strand
uuucauuacuuguggcuuu

SEQ ID NO: 1086357 - RNA, 19 nt, Homo sapiens
  misc_RNA (1)...(19): siRNA sense strand
gcaguuaauguaauaaugg

SEQ ID NO: 1086358 - RNA, 19 nt, Homo sapiens
  misc_RNA (1)...(19): siRNA sense strand
ccaacagucagcugaguuu

SEQ ID NO: 1086359 - RNA, 19 nt, Homo sapiens
  misc_RNA (1)...(19): siRNA sense strand
caacauuucgaaucauaug

SEQ ID NO: 1086360 - RNA, 19 nt, Homo sapiens
  misc_RNA (1)...(19): siRNA sense strand
ugucagcuaugauuagugu

SEQ ID NO: 1086361 - RNA, 19 nt, Homo sapiens
  misc_RNA (1)...(19): siRNA sense strand
gaguugugguggccgauga

SEQ ID NO: 1086362 - RNA, 19 nt, Homo sapiens
  misc_RNA (1)...(19): siRNA sense strand
uauguuaacugaccuaagc

SEQ ID NO: 1086363 - RNA, 19 nt, Homo sapiens
  misc_RNA (1)...(19): siRNA sense strand
ggcaagaaguggacagaac

SEQ ID NO: 1086364 - RNA, 19 nt, Homo sapiens
  misc_RNA (1)...(19): siRNA sense strand
gaguugcaguuaauguaau

SEQ ID NO: 1086365 - RNA, 19 nt, Homo sapiens
  misc_RNA (1)...(19): siRNA sense strand
gaccuaagcgccaucauac

SEQ ID NO: 1086366 - RNA, 19 nt, Homo sapiens
  misc_RNA (1)...(19): siRNA sense strand
gcucaucaccgcagcuguu

SEQ ID NO: 1086367 - RNA, 19 nt, Homo sapiens
  misc_RNA (1)...(19): siRNA sense strand
caccagcgccuuugacuuc

SEQ ID NO: 1086368 - RNA, 19 nt, Homo sapiens
  misc_RNA (1)...(19): siRNA sense strand
caagccagaauacaagauu

SEQ ID NO: 1086369 - RNA, 19 nt, Homo sapiens
  misc_RNA (1)...(19): siRNA sense strand
cgccucaaaucuaugcuaa

SEQ ID NO: 1086370 - RNA, 19 nt, Homo sapiens
  misc_RNA (1)...(19): siRNA sense strand
gaaaggugaaagccagguu

SEQ ID NO: 1086371 - RNA, 19 nt, Homo sapiens
  misc_RNA (1)...(19): siRNA sense strand
cuuaugggauuccucuuau

SEQ ID NO: 1086372 - RNA, 19 nt, Homo sapiens
  misc_RNA (1)...(19): siRNA sense strand
gagaacuuguagguggaua

SEQ ID NO: 1086373 - RNA, 19 nt, Homo sapiens
  misc_RNA (1)...(19): siRNA sense strand
gcuguuggaguugcaguua

SEQ ID NO: 1086374 - RNA, 19 nt, Homo sapiens
  misc_RNA (1)...(19): siRNA sense strand
caacugcagcaaacagaga

SEQ ID NO: 1086375 - RNA, 19 nt, Homo sapiens
  misc_RNA (1)...(19): siRNA sense strand
caaauugucagaguucuag

SEQ ID NO: 1086376 - RNA, 19 nt, Homo sapiens
  misc_RNA (1)...(19): siRNA sense strand
ccucaaaucuaugcuaagg

SEQ ID NO: 1086377 - RNA, 19 nt, Homo sapiens
  misc_RNA (1)...(19): siRNA sense strand
uuaugggauuccucuuaua

SEQ ID NO: 1086378 - RNA, 19 nt, Homo sapiens
  misc_RNA (1)...(19): siRNA sense strand
guauauacuuaugggauuc

SEQ ID NO: 1086379 - RNA, 19 nt, Homo sapiens
  misc_RNA (1)...(19): siRNA sense strand
guacuugcuuuucaugauu

SEQ ID NO: 1086380 - RNA, 19 nt, Homo sapiens
  misc_RNA (1)...(19): siRNA sense strand
cacuucauauguuaacuga

SEQ ID NO: 1086381 - RNA, 19 nt, Homo sapiens
  misc_RNA (1)...(19): siRNA sense strand
gcaagaaguggacagaacu

SEQ ID NO: 1086382 - RNA, 19 nt, Homo sapiens
  misc_RNA (1)...(19): siRNA sense strand
acagaguguuggugugcua

SEQ ID NO: 1086383 - RNA, 19 nt, Homo sapiens
  misc_RNA (1)...(19): siRNA sense strand
gcaaacagagagagauacu

SEQ ID NO: 1086384 - RNA, 19 nt, Homo sapiens
  misc_RNA (1)...(19): siRNA sense strand
cagaacuugugcaaauugu

SEQ ID NO: 1086385 - RNA, 19 nt, Homo sapiens
  misc_RNA (1)...(19): siRNA sense strand
cuuacuggaccaagacuua

SEQ ID NO: 1086386 - RNA, 19 nt, Homo sapiens
  misc_RNA (1)...(19): siRNA sense strand
cauuuggcauguauagaug

SEQ ID NO: 1086387 - RNA, 19 nt, Homo sapiens
  misc_RNA (1)...(19): siRNA sense strand
cuuuggauuucaucgcuua

SEQ ID NO: 1086388 - RNA, 19 nt, Homo sapiens
  misc_RNA (1)...(19): siRNA sense strand
gccuagcaaucaugacaga

SEQ ID NO: 1086389 - RNA, 19 nt, Homo sapiens
  misc_RNA (1)...(19): siRNA sense strand
uuucgaaucauaugggaua

SEQ ID NO: 1086390 - RNA, 19 nt, Homo sapiens
  misc_RNA (1)...(19): siRNA sense strand
guucacauacagcuaauuc

SEQ ID NO: 1086391 - RNA, 19 nt, Homo sapiens
  misc_RNA (1)...(19): siRNA sense strand
gaaaaucuacugccauagu

SEQ ID NO: 1086392 - RNA, 19 nt, Homo sapiens
  misc_RNA (1)...(19): siRNA sense strand
gaagaagacugcuuuaguu

SEQ ID NO: 1086393 - RNA, 19 nt, Homo sapiens
  misc_RNA (1)...(19): siRNA sense strand
gaagacugcuuuaguuuau

SEQ ID NO: 1086394 - RNA, 19 nt, Homo sapiens
  misc_RNA (1)...(19): siRNA sense strand
gaggaugaaugauggauuu

SEQ ID NO: 1086395 - RNA, 19 nt, Homo sapiens
  misc_RNA (1)...(19): siRNA sense strand
caacuggccugaagcauug

SEQ ID NO: 1086396 - RNA, 19 nt, Homo sapiens
  misc_RNA (1)...(19): siRNA sense strand
ggagacaggugaagaugga

SEQ ID NO: 1086397 - RNA, 19 nt, Homo sapiens
  misc_RNA (1)...(19): siRNA sense strand
ccugagagcucuaaccaaa

SEQ ID NO: 1086398 - RNA, 19 nt, Homo sapiens
  misc_RNA (1)...(19): siRNA sense strand
ggaagggaguacucagaaa

SEQ ID NO: 1086399 - RNA, 19 nt, Homo sapiens
  misc_RNA (1)...(19): siRNA sense strand
ggccaucaaucaaguguuu

SEQ ID NO: 1086400 - RNA, 19 nt, Homo sapiens
  misc_RNA (1)...(19): siRNA sense strand
agaagaaggugacauuuca

SEQ ID NO: 1086401 - RNA, 19 nt, Homo sapiens
  misc_RNA (1)...(19): siRNA sense strand
cagcaaacguuuccugaga

SEQ ID NO: 1086402 - RNA, 19 nt, Homo sapiens
  misc_RNA (1)...(19): siRNA sense strand
ggaaaaggcuauauucuuc

SEQ ID NO: 1086403 - RNA, 19 nt, Homo sapiens
  misc_RNA (1)...(19): siRNA sense strand
ggaacucaguggaauuaug

SEQ ID NO: 1086404 - RNA, 19 nt, Homo sapiens
  misc_RNA (1)...(19): siRNA sense strand
ccaagacuauguaucgauu

SEQ ID NO: 1086405 - RNA, 19 nt, Homo sapiens
  misc_RNA (1)...(19): siRNA sense strand
ugagagcucuaaccaaaga

SEQ ID NO: 1086406 - RNA, 19 nt, Homo sapiens
  misc_RNA (1)...(19): siRNA sense strand
guaccugacuccugacuca

SEQ ID NO: 1086407 - RNA, 19 nt, Homo sapiens
  misc_RNA (1)...(19): siRNA sense strand
aggaauacauggucagaaa

SEQ ID NO: 1086408 - RNA, 19 nt, Homo sapiens
  misc_RNA (1)...(19): siRNA sense strand
uagacuggcuggacagauu

SEQ ID NO: 1086409 - RNA, 19 nt, Homo sapiens
  misc_RNA (1)...(19): siRNA sense strand
aaacagagacacugggaaa

SEQ ID NO: 1086410 - RNA, 19 nt, Homo sapiens
  misc_RNA (1)...(19): siRNA sense strand
gaacucaguggaauuaugg

SEQ ID NO: 1086411 - RNA, 19 nt, Homo sapiens
  misc_RNA (1)...(19): siRNA sense strand
caaagaaggaauuaaguag

SEQ ID NO: 1086412 - RNA, 19 nt, Homo sapiens
  misc_RNA (1)...(19): siRNA sense strand
ggaucugccucacuggauu

SEQ ID NO: 1086413 - RNA, 19 nt, Homo sapiens
  misc_RNA (1)...(19): siRNA sense strand
ggacagauucgaagguugu

SEQ ID NO: 1086414 - RNA, 19 nt, Homo sapiens
  misc_RNA (1)...(19): siRNA sense strand
agaagacugcuuuaguuua

SEQ ID NO: 1086415 - RNA, 19 nt, Homo sapiens
  misc_RNA (1)...(19): siRNA sense strand
ggaccaagacuauguaucg

SEQ ID NO: 1086416 - RNA, 19 nt, Homo sapiens
  misc_RNA (1)...(19): siRNA sense strand
ccacuuacuuagagacuca

SEQ ID NO: 1086417 - RNA, 19 nt, Homo sapiens
  misc_RNA (1)...(19): siRNA sense strand
uugauauccuguccacuua

SEQ ID NO: 1086418 - RNA, 19 nt, Homo sapiens
  misc_RNA (1)...(19): siRNA sense strand
gcaagaaggcauccuagag

SEQ ID NO: 1086419 - RNA, 19 nt, Homo sapiens
  misc_RNA (1)...(19): siRNA sense strand
gaagagugugugaggauga

SEQ ID NO: 1086420 - RNA, 19 nt, Homo sapiens
  misc_RNA (1)...(19): siRNA sense strand
cuaguuaccuguuagacau

SEQ ID NO: 1086421 - RNA, 19 nt, Homo sapiens
  misc_RNA (1)...(19): siRNA sense strand
ucggugggcuuguggauga

SEQ ID NO: 1086422 - RNA, 19 nt, Homo sapiens
  misc_RNA (1)...(19): siRNA sense strand
gcaaagaagagcaaaagaa

SEQ ID NO: 1086423 - RNA, 19 nt, Homo sapiens
  misc_RNA (1)...(19): siRNA sense strand
ucacuggauucacaacaga

SEQ ID NO: 1086424 - RNA, 19 nt, Homo sapiens
  misc_RNA (1)...(19): siRNA sense strand
gaguaugacccacuacaug

SEQ ID NO: 1086425 - RNA, 19 nt, Homo sapiens
  misc_RNA (1)...(19): siRNA sense strand
gaagggaguacucagaaag

SEQ ID NO: 1086426 - RNA, 19 nt, Homo sapiens
  misc_RNA (1)...(19): siRNA sense strand
caaagaagagcaaaagaaa

SEQ ID NO: 1086427 - RNA, 19 nt, Homo sapiens
  misc_RNA (1)...(19): siRNA sense strand
gcuugccaauccaggaaua

SEQ ID NO: 1086428 - RNA, 19 nt, Homo sapiens
  misc_RNA (1)...(19): siRNA sense strand
caacagacaguccccuuua

SEQ ID NO: 1086429 - RNA, 19 nt, Homo sapiens
  misc_RNA (1)...(19): siRNA sense strand
gaagaaggugacauuucaa

SEQ ID NO: 1086430 - RNA, 19 nt, Homo sapiens
  misc_RNA (1)...(19): siRNA sense strand
aaaggaguuucuucaggaa

SEQ ID NO: 1086431 - RNA, 19 nt, Homo sapiens
  misc_RNA (1)...(19): siRNA sense strand
uauccuguccacuuacuua

SEQ ID NO: 1086432 - RNA, 19 nt, Homo sapiens
  misc_RNA (1)...(19): siRNA sense strand
gccaaacacucaggaccaa

SEQ ID NO: 1086433 - RNA, 19 nt, Homo sapiens
  misc_RNA (1)...(19): siRNA sense strand
cagaagaaggugacauuuc

SEQ ID NO: 1086434 - RNA, 19 nt, Homo sapiens
  misc_RNA (1)...(19): siRNA sense strand
auucgaagguuguaugguu

SEQ ID NO: 1086435 - RNA, 19 nt, Homo sapiens
  misc_RNA (1)...(19): siRNA sense strand
caaacacucaggaccaaga

SEQ ID NO: 1086436 - RNA, 19 nt, Homo sapiens
  misc_RNA (1)...(19): siRNA sense strand
gauacuggccaucaaucaa

SEQ ID NO: 1086437 - RNA, 19 nt, Homo sapiens
  misc_RNA (1)...(19): siRNA sense strand
cagagauacuggccaucaa

SEQ ID NO: 1086438 - RNA, 19 nt, Homo sapiens
  misc_RNA (1)...(19): siRNA sense strand
agaagaagacugcuuuagu

SEQ ID NO: 1086439 - RNA, 19 nt, Homo sapiens
  misc_RNA (1)...(19): siRNA sense strand
cccacuacaugucaaagaa

SEQ ID NO: 1086440 - RNA, 19 nt, Homo sapiens
  misc_RNA (1)...(19): siRNA sense strand
aagacuauguaucgauuug

SEQ ID NO: 1086441 - RNA, 19 nt, Homo sapiens
  misc_RNA (1)...(19): siRNA sense strand
gcaaaagaaagcaagaaaa

SEQ ID NO: 1086442 - RNA, 19 nt, Homo sapiens
  misc_RNA (1)...(19): siRNA sense strand
aagaagacugcuuuaguuu

SEQ ID NO: 1086443 - RNA, 19 nt, Homo sapiens
  misc_RNA (1)...(19): siRNA sense strand
gaccaagacuauguaucga

SEQ ID NO: 1086444 - RNA, 19 nt, Homo sapiens
  misc_RNA (1)...(19): siRNA sense strand
uaacagaagaagacugcuu

SEQ ID NO: 1086445 - RNA, 19 nt, Homo sapiens
  misc_RNA (1)...(19): siRNA sense strand
uguaucgauuugaguauga

SEQ ID NO: 1086446 - RNA, 19 nt, Homo sapiens
  misc_RNA (1)...(19): siRNA sense strand
gauauccuguccacuuacu

SEQ ID NO: 1086447 - RNA, 19 nt, Homo sapiens
  misc_RNA (1)...(19): siRNA sense strand
acaacuggccugaagcauu

SEQ ID NO: 1086448 - RNA, 19 nt, Homo sapiens
  misc_RNA (1)...(19): siRNA sense strand
aagaaggaauuaaguagac

SEQ ID NO: 1086449 - RNA, 19 nt, Homo sapiens
  misc_RNA (1)...(19): siRNA sense strand
ucggaacucaguggaauua

SEQ ID NO: 1086450 - RNA, 19 nt, Homo sapiens
  misc_RNA (1)...(19): siRNA sense strand
agacauaacagaagaagac

SEQ ID NO: 1086451 - RNA, 19 nt, Homo sapiens
  misc_RNA (1)...(19): siRNA sense strand
gcuuccagcuucugcagau

SEQ ID NO: 1086452 - RNA, 19 nt, Homo sapiens
  misc_RNA (1)...(19): siRNA sense strand
cuauguaucgauuugagua

SEQ ID NO: 1086453 - RNA, 19 nt, Homo sapiens
  misc_RNA (1)...(19): siRNA sense strand
ccugaagcauugaagaaag

SEQ ID NO: 1086454 - RNA, 19 nt, Homo sapiens
  misc_RNA (1)...(19): siRNA sense strand
ggccugaagcauugaagaa

SEQ ID NO: 1086455 - RNA, 19 nt, Homo sapiens
  misc_RNA (1)...(19): siRNA sense strand
acucacaacuggccugaag

SEQ ID NO: 1086456 - RNA, 19 nt, Homo sapiens
  misc_RNA (1)...(19): siRNA sense strand
gacuauguaucgauuugag

SEQ ID NO: 1086457 - RNA, 19 nt, Homo sapiens
  misc_RNA (1)...(19): siRNA sense strand
gcauugaagaaaggaguuu

SEQ ID NO: 1086458 - RNA, 19 nt, Homo sapiens
  misc_RNA (1)...(19): siRNA sense strand
gaagguuguaugguucaaa

SEQ ID NO: 1086459 - RNA, 19 nt, Homo sapiens
  misc_RNA (1)...(19): siRNA sense strand
acagaagaagacugcuuua

SEQ ID NO: 1086460 - RNA, 19 nt, Homo sapiens
  misc_RNA (1)...(19): siRNA sense strand
aagaaggugacauuucaaa

SEQ ID NO: 1086461 - RNA, 19 nt, Homo sapiens
  misc_RNA (1)...(19): siRNA sense strand
acacucaggaccaagacua

SEQ ID NO: 1086462 - RNA, 19 nt, Homo sapiens
  misc_RNA (1)...(19): siRNA sense strand
ugucaaagaaggaauuaag

SEQ ID NO: 1086463 - RNA, 19 nt, Homo sapiens
  misc_RNA (1)...(19): siRNA sense strand
caagacuauguaucgauuu

SEQ ID NO: 1086464 - RNA, 19 nt, Homo sapiens
  misc_RNA (1)...(19): siRNA sense strand
gaggagacaggugaagaug

SEQ ID NO: 1086465 - RNA, 19 nt, Homo sapiens
  misc_RNA (1)...(19): siRNA sense strand
gcuauauucuucggaacuc

SEQ ID NO: 1086466 - RNA, 19 nt, Homo sapiens
  misc_RNA (1)...(19): siRNA sense strand
gagauacuggccaucaauc

SEQ ID NO: 1086467 - RNA, 19 nt, Homo sapiens
  misc_RNA (1)...(19): siRNA sense strand
ucagaagaaggugacauuu

SEQ ID NO: 1086468 - RNA, 19 nt, Homo sapiens
  misc_RNA (1)...(19): siRNA sense strand
acucagaacacgcucuuga

SEQ ID NO: 1086469 - RNA, 19 nt, Homo sapiens
  misc_RNA (1)...(19): siRNA sense strand
aacagaagaagacugcuuu

SEQ ID NO: 1086470 - RNA, 19 nt, Homo sapiens
  misc_RNA (1)...(19): siRNA sense strand
ucaggaccaagacuaugua

SEQ ID NO: 1086471 - RNA, 19 nt, Homo sapiens
  misc_RNA (1)...(19): siRNA sense strand
gggaauacucugucaagac

SEQ ID NO: 1086472 - RNA, 19 nt, Homo sapiens
  misc_RNA (1)...(19): siRNA sense strand
gaaggugacauuucaaaag

SEQ ID NO: 1086473 - RNA, 19 nt, Homo sapiens
  misc_RNA (1)...(19): siRNA sense strand
caugucaaagaaggaauua

SEQ ID NO: 1086474 - RNA, 19 nt, Homo sapiens
  misc_RNA (1)...(19): siRNA sense strand
ggcaagaaggcauccuaga

SEQ ID NO: 1086475 - RNA, 19 nt, Homo sapiens
  misc_RNA (1)...(19): siRNA sense strand
ucagagauacuggccauca

SEQ ID NO: 1086476 - RNA, 19 nt, Homo sapiens
  misc_RNA (1)...(19): siRNA sense strand
gaugaaugauggauuuucu

SEQ ID NO: 1086477 - RNA, 19 nt, Homo sapiens
  misc_RNA (1)...(19): siRNA sense strand
cuucggaacucaguggaau

SEQ ID NO: 1086478 - RNA, 19 nt, Homo sapiens
  misc_RNA (1)...(19): siRNA sense strand
gccaauccaggaauacaug

SEQ ID NO: 1086479 - RNA, 19 nt, Homo sapiens
  misc_RNA (1)...(19): siRNA sense strand
cgggaauacucugucaaga

SEQ ID NO: 1086480 - RNA, 19 nt, Homo sapiens
  misc_RNA (1)...(19): siRNA sense strand
uggaaacccuuguguaccu

SEQ ID NO: 1086481 - RNA, 19 nt, Homo sapiens
  misc_RNA (1)...(19): siRNA sense strand
cagauucgaagguuguaug

SEQ ID NO: 1086482 - RNA, 19 nt, Homo sapiens
  misc_RNA (1)...(19): siRNA sense strand
gccugaagcauugaagaaa

SEQ ID NO: 1086483 - RNA, 19 nt, Homo sapiens
  misc_RNA (1)...(19): siRNA sense strand
ucagaacacgcucuugaag

SEQ ID NO: 1086484 - RNA, 19 nt, Homo sapiens
  misc_RNA (1)...(19): siRNA sense strand
gaaauuggaagggaguacu

SEQ ID NO: 1086485 - RNA, 19 nt, Homo sapiens
  misc_RNA (1)...(19): siRNA sense strand
cuggacagauucgaagguu

SEQ ID NO: 1086486 - RNA, 19 nt, Homo sapiens
  misc_RNA (1)...(19): siRNA sense strand
uggaagggaguacucagaa

SEQ ID NO: 1086487 - RNA, 19 nt, Homo sapiens
  misc_RNA (1)...(19): siRNA sense strand
aagagugugugaggaugaa

SEQ ID NO: 1086488 - RNA, 19 nt, Homo sapiens
  misc_RNA (1)...(19): siRNA sense strand
ggaauacauggucagaaac

SEQ ID NO: 1086489 - RNA, 19 nt, Homo sapiens
  misc_RNA (1)...(19): siRNA sense strand
ccuguccacuuacuuagag

SEQ ID NO: 1086490 - RNA, 19 nt, Homo sapiens
  misc_RNA (1)...(19): siRNA sense strand
uuugauauccuguccacuu

SEQ ID NO: 1086491 - RNA, 19 nt, Homo sapiens
  misc_RNA (1)...(19): siRNA sense strand
cagaaaccagaaugggaaa

SEQ ID NO: 1086492 - RNA, 19 nt, Homo sapiens
  misc_RNA (1)...(19): siRNA sense strand
ggacauggcugauaaagaa

SEQ ID NO: 1086493 - RNA, 19 nt, Homo sapiens
  misc_RNA (1)...(19): siRNA sense strand
gaagauacacagaaaguua

SEQ ID NO: 1086494 - RNA, 19 nt, Homo sapiens
  misc_RNA (1)...(19): siRNA sense strand
ccagugaccuuucaucuuu

SEQ ID NO: 1086495 - RNA, 19 nt, Homo sapiens
  misc_RNA (1)...(19): siRNA sense strand
ccagacacuucccuuauua

SEQ ID NO: 1086496 - RNA, 19 nt, Homo sapiens
  misc_RNA (1)...(19): siRNA sense strand
caacacagcucccgaugau

SEQ ID NO: 1086497 - RNA, 19 nt, Homo sapiens
  misc_RNA (1)...(19): siRNA sense strand
gagaagaacaaacagaaua

SEQ ID NO: 1086498 - RNA, 19 nt, Homo sapiens
  misc_RNA (1)...(19): siRNA sense strand
gaaaggagaaagaaagaaa

SEQ ID NO: 1086499 - RNA, 19 nt, Homo sapiens
  misc_RNA (1)...(19): siRNA sense strand
ggaaaagacugaaaagaaa

SEQ ID NO: 1086500 - RNA, 19 nt, Homo sapiens
  misc_RNA (1)...(19): siRNA sense strand
gaaaccauaacuucucuua

SEQ ID NO: 1086501 - RNA, 19 nt, Homo sapiens
  misc_RNA (1)...(19): siRNA sense strand
gguauugaccgaauuauuu

SEQ ID NO: 1086502 - RNA, 19 nt, Homo sapiens
  misc_RNA (1)...(19): siRNA sense strand
ggaaggaaguggcaacaca

SEQ ID NO: 1086503 - RNA, 19 nt, Homo sapiens
  misc_RNA (1)...(19): siRNA sense strand
cagaggacauggcugauaa

SEQ ID NO: 1086504 - RNA, 19 nt, Homo sapiens
  misc_RNA (1)...(19): siRNA sense strand
ggagaaagaaagaaagaaa

SEQ ID NO: 1086505 - RNA, 19 nt, Homo sapiens
  misc_RNA (1)...(19): siRNA sense strand
gaaacaacauuagacaaca

SEQ ID NO: 1086506 - RNA, 19 nt, Homo sapiens
  misc_RNA (1)...(19): siRNA sense strand
gaaguuguaacgucugaua

SEQ ID NO: 1086507 - RNA, 19 nt, Homo sapiens
  misc_RNA (1)...(19): siRNA sense strand
ggaguccgcaucucaauaa

SEQ ID NO: 1086508 - RNA, 19 nt, Homo sapiens
  misc_RNA (1)...(19): siRNA sense strand
gagugaagauacacagaaa

SEQ ID NO: 1086509 - RNA, 19 nt, Homo sapiens
  misc_RNA (1)...(19): siRNA sense strand
cgacgacaguccauuggua

SEQ ID NO: 1086510 - RNA, 19 nt, Homo sapiens
  misc_RNA (1)...(19): siRNA sense strand
cacagaaaguuaaagauga

SEQ ID NO: 1086511 - RNA, 19 nt, Homo sapiens
  misc_RNA (1)...(19): siRNA sense strand
gcaaaucacuuggcaacuc

SEQ ID NO: 1086512 - RNA, 19 nt, Homo sapiens
  misc_RNA (1)...(19): siRNA sense strand
caaaccauaucuuuacuca

SEQ ID NO: 1086513 - RNA, 19 nt, Homo sapiens
  misc_RNA (1)...(19): siRNA sense strand
gacaacaaguccucaaauc

SEQ ID NO: 1086514 - RNA, 19 nt, Homo sapiens
  misc_RNA (1)...(19): siRNA sense strand
cagcuaagaaacaacauua

SEQ ID NO: 1086515 - RNA, 19 nt, Homo sapiens
  misc_RNA (1)...(19): siRNA sense strand
gagauuacgucagaugaug

SEQ ID NO: 1086516 - RNA, 19 nt, Homo sapiens
  misc_RNA (1)...(19): siRNA sense strand
gaagagaagaacaaacaga

SEQ ID NO: 1086517 - RNA, 19 nt, Homo sapiens
  misc_RNA (1)...(19): siRNA sense strand
caaaucacuuggcaacuca

SEQ ID NO: 1086518 - RNA, 19 nt, Homo sapiens
  misc_RNA (1)...(19): siRNA sense strand
gauagauucugauguggau

SEQ ID NO: 1086519 - RNA, 19 nt, Homo sapiens
  misc_RNA (1)...(19): siRNA sense strand
aaggagagauuacgucaga

SEQ ID NO: 1086520 - RNA, 19 nt, Homo sapiens
  misc_RNA (1)...(19): siRNA sense strand
agaaagcugugcaugaguu

SEQ ID NO: 1086521 - RNA, 19 nt, Homo sapiens
  misc_RNA (1)...(19): siRNA sense strand
gagaaaggagaaagaaaga

SEQ ID NO: 1086522 - RNA, 19 nt, Homo sapiens
  misc_RNA (1)...(19): siRNA sense strand
guccgcaucucaauaagaa

SEQ ID NO: 1086523 - RNA, 19 nt, Homo sapiens
  misc_RNA (1)...(19): siRNA sense strand
acacuucccuuauuacaca

SEQ ID NO: 1086524 - RNA, 19 nt, Homo sapiens
  misc_RNA (1)...(19): siRNA sense strand
ccacaaaccauaucuuuac

SEQ ID NO: 1086525 - RNA, 19 nt, Homo sapiens
  misc_RNA (1)...(19): siRNA sense strand
uuacagacaucacaguuag

SEQ ID NO: 1086526 - RNA, 19 nt, Homo sapiens
  misc_RNA (1)...(19): siRNA sense strand
gcuagggcuucaacagaaa

SEQ ID NO: 1086527 - RNA, 19 nt, Homo sapiens
  misc_RNA (1)...(19): siRNA sense strand
gcaugcguauguccacaaa

SEQ ID NO: 1086528 - RNA, 19 nt, Homo sapiens
  misc_RNA (1)...(19): siRNA sense strand
aauaagaaccagcuaagaa

SEQ ID NO: 1086529 - RNA, 19 nt, Homo sapiens
  misc_RNA (1)...(19): siRNA sense strand
caacagaaacaucaaaugc

SEQ ID NO: 1086530 - RNA, 19 nt, Homo sapiens
  misc_RNA (1)...(19): siRNA sense strand
ccucaaaucaggaauguug

SEQ ID NO: 1086531 - RNA, 19 nt, Homo sapiens
  misc_RNA (1)...(19): siRNA sense strand
acacagcucccgaugauga

SEQ ID NO: 1086532 - RNA, 19 nt, Homo sapiens
  misc_RNA (1)...(19): siRNA sense strand
caacgacgacaguccauug

SEQ ID NO: 1086533 - RNA, 19 nt, Homo sapiens
  misc_RNA (1)...(19): siRNA sense strand
cccaaagucugaagaguuc

SEQ ID NO: 1086534 - RNA, 19 nt, Homo sapiens
  misc_RNA (1)...(19): siRNA sense strand
gaaagcugugcaugaguuu

SEQ ID NO: 1086535 - RNA, 19 nt, Homo sapiens
  misc_RNA (1)...(19): siRNA sense strand
acaccaagccugcguauca

SEQ ID NO: 1086536 - RNA, 19 nt, Homo sapiens
  misc_RNA (1)...(19): siRNA sense strand
cauaacuucucuuaaccaa

SEQ ID NO: 1086537 - RNA, 19 nt, Homo sapiens
  misc_RNA (1)...(19): siRNA sense strand
aaaccagacacuucccuua

SEQ ID NO: 1086538 - RNA, 19 nt, Homo sapiens
  misc_RNA (1)...(19): siRNA sense strand
gaucaaccacacauucaga

SEQ ID NO: 1086539 - RNA, 19 nt, Homo sapiens
  misc_RNA (1)...(19): siRNA sense strand
augaugagcuuacuguaga

SEQ ID NO: 1086540 - RNA, 19 nt, Homo sapiens
  misc_RNA (1)...(19): siRNA sense strand
ggagagauuacgucagaug

SEQ ID NO: 1086541 - RNA, 19 nt, Homo sapiens
  misc_RNA (1)...(19): siRNA sense strand
ccacugauacuaguacuga

SEQ ID NO: 1086542 - RNA, 19 nt, Homo sapiens
  misc_RNA (1)...(19): siRNA sense strand
caaaugccaagaccaguga

SEQ ID NO: 1086543 - RNA, 19 nt, Homo sapiens
  misc_RNA (1)...(19): siRNA sense strand
gcaacacagcucccgauga

SEQ ID NO: 1086544 - RNA, 19 nt, Homo sapiens
  misc_RNA (1)...(19): siRNA sense strand
caacaaguccucaaaucag

SEQ ID NO: 1086545 - RNA, 19 nt, Homo sapiens
  misc_RNA (1)...(19): siRNA sense strand
cgacaguccauugguauuu

SEQ ID NO: 1086546 - RNA, 19 nt, Homo sapiens
  misc_RNA (1)...(19): siRNA sense strand
acacagaaaguuaaagaug

SEQ ID NO: 1086547 - RNA, 19 nt, Homo sapiens
  misc_RNA (1)...(19): siRNA sense strand
aaccauaacuucucuuaac

SEQ ID NO: 1086548 - RNA, 19 nt, Homo sapiens
  misc_RNA (1)...(19): siRNA sense strand
agagaaagcugugcaugag

SEQ ID NO: 1086549 - RNA, 19 nt, Homo sapiens
  misc_RNA (1)...(19): siRNA sense strand
gaugaugagcuuacuguag

SEQ ID NO: 1086550 - RNA, 19 nt, Homo sapiens
  misc_RNA (1)...(19): siRNA sense strand
ucacaaagaggaaggaagu

SEQ ID NO: 1086551 - RNA, 19 nt, Homo sapiens
  misc_RNA (1)...(19): siRNA sense strand
auaagaaccagcuaagaaa

SEQ ID NO: 1086552 - RNA, 19 nt, Homo sapiens
  misc_RNA (1)...(19): siRNA sense strand
gagagauuacgucagauga

SEQ ID NO: 1086553 - RNA, 19 nt, Homo sapiens
  misc_RNA (1)...(19): siRNA sense strand
uuugauagauucugaugug

SEQ ID NO: 1086554 - RNA, 19 nt, Homo sapiens
  misc_RNA (1)...(19): siRNA sense strand
agacagcaaugagaaagga

SEQ ID NO: 1086555 - RNA, 19 nt, Homo sapiens
  misc_RNA (1)...(19): siRNA sense strand
uagagaaagcugugcauga

SEQ ID NO: 1086556 - RNA, 19 nt, Homo sapiens
  misc_RNA (1)...(19): siRNA sense strand
guccacaaaccauaucuuu

SEQ ID NO: 1086557 - RNA, 19 nt, Homo sapiens
  misc_RNA (1)...(19): siRNA sense strand
ugacaaagaaagaacuuca

SEQ ID NO: 1086558 - RNA, 19 nt, Homo sapiens
  misc_RNA (1)...(19): siRNA sense strand
guucauaccagugaccuuu

SEQ ID NO: 1086559 - RNA, 19 nt, Homo sapiens
  misc_RNA (1)...(19): siRNA sense strand
uaaaucaacagacaaaggu

SEQ ID NO: 1086560 - RNA, 19 nt, Homo sapiens
  misc_RNA (1)...(19): siRNA sense strand
aaagaucaaccacacauuc

SEQ ID NO: 1086561 - RNA, 19 nt, Homo sapiens
  misc_RNA (1)...(19): siRNA sense strand
cauggaagaaggagagauu

SEQ ID NO: 1086562 - RNA, 19 nt, Homo sapiens
  misc_RNA (1)...(19): siRNA sense strand
ccaaugaugccaugucgau

SEQ ID NO: 1086563 - RNA, 19 nt, Homo sapiens
  misc_RNA (1)...(19): siRNA sense strand
gaagaaggagagauuacgu

SEQ ID NO: 1086564 - RNA, 19 nt, Homo sapiens
  misc_RNA (1)...(19): siRNA sense strand
caaagaucaaccacacauu

SEQ ID NO: 1086565 - RNA, 19 nt, Homo sapiens
  misc_RNA (1)...(19): siRNA sense strand
ugagcuuacuguagaacaa

SEQ ID NO: 1086566 - RNA, 19 nt, Homo sapiens
  misc_RNA (1)...(19): siRNA sense strand
ugagaaaggagaaagaaag

SEQ ID NO: 1086567 - RNA, 19 nt, Homo sapiens
  misc_RNA (1)...(19): siRNA sense strand
agacaaaggugaaaagaag

SEQ ID NO: 1086568 - RNA, 19 nt, Homo sapiens
  misc_RNA (1)...(19): siRNA sense strand
ugagacagcguguugacaa

SEQ ID NO: 1086569 - RNA, 19 nt, Homo sapiens
  misc_RNA (1)...(19): siRNA sense strand
agaaccagcuaagaaacaa

SEQ ID NO: 1086570 - RNA, 19 nt, Homo sapiens
  misc_RNA (1)...(19): siRNA sense strand
ucucuuugauagauucuga

SEQ ID NO: 1086571 - RNA, 19 nt, Homo sapiens
  misc_RNA (1)...(19): siRNA sense strand
acaacaaguccucaaauca

SEQ ID NO: 1086572 - RNA, 19 nt, Homo sapiens
  misc_RNA (1)...(19): siRNA sense strand
caggaaagcagugagcaaa

SEQ ID NO: 1086573 - RNA, 19 nt, Homo sapiens
  misc_RNA (1)...(19): siRNA sense strand
ggaaacagccccaaagucu

SEQ ID NO: 1086574 - RNA, 19 nt, Homo sapiens
  misc_RNA (1)...(19): siRNA sense strand
gccaaccacugauacuagu

SEQ ID NO: 1086575 - RNA, 19 nt, Homo sapiens
  misc_RNA (1)...(19): siRNA sense strand
gaugagaaaccagacacuu

SEQ ID NO: 1086576 - RNA, 19 nt, Homo sapiens
  misc_RNA (1)...(19): siRNA sense strand
aagagaagaacaaacagaa

SEQ ID NO: 1086577 - RNA, 19 nt, Homo sapiens
  misc_RNA (1)...(19): siRNA sense strand
ugauguggauggacuuaca

SEQ ID NO: 1086578 - RNA, 19 nt, Homo sapiens
  misc_RNA (1)...(19): siRNA sense strand
caauaagaaccagcuaaga

SEQ ID NO: 1086579 - RNA, 19 nt, Homo sapiens
  misc_RNA (1)...(19): siRNA sense strand
ggaggugaaggacuggaaa

SEQ ID NO: 1086580 - RNA, 19 nt, Homo sapiens
  misc_RNA (1)...(19): siRNA sense strand
acaaagaaagaacuucaga

SEQ ID NO: 1086581 - RNA, 19 nt, Homo sapiens
  misc_RNA (1)...(19): siRNA sense strand
uacuaguacugacaaagaa

SEQ ID NO: 1086582 - RNA, 19 nt, Homo sapiens
  misc_RNA (1)...(19): siRNA sense strand
ccagugagagagcgucaaa

SEQ ID NO: 1086583 - RNA, 19 nt, Homo sapiens
  misc_RNA (1)...(19): siRNA sense strand
caagaagccagugcugcua

SEQ ID NO: 1086584 - RNA, 19 nt, Homo sapiens
  misc_RNA (1)...(19): siRNA sense strand
guauugaccgaauuauuuc

SEQ ID NO: 1086585 - RNA, 19 nt, Homo sapiens
  misc_RNA (1)...(19): siRNA sense strand
accagacacuucccuuauu

SEQ ID NO: 1086586 - RNA, 19 nt, Homo sapiens
  misc_RNA (1)...(19): siRNA sense strand
ccaaagaucaaccacacau

SEQ ID NO: 1086587 - RNA, 19 nt, Homo sapiens
  misc_RNA (1)...(19): siRNA sense strand
gugaagauacacagaaagu

SEQ ID NO: 1086588 - RNA, 19 nt, Homo sapiens
  misc_RNA (1)...(19): siRNA sense strand
ggacaccaagccugcguau

SEQ ID NO: 1086589 - RNA, 19 nt, Homo sapiens
  misc_RNA (1)...(19): siRNA sense strand
ggaauguuggagucuggua

SEQ ID NO: 1086590 - RNA, 19 nt, Homo sapiens
  misc_RNA (1)...(19): siRNA sense strand
gaugccaugucgauauugg

SEQ ID NO: 1086591 - RNA, 19 nt, Homo sapiens
  misc_RNA (1)...(19): siRNA sense strand
cgucagaugaugaagagaa

SEQ ID NO: 1086592 - RNA, 19 nt, Homo sapiens
  misc_RNA (1)...(19): siRNA sense strand
gaacugaccuguacagcuu

SEQ ID NO: 1086593 - RNA, 19 nt, Homo sapiens
  misc_RNA (1)...(19): siRNA sense strand
aaucagggcuccuucuuaa

SEQ ID NO: 1086594 - RNA, 19 nt, Homo sapiens
  misc_RNA (1)...(19): siRNA sense strand
ucaagagacuccucaguga

SEQ ID NO: 1086595 - RNA, 19 nt, Homo sapiens
  misc_RNA (1)...(19): siRNA sense strand
gagcggaugucucagauca

SEQ ID NO: 1086596 - RNA, 19 nt, Homo sapiens
  misc_RNA (1)...(19): siRNA sense strand
gaagaagagcauacaauuc

SEQ ID NO: 1086597 - RNA, 19 nt, Homo sapiens
  misc_RNA (1)...(19): siRNA sense strand
ccagaaggccuccagcaua

SEQ ID NO: 1086598 - RNA, 19 nt, Homo sapiens
  misc_RNA (1)...(19): siRNA sense strand
agauaaagauucugggaaa

SEQ ID NO: 1086599 - RNA, 19 nt, Homo sapiens
  misc_RNA (1)...(19): siRNA sense strand
ccacucgccuuuacaguug

SEQ ID NO: 1086600 - RNA, 19 nt, Homo sapiens
  misc_RNA (1)...(19): siRNA sense strand
gaacaaggaagugucugua

SEQ ID NO: 1086601 - RNA, 19 nt, Homo sapiens
  misc_RNA (1)...(19): siRNA sense strand
acaaggaagugucuguaaa

SEQ ID NO: 1086602 - RNA, 19 nt, Homo sapiens
  misc_RNA (1)...(19): siRNA sense strand
agaagaagguggaguucaa

SEQ ID NO: 1086603 - RNA, 19 nt, Homo sapiens
  misc_RNA (1)...(19): siRNA sense strand
ccagugcccucaccgguuu

SEQ ID NO: 1086604 - RNA, 19 nt, Homo sapiens
  misc_RNA (1)...(19): siRNA sense strand
cagaaggccuccagcauag

SEQ ID NO: 1086605 - RNA, 19 nt, Homo sapiens
  misc_RNA (1)...(19): siRNA sense strand
gaaaucagggcuccuucuu

SEQ ID NO: 1086606 - RNA, 19 nt, Homo sapiens
  misc_RNA (1)...(19): siRNA sense strand
uagaagacucagauacuua

SEQ ID NO: 1086607 - RNA, 19 nt, Homo sapiens
  misc_RNA (1)...(19): siRNA sense strand
gaaaguugcaucaggaagu

SEQ ID NO: 1086608 - RNA, 19 nt, Homo sapiens
  misc_RNA (1)...(19): siRNA sense strand
ggugcuagcuuuccagaag

SEQ ID NO: 1086609 - RNA, 19 nt, Homo sapiens
  misc_RNA (1)...(19): siRNA sense strand
gaagguggaguucaaaaua

SEQ ID NO: 1086610 - RNA, 19 nt, Homo sapiens
  misc_RNA (1)...(19): siRNA sense strand
gauaaagauucugggaaau

SEQ ID NO: 1086611 - RNA, 19 nt, Homo sapiens
  misc_RNA (1)...(19): siRNA sense strand
agaagaagagcauacaauu

SEQ ID NO: 1086612 - RNA, 19 nt, Homo sapiens
  misc_RNA (1)...(19): siRNA sense strand
gaggugcaauugcuagugu

SEQ ID NO: 1086613 - RNA, 19 nt, Homo sapiens
  misc_RNA (1)...(19): siRNA sense strand
gaaggaggaggugcaauug

SEQ ID NO: 1086614 - RNA, 19 nt, Homo sapiens
  misc_RNA (1)...(19): siRNA sense strand
gaagaagguggaguucaaa

SEQ ID NO: 1086615 - RNA, 19 nt, Homo sapiens
  misc_RNA (1)...(19): siRNA sense strand
uaagauagaagacucagau

SEQ ID NO: 1086616 - RNA, 19 nt, Homo sapiens
  misc_RNA (1)...(19): siRNA sense strand
gcagagcggaugucucaga

SEQ ID NO: 1086617 - RNA, 19 nt, Homo sapiens
  misc_RNA (1)...(19): siRNA sense strand
gauagaagacucagauacu

SEQ ID NO: 1086618 - RNA, 19 nt, Homo sapiens
  misc_RNA (1)...(19): siRNA sense strand
ucaagguucugcccacaug

SEQ ID NO: 1086619 - RNA, 19 nt, Homo sapiens
  misc_RNA (1)...(19): siRNA sense strand
agucuuggaucaccuuuga

SEQ ID NO: 1086620 - RNA, 19 nt, Homo sapiens
  misc_RNA (1)...(19): siRNA sense strand
ccuuugaccugaagaacaa

SEQ ID NO: 1086621 - RNA, 19 nt, Homo sapiens
  misc_RNA (1)...(19): siRNA sense strand
gaagaacaaggaagugucu

SEQ ID NO: 1086622 - RNA, 19 nt, Homo sapiens
  misc_RNA (1)...(19): siRNA sense strand
ccucaccgguuucagaaga

SEQ ID NO: 1086623 - RNA, 19 nt, Homo sapiens
  misc_RNA (1)...(19): siRNA sense strand
agacucagauacuuacauc

SEQ ID NO: 1086624 - RNA, 19 nt, Homo sapiens
  misc_RNA (1)...(19): siRNA sense strand
aaaucagggcuccuucuua

SEQ ID NO: 1086625 - RNA, 19 nt, Homo sapiens
  misc_RNA (1)...(19): siRNA sense strand
aagcagagcggaugucuca

SEQ ID NO: 1086626 - RNA, 19 nt, Homo sapiens
  misc_RNA (1)...(19): siRNA sense strand
gaucaccuuugaccugaag

SEQ ID NO: 1086627 - RNA, 19 nt, Homo sapiens
  misc_RNA (1)...(19): siRNA sense strand
agaaggaggaggugcaauu

SEQ ID NO: 1086628 - RNA, 19 nt, Homo sapiens
  misc_RNA (1)...(19): siRNA sense strand
uaacuaaagguccauccaa

SEQ ID NO: 1086629 - RNA, 19 nt, Homo sapiens
  misc_RNA (1)...(19): siRNA sense strand
ugaucgcgcugacucaaga

SEQ ID NO: 1086630 - RNA, 19 nt, Homo sapiens
  misc_RNA (1)...(19): siRNA sense strand
gaagacauguagccccauu

SEQ ID NO: 1086631 - RNA, 19 nt, Homo sapiens
  misc_RNA (1)...(19): siRNA sense strand
ccaaccagauaaagauucu

SEQ ID NO: 1086632 - RNA, 19 nt, Homo sapiens
  misc_RNA (1)...(19): siRNA sense strand
cagaagaagagcauacaau

SEQ ID NO: 1086633 - RNA, 19 nt, Homo sapiens
  misc_RNA (1)...(19): siRNA sense strand
cagggcuccuucuuaacua

SEQ ID NO: 1086634 - RNA, 19 nt, Homo sapiens
  misc_RNA (1)...(19): siRNA sense strand
gcggaugucucagaucaag

SEQ ID NO: 1086635 - RNA, 19 nt, Homo sapiens
  misc_RNA (1)...(19): siRNA sense strand
ggaggaggugcaauugcua

SEQ ID NO: 1086636 - RNA, 19 nt, Homo sapiens
  misc_RNA (1)...(19): siRNA sense strand
auagaagacucagauacuu

SEQ ID NO: 1086637 - RNA, 19 nt, Homo sapiens
  misc_RNA (1)...(19): siRNA sense strand
gaaaguggugcugggcaaa

SEQ ID NO: 1086638 - RNA, 19 nt, Homo sapiens
  misc_RNA (1)...(19): siRNA sense strand
aaacaggaaaguugcauca

SEQ ID NO: 1086639 - RNA, 19 nt, Homo sapiens
  misc_RNA (1)...(19): siRNA sense strand
ggaauccaacaucaagguu

SEQ ID NO: 1086640 - RNA, 19 nt, Homo sapiens
  misc_RNA (1)...(19): siRNA sense strand
cggauugacugccaacucu

SEQ ID NO: 1086641 - RNA, 19 nt, Homo sapiens
  misc_RNA (1)...(19): siRNA sense strand
gauaguggcaccuggacau

SEQ ID NO: 1086642 - RNA, 19 nt, Homo sapiens
  misc_RNA (1)...(19): siRNA sense strand
gauugacugccaacucuga

SEQ ID NO: 1086643 - RNA, 19 nt, Homo sapiens
  misc_RNA (1)...(19): siRNA sense strand
cagagcggaugucucagau

SEQ ID NO: 1086644 - RNA, 19 nt, Homo sapiens
  misc_RNA (1)...(19): siRNA sense strand
aaaguugcaucaggaagug

SEQ ID NO: 1086645 - RNA, 19 nt, Homo sapiens
  misc_RNA (1)...(19): siRNA sense strand
gcacugucuugcagaacca

SEQ ID NO: 1086646 - RNA, 19 nt, Homo sapiens
  misc_RNA (1)...(19): siRNA sense strand
ggcaucuucuucuguguca

SEQ ID NO: 1086647 - RNA, 19 nt, Homo sapiens
  misc_RNA (1)...(19): siRNA sense strand
gaucaagagacuccucagu

SEQ ID NO: 1086648 - RNA, 19 nt, Homo sapiens
  misc_RNA (1)...(19): siRNA sense strand
ggaaaucagggcuccuucu

SEQ ID NO: 1086649 - RNA, 19 nt, Homo sapiens
  misc_RNA (1)...(19): siRNA sense strand
cagcagccacucagggaaa

SEQ ID NO: 1086650 - RNA, 19 nt, Homo sapiens
  misc_RNA (1)...(19): siRNA sense strand
gaaggccuccagcauaguc

SEQ ID NO: 1086651 - RNA, 19 nt, Homo sapiens
  misc_RNA (1)...(19): siRNA sense strand
ggaucaccuuugaccugaa

SEQ ID NO: 1086652 - RNA, 19 nt, Homo sapiens
  misc_RNA (1)...(19): siRNA sense strand
caaggaagugucuguaaaa

SEQ ID NO: 1086653 - RNA, 19 nt, Homo sapiens
  misc_RNA (1)...(19): siRNA sense strand
gaaugaucgcgcugacuca

SEQ ID NO: 1086654 - RNA, 19 nt, Homo sapiens
  misc_RNA (1)...(19): siRNA sense strand
ggaugucucagaucaagag

SEQ ID NO: 1086655 - RNA, 19 nt, Homo sapiens
  misc_RNA (1)...(19): siRNA sense strand
gaaccugguggugaugaga

SEQ ID NO: 1086656 - RNA, 19 nt, Homo sapiens
  misc_RNA (1)...(19): siRNA sense strand
guccauccaagcugaauga

SEQ ID NO: 1086657 - RNA, 19 nt, Homo sapiens
  misc_RNA (1)...(19): siRNA sense strand
cgcgcugacucaagaagaa

SEQ ID NO: 1086658 - RNA, 19 nt, Homo sapiens
  misc_RNA (1)...(19): siRNA sense strand
gacucaagaagaagccuuu

SEQ ID NO: 1086659 - RNA, 19 nt, Homo sapiens
  misc_RNA (1)...(19): siRNA sense strand
aaaaggggauacaguggaa

SEQ ID NO: 1086660 - RNA, 19 nt, Homo sapiens
  misc_RNA (1)...(19): siRNA sense strand
aacaaggaagugucuguaa

SEQ ID NO: 1086661 - RNA, 19 nt, Homo sapiens
  misc_RNA (1)...(19): siRNA sense strand
ccacucagggaaagaaagu

SEQ ID NO: 1086662 - RNA, 19 nt, Homo sapiens
  misc_RNA (1)...(19): siRNA sense strand
aagaagagcauacaauucc

SEQ ID NO: 1086663 - RNA, 19 nt, Homo sapiens
  misc_RNA (1)...(19): siRNA sense strand
gggcuaggcaucuucuucu

SEQ ID NO: 1086664 - RNA, 19 nt, Homo sapiens
  misc_RNA (1)...(19): siRNA sense strand
aagauagaagacucagaua

SEQ ID NO: 1086665 - RNA, 19 nt, Homo sapiens
  misc_RNA (1)...(19): siRNA sense strand
gcccucaccgguuucagaa

SEQ ID NO: 1086666 - RNA, 19 nt, Homo sapiens
  misc_RNA (1)...(19): siRNA sense strand
gcuaggcaucuucuucugu

SEQ ID NO: 1086667 - RNA, 19 nt, Homo sapiens
  misc_RNA (1)...(19): siRNA sense strand
ccagaagaagagcauacaa

SEQ ID NO: 1086668 - RNA, 19 nt, Homo sapiens
  misc_RNA (1)...(19): siRNA sense strand
gccugacccugaccuugga

SEQ ID NO: 1086669 - RNA, 19 nt, Homo sapiens
  misc_RNA (1)...(19): siRNA sense strand
ucagggcuccuucuuaacu

SEQ ID NO: 1086670 - RNA, 19 nt, Homo sapiens
  misc_RNA (1)...(19): siRNA sense strand
aauccaacaucaagguucu

SEQ ID NO: 1086671 - RNA, 19 nt, Homo sapiens
  misc_RNA (1)...(19): siRNA sense strand
ugaaacuggagaacaagga

SEQ ID NO: 1086672 - RNA, 19 nt, Homo sapiens
  misc_RNA (1)...(19): siRNA sense strand
gaaaggaucuaacgggauu

SEQ ID NO: 1086673 - RNA, 19 nt, Homo sapiens
  misc_RNA (1)...(19): siRNA sense strand
ugaaguaacugaagaagaa

SEQ ID NO: 1086674 - RNA, 19 nt, Homo sapiens
  misc_RNA (1)...(19): siRNA sense strand
caaagaagguccuaguuau

SEQ ID NO: 1086675 - RNA, 19 nt, Homo sapiens
  misc_RNA (1)...(19): siRNA sense strand
ccaaagaagguccuaguua

SEQ ID NO: 1086676 - RNA, 19 nt, Homo sapiens
  misc_RNA (1)...(19): siRNA sense strand
ggaacaggcuucacaccaa

SEQ ID NO: 1086677 - RNA, 19 nt, Homo sapiens
  misc_RNA (1)...(19): siRNA sense strand
ggauaucaauuuagacuca

SEQ ID NO: 1086678 - RNA, 19 nt, Homo sapiens
  misc_RNA (1)...(19): siRNA sense strand
aagcugauguucuucaaua

SEQ ID NO: 1086679 - RNA, 19 nt, Homo sapiens
  misc_RNA (1)...(19): siRNA sense strand
gaagauguuacucaugaua

SEQ ID NO: 1086680 - RNA, 19 nt, Homo sapiens
  misc_RNA (1)...(19): siRNA sense strand
gaacaggcuucacaccaau

SEQ ID NO: 1086681 - RNA, 19 nt, Homo sapiens
  misc_RNA (1)...(19): siRNA sense strand
cagauacacuugccaaaga

SEQ ID NO: 1086682 - RNA, 19 nt, Homo sapiens
  misc_RNA (1)...(19): siRNA sense strand
gaauacuucuugggacuuu

SEQ ID NO: 1086683 - RNA, 19 nt, Homo sapiens
  misc_RNA (1)...(19): siRNA sense strand
caccagcucuucuuucuga

SEQ ID NO: 1086684 - RNA, 19 nt, Homo sapiens
  misc_RNA (1)...(19): siRNA sense strand
cuacagaaagugccaguua

SEQ ID NO: 1086685 - RNA, 19 nt, Homo sapiens
  misc_RNA (1)...(19): siRNA sense strand
uggagaagaugaacuaaug

SEQ ID NO: 1086686 - RNA, 19 nt, Homo sapiens
  misc_RNA (1)...(19): siRNA sense strand
gcccuuauauggaguauca

SEQ ID NO: 1086687 - RNA, 19 nt, Homo sapiens
  misc_RNA (1)...(19): siRNA sense strand
gccaugagguucaggaaga

SEQ ID NO: 1086688 - RNA, 19 nt, Homo sapiens
  misc_RNA (1)...(19): siRNA sense strand
aagacuggauguugaauuu

SEQ ID NO: 1086689 - RNA, 19 nt, Homo sapiens
  misc_RNA (1)...(19): siRNA sense strand
gaguaagguugcugcauga

SEQ ID NO: 1086690 - RNA, 19 nt, Homo sapiens
  misc_RNA (1)...(19): siRNA sense strand
uaaaccugcuguucugaaa

SEQ ID NO: 1086691 - RNA, 19 nt, Homo sapiens
  misc_RNA (1)...(19): siRNA sense strand
agaaagugccaguuaauuu

SEQ ID NO: 1086692 - RNA, 19 nt, Homo sapiens
  misc_RNA (1)...(19): siRNA sense strand
gcauaagagguuucguuua

SEQ ID NO: 1086693 - RNA, 19 nt, Homo sapiens
  misc_RNA (1)...(19): siRNA sense strand
ugaauuaugcuuugacuga

SEQ ID NO: 1086694 - RNA, 19 nt, Homo sapiens
  misc_RNA (1)...(19): siRNA sense strand
aggaagauguuacucauga

SEQ ID NO: 1086695 - RNA, 19 nt, Homo sapiens
  misc_RNA (1)...(19): siRNA sense strand
caaggaagauguuacucau

SEQ ID NO: 1086696 - RNA, 19 nt, Homo sapiens
  misc_RNA (1)...(19): siRNA sense strand
gcagcaggaucagauggua

SEQ ID NO: 1086697 - RNA, 19 nt, Homo sapiens
  misc_RNA (1)...(19): siRNA sense strand
uauccaaguuccaagaauu

SEQ ID NO: 1086698 - RNA, 19 nt, Homo sapiens
  misc_RNA (1)...(19): siRNA sense strand
gagguuucguuuauaaugu

SEQ ID NO: 1086699 - RNA, 19 nt, Homo sapiens
  misc_RNA (1)...(19): siRNA sense strand
ggacaaauccaaaguucuc

SEQ ID NO: 1086700 - RNA, 19 nt, Homo sapiens
  misc_RNA (1)...(19): siRNA sense strand
gcaaacagggacauauuuc

SEQ ID NO: 1086701 - RNA, 19 nt, Homo sapiens
  misc_RNA (1)...(19): siRNA sense strand
gaagaagaacuuaagaaac

SEQ ID NO: 1086702 - RNA, 19 nt, Homo sapiens
  misc_RNA (1)...(19): siRNA sense strand
cagaaauaguaaagccaua

SEQ ID NO: 1086703 - RNA, 19 nt, Homo sapiens
  misc_RNA (1)...(19): siRNA sense strand
uacagaaagugccaguuaa

SEQ ID NO: 1086704 - RNA, 19 nt, Homo sapiens
  misc_RNA (1)...(19): siRNA sense strand
gcagaaacaauuauuaagg

SEQ ID NO: 1086705 - RNA, 19 nt, Homo sapiens
  misc_RNA (1)...(19): siRNA sense strand
gaacuuaagaaacacaaca

SEQ ID NO: 1086706 - RNA, 19 nt, Homo sapiens
  misc_RNA (1)...(19): siRNA sense strand
ccauugccauauauacuaa

SEQ ID NO: 1086707 - RNA, 19 nt, Homo sapiens
  misc_RNA (1)...(19): siRNA sense strand
caaggaaagauacagguuu

SEQ ID NO: 1086708 - RNA, 19 nt, Homo sapiens
  misc_RNA (1)...(19): siRNA sense strand
ggauaugcauaagagguuu

SEQ ID NO: 1086709 - RNA, 19 nt, Homo sapiens
  misc_RNA (1)...(19): siRNA sense strand
ggaaagugaagcugauguu

SEQ ID NO: 1086710 - RNA, 19 nt, Homo sapiens
  misc_RNA (1)...(19): siRNA sense strand
guuccaaacagacucuuua

SEQ ID NO: 1086711 - RNA, 19 nt, Homo sapiens
  misc_RNA (1)...(19): siRNA sense strand
gcugcaugaucucaacuuu

SEQ ID NO: 1086712 - RNA, 19 nt, Homo sapiens
  misc_RNA (1)...(19): siRNA sense strand
uaagguugcugcaugaucu

SEQ ID NO: 1086713 - RNA, 19 nt, Homo sapiens
  misc_RNA (1)...(19): siRNA sense strand
aaaggcagguuaauugaag

SEQ ID NO: 1086714 - RNA, 19 nt, Homo sapiens
  misc_RNA (1)...(19): siRNA sense strand
aaggaaagauacagguuug

SEQ ID NO: 1086715 - RNA, 19 nt, Homo sapiens
  misc_RNA (1)...(19): siRNA sense strand
gaauuaugcuuugacugau

SEQ ID NO: 1086716 - RNA, 19 nt, Homo sapiens
  misc_RNA (1)...(19): siRNA sense strand
cagcucuucuuucugaauu

SEQ ID NO: 1086717 - RNA, 19 nt, Homo sapiens
  misc_RNA (1)...(19): siRNA sense strand
cagcaccuauuucugaaug

SEQ ID NO: 1086718 - RNA, 19 nt, Homo sapiens
  misc_RNA (1)...(19): siRNA sense strand
cauuaaaccugcuguucug

SEQ ID NO: 1086719 - RNA, 19 nt, Homo sapiens
  misc_RNA (1)...(19): siRNA sense strand
aaaguucucgucugcauuu

SEQ ID NO: 1086720 - RNA, 19 nt, Homo sapiens
  misc_RNA (1)...(19): siRNA sense strand
ccaaaguucucgucugcau

SEQ ID NO: 1086721 - RNA, 19 nt, Homo sapiens
  misc_RNA (1)...(19): siRNA sense strand
ggcaaacagggacauauuu

SEQ ID NO: 1086722 - RNA, 19 nt, Homo sapiens
  misc_RNA (1)...(19): siRNA sense strand
uaccucaagcuaccuauua

SEQ ID NO: 1086723 - RNA, 19 nt, Homo sapiens
  misc_RNA (1)...(19): siRNA sense strand
ggagaagaugaacuaauga

SEQ ID NO: 1086724 - RNA, 19 nt, Homo sapiens
  misc_RNA (1)...(19): siRNA sense strand
gcaccuauuucugaaugga

SEQ ID NO: 1086725 - RNA, 19 nt, Homo sapiens
  misc_RNA (1)...(19): siRNA sense strand
gacuggauguugaauuugu

SEQ ID NO: 1086726 - RNA, 19 nt, Homo sapiens
  misc_RNA (1)...(19): siRNA sense strand
ggagaagccaauuggagaa

SEQ ID NO: 1086727 - RNA, 19 nt, Homo sapiens
  misc_RNA (1)...(19): siRNA sense strand
ccaccaagcacucaucuuc

SEQ ID NO: 1086728 - RNA, 19 nt, Homo sapiens
  misc_RNA (1)...(19): siRNA sense strand
guucaucguugggucaauu

SEQ ID NO: 1086729 - RNA, 19 nt, Homo sapiens
  misc_RNA (1)...(19): siRNA sense strand
gcugaaagaaugccugguu

SEQ ID NO: 1086730 - RNA, 19 nt, Homo sapiens
  misc_RNA (1)...(19): siRNA sense strand
caaguuccaagaauuagaa

SEQ ID NO: 1086731 - RNA, 19 nt, Homo sapiens
  misc_RNA (1)...(19): siRNA sense strand
ggaagauguuacucaugau

SEQ ID NO: 1086732 - RNA, 19 nt, Homo sapiens
  misc_RNA (1)...(19): siRNA sense strand
uuuauaaugucagcccuua

SEQ ID NO: 1086733 - RNA, 19 nt, Homo sapiens
  misc_RNA (1)...(19): siRNA sense strand
aagugaagcugauguucuu

SEQ ID NO: 1086734 - RNA, 19 nt, Homo sapiens
  misc_RNA (1)...(19): siRNA sense strand
gcaacauguuuaccucaag

SEQ ID NO: 1086735 - RNA, 19 nt, Homo sapiens
  misc_RNA (1)...(19): siRNA sense strand
auacgaggcuuuucuguuu

SEQ ID NO: 1086736 - RNA, 19 nt, Homo sapiens
  misc_RNA (1)...(19): siRNA sense strand
gaaagugaagcugauguuc

SEQ ID NO: 1086737 - RNA, 19 nt, Homo sapiens
  misc_RNA (1)...(19): siRNA sense strand
ggcaacauguuuaccucaa

SEQ ID NO: 1086738 - RNA, 19 nt, Homo sapiens
  misc_RNA (1)...(19): siRNA sense strand
gagagcagcaggaucagau

SEQ ID NO: 1086739 - RNA, 19 nt, Homo sapiens
  misc_RNA (1)...(19): siRNA sense strand
gaugauuguuggauaugca

SEQ ID NO: 1086740 - RNA, 19 nt, Homo sapiens
  misc_RNA (1)...(19): siRNA sense strand
gcugauguucuucaauaaa

SEQ ID NO: 1086741 - RNA, 19 nt, Homo sapiens
  misc_RNA (1)...(19): siRNA sense strand
ccaguucuucccaacaaua

SEQ ID NO: 1086742 - RNA, 19 nt, Homo sapiens
  misc_RNA (1)...(19): siRNA sense strand
ccauugggcaacauguuua

SEQ ID NO: 1086743 - RNA, 19 nt, Homo sapiens
  misc_RNA (1)...(19): siRNA sense strand
ccaaggaagauguuacuca

SEQ ID NO: 1086744 - RNA, 19 nt, Homo sapiens
  misc_RNA (1)...(19): siRNA sense strand
cagaaagugccaguuaauu

SEQ ID NO: 1086745 - RNA, 19 nt, Homo sapiens
  misc_RNA (1)...(19): siRNA sense strand
gaccagugccauuuacaga

SEQ ID NO: 1086746 - RNA, 19 nt, Homo sapiens
  misc_RNA (1)...(19): siRNA sense strand
caaacagggacauauuuca

SEQ ID NO: 1086747 - RNA, 19 nt, Homo sapiens
  misc_RNA (1)...(19): siRNA sense strand
accuguaucugguuccuua

SEQ ID NO: 1086748 - RNA, 19 nt, Homo sapiens
  misc_RNA (1)...(19): siRNA sense strand
gauaaaagacuggauguug

SEQ ID NO: 1086749 - RNA, 19 nt, Homo sapiens
  misc_RNA (1)...(19): siRNA sense strand
aauccaugcugaaagaaug

SEQ ID NO: 1086750 - RNA, 19 nt, Homo sapiens
  misc_RNA (1)...(19): siRNA sense strand
gagaagccaauuggagaaa

SEQ ID NO: 1086751 - RNA, 19 nt, Homo sapiens
  misc_RNA (1)...(19): siRNA sense strand
agauacacuugccaaagaa

SEQ ID NO: 1086752 - RNA, 19 nt, Homo sapiens
  misc_RNA (1)...(19): siRNA sense strand
cuaaacagaaggauaucaa

SEQ ID NO: 1086753 - RNA, 19 nt, Homo sapiens
  misc_RNA (1)...(19): siRNA sense strand
guucucgucugcauuugug

SEQ ID NO: 1086754 - RNA, 19 nt, Homo sapiens
  misc_RNA (1)...(19): siRNA sense strand
gauguugaauuuguucucu

SEQ ID NO: 1086755 - RNA, 19 nt, Homo sapiens
  misc_RNA (1)...(19): siRNA sense strand
augaauccaugcugaaaga

SEQ ID NO: 1086756 - RNA, 19 nt, Homo sapiens
  misc_RNA (1)...(19): siRNA sense strand
ugaauggaauggcaaacag

SEQ ID NO: 1086757 - RNA, 19 nt, Homo sapiens
  misc_RNA (1)...(19): siRNA sense strand
gccaguuaauuuccaagga

SEQ ID NO: 1086758 - RNA, 19 nt, Homo sapiens
  misc_RNA (1)...(19): siRNA sense strand
cuaguuauccaagcuauga

SEQ ID NO: 1086759 - RNA, 19 nt, Homo sapiens
  misc_RNA (1)...(19): siRNA sense strand
gauuguuggauaugcauaa

SEQ ID NO: 1086760 - RNA, 19 nt, Homo sapiens
  misc_RNA (1)...(19): siRNA sense strand
aaugagagcagcaggauca

SEQ ID NO: 1086761 - RNA, 19 nt, Homo sapiens
  misc_RNA (1)...(19): siRNA sense strand
gagcuugaucgucuucaga

SEQ ID NO: 1086762 - RNA, 19 nt, Homo sapiens
  misc_RNA (1)...(19): siRNA sense strand
ccuauuacagguacagaaa

SEQ ID NO: 1086763 - RNA, 19 nt, Homo sapiens
  misc_RNA (1)...(19): siRNA sense strand
cuuuagagcagaaacaauu

SEQ ID NO: 1086764 - RNA, 19 nt, Homo sapiens
  misc_RNA (1)...(19): siRNA sense strand
agucuuaaauggcaugcuu

SEQ ID NO: 1086765 - RNA, 19 nt, Homo sapiens
  misc_RNA (1)...(19): siRNA sense strand
gaauccaugcugaaagaau

SEQ ID NO: 1086766 - RNA, 19 nt, Homo sapiens
  misc_RNA (1)...(19): siRNA sense strand
aaccugcuguucugaaaga

SEQ ID NO: 1086767 - RNA, 19 nt, Homo sapiens
  misc_RNA (1)...(19): siRNA sense strand
aaccaguucuucccaacaa

SEQ ID NO: 1086768 - RNA, 19 nt, Homo sapiens
  misc_RNA (1)...(19): siRNA sense strand
uagucaccauugccauaua

SEQ ID NO: 1086769 - RNA, 19 nt, Homo sapiens
  misc_RNA (1)...(19): siRNA sense strand
gaagaacuuaagaaacaca

SEQ ID NO: 1086770 - RNA, 19 nt, Homo sapiens
  misc_RNA (1)...(19): siRNA sense strand
cugcuguucugaaagacua

SEQ ID NO: 1086771 - RNA, 19 nt, Homo sapiens
  misc_RNA (1)...(19): siRNA sense strand
guaucauccugguggagaa

SEQ ID NO: 1086772 - RNA, 19 nt, Homo sapiens
  misc_RNA (1)...(19): siRNA sense strand
gaacauagcaaaccauuga

SEQ ID NO: 1086773 - RNA, 19 nt, Homo sapiens
  misc_RNA (1)...(19): siRNA sense strand
cuacagagcuaacuacaaa

SEQ ID NO: 1086774 - RNA, 19 nt, Homo sapiens
  misc_RNA (1)...(19): siRNA sense strand
gcauggagguggucuauga

SEQ ID NO: 1086775 - RNA, 19 nt, Homo sapiens
  misc_RNA (1)...(19): siRNA sense strand
gaagcugagucaagaaauu

SEQ ID NO: 1086776 - RNA, 19 nt, Homo sapiens
  misc_RNA (1)...(19): siRNA sense strand
ggagaccgcugcagauaug

SEQ ID NO: 1086777 - RNA, 19 nt, Homo sapiens
  misc_RNA (1)...(19): siRNA sense strand
cagcgaggguacuguauuu

SEQ ID NO: 1086778 - RNA, 19 nt, Homo sapiens
  misc_RNA (1)...(19): siRNA sense strand
augaugagcuggaagauuu

SEQ ID NO: 1086779 - RNA, 19 nt, Homo sapiens
  misc_RNA (1)...(19): siRNA sense strand
gaagagaagcagaaacuca

SEQ ID NO: 1086780 - RNA, 19 nt, Homo sapiens
  misc_RNA (1)...(19): siRNA sense strand
gaacaacagccacaacauc

SEQ ID NO: 1086781 - RNA, 19 nt, Homo sapiens
  misc_RNA (1)...(19): siRNA sense strand
ucaagucucucaucgauag

SEQ ID NO: 1086782 - RNA, 19 nt, Homo sapiens
  misc_RNA (1)...(19): siRNA sense strand
gaaagaagagaagcagaaa

SEQ ID NO: 1086783 - RNA, 19 nt, Homo sapiens
  misc_RNA (1)...(19): siRNA sense strand
cauaucaaaucgugcauug

SEQ ID NO: 1086784 - RNA, 19 nt, Homo sapiens
  misc_RNA (1)...(19): siRNA sense strand
ugacaacgaugaagaagag

SEQ ID NO: 1086785 - RNA, 19 nt, Homo sapiens
  misc_RNA (1)...(19): siRNA sense strand
gaagaugagugggacuugu

SEQ ID NO: 1086786 - RNA, 19 nt, Homo sapiens
  misc_RNA (1)...(19): siRNA sense strand
gagugggacuuguuucaug

SEQ ID NO: 1086787 - RNA, 19 nt, Homo sapiens
  misc_RNA (1)...(19): siRNA sense strand
ggagguggucuaugagaaa

SEQ ID NO: 1086788 - RNA, 19 nt, Homo sapiens
  misc_RNA (1)...(19): siRNA sense strand
cgaggguacuguauuuaug

SEQ ID NO: 1086789 - RNA, 19 nt, Homo sapiens
  misc_RNA (1)...(19): siRNA sense strand
gagaggagccacagagaca

SEQ ID NO: 1086790 - RNA, 19 nt, Homo sapiens
  misc_RNA (1)...(19): siRNA sense strand
ccucaagucucucaucgau

SEQ ID NO: 1086791 - RNA, 19 nt, Homo sapiens
  misc_RNA (1)...(19): siRNA sense strand
gcaaguggaggagugcuaa

SEQ ID NO: 1086792 - RNA, 19 nt, Homo sapiens
  misc_RNA (1)...(19): siRNA sense strand
gagauguugcuuaugcuuu

SEQ ID NO: 1086793 - RNA, 19 nt, Homo sapiens
  misc_RNA (1)...(19): siRNA sense strand
agagcuaacuacaaaguca

SEQ ID NO: 1086794 - RNA, 19 nt, Homo sapiens
  misc_RNA (1)...(19): siRNA sense strand
gaaauacaaggaggcaaug

SEQ ID NO: 1086795 - RNA, 19 nt, Homo sapiens
  misc_RNA (1)...(19): siRNA sense strand
uaaggaaggagacaacugu

SEQ ID NO: 1086796 - RNA, 19 nt, Homo sapiens
  misc_RNA (1)...(19): siRNA sense strand
ggcgagauguugcuuaugc

SEQ ID NO: 1086797 - RNA, 19 nt, Homo sapiens
  misc_RNA (1)...(19): siRNA sense strand
agaaagaagagaagcagaa

SEQ ID NO: 1086798 - RNA, 19 nt, Homo sapiens
  misc_RNA (1)...(19): siRNA sense strand
gcgaagcugagucaagaaa

SEQ ID NO: 1086799 - RNA, 19 nt, Homo sapiens
  misc_RNA (1)...(19): siRNA sense strand
gcgaggguacuguauuuau

SEQ ID NO: 1086800 - RNA, 19 nt, Homo sapiens
  misc_RNA (1)...(19): siRNA sense strand
aggcgaagcugagucaaga

SEQ ID NO: 1086801 - RNA, 19 nt, Homo sapiens
  misc_RNA (1)...(19): siRNA sense strand
gacaguccguauaguguag

SEQ ID NO: 1086802 - RNA, 19 nt, Homo sapiens
  misc_RNA (1)...(19): siRNA sense strand
gcucagugaccaaggaaga

SEQ ID NO: 1086803 - RNA, 19 nt, Homo sapiens
  misc_RNA (1)...(19): siRNA sense strand
cggagauucuugugacaug

SEQ ID NO: 1086804 - RNA, 19 nt, Homo sapiens
  misc_RNA (1)...(19): siRNA sense strand
ugacaguccguauagugua

SEQ ID NO: 1086805 - RNA, 19 nt, Homo sapiens
  misc_RNA (1)...(19): siRNA sense strand
ggagauucuugugacaugu

SEQ ID NO: 1086806 - RNA, 19 nt, Homo sapiens
  misc_RNA (1)...(19): siRNA sense strand
ucaagugcauucgcaagug

SEQ ID NO: 1086807 - RNA, 19 nt, Homo sapiens
  misc_RNA (1)...(19): siRNA sense strand
gaaacaggaagaagcaacu

SEQ ID NO: 1086808 - RNA, 19 nt, Homo sapiens
  misc_RNA (1)...(19): siRNA sense strand
gagaagcagaaacucauuc

SEQ ID NO: 1086809 - RNA, 19 nt, Homo sapiens
  misc_RNA (1)...(19): siRNA sense strand
ggaacaacagccacaacau

SEQ ID NO: 1086810 - RNA, 19 nt, Homo sapiens
  misc_RNA (1)...(19): siRNA sense strand
acaucuaacuuugucauuc

SEQ ID NO: 1086811 - RNA, 19 nt, Homo sapiens
  misc_RNA (1)...(19): siRNA sense strand
gagguggucuaugagaaag

SEQ ID NO: 1086812 - RNA, 19 nt, Homo sapiens
  misc_RNA (1)...(19): siRNA sense strand
uggagguggucuaugagaa

SEQ ID NO: 1086813 - RNA, 19 nt, Homo sapiens
  misc_RNA (1)...(19): siRNA sense strand
agugggacuuguuucauga

SEQ ID NO: 1086814 - RNA, 19 nt, Homo sapiens
  misc_RNA (1)...(19): siRNA sense strand
aaacuuugcaacuguagga

SEQ ID NO: 1086815 - RNA, 19 nt, Homo sapiens
  misc_RNA (1)...(19): siRNA sense strand
ugggcgagauguugcuuau

SEQ ID NO: 1086816 - RNA, 19 nt, Homo sapiens
  misc_RNA (1)...(19): siRNA sense strand
gaggguacuguauuuaugg

SEQ ID NO: 1086817 - RNA, 19 nt, Homo sapiens
  misc_RNA (1)...(19): siRNA sense strand
acaaggaggcaaugagcaa

SEQ ID NO: 1086818 - RNA, 19 nt, Homo sapiens
  misc_RNA (1)...(19): siRNA sense strand
caucuaacuuugucauucc

SEQ ID NO: 1086819 - RNA, 19 nt, Homo sapiens
  misc_RNA (1)...(19): siRNA sense strand
gcuacagagcuaacuacaa

SEQ ID NO: 1086820 - RNA, 19 nt, Homo sapiens
  misc_RNA (1)...(19): siRNA sense strand
guaaggaaggagacaacug

SEQ ID NO: 1086821 - RNA, 19 nt, Homo sapiens
  misc_RNA (1)...(19): siRNA sense strand
gcauaucaaaucgugcauu

SEQ ID NO: 1086822 - RNA, 19 nt, Homo sapiens
  misc_RNA (1)...(19): siRNA sense strand
cguauaguguagugugcaa

SEQ ID NO: 1086823 - RNA, 19 nt, Homo sapiens
  misc_RNA (1)...(19): siRNA sense strand
aagaagagaagcagaaacu

SEQ ID NO: 1086824 - RNA, 19 nt, Homo sapiens
  misc_RNA (1)...(19): siRNA sense strand
ggaggagaaagaagagaag

SEQ ID NO: 1086825 - RNA, 19 nt, Homo sapiens
  misc_RNA (1)...(19): siRNA sense strand
aacaacagccacaacauca

SEQ ID NO: 1086826 - RNA, 19 nt, Homo sapiens
  misc_RNA (1)...(19): siRNA sense strand
gcaugggguuuguaaggaa

SEQ ID NO: 1086827 - RNA, 19 nt, Homo sapiens
  misc_RNA (1)...(19): siRNA sense strand
ggguggaggagaaagaaga

SEQ ID NO: 1086828 - RNA, 19 nt, Homo sapiens
  misc_RNA (1)...(19): siRNA sense strand
ugaccaaggaagaaucaga

SEQ ID NO: 1086829 - RNA, 19 nt, Homo sapiens
  misc_RNA (1)...(19): siRNA sense strand
guacuggguggaggagaaa

SEQ ID NO: 1086830 - RNA, 19 nt, Homo sapiens
  misc_RNA (1)...(19): siRNA sense strand
gcaacucccggaacaacag

SEQ ID NO: 1086831 - RNA, 19 nt, Homo sapiens
  misc_RNA (1)...(19): siRNA sense strand
caugaugagcuggaagauu

SEQ ID NO: 1086832 - RNA, 19 nt, Homo sapiens
  misc_RNA (1)...(19): siRNA sense strand
aguacuggguggaggagaa

SEQ ID NO: 1086833 - RNA, 19 nt, Homo sapiens
  misc_RNA (1)...(19): siRNA sense strand
ucagcgaggguacuguauu

SEQ ID NO: 1086834 - RNA, 19 nt, Homo sapiens
  misc_RNA (1)...(19): siRNA sense strand
gcuucgggauccucuccaa

SEQ ID NO: 1086835 - RNA, 19 nt, Homo sapiens
  misc_RNA (1)...(19): siRNA sense strand
aguguagugugcaaguauu

SEQ ID NO: 1086836 - RNA, 19 nt, Homo sapiens
  misc_RNA (1)...(19): siRNA sense strand
acauagcaaaccauugaaa

SEQ ID NO: 1086837 - RNA, 19 nt, Homo sapiens
  misc_RNA (1)...(19): siRNA sense strand
gagauucuugugacaugug

SEQ ID NO: 1086838 - RNA, 19 nt, Homo sapiens
  misc_RNA (1)...(19): siRNA sense strand
gggagaacuguguguaucu

SEQ ID NO: 1086839 - RNA, 19 nt, Homo sapiens
  misc_RNA (1)...(19): siRNA sense strand
auaguguagugugcaagua

SEQ ID NO: 1086840 - RNA, 19 nt, Homo sapiens
  misc_RNA (1)...(19): siRNA sense strand
ucgcaugaccucucugaca

SEQ ID NO: 1086841 - RNA, 19 nt, Homo sapiens
  misc_RNA (1)...(19): siRNA sense strand
cuacucgcaugaccucucu

SEQ ID NO: 1086842 - RNA, 19 nt, Homo sapiens
  misc_RNA (1)...(19): siRNA sense strand
ccuuugagcugggcgagau

SEQ ID NO: 1086843 - RNA, 19 nt, Homo sapiens
  misc_RNA (1)...(19): siRNA sense strand
gauguugaaugaugcuuua

SEQ ID NO: 1086844 - RNA, 19 nt, Homo sapiens
  misc_RNA (1)...(19): siRNA sense strand
gcacauggccuuugcagaa

SEQ ID NO: 1086845 - RNA, 19 nt, Homo sapiens
  misc_RNA (1)...(19): siRNA sense strand
cagcagaguucuaaacaaa

SEQ ID NO: 1086846 - RNA, 19 nt, Homo sapiens
  misc_RNA (1)...(19): siRNA sense strand
caaauguccuugagauuga

SEQ ID NO: 1086847 - RNA, 19 nt, Homo sapiens
  misc_RNA (1)...(19): siRNA sense strand
ccagauauauuucagaguu

SEQ ID NO: 1086848 - RNA, 19 nt, Homo sapiens
  misc_RNA (1)...(19): siRNA sense strand
uaagaaugcuguuucaaug

SEQ ID NO: 1086849 - RNA, 19 nt, Homo sapiens
  misc_RNA (1)...(19): siRNA sense strand
caaaugugcucacgauguu

SEQ ID NO: 1086850 - RNA, 19 nt, Homo sapiens
  misc_RNA (1)...(19): siRNA sense strand
gugaaagccuucuugguuu

SEQ ID NO: 1086851 - RNA, 19 nt, Homo sapiens
  misc_RNA (1)...(19): siRNA sense strand
caacugacacugauacaaa

SEQ ID NO: 1086852 - RNA, 19 nt, Homo sapiens
  misc_RNA (1)...(19): siRNA sense strand
gcaaauguccuugagauug

SEQ ID NO: 1086853 - RNA, 19 nt, Homo sapiens
  misc_RNA (1)...(19): siRNA sense strand
gaaacucuacucuauaaga

SEQ ID NO: 1086854 - RNA, 19 nt, Homo sapiens
  misc_RNA (1)...(19): siRNA sense strand
ucaccuuccucacuucuua

SEQ ID NO: 1086855 - RNA, 19 nt, Homo sapiens
  misc_RNA (1)...(19): siRNA sense strand
gcgcaucgcauuccuguuu

SEQ ID NO: 1086856 - RNA, 19 nt, Homo sapiens
  misc_RNA (1)...(19): siRNA sense strand
gagaagcacagagauauuu

SEQ ID NO: 1086857 - RNA, 19 nt, Homo sapiens
  misc_RNA (1)...(19): siRNA sense strand
agaaugcuguuucaaugua

SEQ ID NO: 1086858 - RNA, 19 nt, Homo sapiens
  misc_RNA (1)...(19): siRNA sense strand
gaaaagagagccuucaaaa

SEQ ID NO: 1086859 - RNA, 19 nt, Homo sapiens
  misc_RNA (1)...(19): siRNA sense strand
gaucaugcacuuacucuga

SEQ ID NO: 1086860 - RNA, 19 nt, Homo sapiens
  misc_RNA (1)...(19): siRNA sense strand
gagcugugcuuuggaauuc

SEQ ID NO: 1086861 - RNA, 19 nt, Homo sapiens
  misc_RNA (1)...(19): siRNA sense strand
gaaugaugcuuuaacacau

SEQ ID NO: 1086862 - RNA, 19 nt, Homo sapiens
  misc_RNA (1)...(19): siRNA sense strand
uaagaagggacaaguaauu

SEQ ID NO: 1086863 - RNA, 19 nt, Homo sapiens
  misc_RNA (1)...(19): siRNA sense strand
ugacauggguguuccacuu

SEQ ID NO: 1086864 - RNA, 19 nt, Homo sapiens
  misc_RNA (1)...(19): siRNA sense strand
ucagagcacuggugaagga

SEQ ID NO: 1086865 - RNA, 19 nt, Homo sapiens
  misc_RNA (1)...(19): siRNA sense strand
gagaggagaaccugauuug

SEQ ID NO: 1086866 - RNA, 19 nt, Homo sapiens
  misc_RNA (1)...(19): siRNA sense strand
cauaagaagggacaaguaa

SEQ ID NO: 1086867 - RNA, 19 nt, Homo sapiens
  misc_RNA (1)...(19): siRNA sense strand
gcacagagauauuuugauc

SEQ ID NO: 1086868 - RNA, 19 nt, Homo sapiens
  misc_RNA (1)...(19): siRNA sense strand
gaagggacaaguaauuaau

SEQ ID NO: 1086869 - RNA, 19 nt, Homo sapiens
  misc_RNA (1)...(19): siRNA sense strand
gcagcagaguucuaaacaa

SEQ ID NO: 1086870 - RNA, 19 nt, Homo sapiens
  misc_RNA (1)...(19): siRNA sense strand
caacuucauucaucaugga

SEQ ID NO: 1086871 - RNA, 19 nt, Homo sapiens
  misc_RNA (1)...(19): siRNA sense strand
guaagcagccugagucugu

SEQ ID NO: 1086872 - RNA, 19 nt, Homo sapiens
  misc_RNA (1)...(19): siRNA sense strand
gagcacuggugaaggagaa

SEQ ID NO: 1086873 - RNA, 19 nt, Homo sapiens
  misc_RNA (1)...(19): siRNA sense strand
gaugagcacacaaauguug

SEQ ID NO: 1086874 - RNA, 19 nt, Homo sapiens
  misc_RNA (1)...(19): siRNA sense strand
uaacuuuguucacucauuc

SEQ ID NO: 1086875 - RNA, 19 nt, Homo sapiens
  misc_RNA (1)...(19): siRNA sense strand
gcacuuacucugagaaaca

SEQ ID NO: 1086876 - RNA, 19 nt, Homo sapiens
  misc_RNA (1)...(19): siRNA sense strand
uaggcaaacucucagauga

SEQ ID NO: 1086877 - RNA, 19 nt, Homo sapiens
  misc_RNA (1)...(19): siRNA sense strand
gaacagaguggacuuacag

SEQ ID NO: 1086878 - RNA, 19 nt, Homo sapiens
  misc_RNA (1)...(19): siRNA sense strand
ucauaaagcauugcagaua

SEQ ID NO: 1086879 - RNA, 19 nt, Homo sapiens
  misc_RNA (1)...(19): siRNA sense strand
cuggacagcuuucuuauag

SEQ ID NO: 1086880 - RNA, 19 nt, Homo sapiens
  misc_RNA (1)...(19): siRNA sense strand
gauuaaagaguaccuuaga

SEQ ID NO: 1086881 - RNA, 19 nt, Homo sapiens
  misc_RNA (1)...(19): siRNA sense strand
ggaacagaguggacuuaca

SEQ ID NO: 1086882 - RNA, 19 nt, Homo sapiens
  misc_RNA (1)...(19): siRNA sense strand
gaaugcuguuucaauguau

SEQ ID NO: 1086883 - RNA, 19 nt, Homo sapiens
  misc_RNA (1)...(19): siRNA sense strand
agucagcucugucugguuu

SEQ ID NO: 1086884 - RNA, 19 nt, Homo sapiens
  misc_RNA (1)...(19): siRNA sense strand
ugaaagccuucuugguuug

SEQ ID NO: 1086885 - RNA, 19 nt, Homo sapiens
  misc_RNA (1)...(19): siRNA sense strand
ggacaaguaauuaauuugg

SEQ ID NO: 1086886 - RNA, 19 nt, Homo sapiens
  misc_RNA (1)...(19): siRNA sense strand
cauaaagcauugcagauac

SEQ ID NO: 1086887 - RNA, 19 nt, Homo sapiens
  misc_RNA (1)...(19): siRNA sense strand
uagaugagcacacaaaugu

SEQ ID NO: 1086888 - RNA, 19 nt, Homo sapiens
  misc_RNA (1)...(19): siRNA sense strand
gaguuaugaucgauugcua

SEQ ID NO: 1086889 - RNA, 19 nt, Homo sapiens
  misc_RNA (1)...(19): siRNA sense strand
ucagaguuaugaucgauug

SEQ ID NO: 1086890 - RNA, 19 nt, Homo sapiens
  misc_RNA (1)...(19): siRNA sense strand
ggagaagcacagagauauu

SEQ ID NO: 1086891 - RNA, 19 nt, Homo sapiens
  misc_RNA (1)...(19): siRNA sense strand
ggaucaacuucauucauca

SEQ ID NO: 1086892 - RNA, 19 nt, Homo sapiens
  misc_RNA (1)...(19): siRNA sense strand
ccucacuucuuauugcuaa

SEQ ID NO: 1086893 - RNA, 19 nt, Homo sapiens
  misc_RNA (1)...(19): siRNA sense strand
caauagaugagcacacaaa

SEQ ID NO: 1086894 - RNA, 19 nt, Homo sapiens
  misc_RNA (1)...(19): siRNA sense strand
cuuacugccuucuuaauga

SEQ ID NO: 1086895 - RNA, 19 nt, Homo sapiens
  misc_RNA (1)...(19): siRNA sense strand
ggauaugucaccauguuga

SEQ ID NO: 1086896 - RNA, 19 nt, Homo sapiens
  misc_RNA (1)...(19): siRNA sense strand
gcaaggugauuauuuugaa

SEQ ID NO: 1086897 - RNA, 19 nt, Homo sapiens
  misc_RNA (1)...(19): siRNA sense strand
gguuaagaaugcuguuuca

SEQ ID NO: 1086898 - RNA, 19 nt, Homo sapiens
  misc_RNA (1)...(19): siRNA sense strand
cuguuugacuccacucuua

SEQ ID NO: 1086899 - RNA, 19 nt, Homo sapiens
  misc_RNA (1)...(19): siRNA sense strand
aagaagggacaaguaauua

SEQ ID NO: 1086900 - RNA, 19 nt, Homo sapiens
  misc_RNA (1)...(19): siRNA sense strand
guugaaugaugcuuuaaca

SEQ ID NO: 1086901 - RNA, 19 nt, Homo sapiens
  misc_RNA (1)...(19): siRNA sense strand
ccucaaaugugcucacgau

SEQ ID NO: 1086902 - RNA, 19 nt, Homo sapiens
  misc_RNA (1)...(19): siRNA sense strand
gaccagcuaucccagaagu

SEQ ID NO: 1086903 - RNA, 19 nt, Homo sapiens
  misc_RNA (1)...(19): siRNA sense strand
cagauuaaagaguaccuua

SEQ ID NO: 1086904 - RNA, 19 nt, Homo sapiens
  misc_RNA (1)...(19): siRNA sense strand
ugugaaagccuucuugguu

SEQ ID NO: 1086905 - RNA, 19 nt, Homo sapiens
  misc_RNA (1)...(19): siRNA sense strand
ccucuuacauuccaguaga

SEQ ID NO: 1086906 - RNA, 19 nt, Homo sapiens
  misc_RNA (1)...(19): siRNA sense strand
cgaauuaaaccggaaaguu

SEQ ID NO: 1086907 - RNA, 19 nt, Homo sapiens
  misc_RNA (1)...(19): siRNA sense strand
ggaguacagagucauuuga

SEQ ID NO: 1086908 - RNA, 19 nt, Homo sapiens
  misc_RNA (1)...(19): siRNA sense strand
ugaaacagaacuacaagga

SEQ ID NO: 1086909 - RNA, 19 nt, Homo sapiens
  misc_RNA (1)...(19): siRNA sense strand
acacgaagcgcaucgcauu

SEQ ID NO: 1086910 - RNA, 19 nt, Homo sapiens
  misc_RNA (1)...(19): siRNA sense strand
guaaaugggaguacagagu

SEQ ID NO: 1086911 - RNA, 19 nt, Homo sapiens
  misc_RNA (1)...(19): siRNA sense strand
uaccuuagauccacagaag

SEQ ID NO: 1086912 - RNA, 19 nt, Homo sapiens
  misc_RNA (1)...(19): siRNA sense strand
uauuggauauucacacaga

SEQ ID NO: 1086913 - RNA, 19 nt, Homo sapiens
  misc_RNA (1)...(19): siRNA sense strand
ugaaugaugcuuuaacaca

SEQ ID NO: 1086914 - RNA, 19 nt, Homo sapiens
  misc_RNA (1)...(19): siRNA sense strand
gagugcaaggugauuauuu

SEQ ID NO: 1086915 - RNA, 19 nt, Homo sapiens
  misc_RNA (1)...(19): siRNA sense strand
uggaucaacuucauucauc

SEQ ID NO: 1086916 - RNA, 19 nt, Homo sapiens
  misc_RNA (1)...(19): siRNA sense strand
ugaaggagaagcacagaga

SEQ ID NO: 1086917 - RNA, 19 nt, Homo sapiens
  misc_RNA (1)...(19): siRNA sense strand
ucucuggacagcuuucuua

SEQ ID NO: 1086918 - RNA, 19 nt, Homo sapiens
  misc_RNA (1)...(19): siRNA sense strand
ugaaguaggcaaacucuca

SEQ ID NO: 1086919 - RNA, 19 nt, Homo sapiens
  misc_RNA (1)...(19): siRNA sense strand
gcaucgcauuccuguuuga

SEQ ID NO: 1086920 - RNA, 19 nt, Homo sapiens
  misc_RNA (1)...(19): siRNA sense strand
gaaaagucaugcagucaca

SEQ ID NO: 1086921 - RNA, 19 nt, Homo sapiens
  misc_RNA (1)...(19): siRNA sense strand
cacauggccuuugcagaaa

SEQ ID NO: 1086922 - RNA, 19 nt, Homo sapiens
  misc_RNA (1)...(19): siRNA sense strand
gaaaacugccagauauauu

SEQ ID NO: 1086923 - RNA, 19 nt, Homo sapiens
  misc_RNA (1)...(19): siRNA sense strand
ccauaagaagggacaagua

SEQ ID NO: 1086924 - RNA, 19 nt, Homo sapiens
  misc_RNA (1)...(19): siRNA sense strand
gcuaaucuccauuugcaau

SEQ ID NO: 1086925 - RNA, 19 nt, Homo sapiens
  misc_RNA (1)...(19): siRNA sense strand
gaguacagagucauuugaa

SEQ ID NO: 1086926 - RNA, 19 nt, Homo sapiens
  misc_RNA (1)...(19): siRNA sense strand
gagagaggagaaccugauu

SEQ ID NO: 1086927 - RNA, 19 nt, Homo sapiens
  misc_RNA (1)...(19): siRNA sense strand
ucaugauccuggaguaguu

SEQ ID NO: 1086928 - RNA, 19 nt, Homo sapiens
  misc_RNA (1)...(19): siRNA sense strand
ucaaaugugcucacgaugu

SEQ ID NO: 1086929 - RNA, 19 nt, Homo sapiens
  misc_RNA (1)...(19): siRNA sense strand
agaagggacaaguaauuaa

SEQ ID NO: 1086930 - RNA, 19 nt, Homo sapiens
  misc_RNA (1)...(19): siRNA sense strand
uuuaacacauucugcaguu

SEQ ID NO: 1086931 - RNA, 19 nt, Homo sapiens
  misc_RNA (1)...(19): siRNA sense strand
caugucccauuuccauuug

SEQ ID NO: 1086932 - RNA, 19 nt, Homo sapiens
  misc_RNA (1)...(19): siRNA sense strand
ccaugucccauuuccauuu

SEQ ID NO: 1086933 - RNA, 19 nt, Homo sapiens
  misc_RNA (1)...(19): siRNA sense strand
agccagaccaacccaauua

SEQ ID NO: 1086934 - RNA, 19 nt, Homo sapiens
  misc_RNA (1)...(19): siRNA sense strand
gauaugucaccauguugaa

SEQ ID NO: 1086935 - RNA, 19 nt, Homo sapiens
  misc_RNA (1)...(19): siRNA sense strand
cacucuuacugccuucuua

SEQ ID NO: 1086936 - RNA, 19 nt, Homo sapiens
  misc_RNA (1)...(19): siRNA sense strand
cauugcagauacuaaggaa

SEQ ID NO: 1086937 - RNA, 19 nt, Homo sapiens
  misc_RNA (1)...(19): siRNA sense strand
aaugaaauccggccuguca

SEQ ID NO: 1086938 - RNA, 19 nt, Homo sapiens
  misc_RNA (1)...(19): siRNA sense strand
uugcaaauguccuugagau

SEQ ID NO: 1086939 - RNA, 19 nt, Homo sapiens
  misc_RNA (1)...(19): siRNA sense strand
aaggagaagcacagagaua

SEQ ID NO: 1086940 - RNA, 19 nt, Homo sapiens
  misc_RNA (1)...(19): siRNA sense strand
gaaggagaagcacagagau

SEQ ID NO: 1086941 - RNA, 19 nt, Homo sapiens
  misc_RNA (1)...(19): siRNA sense strand
gucaugcagucacaauguu

SEQ ID NO: 1086942 - RNA, 19 nt, Homo sapiens
  misc_RNA (1)...(19): siRNA sense strand
ccacaacagaagcagauug

SEQ ID NO: 1086943 - RNA, 19 nt, Homo sapiens
  misc_RNA (1)...(19): siRNA sense strand
gaagagaccuauaaaugua

SEQ ID NO: 1086944 - RNA, 19 nt, Homo sapiens
  misc_RNA (1)...(19): siRNA sense strand
gaagaagucuggaaaugua

SEQ ID NO: 1086945 - RNA, 19 nt, Homo sapiens
  misc_RNA (1)...(19): siRNA sense strand
ggaaugaucucugguauuu

SEQ ID NO: 1086946 - RNA, 19 nt, Homo sapiens
  misc_RNA (1)...(19): siRNA sense strand
guucauagcucuaggcuua

SEQ ID NO: 1086947 - RNA, 19 nt, Homo sapiens
  misc_RNA (1)...(19): siRNA sense strand
ggacagcgcuuguuaauac

SEQ ID NO: 1086948 - RNA, 19 nt, Homo sapiens
  misc_RNA (1)...(19): siRNA sense strand
ccagaacucuccauuuaua

SEQ ID NO: 1086949 - RNA, 19 nt, Homo sapiens
  misc_RNA (1)...(19): siRNA sense strand
gagaagagaccuauaaaug

SEQ ID NO: 1086950 - RNA, 19 nt, Homo sapiens
  misc_RNA (1)...(19): siRNA sense strand
gaaaugugaugcuggagaa

SEQ ID NO: 1086951 - RNA, 19 nt, Homo sapiens
  misc_RNA (1)...(19): siRNA sense strand
gagagaguauuuccauaaa

SEQ ID NO: 1086952 - RNA, 19 nt, Homo sapiens
  misc_RNA (1)...(19): siRNA sense strand
ccucuaaccuuauuggaua

SEQ ID NO: 1086953 - RNA, 19 nt, Homo sapiens
  misc_RNA (1)...(19): siRNA sense strand
ccagagaucucaccuuguu

SEQ ID NO: 1086954 - RNA, 19 nt, Homo sapiens
  misc_RNA (1)...(19): siRNA sense strand
ggucaaacuuucugucaaa

SEQ ID NO: 1086955 - RNA, 19 nt, Homo sapiens
  misc_RNA (1)...(19): siRNA sense strand
gagacaaacuguacacaug

SEQ ID NO: 1086956 - RNA, 19 nt, Homo sapiens
  misc_RNA (1)...(19): siRNA sense strand
gauaaugacaacucucuua

SEQ ID NO: 1086957 - RNA, 19 nt, Homo sapiens
  misc_RNA (1)...(19): siRNA sense strand
gcaauccugugacauuaaa

SEQ ID NO: 1086958 - RNA, 19 nt, Homo sapiens
  misc_RNA (1)...(19): siRNA sense strand
gagaaacccuaugaaugua

SEQ ID NO: 1086959 - RNA, 19 nt, Homo sapiens
  misc_RNA (1)...(19): siRNA sense strand
gauacacacuggagagaaa

SEQ ID NO: 1086960 - RNA, 19 nt, Homo sapiens
  misc_RNA (1)...(19): siRNA sense strand
gggcauacauagagagaaa

SEQ ID NO: 1086961 - RNA, 19 nt, Homo sapiens
  misc_RNA (1)...(19): siRNA sense strand
agccagaacucuccauuua

SEQ ID NO: 1086962 - RNA, 19 nt, Homo sapiens
  misc_RNA (1)...(19): siRNA sense strand
gaaauguagagaccaguua

SEQ ID NO: 1086963 - RNA, 19 nt, Homo sapiens
  misc_RNA (1)...(19): siRNA sense strand
gcaaguaacaguaaugaau

SEQ ID NO: 1086964 - RNA, 19 nt, Homo sapiens
  misc_RNA (1)...(19): siRNA sense strand
ggugauaaauccuacaaau

SEQ ID NO: 1086965 - RNA, 19 nt, Homo sapiens
  misc_RNA (1)...(19): siRNA sense strand
gagagaaacccuaugaaug

SEQ ID NO: 1086966 - RNA, 19 nt, Homo sapiens
  misc_RNA (1)...(19): siRNA sense strand
gagagaaacccuaugaaug

SEQ ID NO: 1086967 - RNA, 19 nt, Homo sapiens
  misc_RNA (1)...(19): siRNA sense strand
ccagacaaaucauauuaga

SEQ ID NO: 1086968 - RNA, 19 nt, Homo sapiens
  misc_RNA (1)...(19): siRNA sense strand
gauaagcaauccugugaca

SEQ ID NO: 1086969 - RNA, 19 nt, Homo sapiens
  misc_RNA (1)...(19): siRNA sense strand
gagagcaguucuuaacaug

SEQ ID NO: 1086970 - RNA, 19 nt, Homo sapiens
  misc_RNA (1)...(19): siRNA sense strand
gagaauucauguuggagaa

SEQ ID NO: 1086971 - RNA, 19 nt, Homo sapiens
  misc_RNA (1)...(19): siRNA sense strand
ggagagaaaccauaugaau

SEQ ID NO: 1086972 - RNA, 19 nt, Homo sapiens
  misc_RNA (1)...(19): siRNA sense strand
uaaagaauguggaaagucu

SEQ ID NO: 1086973 - RNA, 19 nt, Homo sapiens
  misc_RNA (1)...(19): siRNA sense strand
acaaaugcccugauaauga

SEQ ID NO: 1086974 - RNA, 19 nt, Homo sapiens
  misc_RNA (1)...(19): siRNA sense strand
ggagagcaguucuuaacau

SEQ ID NO: 1086975 - RNA, 19 nt, Homo sapiens
  misc_RNA (1)...(19): siRNA sense strand
caagagacccauccugauu

SEQ ID NO: 1086976 - RNA, 19 nt, Homo sapiens
  misc_RNA (1)...(19): siRNA sense strand
agucgaagcucucaccuuu

SEQ ID NO: 1086977 - RNA, 19 nt, Homo sapiens
  misc_RNA (1)...(19): siRNA sense strand
gagaccaguuagacaagua

SEQ ID NO: 1086978 - RNA, 19 nt, Homo sapiens
  misc_RNA (1)...(19): siRNA sense strand
ggagagaaacccuaugaau

SEQ ID NO: 1086979 - RNA, 19 nt, Homo sapiens
  misc_RNA (1)...(19): siRNA sense strand
gaggaacccuaugaaugua

SEQ ID NO: 1086980 - RNA, 19 nt, Homo sapiens
  misc_RNA (1)...(19): siRNA sense strand
agagagaaauucaccaaga

SEQ ID NO: 1086981 - RNA, 19 nt, Homo sapiens
  misc_RNA (1)...(19): siRNA sense strand
gcucucaccuuuauucaca

SEQ ID NO: 1086982 - RNA, 19 nt, Homo sapiens
  misc_RNA (1)...(19): siRNA sense strand
gagagaaaccauaugaaug

SEQ ID NO: 1086983 - RNA, 19 nt, Homo sapiens
  misc_RNA (1)...(19): siRNA sense strand
caaagggcauacauagaga

SEQ ID NO: 1086984 - RNA, 19 nt, Homo sapiens
  misc_RNA (1)...(19): siRNA sense strand
caaguggcauucacccaaa

SEQ ID NO: 1086985 - RNA, 19 nt, Homo sapiens
  misc_RNA (1)...(19): siRNA sense strand
ggaacccuaugaauguaaa

SEQ ID NO: 1086986 - RNA, 19 nt, Homo sapiens
  misc_RNA (1)...(19): siRNA sense strand
aagcaauccugugacauua

SEQ ID NO: 1086987 - RNA, 19 nt, Homo sapiens
  misc_RNA (1)...(19): siRNA sense strand
ggacacuggugaccuucaa

SEQ ID NO: 1086988 - RNA, 19 nt, Homo sapiens
  misc_RNA (1)...(19): siRNA sense strand
gagcaguucuuaacaugca

SEQ ID NO: 1086989 - RNA, 19 nt, Homo sapiens
  misc_RNA (1)...(19): siRNA sense strand
ggcaucagcuuauucauac

SEQ ID NO: 1086990 - RNA, 19 nt, Homo sapiens
  misc_RNA (1)...(19): siRNA sense strand
gagagaaauucaccaagag

SEQ ID NO: 1086991 - RNA, 19 nt, Homo sapiens
  misc_RNA (1)...(19): siRNA sense strand
ggagagaaaccauaugagu

SEQ ID NO: 1086992 - RNA, 19 nt, Homo sapiens
  misc_RNA (1)...(19): siRNA sense strand
ucgaagcucucaccuuuau

SEQ ID NO: 1086993 - RNA, 19 nt, Homo sapiens
  misc_RNA (1)...(19): siRNA sense strand
gagcacacaucucauucug

SEQ ID NO: 1086994 - RNA, 19 nt, Homo sapiens
  misc_RNA (1)...(19): siRNA sense strand
uagaagaagucuggaaaug

SEQ ID NO: 1086995 - RNA, 19 nt, Homo sapiens
  misc_RNA (1)...(19): siRNA sense strand
gaaggaauggcaaggaaug

SEQ ID NO: 1086996 - RNA, 19 nt, Homo sapiens
  misc_RNA (1)...(19): siRNA sense strand
gaauucauguuggagaaga

SEQ ID NO: 1086997 - RNA, 19 nt, Homo sapiens
  misc_RNA (1)...(19): siRNA sense strand
ccagagaauucauguugga

SEQ ID NO: 1086998 - RNA, 19 nt, Homo sapiens
  misc_RNA (1)...(19): siRNA sense strand
agagaaacccuaugaaugu

SEQ ID NO: 1086999 - RNA, 19 nt, Homo sapiens
  misc_RNA (1)...(19): siRNA sense strand
agagaaacccuaugaaugu

SEQ ID NO: 1087000 - RNA, 19 nt, Homo sapiens
  misc_RNA (1)...(19): siRNA sense strand
caaaugcccugauaaugac

SEQ ID NO: 1087001 - RNA, 19 nt, Homo sapiens
  misc_RNA (1)...(19): siRNA sense strand
ugagagaguauuuccauaa

SEQ ID NO: 1087002 - RNA, 19 nt, Homo sapiens
  misc_RNA (1)...(19): siRNA sense strand
uaagcaauccugugacauu

SEQ ID NO: 1087003 - RNA, 19 nt, Homo sapiens
  misc_RNA (1)...(19): siRNA sense strand
gaagcucucaccuuuauuc

SEQ ID NO: 1087004 - RNA, 19 nt, Homo sapiens
  misc_RNA (1)...(19): siRNA sense strand
caucagagaacccauguga

SEQ ID NO: 1087005 - RNA, 19 nt, Homo sapiens
  misc_RNA (1)...(19): siRNA sense strand
caaggaaugaucucuggua

SEQ ID NO: 1087006 - RNA, 19 nt, Homo sapiens
  misc_RNA (1)...(19): siRNA sense strand
ucagagaacccaugugaga

SEQ ID NO: 1087007 - RNA, 19 nt, Homo sapiens
  misc_RNA (1)...(19): siRNA sense strand
agacagagcacacaucuca

SEQ ID NO: 1087008 - RNA, 19 nt, Homo sapiens
  misc_RNA (1)...(19): siRNA sense strand
ggagaagagaccuauaaau

SEQ ID NO: 1087009 - RNA, 19 nt, Homo sapiens
  misc_RNA (1)...(19): siRNA sense strand
ucucugguauuugucauua

SEQ ID NO: 1087010 - RNA, 19 nt, Homo sapiens
  misc_RNA (1)...(19): siRNA sense strand
caaugaauguggaaagucu

SEQ ID NO: 1087011 - RNA, 19 nt, Homo sapiens
  misc_RNA (1)...(19): siRNA sense strand
gacacauacuggagagaaa

SEQ ID NO: 1087012 - RNA, 19 nt, Homo sapiens
  misc_RNA (1)...(19): siRNA sense strand
ugacaacucucuuacucau

SEQ ID NO: 1087013 - RNA, 19 nt, Homo sapiens
  misc_RNA (1)...(19): siRNA sense strand
guagagaccaguuagacaa

SEQ ID NO: 1087014 - RNA, 19 nt, Homo sapiens
  misc_RNA (1)...(19): siRNA sense strand
aaugaucucugguauuugu

SEQ ID NO: 1087015 - RNA, 19 nt, Homo sapiens
  misc_RNA (1)...(19): siRNA sense strand
ggagagagaaauucaccaa

SEQ ID NO: 1087016 - RNA, 19 nt, Homo sapiens
  misc_RNA (1)...(19): siRNA sense strand
ugaggaacccuaugaaugu

SEQ ID NO: 1087017 - RNA, 19 nt, Homo sapiens
  misc_RNA (1)...(19): siRNA sense strand
cagcagaucguguacagaa

SEQ ID NO: 1087018 - RNA, 19 nt, Homo sapiens
  misc_RNA (1)...(19): siRNA sense strand
caggacaguugugcaagua

SEQ ID NO: 1087019 - RNA, 19 nt, Homo sapiens
  misc_RNA (1)...(19): siRNA sense strand
gagaguauuuccauaaacg

SEQ ID NO: 1087020 - RNA, 19 nt, Homo sapiens
  misc_RNA (1)...(19): siRNA sense strand
gaugcuaagucacuaacug

SEQ ID NO: 1087021 - RNA, 19 nt, Homo sapiens
  misc_RNA (1)...(19): siRNA sense strand
caaguaacaguaaugaaug

SEQ ID NO: 1087022 - RNA, 19 nt, Homo sapiens
  misc_RNA (1)...(19): siRNA sense strand
gaaacccuaugaauguaag

SEQ ID NO: 1087023 - RNA, 19 nt, Homo sapiens
  misc_RNA (1)...(19): siRNA sense strand
ggacacauacuggagagaa

SEQ ID NO: 1087024 - RNA, 19 nt, Homo sapiens
  misc_RNA (1)...(19): siRNA sense strand
agaagagaccuauaaaugu

SEQ ID NO: 1087025 - RNA, 19 nt, Homo sapiens
  misc_RNA (1)...(19): siRNA sense strand
ggaaaucuuuuguucauag

SEQ ID NO: 1087026 - RNA, 19 nt, Homo sapiens
  misc_RNA (1)...(19): siRNA sense strand
ggauaccagacaaaucaua

SEQ ID NO: 1087027 - RNA, 19 nt, Homo sapiens
  misc_RNA (1)...(19): siRNA sense strand
cuaugaauguccugaaugu

SEQ ID NO: 1087028 - RNA, 19 nt, Homo sapiens
  misc_RNA (1)...(19): siRNA sense strand
ggaaauguagagaccaguu

SEQ ID NO: 1087029 - RNA, 19 nt, Homo sapiens
  misc_RNA (1)...(19): siRNA sense strand
caccagagaauucauguug

SEQ ID NO: 1087030 - RNA, 19 nt, Homo sapiens
  misc_RNA (1)...(19): siRNA sense strand
gagaaacccuaugaauguc

SEQ ID NO: 1087031 - RNA, 19 nt, Homo sapiens
  misc_RNA (1)...(19): siRNA sense strand
guucaucucuugguauauc

SEQ ID NO: 1087032 - RNA, 19 nt, Homo sapiens
  misc_RNA (1)...(19): siRNA sense strand
cuacaaaugcccugauaau

SEQ ID NO: 1087033 - RNA, 19 nt, Homo sapiens
  misc_RNA (1)...(19): siRNA sense strand
acauucaccuuauucaguu

SEQ ID NO: 1087034 - RNA, 19 nt, Homo sapiens
  misc_RNA (1)...(19): siRNA sense strand
ugaauguggucaaacuuuc

SEQ ID NO: 1087035 - RNA, 19 nt, Homo sapiens
  misc_RNA (1)...(19): siRNA sense strand
uaaugaauguggucaaacu

SEQ ID NO: 1087036 - RNA, 19 nt, Homo sapiens
  misc_RNA (1)...(19): siRNA sense strand
gugaggaacccuaugaaug

SEQ ID NO: 1087037 - RNA, 19 nt, Homo sapiens
  misc_RNA (1)...(19): siRNA sense strand
ucucucaccuuguuacuca

SEQ ID NO: 1087038 - RNA, 19 nt, Homo sapiens
  misc_RNA (1)...(19): siRNA sense strand
gaauguaaagaauguggaa

SEQ ID NO: 1087039 - RNA, 19 nt, Homo sapiens
  misc_RNA (1)...(19): siRNA sense strand
acucaugguucaucucuug

SEQ ID NO: 1087040 - RNA, 19 nt, Homo sapiens
  misc_RNA (1)...(19): siRNA sense strand
gauaccagacaaaucauau

SEQ ID NO: 1087041 - RNA, 19 nt, Homo sapiens
  misc_RNA (1)...(19): siRNA sense strand
ggauguauuuguggacuuc

SEQ ID NO: 1087042 - RNA, 19 nt, Homo sapiens
  misc_RNA (1)...(19): siRNA sense strand
cuucaaggauguauuugug

SEQ ID NO: 1087043 - RNA, 19 nt, Homo sapiens
  misc_RNA (1)...(19): siRNA sense strand
caacacagccucauugcua

SEQ ID NO: 1087044 - RNA, 19 nt, Homo sapiens
  misc_RNA (1)...(19): siRNA sense strand
cagcaucucuccuauugug

SEQ ID NO: 1087045 - RNA, 19 nt, Homo sapiens
  misc_RNA (1)...(19): siRNA sense strand
uccauaaccuggcuacgua

SEQ ID NO: 1087046 - RNA, 19 nt, Homo sapiens
  misc_RNA (1)...(19): siRNA sense strand
ggacuaugggcuccaguuu

SEQ ID NO: 1087047 - RNA, 19 nt, Homo sapiens
  misc_RNA (1)...(19): siRNA sense strand
cuacguaugucuuccuuca

SEQ ID NO: 1087048 - RNA, 19 nt, Homo sapiens
  misc_RNA (1)...(19): siRNA sense strand
gacuaugggcuccaguuua

SEQ ID NO: 1087049 - RNA, 19 nt, Homo sapiens
  misc_RNA (1)...(19): siRNA sense strand
gggagcaaauggacuaugg

SEQ ID NO: 1087050 - RNA, 19 nt, Homo sapiens
  misc_RNA (1)...(19): siRNA sense strand
gcaucuggcuggccuacau

SEQ ID NO: 1087051 - RNA, 19 nt, Homo sapiens
  misc_RNA (1)...(19): siRNA sense strand
caucaacacagccucauug

SEQ ID NO: 1087052 - RNA, 19 nt, Homo sapiens
  misc_RNA (1)...(19): siRNA sense strand
cucagcaucucuccuauug

SEQ ID NO: 1087053 - RNA, 19 nt, Homo sapiens
  misc_RNA (1)...(19): siRNA sense strand
gcugcgcacuuccucauca

SEQ ID NO: 1087054 - RNA, 19 nt, Homo sapiens
  misc_RNA (1)...(19): siRNA sense strand
guucgugucuuuggcauca

SEQ ID NO: 1087055 - RNA, 19 nt, Homo sapiens
  misc_RNA (1)...(19): siRNA sense strand
uugguaggauugcugcaua

SEQ ID NO: 1087056 - RNA, 19 nt, Homo sapiens
  misc_RNA (1)...(19): siRNA sense strand
aacacagccucauugcuaa

SEQ ID NO: 1087057 - RNA, 19 nt, Homo sapiens
  misc_RNA (1)...(19): siRNA sense strand
acuaugggcuccaguuuac

SEQ ID NO: 1087058 - RNA, 19 nt, Homo sapiens
  misc_RNA (1)...(19): siRNA sense strand
uaggauugcugcauauggu

SEQ ID NO: 1087059 - RNA, 19 nt, Homo sapiens
  misc_RNA (1)...(19): siRNA sense strand
guguacugcugccgaaguu

SEQ ID NO: 1087060 - RNA, 19 nt, Homo sapiens
  misc_RNA (1)...(19): siRNA sense strand
guaugaugcugcgcacuuc

SEQ ID NO: 1087061 - RNA, 19 nt, Homo sapiens
  misc_RNA (1)...(19): siRNA sense strand
gcaaguuccucagcaucuc

SEQ ID NO: 1087062 - RNA, 19 nt, Homo sapiens
  misc_RNA (1)...(19): siRNA sense strand
uaaccuggcuacguauguc

SEQ ID NO: 1087063 - RNA, 19 nt, Homo sapiens
  misc_RNA (1)...(19): siRNA sense strand
caucaucuugguaggauug

SEQ ID NO: 1087064 - RNA, 19 nt, Homo sapiens
  misc_RNA (1)...(19): siRNA sense strand
gguggcacacagcgaagua

SEQ ID NO: 1087065 - RNA, 19 nt, Homo sapiens
  misc_RNA (1)...(19): siRNA sense strand
gggcuccaguuuaccucuu

SEQ ID NO: 1087066 - RNA, 19 nt, Homo sapiens
  misc_RNA (1)...(19): siRNA sense strand
acacccgagugaugaauag

SEQ ID NO: 1087067 - RNA, 19 nt, Homo sapiens
  misc_RNA (1)...(19): siRNA sense strand
gcacuuccucaucaacaca

SEQ ID NO: 1087068 - RNA, 19 nt, Homo sapiens
  misc_RNA (1)...(19): siRNA sense strand
cagccucauugcuaagugu

SEQ ID NO: 1087069 - RNA, 19 nt, Homo sapiens
  misc_RNA (1)...(19): siRNA sense strand
uggcaucaacaaauacuga

SEQ ID NO: 1087070 - RNA, 19 nt, Homo sapiens
  misc_RNA (1)...(19): siRNA sense strand
uacaucaucuugguaggau

SEQ ID NO: 1087071 - RNA, 19 nt, Homo sapiens
  misc_RNA (1)...(19): siRNA sense strand
ucucuccuauugugcucua

SEQ ID NO: 1087072 - RNA, 19 nt, Homo sapiens
  misc_RNA (1)...(19): siRNA sense strand
cugcauaugguucuacuca

SEQ ID NO: 1087073 - RNA, 19 nt, Homo sapiens
  misc_RNA (1)...(19): siRNA sense strand
gcgcacuuccucaucaaca

SEQ ID NO: 1087074 - RNA, 19 nt, Homo sapiens
  misc_RNA (1)...(19): siRNA sense strand
gaaagacaaucacaaccua

SEQ ID NO: 1087075 - RNA, 19 nt, Homo sapiens
  misc_RNA (1)...(19): siRNA sense strand
ggaaucugcuugaugugua

SEQ ID NO: 1087076 - RNA, 19 nt, Homo sapiens
  misc_RNA (1)...(19): siRNA sense strand
cagagcagcuggacauuga

SEQ ID NO: 1087077 - RNA, 19 nt, Homo sapiens
  misc_RNA (1)...(19): siRNA sense strand
agaaggagauugaugaugu

SEQ ID NO: 1087078 - RNA, 19 nt, Homo sapiens
  misc_RNA (1)...(19): siRNA sense strand
gauuguugcugacauagaa

SEQ ID NO: 1087079 - RNA, 19 nt, Homo sapiens
  misc_RNA (1)...(19): siRNA sense strand
gcucaagccucccaauauc

SEQ ID NO: 1087080 - RNA, 19 nt, Homo sapiens
  misc_RNA (1)...(19): siRNA sense strand
cgcaggcgauucaacauua

SEQ ID NO: 1087081 - RNA, 19 nt, Homo sapiens
  misc_RNA (1)...(19): siRNA sense strand
ggcagcaggugaaacagua

SEQ ID NO: 1087082 - RNA, 19 nt, Homo sapiens
  misc_RNA (1)...(19): siRNA sense strand
gaaggccucuguggauuau

SEQ ID NO: 1087083 - RNA, 19 nt, Homo sapiens
  misc_RNA (1)...(19): siRNA sense strand
gcaggcgauucaacauuaa

SEQ ID NO: 1087084 - RNA, 19 nt, Homo sapiens
  misc_RNA (1)...(19): siRNA sense strand
gcucagagaaggagauuga

SEQ ID NO: 1087085 - RNA, 19 nt, Homo sapiens
  misc_RNA (1)...(19): siRNA sense strand
gaagaaagacaaucacaac

SEQ ID NO: 1087086 - RNA, 19 nt, Homo sapiens
  misc_RNA (1)...(19): siRNA sense strand
gcagcaacguuccauguag

SEQ ID NO: 1087087 - RNA, 19 nt, Homo sapiens
  misc_RNA (1)...(19): siRNA sense strand
cagggaaucugcuugaugu

SEQ ID NO: 1087088 - RNA, 19 nt, Homo sapiens
  misc_RNA (1)...(19): siRNA sense strand
gaaggagauugaugauguc

SEQ ID NO: 1087089 - RNA, 19 nt, Homo sapiens
  misc_RNA (1)...(19): siRNA sense strand
ugaaggaacggcagaagaa

SEQ ID NO: 1087090 - RNA, 19 nt, Homo sapiens
  misc_RNA (1)...(19): siRNA sense strand
ccagggaggugcucaaggu

SEQ ID NO: 1087091 - RNA, 19 nt, Homo sapiens
  misc_RNA (1)...(19): siRNA sense strand
cagagaaggagauugauga

SEQ ID NO: 1087092 - RNA, 19 nt, Homo sapiens
  misc_RNA (1)...(19): siRNA sense strand
gaaggaacggcagaagaaa

SEQ ID NO: 1087093 - RNA, 19 nt, Homo sapiens
  misc_RNA (1)...(19): siRNA sense strand
ggaguccaguuacaaugau

SEQ ID NO: 1087094 - RNA, 19 nt, Homo sapiens
  misc_RNA (1)...(19): siRNA sense strand
ugaaggccucuguggauua

SEQ ID NO: 1087095 - RNA, 19 nt, Homo sapiens
  misc_RNA (1)...(19): siRNA sense strand
caguuacaaugaugaaaug

SEQ ID NO: 1087096 - RNA, 19 nt, Homo sapiens
  misc_RNA (1)...(19): siRNA sense strand
cgggauuguugcugacaua

SEQ ID NO: 1087097 - RNA, 19 nt, Homo sapiens
  misc_RNA (1)...(19): siRNA sense strand
gaugaaaugcucagcuauc

SEQ ID NO: 1087098 - RNA, 19 nt, Homo sapiens
  misc_RNA (1)...(19): siRNA sense strand
ucaaggaacugggcacucu

SEQ ID NO: 1087099 - RNA, 19 nt, Homo sapiens
  misc_RNA (1)...(19): siRNA sense strand
gcucaaaagccaacccuua

SEQ ID NO: 1087100 - RNA, 19 nt, Homo sapiens
  misc_RNA (1)...(19): siRNA sense strand
gcuccgaauucaggaacua

SEQ ID NO: 1087101 - RNA, 19 nt, Homo sapiens
  misc_RNA (1)...(19): siRNA sense strand
gcacucucaucccuaaguc

SEQ ID NO: 1087102 - RNA, 19 nt, Homo sapiens
  misc_RNA (1)...(19): siRNA sense strand
ucaaacgggagaucucuga

SEQ ID NO: 1087103 - RNA, 19 nt, Homo sapiens
  misc_RNA (1)...(19): siRNA sense strand
ccaguuacaaugaugaaau

SEQ ID NO: 1087104 - RNA, 19 nt, Homo sapiens
  misc_RNA (1)...(19): siRNA sense strand
uggaggacauucugaugga

SEQ ID NO: 1087105 - RNA, 19 nt, Homo sapiens
  misc_RNA (1)...(19): siRNA sense strand
gaaucugcuugauguguac

SEQ ID NO: 1087106 - RNA, 19 nt, Homo sapiens
  misc_RNA (1)...(19): siRNA sense strand
augaugaaaugcucagcua

SEQ ID NO: 1087107 - RNA, 19 nt, Homo sapiens
  misc_RNA (1)...(19): siRNA sense strand
gaacggcagaagaaagaca

SEQ ID NO: 1087108 - RNA, 19 nt, Homo sapiens
  misc_RNA (1)...(19): siRNA sense strand
gcgcagcaacguuccaugu

SEQ ID NO: 1087109 - RNA, 19 nt, Homo sapiens
  misc_RNA (1)...(19): siRNA sense strand
ggcagaagaaagacaauca

SEQ ID NO: 1087110 - RNA, 19 nt, Homo sapiens
  misc_RNA (1)...(19): siRNA sense strand
cuccagggcugcuuuccuu

SEQ ID NO: 1087111 - RNA, 19 nt, Homo sapiens
  misc_RNA (1)...(19): siRNA sense strand
gcugacauagaauuagaaa

SEQ ID NO: 1087112 - RNA, 19 nt, Homo sapiens
  misc_RNA (1)...(19): siRNA sense strand
agacaaucacaaccuaauu

SEQ ID NO: 1087113 - RNA, 19 nt, Homo sapiens
  misc_RNA (1)...(19): siRNA sense strand
gagaaggagauugaugaug

SEQ ID NO: 1087114 - RNA, 19 nt, Homo sapiens
  misc_RNA (1)...(19): siRNA sense strand
aaagacaaucacaaccuaa

SEQ ID NO: 1087115 - RNA, 19 nt, Homo sapiens
  misc_RNA (1)...(19): siRNA sense strand
ugggcacucucaucccuaa

SEQ ID NO: 1087116 - RNA, 19 nt, Homo sapiens
  misc_RNA (1)...(19): siRNA sense strand
uugcugacauagaauuaga

SEQ ID NO: 1087117 - RNA, 19 nt, Homo sapiens
  misc_RNA (1)...(19): siRNA sense strand
cugaaggccucuguggauu

SEQ ID NO: 1087118 - RNA, 19 nt, Homo sapiens
  misc_RNA (1)...(19): siRNA sense strand
agaagaaagacaaucacaa

SEQ ID NO: 1087119 - RNA, 19 nt, Homo sapiens
  misc_RNA (1)...(19): siRNA sense strand
uccgcaagcugcagaagga

SEQ ID NO: 1087120 - RNA, 19 nt, Homo sapiens
  misc_RNA (1)...(19): siRNA sense strand
ggaacugggcacucucauc

SEQ ID NO: 1087121 - RNA, 19 nt, Homo sapiens
  misc_RNA (1)...(19): siRNA sense strand
gcugagcugcccaacauca

SEQ ID NO: 1087122 - RNA, 19 nt, Homo sapiens
  misc_RNA (1)...(19): siRNA sense strand
aggccucuguggauuauau

SEQ ID NO: 1087123 - RNA, 19 nt, Homo sapiens
  misc_RNA (1)...(19): siRNA sense strand
gaguccaguuacaaugaug

SEQ ID NO: 1087124 - RNA, 19 nt, Homo sapiens
  misc_RNA (1)...(19): siRNA sense strand
gagccguguucgugcuguu

SEQ ID NO: 1087125 - RNA, 19 nt, Homo sapiens
  misc_RNA (1)...(19): siRNA sense strand
acucuuugcuuccggaauc

SEQ ID NO: 1087126 - RNA, 19 nt, Homo sapiens
  misc_RNA (1)...(19): siRNA sense strand
ucgcucaagccucccaaua

SEQ ID NO: 1087127 - RNA, 19 nt, Homo sapiens
  misc_RNA (1)...(19): siRNA sense strand
ucagagaaggagauugaug

SEQ ID NO: 1087128 - RNA, 19 nt, Homo sapiens
  misc_RNA (1)...(19): siRNA sense strand
cagaagaaagacaaucaca

SEQ ID NO: 1087129 - RNA, 19 nt, Homo sapiens
  misc_RNA (1)...(19): siRNA sense strand
gggaaucugcuugaugugu

SEQ ID NO: 1087130 - RNA, 19 nt, Homo sapiens
  misc_RNA (1)...(19): siRNA sense strand
ggauuguugcugacauaga

SEQ ID NO: 1087131 - RNA, 19 nt, Homo sapiens
  misc_RNA (1)...(19): siRNA sense strand
uaacgacaggaucaaggaa

SEQ ID NO: 1087132 - RNA, 19 nt, Homo sapiens
  misc_RNA (1)...(19): siRNA sense strand
gccaugucgucaucuucuu

SEQ ID NO: 1087133 - RNA, 19 nt, Homo sapiens
  misc_RNA (1)...(19): siRNA sense strand
gccugcagcuccgaauuca

SEQ ID NO: 1087134 - RNA, 19 nt, Homo sapiens
  misc_RNA (1)...(19): siRNA sense strand
ccugaaggccucuguggau

SEQ ID NO: 1087135 - RNA, 19 nt, Homo sapiens
  misc_RNA (1)...(19): siRNA sense strand
caacaucaaacgggagauc

SEQ ID NO: 1087136 - RNA, 19 nt, Homo sapiens
  misc_RNA (1)...(19): siRNA sense strand
ucagggaaucugcuugaug

SEQ ID NO: 1087137 - RNA, 19 nt, Homo sapiens
  misc_RNA (1)...(19): siRNA sense strand
aggaacggcagaagaaaga

SEQ ID NO: 1087138 - RNA, 19 nt, Homo sapiens
  misc_RNA (1)...(19): siRNA sense strand
gcuggaggacauucugaug

SEQ ID NO: 1087139 - RNA, 19 nt, Homo sapiens
  misc_RNA (1)...(19): siRNA sense strand
caagggcaccauccugaag

SEQ ID NO: 1087140 - RNA, 19 nt, Homo sapiens
  misc_RNA (1)...(19): siRNA sense strand
ggagaugcgcuggaacaag

SEQ ID NO: 1087141 - RNA, 19 nt, Homo sapiens
  misc_RNA (1)...(19): siRNA sense strand
ugucagggaaucugcuuga

SEQ ID NO: 1087142 - RNA, 19 nt, Homo sapiens
  misc_RNA (1)...(19): siRNA sense strand
ugagcugcccaacaucaaa

SEQ ID NO: 1087143 - RNA, 19 nt, Homo sapiens
  misc_RNA (1)...(19): siRNA sense strand
gacauuggcugguaacaga

SEQ ID NO: 1087144 - RNA, 19 nt, Homo sapiens
  misc_RNA (1)...(19): siRNA sense strand
gcaagguuguuccugauug

SEQ ID NO: 1087145 - RNA, 19 nt, Homo sapiens
  misc_RNA (1)...(19): siRNA sense strand
gaacauuggcugcaagguu

SEQ ID NO: 1087146 - RNA, 19 nt, Homo sapiens
  misc_RNA (1)...(19): siRNA sense strand
gcaagcacccaguucauga

SEQ ID NO: 1087147 - RNA, 19 nt, Homo sapiens
  misc_RNA (1)...(19): siRNA sense strand
gaagcaagcacccaguuca

SEQ ID NO: 1087148 - RNA, 19 nt, Homo sapiens
  misc_RNA (1)...(19): siRNA sense strand
caaccuauauccuggugau

SEQ ID NO: 1087149 - RNA, 19 nt, Homo sapiens
  misc_RNA (1)...(19): siRNA sense strand
ggauggagccgauagucaa

SEQ ID NO: 1087150 - RNA, 19 nt, Homo sapiens
  misc_RNA (1)...(19): siRNA sense strand
caagguuguuccugauugu

SEQ ID NO: 1087151 - RNA, 19 nt, Homo sapiens
  misc_RNA (1)...(19): siRNA sense strand
gcuaccaguucuuugucua

SEQ ID NO: 1087152 - RNA, 19 nt, Homo sapiens
  misc_RNA (1)...(19): siRNA sense strand
guuacugggucucaugaug

SEQ ID NO: 1087153 - RNA, 19 nt, Homo sapiens
  misc_RNA (1)...(19): siRNA sense strand
gcagaacccagacagagau

SEQ ID NO: 1087154 - RNA, 19 nt, Homo sapiens
  misc_RNA (1)...(19): siRNA sense strand
ggacggcgcaaccuauauc

SEQ ID NO: 1087155 - RNA, 19 nt, Homo sapiens
  misc_RNA (1)...(19): siRNA sense strand
ccaguucuuugucuaucuu

SEQ ID NO: 1087156 - RNA, 19 nt, Homo sapiens
  misc_RNA (1)...(19): siRNA sense strand
gaacccagacagagauucu

SEQ ID NO: 1087157 - RNA, 19 nt, Homo sapiens
  misc_RNA (1)...(19): siRNA sense strand
ccagcgagcccaagcacaa

SEQ ID NO: 1087158 - RNA, 19 nt, Homo sapiens
  misc_RNA (1)...(19): siRNA sense strand
uaacaacuacagacagaag

SEQ ID NO: 1087159 - RNA, 19 nt, Homo sapiens
  misc_RNA (1)...(19): siRNA sense strand
cuggagacauuggcuggua

SEQ ID NO: 1087160 - RNA, 19 nt, Homo sapiens
  misc_RNA (1)...(19): siRNA sense strand
gcugguaacagauaucaag

SEQ ID NO: 1087161 - RNA, 19 nt, Homo sapiens
  misc_RNA (1)...(19): siRNA sense strand
uggagacauuggcugguaa

SEQ ID NO: 1087162 - RNA, 19 nt, Homo sapiens
  misc_RNA (1)...(19): siRNA sense strand
gauucagggccaggaguua

SEQ ID NO: 1087163 - RNA, 19 nt, Homo sapiens
  misc_RNA (1)...(19): siRNA sense strand
ggacaaugaggcugguuac

SEQ ID NO: 1087164 - RNA, 19 nt, Homo sapiens
  misc_RNA (1)...(19): siRNA sense strand
guggacggcgcaaccuaua

SEQ ID NO: 1087165 - RNA, 19 nt, Homo sapiens
  misc_RNA (1)...(19): siRNA sense strand
gccagggccuugaaguuuu

SEQ ID NO: 1087166 - RNA, 19 nt, Homo sapiens
  misc_RNA (1)...(19): siRNA sense strand
ugccagggccuugaaguuu

SEQ ID NO: 1087167 - RNA, 19 nt, Homo sapiens
  misc_RNA (1)...(19): siRNA sense strand
ucacuggagacgaggauga

SEQ ID NO: 1087168 - RNA, 19 nt, Homo sapiens
  misc_RNA (1)...(19): siRNA sense strand
uggagccgauagucaaguu

SEQ ID NO: 1087169 - RNA, 19 nt, Homo sapiens
  misc_RNA (1)...(19): siRNA sense strand
gaaguuuucuacccagagu

SEQ ID NO: 1087170 - RNA, 19 nt, Homo sapiens
  misc_RNA (1)...(19): siRNA sense strand
gagacgaggaugagaacag

SEQ ID NO: 1087171 - RNA, 19 nt, Homo sapiens
  misc_RNA (1)...(19): siRNA sense strand
acucgaggcucuuggaaaa

SEQ ID NO: 1087172 - RNA, 19 nt, Homo sapiens
  misc_RNA (1)...(19): siRNA sense strand
gcacuguuacugggucuca

SEQ ID NO: 1087173 - RNA, 19 nt, Homo sapiens
  misc_RNA (1)...(19): siRNA sense strand
uggacaaugaggcugguua

SEQ ID NO: 1087174 - RNA, 19 nt, Homo sapiens
  misc_RNA (1)...(19): siRNA sense strand
ccaccugggcgaaccugaa

SEQ ID NO: 1087175 - RNA, 19 nt, Homo sapiens
  misc_RNA (1)...(19): siRNA sense strand
cauuggcugguaacagaua

SEQ ID NO: 1087176 - RNA, 19 nt, Homo sapiens
  misc_RNA (1)...(19): siRNA sense strand
ccuauauccuggugauggu

SEQ ID NO: 1087177 - RNA, 19 nt, Homo sapiens
  misc_RNA (1)...(19): siRNA sense strand
ggaagaacuuaacuuacua

SEQ ID NO: 1087178 - RNA, 19 nt, Homo sapiens
  misc_RNA (1)...(19): siRNA sense strand
guacauaguucuuacauac

SEQ ID NO: 1087179 - RNA, 19 nt, Homo sapiens
  misc_RNA (1)...(19): siRNA sense strand
acaguaggaucacauuaua

SEQ ID NO: 1087180 - RNA, 19 nt, Homo sapiens
  misc_RNA (1)...(19): siRNA sense strand
cacaacaucuggccuauau

SEQ ID NO: 1087181 - RNA, 19 nt, Homo sapiens
  misc_RNA (1)...(19): siRNA sense strand
gaaagaaccaaggaguaua

SEQ ID NO: 1087182 - RNA, 19 nt, Homo sapiens
  misc_RNA (1)...(19): siRNA sense strand
ggaaagaaccaaggaguau

SEQ ID NO: 1087183 - RNA, 19 nt, Homo sapiens
  misc_RNA (1)...(19): siRNA sense strand
caacaucuggccuauauug

SEQ ID NO: 1087184 - RNA, 19 nt, Homo sapiens
  misc_RNA (1)...(19): siRNA sense strand
ggacaguaggaucacauua

SEQ ID NO: 1087185 - RNA, 19 nt, Homo sapiens
  misc_RNA (1)...(19): siRNA sense strand
ucagagauguucuuaaagg

SEQ ID NO: 1087186 - RNA, 19 nt, Homo sapiens
  misc_RNA (1)...(19): siRNA sense strand
gacaguaggaucacauuau

SEQ ID NO: 1087187 - RNA, 19 nt, Homo sapiens
  misc_RNA (1)...(19): siRNA sense strand
uggaagaacuuaacuuacu

SEQ ID NO: 1087188 - RNA, 19 nt, Homo sapiens
  misc_RNA (1)...(19): siRNA sense strand
gcucuugccucaccuuucu

SEQ ID NO: 1087189 - RNA, 19 nt, Homo sapiens
  misc_RNA (1)...(19): siRNA sense strand
acacaaaucagggacagua

SEQ ID NO: 1087190 - RNA, 19 nt, Homo sapiens
  misc_RNA (1)...(19): siRNA sense strand
cagagauguucuuaaagga

SEQ ID NO: 1087191 - RNA, 19 nt, Homo sapiens
  misc_RNA (1)...(19): siRNA sense strand
ucuacccacugcagauaua

SEQ ID NO: 1087192 - RNA, 19 nt, Homo sapiens
  misc_RNA (1)...(19): siRNA sense strand
ugucauagggauucgauuu

SEQ ID NO: 1087193 - RNA, 19 nt, Homo sapiens
  misc_RNA (1)...(19): siRNA sense strand
ucaccagguuucagagaug

SEQ ID NO: 1087194 - RNA, 19 nt, Homo sapiens
  misc_RNA (1)...(19): siRNA sense strand
gaagaacuuaacuuacuag

SEQ ID NO: 1087195 - RNA, 19 nt, Homo sapiens
  misc_RNA (1)...(19): siRNA sense strand
aggaucacauuauaaccua

SEQ ID NO: 1087196 - RNA, 19 nt, Homo sapiens
  misc_RNA (1)...(19): siRNA sense strand
caucuggccuauauugucu

SEQ ID NO: 1087197 - RNA, 19 nt, Homo sapiens
  misc_RNA (1)...(19): siRNA sense strand
caaaucagggacaguagga

SEQ ID NO: 1087198 - RNA, 19 nt, Homo sapiens
  misc_RNA (1)...(19): siRNA sense strand
caugggaaauggaaagaac

SEQ ID NO: 1087199 - RNA, 19 nt, Homo sapiens
  misc_RNA (1)...(19): siRNA sense strand
uggaaagaaccaaggagua

SEQ ID NO: 1087200 - RNA, 19 nt, Homo sapiens
  misc_RNA (1)...(19): siRNA sense strand
uggccuauauugucuguca

SEQ ID NO: 1087201 - RNA, 19 nt, Homo sapiens
  misc_RNA (1)...(19): siRNA sense strand
cauuauaaccuacuuuguc

SEQ ID NO: 1087202 - RNA, 19 nt, Homo sapiens
  misc_RNA (1)...(19): siRNA sense strand
aaagaaccaaggaguauag

SEQ ID NO: 1087203 - RNA, 19 nt, Homo sapiens
  misc_RNA (1)...(19): siRNA sense strand
guucuuacauacuucaacu

SEQ ID NO: 1087204 - RNA, 19 nt, Homo sapiens
  misc_RNA (1)...(19): siRNA sense strand
ccagaguaauggaagaacu

SEQ ID NO: 1087205 - RNA, 19 nt, Homo sapiens
  misc_RNA (1)...(19): siRNA sense strand
ucacaacaucuggccuaua

SEQ ID NO: 1087206 - RNA, 19 nt, Homo sapiens
  misc_RNA (1)...(19): siRNA sense strand
agaguaauggaagaacuua

SEQ ID NO: 1087207 - RNA, 19 nt, Homo sapiens
  misc_RNA (1)...(19): siRNA sense strand
cacauuauaaccuacuuug

SEQ ID NO: 1087208 - RNA, 19 nt, Homo sapiens
  misc_RNA (1)...(19): siRNA sense strand
caguaggaucacauuauaa

SEQ ID NO: 1087209 - RNA, 19 nt, Homo sapiens
  misc_RNA (1)...(19): siRNA sense strand
gaguaauggaagaacuuaa

SEQ ID NO: 1087210 - RNA, 19 nt, Homo sapiens
  misc_RNA (1)...(19): siRNA sense strand
agagauguucuuaaaggaa

SEQ ID NO: 1087211 - RNA, 19 nt, Homo sapiens
  misc_RNA (1)...(19): siRNA sense strand
cagaguaauggaagaacuu

SEQ ID NO: 1087212 - RNA, 19 nt, Homo sapiens
  misc_RNA (1)...(19): siRNA sense strand
cauaguucuuacauacuuc

SEQ ID NO: 1087213 - RNA, 19 nt, Homo sapiens
  misc_RNA (1)...(19): siRNA sense strand
ccacugcagauauaguuca

SEQ ID NO: 1087214 - RNA, 19 nt, Homo sapiens
  misc_RNA (1)...(19): siRNA sense strand
gguuucagagauguucuua

SEQ ID NO: 1087215 - RNA, 19 nt, Homo sapiens
  misc_RNA (1)...(19): siRNA sense strand
uuaacuuacuagccucuca

SEQ ID NO: 1087216 - RNA, 19 nt, Homo sapiens
  misc_RNA (1)...(19): siRNA sense strand
gggacaguaggaucacauu

SEQ ID NO: 1087217 - RNA, 19 nt, Homo sapiens
  misc_RNA (1)...(19): siRNA sense strand
cagaacaggucaagguuua

SEQ ID NO: 1087218 - RNA, 19 nt, Homo sapiens
  misc_RNA (1)...(19): siRNA sense strand
gcaagacccuacaugguuu

SEQ ID NO: 1087219 - RNA, 19 nt, Homo sapiens
  misc_RNA (1)...(19): siRNA sense strand
aaacagaaaucacgucaug

SEQ ID NO: 1087220 - RNA, 19 nt, Homo sapiens
  misc_RNA (1)...(19): siRNA sense strand
gaaaucacgucaugucucu

SEQ ID NO: 1087221 - RNA, 19 nt, Homo sapiens
  misc_RNA (1)...(19): siRNA sense strand
cuaauucucugauuucauc

SEQ ID NO: 1087222 - RNA, 19 nt, Homo sapiens
  misc_RNA (1)...(19): siRNA sense strand
uguaaucucuuccuugguu

SEQ ID NO: 1087223 - RNA, 19 nt, Homo sapiens
  misc_RNA (1)...(19): siRNA sense strand
cgucaugucucugcucaaa

SEQ ID NO: 1087224 - RNA, 19 nt, Homo sapiens
  misc_RNA (1)...(19): siRNA sense strand
ucacaaacacgaggcauuu

SEQ ID NO: 1087225 - RNA, 19 nt, Homo sapiens
  misc_RNA (1)...(19): siRNA sense strand
agaaacaagugcaggaaag

SEQ ID NO: 1087226 - RNA, 19 nt, Homo sapiens
  misc_RNA (1)...(19): siRNA sense strand
guaaucucuuccuugguuu

SEQ ID NO: 1087227 - RNA, 19 nt, Homo sapiens
  misc_RNA (1)...(19): siRNA sense strand
cccaaucucuuguaaaggu

SEQ ID NO: 1087228 - RNA, 19 nt, Homo sapiens
  misc_RNA (1)...(19): siRNA sense strand
gcagaaacaagugcaggaa

SEQ ID NO: 1087229 - RNA, 19 nt, Homo sapiens
  misc_RNA (1)...(19): siRNA sense strand
gaaacaagugcaggaaagu

SEQ ID NO: 1087230 - RNA, 19 nt, Homo sapiens
  misc_RNA (1)...(19): siRNA sense strand
gcuauacccaggugcugua

SEQ ID NO: 1087231 - RNA, 19 nt, Homo sapiens
  misc_RNA (1)...(19): siRNA sense strand
ccaggcacauuggcuguug

SEQ ID NO: 1087232 - RNA, 19 nt, Homo sapiens
  misc_RNA (1)...(19): siRNA sense strand
ucuuugcacuugugucuug

SEQ ID NO: 1087233 - RNA, 19 nt, Homo sapiens
  misc_RNA (1)...(19): siRNA sense strand
ucagaacaggucaagguuu

SEQ ID NO: 1087234 - RNA, 19 nt, Homo sapiens
  misc_RNA (1)...(19): siRNA sense strand
ccaaucucuuguaaagguu

SEQ ID NO: 1087235 - RNA, 19 nt, Homo sapiens
  misc_RNA (1)...(19): siRNA sense strand
ugcaagacccuacaugguu

SEQ ID NO: 1087236 - RNA, 19 nt, Homo sapiens
  misc_RNA (1)...(19): siRNA sense strand
cagaaacaagugcaggaaa

SEQ ID NO: 1087237 - RNA, 19 nt, Homo sapiens
  misc_RNA (1)...(19): siRNA sense strand
auacccaggugcuguaauc

SEQ ID NO: 1087238 - RNA, 19 nt, Homo sapiens
  misc_RNA (1)...(19): siRNA sense strand
caggugcuguaaucucuuc

SEQ ID NO: 1087239 - RNA, 19 nt, Homo sapiens
  misc_RNA (1)...(19): siRNA sense strand
uuuagggucuuugcacuug

SEQ ID NO: 1087240 - RNA, 19 nt, Homo sapiens
  misc_RNA (1)...(19): siRNA sense strand
gugcuguaaucucuuccuu

SEQ ID NO: 1087241 - RNA, 19 nt, Homo sapiens
  misc_RNA (1)...(19): siRNA sense strand
ggucuuugcacuagcuguu

SEQ ID NO: 1087242 - RNA, 19 nt, Homo sapiens
  misc_RNA (1)...(19): siRNA sense strand
gguuuaccauggccugcaa

SEQ ID NO: 1087243 - RNA, 19 nt, Homo sapiens
  misc_RNA (1)...(19): siRNA sense strand
acagaaaucacgucauguc

SEQ ID NO: 1087244 - RNA, 19 nt, Homo sapiens
  misc_RNA (1)...(19): siRNA sense strand
guuucccaaucucuuguaa

SEQ ID NO: 1087245 - RNA, 19 nt, Homo sapiens
  misc_RNA (1)...(19): siRNA sense strand
uucccaaucucuuguaaag

SEQ ID NO: 1087246 - RNA, 19 nt, Homo sapiens
  misc_RNA (1)...(19): siRNA sense strand
gauuucaucuuuuguguac

SEQ ID NO: 1087247 - RNA, 19 nt, Homo sapiens
  misc_RNA (1)...(19): siRNA sense strand
cauuggcuguugcucacaa

SEQ ID NO: 1087248 - RNA, 19 nt, Homo sapiens
  misc_RNA (1)...(19): siRNA sense strand
gagggucuuugcacuagcu

SEQ ID NO: 1087249 - RNA, 19 nt, Homo sapiens
  misc_RNA (1)...(19): siRNA sense strand
acaaacacgaggcauuuua

SEQ ID NO: 1087250 - RNA, 19 nt, Homo sapiens
  misc_RNA (1)...(19): siRNA sense strand
cccaggugcuguaaucucu

SEQ ID NO: 1087251 - RNA, 19 nt, Homo sapiens
  misc_RNA (1)...(19): siRNA sense strand
ggucuuugcacuugugucu

SEQ ID NO: 1087252 - RNA, 19 nt, Homo sapiens
  misc_RNA (1)...(19): siRNA sense strand
ccugagggucuuugcacua

SEQ ID NO: 1087253 - RNA, 19 nt, Homo sapiens
  misc_RNA (1)...(19): siRNA sense strand
gaacaaacaccucuucuua

SEQ ID NO: 1087254 - RNA, 19 nt, Homo sapiens
  misc_RNA (1)...(19): siRNA sense strand
gaacugauccuuucaagua

SEQ ID NO: 1087255 - RNA, 19 nt, Homo sapiens
  misc_RNA (1)...(19): siRNA sense strand
gauaauggcugcagaaaug

SEQ ID NO: 1087256 - RNA, 19 nt, Homo sapiens
  misc_RNA (1)...(19): siRNA sense strand
caaagaagguaacaaauug

SEQ ID NO: 1087257 - RNA, 19 nt, Homo sapiens
  misc_RNA (1)...(19): siRNA sense strand
gcagugagcuuguugaagu

SEQ ID NO: 1087258 - RNA, 19 nt, Homo sapiens
  misc_RNA (1)...(19): siRNA sense strand
gaagauauaugucuacaac

SEQ ID NO: 1087259 - RNA, 19 nt, Homo sapiens
  misc_RNA (1)...(19): siRNA sense strand
caaacacucuuacguuaaa

SEQ ID NO: 1087260 - RNA, 19 nt, Homo sapiens
  misc_RNA (1)...(19): siRNA sense strand
acaaacaccucuucuuaaa

SEQ ID NO: 1087261 - RNA, 19 nt, Homo sapiens
  misc_RNA (1)...(19): siRNA sense strand
gaaacaaagugauggaaca

SEQ ID NO: 1087262 - RNA, 19 nt, Homo sapiens
  misc_RNA (1)...(19): siRNA sense strand
gaagaacuguacuuuggaa

SEQ ID NO: 1087263 - RNA, 19 nt, Homo sapiens
  misc_RNA (1)...(19): siRNA sense strand
gaaagaaguucccagaaac

SEQ ID NO: 1087264 - RNA, 19 nt, Homo sapiens
  misc_RNA (1)...(19): siRNA sense strand
ucaaugaccuuaaugaauc

SEQ ID NO: 1087265 - RNA, 19 nt, Homo sapiens
  misc_RNA (1)...(19): siRNA sense strand
gauaugccuugguuaauga

SEQ ID NO: 1087266 - RNA, 19 nt, Homo sapiens
  misc_RNA (1)...(19): siRNA sense strand
gagaaucacgcccagaaua

SEQ ID NO: 1087267 - RNA, 19 nt, Homo sapiens
  misc_RNA (1)...(19): siRNA sense strand
cagaagaacuguacuuugg

SEQ ID NO: 1087268 - RNA, 19 nt, Homo sapiens
  misc_RNA (1)...(19): siRNA sense strand
agacaaugcuuucaauaug

SEQ ID NO: 1087269 - RNA, 19 nt, Homo sapiens
  misc_RNA (1)...(19): siRNA sense strand
ugacaaagaagguaacaaa

SEQ ID NO: 1087270 - RNA, 19 nt, Homo sapiens
  misc_RNA (1)...(19): siRNA sense strand
gucagaaacuggaauaaau

SEQ ID NO: 1087271 - RNA, 19 nt, Homo sapiens
  misc_RNA (1)...(19): siRNA sense strand
cauagaaagugauggcaaa

SEQ ID NO: 1087272 - RNA, 19 nt, Homo sapiens
  misc_RNA (1)...(19): siRNA sense strand
gcauugacauggacuuugu

SEQ ID NO: 1087273 - RNA, 19 nt, Homo sapiens
  misc_RNA (1)...(19): siRNA sense strand
gacaaugcuuucaauaugu

SEQ ID NO: 1087274 - RNA, 19 nt, Homo sapiens
  misc_RNA (1)...(19): siRNA sense strand
agaaagugauggcaaagaa

SEQ ID NO: 1087275 - RNA, 19 nt, Homo sapiens
  misc_RNA (1)...(19): siRNA sense strand
gcacaggcccagcagaauu

SEQ ID NO: 1087276 - RNA, 19 nt, Homo sapiens
  misc_RNA (1)...(19): siRNA sense strand
aagccaagcucaucucuga

SEQ ID NO: 1087277 - RNA, 19 nt, Homo sapiens
  misc_RNA (1)...(19): siRNA sense strand
aaaagaagcucauagcauu

SEQ ID NO: 1087278 - RNA, 19 nt, Homo sapiens
  misc_RNA (1)...(19): siRNA sense strand
gaagaaaaccuuaauagug

SEQ ID NO: 1087279 - RNA, 19 nt, Homo sapiens
  misc_RNA (1)...(19): siRNA sense strand
uaaauagcauugacaugga

SEQ ID NO: 1087280 - RNA, 19 nt, Homo sapiens
  misc_RNA (1)...(19): siRNA sense strand
aagaagacauagaaaguga

SEQ ID NO: 1087281 - RNA, 19 nt, Homo sapiens
  misc_RNA (1)...(19): siRNA sense strand
ucaccucuuucuucuauuu

SEQ ID NO: 1087282 - RNA, 19 nt, Homo sapiens
  misc_RNA (1)...(19): siRNA sense strand
accaaacacucuuacguua

SEQ ID NO: 1087283 - RNA, 19 nt, Homo sapiens
  misc_RNA (1)...(19): siRNA sense strand
ggaucagggugaaguauca

SEQ ID NO: 1087284 - RNA, 19 nt, Homo sapiens
  misc_RNA (1)...(19): siRNA sense strand
cugaguaugugacagauaa

SEQ ID NO: 1087285 - RNA, 19 nt, Homo sapiens
  misc_RNA (1)...(19): siRNA sense strand
guauagcuauccaccacua

SEQ ID NO: 1087286 - RNA, 19 nt, Homo sapiens
  misc_RNA (1)...(19): siRNA sense strand
ucaacugcuuuaagguuua

SEQ ID NO: 1087287 - RNA, 19 nt, Homo sapiens
  misc_RNA (1)...(19): siRNA sense strand
gcaauaggaagcuugaaga

SEQ ID NO: 1087288 - RNA, 19 nt, Homo sapiens
  misc_RNA (1)...(19): siRNA sense strand
gaaagugauggcaaagaaa

SEQ ID NO: 1087289 - RNA, 19 nt, Homo sapiens
  misc_RNA (1)...(19): siRNA sense strand
gcagaagaacuguacuuug

SEQ ID NO: 1087290 - RNA, 19 nt, Homo sapiens
  misc_RNA (1)...(19): siRNA sense strand
gaaaggcuacaacaagaug

SEQ ID NO: 1087291 - RNA, 19 nt, Homo sapiens
  misc_RNA (1)...(19): siRNA sense strand
gagaacaacagcuccagaa

SEQ ID NO: 1087292 - RNA, 19 nt, Homo sapiens
  misc_RNA (1)...(19): siRNA sense strand
aagaaaccauugaguguau

SEQ ID NO: 1087293 - RNA, 19 nt, Homo sapiens
  misc_RNA (1)...(19): siRNA sense strand
caagaaaccauugagugua

SEQ ID NO: 1087294 - RNA, 19 nt, Homo sapiens
  misc_RNA (1)...(19): siRNA sense strand
ccaggacuaugucagugua

SEQ ID NO: 1087295 - RNA, 19 nt, Homo sapiens
  misc_RNA (1)...(19): siRNA sense strand
gauggaacauagguuaaga

SEQ ID NO: 1087296 - RNA, 19 nt, Homo sapiens
  misc_RNA (1)...(19): siRNA sense strand
gaauaaagccaagcucauc

SEQ ID NO: 1087297 - RNA, 19 nt, Homo sapiens
  misc_RNA (1)...(19): siRNA sense strand
gaaacuggaauaaauagca

SEQ ID NO: 1087298 - RNA, 19 nt, Homo sapiens
  misc_RNA (1)...(19): siRNA sense strand
acaaagugauggaacauag

SEQ ID NO: 1087299 - RNA, 19 nt, Homo sapiens
  misc_RNA (1)...(19): siRNA sense strand
gaaaccauugaguguauuu

SEQ ID NO: 1087300 - RNA, 19 nt, Homo sapiens
  misc_RNA (1)...(19): siRNA sense strand
guucgaagcugaguaugug

SEQ ID NO: 1087301 - RNA, 19 nt, Homo sapiens
  misc_RNA (1)...(19): siRNA sense strand
gaaugcugcuuucaaaauu

SEQ ID NO: 1087302 - RNA, 19 nt, Homo sapiens
  misc_RNA (1)...(19): siRNA sense strand
acaaugcucuugcuugcuu

SEQ ID NO: 1087303 - RNA, 19 nt, Homo sapiens
  misc_RNA (1)...(19): siRNA sense strand
caaagaaacauuggaaaca

SEQ ID NO: 1087304 - RNA, 19 nt, Homo sapiens
  misc_RNA (1)...(19): siRNA sense strand
acuaguagaugaugacuuc

SEQ ID NO: 1087305 - RNA, 19 nt, Homo sapiens
  misc_RNA (1)...(19): siRNA sense strand
guuaaugaaugcugcuuuc

SEQ ID NO: 1087306 - RNA, 19 nt, Homo sapiens
  misc_RNA (1)...(19): siRNA sense strand
ugucaccucuuucuucuau

SEQ ID NO: 1087307 - RNA, 19 nt, Homo sapiens
  misc_RNA (1)...(19): siRNA sense strand
acaacucagucguuuacua

SEQ ID NO: 1087308 - RNA, 19 nt, Homo sapiens
  misc_RNA (1)...(19): siRNA sense strand
ccaaacacucuuacguuaa

SEQ ID NO: 1087309 - RNA, 19 nt, Homo sapiens
  misc_RNA (1)...(19): siRNA sense strand
gcaaagaaacauuggaaac

SEQ ID NO: 1087310 - RNA, 19 nt, Homo sapiens
  misc_RNA (1)...(19): siRNA sense strand
guaaagaagacauagaaag

SEQ ID NO: 1087311 - RNA, 19 nt, Homo sapiens
  misc_RNA (1)...(19): siRNA sense strand
ccagaugguuauuggaaau

SEQ ID NO: 1087312 - RNA, 19 nt, Homo sapiens
  misc_RNA (1)...(19): siRNA sense strand
gaacaacagcuccagaaaa

SEQ ID NO: 1087313 - RNA, 19 nt, Homo sapiens
  misc_RNA (1)...(19): siRNA sense strand
gaagacauagaaagugaug

SEQ ID NO: 1087314 - RNA, 19 nt, Homo sapiens
  misc_RNA (1)...(19): siRNA sense strand
ugauaugccuugguuaaug

SEQ ID NO: 1087315 - RNA, 19 nt, Homo sapiens
  misc_RNA (1)...(19): siRNA sense strand
gaaaaugggaaaccuguaa

SEQ ID NO: 1087316 - RNA, 19 nt, Homo sapiens
  misc_RNA (1)...(19): siRNA sense strand
agaaucacgcccagaauaa

SEQ ID NO: 1087317 - RNA, 19 nt, Homo sapiens
  misc_RNA (1)...(19): siRNA sense strand
uaagaugccauacuguuga

SEQ ID NO: 1087318 - RNA, 19 nt, Homo sapiens
  misc_RNA (1)...(19): siRNA sense strand
gaaguucccagaaacaaag

SEQ ID NO: 1087319 - RNA, 19 nt, Homo sapiens
  misc_RNA (1)...(19): siRNA sense strand
gaaucacgcccagaauaaa

SEQ ID NO: 1087320 - RNA, 19 nt, Homo sapiens
  misc_RNA (1)...(19): siRNA sense strand
uaaauaugaugcacgugau

SEQ ID NO: 1087321 - RNA, 19 nt, Homo sapiens
  misc_RNA (1)...(19): siRNA sense strand
gcaguaaaccaaacacucu

SEQ ID NO: 1087322 - RNA, 19 nt, Homo sapiens
  misc_RNA (1)...(19): siRNA sense strand
cacaggcccagcagaauua

SEQ ID NO: 1087323 - RNA, 19 nt, Homo sapiens
  misc_RNA (1)...(19): siRNA sense strand
ccaagaccguuuucugaua

SEQ ID NO: 1087324 - RNA, 19 nt, Homo sapiens
  misc_RNA (1)...(19): siRNA sense strand
ggguggaacugauccuuuc

SEQ ID NO: 1087325 - RNA, 19 nt, Homo sapiens
  misc_RNA (1)...(19): siRNA sense strand
ggagacauaauauuguaga

SEQ ID NO: 1087326 - RNA, 19 nt, Homo sapiens
  misc_RNA (1)...(19): siRNA sense strand
ggugaaguaucauguaaaa

SEQ ID NO: 1087327 - RNA, 19 nt, Homo sapiens
  misc_RNA (1)...(19): siRNA sense strand
caacucagucguuuacuag

SEQ ID NO: 1087328 - RNA, 19 nt, Homo sapiens
  misc_RNA (1)...(19): siRNA sense strand
gaaagcaguaaaccaaaca

SEQ ID NO: 1087329 - RNA, 19 nt, Homo sapiens
  misc_RNA (1)...(19): siRNA sense strand
cacugaagaugcucgauga

SEQ ID NO: 1087330 - RNA, 19 nt, Homo sapiens
  misc_RNA (1)...(19): siRNA sense strand
ggaauaaauagcauugaca

SEQ ID NO: 1087331 - RNA, 19 nt, Homo sapiens
  misc_RNA (1)...(19): siRNA sense strand
uugaaaggcuacaacaaga

SEQ ID NO: 1087332 - RNA, 19 nt, Homo sapiens
  misc_RNA (1)...(19): siRNA sense strand
gagaaugggccuauuacca

SEQ ID NO: 1087333 - RNA, 19 nt, Homo sapiens
  misc_RNA (1)...(19): siRNA sense strand
gauaaaaccagugaagaua

SEQ ID NO: 1087334 - RNA, 19 nt, Homo sapiens
  misc_RNA (1)...(19): siRNA sense strand
guugaaagcaguaaaccaa

SEQ ID NO: 1087335 - RNA, 19 nt, Homo sapiens
  misc_RNA (1)...(19): siRNA sense strand
caagaccguuuucugauaa

SEQ ID NO: 1087336 - RNA, 19 nt, Homo sapiens
  misc_RNA (1)...(19): siRNA sense strand
gugagcuuguugaaguuua

SEQ ID NO: 1087337 - RNA, 19 nt, Homo sapiens
  misc_RNA (1)...(19): siRNA sense strand
cagugaagauauaugucua

SEQ ID NO: 1087338 - RNA, 19 nt, Homo sapiens
  misc_RNA (1)...(19): siRNA sense strand
caacugcuuuaagguuuau

SEQ ID NO: 1087339 - RNA, 19 nt, Homo sapiens
  misc_RNA (1)...(19): siRNA sense strand
gugcaucaguggauauagu

SEQ ID NO: 1087340 - RNA, 19 nt, Homo sapiens
  misc_RNA (1)...(19): siRNA sense strand
gcauuuaaggugagaacaa

SEQ ID NO: 1087341 - RNA, 19 nt, Homo sapiens
  misc_RNA (1)...(19): siRNA sense strand
caucaacugcuuuaagguu

SEQ ID NO: 1087342 - RNA, 19 nt, Homo sapiens
  misc_RNA (1)...(19): siRNA sense strand
caucagcccagcagaagaa

SEQ ID NO: 1087343 - RNA, 19 nt, Homo sapiens
  misc_RNA (1)...(19): siRNA sense strand
aaccgaaucuacuuccaaa

SEQ ID NO: 1087344 - RNA, 19 nt, Homo sapiens
  misc_RNA (1)...(19): siRNA sense strand
gaagaugcucgaugagagu

SEQ ID NO: 1087345 - RNA, 19 nt, Homo sapiens
  misc_RNA (1)...(19): siRNA sense strand
gguuggaacguuaugcuaa

SEQ ID NO: 1087346 - RNA, 19 nt, Homo sapiens
  misc_RNA (1)...(19): siRNA sense strand
guuaagaugccauacuguu

SEQ ID NO: 1087347 - RNA, 19 nt, Homo sapiens
  misc_RNA (1)...(19): siRNA sense strand
cgaaucuacuuccaaagca

SEQ ID NO: 1087348 - RNA, 19 nt, Homo sapiens
  misc_RNA (1)...(19): siRNA sense strand
ggacuaugucaguguagaa

SEQ ID NO: 1087349 - RNA, 19 nt, Homo sapiens
  misc_RNA (1)...(19): siRNA sense strand
uuuguacgcuuuaucauca

SEQ ID NO: 1087350 - RNA, 19 nt, Homo sapiens
  misc_RNA (1)...(19): siRNA sense strand
aacaaacaccucuucuuaa

SEQ ID NO: 1087351 - RNA, 19 nt, Homo sapiens
  misc_RNA (1)...(19): siRNA sense strand
guagaugaaacacugaaga

SEQ ID NO: 1087352 - RNA, 19 nt, Homo sapiens
  misc_RNA (1)...(19): siRNA sense strand
gaaauggaacagucaucug

SEQ ID NO: 1087353 - RNA, 19 nt, Homo sapiens
  misc_RNA (1)...(19): siRNA sense strand
agaaauggauccacaguua

SEQ ID NO: 1087354 - RNA, 19 nt, Homo sapiens
  misc_RNA (1)...(19): siRNA sense strand
aagcagagauuaagacuaa

SEQ ID NO: 1087355 - RNA, 19 nt, Homo sapiens
  misc_RNA (1)...(19): siRNA sense strand
uaagaucacuggaagcaaa

SEQ ID NO: 1087356 - RNA, 19 nt, Homo sapiens
  misc_RNA (1)...(19): siRNA sense strand
gaacacuggucaugacaga

SEQ ID NO: 1087357 - RNA, 19 nt, Homo sapiens
  misc_RNA (1)...(19): siRNA sense strand
gaacugccucggaucauua

SEQ ID NO: 1087358 - RNA, 19 nt, Homo sapiens
  misc_RNA (1)...(19): siRNA sense strand
ccaagagcauucccuagua

SEQ ID NO: 1087359 - RNA, 19 nt, Homo sapiens
  misc_RNA (1)...(19): siRNA sense strand
caagagcauucccuaguaa

SEQ ID NO: 1087360 - RNA, 19 nt, Homo sapiens
  misc_RNA (1)...(19): siRNA sense strand
gaccaaagcugaaacucau

SEQ ID NO: 1087361 - RNA, 19 nt, Homo sapiens
  misc_RNA (1)...(19): siRNA sense strand
agacagagauuaacagagu

SEQ ID NO: 1087362 - RNA, 19 nt, Homo sapiens
  misc_RNA (1)...(19): siRNA sense strand
gaaauggauccacaguuaa

SEQ ID NO: 1087363 - RNA, 19 nt, Homo sapiens
  misc_RNA (1)...(19): siRNA sense strand
ggaacugccucggaucauu

SEQ ID NO: 1087364 - RNA, 19 nt, Homo sapiens
  misc_RNA (1)...(19): siRNA sense strand
ggaagagacuguguugauc

SEQ ID NO: 1087365 - RNA, 19 nt, Homo sapiens
  misc_RNA (1)...(19): siRNA sense strand
ugaggacucuugccagaaa

SEQ ID NO: 1087366 - RNA, 19 nt, Homo sapiens
  misc_RNA (1)...(19): siRNA sense strand
gaccaaggccacugcuaua

SEQ ID NO: 1087367 - RNA, 19 nt, Homo sapiens
  misc_RNA (1)...(19): siRNA sense strand
ggaagagcccagaguguga

SEQ ID NO: 1087368 - RNA, 19 nt, Homo sapiens
  misc_RNA (1)...(19): siRNA sense strand
ugacacagaccaaggcuaa

SEQ ID NO: 1087369 - RNA, 19 nt, Homo sapiens
  misc_RNA (1)...(19): siRNA sense strand
ggaaguggccaugaaagaa

SEQ ID NO: 1087370 - RNA, 19 nt, Homo sapiens
  misc_RNA (1)...(19): siRNA sense strand
agacuggaauuguggauga

SEQ ID NO: 1087371 - RNA, 19 nt, Homo sapiens
  misc_RNA (1)...(19): siRNA sense strand
cgagugcgcucuaccauac

SEQ ID NO: 1087372 - RNA, 19 nt, Homo sapiens
  misc_RNA (1)...(19): siRNA sense strand
ccagggaaguggccaugaa

SEQ ID NO: 1087373 - RNA, 19 nt, Homo sapiens
  misc_RNA (1)...(19): siRNA sense strand
gggcagagccagagacuca

SEQ ID NO: 1087374 - RNA, 19 nt, Homo sapiens
  misc_RNA (1)...(19): siRNA sense strand
gaaacuggagcaagaagug

SEQ ID NO: 1087375 - RNA, 19 nt, Homo sapiens
  misc_RNA (1)...(19): siRNA sense strand
gcaccugcuacuacauuua

SEQ ID NO: 1087376 - RNA, 19 nt, Homo sapiens
  misc_RNA (1)...(19): siRNA sense strand
gcaaugacccagaccaaag

SEQ ID NO: 1087377 - RNA, 19 nt, Homo sapiens
  misc_RNA (1)...(19): siRNA sense strand
acaacuaccacucucuuua

SEQ ID NO: 1087378 - RNA, 19 nt, Homo sapiens
  misc_RNA (1)...(19): siRNA sense strand
gacagagauuaacagagua

SEQ ID NO: 1087379 - RNA, 19 nt, Homo sapiens
  misc_RNA (1)...(19): siRNA sense strand
agacagaggccaagagaga

SEQ ID NO: 1087380 - RNA, 19 nt, Homo sapiens
  misc_RNA (1)...(19): siRNA sense strand
ccagggaaguggccaagau

SEQ ID NO: 1087381 - RNA, 19 nt, Homo sapiens
  misc_RNA (1)...(19): siRNA sense strand
ggccacugcuauagccaua

SEQ ID NO: 1087382 - RNA, 19 nt, Homo sapiens
  misc_RNA (1)...(19): siRNA sense strand
ggaagcaaagaaacaaaga

SEQ ID NO: 1087383 - RNA, 19 nt, Homo sapiens
  misc_RNA (1)...(19): siRNA sense strand
uaagaaagaagcagugaca

SEQ ID NO: 1087384 - RNA, 19 nt, Homo sapiens
  misc_RNA (1)...(19): siRNA sense strand
gaccuuggccauaaaugaa

SEQ ID NO: 1087385 - RNA, 19 nt, Homo sapiens
  misc_RNA (1)...(19): siRNA sense strand
acucauauauuggcugaaa

SEQ ID NO: 1087386 - RNA, 19 nt, Homo sapiens
  misc_RNA (1)...(19): siRNA sense strand
gggcugaaguagagaccaa

SEQ ID NO: 1087387 - RNA, 19 nt, Homo sapiens
  misc_RNA (1)...(19): siRNA sense strand
caagacagaggccaagaga

SEQ ID NO: 1087388 - RNA, 19 nt, Homo sapiens
  misc_RNA (1)...(19): siRNA sense strand
gaaguggccaugaaagaag

SEQ ID NO: 1087389 - RNA, 19 nt, Homo sapiens
  misc_RNA (1)...(19): siRNA sense strand
gcucuaccauaccuuguuc

SEQ ID NO: 1087390 - RNA, 19 nt, Homo sapiens
  misc_RNA (1)...(19): siRNA sense strand
gggaaguggccaugaaaga

SEQ ID NO: 1087391 - RNA, 19 nt, Homo sapiens
  misc_RNA (1)...(19): siRNA sense strand
gaagcagagauuaagacua

SEQ ID NO: 1087392 - RNA, 19 nt, Homo sapiens
  misc_RNA (1)...(19): siRNA sense strand
guauagacuggguguauug

SEQ ID NO: 1087393 - RNA, 19 nt, Homo sapiens
  misc_RNA (1)...(19): siRNA sense strand
agcugaaacucauauauug

SEQ ID NO: 1087394 - RNA, 19 nt, Homo sapiens
  misc_RNA (1)...(19): siRNA sense strand
cagcuguaguggccuuuga

SEQ ID NO: 1087395 - RNA, 19 nt, Homo sapiens
  misc_RNA (1)...(19): siRNA sense strand
caaagcugaaacucauaua

SEQ ID NO: 1087396 - RNA, 19 nt, Homo sapiens
  misc_RNA (1)...(19): siRNA sense strand
gcagaaacuggagcaagaa

SEQ ID NO: 1087397 - RNA, 19 nt, Homo sapiens
  misc_RNA (1)...(19): siRNA sense strand
cauaaaugaagcagagauu

SEQ ID NO: 1087398 - RNA, 19 nt, Homo sapiens
  misc_RNA (1)...(19): siRNA sense strand
gauugcuccugaucaguau

SEQ ID NO: 1087399 - RNA, 19 nt, Homo sapiens
  misc_RNA (1)...(19): siRNA sense strand
caacuaccacucucuuuac

SEQ ID NO: 1087400 - RNA, 19 nt, Homo sapiens
  misc_RNA (1)...(19): siRNA sense strand
caagacaagagcucuggaa

SEQ ID NO: 1087401 - RNA, 19 nt, Homo sapiens
  misc_RNA (1)...(19): siRNA sense strand
gaugaaaccaagacaagag

SEQ ID NO: 1087402 - RNA, 19 nt, Homo sapiens
  misc_RNA (1)...(19): siRNA sense strand
gaaacaaagaggagauugc

SEQ ID NO: 1087403 - RNA, 19 nt, Homo sapiens
  misc_RNA (1)...(19): siRNA sense strand
ccacugcuauagccauaca

SEQ ID NO: 1087404 - RNA, 19 nt, Homo sapiens
  misc_RNA (1)...(19): siRNA sense strand
agcagaaacuggagcaaga

SEQ ID NO: 1087405 - RNA, 19 nt, Homo sapiens
  misc_RNA (1)...(19): siRNA sense strand
gggcuuaagaucacuggaa

SEQ ID NO: 1087406 - RNA, 19 nt, Homo sapiens
  misc_RNA (1)...(19): siRNA sense strand
gcuggcaccugcuacuaca

SEQ ID NO: 1087407 - RNA, 19 nt, Homo sapiens
  misc_RNA (1)...(19): siRNA sense strand
ggaugaaaccaagacaaga

SEQ ID NO: 1087408 - RNA, 19 nt, Homo sapiens
  misc_RNA (1)...(19): siRNA sense strand
ccaaagcugaaacucauau

SEQ ID NO: 1087409 - RNA, 19 nt, Homo sapiens
  misc_RNA (1)...(19): siRNA sense strand
ggcaccugcuacuacauuu

SEQ ID NO: 1087410 - RNA, 19 nt, Homo sapiens
  misc_RNA (1)...(19): siRNA sense strand
gccaagagagaagcaauga

SEQ ID NO: 1087411 - RNA, 19 nt, Homo sapiens
  misc_RNA (1)...(19): siRNA sense strand
agacaagagcucuggaaga

SEQ ID NO: 1087412 - RNA, 19 nt, Homo sapiens
  misc_RNA (1)...(19): siRNA sense strand
uaagauggagacugugguu

SEQ ID NO: 1087413 - RNA, 19 nt, Homo sapiens
  misc_RNA (1)...(19): siRNA sense strand
ccacaacuaccacucucuu

SEQ ID NO: 1087414 - RNA, 19 nt, Homo sapiens
  misc_RNA (1)...(19): siRNA sense strand
uggaagagacuguguugau

SEQ ID NO: 1087415 - RNA, 19 nt, Homo sapiens
  misc_RNA (1)...(19): siRNA sense strand
aaagagacagagauuaaca

SEQ ID NO: 1087416 - RNA, 19 nt, Homo sapiens
  misc_RNA (1)...(19): siRNA sense strand
agauugcuccugaucagua

SEQ ID NO: 1087417 - RNA, 19 nt, Homo sapiens
  misc_RNA (1)...(19): siRNA sense strand
gaauuguggaugaaaccaa

SEQ ID NO: 1087418 - RNA, 19 nt, Homo sapiens
  misc_RNA (1)...(19): siRNA sense strand
gcagagauuaagacuaaac

SEQ ID NO: 1087419 - RNA, 19 nt, Homo sapiens
  misc_RNA (1)...(19): siRNA sense strand
gagugagaccuuggcagua

SEQ ID NO: 1087420 - RNA, 19 nt, Homo sapiens
  misc_RNA (1)...(19): siRNA sense strand
acagagauuaacagaguaa

SEQ ID NO: 1087421 - RNA, 19 nt, Homo sapiens
  misc_RNA (1)...(19): siRNA sense strand
gaagcaaagaaacaaagag

SEQ ID NO: 1087422 - RNA, 19 nt, Homo sapiens
  misc_RNA (1)...(19): siRNA sense strand
ggccaaagccagggaagug

SEQ ID NO: 1087423 - RNA, 19 nt, Homo sapiens
  misc_RNA (1)...(19): siRNA sense strand
agaccuuggccauaaauga

SEQ ID NO: 1087424 - RNA, 19 nt, Homo sapiens
  misc_RNA (1)...(19): siRNA sense strand
gaucacuggaagcaaagaa

SEQ ID NO: 1087425 - RNA, 19 nt, Homo sapiens
  misc_RNA (1)...(19): siRNA sense strand
ccacgaacaagacuggaau

SEQ ID NO: 1087426 - RNA, 19 nt, Homo sapiens
  misc_RNA (1)...(19): siRNA sense strand
aaagaagcagugacacaga

SEQ ID NO: 1087427 - RNA, 19 nt, Homo sapiens
  misc_RNA (1)...(19): siRNA sense strand
aaagaagcagugacccaaa

SEQ ID NO: 1087428 - RNA, 19 nt, Homo sapiens
  misc_RNA (1)...(19): siRNA sense strand
caaauuuaccaagggaaga

SEQ ID NO: 1087429 - RNA, 19 nt, Homo sapiens
  misc_RNA (1)...(19): siRNA sense strand
agaaagaagcagugacaca

SEQ ID NO: 1087430 - RNA, 19 nt, Homo sapiens
  misc_RNA (1)...(19): siRNA sense strand
gcuggaacacuggucauga

SEQ ID NO: 1087431 - RNA, 19 nt, Homo sapiens
  misc_RNA (1)...(19): siRNA sense strand
gcagagccagagacucaau

SEQ ID NO: 1087432 - RNA, 19 nt, Homo sapiens
  misc_RNA (1)...(19): siRNA sense strand
agaccaaggccacugcuau

SEQ ID NO: 1087433 - RNA, 19 nt, Homo sapiens
  misc_RNA (1)...(19): siRNA sense strand
aguauagacuggguguauu

SEQ ID NO: 1087434 - RNA, 19 nt, Homo sapiens
  misc_RNA (1)...(19): siRNA sense strand
uagcaggggugauuacaug

SEQ ID NO: 1087435 - RNA, 19 nt, Homo sapiens
  misc_RNA (1)...(19): siRNA sense strand
gaagaccagcacccucaca

SEQ ID NO: 1087436 - RNA, 19 nt, Homo sapiens
  misc_RNA (1)...(19): siRNA sense strand
agaccaaagcugaaacuca

SEQ ID NO: 1087437 - RNA, 19 nt, Homo sapiens
  misc_RNA (1)...(19): siRNA sense strand
gacagaggccaagagagaa

SEQ ID NO: 1087438 - RNA, 19 nt, Homo sapiens
  misc_RNA (1)...(19): siRNA sense strand
caaagugguggcuggaaca

SEQ ID NO: 1087439 - RNA, 19 nt, Homo sapiens
  misc_RNA (1)...(19): siRNA sense strand
cagaaauggauccacaguu

SEQ ID NO: 1087440 - RNA, 19 nt, Homo sapiens
  misc_RNA (1)...(19): siRNA sense strand
gaggacucuugccagaaau

SEQ ID NO: 1087441 - RNA, 19 nt, Homo sapiens
  misc_RNA (1)...(19): siRNA sense strand
cugcaggacuggugaucug

SEQ ID NO: 1087442 - RNA, 19 nt, Homo sapiens
  misc_RNA (1)...(19): siRNA sense strand
cagggaaguggccaugaaa

SEQ ID NO: 1087443 - RNA, 19 nt, Homo sapiens
  misc_RNA (1)...(19): siRNA sense strand
ccgagugcgcucuaccaua

SEQ ID NO: 1087444 - RNA, 19 nt, Homo sapiens
  misc_RNA (1)...(19): siRNA sense strand
uuacacagagugagaccuu

SEQ ID NO: 1087445 - RNA, 19 nt, Homo sapiens
  misc_RNA (1)...(19): siRNA sense strand
aagaagcagugacccaaac

SEQ ID NO: 1087446 - RNA, 19 nt, Homo sapiens
  misc_RNA (1)...(19): siRNA sense strand
gccuuugaguggcugaaga

SEQ ID NO: 1087447 - RNA, 19 nt, Homo sapiens
  misc_RNA (1)...(19): siRNA sense strand
gacuggaauuguggaugaa

SEQ ID NO: 1087448 - RNA, 19 nt, Homo sapiens
  misc_RNA (1)...(19): siRNA sense strand
guuaagaaagaagcaguga

SEQ ID NO: 1087449 - RNA, 19 nt, Homo sapiens
  misc_RNA (1)...(19): siRNA sense strand
gagaccaaggccacugcua

SEQ ID NO: 1087450 - RNA, 19 nt, Homo sapiens
  misc_RNA (1)...(19): siRNA sense strand
agagacagagauuaacaga

SEQ ID NO: 1087451 - RNA, 19 nt, Homo sapiens
  misc_RNA (1)...(19): siRNA sense strand
gaggcuggcaaaauaguua

SEQ ID NO: 1087452 - RNA, 19 nt, Homo sapiens
  misc_RNA (1)...(19): siRNA sense strand
aaagaaacaaagaggagau

SEQ ID NO: 1087453 - RNA, 19 nt, Homo sapiens
  misc_RNA (1)...(19): siRNA sense strand
gaacuugcauagugauuaa

SEQ ID NO: 1087454 - RNA, 19 nt, Homo sapiens
  misc_RNA (1)...(19): siRNA sense strand
gaauggaacuugcauagug

SEQ ID NO: 1087455 - RNA, 19 nt, Homo sapiens
  misc_RNA (1)...(19): siRNA sense strand
gcucaaccuuuauggauuu

SEQ ID NO: 1087456 - RNA, 19 nt, Homo sapiens
  misc_RNA (1)...(19): siRNA sense strand
gcauagugauuaaugaaga

SEQ ID NO: 1087457 - RNA, 19 nt, Homo sapiens
  misc_RNA (1)...(19): siRNA sense strand
gaacaugcuuuucagguuu

SEQ ID NO: 1087458 - RNA, 19 nt, Homo sapiens
  misc_RNA (1)...(19): siRNA sense strand
ggaacuugcauagugauua

SEQ ID NO: 1087459 - RNA, 19 nt, Homo sapiens
  misc_RNA (1)...(19): siRNA sense strand
ggaaaauaguggaaaguga

SEQ ID NO: 1087460 - RNA, 19 nt, Homo sapiens
  misc_RNA (1)...(19): siRNA sense strand
gagaauggaacuugcauag

SEQ ID NO: 1087461 - RNA, 19 nt, Homo sapiens
  misc_RNA (1)...(19): siRNA sense strand
uucgacagcucaaccuuua

SEQ ID NO: 1087462 - RNA, 19 nt, Homo sapiens
  misc_RNA (1)...(19): siRNA sense strand
ucagaagccuccacuaggu

SEQ ID NO: 1087463 - RNA, 19 nt, Homo sapiens
  misc_RNA (1)...(19): siRNA sense strand
guuagaaaguccaaguuac

SEQ ID NO: 1087464 - RNA, 19 nt, Homo sapiens
  misc_RNA (1)...(19): siRNA sense strand
aauggaacuugcauaguga

SEQ ID NO: 1087465 - RNA, 19 nt, Homo sapiens
  misc_RNA (1)...(19): siRNA sense strand
caaccuuuauggauuuagu

SEQ ID NO: 1087466 - RNA, 19 nt, Homo sapiens
  misc_RNA (1)...(19): siRNA sense strand
uucagaaacucaagauguu

SEQ ID NO: 1087467 - RNA, 19 nt, Homo sapiens
  misc_RNA (1)...(19): siRNA sense strand
agacuuacggucaaugauu

SEQ ID NO: 1087468 - RNA, 19 nt, Homo sapiens
  misc_RNA (1)...(19): siRNA sense strand
uguuagaaaguccaaguua

SEQ ID NO: 1087469 - RNA, 19 nt, Homo sapiens
  misc_RNA (1)...(19): siRNA sense strand
aguggaaagugaccaauuc

SEQ ID NO: 1087470 - RNA, 19 nt, Homo sapiens
  misc_RNA (1)...(19): siRNA sense strand
cgacagcucaaccuuuaug

SEQ ID NO: 1087471 - RNA, 19 nt, Homo sapiens
  misc_RNA (1)...(19): siRNA sense strand
caggaaacuuuggaaaaua

SEQ ID NO: 1087472 - RNA, 19 nt, Homo sapiens
  misc_RNA (1)...(19): siRNA sense strand
cacuaggucuccauugugu

SEQ ID NO: 1087473 - RNA, 19 nt, Homo sapiens
  misc_RNA (1)...(19): siRNA sense strand
aguccaaguuacacaguuu

SEQ ID NO: 1087474 - RNA, 19 nt, Homo sapiens
  misc_RNA (1)...(19): siRNA sense strand
ccaggaaacuuuggaaaau

SEQ ID NO: 1087475 - RNA, 19 nt, Homo sapiens
  misc_RNA (1)...(19): siRNA sense strand
aaucgucugucuuaagcaa

SEQ ID NO: 1087476 - RNA, 19 nt, Homo sapiens
  misc_RNA (1)...(19): siRNA sense strand
cagcucaaccuuuauggau

SEQ ID NO: 1087477 - RNA, 19 nt, Homo sapiens
  misc_RNA (1)...(19): siRNA sense strand
ccagauaaagaugaugauu

SEQ ID NO: 1087478 - RNA, 19 nt, Homo sapiens
  misc_RNA (1)...(19): siRNA sense strand
agaaucgucugucuuaagc

SEQ ID NO: 1087479 - RNA, 19 nt, Homo sapiens
  misc_RNA (1)...(19): siRNA sense strand
guucgacagcucaaccuuu

SEQ ID NO: 1087480 - RNA, 19 nt, Homo sapiens
  misc_RNA (1)...(19): siRNA sense strand
uuagaaaguccaaguuaca

SEQ ID NO: 1087481 - RNA, 19 nt, Homo sapiens
  misc_RNA (1)...(19): siRNA sense strand
cuucagaaacucaagaugu

SEQ ID NO: 1087482 - RNA, 19 nt, Homo sapiens
  misc_RNA (1)...(19): siRNA sense strand
ccacuaggucuccauugug

SEQ ID NO: 1087483 - RNA, 19 nt, Homo sapiens
  misc_RNA (1)...(19): siRNA sense strand
cuaggucuccauuguguga

SEQ ID NO: 1087484 - RNA, 19 nt, Homo sapiens
  misc_RNA (1)...(19): siRNA sense strand
uccacuaggucuccauugu

SEQ ID NO: 1087485 - RNA, 19 nt, Homo sapiens
  misc_RNA (1)...(19): siRNA sense strand
ugagccagauaaagaugau

SEQ ID NO: 1087486 - RNA, 19 nt, Homo sapiens
  misc_RNA (1)...(19): siRNA sense strand
ucagacuuacggucaauga

SEQ ID NO: 1087487 - RNA, 19 nt, Homo sapiens
  misc_RNA (1)...(19): siRNA sense strand
gacucagacuuacggucaa

SEQ ID NO: 1087488 - RNA, 19 nt, Homo sapiens
  misc_RNA (1)...(19): siRNA sense strand
cuugcauagugauuaauga

SEQ ID NO: 1087489 - RNA, 19 nt, Homo sapiens
  misc_RNA (1)...(19): siRNA sense strand
gaacuugcauagugauuaa

SEQ ID NO: 1087490 - RNA, 19 nt, Homo sapiens
  misc_RNA (1)...(19): siRNA sense strand
gaauggaacuugcauagug

SEQ ID NO: 1087491 - RNA, 19 nt, Homo sapiens
  misc_RNA (1)...(19): siRNA sense strand
gcucaaccuuuauggauuu

SEQ ID NO: 1087492 - RNA, 19 nt, Homo sapiens
  misc_RNA (1)...(19): siRNA sense strand
gcauagugauuaaugaaga

SEQ ID NO: 1087493 - RNA, 19 nt, Homo sapiens
  misc_RNA (1)...(19): siRNA sense strand
gaacaugcuuuucagguuu

SEQ ID NO: 1087494 - RNA, 19 nt, Homo sapiens
  misc_RNA (1)...(19): siRNA sense strand
ggaacuugcauagugauua

SEQ ID NO: 1087495 - RNA, 19 nt, Homo sapiens
  misc_RNA (1)...(19): siRNA sense strand
ggaaaauaguggaaaguga

SEQ ID NO: 1087496 - RNA, 19 nt, Homo sapiens
  misc_RNA (1)...(19): siRNA sense strand
gagaauggaacuugcauag

SEQ ID NO: 1087497 - RNA, 19 nt, Homo sapiens
  misc_RNA (1)...(19): siRNA sense strand
uucgacagcucaaccuuua

SEQ ID NO: 1087498 - RNA, 19 nt, Homo sapiens
  misc_RNA (1)...(19): siRNA sense strand
ucagaagccuccacuaggu

SEQ ID NO: 1087499 - RNA, 19 nt, Homo sapiens
  misc_RNA (1)...(19): siRNA sense strand
guuagaaaguccaaguuac

SEQ ID NO: 1087500 - RNA, 19 nt, Homo sapiens
  misc_RNA (1)...(19): siRNA sense strand
aauggaacuugcauaguga

SEQ ID NO: 1087501 - RNA, 19 nt, Homo sapiens
  misc_RNA (1)...(19): siRNA sense strand
caaccuuuauggauuuagu

SEQ ID NO: 1087502 - RNA, 19 nt, Homo sapiens
  misc_RNA (1)...(19): siRNA sense strand
uucagaaacucaagauguu

SEQ ID NO: 1087503 - RNA, 19 nt, Homo sapiens
  misc_RNA (1)...(19): siRNA sense strand
agacuuacggucaaugauu

SEQ ID NO: 1087504 - RNA, 19 nt, Homo sapiens
  misc_RNA (1)...(19): siRNA sense strand
uguuagaaaguccaaguua

SEQ ID NO: 1087505 - RNA, 19 nt, Homo sapiens
  misc_RNA (1)...(19): siRNA sense strand
aguggaaagugaccaauuc

SEQ ID NO: 1087506 - RNA, 19 nt, Homo sapiens
  misc_RNA (1)...(19): siRNA sense strand
cgacagcucaaccuuuaug

SEQ ID NO: 1087507 - RNA, 19 nt, Homo sapiens
  misc_RNA (1)...(19): siRNA sense strand
caggaaacuuuggaaaaua

SEQ ID NO: 1087508 - RNA, 19 nt, Homo sapiens
  misc_RNA (1)...(19): siRNA sense strand
cacuaggucuccauugugu

SEQ ID NO: 1087509 - RNA, 19 nt, Homo sapiens
  misc_RNA (1)...(19): siRNA sense strand
aguccaaguuacacaguuu

SEQ ID NO: 1087510 - RNA, 19 nt, Homo sapiens
  misc_RNA (1)...(19): siRNA sense strand
ccaggaaacuuuggaaaau

SEQ ID NO: 1087511 - RNA, 19 nt, Homo sapiens
  misc_RNA (1)...(19): siRNA sense strand
aaucgucugucuuaagcaa

SEQ ID NO: 1087512 - RNA, 19 nt, Homo sapiens
  misc_RNA (1)...(19): siRNA sense strand
cagcucaaccuuuauggau

SEQ ID NO: 1087513 - RNA, 19 nt, Homo sapiens
  misc_RNA (1)...(19): siRNA sense strand
ccagauaaagaugaugauu

SEQ ID NO: 1087514 - RNA, 19 nt, Homo sapiens
  misc_RNA (1)...(19): siRNA sense strand
agaaucgucugucuuaagc

SEQ ID NO: 1087515 - RNA, 19 nt, Homo sapiens
  misc_RNA (1)...(19): siRNA sense strand
guucgacagcucaaccuuu

SEQ ID NO: 1087516 - RNA, 19 nt, Homo sapiens
  misc_RNA (1)...(19): siRNA sense strand
uuagaaaguccaaguuaca

SEQ ID NO: 1087517 - RNA, 19 nt, Homo sapiens
  misc_RNA (1)...(19): siRNA sense strand
cuucagaaacucaagaugu

SEQ ID NO: 1087518 - RNA, 19 nt, Homo sapiens
  misc_RNA (1)...(19): siRNA sense strand
ccacuaggucuccauugug

SEQ ID NO: 1087519 - RNA, 19 nt, Homo sapiens
  misc_RNA (1)...(19): siRNA sense strand
cuaggucuccauuguguga

SEQ ID NO: 1087520 - RNA, 19 nt, Homo sapiens
  misc_RNA (1)...(19): siRNA sense strand
uccacuaggucuccauugu

SEQ ID NO: 1087521 - RNA, 19 nt, Homo sapiens
  misc_RNA (1)...(19): siRNA sense strand
ugagccagauaaagaugau

SEQ ID NO: 1087522 - RNA, 19 nt, Homo sapiens
  misc_RNA (1)...(19): siRNA sense strand
ucagacuuacggucaauga

SEQ ID NO: 1087523 - RNA, 19 nt, Homo sapiens
  misc_RNA (1)...(19): siRNA sense strand
gacucagacuuacggucaa

SEQ ID NO: 1087524 - RNA, 19 nt, Homo sapiens
  misc_RNA (1)...(19): siRNA sense strand
cuugcauagugauuaauga

SEQ ID NO: 1087525 - RNA, 19 nt, Homo sapiens
  misc_RNA (1)...(19): siRNA sense strand
ggagaagccuuauaaaugu

SEQ ID NO: 1087526 - RNA, 19 nt, Homo sapiens
  misc_RNA (1)...(19): siRNA sense strand
gagaaacccuauaaaugua

SEQ ID NO: 1087527 - RNA, 19 nt, Homo sapiens
  misc_RNA (1)...(19): siRNA sense strand
gcucauucaucucuuaaua

SEQ ID NO: 1087528 - RNA, 19 nt, Homo sapiens
  misc_RNA (1)...(19): siRNA sense strand
ggacagaaaccauauaaau

SEQ ID NO: 1087529 - RNA, 19 nt, Homo sapiens
  misc_RNA (1)...(19): siRNA sense strand
gagaaaccauaucaaugua

SEQ ID NO: 1087530 - RNA, 19 nt, Homo sapiens
  misc_RNA (1)...(19): siRNA sense strand
gagaaaccguauaaaugua

SEQ ID NO: 1087531 - RNA, 19 nt, Homo sapiens
  misc_RNA (1)...(19): siRNA sense strand
agagaaaccuuaugaaugu

SEQ ID NO: 1087532 - RNA, 19 nt, Homo sapiens
  misc_RNA (1)...(19): siRNA sense strand
ucaagaauauggacagaaa

SEQ ID NO: 1087533 - RNA, 19 nt, Homo sapiens
  misc_RNA (1)...(19): siRNA sense strand
gagagaaacccuauaaaug

SEQ ID NO: 1087534 - RNA, 19 nt, Homo sapiens
  misc_RNA (1)...(19): siRNA sense strand
gagagaaaccguauaaaug

SEQ ID NO: 1087535 - RNA, 19 nt, Homo sapiens
  misc_RNA (1)...(19): siRNA sense strand
gagagaaacccuauaaaug

SEQ ID NO: 1087536 - RNA, 19 nt, Homo sapiens
  misc_RNA (1)...(19): siRNA sense strand
guagagaugugaugcaaga

SEQ ID NO: 1087537 - RNA, 19 nt, Homo sapiens
  misc_RNA (1)...(19): siRNA sense strand
gagaagagaagccguauga

SEQ ID NO: 1087538 - RNA, 19 nt, Homo sapiens
  misc_RNA (1)...(19): siRNA sense strand
gggagaagccuuauaaaug

SEQ ID NO: 1087539 - RNA, 19 nt, Homo sapiens
  misc_RNA (1)...(19): siRNA sense strand
gaaagaacccacucuagga

SEQ ID NO: 1087540 - RNA, 19 nt, Homo sapiens
  misc_RNA (1)...(19): siRNA sense strand
gagaaacccuaugaaugua

SEQ ID NO: 1087541 - RNA, 19 nt, Homo sapiens
  misc_RNA (1)...(19): siRNA sense strand
ggagaaaccuaagaauugu

SEQ ID NO: 1087542 - RNA, 19 nt, Homo sapiens
  misc_RNA (1)...(19): siRNA sense strand
ggagagaaacccuauaaau

SEQ ID NO: 1087543 - RNA, 19 nt, Homo sapiens
  misc_RNA (1)...(19): siRNA sense strand
ggagagaaaccguauaaau

SEQ ID NO: 1087544 - RNA, 19 nt, Homo sapiens
  misc_RNA (1)...(19): siRNA sense strand
ggagagaaacccuauaaau

SEQ ID NO: 1087545 - RNA, 19 nt, Homo sapiens
  misc_RNA (1)...(19): siRNA sense strand
gaagccauaugaauguaaa

SEQ ID NO: 1087546 - RNA, 19 nt, Homo sapiens
  misc_RNA (1)...(19): siRNA sense strand
gagaagccuuauaaaugua

SEQ ID NO: 1087547 - RNA, 19 nt, Homo sapiens
  misc_RNA (1)...(19): siRNA sense strand
gagagaaaccuuaugaaug

SEQ ID NO: 1087548 - RNA, 19 nt, Homo sapiens
  misc_RNA (1)...(19): siRNA sense strand
gaagagaagccguaugaau

SEQ ID NO: 1087549 - RNA, 19 nt, Homo sapiens
  misc_RNA (1)...(19): siRNA sense strand
gagaaacccuaugcaugua

SEQ ID NO: 1087550 - RNA, 19 nt, Homo sapiens
  misc_RNA (1)...(19): siRNA sense strand
gugggaaaguauuaucuua

SEQ ID NO: 1087551 - RNA, 19 nt, Homo sapiens
  misc_RNA (1)...(19): siRNA sense strand
uggaagggcucacugcaua

SEQ ID NO: 1087552 - RNA, 19 nt, Homo sapiens
  misc_RNA (1)...(19): siRNA sense strand
ccucacagcuucaaauuca

SEQ ID NO: 1087553 - RNA, 19 nt, Homo sapiens
  misc_RNA (1)...(19): siRNA sense strand
cagaugacaugcugaagaa

SEQ ID NO: 1087554 - RNA, 19 nt, Homo sapiens
  misc_RNA (1)...(19): siRNA sense strand
gagagaaacccuaugaaug

SEQ ID NO: 1087555 - RNA, 19 nt, Homo sapiens
  misc_RNA (1)...(19): siRNA sense strand
gagagaaacccuaugaaug

SEQ ID NO: 1087556 - RNA, 19 nt, Homo sapiens
  misc_RNA (1)...(19): siRNA sense strand
uaaagaaggucaucagcau

SEQ ID NO: 1087557 - RNA, 19 nt, Homo sapiens
  misc_RNA (1)...(19): siRNA sense strand
ggagagaaaccauaucaau

SEQ ID NO: 1087558 - RNA, 19 nt, Homo sapiens
  misc_RNA (1)...(19): siRNA sense strand
ggagagaaaccuuaugaau

SEQ ID NO: 1087559 - RNA, 19 nt, Homo sapiens
  misc_RNA (1)...(19): siRNA sense strand
agagaaaccuuacgagugu

SEQ ID NO: 1087560 - RNA, 19 nt, Homo sapiens
  misc_RNA (1)...(19): siRNA sense strand
gggaaaguauuaucuuauc

SEQ ID NO: 1087561 - RNA, 19 nt, Homo sapiens
  misc_RNA (1)...(19): siRNA sense strand
gcagauccuucaacuguuc

SEQ ID NO: 1087562 - RNA, 19 nt, Homo sapiens
  misc_RNA (1)...(19): siRNA sense strand
uaucuuaucuuaccagcuu

SEQ ID NO: 1087563 - RNA, 19 nt, Homo sapiens
  misc_RNA (1)...(19): siRNA sense strand
gagaagccauaugaaugua

SEQ ID NO: 1087564 - RNA, 19 nt, Homo sapiens
  misc_RNA (1)...(19): siRNA sense strand
ggagagaaacccuaugaau

SEQ ID NO: 1087565 - RNA, 19 nt, Homo sapiens
  misc_RNA (1)...(19): siRNA sense strand
ggagagaaacccuaugaau

SEQ ID NO: 1087566 - RNA, 19 nt, Homo sapiens
  misc_RNA (1)...(19): siRNA sense strand
gagaaacccuauaaaugca

SEQ ID NO: 1087567 - RNA, 19 nt, Homo sapiens
  misc_RNA (1)...(19): siRNA sense strand
gagaagccauaugaaugua

SEQ ID NO: 1087568 - RNA, 19 nt, Homo sapiens
  misc_RNA (1)...(19): siRNA sense strand
ggagauggaccuuauaagu

SEQ ID NO: 1087569 - RNA, 19 nt, Homo sapiens
  misc_RNA (1)...(19): siRNA sense strand
ggagaagccauaugaaugu

SEQ ID NO: 1087570 - RNA, 19 nt, Homo sapiens
  misc_RNA (1)...(19): siRNA sense strand
ggagaagccauaugaaugu

SEQ ID NO: 1087571 - RNA, 19 nt, Homo sapiens
  misc_RNA (1)...(19): siRNA sense strand
gagagaaaccauaucaaug

SEQ ID NO: 1087572 - RNA, 19 nt, Homo sapiens
  misc_RNA (1)...(19): siRNA sense strand
gacagaaaccauauaaaug

SEQ ID NO: 1087573 - RNA, 19 nt, Homo sapiens
  misc_RNA (1)...(19): siRNA sense strand
gagaagccguaugaaugua

SEQ ID NO: 1087574 - RNA, 19 nt, Homo sapiens
  misc_RNA (1)...(19): siRNA sense strand
agagaaacccuauaaaugu

SEQ ID NO: 1087575 - RNA, 19 nt, Homo sapiens
  misc_RNA (1)...(19): siRNA sense strand
gcauaugaguaucaagaau

SEQ ID NO: 1087576 - RNA, 19 nt, Homo sapiens
  misc_RNA (1)...(19): siRNA sense strand
gagauggaccuuauaagug

SEQ ID NO: 1087577 - RNA, 19 nt, Homo sapiens
  misc_RNA (1)...(19): siRNA sense strand
gaaguaggcagugcucauu

SEQ ID NO: 1087578 - RNA, 19 nt, Homo sapiens
  misc_RNA (1)...(19): siRNA sense strand
ggaugugccucgcgacuuc

SEQ ID NO: 1087579 - RNA, 19 nt, Homo sapiens
  misc_RNA (1)...(19): siRNA sense strand
gagaaaccuuaugaaugua

SEQ ID NO: 1087580 - RNA, 19 nt, Homo sapiens
  misc_RNA (1)...(19): siRNA sense strand
gggaaagccuucagaucug

SEQ ID NO: 1087581 - RNA, 19 nt, Homo sapiens
  misc_RNA (1)...(19): siRNA sense strand
gggaaagccuucagcucuu

SEQ ID NO: 1087582 - RNA, 19 nt, Homo sapiens
  misc_RNA (1)...(19): siRNA sense strand
gggagaagccauaugaaug

SEQ ID NO: 1087583 - RNA, 19 nt, Homo sapiens
  misc_RNA (1)...(19): siRNA sense strand
agagaaacccuaugaaugu

SEQ ID NO: 1087584 - RNA, 19 nt, Homo sapiens
  misc_RNA (1)...(19): siRNA sense strand
ccaguucacuucaaacaca

SEQ ID NO: 1087585 - RNA, 19 nt, Homo sapiens
  misc_RNA (1)...(19): siRNA sense strand
gggagaagccauaugaaug

SEQ ID NO: 1087586 - RNA, 19 nt, Homo sapiens
  misc_RNA (1)...(19): siRNA sense strand
ugacccagguuccagauga

SEQ ID NO: 1087587 - RNA, 19 nt, Homo sapiens
  misc_RNA (1)...(19): siRNA sense strand
gcauucaagugucccaguu

SEQ ID NO: 1087588 - RNA, 19 nt, Homo sapiens
  misc_RNA (1)...(19): siRNA sense strand
ggaaagccuucagcucuuc

SEQ ID NO: 1087589 - RNA, 19 nt, Homo sapiens
  misc_RNA (1)...(19): siRNA sense strand
ggagugggcuuugcuggau

SEQ ID NO: 1087590 - RNA, 19 nt, Homo sapiens
  misc_RNA (1)...(19): siRNA sense strand
acacaaggcauaugaguau

SEQ ID NO: 1087591 - RNA, 19 nt, Homo sapiens
  misc_RNA (1)...(19): siRNA sense strand
ggaguaaaaucaugcgaaa

SEQ ID NO: 1087592 - RNA, 19 nt, Homo sapiens
  misc_RNA (1)...(19): siRNA sense strand
gaaaggaugcacagagaag

SEQ ID NO: 1087593 - RNA, 19 nt, Homo sapiens
  misc_RNA (1)...(19): siRNA sense strand
gaagccauaugaauguaag

SEQ ID NO: 1087594 - RNA, 19 nt, Homo sapiens
  misc_RNA (1)...(19): siRNA sense strand
agauggaccuuauaagugu

SEQ ID NO: 1087595 - RNA, 19 nt, Homo sapiens
  misc_RNA (1)...(19): siRNA sense strand
agagaaaccguauaaaugu

SEQ ID NO: 1087596 - RNA, 19 nt, Homo sapiens
  misc_RNA (1)...(19): siRNA sense strand
caguguguauggagaagua

SEQ ID NO: 1087597 - RNA, 19 nt, Homo sapiens
  misc_RNA (1)...(19): siRNA sense strand
gaaacccuaugaauguaag

SEQ ID NO: 1087598 - RNA, 19 nt, Homo sapiens
  misc_RNA (1)...(19): siRNA sense strand
uaucuuaccagcuuucaaa

SEQ ID NO: 1087599 - RNA, 19 nt, Homo sapiens
  misc_RNA (1)...(19): siRNA sense strand
agagaaaccauaucaaugu

SEQ ID NO: 1087600 - RNA, 19 nt, Homo sapiens
  misc_RNA (1)...(19): siRNA sense strand
ucaacugucucuccucugu

SEQ ID NO: 1087601 - RNA, 19 nt, Homo sapiens
  misc_RNA (1)...(19): siRNA sense strand
aagagaagccguaugaaug

SEQ ID NO: 1087602 - RNA, 19 nt, Homo sapiens
  misc_RNA (1)...(19): siRNA sense strand
gaacucacacuggagagaa

SEQ ID NO: 1087603 - RNA, 19 nt, Homo sapiens
  misc_RNA (1)...(19): siRNA sense strand
uaaacauugugggaaagua

SEQ ID NO: 1087604 - RNA, 19 nt, Homo sapiens
  misc_RNA (1)...(19): siRNA sense strand
gaacucacacuggagagaa

SEQ ID NO: 1087605 - RNA, 19 nt, Homo sapiens
  misc_RNA (1)...(19): siRNA sense strand
aaugcacacuggagagaua

SEQ ID NO: 1087606 - RNA, 19 nt, Homo sapiens
  misc_RNA (1)...(19): siRNA sense strand
uagauguucuucacaacuu

SEQ ID NO: 1087607 - RNA, 19 nt, Homo sapiens
  misc_RNA (1)...(19): siRNA sense strand
ggaaaagccuucagaucug

SEQ ID NO: 1087608 - RNA, 19 nt, Homo sapiens
  misc_RNA (1)...(19): siRNA sense strand
aggagaaaccuaagaauug

SEQ ID NO: 1087609 - RNA, 19 nt, Homo sapiens
  misc_RNA (1)...(19): siRNA sense strand
gacacaaggcauaugagua

SEQ ID NO: 1087610 - RNA, 19 nt, Homo sapiens
  misc_RNA (1)...(19): siRNA sense strand
gaaacccuaugcauguaag

SEQ ID NO: 1087611 - RNA, 19 nt, Homo sapiens
  misc_RNA (1)...(19): siRNA sense strand
agagaaacccuaugcaugu

SEQ ID NO: 1087612 - RNA, 19 nt, Homo sapiens
  misc_RNA (1)...(19): siRNA sense strand
ggagagaaacccuaugcau

SEQ ID NO: 1087613 - RNA, 19 nt, Homo sapiens
  misc_RNA (1)...(19): siRNA sense strand
ccauaugaauguaaggaau

SEQ ID NO: 1087614 - RNA, 19 nt, Homo sapiens
  misc_RNA (1)...(19): siRNA sense strand
ccauaugaauguaaacagu

SEQ ID NO: 1087615 - RNA, 19 nt, Homo sapiens
  misc_RNA (1)...(19): siRNA sense strand
ccauaucaauguaaacagu

SEQ ID NO: 1087616 - RNA, 19 nt, Homo sapiens
  misc_RNA (1)...(19): siRNA sense strand
cuucaaagacacaggauaa

SEQ ID NO: 1087617 - RNA, 19 nt, Homo sapiens
  misc_RNA (1)...(19): siRNA sense strand
cgaaagcaguguguaugga

SEQ ID NO: 1087618 - RNA, 19 nt, Homo sapiens
  misc_RNA (1)...(19): siRNA sense strand
gagaugugaugcaagaaac

SEQ ID NO: 1087619 - RNA, 19 nt, Homo sapiens
  misc_RNA (1)...(19): siRNA sense strand
gagaaacccuaugaaugca

SEQ ID NO: 1087620 - RNA, 19 nt, Homo sapiens
  misc_RNA (1)...(19): siRNA sense strand
caauguaaacaguguggua

SEQ ID NO: 1087621 - RNA, 19 nt, Homo sapiens
  misc_RNA (1)...(19): siRNA sense strand
ugggaaagccuugauguuu

SEQ ID NO: 1087622 - RNA, 19 nt, Homo sapiens
  misc_RNA (1)...(19): siRNA sense strand
gauggaccuuauaagugua

SEQ ID NO: 1087623 - RNA, 19 nt, Homo sapiens
  misc_RNA (1)...(19): siRNA sense strand
auucaaaccuucaaagaca

SEQ ID NO: 1087624 - RNA, 19 nt, Homo sapiens
  misc_RNA (1)...(19): siRNA sense strand
gagaaaccuuacgagugua

SEQ ID NO: 1087625 - RNA, 19 nt, Homo sapiens
  misc_RNA (1)...(19): siRNA sense strand
ggagauagaugcagaugaa

SEQ ID NO: 1087626 - RNA, 19 nt, Homo sapiens
  misc_RNA (1)...(19): siRNA sense strand
gaaaauaacugcaugagaa

SEQ ID NO: 1087627 - RNA, 19 nt, Homo sapiens
  misc_RNA (1)...(19): siRNA sense strand
caaacaagaugaaacaaug

SEQ ID NO: 1087628 - RNA, 19 nt, Homo sapiens
  misc_RNA (1)...(19): siRNA sense strand
gaacacaccaaucuaauga

SEQ ID NO: 1087629 - RNA, 19 nt, Homo sapiens
  misc_RNA (1)...(19): siRNA sense strand
gaugugaauucucucuuua

SEQ ID NO: 1087630 - RNA, 19 nt, Homo sapiens
  misc_RNA (1)...(19): siRNA sense strand
ugaggaagaugcacaauug

SEQ ID NO: 1087631 - RNA, 19 nt, Homo sapiens
  misc_RNA (1)...(19): siRNA sense strand
cuaaagagccgaugacaaa

SEQ ID NO: 1087632 - RNA, 19 nt, Homo sapiens
  misc_RNA (1)...(19): siRNA sense strand
gaagaaaugcagagaagaa

SEQ ID NO: 1087633 - RNA, 19 nt, Homo sapiens
  misc_RNA (1)...(19): siRNA sense strand
ggaugugaauucucucuuu

SEQ ID NO: 1087634 - RNA, 19 nt, Homo sapiens
  misc_RNA (1)...(19): siRNA sense strand
gaaggcaauagaagauuua

SEQ ID NO: 1087635 - RNA, 19 nt, Homo sapiens
  misc_RNA (1)...(19): siRNA sense strand
aagcagaucuugagcaaug

SEQ ID NO: 1087636 - RNA, 19 nt, Homo sapiens
  misc_RNA (1)...(19): siRNA sense strand
uaacuucauuggcuacgua

SEQ ID NO: 1087637 - RNA, 19 nt, Homo sapiens
  misc_RNA (1)...(19): siRNA sense strand
gaacuugaccagaauuugu

SEQ ID NO: 1087638 - RNA, 19 nt, Homo sapiens
  misc_RNA (1)...(19): siRNA sense strand
gaccagaauuugucaagau

SEQ ID NO: 1087639 - RNA, 19 nt, Homo sapiens
  misc_RNA (1)...(19): siRNA sense strand
caaaagcucuacagcauuu

SEQ ID NO: 1087640 - RNA, 19 nt, Homo sapiens
  misc_RNA (1)...(19): siRNA sense strand
ugaagacuguccugaugua

SEQ ID NO: 1087641 - RNA, 19 nt, Homo sapiens
  misc_RNA (1)...(19): siRNA sense strand
ugaaggcaauagaagauuu

SEQ ID NO: 1087642 - RNA, 19 nt, Homo sapiens
  misc_RNA (1)...(19): siRNA sense strand
ucaccuaucugaagacugu

SEQ ID NO: 1087643 - RNA, 19 nt, Homo sapiens
  misc_RNA (1)...(19): siRNA sense strand
ucagacagaugcagcaaga

SEQ ID NO: 1087644 - RNA, 19 nt, Homo sapiens
  misc_RNA (1)...(19): siRNA sense strand
gaagaugagagggcaauuu

SEQ ID NO: 1087645 - RNA, 19 nt, Homo sapiens
  misc_RNA (1)...(19): siRNA sense strand
gaaggaacacaccaaucua

SEQ ID NO: 1087646 - RNA, 19 nt, Homo sapiens
  misc_RNA (1)...(19): siRNA sense strand
aaacaaugaugacagacuu

SEQ ID NO: 1087647 - RNA, 19 nt, Homo sapiens
  misc_RNA (1)...(19): siRNA sense strand
ggucuugccuggaaaauaa

SEQ ID NO: 1087648 - RNA, 19 nt, Homo sapiens
  misc_RNA (1)...(19): siRNA sense strand
gaugacagacuuaagcauu

SEQ ID NO: 1087649 - RNA, 19 nt, Homo sapiens
  misc_RNA (1)...(19): siRNA sense strand
uauacaaccugccaaccua

SEQ ID NO: 1087650 - RNA, 19 nt, Homo sapiens
  misc_RNA (1)...(19): siRNA sense strand
aagaacaucuggaggaaga

SEQ ID NO: 1087651 - RNA, 19 nt, Homo sapiens
  misc_RNA (1)...(19): siRNA sense strand
ugacugguauuaagcaaau

SEQ ID NO: 1087652 - RNA, 19 nt, Homo sapiens
  misc_RNA (1)...(19): siRNA sense strand
gaaagugucagugaaacaa

SEQ ID NO: 1087653 - RNA, 19 nt, Homo sapiens
  misc_RNA (1)...(19): siRNA sense strand
caagaugaaacaaugauga

SEQ ID NO: 1087654 - RNA, 19 nt, Homo sapiens
  misc_RNA (1)...(19): siRNA sense strand
ggaacacaccaaucuaaug

SEQ ID NO: 1087655 - RNA, 19 nt, Homo sapiens
  misc_RNA (1)...(19): siRNA sense strand
ugaagaaagugcugagagu

SEQ ID NO: 1087656 - RNA, 19 nt, Homo sapiens
  misc_RNA (1)...(19): siRNA sense strand
ugaauucucucuuuaacag

SEQ ID NO: 1087657 - RNA, 19 nt, Homo sapiens
  misc_RNA (1)...(19): siRNA sense strand
gaagaaagugcugagaguu

SEQ ID NO: 1087658 - RNA, 19 nt, Homo sapiens
  misc_RNA (1)...(19): siRNA sense strand
cagaauuugucaagauguu

SEQ ID NO: 1087659 - RNA, 19 nt, Homo sapiens
  misc_RNA (1)...(19): siRNA sense strand
ucaagaacaucuggaggaa

SEQ ID NO: 1087660 - RNA, 19 nt, Homo sapiens
  misc_RNA (1)...(19): siRNA sense strand
ggacauucccaacuucuuc

SEQ ID NO: 1087661 - RNA, 19 nt, Homo sapiens
  misc_RNA (1)...(19): siRNA sense strand
cuaaugagcacccugaaga

SEQ ID NO: 1087662 - RNA, 19 nt, Homo sapiens
  misc_RNA (1)...(19): siRNA sense strand
acagguaguuccaaggauu

SEQ ID NO: 1087663 - RNA, 19 nt, Homo sapiens
  misc_RNA (1)...(19): siRNA sense strand
cccugaaacuucugaauga

SEQ ID NO: 1087664 - RNA, 19 nt, Homo sapiens
  misc_RNA (1)...(19): siRNA sense strand
ugagcacccugaagaaaug

SEQ ID NO: 1087665 - RNA, 19 nt, Homo sapiens
  misc_RNA (1)...(19): siRNA sense strand
gaugcacaauugacccaaa

SEQ ID NO: 1087666 - RNA, 19 nt, Homo sapiens
  misc_RNA (1)...(19): siRNA sense strand
aagaaggcuuugacuggua

SEQ ID NO: 1087667 - RNA, 19 nt, Homo sapiens
  misc_RNA (1)...(19): siRNA sense strand
gcauucugccuuccucuaa

SEQ ID NO: 1087668 - RNA, 19 nt, Homo sapiens
  misc_RNA (1)...(19): siRNA sense strand
gaucagguuggucaaugua

SEQ ID NO: 1087669 - RNA, 19 nt, Homo sapiens
  misc_RNA (1)...(19): siRNA sense strand
cuaagaugcugaaggcaau

SEQ ID NO: 1087670 - RNA, 19 nt, Homo sapiens
  misc_RNA (1)...(19): siRNA sense strand
ccaaauggaggauguguuc

SEQ ID NO: 1087671 - RNA, 19 nt, Homo sapiens
  misc_RNA (1)...(19): siRNA sense strand
gcaugagaauuuauacaac

SEQ ID NO: 1087672 - RNA, 19 nt, Homo sapiens
  misc_RNA (1)...(19): siRNA sense strand
gcgaucagguuggucaaug

SEQ ID NO: 1087673 - RNA, 19 nt, Homo sapiens
  misc_RNA (1)...(19): siRNA sense strand
ggccugauuucaaagaugu

SEQ ID NO: 1087674 - RNA, 19 nt, Homo sapiens
  misc_RNA (1)...(19): siRNA sense strand
ccgccuaucugguggagaa

SEQ ID NO: 1087675 - RNA, 19 nt, Homo sapiens
  misc_RNA (1)...(19): siRNA sense strand
gcaagaguuugaccagacu

SEQ ID NO: 1087676 - RNA, 19 nt, Homo sapiens
  misc_RNA (1)...(19): siRNA sense strand
acggaggccugauuucaaa

SEQ ID NO: 1087677 - RNA, 19 nt, Homo sapiens
  misc_RNA (1)...(19): siRNA sense strand
ucugaagacuguccugaug

SEQ ID NO: 1087678 - RNA, 19 nt, Homo sapiens
  misc_RNA (1)...(19): siRNA sense strand
gggagucuuuggcagauuc

SEQ ID NO: 1087679 - RNA, 19 nt, Homo sapiens
  misc_RNA (1)...(19): siRNA sense strand
ccaaacaagaugaaacaau

SEQ ID NO: 1087680 - RNA, 19 nt, Homo sapiens
  misc_RNA (1)...(19): siRNA sense strand
ucuauuuccuuuccaugaa

SEQ ID NO: 1087681 - RNA, 19 nt, Homo sapiens
  misc_RNA (1)...(19): siRNA sense strand
gaaagugcugagaguucua

SEQ ID NO: 1087682 - RNA, 19 nt, Homo sapiens
  misc_RNA (1)...(19): siRNA sense strand
ccgccacucuugguguuua

SEQ ID NO: 1087683 - RNA, 19 nt, Homo sapiens
  misc_RNA (1)...(19): siRNA sense strand
cugaagaaaugcagagaag

SEQ ID NO: 1087684 - RNA, 19 nt, Homo sapiens
  misc_RNA (1)...(19): siRNA sense strand
gaaacaaugaugacagacu

SEQ ID NO: 1087685 - RNA, 19 nt, Homo sapiens
  misc_RNA (1)...(19): siRNA sense strand
ggccagauucuccagauga

SEQ ID NO: 1087686 - RNA, 19 nt, Homo sapiens
  misc_RNA (1)...(19): siRNA sense strand
cagaugaagaggugaagaa

SEQ ID NO: 1087687 - RNA, 19 nt, Homo sapiens
  misc_RNA (1)...(19): siRNA sense strand
gaccacggaggccugauuu

SEQ ID NO: 1087688 - RNA, 19 nt, Homo sapiens
  misc_RNA (1)...(19): siRNA sense strand
uaugaaagugucagugaaa

SEQ ID NO: 1087689 - RNA, 19 nt, Homo sapiens
  misc_RNA (1)...(19): siRNA sense strand
cagugucucuauuuaugaa

SEQ ID NO: 1087690 - RNA, 19 nt, Homo sapiens
  misc_RNA (1)...(19): siRNA sense strand
caacuucuuccagcuguuu

SEQ ID NO: 1087691 - RNA, 19 nt, Homo sapiens
  misc_RNA (1)...(19): siRNA sense strand
uagcugguccucugugaaa

SEQ ID NO: 1087692 - RNA, 19 nt, Homo sapiens
  misc_RNA (1)...(19): siRNA sense strand
gcaauagaagauuuaccaa

SEQ ID NO: 1087693 - RNA, 19 nt, Homo sapiens
  misc_RNA (1)...(19): siRNA sense strand
ugucugaacuggcaaacca

SEQ ID NO: 1087694 - RNA, 19 nt, Homo sapiens
  misc_RNA (1)...(19): siRNA sense strand
ucagcaguauggccagauu

SEQ ID NO: 1087695 - RNA, 19 nt, Homo sapiens
  misc_RNA (1)...(19): siRNA sense strand
aaggaacacaccaaucuaa

SEQ ID NO: 1087696 - RNA, 19 nt, Homo sapiens
  misc_RNA (1)...(19): siRNA sense strand
gaauuugucaagauguuuc

SEQ ID NO: 1087697 - RNA, 19 nt, Homo sapiens
  misc_RNA (1)...(19): siRNA sense strand
ugacccaaauggaggaugu

SEQ ID NO: 1087698 - RNA, 19 nt, Homo sapiens
  misc_RNA (1)...(19): siRNA sense strand
gcacaauugacccaaaugg

SEQ ID NO: 1087699 - RNA, 19 nt, Homo sapiens
  misc_RNA (1)...(19): siRNA sense strand
gaggaagaugcacaauuga

SEQ ID NO: 1087700 - RNA, 19 nt, Homo sapiens
  misc_RNA (1)...(19): siRNA sense strand
gcccugaaacuucugaaug

SEQ ID NO: 1087701 - RNA, 19 nt, Homo sapiens
  misc_RNA (1)...(19): siRNA sense strand
ggcaaaagcucuacagcau

SEQ ID NO: 1087702 - RNA, 19 nt, Homo sapiens
  misc_RNA (1)...(19): siRNA sense strand
gauagaugcagaugaagag

SEQ ID NO: 1087703 - RNA, 19 nt, Homo sapiens
  misc_RNA (1)...(19): siRNA sense strand
caaggauucaugaaggaaa

SEQ ID NO: 1087704 - RNA, 19 nt, Homo sapiens
  misc_RNA (1)...(19): siRNA sense strand
aagaugagagggcaauuug

SEQ ID NO: 1087705 - RNA, 19 nt, Homo sapiens
  misc_RNA (1)...(19): siRNA sense strand
ggaacuugaccagaauuug

SEQ ID NO: 1087706 - RNA, 19 nt, Homo sapiens
  misc_RNA (1)...(19): siRNA sense strand
ccacggaggccugauuuca

SEQ ID NO: 1087707 - RNA, 19 nt, Homo sapiens
  misc_RNA (1)...(19): siRNA sense strand
gcugaaggcaauagaagau

SEQ ID NO: 1087708 - RNA, 19 nt, Homo sapiens
  misc_RNA (1)...(19): siRNA sense strand
agaaggcuuugacugguau

SEQ ID NO: 1087709 - RNA, 19 nt, Homo sapiens
  misc_RNA (1)...(19): siRNA sense strand
guaauuucagugucucuau

SEQ ID NO: 1087710 - RNA, 19 nt, Homo sapiens
  misc_RNA (1)...(19): siRNA sense strand
gggaacuugaccagaauuu

SEQ ID NO: 1087711 - RNA, 19 nt, Homo sapiens
  misc_RNA (1)...(19): siRNA sense strand
gagaaggaacacaccaauc

SEQ ID NO: 1087712 - RNA, 19 nt, Homo sapiens
  misc_RNA (1)...(19): siRNA sense strand
agaaggaacacaccaaucu

SEQ ID NO: 1087713 - RNA, 19 nt, Homo sapiens
  misc_RNA (1)...(19): siRNA sense strand
ggcaauagaagauuuacca

SEQ ID NO: 1087714 - RNA, 19 nt, Homo sapiens
  misc_RNA (1)...(19): siRNA sense strand
uuaugaaagugucagugaa

SEQ ID NO: 1087715 - RNA, 19 nt, Homo sapiens
  misc_RNA (1)...(19): siRNA sense strand
acagaugcagcaagaguuu

SEQ ID NO: 1087716 - RNA, 19 nt, Homo sapiens
  misc_RNA (1)...(19): siRNA sense strand
ccucuaauuucacacucaa

SEQ ID NO: 1087717 - RNA, 19 nt, Homo sapiens
  misc_RNA (1)...(19): siRNA sense strand
augaaacaaugaugacaga

SEQ ID NO: 1087718 - RNA, 19 nt, Homo sapiens
  misc_RNA (1)...(19): siRNA sense strand
ggaggacaccgccuaucug

SEQ ID NO: 1087719 - RNA, 19 nt, Homo sapiens
  misc_RNA (1)...(19): siRNA sense strand
ggaggccugauuucaaaga

SEQ ID NO: 1087720 - RNA, 19 nt, Homo sapiens
  misc_RNA (1)...(19): siRNA sense strand
ccugaaacuucugaaugaa

SEQ ID NO: 1087721 - RNA, 19 nt, Homo sapiens
  misc_RNA (1)...(19): siRNA sense strand
cgaucagguuggucaaugu

SEQ ID NO: 1087722 - RNA, 19 nt, Homo sapiens
  misc_RNA (1)...(19): siRNA sense strand
ugaccagacuuuucaauca

SEQ ID NO: 1087723 - RNA, 19 nt, Homo sapiens
  misc_RNA (1)...(19): siRNA sense strand
gacagaugcagcaagaguu

SEQ ID NO: 1087724 - RNA, 19 nt, Homo sapiens
  misc_RNA (1)...(19): siRNA sense strand
uaaugagcacccugaagaa

SEQ ID NO: 1087725 - RNA, 19 nt, Homo sapiens
  misc_RNA (1)...(19): siRNA sense strand
cgacucggaugcaguauua

SEQ ID NO: 1087726 - RNA, 19 nt, Homo sapiens
  misc_RNA (1)...(19): siRNA sense strand
gaacagaccugaguacucu

SEQ ID NO: 1087727 - RNA, 19 nt, Homo sapiens
  misc_RNA (1)...(19): siRNA sense strand
gaacagaggguggagcuua

SEQ ID NO: 1087728 - RNA, 19 nt, Homo sapiens
  misc_RNA (1)...(19): siRNA sense strand
gccaaaagcuguuccauua

SEQ ID NO: 1087729 - RNA, 19 nt, Homo sapiens
  misc_RNA (1)...(19): siRNA sense strand
gcucugaacucaucucuuc

SEQ ID NO: 1087730 - RNA, 19 nt, Homo sapiens
  misc_RNA (1)...(19): siRNA sense strand
gaacucaucucuucuaccu

SEQ ID NO: 1087731 - RNA, 19 nt, Homo sapiens
  misc_RNA (1)...(19): siRNA sense strand
gagcuuagucucugggaua

SEQ ID NO: 1087732 - RNA, 19 nt, Homo sapiens
  misc_RNA (1)...(19): siRNA sense strand
ugagcaggguugugcaaua

SEQ ID NO: 1087733 - RNA, 19 nt, Homo sapiens
  misc_RNA (1)...(19): siRNA sense strand
agacagaccugcgaacaga

SEQ ID NO: 1087734 - RNA, 19 nt, Homo sapiens
  misc_RNA (1)...(19): siRNA sense strand
ggaucucccuacuacgaua

SEQ ID NO: 1087735 - RNA, 19 nt, Homo sapiens
  misc_RNA (1)...(19): siRNA sense strand
gcagcugggugcagaaauc

SEQ ID NO: 1087736 - RNA, 19 nt, Homo sapiens
  misc_RNA (1)...(19): siRNA sense strand
gagcaggguugugcaauag

SEQ ID NO: 1087737 - RNA, 19 nt, Homo sapiens
  misc_RNA (1)...(19): siRNA sense strand
ggacagcgcacucaagaag

SEQ ID NO: 1087738 - RNA, 19 nt, Homo sapiens
  misc_RNA (1)...(19): siRNA sense strand
gagcauccacagcaucuuu

SEQ ID NO: 1087739 - RNA, 19 nt, Homo sapiens
  misc_RNA (1)...(19): siRNA sense strand
gcucagcuuucaccucaga

SEQ ID NO: 1087740 - RNA, 19 nt, Homo sapiens
  misc_RNA (1)...(19): siRNA sense strand
gauaauguccguccacucu

SEQ ID NO: 1087741 - RNA, 19 nt, Homo sapiens
  misc_RNA (1)...(19): siRNA sense strand
gacaucagccguccagaga

SEQ ID NO: 1087742 - RNA, 19 nt, Homo sapiens
  misc_RNA (1)...(19): siRNA sense strand
caaaagcuguuccauuaug

SEQ ID NO: 1087743 - RNA, 19 nt, Homo sapiens
  misc_RNA (1)...(19): siRNA sense strand
caucagccguccagagaca

SEQ ID NO: 1087744 - RNA, 19 nt, Homo sapiens
  misc_RNA (1)...(19): siRNA sense strand
gcaggguugugcaauagca

SEQ ID NO: 1087745 - RNA, 19 nt, Homo sapiens
  misc_RNA (1)...(19): siRNA sense strand
ccaccguguucgaaaauua

SEQ ID NO: 1087746 - RNA, 19 nt, Homo sapiens
  misc_RNA (1)...(19): siRNA sense strand
cagcgacucggaugcagua

SEQ ID NO: 1087747 - RNA, 19 nt, Homo sapiens
  misc_RNA (1)...(19): siRNA sense strand
ggccagauguaagcucguu

SEQ ID NO: 1087748 - RNA, 19 nt, Homo sapiens
  misc_RNA (1)...(19): siRNA sense strand
gaaguggaggacagaaauc

SEQ ID NO: 1087749 - RNA, 19 nt, Homo sapiens
  misc_RNA (1)...(19): siRNA sense strand
ggaagaccgcgauguugca

SEQ ID NO: 1087750 - RNA, 19 nt, Homo sapiens
  misc_RNA (1)...(19): siRNA sense strand
gaucucccuacuacgauaa

SEQ ID NO: 1087751 - RNA, 19 nt, Homo sapiens
  misc_RNA (1)...(19): siRNA sense strand
guggacagcgcacucaaga

SEQ ID NO: 1087752 - RNA, 19 nt, Homo sapiens
  misc_RNA (1)...(19): siRNA sense strand
caggaucucccuacuacga

SEQ ID NO: 1087753 - RNA, 19 nt, Homo sapiens
  misc_RNA (1)...(19): siRNA sense strand
gaagaccgcgauguugcaa

SEQ ID NO: 1087754 - RNA, 19 nt, Homo sapiens
  misc_RNA (1)...(19): siRNA sense strand
agaccgcgauguugcaagu

SEQ ID NO: 1087755 - RNA, 19 nt, Homo sapiens
  misc_RNA (1)...(19): siRNA sense strand
caagacagaccugcgaaca

SEQ ID NO: 1087756 - RNA, 19 nt, Homo sapiens
  misc_RNA (1)...(19): siRNA sense strand
gcucauuggcugcaagaca

SEQ ID NO: 1087757 - RNA, 19 nt, Homo sapiens
  misc_RNA (1)...(19): siRNA sense strand
cuggaaggcucagcuuuca

SEQ ID NO: 1087758 - RNA, 19 nt, Homo sapiens
  misc_RNA (1)...(19): siRNA sense strand
gugggaagaccgcgauguu

SEQ ID NO: 1087759 - RNA, 19 nt, Homo sapiens
  misc_RNA (1)...(19): siRNA sense strand
cccagucgcucugaacuca

SEQ ID NO: 1087760 - RNA, 19 nt, Homo sapiens
  misc_RNA (1)...(19): siRNA sense strand
ggagcugucccaccagaag

SEQ ID NO: 1087761 - RNA, 19 nt, Homo sapiens
  misc_RNA (1)...(19): siRNA sense strand
gaaaaggccaaaagcuguu

SEQ ID NO: 1087762 - RNA, 19 nt, Homo sapiens
  misc_RNA (1)...(19): siRNA sense strand
ccucaggaucucccuacua

SEQ ID NO: 1087763 - RNA, 19 nt, Homo sapiens
  misc_RNA (1)...(19): siRNA sense strand
cucaggaucucccuacuac

SEQ ID NO: 1087764 - RNA, 19 nt, Homo sapiens
  misc_RNA (1)...(19): siRNA sense strand
agaaguggaggacagaaau

SEQ ID NO: 1087765 - RNA, 19 nt, Homo sapiens
  misc_RNA (1)...(19): siRNA sense strand
cauccaugcugugucugaa

SEQ ID NO: 1087766 - RNA, 19 nt, Homo sapiens
  misc_RNA (1)...(19): siRNA sense strand
gacgugcagugugggaaga

SEQ ID NO: 1087767 - RNA, 19 nt, Homo sapiens
  misc_RNA (1)...(19): siRNA sense strand
agaccugaguacucugaug

SEQ ID NO: 1087768 - RNA, 19 nt, Homo sapiens
  misc_RNA (1)...(19): siRNA sense strand
ucugaacucaucucuucua

SEQ ID NO: 1087769 - RNA, 19 nt, Homo sapiens
  misc_RNA (1)...(19): siRNA sense strand
cgaacagaccugaguacuc

SEQ ID NO: 1087770 - RNA, 19 nt, Homo sapiens
  misc_RNA (1)...(19): siRNA sense strand
gcgacucggaugcaguauu

SEQ ID NO: 1087771 - RNA, 19 nt, Homo sapiens
  misc_RNA (1)...(19): siRNA sense strand
guccgaagccucuccaaac

SEQ ID NO: 1087772 - RNA, 19 nt, Homo sapiens
  misc_RNA (1)...(19): siRNA sense strand
caaguguuagcgaaggauu

SEQ ID NO: 1087773 - RNA, 19 nt, Homo sapiens
  misc_RNA (1)...(19): siRNA sense strand
aagaaguggaggacagaaa

SEQ ID NO: 1087774 - RNA, 19 nt, Homo sapiens
  misc_RNA (1)...(19): siRNA sense strand
ggagauggcuuuacaagaa

SEQ ID NO: 1087775 - RNA, 19 nt, Homo sapiens
  misc_RNA (1)...(19): siRNA sense strand
ggaagagaaugguuacuaa

SEQ ID NO: 1087776 - RNA, 19 nt, Homo sapiens
  misc_RNA (1)...(19): siRNA sense strand
gggagaaacagaaguauua

SEQ ID NO: 1087777 - RNA, 19 nt, Homo sapiens
  misc_RNA (1)...(19): siRNA sense strand
caagaaagcccauguaaca

SEQ ID NO: 1087778 - RNA, 19 nt, Homo sapiens
  misc_RNA (1)...(19): siRNA sense strand
aggcuaagcuuuaccauaa

SEQ ID NO: 1087779 - RNA, 19 nt, Homo sapiens
  misc_RNA (1)...(19): siRNA sense strand
gaaagaagaaggcauggaa

SEQ ID NO: 1087780 - RNA, 19 nt, Homo sapiens
  misc_RNA (1)...(19): siRNA sense strand
ccaaugggcuugcguuuca

SEQ ID NO: 1087781 - RNA, 19 nt, Homo sapiens
  misc_RNA (1)...(19): siRNA sense strand
caaagguacugucauugaa

SEQ ID NO: 1087782 - RNA, 19 nt, Homo sapiens
  misc_RNA (1)...(19): siRNA sense strand
ggaagucccucugccuaaa

SEQ ID NO: 1087783 - RNA, 19 nt, Homo sapiens
  misc_RNA (1)...(19): siRNA sense strand
gagauggcuuuacaagaaa

SEQ ID NO: 1087784 - RNA, 19 nt, Homo sapiens
  misc_RNA (1)...(19): siRNA sense strand
gagaaugguuacuaaagug

SEQ ID NO: 1087785 - RNA, 19 nt, Homo sapiens
  misc_RNA (1)...(19): siRNA sense strand
gggacaaucucgagcuaaa

SEQ ID NO: 1087786 - RNA, 19 nt, Homo sapiens
  misc_RNA (1)...(19): siRNA sense strand
ggacagagagggacaaucu

SEQ ID NO: 1087787 - RNA, 19 nt, Homo sapiens
  misc_RNA (1)...(19): siRNA sense strand
gaaaaccaccuaaauauga

SEQ ID NO: 1087788 - RNA, 19 nt, Homo sapiens
  misc_RNA (1)...(19): siRNA sense strand
gaagagaaugguuacuaaa

SEQ ID NO: 1087789 - RNA, 19 nt, Homo sapiens
  misc_RNA (1)...(19): siRNA sense strand
gaacaggaaagagaaagaa

SEQ ID NO: 1087790 - RNA, 19 nt, Homo sapiens
  misc_RNA (1)...(19): siRNA sense strand
caagaaaaccaccuaaaua

SEQ ID NO: 1087791 - RNA, 19 nt, Homo sapiens
  misc_RNA (1)...(19): siRNA sense strand
gaagaaggcauggaagaga

SEQ ID NO: 1087792 - RNA, 19 nt, Homo sapiens
  misc_RNA (1)...(19): siRNA sense strand
uaacacauccugaacugaa

SEQ ID NO: 1087793 - RNA, 19 nt, Homo sapiens
  misc_RNA (1)...(19): siRNA sense strand
gcauggaagagaaugguua

SEQ ID NO: 1087794 - RNA, 19 nt, Homo sapiens
  misc_RNA (1)...(19): siRNA sense strand
ccaaagguacugucauuga

SEQ ID NO: 1087795 - RNA, 19 nt, Homo sapiens
  misc_RNA (1)...(19): siRNA sense strand
guucaaagaaggcaaagaa

SEQ ID NO: 1087796 - RNA, 19 nt, Homo sapiens
  misc_RNA (1)...(19): siRNA sense strand
gagggacaaucucgagcua

SEQ ID NO: 1087797 - RNA, 19 nt, Homo sapiens
  misc_RNA (1)...(19): siRNA sense strand
ugauuggucugaaggcuaa

SEQ ID NO: 1087798 - RNA, 19 nt, Homo sapiens
  misc_RNA (1)...(19): siRNA sense strand
ggagaaacagaaguauuaa

SEQ ID NO: 1087799 - RNA, 19 nt, Homo sapiens
  misc_RNA (1)...(19): siRNA sense strand
ccacagaaugaauauauug

SEQ ID NO: 1087800 - RNA, 19 nt, Homo sapiens
  misc_RNA (1)...(19): siRNA sense strand
gaaaagagaaggcgggaaa

SEQ ID NO: 1087801 - RNA, 19 nt, Homo sapiens
  misc_RNA (1)...(19): siRNA sense strand
caaggaggcaaaguuauuu

SEQ ID NO: 1087802 - RNA, 19 nt, Homo sapiens
  misc_RNA (1)...(19): siRNA sense strand
uauacaacuuuggguguua

SEQ ID NO: 1087803 - RNA, 19 nt, Homo sapiens
  misc_RNA (1)...(19): siRNA sense strand
gccacagaaugaauauauu

SEQ ID NO: 1087804 - RNA, 19 nt, Homo sapiens
  misc_RNA (1)...(19): siRNA sense strand
uaaagaagaaucccucauc

SEQ ID NO: 1087805 - RNA, 19 nt, Homo sapiens
  misc_RNA (1)...(19): siRNA sense strand
ccagggagaaacagaagua

SEQ ID NO: 1087806 - RNA, 19 nt, Homo sapiens
  misc_RNA (1)...(19): siRNA sense strand
guauacaacuuuggguguu

SEQ ID NO: 1087807 - RNA, 19 nt, Homo sapiens
  misc_RNA (1)...(19): siRNA sense strand
aagaaggcauggaagagaa

SEQ ID NO: 1087808 - RNA, 19 nt, Homo sapiens
  misc_RNA (1)...(19): siRNA sense strand
agagaaugguuacuaaagu

SEQ ID NO: 1087809 - RNA, 19 nt, Homo sapiens
  misc_RNA (1)...(19): siRNA sense strand
gaaaaugauuggucugaag

SEQ ID NO: 1087810 - RNA, 19 nt, Homo sapiens
  misc_RNA (1)...(19): siRNA sense strand
ggucugaaggcuaagcuuu

SEQ ID NO: 1087811 - RNA, 19 nt, Homo sapiens
  misc_RNA (1)...(19): siRNA sense strand
aagagaaacaccaaacaaa

SEQ ID NO: 1087812 - RNA, 19 nt, Homo sapiens
  misc_RNA (1)...(19): siRNA sense strand
caagaugcaugaaaagaga

SEQ ID NO: 1087813 - RNA, 19 nt, Homo sapiens
  misc_RNA (1)...(19): siRNA sense strand
gggaaaauaugcccagguu

SEQ ID NO: 1087814 - RNA, 19 nt, Homo sapiens
  misc_RNA (1)...(19): siRNA sense strand
gaaguaaaugugagcgaau

SEQ ID NO: 1087815 - RNA, 19 nt, Homo sapiens
  misc_RNA (1)...(19): siRNA sense strand
caggaaagagaaagaagaa

SEQ ID NO: 1087816 - RNA, 19 nt, Homo sapiens
  misc_RNA (1)...(19): siRNA sense strand
aaagagaaacaccaaacaa

SEQ ID NO: 1087817 - RNA, 19 nt, Homo sapiens
  misc_RNA (1)...(19): siRNA sense strand
caacaauccugaaaaugau

SEQ ID NO: 1087818 - RNA, 19 nt, Homo sapiens
  misc_RNA (1)...(19): siRNA sense strand
auggauaccguuuggauua

SEQ ID NO: 1087819 - RNA, 19 nt, Homo sapiens
  misc_RNA (1)...(19): siRNA sense strand
ccaacaauccugaaaauga

SEQ ID NO: 1087820 - RNA, 19 nt, Homo sapiens
  misc_RNA (1)...(19): siRNA sense strand
ccaccuaaauaugaaagau

SEQ ID NO: 1087821 - RNA, 19 nt, Homo sapiens
  misc_RNA (1)...(19): siRNA sense strand
aaaguuauucgaacaggaa

SEQ ID NO: 1087822 - RNA, 19 nt, Homo sapiens
  misc_RNA (1)...(19): siRNA sense strand
uguaacacauccugaacug

SEQ ID NO: 1087823 - RNA, 19 nt, Homo sapiens
  misc_RNA (1)...(19): siRNA sense strand
caaagaaggcaaagaaaau

SEQ ID NO: 1087824 - RNA, 19 nt, Homo sapiens
  misc_RNA (1)...(19): siRNA sense strand
gucugaaggcuaagcuuua

SEQ ID NO: 1087825 - RNA, 19 nt, Homo sapiens
  misc_RNA (1)...(19): siRNA sense strand
gaaaauaugcccagguuac

SEQ ID NO: 1087826 - RNA, 19 nt, Homo sapiens
  misc_RNA (1)...(19): siRNA sense strand
aaguaaaugugagcgaauu

SEQ ID NO: 1087827 - RNA, 19 nt, Homo sapiens
  misc_RNA (1)...(19): siRNA sense strand
gaaagucgagaggcucaug

SEQ ID NO: 1087828 - RNA, 19 nt, Homo sapiens
  misc_RNA (1)...(19): siRNA sense strand
gacaaucucgagcuaaagu

SEQ ID NO: 1087829 - RNA, 19 nt, Homo sapiens
  misc_RNA (1)...(19): siRNA sense strand
uggaagagaaugguuacua

SEQ ID NO: 1087830 - RNA, 19 nt, Homo sapiens
  misc_RNA (1)...(19): siRNA sense strand
ucgagaggcucaugaacgu

SEQ ID NO: 1087831 - RNA, 19 nt, Homo sapiens
  misc_RNA (1)...(19): siRNA sense strand
guacgugcccagggagaaa

SEQ ID NO: 1087832 - RNA, 19 nt, Homo sapiens
  misc_RNA (1)...(19): siRNA sense strand
caacuuuggguguuauuac

SEQ ID NO: 1087833 - RNA, 19 nt, Homo sapiens
  misc_RNA (1)...(19): siRNA sense strand
agaaagcccauguaacaca

SEQ ID NO: 1087834 - RNA, 19 nt, Homo sapiens
  misc_RNA (1)...(19): siRNA sense strand
gcugagaaaauacaaauga

SEQ ID NO: 1087835 - RNA, 19 nt, Homo sapiens
  misc_RNA (1)...(19): siRNA sense strand
aagaagaaggcauggaaga

SEQ ID NO: 1087836 - RNA, 19 nt, Homo sapiens
  misc_RNA (1)...(19): siRNA sense strand
gaaaagagaaacaccaaac

SEQ ID NO: 1087837 - RNA, 19 nt, Homo sapiens
  misc_RNA (1)...(19): siRNA sense strand
cgaacaggaaagagaaaga

SEQ ID NO: 1087838 - RNA, 19 nt, Homo sapiens
  misc_RNA (1)...(19): siRNA sense strand
gaagucccucugccuaaag

SEQ ID NO: 1087839 - RNA, 19 nt, Homo sapiens
  misc_RNA (1)...(19): siRNA sense strand
ucaaagaaggcaaagaaaa

SEQ ID NO: 1087840 - RNA, 19 nt, Homo sapiens
  misc_RNA (1)...(19): siRNA sense strand
uguuggagauggcuuuaca

SEQ ID NO: 1087841 - RNA, 19 nt, Homo sapiens
  misc_RNA (1)...(19): siRNA sense strand
aacacauccugaacugaaa

SEQ ID NO: 1087842 - RNA, 19 nt, Homo sapiens
  misc_RNA (1)...(19): siRNA sense strand
ugauggauguauaaaugca

SEQ ID NO: 1087843 - RNA, 19 nt, Homo sapiens
  misc_RNA (1)...(19): siRNA sense strand
acaggaaagagaaagaaga

SEQ ID NO: 1087844 - RNA, 19 nt, Homo sapiens
  misc_RNA (1)...(19): siRNA sense strand
gagaaacaccaaacaaaag

SEQ ID NO: 1087845 - RNA, 19 nt, Homo sapiens
  misc_RNA (1)...(19): siRNA sense strand
aaggcuaagcuuuaccaua

SEQ ID NO: 1087846 - RNA, 19 nt, Homo sapiens
  misc_RNA (1)...(19): siRNA sense strand
ccaaacaaaagaaugauga

SEQ ID NO: 1087847 - RNA, 19 nt, Homo sapiens
  misc_RNA (1)...(19): siRNA sense strand
cuaucaagaugcaugaaaa

SEQ ID NO: 1087848 - RNA, 19 nt, Homo sapiens
  misc_RNA (1)...(19): siRNA sense strand
ggaaaauaugcccagguua

SEQ ID NO: 1087849 - RNA, 19 nt, Homo sapiens
  misc_RNA (1)...(19): siRNA sense strand
gagcgaauugggccuugug

SEQ ID NO: 1087850 - RNA, 19 nt, Homo sapiens
  misc_RNA (1)...(19): siRNA sense strand
auacaacuuuggguguuau

SEQ ID NO: 1087851 - RNA, 19 nt, Homo sapiens
  misc_RNA (1)...(19): siRNA sense strand
guaaagaagaaucccucau

SEQ ID NO: 1087852 - RNA, 19 nt, Homo sapiens
  misc_RNA (1)...(19): siRNA sense strand
ggccaaugggcuugcguuu

SEQ ID NO: 1087853 - RNA, 19 nt, Homo sapiens
  misc_RNA (1)...(19): siRNA sense strand
guuauucgaacaggaaaga

SEQ ID NO: 1087854 - RNA, 19 nt, Homo sapiens
  misc_RNA (1)...(19): siRNA sense strand
ggacaaucucgagcuaaag

SEQ ID NO: 1087855 - RNA, 19 nt, Homo sapiens
  misc_RNA (1)...(19): siRNA sense strand
aagguacugucauugaagu

SEQ ID NO: 1087856 - RNA, 19 nt, Homo sapiens
  misc_RNA (1)...(19): siRNA sense strand
caauacuugguguaaagaa

SEQ ID NO: 1087857 - RNA, 19 nt, Homo sapiens
  misc_RNA (1)...(19): siRNA sense strand
uucaagaaagcccauguaa

SEQ ID NO: 1087858 - RNA, 19 nt, Homo sapiens
  misc_RNA (1)...(19): siRNA sense strand
aaagauucaucaggccaau

SEQ ID NO: 1087859 - RNA, 19 nt, Homo sapiens
  misc_RNA (1)...(19): siRNA sense strand
uaccauaaacagcgucaug

SEQ ID NO: 1087860 - RNA, 19 nt, Homo sapiens
  misc_RNA (1)...(19): siRNA sense strand
aagagaaugguuacuaaag

SEQ ID NO: 1087861 - RNA, 19 nt, Homo sapiens
  misc_RNA (1)...(19): siRNA sense strand
agagaaacaccaaacaaaa

SEQ ID NO: 1087862 - RNA, 19 nt, Homo sapiens
  misc_RNA (1)...(19): siRNA sense strand
guauaaaugcagucuuacu

SEQ ID NO: 1087863 - RNA, 19 nt, Homo sapiens
  misc_RNA (1)...(19): siRNA sense strand
gaaggcauggaagagaaug

SEQ ID NO: 1087864 - RNA, 19 nt, Homo sapiens
  misc_RNA (1)...(19): siRNA sense strand
gauaccguuuggauuacca

SEQ ID NO: 1087865 - RNA, 19 nt, Homo sapiens
  misc_RNA (1)...(19): siRNA sense strand
gaagaucacucucuaugaa

SEQ ID NO: 1087866 - RNA, 19 nt, Homo sapiens
  misc_RNA (1)...(19): siRNA sense strand
gcagcucucuucaaucaga

SEQ ID NO: 1087867 - RNA, 19 nt, Homo sapiens
  misc_RNA (1)...(19): siRNA sense strand
caacaacccagccaccuuu

SEQ ID NO: 1087868 - RNA, 19 nt, Homo sapiens
  misc_RNA (1)...(19): siRNA sense strand
ggaagaucacucucuauga

SEQ ID NO: 1087869 - RNA, 19 nt, Homo sapiens
  misc_RNA (1)...(19): siRNA sense strand
ggcagaagcuggaggucuu

SEQ ID NO: 1087870 - RNA, 19 nt, Homo sapiens
  misc_RNA (1)...(19): siRNA sense strand
gggaagaucacucucuaug

SEQ ID NO: 1087871 - RNA, 19 nt, Homo sapiens
  misc_RNA (1)...(19): siRNA sense strand
cggaagaggccaccacaaa

SEQ ID NO: 1087872 - RNA, 19 nt, Homo sapiens
  misc_RNA (1)...(19): siRNA sense strand
gucaagaacugugugaaca

SEQ ID NO: 1087873 - RNA, 19 nt, Homo sapiens
  misc_RNA (1)...(19): siRNA sense strand
gagaacauuuccgccuaga

SEQ ID NO: 1087874 - RNA, 19 nt, Homo sapiens
  misc_RNA (1)...(19): siRNA sense strand
gcaacaacccagccaccuu

SEQ ID NO: 1087875 - RNA, 19 nt, Homo sapiens
  misc_RNA (1)...(19): siRNA sense strand
gcauggagcccuagaagcu

SEQ ID NO: 1087876 - RNA, 19 nt, Homo sapiens
  misc_RNA (1)...(19): siRNA sense strand
cuucggagcugaggacuuc

SEQ ID NO: 1087877 - RNA, 19 nt, Homo sapiens
  misc_RNA (1)...(19): siRNA sense strand
ggaagaggccaccacaaaa

SEQ ID NO: 1087878 - RNA, 19 nt, Homo sapiens
  misc_RNA (1)...(19): siRNA sense strand
caccuuuccugacugcaaa

SEQ ID NO: 1087879 - RNA, 19 nt, Homo sapiens
  misc_RNA (1)...(19): siRNA sense strand
gccagcaguucaucuugga

SEQ ID NO: 1087880 - RNA, 19 nt, Homo sapiens
  misc_RNA (1)...(19): siRNA sense strand
gagccugggucugcuucaa

SEQ ID NO: 1087881 - RNA, 19 nt, Homo sapiens
  misc_RNA (1)...(19): siRNA sense strand
cuucgaggguugcaacuuc

SEQ ID NO: 1087882 - RNA, 19 nt, Homo sapiens
  misc_RNA (1)...(19): siRNA sense strand
cagccacagugaccacaug

SEQ ID NO: 1087883 - RNA, 19 nt, Homo sapiens
  misc_RNA (1)...(19): siRNA sense strand
ggucaagaacugugugaac

SEQ ID NO: 1087884 - RNA, 19 nt, Homo sapiens
  misc_RNA (1)...(19): siRNA sense strand
ccagccaccuuuccugacu

SEQ ID NO: 1087885 - RNA, 19 nt, Homo sapiens
  misc_RNA (1)...(19): siRNA sense strand
gccugggucugcuucaauc

SEQ ID NO: 1087886 - RNA, 19 nt, Homo sapiens
  misc_RNA (1)...(19): siRNA sense strand
gcagcauggagcccuagaa

SEQ ID NO: 1087887 - RNA, 19 nt, Homo sapiens
  misc_RNA (1)...(19): siRNA sense strand
cagcauggagcccuagaag

SEQ ID NO: 1087888 - RNA, 19 nt, Homo sapiens
  misc_RNA (1)...(19): siRNA sense strand
caacaaaccuggcugugaa

SEQ ID NO: 1087889 - RNA, 19 nt, Homo sapiens
  misc_RNA (1)...(19): siRNA sense strand
guugauagcugguaaugaa

SEQ ID NO: 1087890 - RNA, 19 nt, Homo sapiens
  misc_RNA (1)...(19): siRNA sense strand
ggaugcagcucuucuguug

SEQ ID NO: 1087891 - RNA, 19 nt, Homo sapiens
  misc_RNA (1)...(19): siRNA sense strand
gaacauaggaucccuguca

SEQ ID NO: 1087892 - RNA, 19 nt, Homo sapiens
  misc_RNA (1)...(19): siRNA sense strand
gaagaggagugacaaucaa

SEQ ID NO: 1087893 - RNA, 19 nt, Homo sapiens
  misc_RNA (1)...(19): siRNA sense strand
gaaguaagaccugguauug

SEQ ID NO: 1087894 - RNA, 19 nt, Homo sapiens
  misc_RNA (1)...(19): siRNA sense strand
caagagacuuuacuucaga

SEQ ID NO: 1087895 - RNA, 19 nt, Homo sapiens
  misc_RNA (1)...(19): siRNA sense strand
gguauuguuuccaaagaua

SEQ ID NO: 1087896 - RNA, 19 nt, Homo sapiens
  misc_RNA (1)...(19): siRNA sense strand
caagaaagcagcaaagguu

SEQ ID NO: 1087897 - RNA, 19 nt, Homo sapiens
  misc_RNA (1)...(19): siRNA sense strand
gcagacaagccacaauuaa

SEQ ID NO: 1087898 - RNA, 19 nt, Homo sapiens
  misc_RNA (1)...(19): siRNA sense strand
uaacauagguacaauuggu

SEQ ID NO: 1087899 - RNA, 19 nt, Homo sapiens
  misc_RNA (1)...(19): siRNA sense strand
ucaugaaacugaagcauau

SEQ ID NO: 1087900 - RNA, 19 nt, Homo sapiens
  misc_RNA (1)...(19): siRNA sense strand
gagcagauccuugcauuug

SEQ ID NO: 1087901 - RNA, 19 nt, Homo sapiens
  misc_RNA (1)...(19): siRNA sense strand
gaaauccacagucgucaaa

SEQ ID NO: 1087902 - RNA, 19 nt, Homo sapiens
  misc_RNA (1)...(19): siRNA sense strand
gcauaaugaucugcaauau

SEQ ID NO: 1087903 - RNA, 19 nt, Homo sapiens
  misc_RNA (1)...(19): siRNA sense strand
caguacaccugacgaguuu

SEQ ID NO: 1087904 - RNA, 19 nt, Homo sapiens
  misc_RNA (1)...(19): siRNA sense strand
aguaagaccugguauuguu

SEQ ID NO: 1087905 - RNA, 19 nt, Homo sapiens
  misc_RNA (1)...(19): siRNA sense strand
gugaguacauaguaaagaa

SEQ ID NO: 1087906 - RNA, 19 nt, Homo sapiens
  misc_RNA (1)...(19): siRNA sense strand
gaaguuaucagcagacaag

SEQ ID NO: 1087907 - RNA, 19 nt, Homo sapiens
  misc_RNA (1)...(19): siRNA sense strand
agucagacauguuuccuuu

SEQ ID NO: 1087908 - RNA, 19 nt, Homo sapiens
  misc_RNA (1)...(19): siRNA sense strand
agacauguuuccuuuguug

SEQ ID NO: 1087909 - RNA, 19 nt, Homo sapiens
  misc_RNA (1)...(19): siRNA sense strand
gcccuuagccgaagaguug

SEQ ID NO: 1087910 - RNA, 19 nt, Homo sapiens
  misc_RNA (1)...(19): siRNA sense strand
aaaccuggcugugaaguug

SEQ ID NO: 1087911 - RNA, 19 nt, Homo sapiens
  misc_RNA (1)...(19): siRNA sense strand
aaacucauguguaaaccaa

SEQ ID NO: 1087912 - RNA, 19 nt, Homo sapiens
  misc_RNA (1)...(19): siRNA sense strand
ccaaagauagugaaggaaa

SEQ ID NO: 1087913 - RNA, 19 nt, Homo sapiens
  misc_RNA (1)...(19): siRNA sense strand
gcaguacaccugacgaguu

SEQ ID NO: 1087914 - RNA, 19 nt, Homo sapiens
  misc_RNA (1)...(19): siRNA sense strand
gagcuuuaccugagauauu

SEQ ID NO: 1087915 - RNA, 19 nt, Homo sapiens
  misc_RNA (1)...(19): siRNA sense strand
auaaugaucugcaauaugc

SEQ ID NO: 1087916 - RNA, 19 nt, Homo sapiens
  misc_RNA (1)...(19): siRNA sense strand
ucagacauguuuccuuugu

SEQ ID NO: 1087917 - RNA, 19 nt, Homo sapiens
  misc_RNA (1)...(19): siRNA sense strand
gcacagagguaggagaaaa

SEQ ID NO: 1087918 - RNA, 19 nt, Homo sapiens
  misc_RNA (1)...(19): siRNA sense strand
gcacugaaggagacaagaa

SEQ ID NO: 1087919 - RNA, 19 nt, Homo sapiens
  misc_RNA (1)...(19): siRNA sense strand
cuauagagaucaugaaacu

SEQ ID NO: 1087920 - RNA, 19 nt, Homo sapiens
  misc_RNA (1)...(19): siRNA sense strand
ccacagucgucaaagcuau

SEQ ID NO: 1087921 - RNA, 19 nt, Homo sapiens
  misc_RNA (1)...(19): siRNA sense strand
cggaacaccuggcugcuau

SEQ ID NO: 1087922 - RNA, 19 nt, Homo sapiens
  misc_RNA (1)...(19): siRNA sense strand
caaaagcugucuaagaaug

SEQ ID NO: 1087923 - RNA, 19 nt, Homo sapiens
  misc_RNA (1)...(19): siRNA sense strand
gaccugguauuguuuccaa

SEQ ID NO: 1087924 - RNA, 19 nt, Homo sapiens
  misc_RNA (1)...(19): siRNA sense strand
gcagauccuugcauuuguc

SEQ ID NO: 1087925 - RNA, 19 nt, Homo sapiens
  misc_RNA (1)...(19): siRNA sense strand
gccagaauguuauagaucu

SEQ ID NO: 1087926 - RNA, 19 nt, Homo sapiens
  misc_RNA (1)...(19): siRNA sense strand
aaggaaaacucauguguaa

SEQ ID NO: 1087927 - RNA, 19 nt, Homo sapiens
  misc_RNA (1)...(19): siRNA sense strand
gcucagcugaaauacaaua

SEQ ID NO: 1087928 - RNA, 19 nt, Homo sapiens
  misc_RNA (1)...(19): siRNA sense strand
gacaaucaagccaacagua

SEQ ID NO: 1087929 - RNA, 19 nt, Homo sapiens
  misc_RNA (1)...(19): siRNA sense strand
gauaagaagaggagugaca

SEQ ID NO: 1087930 - RNA, 19 nt, Homo sapiens
  misc_RNA (1)...(19): siRNA sense strand
ccaagagacuuuacuucag

SEQ ID NO: 1087931 - RNA, 19 nt, Homo sapiens
  misc_RNA (1)...(19): siRNA sense strand
caaucaagcuuggauaugc

SEQ ID NO: 1087932 - RNA, 19 nt, Homo sapiens
  misc_RNA (1)...(19): siRNA sense strand
ucaacaggagggagaguua

SEQ ID NO: 1087933 - RNA, 19 nt, Homo sapiens
  misc_RNA (1)...(19): siRNA sense strand
uaccugagauauucacaga

SEQ ID NO: 1087934 - RNA, 19 nt, Homo sapiens
  misc_RNA (1)...(19): siRNA sense strand
gagcucccauuauuccaau

SEQ ID NO: 1087935 - RNA, 19 nt, Homo sapiens
  misc_RNA (1)...(19): siRNA sense strand
cggagaagcuggagugacu

SEQ ID NO: 1087936 - RNA, 19 nt, Homo sapiens
  misc_RNA (1)...(19): siRNA sense strand
gaaagcagcaaagguucaa

SEQ ID NO: 1087937 - RNA, 19 nt, Homo sapiens
  misc_RNA (1)...(19): siRNA sense strand
gcuccaggcggucuuauug

SEQ ID NO: 1087938 - RNA, 19 nt, Homo sapiens
  misc_RNA (1)...(19): siRNA sense strand
guaagaccugguauuguuu

SEQ ID NO: 1087939 - RNA, 19 nt, Homo sapiens
  misc_RNA (1)...(19): siRNA sense strand
gucaggaucucaccaccuu

SEQ ID NO: 1087940 - RNA, 19 nt, Homo sapiens
  misc_RNA (1)...(19): siRNA sense strand
gcccucggccagaauguua

SEQ ID NO: 1087941 - RNA, 19 nt, Homo sapiens
  misc_RNA (1)...(19): siRNA sense strand
cagcagacaagccacaauu

SEQ ID NO: 1087942 - RNA, 19 nt, Homo sapiens
  misc_RNA (1)...(19): siRNA sense strand
gaaggaaaacucaugugua

SEQ ID NO: 1087943 - RNA, 19 nt, Homo sapiens
  misc_RNA (1)...(19): siRNA sense strand
auagagaucaugaaacuga

SEQ ID NO: 1087944 - RNA, 19 nt, Homo sapiens
  misc_RNA (1)...(19): siRNA sense strand
ugaaguugaugaccuuaag

SEQ ID NO: 1087945 - RNA, 19 nt, Homo sapiens
  misc_RNA (1)...(19): siRNA sense strand
caaggccgauuuggguaaa

SEQ ID NO: 1087946 - RNA, 19 nt, Homo sapiens
  misc_RNA (1)...(19): siRNA sense strand
acaccuggcugcuauagag

SEQ ID NO: 1087947 - RNA, 19 nt, Homo sapiens
  misc_RNA (1)...(19): siRNA sense strand
gaaguuguuugugaguaca

SEQ ID NO: 1087948 - RNA, 19 nt, Homo sapiens
  misc_RNA (1)...(19): siRNA sense strand
gagaguuagugcugucaag

SEQ ID NO: 1087949 - RNA, 19 nt, Homo sapiens
  misc_RNA (1)...(19): siRNA sense strand
caaagcuauuucuggaguu

SEQ ID NO: 1087950 - RNA, 19 nt, Homo sapiens
  misc_RNA (1)...(19): siRNA sense strand
gauaugcuaaugcuaagau

SEQ ID NO: 1087951 - RNA, 19 nt, Homo sapiens
  misc_RNA (1)...(19): siRNA sense strand
agacaagccacaauuaaca

SEQ ID NO: 1087952 - RNA, 19 nt, Homo sapiens
  misc_RNA (1)...(19): siRNA sense strand
ggagcauaaugaucugcaa

SEQ ID NO: 1087953 - RNA, 19 nt, Homo sapiens
  misc_RNA (1)...(19): siRNA sense strand
caaagauagugaaggaaaa

SEQ ID NO: 1087954 - RNA, 19 nt, Homo sapiens
  misc_RNA (1)...(19): siRNA sense strand
gaaagucaggcuaaagaac

SEQ ID NO: 1087955 - RNA, 19 nt, Homo sapiens
  misc_RNA (1)...(19): siRNA sense strand
gauagcugguaaugaaucu

SEQ ID NO: 1087956 - RNA, 19 nt, Homo sapiens
  misc_RNA (1)...(19): siRNA sense strand
aagaaagucaggcuaaaga

SEQ ID NO: 1087957 - RNA, 19 nt, Homo sapiens
  misc_RNA (1)...(19): siRNA sense strand
ggaaauccacagucgucaa

SEQ ID NO: 1087958 - RNA, 19 nt, Homo sapiens
  misc_RNA (1)...(19): siRNA sense strand
guuugugaguacauaguaa

SEQ ID NO: 1087959 - RNA, 19 nt, Homo sapiens
  misc_RNA (1)...(19): siRNA sense strand
gaacaccuggcugcuauag

SEQ ID NO: 1087960 - RNA, 19 nt, Homo sapiens
  misc_RNA (1)...(19): siRNA sense strand
gagacaagaaagcagcaaa

SEQ ID NO: 1087961 - RNA, 19 nt, Homo sapiens
  misc_RNA (1)...(19): siRNA sense strand
ccagaauguuauagaucuu

SEQ ID NO: 1087962 - RNA, 19 nt, Homo sapiens
  misc_RNA (1)...(19): siRNA sense strand
gccaggagauagaaguaag

SEQ ID NO: 1087963 - RNA, 19 nt, Homo sapiens
  misc_RNA (1)...(19): siRNA sense strand
ucaacaaaccuggcuguga

SEQ ID NO: 1087964 - RNA, 19 nt, Homo sapiens
  misc_RNA (1)...(19): siRNA sense strand
uaaaagaaagucaggcuaa

SEQ ID NO: 1087965 - RNA, 19 nt, Homo sapiens
  misc_RNA (1)...(19): siRNA sense strand
ggacauuccagggaccaaa

SEQ ID NO: 1087966 - RNA, 19 nt, Homo sapiens
  misc_RNA (1)...(19): siRNA sense strand
caaucaagccaacaguaga

SEQ ID NO: 1087967 - RNA, 19 nt, Homo sapiens
  misc_RNA (1)...(19): siRNA sense strand
cagauaagaagaggaguga

SEQ ID NO: 1087968 - RNA, 19 nt, Homo sapiens
  misc_RNA (1)...(19): siRNA sense strand
uucaaaagcugucuaagaa

SEQ ID NO: 1087969 - RNA, 19 nt, Homo sapiens
  misc_RNA (1)...(19): siRNA sense strand
uuccaaagauagugaagga

SEQ ID NO: 1087970 - RNA, 19 nt, Homo sapiens
  misc_RNA (1)...(19): siRNA sense strand
acgagcagauccuugcauu

SEQ ID NO: 1087971 - RNA, 19 nt, Homo sapiens
  misc_RNA (1)...(19): siRNA sense strand
ugaaguuguuugugaguac

SEQ ID NO: 1087972 - RNA, 19 nt, Homo sapiens
  misc_RNA (1)...(19): siRNA sense strand
agaagaggagugacaauca

SEQ ID NO: 1087973 - RNA, 19 nt, Homo sapiens
  misc_RNA (1)...(19): siRNA sense strand
aaaggugggccaggagaua

SEQ ID NO: 1087974 - RNA, 19 nt, Homo sapiens
  misc_RNA (1)...(19): siRNA sense strand
ugacuguccuggccacgau

SEQ ID NO: 1087975 - RNA, 19 nt, Homo sapiens
  misc_RNA (1)...(19): siRNA sense strand
gaagugcucauggugaaca

SEQ ID NO: 1087976 - RNA, 19 nt, Homo sapiens
  misc_RNA (1)...(19): siRNA sense strand
acaagccacaauuaacaua

SEQ ID NO: 1087977 - RNA, 19 nt, Homo sapiens
  misc_RNA (1)...(19): siRNA sense strand
ggaacaccuggcugcuaua

SEQ ID NO: 1087978 - RNA, 19 nt, Homo sapiens
  misc_RNA (1)...(19): siRNA sense strand
aaagucaggcuaaagaaca

SEQ ID NO: 1087979 - RNA, 19 nt, Homo sapiens
  misc_RNA (1)...(19): siRNA sense strand
guaaaccaaucuuuuccaa

SEQ ID NO: 1087980 - RNA, 19 nt, Homo sapiens
  misc_RNA (1)...(19): siRNA sense strand
cccaagagacuuuacuuca

SEQ ID NO: 1087981 - RNA, 19 nt, Homo sapiens
  misc_RNA (1)...(19): siRNA sense strand
gcucccauuauuccaauuu

SEQ ID NO: 1087982 - RNA, 19 nt, Homo sapiens
  misc_RNA (1)...(19): siRNA sense strand
uagagaucaugaaacugaa

SEQ ID NO: 1087983 - RNA, 19 nt, Homo sapiens
  misc_RNA (1)...(19): siRNA sense strand
gugcacagagguaggagaa

SEQ ID NO: 1087984 - RNA, 19 nt, Homo sapiens
  misc_RNA (1)...(19): siRNA sense strand
ccaauccagugugcacaga

SEQ ID NO: 1087985 - RNA, 19 nt, Homo sapiens
  misc_RNA (1)...(19): siRNA sense strand
agaaguaagaccugguauu

SEQ ID NO: 1087986 - RNA, 19 nt, Homo sapiens
  misc_RNA (1)...(19): siRNA sense strand
aagcuuggauaugcuaaug

SEQ ID NO: 1087987 - RNA, 19 nt, Homo sapiens
  misc_RNA (1)...(19): siRNA sense strand
ggagcucccauuauuccaa

SEQ ID NO: 1087988 - RNA, 19 nt, Homo sapiens
  misc_RNA (1)...(19): siRNA sense strand
gaacuagaaugggaaauug

SEQ ID NO: 1087989 - RNA, 19 nt, Homo sapiens
  misc_RNA (1)...(19): siRNA sense strand
cgaaucgacucagauauua

SEQ ID NO: 1087990 - RNA, 19 nt, Homo sapiens
  misc_RNA (1)...(19): siRNA sense strand
gcagggcucugguggauga

SEQ ID NO: 1087991 - RNA, 19 nt, Homo sapiens
  misc_RNA (1)...(19): siRNA sense strand
gcacauaucgcaugaugag

SEQ ID NO: 1087992 - RNA, 19 nt, Homo sapiens
  misc_RNA (1)...(19): siRNA sense strand
ccgagaggcugacaauguu

SEQ ID NO: 1087993 - RNA, 19 nt, Homo sapiens
  misc_RNA (1)...(19): siRNA sense strand
caagaacuacguacgugua

SEQ ID NO: 1087994 - RNA, 19 nt, Homo sapiens
  misc_RNA (1)...(19): siRNA sense strand
gagccaggaucuccacugu

SEQ ID NO: 1087995 - RNA, 19 nt, Homo sapiens
  misc_RNA (1)...(19): siRNA sense strand
gaccaugcccugcacauau

SEQ ID NO: 1087996 - RNA, 19 nt, Homo sapiens
  misc_RNA (1)...(19): siRNA sense strand
ccaagaagaccauucagau

SEQ ID NO: 1087997 - RNA, 19 nt, Homo sapiens
  misc_RNA (1)...(19): siRNA sense strand
caagaagaccauucagaug

SEQ ID NO: 1087998 - RNA, 19 nt, Homo sapiens
  misc_RNA (1)...(19): siRNA sense strand
ccgaaucgacucagauauu

SEQ ID NO: 1087999 - RNA, 19 nt, Homo sapiens
  misc_RNA (1)...(19): siRNA sense strand
gcaguaagcgaacagaucu

SEQ ID NO: 1088000 - RNA, 19 nt, Homo sapiens
  misc_RNA (1)...(19): siRNA sense strand
gagaggcugacaauguuaa

SEQ ID NO: 1088001 - RNA, 19 nt, Homo sapiens
  misc_RNA (1)...(19): siRNA sense strand
cauaucgcaugaugagcua

SEQ ID NO: 1088002 - RNA, 19 nt, Homo sapiens
  misc_RNA (1)...(19): siRNA sense strand
ucugguggaugaacuagaa

SEQ ID NO: 1088003 - RNA, 19 nt, Homo sapiens
  misc_RNA (1)...(19): siRNA sense strand
uagcggcacccucaaguuu

SEQ ID NO: 1088004 - RNA, 19 nt, Homo sapiens
  misc_RNA (1)...(19): siRNA sense strand
ggaggaauacgaggaugaa

SEQ ID NO: 1088005 - RNA, 19 nt, Homo sapiens
  misc_RNA (1)...(19): siRNA sense strand
gugaccggaugaaggagua

SEQ ID NO: 1088006 - RNA, 19 nt, Homo sapiens
  misc_RNA (1)...(19): siRNA sense strand
ggaauacgaggaugaacuc

SEQ ID NO: 1088007 - RNA, 19 nt, Homo sapiens
  misc_RNA (1)...(19): siRNA sense strand
ugaacuagaaugggaaauu

SEQ ID NO: 1088008 - RNA, 19 nt, Homo sapiens
  misc_RNA (1)...(19): siRNA sense strand
ccacccaucgcaagaacua

SEQ ID NO: 1088009 - RNA, 19 nt, Homo sapiens
  misc_RNA (1)...(19): siRNA sense strand
cugcacauaucgcaugaug

SEQ ID NO: 1088010 - RNA, 19 nt, Homo sapiens
  misc_RNA (1)...(19): siRNA sense strand
cgagaggcugacaauguua

SEQ ID NO: 1088011 - RNA, 19 nt, Homo sapiens
  misc_RNA (1)...(19): siRNA sense strand
uaagcgaacagaucuuugu

SEQ ID NO: 1088012 - RNA, 19 nt, Homo sapiens
  misc_RNA (1)...(19): siRNA sense strand
agagcauuguggaggaaua

SEQ ID NO: 1088013 - RNA, 19 nt, Homo sapiens
  misc_RNA (1)...(19): siRNA sense strand
gaacagauugauccuucca

SEQ ID NO: 1088014 - RNA, 19 nt, Homo sapiens
  misc_RNA (1)...(19): siRNA sense strand
gcauccgaaucgacucaga

SEQ ID NO: 1088015 - RNA, 19 nt, Homo sapiens
  misc_RNA (1)...(19): siRNA sense strand
gaugaacuagaaugggaaa

SEQ ID NO: 1088016 - RNA, 19 nt, Homo sapiens
  misc_RNA (1)...(19): siRNA sense strand
cuacaaggcauccgaaucg

SEQ ID NO: 1088017 - RNA, 19 nt, Homo sapiens
  misc_RNA (1)...(19): siRNA sense strand
cugacaauguuaaagacaa

SEQ ID NO: 1088018 - RNA, 19 nt, Homo sapiens
  misc_RNA (1)...(19): siRNA sense strand
cagagcugcuggaggagau

SEQ ID NO: 1088019 - RNA, 19 nt, Homo sapiens
  misc_RNA (1)...(19): siRNA sense strand
ugaccaugcccugcacaua

SEQ ID NO: 1088020 - RNA, 19 nt, Homo sapiens
  misc_RNA (1)...(19): siRNA sense strand
ugagagcauuguggaggaa

SEQ ID NO: 1088021 - RNA, 19 nt, Homo sapiens
  misc_RNA (1)...(19): siRNA sense strand
uaugugaccggaugaagga

SEQ ID NO: 1088022 - RNA, 19 nt, Homo sapiens
  misc_RNA (1)...(19): siRNA sense strand
gaaucgacucagauauuag

SEQ ID NO: 1088023 - RNA, 19 nt, Homo sapiens
  misc_RNA (1)...(19): siRNA sense strand
cccgagaggcugacaaugu

SEQ ID NO: 1088024 - RNA, 19 nt, Homo sapiens
  misc_RNA (1)...(19): siRNA sense strand
guaagcgaacagaucuuug

SEQ ID NO: 1088025 - RNA, 19 nt, Homo sapiens
  misc_RNA (1)...(19): siRNA sense strand
gagauaugugaccggauga

SEQ ID NO: 1088026 - RNA, 19 nt, Homo sapiens
  misc_RNA (1)...(19): siRNA sense strand
aggcugacaauguuaaaga

SEQ ID NO: 1088027 - RNA, 19 nt, Homo sapiens
  misc_RNA (1)...(19): siRNA sense strand
gcggcacccucaaguuugc

SEQ ID NO: 1088028 - RNA, 19 nt, Homo sapiens
  misc_RNA (1)...(19): siRNA sense strand
gaaaguggacaucuuauua

SEQ ID NO: 1088029 - RNA, 19 nt, Homo sapiens
  misc_RNA (1)...(19): siRNA sense strand
gcugaaaguggacaucuua

SEQ ID NO: 1088030 - RNA, 19 nt, Homo sapiens
  misc_RNA (1)...(19): siRNA sense strand
ucuccaaccugcauucuuu

SEQ ID NO: 1088031 - RNA, 19 nt, Homo sapiens
  misc_RNA (1)...(19): siRNA sense strand
guggacaucuuauuagaca

SEQ ID NO: 1088032 - RNA, 19 nt, Homo sapiens
  misc_RNA (1)...(19): siRNA sense strand
uauuagacaugcuuucaga

SEQ ID NO: 1088033 - RNA, 19 nt, Homo sapiens
  misc_RNA (1)...(19): siRNA sense strand
ggacaucuuauuagacaug

SEQ ID NO: 1088034 - RNA, 19 nt, Homo sapiens
  misc_RNA (1)...(19): siRNA sense strand
agaaggaacuggaugaacu

SEQ ID NO: 1088035 - RNA, 19 nt, Homo sapiens
  misc_RNA (1)...(19): siRNA sense strand
caaccugcauucuuuggau

SEQ ID NO: 1088036 - RNA, 19 nt, Homo sapiens
  misc_RNA (1)...(19): siRNA sense strand
gaaaauggccaguggauag

SEQ ID NO: 1088037 - RNA, 19 nt, Homo sapiens
  misc_RNA (1)...(19): siRNA sense strand
ugaaaguggacaucuuauu

SEQ ID NO: 1088038 - RNA, 19 nt, Homo sapiens
  misc_RNA (1)...(19): siRNA sense strand
gaauacggauccccgacua

SEQ ID NO: 1088039 - RNA, 19 nt, Homo sapiens
  misc_RNA (1)...(19): siRNA sense strand
ggagaaggaacuggaugaa

SEQ ID NO: 1088040 - RNA, 19 nt, Homo sapiens
  misc_RNA (1)...(19): siRNA sense strand
gaaggaacuggaugaacug

SEQ ID NO: 1088041 - RNA, 19 nt, Homo sapiens
  misc_RNA (1)...(19): siRNA sense strand
gagcugggcuuggaauacg

SEQ ID NO: 1088042 - RNA, 19 nt, Homo sapiens
  misc_RNA (1)...(19): siRNA sense strand
aaguggacaucuuauuaga

SEQ ID NO: 1088043 - RNA, 19 nt, Homo sapiens
  misc_RNA (1)...(19): siRNA sense strand
aaaguggacaucuuauuag

SEQ ID NO: 1088044 - RNA, 19 nt, Homo sapiens
  misc_RNA (1)...(19): siRNA sense strand
ggaucagccggaagagaaa

SEQ ID NO: 1088045 - RNA, 19 nt, Homo sapiens
  misc_RNA (1)...(19): siRNA sense strand
ggcugaaaguggacaucuu

SEQ ID NO: 1088046 - RNA, 19 nt, Homo sapiens
  misc_RNA (1)...(19): siRNA sense strand
gaaccagcaguuggaggaa

SEQ ID NO: 1088047 - RNA, 19 nt, Homo sapiens
  misc_RNA (1)...(19): siRNA sense strand
gcaggcggaaccagcaguu

SEQ ID NO: 1088048 - RNA, 19 nt, Homo sapiens
  misc_RNA (1)...(19): siRNA sense strand
gcaguuggaggaagagaac

SEQ ID NO: 1088049 - RNA, 19 nt, Homo sapiens
  misc_RNA (1)...(19): siRNA sense strand
cggcaucucucuccaaccu

SEQ ID NO: 1088050 - RNA, 19 nt, Homo sapiens
  misc_RNA (1)...(19): siRNA sense strand
aggaucagccggaagagaa

SEQ ID NO: 1088051 - RNA, 19 nt, Homo sapiens
  misc_RNA (1)...(19): siRNA sense strand
gaggaucagccggaagaga

SEQ ID NO: 1088052 - RNA, 19 nt, Homo sapiens
  misc_RNA (1)...(19): siRNA sense strand
caucuuauuagacaugcuu

SEQ ID NO: 1088053 - RNA, 19 nt, Homo sapiens
  misc_RNA (1)...(19): siRNA sense strand
gcugaaucccacuuaaugg

SEQ ID NO: 1088054 - RNA, 19 nt, Homo sapiens
  misc_RNA (1)...(19): siRNA sense strand
uggagaaggaacuggauga

SEQ ID NO: 1088055 - RNA, 19 nt, Homo sapiens
  misc_RNA (1)...(19): siRNA sense strand
ccacuuaauggagaaggaa

SEQ ID NO: 1088056 - RNA, 19 nt, Homo sapiens
  misc_RNA (1)...(19): siRNA sense strand
gaaguagccuuaguaauaa

SEQ ID NO: 1088057 - RNA, 19 nt, Homo sapiens
  misc_RNA (1)...(19): siRNA sense strand
agaaguagccuuaguaaua

SEQ ID NO: 1088058 - RNA, 19 nt, Homo sapiens
  misc_RNA (1)...(19): siRNA sense strand
gauuggaaguucucuauuu

SEQ ID NO: 1088059 - RNA, 19 nt, Homo sapiens
  misc_RNA (1)...(19): siRNA sense strand
cagaauugcuaguaguuua

SEQ ID NO: 1088060 - RNA, 19 nt, Homo sapiens
  misc_RNA (1)...(19): siRNA sense strand
gaaccucucucuaugaauc

SEQ ID NO: 1088061 - RNA, 19 nt, Homo sapiens
  misc_RNA (1)...(19): siRNA sense strand
gcagggaugcugugaauaa

SEQ ID NO: 1088062 - RNA, 19 nt, Homo sapiens
  misc_RNA (1)...(19): siRNA sense strand
caaagaauauccucacagu

SEQ ID NO: 1088063 - RNA, 19 nt, Homo sapiens
  misc_RNA (1)...(19): siRNA sense strand
caaagaaguagccuuagua

SEQ ID NO: 1088064 - RNA, 19 nt, Homo sapiens
  misc_RNA (1)...(19): siRNA sense strand
ugucguagcuucuauccua

SEQ ID NO: 1088065 - RNA, 19 nt, Homo sapiens
  misc_RNA (1)...(19): siRNA sense strand
gaaaagagccaguggaaaa

SEQ ID NO: 1088066 - RNA, 19 nt, Homo sapiens
  misc_RNA (1)...(19): siRNA sense strand
cgaaagagcagcuugagaa

SEQ ID NO: 1088067 - RNA, 19 nt, Homo sapiens
  misc_RNA (1)...(19): siRNA sense strand
cagcagauccaaagaagua

SEQ ID NO: 1088068 - RNA, 19 nt, Homo sapiens
  misc_RNA (1)...(19): siRNA sense strand
gguauucccugcuuauaug

SEQ ID NO: 1088069 - RNA, 19 nt, Homo sapiens
  misc_RNA (1)...(19): siRNA sense strand
gaugagaaaccacagaauu

SEQ ID NO: 1088070 - RNA, 19 nt, Homo sapiens
  misc_RNA (1)...(19): siRNA sense strand
gcuguaagccuuuguuuau

SEQ ID NO: 1088071 - RNA, 19 nt, Homo sapiens
  misc_RNA (1)...(19): siRNA sense strand
gaaugucccuguggaauca

SEQ ID NO: 1088072 - RNA, 19 nt, Homo sapiens
  misc_RNA (1)...(19): siRNA sense strand
caugaaaucugcugugauc

SEQ ID NO: 1088073 - RNA, 19 nt, Homo sapiens
  misc_RNA (1)...(19): siRNA sense strand
gaaagagcagcuugagaaa

SEQ ID NO: 1088074 - RNA, 19 nt, Homo sapiens
  misc_RNA (1)...(19): siRNA sense strand
ggagacaauuguuaucauc

SEQ ID NO: 1088075 - RNA, 19 nt, Homo sapiens
  misc_RNA (1)...(19): siRNA sense strand
gaaauugcagauccuauug

SEQ ID NO: 1088076 - RNA, 19 nt, Homo sapiens
  misc_RNA (1)...(19): siRNA sense strand
ugacaaguauugcggaaug

SEQ ID NO: 1088077 - RNA, 19 nt, Homo sapiens
  misc_RNA (1)...(19): siRNA sense strand
gaaugauccugccaugaau

SEQ ID NO: 1088078 - RNA, 19 nt, Homo sapiens
  misc_RNA (1)...(19): siRNA sense strand
gaaguucucuauuuucuug

SEQ ID NO: 1088079 - RNA, 19 nt, Homo sapiens
  misc_RNA (1)...(19): siRNA sense strand
gacaugaaaucugcuguga

SEQ ID NO: 1088080 - RNA, 19 nt, Homo sapiens
  misc_RNA (1)...(19): siRNA sense strand
ccaaagaaguagccuuagu

SEQ ID NO: 1088081 - RNA, 19 nt, Homo sapiens
  misc_RNA (1)...(19): siRNA sense strand
cuuauaaccuugcuaaauc

SEQ ID NO: 1088082 - RNA, 19 nt, Homo sapiens
  misc_RNA (1)...(19): siRNA sense strand
ggacagugaugggcucaau

SEQ ID NO: 1088083 - RNA, 19 nt, Homo sapiens
  misc_RNA (1)...(19): siRNA sense strand
caugcaggcugucuuaaga

SEQ ID NO: 1088084 - RNA, 19 nt, Homo sapiens
  misc_RNA (1)...(19): siRNA sense strand
ugacugcucugcuccucua

SEQ ID NO: 1088085 - RNA, 19 nt, Homo sapiens
  misc_RNA (1)...(19): siRNA sense strand
aagagcagcuugagaaaca

SEQ ID NO: 1088086 - RNA, 19 nt, Homo sapiens
  misc_RNA (1)...(19): siRNA sense strand
ugaaugauccugccaugaa

SEQ ID NO: 1088087 - RNA, 19 nt, Homo sapiens
  misc_RNA (1)...(19): siRNA sense strand
gguuuggucuucacgguuu

SEQ ID NO: 1088088 - RNA, 19 nt, Homo sapiens
  misc_RNA (1)...(19): siRNA sense strand
ugauagaacugcagguugu

SEQ ID NO: 1088089 - RNA, 19 nt, Homo sapiens
  misc_RNA (1)...(19): siRNA sense strand
ugguucagcuuuaucuaua

SEQ ID NO: 1088090 - RNA, 19 nt, Homo sapiens
  misc_RNA (1)...(19): siRNA sense strand
ugaagcacauccuguugaa

SEQ ID NO: 1088091 - RNA, 19 nt, Homo sapiens
  misc_RNA (1)...(19): siRNA sense strand
gggaugcugugaauaagau

SEQ ID NO: 1088092 - RNA, 19 nt, Homo sapiens
  misc_RNA (1)...(19): siRNA sense strand
cagauuuacuccuauuuca

SEQ ID NO: 1088093 - RNA, 19 nt, Homo sapiens
  misc_RNA (1)...(19): siRNA sense strand
gagaauugguucagguagu

SEQ ID NO: 1088094 - RNA, 19 nt, Homo sapiens
  misc_RNA (1)...(19): siRNA sense strand
ucacaugcuuccucugcua

SEQ ID NO: 1088095 - RNA, 19 nt, Homo sapiens
  misc_RNA (1)...(19): siRNA sense strand
uuucuugggucuaaucuuu

SEQ ID NO: 1088096 - RNA, 19 nt, Homo sapiens
  misc_RNA (1)...(19): siRNA sense strand
ccacagaauugcuaguagu

SEQ ID NO: 1088097 - RNA, 19 nt, Homo sapiens
  misc_RNA (1)...(19): siRNA sense strand
ggaccaauguauuuagaac

SEQ ID NO: 1088098 - RNA, 19 nt, Homo sapiens
  misc_RNA (1)...(19): siRNA sense strand
cuuauuugcucuucagauu

SEQ ID NO: 1088099 - RNA, 19 nt, Homo sapiens
  misc_RNA (1)...(19): siRNA sense strand
ggagguauauggccuucuc

SEQ ID NO: 1088100 - RNA, 19 nt, Homo sapiens
  misc_RNA (1)...(19): siRNA sense strand
gcauucuugcucaguauua

SEQ ID NO: 1088101 - RNA, 19 nt, Homo sapiens
  misc_RNA (1)...(19): siRNA sense strand
caggcugucuuaagaaaug

SEQ ID NO: 1088102 - RNA, 19 nt, Homo sapiens
  misc_RNA (1)...(19): siRNA sense strand
aaagaaguagccuuaguaa

SEQ ID NO: 1088103 - RNA, 19 nt, Homo sapiens
  misc_RNA (1)...(19): siRNA sense strand
gagaccaucuuuggagaau

SEQ ID NO: 1088104 - RNA, 19 nt, Homo sapiens
  misc_RNA (1)...(19): siRNA sense strand
uuaucgagcuuucaugaau

SEQ ID NO: 1088105 - RNA, 19 nt, Homo sapiens
  misc_RNA (1)...(19): siRNA sense strand
gaagguuccagggacaaua

SEQ ID NO: 1088106 - RNA, 19 nt, Homo sapiens
  misc_RNA (1)...(19): siRNA sense strand
ccgcagggaugcugugaau

SEQ ID NO: 1088107 - RNA, 19 nt, Homo sapiens
  misc_RNA (1)...(19): siRNA sense strand
gaaacacuuccgugcugua

SEQ ID NO: 1088108 - RNA, 19 nt, Homo sapiens
  misc_RNA (1)...(19): siRNA sense strand
uauccuacagucuauguua

SEQ ID NO: 1088109 - RNA, 19 nt, Homo sapiens
  misc_RNA (1)...(19): siRNA sense strand
gggacuauguucggaguga

SEQ ID NO: 1088110 - RNA, 19 nt, Homo sapiens
  misc_RNA (1)...(19): siRNA sense strand
ccagggacaauaaugagua

SEQ ID NO: 1088111 - RNA, 19 nt, Homo sapiens
  misc_RNA (1)...(19): siRNA sense strand
cuuaagaaauggcuguaug

SEQ ID NO: 1088112 - RNA, 19 nt, Homo sapiens
  misc_RNA (1)...(19): siRNA sense strand
agacugggcugauagaacu

SEQ ID NO: 1088113 - RNA, 19 nt, Homo sapiens
  misc_RNA (1)...(19): siRNA sense strand
gggcauucuugcucaguau

SEQ ID NO: 1088114 - RNA, 19 nt, Homo sapiens
  misc_RNA (1)...(19): siRNA sense strand
gaucacgccuugcagucau

SEQ ID NO: 1088115 - RNA, 19 nt, Homo sapiens
  misc_RNA (1)...(19): siRNA sense strand
ccucccagcuuccaggauu

SEQ ID NO: 1088116 - RNA, 19 nt, Homo sapiens
  misc_RNA (1)...(19): siRNA sense strand
gcuguuggauguccuguac

SEQ ID NO: 1088117 - RNA, 19 nt, Homo sapiens
  misc_RNA (1)...(19): siRNA sense strand
gggagcaucuagagacaag

SEQ ID NO: 1088118 - RNA, 19 nt, Homo sapiens
  misc_RNA (1)...(19): siRNA sense strand
gcaggguuaucgagcuuuc

SEQ ID NO: 1088119 - RNA, 19 nt, Homo sapiens
  misc_RNA (1)...(19): siRNA sense strand
ccuguggaaucaacuggua

SEQ ID NO: 1088120 - RNA, 19 nt, Homo sapiens
  misc_RNA (1)...(19): siRNA sense strand
ggaaugucccuguggaauc

SEQ ID NO: 1088121 - RNA, 19 nt, Homo sapiens
  misc_RNA (1)...(19): siRNA sense strand
gcagcauucuuaccucucu

SEQ ID NO: 1088122 - RNA, 19 nt, Homo sapiens
  misc_RNA (1)...(19): siRNA sense strand
ccucuaugcuggacaucaa

SEQ ID NO: 1088123 - RNA, 19 nt, Homo sapiens
  misc_RNA (1)...(19): siRNA sense strand
gaugggaugucagcuccuu

SEQ ID NO: 1088124 - RNA, 19 nt, Homo sapiens
  misc_RNA (1)...(19): siRNA sense strand
agaaauugcagauccuauu

SEQ ID NO: 1088125 - RNA, 19 nt, Homo sapiens
  misc_RNA (1)...(19): siRNA sense strand
ugagggaccaauguauuua

SEQ ID NO: 1088126 - RNA, 19 nt, Homo sapiens
  misc_RNA (1)...(19): siRNA sense strand
ggacuauguucggagugaa

SEQ ID NO: 1088127 - RNA, 19 nt, Homo sapiens
  misc_RNA (1)...(19): siRNA sense strand
guguggugcugcuaacauu

SEQ ID NO: 1088128 - RNA, 19 nt, Homo sapiens
  misc_RNA (1)...(19): siRNA sense strand
gaugcugugaauaagauua

SEQ ID NO: 1088129 - RNA, 19 nt, Homo sapiens
  misc_RNA (1)...(19): siRNA sense strand
uggaggcaguguuaaaugu

SEQ ID NO: 1088130 - RNA, 19 nt, Homo sapiens
  misc_RNA (1)...(19): siRNA sense strand
gcacugggagcaucuagag

SEQ ID NO: 1088131 - RNA, 19 nt, Homo sapiens
  misc_RNA (1)...(19): siRNA sense strand
gguuaucgagcuuucauga

SEQ ID NO: 1088132 - RNA, 19 nt, Homo sapiens
  misc_RNA (1)...(19): siRNA sense strand
uaucgagcuuucaugaaug

SEQ ID NO: 1088133 - RNA, 19 nt, Homo sapiens
  misc_RNA (1)...(19): siRNA sense strand
uuugguaccuuauaaccuu

SEQ ID NO: 1088134 - RNA, 19 nt, Homo sapiens
  misc_RNA (1)...(19): siRNA sense strand
cuucauucauuccuacuau

SEQ ID NO: 1088135 - RNA, 19 nt, Homo sapiens
  misc_RNA (1)...(19): siRNA sense strand
cagcaucugguucagcuuu

SEQ ID NO: 1088136 - RNA, 19 nt, Homo sapiens
  misc_RNA (1)...(19): siRNA sense strand
cuugagaaacacaaugaua

SEQ ID NO: 1088137 - RNA, 19 nt, Homo sapiens
  misc_RNA (1)...(19): siRNA sense strand
ucacgugagaggcuucuuu

SEQ ID NO: 1088138 - RNA, 19 nt, Homo sapiens
  misc_RNA (1)...(19): siRNA sense strand
gauuuacuccuauuucagu

SEQ ID NO: 1088139 - RNA, 19 nt, Homo sapiens
  misc_RNA (1)...(19): siRNA sense strand
cuucagauuuacuccuauu

SEQ ID NO: 1088140 - RNA, 19 nt, Homo sapiens
  misc_RNA (1)...(19): siRNA sense strand
caacugguagucccuguuc

SEQ ID NO: 1088141 - RNA, 19 nt, Homo sapiens
  misc_RNA (1)...(19): siRNA sense strand
cagagaauugguucaggua

SEQ ID NO: 1088142 - RNA, 19 nt, Homo sapiens
  misc_RNA (1)...(19): siRNA sense strand
guuuaccacagccuuaaua

SEQ ID NO: 1088143 - RNA, 19 nt, Homo sapiens
  misc_RNA (1)...(19): siRNA sense strand
agaaaccacagaauugcua

SEQ ID NO: 1088144 - RNA, 19 nt, Homo sapiens
  misc_RNA (1)...(19): siRNA sense strand
gguucagcuuuaucuauau

SEQ ID NO: 1088145 - RNA, 19 nt, Homo sapiens
  misc_RNA (1)...(19): siRNA sense strand
gcaucugguucagcuuuau

SEQ ID NO: 1088146 - RNA, 19 nt, Homo sapiens
  misc_RNA (1)...(19): siRNA sense strand
gagacaauuguuaucauca

SEQ ID NO: 1088147 - RNA, 19 nt, Homo sapiens
  misc_RNA (1)...(19): siRNA sense strand
gguagucccuguucuuuuc

SEQ ID NO: 1088148 - RNA, 19 nt, Homo sapiens
  misc_RNA (1)...(19): siRNA sense strand
agaauugguucagguagug

SEQ ID NO: 1088149 - RNA, 19 nt, Homo sapiens
  misc_RNA (1)...(19): siRNA sense strand
acagugaugggcucaauga

SEQ ID NO: 1088150 - RNA, 19 nt, Homo sapiens
  misc_RNA (1)...(19): siRNA sense strand
aaacacuuccgugcuguaa

SEQ ID NO: 1088151 - RNA, 19 nt, Homo sapiens
  misc_RNA (1)...(19): siRNA sense strand
aauugcagauccuauuguu

SEQ ID NO: 1088152 - RNA, 19 nt, Homo sapiens
  misc_RNA (1)...(19): siRNA sense strand
cugcagcacuccuuacucu

SEQ ID NO: 1088153 - RNA, 19 nt, Homo sapiens
  misc_RNA (1)...(19): siRNA sense strand
ucacagugcgaaagaugaa

SEQ ID NO: 1088154 - RNA, 19 nt, Homo sapiens
  misc_RNA (1)...(19): siRNA sense strand
ugcaggcugucuuaagaaa

SEQ ID NO: 1088155 - RNA, 19 nt, Homo sapiens
  misc_RNA (1)...(19): siRNA sense strand
guauaaguauuuggcucuu

SEQ ID NO: 1088156 - RNA, 19 nt, Homo sapiens
  misc_RNA (1)...(19): siRNA sense strand
ggugauggcuggugugauu

SEQ ID NO: 1088157 - RNA, 19 nt, Homo sapiens
  misc_RNA (1)...(19): siRNA sense strand
gcaucuacaaggacuauua

SEQ ID NO: 1088158 - RNA, 19 nt, Homo sapiens
  misc_RNA (1)...(19): siRNA sense strand
ugaacaagauggucaagca

SEQ ID NO: 1088159 - RNA, 19 nt, Homo sapiens
  misc_RNA (1)...(19): siRNA sense strand
caaggacuauuacagauac

SEQ ID NO: 1088160 - RNA, 19 nt, Homo sapiens
  misc_RNA (1)...(19): siRNA sense strand
cuacaaggacuauuacaga

SEQ ID NO: 1088161 - RNA, 19 nt, Homo sapiens
  misc_RNA (1)...(19): siRNA sense strand
gaacaagauggucaagcaa

SEQ ID NO: 1088162 - RNA, 19 nt, Homo sapiens
  misc_RNA (1)...(19): siRNA sense strand
gcagaggccaacccaaaga

SEQ ID NO: 1088163 - RNA, 19 nt, Homo sapiens
  misc_RNA (1)...(19): siRNA sense strand
gcaagugacugggaaaaug

SEQ ID NO: 1088164 - RNA, 19 nt, Homo sapiens
  misc_RNA (1)...(19): siRNA sense strand
acaaggacuauuacagaua

SEQ ID NO: 1088165 - RNA, 19 nt, Homo sapiens
  misc_RNA (1)...(19): siRNA sense strand
uacaaggacuauuacagau

SEQ ID NO: 1088166 - RNA, 19 nt, Homo sapiens
  misc_RNA (1)...(19): siRNA sense strand
acaagauggucaagcaagu

SEQ ID NO: 1088167 - RNA, 19 nt, Homo sapiens
  misc_RNA (1)...(19): siRNA sense strand
ggugcagcaucuacaagga

SEQ ID NO: 1088168 - RNA, 19 nt, Homo sapiens
  misc_RNA (1)...(19): siRNA sense strand
gcgggauccugaaccugaa

SEQ ID NO: 1088169 - RNA, 19 nt, Homo sapiens
  misc_RNA (1)...(19): siRNA sense strand
aaaugcccauccucuccua

SEQ ID NO: 1088170 - RNA, 19 nt, Homo sapiens
  misc_RNA (1)...(19): siRNA sense strand
gcuaugaccaccugaagac

SEQ ID NO: 1088171 - RNA, 19 nt, Homo sapiens
  misc_RNA (1)...(19): siRNA sense strand
acccaugacugcugcuaug

SEQ ID NO: 1088172 - RNA, 19 nt, Homo sapiens
  misc_RNA (1)...(19): siRNA sense strand
uccugaaccugaacaagau

SEQ ID NO: 1088173 - RNA, 19 nt, Homo sapiens
  misc_RNA (1)...(19): siRNA sense strand
ggaacauccacugcucuga

SEQ ID NO: 1088174 - RNA, 19 nt, Homo sapiens
  misc_RNA (1)...(19): siRNA sense strand
gaagcgacugcguuucuac

SEQ ID NO: 1088175 - RNA, 19 nt, Homo sapiens
  misc_RNA (1)...(19): siRNA sense strand
ggaacuugcacugcugugu

SEQ ID NO: 1088176 - RNA, 19 nt, Homo sapiens
  misc_RNA (1)...(19): siRNA sense strand
uggcuggugugauuccaau

SEQ ID NO: 1088177 - RNA, 19 nt, Homo sapiens
  misc_RNA (1)...(19): siRNA sense strand
caagauggucaagcaagug

SEQ ID NO: 1088178 - RNA, 19 nt, Homo sapiens
  misc_RNA (1)...(19): siRNA sense strand
caagcaagugacugggaaa

SEQ ID NO: 1088179 - RNA, 19 nt, Homo sapiens
  misc_RNA (1)...(19): siRNA sense strand
ugugugggcugguggugau

SEQ ID NO: 1088180 - RNA, 19 nt, Homo sapiens
  misc_RNA (1)...(19): siRNA sense strand
ggacuuaugucuucuacuu

SEQ ID NO: 1088181 - RNA, 19 nt, Homo sapiens
  misc_RNA (1)...(19): siRNA sense strand
gaauuggacuuaugucuuc

SEQ ID NO: 1088182 - RNA, 19 nt, Homo sapiens
  misc_RNA (1)...(19): siRNA sense strand
acaagagaauuucccauua

SEQ ID NO: 1088183 - RNA, 19 nt, Homo sapiens
  misc_RNA (1)...(19): siRNA sense strand
ucaagcugcugacaauuua

SEQ ID NO: 1088184 - RNA, 19 nt, Homo sapiens
  misc_RNA (1)...(19): siRNA sense strand
caagagaauuucccauuau

SEQ ID NO: 1088185 - RNA, 19 nt, Homo sapiens
  misc_RNA (1)...(19): siRNA sense strand
gaaucugaguguugcguua

SEQ ID NO: 1088186 - RNA, 19 nt, Homo sapiens
  misc_RNA (1)...(19): siRNA sense strand
gauuggaccugcaguauuc

SEQ ID NO: 1088187 - RNA, 19 nt, Homo sapiens
  misc_RNA (1)...(19): siRNA sense strand
ugacauuauugccuacuua

SEQ ID NO: 1088188 - RNA, 19 nt, Homo sapiens
  misc_RNA (1)...(19): siRNA sense strand
ggauauugcuccuucguau

SEQ ID NO: 1088189 - RNA, 19 nt, Homo sapiens
  misc_RNA (1)...(19): siRNA sense strand
uaucguaguugcacacuuu

SEQ ID NO: 1088190 - RNA, 19 nt, Homo sapiens
  misc_RNA (1)...(19): siRNA sense strand
ucccauugcugcagauuua

SEQ ID NO: 1088191 - RNA, 19 nt, Homo sapiens
  misc_RNA (1)...(19): siRNA sense strand
aaacugggcucucaaugau

SEQ ID NO: 1088192 - RNA, 19 nt, Homo sapiens
  misc_RNA (1)...(19): siRNA sense strand
caaaccguguucuauauug

SEQ ID NO: 1088193 - RNA, 19 nt, Homo sapiens
  misc_RNA (1)...(19): siRNA sense strand
ggcaaaccguguucuauau

SEQ ID NO: 1088194 - RNA, 19 nt, Homo sapiens
  misc_RNA (1)...(19): siRNA sense strand
ggaaaaugcugcuaggauu

SEQ ID NO: 1088195 - RNA, 19 nt, Homo sapiens
  misc_RNA (1)...(19): siRNA sense strand
gcaaacuucuuagcauuuc

SEQ ID NO: 1088196 - RNA, 19 nt, Homo sapiens
  misc_RNA (1)...(19): siRNA sense strand
gagcacagcuugggacagu

SEQ ID NO: 1088197 - RNA, 19 nt, Homo sapiens
  misc_RNA (1)...(19): siRNA sense strand
gagaauuucccauuaugaa

SEQ ID NO: 1088198 - RNA, 19 nt, Homo sapiens
  misc_RNA (1)...(19): siRNA sense strand
cgccaaaggugaaguacaa

SEQ ID NO: 1088199 - RNA, 19 nt, Homo sapiens
  misc_RNA (1)...(19): siRNA sense strand
gcacagcuugggacaguaa

SEQ ID NO: 1088200 - RNA, 19 nt, Homo sapiens
  misc_RNA (1)...(19): siRNA sense strand
gguagcugcuggcuucauu

SEQ ID NO: 1088201 - RNA, 19 nt, Homo sapiens
  misc_RNA (1)...(19): siRNA sense strand
cuacuuauaugaaggagau

SEQ ID NO: 1088202 - RNA, 19 nt, Homo sapiens
  misc_RNA (1)...(19): siRNA sense strand
cguuacaacuuagcaauuu

SEQ ID NO: 1088203 - RNA, 19 nt, Homo sapiens
  misc_RNA (1)...(19): siRNA sense strand
gcaaaccguguucuauauu

SEQ ID NO: 1088204 - RNA, 19 nt, Homo sapiens
  misc_RNA (1)...(19): siRNA sense strand
uuguggaucugguuaguua

SEQ ID NO: 1088205 - RNA, 19 nt, Homo sapiens
  misc_RNA (1)...(19): siRNA sense strand
ccaaugggaugcagaaacu

SEQ ID NO: 1088206 - RNA, 19 nt, Homo sapiens
  misc_RNA (1)...(19): siRNA sense strand
uaauuucucuuccucuuuc

SEQ ID NO: 1088207 - RNA, 19 nt, Homo sapiens
  misc_RNA (1)...(19): siRNA sense strand
aagcaaacuucuuagcauu

SEQ ID NO: 1088208 - RNA, 19 nt, Homo sapiens
  misc_RNA (1)...(19): siRNA sense strand
caucaaccaucuggauauu

SEQ ID NO: 1088209 - RNA, 19 nt, Homo sapiens
  misc_RNA (1)...(19): siRNA sense strand
ggacuaggagaggguguua

SEQ ID NO: 1088210 - RNA, 19 nt, Homo sapiens
  misc_RNA (1)...(19): siRNA sense strand
aggagaggguguuacauuu

SEQ ID NO: 1088211 - RNA, 19 nt, Homo sapiens
  misc_RNA (1)...(19): siRNA sense strand
uaaaaucccugccacuuug

SEQ ID NO: 1088212 - RNA, 19 nt, Homo sapiens
  misc_RNA (1)...(19): siRNA sense strand
cuauauugcugcugcuauu

SEQ ID NO: 1088213 - RNA, 19 nt, Homo sapiens
  misc_RNA (1)...(19): siRNA sense strand
uuauuuaggcucuugguua

SEQ ID NO: 1088214 - RNA, 19 nt, Homo sapiens
  misc_RNA (1)...(19): siRNA sense strand
uauuuaggcucuugguuau

SEQ ID NO: 1088215 - RNA, 19 nt, Homo sapiens
  misc_RNA (1)...(19): siRNA sense strand
uggcaaaccguguucuaua

SEQ ID NO: 1088216 - RNA, 19 nt, Homo sapiens
  misc_RNA (1)...(19): siRNA sense strand
gaaacucaaggauggauuc

SEQ ID NO: 1088217 - RNA, 19 nt, Homo sapiens
  misc_RNA (1)...(19): siRNA sense strand
ggaucugguuaguuaguga

SEQ ID NO: 1088218 - RNA, 19 nt, Homo sapiens
  misc_RNA (1)...(19): siRNA sense strand
guacaaaacugggcucuca

SEQ ID NO: 1088219 - RNA, 19 nt, Homo sapiens
  misc_RNA (1)...(19): siRNA sense strand
gagaauggcaaaccguguu

SEQ ID NO: 1088220 - RNA, 19 nt, Homo sapiens
  misc_RNA (1)...(19): siRNA sense strand
ggagaggguguuacauuuc

SEQ ID NO: 1088221 - RNA, 19 nt, Homo sapiens
  misc_RNA (1)...(19): siRNA sense strand
guguaugcauuacguguga

SEQ ID NO: 1088222 - RNA, 19 nt, Homo sapiens
  misc_RNA (1)...(19): siRNA sense strand
guucaauguucaagagaau

SEQ ID NO: 1088223 - RNA, 19 nt, Homo sapiens
  misc_RNA (1)...(19): siRNA sense strand
guaauuucucuuccucuuu

SEQ ID NO: 1088224 - RNA, 19 nt, Homo sapiens
  misc_RNA (1)...(19): siRNA sense strand
gcaucaaccaucuggauau

SEQ ID NO: 1088225 - RNA, 19 nt, Homo sapiens
  misc_RNA (1)...(19): siRNA sense strand
gguucaauguucaagagaa

SEQ ID NO: 1088226 - RNA, 19 nt, Homo sapiens
  misc_RNA (1)...(19): siRNA sense strand
aagagaauuucccauuaug

SEQ ID NO: 1088227 - RNA, 19 nt, Homo sapiens
  misc_RNA (1)...(19): siRNA sense strand
cacaagagaauuucccauu

SEQ ID NO: 1088228 - RNA, 19 nt, Homo sapiens
  misc_RNA (1)...(19): siRNA sense strand
uaggagaggguguuacauu

SEQ ID NO: 1088229 - RNA, 19 nt, Homo sapiens
  misc_RNA (1)...(19): siRNA sense strand
gauccugucuggucaagcu

SEQ ID NO: 1088230 - RNA, 19 nt, Homo sapiens
  misc_RNA (1)...(19): siRNA sense strand
ggaccgcacgccucuucua

SEQ ID NO: 1088231 - RNA, 19 nt, Homo sapiens
  misc_RNA (1)...(19): siRNA sense strand
gauccuaagguucaauguu

SEQ ID NO: 1088232 - RNA, 19 nt, Homo sapiens
  misc_RNA (1)...(19): siRNA sense strand
aaucagcuuucuucacaga

SEQ ID NO: 1088233 - RNA, 19 nt, Homo sapiens
  misc_RNA (1)...(19): siRNA sense strand
ggauaugguagauucaaau

SEQ ID NO: 1088234 - RNA, 19 nt, Homo sapiens
  misc_RNA (1)...(19): siRNA sense strand
uaguggauaugguagauuc

SEQ ID NO: 1088235 - RNA, 19 nt, Homo sapiens
  misc_RNA (1)...(19): siRNA sense strand
gauuuagcaucaaccaucu

SEQ ID NO: 1088236 - RNA, 19 nt, Homo sapiens
  misc_RNA (1)...(19): siRNA sense strand
gcauuacgugugaaucuga

SEQ ID NO: 1088237 - RNA, 19 nt, Homo sapiens
  misc_RNA (1)...(19): siRNA sense strand
cuucuuagcauuucauaug

SEQ ID NO: 1088238 - RNA, 19 nt, Homo sapiens
  misc_RNA (1)...(19): siRNA sense strand
gcauucugcucccauaaaa

SEQ ID NO: 1088239 - RNA, 19 nt, Homo sapiens
  misc_RNA (1)...(19): siRNA sense strand
caaggcauguccagagcau

SEQ ID NO: 1088240 - RNA, 19 nt, Homo sapiens
  misc_RNA (1)...(19): siRNA sense strand
ucaaccaucuggauauugc

SEQ ID NO: 1088241 - RNA, 19 nt, Homo sapiens
  misc_RNA (1)...(19): siRNA sense strand
gccguugcuuuccuaacua

SEQ ID NO: 1088242 - RNA, 19 nt, Homo sapiens
  misc_RNA (1)...(19): siRNA sense strand
gcucugcucguuacaacuu

SEQ ID NO: 1088243 - RNA, 19 nt, Homo sapiens
  misc_RNA (1)...(19): siRNA sense strand
acucagagcacuagaagga

SEQ ID NO: 1088244 - RNA, 19 nt, Homo sapiens
  misc_RNA (1)...(19): siRNA sense strand
gagaggguguuacauuucc

SEQ ID NO: 1088245 - RNA, 19 nt, Homo sapiens
  misc_RNA (1)...(19): siRNA sense strand
ggccguugcuuuccuaacu

SEQ ID NO: 1088246 - RNA, 19 nt, Homo sapiens
  misc_RNA (1)...(19): siRNA sense strand
guuagugacacaccacaaa

SEQ ID NO: 1088247 - RNA, 19 nt, Homo sapiens
  misc_RNA (1)...(19): siRNA sense strand
cagcuugggacaguaauuu

SEQ ID NO: 1088248 - RNA, 19 nt, Homo sapiens
  misc_RNA (1)...(19): siRNA sense strand
guaccaaugggaugcagaa

SEQ ID NO: 1088249 - RNA, 19 nt, Homo sapiens
  misc_RNA (1)...(19): siRNA sense strand
uggcugugauuauucuuug

SEQ ID NO: 1088250 - RNA, 19 nt, Homo sapiens
  misc_RNA (1)...(19): siRNA sense strand
uggauaugguagauucaaa

SEQ ID NO: 1088251 - RNA, 19 nt, Homo sapiens
  misc_RNA (1)...(19): siRNA sense strand
ugaauuggacuuaugucuu

SEQ ID NO: 1088252 - RNA, 19 nt, Homo sapiens
  misc_RNA (1)...(19): siRNA sense strand
ucucaaugaucaccaugga

SEQ ID NO: 1088253 - RNA, 19 nt, Homo sapiens
  misc_RNA (1)...(19): siRNA sense strand
guacucagagcacuagaag

SEQ ID NO: 1088254 - RNA, 19 nt, Homo sapiens
  misc_RNA (1)...(19): siRNA sense strand
cuccugggcaucacaaaua

SEQ ID NO: 1088255 - RNA, 19 nt, Homo sapiens
  misc_RNA (1)...(19): siRNA sense strand
gauggauucucgguuccuu

SEQ ID NO: 1088256 - RNA, 19 nt, Homo sapiens
  misc_RNA (1)...(19): siRNA sense strand
caaacuucuuagcauuuca

SEQ ID NO: 1088257 - RNA, 19 nt, Homo sapiens
  misc_RNA (1)...(19): siRNA sense strand
cuaacuauaucaacaacac

SEQ ID NO: 1088258 - RNA, 19 nt, Homo sapiens
  misc_RNA (1)...(19): siRNA sense strand
uucauuggcugugauuauu

SEQ ID NO: 1088259 - RNA, 19 nt, Homo sapiens
  misc_RNA (1)...(19): siRNA sense strand
gacauuauugccuacuuau

SEQ ID NO: 1088260 - RNA, 19 nt, Homo sapiens
  misc_RNA (1)...(19): siRNA sense strand
gugcugcucugcucguuac

SEQ ID NO: 1088261 - RNA, 19 nt, Homo sapiens
  misc_RNA (1)...(19): siRNA sense strand
ggaccacucauuguacuca

SEQ ID NO: 1088262 - RNA, 19 nt, Homo sapiens
  misc_RNA (1)...(19): siRNA sense strand
gauauugcuccuucguaug

SEQ ID NO: 1088263 - RNA, 19 nt, Homo sapiens
  misc_RNA (1)...(19): siRNA sense strand
ggcucuugguuauguauga

SEQ ID NO: 1088264 - RNA, 19 nt, Homo sapiens
  misc_RNA (1)...(19): siRNA sense strand
auccuaagguucaauguuc

SEQ ID NO: 1088265 - RNA, 19 nt, Homo sapiens
  misc_RNA (1)...(19): siRNA sense strand
guuaguggauaugguagau

SEQ ID NO: 1088266 - RNA, 19 nt, Homo sapiens
  misc_RNA (1)...(19): siRNA sense strand
cuucauuguguaugcauua

SEQ ID NO: 1088267 - RNA, 19 nt, Homo sapiens
  misc_RNA (1)...(19): siRNA sense strand
uauauugcugcugcuauua

SEQ ID NO: 1088268 - RNA, 19 nt, Homo sapiens
  misc_RNA (1)...(19): siRNA sense strand
cuacaucaucacacagauu

SEQ ID NO: 1088269 - RNA, 19 nt, Homo sapiens
  misc_RNA (1)...(19): siRNA sense strand
acugggcucucaaugauca

SEQ ID NO: 1088270 - RNA, 19 nt, Homo sapiens
  misc_RNA (1)...(19): siRNA sense strand
aguaauuucucuuccucuu

SEQ ID NO: 1088271 - RNA, 19 nt, Homo sapiens
  misc_RNA (1)...(19): siRNA sense strand
agagaauuucccauuauga

SEQ ID NO: 1088272 - RNA, 19 nt, Homo sapiens
  misc_RNA (1)...(19): siRNA sense strand
uuuaggcucuugguuaugu

SEQ ID NO: 1088273 - RNA, 19 nt, Homo sapiens
  misc_RNA (1)...(19): siRNA sense strand
gagauccuaagguucaaug

SEQ ID NO: 1088274 - RNA, 19 nt, Homo sapiens
  misc_RNA (1)...(19): siRNA sense strand
acuuugggcuaucguaguu

SEQ ID NO: 1088275 - RNA, 19 nt, Homo sapiens
  misc_RNA (1)...(19): siRNA sense strand
ggaugcagaaacucaagga

SEQ ID NO: 1088276 - RNA, 19 nt, Homo sapiens
  misc_RNA (1)...(19): siRNA sense strand
ugauuggaccugcaguauu

SEQ ID NO: 1088277 - RNA, 19 nt, Homo sapiens
  misc_RNA (1)...(19): siRNA sense strand
gacaguaauuucucuuccu

SEQ ID NO: 1088278 - RNA, 19 nt, Homo sapiens
  misc_RNA (1)...(19): siRNA sense strand
cauaaucaaacggguaaga

SEQ ID NO: 1088279 - RNA, 19 nt, Homo sapiens
  misc_RNA (1)...(19): siRNA sense strand
ucaaacggguaagaaguac

SEQ ID NO: 1088280 - RNA, 19 nt, Homo sapiens
  misc_RNA (1)...(19): siRNA sense strand
gaaaggagauuuagaucaa

SEQ ID NO: 1088281 - RNA, 19 nt, Homo sapiens
  misc_RNA (1)...(19): siRNA sense strand
gcaauuagaucacgccaaa

SEQ ID NO: 1088282 - RNA, 19 nt, Homo sapiens
  misc_RNA (1)...(19): siRNA sense strand
gaaggaaauugaagugaaa

SEQ ID NO: 1088283 - RNA, 19 nt, Homo sapiens
  misc_RNA (1)...(19): siRNA sense strand
gcaaguacuucacucaguu

SEQ ID NO: 1088284 - RNA, 19 nt, Homo sapiens
  misc_RNA (1)...(19): siRNA sense strand
gagacuggaugacaauauu

SEQ ID NO: 1088285 - RNA, 19 nt, Homo sapiens
  misc_RNA (1)...(19): siRNA sense strand
agaaguaccuccgagaaua

SEQ ID NO: 1088286 - RNA, 19 nt, Homo sapiens
  misc_RNA (1)...(19): siRNA sense strand
gcucagaaguagccaaguu

SEQ ID NO: 1088287 - RNA, 19 nt, Homo sapiens
  misc_RNA (1)...(19): siRNA sense strand
cgaaggaaauugaagugaa

SEQ ID NO: 1088288 - RNA, 19 nt, Homo sapiens
  misc_RNA (1)...(19): siRNA sense strand
ggagaaaggagauuuagau

SEQ ID NO: 1088289 - RNA, 19 nt, Homo sapiens
  misc_RNA (1)...(19): siRNA sense strand
gagcagaacaggugagaug

SEQ ID NO: 1088290 - RNA, 19 nt, Homo sapiens
  misc_RNA (1)...(19): siRNA sense strand
uaaggagacuggaugacaa

SEQ ID NO: 1088291 - RNA, 19 nt, Homo sapiens
  misc_RNA (1)...(19): siRNA sense strand
gcgccgaccucuuugucua

SEQ ID NO: 1088292 - RNA, 19 nt, Homo sapiens
  misc_RNA (1)...(19): siRNA sense strand
ggauguaagucugauugaa

SEQ ID NO: 1088293 - RNA, 19 nt, Homo sapiens
  misc_RNA (1)...(19): siRNA sense strand
gaaguaccuccgagaauau

SEQ ID NO: 1088294 - RNA, 19 nt, Homo sapiens
  misc_RNA (1)...(19): siRNA sense strand
gcaaugcucucagcucagu

SEQ ID NO: 1088295 - RNA, 19 nt, Homo sapiens
  misc_RNA (1)...(19): siRNA sense strand
gacaauauucgaacuguug

SEQ ID NO: 1088296 - RNA, 19 nt, Homo sapiens
  misc_RNA (1)...(19): siRNA sense strand
gugcauggcugagaggauu

SEQ ID NO: 1088297 - RNA, 19 nt, Homo sapiens
  misc_RNA (1)...(19): siRNA sense strand
caccuaagcccaacacuga

SEQ ID NO: 1088298 - RNA, 19 nt, Homo sapiens
  misc_RNA (1)...(19): siRNA sense strand
ggacggcaagugaaagaaa

SEQ ID NO: 1088299 - RNA, 19 nt, Homo sapiens
  misc_RNA (1)...(19): siRNA sense strand
cagcugcgccgaccucuuu

SEQ ID NO: 1088300 - RNA, 19 nt, Homo sapiens
  misc_RNA (1)...(19): siRNA sense strand
gcugauagaucgguuugug

SEQ ID NO: 1088301 - RNA, 19 nt, Homo sapiens
  misc_RNA (1)...(19): siRNA sense strand
gaucaaacaggaaaucauc

SEQ ID NO: 1088302 - RNA, 19 nt, Homo sapiens
  misc_RNA (1)...(19): siRNA sense strand
gaacaaaauuaggcugaaa

SEQ ID NO: 1088303 - RNA, 19 nt, Homo sapiens
  misc_RNA (1)...(19): siRNA sense strand
ucaguucugcguuaaauuu

SEQ ID NO: 1088304 - RNA, 19 nt, Homo sapiens
  misc_RNA (1)...(19): siRNA sense strand
aaaggagggcucagaagua

SEQ ID NO: 1088305 - RNA, 19 nt, Homo sapiens
  misc_RNA (1)...(19): siRNA sense strand
gaaccucggagagcugaua

SEQ ID NO: 1088306 - RNA, 19 nt, Homo sapiens
  misc_RNA (1)...(19): siRNA sense strand
ccgagaauaugccuggaaa

SEQ ID NO: 1088307 - RNA, 19 nt, Homo sapiens
  misc_RNA (1)...(19): siRNA sense strand
uauucgaacuguuguaaga

SEQ ID NO: 1088308 - RNA, 19 nt, Homo sapiens
  misc_RNA (1)...(19): siRNA sense strand
gaggauugcgguggaauuu

SEQ ID NO: 1088309 - RNA, 19 nt, Homo sapiens
  misc_RNA (1)...(19): siRNA sense strand
ucacccaccucuucaagug

SEQ ID NO: 1088310 - RNA, 19 nt, Homo sapiens
  misc_RNA (1)...(19): siRNA sense strand
caacggagaaaggagauuu

SEQ ID NO: 1088311 - RNA, 19 nt, Homo sapiens
  misc_RNA (1)...(19): siRNA sense strand
ccgcagauccggcagcuuu

SEQ ID NO: 1088312 - RNA, 19 nt, Homo sapiens
  misc_RNA (1)...(19): siRNA sense strand
ccucaucucuacguguaua

SEQ ID NO: 1088313 - RNA, 19 nt, Homo sapiens
  misc_RNA (1)...(19): siRNA sense strand
ucacucaguucugcguuaa

SEQ ID NO: 1088314 - RNA, 19 nt, Homo sapiens
  misc_RNA (1)...(19): siRNA sense strand
gcgaagacaauacggagaa

SEQ ID NO: 1088315 - RNA, 19 nt, Homo sapiens
  misc_RNA (1)...(19): siRNA sense strand
gcuauucaaagaacaacua

SEQ ID NO: 1088316 - RNA, 19 nt, Homo sapiens
  misc_RNA (1)...(19): siRNA sense strand
ccagagcgaaggaaauuga

SEQ ID NO: 1088317 - RNA, 19 nt, Homo sapiens
  misc_RNA (1)...(19): siRNA sense strand
cagacgcuaugccuggaua

SEQ ID NO: 1088318 - RNA, 19 nt, Homo sapiens
  misc_RNA (1)...(19): siRNA sense strand
augcaugucugguugcuaa

SEQ ID NO: 1088319 - RNA, 19 nt, Homo sapiens
  misc_RNA (1)...(19): siRNA sense strand
agauuuagaucaaccaaag

SEQ ID NO: 1088320 - RNA, 19 nt, Homo sapiens
  misc_RNA (1)...(19): siRNA sense strand
cuacgucaccucugucauu

SEQ ID NO: 1088321 - RNA, 19 nt, Homo sapiens
  misc_RNA (1)...(19): siRNA sense strand
cuggagagauggacacguu

SEQ ID NO: 1088322 - RNA, 19 nt, Homo sapiens
  misc_RNA (1)...(19): siRNA sense strand
ggagacuggaugacaauau

SEQ ID NO: 1088323 - RNA, 19 nt, Homo sapiens
  misc_RNA (1)...(19): siRNA sense strand
cccgugauauuaagcaauu

SEQ ID NO: 1088324 - RNA, 19 nt, Homo sapiens
  misc_RNA (1)...(19): siRNA sense strand
gacggcaagugaaagaaau

SEQ ID NO: 1088325 - RNA, 19 nt, Homo sapiens
  misc_RNA (1)...(19): siRNA sense strand
ugaauguccuggagcacuu

SEQ ID NO: 1088326 - RNA, 19 nt, Homo sapiens
  misc_RNA (1)...(19): siRNA sense strand
gagcucugccucaucugua

SEQ ID NO: 1088327 - RNA, 19 nt, Homo sapiens
  misc_RNA (1)...(19): siRNA sense strand
caccagagauggaggaacu

SEQ ID NO: 1088328 - RNA, 19 nt, Homo sapiens
  misc_RNA (1)...(19): siRNA sense strand
caaacaggaaaucaucaaa

SEQ ID NO: 1088329 - RNA, 19 nt, Homo sapiens
  misc_RNA (1)...(19): siRNA sense strand
ggauggacggcaagugaaa

SEQ ID NO: 1088330 - RNA, 19 nt, Homo sapiens
  misc_RNA (1)...(19): siRNA sense strand
ccaggacccucuagaucga

SEQ ID NO: 1088331 - RNA, 19 nt, Homo sapiens
  misc_RNA (1)...(19): siRNA sense strand
gagaaaggagauuuagauc

SEQ ID NO: 1088332 - RNA, 19 nt, Homo sapiens
  misc_RNA (1)...(19): siRNA sense strand
caugucugguugcuaauau

SEQ ID NO: 1088333 - RNA, 19 nt, Homo sapiens
  misc_RNA (1)...(19): siRNA sense strand
ggaggacccagcaauguuc

SEQ ID NO: 1088334 - RNA, 19 nt, Homo sapiens
  misc_RNA (1)...(19): siRNA sense strand
agaaguugcuaaucuccuu

SEQ ID NO: 1088335 - RNA, 19 nt, Homo sapiens
  misc_RNA (1)...(19): siRNA sense strand
ugacaauauucgaacuguu

SEQ ID NO: 1088336 - RNA, 19 nt, Homo sapiens
  misc_RNA (1)...(19): siRNA sense strand
ggauugcgguggaauuuug

SEQ ID NO: 1088337 - RNA, 19 nt, Homo sapiens
  misc_RNA (1)...(19): siRNA sense strand
gcaugucugguugcuaaua

SEQ ID NO: 1088338 - RNA, 19 nt, Homo sapiens
  misc_RNA (1)...(19): siRNA sense strand
caggauggacggcaaguga

SEQ ID NO: 1088339 - RNA, 19 nt, Homo sapiens
  misc_RNA (1)...(19): siRNA sense strand
cagcaauguucuacgagau

SEQ ID NO: 1088340 - RNA, 19 nt, Homo sapiens
  misc_RNA (1)...(19): siRNA sense strand
gcagaacaggugagaugga

SEQ ID NO: 1088341 - RNA, 19 nt, Homo sapiens
  misc_RNA (1)...(19): siRNA sense strand
gcaagaugcaguggcagaa

SEQ ID NO: 1088342 - RNA, 19 nt, Homo sapiens
  misc_RNA (1)...(19): siRNA sense strand
uaagucugauugaacgaau

SEQ ID NO: 1088343 - RNA, 19 nt, Homo sapiens
  misc_RNA (1)...(19): siRNA sense strand
ccagaaguaccuccgagaa

SEQ ID NO: 1088344 - RNA, 19 nt, Homo sapiens
  misc_RNA (1)...(19): siRNA sense strand
gagcgaaggaaauugaagu

SEQ ID NO: 1088345 - RNA, 19 nt, Homo sapiens
  misc_RNA (1)...(19): siRNA sense strand
aagaacaacuaacuuugag

SEQ ID NO: 1088346 - RNA, 19 nt, Homo sapiens
  misc_RNA (1)...(19): siRNA sense strand
gaauaugccuggaaaaucc

SEQ ID NO: 1088347 - RNA, 19 nt, Homo sapiens
  misc_RNA (1)...(19): siRNA sense strand
gagcugauagaucgguuug

SEQ ID NO: 1088348 - RNA, 19 nt, Homo sapiens
  misc_RNA (1)...(19): siRNA sense strand
uaucgaaucccaagacaag

SEQ ID NO: 1088349 - RNA, 19 nt, Homo sapiens
  misc_RNA (1)...(19): siRNA sense strand
ucugguugcuaauauucua

SEQ ID NO: 1088350 - RNA, 19 nt, Homo sapiens
  misc_RNA (1)...(19): siRNA sense strand
ggagagauggacacguuca

SEQ ID NO: 1088351 - RNA, 19 nt, Homo sapiens
  misc_RNA (1)...(19): siRNA sense strand
gauguaagucugauugaac

SEQ ID NO: 1088352 - RNA, 19 nt, Homo sapiens
  misc_RNA (1)...(19): siRNA sense strand
ccacccagcagcuagaaga

SEQ ID NO: 1088353 - RNA, 19 nt, Homo sapiens
  misc_RNA (1)...(19): siRNA sense strand
aaggagggcucagaaguag

SEQ ID NO: 1088354 - RNA, 19 nt, Homo sapiens
  misc_RNA (1)...(19): siRNA sense strand
ggaacuggcaacggagaaa

SEQ ID NO: 1088355 - RNA, 19 nt, Homo sapiens
  misc_RNA (1)...(19): siRNA sense strand
gaagucgugaacaaaauua

SEQ ID NO: 1088356 - RNA, 19 nt, Homo sapiens
  misc_RNA (1)...(19): siRNA sense strand
gcauuguuuccaaguguuu

SEQ ID NO: 1088357 - RNA, 19 nt, Homo sapiens
  misc_RNA (1)...(19): siRNA sense strand
uggacuaugaggagaaaua

SEQ ID NO: 1088358 - RNA, 19 nt, Homo sapiens
  misc_RNA (1)...(19): siRNA sense strand
gccagcuuguggacuauga

SEQ ID NO: 1088359 - RNA, 19 nt, Homo sapiens
  misc_RNA (1)...(19): siRNA sense strand
acggagaaguugcuaaucu

SEQ ID NO: 1088360 - RNA, 19 nt, Homo sapiens
  misc_RNA (1)...(19): siRNA sense strand
caccugaccaccucaauca

SEQ ID NO: 1088361 - RNA, 19 nt, Homo sapiens
  misc_RNA (1)...(19): siRNA sense strand
ugacugccaugagcaagau

SEQ ID NO: 1088362 - RNA, 19 nt, Homo sapiens
  misc_RNA (1)...(19): siRNA sense strand
ccagacaauccauuucaug

SEQ ID NO: 1088363 - RNA, 19 nt, Homo sapiens
  misc_RNA (1)...(19): siRNA sense strand
gagauuuagaucaaccaaa

SEQ ID NO: 1088364 - RNA, 19 nt, Homo sapiens
  misc_RNA (1)...(19): siRNA sense strand
agaaaggagauuuagauca

SEQ ID NO: 1088365 - RNA, 19 nt, Homo sapiens
  misc_RNA (1)...(19): siRNA sense strand
gaugagccaacaccagaga

SEQ ID NO: 1088366 - RNA, 19 nt, Homo sapiens
  misc_RNA (1)...(19): siRNA sense strand
uaccagagcgaaggaaauu

SEQ ID NO: 1088367 - RNA, 19 nt, Homo sapiens
  misc_RNA (1)...(19): siRNA sense strand
ggaugacaauauucgaacu

SEQ ID NO: 1088368 - RNA, 19 nt, Homo sapiens
  misc_RNA (1)...(19): siRNA sense strand
gcaagccaauuagcauggu

SEQ ID NO: 1088369 - RNA, 19 nt, Homo sapiens
  misc_RNA (1)...(19): siRNA sense strand
cgucaccucugucauucug

SEQ ID NO: 1088370 - RNA, 19 nt, Homo sapiens
  misc_RNA (1)...(19): siRNA sense strand
cagaaguaccuccgagaau

SEQ ID NO: 1088371 - RNA, 19 nt, Homo sapiens
  misc_RNA (1)...(19): siRNA sense strand
agccucaucucuacgugua

SEQ ID NO: 1088372 - RNA, 19 nt, Homo sapiens
  misc_RNA (1)...(19): siRNA sense strand
ggcauuguuuccaaguguu

SEQ ID NO: 1088373 - RNA, 19 nt, Homo sapiens
  misc_RNA (1)...(19): siRNA sense strand
gcgaaggaaauugaaguga

SEQ ID NO: 1088374 - RNA, 19 nt, Homo sapiens
  misc_RNA (1)...(19): siRNA sense strand
ucaaacaggaaaucaucaa

SEQ ID NO: 1088375 - RNA, 19 nt, Homo sapiens
  misc_RNA (1)...(19): siRNA sense strand
ccaggaggacccagcaaug

SEQ ID NO: 1088376 - RNA, 19 nt, Homo sapiens
  misc_RNA (1)...(19): siRNA sense strand
uuugcaaacuccuucauuc

SEQ ID NO: 1088377 - RNA, 19 nt, Homo sapiens
  misc_RNA (1)...(19): siRNA sense strand
ggaaaaggagggcucagaa

SEQ ID NO: 1088378 - RNA, 19 nt, Homo sapiens
  misc_RNA (1)...(19): siRNA sense strand
gagcacggcagaguacugu

SEQ ID NO: 1088379 - RNA, 19 nt, Homo sapiens
  misc_RNA (1)...(19): siRNA sense strand
gcguuaaauuugcaaacuc

SEQ ID NO: 1088380 - RNA, 19 nt, Homo sapiens
  misc_RNA (1)...(19): siRNA sense strand
gggaaaagcuugacgauua

SEQ ID NO: 1088381 - RNA, 19 nt, Homo sapiens
  misc_RNA (1)...(19): siRNA sense strand
gaaacugauuccuucuuua

SEQ ID NO: 1088382 - RNA, 19 nt, Homo sapiens
  misc_RNA (1)...(19): siRNA sense strand
gaacgaagaugacaguaca

SEQ ID NO: 1088383 - RNA, 19 nt, Homo sapiens
  misc_RNA (1)...(19): siRNA sense strand
gaacugugcuuaaaaguaa

SEQ ID NO: 1088384 - RNA, 19 nt, Homo sapiens
  misc_RNA (1)...(19): siRNA sense strand
cagagagacuuuacuguuu

SEQ ID NO: 1088385 - RNA, 19 nt, Homo sapiens
  misc_RNA (1)...(19): siRNA sense strand
agaaagaaauggagugauu

SEQ ID NO: 1088386 - RNA, 19 nt, Homo sapiens
  misc_RNA (1)...(19): siRNA sense strand
gcacauguaucgaauuuac

SEQ ID NO: 1088387 - RNA, 19 nt, Homo sapiens
  misc_RNA (1)...(19): siRNA sense strand
gaagaugacaguacagauu

SEQ ID NO: 1088388 - RNA, 19 nt, Homo sapiens
  misc_RNA (1)...(19): siRNA sense strand
gggcaugagugcuguaauu

SEQ ID NO: 1088389 - RNA, 19 nt, Homo sapiens
  misc_RNA (1)...(19): siRNA sense strand
gaccucauuugcaaucuua

SEQ ID NO: 1088390 - RNA, 19 nt, Homo sapiens
  misc_RNA (1)...(19): siRNA sense strand
cuaaauacaugguuguuug

SEQ ID NO: 1088391 - RNA, 19 nt, Homo sapiens
  misc_RNA (1)...(19): siRNA sense strand
cagcucagccuuucuguua

SEQ ID NO: 1088392 - RNA, 19 nt, Homo sapiens
  misc_RNA (1)...(19): siRNA sense strand
caaugaaacuccagaggaa

SEQ ID NO: 1088393 - RNA, 19 nt, Homo sapiens
  misc_RNA (1)...(19): siRNA sense strand
ucacagagcuaccauuaca

SEQ ID NO: 1088394 - RNA, 19 nt, Homo sapiens
  misc_RNA (1)...(19): siRNA sense strand
agagagacuuuacuguuua

SEQ ID NO: 1088395 - RNA, 19 nt, Homo sapiens
  misc_RNA (1)...(19): siRNA sense strand
agaggaagcuguaagagaa

SEQ ID NO: 1088396 - RNA, 19 nt, Homo sapiens
  misc_RNA (1)...(19): siRNA sense strand
gggagccgcuuacaagaaa

SEQ ID NO: 1088397 - RNA, 19 nt, Homo sapiens
  misc_RNA (1)...(19): siRNA sense strand
guaucgaauuuacggauua

SEQ ID NO: 1088398 - RNA, 19 nt, Homo sapiens
  misc_RNA (1)...(19): siRNA sense strand
ugaaacugauuccuucuuu

SEQ ID NO: 1088399 - RNA, 19 nt, Homo sapiens
  misc_RNA (1)...(19): siRNA sense strand
gaaaguauacaucgaagau

SEQ ID NO: 1088400 - RNA, 19 nt, Homo sapiens
  misc_RNA (1)...(19): siRNA sense strand
caguguuggugaauuauua

SEQ ID NO: 1088401 - RNA, 19 nt, Homo sapiens
  misc_RNA (1)...(19): siRNA sense strand
gagcuaccauuacacauca

SEQ ID NO: 1088402 - RNA, 19 nt, Homo sapiens
  misc_RNA (1)...(19): siRNA sense strand
gcugaagaauuuaaugaug

SEQ ID NO: 1088403 - RNA, 19 nt, Homo sapiens
  misc_RNA (1)...(19): siRNA sense strand
guauuugcauccaguauug

SEQ ID NO: 1088404 - RNA, 19 nt, Homo sapiens
  misc_RNA (1)...(19): siRNA sense strand
ugacaggcgucuuggcuuu

SEQ ID NO: 1088405 - RNA, 19 nt, Homo sapiens
  misc_RNA (1)...(19): siRNA sense strand
cagcuaacauuuggaauug

SEQ ID NO: 1088406 - RNA, 19 nt, Homo sapiens
  misc_RNA (1)...(19): siRNA sense strand
ucucuugguuccuguaaua

SEQ ID NO: 1088407 - RNA, 19 nt, Homo sapiens
  misc_RNA (1)...(19): siRNA sense strand
agagagacuuauucgcuua

SEQ ID NO: 1088408 - RNA, 19 nt, Homo sapiens
  misc_RNA (1)...(19): siRNA sense strand
caacaggcaguauuauuga

SEQ ID NO: 1088409 - RNA, 19 nt, Homo sapiens
  misc_RNA (1)...(19): siRNA sense strand
caaaugaaacugauuccuu

SEQ ID NO: 1088410 - RNA, 19 nt, Homo sapiens
  misc_RNA (1)...(19): siRNA sense strand
aagagaagcugcugcugaa

SEQ ID NO: 1088411 - RNA, 19 nt, Homo sapiens
  misc_RNA (1)...(19): siRNA sense strand
ggaagacauuuaugaaucg

SEQ ID NO: 1088412 - RNA, 19 nt, Homo sapiens
  misc_RNA (1)...(19): siRNA sense strand
guacagauugugaugauga

SEQ ID NO: 1088413 - RNA, 19 nt, Homo sapiens
  misc_RNA (1)...(19): siRNA sense strand
gcacuuugccuucggaaau

SEQ ID NO: 1088414 - RNA, 19 nt, Homo sapiens
  misc_RNA (1)...(19): siRNA sense strand
gcuaagaccagaagagaga

SEQ ID NO: 1088415 - RNA, 19 nt, Homo sapiens
  misc_RNA (1)...(19): siRNA sense strand
aaucugcuaucaugaguuu

SEQ ID NO: 1088416 - RNA, 19 nt, Homo sapiens
  misc_RNA (1)...(19): siRNA sense strand
ccucucaugugucaucuuu

SEQ ID NO: 1088417 - RNA, 19 nt, Homo sapiens
  misc_RNA (1)...(19): siRNA sense strand
aaucacagagcuaccauua

SEQ ID NO: 1088418 - RNA, 19 nt, Homo sapiens
  misc_RNA (1)...(19): siRNA sense strand
uacaacaucugcucguauu

SEQ ID NO: 1088419 - RNA, 19 nt, Homo sapiens
  misc_RNA (1)...(19): siRNA sense strand
gcuaacauuuggaauugga

SEQ ID NO: 1088420 - RNA, 19 nt, Homo sapiens
  misc_RNA (1)...(19): siRNA sense strand
gcaaucugcuaucaugagu

SEQ ID NO: 1088421 - RNA, 19 nt, Homo sapiens
  misc_RNA (1)...(19): siRNA sense strand
caugauugauggcuacuau

SEQ ID NO: 1088422 - RNA, 19 nt, Homo sapiens
  misc_RNA (1)...(19): siRNA sense strand
gaucaacugaggaagauga

SEQ ID NO: 1088423 - RNA, 19 nt, Homo sapiens
  misc_RNA (1)...(19): siRNA sense strand
agacuuuacuguuuacuuc

SEQ ID NO: 1088424 - RNA, 19 nt, Homo sapiens
  misc_RNA (1)...(19): siRNA sense strand
uggaagacauuuaugaauc

SEQ ID NO: 1088425 - RNA, 19 nt, Homo sapiens
  misc_RNA (1)...(19): siRNA sense strand
ucuuaaggauggcaaauga

SEQ ID NO: 1088426 - RNA, 19 nt, Homo sapiens
  misc_RNA (1)...(19): siRNA sense strand
gaaguaaaauucgggcuuu

SEQ ID NO: 1088427 - RNA, 19 nt, Homo sapiens
  misc_RNA (1)...(19): siRNA sense strand
ucaacaggcaguauuauug

SEQ ID NO: 1088428 - RNA, 19 nt, Homo sapiens
  misc_RNA (1)...(19): siRNA sense strand
ucuguuagcugcaacuuca

SEQ ID NO: 1088429 - RNA, 19 nt, Homo sapiens
  misc_RNA (1)...(19): siRNA sense strand
ggaaaagcuugacgauuau

SEQ ID NO: 1088430 - RNA, 19 nt, Homo sapiens
  misc_RNA (1)...(19): siRNA sense strand
aggcacauguaucgaauuu

SEQ ID NO: 1088431 - RNA, 19 nt, Homo sapiens
  misc_RNA (1)...(19): siRNA sense strand
ucagagagacuuuacuguu

SEQ ID NO: 1088432 - RNA, 19 nt, Homo sapiens
  misc_RNA (1)...(19): siRNA sense strand
ggaccucauuugcaaucuu

SEQ ID NO: 1088433 - RNA, 19 nt, Homo sapiens
  misc_RNA (1)...(19): siRNA sense strand
guucaaagagaaagaaaug

SEQ ID NO: 1088434 - RNA, 19 nt, Homo sapiens
  misc_RNA (1)...(19): siRNA sense strand
gcuguaauuuccucaguag

SEQ ID NO: 1088435 - RNA, 19 nt, Homo sapiens
  misc_RNA (1)...(19): siRNA sense strand
ggacugcugugaagaaaau

SEQ ID NO: 1088436 - RNA, 19 nt, Homo sapiens
  misc_RNA (1)...(19): siRNA sense strand
gggcuuacacuaugauguu

SEQ ID NO: 1088437 - RNA, 19 nt, Homo sapiens
  misc_RNA (1)...(19): siRNA sense strand
uauaauguccucugggaaa

SEQ ID NO: 1088438 - RNA, 19 nt, Homo sapiens
  misc_RNA (1)...(19): siRNA sense strand
ggauggcacuuaucguucu

SEQ ID NO: 1088439 - RNA, 19 nt, Homo sapiens
  misc_RNA (1)...(19): siRNA sense strand
gaaagaaauggagugauuc

SEQ ID NO: 1088440 - RNA, 19 nt, Homo sapiens
  misc_RNA (1)...(19): siRNA sense strand
gaaauggggcuuacacuau

SEQ ID NO: 1088441 - RNA, 19 nt, Homo sapiens
  misc_RNA (1)...(19): siRNA sense strand
guuguaauguuuggaaaug

SEQ ID NO: 1088442 - RNA, 19 nt, Homo sapiens
  misc_RNA (1)...(19): siRNA sense strand
gauuacaguuauugaugga

SEQ ID NO: 1088443 - RNA, 19 nt, Homo sapiens
  misc_RNA (1)...(19): siRNA sense strand
ugaugaugauguucaaaga

SEQ ID NO: 1088444 - RNA, 19 nt, Homo sapiens
  misc_RNA (1)...(19): siRNA sense strand
ucucacuguuuauacguua

SEQ ID NO: 1088445 - RNA, 19 nt, Homo sapiens
  misc_RNA (1)...(19): siRNA sense strand
guuuauucuuccugucuua

SEQ ID NO: 1088446 - RNA, 19 nt, Homo sapiens
  misc_RNA (1)...(19): siRNA sense strand
gcacauugacuucuauggu

SEQ ID NO: 1088447 - RNA, 19 nt, Homo sapiens
  misc_RNA (1)...(19): siRNA sense strand
uaaugaugauacugacuga

SEQ ID NO: 1088448 - RNA, 19 nt, Homo sapiens
  misc_RNA (1)...(19): siRNA sense strand
caggcaguauuauugaauu

SEQ ID NO: 1088449 - RNA, 19 nt, Homo sapiens
  misc_RNA (1)...(19): siRNA sense strand
ugauugauggcuacuauaa

SEQ ID NO: 1088450 - RNA, 19 nt, Homo sapiens
  misc_RNA (1)...(19): siRNA sense strand
gaauuuacggauuacaguu

SEQ ID NO: 1088451 - RNA, 19 nt, Homo sapiens
  misc_RNA (1)...(19): siRNA sense strand
gauggcaaaugaaacugau

SEQ ID NO: 1088452 - RNA, 19 nt, Homo sapiens
  misc_RNA (1)...(19): siRNA sense strand
ggaguuguaauguuuggaa

SEQ ID NO: 1088453 - RNA, 19 nt, Homo sapiens
  misc_RNA (1)...(19): siRNA sense strand
ugucucugcuugccuguuu

SEQ ID NO: 1088454 - RNA, 19 nt, Homo sapiens
  misc_RNA (1)...(19): siRNA sense strand
caucaucgacgccaucuuc

SEQ ID NO: 1088455 - RNA, 19 nt, Homo sapiens
  misc_RNA (1)...(19): siRNA sense strand
cagcugaagaauuuaauga

SEQ ID NO: 1088456 - RNA, 19 nt, Homo sapiens
  misc_RNA (1)...(19): siRNA sense strand
ucaaagagaaagaaaugga

SEQ ID NO: 1088457 - RNA, 19 nt, Homo sapiens
  misc_RNA (1)...(19): siRNA sense strand
gggaauugaacgaagauga

SEQ ID NO: 1088458 - RNA, 19 nt, Homo sapiens
  misc_RNA (1)...(19): siRNA sense strand
ucagaaaguauacaucgaa

SEQ ID NO: 1088459 - RNA, 19 nt, Homo sapiens
  misc_RNA (1)...(19): siRNA sense strand
aaagggagccgcuuacaag

SEQ ID NO: 1088460 - RNA, 19 nt, Homo sapiens
  misc_RNA (1)...(19): siRNA sense strand
gcuggaagacauuuaugaa

SEQ ID NO: 1088461 - RNA, 19 nt, Homo sapiens
  misc_RNA (1)...(19): siRNA sense strand
gaguuguaauguuuggaaa

SEQ ID NO: 1088462 - RNA, 19 nt, Homo sapiens
  misc_RNA (1)...(19): siRNA sense strand
gauggcacuuaucguucua

SEQ ID NO: 1088463 - RNA, 19 nt, Homo sapiens
  misc_RNA (1)...(19): siRNA sense strand
caguacagauugugaugau

SEQ ID NO: 1088464 - RNA, 19 nt, Homo sapiens
  misc_RNA (1)...(19): siRNA sense strand
acagggaauugaacgaaga

SEQ ID NO: 1088465 - RNA, 19 nt, Homo sapiens
  misc_RNA (1)...(19): siRNA sense strand
gagaagcugcugcugaauc

SEQ ID NO: 1088466 - RNA, 19 nt, Homo sapiens
  misc_RNA (1)...(19): siRNA sense strand
gagccgcuuacaagaaaua

SEQ ID NO: 1088467 - RNA, 19 nt, Homo sapiens
  misc_RNA (1)...(19): siRNA sense strand
guaggacugcugugaagaa

SEQ ID NO: 1088468 - RNA, 19 nt, Homo sapiens
  misc_RNA (1)...(19): siRNA sense strand
cuacuacguucguucaaca

SEQ ID NO: 1088469 - RNA, 19 nt, Homo sapiens
  misc_RNA (1)...(19): siRNA sense strand
ucacaacgaucacuuuuca

SEQ ID NO: 1088470 - RNA, 19 nt, Homo sapiens
  misc_RNA (1)...(19): siRNA sense strand
guguggaacugugcuuaaa

SEQ ID NO: 1088471 - RNA, 19 nt, Homo sapiens
  misc_RNA (1)...(19): siRNA sense strand
gcacuaaauacaugguugu

SEQ ID NO: 1088472 - RNA, 19 nt, Homo sapiens
  misc_RNA (1)...(19): siRNA sense strand
gcaucgugcuccagaucuu

SEQ ID NO: 1088473 - RNA, 19 nt, Homo sapiens
  misc_RNA (1)...(19): siRNA sense strand
cauggaagaggauucguuu

SEQ ID NO: 1088474 - RNA, 19 nt, Homo sapiens
  misc_RNA (1)...(19): siRNA sense strand
uguaauaggcuuaaucaca

SEQ ID NO: 1088475 - RNA, 19 nt, Homo sapiens
  misc_RNA (1)...(19): siRNA sense strand
uuacacuacuccagauuca

SEQ ID NO: 1088476 - RNA, 19 nt, Homo sapiens
  misc_RNA (1)...(19): siRNA sense strand
gaugauguucaaagagaaa

SEQ ID NO: 1088477 - RNA, 19 nt, Homo sapiens
  misc_RNA (1)...(19): siRNA sense strand
cgaagaugauaucaaggau

SEQ ID NO: 1088478 - RNA, 19 nt, Homo sapiens
  misc_RNA (1)...(19): siRNA sense strand
auugauggcuacuauaaug

SEQ ID NO: 1088479 - RNA, 19 nt, Homo sapiens
  misc_RNA (1)...(19): siRNA sense strand
uuguuucucucacuguuua

SEQ ID NO: 1088480 - RNA, 19 nt, Homo sapiens
  misc_RNA (1)...(19): siRNA sense strand
gaaggacuguggaugaauu

SEQ ID NO: 1088481 - RNA, 19 nt, Homo sapiens
  misc_RNA (1)...(19): siRNA sense strand
agaaaucgcugggcuguuu

SEQ ID NO: 1088482 - RNA, 19 nt, Homo sapiens
  misc_RNA (1)...(19): siRNA sense strand
caucagagauuucuauaac

SEQ ID NO: 1088483 - RNA, 19 nt, Homo sapiens
  misc_RNA (1)...(19): siRNA sense strand
ggacugaugugugcugcuu

SEQ ID NO: 1088484 - RNA, 19 nt, Homo sapiens
  misc_RNA (1)...(19): siRNA sense strand
ccaaugccaucaucagaga

SEQ ID NO: 1088485 - RNA, 19 nt, Homo sapiens
  misc_RNA (1)...(19): siRNA sense strand
gcucuguucugcugcguuu

SEQ ID NO: 1088486 - RNA, 19 nt, Homo sapiens
  misc_RNA (1)...(19): siRNA sense strand
gggaaggacuguggaugaa

SEQ ID NO: 1088487 - RNA, 19 nt, Homo sapiens
  misc_RNA (1)...(19): siRNA sense strand
gaagcucucuacuuaggau

SEQ ID NO: 1088488 - RNA, 19 nt, Homo sapiens
  misc_RNA (1)...(19): siRNA sense strand
cuucuuggcuuucaugaug

SEQ ID NO: 1088489 - RNA, 19 nt, Homo sapiens
  misc_RNA (1)...(19): siRNA sense strand
gcugacggcuggaaucauc

SEQ ID NO: 1088490 - RNA, 19 nt, Homo sapiens
  misc_RNA (1)...(19): siRNA sense strand
gagagugucggccuucauu

SEQ ID NO: 1088491 - RNA, 19 nt, Homo sapiens
  misc_RNA (1)...(19): siRNA sense strand
gaaaagagcaguagcuaca

SEQ ID NO: 1088492 - RNA, 19 nt, Homo sapiens
  misc_RNA (1)...(19): siRNA sense strand
ccagaagucaguaugugua

SEQ ID NO: 1088493 - RNA, 19 nt, Homo sapiens
  misc_RNA (1)...(19): siRNA sense strand
aaagagcaguagcuacaga

SEQ ID NO: 1088494 - RNA, 19 nt, Homo sapiens
  misc_RNA (1)...(19): siRNA sense strand
aaaguuaucacaccggaaa

SEQ ID NO: 1088495 - RNA, 19 nt, Homo sapiens
  misc_RNA (1)...(19): siRNA sense strand
gcuggaaucaucuucauca

SEQ ID NO: 1088496 - RNA, 19 nt, Homo sapiens
  misc_RNA (1)...(19): siRNA sense strand
caucaucagagauuucuau

SEQ ID NO: 1088497 - RNA, 19 nt, Homo sapiens
  misc_RNA (1)...(19): siRNA sense strand
gagugucggccuucauuga

SEQ ID NO: 1088498 - RNA, 19 nt, Homo sapiens
  misc_RNA (1)...(19): siRNA sense strand
caacccaugccuuagaaau

SEQ ID NO: 1088499 - RNA, 19 nt, Homo sapiens
  misc_RNA (1)...(19): siRNA sense strand
ugauguccuucuuggcuuu

SEQ ID NO: 1088500 - RNA, 19 nt, Homo sapiens
  misc_RNA (1)...(19): siRNA sense strand
gaagucaccgagcgucuac

SEQ ID NO: 1088501 - RNA, 19 nt, Homo sapiens
  misc_RNA (1)...(19): siRNA sense strand
gagcgucuacuccagaagu

SEQ ID NO: 1088502 - RNA, 19 nt, Homo sapiens
  misc_RNA (1)...(19): siRNA sense strand
gagcaguagcuacagauac

SEQ ID NO: 1088503 - RNA, 19 nt, Homo sapiens
  misc_RNA (1)...(19): siRNA sense strand
uagcuacagauacucgaua

SEQ ID NO: 1088504 - RNA, 19 nt, Homo sapiens
  misc_RNA (1)...(19): siRNA sense strand
ggaaggacuguggaugaau

SEQ ID NO: 1088505 - RNA, 19 nt, Homo sapiens
  misc_RNA (1)...(19): siRNA sense strand
uacagauacucgauaccuu

SEQ ID NO: 1088506 - RNA, 19 nt, Homo sapiens
  misc_RNA (1)...(19): siRNA sense strand
ugggaaggacuguggauga

SEQ ID NO: 1088507 - RNA, 19 nt, Homo sapiens
  misc_RNA (1)...(19): siRNA sense strand
gcagccagaggacugaugu

SEQ ID NO: 1088508 - RNA, 19 nt, Homo sapiens
  misc_RNA (1)...(19): siRNA sense strand
ugagcuggguugccaaugc

SEQ ID NO: 1088509 - RNA, 19 nt, Homo sapiens
  misc_RNA (1)...(19): siRNA sense strand
ccgagcgucuacuccagaa

SEQ ID NO: 1088510 - RNA, 19 nt, Homo sapiens
  misc_RNA (1)...(19): siRNA sense strand
uaucacaccggaaagaagu

SEQ ID NO: 1088511 - RNA, 19 nt, Homo sapiens
  misc_RNA (1)...(19): siRNA sense strand
gcaacccaugccuuagaaa

SEQ ID NO: 1088512 - RNA, 19 nt, Homo sapiens
  misc_RNA (1)...(19): siRNA sense strand
gcucucuacuuaggaugga

SEQ ID NO: 1088513 - RNA, 19 nt, Homo sapiens
  misc_RNA (1)...(19): siRNA sense strand
cggcuggaaucaucuucau

SEQ ID NO: 1088514 - RNA, 19 nt, Homo sapiens
  misc_RNA (1)...(19): siRNA sense strand
ugguggagaugcacaauua

SEQ ID NO: 1088515 - RNA, 19 nt, Homo sapiens
  misc_RNA (1)...(19): siRNA sense strand
uugcagaggucaucaaguu

SEQ ID NO: 1088516 - RNA, 19 nt, Homo sapiens
  misc_RNA (1)...(19): siRNA sense strand
ccaacucucuccagcagaa

SEQ ID NO: 1088517 - RNA, 19 nt, Homo sapiens
  misc_RNA (1)...(19): siRNA sense strand
gagcuuuccuucuguccuu

SEQ ID NO: 1088518 - RNA, 19 nt, Homo sapiens
  misc_RNA (1)...(19): siRNA sense strand
gaacaggaagguacugaag

SEQ ID NO: 1088519 - RNA, 19 nt, Homo sapiens
  misc_RNA (1)...(19): siRNA sense strand
gguuggagcuuuccuucug

SEQ ID NO: 1088520 - RNA, 19 nt, Homo sapiens
  misc_RNA (1)...(19): siRNA sense strand
ggauggcaguggcuacaug

SEQ ID NO: 1088521 - RNA, 19 nt, Homo sapiens
  misc_RNA (1)...(19): siRNA sense strand
ugaagaggcugaacuuuuc

SEQ ID NO: 1088522 - RNA, 19 nt, Homo sapiens
  misc_RNA (1)...(19): siRNA sense strand
guagacaacaucccucugu

SEQ ID NO: 1088523 - RNA, 19 nt, Homo sapiens
  misc_RNA (1)...(19): siRNA sense strand
ccaagaugguggagaugca

SEQ ID NO: 1088524 - RNA, 19 nt, Homo sapiens
  misc_RNA (1)...(19): siRNA sense strand
acaggaagguacugaagag

SEQ ID NO: 1088525 - RNA, 19 nt, Homo sapiens
  misc_RNA (1)...(19): siRNA sense strand
gcagaggucaucaaguuuu

SEQ ID NO: 1088526 - RNA, 19 nt, Homo sapiens
  misc_RNA (1)...(19): siRNA sense strand
cagaggucaucaaguuuua

SEQ ID NO: 1088527 - RNA, 19 nt, Homo sapiens
  misc_RNA (1)...(19): siRNA sense strand
ggagaugcacaauuauguc

SEQ ID NO: 1088528 - RNA, 19 nt, Homo sapiens
  misc_RNA (1)...(19): siRNA sense strand
aaaccucucccgggacuuu

SEQ ID NO: 1088529 - RNA, 19 nt, Homo sapiens
  misc_RNA (1)...(19): siRNA sense strand
guggagaugcacaauuaug

SEQ ID NO: 1088530 - RNA, 19 nt, Homo sapiens
  misc_RNA (1)...(19): siRNA sense strand
ggggucaucugaacaggaa

SEQ ID NO: 1088531 - RNA, 19 nt, Homo sapiens
  misc_RNA (1)...(19): siRNA sense strand
cagcagaagcucagcaacu

SEQ ID NO: 1088532 - RNA, 19 nt, Homo sapiens
  misc_RNA (1)...(19): siRNA sense strand
guacugaagaggcugaacu

SEQ ID NO: 1088533 - RNA, 19 nt, Homo sapiens
  misc_RNA (1)...(19): siRNA sense strand
caacuggggucaucugaac

SEQ ID NO: 1088534 - RNA, 19 nt, Homo sapiens
  misc_RNA (1)...(19): siRNA sense strand
guuggagcuuuccuucugu

SEQ ID NO: 1088535 - RNA, 19 nt, Homo sapiens
  misc_RNA (1)...(19): siRNA sense strand
agcagaagcucagcaacug

SEQ ID NO: 1088536 - RNA, 19 nt, Homo sapiens
  misc_RNA (1)...(19): siRNA sense strand
gaugacgugaugcgcaaga

SEQ ID NO: 1088537 - RNA, 19 nt, Homo sapiens
  misc_RNA (1)...(19): siRNA sense strand
uggagaugcacaauuaugu

SEQ ID NO: 1088538 - RNA, 19 nt, Homo sapiens
  misc_RNA (1)...(19): siRNA sense strand
cgaggaagcugcucagaua

SEQ ID NO: 1088539 - RNA, 19 nt, Homo sapiens
  misc_RNA (1)...(19): siRNA sense strand
gagcaccacugaagaauuu

SEQ ID NO: 1088540 - RNA, 19 nt, Homo sapiens
  misc_RNA (1)...(19): siRNA sense strand
ugaaggagcugaaagaauu

SEQ ID NO: 1088541 - RNA, 19 nt, Homo sapiens
  misc_RNA (1)...(19): siRNA sense strand
gcaaauacgaccucaaaua

SEQ ID NO: 1088542 - RNA, 19 nt, Homo sapiens
  misc_RNA (1)...(19): siRNA sense strand
gaaacuagcuaaagagaag

SEQ ID NO: 1088543 - RNA, 19 nt, Homo sapiens
  misc_RNA (1)...(19): siRNA sense strand
gcaaacagaugaguuguau

SEQ ID NO: 1088544 - RNA, 19 nt, Homo sapiens
  misc_RNA (1)...(19): siRNA sense strand
caaauacgaccucaaauaa

SEQ ID NO: 1088545 - RNA, 19 nt, Homo sapiens
  misc_RNA (1)...(19): siRNA sense strand
caagaaacaugcuacauca

SEQ ID NO: 1088546 - RNA, 19 nt, Homo sapiens
  misc_RNA (1)...(19): siRNA sense strand
gcaaauggcuuguccaaaa

SEQ ID NO: 1088547 - RNA, 19 nt, Homo sapiens
  misc_RNA (1)...(19): siRNA sense strand
uaaaggagguguuugugaa

SEQ ID NO: 1088548 - RNA, 19 nt, Homo sapiens
  misc_RNA (1)...(19): siRNA sense strand
gaaccuagcucuggcauac

SEQ ID NO: 1088549 - RNA, 19 nt, Homo sapiens
  misc_RNA (1)...(19): siRNA sense strand
gggaugcuguugagauaua

SEQ ID NO: 1088550 - RNA, 19 nt, Homo sapiens
  misc_RNA (1)...(19): siRNA sense strand
gcagaaccguggcagagaa

SEQ ID NO: 1088551 - RNA, 19 nt, Homo sapiens
  misc_RNA (1)...(19): siRNA sense strand
gaccaucacuggaaaugug

SEQ ID NO: 1088552 - RNA, 19 nt, Homo sapiens
  misc_RNA (1)...(19): siRNA sense strand
cagggaugcuguugagaua

SEQ ID NO: 1088553 - RNA, 19 nt, Homo sapiens
  misc_RNA (1)...(19): siRNA sense strand
gaaggagcugaaagaauua

SEQ ID NO: 1088554 - RNA, 19 nt, Homo sapiens
  misc_RNA (1)...(19): siRNA sense strand
agaggaaacuagcuaaaga

SEQ ID NO: 1088555 - RNA, 19 nt, Homo sapiens
  misc_RNA (1)...(19): siRNA sense strand
gaucccagcucaccagcaa

SEQ ID NO: 1088556 - RNA, 19 nt, Homo sapiens
  misc_RNA (1)...(19): siRNA sense strand
gcagagaagccuauuucaa

SEQ ID NO: 1088557 - RNA, 19 nt, Homo sapiens
  misc_RNA (1)...(19): siRNA sense strand
gagaacgaccuaacacuug

SEQ ID NO: 1088558 - RNA, 19 nt, Homo sapiens
  misc_RNA (1)...(19): siRNA sense strand
gaagaggaaacuagcuaaa

SEQ ID NO: 1088559 - RNA, 19 nt, Homo sapiens
  misc_RNA (1)...(19): siRNA sense strand
ggagaaggccauagacugu

SEQ ID NO: 1088560 - RNA, 19 nt, Homo sapiens
  misc_RNA (1)...(19): siRNA sense strand
gcucuggcauacuuugaaa

SEQ ID NO: 1088561 - RNA, 19 nt, Homo sapiens
  misc_RNA (1)...(19): siRNA sense strand
aggagguguuugugaauua

SEQ ID NO: 1088562 - RNA, 19 nt, Homo sapiens
  misc_RNA (1)...(19): siRNA sense strand
cauaagaaguaucaaugca

SEQ ID NO: 1088563 - RNA, 19 nt, Homo sapiens
  misc_RNA (1)...(19): siRNA sense strand
gauuucugcuuccguaugu

SEQ ID NO: 1088564 - RNA, 19 nt, Homo sapiens
  misc_RNA (1)...(19): siRNA sense strand
aaagagaaauuagcccaau

SEQ ID NO: 1088565 - RNA, 19 nt, Homo sapiens
  misc_RNA (1)...(19): siRNA sense strand
ugagaggccucccaguuca

SEQ ID NO: 1088566 - RNA, 19 nt, Homo sapiens
  misc_RNA (1)...(19): siRNA sense strand
ggaaacuagcuaaagagaa

SEQ ID NO: 1088567 - RNA, 19 nt, Homo sapiens
  misc_RNA (1)...(19): siRNA sense strand
ccaagaaacaugcuacauc

SEQ ID NO: 1088568 - RNA, 19 nt, Homo sapiens
  misc_RNA (1)...(19): siRNA sense strand
cagagaagccuauuucaac

SEQ ID NO: 1088569 - RNA, 19 nt, Homo sapiens
  misc_RNA (1)...(19): siRNA sense strand
uagagcagcugaggaggaa

SEQ ID NO: 1088570 - RNA, 19 nt, Homo sapiens
  misc_RNA (1)...(19): siRNA sense strand
ggagcugaaagaauuauau

SEQ ID NO: 1088571 - RNA, 19 nt, Homo sapiens
  misc_RNA (1)...(19): siRNA sense strand
gaaggcagagagaaacaug

SEQ ID NO: 1088572 - RNA, 19 nt, Homo sapiens
  misc_RNA (1)...(19): siRNA sense strand
gagaaggccauagacugua

SEQ ID NO: 1088573 - RNA, 19 nt, Homo sapiens
  misc_RNA (1)...(19): siRNA sense strand
ggaagcugcucagauagag

SEQ ID NO: 1088574 - RNA, 19 nt, Homo sapiens
  misc_RNA (1)...(19): siRNA sense strand
gagcugauucgauguguca

SEQ ID NO: 1088575 - RNA, 19 nt, Homo sapiens
  misc_RNA (1)...(19): siRNA sense strand
gcaaacaaggagcugauuc

SEQ ID NO: 1088576 - RNA, 19 nt, Homo sapiens
  misc_RNA (1)...(19): siRNA sense strand
ccucaaauaaggagaaaga

SEQ ID NO: 1088577 - RNA, 19 nt, Homo sapiens
  misc_RNA (1)...(19): siRNA sense strand
caaugcauaucgagcaaca

SEQ ID NO: 1088578 - RNA, 19 nt, Homo sapiens
  misc_RNA (1)...(19): siRNA sense strand
aauacgaccucaaauaagg

SEQ ID NO: 1088579 - RNA, 19 nt, Homo sapiens
  misc_RNA (1)...(19): siRNA sense strand
gaccucaaauaaggagaaa

SEQ ID NO: 1088580 - RNA, 19 nt, Homo sapiens
  misc_RNA (1)...(19): siRNA sense strand
agaaggccauagacuguau

SEQ ID NO: 1088581 - RNA, 19 nt, Homo sapiens
  misc_RNA (1)...(19): siRNA sense strand
cgaccuaacacuugcuuug

SEQ ID NO: 1088582 - RNA, 19 nt, Homo sapiens
  misc_RNA (1)...(19): siRNA sense strand
gugaagaggaaacuagcua

SEQ ID NO: 1088583 - RNA, 19 nt, Homo sapiens
  misc_RNA (1)...(19): siRNA sense strand
ccagcaaacagaugaguug

SEQ ID NO: 1088584 - RNA, 19 nt, Homo sapiens
  misc_RNA (1)...(19): siRNA sense strand
gcucagcugauuaaggaaa

SEQ ID NO: 1088585 - RNA, 19 nt, Homo sapiens
  misc_RNA (1)...(19): siRNA sense strand
ggcaauuggcgauguuauu

SEQ ID NO: 1088586 - RNA, 19 nt, Homo sapiens
  misc_RNA (1)...(19): siRNA sense strand
aaaggcaauuggcgauguu

SEQ ID NO: 1088587 - RNA, 19 nt, Homo sapiens
  misc_RNA (1)...(19): siRNA sense strand
guaugucucaucccaaaga

SEQ ID NO: 1088588 - RNA, 19 nt, Homo sapiens
  misc_RNA (1)...(19): siRNA sense strand
gcaggcucauucugucugu

SEQ ID NO: 1088589 - RNA, 19 nt, Homo sapiens
  misc_RNA (1)...(19): siRNA sense strand
ugagaacgaccuaacacuu

SEQ ID NO: 1088590 - RNA, 19 nt, Homo sapiens
  misc_RNA (1)...(19): siRNA sense strand
gaaacaugaaggagcugaa

SEQ ID NO: 1088591 - RNA, 19 nt, Homo sapiens
  misc_RNA (1)...(19): siRNA sense strand
agaaggagaaggccauaga

SEQ ID NO: 1088592 - RNA, 19 nt, Homo sapiens
  misc_RNA (1)...(19): siRNA sense strand
ggugauaggacgucagauc

SEQ ID NO: 1088593 - RNA, 19 nt, Homo sapiens
  misc_RNA (1)...(19): siRNA sense strand
ugaagaggaaacuagcuaa

SEQ ID NO: 1088594 - RNA, 19 nt, Homo sapiens
  misc_RNA (1)...(19): siRNA sense strand
aggcaaauacgaccucaaa

SEQ ID NO: 1088595 - RNA, 19 nt, Homo sapiens
  misc_RNA (1)...(19): siRNA sense strand
cuacaucagccaagaauac

SEQ ID NO: 1088596 - RNA, 19 nt, Homo sapiens
  misc_RNA (1)...(19): siRNA sense strand
caaauggcuuguccaaaau

SEQ ID NO: 1088597 - RNA, 19 nt, Homo sapiens
  misc_RNA (1)...(19): siRNA sense strand
gcauaucgagcaacauugg

SEQ ID NO: 1088598 - RNA, 19 nt, Homo sapiens
  misc_RNA (1)...(19): siRNA sense strand
caaagcuuaugccaugucu

SEQ ID NO: 1088599 - RNA, 19 nt, Homo sapiens
  misc_RNA (1)...(19): siRNA sense strand
agaaaugagugcguuacug

SEQ ID NO: 1088600 - RNA, 19 nt, Homo sapiens
  misc_RNA (1)...(19): siRNA sense strand
ccccaaaacugcagaaaug

SEQ ID NO: 1088601 - RNA, 19 nt, Homo sapiens
  misc_RNA (1)...(19): siRNA sense strand
uggccuggcuccugcagaa

SEQ ID NO: 1088602 - RNA, 19 nt, Homo sapiens
  misc_RNA (1)...(19): siRNA sense strand
uggagagagugaagaggaa

SEQ ID NO: 1088603 - RNA, 19 nt, Homo sapiens
  misc_RNA (1)...(19): siRNA sense strand
acacugagcaccacugaag

SEQ ID NO: 1088604 - RNA, 19 nt, Homo sapiens
  misc_RNA (1)...(19): siRNA sense strand
ggaugcuguugagauauau

SEQ ID NO: 1088605 - RNA, 19 nt, Homo sapiens
  misc_RNA (1)...(19): siRNA sense strand
gaagucagccccaaaacug

SEQ ID NO: 1088606 - RNA, 19 nt, Homo sapiens
  misc_RNA (1)...(19): siRNA sense strand
ggagguguuugugaauuac

SEQ ID NO: 1088607 - RNA, 19 nt, Homo sapiens
  misc_RNA (1)...(19): siRNA sense strand
cuguaugucucaucccaaa

SEQ ID NO: 1088608 - RNA, 19 nt, Homo sapiens
  misc_RNA (1)...(19): siRNA sense strand
ugaauacucaagcaaacaa

SEQ ID NO: 1088609 - RNA, 19 nt, Homo sapiens
  misc_RNA (1)...(19): siRNA sense strand
acauugggcucagaggauu

SEQ ID NO: 1088610 - RNA, 19 nt, Homo sapiens
  misc_RNA (1)...(19): siRNA sense strand
acaaccaggccauccagua

SEQ ID NO: 1088611 - RNA, 19 nt, Homo sapiens
  misc_RNA (1)...(19): siRNA sense strand
gaucagccuguacgaggaa

SEQ ID NO: 1088612 - RNA, 19 nt, Homo sapiens
  misc_RNA (1)...(19): siRNA sense strand
aaggagguguuugugaauu

SEQ ID NO: 1088613 - RNA, 19 nt, Homo sapiens
  misc_RNA (1)...(19): siRNA sense strand
aaacaugaaggagcugaaa

SEQ ID NO: 1088614 - RNA, 19 nt, Homo sapiens
  misc_RNA (1)...(19): siRNA sense strand
ggagagagugaagaggaaa

SEQ ID NO: 1088615 - RNA, 19 nt, Homo sapiens
  misc_RNA (1)...(19): siRNA sense strand
uauggcuacuugacacuga

SEQ ID NO: 1088616 - RNA, 19 nt, Homo sapiens
  misc_RNA (1)...(19): siRNA sense strand
ccuggaagcucuggucaag

SEQ ID NO: 1088617 - RNA, 19 nt, Homo sapiens
  misc_RNA (1)...(19): siRNA sense strand
uggcagagaagccuauuuc

SEQ ID NO: 1088618 - RNA, 19 nt, Homo sapiens
  misc_RNA (1)...(19): siRNA sense strand
ucguggaaaugcaaaugaa

SEQ ID NO: 1088619 - RNA, 19 nt, Homo sapiens
  misc_RNA (1)...(19): siRNA sense strand
caaccaggccauccaguac

SEQ ID NO: 1088620 - RNA, 19 nt, Homo sapiens
  misc_RNA (1)...(19): siRNA sense strand
gcagaaggcagagagaaac

SEQ ID NO: 1088621 - RNA, 19 nt, Homo sapiens
  misc_RNA (1)...(19): siRNA sense strand
gccaagaauacacuguuga

SEQ ID NO: 1088622 - RNA, 19 nt, Homo sapiens
  misc_RNA (1)...(19): siRNA sense strand
gcaaaugaaaaccaccaua

SEQ ID NO: 1088623 - RNA, 19 nt, Homo sapiens
  misc_RNA (1)...(19): siRNA sense strand
uagcuaaagagaaggagaa

SEQ ID NO: 1088624 - RNA, 19 nt, Homo sapiens
  misc_RNA (1)...(19): siRNA sense strand
aaacagaugaguuguaucc

SEQ ID NO: 1088625 - RNA, 19 nt, Homo sapiens
  misc_RNA (1)...(19): siRNA sense strand
ggauuucugcuuccguaug

SEQ ID NO: 1088626 - RNA, 19 nt, Homo sapiens
  misc_RNA (1)...(19): siRNA sense strand
gaccauaaaagacaugaaa

SEQ ID NO: 1088627 - RNA, 19 nt, Homo sapiens
  misc_RNA (1)...(19): siRNA sense strand
aaacacugagcaccacuga

SEQ ID NO: 1088628 - RNA, 19 nt, Homo sapiens
  misc_RNA (1)...(19): siRNA sense strand
cagcucaccagcaaacaga

SEQ ID NO: 1088629 - RNA, 19 nt, Homo sapiens
  misc_RNA (1)...(19): siRNA sense strand
auaaaggagguguuuguga

SEQ ID NO: 1088630 - RNA, 19 nt, Homo sapiens
  misc_RNA (1)...(19): siRNA sense strand
gaggaaacuagcuaaagag

SEQ ID NO: 1088631 - RNA, 19 nt, Homo sapiens
  misc_RNA (1)...(19): siRNA sense strand
caaacaaggagcugauucg

SEQ ID NO: 1088632 - RNA, 19 nt, Homo sapiens
  misc_RNA (1)...(19): siRNA sense strand
cauuagucaucguggaaau

SEQ ID NO: 1088633 - RNA, 19 nt, Homo sapiens
  misc_RNA (1)...(19): siRNA sense strand
acaugaaggagcugaaaga

SEQ ID NO: 1088634 - RNA, 19 nt, Homo sapiens
  misc_RNA (1)...(19): siRNA sense strand
uggccaaccuagcuuaugg

SEQ ID NO: 1088635 - RNA, 19 nt, Homo sapiens
  misc_RNA (1)...(19): siRNA sense strand
gugaauuacaagucucuga

SEQ ID NO: 1088636 - RNA, 19 nt, Homo sapiens
  misc_RNA (1)...(19): siRNA sense strand
gacaucgacugggauuucu

SEQ ID NO: 1088637 - RNA, 19 nt, Homo sapiens
  misc_RNA (1)...(19): siRNA sense strand
gaaguaucaaugcauaucg

SEQ ID NO: 1088638 - RNA, 19 nt, Homo sapiens
  misc_RNA (1)...(19): siRNA sense strand
ccucagcucuucacaguca

SEQ ID NO: 1088639 - RNA, 19 nt, Homo sapiens
  misc_RNA (1)...(19): siRNA sense strand
gguguucucugcugagucu

SEQ ID NO: 1088640 - RNA, 19 nt, Homo sapiens
  misc_RNA (1)...(19): siRNA sense strand
guuaugggaucccuuucug

SEQ ID NO: 1088641 - RNA, 19 nt, Homo sapiens
  misc_RNA (1)...(19): siRNA sense strand
gaccugcuccuuccugcuu

SEQ ID NO: 1088642 - RNA, 19 nt, Homo sapiens
  misc_RNA (1)...(19): siRNA sense strand
ugccucagcucuucacagu

SEQ ID NO: 1088643 - RNA, 19 nt, Homo sapiens
  misc_RNA (1)...(19): siRNA sense strand
ucucugcugagucugguua

SEQ ID NO: 1088644 - RNA, 19 nt, Homo sapiens
  misc_RNA (1)...(19): siRNA sense strand
uaagggcacuugcaaauuu

SEQ ID NO: 1088645 - RNA, 19 nt, Homo sapiens
  misc_RNA (1)...(19): siRNA sense strand
gaaaugagccagaccugua

SEQ ID NO: 1088646 - RNA, 19 nt, Homo sapiens
  misc_RNA (1)...(19): siRNA sense strand
ugacagagcugagaauaag

SEQ ID NO: 1088647 - RNA, 19 nt, Homo sapiens
  misc_RNA (1)...(19): siRNA sense strand
ucacauguauggacaacaa

SEQ ID NO: 1088648 - RNA, 19 nt, Homo sapiens
  misc_RNA (1)...(19): siRNA sense strand
cacccuagauauaaagaua

SEQ ID NO: 1088649 - RNA, 19 nt, Homo sapiens
  misc_RNA (1)...(19): siRNA sense strand
gcaaauggaggguuuaagu

SEQ ID NO: 1088650 - RNA, 19 nt, Homo sapiens
  misc_RNA (1)...(19): siRNA sense strand
cagcgacggugauaauuau

SEQ ID NO: 1088651 - RNA, 19 nt, Homo sapiens
  misc_RNA (1)...(19): siRNA sense strand
cagauggaauucuuacuga

SEQ ID NO: 1088652 - RNA, 19 nt, Homo sapiens
  misc_RNA (1)...(19): siRNA sense strand
gagcggaccgucacaugua

SEQ ID NO: 1088653 - RNA, 19 nt, Homo sapiens
  misc_RNA (1)...(19): siRNA sense strand
ggagacacccgaaggaaga

SEQ ID NO: 1088654 - RNA, 19 nt, Homo sapiens
  misc_RNA (1)...(19): siRNA sense strand
guauggugcuaguggauaa

SEQ ID NO: 1088655 - RNA, 19 nt, Homo sapiens
  misc_RNA (1)...(19): siRNA sense strand
gguauucacacccuagaua

SEQ ID NO: 1088656 - RNA, 19 nt, Homo sapiens
  misc_RNA (1)...(19): siRNA sense strand
gagaaugguuacaugaagu

SEQ ID NO: 1088657 - RNA, 19 nt, Homo sapiens
  misc_RNA (1)...(19): siRNA sense strand
ucaaggaggauacuacaaa

SEQ ID NO: 1088658 - RNA, 19 nt, Homo sapiens
  misc_RNA (1)...(19): siRNA sense strand
cagcugcacuucuggauca

SEQ ID NO: 1088659 - RNA, 19 nt, Homo sapiens
  misc_RNA (1)...(19): siRNA sense strand
gaauaagggcacuugcaaa

SEQ ID NO: 1088660 - RNA, 19 nt, Homo sapiens
  misc_RNA (1)...(19): siRNA sense strand
guacacagucuaugacaga

SEQ ID NO: 1088661 - RNA, 19 nt, Homo sapiens
  misc_RNA (1)...(19): siRNA sense strand
gaaggaacgcauugcagaa

SEQ ID NO: 1088662 - RNA, 19 nt, Homo sapiens
  misc_RNA (1)...(19): siRNA sense strand
gauauggaaccuccuagaa

SEQ ID NO: 1088663 - RNA, 19 nt, Homo sapiens
  misc_RNA (1)...(19): siRNA sense strand
gaagagaugguccuacaag

SEQ ID NO: 1088664 - RNA, 19 nt, Homo sapiens
  misc_RNA (1)...(19): siRNA sense strand
agacacagcagauggaauu

SEQ ID NO: 1088665 - RNA, 19 nt, Homo sapiens
  misc_RNA (1)...(19): siRNA sense strand
gcagaacccaacaaacuga

SEQ ID NO: 1088666 - RNA, 19 nt, Homo sapiens
  misc_RNA (1)...(19): siRNA sense strand
gcauggcucuucccuacug

SEQ ID NO: 1088667 - RNA, 19 nt, Homo sapiens
  misc_RNA (1)...(19): siRNA sense strand
ccagcgacggugauaauua

SEQ ID NO: 1088668 - RNA, 19 nt, Homo sapiens
  misc_RNA (1)...(19): siRNA sense strand
ggaaccaggugcgacauuc

SEQ ID NO: 1088669 - RNA, 19 nt, Homo sapiens
  misc_RNA (1)...(19): siRNA sense strand
aaggucaucugcaaacaaa

SEQ ID NO: 1088670 - RNA, 19 nt, Homo sapiens
  misc_RNA (1)...(19): siRNA sense strand
uauggaaccuccuagaauc

SEQ ID NO: 1088671 - RNA, 19 nt, Homo sapiens
  misc_RNA (1)...(19): siRNA sense strand
aagaagagaugguccuaca

SEQ ID NO: 1088672 - RNA, 19 nt, Homo sapiens
  misc_RNA (1)...(19): siRNA sense strand
gcagauggaauucuuacug

SEQ ID NO: 1088673 - RNA, 19 nt, Homo sapiens
  misc_RNA (1)...(19): siRNA sense strand
gccagcaaauggaggguuu

SEQ ID NO: 1088674 - RNA, 19 nt, Homo sapiens
  misc_RNA (1)...(19): siRNA sense strand
gcaaauuucgaguuaaagu

SEQ ID NO: 1088675 - RNA, 19 nt, Homo sapiens
  misc_RNA (1)...(19): siRNA sense strand
caggauaggagcaaagauu

SEQ ID NO: 1088676 - RNA, 19 nt, Homo sapiens
  misc_RNA (1)...(19): siRNA sense strand
gaaucccacucuacuccuu

SEQ ID NO: 1088677 - RNA, 19 nt, Homo sapiens
  misc_RNA (1)...(19): siRNA sense strand
gaucugccagucaaacaaa

SEQ ID NO: 1088678 - RNA, 19 nt, Homo sapiens
  misc_RNA (1)...(19): siRNA sense strand
gauaggagcaaagauuaug

SEQ ID NO: 1088679 - RNA, 19 nt, Homo sapiens
  misc_RNA (1)...(19): siRNA sense strand
gauggugccuacuuuaacu

SEQ ID NO: 1088680 - RNA, 19 nt, Homo sapiens
  misc_RNA (1)...(19): siRNA sense strand
agaaucaagugcccaagug

SEQ ID NO: 1088681 - RNA, 19 nt, Homo sapiens
  misc_RNA (1)...(19): siRNA sense strand
gauggaauucuuacugaug

SEQ ID NO: 1088682 - RNA, 19 nt, Homo sapiens
  misc_RNA (1)...(19): siRNA sense strand
ccagagaaugguuacauga

SEQ ID NO: 1088683 - RNA, 19 nt, Homo sapiens
  misc_RNA (1)...(19): siRNA sense strand
caaauggaggguuuaagug

SEQ ID NO: 1088684 - RNA, 19 nt, Homo sapiens
  misc_RNA (1)...(19): siRNA sense strand
ggauaggagcaaagauuau

SEQ ID NO: 1088685 - RNA, 19 nt, Homo sapiens
  misc_RNA (1)...(19): siRNA sense strand
cgacggugauaauuaugga

SEQ ID NO: 1088686 - RNA, 19 nt, Homo sapiens
  misc_RNA (1)...(19): siRNA sense strand
gggagacucaccacuagaa

SEQ ID NO: 1088687 - RNA, 19 nt, Homo sapiens
  misc_RNA (1)...(19): siRNA sense strand
acuugcaaauuucgaguua

SEQ ID NO: 1088688 - RNA, 19 nt, Homo sapiens
  misc_RNA (1)...(19): siRNA sense strand
cacagcagauggaauucuu

SEQ ID NO: 1088689 - RNA, 19 nt, Homo sapiens
  misc_RNA (1)...(19): siRNA sense strand
uagauggugccuacuuuaa

SEQ ID NO: 1088690 - RNA, 19 nt, Homo sapiens
  misc_RNA (1)...(19): siRNA sense strand
ucaccaggauacacguuga

SEQ ID NO: 1088691 - RNA, 19 nt, Homo sapiens
  misc_RNA (1)...(19): siRNA sense strand
caaggaggauacuacaaaa

SEQ ID NO: 1088692 - RNA, 19 nt, Homo sapiens
  misc_RNA (1)...(19): siRNA sense strand
gcucuucccuacugaucug

SEQ ID NO: 1088693 - RNA, 19 nt, Homo sapiens
  misc_RNA (1)...(19): siRNA sense strand
aggauaggagcaaagauua

SEQ ID NO: 1088694 - RNA, 19 nt, Homo sapiens
  misc_RNA (1)...(19): siRNA sense strand
caaacgcuguggcaaacuc

SEQ ID NO: 1088695 - RNA, 19 nt, Homo sapiens
  misc_RNA (1)...(19): siRNA sense strand
gagaauaagggcacuugca

SEQ ID NO: 1088696 - RNA, 19 nt, Homo sapiens
  misc_RNA (1)...(19): siRNA sense strand
ggaagagacacagcagaug

SEQ ID NO: 1088697 - RNA, 19 nt, Homo sapiens
  misc_RNA (1)...(19): siRNA sense strand
ggauauggaaccuccuaga

SEQ ID NO: 1088698 - RNA, 19 nt, Homo sapiens
  misc_RNA (1)...(19): siRNA sense strand
agagaaugguuacaugaag

SEQ ID NO: 1088699 - RNA, 19 nt, Homo sapiens
  misc_RNA (1)...(19): siRNA sense strand
cgaguuaaaguaagaguca

SEQ ID NO: 1088700 - RNA, 19 nt, Homo sapiens
  misc_RNA (1)...(19): siRNA sense strand
agaaggagaccacaagauc

SEQ ID NO: 1088701 - RNA, 19 nt, Homo sapiens
  misc_RNA (1)...(19): siRNA sense strand
caaacaaacgauggucuga

SEQ ID NO: 1088702 - RNA, 19 nt, Homo sapiens
  misc_RNA (1)...(19): siRNA sense strand
gaacggcagcugcacuucu

SEQ ID NO: 1088703 - RNA, 19 nt, Homo sapiens
  misc_RNA (1)...(19): siRNA sense strand
cagagaaugguuacaugaa

SEQ ID NO: 1088704 - RNA, 19 nt, Homo sapiens
  misc_RNA (1)...(19): siRNA sense strand
aauaagggcacuugcaaau

SEQ ID NO: 1088705 - RNA, 19 nt, Homo sapiens
  misc_RNA (1)...(19): siRNA sense strand
aacaaacgauggucugaca

SEQ ID NO: 1088706 - RNA, 19 nt, Homo sapiens
  misc_RNA (1)...(19): siRNA sense strand
gagacucaccacuagaaga

SEQ ID NO: 1088707 - RNA, 19 nt, Homo sapiens
  misc_RNA (1)...(19): siRNA sense strand
gugcagccaugaacgucaa

SEQ ID NO: 1088708 - RNA, 19 nt, Homo sapiens
  misc_RNA (1)...(19): siRNA sense strand
gagaccacaagauccagua

SEQ ID NO: 1088709 - RNA, 19 nt, Homo sapiens
  misc_RNA (1)...(19): siRNA sense strand
ggguuuaaguguguagaug

SEQ ID NO: 1088710 - RNA, 19 nt, Homo sapiens
  misc_RNA (1)...(19): siRNA sense strand
ggugugaguauuauuguuc

SEQ ID NO: 1088711 - RNA, 19 nt, Homo sapiens
  misc_RNA (1)...(19): siRNA sense strand
aaaugagccagaccuguaa

SEQ ID NO: 1088712 - RNA, 19 nt, Homo sapiens
  misc_RNA (1)...(19): siRNA sense strand
ggagcggaccgucacaugu

SEQ ID NO: 1088713 - RNA, 19 nt, Homo sapiens
  misc_RNA (1)...(19): siRNA sense strand
guauucacacccuagauau

SEQ ID NO: 1088714 - RNA, 19 nt, Homo sapiens
  misc_RNA (1)...(19): siRNA sense strand
agaauaagggcacuugcaa

SEQ ID NO: 1088715 - RNA, 19 nt, Homo sapiens
  misc_RNA (1)...(19): siRNA sense strand
caaggucaucugcaaacaa

SEQ ID NO: 1088716 - RNA, 19 nt, Homo sapiens
  misc_RNA (1)...(19): siRNA sense strand
gaaucaagugcccaagugu

SEQ ID NO: 1088717 - RNA, 19 nt, Homo sapiens
  misc_RNA (1)...(19): siRNA sense strand
aaacaaaagcgauguccua

SEQ ID NO: 1088718 - RNA, 19 nt, Homo sapiens
  misc_RNA (1)...(19): siRNA sense strand
uaugacagagcugagaaua

SEQ ID NO: 1088719 - RNA, 19 nt, Homo sapiens
  misc_RNA (1)...(19): siRNA sense strand
ggaaccuccuagaaucaag

SEQ ID NO: 1088720 - RNA, 19 nt, Homo sapiens
  misc_RNA (1)...(19): siRNA sense strand
cagcaaauggaggguuuaa

SEQ ID NO: 1088721 - RNA, 19 nt, Homo sapiens
  misc_RNA (1)...(19): siRNA sense strand
auucacacccuagauauaa

SEQ ID NO: 1088722 - RNA, 19 nt, Homo sapiens
  misc_RNA (1)...(19): siRNA sense strand
aaauggaggguuuaagugu

SEQ ID NO: 1088723 - RNA, 19 nt, Homo sapiens
  misc_RNA (1)...(19): siRNA sense strand
gguccuacaagccgaaaug

SEQ ID NO: 1088724 - RNA, 19 nt, Homo sapiens
  misc_RNA (1)...(19): siRNA sense strand
cccagagaaugguuacaug

SEQ ID NO: 1088725 - RNA, 19 nt, Homo sapiens
  misc_RNA (1)...(19): siRNA sense strand
gauccaguacacagucuau

SEQ ID NO: 1088726 - RNA, 19 nt, Homo sapiens
  misc_RNA (1)...(19): siRNA sense strand
uauucacacccuagauaua

SEQ ID NO: 1088727 - RNA, 19 nt, Homo sapiens
  misc_RNA (1)...(19): siRNA sense strand
caaacgauggucugacaag

SEQ ID NO: 1088728 - RNA, 19 nt, Homo sapiens
  misc_RNA (1)...(19): siRNA sense strand
caaccugauugacacuuuu

SEQ ID NO: 1088729 - RNA, 19 nt, Homo sapiens
  misc_RNA (1)...(19): siRNA sense strand
acgaugaagucggguauuc

SEQ ID NO: 1088730 - RNA, 19 nt, Homo sapiens
  misc_RNA (1)...(19): siRNA sense strand
caggauacacguugaaagg

SEQ ID NO: 1088731 - RNA, 19 nt, Homo sapiens
  misc_RNA (1)...(19): siRNA sense strand
ccagaaggagaccacaaga

SEQ ID NO: 1088732 - RNA, 19 nt, Homo sapiens
  misc_RNA (1)...(19): siRNA sense strand
gucaaacgcuguggcaaac

SEQ ID NO: 1088733 - RNA, 19 nt, Homo sapiens
  misc_RNA (1)...(19): siRNA sense strand
gugugaguauuauuguuca

SEQ ID NO: 1088734 - RNA, 19 nt, Homo sapiens
  misc_RNA (1)...(19): siRNA sense strand
gacucucauuggcaggaua

SEQ ID NO: 1088735 - RNA, 19 nt, Homo sapiens
  misc_RNA (1)...(19): siRNA sense strand
ggagccaccugugaguucu

SEQ ID NO: 1088736 - RNA, 19 nt, Homo sapiens
  misc_RNA (1)...(19): siRNA sense strand
agucaaacgcuguggcaaa

SEQ ID NO: 1088737 - RNA, 19 nt, Homo sapiens
  misc_RNA (1)...(19): siRNA sense strand
gaguuaaaguaagagucaa

SEQ ID NO: 1088738 - RNA, 19 nt, Homo sapiens
  misc_RNA (1)...(19): siRNA sense strand
ggaauucuuacugauguca

SEQ ID NO: 1088739 - RNA, 19 nt, Homo sapiens
  misc_RNA (1)...(19): siRNA sense strand
gacaaggucaucugcaaac

SEQ ID NO: 1088740 - RNA, 19 nt, Homo sapiens
  misc_RNA (1)...(19): siRNA sense strand
gaaccuccuagaaucaagu

SEQ ID NO: 1088741 - RNA, 19 nt, Homo sapiens
  misc_RNA (1)...(19): siRNA sense strand
ucgggagacucaccacuag

SEQ ID NO: 1088742 - RNA, 19 nt, Homo sapiens
  misc_RNA (1)...(19): siRNA sense strand
gggaaccaggugcgacauu

SEQ ID NO: 1088743 - RNA, 19 nt, Homo sapiens
  misc_RNA (1)...(19): siRNA sense strand
cugcacuucuggaucaguu

SEQ ID NO: 1088744 - RNA, 19 nt, Homo sapiens
  misc_RNA (1)...(19): siRNA sense strand
gacaagauauggaaacaga

SEQ ID NO: 1088745 - RNA, 19 nt, Homo sapiens
  misc_RNA (1)...(19): siRNA sense strand
caaaggaauuuacaaagga

SEQ ID NO: 1088746 - RNA, 19 nt, Homo sapiens
  misc_RNA (1)...(19): siRNA sense strand
ggauggaacauacaaauuu

SEQ ID NO: 1088747 - RNA, 19 nt, Homo sapiens
  misc_RNA (1)...(19): siRNA sense strand
gagauuacaggaccagaua

SEQ ID NO: 1088748 - RNA, 19 nt, Homo sapiens
  misc_RNA (1)...(19): siRNA sense strand
gaacaagcuagaagaaaug

SEQ ID NO: 1088749 - RNA, 19 nt, Homo sapiens
  misc_RNA (1)...(19): siRNA sense strand
ucacauggauggaacauac

SEQ ID NO: 1088750 - RNA, 19 nt, Homo sapiens
  misc_RNA (1)...(19): siRNA sense strand
ggacaucgacguggagauu

SEQ ID NO: 1088751 - RNA, 19 nt, Homo sapiens
  misc_RNA (1)...(19): siRNA sense strand
agaacaagcuagaagaaau

SEQ ID NO: 1088752 - RNA, 19 nt, Homo sapiens
  misc_RNA (1)...(19): siRNA sense strand
gagaauccagugggaaaua

SEQ ID NO: 1088753 - RNA, 19 nt, Homo sapiens
  misc_RNA (1)...(19): siRNA sense strand
ucuacuaccugaagagauu

SEQ ID NO: 1088754 - RNA, 19 nt, Homo sapiens
  misc_RNA (1)...(19): siRNA sense strand
gcacgaacaggaauacaug

SEQ ID NO: 1088755 - RNA, 19 nt, Homo sapiens
  misc_RNA (1)...(19): siRNA sense strand
aaacagaagcucaccagaa

SEQ ID NO: 1088756 - RNA, 19 nt, Homo sapiens
  misc_RNA (1)...(19): siRNA sense strand
ccagauaacaaaggaauuu

SEQ ID NO: 1088757 - RNA, 19 nt, Homo sapiens
  misc_RNA (1)...(19): siRNA sense strand
acaaaggaauuuacaaagg

SEQ ID NO: 1088758 - RNA, 19 nt, Homo sapiens
  misc_RNA (1)...(19): siRNA sense strand
gauguucaccauugauauu

SEQ ID NO: 1088759 - RNA, 19 nt, Homo sapiens
  misc_RNA (1)...(19): siRNA sense strand
cuuugaagcucuuguucua

SEQ ID NO: 1088760 - RNA, 19 nt, Homo sapiens
  misc_RNA (1)...(19): siRNA sense strand
uuacaaaggagacagagaa

SEQ ID NO: 1088761 - RNA, 19 nt, Homo sapiens
  misc_RNA (1)...(19): siRNA sense strand
ggaaguccgggagagaaua

SEQ ID NO: 1088762 - RNA, 19 nt, Homo sapiens
  misc_RNA (1)...(19): siRNA sense strand
cacauuugcugcucacaug

SEQ ID NO: 1088763 - RNA, 19 nt, Homo sapiens
  misc_RNA (1)...(19): siRNA sense strand
uaaagcacgaacaggaaua

SEQ ID NO: 1088764 - RNA, 19 nt, Homo sapiens
  misc_RNA (1)...(19): siRNA sense strand
gaaguccggagaguuguuu

SEQ ID NO: 1088765 - RNA, 19 nt, Homo sapiens
  misc_RNA (1)...(19): siRNA sense strand
cagagaauccagugggaaa

SEQ ID NO: 1088766 - RNA, 19 nt, Homo sapiens
  misc_RNA (1)...(19): siRNA sense strand
ccagaacaagcuagaagaa

SEQ ID NO: 1088767 - RNA, 19 nt, Homo sapiens
  misc_RNA (1)...(19): siRNA sense strand
aaccggauguccaccauga

SEQ ID NO: 1088768 - RNA, 19 nt, Homo sapiens
  misc_RNA (1)...(19): siRNA sense strand
gaccagauaacaaaggaau

SEQ ID NO: 1088769 - RNA, 19 nt, Homo sapiens
  misc_RNA (1)...(19): siRNA sense strand
gccaugacauugggacaga

SEQ ID NO: 1088770 - RNA, 19 nt, Homo sapiens
  misc_RNA (1)...(19): siRNA sense strand
acagagccaucaacgacaa

SEQ ID NO: 1088771 - RNA, 19 nt, Homo sapiens
  misc_RNA (1)...(19): siRNA sense strand
cagaagcucaccagaacaa

SEQ ID NO: 1088772 - RNA, 19 nt, Homo sapiens
  misc_RNA (1)...(19): siRNA sense strand
gcaccaagaugggccucau

SEQ ID NO: 1088773 - RNA, 19 nt, Homo sapiens
  misc_RNA (1)...(19): siRNA sense strand
caagcuagaagaaaugauc

SEQ ID NO: 1088774 - RNA, 19 nt, Homo sapiens
  misc_RNA (1)...(19): siRNA sense strand
aacagaagcucaccagaac

SEQ ID NO: 1088775 - RNA, 19 nt, Homo sapiens
  misc_RNA (1)...(19): siRNA sense strand
caaaggagacagagaaucc

SEQ ID NO: 1088776 - RNA, 19 nt, Homo sapiens
  misc_RNA (1)...(19): siRNA sense strand
gaagcucuuguucuaguug

SEQ ID NO: 1088777 - RNA, 19 nt, Homo sapiens
  misc_RNA (1)...(19): siRNA sense strand
caucgacgcccaugcugaa

SEQ ID NO: 1088778 - RNA, 19 nt, Homo sapiens
  misc_RNA (1)...(19): siRNA sense strand
uacaggaccagauaacaaa

SEQ ID NO: 1088779 - RNA, 19 nt, Homo sapiens
  misc_RNA (1)...(19): siRNA sense strand
guaaagcacgaacaggaau

SEQ ID NO: 1088780 - RNA, 19 nt, Homo sapiens
  misc_RNA (1)...(19): siRNA sense strand
gacaucgacguggagauua

SEQ ID NO: 1088781 - RNA, 19 nt, Homo sapiens
  misc_RNA (1)...(19): siRNA sense strand
cagaacaagcuagaagaaa

SEQ ID NO: 1088782 - RNA, 19 nt, Homo sapiens
  misc_RNA (1)...(19): siRNA sense strand
uuacaggaccagauaacaa

SEQ ID NO: 1088783 - RNA, 19 nt, Homo sapiens
  misc_RNA (1)...(19): siRNA sense strand
caagauauggaaacagaag

SEQ ID NO: 1088784 - RNA, 19 nt, Homo sapiens
  misc_RNA (1)...(19): siRNA sense strand
ggagauuacaggaccagau

SEQ ID NO: 1088785 - RNA, 19 nt, Homo sapiens
  misc_RNA (1)...(19): siRNA sense strand
gaucuacuaccugaagaga

SEQ ID NO: 1088786 - RNA, 19 nt, Homo sapiens
  misc_RNA (1)...(19): siRNA sense strand
gucucgggcuauuucguua

SEQ ID NO: 1088787 - RNA, 19 nt, Homo sapiens
  misc_RNA (1)...(19): siRNA sense strand
cgaacaggaauacauggaa

SEQ ID NO: 1088788 - RNA, 19 nt, Homo sapiens
  misc_RNA (1)...(19): siRNA sense strand
ggucucgggcuauuucguu

SEQ ID NO: 1088789 - RNA, 19 nt, Homo sapiens
  misc_RNA (1)...(19): siRNA sense strand
ugaagcucuuguucuaguu

SEQ ID NO: 1088790 - RNA, 19 nt, Homo sapiens
  misc_RNA (1)...(19): siRNA sense strand
guaaccggauguccaccau

SEQ ID NO: 1088791 - RNA, 19 nt, Homo sapiens
  misc_RNA (1)...(19): siRNA sense strand
cagaucuacuaccugaaga

SEQ ID NO: 1088792 - RNA, 19 nt, Homo sapiens
  misc_RNA (1)...(19): siRNA sense strand
guccuuugguccuucuuug

SEQ ID NO: 1088793 - RNA, 19 nt, Homo sapiens
  misc_RNA (1)...(19): siRNA sense strand
ccagugggaaauacacauu

SEQ ID NO: 1088794 - RNA, 19 nt, Homo sapiens
  misc_RNA (1)...(19): siRNA sense strand
uugaagcucuuguucuagu

SEQ ID NO: 1088795 - RNA, 19 nt, Homo sapiens
  misc_RNA (1)...(19): siRNA sense strand
gaauacacagagccaucaa

SEQ ID NO: 1088796 - RNA, 19 nt, Homo sapiens
  misc_RNA (1)...(19): siRNA sense strand
cgacgcccaugcugaagag

SEQ ID NO: 1088797 - RNA, 19 nt, Homo sapiens
  misc_RNA (1)...(19): siRNA sense strand
cuagaagaaaugaucaaug

SEQ ID NO: 1088798 - RNA, 19 nt, Homo sapiens
  misc_RNA (1)...(19): siRNA sense strand
gaaguccgggagagaauac

SEQ ID NO: 1088799 - RNA, 19 nt, Homo sapiens
  misc_RNA (1)...(19): siRNA sense strand
agaaaugaucaaugagcua

SEQ ID NO: 1088800 - RNA, 19 nt, Homo sapiens
  misc_RNA (1)...(19): siRNA sense strand
gcuagaagaaaugaucaau

SEQ ID NO: 1088801 - RNA, 19 nt, Homo sapiens
  misc_RNA (1)...(19): siRNA sense strand
uguaaagcacgaacaggaa

SEQ ID NO: 1088802 - RNA, 19 nt, Homo sapiens
  misc_RNA (1)...(19): siRNA sense strand
cauugggacagaucuacua

SEQ ID NO: 1088803 - RNA, 19 nt, Homo sapiens
  misc_RNA (1)...(19): siRNA sense strand
uggauggaacauacaaauu

SEQ ID NO: 1088804 - RNA, 19 nt, Homo sapiens
  misc_RNA (1)...(19): siRNA sense strand
ugacauugggacagaucua

SEQ ID NO: 1088805 - RNA, 19 nt, Homo sapiens
  misc_RNA (1)...(19): siRNA sense strand
uguccaccaugacuccaaa

SEQ ID NO: 1088806 - RNA, 19 nt, Homo sapiens
  misc_RNA (1)...(19): siRNA sense strand
acagcagagugguccuuug

SEQ ID NO: 1088807 - RNA, 19 nt, Homo sapiens
  misc_RNA (1)...(19): siRNA sense strand
gagcuagcaguggcgauga

SEQ ID NO: 1088808 - RNA, 19 nt, Homo sapiens
  misc_RNA (1)...(19): siRNA sense strand
ggugacgcuugcugaacug

SEQ ID NO: 1088809 - RNA, 19 nt, Homo sapiens
  misc_RNA (1)...(19): siRNA sense strand
cagcagagugguccuuugg

SEQ ID NO: 1088810 - RNA, 19 nt, Homo sapiens
  misc_RNA (1)...(19): siRNA sense strand
gccacggucucgggcuauu

SEQ ID NO: 1088811 - RNA, 19 nt, Homo sapiens
  misc_RNA (1)...(19): siRNA sense strand
caucaacgacaacacaaac

SEQ ID NO: 1088812 - RNA, 19 nt, Homo sapiens
  misc_RNA (1)...(19): siRNA sense strand
ccaucaacgacaacacaaa

SEQ ID NO: 1088813 - RNA, 19 nt, Homo sapiens
  misc_RNA (1)...(19): siRNA sense strand
gaaccaaaguccagaagaa

SEQ ID NO: 1088814 - RNA, 19 nt, Homo sapiens
  misc_RNA (1)...(19): siRNA sense strand
gggagaagcuggccaagca

SEQ ID NO: 1088815 - RNA, 19 nt, Homo sapiens
  misc_RNA (1)...(19): siRNA sense strand
gacacuggcuccaaggaaa

SEQ ID NO: 1088816 - RNA, 19 nt, Homo sapiens
  misc_RNA (1)...(19): siRNA sense strand
cggcgaggcccaagaaaua

SEQ ID NO: 1088817 - RNA, 19 nt, Homo sapiens
  misc_RNA (1)...(19): siRNA sense strand
gaaaagcgaugccgauucu

SEQ ID NO: 1088818 - RNA, 19 nt, Homo sapiens
  misc_RNA (1)...(19): siRNA sense strand
caaagaagagaaccaaagu

SEQ ID NO: 1088819 - RNA, 19 nt, Homo sapiens
  misc_RNA (1)...(19): siRNA sense strand
ccucaacccuucugcaaca

SEQ ID NO: 1088820 - RNA, 19 nt, Homo sapiens
  misc_RNA (1)...(19): siRNA sense strand
ugccggagcuuccuacaau

SEQ ID NO: 1088821 - RNA, 19 nt, Homo sapiens
  misc_RNA (1)...(19): siRNA sense strand
cacgagcgguggcuuguug

SEQ ID NO: 1088822 - RNA, 19 nt, Homo sapiens
  misc_RNA (1)...(19): siRNA sense strand
ggacacuggcuccaaggaa

SEQ ID NO: 1088823 - RNA, 19 nt, Homo sapiens
  misc_RNA (1)...(19): siRNA sense strand
uccgugagauccaguugua

SEQ ID NO: 1088824 - RNA, 19 nt, Homo sapiens
  misc_RNA (1)...(19): siRNA sense strand
gagcagaccaagaagaaag

SEQ ID NO: 1088825 - RNA, 19 nt, Homo sapiens
  misc_RNA (1)...(19): siRNA sense strand
cagcacgccugcacaccaa

SEQ ID NO: 1088826 - RNA, 19 nt, Homo sapiens
  misc_RNA (1)...(19): siRNA sense strand
agagagagccaaguucaaa

SEQ ID NO: 1088827 - RNA, 19 nt, Homo sapiens
  misc_RNA (1)...(19): siRNA sense strand
cgagagagagccaaguuca

SEQ ID NO: 1088828 - RNA, 19 nt, Homo sapiens
  misc_RNA (1)...(19): siRNA sense strand
gagagagagccaaguucaa

SEQ ID NO: 1088829 - RNA, 19 nt, Homo sapiens
  misc_RNA (1)...(19): siRNA sense strand
aggugaagcugguggagaa

SEQ ID NO: 1088830 - RNA, 19 nt, Homo sapiens
  misc_RNA (1)...(19): siRNA sense strand
ugacaaagaagagaaccaa

SEQ ID NO: 1088831 - RNA, 19 nt, Homo sapiens
  misc_RNA (1)...(19): siRNA sense strand
gcaaguacaaggugaagcu

SEQ ID NO: 1088832 - RNA, 19 nt, Homo sapiens
  misc_RNA (1)...(19): siRNA sense strand
uacaauccauccuuugaag

SEQ ID NO: 1088833 - RNA, 19 nt, Homo sapiens
  misc_RNA (1)...(19): siRNA sense strand
cgagaacacauccaaaguc

SEQ ID NO: 1088834 - RNA, 19 nt, Homo sapiens
  misc_RNA (1)...(19): siRNA sense strand
gcgguggcuuguugucaga

SEQ ID NO: 1088835 - RNA, 19 nt, Homo sapiens
  misc_RNA (1)...(19): siRNA sense strand
gagaccgguucaagagcuu

SEQ ID NO: 1088836 - RNA, 19 nt, Homo sapiens
  misc_RNA (1)...(19): siRNA sense strand
ccuacaauccauccuuuga

SEQ ID NO: 1088837 - RNA, 19 nt, Homo sapiens
  misc_RNA (1)...(19): siRNA sense strand
cuacaauccauccuuugaa

SEQ ID NO: 1088838 - RNA, 19 nt, Homo sapiens
  misc_RNA (1)...(19): siRNA sense strand
gcgaugccgauucugguuu

SEQ ID NO: 1088839 - RNA, 19 nt, Homo sapiens
  misc_RNA (1)...(19): siRNA sense strand
caagaagaaaggagugaag

SEQ ID NO: 1088840 - RNA, 19 nt, Homo sapiens
  misc_RNA (1)...(19): siRNA sense strand
acaaagaagagaaccaaag

SEQ ID NO: 1088841 - RNA, 19 nt, Homo sapiens
  misc_RNA (1)...(19): siRNA sense strand
gacaaagaagagaaccaaa

SEQ ID NO: 1088842 - RNA, 19 nt, Homo sapiens
  misc_RNA (1)...(19): siRNA sense strand
ccaaaguccagaagaaguc

SEQ ID NO: 1088843 - RNA, 19 nt, Homo sapiens
  misc_RNA (1)...(19): siRNA sense strand
ggcgaggcccaagaaauaa

SEQ ID NO: 1088844 - RNA, 19 nt, Homo sapiens
  misc_RNA (1)...(19): siRNA sense strand
ggagcagaccaagaagaaa

SEQ ID NO: 1088845 - RNA, 19 nt, Homo sapiens
  misc_RNA (1)...(19): siRNA sense strand
uggagcagaccaagaagaa

SEQ ID NO: 1088846 - RNA, 19 nt, Homo sapiens
  misc_RNA (1)...(19): siRNA sense strand
ccacccaggaguccacauu

SEQ ID NO: 1088847 - RNA, 19 nt, Homo sapiens
  misc_RNA (1)...(19): siRNA sense strand
cgaugccgauucugguuuc

SEQ ID NO: 1088848 - RNA, 19 nt, Homo sapiens
  misc_RNA (1)...(19): siRNA sense strand
gggcugacaaagaagagaa

SEQ ID NO: 1088849 - RNA, 19 nt, Homo sapiens
  misc_RNA (1)...(19): siRNA sense strand
ggcagaaggaggcggagaa

SEQ ID NO: 1088850 - RNA, 19 nt, Homo sapiens
  misc_RNA (1)...(19): siRNA sense strand
ggagcuuccuacaauccau

SEQ ID NO: 1088851 - RNA, 19 nt, Homo sapiens
  misc_RNA (1)...(19): siRNA sense strand
gggaagcgcagcucgaaaa

SEQ ID NO: 1088852 - RNA, 19 nt, Homo sapiens
  misc_RNA (1)...(19): siRNA sense strand
uuccuacaauccauccuuu

SEQ ID NO: 1088853 - RNA, 19 nt, Homo sapiens
  misc_RNA (1)...(19): siRNA sense strand
ccagaagaagucacugcuu

SEQ ID NO: 1088854 - RNA, 19 nt, Homo sapiens
  misc_RNA (1)...(19): siRNA sense strand
gcggcgaggcccaagaaau

SEQ ID NO: 1088855 - RNA, 19 nt, Homo sapiens
  misc_RNA (1)...(19): siRNA sense strand
gagaaccaaaguccagaag

SEQ ID NO: 1088856 - RNA, 19 nt, Homo sapiens
  misc_RNA (1)...(19): siRNA sense strand
caaguucaaacgcaaguac

SEQ ID NO: 1088857 - RNA, 19 nt, Homo sapiens
  misc_RNA (1)...(19): siRNA sense strand
ccaagaagaaaggagugaa

SEQ ID NO: 1088858 - RNA, 19 nt, Homo sapiens
  misc_RNA (1)...(19): siRNA sense strand
ugucagaggccccaaauga

SEQ ID NO: 1088859 - RNA, 19 nt, Homo sapiens
  misc_RNA (1)...(19): siRNA sense strand
gcagaaggaggcggagaag

SEQ ID NO: 1088860 - RNA, 19 nt, Homo sapiens
  misc_RNA (1)...(19): siRNA sense strand
gcacgagcgguggcuuguu

SEQ ID NO: 1088861 - RNA, 19 nt, Homo sapiens
  misc_RNA (1)...(19): siRNA sense strand
gcaaugaucuuccuguuug

SEQ ID NO: 1088862 - RNA, 19 nt, Homo sapiens
  misc_RNA (1)...(19): siRNA sense strand
caaagagacucagaaguua

SEQ ID NO: 1088863 - RNA, 19 nt, Homo sapiens
  misc_RNA (1)...(19): siRNA sense strand
gagaauauauggaacaaca

SEQ ID NO: 1088864 - RNA, 19 nt, Homo sapiens
  misc_RNA (1)...(19): siRNA sense strand
gaauuaacguugccuuguu

SEQ ID NO: 1088865 - RNA, 19 nt, Homo sapiens
  misc_RNA (1)...(19): siRNA sense strand
caagauaccaccauaagaa

SEQ ID NO: 1088866 - RNA, 19 nt, Homo sapiens
  misc_RNA (1)...(19): siRNA sense strand
gugagaagguggaggagua

SEQ ID NO: 1088867 - RNA, 19 nt, Homo sapiens
  misc_RNA (1)...(19): siRNA sense strand
ggagauaaaugagccauca

SEQ ID NO: 1088868 - RNA, 19 nt, Homo sapiens
  misc_RNA (1)...(19): siRNA sense strand
acagauagcugcaaugauc

SEQ ID NO: 1088869 - RNA, 19 nt, Homo sapiens
  misc_RNA (1)...(19): siRNA sense strand
gcuacuauccguuauuuaa

SEQ ID NO: 1088870 - RNA, 19 nt, Homo sapiens
  misc_RNA (1)...(19): siRNA sense strand
gggauaagccggugucuga

SEQ ID NO: 1088871 - RNA, 19 nt, Homo sapiens
  misc_RNA (1)...(19): siRNA sense strand
caagcgaccugcccuauca

SEQ ID NO: 1088872 - RNA, 19 nt, Homo sapiens
  misc_RNA (1)...(19): siRNA sense strand
gaacauacagugagaaggu

SEQ ID NO: 1088873 - RNA, 19 nt, Homo sapiens
  misc_RNA (1)...(19): siRNA sense strand
acaaagagacucagaaguu

SEQ ID NO: 1088874 - RNA, 19 nt, Homo sapiens
  misc_RNA (1)...(19): siRNA sense strand
caacuuguuuggauauuca

SEQ ID NO: 1088875 - RNA, 19 nt, Homo sapiens
  misc_RNA (1)...(19): siRNA sense strand
gaacaacaggagauaaaug

SEQ ID NO: 1088876 - RNA, 19 nt, Homo sapiens
  misc_RNA (1)...(19): siRNA sense strand
ggacagauagcugcaauga

SEQ ID NO: 1088877 - RNA, 19 nt, Homo sapiens
  misc_RNA (1)...(19): siRNA sense strand
gguagaaggaggacagaua

SEQ ID NO: 1088878 - RNA, 19 nt, Homo sapiens
  misc_RNA (1)...(19): siRNA sense strand
cagcuuacauucacaagga

SEQ ID NO: 1088879 - RNA, 19 nt, Homo sapiens
  misc_RNA (1)...(19): siRNA sense strand
gauaagccggugucugaua

SEQ ID NO: 1088880 - RNA, 19 nt, Homo sapiens
  misc_RNA (1)...(19): siRNA sense strand
gaucaccaccauuauuauu

SEQ ID NO: 1088881 - RNA, 19 nt, Homo sapiens
  misc_RNA (1)...(19): siRNA sense strand
ggaggaguauaaccugaga

SEQ ID NO: 1088882 - RNA, 19 nt, Homo sapiens
  misc_RNA (1)...(19): siRNA sense strand
aacguugccuuguuuauuu

SEQ ID NO: 1088883 - RNA, 19 nt, Homo sapiens
  misc_RNA (1)...(19): siRNA sense strand
cacaaacaguucgaacaua

SEQ ID NO: 1088884 - RNA, 19 nt, Homo sapiens
  misc_RNA (1)...(19): siRNA sense strand
aaugaaaccugaacuacug

SEQ ID NO: 1088885 - RNA, 19 nt, Homo sapiens
  misc_RNA (1)...(19): siRNA sense strand
gcuuggaucaccaccauua

SEQ ID NO: 1088886 - RNA, 19 nt, Homo sapiens
  misc_RNA (1)...(19): siRNA sense strand
ggagacauagagaauauau

SEQ ID NO: 1088887 - RNA, 19 nt, Homo sapiens
  misc_RNA (1)...(19): siRNA sense strand
gggaggcguugguggauug

SEQ ID NO: 1088888 - RNA, 19 nt, Homo sapiens
  misc_RNA (1)...(19): siRNA sense strand
uggaucaccaccauuauua

SEQ ID NO: 1088889 - RNA, 19 nt, Homo sapiens
  misc_RNA (1)...(19): siRNA sense strand
gaggacagauagcugcaau

SEQ ID NO: 1088890 - RNA, 19 nt, Homo sapiens
  misc_RNA (1)...(19): siRNA sense strand
cuacucaagugacacagaa

SEQ ID NO: 1088891 - RNA, 19 nt, Homo sapiens
  misc_RNA (1)...(19): siRNA sense strand
acucgugguugcuggauua

SEQ ID NO: 1088892 - RNA, 19 nt, Homo sapiens
  misc_RNA (1)...(19): siRNA sense strand
acaaacaguucgaacauac

SEQ ID NO: 1088893 - RNA, 19 nt, Homo sapiens
  misc_RNA (1)...(19): siRNA sense strand
ccagaucucaaaccaguaa

SEQ ID NO: 1088894 - RNA, 19 nt, Homo sapiens
  misc_RNA (1)...(19): siRNA sense strand
ucggagacauagagaauau

SEQ ID NO: 1088895 - RNA, 19 nt, Homo sapiens
  misc_RNA (1)...(19): siRNA sense strand
uaacguugccuuguuuauu

SEQ ID NO: 1088896 - RNA, 19 nt, Homo sapiens
  misc_RNA (1)...(19): siRNA sense strand
gagauacuccuacaugaag

SEQ ID NO: 1088897 - RNA, 19 nt, Homo sapiens
  misc_RNA (1)...(19): siRNA sense strand
guucgaacauacagugaga

SEQ ID NO: 1088898 - RNA, 19 nt, Homo sapiens
  misc_RNA (1)...(19): siRNA sense strand
aauuaacguugccuuguuu

SEQ ID NO: 1088899 - RNA, 19 nt, Homo sapiens
  misc_RNA (1)...(19): siRNA sense strand
ccauucuucuggacucuaa

SEQ ID NO: 1088900 - RNA, 19 nt, Homo sapiens
  misc_RNA (1)...(19): siRNA sense strand
ggaauuaacguugccuugu

SEQ ID NO: 1088901 - RNA, 19 nt, Homo sapiens
  misc_RNA (1)...(19): siRNA sense strand
ccaccagccucuccagcaa

SEQ ID NO: 1088902 - RNA, 19 nt, Homo sapiens
  misc_RNA (1)...(19): siRNA sense strand
gagacucagaaguuaauuu

SEQ ID NO: 1088903 - RNA, 19 nt, Homo sapiens
  misc_RNA (1)...(19): siRNA sense strand
cacagaagaaccagcuaua

SEQ ID NO: 1088904 - RNA, 19 nt, Homo sapiens
  misc_RNA (1)...(19): siRNA sense strand
gcccagacuucuacucaag

SEQ ID NO: 1088905 - RNA, 19 nt, Homo sapiens
  misc_RNA (1)...(19): siRNA sense strand
aaagagacucagaaguuaa

SEQ ID NO: 1088906 - RNA, 19 nt, Homo sapiens
  misc_RNA (1)...(19): siRNA sense strand
gcucggagacauagagaau

SEQ ID NO: 1088907 - RNA, 19 nt, Homo sapiens
  misc_RNA (1)...(19): siRNA sense strand
guagaaggaggacagauag

SEQ ID NO: 1088908 - RNA, 19 nt, Homo sapiens
  misc_RNA (1)...(19): siRNA sense strand
ggauugggcaguauguaug

SEQ ID NO: 1088909 - RNA, 19 nt, Homo sapiens
  misc_RNA (1)...(19): siRNA sense strand
ggaacaacaggagauaaau

SEQ ID NO: 1088910 - RNA, 19 nt, Homo sapiens
  misc_RNA (1)...(19): siRNA sense strand
cugcuacuauccguuauuu

SEQ ID NO: 1088911 - RNA, 19 nt, Homo sapiens
  misc_RNA (1)...(19): siRNA sense strand
auaagccggugucugauau

SEQ ID NO: 1088912 - RNA, 19 nt, Homo sapiens
  misc_RNA (1)...(19): siRNA sense strand
ccucugcuacuauccguua

SEQ ID NO: 1088913 - RNA, 19 nt, Homo sapiens
  misc_RNA (1)...(19): siRNA sense strand
guugguggauugggcagua

SEQ ID NO: 1088914 - RNA, 19 nt, Homo sapiens
  misc_RNA (1)...(19): siRNA sense strand
acaaggacagugaguggua

SEQ ID NO: 1088915 - RNA, 19 nt, Homo sapiens
  misc_RNA (1)...(19): siRNA sense strand
ugagauacuccuacaugaa

SEQ ID NO: 1088916 - RNA, 19 nt, Homo sapiens
  misc_RNA (1)...(19): siRNA sense strand
cugagauacuccuacauga

SEQ ID NO: 1088917 - RNA, 19 nt, Homo sapiens
  misc_RNA (1)...(19): siRNA sense strand
cgacacacacaaacaguuc

SEQ ID NO: 1088918 - RNA, 19 nt, Homo sapiens
  misc_RNA (1)...(19): siRNA sense strand
aacaacaggagauaaauga

SEQ ID NO: 1088919 - RNA, 19 nt, Homo sapiens
  misc_RNA (1)...(19): siRNA sense strand
gggacaggcgcuacgauga

SEQ ID NO: 1088920 - RNA, 19 nt, Homo sapiens
  misc_RNA (1)...(19): siRNA sense strand
ucaccaccauuauuauucu

SEQ ID NO: 1088921 - RNA, 19 nt, Homo sapiens
  misc_RNA (1)...(19): siRNA sense strand
agaagguggaggaguauaa

SEQ ID NO: 1088922 - RNA, 19 nt, Homo sapiens
  misc_RNA (1)...(19): siRNA sense strand
ccucaacuccugcaaagau

SEQ ID NO: 1088923 - RNA, 19 nt, Homo sapiens
  misc_RNA (1)...(19): siRNA sense strand
uggaacaacaggagauaaa

SEQ ID NO: 1088924 - RNA, 19 nt, Homo sapiens
  misc_RNA (1)...(19): siRNA sense strand
ggacaggcgcuacgaugag

SEQ ID NO: 1088925 - RNA, 19 nt, Homo sapiens
  misc_RNA (1)...(19): siRNA sense strand
gauauucacaaccguaugg

SEQ ID NO: 1088926 - RNA, 19 nt, Homo sapiens
  misc_RNA (1)...(19): siRNA sense strand
ucucauuagugcuuugguu

SEQ ID NO: 1088927 - RNA, 19 nt, Homo sapiens
  misc_RNA (1)...(19): siRNA sense strand
ccgauggaguggaguguuc

SEQ ID NO: 1088928 - RNA, 19 nt, Homo sapiens
  misc_RNA (1)...(19): siRNA sense strand
agacucagaaguuaauuuc

SEQ ID NO: 1088929 - RNA, 19 nt, Homo sapiens
  misc_RNA (1)...(19): siRNA sense strand
ggaucaccaccauuauuau

SEQ ID NO: 1088930 - RNA, 19 nt, Homo sapiens
  misc_RNA (1)...(19): siRNA sense strand
uuacuacacuggcccuaag

SEQ ID NO: 1088931 - RNA, 19 nt, Homo sapiens
  misc_RNA (1)...(19): siRNA sense strand
gacagugagugguacaacu

SEQ ID NO: 1088932 - RNA, 19 nt, Homo sapiens
  misc_RNA (1)...(19): siRNA sense strand
ucaagauaccaccauaaga

SEQ ID NO: 1088933 - RNA, 19 nt, Homo sapiens
  misc_RNA (1)...(19): siRNA sense strand
cgaccugcccuaucaagau

SEQ ID NO: 1088934 - RNA, 19 nt, Homo sapiens
  misc_RNA (1)...(19): siRNA sense strand
ugacagacaaagagacuca

SEQ ID NO: 1088935 - RNA, 19 nt, Homo sapiens
  misc_RNA (1)...(19): siRNA sense strand
uagcuuggaucaccaccau

SEQ ID NO: 1088936 - RNA, 19 nt, Homo sapiens
  misc_RNA (1)...(19): siRNA sense strand
ugucacagcuuacauucac

SEQ ID NO: 1088937 - RNA, 19 nt, Homo sapiens
  misc_RNA (1)...(19): siRNA sense strand
aggaguauaaccugagaua

SEQ ID NO: 1088938 - RNA, 19 nt, Homo sapiens
  misc_RNA (1)...(19): siRNA sense strand
acacaaacaguucgaacau

SEQ ID NO: 1088939 - RNA, 19 nt, Homo sapiens
  misc_RNA (1)...(19): siRNA sense strand
gaacuacugaguggacaca

SEQ ID NO: 1088940 - RNA, 19 nt, Homo sapiens
  misc_RNA (1)...(19): siRNA sense strand
ccugagauacuccuacaug

SEQ ID NO: 1088941 - RNA, 19 nt, Homo sapiens
  misc_RNA (1)...(19): siRNA sense strand
gucccugacuccuggaaga

SEQ ID NO: 1088942 - RNA, 19 nt, Homo sapiens
  misc_RNA (1)...(19): siRNA sense strand
uagccaggaugaucucgau

SEQ ID NO: 1088943 - RNA, 19 nt, Homo sapiens
  misc_RNA (1)...(19): siRNA sense strand
gugcuuugguuugccuaaa

SEQ ID NO: 1088944 - RNA, 19 nt, Homo sapiens
  misc_RNA (1)...(19): siRNA sense strand
cugcaaugaucuuccuguu

SEQ ID NO: 1088945 - RNA, 19 nt, Homo sapiens
  misc_RNA (1)...(19): siRNA sense strand
ggcccagacuucuacucaa

SEQ ID NO: 1088946 - RNA, 19 nt, Homo sapiens
  misc_RNA (1)...(19): siRNA sense strand
gagaagguggaggaguaua

SEQ ID NO: 1088947 - RNA, 19 nt, Homo sapiens
  misc_RNA (1)...(19): siRNA sense strand
caaugaucuuccuguuugu

SEQ ID NO: 1088948 - RNA, 19 nt, Homo sapiens
  misc_RNA (1)...(19): siRNA sense strand
gguggccucugcuacuauc

SEQ ID NO: 1088949 - RNA, 19 nt, Homo sapiens
  misc_RNA (1)...(19): siRNA sense strand
agacaaagagacucagaag

SEQ ID NO: 1088950 - RNA, 19 nt, Homo sapiens
  misc_RNA (1)...(19): siRNA sense strand
gagccaucauugucaucga

SEQ ID NO: 1088951 - RNA, 19 nt, Homo sapiens
  misc_RNA (1)...(19): siRNA sense strand
gaggcagcucggagacaua

SEQ ID NO: 1088952 - RNA, 19 nt, Homo sapiens
  misc_RNA (1)...(19): siRNA sense strand
cuucuggacucuaauuggu

SEQ ID NO: 1088953 - RNA, 19 nt, Homo sapiens
  misc_RNA (1)...(19): siRNA sense strand
cagaaguuaauuucaagga

SEQ ID NO: 1088954 - RNA, 19 nt, Homo sapiens
  misc_RNA (1)...(19): siRNA sense strand
gacaaagagacucagaagu

SEQ ID NO: 1088955 - RNA, 19 nt, Homo sapiens
  misc_RNA (1)...(19): siRNA sense strand
ugaggcagcucggagacau

SEQ ID NO: 1088956 - RNA, 19 nt, Homo sapiens
  misc_RNA (1)...(19): siRNA sense strand
caaacaguucgaacauaca

SEQ ID NO: 1088957 - RNA, 19 nt, Homo sapiens
  misc_RNA (1)...(19): siRNA sense strand
acacagaagaaccagcuau

SEQ ID NO: 1088958 - RNA, 19 nt, Homo sapiens
  misc_RNA (1)...(19): siRNA sense strand
cagacaaagagacucagaa

SEQ ID NO: 1088959 - RNA, 19 nt, Homo sapiens
  misc_RNA (1)...(19): siRNA sense strand
uaauuucaaggaacugaga

SEQ ID NO: 1088960 - RNA, 19 nt, Homo sapiens
  misc_RNA (1)...(19): siRNA sense strand
cagaagaaccagcuauagc

SEQ ID NO: 1088961 - RNA, 19 nt, Homo sapiens
  misc_RNA (1)...(19): siRNA sense strand
gcccaugucugcgauguaa

SEQ ID NO: 1088962 - RNA, 19 nt, Homo sapiens
  misc_RNA (1)...(19): siRNA sense strand
gaagaaggugauucagauu

SEQ ID NO: 1088963 - RNA, 19 nt, Homo sapiens
  misc_RNA (1)...(19): siRNA sense strand
gaacugagaacaccagcau

SEQ ID NO: 1088964 - RNA, 19 nt, Homo sapiens
  misc_RNA (1)...(19): siRNA sense strand
agaaggugauucagauuca

SEQ ID NO: 1088965 - RNA, 19 nt, Homo sapiens
  misc_RNA (1)...(19): siRNA sense strand
ugaaucagcguuagcaugu

SEQ ID NO: 1088966 - RNA, 19 nt, Homo sapiens
  misc_RNA (1)...(19): siRNA sense strand
ugauucagauucagacaca

SEQ ID NO: 1088967 - RNA, 19 nt, Homo sapiens
  misc_RNA (1)...(19): siRNA sense strand
ggaagcaggaaggaacuga

SEQ ID NO: 1088968 - RNA, 19 nt, Homo sapiens
  misc_RNA (1)...(19): siRNA sense strand
gaaucagcguuagcaugug

SEQ ID NO: 1088969 - RNA, 19 nt, Homo sapiens
  misc_RNA (1)...(19): siRNA sense strand
gagcccaugucugcgaugu

SEQ ID NO: 1088970 - RNA, 19 nt, Homo sapiens
  misc_RNA (1)...(19): siRNA sense strand
cgaagaggaugggaaaaug

SEQ ID NO: 1088971 - RNA, 19 nt, Homo sapiens
  misc_RNA (1)...(19): siRNA sense strand
gaaggugauucagauucag

SEQ ID NO: 1088972 - RNA, 19 nt, Homo sapiens
  misc_RNA (1)...(19): siRNA sense strand
gcaggaaggaacugagaac

SEQ ID NO: 1088973 - RNA, 19 nt, Homo sapiens
  misc_RNA (1)...(19): siRNA sense strand
ucagacacaggaauuaugg

SEQ ID NO: 1088974 - RNA, 19 nt, Homo sapiens
  misc_RNA (1)...(19): siRNA sense strand
gaugccaaccgucgaauua

SEQ ID NO: 1088975 - RNA, 19 nt, Homo sapiens
  misc_RNA (1)...(19): siRNA sense strand
caacaucacuacaaagaac

SEQ ID NO: 1088976 - RNA, 19 nt, Homo sapiens
  misc_RNA (1)...(19): siRNA sense strand
caacaggacccucacucua

SEQ ID NO: 1088977 - RNA, 19 nt, Homo sapiens
  misc_RNA (1)...(19): siRNA sense strand
gcaaucgagagacaauaua

SEQ ID NO: 1088978 - RNA, 19 nt, Homo sapiens
  misc_RNA (1)...(19): siRNA sense strand
cugcucagcucacuauuga

SEQ ID NO: 1088979 - RNA, 19 nt, Homo sapiens
  misc_RNA (1)...(19): siRNA sense strand
cuacaagucauaaagcuaa

SEQ ID NO: 1088980 - RNA, 19 nt, Homo sapiens
  misc_RNA (1)...(19): siRNA sense strand
ugccaaccgucgaauuaua

SEQ ID NO: 1088981 - RNA, 19 nt, Homo sapiens
  misc_RNA (1)...(19): siRNA sense strand
cacaaggaaugacguagga

SEQ ID NO: 1088982 - RNA, 19 nt, Homo sapiens
  misc_RNA (1)...(19): siRNA sense strand
gcauacagcaaucgagaga

SEQ ID NO: 1088983 - RNA, 19 nt, Homo sapiens
  misc_RNA (1)...(19): siRNA sense strand
caggguggcucugauauag

SEQ ID NO: 1088984 - RNA, 19 nt, Homo sapiens
  misc_RNA (1)...(19): siRNA sense strand
agcuaaaucuuaugaguga

SEQ ID NO: 1088985 - RNA, 19 nt, Homo sapiens
  misc_RNA (1)...(19): siRNA sense strand
caucaugauuggaguacug

SEQ ID NO: 1088986 - RNA, 19 nt, Homo sapiens
  misc_RNA (1)...(19): siRNA sense strand
ccacugcucagcucacuau

SEQ ID NO: 1088987 - RNA, 19 nt, Homo sapiens
  misc_RNA (1)...(19): siRNA sense strand
ccaggguggcucugauaua

SEQ ID NO: 1088988 - RNA, 19 nt, Homo sapiens
  misc_RNA (1)...(19): siRNA sense strand
gacccucacucuacucagu

SEQ ID NO: 1088989 - RNA, 19 nt, Homo sapiens
  misc_RNA (1)...(19): siRNA sense strand
gaagcugugccauccaaug

SEQ ID NO: 1088990 - RNA, 19 nt, Homo sapiens
  misc_RNA (1)...(19): siRNA sense strand
cuaauccacccucacagua

SEQ ID NO: 1088991 - RNA, 19 nt, Homo sapiens
  misc_RNA (1)...(19): siRNA sense strand
caaagaacagcggauccua

SEQ ID NO: 1088992 - RNA, 19 nt, Homo sapiens
  misc_RNA (1)...(19): siRNA sense strand
aauccacccucacaguauu

SEQ ID NO: 1088993 - RNA, 19 nt, Homo sapiens
  misc_RNA (1)...(19): siRNA sense strand
auacagcaaucgagagaca

SEQ ID NO: 1088994 - RNA, 19 nt, Homo sapiens
  misc_RNA (1)...(19): siRNA sense strand
gcucagcucacuauugaag

SEQ ID NO: 1088995 - RNA, 19 nt, Homo sapiens
  misc_RNA (1)...(19): siRNA sense strand
guggguaaauggucagagu

SEQ ID NO: 1088996 - RNA, 19 nt, Homo sapiens
  misc_RNA (1)...(19): siRNA sense strand
ggcuacaacugguacaaag

SEQ ID NO: 1088997 - RNA, 19 nt, Homo sapiens
  misc_RNA (1)...(19): siRNA sense strand
ggcugcagcuguccaaugg

SEQ ID NO: 1088998 - RNA, 19 nt, Homo sapiens
  misc_RNA (1)...(19): siRNA sense strand
ggaccacagucaggaugau

SEQ ID NO: 1088999 - RNA, 19 nt, Homo sapiens
  misc_RNA (1)...(19): siRNA sense strand
gcaacaggacccucacucu

SEQ ID NO: 1089000 - RNA, 19 nt, Homo sapiens
  misc_RNA (1)...(19): siRNA sense strand
gauccuacacccuacaagu

SEQ ID NO: 1089001 - RNA, 19 nt, Homo sapiens
  misc_RNA (1)...(19): siRNA sense strand
aaagaacagcggauccuau

SEQ ID NO: 1089002 - RNA, 19 nt, Homo sapiens
  misc_RNA (1)...(19): siRNA sense strand
agacucagaacacaaccua

SEQ ID NO: 1089003 - RNA, 19 nt, Homo sapiens
  misc_RNA (1)...(19): siRNA sense strand
cuaugaaugugaaauacag

SEQ ID NO: 1089004 - RNA, 19 nt, Homo sapiens
  misc_RNA (1)...(19): siRNA sense strand
cccaacaucacuacaaaga

SEQ ID NO: 1089005 - RNA, 19 nt, Homo sapiens
  misc_RNA (1)...(19): siRNA sense strand
agacaccuauuaccaugca

SEQ ID NO: 1089006 - RNA, 19 nt, Homo sapiens
  misc_RNA (1)...(19): siRNA sense strand
cacccugaauguccucuau

SEQ ID NO: 1089007 - RNA, 19 nt, Homo sapiens
  misc_RNA (1)...(19): siRNA sense strand
gaacccagcgagugcaaac

SEQ ID NO: 1089008 - RNA, 19 nt, Homo sapiens
  misc_RNA (1)...(19): siRNA sense strand
gcucacagccucacuuuuc

SEQ ID NO: 1089009 - RNA, 19 nt, Homo sapiens
  misc_RNA (1)...(19): siRNA sense strand
ccaacaucacuacaaagaa

SEQ ID NO: 1089010 - RNA, 19 nt, Homo sapiens
  misc_RNA (1)...(19): siRNA sense strand
ggagguucuucuacuuguc

SEQ ID NO: 1089011 - RNA, 19 nt, Homo sapiens
  misc_RNA (1)...(19): siRNA sense strand
cgagugcaaacuucaguga

SEQ ID NO: 1089012 - RNA, 19 nt, Homo sapiens
  misc_RNA (1)...(19): siRNA sense strand
ggaugccaaccgucgaauu

SEQ ID NO: 1089013 - RNA, 19 nt, Homo sapiens
  misc_RNA (1)...(19): siRNA sense strand
aagaacagcggauccuaug

SEQ ID NO: 1089014 - RNA, 19 nt, Homo sapiens
  misc_RNA (1)...(19): siRNA sense strand
uaauccacccucacaguau

SEQ ID NO: 1089015 - RNA, 19 nt, Homo sapiens
  misc_RNA (1)...(19): siRNA sense strand
cuacacccuacaagucaua

SEQ ID NO: 1089016 - RNA, 19 nt, Homo sapiens
  misc_RNA (1)...(19): siRNA sense strand
gcacauuccagcaauacac

SEQ ID NO: 1089017 - RNA, 19 nt, Homo sapiens
  misc_RNA (1)...(19): siRNA sense strand
caagucauaaagcuaaauc

SEQ ID NO: 1089018 - RNA, 19 nt, Homo sapiens
  misc_RNA (1)...(19): siRNA sense strand
gccaaccgucgaauuauag

SEQ ID NO: 1089019 - RNA, 19 nt, Homo sapiens
  misc_RNA (1)...(19): siRNA sense strand
gagacaauauaccccaaug

SEQ ID NO: 1089020 - RNA, 19 nt, Homo sapiens
  misc_RNA (1)...(19): siRNA sense strand
uugaagcugugccauccaa

SEQ ID NO: 1089021 - RNA, 19 nt, Homo sapiens
  misc_RNA (1)...(19): siRNA sense strand
cagcaucaugauuggagua

SEQ ID NO: 1089022 - RNA, 19 nt, Homo sapiens
  misc_RNA (1)...(19): siRNA sense strand
uuccagcaauacacacaaa

SEQ ID NO: 1089023 - RNA, 19 nt, Homo sapiens
  misc_RNA (1)...(19): siRNA sense strand
gccacugucagcaucauga

SEQ ID NO: 1089024 - RNA, 19 nt, Homo sapiens
  misc_RNA (1)...(19): siRNA sense strand
gggccugcauacagcaauc

SEQ ID NO: 1089025 - RNA, 19 nt, Homo sapiens
  misc_RNA (1)...(19): siRNA sense strand
ucuccuggccucucagcua

SEQ ID NO: 1089026 - RNA, 19 nt, Homo sapiens
  misc_RNA (1)...(19): siRNA sense strand
ggaugaucacagucucuga

SEQ ID NO: 1089027 - RNA, 19 nt, Homo sapiens
  misc_RNA (1)...(19): siRNA sense strand
caaucgagagacaauauac

SEQ ID NO: 1089028 - RNA, 19 nt, Homo sapiens
  misc_RNA (1)...(19): siRNA sense strand
cagcaaucgagagacaaua

SEQ ID NO: 1089029 - RNA, 19 nt, Homo sapiens
  misc_RNA (1)...(19): siRNA sense strand
gcacuuccauuaucugaaa

SEQ ID NO: 1089030 - RNA, 19 nt, Homo sapiens
  misc_RNA (1)...(19): siRNA sense strand
gaacuugaagagcuuauua

SEQ ID NO: 1089031 - RNA, 19 nt, Homo sapiens
  misc_RNA (1)...(19): siRNA sense strand
gggcacugcugaauggaua

SEQ ID NO: 1089032 - RNA, 19 nt, Homo sapiens
  misc_RNA (1)...(19): siRNA sense strand
gcaagucgcgugauuucua

SEQ ID NO: 1089033 - RNA, 19 nt, Homo sapiens
  misc_RNA (1)...(19): siRNA sense strand
gcccauggcucugcuauug

SEQ ID NO: 1089034 - RNA, 19 nt, Homo sapiens
  misc_RNA (1)...(19): siRNA sense strand
gauaguggcuacagaugug

SEQ ID NO: 1089035 - RNA, 19 nt, Homo sapiens
  misc_RNA (1)...(19): siRNA sense strand
gcuuggaacugcuagauga

SEQ ID NO: 1089036 - RNA, 19 nt, Homo sapiens
  misc_RNA (1)...(19): siRNA sense strand
uugaggagcuuaaggauga

SEQ ID NO: 1089037 - RNA, 19 nt, Homo sapiens
  misc_RNA (1)...(19): siRNA sense strand
gcaccgaggaggccuauga

SEQ ID NO: 1089038 - RNA, 19 nt, Homo sapiens
  misc_RNA (1)...(19): siRNA sense strand
gaacugggaagguggcauu

SEQ ID NO: 1089039 - RNA, 19 nt, Homo sapiens
  misc_RNA (1)...(19): siRNA sense strand
cgaguucuuucaccuacua

SEQ ID NO: 1089040 - RNA, 19 nt, Homo sapiens
  misc_RNA (1)...(19): siRNA sense strand
ccaggccacuacauacuuu

SEQ ID NO: 1089041 - RNA, 19 nt, Homo sapiens
  misc_RNA (1)...(19): siRNA sense strand
cuacagaugugugucaguu

SEQ ID NO: 1089042 - RNA, 19 nt, Homo sapiens
  misc_RNA (1)...(19): siRNA sense strand
gaaaagaggccuucgacaa

SEQ ID NO: 1089043 - RNA, 19 nt, Homo sapiens
  misc_RNA (1)...(19): siRNA sense strand
gaaacagucacguccauag

SEQ ID NO: 1089044 - RNA, 19 nt, Homo sapiens
  misc_RNA (1)...(19): siRNA sense strand
ggaaacagucacguccaua

SEQ ID NO: 1089045 - RNA, 19 nt, Homo sapiens
  misc_RNA (1)...(19): siRNA sense strand
ggucagagccgcuguacag

SEQ ID NO: 1089046 - RNA, 19 nt, Homo sapiens
  misc_RNA (1)...(19): siRNA sense strand
ggucuucaguucuuacaag

SEQ ID NO: 1089047 - RNA, 19 nt, Homo sapiens
  misc_RNA (1)...(19): siRNA sense strand
gaagagcuuauuacaaugg

SEQ ID NO: 1089048 - RNA, 19 nt, Homo sapiens
  misc_RNA (1)...(19): siRNA sense strand
gcacagcuuggaacugcua

SEQ ID NO: 1089049 - RNA, 19 nt, Homo sapiens
  misc_RNA (1)...(19): siRNA sense strand
gcagaugcgauuugaagga

SEQ ID NO: 1089050 - RNA, 19 nt, Homo sapiens
  misc_RNA (1)...(19): siRNA sense strand
gaggaggccuaugacauca

SEQ ID NO: 1089051 - RNA, 19 nt, Homo sapiens
  misc_RNA (1)...(19): siRNA sense strand
gagccgcuguacagucuga

SEQ ID NO: 1089052 - RNA, 19 nt, Homo sapiens
  misc_RNA (1)...(19): siRNA sense strand
ugagggcacugcugaaugg

SEQ ID NO: 1089053 - RNA, 19 nt, Homo sapiens
  misc_RNA (1)...(19): siRNA sense strand
ccugacggcuccuuucuca

SEQ ID NO: 1089054 - RNA, 19 nt, Homo sapiens
  misc_RNA (1)...(19): siRNA sense strand
cuucaguucuuacaaguuc

SEQ ID NO: 1089055 - RNA, 19 nt, Homo sapiens
  misc_RNA (1)...(19): siRNA sense strand
ccauggcucugcuauugga

SEQ ID NO: 1089056 - RNA, 19 nt, Homo sapiens
  misc_RNA (1)...(19): siRNA sense strand
gcuccuuucucaugcaugu

SEQ ID NO: 1089057 - RNA, 19 nt, Homo sapiens
  misc_RNA (1)...(19): siRNA sense strand
ugaagagcuuauuacaaug

SEQ ID NO: 1089058 - RNA, 19 nt, Homo sapiens
  misc_RNA (1)...(19): siRNA sense strand
ugacggcuccuuucucaug

SEQ ID NO: 1089059 - RNA, 19 nt, Homo sapiens
  misc_RNA (1)...(19): siRNA sense strand
gcgauuugaaggaggauuu

SEQ ID NO: 1089060 - RNA, 19 nt, Homo sapiens
  misc_RNA (1)...(19): siRNA sense strand
cagagccgcuguacagucu

SEQ ID NO: 1089061 - RNA, 19 nt, Homo sapiens
  misc_RNA (1)...(19): siRNA sense strand
gacagaugccuaugagugu

SEQ ID NO: 1089062 - RNA, 19 nt, Homo sapiens
  misc_RNA (1)...(19): siRNA sense strand
agaagccagucccagguuu

SEQ ID NO: 1089063 - RNA, 19 nt, Homo sapiens
  misc_RNA (1)...(19): siRNA sense strand
cgaggaggccuaugacauc

SEQ ID NO: 1089064 - RNA, 19 nt, Homo sapiens
  misc_RNA (1)...(19): siRNA sense strand
caagucgcgugauuucuac

SEQ ID NO: 1089065 - RNA, 19 nt, Homo sapiens
  misc_RNA (1)...(19): siRNA sense strand
cccagaagguggcuuugga

SEQ ID NO: 1089066 - RNA, 19 nt, Homo sapiens
  misc_RNA (1)...(19): siRNA sense strand
gacccugcccuuagcauga

SEQ ID NO: 1089067 - RNA, 19 nt, Homo sapiens
  misc_RNA (1)...(19): siRNA sense strand
uagccucgcugaccaacau

SEQ ID NO: 1089068 - RNA, 19 nt, Homo sapiens
  misc_RNA (1)...(19): siRNA sense strand
ggacgacucgguggaaaca

SEQ ID NO: 1089069 - RNA, 19 nt, Homo sapiens
  misc_RNA (1)...(19): siRNA sense strand
ccacauaugcagcagucaa

SEQ ID NO: 1089070 - RNA, 19 nt, Homo sapiens
  misc_RNA (1)...(19): siRNA sense strand
gcaggacgacucgguggaa

SEQ ID NO: 1089071 - RNA, 19 nt, Homo sapiens
  misc_RNA (1)...(19): siRNA sense strand
caacauuggaccagacaag

SEQ ID NO: 1089072 - RNA, 19 nt, Homo sapiens
  misc_RNA (1)...(19): siRNA sense strand
guccauagcccagcacuuc

SEQ ID NO: 1089073 - RNA, 19 nt, Homo sapiens
  misc_RNA (1)...(19): siRNA sense strand
aaacagucacguccauaga

SEQ ID NO: 1089074 - RNA, 19 nt, Homo sapiens
  misc_RNA (1)...(19): siRNA sense strand
gccggcagaugcgauuuga

SEQ ID NO: 1089075 - RNA, 19 nt, Homo sapiens
  misc_RNA (1)...(19): siRNA sense strand
gcaaccugacggcuccuuu

SEQ ID NO: 1089076 - RNA, 19 nt, Homo sapiens
  misc_RNA (1)...(19): siRNA sense strand
ccuggcaagucgcgugauu

SEQ ID NO: 1089077 - RNA, 19 nt, Homo sapiens
  misc_RNA (1)...(19): siRNA sense strand
guucuuucaccuacuauug

SEQ ID NO: 1089078 - RNA, 19 nt, Homo sapiens
  misc_RNA (1)...(19): siRNA sense strand
aaagaggccuucgacaacu

SEQ ID NO: 1089079 - RNA, 19 nt, Homo sapiens
  misc_RNA (1)...(19): siRNA sense strand
gauccaggccacuacauac

SEQ ID NO: 1089080 - RNA, 19 nt, Homo sapiens
  misc_RNA (1)...(19): siRNA sense strand
caugguggcuauaccuucu

SEQ ID NO: 1089081 - RNA, 19 nt, Homo sapiens
  misc_RNA (1)...(19): siRNA sense strand
ccagauaguggcuacagau

SEQ ID NO: 1089082 - RNA, 19 nt, Homo sapiens
  misc_RNA (1)...(19): siRNA sense strand
caucacuccagaccucuuu

SEQ ID NO: 1089083 - RNA, 19 nt, Homo sapiens
  misc_RNA (1)...(19): siRNA sense strand
ugauccaggccacuacaua

SEQ ID NO: 1089084 - RNA, 19 nt, Homo sapiens
  misc_RNA (1)...(19): siRNA sense strand
caggacgacucgguggaaa

SEQ ID NO: 1089085 - RNA, 19 nt, Homo sapiens
  misc_RNA (1)...(19): siRNA sense strand
gccacuacauacuuucuac

SEQ ID NO: 1089086 - RNA, 19 nt, Homo sapiens
  misc_RNA (1)...(19): siRNA sense strand
caaccugacggcuccuuuc

SEQ ID NO: 1089087 - RNA, 19 nt, Homo sapiens
  misc_RNA (1)...(19): siRNA sense strand
ggaggugagguggauguga

SEQ ID NO: 1089088 - RNA, 19 nt, Homo sapiens
  misc_RNA (1)...(19): siRNA sense strand
acuacauacuuucuacaga

SEQ ID NO: 1089089 - RNA, 19 nt, Homo sapiens
  misc_RNA (1)...(19): siRNA sense strand
cggcagaugcgauuugaag

SEQ ID NO: 1089090 - RNA, 19 nt, Homo sapiens
  misc_RNA (1)...(19): siRNA sense strand
gcgcugguaauccucaaga

SEQ ID NO: 1089091 - RNA, 19 nt, Homo sapiens
  misc_RNA (1)...(19): siRNA sense strand
cacccaguguacaacauug

SEQ ID NO: 1089092 - RNA, 19 nt, Homo sapiens
  misc_RNA (1)...(19): siRNA sense strand
cauagaacaggcaaaagua

SEQ ID NO: 1089093 - RNA, 19 nt, Homo sapiens
  misc_RNA (1)...(19): siRNA sense strand
caagccggcagaugcgauu

SEQ ID NO: 1089094 - RNA, 19 nt, Homo sapiens
  misc_RNA (1)...(19): siRNA sense strand
ggauagcaaggugucagaa

SEQ ID NO: 1089095 - RNA, 19 nt, Homo sapiens
  misc_RNA (1)...(19): siRNA sense strand
cagaagccagucccagguu

SEQ ID NO: 1089096 - RNA, 19 nt, Homo sapiens
  misc_RNA (1)...(19): siRNA sense strand
ucacccaguguacaacauu

SEQ ID NO: 1089097 - RNA, 19 nt, Homo sapiens
  misc_RNA (1)...(19): siRNA sense strand
gauccugcacagcuuggaa

SEQ ID NO: 1089098 - RNA, 19 nt, Homo sapiens
  misc_RNA (1)...(19): siRNA sense strand
ugucggaggugagguggau

SEQ ID NO: 1089099 - RNA, 19 nt, Homo sapiens
  misc_RNA (1)...(19): siRNA sense strand
gcagggcacucaaucagua

SEQ ID NO: 1089100 - RNA, 19 nt, Homo sapiens
  misc_RNA (1)...(19): siRNA sense strand
aaagagaacuugagagaga

SEQ ID NO: 1089101 - RNA, 19 nt, Homo sapiens
  misc_RNA (1)...(19): siRNA sense strand
ggucgcagcuucacucauu

SEQ ID NO: 1089102 - RNA, 19 nt, Homo sapiens
  misc_RNA (1)...(19): siRNA sense strand
uagcagaucugacacuaaa

SEQ ID NO: 1089103 - RNA, 19 nt, Homo sapiens
  misc_RNA (1)...(19): siRNA sense strand
gagcaaaguugggaaaguu

SEQ ID NO: 1089104 - RNA, 19 nt, Homo sapiens
  misc_RNA (1)...(19): siRNA sense strand
gggacucgcuucauuauag

SEQ ID NO: 1089105 - RNA, 19 nt, Homo sapiens
  misc_RNA (1)...(19): siRNA sense strand
ggucagagcguuacuggaa

SEQ ID NO: 1089106 - RNA, 19 nt, Homo sapiens
  misc_RNA (1)...(19): siRNA sense strand
gaaacugucucaggaccuu

SEQ ID NO: 1089107 - RNA, 19 nt, Homo sapiens
  misc_RNA (1)...(19): siRNA sense strand
agagagauuugcugggaua

SEQ ID NO: 1089108 - RNA, 19 nt, Homo sapiens
  misc_RNA (1)...(19): siRNA sense strand
gaaaaugauugguuuggaa

SEQ ID NO: 1089109 - RNA, 19 nt, Homo sapiens
  misc_RNA (1)...(19): siRNA sense strand
gaagguggucagagcguua

SEQ ID NO: 1089110 - RNA, 19 nt, Homo sapiens
  misc_RNA (1)...(19): siRNA sense strand
ggugaugucuguggaaaug

SEQ ID NO: 1089111 - RNA, 19 nt, Homo sapiens
  misc_RNA (1)...(19): siRNA sense strand
ggauuucgcuucuguacag

SEQ ID NO: 1089112 - RNA, 19 nt, Homo sapiens
  misc_RNA (1)...(19): siRNA sense strand
ugaaagagaacuugagaga

SEQ ID NO: 1089113 - RNA, 19 nt, Homo sapiens
  misc_RNA (1)...(19): siRNA sense strand
ggacucgcuucauuauaga

SEQ ID NO: 1089114 - RNA, 19 nt, Homo sapiens
  misc_RNA (1)...(19): siRNA sense strand
gagcuucucuuggaaaugg

SEQ ID NO: 1089115 - RNA, 19 nt, Homo sapiens
  misc_RNA (1)...(19): siRNA sense strand
ggaagacuuuguugcagau

SEQ ID NO: 1089116 - RNA, 19 nt, Homo sapiens
  misc_RNA (1)...(19): siRNA sense strand
ggacauauucagcagagaa

SEQ ID NO: 1089117 - RNA, 19 nt, Homo sapiens
  misc_RNA (1)...(19): siRNA sense strand
caaguuaacaggaucaaug

SEQ ID NO: 1089118 - RNA, 19 nt, Homo sapiens
  misc_RNA (1)...(19): siRNA sense strand
caaccggucucccuuagca

SEQ ID NO: 1089119 - RNA, 19 nt, Homo sapiens
  misc_RNA (1)...(19): siRNA sense strand
ggauaaggcgggacauuuc

SEQ ID NO: 1089120 - RNA, 19 nt, Homo sapiens
  misc_RNA (1)...(19): siRNA sense strand
gccagaguauauaugcaua

SEQ ID NO: 1089121 - RNA, 19 nt, Homo sapiens
  misc_RNA (1)...(19): siRNA sense strand
gggauaaggcgggacauuu

SEQ ID NO: 1089122 - RNA, 19 nt, Homo sapiens
  misc_RNA (1)...(19): siRNA sense strand
uuacauguuuggccagauu

SEQ ID NO: 1089123 - RNA, 19 nt, Homo sapiens
  misc_RNA (1)...(19): siRNA sense strand
gcagauaauuacagcaaaa

SEQ ID NO: 1089124 - RNA, 19 nt, Homo sapiens
  misc_RNA (1)...(19): siRNA sense strand
ggccacaguucaagccauu

SEQ ID NO: 1089125 - RNA, 19 nt, Homo sapiens
  misc_RNA (1)...(19): siRNA sense strand
gagcguuacuggaaaauug

SEQ ID NO: 1089126 - RNA, 19 nt, Homo sapiens
  misc_RNA (1)...(19): siRNA sense strand
gagauuugcugggauaagg

SEQ ID NO: 1089127 - RNA, 19 nt, Homo sapiens
  misc_RNA (1)...(19): siRNA sense strand
cgagcagucagucaaguua

SEQ ID NO: 1089128 - RNA, 19 nt, Homo sapiens
  misc_RNA (1)...(19): siRNA sense strand
guguguaaguggacauauu

SEQ ID NO: 1089129 - RNA, 19 nt, Homo sapiens
  misc_RNA (1)...(19): siRNA sense strand
aaacuucuguggcugaaag

SEQ ID NO: 1089130 - RNA, 19 nt, Homo sapiens
  misc_RNA (1)...(19): siRNA sense strand
ccagaugccagaguauaua

SEQ ID NO: 1089131 - RNA, 19 nt, Homo sapiens
  misc_RNA (1)...(19): siRNA sense strand
gaaggcaacaggugucaca

SEQ ID NO: 1089132 - RNA, 19 nt, Homo sapiens
  misc_RNA (1)...(19): siRNA sense strand
ggcacggccucaucuguga

SEQ ID NO: 1089133 - RNA, 19 nt, Homo sapiens
  misc_RNA (1)...(19): siRNA sense strand
acagccagaugccagagua

SEQ ID NO: 1089134 - RNA, 19 nt, Homo sapiens
  misc_RNA (1)...(19): siRNA sense strand
gcaggaggacuaggaguga

SEQ ID NO: 1089135 - RNA, 19 nt, Homo sapiens
  misc_RNA (1)...(19): siRNA sense strand
gaucagcaaagacccgauu

SEQ ID NO: 1089136 - RNA, 19 nt, Homo sapiens
  misc_RNA (1)...(19): siRNA sense strand
gagcagucagucaaguuaa

SEQ ID NO: 1089137 - RNA, 19 nt, Homo sapiens
  misc_RNA (1)...(19): siRNA sense strand
gagguggaguccguucuug

SEQ ID NO: 1089138 - RNA, 19 nt, Homo sapiens
  misc_RNA (1)...(19): siRNA sense strand
guggaggccucagcaagaa

SEQ ID NO: 1089139 - RNA, 19 nt, Homo sapiens
  misc_RNA (1)...(19): siRNA sense strand
gcugaaagagaacuugaga

SEQ ID NO: 1089140 - RNA, 19 nt, Homo sapiens
  misc_RNA (1)...(19): siRNA sense strand
uuccagaacuacaaguaaa

SEQ ID NO: 1089141 - RNA, 19 nt, Homo sapiens
  misc_RNA (1)...(19): siRNA sense strand
guuaacaggaucaaugaga

SEQ ID NO: 1089142 - RNA, 19 nt, Homo sapiens
  misc_RNA (1)...(19): siRNA sense strand
ucagucaaguuaacaggau

SEQ ID NO: 1089143 - RNA, 19 nt, Homo sapiens
  misc_RNA (1)...(19): siRNA sense strand
cauggucaccggauugaaa

SEQ ID NO: 1089144 - RNA, 19 nt, Homo sapiens
  misc_RNA (1)...(19): siRNA sense strand
uaaggcgggacauuucuuu

SEQ ID NO: 1089145 - RNA, 19 nt, Homo sapiens
  misc_RNA (1)...(19): siRNA sense strand
ucccgagacuacaggauaa

SEQ ID NO: 1089146 - RNA, 19 nt, Homo sapiens
  misc_RNA (1)...(19): siRNA sense strand
gaaaauugauagaccacau

SEQ ID NO: 1089147 - RNA, 19 nt, Homo sapiens
  misc_RNA (1)...(19): siRNA sense strand
gaaaggcugggacgacagu

SEQ ID NO: 1089148 - RNA, 19 nt, Homo sapiens
  misc_RNA (1)...(19): siRNA sense strand
ucugcucccugguguguaa

SEQ ID NO: 1089149 - RNA, 19 nt, Homo sapiens
  misc_RNA (1)...(19): siRNA sense strand
guacaaggccaugcugcuu

SEQ ID NO: 1089150 - RNA, 19 nt, Homo sapiens
  misc_RNA (1)...(19): siRNA sense strand
agacuuuguugcagauaau

SEQ ID NO: 1089151 - RNA, 19 nt, Homo sapiens
  misc_RNA (1)...(19): siRNA sense strand
gacauauucagcagagaaa

SEQ ID NO: 1089152 - RNA, 19 nt, Homo sapiens
  misc_RNA (1)...(19): siRNA sense strand
ggcgggacauuucuuugau

SEQ ID NO: 1089153 - RNA, 19 nt, Homo sapiens
  misc_RNA (1)...(19): siRNA sense strand
uugaugaucuugccauucu

SEQ ID NO: 1089154 - RNA, 19 nt, Homo sapiens
  misc_RNA (1)...(19): siRNA sense strand
aauaggaaaccaagugcua

SEQ ID NO: 1089155 - RNA, 19 nt, Homo sapiens
  misc_RNA (1)...(19): siRNA sense strand
aagacuuuguugcagauaa

SEQ ID NO: 1089156 - RNA, 19 nt, Homo sapiens
  misc_RNA (1)...(19): siRNA sense strand
cgaaacuucuguggcugaa

SEQ ID NO: 1089157 - RNA, 19 nt, Homo sapiens
  misc_RNA (1)...(19): siRNA sense strand
gcaaaguugggaaaguugu

SEQ ID NO: 1089158 - RNA, 19 nt, Homo sapiens
  misc_RNA (1)...(19): siRNA sense strand
gcagaucugacacuaaagg

SEQ ID NO: 1089159 - RNA, 19 nt, Homo sapiens
  misc_RNA (1)...(19): siRNA sense strand
gucagagcguuacuggaaa

SEQ ID NO: 1089160 - RNA, 19 nt, Homo sapiens
  misc_RNA (1)...(19): siRNA sense strand
ggaaaaugauugguuugga

SEQ ID NO: 1089161 - RNA, 19 nt, Homo sapiens
  misc_RNA (1)...(19): siRNA sense strand
gcagcagggcacucaauca

SEQ ID NO: 1089162 - RNA, 19 nt, Homo sapiens
  misc_RNA (1)...(19): siRNA sense strand
ggaacgucuucuugucaca

SEQ ID NO: 1089163 - RNA, 19 nt, Homo sapiens
  misc_RNA (1)...(19): siRNA sense strand
gcacaguguccuccaguac

SEQ ID NO: 1089164 - RNA, 19 nt, Homo sapiens
  misc_RNA (1)...(19): siRNA sense strand
gccagaugccagaguauau

SEQ ID NO: 1089165 - RNA, 19 nt, Homo sapiens
  misc_RNA (1)...(19): siRNA sense strand
ggcaaccggucucccuuag

SEQ ID NO: 1089166 - RNA, 19 nt, Homo sapiens
  misc_RNA (1)...(19): siRNA sense strand
accuggaucugauuaagaa

SEQ ID NO: 1089167 - RNA, 19 nt, Homo sapiens
  misc_RNA (1)...(19): siRNA sense strand
augcauauuugaacaguca

SEQ ID NO: 1089168 - RNA, 19 nt, Homo sapiens
  misc_RNA (1)...(19): siRNA sense strand
gaagacuuuguugcagaua

SEQ ID NO: 1089169 - RNA, 19 nt, Homo sapiens
  misc_RNA (1)...(19): siRNA sense strand
gggcauggucaccggauug

SEQ ID NO: 1089170 - RNA, 19 nt, Homo sapiens
  misc_RNA (1)...(19): siRNA sense strand
caaaauaggaaaccaagug

SEQ ID NO: 1089171 - RNA, 19 nt, Homo sapiens
  misc_RNA (1)...(19): siRNA sense strand
gauaaggcgggacauuucu

SEQ ID NO: 1089172 - RNA, 19 nt, Homo sapiens
  misc_RNA (1)...(19): siRNA sense strand
cuuagcagaucugacacua

SEQ ID NO: 1089173 - RNA, 19 nt, Homo sapiens
  misc_RNA (1)...(19): siRNA sense strand
acagucaccuggaucugau

SEQ ID NO: 1089174 - RNA, 19 nt, Homo sapiens
  misc_RNA (1)...(19): siRNA sense strand
gcgggacauuucuuugauc

SEQ ID NO: 1089175 - RNA, 19 nt, Homo sapiens
  misc_RNA (1)...(19): siRNA sense strand
ugaucucccggacuucuua

SEQ ID NO: 1089176 - RNA, 19 nt, Homo sapiens
  misc_RNA (1)...(19): siRNA sense strand
caccagaggcagcaagaga

SEQ ID NO: 1089177 - RNA, 19 nt, Homo sapiens
  misc_RNA (1)...(19): siRNA sense strand
ucuuugaucucccggacuu

SEQ ID NO: 1089178 - RNA, 19 nt, Homo sapiens
  misc_RNA (1)...(19): siRNA sense strand
guauuuggcgaucaugaau

SEQ ID NO: 1089179 - RNA, 19 nt, Homo sapiens
  misc_RNA (1)...(19): siRNA sense strand
gaacaccagaaggaguauu

SEQ ID NO: 1089180 - RNA, 19 nt, Homo sapiens
  misc_RNA (1)...(19): siRNA sense strand
ucaggaccuugaugaucuu

SEQ ID NO: 1089181 - RNA, 19 nt, Homo sapiens
  misc_RNA (1)...(19): siRNA sense strand
uacaaggccaugcugcuuu

SEQ ID NO: 1089182 - RNA, 19 nt, Homo sapiens
  misc_RNA (1)...(19): siRNA sense strand
ggaggacuaggagugauug

SEQ ID NO: 1089183 - RNA, 19 nt, Homo sapiens
  misc_RNA (1)...(19): siRNA sense strand
ugagcaaaguugggaaagu

SEQ ID NO: 1089184 - RNA, 19 nt, Homo sapiens
  misc_RNA (1)...(19): siRNA sense strand
cucaggaccuugaugaucu

SEQ ID NO: 1089185 - RNA, 19 nt, Homo sapiens
  misc_RNA (1)...(19): siRNA sense strand
uggguuuccuuacuguuga

SEQ ID NO: 1089186 - RNA, 19 nt, Homo sapiens
  misc_RNA (1)...(19): siRNA sense strand
ucaccuggaucugauuaag

SEQ ID NO: 1089187 - RNA, 19 nt, Homo sapiens
  misc_RNA (1)...(19): siRNA sense strand
uaaaggccacagccagaug

SEQ ID NO: 1089188 - RNA, 19 nt, Homo sapiens
  misc_RNA (1)...(19): siRNA sense strand
uugaacaccagaaggagua

SEQ ID NO: 1089189 - RNA, 19 nt, Homo sapiens
  misc_RNA (1)...(19): siRNA sense strand
uccugaagcugguugaaca

SEQ ID NO: 1089190 - RNA, 19 nt, Homo sapiens
  misc_RNA (1)...(19): siRNA sense strand
gaacagucaccuggaucug

SEQ ID NO: 1089191 - RNA, 19 nt, Homo sapiens
  misc_RNA (1)...(19): siRNA sense strand
gggacgacaguuucuggaa

SEQ ID NO: 1089192 - RNA, 19 nt, Homo sapiens
  misc_RNA (1)...(19): siRNA sense strand
gguggaguccguucuugug

SEQ ID NO: 1089193 - RNA, 19 nt, Homo sapiens
  misc_RNA (1)...(19): siRNA sense strand
uggcaaccggucucccuua

SEQ ID NO: 1089194 - RNA, 19 nt, Homo sapiens
  misc_RNA (1)...(19): siRNA sense strand
cagccuguggguuuccuua

SEQ ID NO: 1089195 - RNA, 19 nt, Homo sapiens
  misc_RNA (1)...(19): siRNA sense strand
cagaugccagaguauauau

SEQ ID NO: 1089196 - RNA, 19 nt, Homo sapiens
  misc_RNA (1)...(19): siRNA sense strand
guaaaggccacagccagau

SEQ ID NO: 1089197 - RNA, 19 nt, Homo sapiens
  misc_RNA (1)...(19): siRNA sense strand
gagaacuugagagagauuu

SEQ ID NO: 1089198 - RNA, 19 nt, Homo sapiens
  misc_RNA (1)...(19): siRNA sense strand
uccuggagcuucucuugga

SEQ ID NO: 1089199 - RNA, 19 nt, Homo sapiens
  misc_RNA (1)...(19): siRNA sense strand
ugacggaccucuaccauua

SEQ ID NO: 1089200 - RNA, 19 nt, Homo sapiens
  misc_RNA (1)...(19): siRNA sense strand
gcaaggaaaucuccaaauc

SEQ ID NO: 1089201 - RNA, 19 nt, Homo sapiens
  misc_RNA (1)...(19): siRNA sense strand
gaagagaaacaguauauuc

SEQ ID NO: 1089202 - RNA, 19 nt, Homo sapiens
  misc_RNA (1)...(19): siRNA sense strand
ggucagagccucccuguga

SEQ ID NO: 1089203 - RNA, 19 nt, Homo sapiens
  misc_RNA (1)...(19): siRNA sense strand
caacaggacccucuaucua

SEQ ID NO: 1089204 - RNA, 19 nt, Homo sapiens
  misc_RNA (1)...(19): siRNA sense strand
gaacuacaccuacauuugg

SEQ ID NO: 1089205 - RNA, 19 nt, Homo sapiens
  misc_RNA (1)...(19): siRNA sense strand
ccucuaccauuacauuaua

SEQ ID NO: 1089206 - RNA, 19 nt, Homo sapiens
  misc_RNA (1)...(19): siRNA sense strand
gagaaacaguauauuccaa

SEQ ID NO: 1089207 - RNA, 19 nt, Homo sapiens
  misc_RNA (1)...(19): siRNA sense strand
gaaacaggacccuaucaau

SEQ ID NO: 1089208 - RNA, 19 nt, Homo sapiens
  misc_RNA (1)...(19): siRNA sense strand
gacaauuaaugggaaguuu

SEQ ID NO: 1089209 - RNA, 19 nt, Homo sapiens
  misc_RNA (1)...(19): siRNA sense strand
gcaggaaccuacaccuuac

SEQ ID NO: 1089210 - RNA, 19 nt, Homo sapiens
  misc_RNA (1)...(19): siRNA sense strand
gcucuaugcuugcucuguu

SEQ ID NO: 1089211 - RNA, 19 nt, Homo sapiens
  misc_RNA (1)...(19): siRNA sense strand
aaacaggacccuaucaaug

SEQ ID NO: 1089212 - RNA, 19 nt, Homo sapiens
  misc_RNA (1)...(19): siRNA sense strand
ggaccucuaccauuacauu

SEQ ID NO: 1089213 - RNA, 19 nt, Homo sapiens
  misc_RNA (1)...(19): siRNA sense strand
ggaaaugacggaccucuac

SEQ ID NO: 1089214 - RNA, 19 nt, Homo sapiens
  misc_RNA (1)...(19): siRNA sense strand
gcucacagcaucacuuuua

SEQ ID NO: 1089215 - RNA, 19 nt, Homo sapiens
  misc_RNA (1)...(19): siRNA sense strand
acaggacccucuaucuauu

SEQ ID NO: 1089216 - RNA, 19 nt, Homo sapiens
  misc_RNA (1)...(19): siRNA sense strand
gaaccuacaccuuacacau

SEQ ID NO: 1089217 - RNA, 19 nt, Homo sapiens
  misc_RNA (1)...(19): siRNA sense strand
ugaugagacuagagaagaa

SEQ ID NO: 1089218 - RNA, 19 nt, Homo sapiens
  misc_RNA (1)...(19): siRNA sense strand
gcauacaguggaagagaaa

SEQ ID NO: 1089219 - RNA, 19 nt, Homo sapiens
  misc_RNA (1)...(19): siRNA sense strand
gaaaacaggauacucauuc

SEQ ID NO: 1089220 - RNA, 19 nt, Homo sapiens
  misc_RNA (1)...(19): siRNA sense strand
cguauauaguugaugguaa

SEQ ID NO: 1089221 - RNA, 19 nt, Homo sapiens
  misc_RNA (1)...(19): siRNA sense strand
cagcaucacuuuuaaacuu

SEQ ID NO: 1089222 - RNA, 19 nt, Homo sapiens
  misc_RNA (1)...(19): siRNA sense strand
ggacgcaagcuaccuaugg

SEQ ID NO: 1089223 - RNA, 19 nt, Homo sapiens
  misc_RNA (1)...(19): siRNA sense strand
ggaagagaaacaguauauu

SEQ ID NO: 1089224 - RNA, 19 nt, Homo sapiens
  misc_RNA (1)...(19): siRNA sense strand
acccuucauucaccuauua

SEQ ID NO: 1089225 - RNA, 19 nt, Homo sapiens
  misc_RNA (1)...(19): siRNA sense strand
gaccucuaccauuacauua

SEQ ID NO: 1089226 - RNA, 19 nt, Homo sapiens
  misc_RNA (1)...(19): siRNA sense strand
cauuucaccuucaccuuau

SEQ ID NO: 1089227 - RNA, 19 nt, Homo sapiens
  misc_RNA (1)...(19): siRNA sense strand
acauuucaccuucaccuua

SEQ ID NO: 1089228 - RNA, 19 nt, Homo sapiens
  misc_RNA (1)...(19): siRNA sense strand
ugcaggaaccuacaccuua

SEQ ID NO: 1089229 - RNA, 19 nt, Homo sapiens
  misc_RNA (1)...(19): siRNA sense strand
gcccagccacccaaaguuu

SEQ ID NO: 1089230 - RNA, 19 nt, Homo sapiens
  misc_RNA (1)...(19): siRNA sense strand
ggaaggaugcaggaaccua

SEQ ID NO: 1089231 - RNA, 19 nt, Homo sapiens
  misc_RNA (1)...(19): siRNA sense strand
uggaagagaaacaguauau

SEQ ID NO: 1089232 - RNA, 19 nt, Homo sapiens
  misc_RNA (1)...(19): siRNA sense strand
caccuucaccuuauacuug

SEQ ID NO: 1089233 - RNA, 19 nt, Homo sapiens
  misc_RNA (1)...(19): siRNA sense strand
ggacaauuaaugggaaguu

SEQ ID NO: 1089234 - RNA, 19 nt, Homo sapiens
  misc_RNA (1)...(19): siRNA sense strand
gaggugaugagacuagaga

SEQ ID NO: 1089235 - RNA, 19 nt, Homo sapiens
  misc_RNA (1)...(19): siRNA sense strand
caauuaaugggaaguuuca

SEQ ID NO: 1089236 - RNA, 19 nt, Homo sapiens
  misc_RNA (1)...(19): siRNA sense strand
agaacuacaccuacauuug

SEQ ID NO: 1089237 - RNA, 19 nt, Homo sapiens
  misc_RNA (1)...(19): siRNA sense strand
aaacaggauacucauucua

SEQ ID NO: 1089238 - RNA, 19 nt, Homo sapiens
  misc_RNA (1)...(19): siRNA sense strand
ugaaacaggacccuaucaa

SEQ ID NO: 1089239 - RNA, 19 nt, Homo sapiens
  misc_RNA (1)...(19): siRNA sense strand
gggaaaugacggaccucua

SEQ ID NO: 1089240 - RNA, 19 nt, Homo sapiens
  misc_RNA (1)...(19): siRNA sense strand
caagcuaccuaugguggau

SEQ ID NO: 1089241 - RNA, 19 nt, Homo sapiens
  misc_RNA (1)...(19): siRNA sense strand
gacgcaagcuaccuauggu

SEQ ID NO: 1089242 - RNA, 19 nt, Homo sapiens
  misc_RNA (1)...(19): siRNA sense strand
gaugagacuagagaagaaa

SEQ ID NO: 1089243 - RNA, 19 nt, Homo sapiens
  misc_RNA (1)...(19): siRNA sense strand
aaagcgaggugaugagacu

SEQ ID NO: 1089244 - RNA, 19 nt, Homo sapiens
  misc_RNA (1)...(19): siRNA sense strand
caucccugcugauccagaa

SEQ ID NO: 1089245 - RNA, 19 nt, Homo sapiens
  misc_RNA (1)...(19): siRNA sense strand
gugaugagacuagagaaga

SEQ ID NO: 1089246 - RNA, 19 nt, Homo sapiens
  misc_RNA (1)...(19): siRNA sense strand
gagacuagagaagaaauuc

SEQ ID NO: 1089247 - RNA, 19 nt, Homo sapiens
  misc_RNA (1)...(19): siRNA sense strand
aaugggaaguuucagcaau

SEQ ID NO: 1089248 - RNA, 19 nt, Homo sapiens
  misc_RNA (1)...(19): siRNA sense strand
uaacccaccggcagaguau

SEQ ID NO: 1089249 - RNA, 19 nt, Homo sapiens
  misc_RNA (1)...(19): siRNA sense strand
aacaggacccuaucaaugu

SEQ ID NO: 1089250 - RNA, 19 nt, Homo sapiens
  misc_RNA (1)...(19): siRNA sense strand
aacaggacccucuaucuau

SEQ ID NO: 1089251 - RNA, 19 nt, Homo sapiens
  misc_RNA (1)...(19): siRNA sense strand
agagaagaaauucgacauu

SEQ ID NO: 1089252 - RNA, 19 nt, Homo sapiens
  misc_RNA (1)...(19): siRNA sense strand
caggacccucuaucuauuu

SEQ ID NO: 1089253 - RNA, 19 nt, Homo sapiens
  misc_RNA (1)...(19): siRNA sense strand
caacgcaucccugcugauc

SEQ ID NO: 1089254 - RNA, 19 nt, Homo sapiens
  misc_RNA (1)...(19): siRNA sense strand
acaggacccuaucaaugug

SEQ ID NO: 1089255 - RNA, 19 nt, Homo sapiens
  misc_RNA (1)...(19): siRNA sense strand
aaaugaaacaggacccuau

SEQ ID NO: 1089256 - RNA, 19 nt, Homo sapiens
  misc_RNA (1)...(19): siRNA sense strand
uaccuaugguggaugaaug

SEQ ID NO: 1089257 - RNA, 19 nt, Homo sapiens
  misc_RNA (1)...(19): siRNA sense strand
cuacaccuuacacaucaua

SEQ ID NO: 1089258 - RNA, 19 nt, Homo sapiens
  misc_RNA (1)...(19): siRNA sense strand
gggccugcauacaguggaa

SEQ ID NO: 1089259 - RNA, 19 nt, Homo sapiens
  misc_RNA (1)...(19): siRNA sense strand
gcgaggugaugagacuaga

SEQ ID NO: 1089260 - RNA, 19 nt, Homo sapiens
  misc_RNA (1)...(19): siRNA sense strand
uuucagcaaucaggacaaa

SEQ ID NO: 1089261 - RNA, 19 nt, Homo sapiens
  misc_RNA (1)...(19): siRNA sense strand
gacccucuaucuauuuggu

SEQ ID NO: 1089262 - RNA, 19 nt, Homo sapiens
  misc_RNA (1)...(19): siRNA sense strand
ccaacaggacccucuaucu

SEQ ID NO: 1089263 - RNA, 19 nt, Homo sapiens
  misc_RNA (1)...(19): siRNA sense strand
gaaugucacccggaaggau

SEQ ID NO: 1089264 - RNA, 19 nt, Homo sapiens
  misc_RNA (1)...(19): siRNA sense strand
ugcauacaguggaagagaa

SEQ ID NO: 1089265 - RNA, 19 nt, Homo sapiens
  misc_RNA (1)...(19): siRNA sense strand
gacuagagaagaaauucga

SEQ ID NO: 1089266 - RNA, 19 nt, Homo sapiens
  misc_RNA (1)...(19): siRNA sense strand
caguggaagagaaacagua

SEQ ID NO: 1089267 - RNA, 19 nt, Homo sapiens
  misc_RNA (1)...(19): siRNA sense strand
ccagaccuccccagaauuu

SEQ ID NO: 1089268 - RNA, 19 nt, Homo sapiens
  misc_RNA (1)...(19): siRNA sense strand
cuaacccaccggcagagua

SEQ ID NO: 1089269 - RNA, 19 nt, Homo sapiens
  misc_RNA (1)...(19): siRNA sense strand
caaggaaaucuccaaaucc

SEQ ID NO: 1089270 - RNA, 19 nt, Homo sapiens
  misc_RNA (1)...(19): siRNA sense strand
ggcaaggaaaucuccaaau

SEQ ID NO: 1089271 - RNA, 19 nt, Homo sapiens
  misc_RNA (1)...(19): siRNA sense strand
cacagcgcaucaccuggaa

SEQ ID NO: 1089272 - RNA, 19 nt, Homo sapiens
  misc_RNA (1)...(19): siRNA sense strand
ggauguucuucuacuuguc

SEQ ID NO: 1089273 - RNA, 19 nt, Homo sapiens
  misc_RNA (1)...(19): siRNA sense strand
guccagaccuccccagaau

SEQ ID NO: 1089274 - RNA, 19 nt, Homo sapiens
  misc_RNA (1)...(19): siRNA sense strand
aaaccaacaggacccucua

SEQ ID NO: 1089275 - RNA, 19 nt, Homo sapiens
  misc_RNA (1)...(19): siRNA sense strand
guggaagagaaacaguaua

SEQ ID NO: 1089276 - RNA, 19 nt, Homo sapiens
  misc_RNA (1)...(19): siRNA sense strand
ugagacuagagaagaaauu

SEQ ID NO: 1089277 - RNA, 19 nt, Homo sapiens
  misc_RNA (1)...(19): siRNA sense strand
aggauguucuucuacuugu

SEQ ID NO: 1089278 - RNA, 19 nt, Homo sapiens
  misc_RNA (1)...(19): siRNA sense strand
gaucaaugcacacauggua

SEQ ID NO: 1089279 - RNA, 19 nt, Homo sapiens
  misc_RNA (1)...(19): siRNA sense strand
caaaauagaugacaugaca

SEQ ID NO: 1089280 - RNA, 19 nt, Homo sapiens
  misc_RNA (1)...(19): siRNA sense strand
ccacacauauucuggaagu

SEQ ID NO: 1089281 - RNA, 19 nt, Homo sapiens
  misc_RNA (1)...(19): siRNA sense strand
gggcacaucuauucuacug

SEQ ID NO: 1089282 - RNA, 19 nt, Homo sapiens
  misc_RNA (1)...(19): siRNA sense strand
caucagacaugcagagaag

SEQ ID NO: 1089283 - RNA, 19 nt, Homo sapiens
  misc_RNA (1)...(19): siRNA sense strand
ggagagcaccuaucagcaa

SEQ ID NO: 1089284 - RNA, 19 nt, Homo sapiens
  misc_RNA (1)...(19): siRNA sense strand
gcagggagagcaccuauca

SEQ ID NO: 1089285 - RNA, 19 nt, Homo sapiens
  misc_RNA (1)...(19): siRNA sense strand
gagagcaccuaucagcaau

SEQ ID NO: 1089286 - RNA, 19 nt, Homo sapiens
  misc_RNA (1)...(19): siRNA sense strand
gaugacaccagcagugaaa

SEQ ID NO: 1089287 - RNA, 19 nt, Homo sapiens
  misc_RNA (1)...(19): siRNA sense strand
uaucagcaauccaggaaug

SEQ ID NO: 1089288 - RNA, 19 nt, Homo sapiens
  misc_RNA (1)...(19): siRNA sense strand
ugaaacacaugucuguauc

SEQ ID NO: 1089289 - RNA, 19 nt, Homo sapiens
  misc_RNA (1)...(19): siRNA sense strand
aaaaccagguguugaauuu

SEQ ID NO: 1089290 - RNA, 19 nt, Homo sapiens
  misc_RNA (1)...(19): siRNA sense strand
gccaguggguugacacaga

SEQ ID NO: 1089291 - RNA, 19 nt, Homo sapiens
  misc_RNA (1)...(19): siRNA sense strand
auccacagaugcagaauaa

SEQ ID NO: 1089292 - RNA, 19 nt, Homo sapiens
  misc_RNA (1)...(19): siRNA sense strand
caagcaagcuguggauuuu

SEQ ID NO: 1089293 - RNA, 19 nt, Homo sapiens
  misc_RNA (1)...(19): siRNA sense strand
uggaggauaugaaugaguu

SEQ ID NO: 1089294 - RNA, 19 nt, Homo sapiens
  misc_RNA (1)...(19): siRNA sense strand
agaaacauaugugaaagug

SEQ ID NO: 1089295 - RNA, 19 nt, Homo sapiens
  misc_RNA (1)...(19): siRNA sense strand
ucaagcaagcuguggauuu

SEQ ID NO: 1089296 - RNA, 19 nt, Homo sapiens
  misc_RNA (1)...(19): siRNA sense strand
gcacacaugguacuaagca

SEQ ID NO: 1089297 - RNA, 19 nt, Homo sapiens
  misc_RNA (1)...(19): siRNA sense strand
aaccagguguugaauuuga

SEQ ID NO: 1089298 - RNA, 19 nt, Homo sapiens
  misc_RNA (1)...(19): siRNA sense strand
gagugaagcagggaacuuu

SEQ ID NO: 1089299 - RNA, 19 nt, Homo sapiens
  misc_RNA (1)...(19): siRNA sense strand
guggaacaguggauucgaa

SEQ ID NO: 1089300 - RNA, 19 nt, Homo sapiens
  misc_RNA (1)...(19): siRNA sense strand
ucaagaaccagcugaaaca

SEQ ID NO: 1089301 - RNA, 19 nt, Homo sapiens
  misc_RNA (1)...(19): siRNA sense strand
guucagaauugggaauguu

SEQ ID NO: 1089302 - RNA, 19 nt, Homo sapiens
  misc_RNA (1)...(19): siRNA sense strand
ccugaaggguugaacuuuc

SEQ ID NO: 1089303 - RNA, 19 nt, Homo sapiens
  misc_RNA (1)...(19): siRNA sense strand
uuucacaggucacuauugu

SEQ ID NO: 1089304 - RNA, 19 nt, Homo sapiens
  misc_RNA (1)...(19): siRNA sense strand
gaacaguggauucgaaagc

SEQ ID NO: 1089305 - RNA, 19 nt, Homo sapiens
  misc_RNA (1)...(19): siRNA sense strand
agaaccagcugaaacacau

SEQ ID NO: 1089306 - RNA, 19 nt, Homo sapiens
  misc_RNA (1)...(19): siRNA sense strand
gaauugggaauguugagau

SEQ ID NO: 1089307 - RNA, 19 nt, Homo sapiens
  misc_RNA (1)...(19): siRNA sense strand
gaacuuuggugggaauagc

SEQ ID NO: 1089308 - RNA, 19 nt, Homo sapiens
  misc_RNA (1)...(19): siRNA sense strand
caccacacauauucuggaa

SEQ ID NO: 1089309 - RNA, 19 nt, Homo sapiens
  misc_RNA (1)...(19): siRNA sense strand
ccagaaacauaugugaaag

SEQ ID NO: 1089310 - RNA, 19 nt, Homo sapiens
  misc_RNA (1)...(19): siRNA sense strand
cagagaaggcuccaaccaa

SEQ ID NO: 1089311 - RNA, 19 nt, Homo sapiens
  misc_RNA (1)...(19): siRNA sense strand
uaaauccacagaugcagaa

SEQ ID NO: 1089312 - RNA, 19 nt, Homo sapiens
  misc_RNA (1)...(19): siRNA sense strand
ccaguggguugacacagau

SEQ ID NO: 1089313 - RNA, 19 nt, Homo sapiens
  misc_RNA (1)...(19): siRNA sense strand
gaagugaucaaugcacaca

SEQ ID NO: 1089314 - RNA, 19 nt, Homo sapiens
  misc_RNA (1)...(19): siRNA sense strand
gaguucaccacacauauuc

SEQ ID NO: 1089315 - RNA, 19 nt, Homo sapiens
  misc_RNA (1)...(19): siRNA sense strand
ccugguagccuuuaagauc

SEQ ID NO: 1089316 - RNA, 19 nt, Homo sapiens
  misc_RNA (1)...(19): siRNA sense strand
ugaguucaccacacauauu

SEQ ID NO: 1089317 - RNA, 19 nt, Homo sapiens
  misc_RNA (1)...(19): siRNA sense strand
gcagagaaggcuccaacca

SEQ ID NO: 1089318 - RNA, 19 nt, Homo sapiens
  misc_RNA (1)...(19): siRNA sense strand
gcaaugaggggcacaucua

SEQ ID NO: 1089319 - RNA, 19 nt, Homo sapiens
  misc_RNA (1)...(19): siRNA sense strand
gaacuuucaggaucucaag

SEQ ID NO: 1089320 - RNA, 19 nt, Homo sapiens
  misc_RNA (1)...(19): siRNA sense strand
gaccugaaggguugaacuu

SEQ ID NO: 1089321 - RNA, 19 nt, Homo sapiens
  misc_RNA (1)...(19): siRNA sense strand
acaguggauucgaaagcua

SEQ ID NO: 1089322 - RNA, 19 nt, Homo sapiens
  misc_RNA (1)...(19): siRNA sense strand
guacuaagcaaagccaaca

SEQ ID NO: 1089323 - RNA, 19 nt, Homo sapiens
  misc_RNA (1)...(19): siRNA sense strand
acacauauucuggaaguga

SEQ ID NO: 1089324 - RNA, 19 nt, Homo sapiens
  misc_RNA (1)...(19): siRNA sense strand
cauugugcccuguacuaua

SEQ ID NO: 1089325 - RNA, 19 nt, Homo sapiens
  misc_RNA (1)...(19): siRNA sense strand
cugguagccuuuaagauca

SEQ ID NO: 1089326 - RNA, 19 nt, Homo sapiens
  misc_RNA (1)...(19): siRNA sense strand
auugugcccuguacuauau

SEQ ID NO: 1089327 - RNA, 19 nt, Homo sapiens
  misc_RNA (1)...(19): siRNA sense strand
gcaauccaggaaugaguga

SEQ ID NO: 1089328 - RNA, 19 nt, Homo sapiens
  misc_RNA (1)...(19): siRNA sense strand
cagcaaauggccucacugu

SEQ ID NO: 1089329 - RNA, 19 nt, Homo sapiens
  misc_RNA (1)...(19): siRNA sense strand
caucuauucuacuguggau

SEQ ID NO: 1089330 - RNA, 19 nt, Homo sapiens
  misc_RNA (1)...(19): siRNA sense strand
gagaaggcuccaaccaaca

SEQ ID NO: 1089331 - RNA, 19 nt, Homo sapiens
  misc_RNA (1)...(19): siRNA sense strand
aauugggaauguugagauu

SEQ ID NO: 1089332 - RNA, 19 nt, Homo sapiens
  misc_RNA (1)...(19): siRNA sense strand
acacaugguacuaagcaaa

SEQ ID NO: 1089333 - RNA, 19 nt, Homo sapiens
  misc_RNA (1)...(19): siRNA sense strand
uccagaaacauaugugaaa

SEQ ID NO: 1089334 - RNA, 19 nt, Homo sapiens
  misc_RNA (1)...(19): siRNA sense strand
ggaauguugagauuucaca

SEQ ID NO: 1089335 - RNA, 19 nt, Homo sapiens
  misc_RNA (1)...(19): siRNA sense strand
gguguugaauuugauuaag

SEQ ID NO: 1089336 - RNA, 19 nt, Homo sapiens
  misc_RNA (1)...(19): siRNA sense strand
gaaggcuccaaccaacauu

SEQ ID NO: 1089337 - RNA, 19 nt, Homo sapiens
  misc_RNA (1)...(19): siRNA sense strand
auucuacuguggaugauga

SEQ ID NO: 1089338 - RNA, 19 nt, Homo sapiens
  misc_RNA (1)...(19): siRNA sense strand
agugaucaaugcacacaug

SEQ ID NO: 1089339 - RNA, 19 nt, Homo sapiens
  misc_RNA (1)...(19): siRNA sense strand
cagaugacaccagcaguga

SEQ ID NO: 1089340 - RNA, 19 nt, Homo sapiens
  misc_RNA (1)...(19): siRNA sense strand
aaugaguucaccacacaua

SEQ ID NO: 1089341 - RNA, 19 nt, Homo sapiens
  misc_RNA (1)...(19): siRNA sense strand
cugaaacacaugucuguau

SEQ ID NO: 1089342 - RNA, 19 nt, Homo sapiens
  misc_RNA (1)...(19): siRNA sense strand
gcugaaacacaugucugua

SEQ ID NO: 1089343 - RNA, 19 nt, Homo sapiens
  misc_RNA (1)...(19): siRNA sense strand
gaauuugauuaaggcuugu

SEQ ID NO: 1089344 - RNA, 19 nt, Homo sapiens
  misc_RNA (1)...(19): siRNA sense strand
uugggaauguugagauuuc

SEQ ID NO: 1089345 - RNA, 19 nt, Homo sapiens
  misc_RNA (1)...(19): siRNA sense strand
ucuauucuacuguggauga

SEQ ID NO: 1089346 - RNA, 19 nt, Homo sapiens
  misc_RNA (1)...(19): siRNA sense strand
uacuauaucucagcugcuu

SEQ ID NO: 1089347 - RNA, 19 nt, Homo sapiens
  misc_RNA (1)...(19): siRNA sense strand
cacauauucuggaagugau

SEQ ID NO: 1089348 - RNA, 19 nt, Homo sapiens
  misc_RNA (1)...(19): siRNA sense strand
guguugaauuugauuaagg

SEQ ID NO: 1089349 - RNA, 19 nt, Homo sapiens
  misc_RNA (1)...(19): siRNA sense strand
gagcaccuaucagcaaucc

SEQ ID NO: 1089350 - RNA, 19 nt, Homo sapiens
  misc_RNA (1)...(19): siRNA sense strand
gaaccagcugaaacacaug

SEQ ID NO: 1089351 - RNA, 19 nt, Homo sapiens
  misc_RNA (1)...(19): siRNA sense strand
cagaaacauaugugaaagu

SEQ ID NO: 1089352 - RNA, 19 nt, Homo sapiens
  misc_RNA (1)...(19): siRNA sense strand
gauuucacaggucacuauu

SEQ ID NO: 1089353 - RNA, 19 nt, Homo sapiens
  misc_RNA (1)...(19): siRNA sense strand
cagguguugaauuugauua

SEQ ID NO: 1089354 - RNA, 19 nt, Homo sapiens
  misc_RNA (1)...(19): siRNA sense strand
ccuaucagcaauccaggaa

SEQ ID NO: 1089355 - RNA, 19 nt, Homo sapiens
  misc_RNA (1)...(19): siRNA sense strand
ugugguuccuccagaaaca

SEQ ID NO: 1089356 - RNA, 19 nt, Homo sapiens
  misc_RNA (1)...(19): siRNA sense strand
uaagauggcugucaaguuu

SEQ ID NO: 1089357 - RNA, 19 nt, Homo sapiens
  misc_RNA (1)...(19): siRNA sense strand
gcaagagaguuguuaauga

SEQ ID NO: 1089358 - RNA, 19 nt, Homo sapiens
  misc_RNA (1)...(19): siRNA sense strand
gaagauaccucugguguca

SEQ ID NO: 1089359 - RNA, 19 nt, Homo sapiens
  misc_RNA (1)...(19): siRNA sense strand
ccucagcacucuuguuaaa

SEQ ID NO: 1089360 - RNA, 19 nt, Homo sapiens
  misc_RNA (1)...(19): siRNA sense strand
gagcggacauuguuuacug

SEQ ID NO: 1089361 - RNA, 19 nt, Homo sapiens
  misc_RNA (1)...(19): siRNA sense strand
gagcugcccugcugucaga

SEQ ID NO: 1089362 - RNA, 19 nt, Homo sapiens
  misc_RNA (1)...(19): siRNA sense strand
caagagaguuguuaaugag

SEQ ID NO: 1089363 - RNA, 19 nt, Homo sapiens
  misc_RNA (1)...(19): siRNA sense strand
gaacaaaaguaucagucua

SEQ ID NO: 1089364 - RNA, 19 nt, Homo sapiens
  misc_RNA (1)...(19): siRNA sense strand
ggaaauuugugaggccuuu

SEQ ID NO: 1089365 - RNA, 19 nt, Homo sapiens
  misc_RNA (1)...(19): siRNA sense strand
gguagggacucuuccaaug

SEQ ID NO: 1089366 - RNA, 19 nt, Homo sapiens
  misc_RNA (1)...(19): siRNA sense strand
ggacauagaggacuuucga

SEQ ID NO: 1089367 - RNA, 19 nt, Homo sapiens
  misc_RNA (1)...(19): siRNA sense strand
ccuaagaugugccuacuag

SEQ ID NO: 1089368 - RNA, 19 nt, Homo sapiens
  misc_RNA (1)...(19): siRNA sense strand
gcugauacccucuccauuc

SEQ ID NO: 1089369 - RNA, 19 nt, Homo sapiens
  misc_RNA (1)...(19): siRNA sense strand
ccaacaguauucggacaua

SEQ ID NO: 1089370 - RNA, 19 nt, Homo sapiens
  misc_RNA (1)...(19): siRNA sense strand
ucaaagccauugcugauac

SEQ ID NO: 1089371 - RNA, 19 nt, Homo sapiens
  misc_RNA (1)...(19): siRNA sense strand
guagggacucuuccaauga

SEQ ID NO: 1089372 - RNA, 19 nt, Homo sapiens
  misc_RNA (1)...(19): siRNA sense strand
ucagauacgcggugcagua

SEQ ID NO: 1089373 - RNA, 19 nt, Homo sapiens
  misc_RNA (1)...(19): siRNA sense strand
gcagaaauacaucagauac

SEQ ID NO: 1089374 - RNA, 19 nt, Homo sapiens
  misc_RNA (1)...(19): siRNA sense strand
uggaggaggucaugcagaa

SEQ ID NO: 1089375 - RNA, 19 nt, Homo sapiens
  misc_RNA (1)...(19): siRNA sense strand
ccugugaccugcaagauuc

SEQ ID NO: 1089376 - RNA, 19 nt, Homo sapiens
  misc_RNA (1)...(19): siRNA sense strand
ucaagaugauucagugcaa

SEQ ID NO: 1089377 - RNA, 19 nt, Homo sapiens
  misc_RNA (1)...(19): siRNA sense strand
gagcauacccagcccagau

SEQ ID NO: 1089378 - RNA, 19 nt, Homo sapiens
  misc_RNA (1)...(19): siRNA sense strand
gaucgccuguucuccucua

SEQ ID NO: 1089379 - RNA, 19 nt, Homo sapiens
  misc_RNA (1)...(19): siRNA sense strand
gagcugaucgaccucaaga

SEQ ID NO: 1089380 - RNA, 19 nt, Homo sapiens
  misc_RNA (1)...(19): siRNA sense strand
ucauuaagauggcugucaa

SEQ ID NO: 1089381 - RNA, 19 nt, Homo sapiens
  misc_RNA (1)...(19): siRNA sense strand
agauaccucuggugucauu

SEQ ID NO: 1089382 - RNA, 19 nt, Homo sapiens
  misc_RNA (1)...(19): siRNA sense strand
gaccacauccaacaguauu

SEQ ID NO: 1089383 - RNA, 19 nt, Homo sapiens
  misc_RNA (1)...(19): siRNA sense strand
ugauguggcugguauugau

SEQ ID NO: 1089384 - RNA, 19 nt, Homo sapiens
  misc_RNA (1)...(19): siRNA sense strand
gacaaccacuacaccaaca

SEQ ID NO: 1089385 - RNA, 19 nt, Homo sapiens
  misc_RNA (1)...(19): siRNA sense strand
ucucuguguuaccauaaua

SEQ ID NO: 1089386 - RNA, 19 nt, Homo sapiens
  misc_RNA (1)...(19): siRNA sense strand
guucaacgcccucuagauc

SEQ ID NO: 1089387 - RNA, 19 nt, Homo sapiens
  misc_RNA (1)...(19): siRNA sense strand
gcugaucgaccucaagaug

SEQ ID NO: 1089388 - RNA, 19 nt, Homo sapiens
  misc_RNA (1)...(19): siRNA sense strand
gaggaggucaugcagaaau

SEQ ID NO: 1089389 - RNA, 19 nt, Homo sapiens
  misc_RNA (1)...(19): siRNA sense strand
gaagucaucaaagccauug

SEQ ID NO: 1089390 - RNA, 19 nt, Homo sapiens
  misc_RNA (1)...(19): siRNA sense strand
gcucagcacaguggacuuu

SEQ ID NO: 1089391 - RNA, 19 nt, Homo sapiens
  misc_RNA (1)...(19): siRNA sense strand
caacaugggcuguccaaaa

SEQ ID NO: 1089392 - RNA, 19 nt, Homo sapiens
  misc_RNA (1)...(19): siRNA sense strand
uugaauagccucucucugu

SEQ ID NO: 1089393 - RNA, 19 nt, Homo sapiens
  misc_RNA (1)...(19): siRNA sense strand
aggaggucaugcagaaaua

SEQ ID NO: 1089394 - RNA, 19 nt, Homo sapiens
  misc_RNA (1)...(19): siRNA sense strand
cugacaagauugagaagau

SEQ ID NO: 1089395 - RNA, 19 nt, Homo sapiens
  misc_RNA (1)...(19): siRNA sense strand
gggaaguggugaagaaagc

SEQ ID NO: 1089396 - RNA, 19 nt, Homo sapiens
  misc_RNA (1)...(19): siRNA sense strand
gcugugaagucaucaaagc

SEQ ID NO: 1089397 - RNA, 19 nt, Homo sapiens
  misc_RNA (1)...(19): siRNA sense strand
gaauagccucucucugugu

SEQ ID NO: 1089398 - RNA, 19 nt, Homo sapiens
  misc_RNA (1)...(19): siRNA sense strand
caacaguauucggacauag

SEQ ID NO: 1089399 - RNA, 19 nt, Homo sapiens
  misc_RNA (1)...(19): siRNA sense strand
cgccuguucuccucuauug

SEQ ID NO: 1089400 - RNA, 19 nt, Homo sapiens
  misc_RNA (1)...(19): siRNA sense strand
ccucuggugucauuaagau

SEQ ID NO: 1089401 - RNA, 19 nt, Homo sapiens
  misc_RNA (1)...(19): siRNA sense strand
ccucuccauuccugucaua

SEQ ID NO: 1089402 - RNA, 19 nt, Homo sapiens
  misc_RNA (1)...(19): siRNA sense strand
cuugggaaguggugaagaa

SEQ ID NO: 1089403 - RNA, 19 nt, Homo sapiens
  misc_RNA (1)...(19): siRNA sense strand
auagaggacuuucgacaag

SEQ ID NO: 1089404 - RNA, 19 nt, Homo sapiens
  misc_RNA (1)...(19): siRNA sense strand
ucagcacucuuguuaaagg

SEQ ID NO: 1089405 - RNA, 19 nt, Homo sapiens
  misc_RNA (1)...(19): siRNA sense strand
ggcagccucuuccgugaug

SEQ ID NO: 1089406 - RNA, 19 nt, Homo sapiens
  misc_RNA (1)...(19): siRNA sense strand
ugaucgaccucaagaugau

SEQ ID NO: 1089407 - RNA, 19 nt, Homo sapiens
  misc_RNA (1)...(19): siRNA sense strand
ggagccagcugaagauacc

SEQ ID NO: 1089408 - RNA, 19 nt, Homo sapiens
  misc_RNA (1)...(19): siRNA sense strand
gggacacgcagaccuguga

SEQ ID NO: 1089409 - RNA, 19 nt, Homo sapiens
  misc_RNA (1)...(19): siRNA sense strand
aaaaugauguggcugguau

SEQ ID NO: 1089410 - RNA, 19 nt, Homo sapiens
  misc_RNA (1)...(19): siRNA sense strand
ugacaagauugagaagauc

SEQ ID NO: 1089411 - RNA, 19 nt, Homo sapiens
  misc_RNA (1)...(19): siRNA sense strand
cauagaggacuuucgacaa

SEQ ID NO: 1089412 - RNA, 19 nt, Homo sapiens
  misc_RNA (1)...(19): siRNA sense strand
ccugucagcugugaaguca

SEQ ID NO: 1089413 - RNA, 19 nt, Homo sapiens
  misc_RNA (1)...(19): siRNA sense strand
ugucagcugugaagucauc

SEQ ID NO: 1089414 - RNA, 19 nt, Homo sapiens
  misc_RNA (1)...(19): siRNA sense strand
uaagaugugccuacuagag

SEQ ID NO: 1089415 - RNA, 19 nt, Homo sapiens
  misc_RNA (1)...(19): siRNA sense strand
aauagccucucucuguguu

SEQ ID NO: 1089416 - RNA, 19 nt, Homo sapiens
  misc_RNA (1)...(19): siRNA sense strand
gcuccaugcugcccagucu

SEQ ID NO: 1089417 - RNA, 19 nt, Homo sapiens
  misc_RNA (1)...(19): siRNA sense strand
ugccaucgcuagaagauac

SEQ ID NO: 1089418 - RNA, 19 nt, Homo sapiens
  misc_RNA (1)...(19): siRNA sense strand
ugucaccguugcugaacaa

SEQ ID NO: 1089419 - RNA, 19 nt, Homo sapiens
  misc_RNA (1)...(19): siRNA sense strand
caacggaggaucucaugac

SEQ ID NO: 1089420 - RNA, 19 nt, Homo sapiens
  misc_RNA (1)...(19): siRNA sense strand
uuaagauggcugucaaguu

SEQ ID NO: 1089421 - RNA, 19 nt, Homo sapiens
  misc_RNA (1)...(19): siRNA sense strand
ucagcacaguggacuuugu

SEQ ID NO: 1089422 - RNA, 19 nt, Homo sapiens
  misc_RNA (1)...(19): siRNA sense strand
gaggaucucaugaccacau

SEQ ID NO: 1089423 - RNA, 19 nt, Homo sapiens
  misc_RNA (1)...(19): siRNA sense strand
guguuaccauaauaagcua

SEQ ID NO: 1089424 - RNA, 19 nt, Homo sapiens
  misc_RNA (1)...(19): siRNA sense strand
cggacauuguuuacuguga

SEQ ID NO: 1089425 - RNA, 19 nt, Homo sapiens
  misc_RNA (1)...(19): siRNA sense strand
gaugauucagugcaagaga

SEQ ID NO: 1089426 - RNA, 19 nt, Homo sapiens
  misc_RNA (1)...(19): siRNA sense strand
gauuauggagcggacauug

SEQ ID NO: 1089427 - RNA, 19 nt, Homo sapiens
  misc_RNA (1)...(19): siRNA sense strand
uagggacucuuccaaugag

SEQ ID NO: 1089428 - RNA, 19 nt, Homo sapiens
  misc_RNA (1)...(19): siRNA sense strand
uuauggagcggacauuguu

SEQ ID NO: 1089429 - RNA, 19 nt, Homo sapiens
  misc_RNA (1)...(19): siRNA sense strand
guggaacccaucuaucuuc

SEQ ID NO: 1089430 - RNA, 19 nt, Homo sapiens
  misc_RNA (1)...(19): siRNA sense strand
cagcugugaagucaucaaa

SEQ ID NO: 1089431 - RNA, 19 nt, Homo sapiens
  misc_RNA (1)...(19): siRNA sense strand
agagaggacuggcauugcu

SEQ ID NO: 1089432 - RNA, 19 nt, Homo sapiens
  misc_RNA (1)...(19): siRNA sense strand
gcagaacaggguggucuuc

SEQ ID NO: 1089433 - RNA, 19 nt, Homo sapiens
  misc_RNA (1)...(19): siRNA sense strand
ggaggaggucaugcagaaa

SEQ ID NO: 1089434 - RNA, 19 nt, Homo sapiens
  misc_RNA (1)...(19): siRNA sense strand
gauagagaggacuggcauu

SEQ ID NO: 1089435 - RNA, 19 nt, Homo sapiens
  misc_RNA (1)...(19): siRNA sense strand
gugcaagagaguuguuaau

SEQ ID NO: 1089436 - RNA, 19 nt, Homo sapiens
  misc_RNA (1)...(19): siRNA sense strand
auccucagcacucuuguua

SEQ ID NO: 1089437 - RNA, 19 nt, Homo sapiens
  misc_RNA (1)...(19): siRNA sense strand
ccauguggaacccaucuau

SEQ ID NO: 1089438 - RNA, 19 nt, Homo sapiens
  misc_RNA (1)...(19): siRNA sense strand
gaaaaugauguggcuggua

SEQ ID NO: 1089439 - RNA, 19 nt, Homo sapiens
  misc_RNA (1)...(19): siRNA sense strand
guacugcuugugccagaug

SEQ ID NO: 1089440 - RNA, 19 nt, Homo sapiens
  misc_RNA (1)...(19): siRNA sense strand
gcaguaugacaaccacuac

SEQ ID NO: 1089441 - RNA, 19 nt, Homo sapiens
  misc_RNA (1)...(19): siRNA sense strand
augcagaaauacaucagau

SEQ ID NO: 1089442 - RNA, 19 nt, Homo sapiens
  misc_RNA (1)...(19): siRNA sense strand
gauccucagcacucuuguu

SEQ ID NO: 1089443 - RNA, 19 nt, Homo sapiens
  misc_RNA (1)...(19): siRNA sense strand
aagauacccugagccuugu

SEQ ID NO: 1089444 - RNA, 19 nt, Homo sapiens
  misc_RNA (1)...(19): siRNA sense strand
ugcagaaauacaucagaua

SEQ ID NO: 1089445 - RNA, 19 nt, Homo sapiens
  misc_RNA (1)...(19): siRNA sense strand
ggucaugcagaaauacauc

SEQ ID NO: 1089446 - RNA, 19 nt, Homo sapiens
  misc_RNA (1)...(19): siRNA sense strand
ggguagggacucuuccaau

SEQ ID NO: 1089447 - RNA, 19 nt, Homo sapiens
  misc_RNA (1)...(19): siRNA sense strand
gagaagaccuuaccuauug

SEQ ID NO: 1089448 - RNA, 19 nt, Homo sapiens
  misc_RNA (1)...(19): siRNA sense strand
ggagaaaucugaucaucua

SEQ ID NO: 1089449 - RNA, 19 nt, Homo sapiens
  misc_RNA (1)...(19): siRNA sense strand
gagcaaagauugagaaaca

SEQ ID NO: 1089450 - RNA, 19 nt, Homo sapiens
  misc_RNA (1)...(19): siRNA sense strand
gcagaaaccagaaacuuua

SEQ ID NO: 1089451 - RNA, 19 nt, Homo sapiens
  misc_RNA (1)...(19): siRNA sense strand
ugaaggagauucuuucuga

SEQ ID NO: 1089452 - RNA, 19 nt, Homo sapiens
  misc_RNA (1)...(19): siRNA sense strand
gaagaagaaggaacuguua

SEQ ID NO: 1089453 - RNA, 19 nt, Homo sapiens
  misc_RNA (1)...(19): siRNA sense strand
gcacaggguuuccaaaugu

SEQ ID NO: 1089454 - RNA, 19 nt, Homo sapiens
  misc_RNA (1)...(19): siRNA sense strand
uaagaacuguccugugaua

SEQ ID NO: 1089455 - RNA, 19 nt, Homo sapiens
  misc_RNA (1)...(19): siRNA sense strand
gaagaaggaacuguuaaua

SEQ ID NO: 1089456 - RNA, 19 nt, Homo sapiens
  misc_RNA (1)...(19): siRNA sense strand
gaaagacaccgaaaguaaa

SEQ ID NO: 1089457 - RNA, 19 nt, Homo sapiens
  misc_RNA (1)...(19): siRNA sense strand
gagaggaaguggcugaauu

SEQ ID NO: 1089458 - RNA, 19 nt, Homo sapiens
  misc_RNA (1)...(19): siRNA sense strand
ggaaauaauugagaaggaa

SEQ ID NO: 1089459 - RNA, 19 nt, Homo sapiens
  misc_RNA (1)...(19): siRNA sense strand
gagaagauuuggagaacaa

SEQ ID NO: 1089460 - RNA, 19 nt, Homo sapiens
  misc_RNA (1)...(19): siRNA sense strand
gcaacccagucacaaauaa

SEQ ID NO: 1089461 - RNA, 19 nt, Homo sapiens
  misc_RNA (1)...(19): siRNA sense strand
ccagaaacuuuaaaucuug

SEQ ID NO: 1089462 - RNA, 19 nt, Homo sapiens
  misc_RNA (1)...(19): siRNA sense strand
gaacaaguauuaggugauc

SEQ ID NO: 1089463 - RNA, 19 nt, Homo sapiens
  misc_RNA (1)...(19): siRNA sense strand
ccagaaagcucaaaaugua

SEQ ID NO: 1089464 - RNA, 19 nt, Homo sapiens
  misc_RNA (1)...(19): siRNA sense strand
gaacuguccugugauaaau

SEQ ID NO: 1089465 - RNA, 19 nt, Homo sapiens
  misc_RNA (1)...(19): siRNA sense strand
gagcaaagaggacaauuga

SEQ ID NO: 1089466 - RNA, 19 nt, Homo sapiens
  misc_RNA (1)...(19): siRNA sense strand
caaccuggauguccucaaa

SEQ ID NO: 1089467 - RNA, 19 nt, Homo sapiens
  misc_RNA (1)...(19): siRNA sense strand
gagaaggacuguucaaacu

SEQ ID NO: 1089468 - RNA, 19 nt, Homo sapiens
  misc_RNA (1)...(19): siRNA sense strand
cacaaccucugcagacuua

SEQ ID NO: 1089469 - RNA, 19 nt, Homo sapiens
  misc_RNA (1)...(19): siRNA sense strand
gaauugaaucgacaaagua

SEQ ID NO: 1089470 - RNA, 19 nt, Homo sapiens
  misc_RNA (1)...(19): siRNA sense strand
gaagagaagaccuuaccua

SEQ ID NO: 1089471 - RNA, 19 nt, Homo sapiens
  misc_RNA (1)...(19): siRNA sense strand
gauuugacauugcagaauu

SEQ ID NO: 1089472 - RNA, 19 nt, Homo sapiens
  misc_RNA (1)...(19): siRNA sense strand
gguacgccgucaugaaaua

SEQ ID NO: 1089473 - RNA, 19 nt, Homo sapiens
  misc_RNA (1)...(19): siRNA sense strand
aaugucaccuguucaguua

SEQ ID NO: 1089474 - RNA, 19 nt, Homo sapiens
  misc_RNA (1)...(19): siRNA sense strand
ugacacgaauugcugauuu

SEQ ID NO: 1089475 - RNA, 19 nt, Homo sapiens
  misc_RNA (1)...(19): siRNA sense strand
ggauaacucucuaaacucu

SEQ ID NO: 1089476 - RNA, 19 nt, Homo sapiens
  misc_RNA (1)...(19): siRNA sense strand
gaagaauagagcauuagua

SEQ ID NO: 1089477 - RNA, 19 nt, Homo sapiens
  misc_RNA (1)...(19): siRNA sense strand
ggaacggauugcagaauug

SEQ ID NO: 1089478 - RNA, 19 nt, Homo sapiens
  misc_RNA (1)...(19): siRNA sense strand
gaaauucaggcaucagaaa

SEQ ID NO: 1089479 - RNA, 19 nt, Homo sapiens
  misc_RNA (1)...(19): siRNA sense strand
gcugaaauucuucgucuua

SEQ ID NO: 1089480 - RNA, 19 nt, Homo sapiens
  misc_RNA (1)...(19): siRNA sense strand
aaagagcuguuuccucgua

SEQ ID NO: 1089481 - RNA, 19 nt, Homo sapiens
  misc_RNA (1)...(19): siRNA sense strand
guaaagaaguagagacaag

SEQ ID NO: 1089482 - RNA, 19 nt, Homo sapiens
  misc_RNA (1)...(19): siRNA sense strand
ugauguagauggugaagaa

SEQ ID NO: 1089483 - RNA, 19 nt, Homo sapiens
  misc_RNA (1)...(19): siRNA sense strand
gaaauacacaaaucgaaga

SEQ ID NO: 1089484 - RNA, 19 nt, Homo sapiens
  misc_RNA (1)...(19): siRNA sense strand
gaaugaagaaggcugguuu

SEQ ID NO: 1089485 - RNA, 19 nt, Homo sapiens
  misc_RNA (1)...(19): siRNA sense strand
agaaagacaccgaaaguaa

SEQ ID NO: 1089486 - RNA, 19 nt, Homo sapiens
  misc_RNA (1)...(19): siRNA sense strand
ugagccagcuguguuguua

SEQ ID NO: 1089487 - RNA, 19 nt, Homo sapiens
  misc_RNA (1)...(19): siRNA sense strand
ucaaggcacauaugaauaa

SEQ ID NO: 1089488 - RNA, 19 nt, Homo sapiens
  misc_RNA (1)...(19): siRNA sense strand
caaagaaaggacauaauga

SEQ ID NO: 1089489 - RNA, 19 nt, Homo sapiens
  misc_RNA (1)...(19): siRNA sense strand
cccaaucuaucuuuaauga

SEQ ID NO: 1089490 - RNA, 19 nt, Homo sapiens
  misc_RNA (1)...(19): siRNA sense strand
gaccuuaccuauugauaca

SEQ ID NO: 1089491 - RNA, 19 nt, Homo sapiens
  misc_RNA (1)...(19): siRNA sense strand
gauaauaccgugacugauc

SEQ ID NO: 1089492 - RNA, 19 nt, Homo sapiens
  misc_RNA (1)...(19): siRNA sense strand
ccagcuacguaaagaagua

SEQ ID NO: 1089493 - RNA, 19 nt, Homo sapiens
  misc_RNA (1)...(19): siRNA sense strand
gaagauugucuaucaugaa

SEQ ID NO: 1089494 - RNA, 19 nt, Homo sapiens
  misc_RNA (1)...(19): siRNA sense strand
gaaggcugguuugcucuuu

SEQ ID NO: 1089495 - RNA, 19 nt, Homo sapiens
  misc_RNA (1)...(19): siRNA sense strand
auuaagaacuguccuguga

SEQ ID NO: 1089496 - RNA, 19 nt, Homo sapiens
  misc_RNA (1)...(19): siRNA sense strand
caaauaggacuaauuccaa

SEQ ID NO: 1089497 - RNA, 19 nt, Homo sapiens
  misc_RNA (1)...(19): siRNA sense strand
aaagugagaaugagaauga

SEQ ID NO: 1089498 - RNA, 19 nt, Homo sapiens
  misc_RNA (1)...(19): siRNA sense strand
gaaagcggagccacaggua

SEQ ID NO: 1089499 - RNA, 19 nt, Homo sapiens
  misc_RNA (1)...(19): siRNA sense strand
acaugaaucuggccaagaa

SEQ ID NO: 1089500 - RNA, 19 nt, Homo sapiens
  misc_RNA (1)...(19): siRNA sense strand
ucucuaaacucucagucua

SEQ ID NO: 1089501 - RNA, 19 nt, Homo sapiens
  misc_RNA (1)...(19): siRNA sense strand
ggacauaaugacacgaauu

SEQ ID NO: 1089502 - RNA, 19 nt, Homo sapiens
  misc_RNA (1)...(19): siRNA sense strand
ugacugaucuaaccguuca

SEQ ID NO: 1089503 - RNA, 19 nt, Homo sapiens
  misc_RNA (1)...(19): siRNA sense strand
cagaagagcucccaguacu

SEQ ID NO: 1089504 - RNA, 19 nt, Homo sapiens
  misc_RNA (1)...(19): siRNA sense strand
aggcaagacuucagcagua

SEQ ID NO: 1089505 - RNA, 19 nt, Homo sapiens
  misc_RNA (1)...(19): siRNA sense strand
gcaacaacuggaacaagua

SEQ ID NO: 1089506 - RNA, 19 nt, Homo sapiens
  misc_RNA (1)...(19): siRNA sense strand
ucacacaugcuauuaagaa

SEQ ID NO: 1089507 - RNA, 19 nt, Homo sapiens
  misc_RNA (1)...(19): siRNA sense strand
gaauagagcauuaguacac

SEQ ID NO: 1089508 - RNA, 19 nt, Homo sapiens
  misc_RNA (1)...(19): siRNA sense strand
ccaccaaugucaccuguuc

SEQ ID NO: 1089509 - RNA, 19 nt, Homo sapiens
  misc_RNA (1)...(19): siRNA sense strand
gaaucuuucuccaccaaug

SEQ ID NO: 1089510 - RNA, 19 nt, Homo sapiens
  misc_RNA (1)...(19): siRNA sense strand
ugacaugacuucuacuuuu

SEQ ID NO: 1089511 - RNA, 19 nt, Homo sapiens
  misc_RNA (1)...(19): siRNA sense strand
aggaagaguugccuguuaa

SEQ ID NO: 1089512 - RNA, 19 nt, Homo sapiens
  misc_RNA (1)...(19): siRNA sense strand
acaacuggaacaaguauua

SEQ ID NO: 1089513 - RNA, 19 nt, Homo sapiens
  misc_RNA (1)...(19): siRNA sense strand
ucugcagacuuaccaaaua

SEQ ID NO: 1089514 - RNA, 19 nt, Homo sapiens
  misc_RNA (1)...(19): siRNA sense strand
gggauaauaccgugacuga

SEQ ID NO: 1089515 - RNA, 19 nt, Homo sapiens
  misc_RNA (1)...(19): siRNA sense strand
gacauaaugacacgaauug

SEQ ID NO: 1089516 - RNA, 19 nt, Homo sapiens
  misc_RNA (1)...(19): siRNA sense strand
ggcaacaacuggaacaagu

SEQ ID NO: 1089517 - RNA, 19 nt, Homo sapiens
  misc_RNA (1)...(19): siRNA sense strand
gccaucaucugcucuuuca

SEQ ID NO: 1089518 - RNA, 19 nt, Homo sapiens
  misc_RNA (1)...(19): siRNA sense strand
ucuaauagcugcagcaaaa

SEQ ID NO: 1089519 - RNA, 19 nt, Homo sapiens
  misc_RNA (1)...(19): siRNA sense strand
caagauguguuggagaaau

SEQ ID NO: 1089520 - RNA, 19 nt, Homo sapiens
  misc_RNA (1)...(19): siRNA sense strand
gaaggagauucuuucugau

SEQ ID NO: 1089521 - RNA, 19 nt, Homo sapiens
  misc_RNA (1)...(19): siRNA sense strand
gacacgaauugcugauuug

SEQ ID NO: 1089522 - RNA, 19 nt, Homo sapiens
  misc_RNA (1)...(19): siRNA sense strand
gaacaaaauugggaagaga

SEQ ID NO: 1089523 - RNA, 19 nt, Homo sapiens
  misc_RNA (1)...(19): siRNA sense strand
gaaaauagcaacccaguca

SEQ ID NO: 1089524 - RNA, 19 nt, Homo sapiens
  misc_RNA (1)...(19): siRNA sense strand
gauugucuaucaugaagga

SEQ ID NO: 1089525 - RNA, 19 nt, Homo sapiens
  misc_RNA (1)...(19): siRNA sense strand
gcaaagauugagaaacaga

SEQ ID NO: 1089526 - RNA, 19 nt, Homo sapiens
  misc_RNA (1)...(19): siRNA sense strand
gaaacaagaaugggauaau

SEQ ID NO: 1089527 - RNA, 19 nt, Homo sapiens
  misc_RNA (1)...(19): siRNA sense strand
gcucauugaugcucugaca

SEQ ID NO: 1089528 - RNA, 19 nt, Homo sapiens
  misc_RNA (1)...(19): siRNA sense strand
gaacaugaaauggaagaau

SEQ ID NO: 1089529 - RNA, 19 nt, Homo sapiens
  misc_RNA (1)...(19): siRNA sense strand
uaagaaagacaccgaaagu

SEQ ID NO: 1089530 - RNA, 19 nt, Homo sapiens
  misc_RNA (1)...(19): siRNA sense strand
gaacggauugcagaauuga

SEQ ID NO: 1089531 - RNA, 19 nt, Homo sapiens
  misc_RNA (1)...(19): siRNA sense strand
caccgaaaguaaagaagaa

SEQ ID NO: 1089532 - RNA, 19 nt, Homo sapiens
  misc_RNA (1)...(19): siRNA sense strand
acaaagaaaggacauaaug

SEQ ID NO: 1089533 - RNA, 19 nt, Homo sapiens
  misc_RNA (1)...(19): siRNA sense strand
ucugacagcugaaauucuu

SEQ ID NO: 1089534 - RNA, 19 nt, Homo sapiens
  misc_RNA (1)...(19): siRNA sense strand
uaccaaugcugucaagaga

SEQ ID NO: 1089535 - RNA, 19 nt, Homo sapiens
  misc_RNA (1)...(19): siRNA sense strand
ggagauucuuucugaucaa

SEQ ID NO: 1089536 - RNA, 19 nt, Homo sapiens
  misc_RNA (1)...(19): siRNA sense strand
gaaccucaggcucuuaaug

SEQ ID NO: 1089537 - RNA, 19 nt, Homo sapiens
  misc_RNA (1)...(19): siRNA sense strand
gggagauucacaccucuua

SEQ ID NO: 1089538 - RNA, 19 nt, Homo sapiens
  misc_RNA (1)...(19): siRNA sense strand
ggacaauugagguaucuau

SEQ ID NO: 1089539 - RNA, 19 nt, Homo sapiens
  misc_RNA (1)...(19): siRNA sense strand
ggagcaaagaggacaauug

SEQ ID NO: 1089540 - RNA, 19 nt, Homo sapiens
  misc_RNA (1)...(19): siRNA sense strand
agaauugaaucgacaaagu

SEQ ID NO: 1089541 - RNA, 19 nt, Homo sapiens
  misc_RNA (1)...(19): siRNA sense strand
gaaagugcaagugacauga

SEQ ID NO: 1089542 - RNA, 19 nt, Homo sapiens
  misc_RNA (1)...(19): siRNA sense strand
gaauugcugauuugacauu

SEQ ID NO: 1089543 - RNA, 19 nt, Homo sapiens
  misc_RNA (1)...(19): siRNA sense strand
aaucgucucuucacucaga

SEQ ID NO: 1089544 - RNA, 19 nt, Homo sapiens
  misc_RNA (1)...(19): siRNA sense strand
gaucaucgagagcucauug

SEQ ID NO: 1089545 - RNA, 19 nt, Homo sapiens
  misc_RNA (1)...(19): siRNA sense strand
gagaaagugagaaugagaa

SEQ ID NO: 1089546 - RNA, 19 nt, Homo sapiens
  misc_RNA (1)...(19): siRNA sense strand
ggagaaagugagaaugaga

SEQ ID NO: 1089547 - RNA, 19 nt, Homo sapiens
  misc_RNA (1)...(19): siRNA sense strand
gaacugcaguccaaacuug

SEQ ID NO: 1089548 - RNA, 19 nt, Homo sapiens
  misc_RNA (1)...(19): siRNA sense strand
aagaggaacugaugcaaua

SEQ ID NO: 1089549 - RNA, 19 nt, Homo sapiens
  misc_RNA (1)...(19): siRNA sense strand
gagaugauuugaacucuga

SEQ ID NO: 1089550 - RNA, 19 nt, Homo sapiens
  misc_RNA (1)...(19): siRNA sense strand
uagagaaguugccaaagua

SEQ ID NO: 1089551 - RNA, 19 nt, Homo sapiens
  misc_RNA (1)...(19): siRNA sense strand
gcuauaauuuggaggauga

SEQ ID NO: 1089552 - RNA, 19 nt, Homo sapiens
  misc_RNA (1)...(19): siRNA sense strand
ggagugaaccuguaccaaa

SEQ ID NO: 1089553 - RNA, 19 nt, Homo sapiens
  misc_RNA (1)...(19): siRNA sense strand
ccaacagccaguuuaauua

SEQ ID NO: 1089554 - RNA, 19 nt, Homo sapiens
  misc_RNA (1)...(19): siRNA sense strand
gcaagacaaugcuuccaau

SEQ ID NO: 1089555 - RNA, 19 nt, Homo sapiens
  misc_RNA (1)...(19): siRNA sense strand
ccagccaggugauguuaua

SEQ ID NO: 1089556 - RNA, 19 nt, Homo sapiens
  misc_RNA (1)...(19): siRNA sense strand
caggagagauucuucugaa

SEQ ID NO: 1089557 - RNA, 19 nt, Homo sapiens
  misc_RNA (1)...(19): siRNA sense strand
ggacguagaugcaauuuuc

SEQ ID NO: 1089558 - RNA, 19 nt, Homo sapiens
  misc_RNA (1)...(19): siRNA sense strand
gagagauucuucugaaagu

SEQ ID NO: 1089559 - RNA, 19 nt, Homo sapiens
  misc_RNA (1)...(19): siRNA sense strand
ggaggaugaugacuuggaa

SEQ ID NO: 1089560 - RNA, 19 nt, Homo sapiens
  misc_RNA (1)...(19): siRNA sense strand
ggacaggccaugaaauaug

SEQ ID NO: 1089561 - RNA, 19 nt, Homo sapiens
  misc_RNA (1)...(19): siRNA sense strand
cacgaucccuaucuuuaua

SEQ ID NO: 1089562 - RNA, 19 nt, Homo sapiens
  misc_RNA (1)...(19): siRNA sense strand
aaaguugucuucaguuuag

SEQ ID NO: 1089563 - RNA, 19 nt, Homo sapiens
  misc_RNA (1)...(19): siRNA sense strand
ugaccgaccugaagaggaa

SEQ ID NO: 1089564 - RNA, 19 nt, Homo sapiens
  misc_RNA (1)...(19): siRNA sense strand
acacagcccucaugacuca

SEQ ID NO: 1089565 - RNA, 19 nt, Homo sapiens
  misc_RNA (1)...(19): siRNA sense strand
ggaugcagcccacccuaua

SEQ ID NO: 1089566 - RNA, 19 nt, Homo sapiens
  misc_RNA (1)...(19): siRNA sense strand
gacaggccaugaaauaugu

SEQ ID NO: 1089567 - RNA, 19 nt, Homo sapiens
  misc_RNA (1)...(19): siRNA sense strand
ggccaucccuuaccacuuc

SEQ ID NO: 1089568 - RNA, 19 nt, Homo sapiens
  misc_RNA (1)...(19): siRNA sense strand
caacagccaguuuaauuau

SEQ ID NO: 1089569 - RNA, 19 nt, Homo sapiens
  misc_RNA (1)...(19): siRNA sense strand
cuagagaaguugccaaagu

SEQ ID NO: 1089570 - RNA, 19 nt, Homo sapiens
  misc_RNA (1)...(19): siRNA sense strand
agaaguugccaaaguaaua

SEQ ID NO: 1089571 - RNA, 19 nt, Homo sapiens
  misc_RNA (1)...(19): siRNA sense strand
gaagaggaacugaugcaau

SEQ ID NO: 1089572 - RNA, 19 nt, Homo sapiens
  misc_RNA (1)...(19): siRNA sense strand
aaacccaccuggauaagga

SEQ ID NO: 1089573 - RNA, 19 nt, Homo sapiens
  misc_RNA (1)...(19): siRNA sense strand
aaacagacgugaacaagcu

SEQ ID NO: 1089574 - RNA, 19 nt, Homo sapiens
  misc_RNA (1)...(19): siRNA sense strand
gugguggacuucaagauga

SEQ ID NO: 1089575 - RNA, 19 nt, Homo sapiens
  misc_RNA (1)...(19): siRNA sense strand
cagcagugguucuauuuca

SEQ ID NO: 1089576 - RNA, 19 nt, Homo sapiens
  misc_RNA (1)...(19): siRNA sense strand
gauaaggacaggccaugaa

SEQ ID NO: 1089577 - RNA, 19 nt, Homo sapiens
  misc_RNA (1)...(19): siRNA sense strand
ggucaacgcagaugugaau

SEQ ID NO: 1089578 - RNA, 19 nt, Homo sapiens
  misc_RNA (1)...(19): siRNA sense strand
aaggacaggccaugaaaua

SEQ ID NO: 1089579 - RNA, 19 nt, Homo sapiens
  misc_RNA (1)...(19): siRNA sense strand
gccaggugauguuauaaau

SEQ ID NO: 1089580 - RNA, 19 nt, Homo sapiens
  misc_RNA (1)...(19): siRNA sense strand
gcagugguucuauuucaaa

SEQ ID NO: 1089581 - RNA, 19 nt, Homo sapiens
  misc_RNA (1)...(19): siRNA sense strand
gucuugagcucuccuauag

SEQ ID NO: 1089582 - RNA, 19 nt, Homo sapiens
  misc_RNA (1)...(19): siRNA sense strand
gagauucuucugaaaguga

SEQ ID NO: 1089583 - RNA, 19 nt, Homo sapiens
  misc_RNA (1)...(19): siRNA sense strand
aauaugaggugaugugucu

SEQ ID NO: 1089584 - RNA, 19 nt, Homo sapiens
  misc_RNA (1)...(19): siRNA sense strand
ucugggaagugcuacuaua

SEQ ID NO: 1089585 - RNA, 19 nt, Homo sapiens
  misc_RNA (1)...(19): siRNA sense strand
gucaggaaaucuucgcaaa

SEQ ID NO: 1089586 - RNA, 19 nt, Homo sapiens
  misc_RNA (1)...(19): siRNA sense strand
gaaagugaaaucccugaca

SEQ ID NO: 1089587 - RNA, 19 nt, Homo sapiens
  misc_RNA (1)...(19): siRNA sense strand
ggagagauucuucugaaag

SEQ ID NO: 1089588 - RNA, 19 nt, Homo sapiens
  misc_RNA (1)...(19): siRNA sense strand
ggaaacagacgugaacaag

SEQ ID NO: 1089589 - RNA, 19 nt, Homo sapiens
  misc_RNA (1)...(19): siRNA sense strand
ggcaaacccaccuggauaa

SEQ ID NO: 1089590 - RNA, 19 nt, Homo sapiens
  misc_RNA (1)...(19): siRNA sense strand
gagugaaccuguaccaaaa

SEQ ID NO: 1089591 - RNA, 19 nt, Homo sapiens
  misc_RNA (1)...(19): siRNA sense strand
gaugaugacuuggaaacag

SEQ ID NO: 1089592 - RNA, 19 nt, Homo sapiens
  misc_RNA (1)...(19): siRNA sense strand
ccaggugauguuauaaaua

SEQ ID NO: 1089593 - RNA, 19 nt, Homo sapiens
  misc_RNA (1)...(19): siRNA sense strand
uagaugagccuuggccuuu

SEQ ID NO: 1089594 - RNA, 19 nt, Homo sapiens
  misc_RNA (1)...(19): siRNA sense strand
ggaggaucuucuuggcaaa

SEQ ID NO: 1089595 - RNA, 19 nt, Homo sapiens
  misc_RNA (1)...(19): siRNA sense strand
aaagugaaaucccugacau

SEQ ID NO: 1089596 - RNA, 19 nt, Homo sapiens
  misc_RNA (1)...(19): siRNA sense strand
gcugucaccuucccacaca

SEQ ID NO: 1089597 - RNA, 19 nt, Homo sapiens
  misc_RNA (1)...(19): siRNA sense strand
cccaacagccaguuuaauu

SEQ ID NO: 1089598 - RNA, 19 nt, Homo sapiens
  misc_RNA (1)...(19): siRNA sense strand
gaugcaauaugaggugaug

SEQ ID NO: 1089599 - RNA, 19 nt, Homo sapiens
  misc_RNA (1)...(19): siRNA sense strand
gcaauuuucugcccaagga

SEQ ID NO: 1089600 - RNA, 19 nt, Homo sapiens
  misc_RNA (1)...(19): siRNA sense strand
ucaacaucaucaacuguga

SEQ ID NO: 1089601 - RNA, 19 nt, Homo sapiens
  misc_RNA (1)...(19): siRNA sense strand
ccacgaucccuaucuuuau

SEQ ID NO: 1089602 - RNA, 19 nt, Homo sapiens
  misc_RNA (1)...(19): siRNA sense strand
gcucugugguggacuucaa

SEQ ID NO: 1089603 - RNA, 19 nt, Homo sapiens
  misc_RNA (1)...(19): siRNA sense strand
aggaacugaugcaauauga

SEQ ID NO: 1089604 - RNA, 19 nt, Homo sapiens
  misc_RNA (1)...(19): siRNA sense strand
gugguucuauuucaaagug

SEQ ID NO: 1089605 - RNA, 19 nt, Homo sapiens
  misc_RNA (1)...(19): siRNA sense strand
caagacaaugcuuccaauu

SEQ ID NO: 1089606 - RNA, 19 nt, Homo sapiens
  misc_RNA (1)...(19): siRNA sense strand
caaaaugugcaauccaaua

SEQ ID NO: 1089607 - RNA, 19 nt, Homo sapiens
  misc_RNA (1)...(19): siRNA sense strand
uggcaaacccaccuggaua

SEQ ID NO: 1089608 - RNA, 19 nt, Homo sapiens
  misc_RNA (1)...(19): siRNA sense strand
ggccagugcuauaauuugg

SEQ ID NO: 1089609 - RNA, 19 nt, Homo sapiens
  misc_RNA (1)...(19): siRNA sense strand
uuacgguucuucuccaaau

SEQ ID NO: 1089610 - RNA, 19 nt, Homo sapiens
  misc_RNA (1)...(19): siRNA sense strand
gaugauggcauuuccugau

SEQ ID NO: 1089611 - RNA, 19 nt, Homo sapiens
  misc_RNA (1)...(19): siRNA sense strand
gaaguugccaaaguaauag

SEQ ID NO: 1089612 - RNA, 19 nt, Homo sapiens
  misc_RNA (1)...(19): siRNA sense strand
gaagguccacugugcaucu

SEQ ID NO: 1089613 - RNA, 19 nt, Homo sapiens
  misc_RNA (1)...(19): siRNA sense strand
ugcgugaguucgaguauga

SEQ ID NO: 1089614 - RNA, 19 nt, Homo sapiens
  misc_RNA (1)...(19): siRNA sense strand
ucgcaaagccauccaagug

SEQ ID NO: 1089615 - RNA, 19 nt, Homo sapiens
  misc_RNA (1)...(19): siRNA sense strand
ccaaaggaucaggauauuu

SEQ ID NO: 1089616 - RNA, 19 nt, Homo sapiens
  misc_RNA (1)...(19): siRNA sense strand
guccaaaggaucaggauau

SEQ ID NO: 1089617 - RNA, 19 nt, Homo sapiens
  misc_RNA (1)...(19): siRNA sense strand
gauuugaacucugaaaaga

SEQ ID NO: 1089618 - RNA, 19 nt, Homo sapiens
  misc_RNA (1)...(19): siRNA sense strand
uagagcaguuccgugagua

SEQ ID NO: 1089619 - RNA, 19 nt, Homo sapiens
  misc_RNA (1)...(19): siRNA sense strand
cuaccuggccuaccacuau

SEQ ID NO: 1089620 - RNA, 19 nt, Homo sapiens
  misc_RNA (1)...(19): siRNA sense strand
caggaaaucuucgcaaagc

SEQ ID NO: 1089621 - RNA, 19 nt, Homo sapiens
  misc_RNA (1)...(19): siRNA sense strand
gacuagagaaguugccaaa

SEQ ID NO: 1089622 - RNA, 19 nt, Homo sapiens
  misc_RNA (1)...(19): siRNA sense strand
aauaugcuguccagacuuc

SEQ ID NO: 1089623 - RNA, 19 nt, Homo sapiens
  misc_RNA (1)...(19): siRNA sense strand
agaauaugcuguccagacu

SEQ ID NO: 1089624 - RNA, 19 nt, Homo sapiens
  misc_RNA (1)...(19): siRNA sense strand
cuacuauacccucaccuuu

SEQ ID NO: 1089625 - RNA, 19 nt, Homo sapiens
  misc_RNA (1)...(19): siRNA sense strand
caacgcagaugugaauagc

SEQ ID NO: 1089626 - RNA, 19 nt, Homo sapiens
  misc_RNA (1)...(19): siRNA sense strand
uugaggaacugcaguccaa

SEQ ID NO: 1089627 - RNA, 19 nt, Homo sapiens
  misc_RNA (1)...(19): siRNA sense strand
uccaaaggaucaggauauu

SEQ ID NO: 1089628 - RNA, 19 nt, Homo sapiens
  misc_RNA (1)...(19): siRNA sense strand
ccacccagccuauguugga

SEQ ID NO: 1089629 - RNA, 19 nt, Homo sapiens
  misc_RNA (1)...(19): siRNA sense strand
gaggaacugaugcaauaug

SEQ ID NO: 1089630 - RNA, 19 nt, Homo sapiens
  misc_RNA (1)...(19): siRNA sense strand
gccuaccacuaucccuaua

SEQ ID NO: 1089631 - RNA, 19 nt, Homo sapiens
  misc_RNA (1)...(19): siRNA sense strand
gcaagaaagagaauaugcu

SEQ ID NO: 1089632 - RNA, 19 nt, Homo sapiens
  misc_RNA (1)...(19): siRNA sense strand
ggaacugcaguccaaacuu

SEQ ID NO: 1089633 - RNA, 19 nt, Homo sapiens
  misc_RNA (1)...(19): siRNA sense strand
caucuugacauccuggaaa

SEQ ID NO: 1089634 - RNA, 19 nt, Homo sapiens
  misc_RNA (1)...(19): siRNA sense strand
ugaguucgaguaugacuug

SEQ ID NO: 1089635 - RNA, 19 nt, Homo sapiens
  misc_RNA (1)...(19): siRNA sense strand
cagccuauguuggaacgaa

SEQ ID NO: 1089636 - RNA, 19 nt, Homo sapiens
  misc_RNA (1)...(19): siRNA sense strand
uccacgaucccuaucuuua

SEQ ID NO: 1089637 - RNA, 19 nt, Homo sapiens
  misc_RNA (1)...(19): siRNA sense strand
gagaaguugccaaaguaau

SEQ ID NO: 1089638 - RNA, 19 nt, Homo sapiens
  misc_RNA (1)...(19): siRNA sense strand
ccaaaguaauagauaagcu

SEQ ID NO: 1089639 - RNA, 19 nt, Homo sapiens
  misc_RNA (1)...(19): siRNA sense strand
cuagagcaguuccgugagu

SEQ ID NO: 1089640 - RNA, 19 nt, Homo sapiens
  misc_RNA (1)...(19): siRNA sense strand
cuacacagcccucaugacu

SEQ ID NO: 1089641 - RNA, 19 nt, Homo sapiens
  misc_RNA (1)...(19): siRNA sense strand
ggauaaggacaggccauga

SEQ ID NO: 1089642 - RNA, 19 nt, Homo sapiens
  misc_RNA (1)...(19): siRNA sense strand
gaagcccaacagccaguuu

SEQ ID NO: 1089643 - RNA, 19 nt, Homo sapiens
  misc_RNA (1)...(19): siRNA sense strand
uuuggaggaugaugacuug

SEQ ID NO: 1089644 - RNA, 19 nt, Homo sapiens
  misc_RNA (1)...(19): siRNA sense strand
gaugcagcccacccuauau

SEQ ID NO: 1089645 - RNA, 19 nt, Homo sapiens
  misc_RNA (1)...(19): siRNA sense strand
ccuuaccacuucaacauca

SEQ ID NO: 1089646 - RNA, 19 nt, Homo sapiens
  misc_RNA (1)...(19): siRNA sense strand
ccaaauuugagucaggaaa

SEQ ID NO: 1089647 - RNA, 19 nt, Homo sapiens
  misc_RNA (1)...(19): siRNA sense strand
gagaagaccucauccguuu

SEQ ID NO: 1089648 - RNA, 19 nt, Homo sapiens
  misc_RNA (1)...(19): siRNA sense strand
gaagcaagaucguggaaau

SEQ ID NO: 1089649 - RNA, 19 nt, Homo sapiens
  misc_RNA (1)...(19): siRNA sense strand
cagcagcucuggaaaugua

SEQ ID NO: 1089650 - RNA, 19 nt, Homo sapiens
  misc_RNA (1)...(19): siRNA sense strand
ggaauuguucugccacuua

SEQ ID NO: 1089651 - RNA, 19 nt, Homo sapiens
  misc_RNA (1)...(19): siRNA sense strand
guacguaugcaaccgauua

SEQ ID NO: 1089652 - RNA, 19 nt, Homo sapiens
  misc_RNA (1)...(19): siRNA sense strand
gaaacuaggcuccgaagga

SEQ ID NO: 1089653 - RNA, 19 nt, Homo sapiens
  misc_RNA (1)...(19): siRNA sense strand
gaacagcagcucuggaaau

SEQ ID NO: 1089654 - RNA, 19 nt, Homo sapiens
  misc_RNA (1)...(19): siRNA sense strand
ggacggagcagccaucuuc

SEQ ID NO: 1089655 - RNA, 19 nt, Homo sapiens
  misc_RNA (1)...(19): siRNA sense strand
ggaaauguaacccaugaaa

SEQ ID NO: 1089656 - RNA, 19 nt, Homo sapiens
  misc_RNA (1)...(19): siRNA sense strand
gugcugguguccuggauua

SEQ ID NO: 1089657 - RNA, 19 nt, Homo sapiens
  misc_RNA (1)...(19): siRNA sense strand
gcaagaucguggaaaugaa

SEQ ID NO: 1089658 - RNA, 19 nt, Homo sapiens
  misc_RNA (1)...(19): siRNA sense strand
ggaacuugcugaggugaaa

SEQ ID NO: 1089659 - RNA, 19 nt, Homo sapiens
  misc_RNA (1)...(19): siRNA sense strand
gaauuguucugccacuuau

SEQ ID NO: 1089660 - RNA, 19 nt, Homo sapiens
  misc_RNA (1)...(19): siRNA sense strand
gaacaaugguguggacaag

SEQ ID NO: 1089661 - RNA, 19 nt, Homo sapiens
  misc_RNA (1)...(19): siRNA sense strand
ggaguggccuuaaagaaac

SEQ ID NO: 1089662 - RNA, 19 nt, Homo sapiens
  misc_RNA (1)...(19): siRNA sense strand
caucuucgcaucuauauug

SEQ ID NO: 1089663 - RNA, 19 nt, Homo sapiens
  misc_RNA (1)...(19): siRNA sense strand
ugaagugcauugaagagaa

SEQ ID NO: 1089664 - RNA, 19 nt, Homo sapiens
  misc_RNA (1)...(19): siRNA sense strand
gcucaacgcaggacagauu

SEQ ID NO: 1089665 - RNA, 19 nt, Homo sapiens
  misc_RNA (1)...(19): siRNA sense strand
cagcgacccuucccucuau

SEQ ID NO: 1089666 - RNA, 19 nt, Homo sapiens
  misc_RNA (1)...(19): siRNA sense strand
cauaggcacugagauagaa

SEQ ID NO: 1089667 - RNA, 19 nt, Homo sapiens
  misc_RNA (1)...(19): siRNA sense strand
ggacagauuuucaccauuc

SEQ ID NO: 1089668 - RNA, 19 nt, Homo sapiens
  misc_RNA (1)...(19): siRNA sense strand
ccauugggcugccuacuca

SEQ ID NO: 1089669 - RNA, 19 nt, Homo sapiens
  misc_RNA (1)...(19): siRNA sense strand
ggcaucauguuccuuguug

SEQ ID NO: 1089670 - RNA, 19 nt, Homo sapiens
  misc_RNA (1)...(19): siRNA sense strand
aaauacaucuucgcaucua

SEQ ID NO: 1089671 - RNA, 19 nt, Homo sapiens
  misc_RNA (1)...(19): siRNA sense strand
caagaucguggaaaugaaa

SEQ ID NO: 1089672 - RNA, 19 nt, Homo sapiens
  misc_RNA (1)...(19): siRNA sense strand
guaugcaaccgauuauaaa

SEQ ID NO: 1089673 - RNA, 19 nt, Homo sapiens
  misc_RNA (1)...(19): siRNA sense strand
ccuguuugcucugguguua

SEQ ID NO: 1089674 - RNA, 19 nt, Homo sapiens
  misc_RNA (1)...(19): siRNA sense strand
gaagugcauugaagagaac

SEQ ID NO: 1089675 - RNA, 19 nt, Homo sapiens
  misc_RNA (1)...(19): siRNA sense strand
uagaagggaugaacauuuu

SEQ ID NO: 1089676 - RNA, 19 nt, Homo sapiens
  misc_RNA (1)...(19): siRNA sense strand
aagaggaucagcagguuua

SEQ ID NO: 1089677 - RNA, 19 nt, Homo sapiens
  misc_RNA (1)...(19): siRNA sense strand
cguaugcaaccgauuauaa

SEQ ID NO: 1089678 - RNA, 19 nt, Homo sapiens
  misc_RNA (1)...(19): siRNA sense strand
gaaauacaucuucgcaucu

SEQ ID NO: 1089679 - RNA, 19 nt, Homo sapiens
  misc_RNA (1)...(19): siRNA sense strand
ccucauccguuucuucaau

SEQ ID NO: 1089680 - RNA, 19 nt, Homo sapiens
  misc_RNA (1)...(19): siRNA sense strand
uguccuggauuauguggua

SEQ ID NO: 1089681 - RNA, 19 nt, Homo sapiens
  misc_RNA (1)...(19): siRNA sense strand
ucagaaggcaacaaagaaa

SEQ ID NO: 1089682 - RNA, 19 nt, Homo sapiens
  misc_RNA (1)...(19): siRNA sense strand
uauauugggccauguuauu

SEQ ID NO: 1089683 - RNA, 19 nt, Homo sapiens
  misc_RNA (1)...(19): siRNA sense strand
gaaaggcgagcaggaacuu

SEQ ID NO: 1089684 - RNA, 19 nt, Homo sapiens
  misc_RNA (1)...(19): siRNA sense strand
ugaaucagaaggcaacaaa

SEQ ID NO: 1089685 - RNA, 19 nt, Homo sapiens
  misc_RNA (1)...(19): siRNA sense strand
ggaugaacauuuuaggauu

SEQ ID NO: 1089686 - RNA, 19 nt, Homo sapiens
  misc_RNA (1)...(19): siRNA sense strand
gauagaagggaugaacauu

SEQ ID NO: 1089687 - RNA, 19 nt, Homo sapiens
  misc_RNA (1)...(19): siRNA sense strand
gaagaccucauccguuucu

SEQ ID NO: 1089688 - RNA, 19 nt, Homo sapiens
  misc_RNA (1)...(19): siRNA sense strand
cuggaaauguaacccauga

SEQ ID NO: 1089689 - RNA, 19 nt, Homo sapiens
  misc_RNA (1)...(19): siRNA sense strand
aaagaaaggcgagcaggaa

SEQ ID NO: 1089690 - RNA, 19 nt, Homo sapiens
  misc_RNA (1)...(19): siRNA sense strand
acaagaggaucagcagguu

SEQ ID NO: 1089691 - RNA, 19 nt, Homo sapiens
  misc_RNA (1)...(19): siRNA sense strand
gaugaacauuuuaggauug

SEQ ID NO: 1089692 - RNA, 19 nt, Homo sapiens
  misc_RNA (1)...(19): siRNA sense strand
gguguuaggaguggccuua

SEQ ID NO: 1089693 - RNA, 19 nt, Homo sapiens
  misc_RNA (1)...(19): siRNA sense strand
aaucagaaggcaacaaaga

SEQ ID NO: 1089694 - RNA, 19 nt, Homo sapiens
  misc_RNA (1)...(19): siRNA sense strand
guucugccacuuauuuauu

SEQ ID NO: 1089695 - RNA, 19 nt, Homo sapiens
  misc_RNA (1)...(19): siRNA sense strand
cgaaggagaagaccucauc

SEQ ID NO: 1089696 - RNA, 19 nt, Homo sapiens
  misc_RNA (1)...(19): siRNA sense strand
gcaucgcugucgccuacuu

SEQ ID NO: 1089697 - RNA, 19 nt, Homo sapiens
  misc_RNA (1)...(19): siRNA sense strand
aggaguggccuuaaagaaa

SEQ ID NO: 1089698 - RNA, 19 nt, Homo sapiens
  misc_RNA (1)...(19): siRNA sense strand
aacagcagcucuggaaaug

SEQ ID NO: 1089699 - RNA, 19 nt, Homo sapiens
  misc_RNA (1)...(19): siRNA sense strand
gaccucauccguuucuuca

SEQ ID NO: 1089700 - RNA, 19 nt, Homo sapiens
  misc_RNA (1)...(19): siRNA sense strand
auagaagggaugaacauuu

SEQ ID NO: 1089701 - RNA, 19 nt, Homo sapiens
  misc_RNA (1)...(19): siRNA sense strand
gaaauguaacccaugaaaa

SEQ ID NO: 1089702 - RNA, 19 nt, Homo sapiens
  misc_RNA (1)...(19): siRNA sense strand
acccuucccucuaugauga

SEQ ID NO: 1089703 - RNA, 19 nt, Homo sapiens
  misc_RNA (1)...(19): siRNA sense strand
acaaugguguggacaagag

SEQ ID NO: 1089704 - RNA, 19 nt, Homo sapiens
  misc_RNA (1)...(19): siRNA sense strand
caagaggaucagcagguuu

SEQ ID NO: 1089705 - RNA, 19 nt, Homo sapiens
  misc_RNA (1)...(19): siRNA sense strand
auaaagucgugacccagaa

SEQ ID NO: 1089706 - RNA, 19 nt, Homo sapiens
  misc_RNA (1)...(19): siRNA sense strand
auacaucuucgcaucuaua

SEQ ID NO: 1089707 - RNA, 19 nt, Homo sapiens
  misc_RNA (1)...(19): siRNA sense strand
gccacagcguccaguguug

SEQ ID NO: 1089708 - RNA, 19 nt, Homo sapiens
  misc_RNA (1)...(19): siRNA sense strand
uguuaggaguggccuuaaa

SEQ ID NO: 1089709 - RNA, 19 nt, Homo sapiens
  misc_RNA (1)...(19): siRNA sense strand
acucaugaccugccucuga

SEQ ID NO: 1089710 - RNA, 19 nt, Homo sapiens
  misc_RNA (1)...(19): siRNA sense strand
ggaagcaagaucguggaaa

SEQ ID NO: 1089711 - RNA, 19 nt, Homo sapiens
  misc_RNA (1)...(19): siRNA sense strand
gagauagaagggaugaaca

SEQ ID NO: 1089712 - RNA, 19 nt, Homo sapiens
  misc_RNA (1)...(19): siRNA sense strand
ucaacaacguagagcucaa

SEQ ID NO: 1089713 - RNA, 19 nt, Homo sapiens
  misc_RNA (1)...(19): siRNA sense strand
gggccaccgugaacaugga

SEQ ID NO: 1089714 - RNA, 19 nt, Homo sapiens
  misc_RNA (1)...(19): siRNA sense strand
ccauaggcacugagauaga

SEQ ID NO: 1089715 - RNA, 19 nt, Homo sapiens
  misc_RNA (1)...(19): siRNA sense strand
uaggaguggccuuaaagaa

SEQ ID NO: 1089716 - RNA, 19 nt, Homo sapiens
  misc_RNA (1)...(19): siRNA sense strand
ugcaaccgauuauaaaguc

SEQ ID NO: 1089717 - RNA, 19 nt, Homo sapiens
  misc_RNA (1)...(19): siRNA sense strand
cuguuucccuccaaucuug

SEQ ID NO: 1089718 - RNA, 19 nt, Homo sapiens
  misc_RNA (1)...(19): siRNA sense strand
gaggaucagcagguuuauu

SEQ ID NO: 1089719 - RNA, 19 nt, Homo sapiens
  misc_RNA (1)...(19): siRNA sense strand
gagcucaacgcaggacaga

SEQ ID NO: 1089720 - RNA, 19 nt, Homo sapiens
  misc_RNA (1)...(19): siRNA sense strand
aggaucagcagguuuauuc

SEQ ID NO: 1089721 - RNA, 19 nt, Homo sapiens
  misc_RNA (1)...(19): siRNA sense strand
gaugaagugcauugaagag

SEQ ID NO: 1089722 - RNA, 19 nt, Homo sapiens
  misc_RNA (1)...(19): siRNA sense strand
guccucaccauugccauua

SEQ ID NO: 1089723 - RNA, 19 nt, Homo sapiens
  misc_RNA (1)...(19): siRNA sense strand
gggcaucauguuccuuguu

SEQ ID NO: 1089724 - RNA, 19 nt, Homo sapiens
  misc_RNA (1)...(19): siRNA sense strand
gaucagcagguuuauucuc

SEQ ID NO: 1089725 - RNA, 19 nt, Homo sapiens
  misc_RNA (1)...(19): siRNA sense strand
ucagcgacccuucccucua

SEQ ID NO: 1089726 - RNA, 19 nt, Homo sapiens
  misc_RNA (1)...(19): siRNA sense strand
gcagcuuuccguacguaug

SEQ ID NO: 1089727 - RNA, 19 nt, Homo sapiens
  misc_RNA (1)...(19): siRNA sense strand
ggccuuggcguucaucauc

SEQ ID NO: 1089728 - RNA, 19 nt, Homo sapiens
  misc_RNA (1)...(19): siRNA sense strand
caucauguuccuuguugga

SEQ ID NO: 1089729 - RNA, 19 nt, Homo sapiens
  misc_RNA (1)...(19): siRNA sense strand
ucuauauugggccauguua

SEQ ID NO: 1089730 - RNA, 19 nt, Homo sapiens
  misc_RNA (1)...(19): siRNA sense strand
gguccucaccauugccauu

SEQ ID NO: 1089731 - RNA, 19 nt, Homo sapiens
  misc_RNA (1)...(19): siRNA sense strand
gcaacucaacaacguagag

SEQ ID NO: 1089732 - RNA, 19 nt, Homo sapiens
  misc_RNA (1)...(19): siRNA sense strand
guuaggaguggccuuaaag

SEQ ID NO: 1089733 - RNA, 19 nt, Homo sapiens
  misc_RNA (1)...(19): siRNA sense strand
gccuuggcguucaucauca

SEQ ID NO: 1089734 - RNA, 19 nt, Homo sapiens
  misc_RNA (1)...(19): siRNA sense strand
ugaugaagugcauugaaga

SEQ ID NO: 1089735 - RNA, 19 nt, Homo sapiens
  misc_RNA (1)...(19): siRNA sense strand
uaugaugaagugcauugaa

SEQ ID NO: 1089736 - RNA, 19 nt, Homo sapiens
  misc_RNA (1)...(19): siRNA sense strand
ccucuaugaugaagugcau

SEQ ID NO: 1089737 - RNA, 19 nt, Homo sapiens
  misc_RNA (1)...(19): siRNA sense strand
cugguguccuggauuaugu

SEQ ID NO: 1089738 - RNA, 19 nt, Homo sapiens
  misc_RNA (1)...(19): siRNA sense strand
agcaagaucguggaaauga

SEQ ID NO: 1089739 - RNA, 19 nt, Homo sapiens
  misc_RNA (1)...(19): siRNA sense strand
augaugaagugcauugaag

SEQ ID NO: 1089740 - RNA, 19 nt, Homo sapiens
  misc_RNA (1)...(19): siRNA sense strand
ggaaaucgccaggaaagua

SEQ ID NO: 1089741 - RNA, 19 nt, Homo sapiens
  misc_RNA (1)...(19): siRNA sense strand
gaacuauccuaucccugaa

SEQ ID NO: 1089742 - RNA, 19 nt, Homo sapiens
  misc_RNA (1)...(19): siRNA sense strand
aaagugggaucaucgguaa

SEQ ID NO: 1089743 - RNA, 19 nt, Homo sapiens
  misc_RNA (1)...(19): siRNA sense strand
ccaagucugugaauguaaa

SEQ ID NO: 1089744 - RNA, 19 nt, Homo sapiens
  misc_RNA (1)...(19): siRNA sense strand
gcucagauguccacuacug

SEQ ID NO: 1089745 - RNA, 19 nt, Homo sapiens
  misc_RNA (1)...(19): siRNA sense strand
ggagagcccucaggaaauc

SEQ ID NO: 1089746 - RNA, 19 nt, Homo sapiens
  misc_RNA (1)...(19): siRNA sense strand
ucaagggcguguuucgaua

SEQ ID NO: 1089747 - RNA, 19 nt, Homo sapiens
  misc_RNA (1)...(19): siRNA sense strand
ggaggccuuugaaacauuu

SEQ ID NO: 1089748 - RNA, 19 nt, Homo sapiens
  misc_RNA (1)...(19): siRNA sense strand
guuacaagcuuccugacaa

SEQ ID NO: 1089749 - RNA, 19 nt, Homo sapiens
  misc_RNA (1)...(19): siRNA sense strand
caaucgggauggucacuuu

SEQ ID NO: 1089750 - RNA, 19 nt, Homo sapiens
  misc_RNA (1)...(19): siRNA sense strand
gggcugggcucugagauga

SEQ ID NO: 1089751 - RNA, 19 nt, Homo sapiens
  misc_RNA (1)...(19): siRNA sense strand
gaggaugcauucuguugga

SEQ ID NO: 1089752 - RNA, 19 nt, Homo sapiens
  misc_RNA (1)...(19): siRNA sense strand
caagaugggccgauacaau

SEQ ID NO: 1089753 - RNA, 19 nt, Homo sapiens
  misc_RNA (1)...(19): siRNA sense strand
guccaagucugugaaugua

SEQ ID NO: 1089754 - RNA, 19 nt, Homo sapiens
  misc_RNA (1)...(19): siRNA sense strand
uaagcacaaugcagccuuu

SEQ ID NO: 1089755 - RNA, 19 nt, Homo sapiens
  misc_RNA (1)...(19): siRNA sense strand
gaaaucgccaggaaaguag

SEQ ID NO: 1089756 - RNA, 19 nt, Homo sapiens
  misc_RNA (1)...(19): siRNA sense strand
ggauaucaagggcguguuu

SEQ ID NO: 1089757 - RNA, 19 nt, Homo sapiens
  misc_RNA (1)...(19): siRNA sense strand
aaaucaugcucaaguguga

SEQ ID NO: 1089758 - RNA, 19 nt, Homo sapiens
  misc_RNA (1)...(19): siRNA sense strand
aaugaugaauucugcaaga

SEQ ID NO: 1089759 - RNA, 19 nt, Homo sapiens
  misc_RNA (1)...(19): siRNA sense strand
caaugucaccuuugaggaa

SEQ ID NO: 1089760 - RNA, 19 nt, Homo sapiens
  misc_RNA (1)...(19): siRNA sense strand
aaggagagcccucaggaaa

SEQ ID NO: 1089761 - RNA, 19 nt, Homo sapiens
  misc_RNA (1)...(19): siRNA sense strand
uuacaagcuuccugacaau

SEQ ID NO: 1089762 - RNA, 19 nt, Homo sapiens
  misc_RNA (1)...(19): siRNA sense strand
gcucguggccaaagcaaug

SEQ ID NO: 1089763 - RNA, 19 nt, Homo sapiens
  misc_RNA (1)...(19): siRNA sense strand
ggaguuacccugggacaca

SEQ ID NO: 1089764 - RNA, 19 nt, Homo sapiens
  misc_RNA (1)...(19): siRNA sense strand
ucugucaccuuccaucuuc

SEQ ID NO: 1089765 - RNA, 19 nt, Homo sapiens
  misc_RNA (1)...(19): siRNA sense strand
ccucgucacccauagguuu

SEQ ID NO: 1089766 - RNA, 19 nt, Homo sapiens
  misc_RNA (1)...(19): siRNA sense strand
ggagauuggggcugauuua

SEQ ID NO: 1089767 - RNA, 19 nt, Homo sapiens
  misc_RNA (1)...(19): siRNA sense strand
gcccugaucgagccacuuu

SEQ ID NO: 1089768 - RNA, 19 nt, Homo sapiens
  misc_RNA (1)...(19): siRNA sense strand
acaugaagcuucgggaaca

SEQ ID NO: 1089769 - RNA, 19 nt, Homo sapiens
  misc_RNA (1)...(19): siRNA sense strand
guccaaagccaaggagauu

SEQ ID NO: 1089770 - RNA, 19 nt, Homo sapiens
  misc_RNA (1)...(19): siRNA sense strand
caaggagagcccucaggaa

SEQ ID NO: 1089771 - RNA, 19 nt, Homo sapiens
  misc_RNA (1)...(19): siRNA sense strand
gaguuacccugggacacaa

SEQ ID NO: 1089772 - RNA, 19 nt, Homo sapiens
  misc_RNA (1)...(19): siRNA sense strand
uggaggccuuugaaacauu

SEQ ID NO: 1089773 - RNA, 19 nt, Homo sapiens
  misc_RNA (1)...(19): siRNA sense strand
ccgagaaaaugaugaauuc

SEQ ID NO: 1089774 - RNA, 19 nt, Homo sapiens
  misc_RNA (1)...(19): siRNA sense strand
gcucuggaggccuuugaaa

SEQ ID NO: 1089775 - RNA, 19 nt, Homo sapiens
  misc_RNA (1)...(19): siRNA sense strand
gcuacccgauuguccaaag

SEQ ID NO: 1089776 - RNA, 19 nt, Homo sapiens
  misc_RNA (1)...(19): siRNA sense strand
gccaagcccaacaaccuuu

SEQ ID NO: 1089777 - RNA, 19 nt, Homo sapiens
  misc_RNA (1)...(19): siRNA sense strand
aagaugggccgauacaauc

SEQ ID NO: 1089778 - RNA, 19 nt, Homo sapiens
  misc_RNA (1)...(19): siRNA sense strand
caggaaaucgccaggaaag

SEQ ID NO: 1089779 - RNA, 19 nt, Homo sapiens
  misc_RNA (1)...(19): siRNA sense strand
uggcucagauguccacuac

SEQ ID NO: 1089780 - RNA, 19 nt, Homo sapiens
  misc_RNA (1)...(19): siRNA sense strand
ucugcaagaugggccgaua

SEQ ID NO: 1089781 - RNA, 19 nt, Homo sapiens
  misc_RNA (1)...(19): siRNA sense strand
gauuuaguccuccagaucu

SEQ ID NO: 1089782 - RNA, 19 nt, Homo sapiens
  misc_RNA (1)...(19): siRNA sense strand
gauuggggcugauuuaguc

SEQ ID NO: 1089783 - RNA, 19 nt, Homo sapiens
  misc_RNA (1)...(19): siRNA sense strand
cugggaguauggucgaauu

SEQ ID NO: 1089784 - RNA, 19 nt, Homo sapiens
  misc_RNA (1)...(19): siRNA sense strand
cucaggaaaucgccaggaa

SEQ ID NO: 1089785 - RNA, 19 nt, Homo sapiens
  misc_RNA (1)...(19): siRNA sense strand
gcaagaugggccgauacaa

SEQ ID NO: 1089786 - RNA, 19 nt, Homo sapiens
  misc_RNA (1)...(19): siRNA sense strand
gaaaaucaugcucaagugu

SEQ ID NO: 1089787 - RNA, 19 nt, Homo sapiens
  misc_RNA (1)...(19): siRNA sense strand
ucaggaaaucgccaggaaa

SEQ ID NO: 1089788 - RNA, 19 nt, Homo sapiens
  misc_RNA (1)...(19): siRNA sense strand
guguggagcugggccaauc

SEQ ID NO: 1089789 - RNA, 19 nt, Homo sapiens
  misc_RNA (1)...(19): siRNA sense strand
caccuuccaucuucuucug

SEQ ID NO: 1089790 - RNA, 19 nt, Homo sapiens
  misc_RNA (1)...(19): siRNA sense strand
ucuggaggccuuugaaaca

SEQ ID NO: 1089791 - RNA, 19 nt, Homo sapiens
  misc_RNA (1)...(19): siRNA sense strand
cguccaagucugugaaugu

SEQ ID NO: 1089792 - RNA, 19 nt, Homo sapiens
  misc_RNA (1)...(19): siRNA sense strand
uuucgaugcuugcguccaa

SEQ ID NO: 1089793 - RNA, 19 nt, Homo sapiens
  misc_RNA (1)...(19): siRNA sense strand
uccgggagguggauaucaa

SEQ ID NO: 1089794 - RNA, 19 nt, Homo sapiens
  misc_RNA (1)...(19): siRNA sense strand
caaguaguggugacugauc

SEQ ID NO: 1089795 - RNA, 19 nt, Homo sapiens
  misc_RNA (1)...(19): siRNA sense strand
cucaaguaguggugacuga

SEQ ID NO: 1089796 - RNA, 19 nt, Homo sapiens
  misc_RNA (1)...(19): siRNA sense strand
ugaaaaucaugcucaagug

SEQ ID NO: 1089797 - RNA, 19 nt, Homo sapiens
  misc_RNA (1)...(19): siRNA sense strand
gggccgauacaaucuguca

SEQ ID NO: 1089798 - RNA, 19 nt, Homo sapiens
  misc_RNA (1)...(19): siRNA sense strand
ggccaagcccaacaaccuu

SEQ ID NO: 1089799 - RNA, 19 nt, Homo sapiens
  misc_RNA (1)...(19): siRNA sense strand
gauagugugugaggucuua

SEQ ID NO: 1089800 - RNA, 19 nt, Homo sapiens
  misc_RNA (1)...(19): siRNA sense strand
gcucugggaguuacuauua

SEQ ID NO: 1089801 - RNA, 19 nt, Homo sapiens
  misc_RNA (1)...(19): siRNA sense strand
gugaaugacuuuacccaaa

SEQ ID NO: 1089802 - RNA, 19 nt, Homo sapiens
  misc_RNA (1)...(19): siRNA sense strand
caccugagcuguuaaagau

SEQ ID NO: 1089803 - RNA, 19 nt, Homo sapiens
  misc_RNA (1)...(19): siRNA sense strand
ggagaucucugcaucacau

SEQ ID NO: 1089804 - RNA, 19 nt, Homo sapiens
  misc_RNA (1)...(19): siRNA sense strand
cgaagaugcugaaggaguu

SEQ ID NO: 1089805 - RNA, 19 nt, Homo sapiens
  misc_RNA (1)...(19): siRNA sense strand
uaaagauccugcauucuca

SEQ ID NO: 1089806 - RNA, 19 nt, Homo sapiens
  misc_RNA (1)...(19): siRNA sense strand
guaauuggcccugauggua

SEQ ID NO: 1089807 - RNA, 19 nt, Homo sapiens
  misc_RNA (1)...(19): siRNA sense strand
guucagcaccuuccaguuu

SEQ ID NO: 1089808 - RNA, 19 nt, Homo sapiens
  misc_RNA (1)...(19): siRNA sense strand
ggaaguaauuggcccugau

SEQ ID NO: 1089809 - RNA, 19 nt, Homo sapiens
  misc_RNA (1)...(19): siRNA sense strand
acacguauauugccaaagu

SEQ ID NO: 1089810 - RNA, 19 nt, Homo sapiens
  misc_RNA (1)...(19): siRNA sense strand
uaccaaaacucucaagaua

SEQ ID NO: 1089811 - RNA, 19 nt, Homo sapiens
  misc_RNA (1)...(19): siRNA sense strand
gcaggaugcuaaacuacau

SEQ ID NO: 1089812 - RNA, 19 nt, Homo sapiens
  misc_RNA (1)...(19): siRNA sense strand
gggaguuacuauuaccaaa

SEQ ID NO: 1089813 - RNA, 19 nt, Homo sapiens
  misc_RNA (1)...(19): siRNA sense strand
uguuaaagauccugcauuc

SEQ ID NO: 1089814 - RNA, 19 nt, Homo sapiens
  misc_RNA (1)...(19): siRNA sense strand
ugugugaggucuuaucaug

SEQ ID NO: 1089815 - RNA, 19 nt, Homo sapiens
  misc_RNA (1)...(19): siRNA sense strand
gaaguaauuggcccugaug

SEQ ID NO: 1089816 - RNA, 19 nt, Homo sapiens
  misc_RNA (1)...(19): siRNA sense strand
caguuucucuacacguaua

SEQ ID NO: 1089817 - RNA, 19 nt, Homo sapiens
  misc_RNA (1)...(19): siRNA sense strand
gaugcuaaacuacauggaa

SEQ ID NO: 1089818 - RNA, 19 nt, Homo sapiens
  misc_RNA (1)...(19): siRNA sense strand
ccaaaacucucaagauagu

SEQ ID NO: 1089819 - RNA, 19 nt, Homo sapiens
  misc_RNA (1)...(19): siRNA sense strand
cuacauggaacaggaagua

SEQ ID NO: 1089820 - RNA, 19 nt, Homo sapiens
  misc_RNA (1)...(19): siRNA sense strand
cuacacguauauugccaaa

SEQ ID NO: 1089821 - RNA, 19 nt, Homo sapiens
  misc_RNA (1)...(19): siRNA sense strand
cauggaacaggaaguaauu

SEQ ID NO: 1089822 - RNA, 19 nt, Homo sapiens
  misc_RNA (1)...(19): siRNA sense strand
aauuggcccugaugguaua

SEQ ID NO: 1089823 - RNA, 19 nt, Homo sapiens
  misc_RNA (1)...(19): siRNA sense strand
gagaucgaguggcugaagu

SEQ ID NO: 1089824 - RNA, 19 nt, Homo sapiens
  misc_RNA (1)...(19): siRNA sense strand
ugccgaagaugcugaagga

SEQ ID NO: 1089825 - RNA, 19 nt, Homo sapiens
  misc_RNA (1)...(19): siRNA sense strand
ugugaggucuuaucaugug

SEQ ID NO: 1089826 - RNA, 19 nt, Homo sapiens
  misc_RNA (1)...(19): siRNA sense strand
agacagauaagccaacaug

SEQ ID NO: 1089827 - RNA, 19 nt, Homo sapiens
  misc_RNA (1)...(19): siRNA sense strand
ugaaugacuuuacccaaaa

SEQ ID NO: 1089828 - RNA, 19 nt, Homo sapiens
  misc_RNA (1)...(19): siRNA sense strand
ccagugggcagccgauuau

SEQ ID NO: 1089829 - RNA, 19 nt, Homo sapiens
  misc_RNA (1)...(19): siRNA sense strand
uggugaaucucccaacaga

SEQ ID NO: 1089830 - RNA, 19 nt, Homo sapiens
  misc_RNA (1)...(19): siRNA sense strand
gaagaugcugaaggaguuu

SEQ ID NO: 1089831 - RNA, 19 nt, Homo sapiens
  misc_RNA (1)...(19): siRNA sense strand
uccaguuucucuacacgua

SEQ ID NO: 1089832 - RNA, 19 nt, Homo sapiens
  misc_RNA (1)...(19): siRNA sense strand
cagauaagccaacaugcau

SEQ ID NO: 1089833 - RNA, 19 nt, Homo sapiens
  misc_RNA (1)...(19): siRNA sense strand
gaucgaguggcugaaguuu

SEQ ID NO: 1089834 - RNA, 19 nt, Homo sapiens
  misc_RNA (1)...(19): siRNA sense strand
uuaaagauccugcauucuc

SEQ ID NO: 1089835 - RNA, 19 nt, Homo sapiens
  misc_RNA (1)...(19): siRNA sense strand
uaauuggcccugaugguau

SEQ ID NO: 1089836 - RNA, 19 nt, Homo sapiens
  misc_RNA (1)...(19): siRNA sense strand
uguggaaaguggugaaucu

SEQ ID NO: 1089837 - RNA, 19 nt, Homo sapiens
  misc_RNA (1)...(19): siRNA sense strand
caucacaugucagcaggau

SEQ ID NO: 1089838 - RNA, 19 nt, Homo sapiens
  misc_RNA (1)...(19): siRNA sense strand
cagaucuguuuaauagugu

SEQ ID NO: 1089839 - RNA, 19 nt, Homo sapiens
  misc_RNA (1)...(19): siRNA sense strand
ucagacagauaagccaaca

SEQ ID NO: 1089840 - RNA, 19 nt, Homo sapiens
  misc_RNA (1)...(19): siRNA sense strand
gcaccuuccaguuucucua

SEQ ID NO: 1089841 - RNA, 19 nt, Homo sapiens
  misc_RNA (1)...(19): siRNA sense strand
uugcagcgcucugggaguu

SEQ ID NO: 1089842 - RNA, 19 nt, Homo sapiens
  misc_RNA (1)...(19): siRNA sense strand
guauauugccaaaguggau

SEQ ID NO: 1089843 - RNA, 19 nt, Homo sapiens
  misc_RNA (1)...(19): siRNA sense strand
gcagcgcucugggaguuac

SEQ ID NO: 1089844 - RNA, 19 nt, Homo sapiens
  misc_RNA (1)...(19): siRNA sense strand
acaccugagcuguuaaaga

SEQ ID NO: 1089845 - RNA, 19 nt, Homo sapiens
  misc_RNA (1)...(19): siRNA sense strand
ggagaucgaguggcugaag

SEQ ID NO: 1089846 - RNA, 19 nt, Homo sapiens
  misc_RNA (1)...(19): siRNA sense strand
agagacgccuccggugaga

SEQ ID NO: 1089847 - RNA, 19 nt, Homo sapiens
  misc_RNA (1)...(19): siRNA sense strand
aaacuacauggaacaggaa

SEQ ID NO: 1089848 - RNA, 19 nt, Homo sapiens
  misc_RNA (1)...(19): siRNA sense strand
acagauaagccaacaugca

SEQ ID NO: 1089849 - RNA, 19 nt, Homo sapiens
  misc_RNA (1)...(19): siRNA sense strand
gugaggucuuaucauguga

SEQ ID NO: 1089850 - RNA, 19 nt, Homo sapiens
  misc_RNA (1)...(19): siRNA sense strand
ggaguuacuauuaccaaaa

SEQ ID NO: 1089851 - RNA, 19 nt, Homo sapiens
  misc_RNA (1)...(19): siRNA sense strand
uaaccgggcagagcuaaca

SEQ ID NO: 1089852 - RNA, 19 nt, Homo sapiens
  misc_RNA (1)...(19): siRNA sense strand
gaugaaagcucacagaaca

SEQ ID NO: 1089853 - RNA, 19 nt, Homo sapiens
  misc_RNA (1)...(19): siRNA sense strand
gaaaugagcucagggaaac

SEQ ID NO: 1089854 - RNA, 19 nt, Homo sapiens
  misc_RNA (1)...(19): siRNA sense strand
ggaacaagcugcugucaag

SEQ ID NO: 1089855 - RNA, 19 nt, Homo sapiens
  misc_RNA (1)...(19): siRNA sense strand
ggacagauuugccuucaca

SEQ ID NO: 1089856 - RNA, 19 nt, Homo sapiens
  misc_RNA (1)...(19): siRNA sense strand
ggaggagaaugaaaugcua

SEQ ID NO: 1089857 - RNA, 19 nt, Homo sapiens
  misc_RNA (1)...(19): siRNA sense strand
ggagaaacuugccagugaa

SEQ ID NO: 1089858 - RNA, 19 nt, Homo sapiens
  misc_RNA (1)...(19): siRNA sense strand
gggaaacgguggacgagaa

SEQ ID NO: 1089859 - RNA, 19 nt, Homo sapiens
  misc_RNA (1)...(19): siRNA sense strand
uguauaagcugcugaagga

SEQ ID NO: 1089860 - RNA, 19 nt, Homo sapiens
  misc_RNA (1)...(19): siRNA sense strand
gcacaagugucagagauca

SEQ ID NO: 1089861 - RNA, 19 nt, Homo sapiens
  misc_RNA (1)...(19): siRNA sense strand
gggaagacaucaacguuca

SEQ ID NO: 1089862 - RNA, 19 nt, Homo sapiens
  misc_RNA (1)...(19): siRNA sense strand
gaggaggacuuccggaugu

SEQ ID NO: 1089863 - RNA, 19 nt, Homo sapiens
  misc_RNA (1)...(19): siRNA sense strand
aagcagagcugacgaccaa

SEQ ID NO: 1089864 - RNA, 19 nt, Homo sapiens
  misc_RNA (1)...(19): siRNA sense strand
gagcaagguucaagagcuu

SEQ ID NO: 1089865 - RNA, 19 nt, Homo sapiens
  misc_RNA (1)...(19): siRNA sense strand
gaacagccagugaugaguu

SEQ ID NO: 1089866 - RNA, 19 nt, Homo sapiens
  misc_RNA (1)...(19): siRNA sense strand
uggagaaacuugccaguga

SEQ ID NO: 1089867 - RNA, 19 nt, Homo sapiens
  misc_RNA (1)...(19): siRNA sense strand
gaggagcccuuggagguuu

SEQ ID NO: 1089868 - RNA, 19 nt, Homo sapiens
  misc_RNA (1)...(19): siRNA sense strand
ugaagacccucaagaguca

SEQ ID NO: 1089869 - RNA, 19 nt, Homo sapiens
  misc_RNA (1)...(19): siRNA sense strand
gagaacgggcgauuguaua

SEQ ID NO: 1089870 - RNA, 19 nt, Homo sapiens
  misc_RNA (1)...(19): siRNA sense strand
ugaagcagcugaccaaucg

SEQ ID NO: 1089871 - RNA, 19 nt, Homo sapiens
  misc_RNA (1)...(19): siRNA sense strand
gggucgggcucaacaaauu

SEQ ID NO: 1089872 - RNA, 19 nt, Homo sapiens
  misc_RNA (1)...(19): siRNA sense strand
agaagagggugcuugaaga

SEQ ID NO: 1089873 - RNA, 19 nt, Homo sapiens
  misc_RNA (1)...(19): siRNA sense strand
gcacaaacgguuacagaag

SEQ ID NO: 1089874 - RNA, 19 nt, Homo sapiens
  misc_RNA (1)...(19): siRNA sense strand
gugaugaguugucugucua

SEQ ID NO: 1089875 - RNA, 19 nt, Homo sapiens
  misc_RNA (1)...(19): siRNA sense strand
gccaccaacuugaagauga

SEQ ID NO: 1089876 - RNA, 19 nt, Homo sapiens
  misc_RNA (1)...(19): siRNA sense strand
agagggugcuugaagauga

SEQ ID NO: 1089877 - RNA, 19 nt, Homo sapiens
  misc_RNA (1)...(19): siRNA sense strand
acaagcugcugucaaguga

SEQ ID NO: 1089878 - RNA, 19 nt, Homo sapiens
  misc_RNA (1)...(19): siRNA sense strand
ugaagcagcuacaggagau

SEQ ID NO: 1089879 - RNA, 19 nt, Homo sapiens
  misc_RNA (1)...(19): siRNA sense strand
gagaagagggugcuugaag

SEQ ID NO: 1089880 - RNA, 19 nt, Homo sapiens
  misc_RNA (1)...(19): siRNA sense strand
gaagacaggcaagcaauag

SEQ ID NO: 1089881 - RNA, 19 nt, Homo sapiens
  misc_RNA (1)...(19): siRNA sense strand
gcacuaucuucggaauaaa

SEQ ID NO: 1089882 - RNA, 19 nt, Homo sapiens
  misc_RNA (1)...(19): siRNA sense strand
ggagaucggacaacucaau

SEQ ID NO: 1089883 - RNA, 19 nt, Homo sapiens
  misc_RNA (1)...(19): siRNA sense strand
ggcaugaggucucggaaca

SEQ ID NO: 1089884 - RNA, 19 nt, Homo sapiens
  misc_RNA (1)...(19): siRNA sense strand
gaggacagauuugccuuca

SEQ ID NO: 1089885 - RNA, 19 nt, Homo sapiens
  misc_RNA (1)...(19): siRNA sense strand
gaagagggugcuugaagau

SEQ ID NO: 1089886 - RNA, 19 nt, Homo sapiens
  misc_RNA (1)...(19): siRNA sense strand
aauagaagaggacagauuu

SEQ ID NO: 1089887 - RNA, 19 nt, Homo sapiens
  misc_RNA (1)...(19): siRNA sense strand
gggauguccuccagagaga

SEQ ID NO: 1089888 - RNA, 19 nt, Homo sapiens
  misc_RNA (1)...(19): siRNA sense strand
gaugggagacagagcauug

SEQ ID NO: 1089889 - RNA, 19 nt, Homo sapiens
  misc_RNA (1)...(19): siRNA sense strand
gcuugaagaugagauugaa

SEQ ID NO: 1089890 - RNA, 19 nt, Homo sapiens
  misc_RNA (1)...(19): siRNA sense strand
ucaccgaguuugucacugu

SEQ ID NO: 1089891 - RNA, 19 nt, Homo sapiens
  misc_RNA (1)...(19): siRNA sense strand
cgaaaugagcucagggaaa

SEQ ID NO: 1089892 - RNA, 19 nt, Homo sapiens
  misc_RNA (1)...(19): siRNA sense strand
uugaacaccuucgaaauga

SEQ ID NO: 1089893 - RNA, 19 nt, Homo sapiens
  misc_RNA (1)...(19): siRNA sense strand
gcagaagacaggcaagcaa

SEQ ID NO: 1089894 - RNA, 19 nt, Homo sapiens
  misc_RNA (1)...(19): siRNA sense strand
ugaaaucaaacaccucaaa

SEQ ID NO: 1089895 - RNA, 19 nt, Homo sapiens
  misc_RNA (1)...(19): siRNA sense strand
gcagaugaaagcucacaga

SEQ ID NO: 1089896 - RNA, 19 nt, Homo sapiens
  misc_RNA (1)...(19): siRNA sense strand
gaggucagcccugccuaua

SEQ ID NO: 1089897 - RNA, 19 nt, Homo sapiens
  misc_RNA (1)...(19): siRNA sense strand
ugcacuaucuucggaauaa

SEQ ID NO: 1089898 - RNA, 19 nt, Homo sapiens
  misc_RNA (1)...(19): siRNA sense strand
gagaugaagacccucaaga

SEQ ID NO: 1089899 - RNA, 19 nt, Homo sapiens
  misc_RNA (1)...(19): siRNA sense strand
gaugaagacccucaagagu

SEQ ID NO: 1089900 - RNA, 19 nt, Homo sapiens
  misc_RNA (1)...(19): siRNA sense strand
gcucaucgacgcccucaug

SEQ ID NO: 1089901 - RNA, 19 nt, Homo sapiens
  misc_RNA (1)...(19): siRNA sense strand
gaaaauagaagaggacaga

SEQ ID NO: 1089902 - RNA, 19 nt, Homo sapiens
  misc_RNA (1)...(19): siRNA sense strand
agaacgggcgauuguauaa

SEQ ID NO: 1089903 - RNA, 19 nt, Homo sapiens
  misc_RNA (1)...(19): siRNA sense strand
gaggagaaugaaaugcuaa

SEQ ID NO: 1089904 - RNA, 19 nt, Homo sapiens
  misc_RNA (1)...(19): siRNA sense strand
ucaaggcaaugcaggagau

SEQ ID NO: 1089905 - RNA, 19 nt, Homo sapiens
  misc_RNA (1)...(19): siRNA sense strand
gcagagcugacgaccaaga

SEQ ID NO: 1089906 - RNA, 19 nt, Homo sapiens
  misc_RNA (1)...(19): siRNA sense strand
aaauagaagaggacagauu

SEQ ID NO: 1089907 - RNA, 19 nt, Homo sapiens
  misc_RNA (1)...(19): siRNA sense strand
cgagaacgggcgauuguau

SEQ ID NO: 1089908 - RNA, 19 nt, Homo sapiens
  misc_RNA (1)...(19): siRNA sense strand
caaccgggagcgagaagaa

SEQ ID NO: 1089909 - RNA, 19 nt, Homo sapiens
  misc_RNA (1)...(19): siRNA sense strand
gagaaugaaaugcuaaagg

SEQ ID NO: 1089910 - RNA, 19 nt, Homo sapiens
  misc_RNA (1)...(19): siRNA sense strand
gagauugaacaccuucgaa

SEQ ID NO: 1089911 - RNA, 19 nt, Homo sapiens
  misc_RNA (1)...(19): siRNA sense strand
agaagacaggcaagcaaua

SEQ ID NO: 1089912 - RNA, 19 nt, Homo sapiens
  misc_RNA (1)...(19): siRNA sense strand
ggcaucagccucccagaga

SEQ ID NO: 1089913 - RNA, 19 nt, Homo sapiens
  misc_RNA (1)...(19): siRNA sense strand
ggagcaacaucuggagaag

SEQ ID NO: 1089914 - RNA, 19 nt, Homo sapiens
  misc_RNA (1)...(19): siRNA sense strand
cagcacaaacgguuacaga

SEQ ID NO: 1089915 - RNA, 19 nt, Homo sapiens
  misc_RNA (1)...(19): siRNA sense strand
gaucggacaacucaaugug

SEQ ID NO: 1089916 - RNA, 19 nt, Homo sapiens
  misc_RNA (1)...(19): siRNA sense strand
gaaaucaaacaccucaaaa

SEQ ID NO: 1089917 - RNA, 19 nt, Homo sapiens
  misc_RNA (1)...(19): siRNA sense strand
ggacgagaacgggcgauug

SEQ ID NO: 1089918 - RNA, 19 nt, Homo sapiens
  misc_RNA (1)...(19): siRNA sense strand
gauugaacaccuucgaaau

SEQ ID NO: 1089919 - RNA, 19 nt, Homo sapiens
  misc_RNA (1)...(19): siRNA sense strand
gacgagaacgggcgauugu

SEQ ID NO: 1089920 - RNA, 19 nt, Homo sapiens
  misc_RNA (1)...(19): siRNA sense strand
ccagagagagcuugaagag

SEQ ID NO: 1089921 - RNA, 19 nt, Homo sapiens
  misc_RNA (1)...(19): siRNA sense strand
uacagaagcagauggagaa

SEQ ID NO: 1089922 - RNA, 19 nt, Homo sapiens
  misc_RNA (1)...(19): siRNA sense strand
uauaagcugcugaaggaaa

SEQ ID NO: 1089923 - RNA, 19 nt, Homo sapiens
  misc_RNA (1)...(19): siRNA sense strand
aagcugcugucaagugaga

SEQ ID NO: 1089924 - RNA, 19 nt, Homo sapiens
  misc_RNA (1)...(19): siRNA sense strand
ggagauggagaucggacaa

SEQ ID NO: 1089925 - RNA, 19 nt, Homo sapiens
  misc_RNA (1)...(19): siRNA sense strand
cagaugaaagcucacagaa

SEQ ID NO: 1089926 - RNA, 19 nt, Homo sapiens
  misc_RNA (1)...(19): siRNA sense strand
cguggaaucccaaauggaa

SEQ ID NO: 1089927 - RNA, 19 nt, Homo sapiens
  misc_RNA (1)...(19): siRNA sense strand
ugaguugucugucuaucca

SEQ ID NO: 1089928 - RNA, 19 nt, Homo sapiens
  misc_RNA (1)...(19): siRNA sense strand
gaugcagcacaaacgguua

SEQ ID NO: 1089929 - RNA, 19 nt, Homo sapiens
  misc_RNA (1)...(19): siRNA sense strand
caggaaggcuuggagaaac

SEQ ID NO: 1089930 - RNA, 19 nt, Homo sapiens
  misc_RNA (1)...(19): siRNA sense strand
gcagagcaagguucaagag

SEQ ID NO: 1089931 - RNA, 19 nt, Homo sapiens
  misc_RNA (1)...(19): siRNA sense strand
gagaucggacaacucaaug

SEQ ID NO: 1089932 - RNA, 19 nt, Homo sapiens
  misc_RNA (1)...(19): siRNA sense strand
gagccagucugcgggaaca

SEQ ID NO: 1089933 - RNA, 19 nt, Homo sapiens
  misc_RNA (1)...(19): siRNA sense strand
ccaccaacuugaagaugag

SEQ ID NO: 1089934 - RNA, 19 nt, Homo sapiens
  misc_RNA (1)...(19): siRNA sense strand
ggucagcccugccuauacc

SEQ ID NO: 1089935 - RNA, 19 nt, Homo sapiens
  misc_RNA (1)...(19): siRNA sense strand
ugggaacccugguggugaa

SEQ ID NO: 1089936 - RNA, 19 nt, Homo sapiens
  misc_RNA (1)...(19): siRNA sense strand
caugaggucucggaacaag

SEQ ID NO: 1089937 - RNA, 19 nt, Homo sapiens
  misc_RNA (1)...(19): siRNA sense strand
uucagcagcuccuaucuuc

SEQ ID NO: 1089938 - RNA, 19 nt, Homo sapiens
  misc_RNA (1)...(19): siRNA sense strand
ugagugaccuccgaaacca

SEQ ID NO: 1089939 - RNA, 19 nt, Homo sapiens
  misc_RNA (1)...(19): siRNA sense strand
gggaacagccagugaugag

SEQ ID NO: 1089940 - RNA, 19 nt, Homo sapiens
  misc_RNA (1)...(19): siRNA sense strand
ugcgacagcuggagaugga

SEQ ID NO: 1089941 - RNA, 19 nt, Homo sapiens
  misc_RNA (1)...(19): siRNA sense strand
acaggaaggcuuggagaaa

SEQ ID NO: 1089942 - RNA, 19 nt, Homo sapiens
  misc_RNA (1)...(19): siRNA sense strand
ggucugcccaccucuaaca

SEQ ID NO: 1089943 - RNA, 19 nt, Homo sapiens
  misc_RNA (1)...(19): siRNA sense strand
gagcaacaucuggagaaga

SEQ ID NO: 1089944 - RNA, 19 nt, Homo sapiens
  misc_RNA (1)...(19): siRNA sense strand
acaacucaaugugcacuau

SEQ ID NO: 1089945 - RNA, 19 nt, Homo sapiens
  misc_RNA (1)...(19): siRNA sense strand
ccagugaugaguugucugu

SEQ ID NO: 1089946 - RNA, 19 nt, Homo sapiens
  misc_RNA (1)...(19): siRNA sense strand
cagaagacaggcaagcaau

SEQ ID NO: 1089947 - RNA, 19 nt, Homo sapiens
  misc_RNA (1)...(19): siRNA sense strand
gaacaagcugcugucaagu

SEQ ID NO: 1089948 - RNA, 19 nt, Homo sapiens
  misc_RNA (1)...(19): siRNA sense strand
ccaacuugaagaugaguga

SEQ ID NO: 1089949 - RNA, 19 nt, Homo sapiens
  misc_RNA (1)...(19): siRNA sense strand
ucacuguccugcagaaacg

SEQ ID NO: 1089950 - RNA, 19 nt, Homo sapiens
  misc_RNA (1)...(19): siRNA sense strand
gaacgggcgauuguauaag

SEQ ID NO: 1089951 - RNA, 19 nt, Homo sapiens
  misc_RNA (1)...(19): siRNA sense strand
ccagagagguuggggaaga

SEQ ID NO: 1089952 - RNA, 19 nt, Homo sapiens
  misc_RNA (1)...(19): siRNA sense strand
ggacagaucuucuuggaaa

SEQ ID NO: 1089953 - RNA, 19 nt, Homo sapiens
  misc_RNA (1)...(19): siRNA sense strand
ggaaagaucucagaacaau

SEQ ID NO: 1089954 - RNA, 19 nt, Homo sapiens
  misc_RNA (1)...(19): siRNA sense strand
agaagaagcuguacuguau

SEQ ID NO: 1089955 - RNA, 19 nt, Homo sapiens
  misc_RNA (1)...(19): siRNA sense strand
gggcgugucuuaaguauug

SEQ ID NO: 1089956 - RNA, 19 nt, Homo sapiens
  misc_RNA (1)...(19): siRNA sense strand
ggaaggagauauagugaag

SEQ ID NO: 1089957 - RNA, 19 nt, Homo sapiens
  misc_RNA (1)...(19): siRNA sense strand
acaaguggcuguuaucuau

SEQ ID NO: 1089958 - RNA, 19 nt, Homo sapiens
  misc_RNA (1)...(19): siRNA sense strand
caaaagagauccacuguug

SEQ ID NO: 1089959 - RNA, 19 nt, Homo sapiens
  misc_RNA (1)...(19): siRNA sense strand
gagauguccucuauucuug

SEQ ID NO: 1089960 - RNA, 19 nt, Homo sapiens
  misc_RNA (1)...(19): siRNA sense strand
guaaugcuauugauggaaa

SEQ ID NO: 1089961 - RNA, 19 nt, Homo sapiens
  misc_RNA (1)...(19): siRNA sense strand
cagaagaaaugguagaguu

SEQ ID NO: 1089962 - RNA, 19 nt, Homo sapiens
  misc_RNA (1)...(19): siRNA sense strand
gcugagauguccucuauuc

SEQ ID NO: 1089963 - RNA, 19 nt, Homo sapiens
  misc_RNA (1)...(19): siRNA sense strand
ccagcaagauuacaaaguu

SEQ ID NO: 1089964 - RNA, 19 nt, Homo sapiens
  misc_RNA (1)...(19): siRNA sense strand
ggaaaggguccaauugguu

SEQ ID NO: 1089965 - RNA, 19 nt, Homo sapiens
  misc_RNA (1)...(19): siRNA sense strand
gaacuuggaaccugacaau

SEQ ID NO: 1089966 - RNA, 19 nt, Homo sapiens
  misc_RNA (1)...(19): siRNA sense strand
aagaagcuguacuguauuu

SEQ ID NO: 1089967 - RNA, 19 nt, Homo sapiens
  misc_RNA (1)...(19): siRNA sense strand
gaagaggacaggagccauu

SEQ ID NO: 1089968 - RNA, 19 nt, Homo sapiens
  misc_RNA (1)...(19): siRNA sense strand
gaagagacuuacagaugca

SEQ ID NO: 1089969 - RNA, 19 nt, Homo sapiens
  misc_RNA (1)...(19): siRNA sense strand
gcuguugggucguguaguu

SEQ ID NO: 1089970 - RNA, 19 nt, Homo sapiens
  misc_RNA (1)...(19): siRNA sense strand
cagcaagauuacaaaguuu

SEQ ID NO: 1089971 - RNA, 19 nt, Homo sapiens
  misc_RNA (1)...(19): siRNA sense strand
gguauccgcccugcaauua

SEQ ID NO: 1089972 - RNA, 19 nt, Homo sapiens
  misc_RNA (1)...(19): siRNA sense strand
guacaugggcugaggaaug

SEQ ID NO: 1089973 - RNA, 19 nt, Homo sapiens
  misc_RNA (1)...(19): siRNA sense strand
guaccuggcuccuuacucu

SEQ ID NO: 1089974 - RNA, 19 nt, Homo sapiens
  misc_RNA (1)...(19): siRNA sense strand
gaacuuccaugccucuaac

SEQ ID NO: 1089975 - RNA, 19 nt, Homo sapiens
  misc_RNA (1)...(19): siRNA sense strand
gagcugauaccucuguuga

SEQ ID NO: 1089976 - RNA, 19 nt, Homo sapiens
  misc_RNA (1)...(19): siRNA sense strand
ggaauuggcucaguaucgu

SEQ ID NO: 1089977 - RNA, 19 nt, Homo sapiens
  misc_RNA (1)...(19): siRNA sense strand
gugaagagacuuacagaug

SEQ ID NO: 1089978 - RNA, 19 nt, Homo sapiens
  misc_RNA (1)...(19): siRNA sense strand
gaagcuguacuguauuuau

SEQ ID NO: 1089979 - RNA, 19 nt, Homo sapiens
  misc_RNA (1)...(19): siRNA sense strand
gaggaauguucaagcagaa

SEQ ID NO: 1089980 - RNA, 19 nt, Homo sapiens
  misc_RNA (1)...(19): siRNA sense strand
gcugauaccucuguugauc

SEQ ID NO: 1089981 - RNA, 19 nt, Homo sapiens
  misc_RNA (1)...(19): siRNA sense strand
gaaacugggcgugucuuaa

SEQ ID NO: 1089982 - RNA, 19 nt, Homo sapiens
  misc_RNA (1)...(19): siRNA sense strand
gaaaugcuuuggguucauc

SEQ ID NO: 1089983 - RNA, 19 nt, Homo sapiens
  misc_RNA (1)...(19): siRNA sense strand
guauuuauguugcuauugg

SEQ ID NO: 1089984 - RNA, 19 nt, Homo sapiens
  misc_RNA (1)...(19): siRNA sense strand
gcaauuaacguuggucugu

SEQ ID NO: 1089985 - RNA, 19 nt, Homo sapiens
  misc_RNA (1)...(19): siRNA sense strand
gauguccucuauucuugaa

SEQ ID NO: 1089986 - RNA, 19 nt, Homo sapiens
  misc_RNA (1)...(19): siRNA sense strand
cugcuuacauuccaacaaa

SEQ ID NO: 1089987 - RNA, 19 nt, Homo sapiens
  misc_RNA (1)...(19): siRNA sense strand
gccaugaaguacaccauug

SEQ ID NO: 1089988 - RNA, 19 nt, Homo sapiens
  misc_RNA (1)...(19): siRNA sense strand
gcauuaaggcuguggauag

SEQ ID NO: 1089989 - RNA, 19 nt, Homo sapiens
  misc_RNA (1)...(19): siRNA sense strand
acacaaucauuaaccagaa

SEQ ID NO: 1089990 - RNA, 19 nt, Homo sapiens
  misc_RNA (1)...(19): siRNA sense strand
caaauuucuuggcuggauu

SEQ ID NO: 1089991 - RNA, 19 nt, Homo sapiens
  misc_RNA (1)...(19): siRNA sense strand
ucccauggcuauugaagaa

SEQ ID NO: 1089992 - RNA, 19 nt, Homo sapiens
  misc_RNA (1)...(19): siRNA sense strand
uucaguaccuggcuccuua

SEQ ID NO: 1089993 - RNA, 19 nt, Homo sapiens
  misc_RNA (1)...(19): siRNA sense strand
cugcugagauguccucuau

SEQ ID NO: 1089994 - RNA, 19 nt, Homo sapiens
  misc_RNA (1)...(19): siRNA sense strand
gaagaagcuguacuguauu

SEQ ID NO: 1089995 - RNA, 19 nt, Homo sapiens
  misc_RNA (1)...(19): siRNA sense strand
augcaaagcugaaagagau

SEQ ID NO: 1089996 - RNA, 19 nt, Homo sapiens
  misc_RNA (1)...(19): siRNA sense strand
aaagaucucagaacaauca

SEQ ID NO: 1089997 - RNA, 19 nt, Homo sapiens
  misc_RNA (1)...(19): siRNA sense strand
ucaagcagaagaaauggua

SEQ ID NO: 1089998 - RNA, 19 nt, Homo sapiens
  misc_RNA (1)...(19): siRNA sense strand
uaacguuggucugucugua

SEQ ID NO: 1089999 - RNA, 19 nt, Homo sapiens
  misc_RNA (1)...(19): siRNA sense strand
cuggugaugugucugcuua

SEQ ID NO: 1090000 - RNA, 19 nt, Homo sapiens
  misc_RNA (1)...(19): siRNA sense strand
aaacaugcuuugaucaucu

SEQ ID NO: 1090001 - RNA, 19 nt, Homo sapiens
  misc_RNA (1)...(19): siRNA sense strand
uaaggaaggagauauagug

SEQ ID NO: 1090002 - RNA, 19 nt, Homo sapiens
  misc_RNA (1)...(19): siRNA sense strand
uuucuuggcuggauuugaa

SEQ ID NO: 1090003 - RNA, 19 nt, Homo sapiens
  misc_RNA (1)...(19): siRNA sense strand
ggagagagcagccaaaaug

SEQ ID NO: 1090004 - RNA, 19 nt, Homo sapiens
  misc_RNA (1)...(19): siRNA sense strand
gcugaggaauguucaagca

SEQ ID NO: 1090005 - RNA, 19 nt, Homo sapiens
  misc_RNA (1)...(19): siRNA sense strand
aaugauggaucugaugaaa

SEQ ID NO: 1090006 - RNA, 19 nt, Homo sapiens
  misc_RNA (1)...(19): siRNA sense strand
cagaaaugcuuuggguuca

SEQ ID NO: 1090007 - RNA, 19 nt, Homo sapiens
  misc_RNA (1)...(19): siRNA sense strand
uggcuggauuugaagcuua

SEQ ID NO: 1090008 - RNA, 19 nt, Homo sapiens
  misc_RNA (1)...(19): siRNA sense strand
gcuguacuguauuuauguu

SEQ ID NO: 1090009 - RNA, 19 nt, Homo sapiens
  misc_RNA (1)...(19): siRNA sense strand
cagcgugaacugauuauug

SEQ ID NO: 1090010 - RNA, 19 nt, Homo sapiens
  misc_RNA (1)...(19): siRNA sense strand
cuuggaaccugacaauguu

SEQ ID NO: 1090011 - RNA, 19 nt, Homo sapiens
  misc_RNA (1)...(19): siRNA sense strand
aagaagaagcuguacugua

SEQ ID NO: 1090012 - RNA, 19 nt, Homo sapiens
  misc_RNA (1)...(19): siRNA sense strand
cacaaucauuaaccagaaa

SEQ ID NO: 1090013 - RNA, 19 nt, Homo sapiens
  misc_RNA (1)...(19): siRNA sense strand
ucauuaaccagaaacguuu

SEQ ID NO: 1090014 - RNA, 19 nt, Homo sapiens
  misc_RNA (1)...(19): siRNA sense strand
aagcuguacuguauuuaug

SEQ ID NO: 1090015 - RNA, 19 nt, Homo sapiens
  misc_RNA (1)...(19): siRNA sense strand
agaagaaaugguagaguuu

SEQ ID NO: 1090016 - RNA, 19 nt, Homo sapiens
  misc_RNA (1)...(19): siRNA sense strand
gcugaaagagauuguaaca

SEQ ID NO: 1090017 - RNA, 19 nt, Homo sapiens
  misc_RNA (1)...(19): siRNA sense strand
ugagauguccucuauucuu

SEQ ID NO: 1090018 - RNA, 19 nt, Homo sapiens
  misc_RNA (1)...(19): siRNA sense strand
gcuguuccaugggagagua

SEQ ID NO: 1090019 - RNA, 19 nt, Homo sapiens
  misc_RNA (1)...(19): siRNA sense strand
gcagaugccaugaaguaca

SEQ ID NO: 1090020 - RNA, 19 nt, Homo sapiens
  misc_RNA (1)...(19): siRNA sense strand
gaagaaacugggcgugucu

SEQ ID NO: 1090021 - RNA, 19 nt, Homo sapiens
  misc_RNA (1)...(19): siRNA sense strand
ugauaccucuguugaucuu

SEQ ID NO: 1090022 - RNA, 19 nt, Homo sapiens
  misc_RNA (1)...(19): siRNA sense strand
gaugcaaagcugaaagaga

SEQ ID NO: 1090023 - RNA, 19 nt, Homo sapiens
  misc_RNA (1)...(19): siRNA sense strand
gacugggacugcugagaug

SEQ ID NO: 1090024 - RNA, 19 nt, Homo sapiens
  misc_RNA (1)...(19): siRNA sense strand
uaggcgaguuggucugaaa

SEQ ID NO: 1090025 - RNA, 19 nt, Homo sapiens
  misc_RNA (1)...(19): siRNA sense strand
gacaauggcaaacaugcuu

SEQ ID NO: 1090026 - RNA, 19 nt, Homo sapiens
  misc_RNA (1)...(19): siRNA sense strand
gcaaagcugaaagagauug

SEQ ID NO: 1090027 - RNA, 19 nt, Homo sapiens
  misc_RNA (1)...(19): siRNA sense strand
ggaauguucaagcagaaga

SEQ ID NO: 1090028 - RNA, 19 nt, Homo sapiens
  misc_RNA (1)...(19): siRNA sense strand
ggcuggauuugaagcuuaa

SEQ ID NO: 1090029 - RNA, 19 nt, Homo sapiens
  misc_RNA (1)...(19): siRNA sense strand
gcuuuggguucaucuuuca

SEQ ID NO: 1090030 - RNA, 19 nt, Homo sapiens
  misc_RNA (1)...(19): siRNA sense strand
aaagguauccgcccugcaa

SEQ ID NO: 1090031 - RNA, 19 nt, Homo sapiens
  misc_RNA (1)...(19): siRNA sense strand
ucaaugauggaucugauga

SEQ ID NO: 1090032 - RNA, 19 nt, Homo sapiens
  misc_RNA (1)...(19): siRNA sense strand
agaaacugggcgugucuua

SEQ ID NO: 1090033 - RNA, 19 nt, Homo sapiens
  misc_RNA (1)...(19): siRNA sense strand
ucagaacaaucagaugcaa

SEQ ID NO: 1090034 - RNA, 19 nt, Homo sapiens
  misc_RNA (1)...(19): siRNA sense strand
gaauguucaagcagaagaa

SEQ ID NO: 1090035 - RNA, 19 nt, Homo sapiens
  misc_RNA (1)...(19): siRNA sense strand
uagagacaauggcaaacau

SEQ ID NO: 1090036 - RNA, 19 nt, Homo sapiens
  misc_RNA (1)...(19): siRNA sense strand
uuaaggcuguggauagcuu

SEQ ID NO: 1090037 - RNA, 19 nt, Homo sapiens
  misc_RNA (1)...(19): siRNA sense strand
gaagaaaugguagaguuuu

SEQ ID NO: 1090038 - RNA, 19 nt, Homo sapiens
  misc_RNA (1)...(19): siRNA sense strand
gagcccagcaagauuacaa

SEQ ID NO: 1090039 - RNA, 19 nt, Homo sapiens
  misc_RNA (1)...(19): siRNA sense strand
ccauggcuauugaagaaca

SEQ ID NO: 1090040 - RNA, 19 nt, Homo sapiens
  misc_RNA (1)...(19): siRNA sense strand
augcagaugccaugaagua

SEQ ID NO: 1090041 - RNA, 19 nt, Homo sapiens
  misc_RNA (1)...(19): siRNA sense strand
aaacugggcgugucuuaag

SEQ ID NO: 1090042 - RNA, 19 nt, Homo sapiens
  misc_RNA (1)...(19): siRNA sense strand
aaacacaggcuggugaugu

SEQ ID NO: 1090043 - RNA, 19 nt, Homo sapiens
  misc_RNA (1)...(19): siRNA sense strand
acaaauuucuuggcuggau

SEQ ID NO: 1090044 - RNA, 19 nt, Homo sapiens
  misc_RNA (1)...(19): siRNA sense strand
auggaaagaucucagaaca

SEQ ID NO: 1090045 - RNA, 19 nt, Homo sapiens
  misc_RNA (1)...(19): siRNA sense strand
guauguccuugaacuugga

SEQ ID NO: 1090046 - RNA, 19 nt, Homo sapiens
  misc_RNA (1)...(19): siRNA sense strand
ggugaugugucugcuuaca

SEQ ID NO: 1090047 - RNA, 19 nt, Homo sapiens
  misc_RNA (1)...(19): siRNA sense strand
cuaauuaaggaaggagaua

SEQ ID NO: 1090048 - RNA, 19 nt, Homo sapiens
  misc_RNA (1)...(19): siRNA sense strand
gguguugucguguuuggaa

SEQ ID NO: 1090049 - RNA, 19 nt, Homo sapiens
  misc_RNA (1)...(19): siRNA sense strand
ggccuauccuggugaugug

SEQ ID NO: 1090050 - RNA, 19 nt, Homo sapiens
  misc_RNA (1)...(19): siRNA sense strand
aagcugaaagagauuguaa

SEQ ID NO: 1090051 - RNA, 19 nt, Homo sapiens
  misc_RNA (1)...(19): siRNA sense strand
ugacggacagaucuucuug

SEQ ID NO: 1090052 - RNA, 19 nt, Homo sapiens
  misc_RNA (1)...(19): siRNA sense strand
gaagacagaugauucaguu

SEQ ID NO: 1090053 - RNA, 19 nt, Homo sapiens
  misc_RNA (1)...(19): siRNA sense strand
caauaacccugaagaauaa

SEQ ID NO: 1090054 - RNA, 19 nt, Homo sapiens
  misc_RNA (1)...(19): siRNA sense strand
gcaauaccuuggaugauua

SEQ ID NO: 1090055 - RNA, 19 nt, Homo sapiens
  misc_RNA (1)...(19): siRNA sense strand
gguauuaacugcccaagaa

SEQ ID NO: 1090056 - RNA, 19 nt, Homo sapiens
  misc_RNA (1)...(19): siRNA sense strand
gcacgugacuacuuucaaa

SEQ ID NO: 1090057 - RNA, 19 nt, Homo sapiens
  misc_RNA (1)...(19): siRNA sense strand
ccaguuaaccuucuaaaua

SEQ ID NO: 1090058 - RNA, 19 nt, Homo sapiens
  misc_RNA (1)...(19): siRNA sense strand
gaaauagguuaccggaauu

SEQ ID NO: 1090059 - RNA, 19 nt, Homo sapiens
  misc_RNA (1)...(19): siRNA sense strand
gauaagaucauccgacuuu

SEQ ID NO: 1090060 - RNA, 19 nt, Homo sapiens
  misc_RNA (1)...(19): siRNA sense strand
ucaauaacccugaagaaua

SEQ ID NO: 1090061 - RNA, 19 nt, Homo sapiens
  misc_RNA (1)...(19): siRNA sense strand
guaauggaguguggaaaua

SEQ ID NO: 1090062 - RNA, 19 nt, Homo sapiens
  misc_RNA (1)...(19): siRNA sense strand
caagguauuucagguguua

SEQ ID NO: 1090063 - RNA, 19 nt, Homo sapiens
  misc_RNA (1)...(19): siRNA sense strand
gcagauaaccaaacucuug

SEQ ID NO: 1090064 - RNA, 19 nt, Homo sapiens
  misc_RNA (1)...(19): siRNA sense strand
gaacaaagugagagacauu

SEQ ID NO: 1090065 - RNA, 19 nt, Homo sapiens
  misc_RNA (1)...(19): siRNA sense strand
gacaauugauuccauaaug

SEQ ID NO: 1090066 - RNA, 19 nt, Homo sapiens
  misc_RNA (1)...(19): siRNA sense strand
aaucaagucuucuagcuaa

SEQ ID NO: 1090067 - RNA, 19 nt, Homo sapiens
  misc_RNA (1)...(19): siRNA sense strand
gauaguugauggaaugcua

SEQ ID NO: 1090068 - RNA, 19 nt, Homo sapiens
  misc_RNA (1)...(19): siRNA sense strand
gggaaccacugaagaaaug

SEQ ID NO: 1090069 - RNA, 19 nt, Homo sapiens
  misc_RNA (1)...(19): siRNA sense strand
ggauuuaaguggcagagaa

SEQ ID NO: 1090070 - RNA, 19 nt, Homo sapiens
  misc_RNA (1)...(19): siRNA sense strand
gaacaugccaccacaagau

SEQ ID NO: 1090071 - RNA, 19 nt, Homo sapiens
  misc_RNA (1)...(19): siRNA sense strand
caagauguguuaaaguguu

SEQ ID NO: 1090072 - RNA, 19 nt, Homo sapiens
  misc_RNA (1)...(19): siRNA sense strand
cagaagcaaucaaagauau

SEQ ID NO: 1090073 - RNA, 19 nt, Homo sapiens
  misc_RNA (1)...(19): siRNA sense strand
uaaccaaacucuugauagu

SEQ ID NO: 1090074 - RNA, 19 nt, Homo sapiens
  misc_RNA (1)...(19): siRNA sense strand
gaacuuagaagaagcagau

SEQ ID NO: 1090075 - RNA, 19 nt, Homo sapiens
  misc_RNA (1)...(19): siRNA sense strand
gcaacagcaucaaauacuu

SEQ ID NO: 1090076 - RNA, 19 nt, Homo sapiens
  misc_RNA (1)...(19): siRNA sense strand
agaaauagguuaccggaau

SEQ ID NO: 1090077 - RNA, 19 nt, Homo sapiens
  misc_RNA (1)...(19): siRNA sense strand
agugagauuugcugaauua

SEQ ID NO: 1090078 - RNA, 19 nt, Homo sapiens
  misc_RNA (1)...(19): siRNA sense strand
gacagaugauucaguugua

SEQ ID NO: 1090079 - RNA, 19 nt, Homo sapiens
  misc_RNA (1)...(19): siRNA sense strand
gagagaaugggaaaucuaa

SEQ ID NO: 1090080 - RNA, 19 nt, Homo sapiens
  misc_RNA (1)...(19): siRNA sense strand
caagugagauuugcugaau

SEQ ID NO: 1090081 - RNA, 19 nt, Homo sapiens
  misc_RNA (1)...(19): siRNA sense strand
gauaggaaguggagguuca

SEQ ID NO: 1090082 - RNA, 19 nt, Homo sapiens
  misc_RNA (1)...(19): siRNA sense strand
gcagcaacagcaucaaaua

SEQ ID NO: 1090083 - RNA, 19 nt, Homo sapiens
  misc_RNA (1)...(19): siRNA sense strand
gagcaaacugcaagaaauu

SEQ ID NO: 1090084 - RNA, 19 nt, Homo sapiens
  misc_RNA (1)...(19): siRNA sense strand
gaucuuaauaguuggcuua

SEQ ID NO: 1090085 - RNA, 19 nt, Homo sapiens
  misc_RNA (1)...(19): siRNA sense strand
caguuaaccuucuaaauag

SEQ ID NO: 1090086 - RNA, 19 nt, Homo sapiens
  misc_RNA (1)...(19): siRNA sense strand
cagaaacaguggcaaucua

SEQ ID NO: 1090087 - RNA, 19 nt, Homo sapiens
  misc_RNA (1)...(19): siRNA sense strand
ccacugaagaaaugaaaua

SEQ ID NO: 1090088 - RNA, 19 nt, Homo sapiens
  misc_RNA (1)...(19): siRNA sense strand
caaggaaccucugguguca

SEQ ID NO: 1090089 - RNA, 19 nt, Homo sapiens
  misc_RNA (1)...(19): siRNA sense strand
gaugaacuaagcuugaaua

SEQ ID NO: 1090090 - RNA, 19 nt, Homo sapiens
  misc_RNA (1)...(19): siRNA sense strand
ccagcuaacuuucugauag

SEQ ID NO: 1090091 - RNA, 19 nt, Homo sapiens
  misc_RNA (1)...(19): siRNA sense strand
gaaagucagaguguauuaa

SEQ ID NO: 1090092 - RNA, 19 nt, Homo sapiens
  misc_RNA (1)...(19): siRNA sense strand
gauggaaugcuaaagcuaa

SEQ ID NO: 1090093 - RNA, 19 nt, Homo sapiens
  misc_RNA (1)...(19): siRNA sense strand
gcuaagugaugcucuuuua

SEQ ID NO: 1090094 - RNA, 19 nt, Homo sapiens
  misc_RNA (1)...(19): siRNA sense strand
gauaaccaaacucuugaua

SEQ ID NO: 1090095 - RNA, 19 nt, Homo sapiens
  misc_RNA (1)...(19): siRNA sense strand
augaagaccuuacugauga

SEQ ID NO: 1090096 - RNA, 19 nt, Homo sapiens
  misc_RNA (1)...(19): siRNA sense strand
aaacagucaugcccauuug

SEQ ID NO: 1090097 - RNA, 19 nt, Homo sapiens
  misc_RNA (1)...(19): siRNA sense strand
aaacagaggauauccauuc

SEQ ID NO: 1090098 - RNA, 19 nt, Homo sapiens
  misc_RNA (1)...(19): siRNA sense strand
caugggaacgcaagaguua

SEQ ID NO: 1090099 - RNA, 19 nt, Homo sapiens
  misc_RNA (1)...(19): siRNA sense strand
caagucuucuagcuaaauu

SEQ ID NO: 1090100 - RNA, 19 nt, Homo sapiens
  misc_RNA (1)...(19): siRNA sense strand
ggaaucaagucuucuagcu

SEQ ID NO: 1090101 - RNA, 19 nt, Homo sapiens
  misc_RNA (1)...(19): siRNA sense strand
caagggaaccacugaagaa

SEQ ID NO: 1090102 - RNA, 19 nt, Homo sapiens
  misc_RNA (1)...(19): siRNA sense strand
caaccugucuuuucaguuu

SEQ ID NO: 1090103 - RNA, 19 nt, Homo sapiens
  misc_RNA (1)...(19): siRNA sense strand
caacaacacagugauaaga

SEQ ID NO: 1090104 - RNA, 19 nt, Homo sapiens
  misc_RNA (1)...(19): siRNA sense strand
ccagaggacagacuacuaa

SEQ ID NO: 1090105 - RNA, 19 nt, Homo sapiens
  misc_RNA (1)...(19): siRNA sense strand
cuauaugacuuacgggaaa

SEQ ID NO: 1090106 - RNA, 19 nt, Homo sapiens
  misc_RNA (1)...(19): siRNA sense strand
ggaacuguuaaccaaauua

SEQ ID NO: 1090107 - RNA, 19 nt, Homo sapiens
  misc_RNA (1)...(19): siRNA sense strand
caaguguuguuaaagauuc

SEQ ID NO: 1090108 - RNA, 19 nt, Homo sapiens
  misc_RNA (1)...(19): siRNA sense strand
gcaaccagauacaacaagu

SEQ ID NO: 1090109 - RNA, 19 nt, Homo sapiens
  misc_RNA (1)...(19): siRNA sense strand
gcagaaacauaccacuuuu

SEQ ID NO: 1090110 - RNA, 19 nt, Homo sapiens
  misc_RNA (1)...(19): siRNA sense strand
cagaguguauuaaccagaa

SEQ ID NO: 1090111 - RNA, 19 nt, Homo sapiens
  misc_RNA (1)...(19): siRNA sense strand
uaaauagcccagauuguga

SEQ ID NO: 1090112 - RNA, 19 nt, Homo sapiens
  misc_RNA (1)...(19): siRNA sense strand
accacaagaugcagaaaua

SEQ ID NO: 1090113 - RNA, 19 nt, Homo sapiens
  misc_RNA (1)...(19): siRNA sense strand
uguagaacguggagcagua

SEQ ID NO: 1090114 - RNA, 19 nt, Homo sapiens
  misc_RNA (1)...(19): siRNA sense strand
ggaaugcuaaagcuaauug

SEQ ID NO: 1090115 - RNA, 19 nt, Homo sapiens
  misc_RNA (1)...(19): siRNA sense strand
ccacuccacuucaaaauuu

SEQ ID NO: 1090116 - RNA, 19 nt, Homo sapiens
  misc_RNA (1)...(19): siRNA sense strand
gcagcaauaccuuggauga

SEQ ID NO: 1090117 - RNA, 19 nt, Homo sapiens
  misc_RNA (1)...(19): siRNA sense strand
gaaucaagucuucuagcua

SEQ ID NO: 1090118 - RNA, 19 nt, Homo sapiens
  misc_RNA (1)...(19): siRNA sense strand
agacaaaccucuagaucag

SEQ ID NO: 1090119 - RNA, 19 nt, Homo sapiens
  misc_RNA (1)...(19): siRNA sense strand
ccagaagcaaucaaagaua

SEQ ID NO: 1090120 - RNA, 19 nt, Homo sapiens
  misc_RNA (1)...(19): siRNA sense strand
caguacaucuacaugguaa

SEQ ID NO: 1090121 - RNA, 19 nt, Homo sapiens
  misc_RNA (1)...(19): siRNA sense strand
caaagugagagacauuaaa

SEQ ID NO: 1090122 - RNA, 19 nt, Homo sapiens
  misc_RNA (1)...(19): siRNA sense strand
uaaagaguaucaagaacca

SEQ ID NO: 1090123 - RNA, 19 nt, Homo sapiens
  misc_RNA (1)...(19): siRNA sense strand
ccagauaaauauggccaaa

SEQ ID NO: 1090124 - RNA, 19 nt, Homo sapiens
  misc_RNA (1)...(19): siRNA sense strand
uguuaaagauucucagguu

SEQ ID NO: 1090125 - RNA, 19 nt, Homo sapiens
  misc_RNA (1)...(19): siRNA sense strand
uaaaccagcuaacuuucug

SEQ ID NO: 1090126 - RNA, 19 nt, Homo sapiens
  misc_RNA (1)...(19): siRNA sense strand
gaagaagcagauaaccaaa

SEQ ID NO: 1090127 - RNA, 19 nt, Homo sapiens
  misc_RNA (1)...(19): siRNA sense strand
acaaaccucuagaucagaa

SEQ ID NO: 1090128 - RNA, 19 nt, Homo sapiens
  misc_RNA (1)...(19): siRNA sense strand
uaaacagucaugcccauuu

SEQ ID NO: 1090129 - RNA, 19 nt, Homo sapiens
  misc_RNA (1)...(19): siRNA sense strand
agagcaaacugcaagaaau

SEQ ID NO: 1090130 - RNA, 19 nt, Homo sapiens
  misc_RNA (1)...(19): siRNA sense strand
ccauuucagcagauaauua

SEQ ID NO: 1090131 - RNA, 19 nt, Homo sapiens
  misc_RNA (1)...(19): siRNA sense strand
cauccgacuuuaugauuau

SEQ ID NO: 1090132 - RNA, 19 nt, Homo sapiens
  misc_RNA (1)...(19): siRNA sense strand
agaccuuacugaugaacua

SEQ ID NO: 1090133 - RNA, 19 nt, Homo sapiens
  misc_RNA (1)...(19): siRNA sense strand
ugaugcacgugacuacuuu

SEQ ID NO: 1090134 - RNA, 19 nt, Homo sapiens
  misc_RNA (1)...(19): siRNA sense strand
ucugauaguugauggaaug

SEQ ID NO: 1090135 - RNA, 19 nt, Homo sapiens
  misc_RNA (1)...(19): siRNA sense strand
cuacaacaacacagugaua

SEQ ID NO: 1090136 - RNA, 19 nt, Homo sapiens
  misc_RNA (1)...(19): siRNA sense strand
caacagcaucaaauacuug

SEQ ID NO: 1090137 - RNA, 19 nt, Homo sapiens
  misc_RNA (1)...(19): siRNA sense strand
gggaacuguuaaccaaauu

SEQ ID NO: 1090138 - RNA, 19 nt, Homo sapiens
  misc_RNA (1)...(19): siRNA sense strand
cggaauucauugagacaaa

SEQ ID NO: 1090139 - RNA, 19 nt, Homo sapiens
  misc_RNA (1)...(19): siRNA sense strand
cuaaauagcccagauugug

SEQ ID NO: 1090140 - RNA, 19 nt, Homo sapiens
  misc_RNA (1)...(19): siRNA sense strand
gaauucuccuaacuccauu

SEQ ID NO: 1090141 - RNA, 19 nt, Homo sapiens
  misc_RNA (1)...(19): siRNA sense strand
cagcagauaauuaaucaga

SEQ ID NO: 1090142 - RNA, 19 nt, Homo sapiens
  misc_RNA (1)...(19): siRNA sense strand
gcaagguauuucagguguu

SEQ ID NO: 1090143 - RNA, 19 nt, Homo sapiens
  misc_RNA (1)...(19): siRNA sense strand
gagcagaaacauaccacuu

SEQ ID NO: 1090144 - RNA, 19 nt, Homo sapiens
  misc_RNA (1)...(19): siRNA sense strand
gagaguaaccagaaacagu

SEQ ID NO: 1090145 - RNA, 19 nt, Homo sapiens
  misc_RNA (1)...(19): siRNA sense strand
gaucuaaaccaaguggaaa

SEQ ID NO: 1090146 - RNA, 19 nt, Homo sapiens
  misc_RNA (1)...(19): siRNA sense strand
gguugugccuggaucuaaa

SEQ ID NO: 1090147 - RNA, 19 nt, Homo sapiens
  misc_RNA (1)...(19): siRNA sense strand
uaaaccaaguggaaaugau

SEQ ID NO: 1090148 - RNA, 19 nt, Homo sapiens
  misc_RNA (1)...(19): siRNA sense strand
ucacggaccaguacaucua

SEQ ID NO: 1090149 - RNA, 19 nt, Homo sapiens
  misc_RNA (1)...(19): siRNA sense strand
gauaguuaccggaacgaaa

SEQ ID NO: 1090150 - RNA, 19 nt, Homo sapiens
  misc_RNA (1)...(19): siRNA sense strand
agaagaagcagauaaccaa

SEQ ID NO: 1090151 - RNA, 19 nt, Homo sapiens
  misc_RNA (1)...(19): siRNA sense strand
uacaugagcuguuuuagaa

SEQ ID NO: 1090152 - RNA, 19 nt, Homo sapiens
  misc_RNA (1)...(19): siRNA sense strand
gaacagaggauucaaauuu

SEQ ID NO: 1090153 - RNA, 19 nt, Homo sapiens
  misc_RNA (1)...(19): siRNA sense strand
gcagauaagcugaagaaua

SEQ ID NO: 1090154 - RNA, 19 nt, Homo sapiens
  misc_RNA (1)...(19): siRNA sense strand
cgacaaggcuaaacuagaa

SEQ ID NO: 1090155 - RNA, 19 nt, Homo sapiens
  misc_RNA (1)...(19): siRNA sense strand
ggagacaacugugaaauug

SEQ ID NO: 1090156 - RNA, 19 nt, Homo sapiens
  misc_RNA (1)...(19): siRNA sense strand
gaggaucaguuaaguauga

SEQ ID NO: 1090157 - RNA, 19 nt, Homo sapiens
  misc_RNA (1)...(19): siRNA sense strand
gaaugugaauccucucuuu

SEQ ID NO: 1090158 - RNA, 19 nt, Homo sapiens
  misc_RNA (1)...(19): siRNA sense strand
cagauaagcugaagaauac

SEQ ID NO: 1090159 - RNA, 19 nt, Homo sapiens
  misc_RNA (1)...(19): siRNA sense strand
uugagaagcugcagacuua

SEQ ID NO: 1090160 - RNA, 19 nt, Homo sapiens
  misc_RNA (1)...(19): siRNA sense strand
gauaacaacuaaugacugu

SEQ ID NO: 1090161 - RNA, 19 nt, Homo sapiens
  misc_RNA (1)...(19): siRNA sense strand
ggaaucucgugaagacuua

SEQ ID NO: 1090162 - RNA, 19 nt, Homo sapiens
  misc_RNA (1)...(19): siRNA sense strand
gacauuaucuaaacagaga

SEQ ID NO: 1090163 - RNA, 19 nt, Homo sapiens
  misc_RNA (1)...(19): siRNA sense strand
gagaagagauugacacacu

SEQ ID NO: 1090164 - RNA, 19 nt, Homo sapiens
  misc_RNA (1)...(19): siRNA sense strand
ggaagaaugucaauuacag

SEQ ID NO: 1090165 - RNA, 19 nt, Homo sapiens
  misc_RNA (1)...(19): siRNA sense strand
gauguuggaagcacaauua

SEQ ID NO: 1090166 - RNA, 19 nt, Homo sapiens
  misc_RNA (1)...(19): siRNA sense strand
ugaacuagcucuaagugaa

SEQ ID NO: 1090167 - RNA, 19 nt, Homo sapiens
  misc_RNA (1)...(19): siRNA sense strand
acacuuaaccuccuacaua

SEQ ID NO: 1090168 - RNA, 19 nt, Homo sapiens
  misc_RNA (1)...(19): siRNA sense strand
gcaacaauuuggacuacuu

SEQ ID NO: 1090169 - RNA, 19 nt, Homo sapiens
  misc_RNA (1)...(19): siRNA sense strand
gcaaggauaguggaacuua

SEQ ID NO: 1090170 - RNA, 19 nt, Homo sapiens
  misc_RNA (1)...(19): siRNA sense strand
gaagauagaagagaaugaa

SEQ ID NO: 1090171 - RNA, 19 nt, Homo sapiens
  misc_RNA (1)...(19): siRNA sense strand
cacuaaagauguccaguaa

SEQ ID NO: 1090172 - RNA, 19 nt, Homo sapiens
  misc_RNA (1)...(19): siRNA sense strand
gaacgacaaggcuaaacua

SEQ ID NO: 1090173 - RNA, 19 nt, Homo sapiens
  misc_RNA (1)...(19): siRNA sense strand
gagaaugaacgguugcaua

SEQ ID NO: 1090174 - RNA, 19 nt, Homo sapiens
  misc_RNA (1)...(19): siRNA sense strand
gacacuauaucuccauuga

SEQ ID NO: 1090175 - RNA, 19 nt, Homo sapiens
  misc_RNA (1)...(19): siRNA sense strand
gaagagauugacacacuaa

SEQ ID NO: 1090176 - RNA, 19 nt, Homo sapiens
  misc_RNA (1)...(19): siRNA sense strand
ugacggcucuucuaaacuu

SEQ ID NO: 1090177 - RNA, 19 nt, Homo sapiens
  misc_RNA (1)...(19): siRNA sense strand
ugacagcuguguuugagaa

SEQ ID NO: 1090178 - RNA, 19 nt, Homo sapiens
  misc_RNA (1)...(19): siRNA sense strand
agacaacugugaaauugaa

SEQ ID NO: 1090179 - RNA, 19 nt, Homo sapiens
  misc_RNA (1)...(19): siRNA sense strand
gcagcgaguggauucauua

SEQ ID NO: 1090180 - RNA, 19 nt, Homo sapiens
  misc_RNA (1)...(19): siRNA sense strand
ucacugagcuauggaccua

SEQ ID NO: 1090181 - RNA, 19 nt, Homo sapiens
  misc_RNA (1)...(19): siRNA sense strand
aaaugaaacuugccaguca

SEQ ID NO: 1090182 - RNA, 19 nt, Homo sapiens
  misc_RNA (1)...(19): siRNA sense strand
aaaucaagcuagagaaaga

SEQ ID NO: 1090183 - RNA, 19 nt, Homo sapiens
  misc_RNA (1)...(19): siRNA sense strand
gaaugcaugcuacaguaua

SEQ ID NO: 1090184 - RNA, 19 nt, Homo sapiens
  misc_RNA (1)...(19): siRNA sense strand
gagauugacacacuaaaga

SEQ ID NO: 1090185 - RNA, 19 nt, Homo sapiens
  misc_RNA (1)...(19): siRNA sense strand
ggaaaaugcugcuguguca

SEQ ID NO: 1090186 - RNA, 19 nt, Homo sapiens
  misc_RNA (1)...(19): siRNA sense strand
cuaaagauguccaguaagg

SEQ ID NO: 1090187 - RNA, 19 nt, Homo sapiens
  misc_RNA (1)...(19): siRNA sense strand
gaagauuugucagguagau

SEQ ID NO: 1090188 - RNA, 19 nt, Homo sapiens
  misc_RNA (1)...(19): siRNA sense strand
gcgaguggauucauuaguc

SEQ ID NO: 1090189 - RNA, 19 nt, Homo sapiens
  misc_RNA (1)...(19): siRNA sense strand
ggaaauggacaguuugaca

SEQ ID NO: 1090190 - RNA, 19 nt, Homo sapiens
  misc_RNA (1)...(19): siRNA sense strand
caagaggaguuacgaggau

SEQ ID NO: 1090191 - RNA, 19 nt, Homo sapiens
  misc_RNA (1)...(19): siRNA sense strand
caugaagauuugucaggua

SEQ ID NO: 1090192 - RNA, 19 nt, Homo sapiens
  misc_RNA (1)...(19): siRNA sense strand
uagaacuacuucaagauga

SEQ ID NO: 1090193 - RNA, 19 nt, Homo sapiens
  misc_RNA (1)...(19): siRNA sense strand
gcacagcaaguucaacaga

SEQ ID NO: 1090194 - RNA, 19 nt, Homo sapiens
  misc_RNA (1)...(19): siRNA sense strand
ucacaauaccuucaugaaa

SEQ ID NO: 1090195 - RNA, 19 nt, Homo sapiens
  misc_RNA (1)...(19): siRNA sense strand
gaaguucucacaauaccuu

SEQ ID NO: 1090196 - RNA, 19 nt, Homo sapiens
  misc_RNA (1)...(19): siRNA sense strand
aacaggaaauggacaguuu

SEQ ID NO: 1090197 - RNA, 19 nt, Homo sapiens
  misc_RNA (1)...(19): siRNA sense strand
gaguuacgaggaucaguua

SEQ ID NO: 1090198 - RNA, 19 nt, Homo sapiens
  misc_RNA (1)...(19): siRNA sense strand
cacagaagcugauaacaac

SEQ ID NO: 1090199 - RNA, 19 nt, Homo sapiens
  misc_RNA (1)...(19): siRNA sense strand
cacuauaucuccauugaau

SEQ ID NO: 1090200 - RNA, 19 nt, Homo sapiens
  misc_RNA (1)...(19): siRNA sense strand
gaaugaacgguugcauaua

SEQ ID NO: 1090201 - RNA, 19 nt, Homo sapiens
  misc_RNA (1)...(19): siRNA sense strand
gaaauggacaguuugacau

SEQ ID NO: 1090202 - RNA, 19 nt, Homo sapiens
  misc_RNA (1)...(19): siRNA sense strand
gaccaccugugcagcauga

SEQ ID NO: 1090203 - RNA, 19 nt, Homo sapiens
  misc_RNA (1)...(19): siRNA sense strand
gaagcuggcucaggaguac

SEQ ID NO: 1090204 - RNA, 19 nt, Homo sapiens
  misc_RNA (1)...(19): siRNA sense strand
caacagaguuuggaaaaga

SEQ ID NO: 1090205 - RNA, 19 nt, Homo sapiens
  misc_RNA (1)...(19): siRNA sense strand
caauuuggacuacuucauu

SEQ ID NO: 1090206 - RNA, 19 nt, Homo sapiens
  misc_RNA (1)...(19): siRNA sense strand
cacaauaccuucaugaaaa

SEQ ID NO: 1090207 - RNA, 19 nt, Homo sapiens
  misc_RNA (1)...(19): siRNA sense strand
caagaugaacuagcucuaa

SEQ ID NO: 1090208 - RNA, 19 nt, Homo sapiens
  misc_RNA (1)...(19): siRNA sense strand
gugcugcucugcauggauu

SEQ ID NO: 1090209 - RNA, 19 nt, Homo sapiens
  misc_RNA (1)...(19): siRNA sense strand
ucagcagacuucaggauga

SEQ ID NO: 1090210 - RNA, 19 nt, Homo sapiens
  misc_RNA (1)...(19): siRNA sense strand
caaauucugcagcuuuaaa

SEQ ID NO: 1090211 - RNA, 19 nt, Homo sapiens
  misc_RNA (1)...(19): siRNA sense strand
gacaguaagucagugcauu

SEQ ID NO: 1090212 - RNA, 19 nt, Homo sapiens
  misc_RNA (1)...(19): siRNA sense strand
gaacggaagaaugucaauu

SEQ ID NO: 1090213 - RNA, 19 nt, Homo sapiens
  misc_RNA (1)...(19): siRNA sense strand
gagacauuaucuaaacaga

SEQ ID NO: 1090214 - RNA, 19 nt, Homo sapiens
  misc_RNA (1)...(19): siRNA sense strand
cugaaugcaugcuacagua

SEQ ID NO: 1090215 - RNA, 19 nt, Homo sapiens
  misc_RNA (1)...(19): siRNA sense strand
gccaaggaaugucgacuuc

SEQ ID NO: 1090216 - RNA, 19 nt, Homo sapiens
  misc_RNA (1)...(19): siRNA sense strand
acacagaagcugauaacaa

SEQ ID NO: 1090217 - RNA, 19 nt, Homo sapiens
  misc_RNA (1)...(19): siRNA sense strand
cacuuaaccuccuacauau

SEQ ID NO: 1090218 - RNA, 19 nt, Homo sapiens
  misc_RNA (1)...(19): siRNA sense strand
ggagacaccagcugaagau

SEQ ID NO: 1090219 - RNA, 19 nt, Homo sapiens
  misc_RNA (1)...(19): siRNA sense strand
ggaagcacaauuagccaaa

SEQ ID NO: 1090220 - RNA, 19 nt, Homo sapiens
  misc_RNA (1)...(19): siRNA sense strand
aaauggagcaggaaagauu

SEQ ID NO: 1090221 - RNA, 19 nt, Homo sapiens
  misc_RNA (1)...(19): siRNA sense strand
agaaugaacgguugcauau

SEQ ID NO: 1090222 - RNA, 19 nt, Homo sapiens
  misc_RNA (1)...(19): siRNA sense strand
cugccuauaugaagucuuu

SEQ ID NO: 1090223 - RNA, 19 nt, Homo sapiens
  misc_RNA (1)...(19): siRNA sense strand
gaacguuccacuccacaau

SEQ ID NO: 1090224 - RNA, 19 nt, Homo sapiens
  misc_RNA (1)...(19): siRNA sense strand
aacggaagaaugucaauua

SEQ ID NO: 1090225 - RNA, 19 nt, Homo sapiens
  misc_RNA (1)...(19): siRNA sense strand
ggaguuacgaggaucaguu

SEQ ID NO: 1090226 - RNA, 19 nt, Homo sapiens
  misc_RNA (1)...(19): siRNA sense strand
aggaugagcugacaacuac

SEQ ID NO: 1090227 - RNA, 19 nt, Homo sapiens
  misc_RNA (1)...(19): siRNA sense strand
uggagucugugccuuauga

SEQ ID NO: 1090228 - RNA, 19 nt, Homo sapiens
  misc_RNA (1)...(19): siRNA sense strand
agcaaauucugcagcuuua

SEQ ID NO: 1090229 - RNA, 19 nt, Homo sapiens
  misc_RNA (1)...(19): siRNA sense strand
uaacaaauggagcaggaaa

SEQ ID NO: 1090230 - RNA, 19 nt, Homo sapiens
  misc_RNA (1)...(19): siRNA sense strand
cagcugaagaugcgagaua

SEQ ID NO: 1090231 - RNA, 19 nt, Homo sapiens
  misc_RNA (1)...(19): siRNA sense strand
caagaaaaguggagaaucu

SEQ ID NO: 1090232 - RNA, 19 nt, Homo sapiens
  misc_RNA (1)...(19): siRNA sense strand
agaagagauugacacacua

SEQ ID NO: 1090233 - RNA, 19 nt, Homo sapiens
  misc_RNA (1)...(19): siRNA sense strand
gagcugacaacuaccaaga

SEQ ID NO: 1090234 - RNA, 19 nt, Homo sapiens
  misc_RNA (1)...(19): siRNA sense strand
uaaggaagcauugacagaa

SEQ ID NO: 1090235 - RNA, 19 nt, Homo sapiens
  misc_RNA (1)...(19): siRNA sense strand
agacuggccuuggcugaaa

SEQ ID NO: 1090236 - RNA, 19 nt, Homo sapiens
  misc_RNA (1)...(19): siRNA sense strand
uaguggaacuuacgucuca

SEQ ID NO: 1090237 - RNA, 19 nt, Homo sapiens
  misc_RNA (1)...(19): siRNA sense strand
gaagcugcagacuuacaua

SEQ ID NO: 1090238 - RNA, 19 nt, Homo sapiens
  misc_RNA (1)...(19): siRNA sense strand
uugagaagcugcagaacga

SEQ ID NO: 1090239 - RNA, 19 nt, Homo sapiens
  misc_RNA (1)...(19): siRNA sense strand
aaugaacgguugcauauac

SEQ ID NO: 1090240 - RNA, 19 nt, Homo sapiens
  misc_RNA (1)...(19): siRNA sense strand
gauucuucccuaucaguua

SEQ ID NO: 1090241 - RNA, 19 nt, Homo sapiens
  misc_RNA (1)...(19): siRNA sense strand
gauguggaaucucgugaag

SEQ ID NO: 1090242 - RNA, 19 nt, Homo sapiens
  misc_RNA (1)...(19): siRNA sense strand
agaagcugauaacaacuaa

SEQ ID NO: 1090243 - RNA, 19 nt, Homo sapiens
  misc_RNA (1)...(19): siRNA sense strand
guuaagagccaggaaucua

SEQ ID NO: 1090244 - RNA, 19 nt, Homo sapiens
  misc_RNA (1)...(19): siRNA sense strand
ucagguagauuagaggaau

SEQ ID NO: 1090245 - RNA, 19 nt, Homo sapiens
  misc_RNA (1)...(19): siRNA sense strand
acacuaaagauguccagua

SEQ ID NO: 1090246 - RNA, 19 nt, Homo sapiens
  misc_RNA (1)...(19): siRNA sense strand
aaugcaugcuacaguauaa

SEQ ID NO: 1090247 - RNA, 19 nt, Homo sapiens
  misc_RNA (1)...(19): siRNA sense strand
cagaagcugauaacaacua

SEQ ID NO: 1090248 - RNA, 19 nt, Homo sapiens
  misc_RNA (1)...(19): siRNA sense strand
cagaacacuuaaccuccua

SEQ ID NO: 1090249 - RNA, 19 nt, Homo sapiens
  misc_RNA (1)...(19): siRNA sense strand
agauuugucagguagauua

SEQ ID NO: 1090250 - RNA, 19 nt, Homo sapiens
  misc_RNA (1)...(19): siRNA sense strand
gcucuucuaaacuuucaua

SEQ ID NO: 1090251 - RNA, 19 nt, Homo sapiens
  misc_RNA (1)...(19): siRNA sense strand
aaacagagagaagagauug

SEQ ID NO: 1090252 - RNA, 19 nt, Homo sapiens
  misc_RNA (1)...(19): siRNA sense strand
gaaaacaggucucuugaaa

SEQ ID NO: 1090253 - RNA, 19 nt, Homo sapiens
  misc_RNA (1)...(19): siRNA sense strand
uaauagauguggcuacaaa

SEQ ID NO: 1090254 - RNA, 19 nt, Homo sapiens
  misc_RNA (1)...(19): siRNA sense strand
ucaaagaccuucugcagau

SEQ ID NO: 1090255 - RNA, 19 nt, Homo sapiens
  misc_RNA (1)...(19): siRNA sense strand
ggaguccugucauugcuua

SEQ ID NO: 1090256 - RNA, 19 nt, Homo sapiens
  misc_RNA (1)...(19): siRNA sense strand
gccagugucuuccugcuua

SEQ ID NO: 1090257 - RNA, 19 nt, Homo sapiens
  misc_RNA (1)...(19): siRNA sense strand
caacugaccuacucucaca

SEQ ID NO: 1090258 - RNA, 19 nt, Homo sapiens
  misc_RNA (1)...(19): siRNA sense strand
gccaauaguugcuuuaauc

SEQ ID NO: 1090259 - RNA, 19 nt, Homo sapiens
  misc_RNA (1)...(19): siRNA sense strand
ccacaagguuuccaggauu

SEQ ID NO: 1090260 - RNA, 19 nt, Homo sapiens
  misc_RNA (1)...(19): siRNA sense strand
cacaagguuuccaggauua

SEQ ID NO: 1090261 - RNA, 19 nt, Homo sapiens
  misc_RNA (1)...(19): siRNA sense strand
gguuagauccuuccucuuu

SEQ ID NO: 1090262 - RNA, 19 nt, Homo sapiens
  misc_RNA (1)...(19): siRNA sense strand
gcuuuaaucccuuccuuua

SEQ ID NO: 1090263 - RNA, 19 nt, Homo sapiens
  misc_RNA (1)...(19): siRNA sense strand
ggacagugaacacaauuug

SEQ ID NO: 1090264 - RNA, 19 nt, Homo sapiens
  misc_RNA (1)...(19): siRNA sense strand
cuuccaaccucaaacauuu

SEQ ID NO: 1090265 - RNA, 19 nt, Homo sapiens
  misc_RNA (1)...(19): siRNA sense strand
gcucuagcaucugccaaua

SEQ ID NO: 1090266 - RNA, 19 nt, Homo sapiens
  misc_RNA (1)...(19): siRNA sense strand
ccaguggguuuccuauuga

SEQ ID NO: 1090267 - RNA, 19 nt, Homo sapiens
  misc_RNA (1)...(19): siRNA sense strand
gauccuuccucuuuccaaa

SEQ ID NO: 1090268 - RNA, 19 nt, Homo sapiens
  misc_RNA (1)...(19): siRNA sense strand
gaaagaaauaguacaacug

SEQ ID NO: 1090269 - RNA, 19 nt, Homo sapiens
  misc_RNA (1)...(19): siRNA sense strand
ggugguggcugucuuucuu

SEQ ID NO: 1090270 - RNA, 19 nt, Homo sapiens
  misc_RNA (1)...(19): siRNA sense strand
ggauaacucugaugcuuuu

SEQ ID NO: 1090271 - RNA, 19 nt, Homo sapiens
  misc_RNA (1)...(19): siRNA sense strand
ucagaaucaucgcaaugua

SEQ ID NO: 1090272 - RNA, 19 nt, Homo sapiens
  misc_RNA (1)...(19): siRNA sense strand
gggauggccugcucuaucu

SEQ ID NO: 1090273 - RNA, 19 nt, Homo sapiens
  misc_RNA (1)...(19): siRNA sense strand
ggaaagauuuuaggaagaa

SEQ ID NO: 1090274 - RNA, 19 nt, Homo sapiens
  misc_RNA (1)...(19): siRNA sense strand
ggaucgcugucuuguggua

SEQ ID NO: 1090275 - RNA, 19 nt, Homo sapiens
  misc_RNA (1)...(19): siRNA sense strand
cauaauagauguggcuaca

SEQ ID NO: 1090276 - RNA, 19 nt, Homo sapiens
  misc_RNA (1)...(19): siRNA sense strand
gauguggucucaccuaaaa

SEQ ID NO: 1090277 - RNA, 19 nt, Homo sapiens
  misc_RNA (1)...(19): siRNA sense strand
caaagaccuucugcagauu

SEQ ID NO: 1090278 - RNA, 19 nt, Homo sapiens
  misc_RNA (1)...(19): siRNA sense strand
gcauuccuguguucgugua

SEQ ID NO: 1090279 - RNA, 19 nt, Homo sapiens
  misc_RNA (1)...(19): siRNA sense strand
uuuaaucccuuccuuuaug

SEQ ID NO: 1090280 - RNA, 19 nt, Homo sapiens
  misc_RNA (1)...(19): siRNA sense strand
gagaaaugaaugauagguu

SEQ ID NO: 1090281 - RNA, 19 nt, Homo sapiens
  misc_RNA (1)...(19): siRNA sense strand
agauguggcuacaaauuug

SEQ ID NO: 1090282 - RNA, 19 nt, Homo sapiens
  misc_RNA (1)...(19): siRNA sense strand
agacaaccauaauagaugu

SEQ ID NO: 1090283 - RNA, 19 nt, Homo sapiens
  misc_RNA (1)...(19): siRNA sense strand
caauucaacugaccuacuc

SEQ ID NO: 1090284 - RNA, 19 nt, Homo sapiens
  misc_RNA (1)...(19): siRNA sense strand
guaucugggugguggcuuu

SEQ ID NO: 1090285 - RNA, 19 nt, Homo sapiens
  misc_RNA (1)...(19): siRNA sense strand
ccucaaacauuucaaagac

SEQ ID NO: 1090286 - RNA, 19 nt, Homo sapiens
  misc_RNA (1)...(19): siRNA sense strand
uagauguggcuacaaauuu

SEQ ID NO: 1090287 - RNA, 19 nt, Homo sapiens
  misc_RNA (1)...(19): siRNA sense strand
gaugugcauuccuguguuc

SEQ ID NO: 1090288 - RNA, 19 nt, Homo sapiens
  misc_RNA (1)...(19): siRNA sense strand
cuacagacaaccauaauag

SEQ ID NO: 1090289 - RNA, 19 nt, Homo sapiens
  misc_RNA (1)...(19): siRNA sense strand
gggaaaucuucacuacaga

SEQ ID NO: 1090290 - RNA, 19 nt, Homo sapiens
  misc_RNA (1)...(19): siRNA sense strand
cgggaaaucuucacuacag

SEQ ID NO: 1090291 - RNA, 19 nt, Homo sapiens
  misc_RNA (1)...(19): siRNA sense strand
caaccucaaacauuucaaa

SEQ ID NO: 1090292 - RNA, 19 nt, Homo sapiens
  misc_RNA (1)...(19): siRNA sense strand
gaaaugaaugauagguuag

SEQ ID NO: 1090293 - RNA, 19 nt, Homo sapiens
  misc_RNA (1)...(19): siRNA sense strand
ucacuacagacaaccauaa

SEQ ID NO: 1090294 - RNA, 19 nt, Homo sapiens
  misc_RNA (1)...(19): siRNA sense strand
cuggagaaaugaaugauag

SEQ ID NO: 1090295 - RNA, 19 nt, Homo sapiens
  misc_RNA (1)...(19): siRNA sense strand
aaugauagguuagauccuu

SEQ ID NO: 1090296 - RNA, 19 nt, Homo sapiens
  misc_RNA (1)...(19): siRNA sense strand
agaaauaguacaacugugu

SEQ ID NO: 1090297 - RNA, 19 nt, Homo sapiens
  misc_RNA (1)...(19): siRNA sense strand
gaaaucuucacuacagaca

SEQ ID NO: 1090298 - RNA, 19 nt, Homo sapiens
  misc_RNA (1)...(19): siRNA sense strand
gaaagcaaggcaguccauu

SEQ ID NO: 1090299 - RNA, 19 nt, Homo sapiens
  misc_RNA (1)...(19): siRNA sense strand
uagcaucugccaauaguug

SEQ ID NO: 1090300 - RNA, 19 nt, Homo sapiens
  misc_RNA (1)...(19): siRNA sense strand
guuagauccuuccucuuuc

SEQ ID NO: 1090301 - RNA, 19 nt, Homo sapiens
  misc_RNA (1)...(19): siRNA sense strand
ccaaacaaaugaucauccu

SEQ ID NO: 1090302 - RNA, 19 nt, Homo sapiens
  misc_RNA (1)...(19): siRNA sense strand
ucauuguccucaacauguu

SEQ ID NO: 1090303 - RNA, 19 nt, Homo sapiens
  misc_RNA (1)...(19): siRNA sense strand
uguuacagcuucauugucu

SEQ ID NO: 1090304 - RNA, 19 nt, Homo sapiens
  misc_RNA (1)...(19): siRNA sense strand
aagguuuccaggauuauua

SEQ ID NO: 1090305 - RNA, 19 nt, Homo sapiens
  misc_RNA (1)...(19): siRNA sense strand
aaacaggucucuugaaaac

SEQ ID NO: 1090306 - RNA, 19 nt, Homo sapiens
  misc_RNA (1)...(19): siRNA sense strand
cagacaaccauaauagaug

SEQ ID NO: 1090307 - RNA, 19 nt, Homo sapiens
  misc_RNA (1)...(19): siRNA sense strand
ucuagcaucugccaauagu

SEQ ID NO: 1090308 - RNA, 19 nt, Homo sapiens
  misc_RNA (1)...(19): siRNA sense strand
gcugcccucuguuaucaug

SEQ ID NO: 1090309 - RNA, 19 nt, Homo sapiens
  misc_RNA (1)...(19): siRNA sense strand
ggugguggcuuuugugaug

SEQ ID NO: 1090310 - RNA, 19 nt, Homo sapiens
  misc_RNA (1)...(19): siRNA sense strand
ccacugucccucaaacaau

SEQ ID NO: 1090311 - RNA, 19 nt, Homo sapiens
  misc_RNA (1)...(19): siRNA sense strand
ucacagaugacgaucaagu

SEQ ID NO: 1090312 - RNA, 19 nt, Homo sapiens
  misc_RNA (1)...(19): siRNA sense strand
ccaauucacagaugacgau

SEQ ID NO: 1090313 - RNA, 19 nt, Homo sapiens
  misc_RNA (1)...(19): siRNA sense strand
cugauguggucucaccuaa

SEQ ID NO: 1090314 - RNA, 19 nt, Homo sapiens
  misc_RNA (1)...(19): siRNA sense strand
ucagccgccuggagaaaug

SEQ ID NO: 1090315 - RNA, 19 nt, Homo sapiens
  misc_RNA (1)...(19): siRNA sense strand
cgccaagucucagagcaaa

SEQ ID NO: 1090316 - RNA, 19 nt, Homo sapiens
  misc_RNA (1)...(19): siRNA sense strand
aagcaaggcaguccauuca

SEQ ID NO: 1090317 - RNA, 19 nt, Homo sapiens
  misc_RNA (1)...(19): siRNA sense strand
acagacaaccauaauagau

SEQ ID NO: 1090318 - RNA, 19 nt, Homo sapiens
  misc_RNA (1)...(19): siRNA sense strand
ucucacagccauggaauga

SEQ ID NO: 1090319 - RNA, 19 nt, Homo sapiens
  misc_RNA (1)...(19): siRNA sense strand
auucacagaugacgaucaa

SEQ ID NO: 1090320 - RNA, 19 nt, Homo sapiens
  misc_RNA (1)...(19): siRNA sense strand
cuggauaacucugaugcuu

SEQ ID NO: 1090321 - RNA, 19 nt, Homo sapiens
  misc_RNA (1)...(19): siRNA sense strand
gguuuccuauugaagauca

SEQ ID NO: 1090322 - RNA, 19 nt, Homo sapiens
  misc_RNA (1)...(19): siRNA sense strand
gcugagaccaauucaacug

SEQ ID NO: 1090323 - RNA, 19 nt, Homo sapiens
  misc_RNA (1)...(19): siRNA sense strand
cacugucccucaaacaaug

SEQ ID NO: 1090324 - RNA, 19 nt, Homo sapiens
  misc_RNA (1)...(19): siRNA sense strand
gggaaagauuuuaggaaga

SEQ ID NO: 1090325 - RNA, 19 nt, Homo sapiens
  misc_RNA (1)...(19): siRNA sense strand
uauuuaaaccugcugaugu

SEQ ID NO: 1090326 - RNA, 19 nt, Homo sapiens
  misc_RNA (1)...(19): siRNA sense strand
ucugcuagguuaacaaguc

SEQ ID NO: 1090327 - RNA, 19 nt, Homo sapiens
  misc_RNA (1)...(19): siRNA sense strand
guccugggaucauguaugc

SEQ ID NO: 1090328 - RNA, 19 nt, Homo sapiens
  misc_RNA (1)...(19): siRNA sense strand
cuacucauuuaaagcuguu

SEQ ID NO: 1090329 - RNA, 19 nt, Homo sapiens
  misc_RNA (1)...(19): siRNA sense strand
gcuuuucucucuacucauu

SEQ ID NO: 1090330 - RNA, 19 nt, Homo sapiens
  misc_RNA (1)...(19): siRNA sense strand
ucaacauguuugccagugu

SEQ ID NO: 1090331 - RNA, 19 nt, Homo sapiens
  misc_RNA (1)...(19): siRNA sense strand
gaccaauucaacugaccua

SEQ ID NO: 1090332 - RNA, 19 nt, Homo sapiens
  misc_RNA (1)...(19): siRNA sense strand
caacaccccucguggcaau

SEQ ID NO: 1090333 - RNA, 19 nt, Homo sapiens
  misc_RNA (1)...(19): siRNA sense strand
gcugauguggucucaccua

SEQ ID NO: 1090334 - RNA, 19 nt, Homo sapiens
  misc_RNA (1)...(19): siRNA sense strand
ugaugugcauuccuguguu

SEQ ID NO: 1090335 - RNA, 19 nt, Homo sapiens
  misc_RNA (1)...(19): siRNA sense strand
cagaaucaucgcaauguag

SEQ ID NO: 1090336 - RNA, 19 nt, Homo sapiens
  misc_RNA (1)...(19): siRNA sense strand
gauguccugggaucaugua

SEQ ID NO: 1090337 - RNA, 19 nt, Homo sapiens
  misc_RNA (1)...(19): siRNA sense strand
cugcugcccucuguuauca

SEQ ID NO: 1090338 - RNA, 19 nt, Homo sapiens
  misc_RNA (1)...(19): siRNA sense strand
uggauaacucugaugcuuu

SEQ ID NO: 1090339 - RNA, 19 nt, Homo sapiens
  misc_RNA (1)...(19): siRNA sense strand
caucauuguccucaacaug

SEQ ID NO: 1090340 - RNA, 19 nt, Homo sapiens
  misc_RNA (1)...(19): siRNA sense strand
gcucauccccuccaucauu

SEQ ID NO: 1090341 - RNA, 19 nt, Homo sapiens
  misc_RNA (1)...(19): siRNA sense strand
gcuagguuaacaagucaaa

SEQ ID NO: 1090342 - RNA, 19 nt, Homo sapiens
  misc_RNA (1)...(19): siRNA sense strand
auagauguggcuacaaauu

SEQ ID NO: 1090343 - RNA, 19 nt, Homo sapiens
  misc_RNA (1)...(19): siRNA sense strand
guagggauggccugcucua

SEQ ID NO: 1090344 - RNA, 19 nt, Homo sapiens
  misc_RNA (1)...(19): siRNA sense strand
ccuggagaaaugaaugaua

SEQ ID NO: 1090345 - RNA, 19 nt, Homo sapiens
  misc_RNA (1)...(19): siRNA sense strand
gguggugguggcugucuuu

SEQ ID NO: 1090346 - RNA, 19 nt, Homo sapiens
  misc_RNA (1)...(19): siRNA sense strand
ucucucuacucauuuaaag

SEQ ID NO: 1090347 - RNA, 19 nt, Homo sapiens
  misc_RNA (1)...(19): siRNA sense strand
guauuuaaaccugcugaug

SEQ ID NO: 1090348 - RNA, 19 nt, Homo sapiens
  misc_RNA (1)...(19): siRNA sense strand
ggagaaaugaaugauaggu

SEQ ID NO: 1090349 - RNA, 19 nt, Homo sapiens
  misc_RNA (1)...(19): siRNA sense strand
ucaagccaaucugguguca

SEQ ID NO: 1090350 - RNA, 19 nt, Homo sapiens
  misc_RNA (1)...(19): siRNA sense strand
cuacgagucugagcuacca

SEQ ID NO: 1090351 - RNA, 19 nt, Homo sapiens
  misc_RNA (1)...(19): siRNA sense strand
auuuaaaccugcugaugug

SEQ ID NO: 1090352 - RNA, 19 nt, Homo sapiens
  misc_RNA (1)...(19): siRNA sense strand
ggaagauccucucaucauu

SEQ ID NO: 1090353 - RNA, 19 nt, Homo sapiens
  misc_RNA (1)...(19): siRNA sense strand
aaagagggcaugucuaaua

SEQ ID NO: 1090354 - RNA, 19 nt, Homo sapiens
  misc_RNA (1)...(19): siRNA sense strand
aagagggcaugucuaauaa

SEQ ID NO: 1090355 - RNA, 19 nt, Homo sapiens
  misc_RNA (1)...(19): siRNA sense strand
gagggcaugucuaauaaca

SEQ ID NO: 1090356 - RNA, 19 nt, Homo sapiens
  misc_RNA (1)...(19): siRNA sense strand
gaagauccucucaucauuc

SEQ ID NO: 1090357 - RNA, 19 nt, Homo sapiens
  misc_RNA (1)...(19): siRNA sense strand
gcgggaagauccucucauc

SEQ ID NO: 1090358 - RNA, 19 nt, Homo sapiens
  misc_RNA (1)...(19): siRNA sense strand
gggaagauccucucaucau

SEQ ID NO: 1090359 - RNA, 19 nt, Homo sapiens
  misc_RNA (1)...(19): siRNA sense strand
ucuaauaacagcaccacua

SEQ ID NO: 1090360 - RNA, 19 nt, Homo sapiens
  misc_RNA (1)...(19): siRNA sense strand
gaaguucuuuuguaccauu

SEQ ID NO: 1090361 - RNA, 19 nt, Homo sapiens
  misc_RNA (1)...(19): siRNA sense strand
gaaagagggcaugucuaau

SEQ ID NO: 1090362 - RNA, 19 nt, Homo sapiens
  misc_RNA (1)...(19): siRNA sense strand
uggagcagcuaaagaugga

SEQ ID NO: 1090363 - RNA, 19 nt, Homo sapiens
  misc_RNA (1)...(19): siRNA sense strand
uccagugccugcaucagaa

SEQ ID NO: 1090364 - RNA, 19 nt, Homo sapiens
  misc_RNA (1)...(19): siRNA sense strand
aaagauggaagccuguaug

SEQ ID NO: 1090365 - RNA, 19 nt, Homo sapiens
  misc_RNA (1)...(19): siRNA sense strand
aauaacagcaccacuagca

SEQ ID NO: 1090366 - RNA, 19 nt, Homo sapiens
  misc_RNA (1)...(19): siRNA sense strand
cuaauaacagcaccacuag

SEQ ID NO: 1090367 - RNA, 19 nt, Homo sapiens
  misc_RNA (1)...(19): siRNA sense strand
uaaagauggaagccuguau

SEQ ID NO: 1090368 - RNA, 19 nt, Homo sapiens
  misc_RNA (1)...(19): siRNA sense strand
ggacaaagcaguaccugaa

SEQ ID NO: 1090369 - RNA, 19 nt, Homo sapiens
  misc_RNA (1)...(19): siRNA sense strand
aagaaucgcuguuucaugu

SEQ ID NO: 1090370 - RNA, 19 nt, Homo sapiens
  misc_RNA (1)...(19): siRNA sense strand
uguagcaucuucucaauug

SEQ ID NO: 1090371 - RNA, 19 nt, Homo sapiens
  misc_RNA (1)...(19): siRNA sense strand
cagaauaguaguaauggua

SEQ ID NO: 1090372 - RNA, 19 nt, Homo sapiens
  misc_RNA (1)...(19): siRNA sense strand
guacacaauugcucuuaca

SEQ ID NO: 1090373 - RNA, 19 nt, Homo sapiens
  misc_RNA (1)...(19): siRNA sense strand
gcccagcccuguaucaaau

SEQ ID NO: 1090374 - RNA, 19 nt, Homo sapiens
  misc_RNA (1)...(19): siRNA sense strand
gcagccaucugaagagcaa

SEQ ID NO: 1090375 - RNA, 19 nt, Homo sapiens
  misc_RNA (1)...(19): siRNA sense strand
guacaaauggcauguguuc

SEQ ID NO: 1090376 - RNA, 19 nt, Homo sapiens
  misc_RNA (1)...(19): siRNA sense strand
caaagacagaauaguagua

SEQ ID NO: 1090377 - RNA, 19 nt, Homo sapiens
  misc_RNA (1)...(19): siRNA sense strand
acucagauguacacaauug

SEQ ID NO: 1090378 - RNA, 19 nt, Homo sapiens
  misc_RNA (1)...(19): siRNA sense strand
uuacucagauguacacaau

SEQ ID NO: 1090379 - RNA, 19 nt, Homo sapiens
  misc_RNA (1)...(19): siRNA sense strand
cuucaaagacagaauagua

SEQ ID NO: 1090380 - RNA, 19 nt, Homo sapiens
  misc_RNA (1)...(19): siRNA sense strand
guacaucuguggacaaagc

SEQ ID NO: 1090381 - RNA, 19 nt, Homo sapiens
  misc_RNA (1)...(19): siRNA sense strand
gaauaguaguaaugguaga

SEQ ID NO: 1090382 - RNA, 19 nt, Homo sapiens
  misc_RNA (1)...(19): siRNA sense strand
uggaaacccucguacaaau

SEQ ID NO: 1090383 - RNA, 19 nt, Homo sapiens
  misc_RNA (1)...(19): siRNA sense strand
gaaugccgguguggaaaug

SEQ ID NO: 1090384 - RNA, 19 nt, Homo sapiens
  misc_RNA (1)...(19): siRNA sense strand
agaauaagcccaccugcaa

SEQ ID NO: 1090385 - RNA, 19 nt, Homo sapiens
  misc_RNA (1)...(19): siRNA sense strand
guacaccguuacucagaug

SEQ ID NO: 1090386 - RNA, 19 nt, Homo sapiens
  misc_RNA (1)...(19): siRNA sense strand
cagcacagcagccaucuga

SEQ ID NO: 1090387 - RNA, 19 nt, Homo sapiens
  misc_RNA (1)...(19): siRNA sense strand
ccaguucaaugcacagaug

SEQ ID NO: 1090388 - RNA, 19 nt, Homo sapiens
  misc_RNA (1)...(19): siRNA sense strand
uagucugucugaaucuuua

SEQ ID NO: 1090389 - RNA, 19 nt, Homo sapiens
  misc_RNA (1)...(19): siRNA sense strand
ggaaacccucguacaaaug

SEQ ID NO: 1090390 - RNA, 19 nt, Homo sapiens
  misc_RNA (1)...(19): siRNA sense strand
gcacagcagccaucugaag

SEQ ID NO: 1090391 - RNA, 19 nt, Homo sapiens
  misc_RNA (1)...(19): siRNA sense strand
gugaaaagauccaaaagau

SEQ ID NO: 1090392 - RNA, 19 nt, Homo sapiens
  misc_RNA (1)...(19): siRNA sense strand
ggacuuacuggguuugaau

SEQ ID NO: 1090393 - RNA, 19 nt, Homo sapiens
  misc_RNA (1)...(19): siRNA sense strand
caaauggcauguguucagu

SEQ ID NO: 1090394 - RNA, 19 nt, Homo sapiens
  misc_RNA (1)...(19): siRNA sense strand
caguacaucuguggacaaa

SEQ ID NO: 1090395 - RNA, 19 nt, Homo sapiens
  misc_RNA (1)...(19): siRNA sense strand
gacucuacaucuucaucua

SEQ ID NO: 1090396 - RNA, 19 nt, Homo sapiens
  misc_RNA (1)...(19): siRNA sense strand
gacaaagcaguaccugaaa

SEQ ID NO: 1090397 - RNA, 19 nt, Homo sapiens
  misc_RNA (1)...(19): siRNA sense strand
gucugaaucuuuaccaguu

SEQ ID NO: 1090398 - RNA, 19 nt, Homo sapiens
  misc_RNA (1)...(19): siRNA sense strand
gaaacccucguacaaaugg

SEQ ID NO: 1090399 - RNA, 19 nt, Homo sapiens
  misc_RNA (1)...(19): siRNA sense strand
agcaguaccugaaacagaa

SEQ ID NO: 1090400 - RNA, 19 nt, Homo sapiens
  misc_RNA (1)...(19): siRNA sense strand
agacagaauaguaguaaug

SEQ ID NO: 1090401 - RNA, 19 nt, Homo sapiens
  misc_RNA (1)...(19): siRNA sense strand
ccaagugccuaugcuuugu

SEQ ID NO: 1090402 - RNA, 19 nt, Homo sapiens
  misc_RNA (1)...(19): siRNA sense strand
ugugcaggcuucaguauca

SEQ ID NO: 1090403 - RNA, 19 nt, Homo sapiens
  misc_RNA (1)...(19): siRNA sense strand
gccaagugccuaugcuuug

SEQ ID NO: 1090404 - RNA, 19 nt, Homo sapiens
  misc_RNA (1)...(19): siRNA sense strand
guguggaaauguuuacugu

SEQ ID NO: 1090405 - RNA, 19 nt, Homo sapiens
  misc_RNA (1)...(19): siRNA sense strand
caaagcaguaccugaaaca

SEQ ID NO: 1090406 - RNA, 19 nt, Homo sapiens
  misc_RNA (1)...(19): siRNA sense strand
uauggaaacccucguacaa

SEQ ID NO: 1090407 - RNA, 19 nt, Homo sapiens
  misc_RNA (1)...(19): siRNA sense strand
ccugcaaccucugucagua

SEQ ID NO: 1090408 - RNA, 19 nt, Homo sapiens
  misc_RNA (1)...(19): siRNA sense strand
aauggcauguguucaguau

SEQ ID NO: 1090409 - RNA, 19 nt, Homo sapiens
  misc_RNA (1)...(19): siRNA sense strand
cagaagcccagucagcauu

SEQ ID NO: 1090410 - RNA, 19 nt, Homo sapiens
  misc_RNA (1)...(19): siRNA sense strand
ucaguaugcuauaaagaac

SEQ ID NO: 1090411 - RNA, 19 nt, Homo sapiens
  misc_RNA (1)...(19): siRNA sense strand
gaaaagaaaauccaguagu

SEQ ID NO: 1090412 - RNA, 19 nt, Homo sapiens
  misc_RNA (1)...(19): siRNA sense strand
gcucaagaaacuaaucaca

SEQ ID NO: 1090413 - RNA, 19 nt, Homo sapiens
  misc_RNA (1)...(19): siRNA sense strand
guagucugucugaaucuuu

SEQ ID NO: 1090414 - RNA, 19 nt, Homo sapiens
  misc_RNA (1)...(19): siRNA sense strand
gaagcccagucagcauuag

SEQ ID NO: 1090415 - RNA, 19 nt, Homo sapiens
  misc_RNA (1)...(19): siRNA sense strand
agaagcccagucagcauua

SEQ ID NO: 1090416 - RNA, 19 nt, Homo sapiens
  misc_RNA (1)...(19): siRNA sense strand
gaugugcaggcuucaguau

SEQ ID NO: 1090417 - RNA, 19 nt, Homo sapiens
  misc_RNA (1)...(19): siRNA sense strand
gaaaauccaguaguuguug

SEQ ID NO: 1090418 - RNA, 19 nt, Homo sapiens
  misc_RNA (1)...(19): siRNA sense strand
caaccucugucaguagucu

SEQ ID NO: 1090419 - RNA, 19 nt, Homo sapiens
  misc_RNA (1)...(19): siRNA sense strand
uccaguaguuguuggugaa

SEQ ID NO: 1090420 - RNA, 19 nt, Homo sapiens
  misc_RNA (1)...(19): siRNA sense strand
gggacuuacuggguuugaa

SEQ ID NO: 1090421 - RNA, 19 nt, Homo sapiens
  misc_RNA (1)...(19): siRNA sense strand
uguguucaguaugcuauaa

SEQ ID NO: 1090422 - RNA, 19 nt, Homo sapiens
  misc_RNA (1)...(19): siRNA sense strand
acaaagcaguaccugaaac

SEQ ID NO: 1090423 - RNA, 19 nt, Homo sapiens
  misc_RNA (1)...(19): siRNA sense strand
agccgaugcugcugagaaa

SEQ ID NO: 1090424 - RNA, 19 nt, Homo sapiens
  misc_RNA (1)...(19): siRNA sense strand
guaucaaaucagucacuuu

SEQ ID NO: 1090425 - RNA, 19 nt, Homo sapiens
  misc_RNA (1)...(19): siRNA sense strand
aaagaaucgcuguuucaug

SEQ ID NO: 1090426 - RNA, 19 nt, Homo sapiens
  misc_RNA (1)...(19): siRNA sense strand
aaacuaaucacagccaagu

SEQ ID NO: 1090427 - RNA, 19 nt, Homo sapiens
  misc_RNA (1)...(19): siRNA sense strand
ucuguagcaucuucucaau

SEQ ID NO: 1090428 - RNA, 19 nt, Homo sapiens
  misc_RNA (1)...(19): siRNA sense strand
cagaaaagaaaauccagua

SEQ ID NO: 1090429 - RNA, 19 nt, Homo sapiens
  misc_RNA (1)...(19): siRNA sense strand
caucugaagagcaaagcaa

SEQ ID NO: 1090430 - RNA, 19 nt, Homo sapiens
  misc_RNA (1)...(19): siRNA sense strand
cacagcagccaucugaaga

SEQ ID NO: 1090431 - RNA, 19 nt, Homo sapiens
  misc_RNA (1)...(19): siRNA sense strand
aagcaguaccugaaacaga

SEQ ID NO: 1090432 - RNA, 19 nt, Homo sapiens
  misc_RNA (1)...(19): siRNA sense strand
gcucuuacaauuacaaagc

SEQ ID NO: 1090433 - RNA, 19 nt, Homo sapiens
  misc_RNA (1)...(19): siRNA sense strand
ccagcccuguaucaaauca

SEQ ID NO: 1090434 - RNA, 19 nt, Homo sapiens
  misc_RNA (1)...(19): siRNA sense strand
gacagaauaguaguaaugg

SEQ ID NO: 1090435 - RNA, 19 nt, Homo sapiens
  misc_RNA (1)...(19): siRNA sense strand
ucaauuggacaguacaucu

SEQ ID NO: 1090436 - RNA, 19 nt, Homo sapiens
  misc_RNA (1)...(19): siRNA sense strand
acaaauggcauguguucag

SEQ ID NO: 1090437 - RNA, 19 nt, Homo sapiens
  misc_RNA (1)...(19): siRNA sense strand
ucaaagacagaauaguagu

SEQ ID NO: 1090438 - RNA, 19 nt, Homo sapiens
  misc_RNA (1)...(19): siRNA sense strand
ucguacaaauggcaugugu

SEQ ID NO: 1090439 - RNA, 19 nt, Homo sapiens
  misc_RNA (1)...(19): siRNA sense strand
caagugccuaugcuuuguu

SEQ ID NO: 1090440 - RNA, 19 nt, Homo sapiens
  misc_RNA (1)...(19): siRNA sense strand
gcagcccagcccuguauca

SEQ ID NO: 1090441 - RNA, 19 nt, Homo sapiens
  misc_RNA (1)...(19): siRNA sense strand
gcuguuucaugugcaggaa

SEQ ID NO: 1090442 - RNA, 19 nt, Homo sapiens
  misc_RNA (1)...(19): siRNA sense strand
gagcagacauucucuuuga

SEQ ID NO: 1090443 - RNA, 19 nt, Homo sapiens
  misc_RNA (1)...(19): siRNA sense strand
agaacgagcuguuagaauu

SEQ ID NO: 1090444 - RNA, 19 nt, Homo sapiens
  misc_RNA (1)...(19): siRNA sense strand
ggaaugaacugcugaaacg

SEQ ID NO: 1090445 - RNA, 19 nt, Homo sapiens
  misc_RNA (1)...(19): siRNA sense strand
gaagagaaccagcugaaga

SEQ ID NO: 1090446 - RNA, 19 nt, Homo sapiens
  misc_RNA (1)...(19): siRNA sense strand
agaaccagcugaagaauga

SEQ ID NO: 1090447 - RNA, 19 nt, Homo sapiens
  misc_RNA (1)...(19): siRNA sense strand
gugaggcgauuucaacuaa

SEQ ID NO: 1090448 - RNA, 19 nt, Homo sapiens
  misc_RNA (1)...(19): siRNA sense strand
ccaaguggguugaagagaa

SEQ ID NO: 1090449 - RNA, 19 nt, Homo sapiens
  misc_RNA (1)...(19): siRNA sense strand
cggcauaccuccuugaaug

SEQ ID NO: 1090450 - RNA, 19 nt, Homo sapiens
  misc_RNA (1)...(19): siRNA sense strand
ucagaaacguuguccgaaa

SEQ ID NO: 1090451 - RNA, 19 nt, Homo sapiens
  misc_RNA (1)...(19): siRNA sense strand
ggaaagaccgugugauucu

SEQ ID NO: 1090452 - RNA, 19 nt, Homo sapiens
  misc_RNA (1)...(19): siRNA sense strand
gagaagaacaagcggauga

SEQ ID NO: 1090453 - RNA, 19 nt, Homo sapiens
  misc_RNA (1)...(19): siRNA sense strand
gaagaaugaggaucuguug

SEQ ID NO: 1090454 - RNA, 19 nt, Homo sapiens
  misc_RNA (1)...(19): siRNA sense strand
gagacucuaucuguuguaa

SEQ ID NO: 1090455 - RNA, 19 nt, Homo sapiens
  misc_RNA (1)...(19): siRNA sense strand
ggaugaacaagaagaauga

SEQ ID NO: 1090456 - RNA, 19 nt, Homo sapiens
  misc_RNA (1)...(19): siRNA sense strand
cagaggaggcgcucaguaa

SEQ ID NO: 1090457 - RNA, 19 nt, Homo sapiens
  misc_RNA (1)...(19): siRNA sense strand
ccacaguaguccaaagaga

SEQ ID NO: 1090458 - RNA, 19 nt, Homo sapiens
  misc_RNA (1)...(19): siRNA sense strand
gcugaagaaugaaaugcaa

SEQ ID NO: 1090459 - RNA, 19 nt, Homo sapiens
  misc_RNA (1)...(19): siRNA sense strand
cugaaacgcucacgagaga

SEQ ID NO: 1090460 - RNA, 19 nt, Homo sapiens
  misc_RNA (1)...(19): siRNA sense strand
acaagcggaugaacaagaa

SEQ ID NO: 1090461 - RNA, 19 nt, Homo sapiens
  misc_RNA (1)...(19): siRNA sense strand
gaacgagcuguuagaauuc

SEQ ID NO: 1090462 - RNA, 19 nt, Homo sapiens
  misc_RNA (1)...(19): siRNA sense strand
ucgaagauuuggagaaguu

SEQ ID NO: 1090463 - RNA, 19 nt, Homo sapiens
  misc_RNA (1)...(19): siRNA sense strand
gaaagaccgugugauucug

SEQ ID NO: 1090464 - RNA, 19 nt, Homo sapiens
  misc_RNA (1)...(19): siRNA sense strand
cgaaacauccuacaacaca

SEQ ID NO: 1090465 - RNA, 19 nt, Homo sapiens
  misc_RNA (1)...(19): siRNA sense strand
ggagagagaacggcuguug

SEQ ID NO: 1090466 - RNA, 19 nt, Homo sapiens
  misc_RNA (1)...(19): siRNA sense strand
gcgagaagcccgagaugga

SEQ ID NO: 1090467 - RNA, 19 nt, Homo sapiens
  misc_RNA (1)...(19): siRNA sense strand
agaaguuacugguugagaa

SEQ ID NO: 1090468 - RNA, 19 nt, Homo sapiens
  misc_RNA (1)...(19): siRNA sense strand
gacuggaaauggaagagaa

SEQ ID NO: 1090469 - RNA, 19 nt, Homo sapiens
  misc_RNA (1)...(19): siRNA sense strand
gcagaggaggcgcucagua

SEQ ID NO: 1090470 - RNA, 19 nt, Homo sapiens
  misc_RNA (1)...(19): siRNA sense strand
caaguggguugaagagaag

SEQ ID NO: 1090471 - RNA, 19 nt, Homo sapiens
  misc_RNA (1)...(19): siRNA sense strand
gaacaagaagaaugaggau

SEQ ID NO: 1090472 - RNA, 19 nt, Homo sapiens
  misc_RNA (1)...(19): siRNA sense strand
gcacacggccuacauuucg

SEQ ID NO: 1090473 - RNA, 19 nt, Homo sapiens
  misc_RNA (1)...(19): siRNA sense strand
gcuagaacucgaaguaaga

SEQ ID NO: 1090474 - RNA, 19 nt, Homo sapiens
  misc_RNA (1)...(19): siRNA sense strand
gggaaaacguggaaaugaa

SEQ ID NO: 1090475 - RNA, 19 nt, Homo sapiens
  misc_RNA (1)...(19): siRNA sense strand
caaaaggcaucgagggaaa

SEQ ID NO: 1090476 - RNA, 19 nt, Homo sapiens
  misc_RNA (1)...(19): siRNA sense strand
gaucagaacgagcuguuag

SEQ ID NO: 1090477 - RNA, 19 nt, Homo sapiens
  misc_RNA (1)...(19): siRNA sense strand
gaagcuggaagacagaaau

SEQ ID NO: 1090478 - RNA, 19 nt, Homo sapiens
  misc_RNA (1)...(19): siRNA sense strand
gcauucagaucgaguucca

SEQ ID NO: 1090479 - RNA, 19 nt, Homo sapiens
  misc_RNA (1)...(19): siRNA sense strand
gagaaccagcugaagaaug

SEQ ID NO: 1090480 - RNA, 19 nt, Homo sapiens
  misc_RNA (1)...(19): siRNA sense strand
agaacaagcggaugaacaa

SEQ ID NO: 1090481 - RNA, 19 nt, Homo sapiens
  misc_RNA (1)...(19): siRNA sense strand
gacucuaucuguuguaaac

SEQ ID NO: 1090482 - RNA, 19 nt, Homo sapiens
  misc_RNA (1)...(19): siRNA sense strand
caagaagaaugaggaucug

SEQ ID NO: 1090483 - RNA, 19 nt, Homo sapiens
  misc_RNA (1)...(19): siRNA sense strand
gcaccacaguaguccaaag

SEQ ID NO: 1090484 - RNA, 19 nt, Homo sapiens
  misc_RNA (1)...(19): siRNA sense strand
gaaguuacugguugagaag

SEQ ID NO: 1090485 - RNA, 19 nt, Homo sapiens
  misc_RNA (1)...(19): siRNA sense strand
gcaggcugauggaugagau

SEQ ID NO: 1090486 - RNA, 19 nt, Homo sapiens
  misc_RNA (1)...(19): siRNA sense strand
cagaaacguuguccgaaac

SEQ ID NO: 1090487 - RNA, 19 nt, Homo sapiens
  misc_RNA (1)...(19): siRNA sense strand
ugaaaccgcccaagaagca

SEQ ID NO: 1090488 - RNA, 19 nt, Homo sapiens
  misc_RNA (1)...(19): siRNA sense strand
gggaaagaccgugugauuc

SEQ ID NO: 1090489 - RNA, 19 nt, Homo sapiens
  misc_RNA (1)...(19): siRNA sense strand
ggagcagacauucucuuug

SEQ ID NO: 1090490 - RNA, 19 nt, Homo sapiens
  misc_RNA (1)...(19): siRNA sense strand
aagagaaccagcugaagaa

SEQ ID NO: 1090491 - RNA, 19 nt, Homo sapiens
  misc_RNA (1)...(19): siRNA sense strand
gggaugagcaggagaucga

SEQ ID NO: 1090492 - RNA, 19 nt, Homo sapiens
  misc_RNA (1)...(19): siRNA sense strand
gaugugaggcgauuucaac

SEQ ID NO: 1090493 - RNA, 19 nt, Homo sapiens
  misc_RNA (1)...(19): siRNA sense strand
cguccaggaucaacauaug

SEQ ID NO: 1090494 - RNA, 19 nt, Homo sapiens
  misc_RNA (1)...(19): siRNA sense strand
ggaaaacguggaaaugaaa

SEQ ID NO: 1090495 - RNA, 19 nt, Homo sapiens
  misc_RNA (1)...(19): siRNA sense strand
uggagaaguuacugguuga

SEQ ID NO: 1090496 - RNA, 19 nt, Homo sapiens
  misc_RNA (1)...(19): siRNA sense strand
gaaacguuguccgaaacau

SEQ ID NO: 1090497 - RNA, 19 nt, Homo sapiens
  misc_RNA (1)...(19): siRNA sense strand
ggaucagaacgagcuguua

SEQ ID NO: 1090498 - RNA, 19 nt, Homo sapiens
  misc_RNA (1)...(19): siRNA sense strand
gaggcgauuucaacuaaaa

SEQ ID NO: 1090499 - RNA, 19 nt, Homo sapiens
  misc_RNA (1)...(19): siRNA sense strand
gcucaugggcguccaggau

SEQ ID NO: 1090500 - RNA, 19 nt, Homo sapiens
  misc_RNA (1)...(19): siRNA sense strand
aaacggagcagacauucuc

SEQ ID NO: 1090501 - RNA, 19 nt, Homo sapiens
  misc_RNA (1)...(19): siRNA sense strand
cgaagaagacuuggacgau

SEQ ID NO: 1090502 - RNA, 19 nt, Homo sapiens
  misc_RNA (1)...(19): siRNA sense strand
agggaaagaccgugugauu

SEQ ID NO: 1090503 - RNA, 19 nt, Homo sapiens
  misc_RNA (1)...(19): siRNA sense strand
cggagcagacauucucuuu

SEQ ID NO: 1090504 - RNA, 19 nt, Homo sapiens
  misc_RNA (1)...(19): siRNA sense strand
ugaagaaugaaaugcaaga

SEQ ID NO: 1090505 - RNA, 19 nt, Homo sapiens
  misc_RNA (1)...(19): siRNA sense strand
ggcauaccuccuugaauga

SEQ ID NO: 1090506 - RNA, 19 nt, Homo sapiens
  misc_RNA (1)...(19): siRNA sense strand
gcagacauucucuuugaac

SEQ ID NO: 1090507 - RNA, 19 nt, Homo sapiens
  misc_RNA (1)...(19): siRNA sense strand
gaauucagagugcuagaac

SEQ ID NO: 1090508 - RNA, 19 nt, Homo sapiens
  misc_RNA (1)...(19): siRNA sense strand
cagcugcucaucagaacaa

SEQ ID NO: 1090509 - RNA, 19 nt, Homo sapiens
  misc_RNA (1)...(19): siRNA sense strand
cagccacgcccgaagaaga

SEQ ID NO: 1090510 - RNA, 19 nt, Homo sapiens
  misc_RNA (1)...(19): siRNA sense strand
aaacauccuacaacacaga

SEQ ID NO: 1090511 - RNA, 19 nt, Homo sapiens
  misc_RNA (1)...(19): siRNA sense strand
ugaggcgauuucaacuaaa

SEQ ID NO: 1090512 - RNA, 19 nt, Homo sapiens
  misc_RNA (1)...(19): siRNA sense strand
gagaaguuacugguugaga

SEQ ID NO: 1090513 - RNA, 19 nt, Homo sapiens
  misc_RNA (1)...(19): siRNA sense strand
gcaccgccaagaucaagga

SEQ ID NO: 1090514 - RNA, 19 nt, Homo sapiens
  misc_RNA (1)...(19): siRNA sense strand
acaagaagaaugaggaucu

SEQ ID NO: 1090515 - RNA, 19 nt, Homo sapiens
  misc_RNA (1)...(19): siRNA sense strand
ggaagcuggaagacagaaa

SEQ ID NO: 1090516 - RNA, 19 nt, Homo sapiens
  misc_RNA (1)...(19): siRNA sense strand
ucagaacgagcuguuagaa

SEQ ID NO: 1090517 - RNA, 19 nt, Homo sapiens
  misc_RNA (1)...(19): siRNA sense strand
uuacagacuggaaauggaa

SEQ ID NO: 1090518 - RNA, 19 nt, Homo sapiens
  misc_RNA (1)...(19): siRNA sense strand
gaagcauguuguggagaca

SEQ ID NO: 1090519 - RNA, 19 nt, Homo sapiens
  misc_RNA (1)...(19): siRNA sense strand
gagcggcaccacaguaguc

SEQ ID NO: 1090520 - RNA, 19 nt, Homo sapiens
  misc_RNA (1)...(19): siRNA sense strand
gagcagcagcacgucauug

SEQ ID NO: 1090521 - RNA, 19 nt, Homo sapiens
  misc_RNA (1)...(19): siRNA sense strand
gcagaugagaggaaugaac

SEQ ID NO: 1090522 - RNA, 19 nt, Homo sapiens
  misc_RNA (1)...(19): siRNA sense strand
gaacucgaaguaagagacu

SEQ ID NO: 1090523 - RNA, 19 nt, Homo sapiens
  misc_RNA (1)...(19): siRNA sense strand
gugcuagaacucgaaguaa

SEQ ID NO: 1090524 - RNA, 19 nt, Homo sapiens
  misc_RNA (1)...(19): siRNA sense strand
ugaccagcauucagaucga

SEQ ID NO: 1090525 - RNA, 19 nt, Homo sapiens
  misc_RNA (1)...(19): siRNA sense strand
ucaaggccaagcugcauga

SEQ ID NO: 1090526 - RNA, 19 nt, Homo sapiens
  misc_RNA (1)...(19): siRNA sense strand
uccgaaacauccuacaaca

SEQ ID NO: 1090527 - RNA, 19 nt, Homo sapiens
  misc_RNA (1)...(19): siRNA sense strand
ggagcagcagcacgucauu

SEQ ID NO: 1090528 - RNA, 19 nt, Homo sapiens
  misc_RNA (1)...(19): siRNA sense strand
cggcacacggccuacauuu

SEQ ID NO: 1090529 - RNA, 19 nt, Homo sapiens
  misc_RNA (1)...(19): siRNA sense strand
gaacaagcggaugaacaag

SEQ ID NO: 1090530 - RNA, 19 nt, Homo sapiens
  misc_RNA (1)...(19): siRNA sense strand
gaggaaugaacugcugaaa

SEQ ID NO: 1090531 - RNA, 19 nt, Homo sapiens
  misc_RNA (1)...(19): siRNA sense strand
aagcuggaagacagaaaua

SEQ ID NO: 1090532 - RNA, 19 nt, Homo sapiens
  misc_RNA (1)...(19): siRNA sense strand
uaucuguuguaaacucuca

SEQ ID NO: 1090533 - RNA, 19 nt, Homo sapiens
  misc_RNA (1)...(19): siRNA sense strand
uccgcaggcugauggauga

SEQ ID NO: 1090534 - RNA, 19 nt, Homo sapiens
  misc_RNA (1)...(19): siRNA sense strand
ggaagagaaccagcugaag

SEQ ID NO: 1090535 - RNA, 19 nt, Homo sapiens
  misc_RNA (1)...(19): siRNA sense strand
guugagaagggacaggauu

SEQ ID NO: 1090536 - RNA, 19 nt, Homo sapiens
  misc_RNA (1)...(19): siRNA sense strand
gauuugaugaggagucugu

SEQ ID NO: 1090537 - RNA, 19 nt, Homo sapiens
  misc_RNA (1)...(19): siRNA sense strand
aaagcaaggugggcaaacu

SEQ ID NO: 1090538 - RNA, 19 nt, Homo sapiens
  misc_RNA (1)...(19): siRNA sense strand
cagaacgagcuguuagaau

SEQ ID NO: 1090539 - RNA, 19 nt, Homo sapiens
  misc_RNA (1)...(19): siRNA sense strand
ucaugggcguccaggauca

SEQ ID NO: 1090540 - RNA, 19 nt, Homo sapiens
  misc_RNA (1)...(19): siRNA sense strand
cgagaugugaggcgauuuc

SEQ ID NO: 1090541 - RNA, 19 nt, Homo sapiens
  misc_RNA (1)...(19): siRNA sense strand
guuagaauucagagugcua

SEQ ID NO: 1090542 - RNA, 19 nt, Homo sapiens
  misc_RNA (1)...(19): siRNA sense strand
uagaagaacugcuuaagga

SEQ ID NO: 1090543 - RNA, 19 nt, Homo sapiens
  misc_RNA (1)...(19): siRNA sense strand
gaggaaagcaauagaagaa

SEQ ID NO: 1090544 - RNA, 19 nt, Homo sapiens
  misc_RNA (1)...(19): siRNA sense strand
gcaauagaagaacugcuua

SEQ ID NO: 1090545 - RNA, 19 nt, Homo sapiens
  misc_RNA (1)...(19): siRNA sense strand
acacauugcccucucauaa

SEQ ID NO: 1090546 - RNA, 19 nt, Homo sapiens
  misc_RNA (1)...(19): siRNA sense strand
ggaaagcaauagaagaacu

SEQ ID NO: 1090547 - RNA, 19 nt, Homo sapiens
  misc_RNA (1)...(19): siRNA sense strand
ggagaggaaagcaauagaa

SEQ ID NO: 1090548 - RNA, 19 nt, Homo sapiens
  misc_RNA (1)...(19): siRNA sense strand
aacuagagcugaaacaaug

SEQ ID NO: 1090549 - RNA, 19 nt, Homo sapiens
  misc_RNA (1)...(19): siRNA sense strand
uggaugaaguguccucuug

SEQ ID NO: 1090550 - RNA, 19 nt, Homo sapiens
  misc_RNA (1)...(19): siRNA sense strand
gagcaagaccaugaacaaa

SEQ ID NO: 1090551 - RNA, 19 nt, Homo sapiens
  misc_RNA (1)...(19): siRNA sense strand
ggagcagccaggacaagua

SEQ ID NO: 1090552 - RNA, 19 nt, Homo sapiens
  misc_RNA (1)...(19): siRNA sense strand
auaaagagcaagaccauga

SEQ ID NO: 1090553 - RNA, 19 nt, Homo sapiens
  misc_RNA (1)...(19): siRNA sense strand
gaagccauccuuacaagca

SEQ ID NO: 1090554 - RNA, 19 nt, Homo sapiens
  misc_RNA (1)...(19): siRNA sense strand
cagaagccauccuuacaag

SEQ ID NO: 1090555 - RNA, 19 nt, Homo sapiens
  misc_RNA (1)...(19): siRNA sense strand
caauagaagaacugcuuaa

SEQ ID NO: 1090556 - RNA, 19 nt, Homo sapiens
  misc_RNA (1)...(19): siRNA sense strand
gaaagcaauagaagaacug

SEQ ID NO: 1090557 - RNA, 19 nt, Homo sapiens
  misc_RNA (1)...(19): siRNA sense strand
gagccaggcccagaaagaa

SEQ ID NO: 1090558 - RNA, 19 nt, Homo sapiens
  misc_RNA (1)...(19): siRNA sense strand
aaacuagagcugaaacaau

SEQ ID NO: 1090559 - RNA, 19 nt, Homo sapiens
  misc_RNA (1)...(19): siRNA sense strand
gagaggaaagcaauagaag

SEQ ID NO: 1090560 - RNA, 19 nt, Homo sapiens
  misc_RNA (1)...(19): siRNA sense strand
gaagaaaacccgaagaaac

SEQ ID NO: 1090561 - RNA, 19 nt, Homo sapiens
  misc_RNA (1)...(19): siRNA sense strand
cacauugcccucucauaaa

SEQ ID NO: 1090562 - RNA, 19 nt, Homo sapiens
  misc_RNA (1)...(19): siRNA sense strand
aaacacagaagccauccuu

SEQ ID NO: 1090563 - RNA, 19 nt, Homo sapiens
  misc_RNA (1)...(19): siRNA sense strand
gcaaaacgugggaaaacua

SEQ ID NO: 1090564 - RNA, 19 nt, Homo sapiens
  misc_RNA (1)...(19): siRNA sense strand
uaaagagcaagaccaugaa

SEQ ID NO: 1090565 - RNA, 19 nt, Homo sapiens
  misc_RNA (1)...(19): siRNA sense strand
acauugcccucucauaaag

SEQ ID NO: 1090566 - RNA, 19 nt, Homo sapiens
  misc_RNA (1)...(19): siRNA sense strand
gaugaaguguccucuugcu

SEQ ID NO: 1090567 - RNA, 19 nt, Homo sapiens
  misc_RNA (1)...(19): siRNA sense strand
aucaggagcuggagaggaa

SEQ ID NO: 1090568 - RNA, 19 nt, Homo sapiens
  misc_RNA (1)...(19): siRNA sense strand
gcucgagguuccgccaguu

SEQ ID NO: 1090569 - RNA, 19 nt, Homo sapiens
  misc_RNA (1)...(19): siRNA sense strand
acagaagccauccuuacaa

SEQ ID NO: 1090570 - RNA, 19 nt, Homo sapiens
  misc_RNA (1)...(19): siRNA sense strand
agagcaagaccaugaacaa

SEQ ID NO: 1090571 - RNA, 19 nt, Homo sapiens
  misc_RNA (1)...(19): siRNA sense strand
cacagaagccauccuuaca

SEQ ID NO: 1090572 - RNA, 19 nt, Homo sapiens
  misc_RNA (1)...(19): siRNA sense strand
gagcagccaggacaaguac

SEQ ID NO: 1090573 - RNA, 19 nt, Homo sapiens
  misc_RNA (1)...(19): siRNA sense strand
gcuggagaggaaagcaaua

SEQ ID NO: 1090574 - RNA, 19 nt, Homo sapiens
  misc_RNA (1)...(19): siRNA sense strand
acacagaagccauccuuac

SEQ ID NO: 1090575 - RNA, 19 nt, Homo sapiens
  misc_RNA (1)...(19): siRNA sense strand
gagcuggagaggaaagcaa

SEQ ID NO: 1090576 - RNA, 19 nt, Homo sapiens
  misc_RNA (1)...(19): siRNA sense strand
agaggaaagcaauagaaga

SEQ ID NO: 1090577 - RNA, 19 nt, Homo sapiens
  misc_RNA (1)...(19): siRNA sense strand
gcagccaggacaaguacga

SEQ ID NO: 1090578 - RNA, 19 nt, Homo sapiens
  misc_RNA (1)...(19): siRNA sense strand
gccaggcccagaaagaaga

SEQ ID NO: 1090579 - RNA, 19 nt, Homo sapiens
  misc_RNA (1)...(19): siRNA sense strand
ucauaaagagcaagaccau

SEQ ID NO: 1090580 - RNA, 19 nt, Homo sapiens
  misc_RNA (1)...(19): siRNA sense strand
ucaccucugugucuuauua

SEQ ID NO: 1090581 - RNA, 19 nt, Homo sapiens
  misc_RNA (1)...(19): siRNA sense strand
acacagaugucuuucuuug

SEQ ID NO: 1090582 - RNA, 19 nt, Homo sapiens
  misc_RNA (1)...(19): siRNA sense strand
caauucaucugcuucaaga

SEQ ID NO: 1090583 - RNA, 19 nt, Homo sapiens
  misc_RNA (1)...(19): siRNA sense strand
gacaugauccugacuguga

SEQ ID NO: 1090584 - RNA, 19 nt, Homo sapiens
  misc_RNA (1)...(19): siRNA sense strand
ugacugugauggccuauga

SEQ ID NO: 1090585 - RNA, 19 nt, Homo sapiens
  misc_RNA (1)...(19): siRNA sense strand
gaacuacccaggcaucaug

SEQ ID NO: 1090586 - RNA, 19 nt, Homo sapiens
  misc_RNA (1)...(19): siRNA sense strand
ccucagaugggaauuauaa

SEQ ID NO: 1090587 - RNA, 19 nt, Homo sapiens
  misc_RNA (1)...(19): siRNA sense strand
gauggccuaugacugguuu

SEQ ID NO: 1090588 - RNA, 19 nt, Homo sapiens
  misc_RNA (1)...(19): siRNA sense strand
ccaagaugauugaggagau

SEQ ID NO: 1090589 - RNA, 19 nt, Homo sapiens
  misc_RNA (1)...(19): siRNA sense strand
auucccagcugcacaauuu

SEQ ID NO: 1090590 - RNA, 19 nt, Homo sapiens
  misc_RNA (1)...(19): siRNA sense strand
acagaugucuuucuuuguc

SEQ ID NO: 1090591 - RNA, 19 nt, Homo sapiens
  misc_RNA (1)...(19): siRNA sense strand
caagaugauugaggagaug

SEQ ID NO: 1090592 - RNA, 19 nt, Homo sapiens
  misc_RNA (1)...(19): siRNA sense strand
ucaagaauguggaaaucuc

SEQ ID NO: 1090593 - RNA, 19 nt, Homo sapiens
  misc_RNA (1)...(19): siRNA sense strand
acagugacaucaauaacau

SEQ ID NO: 1090594 - RNA, 19 nt, Homo sapiens
  misc_RNA (1)...(19): siRNA sense strand
caugaauccucaccucugu

SEQ ID NO: 1090595 - RNA, 19 nt, Homo sapiens
  misc_RNA (1)...(19): siRNA sense strand
gggacugccugacacagau

SEQ ID NO: 1090596 - RNA, 19 nt, Homo sapiens
  misc_RNA (1)...(19): siRNA sense strand
gacagugacaucaauaaca

SEQ ID NO: 1090597 - RNA, 19 nt, Homo sapiens
  misc_RNA (1)...(19): siRNA sense strand
cagggauccuuuuguguua

SEQ ID NO: 1090598 - RNA, 19 nt, Homo sapiens
  misc_RNA (1)...(19): siRNA sense strand
uaagaauuccauccucaga

SEQ ID NO: 1090599 - RNA, 19 nt, Homo sapiens
  misc_RNA (1)...(19): siRNA sense strand
cucugugucuuauuaguuu

SEQ ID NO: 1090600 - RNA, 19 nt, Homo sapiens
  misc_RNA (1)...(19): siRNA sense strand
gaauguggaaaucucuaau

SEQ ID NO: 1090601 - RNA, 19 nt, Homo sapiens
  misc_RNA (1)...(19): siRNA sense strand
ccucaccucugugucuuau

SEQ ID NO: 1090602 - RNA, 19 nt, Homo sapiens
  misc_RNA (1)...(19): siRNA sense strand
ggaauuauaaagccuucuc

SEQ ID NO: 1090603 - RNA, 19 nt, Homo sapiens
  misc_RNA (1)...(19): siRNA sense strand
ggaaccugcucauuauccu

SEQ ID NO: 1090604 - RNA, 19 nt, Homo sapiens
  misc_RNA (1)...(19): siRNA sense strand
aaccuugccuguucugaca

SEQ ID NO: 1090605 - RNA, 19 nt, Homo sapiens
  misc_RNA (1)...(19): siRNA sense strand
cuucaagaauguggaaauc

SEQ ID NO: 1090606 - RNA, 19 nt, Homo sapiens
  misc_RNA (1)...(19): siRNA sense strand
agaauguggaaaucucuaa

SEQ ID NO: 1090607 - RNA, 19 nt, Homo sapiens
  misc_RNA (1)...(19): siRNA sense strand
ucagaugggaauuauaaag

SEQ ID NO: 1090608 - RNA, 19 nt, Homo sapiens
  misc_RNA (1)...(19): siRNA sense strand
uuccuuagccuguuggauu

SEQ ID NO: 1090609 - RNA, 19 nt, Homo sapiens
  misc_RNA (1)...(19): siRNA sense strand
gcauagcagagucaucuac

SEQ ID NO: 1090610 - RNA, 19 nt, Homo sapiens
  misc_RNA (1)...(19): siRNA sense strand
gucucaaccuugccuguuc

SEQ ID NO: 1090611 - RNA, 19 nt, Homo sapiens
  misc_RNA (1)...(19): siRNA sense strand
ucaucugcuucaagaaugu

SEQ ID NO: 1090612 - RNA, 19 nt, Homo sapiens
  misc_RNA (1)...(19): siRNA sense strand
guucugacagugacaucaa

SEQ ID NO: 1090613 - RNA, 19 nt, Homo sapiens
  misc_RNA (1)...(19): siRNA sense strand
guuucaacgucucaaccuu

SEQ ID NO: 1090614 - RNA, 19 nt, Homo sapiens
  misc_RNA (1)...(19): siRNA sense strand
gcaauuaccugcacuuuca

SEQ ID NO: 1090615 - RNA, 19 nt, Homo sapiens
  misc_RNA (1)...(19): siRNA sense strand
uaaaggaggucaucacaga

SEQ ID NO: 1090616 - RNA, 19 nt, Homo sapiens
  misc_RNA (1)...(19): siRNA sense strand
ugucaaagaugaaacagua

SEQ ID NO: 1090617 - RNA, 19 nt, Homo sapiens
  misc_RNA (1)...(19): siRNA sense strand
gaaaagauguugcugacua

SEQ ID NO: 1090618 - RNA, 19 nt, Homo sapiens
  misc_RNA (1)...(19): siRNA sense strand
gaaaguaggcacuaaagga

SEQ ID NO: 1090619 - RNA, 19 nt, Homo sapiens
  misc_RNA (1)...(19): siRNA sense strand
gagaagcagugacaggauu

SEQ ID NO: 1090620 - RNA, 19 nt, Homo sapiens
  misc_RNA (1)...(19): siRNA sense strand
ugacuacuaugaacaaaug

SEQ ID NO: 1090621 - RNA, 19 nt, Homo sapiens
  misc_RNA (1)...(19): siRNA sense strand
cagcgacacucucuacaaa

SEQ ID NO: 1090622 - RNA, 19 nt, Homo sapiens
  misc_RNA (1)...(19): siRNA sense strand
aaacaacgacuacaccuaa

SEQ ID NO: 1090623 - RNA, 19 nt, Homo sapiens
  misc_RNA (1)...(19): siRNA sense strand
gacuacaccuaaagaaauu

SEQ ID NO: 1090624 - RNA, 19 nt, Homo sapiens
  misc_RNA (1)...(19): siRNA sense strand
ccacuuccauucugcauau

SEQ ID NO: 1090625 - RNA, 19 nt, Homo sapiens
  misc_RNA (1)...(19): siRNA sense strand
gugcaaauccgaagaauuc

SEQ ID NO: 1090626 - RNA, 19 nt, Homo sapiens
  misc_RNA (1)...(19): siRNA sense strand
gaaauuccuucuugauagg

SEQ ID NO: 1090627 - RNA, 19 nt, Homo sapiens
  misc_RNA (1)...(19): siRNA sense strand
acaagcaaauguagaaaga

SEQ ID NO: 1090628 - RNA, 19 nt, Homo sapiens
  misc_RNA (1)...(19): siRNA sense strand
gaaacaacgacuacaccua

SEQ ID NO: 1090629 - RNA, 19 nt, Homo sapiens
  misc_RNA (1)...(19): siRNA sense strand
caggauugcugcucaucua

SEQ ID NO: 1090630 - RNA, 19 nt, Homo sapiens
  misc_RNA (1)...(19): siRNA sense strand
gaagagaaacaacgacuac

SEQ ID NO: 1090631 - RNA, 19 nt, Homo sapiens
  misc_RNA (1)...(19): siRNA sense strand
uaaaguacuugugcaaauc

SEQ ID NO: 1090632 - RNA, 19 nt, Homo sapiens
  misc_RNA (1)...(19): siRNA sense strand
ccacuggaaccucuucuuu

SEQ ID NO: 1090633 - RNA, 19 nt, Homo sapiens
  misc_RNA (1)...(19): siRNA sense strand
gguauggccugcuccuuca

SEQ ID NO: 1090634 - RNA, 19 nt, Homo sapiens
  misc_RNA (1)...(19): siRNA sense strand
gcgacacucucuacaaagu

SEQ ID NO: 1090635 - RNA, 19 nt, Homo sapiens
  misc_RNA (1)...(19): siRNA sense strand
cgacuacaccuaaagaaau

SEQ ID NO: 1090636 - RNA, 19 nt, Homo sapiens
  misc_RNA (1)...(19): siRNA sense strand
ggacccggcaacauuuaua

SEQ ID NO: 1090637 - RNA, 19 nt, Homo sapiens
  misc_RNA (1)...(19): siRNA sense strand
uauaauagacccauacaca

SEQ ID NO: 1090638 - RNA, 19 nt, Homo sapiens
  misc_RNA (1)...(19): siRNA sense strand
cacacaaacucauaaacug

SEQ ID NO: 1090639 - RNA, 19 nt, Homo sapiens
  misc_RNA (1)...(19): siRNA sense strand
caacgacuacaccuaaaga

SEQ ID NO: 1090640 - RNA, 19 nt, Homo sapiens
  misc_RNA (1)...(19): siRNA sense strand
gacacucucuacaaaguuc

SEQ ID NO: 1090641 - RNA, 19 nt, Homo sapiens
  misc_RNA (1)...(19): siRNA sense strand
uuauguaucucgacgaugu

SEQ ID NO: 1090642 - RNA, 19 nt, Homo sapiens
  misc_RNA (1)...(19): siRNA sense strand
agauguugcugacuacuau

SEQ ID NO: 1090643 - RNA, 19 nt, Homo sapiens
  misc_RNA (1)...(19): siRNA sense strand
gaaacaucaccuaggagaa

SEQ ID NO: 1090644 - RNA, 19 nt, Homo sapiens
  misc_RNA (1)...(19): siRNA sense strand
uagauuauauuggccaugu

SEQ ID NO: 1090645 - RNA, 19 nt, Homo sapiens
  misc_RNA (1)...(19): siRNA sense strand
ggcaacauuuauaaacaug

SEQ ID NO: 1090646 - RNA, 19 nt, Homo sapiens
  misc_RNA (1)...(19): siRNA sense strand
caaauccgaagaauucaug

SEQ ID NO: 1090647 - RNA, 19 nt, Homo sapiens
  misc_RNA (1)...(19): siRNA sense strand
cucauaaacugucacucua

SEQ ID NO: 1090648 - RNA, 19 nt, Homo sapiens
  misc_RNA (1)...(19): siRNA sense strand
uaauagacccauacacauc

SEQ ID NO: 1090649 - RNA, 19 nt, Homo sapiens
  misc_RNA (1)...(19): siRNA sense strand
acacaucacucuggauucu

SEQ ID NO: 1090650 - RNA, 19 nt, Homo sapiens
  misc_RNA (1)...(19): siRNA sense strand
acaaauguuucagucaguu

SEQ ID NO: 1090651 - RNA, 19 nt, Homo sapiens
  misc_RNA (1)...(19): siRNA sense strand
acaucacucuggauucuga

SEQ ID NO: 1090652 - RNA, 19 nt, Homo sapiens
  misc_RNA (1)...(19): siRNA sense strand
ccaaguugcaccugaccua

SEQ ID NO: 1090653 - RNA, 19 nt, Homo sapiens
  misc_RNA (1)...(19): siRNA sense strand
uuugaaacaucaccuagga

SEQ ID NO: 1090654 - RNA, 19 nt, Homo sapiens
  misc_RNA (1)...(19): siRNA sense strand
caaauguuucagucaguuu

SEQ ID NO: 1090655 - RNA, 19 nt, Homo sapiens
  misc_RNA (1)...(19): siRNA sense strand
ggccugcuccuucacguuu

SEQ ID NO: 1090656 - RNA, 19 nt, Homo sapiens
  misc_RNA (1)...(19): siRNA sense strand
cauguauaauagacccaua

SEQ ID NO: 1090657 - RNA, 19 nt, Homo sapiens
  misc_RNA (1)...(19): siRNA sense strand
gacccggcaacauuuauaa

SEQ ID NO: 1090658 - RNA, 19 nt, Homo sapiens
  misc_RNA (1)...(19): siRNA sense strand
ucauggacccggcaacauu

SEQ ID NO: 1090659 - RNA, 19 nt, Homo sapiens
  misc_RNA (1)...(19): siRNA sense strand
uggcauguuucagugauaa

SEQ ID NO: 1090660 - RNA, 19 nt, Homo sapiens
  misc_RNA (1)...(19): siRNA sense strand
cuaaaggaccaggcgauaa

SEQ ID NO: 1090661 - RNA, 19 nt, Homo sapiens
  misc_RNA (1)...(19): siRNA sense strand
cggcaacauuuauaaacau

SEQ ID NO: 1090662 - RNA, 19 nt, Homo sapiens
  misc_RNA (1)...(19): siRNA sense strand
uggccaagauacaagcaaa

SEQ ID NO: 1090663 - RNA, 19 nt, Homo sapiens
  misc_RNA (1)...(19): siRNA sense strand
ccggcaacauuuauaaaca

SEQ ID NO: 1090664 - RNA, 19 nt, Homo sapiens
  misc_RNA (1)...(19): siRNA sense strand
ucacacaaacucauaaacu

SEQ ID NO: 1090665 - RNA, 19 nt, Homo sapiens
  misc_RNA (1)...(19): siRNA sense strand
aaacugucacucuaccuuu

SEQ ID NO: 1090666 - RNA, 19 nt, Homo sapiens
  misc_RNA (1)...(19): siRNA sense strand
uaccugcacuuucaagaag

SEQ ID NO: 1090667 - RNA, 19 nt, Homo sapiens
  misc_RNA (1)...(19): siRNA sense strand
caagucccacguagcaauu

SEQ ID NO: 1090668 - RNA, 19 nt, Homo sapiens
  misc_RNA (1)...(19): siRNA sense strand
ccagaacaaaucauaaagu

SEQ ID NO: 1090669 - RNA, 19 nt, Homo sapiens
  misc_RNA (1)...(19): siRNA sense strand
cuaugaaaguaggcacuaa

SEQ ID NO: 1090670 - RNA, 19 nt, Homo sapiens
  misc_RNA (1)...(19): siRNA sense strand
uaaaggaccaggcgauaac

SEQ ID NO: 1090671 - RNA, 19 nt, Homo sapiens
  misc_RNA (1)...(19): siRNA sense strand
cauggacccggcaacauuu

SEQ ID NO: 1090672 - RNA, 19 nt, Homo sapiens
  misc_RNA (1)...(19): siRNA sense strand
gcugacuacuaugaacaaa

SEQ ID NO: 1090673 - RNA, 19 nt, Homo sapiens
  misc_RNA (1)...(19): siRNA sense strand
ucaagaagagaaacaacga

SEQ ID NO: 1090674 - RNA, 19 nt, Homo sapiens
  misc_RNA (1)...(19): siRNA sense strand
cauaaaguacuugugcaaa

SEQ ID NO: 1090675 - RNA, 19 nt, Homo sapiens
  misc_RNA (1)...(19): siRNA sense strand
caucacagauuuucucaca

SEQ ID NO: 1090676 - RNA, 19 nt, Homo sapiens
  misc_RNA (1)...(19): siRNA sense strand
ggagaagcagugacaggau

SEQ ID NO: 1090677 - RNA, 19 nt, Homo sapiens
  misc_RNA (1)...(19): siRNA sense strand
aaacaucaccuaggagaag

SEQ ID NO: 1090678 - RNA, 19 nt, Homo sapiens
  misc_RNA (1)...(19): siRNA sense strand
uaugaaaguaggcacuaaa

SEQ ID NO: 1090679 - RNA, 19 nt, Homo sapiens
  misc_RNA (1)...(19): siRNA sense strand
gauuauauuggccauguca

SEQ ID NO: 1090680 - RNA, 19 nt, Homo sapiens
  misc_RNA (1)...(19): siRNA sense strand
aggaggucaucacagauuu

SEQ ID NO: 1090681 - RNA, 19 nt, Homo sapiens
  misc_RNA (1)...(19): siRNA sense strand
auacacaucacucuggauu

SEQ ID NO: 1090682 - RNA, 19 nt, Homo sapiens
  misc_RNA (1)...(19): siRNA sense strand
gcaaauccgaagaauucau

SEQ ID NO: 1090683 - RNA, 19 nt, Homo sapiens
  misc_RNA (1)...(19): siRNA sense strand
ccucccagaacaaaucaua

SEQ ID NO: 1090684 - RNA, 19 nt, Homo sapiens
  misc_RNA (1)...(19): siRNA sense strand
aggaccaggcgauaacuua

SEQ ID NO: 1090685 - RNA, 19 nt, Homo sapiens
  misc_RNA (1)...(19): siRNA sense strand
uaaacugucacucuaccuu

SEQ ID NO: 1090686 - RNA, 19 nt, Homo sapiens
  misc_RNA (1)...(19): siRNA sense strand
acacaaacucauaaacugu

SEQ ID NO: 1090687 - RNA, 19 nt, Homo sapiens
  misc_RNA (1)...(19): siRNA sense strand
gugauaaaaguuccaguua

SEQ ID NO: 1090688 - RNA, 19 nt, Homo sapiens
  misc_RNA (1)...(19): siRNA sense strand
aacaacgacuacaccuaaa

SEQ ID NO: 1090689 - RNA, 19 nt, Homo sapiens
  misc_RNA (1)...(19): siRNA sense strand
gccaagauacaagcaaaug

SEQ ID NO: 1090690 - RNA, 19 nt, Homo sapiens
  misc_RNA (1)...(19): siRNA sense strand
ucccagaacaaaucauaaa

SEQ ID NO: 1090691 - RNA, 19 nt, Homo sapiens
  misc_RNA (1)...(19): siRNA sense strand
acaaacucauaaacuguca

SEQ ID NO: 1090692 - RNA, 19 nt, Homo sapiens
  misc_RNA (1)...(19): siRNA sense strand
ccagcgacacucucuacaa

SEQ ID NO: 1090693 - RNA, 19 nt, Homo sapiens
  misc_RNA (1)...(19): siRNA sense strand
ccaagucccacguagcaau

SEQ ID NO: 1090694 - RNA, 19 nt, Homo sapiens
  misc_RNA (1)...(19): siRNA sense strand
ccaagauacaagcaaaugu

SEQ ID NO: 1090695 - RNA, 19 nt, Homo sapiens
  misc_RNA (1)...(19): siRNA sense strand
ucacagauuuucucacaca

SEQ ID NO: 1090696 - RNA, 19 nt, Homo sapiens
  misc_RNA (1)...(19): siRNA sense strand
aaggaggucaucacagauu

SEQ ID NO: 1090697 - RNA, 19 nt, Homo sapiens
  misc_RNA (1)...(19): siRNA sense strand
agaagagaaacaacgacua

SEQ ID NO: 1090698 - RNA, 19 nt, Homo sapiens
  misc_RNA (1)...(19): siRNA sense strand
uaccuuugccagacuauga

SEQ ID NO: 1090699 - RNA, 19 nt, Homo sapiens
  misc_RNA (1)...(19): siRNA sense strand
ugacaggauugcugcucau

SEQ ID NO: 1090700 - RNA, 19 nt, Homo sapiens
  misc_RNA (1)...(19): siRNA sense strand
ucauaaaguacuugugcaa

SEQ ID NO: 1090701 - RNA, 19 nt, Homo sapiens
  misc_RNA (1)...(19): siRNA sense strand
ggaccaggcgauaacuuac

SEQ ID NO: 1090702 - RNA, 19 nt, Homo sapiens
  misc_RNA (1)...(19): siRNA sense strand
cgacacucucuacaaaguu

SEQ ID NO: 1090703 - RNA, 19 nt, Homo sapiens
  misc_RNA (1)...(19): siRNA sense strand
uauuggccaugucaaagau

SEQ ID NO: 1090704 - RNA, 19 nt, Homo sapiens
  misc_RNA (1)...(19): siRNA sense strand
gauugcugcucaucuaucc

SEQ ID NO: 1090705 - RNA, 19 nt, Homo sapiens
  misc_RNA (1)...(19): siRNA sense strand
uuaccugcacuuucaagaa

SEQ ID NO: 1090706 - RNA, 19 nt, Homo sapiens
  misc_RNA (1)...(19): siRNA sense strand
gaccaggcgauaacuuaca

SEQ ID NO: 1090707 - RNA, 19 nt, Homo sapiens
  misc_RNA (1)...(19): siRNA sense strand
caagcaaauguagaaagaa

SEQ ID NO: 1090708 - RNA, 19 nt, Homo sapiens
  misc_RNA (1)...(19): siRNA sense strand
uuauauuggccaugucaaa

SEQ ID NO: 1090709 - RNA, 19 nt, Homo sapiens
  misc_RNA (1)...(19): siRNA sense strand
uaaccagaagggcagcaaa

SEQ ID NO: 1090710 - RNA, 19 nt, Homo sapiens
  misc_RNA (1)...(19): siRNA sense strand
aauagacccauacacauca

SEQ ID NO: 1090711 - RNA, 19 nt, Homo sapiens
  misc_RNA (1)...(19): siRNA sense strand
cuugauaggauguuucuag

SEQ ID NO: 1090712 - RNA, 19 nt, Homo sapiens
  misc_RNA (1)...(19): siRNA sense strand
caauggcauguuucaguga

SEQ ID NO: 1090713 - RNA, 19 nt, Homo sapiens
  misc_RNA (1)...(19): siRNA sense strand
uugauaggauguuucuagu

SEQ ID NO: 1090714 - RNA, 19 nt, Homo sapiens
  misc_RNA (1)...(19): siRNA sense strand
caaagacucagaagaauua

SEQ ID NO: 1090715 - RNA, 19 nt, Homo sapiens
  misc_RNA (1)...(19): siRNA sense strand
gaaagcauguugagauaug

SEQ ID NO: 1090716 - RNA, 19 nt, Homo sapiens
  misc_RNA (1)...(19): siRNA sense strand
gaagacgagugaucugaaa

SEQ ID NO: 1090717 - RNA, 19 nt, Homo sapiens
  misc_RNA (1)...(19): siRNA sense strand
gguaauuccugaagucuug

SEQ ID NO: 1090718 - RNA, 19 nt, Homo sapiens
  misc_RNA (1)...(19): siRNA sense strand
ggcaggagauaguggaaua

SEQ ID NO: 1090719 - RNA, 19 nt, Homo sapiens
  misc_RNA (1)...(19): siRNA sense strand
gaccaggccuuguaucaga

SEQ ID NO: 1090720 - RNA, 19 nt, Homo sapiens
  misc_RNA (1)...(19): siRNA sense strand
agaaugaaguggaagauga

SEQ ID NO: 1090721 - RNA, 19 nt, Homo sapiens
  misc_RNA (1)...(19): siRNA sense strand
gaagaagaacccaguguug

SEQ ID NO: 1090722 - RNA, 19 nt, Homo sapiens
  misc_RNA (1)...(19): siRNA sense strand
ggagauaguggaauagauu

SEQ ID NO: 1090723 - RNA, 19 nt, Homo sapiens
  misc_RNA (1)...(19): siRNA sense strand
gcauuagacuggagaaaca

SEQ ID NO: 1090724 - RNA, 19 nt, Homo sapiens
  misc_RNA (1)...(19): siRNA sense strand
gcagaauccauuuacauaa

SEQ ID NO: 1090725 - RNA, 19 nt, Homo sapiens
  misc_RNA (1)...(19): siRNA sense strand
guugagauaugaaguguau

SEQ ID NO: 1090726 - RNA, 19 nt, Homo sapiens
  misc_RNA (1)...(19): siRNA sense strand
agacaaagacucagaagaa

SEQ ID NO: 1090727 - RNA, 19 nt, Homo sapiens
  misc_RNA (1)...(19): siRNA sense strand
ccacugacaugcugacaau

SEQ ID NO: 1090728 - RNA, 19 nt, Homo sapiens
  misc_RNA (1)...(19): siRNA sense strand
uggaaagcauguugagaua

SEQ ID NO: 1090729 - RNA, 19 nt, Homo sapiens
  misc_RNA (1)...(19): siRNA sense strand
acucacaucuaauuccuua

SEQ ID NO: 1090730 - RNA, 19 nt, Homo sapiens
  misc_RNA (1)...(19): siRNA sense strand
gaagcagaauccauuuaca

SEQ ID NO: 1090731 - RNA, 19 nt, Homo sapiens
  misc_RNA (1)...(19): siRNA sense strand
gucaaccacucacaucuaa

SEQ ID NO: 1090732 - RNA, 19 nt, Homo sapiens
  misc_RNA (1)...(19): siRNA sense strand
gaaaguuguggccuaaauu

SEQ ID NO: 1090733 - RNA, 19 nt, Homo sapiens
  misc_RNA (1)...(19): siRNA sense strand
gacaaagacucagaagaau

SEQ ID NO: 1090734 - RNA, 19 nt, Homo sapiens
  misc_RNA (1)...(19): siRNA sense strand
gggcauaaguauccuucaa

SEQ ID NO: 1090735 - RNA, 19 nt, Homo sapiens
  misc_RNA (1)...(19): siRNA sense strand
gcugaaaguuguggccuaa

SEQ ID NO: 1090736 - RNA, 19 nt, Homo sapiens
  misc_RNA (1)...(19): siRNA sense strand
uaaccucucugcugaaagu

SEQ ID NO: 1090737 - RNA, 19 nt, Homo sapiens
  misc_RNA (1)...(19): siRNA sense strand
gcuuguagauuaguggaua

SEQ ID NO: 1090738 - RNA, 19 nt, Homo sapiens
  misc_RNA (1)...(19): siRNA sense strand
gcugaacaaccuaaugaua

SEQ ID NO: 1090739 - RNA, 19 nt, Homo sapiens
  misc_RNA (1)...(19): siRNA sense strand
ccaagaaccuaaccucucu

SEQ ID NO: 1090740 - RNA, 19 nt, Homo sapiens
  misc_RNA (1)...(19): siRNA sense strand
caaccacucacaucuaauu

SEQ ID NO: 1090741 - RNA, 19 nt, Homo sapiens
  misc_RNA (1)...(19): siRNA sense strand
agucugggaucuaauaauu

SEQ ID NO: 1090742 - RNA, 19 nt, Homo sapiens
  misc_RNA (1)...(19): siRNA sense strand
ugaaguguaugguggagaa

SEQ ID NO: 1090743 - RNA, 19 nt, Homo sapiens
  misc_RNA (1)...(19): siRNA sense strand
ugaaaguuguggccuaaau

SEQ ID NO: 1090744 - RNA, 19 nt, Homo sapiens
  misc_RNA (1)...(19): siRNA sense strand
gaagaacccaguguugcua

SEQ ID NO: 1090745 - RNA, 19 nt, Homo sapiens
  misc_RNA (1)...(19): siRNA sense strand
guaauccuuuccaggguuu

SEQ ID NO: 1090746 - RNA, 19 nt, Homo sapiens
  misc_RNA (1)...(19): siRNA sense strand
cugaacaaccuaaugauaa

SEQ ID NO: 1090747 - RNA, 19 nt, Homo sapiens
  misc_RNA (1)...(19): siRNA sense strand
aagcugaagucauacaaga

SEQ ID NO: 1090748 - RNA, 19 nt, Homo sapiens
  misc_RNA (1)...(19): siRNA sense strand
aagacaagcugcaagacaa

SEQ ID NO: 1090749 - RNA, 19 nt, Homo sapiens
  misc_RNA (1)...(19): siRNA sense strand
uaacacaauacaccaguuu

SEQ ID NO: 1090750 - RNA, 19 nt, Homo sapiens
  misc_RNA (1)...(19): siRNA sense strand
cgaacacccucugcuugua

SEQ ID NO: 1090751 - RNA, 19 nt, Homo sapiens
  misc_RNA (1)...(19): siRNA sense strand
gugcuagguucccauuuga

SEQ ID NO: 1090752 - RNA, 19 nt, Homo sapiens
  misc_RNA (1)...(19): siRNA sense strand
ucgaagggauagacacaaa

SEQ ID NO: 1090753 - RNA, 19 nt, Homo sapiens
  misc_RNA (1)...(19): siRNA sense strand
gaggaugacauuucugaga

SEQ ID NO: 1090754 - RNA, 19 nt, Homo sapiens
  misc_RNA (1)...(19): siRNA sense strand
ccaaacagacuccgcauag

SEQ ID NO: 1090755 - RNA, 19 nt, Homo sapiens
  misc_RNA (1)...(19): siRNA sense strand
gcgaaucaguaauccuuuc

SEQ ID NO: 1090756 - RNA, 19 nt, Homo sapiens
  misc_RNA (1)...(19): siRNA sense strand
gcauaaguauccuucaaaa

SEQ ID NO: 1090757 - RNA, 19 nt, Homo sapiens
  misc_RNA (1)...(19): siRNA sense strand
uuucaacacuucacauaug

SEQ ID NO: 1090758 - RNA, 19 nt, Homo sapiens
  misc_RNA (1)...(19): siRNA sense strand
gacaaucgggcauaaguau

SEQ ID NO: 1090759 - RNA, 19 nt, Homo sapiens
  misc_RNA (1)...(19): siRNA sense strand
uagguucccauuugauuua

SEQ ID NO: 1090760 - RNA, 19 nt, Homo sapiens
  misc_RNA (1)...(19): siRNA sense strand
gauggugccuguaguucau

SEQ ID NO: 1090761 - RNA, 19 nt, Homo sapiens
  misc_RNA (1)...(19): siRNA sense strand
agacucagaagaauuauug

SEQ ID NO: 1090762 - RNA, 19 nt, Homo sapiens
  misc_RNA (1)...(19): siRNA sense strand
cgugaacccuuuaagacaa

SEQ ID NO: 1090763 - RNA, 19 nt, Homo sapiens
  misc_RNA (1)...(19): siRNA sense strand
gaagcacaauauccaaagg

SEQ ID NO: 1090764 - RNA, 19 nt, Homo sapiens
  misc_RNA (1)...(19): siRNA sense strand
cucaggauguccaauauga

SEQ ID NO: 1090765 - RNA, 19 nt, Homo sapiens
  misc_RNA (1)...(19): siRNA sense strand
ggugaaagccaagaaccua

SEQ ID NO: 1090766 - RNA, 19 nt, Homo sapiens
  misc_RNA (1)...(19): siRNA sense strand
cuacaagccuagaaaauga

SEQ ID NO: 1090767 - RNA, 19 nt, Homo sapiens
  misc_RNA (1)...(19): siRNA sense strand
gggcagggccauucucgaa

SEQ ID NO: 1090768 - RNA, 19 nt, Homo sapiens
  misc_RNA (1)...(19): siRNA sense strand
ggaagcagaauccauuuac

SEQ ID NO: 1090769 - RNA, 19 nt, Homo sapiens
  misc_RNA (1)...(19): siRNA sense strand
caaagagccauaugcugaa

SEQ ID NO: 1090770 - RNA, 19 nt, Homo sapiens
  misc_RNA (1)...(19): siRNA sense strand
guaaagccaaagagccaua

SEQ ID NO: 1090771 - RNA, 19 nt, Homo sapiens
  misc_RNA (1)...(19): siRNA sense strand
gaacacccucugcuuguag

SEQ ID NO: 1090772 - RNA, 19 nt, Homo sapiens
  misc_RNA (1)...(19): siRNA sense strand
ugaacacagucacuuggaa

SEQ ID NO: 1090773 - RNA, 19 nt, Homo sapiens
  misc_RNA (1)...(19): siRNA sense strand
ggagucagaguccucagaa

SEQ ID NO: 1090774 - RNA, 19 nt, Homo sapiens
  misc_RNA (1)...(19): siRNA sense strand
agaaaugaaugcuacaaac

SEQ ID NO: 1090775 - RNA, 19 nt, Homo sapiens
  misc_RNA (1)...(19): siRNA sense strand
gagacuacaagccuagaaa

SEQ ID NO: 1090776 - RNA, 19 nt, Homo sapiens
  misc_RNA (1)...(19): siRNA sense strand
ugaaaugguaggucagaaa

SEQ ID NO: 1090777 - RNA, 19 nt, Homo sapiens
  misc_RNA (1)...(19): siRNA sense strand
augaacagcuuucuaacga

SEQ ID NO: 1090778 - RNA, 19 nt, Homo sapiens
  misc_RNA (1)...(19): siRNA sense strand
gcaaaaugaugguaaaugc

SEQ ID NO: 1090779 - RNA, 19 nt, Homo sapiens
  misc_RNA (1)...(19): siRNA sense strand
aagccuagguccuuggauu

SEQ ID NO: 1090780 - RNA, 19 nt, Homo sapiens
  misc_RNA (1)...(19): siRNA sense strand
gcuagguucccauuugauu

SEQ ID NO: 1090781 - RNA, 19 nt, Homo sapiens
  misc_RNA (1)...(19): siRNA sense strand
acaauacaccaguuucaaa

SEQ ID NO: 1090782 - RNA, 19 nt, Homo sapiens
  misc_RNA (1)...(19): siRNA sense strand
ucugggaucuaauaauuca

SEQ ID NO: 1090783 - RNA, 19 nt, Homo sapiens
  misc_RNA (1)...(19): siRNA sense strand
aagcccaaaugaaauggua

SEQ ID NO: 1090784 - RNA, 19 nt, Homo sapiens
  misc_RNA (1)...(19): siRNA sense strand
cgaagaagaacccaguguu

SEQ ID NO: 1090785 - RNA, 19 nt, Homo sapiens
  misc_RNA (1)...(19): siRNA sense strand
ccuaaccucucugcugaaa

SEQ ID NO: 1090786 - RNA, 19 nt, Homo sapiens
  misc_RNA (1)...(19): siRNA sense strand
ggaagccagggaaaucauu

SEQ ID NO: 1090787 - RNA, 19 nt, Homo sapiens
  misc_RNA (1)...(19): siRNA sense strand
gaugauggugccuguaguu

SEQ ID NO: 1090788 - RNA, 19 nt, Homo sapiens
  misc_RNA (1)...(19): siRNA sense strand
acccucugcuuguagauua

SEQ ID NO: 1090789 - RNA, 19 nt, Homo sapiens
  misc_RNA (1)...(19): siRNA sense strand
caaacagacuccgcauagu

SEQ ID NO: 1090790 - RNA, 19 nt, Homo sapiens
  misc_RNA (1)...(19): siRNA sense strand
uuacauaaaugacccuacu

SEQ ID NO: 1090791 - RNA, 19 nt, Homo sapiens
  misc_RNA (1)...(19): siRNA sense strand
gaaugaaguggaagaugau

SEQ ID NO: 1090792 - RNA, 19 nt, Homo sapiens
  misc_RNA (1)...(19): siRNA sense strand
guaucagaaugaaguggaa

SEQ ID NO: 1090793 - RNA, 19 nt, Homo sapiens
  misc_RNA (1)...(19): siRNA sense strand
gaaaugguaggucagaaac

SEQ ID NO: 1090794 - RNA, 19 nt, Homo sapiens
  misc_RNA (1)...(19): siRNA sense strand
ugacaaucgggcauaagua

SEQ ID NO: 1090795 - RNA, 19 nt, Homo sapiens
  misc_RNA (1)...(19): siRNA sense strand
gaagucauacaagacacua

SEQ ID NO: 1090796 - RNA, 19 nt, Homo sapiens
  misc_RNA (1)...(19): siRNA sense strand
gaaucagggaagugaguuu

SEQ ID NO: 1090797 - RNA, 19 nt, Homo sapiens
  misc_RNA (1)...(19): siRNA sense strand
acaaagacucagaagaauu

SEQ ID NO: 1090798 - RNA, 19 nt, Homo sapiens
  misc_RNA (1)...(19): siRNA sense strand
ugagguaauuccugaaguc

SEQ ID NO: 1090799 - RNA, 19 nt, Homo sapiens
  misc_RNA (1)...(19): siRNA sense strand
ggaaagcauguugagauau

SEQ ID NO: 1090800 - RNA, 19 nt, Homo sapiens
  misc_RNA (1)...(19): siRNA sense strand
ggcauaaguauccuucaaa

SEQ ID NO: 1090801 - RNA, 19 nt, Homo sapiens
  misc_RNA (1)...(19): siRNA sense strand
gaauuaaaagcccaaauga

SEQ ID NO: 1090802 - RNA, 19 nt, Homo sapiens
  misc_RNA (1)...(19): siRNA sense strand
ucaccgaggaagcacaaua

SEQ ID NO: 1090803 - RNA, 19 nt, Homo sapiens
  misc_RNA (1)...(19): siRNA sense strand
ggaagcacaauauccaaag

SEQ ID NO: 1090804 - RNA, 19 nt, Homo sapiens
  misc_RNA (1)...(19): siRNA sense strand
uaacuccagucauaaacgu

SEQ ID NO: 1090805 - RNA, 19 nt, Homo sapiens
  misc_RNA (1)...(19): siRNA sense strand
caguguugcuaaaugugua

SEQ ID NO: 1090806 - RNA, 19 nt, Homo sapiens
  misc_RNA (1)...(19): siRNA sense strand
gacaagacaaagacucaga

SEQ ID NO: 1090807 - RNA, 19 nt, Homo sapiens
  misc_RNA (1)...(19): siRNA sense strand
accgcuaacuccagucaua

SEQ ID NO: 1090808 - RNA, 19 nt, Homo sapiens
  misc_RNA (1)...(19): siRNA sense strand
gcagucaaccacucacauc

SEQ ID NO: 1090809 - RNA, 19 nt, Homo sapiens
  misc_RNA (1)...(19): siRNA sense strand
agaggaggaugacauuucu

SEQ ID NO: 1090810 - RNA, 19 nt, Homo sapiens
  misc_RNA (1)...(19): siRNA sense strand
ggaaagaagccagcuagcu

SEQ ID NO: 1090811 - RNA, 19 nt, Homo sapiens
  misc_RNA (1)...(19): siRNA sense strand
gugaaagccaagaaccuaa

SEQ ID NO: 1090812 - RNA, 19 nt, Homo sapiens
  misc_RNA (1)...(19): siRNA sense strand
ggcucaggauguccaauau

SEQ ID NO: 1090813 - RNA, 19 nt, Homo sapiens
  misc_RNA (1)...(19): siRNA sense strand
cacaucuaauuccuuacua

SEQ ID NO: 1090814 - RNA, 19 nt, Homo sapiens
  misc_RNA (1)...(19): siRNA sense strand
aaacgaagauaucaccuuu

SEQ ID NO: 1090815 - RNA, 19 nt, Homo sapiens
  misc_RNA (1)...(19): siRNA sense strand
gcaaaguacucagcagaga

SEQ ID NO: 1090816 - RNA, 19 nt, Homo sapiens
  misc_RNA (1)...(19): siRNA sense strand
ggaagaaggaguugaagga

SEQ ID NO: 1090817 - RNA, 19 nt, Homo sapiens
  misc_RNA (1)...(19): siRNA sense strand
gcaugaaccuccucaagag

SEQ ID NO: 1090818 - RNA, 19 nt, Homo sapiens
  misc_RNA (1)...(19): siRNA sense strand
aggaugaacugaagaagaa

SEQ ID NO: 1090819 - RNA, 19 nt, Homo sapiens
  misc_RNA (1)...(19): siRNA sense strand
gaacugaagaagaaagaga

SEQ ID NO: 1090820 - RNA, 19 nt, Homo sapiens
  misc_RNA (1)...(19): siRNA sense strand
ggcuacagauguucaauug

SEQ ID NO: 1090821 - RNA, 19 nt, Homo sapiens
  misc_RNA (1)...(19): siRNA sense strand
caaggaggaugaacugaag

SEQ ID NO: 1090822 - RNA, 19 nt, Homo sapiens
  misc_RNA (1)...(19): siRNA sense strand
gagccacccugcagucaau

SEQ ID NO: 1090823 - RNA, 19 nt, Homo sapiens
  misc_RNA (1)...(19): siRNA sense strand
gcacgugacccacauccaa

SEQ ID NO: 1090824 - RNA, 19 nt, Homo sapiens
  misc_RNA (1)...(19): siRNA sense strand
ucaauuggcugguuaucca

SEQ ID NO: 1090825 - RNA, 19 nt, Homo sapiens
  misc_RNA (1)...(19): siRNA sense strand
gaggaugaacugaagaaga

SEQ ID NO: 1090826 - RNA, 19 nt, Homo sapiens
  misc_RNA (1)...(19): siRNA sense strand
agaaagagaaggagcagaa

SEQ ID NO: 1090827 - RNA, 19 nt, Homo sapiens
  misc_RNA (1)...(19): siRNA sense strand
acgaagauaucaccuuuua

SEQ ID NO: 1090828 - RNA, 19 nt, Homo sapiens
  misc_RNA (1)...(19): siRNA sense strand
uccaaaggcugagcugaaa

SEQ ID NO: 1090829 - RNA, 19 nt, Homo sapiens
  misc_RNA (1)...(19): siRNA sense strand
gaagauaucaccuuuuaca

SEQ ID NO: 1090830 - RNA, 19 nt, Homo sapiens
  misc_RNA (1)...(19): siRNA sense strand
gauguucaauuggcugguu

SEQ ID NO: 1090831 - RNA, 19 nt, Homo sapiens
  misc_RNA (1)...(19): siRNA sense strand
ccaaggaggaugaacugaa

SEQ ID NO: 1090832 - RNA, 19 nt, Homo sapiens
  misc_RNA (1)...(19): siRNA sense strand
cagagaagaagacaucgaa

SEQ ID NO: 1090833 - RNA, 19 nt, Homo sapiens
  misc_RNA (1)...(19): siRNA sense strand
gcuaagcgcaauccaguuc

SEQ ID NO: 1090834 - RNA, 19 nt, Homo sapiens
  misc_RNA (1)...(19): siRNA sense strand
gaacacagagaagaagaca

SEQ ID NO: 1090835 - RNA, 19 nt, Homo sapiens
  misc_RNA (1)...(19): siRNA sense strand
gagcugaaacuggagaaga

SEQ ID NO: 1090836 - RNA, 19 nt, Homo sapiens
  misc_RNA (1)...(19): siRNA sense strand
ggaaacagacuugcuaagc

SEQ ID NO: 1090837 - RNA, 19 nt, Homo sapiens
  misc_RNA (1)...(19): siRNA sense strand
acacagagaagaagacauc

SEQ ID NO: 1090838 - RNA, 19 nt, Homo sapiens
  misc_RNA (1)...(19): siRNA sense strand
ugaagaagaaagagaagga

SEQ ID NO: 1090839 - RNA, 19 nt, Homo sapiens
  misc_RNA (1)...(19): siRNA sense strand
gaagaaaacgaagauauca

SEQ ID NO: 1090840 - RNA, 19 nt, Homo sapiens
  misc_RNA (1)...(19): siRNA sense strand
gucagauccuggaaacaga

SEQ ID NO: 1090841 - RNA, 19 nt, Homo sapiens
  misc_RNA (1)...(19): siRNA sense strand
guccaaaggcugagcugaa

SEQ ID NO: 1090842 - RNA, 19 nt, Homo sapiens
  misc_RNA (1)...(19): siRNA sense strand
gccagaacacagagaagaa

SEQ ID NO: 1090843 - RNA, 19 nt, Homo sapiens
  misc_RNA (1)...(19): siRNA sense strand
gaaacuggagaagaaguca

SEQ ID NO: 1090844 - RNA, 19 nt, Homo sapiens
  misc_RNA (1)...(19): siRNA sense strand
gauccuggaaacagacuug

SEQ ID NO: 1090845 - RNA, 19 nt, Homo sapiens
  misc_RNA (1)...(19): siRNA sense strand
ccgggaagccugucugugu

SEQ ID NO: 1090846 - RNA, 19 nt, Homo sapiens
  misc_RNA (1)...(19): siRNA sense strand
gaaagagaaggagcagaag

SEQ ID NO: 1090847 - RNA, 19 nt, Homo sapiens
  misc_RNA (1)...(19): siRNA sense strand
caagccagaacacagagaa

SEQ ID NO: 1090848 - RNA, 19 nt, Homo sapiens
  misc_RNA (1)...(19): siRNA sense strand
caaguccuccagaugcauu

SEQ ID NO: 1090849 - RNA, 19 nt, Homo sapiens
  misc_RNA (1)...(19): siRNA sense strand
agcugaaacuggagaagaa

SEQ ID NO: 1090850 - RNA, 19 nt, Homo sapiens
  misc_RNA (1)...(19): siRNA sense strand
ugacccacauccaagaucu

SEQ ID NO: 1090851 - RNA, 19 nt, Homo sapiens
  misc_RNA (1)...(19): siRNA sense strand
guacauuggagaagcucaa

SEQ ID NO: 1090852 - RNA, 19 nt, Homo sapiens
  misc_RNA (1)...(19): siRNA sense strand
ccuggaaacagacuugcua

SEQ ID NO: 1090853 - RNA, 19 nt, Homo sapiens
  misc_RNA (1)...(19): siRNA sense strand
ggauacccaccaucucugu

SEQ ID NO: 1090854 - RNA, 19 nt, Homo sapiens
  misc_RNA (1)...(19): siRNA sense strand
uccuggagcuccuguguca

SEQ ID NO: 1090855 - RNA, 19 nt, Homo sapiens
  misc_RNA (1)...(19): siRNA sense strand
ccuggcaccuacugcuuug

SEQ ID NO: 1090856 - RNA, 19 nt, Homo sapiens
  misc_RNA (1)...(19): siRNA sense strand
ccacugaugaguccaaagg

SEQ ID NO: 1090857 - RNA, 19 nt, Homo sapiens
  misc_RNA (1)...(19): siRNA sense strand
uaagcgcaauccaguucug

SEQ ID NO: 1090858 - RNA, 19 nt, Homo sapiens
  misc_RNA (1)...(19): siRNA sense strand
aagagaaggagcagaagga

SEQ ID NO: 1090859 - RNA, 19 nt, Homo sapiens
  misc_RNA (1)...(19): siRNA sense strand
ugcaugaaccuccucaaga

SEQ ID NO: 1090860 - RNA, 19 nt, Homo sapiens
  misc_RNA (1)...(19): siRNA sense strand
caaaggcugagcugaaacu

SEQ ID NO: 1090861 - RNA, 19 nt, Homo sapiens
  misc_RNA (1)...(19): siRNA sense strand
aagcucaaguccuccagau

SEQ ID NO: 1090862 - RNA, 19 nt, Homo sapiens
  misc_RNA (1)...(19): siRNA sense strand
caccaucucuguccccauu

SEQ ID NO: 1090863 - RNA, 19 nt, Homo sapiens
  misc_RNA (1)...(19): siRNA sense strand
ccuggaagaaggaguugaa

SEQ ID NO: 1090864 - RNA, 19 nt, Homo sapiens
  misc_RNA (1)...(19): siRNA sense strand
cagaacacagagaagaaga

SEQ ID NO: 1090865 - RNA, 19 nt, Homo sapiens
  misc_RNA (1)...(19): siRNA sense strand
gaagaaagacgcacaggaa

SEQ ID NO: 1090866 - RNA, 19 nt, Homo sapiens
  misc_RNA (1)...(19): siRNA sense strand
gaaaagaaauggugcaaau

SEQ ID NO: 1090867 - RNA, 19 nt, Homo sapiens
  misc_RNA (1)...(19): siRNA sense strand
ggagaugguuccaggagaa

SEQ ID NO: 1090868 - RNA, 19 nt, Homo sapiens
  misc_RNA (1)...(19): siRNA sense strand
ggacuuggguuuuacauuu

SEQ ID NO: 1090869 - RNA, 19 nt, Homo sapiens
  misc_RNA (1)...(19): siRNA sense strand
gagaucaggugggaaguuu

SEQ ID NO: 1090870 - RNA, 19 nt, Homo sapiens
  misc_RNA (1)...(19): siRNA sense strand
gaagucagcagaaagaaga

SEQ ID NO: 1090871 - RNA, 19 nt, Homo sapiens
  misc_RNA (1)...(19): siRNA sense strand
gaaagacgcacaggaaaga

SEQ ID NO: 1090872 - RNA, 19 nt, Homo sapiens
  misc_RNA (1)...(19): siRNA sense strand
ccugucaacuccaccuuua

SEQ ID NO: 1090873 - RNA, 19 nt, Homo sapiens
  misc_RNA (1)...(19): siRNA sense strand
caaguucucuggaucacau

SEQ ID NO: 1090874 - RNA, 19 nt, Homo sapiens
  misc_RNA (1)...(19): siRNA sense strand
agaaggaagucagcagaaa

SEQ ID NO: 1090875 - RNA, 19 nt, Homo sapiens
  misc_RNA (1)...(19): siRNA sense strand
gaucaggugggaaguuuau

SEQ ID NO: 1090876 - RNA, 19 nt, Homo sapiens
  misc_RNA (1)...(19): siRNA sense strand
aaagaaauggugcaaaugu

SEQ ID NO: 1090877 - RNA, 19 nt, Homo sapiens
  misc_RNA (1)...(19): siRNA sense strand
gaagaaagagacagagacu

SEQ ID NO: 1090878 - RNA, 19 nt, Homo sapiens
  misc_RNA (1)...(19): siRNA sense strand
ggaaguuuauccugucaac

SEQ ID NO: 1090879 - RNA, 19 nt, Homo sapiens
  misc_RNA (1)...(19): siRNA sense strand
gguacuuggugccgaagaa

SEQ ID NO: 1090880 - RNA, 19 nt, Homo sapiens
  misc_RNA (1)...(19): siRNA sense strand
gagaaggaagucagcagaa

SEQ ID NO: 1090881 - RNA, 19 nt, Homo sapiens
  misc_RNA (1)...(19): siRNA sense strand
gaaggaagucagcagaaag

SEQ ID NO: 1090882 - RNA, 19 nt, Homo sapiens
  misc_RNA (1)...(19): siRNA sense strand
ccacaaggacugaaacucu

SEQ ID NO: 1090883 - RNA, 19 nt, Homo sapiens
  misc_RNA (1)...(19): siRNA sense strand
cacaaauucucuaguagca

SEQ ID NO: 1090884 - RNA, 19 nt, Homo sapiens
  misc_RNA (1)...(19): siRNA sense strand
uagcagaagccaagaacaa

SEQ ID NO: 1090885 - RNA, 19 nt, Homo sapiens
  misc_RNA (1)...(19): siRNA sense strand
gccggacgcuagcuuccua

SEQ ID NO: 1090886 - RNA, 19 nt, Homo sapiens
  misc_RNA (1)...(19): siRNA sense strand
gaaacagagaugguacuug

SEQ ID NO: 1090887 - RNA, 19 nt, Homo sapiens
  misc_RNA (1)...(19): siRNA sense strand
aagaaauggugcaaaugug

SEQ ID NO: 1090888 - RNA, 19 nt, Homo sapiens
  misc_RNA (1)...(19): siRNA sense strand
cagaagccaagaacaaguu

SEQ ID NO: 1090889 - RNA, 19 nt, Homo sapiens
  misc_RNA (1)...(19): siRNA sense strand
gacuuggguuuuacauuua

SEQ ID NO: 1090890 - RNA, 19 nt, Homo sapiens
  misc_RNA (1)...(19): siRNA sense strand
aaagagagaaggguagcua

SEQ ID NO: 1090891 - RNA, 19 nt, Homo sapiens
  misc_RNA (1)...(19): siRNA sense strand
agacagagacugggaagga

SEQ ID NO: 1090892 - RNA, 19 nt, Homo sapiens
  misc_RNA (1)...(19): siRNA sense strand
gcagaagccaagaacaagu

SEQ ID NO: 1090893 - RNA, 19 nt, Homo sapiens
  misc_RNA (1)...(19): siRNA sense strand
ggaagucagcagaaagaag

SEQ ID NO: 1090894 - RNA, 19 nt, Homo sapiens
  misc_RNA (1)...(19): siRNA sense strand
gaugguuccaggagaagaa

SEQ ID NO: 1090895 - RNA, 19 nt, Homo sapiens
  misc_RNA (1)...(19): siRNA sense strand
aagaaagacgcacaggaaa

SEQ ID NO: 1090896 - RNA, 19 nt, Homo sapiens
  misc_RNA (1)...(19): siRNA sense strand
ggagccacaaggacugaaa

SEQ ID NO: 1090897 - RNA, 19 nt, Homo sapiens
  misc_RNA (1)...(19): siRNA sense strand
agagagaaggguagcuaaa

SEQ ID NO: 1090898 - RNA, 19 nt, Homo sapiens
  misc_RNA (1)...(19): siRNA sense strand
guacuuggugccgaagaaa

SEQ ID NO: 1090899 - RNA, 19 nt, Homo sapiens
  misc_RNA (1)...(19): siRNA sense strand
aaggaagucagcagaaaga

SEQ ID NO: 1090900 - RNA, 19 nt, Homo sapiens
  misc_RNA (1)...(19): siRNA sense strand
gagagaaggguagcuaaaa

SEQ ID NO: 1090901 - RNA, 19 nt, Homo sapiens
  misc_RNA (1)...(19): siRNA sense strand
ccgagggacuuggguuuua

SEQ ID NO: 1090902 - RNA, 19 nt, Homo sapiens
  misc_RNA (1)...(19): siRNA sense strand
ugucaacuccaccuuuaga

SEQ ID NO: 1090903 - RNA, 19 nt, Homo sapiens
  misc_RNA (1)...(19): siRNA sense strand
gaaggguagcuaaaagaaa

SEQ ID NO: 1090904 - RNA, 19 nt, Homo sapiens
  misc_RNA (1)...(19): siRNA sense strand
cagagacccaccacugaug

SEQ ID NO: 1090905 - RNA, 19 nt, Homo sapiens
  misc_RNA (1)...(19): siRNA sense strand
agacugggaaggagaagga

SEQ ID NO: 1090906 - RNA, 19 nt, Homo sapiens
  misc_RNA (1)...(19): siRNA sense strand
ggccgagggacuuggguuu

SEQ ID NO: 1090907 - RNA, 19 nt, Homo sapiens
  misc_RNA (1)...(19): siRNA sense strand
agaaagacgcacaggaaag

SEQ ID NO: 1090908 - RNA, 19 nt, Homo sapiens
  misc_RNA (1)...(19): siRNA sense strand
guucaacggaaauucacaa

SEQ ID NO: 1090909 - RNA, 19 nt, Homo sapiens
  misc_RNA (1)...(19): siRNA sense strand
ccaucaggcucaggaacug

SEQ ID NO: 1090910 - RNA, 19 nt, Homo sapiens
  misc_RNA (1)...(19): siRNA sense strand
gagaaggguagcuaaaaga

SEQ ID NO: 1090911 - RNA, 19 nt, Homo sapiens
  misc_RNA (1)...(19): siRNA sense strand
ccgaagaaagagacagaga

SEQ ID NO: 1090912 - RNA, 19 nt, Homo sapiens
  misc_RNA (1)...(19): siRNA sense strand
gaaaagaaagucaguugcu

SEQ ID NO: 1090913 - RNA, 19 nt, Homo sapiens
  misc_RNA (1)...(19): siRNA sense strand
aagaaagagucagggagau

SEQ ID NO: 1090914 - RNA, 19 nt, Homo sapiens
  misc_RNA (1)...(19): siRNA sense strand
gauuauggcuaucagauua

SEQ ID NO: 1090915 - RNA, 19 nt, Homo sapiens
  misc_RNA (1)...(19): siRNA sense strand
gucaauggcugcuguauua

SEQ ID NO: 1090916 - RNA, 19 nt, Homo sapiens
  misc_RNA (1)...(19): siRNA sense strand
gcaaacauaucaaggagaa

SEQ ID NO: 1090917 - RNA, 19 nt, Homo sapiens
  misc_RNA (1)...(19): siRNA sense strand
gcaguaggaucauauuuga

SEQ ID NO: 1090918 - RNA, 19 nt, Homo sapiens
  misc_RNA (1)...(19): siRNA sense strand
ucaaggagaaugacuauua

SEQ ID NO: 1090919 - RNA, 19 nt, Homo sapiens
  misc_RNA (1)...(19): siRNA sense strand
gacaauaacacauggaaua

SEQ ID NO: 1090920 - RNA, 19 nt, Homo sapiens
  misc_RNA (1)...(19): siRNA sense strand
ccacauacaugaagaaucu

SEQ ID NO: 1090921 - RNA, 19 nt, Homo sapiens
  misc_RNA (1)...(19): siRNA sense strand
gagcacagauacaggcaaa

SEQ ID NO: 1090922 - RNA, 19 nt, Homo sapiens
  misc_RNA (1)...(19): siRNA sense strand
uaaaggaccuggauaaucg

SEQ ID NO: 1090923 - RNA, 19 nt, Homo sapiens
  misc_RNA (1)...(19): siRNA sense strand
ggauauaucucccgaucug

SEQ ID NO: 1090924 - RNA, 19 nt, Homo sapiens
  misc_RNA (1)...(19): siRNA sense strand
gauuccaccuacccuauua

SEQ ID NO: 1090925 - RNA, 19 nt, Homo sapiens
  misc_RNA (1)...(19): siRNA sense strand
caaggagaaugacuauuau

SEQ ID NO: 1090926 - RNA, 19 nt, Homo sapiens
  misc_RNA (1)...(19): siRNA sense strand
ugaagaaucuggacauaag

SEQ ID NO: 1090927 - RNA, 19 nt, Homo sapiens
  misc_RNA (1)...(19): siRNA sense strand
ggaagcauauaccacagaa

SEQ ID NO: 1090928 - RNA, 19 nt, Homo sapiens
  misc_RNA (1)...(19): siRNA sense strand
gagaaugacuauuauacuc

SEQ ID NO: 1090929 - RNA, 19 nt, Homo sapiens
  misc_RNA (1)...(19): siRNA sense strand
gcuaucagauuacagcuau

SEQ ID NO: 1090930 - RNA, 19 nt, Homo sapiens
  misc_RNA (1)...(19): siRNA sense strand
gcaagaagcaacaggauuc

SEQ ID NO: 1090931 - RNA, 19 nt, Homo sapiens
  misc_RNA (1)...(19): siRNA sense strand
gaucaccucugcugcaauc

SEQ ID NO: 1090932 - RNA, 19 nt, Homo sapiens
  misc_RNA (1)...(19): siRNA sense strand
ggucauggcuuucuuucuc

SEQ ID NO: 1090933 - RNA, 19 nt, Homo sapiens
  misc_RNA (1)...(19): siRNA sense strand
guggcuggcuccuaugaua

SEQ ID NO: 1090934 - RNA, 19 nt, Homo sapiens
  misc_RNA (1)...(19): siRNA sense strand
ugaagggauugccaucuuu

SEQ ID NO: 1090935 - RNA, 19 nt, Homo sapiens
  misc_RNA (1)...(19): siRNA sense strand
ccacaacaauuugaaguuc

SEQ ID NO: 1090936 - RNA, 19 nt, Homo sapiens
  misc_RNA (1)...(19): siRNA sense strand
ggaacaauuuacccagguu

SEQ ID NO: 1090937 - RNA, 19 nt, Homo sapiens
  misc_RNA (1)...(19): siRNA sense strand
caugaagaaucuggacaua

SEQ ID NO: 1090938 - RNA, 19 nt, Homo sapiens
  misc_RNA (1)...(19): siRNA sense strand
caucauugcuucugugucu

SEQ ID NO: 1090939 - RNA, 19 nt, Homo sapiens
  misc_RNA (1)...(19): siRNA sense strand
ucaacugccucauguacaa

SEQ ID NO: 1090940 - RNA, 19 nt, Homo sapiens
  misc_RNA (1)...(19): siRNA sense strand
ccacaucaccaucgacauu

SEQ ID NO: 1090941 - RNA, 19 nt, Homo sapiens
  misc_RNA (1)...(19): siRNA sense strand
gcauauaccacagaacauu

SEQ ID NO: 1090942 - RNA, 19 nt, Homo sapiens
  misc_RNA (1)...(19): siRNA sense strand
gcaugcuacucaccuacua

SEQ ID NO: 1090943 - RNA, 19 nt, Homo sapiens
  misc_RNA (1)...(19): siRNA sense strand
gauccguacuuuaauuauc

SEQ ID NO: 1090944 - RNA, 19 nt, Homo sapiens
  misc_RNA (1)...(19): siRNA sense strand
gaacaauuuacccagguuu

SEQ ID NO: 1090945 - RNA, 19 nt, Homo sapiens
  misc_RNA (1)...(19): siRNA sense strand
ggacgaaucauuggaggaa

SEQ ID NO: 1090946 - RNA, 19 nt, Homo sapiens
  misc_RNA (1)...(19): siRNA sense strand
agugugcccuugcuuauuu

SEQ ID NO: 1090947 - RNA, 19 nt, Homo sapiens
  misc_RNA (1)...(19): siRNA sense strand
ggauauacaagguaaagga

SEQ ID NO: 1090948 - RNA, 19 nt, Homo sapiens
  misc_RNA (1)...(19): siRNA sense strand
ggacagguuuacacagaag

SEQ ID NO: 1090949 - RNA, 19 nt, Homo sapiens
  misc_RNA (1)...(19): siRNA sense strand
gagguuauguguuccugau

SEQ ID NO: 1090950 - RNA, 19 nt, Homo sapiens
  misc_RNA (1)...(19): siRNA sense strand
acagauacaggcaaacaua

SEQ ID NO: 1090951 - RNA, 19 nt, Homo sapiens
  misc_RNA (1)...(19): siRNA sense strand
gaggagggguuuuauaaau

SEQ ID NO: 1090952 - RNA, 19 nt, Homo sapiens
  misc_RNA (1)...(19): siRNA sense strand
guaaaggaccuggauaauc

SEQ ID NO: 1090953 - RNA, 19 nt, Homo sapiens
  misc_RNA (1)...(19): siRNA sense strand
ucaacaaguuucuuuggau

SEQ ID NO: 1090954 - RNA, 19 nt, Homo sapiens
  misc_RNA (1)...(19): siRNA sense strand
ggguauuccucugaugaua

SEQ ID NO: 1090955 - RNA, 19 nt, Homo sapiens
  misc_RNA (1)...(19): siRNA sense strand
cccaggugcuguccacaua

SEQ ID NO: 1090956 - RNA, 19 nt, Homo sapiens
  misc_RNA (1)...(19): siRNA sense strand
cuacucaccuacuacaugu

SEQ ID NO: 1090957 - RNA, 19 nt, Homo sapiens
  misc_RNA (1)...(19): siRNA sense strand
gucaggauauacaagguaa

SEQ ID NO: 1090958 - RNA, 19 nt, Homo sapiens
  misc_RNA (1)...(19): siRNA sense strand
ucauguacaagauguguua

SEQ ID NO: 1090959 - RNA, 19 nt, Homo sapiens
  misc_RNA (1)...(19): siRNA sense strand
gaugauaucaacaaguuuc

SEQ ID NO: 1090960 - RNA, 19 nt, Homo sapiens
  misc_RNA (1)...(19): siRNA sense strand
gcuaugugcuggucauuuu

SEQ ID NO: 1090961 - RNA, 19 nt, Homo sapiens
  misc_RNA (1)...(19): siRNA sense strand
ggauggcaguaggaucaua

SEQ ID NO: 1090962 - RNA, 19 nt, Homo sapiens
  misc_RNA (1)...(19): siRNA sense strand
ccagauccaugccuuugug

SEQ ID NO: 1090963 - RNA, 19 nt, Homo sapiens
  misc_RNA (1)...(19): siRNA sense strand
uugaaaguguuauccauga

SEQ ID NO: 1090964 - RNA, 19 nt, Homo sapiens
  misc_RNA (1)...(19): siRNA sense strand
augcugagauugggaauaa

SEQ ID NO: 1090965 - RNA, 19 nt, Homo sapiens
  misc_RNA (1)...(19): siRNA sense strand
uguacaagauguguuacua

SEQ ID NO: 1090966 - RNA, 19 nt, Homo sapiens
  misc_RNA (1)...(19): siRNA sense strand
caaccugguccucauacua

SEQ ID NO: 1090967 - RNA, 19 nt, Homo sapiens
  misc_RNA (1)...(19): siRNA sense strand
gguuauguguuccugauca

SEQ ID NO: 1090968 - RNA, 19 nt, Homo sapiens
  misc_RNA (1)...(19): siRNA sense strand
gaucaaggcaguaaagacu

SEQ ID NO: 1090969 - RNA, 19 nt, Homo sapiens
  misc_RNA (1)...(19): siRNA sense strand
gagaagcaggacacacuuu

SEQ ID NO: 1090970 - RNA, 19 nt, Homo sapiens
  misc_RNA (1)...(19): siRNA sense strand
uuccauaacugguuugaug

SEQ ID NO: 1090971 - RNA, 19 nt, Homo sapiens
  misc_RNA (1)...(19): siRNA sense strand
gcacagauacaggcaaaca

SEQ ID NO: 1090972 - RNA, 19 nt, Homo sapiens
  misc_RNA (1)...(19): siRNA sense strand
guacaagauguguuacuau

SEQ ID NO: 1090973 - RNA, 19 nt, Homo sapiens
  misc_RNA (1)...(19): siRNA sense strand
ugaguuugauccguacuuu

SEQ ID NO: 1090974 - RNA, 19 nt, Homo sapiens
  misc_RNA (1)...(19): siRNA sense strand
ggauuauggcuaucagauu

SEQ ID NO: 1090975 - RNA, 19 nt, Homo sapiens
  misc_RNA (1)...(19): siRNA sense strand
ggcaguaggaucauauuug

SEQ ID NO: 1090976 - RNA, 19 nt, Homo sapiens
  misc_RNA (1)...(19): siRNA sense strand
ggaucuauguggccuacug

SEQ ID NO: 1090977 - RNA, 19 nt, Homo sapiens
  misc_RNA (1)...(19): siRNA sense strand
cuggaucccucuuaugcua

SEQ ID NO: 1090978 - RNA, 19 nt, Homo sapiens
  misc_RNA (1)...(19): siRNA sense strand
uacaagauguguuacuauc

SEQ ID NO: 1090979 - RNA, 19 nt, Homo sapiens
  misc_RNA (1)...(19): siRNA sense strand
ccagugaggccuacucuuc

SEQ ID NO: 1090980 - RNA, 19 nt, Homo sapiens
  misc_RNA (1)...(19): siRNA sense strand
gcuguaauggugcgucuaa

SEQ ID NO: 1090981 - RNA, 19 nt, Homo sapiens
  misc_RNA (1)...(19): siRNA sense strand
ccacaaccugguccucaua

SEQ ID NO: 1090982 - RNA, 19 nt, Homo sapiens
  misc_RNA (1)...(19): siRNA sense strand
gagcgucaucucucuggua

SEQ ID NO: 1090983 - RNA, 19 nt, Homo sapiens
  misc_RNA (1)...(19): siRNA sense strand
gauaaucgaggcuugucaa

SEQ ID NO: 1090984 - RNA, 19 nt, Homo sapiens
  misc_RNA (1)...(19): siRNA sense strand
cuucuccacucgucuguuu

SEQ ID NO: 1090985 - RNA, 19 nt, Homo sapiens
  misc_RNA (1)...(19): siRNA sense strand
guauuccucugaugauauc

SEQ ID NO: 1090986 - RNA, 19 nt, Homo sapiens
  misc_RNA (1)...(19): siRNA sense strand
ucucaucaccuacaccuuu

SEQ ID NO: 1090987 - RNA, 19 nt, Homo sapiens
  misc_RNA (1)...(19): siRNA sense strand
aaaguguuauccaugaguu

SEQ ID NO: 1090988 - RNA, 19 nt, Homo sapiens
  misc_RNA (1)...(19): siRNA sense strand
uguccgaaaugcugagauu

SEQ ID NO: 1090989 - RNA, 19 nt, Homo sapiens
  misc_RNA (1)...(19): siRNA sense strand
guccugagauuugaaagug

SEQ ID NO: 1090990 - RNA, 19 nt, Homo sapiens
  misc_RNA (1)...(19): siRNA sense strand
aaagacugguuccaucugu

SEQ ID NO: 1090991 - RNA, 19 nt, Homo sapiens
  misc_RNA (1)...(19): siRNA sense strand
ggucaggauauacaaggua

SEQ ID NO: 1090992 - RNA, 19 nt, Homo sapiens
  misc_RNA (1)...(19): siRNA sense strand
ggagaaugacuauuauacu

SEQ ID NO: 1090993 - RNA, 19 nt, Homo sapiens
  misc_RNA (1)...(19): siRNA sense strand
ccugagauuugaaaguguu

SEQ ID NO: 1090994 - RNA, 19 nt, Homo sapiens
  misc_RNA (1)...(19): siRNA sense strand
gaaaguguuauccaugagu

SEQ ID NO: 1090995 - RNA, 19 nt, Homo sapiens
  misc_RNA (1)...(19): siRNA sense strand
gaguuugauccguacuuua

SEQ ID NO: 1090996 - RNA, 19 nt, Homo sapiens
  misc_RNA (1)...(19): siRNA sense strand
gaacaacauccccaucauu

SEQ ID NO: 1090997 - RNA, 19 nt, Homo sapiens
  misc_RNA (1)...(19): siRNA sense strand
ucacaggccguuucucuca

SEQ ID NO: 1090998 - RNA, 19 nt, Homo sapiens
  misc_RNA (1)...(19): siRNA sense strand
aaacauaucaaggagaaug

SEQ ID NO: 1090999 - RNA, 19 nt, Homo sapiens
  misc_RNA (1)...(19): siRNA sense strand
gcuccucgucuucauguuu

SEQ ID NO: 1091000 - RNA, 19 nt, Homo sapiens
  misc_RNA (1)...(19): siRNA sense strand
gcugcuggaucccucuuau

SEQ ID NO: 1091001 - RNA, 19 nt, Homo sapiens
  misc_RNA (1)...(19): siRNA sense strand
ggagggguuuuauaaauuc

SEQ ID NO: 1091002 - RNA, 19 nt, Homo sapiens
  misc_RNA (1)...(19): siRNA sense strand
ugauacuggucauggcuuu

SEQ ID NO: 1091003 - RNA, 19 nt, Homo sapiens
  misc_RNA (1)...(19): siRNA sense strand
gcugcaaucuaccauguac

SEQ ID NO: 1091004 - RNA, 19 nt, Homo sapiens
  misc_RNA (1)...(19): siRNA sense strand
uuacccagguuuaaugauc

SEQ ID NO: 1091005 - RNA, 19 nt, Homo sapiens
  misc_RNA (1)...(19): siRNA sense strand
gcuacucaccuacuacaug

SEQ ID NO: 1091006 - RNA, 19 nt, Homo sapiens
  misc_RNA (1)...(19): siRNA sense strand
gguaaaggaccuggauaau

SEQ ID NO: 1091007 - RNA, 19 nt, Homo sapiens
  misc_RNA (1)...(19): siRNA sense strand
gauguguuacuaucgcuuu

SEQ ID NO: 1091008 - RNA, 19 nt, Homo sapiens
  misc_RNA (1)...(19): siRNA sense strand
gcgauuguccuaugagaag

SEQ ID NO: 1091009 - RNA, 19 nt, Homo sapiens
  misc_RNA (1)...(19): siRNA sense strand
ggauuccaccuacccuauu

SEQ ID NO: 1091010 - RNA, 19 nt, Homo sapiens
  misc_RNA (1)...(19): siRNA sense strand
gguauuccucugaugauau

SEQ ID NO: 1091011 - RNA, 19 nt, Homo sapiens
  misc_RNA (1)...(19): siRNA sense strand
ggacaauaacacauggaau

SEQ ID NO: 1091012 - RNA, 19 nt, Homo sapiens
  misc_RNA (1)...(19): siRNA sense strand
ucauaauacuccagaggau

SEQ ID NO: 1091013 - RNA, 19 nt, Homo sapiens
  misc_RNA (1)...(19): siRNA sense strand
gaaguggcaagugggauga

SEQ ID NO: 1091014 - RNA, 19 nt, Homo sapiens
  misc_RNA (1)...(19): siRNA sense strand
gaacaugaccuuccacuug

SEQ ID NO: 1091015 - RNA, 19 nt, Homo sapiens
  misc_RNA (1)...(19): siRNA sense strand
gcagaaguaugaagacauc

SEQ ID NO: 1091016 - RNA, 19 nt, Homo sapiens
  misc_RNA (1)...(19): siRNA sense strand
gaagagggacagacacaaa

SEQ ID NO: 1091017 - RNA, 19 nt, Homo sapiens
  misc_RNA (1)...(19): siRNA sense strand
gcucaaugcauacacauaa

SEQ ID NO: 1091018 - RNA, 19 nt, Homo sapiens
  misc_RNA (1)...(19): siRNA sense strand
gaaggaagagcaagagcuu

SEQ ID NO: 1091019 - RNA, 19 nt, Homo sapiens
  misc_RNA (1)...(19): siRNA sense strand
gcaagagcuucaugacauc

SEQ ID NO: 1091020 - RNA, 19 nt, Homo sapiens
  misc_RNA (1)...(19): siRNA sense strand
ggagacacacuggauguuu

SEQ ID NO: 1091021 - RNA, 19 nt, Homo sapiens
  misc_RNA (1)...(19): siRNA sense strand
cuacugagcugaacaugac

SEQ ID NO: 1091022 - RNA, 19 nt, Homo sapiens
  misc_RNA (1)...(19): siRNA sense strand
uaccaugauugacaucuuu

SEQ ID NO: 1091023 - RNA, 19 nt, Homo sapiens
  misc_RNA (1)...(19): siRNA sense strand
cagcugcguucuuugugua

SEQ ID NO: 1091024 - RNA, 19 nt, Homo sapiens
  misc_RNA (1)...(19): siRNA sense strand
ucaacauucugcaaaccua

SEQ ID NO: 1091025 - RNA, 19 nt, Homo sapiens
  misc_RNA (1)...(19): siRNA sense strand
gcagcugcguucuuugugu

SEQ ID NO: 1091026 - RNA, 19 nt, Homo sapiens
  misc_RNA (1)...(19): siRNA sense strand
gugagcgcuugguucauua

SEQ ID NO: 1091027 - RNA, 19 nt, Homo sapiens
  misc_RNA (1)...(19): siRNA sense strand
ugugagcgcuugguucauu

SEQ ID NO: 1091028 - RNA, 19 nt, Homo sapiens
  misc_RNA (1)...(19): siRNA sense strand
ccacucuacucgcuccaaa

SEQ ID NO: 1091029 - RNA, 19 nt, Homo sapiens
  misc_RNA (1)...(19): siRNA sense strand
gagcaagagcuucaugaca

SEQ ID NO: 1091030 - RNA, 19 nt, Homo sapiens
  misc_RNA (1)...(19): siRNA sense strand
gagacacacuggauguuuu

SEQ ID NO: 1091031 - RNA, 19 nt, Homo sapiens
  misc_RNA (1)...(19): siRNA sense strand
ucauugcuaugguucacua

SEQ ID NO: 1091032 - RNA, 19 nt, Homo sapiens
  misc_RNA (1)...(19): siRNA sense strand
caguuuacauguacuucaa

SEQ ID NO: 1091033 - RNA, 19 nt, Homo sapiens
  misc_RNA (1)...(19): siRNA sense strand
ggaagagaauauggaagag

SEQ ID NO: 1091034 - RNA, 19 nt, Homo sapiens
  misc_RNA (1)...(19): siRNA sense strand
gcuuggaccuucgucaguu

SEQ ID NO: 1091035 - RNA, 19 nt, Homo sapiens
  misc_RNA (1)...(19): siRNA sense strand
agcaagagcuucaugacau

SEQ ID NO: 1091036 - RNA, 19 nt, Homo sapiens
  misc_RNA (1)...(19): siRNA sense strand
augaagacaucaagucgaa

SEQ ID NO: 1091037 - RNA, 19 nt, Homo sapiens
  misc_RNA (1)...(19): siRNA sense strand
ggaugcagaaguaugaaga

SEQ ID NO: 1091038 - RNA, 19 nt, Homo sapiens
  misc_RNA (1)...(19): siRNA sense strand
aacaugaccuuccacuugu

SEQ ID NO: 1091039 - RNA, 19 nt, Homo sapiens
  misc_RNA (1)...(19): siRNA sense strand
gcgaaucuacugagcugaa

SEQ ID NO: 1091040 - RNA, 19 nt, Homo sapiens
  misc_RNA (1)...(19): siRNA sense strand
gaaguaugaagacaucaag

SEQ ID NO: 1091041 - RNA, 19 nt, Homo sapiens
  misc_RNA (1)...(19): siRNA sense strand
gcuaugguucacuaccuua

SEQ ID NO: 1091042 - RNA, 19 nt, Homo sapiens
  misc_RNA (1)...(19): siRNA sense strand
ugaaugcuguaucaaaugc

SEQ ID NO: 1091043 - RNA, 19 nt, Homo sapiens
  misc_RNA (1)...(19): siRNA sense strand
uacauguacuucaaucugu

SEQ ID NO: 1091044 - RNA, 19 nt, Homo sapiens
  misc_RNA (1)...(19): siRNA sense strand
cccuaugccucucugauug

SEQ ID NO: 1091045 - RNA, 19 nt, Homo sapiens
  misc_RNA (1)...(19): siRNA sense strand
gaaaauuuguacugucucu

SEQ ID NO: 1091046 - RNA, 19 nt, Homo sapiens
  misc_RNA (1)...(19): siRNA sense strand
aagaacugcuggagacaca

SEQ ID NO: 1091047 - RNA, 19 nt, Homo sapiens
  misc_RNA (1)...(19): siRNA sense strand
aaauuuguacugucucuga

SEQ ID NO: 1091048 - RNA, 19 nt, Homo sapiens
  misc_RNA (1)...(19): siRNA sense strand
ggagaggaaaagaaaauuu

SEQ ID NO: 1091049 - RNA, 19 nt, Homo sapiens
  misc_RNA (1)...(19): siRNA sense strand
ggccaucaaagaucucuau

SEQ ID NO: 1091050 - RNA, 19 nt, Homo sapiens
  misc_RNA (1)...(19): siRNA sense strand
ggaagagggacagacacaa

SEQ ID NO: 1091051 - RNA, 19 nt, Homo sapiens
  misc_RNA (1)...(19): siRNA sense strand
ccaccauccugcucuaugc

SEQ ID NO: 1091052 - RNA, 19 nt, Homo sapiens
  misc_RNA (1)...(19): siRNA sense strand
gaccuuccacuuguuuauu

SEQ ID NO: 1091053 - RNA, 19 nt, Homo sapiens
  misc_RNA (1)...(19): siRNA sense strand
cuucgucaguuuggaauug

SEQ ID NO: 1091054 - RNA, 19 nt, Homo sapiens
  misc_RNA (1)...(19): siRNA sense strand
gcugacauaucuuuucaug

SEQ ID NO: 1091055 - RNA, 19 nt, Homo sapiens
  misc_RNA (1)...(19): siRNA sense strand
caacuggggccaucaaaga

SEQ ID NO: 1091056 - RNA, 19 nt, Homo sapiens
  misc_RNA (1)...(19): siRNA sense strand
gagaggaaaagaaaauuug

SEQ ID NO: 1091057 - RNA, 19 nt, Homo sapiens
  misc_RNA (1)...(19): siRNA sense strand
caugaagcgcuuucuggaa

SEQ ID NO: 1091058 - RNA, 19 nt, Homo sapiens
  misc_RNA (1)...(19): siRNA sense strand
gaagcgcuuucuggaacug

SEQ ID NO: 1091059 - RNA, 19 nt, Homo sapiens
  misc_RNA (1)...(19): siRNA sense strand
gcgcuugguucauuaugcu

SEQ ID NO: 1091060 - RNA, 19 nt, Homo sapiens
  misc_RNA (1)...(19): siRNA sense strand
uuaccaugauugacaucuu

SEQ ID NO: 1091061 - RNA, 19 nt, Homo sapiens
  misc_RNA (1)...(19): siRNA sense strand
gccggaugcagaaguauga

SEQ ID NO: 1091062 - RNA, 19 nt, Homo sapiens
  misc_RNA (1)...(19): siRNA sense strand
ugugacaauuggagaggaa

SEQ ID NO: 1091063 - RNA, 19 nt, Homo sapiens
  misc_RNA (1)...(19): siRNA sense strand
ggaccuucgucaguuugga

SEQ ID NO: 1091064 - RNA, 19 nt, Homo sapiens
  misc_RNA (1)...(19): siRNA sense strand
uucuggaacugucaacauu

SEQ ID NO: 1091065 - RNA, 19 nt, Homo sapiens
  misc_RNA (1)...(19): siRNA sense strand
guuuacauguacuucaauc

SEQ ID NO: 1091066 - RNA, 19 nt, Homo sapiens
  misc_RNA (1)...(19): siRNA sense strand
gcggcucaaugcauacaca

SEQ ID NO: 1091067 - RNA, 19 nt, Homo sapiens
  misc_RNA (1)...(19): siRNA sense strand
caugaccuuccacuuguuu

SEQ ID NO: 1091068 - RNA, 19 nt, Homo sapiens
  misc_RNA (1)...(19): siRNA sense strand
ggcugggagucacggcuuu

SEQ ID NO: 1091069 - RNA, 19 nt, Homo sapiens
  misc_RNA (1)...(19): siRNA sense strand
ggaugugcgaaucuacuga

SEQ ID NO: 1091070 - RNA, 19 nt, Homo sapiens
  misc_RNA (1)...(19): siRNA sense strand
gaccuucgucaguuuggaa

SEQ ID NO: 1091071 - RNA, 19 nt, Homo sapiens
  misc_RNA (1)...(19): siRNA sense strand
cuuggaccuucgucaguuu

SEQ ID NO: 1091072 - RNA, 19 nt, Homo sapiens
  misc_RNA (1)...(19): siRNA sense strand
uuacauguacuucaaucug

SEQ ID NO: 1091073 - RNA, 19 nt, Homo sapiens
  misc_RNA (1)...(19): siRNA sense strand
uugaggaugugcgaaucua

SEQ ID NO: 1091074 - RNA, 19 nt, Homo sapiens
  misc_RNA (1)...(19): siRNA sense strand
gcaagaacugcuggagaca

SEQ ID NO: 1091075 - RNA, 19 nt, Homo sapiens
  misc_RNA (1)...(19): siRNA sense strand
gaugugugagcgcuugguu

SEQ ID NO: 1091076 - RNA, 19 nt, Homo sapiens
  misc_RNA (1)...(19): siRNA sense strand
ccaugauugacaucuuuaa

SEQ ID NO: 1091077 - RNA, 19 nt, Homo sapiens
  misc_RNA (1)...(19): siRNA sense strand
gaacugcuggagacacacu

SEQ ID NO: 1091078 - RNA, 19 nt, Homo sapiens
  misc_RNA (1)...(19): siRNA sense strand
ugaguggcaucaacaauua

SEQ ID NO: 1091079 - RNA, 19 nt, Homo sapiens
  misc_RNA (1)...(19): siRNA sense strand
gcucaaagccugucaacau

SEQ ID NO: 1091080 - RNA, 19 nt, Homo sapiens
  misc_RNA (1)...(19): siRNA sense strand
guugguuccuguacacuua

SEQ ID NO: 1091081 - RNA, 19 nt, Homo sapiens
  misc_RNA (1)...(19): siRNA sense strand
gcucagcauugucugcaaa

SEQ ID NO: 1091082 - RNA, 19 nt, Homo sapiens
  misc_RNA (1)...(19): siRNA sense strand
caguacaaauucuucauug

SEQ ID NO: 1091083 - RNA, 19 nt, Homo sapiens
  misc_RNA (1)...(19): siRNA sense strand
caaguccucuccaaugcaa

SEQ ID NO: 1091084 - RNA, 19 nt, Homo sapiens
  misc_RNA (1)...(19): siRNA sense strand
gugcuaugcuuuccucuuc

SEQ ID NO: 1091085 - RNA, 19 nt, Homo sapiens
  misc_RNA (1)...(19): siRNA sense strand
ccuguacacuuagauagua

SEQ ID NO: 1091086 - RNA, 19 nt, Homo sapiens
  misc_RNA (1)...(19): siRNA sense strand
gcaaugaguggcaucaaca

SEQ ID NO: 1091087 - RNA, 19 nt, Homo sapiens
  misc_RNA (1)...(19): siRNA sense strand
gcucacugguuugaaauuc

SEQ ID NO: 1091088 - RNA, 19 nt, Homo sapiens
  misc_RNA (1)...(19): siRNA sense strand
acacuuagauaguauucuc

SEQ ID NO: 1091089 - RNA, 19 nt, Homo sapiens
  misc_RNA (1)...(19): siRNA sense strand
gcuaugcuuuccucuucuu

SEQ ID NO: 1091090 - RNA, 19 nt, Homo sapiens
  misc_RNA (1)...(19): siRNA sense strand
cagacucacuucaggaaag

SEQ ID NO: 1091091 - RNA, 19 nt, Homo sapiens
  misc_RNA (1)...(19): siRNA sense strand
aaggcucacugguuugaaa

SEQ ID NO: 1091092 - RNA, 19 nt, Homo sapiens
  misc_RNA (1)...(19): siRNA sense strand
cucaaagccugucaacaug

SEQ ID NO: 1091093 - RNA, 19 nt, Homo sapiens
  misc_RNA (1)...(19): siRNA sense strand
ccaguacaaauucuucauu

SEQ ID NO: 1091094 - RNA, 19 nt, Homo sapiens
  misc_RNA (1)...(19): siRNA sense strand
ggccuaagcgucucaccaa

SEQ ID NO: 1091095 - RNA, 19 nt, Homo sapiens
  misc_RNA (1)...(19): siRNA sense strand
gccaaguccucuccaaugc

SEQ ID NO: 1091096 - RNA, 19 nt, Homo sapiens
  misc_RNA (1)...(19): siRNA sense strand
ucaaagccugucaacauga

SEQ ID NO: 1091097 - RNA, 19 nt, Homo sapiens
  misc_RNA (1)...(19): siRNA sense strand
caaguugguuccuguacac

SEQ ID NO: 1091098 - RNA, 19 nt, Homo sapiens
  misc_RNA (1)...(19): siRNA sense strand
ggcaaugaguggcaucaac

SEQ ID NO: 1091099 - RNA, 19 nt, Homo sapiens
  misc_RNA (1)...(19): siRNA sense strand
gcagacucacuucaggaaa

SEQ ID NO: 1091100 - RNA, 19 nt, Homo sapiens
  misc_RNA (1)...(19): siRNA sense strand
uggcugcugucugugauuu

SEQ ID NO: 1091101 - RNA, 19 nt, Homo sapiens
  misc_RNA (1)...(19): siRNA sense strand
caaugcaacagggcaauga

SEQ ID NO: 1091102 - RNA, 19 nt, Homo sapiens
  misc_RNA (1)...(19): siRNA sense strand
aaaauaccuuucugcauga

SEQ ID NO: 1091103 - RNA, 19 nt, Homo sapiens
  misc_RNA (1)...(19): siRNA sense strand
ccaaggcucacugguuuga

SEQ ID NO: 1091104 - RNA, 19 nt, Homo sapiens
  misc_RNA (1)...(19): siRNA sense strand
cagcauauacagccaaguc

SEQ ID NO: 1091105 - RNA, 19 nt, Homo sapiens
  misc_RNA (1)...(19): siRNA sense strand
acaaguugguuccuguaca

SEQ ID NO: 1091106 - RNA, 19 nt, Homo sapiens
  misc_RNA (1)...(19): siRNA sense strand
guuccuguacacuuagaua

SEQ ID NO: 1091107 - RNA, 19 nt, Homo sapiens
  misc_RNA (1)...(19): siRNA sense strand
aauuauacccagcacugua

SEQ ID NO: 1091108 - RNA, 19 nt, Homo sapiens
  misc_RNA (1)...(19): siRNA sense strand
guacacuuagauaguauuc

SEQ ID NO: 1091109 - RNA, 19 nt, Homo sapiens
  misc_RNA (1)...(19): siRNA sense strand
caaugaguggcaucaacaa

SEQ ID NO: 1091110 - RNA, 19 nt, Homo sapiens
  misc_RNA (1)...(19): siRNA sense strand
cugcugcccaguacaaauu

SEQ ID NO: 1091111 - RNA, 19 nt, Homo sapiens
  misc_RNA (1)...(19): siRNA sense strand
ucagaaagcuguaucucua

SEQ ID NO: 1091112 - RNA, 19 nt, Homo sapiens
  misc_RNA (1)...(19): siRNA sense strand
ggacacauccuuguacaua

SEQ ID NO: 1091113 - RNA, 19 nt, Homo sapiens
  misc_RNA (1)...(19): siRNA sense strand
ugaaugccaugucaguuua

SEQ ID NO: 1091114 - RNA, 19 nt, Homo sapiens
  misc_RNA (1)...(19): siRNA sense strand
ggagagagacugaggaaga

SEQ ID NO: 1091115 - RNA, 19 nt, Homo sapiens
  misc_RNA (1)...(19): siRNA sense strand
gauggaaguuggaaaugaa

SEQ ID NO: 1091116 - RNA, 19 nt, Homo sapiens
  misc_RNA (1)...(19): siRNA sense strand
gagagagacugaggaagaa

SEQ ID NO: 1091117 - RNA, 19 nt, Homo sapiens
  misc_RNA (1)...(19): siRNA sense strand
caugucaguuuauaccuua

SEQ ID NO: 1091118 - RNA, 19 nt, Homo sapiens
  misc_RNA (1)...(19): siRNA sense strand
gaaagaaggacccaucauc

SEQ ID NO: 1091119 - RNA, 19 nt, Homo sapiens
  misc_RNA (1)...(19): siRNA sense strand
caggaggucuuuauucguu

SEQ ID NO: 1091120 - RNA, 19 nt, Homo sapiens
  misc_RNA (1)...(19): siRNA sense strand
gaaaccauauucuccuuac

SEQ ID NO: 1091121 - RNA, 19 nt, Homo sapiens
  misc_RNA (1)...(19): siRNA sense strand
aaacucaggugauggaagu

SEQ ID NO: 1091122 - RNA, 19 nt, Homo sapiens
  misc_RNA (1)...(19): siRNA sense strand
gcacucugcucucaaacuc

SEQ ID NO: 1091123 - RNA, 19 nt, Homo sapiens
  misc_RNA (1)...(19): siRNA sense strand
gaagaacuauguggaagac

SEQ ID NO: 1091124 - RNA, 19 nt, Homo sapiens
  misc_RNA (1)...(19): siRNA sense strand
ccacaaauggccaccguuu

SEQ ID NO: 1091125 - RNA, 19 nt, Homo sapiens
  misc_RNA (1)...(19): siRNA sense strand
ugacaguagugauaaagug

SEQ ID NO: 1091126 - RNA, 19 nt, Homo sapiens
  misc_RNA (1)...(19): siRNA sense strand
ggaagaacuauguggaaga

SEQ ID NO: 1091127 - RNA, 19 nt, Homo sapiens
  misc_RNA (1)...(19): siRNA sense strand
gguuugugcagcucuauua

SEQ ID NO: 1091128 - RNA, 19 nt, Homo sapiens
  misc_RNA (1)...(19): siRNA sense strand
cagggaaagucuucagaug

SEQ ID NO: 1091129 - RNA, 19 nt, Homo sapiens
  misc_RNA (1)...(19): siRNA sense strand
gggcaugcagcaaauguuu

SEQ ID NO: 1091130 - RNA, 19 nt, Homo sapiens
  misc_RNA (1)...(19): siRNA sense strand
ugauggaaguuggaaauga

SEQ ID NO: 1091131 - RNA, 19 nt, Homo sapiens
  misc_RNA (1)...(19): siRNA sense strand
ggaugggcauugacaguag

SEQ ID NO: 1091132 - RNA, 19 nt, Homo sapiens
  misc_RNA (1)...(19): siRNA sense strand
gaggaagaacuauguggaa

SEQ ID NO: 1091133 - RNA, 19 nt, Homo sapiens
  misc_RNA (1)...(19): siRNA sense strand
caugcacucugcucucaaa

SEQ ID NO: 1091134 - RNA, 19 nt, Homo sapiens
  misc_RNA (1)...(19): siRNA sense strand
gcacacaaccucccaagcu

SEQ ID NO: 1091135 - RNA, 19 nt, Homo sapiens
  misc_RNA (1)...(19): siRNA sense strand
ggcauugacaguagugaua

SEQ ID NO: 1091136 - RNA, 19 nt, Homo sapiens
  misc_RNA (1)...(19): siRNA sense strand
guucuugaaugccauguca

SEQ ID NO: 1091137 - RNA, 19 nt, Homo sapiens
  misc_RNA (1)...(19): siRNA sense strand
ugaccucgcuggcguacug

SEQ ID NO: 1091138 - RNA, 19 nt, Homo sapiens
  misc_RNA (1)...(19): siRNA sense strand
gaccugaccauggaacuuu

SEQ ID NO: 1091139 - RNA, 19 nt, Homo sapiens
  misc_RNA (1)...(19): siRNA sense strand
guacauacugcccaaggaa

SEQ ID NO: 1091140 - RNA, 19 nt, Homo sapiens
  misc_RNA (1)...(19): siRNA sense strand
aaagaaggacccaucauca

SEQ ID NO: 1091141 - RNA, 19 nt, Homo sapiens
  misc_RNA (1)...(19): siRNA sense strand
ccacaggaggucuuuauuc

SEQ ID NO: 1091142 - RNA, 19 nt, Homo sapiens
  misc_RNA (1)...(19): siRNA sense strand
gcauugacaguagugauaa

SEQ ID NO: 1091143 - RNA, 19 nt, Homo sapiens
  misc_RNA (1)...(19): siRNA sense strand
cgaaaccauauucuccuua

SEQ ID NO: 1091144 - RNA, 19 nt, Homo sapiens
  misc_RNA (1)...(19): siRNA sense strand
gagcaggugccgagagguu

SEQ ID NO: 1091145 - RNA, 19 nt, Homo sapiens
  misc_RNA (1)...(19): siRNA sense strand
ccacacugaugaagcagau

SEQ ID NO: 1091146 - RNA, 19 nt, Homo sapiens
  misc_RNA (1)...(19): siRNA sense strand
agaaagcuguaucucuaug

SEQ ID NO: 1091147 - RNA, 19 nt, Homo sapiens
  misc_RNA (1)...(19): siRNA sense strand
aguuggaaaugaagaguaa

SEQ ID NO: 1091148 - RNA, 19 nt, Homo sapiens
  misc_RNA (1)...(19): siRNA sense strand
ggaguccacccguuguuug

SEQ ID NO: 1091149 - RNA, 19 nt, Homo sapiens
  misc_RNA (1)...(19): siRNA sense strand
uuacgacucucaauaccau

SEQ ID NO: 1091150 - RNA, 19 nt, Homo sapiens
  misc_RNA (1)...(19): siRNA sense strand
cuucauaccgcucuuaaug

SEQ ID NO: 1091151 - RNA, 19 nt, Homo sapiens
  misc_RNA (1)...(19): siRNA sense strand
gcacggaugaucgaacaga

SEQ ID NO: 1091152 - RNA, 19 nt, Homo sapiens
  misc_RNA (1)...(19): siRNA sense strand
ccaugucaguuuauaccuu

SEQ ID NO: 1091153 - RNA, 19 nt, Homo sapiens
  misc_RNA (1)...(19): siRNA sense strand
cacaggaggucuuuauucg

SEQ ID NO: 1091154 - RNA, 19 nt, Homo sapiens
  misc_RNA (1)...(19): siRNA sense strand
gccgagagguugcccugau

SEQ ID NO: 1091155 - RNA, 19 nt, Homo sapiens
  misc_RNA (1)...(19): siRNA sense strand
ggccaccguuugcuguuga

SEQ ID NO: 1091156 - RNA, 19 nt, Homo sapiens
  misc_RNA (1)...(19): siRNA sense strand
agacauucccuuucuuuca

SEQ ID NO: 1091157 - RNA, 19 nt, Homo sapiens
  misc_RNA (1)...(19): siRNA sense strand
gacauucccuuucuuucac

SEQ ID NO: 1091158 - RNA, 19 nt, Homo sapiens
  misc_RNA (1)...(19): siRNA sense strand
cauugacaguagugauaaa

SEQ ID NO: 1091159 - RNA, 19 nt, Homo sapiens
  misc_RNA (1)...(19): siRNA sense strand
ggugauggaaguuggaaau

SEQ ID NO: 1091160 - RNA, 19 nt, Homo sapiens
  misc_RNA (1)...(19): siRNA sense strand
gacacauccuuguacauac

SEQ ID NO: 1091161 - RNA, 19 nt, Homo sapiens
  misc_RNA (1)...(19): siRNA sense strand
ccgaaaccauauucuccuu

SEQ ID NO: 1091162 - RNA, 19 nt, Homo sapiens
  misc_RNA (1)...(19): siRNA sense strand
ucacugguguguucagcau

SEQ ID NO: 1091163 - RNA, 19 nt, Homo sapiens
  misc_RNA (1)...(19): siRNA sense strand
cuggacauguucuugaaug

SEQ ID NO: 1091164 - RNA, 19 nt, Homo sapiens
  misc_RNA (1)...(19): siRNA sense strand
uugaaugccaugucaguuu

SEQ ID NO: 1091165 - RNA, 19 nt, Homo sapiens
  misc_RNA (1)...(19): siRNA sense strand
gaagcagauucagaagucu

SEQ ID NO: 1091166 - RNA, 19 nt, Homo sapiens
  misc_RNA (1)...(19): siRNA sense strand
ccgagagguugcccugaug

SEQ ID NO: 1091167 - RNA, 19 nt, Homo sapiens
  misc_RNA (1)...(19): siRNA sense strand
agaaggacccaucaucauc

SEQ ID NO: 1091168 - RNA, 19 nt, Homo sapiens
  misc_RNA (1)...(19): siRNA sense strand
caaggaagacagggaaagu

SEQ ID NO: 1091169 - RNA, 19 nt, Homo sapiens
  misc_RNA (1)...(19): siRNA sense strand
acacauccuuguacauacu

SEQ ID NO: 1091170 - RNA, 19 nt, Homo sapiens
  misc_RNA (1)...(19): siRNA sense strand
uuuauucguuccacuaaca

SEQ ID NO: 1091171 - RNA, 19 nt, Homo sapiens
  misc_RNA (1)...(19): siRNA sense strand
gaaucuaaggagugguuug

SEQ ID NO: 1091172 - RNA, 19 nt, Homo sapiens
  misc_RNA (1)...(19): siRNA sense strand
cuaugcggcucaugaugug

SEQ ID NO: 1091173 - RNA, 19 nt, Homo sapiens
  misc_RNA (1)...(19): siRNA sense strand
cagaaagcuguaucucuau

SEQ ID NO: 1091174 - RNA, 19 nt, Homo sapiens
  misc_RNA (1)...(19): siRNA sense strand
guggacacauccuuguaca

SEQ ID NO: 1091175 - RNA, 19 nt, Homo sapiens
  misc_RNA (1)...(19): siRNA sense strand
gaugggcauugacaguagu

SEQ ID NO: 1091176 - RNA, 19 nt, Homo sapiens
  misc_RNA (1)...(19): siRNA sense strand
cagaaagaaggacccauca

SEQ ID NO: 1091177 - RNA, 19 nt, Homo sapiens
  misc_RNA (1)...(19): siRNA sense strand
aaugccaugucaguuuaua

SEQ ID NO: 1091178 - RNA, 19 nt, Homo sapiens
  misc_RNA (1)...(19): siRNA sense strand
uuacacagucaccaaucua

SEQ ID NO: 1091179 - RNA, 19 nt, Homo sapiens
  misc_RNA (1)...(19): siRNA sense strand
gcugaaagccauggacucu

SEQ ID NO: 1091180 - RNA, 19 nt, Homo sapiens
  misc_RNA (1)...(19): siRNA sense strand
ccaucaucauccacacuga

SEQ ID NO: 1091181 - RNA, 19 nt, Homo sapiens
  misc_RNA (1)...(19): siRNA sense strand
gaaguuggaaaugaagagu

SEQ ID NO: 1091182 - RNA, 19 nt, Homo sapiens
  misc_RNA (1)...(19): siRNA sense strand
gaccuucauaccgcucuua

SEQ ID NO: 1091183 - RNA, 19 nt, Homo sapiens
  misc_RNA (1)...(19): siRNA sense strand
gacagggaaagucuucaga

SEQ ID NO: 1091184 - RNA, 19 nt, Homo sapiens
  misc_RNA (1)...(19): siRNA sense strand
cagauucagaagucuugua

SEQ ID NO: 1091185 - RNA, 19 nt, Homo sapiens
  misc_RNA (1)...(19): siRNA sense strand
caacccacaggaggucuuu

SEQ ID NO: 1091186 - RNA, 19 nt, Homo sapiens
  misc_RNA (1)...(19): siRNA sense strand
ggaaguuggaaaugaagag

SEQ ID NO: 1091187 - RNA, 19 nt, Homo sapiens
  misc_RNA (1)...(19): siRNA sense strand
gaaugccaugucaguuuau

SEQ ID NO: 1091188 - RNA, 19 nt, Homo sapiens
  misc_RNA (1)...(19): siRNA sense strand
ugaccaaggugggcaugca

SEQ ID NO: 1091189 - RNA, 19 nt, Homo sapiens
  misc_RNA (1)...(19): siRNA sense strand
gacaggaugggcauugaca

SEQ ID NO: 1091190 - RNA, 19 nt, Homo sapiens
  misc_RNA (1)...(19): siRNA sense strand
gaagucuuguaucccaacu

SEQ ID NO: 1091191 - RNA, 19 nt, Homo sapiens
  misc_RNA (1)...(19): siRNA sense strand
aggagcagguagaguggaa

SEQ ID NO: 1091192 - RNA, 19 nt, Homo sapiens
  misc_RNA (1)...(19): siRNA sense strand
gaaagcuguaucucuaugc

SEQ ID NO: 1091193 - RNA, 19 nt, Homo sapiens
  misc_RNA (1)...(19): siRNA sense strand
uguacauacugcccaagga

SEQ ID NO: 1091194 - RNA, 19 nt, Homo sapiens
  misc_RNA (1)...(19): siRNA sense strand
cuguugaccugaccaugga

SEQ ID NO: 1091195 - RNA, 19 nt, Homo sapiens
  misc_RNA (1)...(19): siRNA sense strand
uaaugacccuggggauuuu

SEQ ID NO: 1091196 - RNA, 19 nt, Homo sapiens
  misc_RNA (1)...(19): siRNA sense strand
caagaucagaaagcuguau

SEQ ID NO: 1091197 - RNA, 19 nt, Homo sapiens
  misc_RNA (1)...(19): siRNA sense strand
gacugaggaagaacuaugu

SEQ ID NO: 1091198 - RNA, 19 nt, Homo sapiens
  misc_RNA (1)...(19): siRNA sense strand
cgcuggacauguucuugaa

SEQ ID NO: 1091199 - RNA, 19 nt, Homo sapiens
  misc_RNA (1)...(19): siRNA sense strand
gaucagaaagcuguaucuc

SEQ ID NO: 1091200 - RNA, 19 nt, Homo sapiens
  misc_RNA (1)...(19): siRNA sense strand
cugggcagcugaccaaggu

SEQ ID NO: 1091201 - RNA, 19 nt, Homo sapiens
  misc_RNA (1)...(19): siRNA sense strand
agacugaggaagaacuaug

SEQ ID NO: 1091202 - RNA, 19 nt, Homo sapiens
  misc_RNA (1)...(19): siRNA sense strand
gagauuugcacggaugauc

SEQ ID NO: 1091203 - RNA, 19 nt, Homo sapiens
  misc_RNA (1)...(19): siRNA sense strand
caacagagcuucuuaaaug

SEQ ID NO: 1091204 - RNA, 19 nt, Homo sapiens
  misc_RNA (1)...(19): siRNA sense strand
ggaacuggcugacaaauau

SEQ ID NO: 1091205 - RNA, 19 nt, Homo sapiens
  misc_RNA (1)...(19): siRNA sense strand
gaauggaucuucagggaaa

SEQ ID NO: 1091206 - RNA, 19 nt, Homo sapiens
  misc_RNA (1)...(19): siRNA sense strand
gccaugggcuucuuauuaa

SEQ ID NO: 1091207 - RNA, 19 nt, Homo sapiens
  misc_RNA (1)...(19): siRNA sense strand
gcaaaugcuuauugugaaa

SEQ ID NO: 1091208 - RNA, 19 nt, Homo sapiens
  misc_RNA (1)...(19): siRNA sense strand
ggagaaagcuguagaaacc

SEQ ID NO: 1091209 - RNA, 19 nt, Homo sapiens
  misc_RNA (1)...(19): siRNA sense strand
gcacaaggaccgaauggau

SEQ ID NO: 1091210 - RNA, 19 nt, Homo sapiens
  misc_RNA (1)...(19): siRNA sense strand
cgccaugggcuucuuauua

SEQ ID NO: 1091211 - RNA, 19 nt, Homo sapiens
  misc_RNA (1)...(19): siRNA sense strand
uaaagugcaucuucagcuu

SEQ ID NO: 1091212 - RNA, 19 nt, Homo sapiens
  misc_RNA (1)...(19): siRNA sense strand
gaaagcauuuaaagugcau

SEQ ID NO: 1091213 - RNA, 19 nt, Homo sapiens
  misc_RNA (1)...(19): siRNA sense strand
gggaacuggcugacaaaua

SEQ ID NO: 1091214 - RNA, 19 nt, Homo sapiens
  misc_RNA (1)...(19): siRNA sense strand
uggaaauucuggaaacuug

SEQ ID NO: 1091215 - RNA, 19 nt, Homo sapiens
  misc_RNA (1)...(19): siRNA sense strand
ccaaauucaucacuacagu

SEQ ID NO: 1091216 - RNA, 19 nt, Homo sapiens
  misc_RNA (1)...(19): siRNA sense strand
caaauucaucacuacagua

SEQ ID NO: 1091217 - RNA, 19 nt, Homo sapiens
  misc_RNA (1)...(19): siRNA sense strand
caacaaggcagaccuacca

SEQ ID NO: 1091218 - RNA, 19 nt, Homo sapiens
  misc_RNA (1)...(19): siRNA sense strand
cgauggagacuaugauuau

SEQ ID NO: 1091219 - RNA, 19 nt, Homo sapiens
  misc_RNA (1)...(19): siRNA sense strand
gaaacuggaugagccaacu

SEQ ID NO: 1091220 - RNA, 19 nt, Homo sapiens
  misc_RNA (1)...(19): siRNA sense strand
gacagaauguggagaaagc

SEQ ID NO: 1091221 - RNA, 19 nt, Homo sapiens
  misc_RNA (1)...(19): siRNA sense strand
caccagagaagaaauguau

SEQ ID NO: 1091222 - RNA, 19 nt, Homo sapiens
  misc_RNA (1)...(19): siRNA sense strand
agacacaaaucccugauac

SEQ ID NO: 1091223 - RNA, 19 nt, Homo sapiens
  misc_RNA (1)...(19): siRNA sense strand
ugagccaacugcaagcaaa

SEQ ID NO: 1091224 - RNA, 19 nt, Homo sapiens
  misc_RNA (1)...(19): siRNA sense strand
gcauuuaaagugcaucuuc

SEQ ID NO: 1091225 - RNA, 19 nt, Homo sapiens
  misc_RNA (1)...(19): siRNA sense strand
gaaauucuggaaacuugga

SEQ ID NO: 1091226 - RNA, 19 nt, Homo sapiens
  misc_RNA (1)...(19): siRNA sense strand
agacuaugauuaucugauc

SEQ ID NO: 1091227 - RNA, 19 nt, Homo sapiens
  misc_RNA (1)...(19): siRNA sense strand
ugaaacaagugcagcaacu

SEQ ID NO: 1091228 - RNA, 19 nt, Homo sapiens
  misc_RNA (1)...(19): siRNA sense strand
cagagcuucuuaaauguca

SEQ ID NO: 1091229 - RNA, 19 nt, Homo sapiens
  misc_RNA (1)...(19): siRNA sense strand
gaauguggagaaagcugua

SEQ ID NO: 1091230 - RNA, 19 nt, Homo sapiens
  misc_RNA (1)...(19): siRNA sense strand
aggcagaccuaccagauca

SEQ ID NO: 1091231 - RNA, 19 nt, Homo sapiens
  misc_RNA (1)...(19): siRNA sense strand
cauuuaaagugcaucuuca

SEQ ID NO: 1091232 - RNA, 19 nt, Homo sapiens
  misc_RNA (1)...(19): siRNA sense strand
gggcuucuuauuaauguuu

SEQ ID NO: 1091233 - RNA, 19 nt, Homo sapiens
  misc_RNA (1)...(19): siRNA sense strand
gauggagacuaugauuauc

SEQ ID NO: 1091234 - RNA, 19 nt, Homo sapiens
  misc_RNA (1)...(19): siRNA sense strand
ccgauggagacuaugauua

SEQ ID NO: 1091235 - RNA, 19 nt, Homo sapiens
  misc_RNA (1)...(19): siRNA sense strand
gaucagagggaagucaaug

SEQ ID NO: 1091236 - RNA, 19 nt, Homo sapiens
  misc_RNA (1)...(19): siRNA sense strand
gaucuucagggaaagcauu

SEQ ID NO: 1091237 - RNA, 19 nt, Homo sapiens
  misc_RNA (1)...(19): siRNA sense strand
aaucccaaauucaucacua

SEQ ID NO: 1091238 - RNA, 19 nt, Homo sapiens
  misc_RNA (1)...(19): siRNA sense strand
gaacuggcugacaaauaug

SEQ ID NO: 1091239 - RNA, 19 nt, Homo sapiens
  misc_RNA (1)...(19): siRNA sense strand
acacaaaucccugauacug

SEQ ID NO: 1091240 - RNA, 19 nt, Homo sapiens
  misc_RNA (1)...(19): siRNA sense strand
gaacaguguguggagaaga

SEQ ID NO: 1091241 - RNA, 19 nt, Homo sapiens
  misc_RNA (1)...(19): siRNA sense strand
gucaacagagcuucuuaaa

SEQ ID NO: 1091242 - RNA, 19 nt, Homo sapiens
  misc_RNA (1)...(19): siRNA sense strand
ggaacaguguguggagaag

SEQ ID NO: 1091243 - RNA, 19 nt, Homo sapiens
  misc_RNA (1)...(19): siRNA sense strand
agggaaagcauuuaaagug

SEQ ID NO: 1091244 - RNA, 19 nt, Homo sapiens
  misc_RNA (1)...(19): siRNA sense strand
ucagagggaagucaaugaa

SEQ ID NO: 1091245 - RNA, 19 nt, Homo sapiens
  misc_RNA (1)...(19): siRNA sense strand
caaggcagaccuaccagau

SEQ ID NO: 1091246 - RNA, 19 nt, Homo sapiens
  misc_RNA (1)...(19): siRNA sense strand
gaccucaccagucaacaga

SEQ ID NO: 1091247 - RNA, 19 nt, Homo sapiens
  misc_RNA (1)...(19): siRNA sense strand
gaagcgaauggaacagugu

SEQ ID NO: 1091248 - RNA, 19 nt, Homo sapiens
  misc_RNA (1)...(19): siRNA sense strand
uacaguaggaauagacuuu

SEQ ID NO: 1091249 - RNA, 19 nt, Homo sapiens
  misc_RNA (1)...(19): siRNA sense strand
ggacacugcgggacaagag

SEQ ID NO: 1091250 - RNA, 19 nt, Homo sapiens
  misc_RNA (1)...(19): siRNA sense strand
gaaacaagugcagcaacug

SEQ ID NO: 1091251 - RNA, 19 nt, Homo sapiens
  misc_RNA (1)...(19): siRNA sense strand
ucaacagagcuucuuaaau

SEQ ID NO: 1091252 - RNA, 19 nt, Homo sapiens
  misc_RNA (1)...(19): siRNA sense strand
gagcgguuccggagucuca

SEQ ID NO: 1091253 - RNA, 19 nt, Homo sapiens
  misc_RNA (1)...(19): siRNA sense strand
ccaugggcuucuuauuaau

SEQ ID NO: 1091254 - RNA, 19 nt, Homo sapiens
  misc_RNA (1)...(19): siRNA sense strand
agaagaaauguaucugcua

SEQ ID NO: 1091255 - RNA, 19 nt, Homo sapiens
  misc_RNA (1)...(19): siRNA sense strand
gggaaaagccaccagagaa

SEQ ID NO: 1091256 - RNA, 19 nt, Homo sapiens
  misc_RNA (1)...(19): siRNA sense strand
gguuuauaaugcacaagga

SEQ ID NO: 1091257 - RNA, 19 nt, Homo sapiens
  misc_RNA (1)...(19): siRNA sense strand
aagugcaucuucagcuuug

SEQ ID NO: 1091258 - RNA, 19 nt, Homo sapiens
  misc_RNA (1)...(19): siRNA sense strand
ugucaaugguggaaauucu

SEQ ID NO: 1091259 - RNA, 19 nt, Homo sapiens
  misc_RNA (1)...(19): siRNA sense strand
ggacagaauguggagaaag

SEQ ID NO: 1091260 - RNA, 19 nt, Homo sapiens
  misc_RNA (1)...(19): siRNA sense strand
gagucucaccacugcauuu

SEQ ID NO: 1091261 - RNA, 19 nt, Homo sapiens
  misc_RNA (1)...(19): siRNA sense strand
ccagagaagaaauguaucu

SEQ ID NO: 1091262 - RNA, 19 nt, Homo sapiens
  misc_RNA (1)...(19): siRNA sense strand
ugcagcaacuggacagaau

SEQ ID NO: 1091263 - RNA, 19 nt, Homo sapiens
  misc_RNA (1)...(19): siRNA sense strand
uagaaacccuuuuggacuu

SEQ ID NO: 1091264 - RNA, 19 nt, Homo sapiens
  misc_RNA (1)...(19): siRNA sense strand
gaagacacaaaucccugau

SEQ ID NO: 1091265 - RNA, 19 nt, Homo sapiens
  misc_RNA (1)...(19): siRNA sense strand
aacagagcuucuuaaaugu

SEQ ID NO: 1091266 - RNA, 19 nt, Homo sapiens
  misc_RNA (1)...(19): siRNA sense strand
ucagggaaagcauuuaaag

SEQ ID NO: 1091267 - RNA, 19 nt, Homo sapiens
  misc_RNA (1)...(19): siRNA sense strand
gcagaccuaccagaucaga

SEQ ID NO: 1091268 - RNA, 19 nt, Homo sapiens
  misc_RNA (1)...(19): siRNA sense strand
cuucagggaaagcauuuaa

SEQ ID NO: 1091269 - RNA, 19 nt, Homo sapiens
  misc_RNA (1)...(19): siRNA sense strand
gaaaagccaccagagaaga

SEQ ID NO: 1091270 - RNA, 19 nt, Homo sapiens
  misc_RNA (1)...(19): siRNA sense strand
gagacuaugauuaucugau

SEQ ID NO: 1091271 - RNA, 19 nt, Homo sapiens
  misc_RNA (1)...(19): siRNA sense strand
aguauuaauuggcaacaag

SEQ ID NO: 1091272 - RNA, 19 nt, Homo sapiens
  misc_RNA (1)...(19): siRNA sense strand
gcagcaacuggacagaaug

SEQ ID NO: 1091273 - RNA, 19 nt, Homo sapiens
  misc_RNA (1)...(19): siRNA sense strand
cacaaaucccugauacugu

SEQ ID NO: 1091274 - RNA, 19 nt, Homo sapiens
  misc_RNA (1)...(19): siRNA sense strand
gagacgccaugggcuucuu

SEQ ID NO: 1091275 - RNA, 19 nt, Homo sapiens
  misc_RNA (1)...(19): siRNA sense strand
uggagacuaugauuaucug

SEQ ID NO: 1091276 - RNA, 19 nt, Homo sapiens
  misc_RNA (1)...(19): siRNA sense strand
caugggcuucuuauuaaug

SEQ ID NO: 1091277 - RNA, 19 nt, Homo sapiens
  misc_RNA (1)...(19): siRNA sense strand
gguggaaauucuggaaacu

SEQ ID NO: 1091278 - RNA, 19 nt, Homo sapiens
  misc_RNA (1)...(19): siRNA sense strand
cagggaaagcauuuaaagu

SEQ ID NO: 1091279 - RNA, 19 nt, Homo sapiens
  misc_RNA (1)...(19): siRNA sense strand
ccaccagagaagaaaugua

SEQ ID NO: 1091280 - RNA, 19 nt, Homo sapiens
  misc_RNA (1)...(19): siRNA sense strand
aaucaugaagcgaauggaa

SEQ ID NO: 1091281 - RNA, 19 nt, Homo sapiens
  misc_RNA (1)...(19): siRNA sense strand
guggagaaagcuguagaaa

SEQ ID NO: 1091282 - RNA, 19 nt, Homo sapiens
  misc_RNA (1)...(19): siRNA sense strand
gagccaacugcaagcaaau

SEQ ID NO: 1091283 - RNA, 19 nt, Homo sapiens
  misc_RNA (1)...(19): siRNA sense strand
gagcuucuuaaaugucaga

SEQ ID NO: 1091284 - RNA, 19 nt, Homo sapiens
  misc_RNA (1)...(19): siRNA sense strand
cagcaacuggacagaaugu

SEQ ID NO: 1091285 - RNA, 19 nt, Homo sapiens
  misc_RNA (1)...(19): siRNA sense strand
gaagaacucccgcacaaug

SEQ ID NO: 1091286 - RNA, 19 nt, Homo sapiens
  misc_RNA (1)...(19): siRNA sense strand
aagcaaaguuuccuucaaa

SEQ ID NO: 1091287 - RNA, 19 nt, Homo sapiens
  misc_RNA (1)...(19): siRNA sense strand
caaggucuccauucucuua

SEQ ID NO: 1091288 - RNA, 19 nt, Homo sapiens
  misc_RNA (1)...(19): siRNA sense strand
cugauuggcucuccuaauu

SEQ ID NO: 1091289 - RNA, 19 nt, Homo sapiens
  misc_RNA (1)...(19): siRNA sense strand
ucgaugagauugucacuga

SEQ ID NO: 1091290 - RNA, 19 nt, Homo sapiens
  misc_RNA (1)...(19): siRNA sense strand
ugacuccacugaucaagaa

SEQ ID NO: 1091291 - RNA, 19 nt, Homo sapiens
  misc_RNA (1)...(19): siRNA sense strand
ccaaaggccucuggcugua

SEQ ID NO: 1091292 - RNA, 19 nt, Homo sapiens
  misc_RNA (1)...(19): siRNA sense strand
ggagauugccgacuucuuc

SEQ ID NO: 1091293 - RNA, 19 nt, Homo sapiens
  misc_RNA (1)...(19): siRNA sense strand
caagcaaaguuuccuucaa

SEQ ID NO: 1091294 - RNA, 19 nt, Homo sapiens
  misc_RNA (1)...(19): siRNA sense strand
gcacaucgagcgacaguuc

SEQ ID NO: 1091295 - RNA, 19 nt, Homo sapiens
  misc_RNA (1)...(19): siRNA sense strand
cggaagaacucccgcacaa

SEQ ID NO: 1091296 - RNA, 19 nt, Homo sapiens
  misc_RNA (1)...(19): siRNA sense strand
gauggugacuccacugauc

SEQ ID NO: 1091297 - RNA, 19 nt, Homo sapiens
  misc_RNA (1)...(19): siRNA sense strand
gacaacagcgucaucuuga

SEQ ID NO: 1091298 - RNA, 19 nt, Homo sapiens
  misc_RNA (1)...(19): siRNA sense strand
agaggugaauggcuucuuu

SEQ ID NO: 1091299 - RNA, 19 nt, Homo sapiens
  misc_RNA (1)...(19): siRNA sense strand
ggaaaguacucuagaaaag

SEQ ID NO: 1091300 - RNA, 19 nt, Homo sapiens
  misc_RNA (1)...(19): siRNA sense strand
ggguccagcuucaggagua

SEQ ID NO: 1091301 - RNA, 19 nt, Homo sapiens
  misc_RNA (1)...(19): siRNA sense strand
cgacaacagcgucaucuug

SEQ ID NO: 1091302 - RNA, 19 nt, Homo sapiens
  misc_RNA (1)...(19): siRNA sense strand
gcaggacugugcggagauu

SEQ ID NO: 1091303 - RNA, 19 nt, Homo sapiens
  misc_RNA (1)...(19): siRNA sense strand
gugcggagauugccgacuu

SEQ ID NO: 1091304 - RNA, 19 nt, Homo sapiens
  misc_RNA (1)...(19): siRNA sense strand
caaaguuuccuucaaaucu

SEQ ID NO: 1091305 - RNA, 19 nt, Homo sapiens
  misc_RNA (1)...(19): siRNA sense strand
gcaaaguuuccuucaaauc

SEQ ID NO: 1091306 - RNA, 19 nt, Homo sapiens
  misc_RNA (1)...(19): siRNA sense strand
cugagacccuguugacuga

SEQ ID NO: 1091307 - RNA, 19 nt, Homo sapiens
  misc_RNA (1)...(19): siRNA sense strand
ccucaccacuggcuauuuc

SEQ ID NO: 1091308 - RNA, 19 nt, Homo sapiens
  misc_RNA (1)...(19): siRNA sense strand
ccaauaagagggucaugga

SEQ ID NO: 1091309 - RNA, 19 nt, Homo sapiens
  misc_RNA (1)...(19): siRNA sense strand
gauuggcucuccuaauuuu

SEQ ID NO: 1091310 - RNA, 19 nt, Homo sapiens
  misc_RNA (1)...(19): siRNA sense strand
gguccgagucucccucuuu

SEQ ID NO: 1091311 - RNA, 19 nt, Homo sapiens
  misc_RNA (1)...(19): siRNA sense strand
ccugacaccuggauuuauc

SEQ ID NO: 1091312 - RNA, 19 nt, Homo sapiens
  misc_RNA (1)...(19): siRNA sense strand
auaagagggucauggaugu

SEQ ID NO: 1091313 - RNA, 19 nt, Homo sapiens
  misc_RNA (1)...(19): siRNA sense strand
ccuggaaaguacucuagaa

SEQ ID NO: 1091314 - RNA, 19 nt, Homo sapiens
  misc_RNA (1)...(19): siRNA sense strand
gcaaggcagccaauaagag

SEQ ID NO: 1091315 - RNA, 19 nt, Homo sapiens
  misc_RNA (1)...(19): siRNA sense strand
gaugagauugucacugaga

SEQ ID NO: 1091316 - RNA, 19 nt, Homo sapiens
  misc_RNA (1)...(19): siRNA sense strand
ggucauggaugugaucaac

SEQ ID NO: 1091317 - RNA, 19 nt, Homo sapiens
  misc_RNA (1)...(19): siRNA sense strand
aaaagucacuccaagcaaa

SEQ ID NO: 1091318 - RNA, 19 nt, Homo sapiens
  misc_RNA (1)...(19): siRNA sense strand
gugaagcugugggugaaga

SEQ ID NO: 1091319 - RNA, 19 nt, Homo sapiens
  misc_RNA (1)...(19): siRNA sense strand
ggaagaacucccgcacaau

SEQ ID NO: 1091320 - RNA, 19 nt, Homo sapiens
  misc_RNA (1)...(19): siRNA sense strand
aaaguuuccuucaaaucuc

SEQ ID NO: 1091321 - RNA, 19 nt, Homo sapiens
  misc_RNA (1)...(19): siRNA sense strand
ucauggaugugaucaacuc

SEQ ID NO: 1091322 - RNA, 19 nt, Homo sapiens
  misc_RNA (1)...(19): siRNA sense strand
guccgagucucccucuuuc

SEQ ID NO: 1091323 - RNA, 19 nt, Homo sapiens
  misc_RNA (1)...(19): siRNA sense strand
cagauaagaguagccaaga

SEQ ID NO: 1091324 - RNA, 19 nt, Homo sapiens
  misc_RNA (1)...(19): siRNA sense strand
caagaggcgggucgugaug

SEQ ID NO: 1091325 - RNA, 19 nt, Homo sapiens
  misc_RNA (1)...(19): siRNA sense strand
ugauuggcucuccuaauuu

SEQ ID NO: 1091326 - RNA, 19 nt, Homo sapiens
  misc_RNA (1)...(19): siRNA sense strand
uccagcacauuaaggugua

SEQ ID NO: 1091327 - RNA, 19 nt, Homo sapiens
  misc_RNA (1)...(19): siRNA sense strand
gcugguggacugccuggaa

SEQ ID NO: 1091328 - RNA, 19 nt, Homo sapiens
  misc_RNA (1)...(19): siRNA sense strand
gaggugaauggcuucuuug

SEQ ID NO: 1091329 - RNA, 19 nt, Homo sapiens
  misc_RNA (1)...(19): siRNA sense strand
cacagcaacucucuuuuga

SEQ ID NO: 1091330 - RNA, 19 nt, Homo sapiens
  misc_RNA (1)...(19): siRNA sense strand
gagauugccgacuucuuca

SEQ ID NO: 1091331 - RNA, 19 nt, Homo sapiens
  misc_RNA (1)...(19): siRNA sense strand
cugguggacugccuggaaa

SEQ ID NO: 1091332 - RNA, 19 nt, Homo sapiens
  misc_RNA (1)...(19): siRNA sense strand
cucaaggucuccauucucu

SEQ ID NO: 1091333 - RNA, 19 nt, Homo sapiens
  misc_RNA (1)...(19): siRNA sense strand
ccaagcaaaguuuccuuca

SEQ ID NO: 1091334 - RNA, 19 nt, Homo sapiens
  misc_RNA (1)...(19): siRNA sense strand
ccaagaggcgggucgugau

SEQ ID NO: 1091335 - RNA, 19 nt, Homo sapiens
  misc_RNA (1)...(19): siRNA sense strand
ggacguuccacgccaaagg

SEQ ID NO: 1091336 - RNA, 19 nt, Homo sapiens
  misc_RNA (1)...(19): siRNA sense strand
agcgacaguucuucaguga

SEQ ID NO: 1091337 - RNA, 19 nt, Homo sapiens
  misc_RNA (1)...(19): siRNA sense strand
gaaaagucacuccaagcaa

SEQ ID NO: 1091338 - RNA, 19 nt, Homo sapiens
  misc_RNA (1)...(19): siRNA sense strand
cuggaaaguacucuagaaa

SEQ ID NO: 1091339 - RNA, 19 nt, Homo sapiens
  misc_RNA (1)...(19): siRNA sense strand
gaaaguacucuagaaaagu

SEQ ID NO: 1091340 - RNA, 19 nt, Homo sapiens
  misc_RNA (1)...(19): siRNA sense strand
ucacugagacccuguugac

SEQ ID NO: 1091341 - RNA, 19 nt, Homo sapiens
  misc_RNA (1)...(19): siRNA sense strand
gccaggaccgcuacguguu

SEQ ID NO: 1091342 - RNA, 19 nt, Homo sapiens
  misc_RNA (1)...(19): siRNA sense strand
guggacugccuggaaagua

SEQ ID NO: 1091343 - RNA, 19 nt, Homo sapiens
  misc_RNA (1)...(19): siRNA sense strand
ccacagcaacucucuuuug

SEQ ID NO: 1091344 - RNA, 19 nt, Homo sapiens
  misc_RNA (1)...(19): siRNA sense strand
ccaggaccgcuacguguuc

SEQ ID NO: 1091345 - RNA, 19 nt, Homo sapiens
  misc_RNA (1)...(19): siRNA sense strand
gcugauuggcucuccuaau

SEQ ID NO: 1091346 - RNA, 19 nt, Homo sapiens
  misc_RNA (1)...(19): siRNA sense strand
caauaagagggucauggau

SEQ ID NO: 1091347 - RNA, 19 nt, Homo sapiens
  misc_RNA (1)...(19): siRNA sense strand
gaaaugcacuucaacuugu

SEQ ID NO: 1091348 - RNA, 19 nt, Homo sapiens
  misc_RNA (1)...(19): siRNA sense strand
gcuaugaccugcacagcua

SEQ ID NO: 1091349 - RNA, 19 nt, Homo sapiens
  misc_RNA (1)...(19): siRNA sense strand
gaggugcccugcugaauau

SEQ ID NO: 1091350 - RNA, 19 nt, Homo sapiens
  misc_RNA (1)...(19): siRNA sense strand
ggaaaugcacuucaacuug

SEQ ID NO: 1091351 - RNA, 19 nt, Homo sapiens
  misc_RNA (1)...(19): siRNA sense strand
ggaggugcccugcugaaua

SEQ ID NO: 1091352 - RNA, 19 nt, Homo sapiens
  misc_RNA (1)...(19): siRNA sense strand
gcagggaaaugcacuucaa

SEQ ID NO: 1091353 - RNA, 19 nt, Homo sapiens
  misc_RNA (1)...(19): siRNA sense strand
ugccauagccugcuucuua

SEQ ID NO: 1091354 - RNA, 19 nt, Homo sapiens
  misc_RNA (1)...(19): siRNA sense strand
gcuaugagguggaguugga

SEQ ID NO: 1091355 - RNA, 19 nt, Homo sapiens
  misc_RNA (1)...(19): siRNA sense strand
ucaccuaccuggaugagaa

SEQ ID NO: 1091356 - RNA, 19 nt, Homo sapiens
  misc_RNA (1)...(19): siRNA sense strand
cagauggccuggaaacuug

SEQ ID NO: 1091357 - RNA, 19 nt, Homo sapiens
  misc_RNA (1)...(19): siRNA sense strand
gaaggccaccugaaccuaa

SEQ ID NO: 1091358 - RNA, 19 nt, Homo sapiens
  misc_RNA (1)...(19): siRNA sense strand
cugaauaucuacacggaaa

SEQ ID NO: 1091359 - RNA, 19 nt, Homo sapiens
  misc_RNA (1)...(19): siRNA sense strand
gcuccgcggucaucaaguu

SEQ ID NO: 1091360 - RNA, 19 nt, Homo sapiens
  misc_RNA (1)...(19): siRNA sense strand
gccauagccugcuucuuau

SEQ ID NO: 1091361 - RNA, 19 nt, Homo sapiens
  misc_RNA (1)...(19): siRNA sense strand
gaagguguaccgagacugu

SEQ ID NO: 1091362 - RNA, 19 nt, Homo sapiens
  misc_RNA (1)...(19): siRNA sense strand
ccaagggcauccuguucuu

SEQ ID NO: 1091363 - RNA, 19 nt, Homo sapiens
  misc_RNA (1)...(19): siRNA sense strand
uaccgagacuguagcugua

SEQ ID NO: 1091364 - RNA, 19 nt, Homo sapiens
  misc_RNA (1)...(19): siRNA sense strand
guagcuguaucccucagaa

SEQ ID NO: 1091365 - RNA, 19 nt, Homo sapiens
  misc_RNA (1)...(19): siRNA sense strand
ggccaugagccgcuacaua

SEQ ID NO: 1091366 - RNA, 19 nt, Homo sapiens
  misc_RNA (1)...(19): siRNA sense strand
gggaaaugcacuucaacuu

SEQ ID NO: 1091367 - RNA, 19 nt, Homo sapiens
  misc_RNA (1)...(19): siRNA sense strand
cggcggaaaugcaccaguu

SEQ ID NO: 1091368 - RNA, 19 nt, Homo sapiens
  misc_RNA (1)...(19): siRNA sense strand
ccaguggauuguaguuaga

SEQ ID NO: 1091369 - RNA, 19 nt, Homo sapiens
  misc_RNA (1)...(19): siRNA sense strand
gaagcugccaccuuguuug

SEQ ID NO: 1091370 - RNA, 19 nt, Homo sapiens
  misc_RNA (1)...(19): siRNA sense strand
gcacuaacggcaacucuac

SEQ ID NO: 1091371 - RNA, 19 nt, Homo sapiens
  misc_RNA (1)...(19): siRNA sense strand
gaauaucuacacggaaaug

SEQ ID NO: 1091372 - RNA, 19 nt, Homo sapiens
  misc_RNA (1)...(19): siRNA sense strand
gccaugagccgcuacauac

SEQ ID NO: 1091373 - RNA, 19 nt, Homo sapiens
  misc_RNA (1)...(19): siRNA sense strand
gggacaagccgcucaccuu

SEQ ID NO: 1091374 - RNA, 19 nt, Homo sapiens
  misc_RNA (1)...(19): siRNA sense strand
gcgcuacgcggucaugaga

SEQ ID NO: 1091375 - RNA, 19 nt, Homo sapiens
  misc_RNA (1)...(19): siRNA sense strand
gcucggacggccucaugua

SEQ ID NO: 1091376 - RNA, 19 nt, Homo sapiens
  misc_RNA (1)...(19): siRNA sense strand
ggaaaugcaccaguugaag

SEQ ID NO: 1091377 - RNA, 19 nt, Homo sapiens
  misc_RNA (1)...(19): siRNA sense strand
ccaucuggcuccugcugaa

SEQ ID NO: 1091378 - RNA, 19 nt, Homo sapiens
  misc_RNA (1)...(19): siRNA sense strand
gaauguggacggccagaag

SEQ ID NO: 1091379 - RNA, 19 nt, Homo sapiens
  misc_RNA (1)...(19): siRNA sense strand
ucagauggccuggaaacuu

SEQ ID NO: 1091380 - RNA, 19 nt, Homo sapiens
  misc_RNA (1)...(19): siRNA sense strand
ccaugccacugcagggaaa

SEQ ID NO: 1091381 - RNA, 19 nt, Homo sapiens
  misc_RNA (1)...(19): siRNA sense strand
gcugccggcuaccugauug

SEQ ID NO: 1091382 - RNA, 19 nt, Homo sapiens
  misc_RNA (1)...(19): siRNA sense strand
gcugggcguccucuucuuu

SEQ ID NO: 1091383 - RNA, 19 nt, Homo sapiens
  misc_RNA (1)...(19): siRNA sense strand
cacuucaacuugucagaga

SEQ ID NO: 1091384 - RNA, 19 nt, Homo sapiens
  misc_RNA (1)...(19): siRNA sense strand
ucaccggcauguccacguu

SEQ ID NO: 1091385 - RNA, 19 nt, Homo sapiens
  misc_RNA (1)...(19): siRNA sense strand
gugcccugcugaauaucua

SEQ ID NO: 1091386 - RNA, 19 nt, Homo sapiens
  misc_RNA (1)...(19): siRNA sense strand
gcggaaaugcaccaguuga

SEQ ID NO: 1091387 - RNA, 19 nt, Homo sapiens
  misc_RNA (1)...(19): siRNA sense strand
uaccagaauucggccauga

SEQ ID NO: 1091388 - RNA, 19 nt, Homo sapiens
  misc_RNA (1)...(19): siRNA sense strand
cggacggccucauguacuu

SEQ ID NO: 1091389 - RNA, 19 nt, Homo sapiens
  misc_RNA (1)...(19): siRNA sense strand
caacccggacuuugggaaa

SEQ ID NO: 1091390 - RNA, 19 nt, Homo sapiens
  misc_RNA (1)...(19): siRNA sense strand
cagaagcugccaccuuguu

SEQ ID NO: 1091391 - RNA, 19 nt, Homo sapiens
  misc_RNA (1)...(19): siRNA sense strand
cagcauuccugcacuaacg

SEQ ID NO: 1091392 - RNA, 19 nt, Homo sapiens
  misc_RNA (1)...(19): siRNA sense strand
cgucuacauugccaucuuc

SEQ ID NO: 1091393 - RNA, 19 nt, Homo sapiens
  misc_RNA (1)...(19): siRNA sense strand
ccauagccugcuucuuaua

SEQ ID NO: 1091394 - RNA, 19 nt, Homo sapiens
  misc_RNA (1)...(19): siRNA sense strand
cgccagcuccuacgacauu

SEQ ID NO: 1091395 - RNA, 19 nt, Homo sapiens
  misc_RNA (1)...(19): siRNA sense strand
guggauuguaguuagaaua

SEQ ID NO: 1091396 - RNA, 19 nt, Homo sapiens
  misc_RNA (1)...(19): siRNA sense strand
cggcaacucuacgaugugu

SEQ ID NO: 1091397 - RNA, 19 nt, Homo sapiens
  misc_RNA (1)...(19): siRNA sense strand
gggcgucaccuaccuggau

SEQ ID NO: 1091398 - RNA, 19 nt, Homo sapiens
  misc_RNA (1)...(19): siRNA sense strand
uagccugcuucuuauacaa

SEQ ID NO: 1091399 - RNA, 19 nt, Homo sapiens
  misc_RNA (1)...(19): siRNA sense strand
gggcauccucgucuucuca

SEQ ID NO: 1091400 - RNA, 19 nt, Homo sapiens
  misc_RNA (1)...(19): siRNA sense strand
caucaaguucugccuguuc

SEQ ID NO: 1091401 - RNA, 19 nt, Homo sapiens
  misc_RNA (1)...(19): siRNA sense strand
cggaaaugcaccaguugaa

SEQ ID NO: 1091402 - RNA, 19 nt, Homo sapiens
  misc_RNA (1)...(19): siRNA sense strand
cuacauugccaucuucuac

SEQ ID NO: 1091403 - RNA, 19 nt, Homo sapiens
  misc_RNA (1)...(19): siRNA sense strand
ccugacagugccacagaua

SEQ ID NO: 1091404 - RNA, 19 nt, Homo sapiens
  misc_RNA (1)...(19): siRNA sense strand
agaagcugccaccuuguuu

SEQ ID NO: 1091405 - RNA, 19 nt, Homo sapiens
  misc_RNA (1)...(19): siRNA sense strand
ccguucccauccuugguua

SEQ ID NO: 1091406 - RNA, 19 nt, Homo sapiens
  misc_RNA (1)...(19): siRNA sense strand
ccucagaagcugccaccuu

SEQ ID NO: 1091407 - RNA, 19 nt, Homo sapiens
  misc_RNA (1)...(19): siRNA sense strand
aacggcaacucuacgaugu

SEQ ID NO: 1091408 - RNA, 19 nt, Homo sapiens
  misc_RNA (1)...(19): siRNA sense strand
gcgagcaacccggacuuug

SEQ ID NO: 1091409 - RNA, 19 nt, Homo sapiens
  misc_RNA (1)...(19): siRNA sense strand
cagaagguguaccgagacu

SEQ ID NO: 1091410 - RNA, 19 nt, Homo sapiens
  misc_RNA (1)...(19): siRNA sense strand
cgagcaacccggacuuugg

SEQ ID NO: 1091411 - RNA, 19 nt, Homo sapiens
  misc_RNA (1)...(19): siRNA sense strand
gucuucagauggccuggaa

SEQ ID NO: 1091412 - RNA, 19 nt, Homo sapiens
  misc_RNA (1)...(19): siRNA sense strand
cgaaggccaccugaaccua

SEQ ID NO: 1091413 - RNA, 19 nt, Homo sapiens
  misc_RNA (1)...(19): siRNA sense strand
guucuuggagucccaguuc
